United States Patent Application Publication US 2016/0281171 A1 - sequence listing, part 3

SEQ ID NO: 47887 - DNA, 75 bp, Homo sapiens
ttgggagacttgtctgaacacttcttccaggtccaagatggtaatgggtatccatccgagaaacaggacgcctga

SEQ ID NO: 47888 - DNA, 77 bp, Homo sapiens
tctgaacacttcttccaggtccaagatggtaatgggtatccatccgagaaacaggacgcctgacttgccgatgcttc

SEQ ID NO: 47889 - DNA, 79 bp, Homo sapiens
ttccaggtccaagatggtaatgggtatccatccgagaaacaggacgcctgacttgccgatgcttctgcgagcacttgag

SEQ ID NO: 47890 - DNA, 76 bp, Homo sapiens
aagatggtaatgggtatccatccgagaaacaggacgcctgacttgccgatgcttctgcgagcacttgaggtttccc

SEQ ID NO: 47891 - DNA, 77 bp, Homo sapiens
taatgggtatccatccgagaaacaggacgcctgacttgccgatgcttctgcgagcacttgaggtttccctatagaaa

SEQ ID NO: 47892 - DNA, 75 bp, Homo sapiens
atccatccgagaaacaggacgcctgacttgccgatgcttctgcgagcacttgaggtttccctatagaaaagaacg

SEQ ID NO: 47893 - DNA, 74 bp, Homo sapiens
aaacaggacgcctgacttgccgatgcttctgcgagcacttgaggtttccctatagaaaagaacgtgtgaaataa

SEQ ID NO: 47894 - DNA, 67 bp, Homo sapiens
aaaaataaaaatcaaattctcggcaatttaacttacttcttatattcagcgtgaacattttggtaaa

SEQ ID NO: 47895 - DNA, 73 bp, Homo sapiens
aaaatcaaattctcggcaatttaacttacttcttatattcagcgtgaacattttggtaaattgggcatcatca

SEQ ID NO: 47896 - DNA, 76 bp, Homo sapiens
attctcggcaatttaacttacttcttatattcagcgtgaacattttggtaaattgggcatcatcattttctgcatg

SEQ ID NO: 47897 - DNA, 78 bp, Homo sapiens
acttacttcttatattcagcgtgaacattttggtaaattgggcatcatcattttctgcatggaatatatattctcctg

SEQ ID NO: 47898 - DNA, 83 bp, Homo sapiens
ttatattcagcgtgaacattttggtaaattgggcatcatcattttctgcatggaatatatattctcctggctggtgcttatga

SEQ ID NO: 47899 - DNA, 81 bp, Homo sapiens
cgtgaacattttggtaaattgggcatcatcattttctgcatggaatatatattctcctggctggtgcttatgattgcaaaa

SEQ ID NO: 47900 - DNA, 81 bp, Homo sapiens
ttttggtaaattgggcatcatcattttctgcatggaatatatattctcctggctggtgcttatgattgcaaaacttggata

SEQ ID NO: 47901 - DNA, 84 bp, Homo sapiens
aattgggcatcatcattttctgcatggaatatatattctcctggctggtgcttatgattgcaaaacttggatatgctgtttgaa

SEQ ID NO: 47902 - DNA, 80 bp, Homo sapiens
atcattttctgcatggaatatatattctcctggctggtgcttatgattgcaaaacttggatatgctgtttgaaaaagaat

SEQ ID NO: 47903 - DNA, 77 bp, Homo sapiens
ggaatatatattctcctggctggtgcttatgattgcaaaacttggatatgctgtttgaaaaagaattaaagacagat

SEQ ID NO: 47904 - DNA, 77 bp, Homo sapiens
atatattctcctggctggtgcttatgattgcaaaacttggatatgctgtttgaaaaagaattaaagacagatttagc

SEQ ID NO: 47905 - DNA, 71 bp, Homo sapiens
aggagaattatgctaaaaatggtatcttagagtcctttgtggtctcacctgtatccgttatcaagaccctt

SEQ ID NO: 47906 - DNA, 74 bp, Homo sapiens
ttatgctaaaaatggtatcttagagtcctttgtggtctcacctgtatccgttatcaagacccttttgctcacaa

SEQ ID NO: 47907 - DNA, 73 bp, Homo sapiens
aatggtatcttagagtcctttgtggtctcacctgtatccgttatcaagacccttttgctcacaaggaaatgat

SEQ ID NO: 47908 - DNA, 74 bp, Homo sapiens
tagagtcctttgtggtctcacctgtatccgttatcaagacccttttgctcacaaggaaatgattttcgagagaa

SEQ ID NO: 47909 - DNA, 76 bp, Homo sapiens
tctcacctgtatccgttatcaagacccttttgctcacaaggaaatgattttcgagagaaggtccacgtacatctga

SEQ ID NO: 47910 - DNA, 75 bp, Homo sapiens
tgtatccgttatcaagacccttttgctcacaaggaaatgattttcgagagaaggtccacgtacatctgatttgtg

SEQ ID NO: 47911 - DNA, 71 bp, Homo sapiens
aagacccttttgctcacaaggaaatgattttcgagagaaggtccacgtacatctgatttgtgggtaggctt

SEQ ID NO: 47912 - DNA, 73 bp, Homo sapiens
ttttgctcacaaggaaatgattttcgagagaaggtccacgtacatctgatttgtgggtaggctttaaacctga

SEQ ID NO: 47913 - DNA, 70 bp, Homo sapiens
aggaaatgattttcgagagaaggtccacgtacatctgatttgtgggtaggctttaaacctgacagaaaaa

SEQ ID NO: 47914 - DNA, 68 bp, Homo sapiens
attttcgagagaaggtccacgtacatctgatttgtgggtaggctttaaacctgacagaaaaacaaaac

SEQ ID NO: 47915 - DNA, 71 bp, Homo sapiens
gtccacgtacatctgatttgtgggtaggctttaaacctgacagaaaaacaaaactcttcatattggtcaat

SEQ ID NO: 47916 - DNA, 72 bp, Homo sapiens
cgtacatctgatttgtgggtaggctttaaacctgacagaaaaacaaaactcttcatattggtcaatttcata

SEQ ID NO: 47917 - DNA, 71 bp, Homo sapiens
gtgggtaggctttaaacctgacagaaaaacaaaactcttcatattggtcaatttcataatcttcacttgaa

SEQ ID NO: 47918 - DNA, 73 bp, Homo sapiens
ggctttaaacctgacagaaaaacaaaactcttcatattggtcaatttcataatcttcacttgaattggtagca

SEQ ID NO: 47919 - DNA, 72 bp, Homo sapiens
cagaaaaacaaaactcttcatattggtcaatttcataatcttcacttgaattggtagcatttataaatccct

SEQ ID NO: 47920 - DNA, 73 bp, Homo sapiens
aaactcttcatattggtcaatttcataatcttcacttgaattggtagcatttataaatcccttttctgtaaga

SEQ ID NO: 47921 - DNA, 72 bp, Homo sapiens
cttcatattggtcaatttcataatcttcacttgaattggtagcatttataaatcccttttctgtaagaaaaa

SEQ ID NO: 47922 - DNA, 71 bp, Homo sapiens
gtcaatttcataatcttcacttgaattggtagcatttataaatcccttttctgtaagaaaaaataggcatt

SEQ ID NO: 47923 - DNA, 71 bp, Homo sapiens
tcttcacttgaattggtagcatttataaatcccttttctgtaagaaaaaataggcatttatgagttagtta

SEQ ID NO: 47924 - DNA, 77 bp, Homo sapiens
actacagcgactaaaaataggaataaagattgtgtgagcagcctgcattacctacgatggtaaccaaagctgattga

SEQ ID NO: 47925 - DNA, 78 bp, Homo sapiens
aaataggaataaagattgtgtgagcagcctgcattacctacgatggtaaccaaagctgattgactgggatgctttgaa

SEQ ID NO: 47926 - DNA, 79 bp, Homo sapiens
ataaagattgtgtgagcagcctgcattacctacgatggtaaccaaagctgattgactgggatgctttgaagaggaacaa

SEQ ID NO: 47927 - DNA, 81 bp, Homo sapiens
tgtgtgagcagcctgcattacctacgatggtaaccaaagctgattgactgggatgctttgaagaggaacaagtgtagtatc

SEQ ID NO: 47928 - DNA, 74 bp, Homo sapiens
cattacctacgatggtaaccaaagctgattgactgggatgctttgaagaggaacaagtgtagtatccggtgtcg

SEQ ID NO: 47929 - DNA, 73 bp, Homo sapiens
ctacgatggtaaccaaagctgattgactgggatgctttgaagaggaacaagtgtagtatccggtgtcgtttct

SEQ ID NO: 47930 - DNA, 77 bp, Homo sapiens
aaagctgattgactgggatgctttgaagaggaacaagtgtagtatccggtgtcgtttcttgccactgatgatacaaa

SEQ ID NO: 47931 - DNA, 76 bp, Homo sapiens
attgactgggatgctttgaagaggaacaagtgtagtatccggtgtcgtttcttgccactgatgatacaaaagcaaa

SEQ ID NO: 47932 - DNA, 74 bp, Homo sapiens
ctttgaagaggaacaagtgtagtatccggtgtcgtttcttgccactgatgatacaaaagcaaacagaatccgta

SEQ ID NO: 47933 - DNA, 76 bp, Homo sapiens
gaacaagtgtagtatccggtgtcgtttcttgccactgatgatacaaaagcaaacagaatccgtatcatagttctgt

SEQ ID NO: 47934 - DNA, 77 bp, Homo sapiens
tagtatccggtgtcgtttcttgccactgatgatacaaaagcaaacagaatccgtatcatagttctgtttgttgaata

SEQ ID NO: 47935 - DNA, 80 bp, Homo sapiens
tgtcgtttcttgccactgatgatacaaaagcaaacagaatccgtatcatagttctgtttgttgaataggtactcatctca

SEQ ID NO: 47936 - DNA, 79 bp, Homo sapiens
ttcttgccactgatgatacaaaagcaaacagaatccgtatcatagttctgtttgttgaataggtactcatctcaaagta

SEQ ID NO: 47937 - DNA, 74 bp, Homo sapiens
atacaaaagcaaacagaatccgtatcatagttctgtttgttgaataggtactcatctcaaagtagttgccctag

SEQ ID NO: 47938 - DNA, 71 bp, Homo sapiens
aaacagaatccgtatcatagttctgtttgttgaataggtactcatctcaaagtagttgccctaggttttaa

SEQ ID NO: 47939 - DNA, 71 bp, Homo sapiens
gaatccgtatcatagttctgtttgttgaataggtactcatctcaaagtagttgccctaggttttaataaaa

SEQ ID NO: 47940 - DNA, 72 bp, Homo sapiens
catagttctgtttgttgaataggtactcatctcaaagtagttgccctaggttttaataaaacagagtttgca

SEQ ID NO: 47941 - DNA, 70 bp, Homo sapiens
tttgttgaataggtactcatctcaaagtagttgccctaggttttaataaaacagagtttgcatttaatgt

SEQ ID NO: 47942 - DNA, 71 bp, Homo sapiens
ctattagttaattgttcctgcattttcagaatacaaacttgtcctattacctcctcgagtgctttgttttc

SEQ ID NO: 47943 - DNA, 71 bp, Homo sapiens
aattgttcctgcattttcagaatacaaacttgtcctattacctcctcgagtgctttgttttctaattccca

SEQ ID NO: 47944 - DNA, 70 bp, Homo sapiens
ttttcagaatacaaacttgtcctattacctcctcgagtgctttgttttctaattcccaggtgagcccgaa

SEQ ID NO: 47945 - DNA, 70 bp, Homo sapiens
atacaaacttgtcctattacctcctcgagtgctttgttttctaattcccaggtgagcccgaatccatggt

SEQ ID NO: 47946 - DNA, 74 bp, Homo sapiens
tcctattacctcctcgagtgctttgttttctaattcccaggtgagcccgaatccatggttcacatgaacagctt

SEQ ID NO: 47947 - DNA, 77 bp, Homo sapiens
tcgagtgctttgttttctaattcccaggtgagcccgaatccatggttcacatgaacagctttgcaccttatccataa

SEQ ID NO: 47948 - DNA, 74 bp, Homo sapiens
ttgttttctaattcccaggtgagcccgaatccatggttcacatgaacagctttgcaccttatccataagggttc

SEQ ID NO: 47949 - DNA, 73 bp, Homo sapiens
ttcccaggtgagcccgaatccatggttcacatgaacagctttgcaccttatccataagggttcccctacttta

SEQ ID NO: 47950 - DNA, 71 bp, Homo sapiens
agcccgaatccatggttcacatgaacagctttgcaccttatccataagggttcccctactttaagaaataa

SEQ ID NO: 47951 - DNA, 73 bp, Homo sapiens
aatccatggttcacatgaacagctttgcaccttatccataagggttcccctactttaagaaataattgtggca

SEQ ID NO: 47952 - DNA, 75 bp, Homo sapiens
ttcacatgaacagctttgcaccttatccataagggttcccctactttaagaaataattgtggcaatgtggtctga

SEQ ID NO: 47953 - DNA, 71 bp, Homo sapiens
tttgcaccttatccataagggttcccctactttaagaaataattgtggcaatgtggtctgaggagtttgat

SEQ ID NO: 47954 - DNA, 72 bp, Homo sapiens
ttatccataagggttcccctactttaagaaataattgtggcaatgtggtctgaggagtttgatttagatcta

SEQ ID NO: 47955 - DNA, 74 bp, Homo sapiens
ttcccctactttaagaaataattgtggcaatgtggtctgaggagtttgatttagatctaggagatgaaaacatc

SEQ ID NO: 47956 - DNA, 76 bp, Homo sapiens
ttaagaaataattgtggcaatgtggtctgaggagtttgatttagatctaggagatgaaaacatcccaagtgagaaa

SEQ ID NO: 47957 - DNA, 74 bp, Homo sapiens
aaataattgtggcaatgtggtctgaggagtttgatttagatctaggagatgaaaacatcccaagtgagaaaaaa

SEQ ID NO: 47958 - DNA, 78 bp, Homo sapiens
ttgctaagaaccggtcactgaaaatgaaagtgcatgatattatagtgttacctattgtgaacagcctggtgcattccc

SEQ ID NO: 47959 - DNA, 80 bp, Homo sapiens
cactgaaaatgaaagtgcatgatattatagtgttacctattgtgaacagcctggtgcattccctgcccagttcatttctg

SEQ ID NO: 47960 - DNA, 80 bp, Homo sapiens
aaaatgaaagtgcatgatattatagtgttacctattgtgaacagcctggtgcattccctgcccagttcatttctggcaca

SEQ ID NO: 47961 - DNA, 80 bp, Homo sapiens
atgatattatagtgttacctattgtgaacagcctggtgcattccctgcccagttcatttctggcacagcaccttatgtcc

SEQ ID NO: 47962 - DNA, 78 bp, Homo sapiens
tgttacctattgtgaacagcctggtgcattccctgcccagttcatttctggcacagcaccttatgtccgtcccaaata

SEQ ID NO: 47963 - DNA, 80 bp, Homo sapiens
tattgtgaacagcctggtgcattccctgcccagttcatttctggcacagcaccttatgtccgtcccaaataattcatgaa

SEQ ID NO: 47964 - DNA, 77 bp, Homo sapiens
ctggtgcattccctgcccagttcatttctggcacagcaccttatgtccgtcccaaataattcatgaagcactttttc

SEQ ID NO: 47965 - DNA, 74 bp, Homo sapiens
attccctgcccagttcatttctggcacagcaccttatgtccgtcccaaataattcatgaagcactttttcctcc

SEQ ID NO: 47966 - DNA, 73 bp, Homo sapiens
ttcatttctggcacagcaccttatgtccgtcccaaataattcatgaagcactttttcctcctttttaacaaca

SEQ ID NO: 47967 - DNA, 72 bp, Homo sapiens
gcacagcaccttatgtccgtcccaaataattcatgaagcactttttcctcctttttaacaacagctggactt

SEQ ID NO: 47968 - DNA, 69 bp, Homo sapiens
ttatgtccgtcccaaataattcatgaagcactttttcctcctttttaacaacagctggactttcttctt

SEQ ID NO: 47969 - DNA, 72 bp, Homo sapiens
tcccaaataattcatgaagcactttttcctcctttttaacaacagctggactttcttctttacagctgcaat

SEQ ID NO: 47970 - DNA, 72 bp, Homo sapiens
attcatgaagcactttttcctcctttttaacaacagctggactttcttctttacagctgcaattagaaaaga

SEQ ID NO: 47971 - DNA, 69 bp, Homo sapiens
cactttttcctcctttttaacaacagctggactttcttctttacagctgcaattagaaaagaagtacca

SEQ ID NO: 47972 - DNA, 70 bp, Homo sapiens
cctttttaacaacagctggactttcttctttacagctgcaattagaaaagaagtaccatttggctaaaca

SEQ ID NO: 47973 - DNA, 76 bp, Homo sapiens
ccaaaaggaaattatgagaatagcagctaccatggatgtgtcatacctttccccctgtgaatcgcaaagcacccat

SEQ ID NO: 47974 - DNA, 78 bp, Homo sapiens
aaattatgagaatagcagctaccatggatgtgtcatacctttccccctgtgaatcgcaaagcacccattccacgatcg

SEQ ID NO: 47975 - DNA, 78 bp, Homo sapiens
aatagcagctaccatggatgtgtcatacctttccccctgtgaatcgcaaagcacccattccacgatcggctctggaac

SEQ ID NO: 47976 - DNA, 80 bp, Homo sapiens
taccatggatgtgtcatacctttccccctgtgaatcgcaaagcacccattccacgatcggctctggaacgctctcagata

SEQ ID NO: 47977 - DNA, 81 bp, Homo sapiens
atgtgtcatacctttccccctgtgaatcgcaaagcacccattccacgatcggctctggaacgctctcagatatgcagacca

SEQ ID NO: 47978 - DNA, 79 bp, Homo sapiens
tttccccctgtgaatcgcaaagcacccattccacgatcggctctggaacgctctcagatatgcagaccagggcgtcctg

SEQ ID NO: 47979 - DNA, 77 bp, Homo sapiens
aatcgcaaagcacccattccacgatcggctctggaacgctctcagatatgcagaccagggcgtcctggttttccatt

SEQ ID NO: 47980 - DNA, 75 bp, Homo sapiens
aaagcacccattccacgatcggctctggaacgctctcagatatgcagaccagggcgtcctggttttccatttttc

SEQ ID NO: 47981 - DNA, 74 bp, Homo sapiens
ttccacgatcggctctggaacgctctcagatatgcagaccagggcgtcctggttttccatttttctaaagtaag

SEQ ID NO: 47982 - DNA, 73 bp, Homo sapiens
tctggaacgctctcagatatgcagaccagggcgtcctggttttccatttttctaaagtaaggtcttcttaatg

SEQ ID NO: 47983 - DNA, 73 bp, Homo sapiens
ctctcagatatgcagaccagggcgtcctggttttccatttttctaaagtaaggtcttcttaatgtgtaaagca

SEQ ID NO: 47984 - DNA, 67 bp, Homo sapiens
agaccagggcgtcctggttttccatttttctaaagtaaggtcttcttaatgtgtaaagcagggtatc

SEQ ID NO: 47985 - DNA, 70 bp, Homo sapiens
cgtcctggttttccatttttctaaagtaaggtcttcttaatgtgtaaagcagggtatctaaagcatcata

SEQ ID NO: 47986 - DNA, 71 bp, Homo sapiens
tccatttttctaaagtaaggtcttcttaatgtgtaaagcagggtatctaaagcatcataagttattaacat

SEQ ID NO: 47987 - DNA, 70 bp, Homo sapiens
tttctaaagtaaggtcttcttaatgtgtaaagcagggtatctaaagcatcataagttattaacattttac

SEQ ID NO: 47988 - DNA, 74 bp, Homo sapiens
aaatattgtggtattccaggctggaatactagtagcaggctggacttacttcttatactcactgtaaacaatat

SEQ ID NO: 47989 - DNA, 76 bp, Homo sapiens
tattccaggctggaatactagtagcaggctggacttacttcttatactcactgtaaacaatattgtgtaattggta

SEQ ID NO: 47990 - DNA, 77 bp, Homo sapiens
gaatactagtagcaggctggacttacttcttatactcactgtaaacaatattgtgtaattggtagcttcactctgaa

SEQ ID NO: 47991 - DNA, 76 bp, Homo sapiens
tagtagcaggctggacttacttcttatactcactgtaaacaatattgtgtaattggtagcttcactctgaataaaa

SEQ ID NO: 47992 - DNA, 73 bp, Homo sapiens
gctggacttacttcttatactcactgtaaacaatattgtgtaattggtagcttcactctgaataaaaagtagg

SEQ ID NO: 47993 - DNA, 74 bp, Homo sapiens
tatactcactgtaaacaatattgtgtaattggtagcttcactctgaataaaaagtaggtattctccagcttggg

SEQ ID NO: 47994 - DNA, 71 bp, Homo sapiens
actgtaaacaatattgtgtaattggtagcttcactctgaataaaaagtaggtattctccagcttgggtttc

SEQ ID NO: 47995 - DNA, 74 bp, Homo sapiens
caatattgtgtaattggtagcttcactctgaataaaaagtaggtattctccagcttgggtttctgtcattttca

SEQ ID NO: 47996 - DNA, 73 bp, Homo sapiens
taattggtagcttcactctgaataaaaagtaggtattctccagcttgggtttctgtcattttcaaaatgacca

SEQ ID NO: 47997 - DNA, 72 bp, Homo sapiens
ttcactctgaataaaaagtaggtattctccagcttgggtttctgtcattttcaaaatgaccatggaaacaac

SEQ ID NO: 47998 - DNA, 72 bp, Homo sapiens
taaaaagtaggtattctccagcttgggtttctgtcattttcaaaatgaccatggaaacaactcctctgcaaa

SEQ ID NO: 47999 - DNA, 72 bp, Homo sapiens
aggtattctccagcttgggtttctgtcattttcaaaatgaccatggaaacaactcctctgcaaaacaggaaa

SEQ ID NO: 48000 - DNA, 71 bp, Homo sapiens
tgggtttctgtcattttcaaaatgaccatggaaacaactcctctgcaaaacaggaaagagaactagttatt

SEQ ID NO: 48001 - DNA, 71 bp, Homo sapiens
ttccaaatgaaccacattttatgtcaagaaggtattcctccacttacctgttttgtaaatcaaaatgtggc

SEQ ID NO: 48002 - DNA, 72 bp, Homo sapiens
aaccacattttatgtcaagaaggtattcctccacttacctgttttgtaaatcaaaatgtggctggcaattca

SEQ ID NO: 48003 - DNA, 73 bp, Homo sapiens
ttttatgtcaagaaggtattcctccacttacctgttttgtaaatcaaaatgtggctggcaattcagggagctg

SEQ ID NO: 48004 - DNA, 73 bp, Homo sapiens
agaaggtattcctccacttacctgttttgtaaatcaaaatgtggctggcaattcagggagctgtgcttaaaga

SEQ ID NO: 48005 - DNA, 73 bp, Homo sapiens
acttacctgttttgtaaatcaaaatgtggctggcaattcagggagctgtgcttaaagacccagagacaggaaa

SEQ ID NO: 48006 - DNA, 75 bp, Homo sapiens
tgttttgtaaatcaaaatgtggctggcaattcagggagctgtgcttaaagacccagagacaggaaatgttccctg

SEQ ID NO: 48007 - DNA, 74 bp, Homo sapiens
aaatcaaaatgtggctggcaattcagggagctgtgcttaaagacccagagacaggaaatgttccctggggcgtc

SEQ ID NO: 48008 - DNA, 79 bp, Homo sapiens
tggcaattcagggagctgtgcttaaagacccagagacaggaaatgttccctggggcgtcgaccagcacttgcagtgtga

SEQ ID NO: 48009 - DNA, 78 bp, Homo sapiens
ttcagggagctgtgcttaaagacccagagacaggaaatgttccctggggcgtcgaccagcacttgcagtgtgatggaa

SEQ ID NO: 48010 - DNA, 81 bp, Homo sapiens
tgtgcttaaagacccagagacaggaaatgttccctggggcgtcgaccagcacttgcagtgtgatggaagcagatacatcca

SEQ ID NO: 48011 - DNA, 80 bp, Homo sapiens
agacccagagacaggaaatgttccctggggcgtcgaccagcacttgcagtgtgatggaagcagatacatccacttccaca

SEQ ID NO: 48012 - DNA, 81 bp, Homo sapiens
aaatgttccctggggcgtcgaccagcacttgcagtgtgatggaagcagatacatccacttccacagcggcagcttcgtaca

SEQ ID NO: 48013 - DNA, 82 bp, Homo sapiens
ttccctggggcgtcgaccagcacttgcagtgtgatggaagcagatacatccacttccacagcggcagcttcgtacactgtcc

SEQ ID NO: 48014 - DNA, 84 bp, Homo sapiens
cgtcgaccagcacttgcagtgtgatggaagcagatacatccacttccacagcggcagcttcgtacactgtccctgagctctggg

SEQ ID NO: 48015 - DNA, 84 bp, Homo sapiens
acttgcagtgtgatggaagcagatacatccacttccacagcggcagcttcgtacactgtccctgagctctggggtctcaacgca

SEQ ID NO: 48016 - DNA, 80 bp, Homo sapiens
atggaagcagatacatccacttccacagcggcagcttcgtacactgtccctgagctctggggtctcaacgcacacccgag

SEQ ID NO: 48017 - DNA, 78 bp, Homo sapiens
agatacatccacttccacagcggcagcttcgtacactgtccctgagctctggggtctcaacgcacacccgaggtcttc

SEQ ID NO: 48018 - DNA, 75 bp, Homo sapiens
ttccacagcggcagcttcgtacactgtccctgagctctggggtctcaacgcacacccgaggtcttccggggattc

SEQ ID NO: 48019 - DNA, 73 bp, Homo sapiens
agcttcgtacactgtccctgagctctggggtctcaacgcacacccgaggtcttccggggattctgatacctac

SEQ ID NO: 48020 - DNA, 75 bp, Homo sapiens
actgtccctgagctctggggtctcaacgcacacccgaggtcttccggggattctgatacctacgttgcagataga

SEQ ID NO: 48021 - DNA, 74 bp, Homo sapiens
agctctggggtctcaacgcacacccgaggtcttccggggattctgatacctacgttgcagatagaacaaagtga

SEQ ID NO: 48022 - DNA, 75 bp, Homo sapiens
tctcaacgcacacccgaggtcttccggggattctgatacctacgttgcagatagaacaaagtgaattcatgaaaa

SEQ ID NO: 48023 - DNA, 72 bp, Homo sapiens
gttctctagagaaaaacagctaaaggtataattttaatgttactttaccatgggatatgatgatgacttccc

SEQ ID NO: 48024 - DNA, 75 bp, Homo sapiens
gaaaaacagctaaaggtataattttaatgttactttaccatgggatatgatgatgacttccccactgatgaatca

SEQ ID NO: 48025 - DNA, 75 bp, Homo sapiens
agctaaaggtataattttaatgttactttaccatgggatatgatgatgacttccccactgatgaatcattgttct

SEQ ID NO: 48026 - DNA, 79 bp, Homo sapiens
tttaatgttactttaccatgggatatgatgatgacttccccactgatgaatcattgttcttatgattgattaaaacaca

SEQ ID NO: 48027 - DNA, 82 bp, Homo sapiens
tgttactttaccatgggatatgatgatgacttccccactgatgaatcattgttcttatgattgattaaaacacacttgatca

SEQ ID NO: 48028 - DNA, 85 bp, Homo sapiens
ggatatgatgatgacttccccactgatgaatcattgttcttatgattgattaaaacacacttgatcacaggcagatcttgatttg

SEQ ID NO: 48029 - DNA, 83 bp, Homo sapiens
atgatgacttccccactgatgaatcattgttcttatgattgattaaaacacacttgatcacaggcagatcttgatttgtaata

SEQ ID NO: 48030 - DNA, 83 bp, Homo sapiens
cactgatgaatcattgttcttatgattgattaaaacacacttgatcacaggcagatcttgatttgtaatagtcccaaatatca

SEQ ID NO: 48031 - DNA, 83 bp, Homo sapiens
gaatcattgttcttatgattgattaaaacacacttgatcacaggcagatcttgatttgtaatagtcccaaatatcattgcaga

SEQ ID NO: 48032 - DNA, 79 bp, Homo sapiens
gttcttatgattgattaaaacacacttgatcacaggcagatcttgatttgtaatagtcccaaatatcattgcagaaaaa

SEQ ID NO: 48033 - DNA, 77 bp, Homo sapiens
gattaaaacacacttgatcacaggcagatcttgatttgtaatagtcccaaatatcattgcagaaaaaacaactgtaa

SEQ ID NO: 48034 - DNA, 76 bp, Homo sapiens
cacacttgatcacaggcagatcttgatttgtaatagtcccaaatatcattgcagaaaaaacaactgtaaaacaaaa

SEQ ID NO: 48035 - DNA, 72 bp, Homo sapiens
cacaggcagatcttgatttgtaatagtcccaaatatcattgcagaaaaaacaactgtaaaacaaaataaaaa

SEQ ID NO: 48036 - DNA, 79 bp, Homo sapiens
ggctgagggaccgcgaggggctgcgagcgagcgagcggggccttaccgagcagcggcagctggccgccgtcgcgcgcca

SEQ ID NO: 48037 - DNA, 79 bp, Homo sapiens
ctgcgagcgagcgagcggggccttaccgagcagcggcagctggccgccgtcgcgcgccaacgccggcatggcctccgga

SEQ ID NO: 48038 - DNA, 77 bp, Homo sapiens
agcgagcgagcggggccttaccgagcagcggcagctggccgccgtcgcgcgccaacgccggcatggcctccggagcc

SEQ ID NO: 48039 - DNA, 73 bp, Homo sapiens
gggccttaccgagcagcggcagctggccgccgtcgcgcgccaacgccggcatggcctccggagcccggggtcc

SEQ ID NO: 48040 - DNA, 74 bp, Homo sapiens
agcagcggcagctggccgccgtcgcgcgccaacgccggcatggcctccggagcccggggtccccaggccgcgcc

SEQ ID NO: 48041 - DNA, 71 bp, Homo sapiens
agctggccgccgtcgcgcgccaacgccggcatggcctccggagcccggggtccccaggccgcgccggccca

SEQ ID NO: 48042 - DNA, 71 bp, Homo sapiens
ccgtcgcgcgccaacgccggcatggcctccggagcccggggtccccaggccgcgccggcccagccctgcga

SEQ ID NO: 48043 - DNA, 72 bp, Homo sapiens
aacgccggcatggcctccggagcccggggtccccaggccgcgccggcccagccctgcgatgccgcctggagc

SEQ ID NO: 48044 - DNA, 73 bp, Homo sapiens
atggcctccggagcccggggtccccaggccgcgccggcccagccctgcgatgccgcctggagcggcgcgcctc

SEQ ID NO: 48045 - DNA, 76 bp, Homo sapiens
cccggggtccccaggccgcgccggcccagccctgcgatgccgcctggagcggcgcgcctcgcgctgcaggtggctc

SEQ ID NO: 48046 - DNA, 81 bp, Homo sapiens
ccaggccgcgccggcccagccctgcgatgccgcctggagcggcgcgcctcgcgctgcaggtggctctcttaaggatgcgcg

SEQ ID NO: 48047 - DNA, 80 bp, Homo sapiens
ccggcccagccctgcgatgccgcctggagcggcgcgcctcgcgctgcaggtggctctcttaaggatgcgcgtcaccgacc

SEQ ID NO: 48048 - DNA, 81 bp, Homo sapiens
agccctgcgatgccgcctggagcggcgcgcctcgcgctgcaggtggctctcttaaggatgcgcgtcaccgaccgcaaattc

SEQ ID NO: 48049 - DNA, 79 bp, Homo sapiens
atgccgcctggagcggcgcgcctcgcgctgcaggtggctctcttaaggatgcgcgtcaccgaccgcaaattccctcgga

SEQ ID NO: 48050 - DNA, 78 bp, Homo sapiens
ggcgcgcctcgcgctgcaggtggctctcttaaggatgcgcgtcaccgaccgcaaattccctcggactggtgcaaagtg

SEQ ID NO: 48051 - DNA, 76 bp, Homo sapiens
cctcgcgctgcaggtggctctcttaaggatgcgcgtcaccgaccgcaaattccctcggactggtgcaaagtggaag

SEQ ID NO: 48052 - DNA, 71 bp, Homo sapiens
aggtggctctcttaaggatgcgcgtcaccgaccgcaaattccctcggactggtgcaaagtggaagggggga

SEQ ID NO: 48053 - DNA, 69 bp, Homo sapiens
ctcttaaggatgcgcgtcaccgaccgcaaattccctcggactggtgcaaagtggaaggggggaggaacc

SEQ ID NO: 48054 - DNA, 67 bp, Homo sapiens
cgtcaccgaccgcaaattccctcggactggtgcaaagtggaaggggggaggaaccctctccccagag

SEQ ID NO: 48055 - DNA, 67 bp, Homo sapiens
accgcaaattccctcggactggtgcaaagtggaaggggggaggaaccctctccccagaggcagggac

SEQ ID NO: 48056 - DNA, 67 bp, Homo sapiens
ttccctcggactggtgcaaagtggaaggggggaggaaccctctccccagaggcagggaccgaggcgg

SEQ ID NO: 48057 - DNA, 68 bp, Homo sapiens
aaggggggaggaaccctctccccagaggcagggaccgaggcgggagcggagaggttgggcagagccga

SEQ ID NO: 48058 - DNA, 73 bp, Homo sapiens
aaccctctccccagaggcagggaccgaggcgggagcggagaggttgggcagagccgagcagccggtgcctggc

SEQ ID NO: 48059 - DNA, 81 bp, Homo sapiens
ccagaggcagggaccgaggcgggagcggagaggttgggcagagccgagcagccggtgcctggcgcagcgctgcagccgagc

SEQ ID NO: 48060 - DNA, 80 bp, Homo sapiens
gggagcggagaggttgggcagagccgagcagccggtgcctggcgcagcgctgcagccgagcccacgtgcccgccgcggtc

SEQ ID NO: 48061 - DNA, 82 bp, Homo sapiens
aggttgggcagagccgagcagccggtgcctggcgcagcgctgcagccgagcccacgtgcccgccgcggtccgcagcctgtgc

SEQ ID NO: 48062 - DNA, 82 bp, Homo sapiens
agagccgagcagccggtgcctggcgcagcgctgcagccgagcccacgtgcccgccgcggtccgcagcctgtgctcggcggcc

SEQ ID NO: 48063 - DNA, 79 bp, Homo sapiens
agcagccggtgcctggcgcagcgctgcagccgagcccacgtgcccgccgcggtccgcagcctgtgctcggcggcccccg

SEQ ID NO: 48064 - DNA, 75 bp, Homo sapiens
agcgctgcagccgagcccacgtgcccgccgcggtccgcagcctgtgctcggcggcccccggggctccccgactgc

SEQ ID NO: 48065 - DNA, 70 bp, Homo sapiens
cgagcccacgtgcccgccgcggtccgcagcctgtgctcggcggcccccggggctccccgactgcggcggg

SEQ ID NO: 48066 - DNA, 70 bp, Homo sapiens
gtgcccgccgcggtccgcagcctgtgctcggcggcccccggggctccccgactgcggcggggaagattgg

SEQ ID NO: 48067 - DNA, 69 bp, Homo sapiens
cggtccgcagcctgtgctcggcggcccccggggctccccgactgcggcggggaagattgggcgcggtcc

SEQ ID NO: 48068 - DNA, 67 bp, Homo sapiens
tgctcggcggcccccggggctccccgactgcggcggggaagattgggcgcggtcccgccggagaagt

SEQ ID NO: 48069 - DNA, 68 bp, Homo sapiens
ccccggggctccccgactgcggcggggaagattgggcgcggtcccgccggagaagttgcactggctcc

SEQ ID NO: 48070 - DNA, 75 bp, Homo sapiens
actgcggcggggaagattgggcgcggtcccgccggagaagttgcactggctccgcggctctgccgccttgctgcc

SEQ ID NO: 48071 - DNA, 75 bp, Homo sapiens
aagattgggcgcggtcccgccggagaagttgcactggctccgcggctctgccgccttgctgcccctgtgagtccc

SEQ ID NO: 48072 - DNA, 75 bp, Homo sapiens
gtcccgccggagaagttgcactggctccgcggctctgccgccttgctgcccctgtgagtccccgaactctgtcgt

SEQ ID NO: 48073 - DNA, 75 bp, Homo sapiens
agaagttgcactggctccgcggctctgccgccttgctgcccctgtgagtccccgaactctgtcgtttggatccgg

SEQ ID NO: 48074 - DNA, 76 bp, Homo sapiens
ttgcactggctccgcggctctgccgccttgctgcccctgtgagtccccgaactctgtcgtttggatccggggcgtg

SEQ ID NO: 48075 - DNA, 75 bp, Homo sapiens
tccgcggctctgccgccttgctgcccctgtgagtccccgaactctgtcgtttggatccggggcgtggggactgca

SEQ ID NO: 48076 - DNA, 72 bp, Homo sapiens
ccttgctgcccctgtgagtccccgaactctgtcgtttggatccggggcgtggggactgcagggagccacaaa

SEQ ID NO: 48077 - DNA, 70 bp, Homo sapiens
cctgtgagtccccgaactctgtcgtttggatccggggcgtggggactgcagggagccacaaaccaccctc

SEQ ID NO: 48078 - DNA, 71 bp, Homo sapiens
cccgaactctgtcgtttggatccggggcgtggggactgcagggagccacaaaccaccctcctagtgcgctg

SEQ ID NO: 48079 - DNA, 74 bp, Homo sapiens
ttggatccggggcgtggggactgcagggagccacaaaccaccctcctagtgcgctgggatctttgaggccctga

SEQ ID NO: 48080 - DNA, 76 bp, Homo sapiens
tggggactgcagggagccacaaaccaccctcctagtgcgctgggatctttgaggccctgagaaaggcgctgaatcc

SEQ ID NO: 48081 - DNA, 75 bp, Homo sapiens
agggagccacaaaccaccctcctagtgcgctgggatctttgaggccctgagaaaggcgctgaatccgctcggcac

SEQ ID NO: 48082 - DNA, 82 bp, Homo sapiens
tgggatctttgaggccctgagaaaggcgctgaatccgctcggcacgctggcaactcccgccagcgcacaggcgagcattcca

SEQ ID NO: 48083 - DNA, 79 bp, Homo sapiens
agaaaggcgctgaatccgctcggcacgctggcaactcccgccagcgcacaggcgagcattccattaagaaccattccat

SEQ ID NO: 48084 - DNA, 79 bp, Homo sapiens
cgctgaatccgctcggcacgctggcaactcccgccagcgcacaggcgagcattccattaagaaccattccattcttaat

SEQ ID NO: 48085 - DNA, 79 bp, Homo sapiens
tcggcacgctggcaactcccgccagcgcacaggcgagcattccattaagaaccattccattcttaattgtggactgatt

SEQ ID NO: 48086 - DNA, 75 bp, Homo sapiens
aactcccgccagcgcacaggcgagcattccattaagaaccattccattcttaattgtggactgatttcctttgtc

SEQ ID NO: 48087 - DNA, 79 bp, Homo sapiens
cgccagcgcacaggcgagcattccattaagaaccattccattcttaattgtggactgatttcctttgtctctgcctcca

SEQ ID NO: 48088 - DNA, 77 bp, Homo sapiens
acaggcgagcattccattaagaaccattccattcttaattgtggactgatttcctttgtctctgcctccatctccta

SEQ ID NO: 48089 - DNA, 78 bp, Homo sapiens
aaccattccattcttaattgtggactgatttcctttgtctctgcctccatctcctaggatgctcaggacccagtcagc

SEQ ID NO: 48090 - DNA, 79 bp, Homo sapiens
taattgtggactgatttcctttgtctctgcctccatctcctaggatgctcaggacccagtcagcggcgggatcaagaaa

SEQ ID NO: 48091 - DNA, 78 bp, Homo sapiens
gtggactgatttcctttgtctctgcctccatctcctaggatgctcaggacccagtcagcggcgggatcaagaaaaaca

SEQ ID NO: 48092 - DNA, 75 bp, Homo sapiens
taggatgctcaggacccagtcagcggcgggatcaagaaaaacaggcagggtttcaatgtcaaccaaggcaattag

SEQ ID NO: 48093 - DNA, 70 bp, Homo sapiens
aggacccagtcagcggcgggatcaagaaaaacaggcagggtttcaatgtcaaccaaggcaattagggagg

SEQ ID NO: 48094 - DNA, 71 bp, Homo sapiens
tcagcggcgggatcaagaaaaacaggcagggtttcaatgtcaaccaaggcaattagggaggttaacaaaca

SEQ ID NO: 48095 - DNA, 69 bp, Homo sapiens
atcaagaaaaacaggcagggtttcaatgtcaaccaaggcaattagggaggttaacaaacagccttcaaa

SEQ ID NO: 48096 - DNA, 70 bp, Homo sapiens
tttcaatgtcaaccaaggcaattagggaggttaacaaacagccttcaaaacaaaacacacagaaaataca

SEQ ID NO: 48097 - DNA, 70 bp, Homo sapiens
atgtcaaccaaggcaattagggaggttaacaaacagccttcaaaacaaaacacacagaaaatacatccca

SEQ ID NO: 48098 - DNA, 70 bp, Homo sapiens
aattagggaggttaacaaacagccttcaaaacaaaacacacagaaaatacatcccagaggatgttgcgaa

SEQ ID NO: 48099 - DNA, 75 bp, Homo sapiens
ttaacaaacagccttcaaaacaaaacacacagaaaatacatcccagaggatgttgcgaatcatccgctcaatagt

SEQ ID NO: 48100 - DNA, 75 bp, Homo sapiens
agccttcaaaacaaaacacacagaaaatacatcccagaggatgttgcgaatcatccgctcaatagttcttgttct

SEQ ID NO: 48101 - DNA, 78 bp, Homo sapiens
agaaaatacatcccagaggatgttgcgaatcatccgctcaatagttcttgttcttcatcgcataatttttcgagttga

SEQ ID NO: 48102 - DNA, 76 bp, Homo sapiens
atcccagaggatgttgcgaatcatccgctcaatagttcttgttcttcatcgcataatttttcgagttgaaaattat

SEQ ID NO: 48103 - DNA, 76 bp, Homo sapiens
gaggatgttgcgaatcatccgctcaatagttcttgttcttcatcgcataatttttcgagttgaaaattattattat

SEQ ID NO: 48104 - DNA, 72 bp, Homo sapiens
ttattttctttgcaataagttgaggattggaaagctctggatgccagttctggttcttcccttacttaacta

SEQ ID NO: 48105 - DNA, 73 bp, Homo sapiens
tttgcaataagttgaggattggaaagctctggatgccagttctggttcttcccttacttaactagccgtttga

SEQ ID NO: 48106 - DNA, 72 bp, Homo sapiens
ttgaggattggaaagctctggatgccagttctggttcttcccttacttaactagccgtttgacctccacaaa

SEQ ID NO: 48107 - DNA, 68 bp, Homo sapiens
ccagttctggttcttcccttacttaactagccgtttgacctccacaaacctctgtttactcatcgtaa

SEQ ID NO: 48108 - DNA, 66 bp, Homo sapiens
ttcttcccttacttaactagccgtttgacctccacaaacctctgtttactcatcgtaaaggaaagg

SEQ ID NO: 48109 - DNA, 68 bp, Homo sapiens
ttacttaactagccgtttgacctccacaaacctctgtttactcatcgtaaaggaaagggatggaccaa

SEQ ID NO: 48110 - DNA, 70 bp, Homo sapiens
tagccgtttgacctccacaaacctctgtttactcatcgtaaaggaaagggatggaccaaatggttcataa

SEQ ID NO: 48111 - DNA, 72 bp, Homo sapiens
tccacaaacctctgtttactcatcgtaaaggaaagggatggaccaaatggttcataatgtctctcccaattc

SEQ ID NO: 48112 - DNA, 73 bp, Homo sapiens
tctgtttactcatcgtaaaggaaagggatggaccaaatggttcataatgtctctcccaattctaggaattcca

SEQ ID NO: 48113 - DNA, 73 bp, Homo sapiens
tcatcgtaaaggaaagggatggaccaaatggttcataatgtctctcccaattctaggaattccacgctcttaa

SEQ ID NO: 48114 - DNA, 70 bp, Homo sapiens
aggaaagggatggaccaaatggttcataatgtctctcccaattctaggaattccacgctcttaattattt

SEQ ID NO: 48115 - DNA, 71 bp, Homo sapiens
ggatggaccaaatggttcataatgtctctcccaattctaggaattccacgctcttaattattttaattatt

SEQ ID NO: 48116 - DNA, 71 bp, Homo sapiens
ggttcataatgtctctcccaattctaggaattccacgctcttaattattttaattattttctaataaagca

SEQ ID NO: 48117 - DNA, 69 bp, Homo sapiens
aattattttaattattttctaataaagcatgaaaattgactgtttactcttggccatacagttcttttc

SEQ ID NO: 48118 - DNA, 72 bp, Homo sapiens
attattttctaataaagcatgaaaattgactgtttactcttggccatacagttcttttccttagatgttgtc

SEQ ID NO: 48119 - DNA, 74 bp, Homo sapiens
ctaataaagcatgaaaattgactgtttactcttggccatacagttcttttccttagatgttgtctacagtacaa

SEQ ID NO: 48120 - DNA, 74 bp, Homo sapiens
gcatgaaaattgactgtttactcttggccatacagttcttttccttagatgttgtctacagtacaataattctt

SEQ ID NO: 48121 - DNA, 70 bp, Homo sapiens
actgtttactcttggccatacagttcttttccttagatgttgtctacagtacaataattctttcccctag

SEQ ID NO: 48122 - DNA, 72 bp, Homo sapiens
ttggccatacagttcttttccttagatgttgtctacagtacaataattctttcccctagggtatggcagaaa

SEQ ID NO: 48123 - DNA, 69 bp, Homo sapiens
agttcttttccttagatgttgtctacagtacaataattctttcccctagggtatggcagaaactttaga

SEQ ID NO: 48124 - DNA, 71 bp, Homo sapiens
tttccttagatgttgtctacagtacaataattctttcccctagggtatggcagaaactttagaagtgtcta

SEQ ID NO: 48125 - DNA, 75 bp, Homo sapiens
tgttgtctacagtacaataattctttcccctagggtatggcagaaactttagaagtgtctaccatggtgcagcca

SEQ ID NO: 48126 - DNA, 73 bp, Homo sapiens
agtacaataattctttcccctagggtatggcagaaactttagaagtgtctaccatggtgcagccactatggaa

SEQ ID NO: 48127 - DNA, 78 bp, Homo sapiens
attattcacagtagtcaaaaggcagaagtaacccatgtccacaacagatgaatgataaacaaaaatgcagtatataca

SEQ ID NO: 48128 - DNA, 78 bp, Homo sapiens
agtagtcaaaaggcagaagtaacccatgtccacaacagatgaatgataaacaaaaatgcagtatatacatacgactga

SEQ ID NO: 48129 - DNA, 76 bp, Homo sapiens
aaggcagaagtaacccatgtccacaacagatgaatgataaacaaaaatgcagtatatacatacgactgagtatttt

SEQ ID NO: 48130 - DNA, 76 bp, Homo sapiens
aagtaacccatgtccacaacagatgaatgataaacaaaaatgcagtatatacatacgactgagtatttttcagctt

SEQ ID NO: 48131 - DNA, 76 bp, Homo sapiens
gtccacaacagatgaatgataaacaaaaatgcagtatatacatacgactgagtatttttcagctttaaagaggagg

SEQ ID NO: 48132 - DNA, 76 bp, Homo sapiens
gatgaatgataaacaaaaatgcagtatatacatacgactgagtatttttcagctttaaagaggagggaaattctga

SEQ ID NO: 48133 - DNA, 74 bp, Homo sapiens
caaaaatgcagtatatacatacgactgagtatttttcagctttaaagaggagggaaattctgatacagctaaaa

SEQ ID NO: 48134 - DNA, 78 bp, Homo sapiens
atgcagtatatacatacgactgagtatttttcagctttaaagaggagggaaattctgatacagctaaaatatggatga

SEQ ID NO: 48135 - DNA, 77 bp, Homo sapiens
gcagtatatacatacgactgagtatttttcagctttaaagaggagggaaattctgatacagctaaaatatggatgaa

SEQ ID NO: 48136 - DNA, 76 bp, Homo sapiens
acatacgactgagtatttttcagctttaaagaggagggaaattctgatacagctaaaatatggatgaatcttgaca

SEQ ID NO: 48137 - DNA, 77 bp, Homo sapiens
cgactgagtatttttcagctttaaagaggagggaaattctgatacagctaaaatatggatgaatcttgacattatgc

SEQ ID NO: 48138 - DNA, 76 bp, Homo sapiens
gagtatttttcagctttaaagaggagggaaattctgatacagctaaaatatggatgaatcttgacattatgctaag

SEQ ID NO: 48139 - DNA, 70 bp, Homo sapiens
gtgaaataagctagtcccaaaaaatacaatactgtatcccattacaaattcataaagacagaaagttaaa

SEQ ID NO: 48140 - DNA, 69 bp, Homo sapiens
aagctagtcccaaaaaatacaatactgtatcccattacaaattcataaagacagaaagttaaatggtgg

SEQ ID NO: 48141 - DNA, 70 bp, Homo sapiens
aaaaatacaatactgtatcccattacaaattcataaagacagaaagttaaatggtggttaccatgggctg

SEQ ID NO: 48142 - DNA, 71 bp, Homo sapiens
acaatactgtatcccattacaaattcataaagacagaaagttaaatggtggttaccatgggctgggggcag

SEQ ID NO: 48143 - DNA, 68 bp, Homo sapiens
atcccattacaaattcataaagacagaaagttaaatggtggttaccatgggctgggggcagggggaaa

SEQ ID NO: 48144 - DNA, 69 bp, Homo sapiens
tcataaagacagaaagttaaatggtggttaccatgggctgggggcagggggaaatggggagccagtgtt

SEQ ID NO: 48145 - DNA, 68 bp, Homo sapiens
agaaagttaaatggtggttaccatgggctgggggcagggggaaatggggagccagtgtttaatggata

SEQ ID NO: 48146 - DNA, 69 bp, Homo sapiens
ttaaatggtggttaccatgggctgggggcagggggaaatggggagccagtgtttaatggatacagagtt

SEQ ID NO: 48147 - DNA, 69 bp, Homo sapiens
aatttttttaaagagtgttgtgtctaccttaggtcagaaacagaagtgaaggaagatggcctgaaataa

SEQ ID NO: 48148 - DNA, 72 bp, Homo sapiens
ttttaaagagtgttgtgtctaccttaggtcagaaacagaagtgaaggaagatggcctgaaataagtgaaaca

SEQ ID NO: 48149 - DNA, 76 bp, Homo sapiens
ttgtgtctaccttaggtcagaaacagaagtgaaggaagatggcctgaaataagtgaaacatgaggagataaagcaa

SEQ ID NO: 48150 - DNA, 75 bp, Homo sapiens
accttaggtcagaaacagaagtgaaggaagatggcctgaaataagtgaaacatgaggagataaagcaatgaaaca

SEQ ID NO: 48151 - DNA, 75 bp, Homo sapiens
aaacagaagtgaaggaagatggcctgaaataagtgaaacatgaggagataaagcaatgaaacaggctggttatgg

SEQ ID NO: 48152 - DNA, 75 bp, Homo sapiens
gtgaaggaagatggcctgaaataagtgaaacatgaggagataaagcaatgaaacaggctggttatggggagaaaa

SEQ ID NO: 48153 - DNA, 75 bp, Homo sapiens
cctgaaataagtgaaacatgaggagataaagcaatgaaacaggctggttatggggagaaaagcgagcttccaatg

SEQ ID NO: 48154 - DNA, 76 bp, Homo sapiens
ataagtgaaacatgaggagataaagcaatgaaacaggctggttatggggagaaaagcgagcttccaatggccaaga

SEQ ID NO: 48155 - DNA, 74 bp, Homo sapiens
aggagataaagcaatgaaacaggctggttatggggagaaaagcgagcttccaatggccaagacctaacacacta

SEQ ID NO: 48156 - DNA, 72 bp, Homo sapiens
caatgaaacaggctggttatggggagaaaagcgagcttccaatggccaagacctaacacactaccttctatt

SEQ ID NO: 48157 - DNA, 70 bp, Homo sapiens
aaacaggctggttatggggagaaaagcgagcttccaatggccaagacctaacacactaccttctatttaa

SEQ ID NO: 48158 - DNA, 72 bp, Homo sapiens
ttatggggagaaaagcgagcttccaatggccaagacctaacacactaccttctatttaaagctcaattactg

SEQ ID NO: 48159 - DNA, 70 bp, Homo sapiens
aaaagcgagcttccaatggccaagacctaacacactaccttctatttaaagctcaattactgtcttaaag

SEQ ID NO: 48160 - DNA, 70 bp, Homo sapiens
cttccaatggccaagacctaacacactaccttctatttaaagctcaattactgtcttaaaggaaactgat

SEQ ID NO: 48161 - DNA, 71 bp, Homo sapiens
aagacctaacacactaccttctatttaaagctcaattactgtcttaaaggaaactgattggctgggcgctg

SEQ ID NO: 48162 - DNA, 76 bp, Homo sapiens
ctaaaaaaaaaatgaaactgattattacaaatttgcagaacatcagcttgagtgcagcagtattcaggatacaaaa

SEQ ID NO: 48163 - DNA, 77 bp, Homo sapiens
aggatacaaaatcataaagatactgctgctttgtccaagaatcttggacacaaggcagagatcttcatgaaaaaggg

SEQ ID NO: 48164 - DNA, 75 bp, Homo sapiens
aaaatcataaagatactgctgctttgtccaagaatcttggacacaaggcagagatcttcatgaaaaagggggttg

SEQ ID NO: 48165 - DNA, 77 bp, Homo sapiens
aagatactgctgctttgtccaagaatcttggacacaaggcagagatcttcatgaaaaagggggttggtgagagagga

SEQ ID NO: 48166 - DNA, 74 bp, Homo sapiens
tttgtccaagaatcttggacacaaggcagagatcttcatgaaaaagggggttggtgagagaggagaagttagga

SEQ ID NO: 48167 - DNA, 72 bp, Homo sapiens
aagaatcttggacacaaggcagagatcttcatgaaaaagggggttggtgagagaggagaagttaggaatggt

SEQ ID NO: 48168 - DNA, 70 bp, Homo sapiens
gacacaaggcagagatcttcatgaaaaagggggttggtgagagaggagaagttaggaatggtttcttttt

SEQ ID NO: 48169 - DNA, 69 bp, Homo sapiens
acacaaggcagagatcttcatgaaaaagggggttggtgagagaggagaagttaggaatggtttcttttt

SEQ ID NO: 48170 - DNA, 69 bp, Homo sapiens
aaggcagagatcttcatgaaaaagggggttggtgagagaggagaagttaggaatggtttctttttttga

SEQ ID NO: 48171 - DNA, 72 bp, Homo sapiens
caggtgtgagtcaccgcggccagccaggaatggtttctaggaacacttgattttccgtggaaattggtggaa

SEQ ID NO: 48172 - DNA, 70 bp, Homo sapiens
gtgagtcaccgcggccagccaggaatggtttctaggaacacttgattttccgtggaaattggtggaaaaa

SEQ ID NO: 48173 - DNA, 68 bp, Homo sapiens
ccagccaggaatggtttctaggaacacttgattttccgtggaaattggtggaaaaaataattctagaa

SEQ ID NO: 48174 - DNA, 68 bp, Homo sapiens
aggaatggtttctaggaacacttgattttccgtggaaattggtggaaaaaataattctagaaggagca

SEQ ID NO: 48175 - DNA, 69 bp, Homo sapiens
ctaggaacacttgattttccgtggaaattggtggaaaaaataattctagaaggagcaaatcttatagac

SEQ ID NO: 48176 - DNA, 69 bp, Homo sapiens
cttgattttccgtggaaattggtggaaaaaataattctagaaggagcaaatcttatagactgaaatatt

SEQ ID NO: 48177 - DNA, 71 bp, Homo sapiens
cgtggaaattggtggaaaaaataattctagaaggagcaaatcttatagactgaaatattttggagtatgag

SEQ ID NO: 48178 - DNA, 73 bp, Homo sapiens
ggaaaaaataattctagaaggagcaaatcttatagactgaaatattttggagtatgaggtataggctaacaga

SEQ ID NO: 48179 - DNA, 74 bp, Homo sapiens
ataattctagaaggagcaaatcttatagactgaaatattttggagtatgaggtataggctaacagaaggtgaag

SEQ ID NO: 48180 - DNA, 74 bp, Homo sapiens
aattctagaaggagcaaatcttatagactgaaatattttggagtatgaggtataggctaacagaaggtgaagta

SEQ ID NO: 48181 - DNA, 76 bp, Homo sapiens
tagaaggagcaaatcttatagactgaaatattttggagtatgaggtataggctaacagaaggtgaagtaatgccca

SEQ ID NO: 48182 - DNA, 74 bp, Homo sapiens
agcaaatcttatagactgaaatattttggagtatgaggtataggctaacagaaggtgaagtaatgcccatgttt

SEQ ID NO: 48183 - DNA, 74 bp, Homo sapiens
gcaaatcttatagactgaaatattttggagtatgaggtataggctaacagaaggtgaagtaatgcccatgtttt

SEQ ID NO: 48184 - DNA, 76 bp, Homo sapiens
tcttatagactgaaatattttggagtatgaggtataggctaacagaaggtgaagtaatgcccatgtttttctgtga

SEQ ID NO: 48185 - DNA, 78 bp, Homo sapiens
atattttggagtatgaggtataggctaacagaaggtgaagtaatgcccatgtttttctgtgatgtgccaagagtcata

SEQ ID NO: 48186 - DNA, 79 bp, Homo sapiens
aggtataggctaacagaaggtgaagtaatgcccatgtttttctgtgatgtgccaagagtcatatctaatatgagaacta

SEQ ID NO: 48187 - DNA, 80 bp, Homo sapiens
aaggtgaagtaatgcccatgtttttctgtgatgtgccaagagtcatatctaatatgagaactaatttcttcctcacagca

SEQ ID NO: 48188 - DNA, 78 bp, Homo sapiens
tttttctgtgatgtgccaagagtcatatctaatatgagaactaatttcttcctcacagcaacacttaaggaaagtagc

SEQ ID NO: 48189 - DNA, 76 bp, Homo sapiens
agtcatatctaatatgagaactaatttcttcctcacagcaacacttaaggaaagtagcctgaaattgtctagagtc

SEQ ID NO: 48190 - DNA, 74 bp, Homo sapiens
aatatgagaactaatttcttcctcacagcaacacttaaggaaagtagcctgaaattgtctagagtcctggatta

SEQ ID NO: 48191 - DNA, 76 bp, Homo sapiens
acagcaacacttaaggaaagtagcctgaaattgtctagagtcctggattacacgcccaggtatgcatgcccaagta

SEQ ID NO: 48192 - DNA, 74 bp, Homo sapiens
ttaaggaaagtagcctgaaattgtctagagtcctggattacacgcccaggtatgcatgcccaagtatgaaattt

SEQ ID NO: 48193 - DNA, 76 bp, Homo sapiens
aaagtagcctgaaattgtctagagtcctggattacacgcccaggtatgcatgcccaagtatgaaattttggtgtca

SEQ ID NO: 48194 - DNA, 77 bp, Homo sapiens
attacacgcccaggtatgcatgcccaagtatgaaattttggtgtcagagttcatgataggaattctgtaataaagaa

SEQ ID NO: 48195 - DNA, 76 bp, Homo sapiens
caggtatgcatgcccaagtatgaaattttggtgtcagagttcatgataggaattctgtaataaagaaactcttaaa

SEQ ID NO: 48196 - DNA, 72 bp, Homo sapiens
gcccaagtatgaaattttggtgtcagagttcatgataggaattctgtaataaagaaactcttaaagggtcaa

SEQ ID NO: 48197 - DNA, 72 bp, Homo sapiens
ttttggtgtcagagttcatgataggaattctgtaataaagaaactcttaaagggtcaaaagcaactagaaga

SEQ ID NO: 48198 - DNA, 76 bp, Homo sapiens
tgtcagagttcatgataggaattctgtaataaagaaactcttaaagggtcaaaagcaactagaagaaatgagctga

SEQ ID NO: 48199 - DNA, 70 bp, Homo sapiens
gataggaattctgtaataaagaaactcttaaagggtcaaaagcaactagaagaaatgagctgaaacggga

SEQ ID NO: 48200 - DNA, 67 bp, Homo sapiens
aagaaactcttaaagggtcaaaagcaactagaagaaatgagctgaaacgggaaatcggaaaagagaa

SEQ ID NO: 48201 - DNA, 67 bp, Homo sapiens
ttaaagggtcaaaagcaactagaagaaatgagctgaaacgggaaatcggaaaagagaagagtaagtt

SEQ ID NO: 48202 - DNA, 70 bp, Homo sapiens
agaaatgagctgaaacgggaaatcggaaaagagaagagtaagtttgtttctgggttgaatggagtgtcta

SEQ ID NO: 48203 - DNA, 69 bp, Homo sapiens
aaatcggaaaagagaagagtaagtttgtttctgggttgaatggagtgtctagtgctaactctacgaaag

SEQ ID NO: 48204 - DNA, 71 bp, Homo sapiens
aagagaagagtaagtttgtttctgggttgaatggagtgtctagtgctaactctacgaaaggatgtatttta

SEQ ID NO: 48205 - DNA, 72 bp, Homo sapiens
aagtttgtttctgggttgaatggagtgtctagtgctaactctacgaaaggatgtattttatctagattctta

SEQ ID NO: 48206 - DNA, 80 bp, Homo sapiens
aatggagtgtctagtgctaactctacgaaaggatgtattttatctagattcttagcaccatgatgcttagccatgagtaa

SEQ ID NO: 48207 - DNA, 82 bp, Homo sapiens
tgctaactctacgaaaggatgtattttatctagattcttagcaccatgatgcttagccatgagtaagtggtcatctatctta

SEQ ID NO: 48208 - DNA, 80 bp, Homo sapiens
actctacgaaaggatgtattttatctagattcttagcaccatgatgcttagccatgagtaagtggtcatctatcttacca

SEQ ID NO: 48209 - DNA, 83 bp, Homo sapiens
gtattttatctagattcttagcaccatgatgcttagccatgagtaagtggtcatctatcttaccagcatcttgataccatgtt

SEQ ID NO: 48210 - DNA, 84 bp, Homo sapiens
ttatctagattcttagcaccatgatgcttagccatgagtaagtggtcatctatcttaccagcatcttgataccatgtttccacc

SEQ ID NO: 48211 - DNA, 82 bp, Homo sapiens
ttagcaccatgatgcttagccatgagtaagtggtcatctatcttaccagcatcttgataccatgtttccaccccttaagtca

SEQ ID NO: 48212 - DNA, 79 bp, Homo sapiens
atgcttagccatgagtaagtggtcatctatcttaccagcatcttgataccatgtttccaccccttaagtcacacaaata

SEQ ID NO: 48213 - DNA, 78 bp, Homo sapiens
atgagtaagtggtcatctatcttaccagcatcttgataccatgtttccaccccttaagtcacacaaatatctcctctc

SEQ ID NO: 48214 - DNA, 76 bp, Homo sapiens
tatcttaccagcatcttgataccatgtttccaccccttaagtcacacaaatatctcctctccctttcctctctctc

SEQ ID NO: 48215 - DNA, 72 bp, Homo sapiens
atcttgataccatgtttccaccccttaagtcacacaaatatctcctctccctttcctctctctctccaaaaa

SEQ ID NO: 48216 - DNA, 72 bp, Homo sapiens
atgtttccaccccttaagtcacacaaatatctcctctccctttcctctctctctccaaaaattgtgacatag

SEQ ID NO: 48217 - DNA, 77 bp, Homo sapiens
cttaagtcacacaaatatctcctctccctttcctctctctctccaaaaattgtgacatagtttcgtagcagctcaca

SEQ ID NO: 48218 - DNA, 77 bp, Homo sapiens
tatctcctctccctttcctctctctctccaaaaattgtgacatagtttcgtagcagctcacaggtgaaatactttca

SEQ ID NO: 48219 - DNA, 76 bp, Homo sapiens
tcctctctctctccaaaaattgtgacatagtttcgtagcagctcacaggtgaaatactttcatgtcatttttaact

SEQ ID NO: 48220 - DNA, 76 bp, Homo sapiens
tctctctccaaaaattgtgacatagtttcgtagcagctcacaggtgaaatactttcatgtcatttttaacttacaa

SEQ ID NO: 48221 - DNA, 74 bp, Homo sapiens
catagtttcgtagcagctcacaggtgaaatactttcatgtcatttttaacttacaaagccttatgttttcctga

SEQ ID NO: 48222 - DNA, 70 bp, Homo sapiens
caggtgaaatactttcatgtcatttttaacttacaaagccttatgttttcctgaaaatcagggacaaaca

SEQ ID NO: 48223 - DNA, 67 bp, Homo sapiens
actttcatgtcatttttaacttacaaagccttatgttttcctgaaaatcagggacaaacaaaaggaa

SEQ ID NO: 48224 - DNA, 66 bp, Homo sapiens
tttaacttacaaagccttatgttttcctgaaaatcagggacaaacaaaaggaatatttgaataggg

SEQ ID NO: 48225 - DNA, 70 bp, Homo sapiens
aagccttatgttttcctgaaaatcagggacaaacaaaaggaatatttgaatagggttcatgtgagttcag

SEQ ID NO: 48226 - DNA, 73 bp, Homo sapiens
ttttcctgaaaatcagggacaaacaaaaggaatatttgaatagggttcatgtgagttcagttgagatatcaac

SEQ ID NO: 48227 - DNA, 73 bp, Homo sapiens
gaaaatcagggacaaacaaaaggaatatttgaatagggttcatgtgagttcagttgagatatcaactttatag

SEQ ID NO: 48228 - DNA, 72 bp, Homo sapiens
gggacaaacaaaaggaatatttgaatagggttcatgtgagttcagttgagatatcaactttatagtataatt

SEQ ID NO: 48229 - DNA, 73 bp, Homo sapiens
aaggaatatttgaatagggttcatgtgagttcagttgagatatcaactttatagtataattttacacatcttt

SEQ ID NO: 48230 - DNA, 73 bp, Homo sapiens
gaatagggttcatgtgagttcagttgagatatcaactttatagtataattttacacatcttttattaataggg

SEQ ID NO: 48231 - DNA, 73 bp, Homo sapiens
gttgagatatcaactttatagtataattttacacatcttttattaataggggctttgaactcaccaattggca

SEQ ID NO: 48232 - DNA, 71 bp, Homo sapiens
caactttatagtataattttacacatcttttattaataggggctttgaactcaccaattggcaaaatctga

SEQ ID NO: 48233 - DNA, 71 bp, Homo sapiens
gtataattttacacatcttttattaataggggctttgaactcaccaattggcaaaatctgacaatacaaag

SEQ ID NO: 48234 - DNA, 73 bp, Homo sapiens
acacatcttttattaataggggctttgaactcaccaattggcaaaatctgacaatacaaagtgttgacaagaa

SEQ ID NO: 48235 - DNA, 79 bp, Homo sapiens
gctttgaactcaccaattggcaaaatctgacaatacaaagtgttgacaagaattcagagcaatggagaacacccacaca

SEQ ID NO: 48236 - DNA, 77 bp, Homo sapiens
aactcaccaattggcaaaatctgacaatacaaagtgttgacaagaattcagagcaatggagaacacccacacactgt

SEQ ID NO: 48237 - DNA, 79 bp, Homo sapiens
attggcaaaatctgacaatacaaagtgttgacaagaattcagagcaatggagaacacccacacactgttggtggacatc

SEQ ID NO: 48238 - DNA, 78 bp, Homo sapiens
acaatacaaagtgttgacaagaattcagagcaatggagaacacccacacactgttggtggacatcccaatgggtgtga

SEQ ID NO: 48239 - DNA, 76 bp, Homo sapiens
aagaattcagagcaatggagaacacccacacactgttggtggacatcccaatgggtgtgagcactttgaaaaataa

SEQ ID NO: 48240 - DNA, 75 bp, Homo sapiens
aatggagaacacccacacactgttggtggacatcccaatgggtgtgagcactttgaaaaataatttggcatatct

SEQ ID NO: 48241 - DNA, 74 bp, Homo sapiens
acacccacacactgttggtggacatcccaatgggtgtgagcactttgaaaaataatttggcatatcttactaaa

SEQ ID NO: 48242 - DNA, 74 bp, Homo sapiens
actgttggtggacatcccaatgggtgtgagcactttgaaaaataatttggcatatcttactaaagttgaacata

SEQ ID NO: 48243 - DNA, 77 bp, Homo sapiens
tggacatcccaatgggtgtgagcactttgaaaaataatttggcatatcttactaaagttgaacatatcctccagcca

SEQ ID NO: 48244 - DNA, 76 bp, Homo sapiens
aatgggtgtgagcactttgaaaaataatttggcatatcttactaaagttgaacatatcctccagccagcagtttca

SEQ ID NO: 48245 - DNA, 74 bp, Homo sapiens
ctttgaaaaataatttggcatatcttactaaagttgaacatatcctccagccagcagtttcacccccagatata

SEQ ID NO: 48246 - DNA, 74 bp, Homo sapiens
ataatttggcatatcttactaaagttgaacatatcctccagccagcagtttcacccccagatataaacctcaaa

SEQ ID NO: 48247 - DNA, 74 bp, Homo sapiens
atatcttactaaagttgaacatatcctccagccagcagtttcacccccagatataaacctcaaagaaacacata

SEQ ID NO: 48248 - DNA, 76 bp, Homo sapiens
tactaaagttgaacatatcctccagccagcagtttcacccccagatataaacctcaaagaaacacatatgtgccaa

SEQ ID NO: 48249 - DNA, 76 bp, Homo sapiens
acctcaaagaaacacatatgtgccaagagacaagtataagaatgttcatagcattattgtttataatatcaaaaaa

SEQ ID NO: 48250 - DNA, 78 bp, Homo sapiens
cacatatgtgccaagagacaagtataagaatgttcatagcattattgtttataatatcaaaaaattgggaacaatcta

SEQ ID NO: 48251 - DNA, 76 bp, Homo sapiens
tgccaagagacaagtataagaatgttcatagcattattgtttataatatcaaaaaattgggaacaatctaaatgcc

SEQ ID NO: 48252 - DNA, 74 bp, Homo sapiens
caagtataagaatgttcatagcattattgtttataatatcaaaaaattgggaacaatctaaatgcccaccaaca

SEQ ID NO: 48253 - DNA, 71 bp, Homo sapiens
aatatcaaaaaattgggaacaatctaaatgcccaccaacaaaaggataaattgcagtacagtcataataaa

SEQ ID NO: 48254 - DNA, 69 bp, Homo sapiens
aaaaattgggaacaatctaaatgcccaccaacaaaaggataaattgcagtacagtcataataaaatacc

SEQ ID NO: 48255 - DNA, 72 bp, Homo sapiens
atctaaatgcccaccaacaaaaggataaattgcagtacagtcataataaaatacctatatattaaataacag

SEQ ID NO: 48256 - DNA, 73 bp, Homo sapiens
gcccaccaacaaaaggataaattgcagtacagtcataataaaatacctatatattaaataacagtgtaaatga

SEQ ID NO: 48257 - DNA, 75 bp, Homo sapiens
caaaaggataaattgcagtacagtcataataaaatacctatatattaaataacagtgtaaatgaatgagctacag

SEQ ID NO: 48258 - DNA, 80 bp, Homo sapiens
tgcagtacagtcataataaaatacctatatattaaataacagtgtaaatgaatgagctacagttacctgacacaccatga

SEQ ID NO: 48259 - DNA, 78 bp, Homo sapiens
gtcataataaaatacctatatattaaataacagtgtaaatgaatgagctacagttacctgacacaccatgaatgaatc

SEQ ID NO: 48260 - DNA, 77 bp, Homo sapiens
ataaaatacctatatattaaataacagtgtaaatgaatgagctacagttacctgacacaccatgaatgaatctcaaa

SEQ ID NO: 48261 - DNA, 77 bp, Homo sapiens
attaaataacagtgtaaatgaatgagctacagttacctgacacaccatgaatgaatctcaaaaacataatgttgagg

SEQ ID NO: 48262 - DNA, 77 bp, Homo sapiens
ataacagtgtaaatgaatgagctacagttacctgacacaccatgaatgaatctcaaaaacataatgttgagggggaa

SEQ ID NO: 48263 - DNA, 77 bp, Homo sapiens
tacagttacctgacacaccatgaatgaatctcaaaaacataatgttgagggggaaaagcaagtcatggaataataga

SEQ ID NO: 48264 - DNA, 76 bp, Homo sapiens
cctgacacaccatgaatgaatctcaaaaacataatgttgagggggaaaagcaagtcatggaataatagacataaag

SEQ ID NO: 48265 - DNA, 73 bp, Homo sapiens
aatgaatctcaaaaacataatgttgagggggaaaagcaagtcatggaataatagacataaaggcggaagcaaa

SEQ ID NO: 48266 - DNA, 71 bp, Homo sapiens
aaaaacataatgttgagggggaaaagcaagtcatggaataatagacataaaggcggaagcaaacaatattc

SEQ ID NO: 48267 - DNA, 72 bp, Homo sapiens
ataatgttgagggggaaaagcaagtcatggaataatagacataaaggcggaagcaaacaatattctccttag

SEQ ID NO: 48268 - DNA, 73 bp, Homo sapiens
aaaagcaagtcatggaataatagacataaaggcggaagcaaacaatattctccttaggaatacattcataggg

SEQ ID NO: 48269 - DNA, 74 bp, Homo sapiens
tcatggaataatagacataaaggcggaagcaaacaatattctccttaggaatacattcataggggtataaggaa

SEQ ID NO: 48270 - DNA, 71 bp, Homo sapiens
ataatagacataaaggcggaagcaaacaatattctccttaggaatacattcataggggtataaggaaagta

SEQ ID NO: 48271 - DNA, 68 bp, Homo sapiens
ataaaggcggaagcaaacaatattctccttaggaatacattcataggggtataaggaaagtaaaggaa

SEQ ID NO: 48272 - DNA, 69 bp, Homo sapiens
agcaaacaatattctccttaggaatacattcataggggtataaggaaagtaaaggaataattaccacaa

SEQ ID NO: 48273 - DNA, 69 bp, Homo sapiens
tctccttaggaatacattcataggggtataaggaaagtaaaggaataattaccacaaaagtcaggattg

SEQ ID NO: 48274 - DNA, 69 bp, Homo sapiens
tacattcataggggtataaggaaagtaaaggaataattaccacaaaagtcaggattgtggttacgtctg

SEQ ID NO: 48275 - DNA, 67 bp, Homo sapiens
ataggggtataaggaaagtaaaggaataattaccacaaaagtcaggattgtggttacgtctggtatg

SEQ ID NO: 48276 - DNA, 67 bp, Homo sapiens
taaggaaagtaaaggaataattaccacaaaagtcaggattgtggttacgtctggtatggggtgggaa

SEQ ID NO: 48277 - DNA, 68 bp, Homo sapiens
gaataattaccacaaaagtcaggattgtggttacgtctggtatggggtgggaagaggaggtttaatta

SEQ ID NO: 48278 - DNA, 68 bp, Homo sapiens
attaccacaaaagtcaggattgtggttacgtctggtatggggtgggaagaggaggtttaattagagaa

SEQ ID NO: 48279 - DNA, 68 bp, Homo sapiens
aagtcaggattgtggttacgtctggtatggggtgggaagaggaggtttaattagagaagacaaactgg

SEQ ID NO: 48280 - DNA, 70 bp, Homo sapiens
ttacgtctggtatggggtgggaagaggaggtttaattagagaagacaaactggggatttctgaggtgcta

SEQ ID NO: 48281 - DNA, 70 bp, Homo sapiens
tatggggtgggaagaggaggtttaattagagaagacaaactggggatttctgaggtgctaacatacccta

SEQ ID NO: 48282 - DNA, 69 bp, Homo sapiens
gaagaggaggtttaattagagaagacaaactggggatttctgaggtgctaacataccctattgttgttt

SEQ ID NO: 48283 - DNA, 70 bp, Homo sapiens
aggtttaattagagaagacaaactggggatttctgaggtgctaacataccctattgttgttttgcgatag

SEQ ID NO: 48284 - DNA, 74 bp, Homo sapiens
ttagagaagacaaactggggatttctgaggtgctaacataccctattgttgttttgcgatagggtcttgctaca

SEQ ID NO: 48285 - DNA, 73 bp, Homo sapiens
aaactggggatttctgaggtgctaacataccctattgttgttttgcgatagggtcttgctacactgcccaagc

SEQ ID NO: 48286 - DNA, 71 bp, Homo sapiens
gactacaggtgtggaccaccatgtccaaccacaccctatttttttttaacctctgtggtgggtgctggatg

SEQ ID NO: 48287 - DNA, 71 bp, Homo sapiens
tgtggaccaccatgtccaaccacaccctatttttttttaacctctgtggtgggtgctggatgttcatttta

SEQ ID NO: 48288 - DNA, 69 bp, Homo sapiens
atgtccaaccacaccctatttttttttaacctctgtggtgggtgctggatgttcattttattgttattc

SEQ ID NO: 48289 - DNA, 68 bp, Homo sapiens
caaccacaccctatttttttttaacctctgtggtgggtgctggatgttcattttattgttattcttta

SEQ ID NO: 48290 - DNA, 68 bp, Homo sapiens
tttttttaacctctgtggtgggtgctggatgttcattttattgttattctttaaactatgtaattatt

SEQ ID NO: 48291 - DNA, 73 bp, Homo sapiens
cctctgtggtgggtgctggatgttcattttattgttattctttaaactatgtaattatttttacacactgctg

SEQ ID NO: 48292 - DNA, 75 bp, Homo sapiens
ggtgggtgctggatgttcattttattgttattctttaaactatgtaattatttttacacactgctgtgaatatga

SEQ ID NO: 48293 - DNA, 76 bp, Homo sapiens
ggatgttcattttattgttattctttaaactatgtaattatttttacacactgctgtgaatatgatgtatttcaca

SEQ ID NO: 48294 - DNA, 73 bp, Homo sapiens
attgttattctttaaactatgtaattatttttacacactgctgtgaatatgatgtatttcacaacaaaagaaa

SEQ ID NO: 48295 - DNA, 72 bp, Homo sapiens
ttaaactatgtaattatttttacacactgctgtgaatatgatgtatttcacaacaaaagaaaattaaaggcc

SEQ ID NO: 48296 - DNA, 71 bp, Homo sapiens
gtaattatttttacacactgctgtgaatatgatgtatttcacaacaaaagaaaattaaaggccgggtgcgg

SEQ ID NO: 48297 - DNA, 76 bp, Homo sapiens
aggctgagataagaggatcactgagcctagaagttacagaccaccctgggcaataaaatgagaccccacttctaga

SEQ ID NO: 48298 - DNA, 72 bp, Homo sapiens
ataagaggatcactgagcctagaagttacagaccaccctgggcaataaaatgagaccccacttctagaaaaa

SEQ ID NO: 48299 - DNA, 72 bp, Homo sapiens
aaataaataagtttgacacattttcacctacaagtattcttatacaaacaaatgatatttgaatctgattaa

SEQ ID NO: 48300 - DNA, 74 bp, Homo sapiens
gtttgacacattttcacctacaagtattcttatacaaacaaatgatatttgaatctgattaagattccagggcc

SEQ ID NO: 48301 - DNA, 74 bp, Homo sapiens
acattttcacctacaagtattcttatacaaacaaatgatatttgaatctgattaagattccagggcctggtggc

SEQ ID NO: 48302 - DNA, 76 bp, Homo sapiens
ggtggcgcacacctgaagatcccagatccaactaccaatttataggaaatacatgggatagtggaatatgggacaa

SEQ ID NO: 48303 - DNA, 74 bp, Homo sapiens
acacctgaagatcccagatccaactaccaatttataggaaatacatgggatagtggaatatgggacaacacagg

SEQ ID NO: 48304 - DNA, 73 bp, Homo sapiens
atcccagatccaactaccaatttataggaaatacatgggatagtggaatatgggacaacacagggacataatt

SEQ ID NO: 48305 - DNA, 71 bp, Homo sapiens
atccaactaccaatttataggaaatacatgggatagtggaatatgggacaacacagggacataattttaaa

SEQ ID NO: 48306 - DNA, 71 bp, Homo sapiens
tttataggaaatacatgggatagtggaatatgggacaacacagggacataattttaaaattccaaaggcca

SEQ ID NO: 48307 - DNA, 66 bp, Homo sapiens
aataaaataaaattccagaacctaggaaactgtatggaacaaatatcttggtttcttcaacgaaaa

SEQ ID NO: 48308 - DNA, 67 bp, Homo sapiens
aaaattccagaacctaggaaactgtatggaacaaatatcttggtttcttcaacgaaaatttgtaaga

SEQ ID NO: 48309 - DNA, 67 bp, Homo sapiens
cagaacctaggaaactgtatggaacaaatatcttggtttcttcaacgaaaatttgtaagaaaataaa

SEQ ID NO: 48310 - DNA, 68 bp, Homo sapiens
ctgtatggaacaaatatcttggtttcttcaacgaaaatttgtaagaaaataaaaaaagagatggagcc

SEQ ID NO: 48311 - DNA, 67 bp, Homo sapiens
ggaacaaatatcttggtttcttcaacgaaaatttgtaagaaaataaaaaaagagatggagcctataa

SEQ ID NO: 48312 - DNA, 66 bp, Homo sapiens
tcttggtttcttcaacgaaaatttgtaagaaaataaaaaaagagatggagcctataaattaaaaga

SEQ ID NO: 48313 - DNA, 66 bp, Homo sapiens
atttgtaagaaaataaaaaaagagatggagcctataaattaaaagaaacctaagatatattaagga

SEQ ID NO: 48314 - DNA, 69 bp, Homo sapiens
aaataaaaaaagagatggagcctataaattaaaagaaacctaagatatattaaggacattacaatatca

SEQ ID NO: 48315 - DNA, 76 bp, Homo sapiens
agagatggagcctataaattaaaagaaacctaagatatattaaggacattacaatatcaagcaattgtaatgtgca

SEQ ID NO: 48316 - DNA, 75 bp, Homo sapiens
ggagcctataaattaaaagaaacctaagatatattaaggacattacaatatcaagcaattgtaatgtgcaatgta

SEQ ID NO: 48317 - DNA, 73 bp, Homo sapiens
aaattaaaagaaacctaagatatattaaggacattacaatatcaagcaattgtaatgtgcaatgtaaagatgt

SEQ ID NO: 48318 - DNA, 74 bp, Homo sapiens
ttaaaagaaacctaagatatattaaggacattacaatatcaagcaattgtaatgtgcaatgtaaagatgttatt

SEQ ID NO: 48319 - DNA, 80 bp, Homo sapiens
cctaagatatattaaggacattacaatatcaagcaattgtaatgtgcaatgtaaagatgttatttggatgctgattcaag

SEQ ID NO: 48320 - DNA, 79 bp, Homo sapiens
tatattaaggacattacaatatcaagcaattgtaatgtgcaatgtaaagatgttatttggatgctgattcaagtaaccc

SEQ ID NO: 48321 - DNA, 78 bp, Homo sapiens
taaggacattacaatatcaagcaattgtaatgtgcaatgtaaagatgttatttggatgctgattcaagtaacccgaaa

SEQ ID NO: 48322 - DNA, 77 bp, Homo sapiens
acattacaatatcaagcaattgtaatgtgcaatgtaaagatgttatttggatgctgattcaagtaacccgaaaaata

SEQ ID NO: 48323 - DNA, 78 bp, Homo sapiens
acaatatcaagcaattgtaatgtgcaatgtaaagatgttatttggatgctgattcaagtaacccgaaaaatatacata

SEQ ID NO: 48324 - DNA, 75 bp, Homo sapiens
tgtaatgtgcaatgtaaagatgttatttggatgctgattcaagtaacccgaaaaatatacataaaataattggga

SEQ ID NO: 48325 - DNA, 73 bp, Homo sapiens
tgtgcaatgtaaagatgttatttggatgctgattcaagtaacccgaaaaatatacataaaataattgggaaaa

SEQ ID NO: 48326 - DNA, 73 bp, Homo sapiens
gatgttatttggatgctgattcaagtaacccgaaaaatatacataaaataattgggaaaatgtgatcactggt

SEQ ID NO: 48327 - DNA, 71 bp, Homo sapiens
tggatgctgattcaagtaacccgaaaaatatacataaaataattgggaaaatgtgatcactggttttaatt

SEQ ID NO: 48328 - DNA, 69 bp, Homo sapiens
gattcaagtaacccgaaaaatatacataaaataattgggaaaatgtgatcactggttttaattttgata

SEQ ID NO: 48329 - DNA, 67 bp, Homo sapiens
acccgaaaaatatacataaaataattgggaaaatgtgatcactggttttaattttgatattatttta

SEQ ID NO: 48330 - DNA, 69 bp, Homo sapiens
cataaaataattgggaaaatgtgatcactggttttaattttgatattattttataaaaaattatatgtg

SEQ ID NO: 48331 - DNA, 72 bp, Homo sapiens
tgggaaaatgtgatcactggttttaattttgatattattttataaaaaattatatgtgtgtgggaggctgag

SEQ ID NO: 48332 - DNA, 74 bp, Homo sapiens
atatattttaaaaatcattcctatctttgcagaggtacacatgaaatagttacagaaaaaatgatatgaaatgg

SEQ ID NO: 48333 - DNA, 74 bp, Homo sapiens
aaaatcattcctatctttgcagaggtacacatgaaatagttacagaaaaaatgatatgaaatgggaaggttgag

SEQ ID NO: 48334 - DNA, 73 bp, Homo sapiens
ctatctttgcagaggtacacatgaaatagttacagaaaaaatgatatgaaatgggaaggttgagggggaataa

SEQ ID NO: 48335 - DNA, 72 bp, Homo sapiens
tttgcagaggtacacatgaaatagttacagaaaaaatgatatgaaatgggaaggttgagggggaataaggag

SEQ ID NO: 48336 - DNA, 70 bp, Homo sapiens
atgaaatagttacagaaaaaatgatatgaaatgggaaggttgagggggaataaggagtgacagttaatgg

SEQ ID NO: 48337 - DNA, 70 bp, Homo sapiens
atagttacagaaaaaatgatatgaaatgggaaggttgagggggaataaggagtgacagttaatgggaaca

SEQ ID NO: 48338 - DNA, 67 bp, Homo sapiens
aatgatatgaaatgggaaggttgagggggaataaggagtgacagttaatgggaacagggtttctttt

SEQ ID NO: 48339 - DNA, 65 bp, Homo sapiens
atgaaatgggaaggttgagggggaataaggagtgacagttaatgggaacagggtttctttttttc

SEQ ID NO: 48340 - DNA, 69 bp, Homo sapiens
tgagggggaataaggagtgacagttaatgggaacagggtttctttttttcggatgatgaaactattgta

SEQ ID NO: 48341 - DNA, 67 bp, Homo sapiens
gggaataaggagtgacagttaatgggaacagggtttctttttttcggatgatgaaactattgtaaaa

SEQ ID NO: 48342 - DNA, 70 bp, Homo sapiens
gtgacagttaatgggaacagggtttctttttttcggatgatgaaactattgtaaaattagattatggtga

SEQ ID NO: 48343 - DNA, 70 bp, Homo sapiens
gggaacagggtttctttttttcggatgatgaaactattgtaaaattagattatggtgatggttgctcaac

SEQ ID NO: 48344 - DNA, 71 bp, Homo sapiens
gggtttctttttttcggatgatgaaactattgtaaaattagattatggtgatggttgctcaactctgtaaa

SEQ ID NO: 48345 - DNA, 74 bp, Homo sapiens
tttcggatgatgaaactattgtaaaattagattatggtgatggttgctcaactctgtaaatacactaaaaacca

SEQ ID NO: 48346 - DNA, 75 bp, Homo sapiens
tgctcaactctgtaaatacactaaaaaccactgaattgtaggctaaataggtgaactatagacatgtaaattgga

SEQ ID NO: 48347 - DNA, 76 bp, Homo sapiens
atacactaaaaaccactgaattgtaggctaaataggtgaactatagacatgtaaattggatctcagtgaagctgta

SEQ ID NO: 48348 - DNA, 73 bp, Homo sapiens
aaaaaccactgaattgtaggctaaataggtgaactatagacatgtaaattggatctcagtgaagctgtaaaaa

SEQ ID NO: 48349 - DNA, 76 bp, Homo sapiens
ggctaaataggtgaactatagacatgtaaattggatctcagtgaagctgtaaaaaatgacataaagccagagattt

SEQ ID NO: 48350 - DNA, 80 bp, Homo sapiens
ctatagacatgtaaattggatctcagtgaagctgtaaaaaatgacataaagccagagattttcttcaaaatcatctgatg

SEQ ID NO: 48351 - DNA, 79 bp, Homo sapiens
acatgtaaattggatctcagtgaagctgtaaaaaatgacataaagccagagattttcttcaaaatcatctgatgtggag

SEQ ID NO: 48352 - DNA, 78 bp, Homo sapiens
atctcagtgaagctgtaaaaaatgacataaagccagagattttcttcaaaatcatctgatgtggagggtttgagtgga

SEQ ID NO: 48353 - DNA, 77 bp, Homo sapiens
gctgtaaaaaatgacataaagccagagattttcttcaaaatcatctgatgtggagggtttgagtggagcaatcaaaa

SEQ ID NO: 48354 - DNA, 75 bp, Homo sapiens
gtaaaaaatgacataaagccagagattttcttcaaaatcatctgatgtggagggtttgagtggagcaatcaaaat

SEQ ID NO: 48355 - DNA, 78 bp, Homo sapiens
atgacataaagccagagattttcttcaaaatcatctgatgtggagggtttgagtggagcaatcaaaattaaccatgtg

SEQ ID NO: 48356 - DNA, 77 bp, Homo sapiens
ataaagccagagattttcttcaaaatcatctgatgtggagggtttgagtggagcaatcaaaattaaccatgtgtcac

SEQ ID NO: 48357 - DNA, 76 bp, Homo sapiens
agagattttcttcaaaatcatctgatgtggagggtttgagtggagcaatcaaaattaaccatgtgtcaccagtagt

SEQ ID NO: 48358 - DNA, 77 bp, Homo sapiens
attttcttcaaaatcatctgatgtggagggtttgagtggagcaatcaaaattaaccatgtgtcaccagtagttgcac

SEQ ID NO: 48359 - DNA, 80 bp, Homo sapiens
ttcttcaaaatcatctgatgtggagggtttgagtggagcaatcaaaattaaccatgtgtcaccagtagttgcacctcagc

SEQ ID NO: 48360 - DNA, 79 bp, Homo sapiens
aaaatcatctgatgtggagggtttgagtggagcaatcaaaattaaccatgtgtcaccagtagttgcacctcagccacag

SEQ ID NO: 48361 - DNA, 78 bp, Homo sapiens
atgtggagggtttgagtggagcaatcaaaattaaccatgtgtcaccagtagttgcacctcagccacagtcatataagt

SEQ ID NO: 48362 - DNA, 79 bp, Homo sapiens
gggtttgagtggagcaatcaaaattaaccatgtgtcaccagtagttgcacctcagccacagtcatataagttcattata

SEQ ID NO: 48363 - DNA, 77 bp, Homo sapiens
agtggagcaatcaaaattaaccatgtgtcaccagtagttgcacctcagccacagtcatataagttcattatactttt

SEQ ID NO: 48364 - DNA, 76 bp, Homo sapiens
caaaattaaccatgtgtcaccagtagttgcacctcagccacagtcatataagttcattatactttttattagacat

SEQ ID NO: 48365 - DNA, 73 bp, Homo sapiens
ccagtagttgcacctcagccacagtcatataagttcattatactttttattagacattttctataataaaagg

SEQ ID NO: 48366 - DNA, 73 bp, Homo sapiens
gcacctcagccacagtcatataagttcattatactttttattagacattttctataataaaaggttttgaata

SEQ ID NO: 48367 - DNA, 66 bp, Homo sapiens
agttcattatactttttattagacattttctataataaaaggttttgaataaaaaagatttgaaga

SEQ ID NO: 48368 - DNA, 65 bp, Homo sapiens
ttttattagacattttctataataaaaggttttgaataaaaaagatttgaagaaaaggccgagcc

SEQ ID NO: 48369 - DNA, 65 bp, Homo sapiens
cattttctataataaaaggttttgaataaaaaagatttgaagaaaaggccgagccgttgcgtacc

SEQ ID NO: 48370 - DNA, 68 bp, Homo sapiens
tataataaaaggttttgaataaaaaagatttgaagaaaaggccgagccgttgcgtacctaggatgcca

SEQ ID NO: 48371 - DNA, 69 bp, Homo sapiens
aaggttttgaataaaaaagatttgaagaaaaggccgagccgttgcgtacctaggatgccatgtggaagc

SEQ ID NO: 48372 - DNA, 74 bp, Homo sapiens
aaaaagatttgaagaaaaggccgagccgttgcgtacctaggatgccatgtggaagctgaagctgcacctcccgc

SEQ ID NO: 48373 - DNA, 75 bp, Homo sapiens
aagaaaaggccgagccgttgcgtacctaggatgccatgtggaagctgaagctgcacctcccgcgtgacccctcta

SEQ ID NO: 48374 - DNA, 78 bp, Homo sapiens
aggccgagccgttgcgtacctaggatgccatgtggaagctgaagctgcacctcccgcgtgacccctctagccagctgg

SEQ ID NO: 48375 - DNA, 82 bp, Homo sapiens
ttgcgtacctaggatgccatgtggaagctgaagctgcacctcccgcgtgacccctctagccagctgggcccctcagatgaga

SEQ ID NO: 48376 - DNA, 84 bp, Homo sapiens
taggatgccatgtggaagctgaagctgcacctcccgcgtgacccctctagccagctgggcccctcagatgagagttgcatccag

SEQ ID NO: 48377 - DNA, 82 bp, Homo sapiens
aagctgaagctgcacctcccgcgtgacccctctagccagctgggcccctcagatgagagttgcatccaggccagcactagcc

SEQ ID NO: 48378 - DNA, 83 bp, Homo sapiens
aagctgcacctcccgcgtgacccctctagccagctgggcccctcagatgagagttgcatccaggccagcactagccgctcagc

SEQ ID NO: 48379 - DNA, 87 bp, Homo sapiens
tctagccagctgggcccctcagatgagagttgcatccaggccagcactagccgctcagccaccagcagcggcacccccatctgcagt

SEQ ID NO: 48380 - DNA, 86 bp, Homo sapiens
agctgggcccctcagatgagagttgcatccaggccagcactagccgctcagccaccagcagcggcacccccatctgcagttggctc

SEQ ID NO: 48381 - DNA, 89 bp, Homo sapiens
ccctcagatgagagttgcatccaggccagcactagccgctcagccaccagcagcggcacccccatctgcagttggctctcctgctgctg

SEQ ID NO: 48382 - DNA, 85 bp, Homo sapiens
actagccgctcagccaccagcagcggcacccccatctgcagttggctctcctgctgctgtgccccgtctgatggcccaaatggca

SEQ ID NO: 48383 - DNA, 85 bp, Homo sapiens
ccaccagcagcggcacccccatctgcagttggctctcctgctgctgtgccccgtctgatggcccaaatggcaaccactgcagctg

SEQ ID NO: 48384 - DNA, 85 bp, Homo sapiens
gcacccccatctgcagttggctctcctgctgctgtgccccgtctgatggcccaaatggcaaccactgcagctggcgcggctgtgg

SEQ ID NO: 48385 - DNA, 86 bp, Homo sapiens
atctgcagttggctctcctgctgctgtgccccgtctgatggcccaaatggcaaccactgcagctggcgcggctgtgggctctgccg

SEQ ID NO: 48386 - DNA, 80 bp, Homo sapiens
atggcccaaatggcaaccactgcagctggcgcggctgtgggctctgccgtggggcacacactgggtcacgccattactgg

SEQ ID NO: 48387 - DNA, 78 bp, Homo sapiens
ccaaatggcaaccactgcagctggcgcggctgtgggctctgccgtggggcacacactgggtcacgccattactggggg

SEQ ID NO: 48388 - DNA, 77 bp, Homo sapiens
tgcagctggcgcggctgtgggctctgccgtggggcacacactgggtcacgccattactggggggtttagtggaggaa

SEQ ID NO: 48389 - DNA, 72 bp, Homo sapiens
cgcggctgtgggctctgccgtggggcacacactgggtcacgccattactggggggtttagtggaggaagtaa

SEQ ID NO: 48390 - DNA, 75 bp, Homo sapiens
ctgtgggctctgccgtggggcacacactgggtcacgccattactggggggtttagtggaggaagtaatgctgagc

SEQ ID NO: 48391 - DNA, 75 bp, Homo sapiens
tgtgggctctgccgtggggcacacactgggtcacgccattactggggggtttagtggaggaagtaatgctgagcc

SEQ ID NO: 48392 - DNA, 75 bp, Homo sapiens
ctctgccgtggggcacacactgggtcacgccattactggggggtttagtggaggaagtaatgctgagcctgcgag

SEQ ID NO: 48393 - DNA, 76 bp, Homo sapiens
gtggggcacacactgggtcacgccattactggggggtttagtggaggaagtaatgctgagcctgcgaggcctgaca

SEQ ID NO: 48394 - DNA, 77 bp, Homo sapiens
ggggcacacactgggtcacgccattactggggggtttagtggaggaagtaatgctgagcctgcgaggcctgacatca

SEQ ID NO: 48395 - DNA, 86 bp, Homo sapiens
aacccagctggcacagcagcagcagccttgcttctatgagatcgaacagtttctggagtgtgcccagaaccatggtgacatcaagc

SEQ ID NO: 48396 - DNA, 84 bp, Homo sapiens
agcagcagcagccttgcttctatgagatcgaacagtttctggagtgtgcccagaaccatggtgacatcaagctctgtgagggtt

SEQ ID NO: 48397 - DNA, 82 bp, Homo sapiens
agccttgcttctatgagatcgaacagtttctggagtgtgcccagaaccatggtgacatcaagctctgtgagggtttcaatga

SEQ ID NO: 48398 - DNA, 83 bp, Homo sapiens
ttctatgagatcgaacagtttctggagtgtgcccagaaccatggtgacatcaagctctgtgagggtttcaatgaggtgctgaa

SEQ ID NO: 48399 - DNA, 80 bp, Homo sapiens
ggagtgtgcccagaaccatggtgacatcaagctctgtgagggtttcaatgaggtgctgaaacagtgccgactggcaaaac

SEQ ID NO: 48400 - DNA, 81 bp, Homo sapiens
cagaaccatggtgacatcaagctctgtgagggtttcaatgaggtgctgaaacagtgccgactggcaaaacgattggcctga

SEQ ID NO: 48401 - DNA, 81 bp, Homo sapiens
atggtgacatcaagctctgtgagggtttcaatgaggtgctgaaacagtgccgactggcaaaacgattggcctgatcaagaa

SEQ ID NO: 48402 - DNA, 77 bp, Homo sapiens
agctctgtgagggtttcaatgaggtgctgaaacagtgccgactggcaaaacgattggcctgatcaagaagttcaacc

SEQ ID NO: 48403 - DNA, 77 bp, Homo sapiens
gtgagggtttcaatgaggtgctgaaacagtgccgactggcaaaacgattggcctgatcaagaagttcaacctggaga

SEQ ID NO: 48404 - DNA, 75 bp, Homo sapiens
aatgaggtgctgaaacagtgccgactggcaaaacgattggcctgatcaagaagttcaacctggagaaatggaaaa

SEQ ID NO: 48405 - DNA, 76 bp, Homo sapiens
aggtgctgaaacagtgccgactggcaaaacgattggcctgatcaagaagttcaacctggagaaatggaaaatcagc

SEQ ID NO: 48406 - DNA, 75 bp, Homo sapiens
aaacagtgccgactggcaaaacgattggcctgatcaagaagttcaacctggagaaatggaaaatcagctctataa

SEQ ID NO: 48407 - DNA, 75 bp, Homo sapiens
agtgccgactggcaaaacgattggcctgatcaagaagttcaacctggagaaatggaaaatcagctctataaccaa

SEQ ID NO: 48408 - DNA, 74 bp, Homo sapiens
cgactggcaaaacgattggcctgatcaagaagttcaacctggagaaatggaaaatcagctctataaccaagtta

SEQ ID NO: 48409 - DNA, 73 bp, Homo sapiens
ctggcaaaacgattggcctgatcaagaagttcaacctggagaaatggaaaatcagctctataaccaagttaat

SEQ ID NO: 48410 - DNA, 73 bp, Homo sapiens
gattggcctgatcaagaagttcaacctggagaaatggaaaatcagctctataaccaagttaatttagtataaa

SEQ ID NO: 48411 - DNA, 71 bp, Homo sapiens
cctggagaaatggaaaatcagctctataaccaagttaatttagtataaaaatcaaattgatagtgaaggta

SEQ ID NO: 48412 - DNA, 70 bp, Homo sapiens
aatggaaaatcagctctataaccaagttaatttagtataaaaatcaaattgatagtgaaggtataaagtg

SEQ ID NO: 48413 - DNA, 72 bp, Homo sapiens
atcagctctataaccaagttaatttagtataaaaatcaaattgatagtgaaggtataaagtgtaaccatcag

SEQ ID NO: 48414 - DNA, 68 bp, Homo sapiens
ccaagttaatttagtataaaaatcaaattgatagtgaaggtataaagtgtaaccatcagttaaacctc

SEQ ID NO: 48415 - DNA, 73 bp, Homo sapiens
agtgaaggtataaagtgtaaccatcagttaaacctcttgtgtcattcctagcttccttgcttctgaattgaaa

SEQ ID NO: 48416 - DNA, 73 bp, Homo sapiens
aggtataaagtgtaaccatcagttaaacctcttgtgtcattcctagcttccttgcttctgaattgaaatggaa

SEQ ID NO: 48417 - DNA, 73 bp, Homo sapiens
tgtaaccatcagttaaacctcttgtgtcattcctagcttccttgcttctgaattgaaatggaagggggtgttc

SEQ ID NO: 48418 - DNA, 73 bp, Homo sapiens
taaacctcttgtgtcattcctagcttccttgcttctgaattgaaatggaagggggtgttcctactctgtagaa

SEQ ID NO: 48419 - DNA, 72 bp, Homo sapiens
tagcttccttgcttctgaattgaaatggaagggggtgttcctactctgtagaatttggggctgggcaaatgt

SEQ ID NO: 48420 - DNA, 72 bp, Homo sapiens
cttgcttctgaattgaaatggaagggggtgttcctactctgtagaatttggggctgggcaaatgtttgtgtg

SEQ ID NO: 48421 - DNA, 70 bp, Homo sapiens
ttgaaatggaagggggtgttcctactctgtagaatttggggctgggcaaatgtttgtgtggcctccttaa

SEQ ID NO: 48422 - DNA, 72 bp, Homo sapiens
ggggtgttcctactctgtagaatttggggctgggcaaatgtttgtgtggcctccttaaaagagctgttatga

SEQ ID NO: 48423 - DNA, 67 bp, Homo sapiens
agtcattttcttccaagggaaaaaaaaagatttgaaatattggacaagttaacttatcctgaatgtg

SEQ ID NO: 48424 - DNA, 68 bp, Homo sapiens
agggaaaaaaaaagatttgaaatattggacaagttaacttatcctgaatgtgtggaagatgactaccc

SEQ ID NO: 48425 - DNA, 75 bp, Homo sapiens
aaagatttgaaatattggacaagttaacttatcctgaatgtgtggaagatgactacccctgcttagaactcatga

SEQ ID NO: 48426 - DNA, 77 bp, Homo sapiens
aatattggacaagttaacttatcctgaatgtgtggaagatgactacccctgcttagaactcatgagctgctctttac

SEQ ID NO: 48427 - DNA, 75 bp, Homo sapiens
aagttaacttatcctgaatgtgtggaagatgactacccctgcttagaactcatgagctgctctttactgtgtttt

SEQ ID NO: 48428 - DNA, 77 bp, Homo sapiens
tgaatgtgtggaagatgactacccctgcttagaactcatgagctgctctttactgtgtttttattaacccatctaaa

SEQ ID NO: 48429 - DNA, 75 bp, Homo sapiens
aagatgactacccctgcttagaactcatgagctgctctttactgtgtttttattaacccatctaaatgggatgaa

SEQ ID NO: 48430 - DNA, 75 bp, Homo sapiens
tacccctgcttagaactcatgagctgctctttactgtgtttttattaacccatctaaatgggatgaacaataaca

SEQ ID NO: 48431 - DNA, 74 bp, Homo sapiens
ttagaactcatgagctgctctttactgtgtttttattaacccatctaaatgggatgaacaataacaggaccctg

SEQ ID NO: 48432 - DNA, 71 bp, Homo sapiens
agctgctctttactgtgtttttattaacccatctaaatgggatgaacaataacaggaccctggaatctgtt

SEQ ID NO: 48433 - DNA, 72 bp, Homo sapiens
actgtgtttttattaacccatctaaatgggatgaacaataacaggaccctggaatctgtttccattatgcaa

SEQ ID NO: 48434 - DNA, 72 bp, Homo sapiens
tttttattaacccatctaaatgggatgaacaataacaggaccctggaatctgtttccattatgcaattggtg

SEQ ID NO: 48435 - DNA, 77 bp, Homo sapiens
atctaaatgggatgaacaataacaggaccctggaatctgtttccattatgcaattggtggcacacaggtaaactgca

SEQ ID NO: 48436 - DNA, 75 bp, Homo sapiens
atgaacaataacaggaccctggaatctgtttccattatgcaattggtggcacacaggtaaactgcaaaattccaa

SEQ ID NO: 48437 - DNA, 76 bp, Homo sapiens
aataacaggaccctggaatctgtttccattatgcaattggtggcacacaggtaaactgcaaaattccaactgcaga

SEQ ID NO: 48438 - DNA, 78 bp, Homo sapiens
ggaatctgtttccattatgcaattggtggcacacaggtaaactgcaaaattccaactgcagaatttcataattgatag

SEQ ID NO: 48439 - DNA, 75 bp, Homo sapiens
aattggtggcacacaggtaaactgcaaaattccaactgcagaatttcataattgatagttcttcctttatgtcta

SEQ ID NO: 48440 - DNA, 74 bp, Homo sapiens
ggtaaactgcaaaattccaactgcagaatttcataattgatagttcttcctttatgtctaagatgatttcaaaa

SEQ ID NO: 48441 - DNA, 77 bp, Homo sapiens
tccaactgcagaatttcataattgatagttcttcctttatgtctaagatgatttcaaaataatcatctccttagaat

SEQ ID NO: 48442 - DNA, 78 bp, Homo sapiens
gcagaatttcataattgatagttcttcctttatgtctaagatgatttcaaaataatcatctccttagaattattcgca

SEQ ID NO: 48443 - DNA, 77 bp, Homo sapiens
taattgatagttcttcctttatgtctaagatgatttcaaaataatcatctccttagaattattcgcaacagataatg

SEQ ID NO: 48444 - DNA, 76 bp, Homo sapiens
cttcctttatgtctaagatgatttcaaaataatcatctccttagaattattcgcaacagataatgtattagtttgc

SEQ ID NO: 48445 - DNA, 81 bp, Homo sapiens
ttatgtctaagatgatttcaaaataatcatctccttagaattattcgcaacagataatgtattagtttgctggagctgcca

SEQ ID NO: 48446 - DNA, 79 bp, Homo sapiens
agatgatttcaaaataatcatctccttagaattattcgcaacagataatgtattagtttgctggagctgccataacaaa

SEQ ID NO: 48447 - DNA, 73 bp, Homo sapiens
aggtgttggcagggttggttctaagggctgtcatggagaatctgttccaagccttgtactggcttctggtggt

SEQ ID NO: 48448 - DNA, 75 bp, Homo sapiens
agggttggttctaagggctgtcatggagaatctgttccaagccttgtactggcttctggtggtttgcaggcaata

SEQ ID NO: 48449 - DNA, 78 bp, Homo sapiens
gttctaagggctgtcatggagaatctgttccaagccttgtactggcttctggtggtttgcaggcaatatttggtgctc

SEQ ID NO: 48450 - DNA, 81 bp, Homo sapiens
tgtcatggagaatctgttccaagccttgtactggcttctggtggtttgcaggcaatatttggtgctccttggcttctgcta

SEQ ID NO: 48451 - DNA, 79 bp, Homo sapiens
agaatctgttccaagccttgtactggcttctggtggtttgcaggcaatatttggtgctccttggcttctgctacatcac

SEQ ID NO: 48452 - DNA, 76 bp, Homo sapiens
aagccttgtactggcttctggtggtttgcaggcaatatttggtgctccttggcttctgctacatcaccccgacctc

SEQ ID NO: 48453 - DNA, 79 bp, Homo sapiens
tactggcttctggtggtttgcaggcaatatttggtgctccttggcttctgctacatcaccccgacctctgccttcatgt

SEQ ID NO: 48454 - DNA, 81 bp, Homo sapiens
tggtttgcaggcaatatttggtgctccttggcttctgctacatcaccccgacctctgccttcatgttcacgtggcagtctc

SEQ ID NO: 48455 - DNA, 79 bp, Homo sapiens
aggcaatatttggtgctccttggcttctgctacatcaccccgacctctgccttcatgttcacgtggcagtctccctgtg

SEQ ID NO: 48456 - DNA, 81 bp, Homo sapiens
tttggtgctccttggcttctgctacatcaccccgacctctgccttcatgttcacgtggcagtctccctgtgtgtgtgtctg

SEQ ID NO: 48457 - DNA, 75 bp, Homo sapiens
gtgtgtgtctgtctagcgctgcatttgaatttccccttttcataaggataccggtcatattggattaggacccac

SEQ ID NO: 48458 - DNA, 75 bp, Homo sapiens
tctgtctagcgctgcatttgaatttccccttttcataaggataccggtcatattggattaggacccacccaatga

SEQ ID NO: 48459 - DNA, 73 bp, Homo sapiens
tgcatttgaatttccccttttcataaggataccggtcatattggattaggacccacccaatgacctcagtgta

SEQ ID NO: 48460 - DNA, 71 bp, Homo sapiens
ttccccttttcataaggataccggtcatattggattaggacccacccaatgacctcagtgtaacttgatta

SEQ ID NO: 48461 - DNA, 73 bp, Homo sapiens
ttttcataaggataccggtcatattggattaggacccacccaatgacctcagtgtaacttgattacctctgta

SEQ ID NO: 48462 - DNA, 71 bp, Homo sapiens
ataccggtcatattggattaggacccacccaatgacctcagtgtaacttgattacctctgtaaaaagccta

SEQ ID NO: 48463 - DNA, 71 bp, Homo sapiens
attggattaggacccacccaatgacctcagtgtaacttgattacctctgtaaaaagcctatctccaaataa

SEQ ID NO: 48464 - DNA, 66 bp, Homo sapiens
gtcacattctgaggaatatggggttaggacctcaaaaatacgttttttaggaccacaaaaaaattg

SEQ ID NO: 48465 - DNA, 65 bp, Homo sapiens
ttctgaggaatatggggttaggacctcaaaaatacgttttttaggaccacaaaaaaattgtgtcc

SEQ ID NO: 48466 - DNA, 63 bp, Homo sapiens
gggttaggacctcaaaaatacgttttttaggaccacaaaaaaattgtgtcctgttaagggaca

SEQ ID NO: 48467 - DNA, 65 bp, Homo sapiens
aggacctcaaaaatacgttttttaggaccacaaaaaaattgtgtcctgttaagggacacaattca

SEQ ID NO: 48468 - DNA, 64 bp, Homo sapiens
aatacgttttttaggaccacaaaaaaattgtgtcctgttaagggacacaattcagcccttaacg

SEQ ID NO: 48469 - DNA, 68 bp, Homo sapiens
tttaggaccacaaaaaaattgtgtcctgttaagggacacaattcagcccttaacggatagatttcaaa

SEQ ID NO: 48470 - DNA, 69 bp, Homo sapiens
aaaaattgtgtcctgttaagggacacaattcagcccttaacggatagatttcaaaatcaatagaaatta

SEQ ID NO: 48471 - DNA, 72 bp, Homo sapiens
gtgtcctgttaagggacacaattcagcccttaacggatagatttcaaaatcaatagaaattaattcatttgc

SEQ ID NO: 48472 - DNA, 75 bp, Homo sapiens
ggacacaattcagcccttaacggatagatttcaaaatcaatagaaattaattcatttgcttcacctatagattgc

SEQ ID NO: 48473 - DNA, 74 bp, Homo sapiens
attcagcccttaacggatagatttcaaaatcaatagaaattaattcatttgcttcacctatagattgcttgtta

SEQ ID NO: 48474 - DNA, 76 bp, Homo sapiens
tcaaaatcaatagaaattaattcatttgcttcacctatagattgcttgttaattgatatattaagtagatttcaat

SEQ ID NO: 48475 - DNA, 73 bp, Homo sapiens
aattcatttgcttcacctatagattgcttgttaattgatatattaagtagatttcaatttgatattttacttt

SEQ ID NO: 48476 - DNA, 72 bp, Homo sapiens
gcttcacctatagattgcttgttaattgatatattaagtagatttcaatttgatattttacttttacaaaaa

SEQ ID NO: 48477 - DNA, 73 bp, Homo sapiens
tgcttgttaattgatatattaagtagatttcaatttgatattttacttttacaaaaaatattgagcatgggta

SEQ ID NO: 48478 - DNA, 69 bp, Homo sapiens
ttaagtagatttcaatttgatattttacttttacaaaaaatattgagcatgggtaacttttagaagtca

SEQ ID NO: 48479 - DNA, 69 bp, Homo sapiens
ttttacttttacaaaaaatattgagcatgggtaacttttagaagtcaacacaaaaatgggagctgttga

SEQ ID NO: 48480 - DNA, 69 bp, Homo sapiens
acaaaaaatattgagcatgggtaacttttagaagtcaacacaaaaatgggagctgttgaaaattttgct

SEQ ID NO: 48481 - DNA, 71 bp, Homo sapiens
atattgagcatgggtaacttttagaagtcaacacaaaaatgggagctgttgaaaattttgctttcaaagag

SEQ ID NO: 48482 - DNA, 66 bp, Homo sapiens
gggtaacttttagaagtcaacacaaaaatgggagctgttgaaaattttgctttcaaagagtttaag

SEQ ID NO: 48483 - DNA, 66 bp, Homo sapiens
ttttagaagtcaacacaaaaatgggagctgttgaaaattttgctttcaaagagtttaaggttaaaa

SEQ ID NO: 48484 - DNA, 65 bp, Homo sapiens
caacacaaaaatgggagctgttgaaaattttgctttcaaagagtttaaggttaaaaaagggtaca

SEQ ID NO: 48485 - DNA, 69 bp, Homo sapiens
gagctgttgaaaattttgctttcaaagagtttaaggttaaaaaagggtacaaactacatgacatgacag

SEQ ID NO: 48486 - DNA, 68 bp, Homo sapiens
gaaaattttgctttcaaagagtttaaggttaaaaaagggtacaaactacatgacatgacagtcattaa

SEQ ID NO: 48487 - DNA, 69 bp, Homo sapiens
gctttcaaagagtttaaggttaaaaaagggtacaaactacatgacatgacagtcattaaattttcagaa

SEQ ID NO: 48488 - DNA, 72 bp, Homo sapiens
taaggttaaaaaagggtacaaactacatgacatgacagtcattaaattttcagaaattatgtatatgcctac

SEQ ID NO: 48489 - DNA, 78 bp, Homo sapiens
caaactacatgacatgacagtcattaaattttcagaaattatgtatatgcctactcaaataactagaagataatacac

SEQ ID NO: 48490 - DNA, 76 bp, Homo sapiens
cagtcattaaattttcagaaattatgtatatgcctactcaaataactagaagataatacactaaaatgcaaactga

SEQ ID NO: 48491 - DNA, 81 bp, Homo sapiens
tgtatatgcctactcaaataactagaagataatacactaaaatgcaaactgattatctctgactcatggccttattagtga

SEQ ID NO: 48492 - DNA, 78 bp, Homo sapiens
actcaaataactagaagataatacactaaaatgcaaactgattatctctgactcatggccttattagtgagatggaac

SEQ ID NO: 48493 - DNA, 80 bp, Homo sapiens
taactagaagataatacactaaaatgcaaactgattatctctgactcatggccttattagtgagatggaactgatttctc

SEQ ID NO: 48494 - DNA, 82 bp, Homo sapiens
aaaatgcaaactgattatctctgactcatggccttattagtgagatggaactgatttctccatcagaaatctaaggctcaga

SEQ ID NO: 48495 - DNA, 82 bp, Homo sapiens
aactgattatctctgactcatggccttattagtgagatggaactgatttctccatcagaaatctaaggctcagagctgttag

SEQ ID NO: 48496 - DNA, 79 bp, Homo sapiens
actcatggccttattagtgagatggaactgatttctccatcagaaatctaaggctcagagctgttaggtgacctaccta

SEQ ID NO: 48497 - DNA, 79 bp, Homo sapiens
ttattagtgagatggaactgatttctccatcagaaatctaaggctcagagctgttaggtgacctacctaaagtctcaca

SEQ ID NO: 48498 - DNA, 78 bp, Homo sapiens
agatggaactgatttctccatcagaaatctaaggctcagagctgttaggtgacctacctaaagtctcacagccagtaa

SEQ ID NO: 48499 - DNA, 78 bp, Homo sapiens
atttctccatcagaaatctaaggctcagagctgttaggtgacctacctaaagtctcacagccagtaagaggctgaatg

SEQ ID NO: 48500 - DNA, 79 bp, Homo sapiens
atcagaaatctaaggctcagagctgttaggtgacctacctaaagtctcacagccagtaagaggctgaatgtgattagaa

SEQ ID NO: 48501 - DNA, 78 bp, Homo sapiens
atctaaggctcagagctgttaggtgacctacctaaagtctcacagccagtaagaggctgaatgtgattagaattcaaa

SEQ ID NO: 48502 - DNA, 78 bp, Homo sapiens
ctgttaggtgacctacctaaagtctcacagccagtaagaggctgaatgtgattagaattcaaattggctcatatccaa

SEQ ID NO: 48503 - DNA, 76 bp, Homo sapiens
aggtgacctacctaaagtctcacagccagtaagaggctgaatgtgattagaattcaaattggctcatatccaaaac

SEQ ID NO: 48504 - DNA, 77 bp, Homo sapiens
cctaaagtctcacagccagtaagaggctgaatgtgattagaattcaaattggctcatatccaaaacccctgctttca

SEQ ID NO: 48505 - DNA, 78 bp, Homo sapiens
ccagtaagaggctgaatgtgattagaattcaaattggctcatatccaaaacccctgctttcagccattatggcttaga

SEQ ID NO: 48506 - DNA, 77 bp, Homo sapiens
aggctgaatgtgattagaattcaaattggctcatatccaaaacccctgctttcagccattatggcttagaataataa

SEQ ID NO: 48507 - DNA, 75 bp, Homo sapiens
aattcaaattggctcatatccaaaacccctgctttcagccattatggcttagaataataattgccaccatttgag

SEQ ID NO: 48508 - DNA, 74 bp, Homo sapiens
ctcatatccaaaacccctgctttcagccattatggcttagaataataattgccaccatttgagttcctaaaatg

SEQ ID NO: 48509 - DNA, 76 bp, Homo sapiens
tcagccattatggcttagaataataattgccaccatttgagttcctaaaatgtgccaaacattataccaatcactt

SEQ ID NO: 48510 - DNA, 73 bp, Homo sapiens
aataattgccaccatttgagttcctaaaatgtgccaaacattataccaatcactttacaatctttgcttcact

SEQ ID NO: 48511 - DNA, 75 bp, Homo sapiens
tgccaccatttgagttcctaaaatgtgccaaacattataccaatcactttacaatctttgcttcacttaatacta

SEQ ID NO: 48512 - DNA, 70 bp, Homo sapiens
cattataccaatcactttacaatctttgcttcacttaatactaataacaatcccataggttaggtatttt

SEQ ID NO: 48513 - DNA, 69 bp, Homo sapiens
ccaatcactttacaatctttgcttcacttaatactaataacaatcccataggttaggtatttttcccat

SEQ ID NO: 48514 - DNA, 69 bp, Homo sapiens
caatctttgcttcacttaatactaataacaatcccataggttaggtatttttcccattccaaagaagtc

SEQ ID NO: 48515 - DNA, 71 bp, Homo sapiens
gcttcacttaatactaataacaatcccataggttaggtatttttcccattccaaagaagtctaatagcagc

SEQ ID NO: 48516 - DNA, 69 bp, Homo sapiens
ctaataacaatcccataggttaggtatttttcccattccaaagaagtctaatagcagcctaaactttga

SEQ ID NO: 48517 - DNA, 70 bp, Homo sapiens
aatcccataggttaggtatttttcccattccaaagaagtctaatagcagcctaaactttgaagcaggaga

SEQ ID NO: 48518 - DNA, 75 bp, Homo sapiens
taggtatttttcccattccaaagaagtctaatagcagcctaaactttgaagcaggagagatggatgatccagaaa

SEQ ID NO: 48519 - DNA, 75 bp, Homo sapiens
ttttcccattccaaagaagtctaatagcagcctaaactttgaagcaggagagatggatgatccagaaagccaaaa

SEQ ID NO: 48520 - DNA, 76 bp, Homo sapiens
aaagaagtctaatagcagcctaaactttgaagcaggagagatggatgatccagaaagccaaaagagggagttcatg

SEQ ID NO: 48521 - DNA, 78 bp, Homo sapiens
taatagcagcctaaactttgaagcaggagagatggatgatccagaaagccaaaagagggagttcatggaaagaagaca

SEQ ID NO: 48522 - DNA, 75 bp, Homo sapiens
taaactttgaagcaggagagatggatgatccagaaagccaaaagagggagttcatggaaagaagacaagttacaa

SEQ ID NO: 48523 - DNA, 75 bp, Homo sapiens
aggagagatggatgatccagaaagccaaaagagggagttcatggaaagaagacaagttacaaagatggaggtatc

SEQ ID NO: 48524 - DNA, 75 bp, Homo sapiens
tggatgatccagaaagccaaaagagggagttcatggaaagaagacaagttacaaagatggaggtatctgtggtaa

SEQ ID NO: 48525 - DNA, 70 bp, Homo sapiens
aaagccaaaagagggagttcatggaaagaagacaagttacaaagatggaggtatctgtggtaaggcgagt

SEQ ID NO: 48526 - DNA, 72 bp, Homo sapiens
gagggagttcatggaaagaagacaagttacaaagatggaggtatctgtggtaaggcgagttggcccatttta

SEQ ID NO: 48527 - DNA, 72 bp, Homo sapiens
atggaaagaagacaagttacaaagatggaggtatctgtggtaaggcgagttggcccattttacactgtcaaa

SEQ ID NO: 48528 - DNA, 69 bp, Homo sapiens
gtatctgtggtaaggcgagttggcccattttacactgtcaaaaataactaaggacataaggggtttgaa

SEQ ID NO: 48529 - DNA, 67 bp, Homo sapiens
taaggcgagttggcccattttacactgtcaaaaataactaaggacataaggggtttgaacaaagtaa

SEQ ID NO: 48530 - DNA, 67 bp, Homo sapiens
tggcccattttacactgtcaaaaataactaaggacataaggggtttgaacaaagtaattaacaagga

SEQ ID NO: 48531 - DNA, 68 bp, Homo sapiens
tacactgtcaaaaataactaaggacataaggggtttgaacaaagtaattaacaaggaaagagtgaaca

SEQ ID NO: 48532 - DNA, 66 bp, Homo sapiens
gtcaaaaataactaaggacataaggggtttgaacaaagtaattaacaaggaaagagtgaacacatt

SEQ ID NO: 48533 - DNA, 67 bp, Homo sapiens
aactaaggacataaggggtttgaacaaagtaattaacaaggaaagagtgaacacatttatgtagaat

SEQ ID NO: 48534 - DNA, 72 bp, Homo sapiens
gggtttgaacaaagtaattaacaaggaaagagtgaacacatttatgtagaatttatatcctacaagcagaca

SEQ ID NO: 48535 - DNA, 73 bp, Homo sapiens
caaagtaattaacaaggaaagagtgaacacatttatgtagaatttatatcctacaagcagacaaaacatcttc

SEQ ID NO: 48536 - DNA, 72 bp, Homo sapiens
aacaaggaaagagtgaacacatttatgtagaatttatatcctacaagcagacaaaacatcttctttttggac

SEQ ID NO: 48537 - DNA, 76 bp, Homo sapiens
gaaagagtgaacacatttatgtagaatttatatcctacaagcagacaaaacatcttctttttggacttacatggca

SEQ ID NO: 48538 - DNA, 74 bp, Homo sapiens
acacatttatgtagaatttatatcctacaagcagacaaaacatcttctttttggacttacatggcattttataa

SEQ ID NO: 48539 - DNA, 74 bp, Homo sapiens
gaatttatatcctacaagcagacaaaacatcttctttttggacttacatggcattttataaatatagttgtgtg

SEQ ID NO: 48540 - DNA, 74 bp, Homo sapiens
gcagacaaaacatcttctttttggacttacatggcattttataaatatagttgtgtgtcacttaataggacagg

SEQ ID NO: 48541 - DNA, 76 bp, Homo sapiens
cttacatggcattttataaatatagttgtgtgtcacttaataggacaggttctgagaaatggattgctaggcaatt

SEQ ID NO: 48542 - DNA, 76 bp, Homo sapiens
ggcattttataaatatagttgtgtgtcacttaataggacaggttctgagaaatggattgctaggcaatttcattgt

SEQ ID NO: 48543 - DNA, 78 bp, Homo sapiens
ataaatatagttgtgtgtcacttaataggacaggttctgagaaatggattgctaggcaatttcattgttgcataaaca

SEQ ID NO: 48544 - DNA, 80 bp, Homo sapiens
ttgtgtgtcacttaataggacaggttctgagaaatggattgctaggcaatttcattgttgcataaacatcagagtgtact

SEQ ID NO: 48545 - DNA, 78 bp, Homo sapiens
cttaataggacaggttctgagaaatggattgctaggcaatttcattgttgcataaacatcagagtgtacttacacaaa

SEQ ID NO: 48546 - DNA, 77 bp, Homo sapiens
acaaacctagatattagcctactgcatacccaggctatgtggtatagcctgttgcttctaggctacaaacttatatg

SEQ ID NO: 48547 - DNA, 82 bp, Homo sapiens
tagatattagcctactgcatacccaggctatgtggtatagcctgttgcttctaggctacaaacttatatggcatgtattata

SEQ ID NO: 48548 - DNA, 81 bp, Homo sapiens
ctactgcatacccaggctatgtggtatagcctgttgcttctaggctacaaacttatatggcatgtattatactgaatactg

SEQ ID NO: 48549 - DNA, 73 bp, Homo sapiens
tgtaacacaatagtaagtatttgtatatctgaacatattgaaatatagaaaaagtacagtagaaaaccagaac

SEQ ID NO: 48550 - DNA, 75 bp, Homo sapiens
ttgtatatctgaacatattgaaatatagaaaaagtacagtagaaaaccagaactataatcttttggatcattgtc

SEQ ID NO: 48551 - DNA, 74 bp, Homo sapiens
gaacatattgaaatatagaaaaagtacagtagaaaaccagaactataatcttttggatcattgtccatcttgac

SEQ ID NO: 48552 - DNA, 72 bp, Homo sapiens
gaaatatagaaaaagtacagtagaaaaccagaactataatcttttggatcattgtccatcttgaccaaaatg

SEQ ID NO: 48553 - DNA, 76 bp, Homo sapiens
aaagtacagtagaaaaccagaactataatcttttggatcattgtccatcttgaccaaaatgttgttatgcagcaca

SEQ ID NO: 48554 - DNA, 80 bp, Homo sapiens
tagaaaaccagaactataatcttttggatcattgtccatcttgaccaaaatgttgttatgcagcacatgactgtactaca

SEQ ID NO: 48555 - DNA, 84 bp, Homo sapiens
agaactataatcttttggatcattgtccatcttgaccaaaatgttgttatgcagcacatgactgtactacactctctgatcaca

SEQ ID NO: 48556 - DNA, 84 bp, Homo sapiens
actataatcttttggatcattgtccatcttgaccaaaatgttgttatgcagcacatgactgtactacactctctgatcacacta

SEQ ID NO: 48557 - DNA, 82 bp, Homo sapiens
ttttggatcattgtccatcttgaccaaaatgttgttatgcagcacatgactgtactacactctctgatcacactaggctttt

SEQ ID NO: 48558 - DNA, 81 bp, Homo sapiens
attgtccatcttgaccaaaatgttgttatgcagcacatgactgtactacactctctgatcacactaggctttttccaaata

SEQ ID NO: 48559 - DNA, 81 bp, Homo sapiens
catcttgaccaaaatgttgttatgcagcacatgactgtactacactctctgatcacactaggctttttccaaatatgcttt

SEQ ID NO: 48560 - DNA, 80 bp, Homo sapiens
tgaccaaaatgttgttatgcagcacatgactgtactacactctctgatcacactaggctttttccaaatatgctttttct

SEQ ID NO: 48561 - DNA, 78 bp, Homo sapiens
aaaatgttgttatgcagcacatgactgtactacactctctgatcacactaggctttttccaaatatgctttttcttcc

SEQ ID NO: 48562 - DNA, 81 bp, Homo sapiens
ttgttatgcagcacatgactgtactacactctctgatcacactaggctttttccaaatatgctttttcttcccttgagctg

SEQ ID NO: 48563 - DNA, 82 bp, Homo sapiens
cagcacatgactgtactacactctctgatcacactaggctttttccaaatatgctttttcttcccttgagctggcacatgga

SEQ ID NO: 48564 - DNA, 80 bp, Homo sapiens
tactacactctctgatcacactaggctttttccaaatatgctttttcttcccttgagctggcacatggatgtcacagtaa

SEQ ID NO: 48565 - DNA, 79 bp, Homo sapiens
tgatcacactaggctttttccaaatatgctttttcttcccttgagctggcacatggatgtcacagtaatcccattttga

SEQ ID NO: 48566 - DNA, 76 bp, Homo sapiens
taggctttttccaaatatgctttttcttcccttgagctggcacatggatgtcacagtaatcccattttgacaatac

SEQ ID NO: 48567 - DNA, 78 bp, Homo sapiens
aaatatgctttttcttcccttgagctggcacatggatgtcacagtaatcccattttgacaatacgtacatgaacaaca

SEQ ID NO: 48568 - DNA, 78 bp, Homo sapiens
tttcttcccttgagctggcacatggatgtcacagtaatcccattttgacaatacgtacatgaacaacagcctagggta

SEQ ID NO: 48569 - DNA, 75 bp, Homo sapiens
atgtcacagtaatcccattttgacaatacgtacatgaacaacagcctagggtatggtggaacaacaatatagaag

SEQ ID NO: 48570 - DNA, 74 bp, Homo sapiens
atcccattttgacaatacgtacatgaacaacagcctagggtatggtggaacaacaatatagaaggcattagatt

SEQ ID NO: 48571 - DNA, 78 bp, Homo sapiens
aatacgtacatgaacaacagcctagggtatggtggaacaacaatatagaaggcattagatttgcatgagcaactccaa

SEQ ID NO: 48572 - DNA, 77 bp, Homo sapiens
atgaacaacagcctagggtatggtggaacaacaatatagaaggcattagatttgcatgagcaactccaaaacctgta

SEQ ID NO: 48573 - DNA, 76 bp, Homo sapiens
ctagggtatggtggaacaacaatatagaaggcattagatttgcatgagcaactccaaaacctgtactacctacatc

SEQ ID NO: 48574 - DNA, 78 bp, Homo sapiens
tatggtggaacaacaatatagaaggcattagatttgcatgagcaactccaaaacctgtactacctacatccctctaga

SEQ ID NO: 48575 - DNA, 78 bp, Homo sapiens
aacaatatagaaggcattagatttgcatgagcaactccaaaacctgtactacctacatccctctagactgctgcttaa

SEQ ID NO: 48576 - DNA, 77 bp, Homo sapiens
aaggcattagatttgcatgagcaactccaaaacctgtactacctacatccctctagactgctgcttaagagaaataa

SEQ ID NO: 48577 - DNA, 75 bp, Homo sapiens
agatttgcatgagcaactccaaaacctgtactacctacatccctctagactgctgcttaagagaaataaacttcg

SEQ ID NO: 48578 - DNA, 71 bp, Homo sapiens
actccaaaacctgtactacctacatccctctagactgctgcttaagagaaataaacttcggtctcatttaa

SEQ ID NO: 48579 - DNA, 72 bp, Homo sapiens
aaaacctgtactacctacatccctctagactgctgcttaagagaaataaacttcggtctcatttaatccatg

SEQ ID NO: 48580 - DNA, 76 bp, Homo sapiens
ctctagactgctgcttaagagaaataaacttcggtctcatttaatccatggtgcttgggggctgtctgtaacaata

SEQ ID NO: 48581 - DNA, 71 bp, Homo sapiens
cttaagagaaataaacttcggtctcatttaatccatggtgcttgggggctgtctgtaacaatagcttactt

SEQ ID NO: 48582 - DNA, 76 bp, Homo sapiens
ttcggtctcatttaatccatggtgcttgggggctgtctgtaacaatagcttactttgtaccctgtttgcatagcca

SEQ ID NO: 48583 - DNA, 74 bp, Homo sapiens
atttaatccatggtgcttgggggctgtctgtaacaatagcttactttgtaccctgtttgcatagccaccactcc

SEQ ID NO: 48584 - DNA, 75 bp, Homo sapiens
tgtctgtaacaatagcttactttgtaccctgtttgcatagccaccactcctccacataaacccaagttagagtca

SEQ ID NO: 48585 - DNA, 75 bp, Homo sapiens
taacaatagcttactttgtaccctgtttgcatagccaccactcctccacataaacccaagttagagtcacagtga

SEQ ID NO: 48586 - DNA, 73 bp, Homo sapiens
ttactttgtaccctgtttgcatagccaccactcctccacataaacccaagttagagtcacagtgaaccagaac

SEQ ID NO: 48587 - DNA, 76 bp, Homo sapiens
tgtttgcatagccaccactcctccacataaacccaagttagagtcacagtgaaccagaactccaaattcattatgt

SEQ ID NO: 48588 - DNA, 73 bp, Homo sapiens
caccactcctccacataaacccaagttagagtcacagtgaaccagaactccaaattcattatgttcttcttgt

SEQ ID NO: 48589 - DNA, 74 bp, Homo sapiens
tccacataaacccaagttagagtcacagtgaaccagaactccaaattcattatgttcttcttgtttccatgtct

SEQ ID NO: 48590 - DNA, 77 bp, Homo sapiens
ttagagtcacagtgaaccagaactccaaattcattatgttcttcttgtttccatgtcttgatacctgtgttggtatc

SEQ ID NO: 48591 - DNA, 77 bp, Homo sapiens
agtgaaccagaactccaaattcattatgttcttcttgtttccatgtcttgatacctgtgttggtatctgcaatgacc

SEQ ID NO: 48592 - DNA, 76 bp, Homo sapiens
actccaaattcattatgttcttcttgtttccatgtcttgatacctgtgttggtatctgcaatgacccatgcccctt

SEQ ID NO: 48593 - DNA, 77 bp, Homo sapiens
attatgttcttcttgtttccatgtcttgatacctgtgttggtatctgcaatgacccatgcccctttctcactatttc

SEQ ID NO: 48594 - DNA, 76 bp, Homo sapiens
ttcttgtttccatgtcttgatacctgtgttggtatctgcaatgacccatgcccctttctcactatttcccttgccc

SEQ ID NO: 48595 - DNA, 76 bp, Homo sapiens
atgtcttgatacctgtgttggtatctgcaatgacccatgcccctttctcactatttcccttgccccttccagtcta

SEQ ID NO: 48596 - DNA, 76 bp, Homo sapiens
atacctgtgttggtatctgcaatgacccatgcccctttctcactatttcccttgccccttccagtctatgtgacca

SEQ ID NO: 48597 - DNA, 77 bp, Homo sapiens
tatctgcaatgacccatgcccctttctcactatttcccttgccccttccagtctatgtgaccaactctgattcacct

SEQ ID NO: 48598 - DNA, 74 bp, Homo sapiens
aatgacccatgcccctttctcactatttcccttgccccttccagtctatgtgaccaactctgattcaccttcta

SEQ ID NO: 48599 - DNA, 76 bp, Homo sapiens
tttctcactatttcccttgccccttccagtctatgtgaccaactctgattcaccttctagattcattcctgactac

SEQ ID NO: 48600 - DNA, 76 bp, Homo sapiens
actatttcccttgccccttccagtctatgtgaccaactctgattcaccttctagattcattcctgactactctatc

SEQ ID NO: 48601 - DNA, 78 bp, Homo sapiens
cccttccagtctatgtgaccaactctgattcaccttctagattcattcctgactactctatcgctatccccccagcca

SEQ ID NO: 48602 - DNA, 80 bp, Homo sapiens
aactctgattcaccttctagattcattcctgactactctatcgctatccccccagccacatgtgactcaggtacatcctc

SEQ ID NO: 48603 - DNA, 78 bp, Homo sapiens
attcaccttctagattcattcctgactactctatcgctatccccccagccacatgtgactcaggtacatcctcttgtt

SEQ ID NO: 48604 - DNA, 79 bp, Homo sapiens
agcacacagggcacctctgactcccgcttcgctttcctcccagcagatctccgaagacctgggcagtgagaagttctgc

SEQ ID NO: 48605 - DNA, 80 bp, Homo sapiens
gcacctctgactcccgcttcgctttcctcccagcagatctccgaagacctgggcagtgagaagttctgcgtggatgcaaa

SEQ ID NO: 48606 - DNA, 81 bp, Homo sapiens
tctgactcccgcttcgctttcctcccagcagatctccgaagacctgggcagtgagaagttctgcgtggatgcaaatcaggc

SEQ ID NO: 48607 - DNA, 78 bp, Homo sapiens
cttcgctttcctcccagcagatctccgaagacctgggcagtgagaagttctgcgtggatgcaaatcaggcgggggctg

SEQ ID NO: 48608 - DNA, 84 bp, Homo sapiens
cagcagatctccgaagacctgggcagtgagaagttctgcgtggatgcaaatcaggcgggggctggcagctggctcaagtacatc

SEQ ID NO: 48609 - DNA, 80 bp, Homo sapiens
atctccgaagacctgggcagtgagaagttctgcgtggatgcaaatcaggcgggggctggcagctggctcaagtacatccg

SEQ ID NO: 48610 - DNA, 85 bp, Homo sapiens
tgggcagtgagaagttctgcgtggatgcaaatcaggcgggggctggcagctggctcaagtacatccgtgtggcgtgctcctgcga

SEQ ID NO: 48611 - DNA, 83 bp, Homo sapiens
aagttctgcgtggatgcaaatcaggcgggggctggcagctggctcaagtacatccgtgtggcgtgctcctgcgatgaccagaa

SEQ ID NO: 48612 - DNA, 85 bp, Homo sapiens
tggatgcaaatcaggcgggggctggcagctggctcaagtacatccgtgtggcgtgctcctgcgatgaccagaacctcaccatgtg

SEQ ID NO: 48613 - DNA, 83 bp, Homo sapiens
aaatcaggcgggggctggcagctggctcaagtacatccgtgtggcgtgctcctgcgatgaccagaacctcaccatgtgtcaga

SEQ ID NO: 48614 - DNA, 88 bp, Homo sapiens
gctggcagctggctcaagtacatccgtgtggcgtgctcctgcgatgaccagaacctcaccatgtgtcagatcagtgagcaggtaggtc

SEQ ID NO: 48615 - DNA, 84 bp, Homo sapiens
agctggctcaagtacatccgtgtggcgtgctcctgcgatgaccagaacctcaccatgtgtcagatcagtgagcaggtaggtccg

SEQ ID NO: 48616 - DNA, 83 bp, Homo sapiens
aagtacatccgtgtggcgtgctcctgcgatgaccagaacctcaccatgtgtcagatcagtgagcaggtaggtccgggctcata

SEQ ID NO: 48617 - DNA, 83 bp, Homo sapiens
tgtggcgtgctcctgcgatgaccagaacctcaccatgtgtcagatcagtgagcaggtaggtccgggctcataacaggggcttc

SEQ ID NO: 48618 - DNA, 81 bp, Homo sapiens
ctcctgcgatgaccagaacctcaccatgtgtcagatcagtgagcaggtaggtccgggctcataacaggggcttctgcctct

SEQ ID NO: 48619 - DNA, 77 bp, Homo sapiens
tctggattggtcgcgaacgcggcttccccgcccatcccgccattaggagcgctcccattggctgatgttggcgcgaa

SEQ ID NO: 48620 - DNA, 77 bp, Homo sapiens
cgaacgcggcttccccgcccatcccgccattaggagcgctcccattggctgatgttggcgcgaaggtgcgcgagtca

SEQ ID NO: 48621 - DNA, 79 bp, Homo sapiens
ttccccgcccatcccgccattaggagcgctcccattggctgatgttggcgcgaaggtgcgcgagtcagccctcgcgctg

SEQ ID NO: 48622 - DNA, 80 bp, Homo sapiens
atcccgccattaggagcgctcccattggctgatgttggcgcgaaggtgcgcgagtcagccctcgcgctgggggcgcagga

SEQ ID NO: 48623 - DNA, 79 bp, Homo sapiens
attaggagcgctcccattggctgatgttggcgcgaaggtgcgcgagtcagccctcgcgctgggggcgcaggaaacaata

SEQ ID NO: 48624 - DNA, 81 bp, Homo sapiens
ccattggctgatgttggcgcgaaggtgcgcgagtcagccctcgcgctgggggcgcaggaaacaatagaggccgcgcgcaca

SEQ ID NO: 48625 - DNA, 83 bp, Homo sapiens
tgatgttggcgcgaaggtgcgcgagtcagccctcgcgctgggggcgcaggaaacaatagaggccgcgcgcacagagcgagctc

SEQ ID NO: 48626 - DNA, 82 bp, Homo sapiens
cgcgaaggtgcgcgagtcagccctcgcgctgggggcgcaggaaacaatagaggccgcgcgcacagagcgagctcttgcagcc

SEQ ID NO: 48627 - DNA, 82 bp, Homo sapiens
tgcgcgagtcagccctcgcgctgggggcgcaggaaacaatagaggccgcgcgcacagagcgagctcttgcagcctccccgcc

SEQ ID NO: 48628 - DNA, 77 bp, Homo sapiens
agccctcgcgctgggggcgcaggaaacaatagaggccgcgcgcacagagcgagctcttgcagcctccccgcccctcc

SEQ ID NO: 48629 - DNA, 77 bp, Homo sapiens
ggcgcaggaaacaatagaggccgcgcgcacagagcgagctcttgcagcctccccgcccctcccgcaacgctcgaccc

SEQ ID NO: 48630 - DNA, 75 bp, Homo sapiens
aaacaatagaggccgcgcgcacagagcgagctcttgcagcctccccgcccctcccgcaacgctcgaccccaggat

SEQ ID NO: 48631 - DNA, 74 bp, Homo sapiens
agaggccgcgcgcacagagcgagctcttgcagcctccccgcccctcccgcaacgctcgaccccaggattccccc

SEQ ID NO: 48632 - DNA, 73 bp, Homo sapiens
acagagcgagctcttgcagcctccccgcccctcccgcaacgctcgaccccaggattcccccggctcgcctgcc

SEQ ID NO: 48633 - DNA, 72 bp, Homo sapiens
agctcttgcagcctccccgcccctcccgcaacgctcgaccccaggattcccccggctcgcctgcccgccatg

SEQ ID NO: 48634 - DNA, 70 bp, Homo sapiens
tccccgcccctcccgcaacgctcgaccccaggattcccccggctcgcctgcccgccatggccgacaagga

SEQ ID NO: 48635 - DNA, 70 bp, Homo sapiens
ccctcccgcaacgctcgaccccaggattcccccggctcgcctgcccgccatggccgacaaggaaggtgag

SEQ ID NO: 48636 - DNA, 69 bp, Homo sapiens
aacgctcgaccccaggattcccccggctcgcctgcccgccatggccgacaaggaaggtgagggtgccgg

SEQ ID NO: 48637 - DNA, 69 bp, Homo sapiens
aggattcccccggctcgcctgcccgccatggccgacaaggaaggtgagggtgccggggccgacccagga

SEQ ID NO: 48638 - DNA, 70 bp, Homo sapiens
cccggctcgcctgcccgccatggccgacaaggaaggtgagggtgccggggccgacccaggagggcagtgg

SEQ ID NO: 48639 - DNA, 73 bp, Homo sapiens
ctgcccgccatggccgacaaggaaggtgagggtgccggggccgacccaggagggcagtgggtgcctgggctga

SEQ ID NO: 48640 - DNA, 72 bp, Homo sapiens
atggccgacaaggaaggtgagggtgccggggccgacccaggagggcagtgggtgcctgggctgagccgcggc

SEQ ID NO: 48641 - DNA, 72 bp, Homo sapiens
aaggaaggtgagggtgccggggccgacccaggagggcagtgggtgcctgggctgagccgcggcctcgacatg

SEQ ID NO: 48642 - DNA, 73 bp, Homo sapiens
aggtgagggtgccggggccgacccaggagggcagtgggtgcctgggctgagccgcggcctcgacatggcctaa

SEQ ID NO: 48643 - DNA, 76 bp, Homo sapiens
tgagggtgccggggccgacccaggagggcagtgggtgcctgggctgagccgcggcctcgacatggcctaacagtga

SEQ ID NO: 48644 - DNA, 75 bp, Homo sapiens
cgacccaggagggcagtgggtgcctgggctgagccgcggcctcgacatggcctaacagtgagggcaggcccgagt

SEQ ID NO: 48645 - DNA, 78 bp, Homo sapiens
agggcagtgggtgcctgggctgagccgcggcctcgacatggcctaacagtgagggcaggcccgagtttgccgagtgca

SEQ ID NO: 48646 - DNA, 77 bp, Homo sapiens
gtgggtgcctgggctgagccgcggcctcgacatggcctaacagtgagggcaggcccgagtttgccgagtgcagtccc

SEQ ID NO: 48647 - DNA, 75 bp, Homo sapiens
ctgagccgcggcctcgacatggcctaacagtgagggcaggcccgagtttgccgagtgcagtccccggtactgaag

SEQ ID NO: 48648 - DNA, 74 bp, Homo sapiens
cctcgacatggcctaacagtgagggcaggcccgagtttgccgagtgcagtccccggtactgaaggcgtgaagag

SEQ ID NO: 48649 - DNA, 72 bp, Homo sapiens
atggcctaacagtgagggcaggcccgagtttgccgagtgcagtccccggtactgaaggcgtgaagagggaac

SEQ ID NO: 48650 - DNA, 68 bp, Homo sapiens
agggcaggcccgagtttgccgagtgcagtccccggtactgaaggcgtgaagagggaactccccgcggg

SEQ ID NO: 48651 - DNA, 69 bp, Homo sapiens
cgagtttgccgagtgcagtccccggtactgaaggcgtgaagagggaactccccgcggggcgtgctaacg

SEQ ID NO: 48652 - DNA, 70 bp, Homo sapiens
atttgtttttaaaaattttagcagccttcgacgacgcagtggaagaacgagtgatcaacgaggaatacaa

SEQ ID NO: 48653 - DNA, 71 bp, Homo sapiens
aaaaattttagcagccttcgacgacgcagtggaagaacgagtgatcaacgaggaatacaaaatatggaaaa

SEQ ID NO: 48654 - DNA, 73 bp, Homo sapiens
ttttagcagccttcgacgacgcagtggaagaacgagtgatcaacgaggaatacaaaatatggaaaaagaacac

SEQ ID NO: 48655 - DNA, 70 bp, Homo sapiens
ttcgacgacgcagtggaagaacgagtgatcaacgaggaatacaaaatatggaaaaagaacaccccttttc

SEQ ID NO: 48656 - DNA, 69 bp, Homo sapiens
cagtggaagaacgagtgatcaacgaggaatacaaaatatggaaaaagaacaccccttttctttatgatt

SEQ ID NO: 48657 - DNA, 70 bp, Homo sapiens
aacgagtgatcaacgaggaatacaaaatatggaaaaagaacaccccttttctttatgatttggtgatgac

SEQ ID NO: 48658 - DNA, 71 bp, Homo sapiens
aacgaggaatacaaaatatggaaaaagaacaccccttttctttatgatttggtgatgacccatgctctgga

SEQ ID NO: 48659 - DNA, 73 bp, Homo sapiens
tacaaaatatggaaaaagaacaccccttttctttatgatttggtgatgacccatgctctggagtggcccagcc

SEQ ID NO: 48660 - DNA, 76 bp, Homo sapiens
gagtggcccagcctaactgcccagtggcttccagatgtaaccaggtgacatgactctcccgaacgttattttgatg

SEQ ID NO: 48661 - DNA, 74 bp, Homo sapiens
ccagcctaactgcccagtggcttccagatgtaaccaggtgacatgactctcccgaacgttattttgatgtattt

SEQ ID NO: 48662 - DNA, 79 bp, Homo sapiens
tctcctgatgttactaatttgaacagtgactatatattgccgttacagaccagaagggaaagatttcagcattcatcga

SEQ ID NO: 48663 - DNA, 76 bp, Homo sapiens
atgttactaatttgaacagtgactatatattgccgttacagaccagaagggaaagatttcagcattcatcgacttg

SEQ ID NO: 48664 - DNA, 78 bp, Homo sapiens
ggaaagatttcagcattcatcgacttgtcctggggacacacacatcggatgaacaaaaccatcttgttatagccagtg

SEQ ID NO: 48665 - DNA, 81 bp, Homo sapiens
atttcagcattcatcgacttgtcctggggacacacacatcggatgaacaaaaccatcttgttatagccagtgtgcagctcc

SEQ ID NO: 48666 - DNA, 82 bp, Homo sapiens
atcgacttgtcctggggacacacacatcggatgaacaaaaccatcttgttatagccagtgtgcagctccctaatgatgatgc

SEQ ID NO: 48667 - DNA, 85 bp, Homo sapiens
ggggacacacacatcggatgaacaaaaccatcttgttatagccagtgtgcagctccctaatgatgatgctcagtttgatgcgtca

SEQ ID NO: 48668 - DNA, 85 bp, Homo sapiens
acacacatcggatgaacaaaaccatcttgttatagccagtgtgcagctccctaatgatgatgctcagtttgatgcgtcacactac

SEQ ID NO: 48669 - DNA, 83 bp, Homo sapiens
aacaaaaccatcttgttatagccagtgtgcagctccctaatgatgatgctcagtttgatgcgtcacactacgacagtgagaaa

SEQ ID NO: 48670 - DNA, 83 bp, Homo sapiens
aaccatcttgttatagccagtgtgcagctccctaatgatgatgctcagtttgatgcgtcacactacgacagtgagaaaggagg

SEQ ID NO: 48671 - DNA, 82 bp, Homo sapiens
gccagtgtgcagctccctaatgatgatgctcagtttgatgcgtcacactacgacagtgagaaaggaggtaggaatcttaaag

SEQ ID NO: 48672 - DNA, 78 bp, Homo sapiens
agctccctaatgatgatgctcagtttgatgcgtcacactacgacagtgagaaaggaggtaggaatcttaaaggtgaaa

SEQ ID NO: 48673 - DNA, 78 bp, Homo sapiens
taatgatgatgctcagtttgatgcgtcacactacgacagtgagaaaggaggtaggaatcttaaaggtgaaagaagtaa

SEQ ID NO: 48674 - DNA, 75 bp, Homo sapiens
atgctcagtttgatgcgtcacactacgacagtgagaaaggaggtaggaatcttaaaggtgaaagaagtaaagatg

SEQ ID NO: 48675 - DNA, 72 bp, Homo sapiens
accaacaaaccacactcaccctttctctctggtctctccatcctagatttactataaagtcattaaggacat

SEQ ID NO: 48676 - DNA, 74 bp, Homo sapiens
aaaccacactcaccctttctctctggtctctccatcctagatttactataaagtcattaaggacattgagccag

SEQ ID NO: 48677 - DNA, 77 bp, Homo sapiens
accctttctctctggtctctccatcctagatttactataaagtcattaaggacattgagccaggtgaggagctgctg

SEQ ID NO: 48678 - DNA, 80 bp, Homo sapiens
tggtctctccatcctagatttactataaagtcattaaggacattgagccaggtgaggagctgctggtgcacgtgaaggaa

SEQ ID NO: 48679 - DNA, 78 bp, Homo sapiens
atcctagatttactataaagtcattaaggacattgagccaggtgaggagctgctggtgcacgtgaaggaaggcgtcta

SEQ ID NO: 48680 - DNA, 75 bp, Homo sapiens
atttactataaagtcattaaggacattgagccaggtgaggagctgctggtgcacgtgaaggaaggcgtctacccc

SEQ ID NO: 48681 - DNA, 76 bp, Homo sapiens
aaagtcattaaggacattgagccaggtgaggagctgctggtgcacgtgaaggaaggcgtctaccccctgggcacag

SEQ ID NO: 48682 - DNA, 77 bp, Homo sapiens
attgagccaggtgaggagctgctggtgcacgtgaaggaaggcgtctaccccctgggcacagtgccgcccggcctgga

SEQ ID NO: 48683 - DNA, 75 bp, Homo sapiens
gtgaggagctgctggtgcacgtgaaggaaggcgtctaccccctgggcacagtgccgcccggcctggacggtaaga

SEQ ID NO: 48684 - DNA, 72 bp, Homo sapiens
agctgctggtgcacgtgaaggaaggcgtctaccccctgggcacagtgccgcccggcctggacggtaagaccc

SEQ ID NO: 48685 - DNA, 66 bp, Homo sapiens
acgtgaaggaaggcgtctaccccctgggcacagtgccgcccggcctggacggtaagacccctcccc

SEQ ID NO: 48686 - DNA, 64 bp, Homo sapiens
aaggcgtctaccccctgggcacagtgccgcccggcctggacggtaagacccctcccccaaaccg

SEQ ID NO: 48687 - DNA, 72 bp, Homo sapiens
ctctagagtagctcttgttttgtcctcatttgcaattaatttattcacagaatttggaggttttggttcagt

SEQ ID NO: 48688 - DNA, 71 bp, Homo sapiens
agctcttgttttgtcctcatttgcaattaatttattcacagaatttggaggttttggttcagttagtggaa

SEQ ID NO: 48689 - DNA, 70 bp, Homo sapiens
ttgtcctcatttgcaattaatttattcacagaatttggaggttttggttcagttagtggaaaaattgaaa

SEQ ID NO: 48690 - DNA, 70 bp, Homo sapiens
gcaattaatttattcacagaatttggaggttttggttcagttagtggaaaaattgaaatagaaatcaaga

SEQ ID NO: 48691 - DNA, 72 bp, Homo sapiens
tattcacagaatttggaggttttggttcagttagtggaaaaattgaaatagaaatcaagatcaaccatgaag

SEQ ID NO: 48692 - DNA, 72 bp, Homo sapiens
ttgaaatagaaatcaagatcaaccatgaaggagaagtaaacagggcccgttatatgccccagaacccttgta

SEQ ID NO: 48693 - DNA, 74 bp, Homo sapiens
atcaagatcaaccatgaaggagaagtaaacagggcccgttatatgccccagaacccttgtatcatcgcaacaaa

SEQ ID NO: 48694 - DNA, 73 bp, Homo sapiens
atcaaccatgaaggagaagtaaacagggcccgttatatgccccagaacccttgtatcatcgcaacaaagactc

SEQ ID NO: 48695 - DNA, 72 bp, Homo sapiens
agaagtaaacagggcccgttatatgccccagaacccttgtatcatcgcaacaaagactccttccagtgatgt

SEQ ID NO: 48696 - DNA, 73 bp, Homo sapiens
taaacagggcccgttatatgccccagaacccttgtatcatcgcaacaaagactccttccagtgatgttcttgt

SEQ ID NO: 48697 - DNA, 74 bp, Homo sapiens
ccgttatatgccccagaacccttgtatcatcgcaacaaagactccttccagtgatgttcttgtttttgactata

SEQ ID NO: 48698 - DNA, 73 bp, Homo sapiens
agaacccttgtatcatcgcaacaaagactccttccagtgatgttcttgtttttgactatacaaaacatccttc

SEQ ID NO: 48699 - DNA, 74 bp, Homo sapiens
cttgtatcatcgcaacaaagactccttccagtgatgttcttgtttttgactatacaaaacatccttctaaacca

SEQ ID NO: 48700 - DNA, 71 bp, Homo sapiens
aacaaagactccttccagtgatgttcttgtttttgactatacaaaacatccttctaaaccaggtatgtgcc

SEQ ID NO: 48701 - DNA, 72 bp, Homo sapiens
ttccagtgatgttcttgtttttgactatacaaaacatccttctaaaccaggtatgtgcccttttctattcaa

SEQ ID NO: 48702 - DNA, 71 bp, Homo sapiens
gatgttcttgtttttgactatacaaaacatccttctaaaccaggtatgtgcccttttctattcaaatacaa

SEQ ID NO: 48703 - DNA, 82 bp, Homo sapiens
ccagagagccagtggactgggtagtcttgatgtgtctgtcactttgcagatccttctggagagtgcaacccagacttgcgtc

SEQ ID NO: 48704 - DNA, 83 bp, Homo sapiens
tggactgggtagtcttgatgtgtctgtcactttgcagatccttctggagagtgcaacccagacttgcgtctccgtggacatca

SEQ ID NO: 48705 - DNA, 82 bp, Homo sapiens
gtagtcttgatgtgtctgtcactttgcagatccttctggagagtgcaacccagacttgcgtctccgtggacatcagaaggaa

SEQ ID NO: 48706 - DNA, 81 bp, Homo sapiens
atgtgtctgtcactttgcagatccttctggagagtgcaacccagacttgcgtctccgtggacatcagaaggaaggctatgg

SEQ ID NO: 48707 - DNA, 77 bp, Homo sapiens
actttgcagatccttctggagagtgcaacccagacttgcgtctccgtggacatcagaaggaaggctatgggctttct

SEQ ID NO: 48708 - DNA, 77 bp, Homo sapiens
ttggaacccaaatctcagtgggcacttacttagtgcttcagatgaccatgtgtgtatccttcccattttgaagcaaa

SEQ ID NO: 48709 - DNA, 74 bp, Homo sapiens
gaggtgagaatcttccttttatataatggttaattttacatttaagaccatctgcctgtgggacatcagtgccg

SEQ ID NO: 48710 - DNA, 72 bp, Homo sapiens
atcttccttttatataatggttaattttacatttaagaccatctgcctgtgggacatcagtgccgttccaaa

SEQ ID NO: 48711 - DNA, 72 bp, Homo sapiens
ttttatataatggttaattttacatttaagaccatctgcctgtgggacatcagtgccgttccaaaggaggga

SEQ ID NO: 48712 - DNA, 71 bp, Homo sapiens
gttaattttacatttaagaccatctgcctgtgggacatcagtgccgttccaaaggagggaaaagtggtaga

SEQ ID NO: 48713 - DNA, 74 bp, Homo sapiens
tttaagaccatctgcctgtgggacatcagtgccgttccaaaggagggaaaagtggtagatgcgaagaccatctt

SEQ ID NO: 48714 - DNA, 76 bp, Homo sapiens
atctgcctgtgggacatcagtgccgttccaaaggagggaaaagtggtagatgcgaagaccatctttacagggcata

SEQ ID NO: 48715 - DNA, 75 bp, Homo sapiens
tgggacatcagtgccgttccaaaggagggaaaagtggtagatgcgaagaccatctttacagggcatacggcagta

SEQ ID NO: 48716 - DNA, 72 bp, Homo sapiens
agtgccgttccaaaggagggaaaagtggtagatgcgaagaccatctttacagggcatacggcagtagtagaa

SEQ ID NO: 48717 - DNA, 72 bp, Homo sapiens
aaaggagggaaaagtggtagatgcgaagaccatctttacagggcatacggcagtagtagaagatgtttcctg

SEQ ID NO: 48718 - DNA, 78 bp, Homo sapiens
aaaagtggtagatgcgaagaccatctttacagggcatacggcagtagtagaagatgtttcctggcatctactccatga

SEQ ID NO: 48719 - DNA, 81 bp, Homo sapiens
tagatgcgaagaccatctttacagggcatacggcagtagtagaagatgtttcctggcatctactccatgagtctctgtttg

SEQ ID NO: 48720 - DNA, 77 bp, Homo sapiens
accatctttacagggcatacggcagtagtagaagatgtttcctggcatctactccatgagtctctgtttgggtcagt

SEQ ID NO: 48721 - DNA, 82 bp, Homo sapiens
agggcatacggcagtagtagaagatgtttcctggcatctactccatgagtctctgtttgggtcagttgctgatgatcagaaa

SEQ ID NO: 48722 - DNA, 82 bp, Homo sapiens
gtctctgtttgggtcagttgctgatgatcagaaacttatgatgtgagtagaatccattcagagtttctaaatatcttgtcta

SEQ ID NO: 48723 - DNA, 65 bp, Homo sapiens
tttttcctttgtttttttttcactgaagttgggatactcgttcaaacaatacttccaaaccaagc

SEQ ID NO: 48724 - DNA, 73 bp, Homo sapiens
ttttttttcactgaagttgggatactcgttcaaacaatacttccaaaccaagccactcagttgatgctcacac

SEQ ID NO: 48725 - DNA, 79 bp, Homo sapiens
tttcactgaagttgggatactcgttcaaacaatacttccaaaccaagccactcagttgatgctcacactgctgaagtga

SEQ ID NO: 48726 - DNA, 77 bp, Homo sapiens
ggatactcgttcaaacaatacttccaaaccaagccactcagttgatgctcacactgctgaagtgaactgcctttctt

SEQ ID NO: 48727 - DNA, 79 bp, Homo sapiens
tcaaacaatacttccaaaccaagccactcagttgatgctcacactgctgaagtgaactgcctttctttcaatccttata

SEQ ID NO: 48728 - DNA, 78 bp, Homo sapiens
atacttccaaaccaagccactcagttgatgctcacactgctgaagtgaactgcctttctttcaatccttatagtgagt

SEQ ID NO: 48729 - DNA, 81 bp, Homo sapiens
aaccaagccactcagttgatgctcacactgctgaagtgaactgcctttctttcaatccttatagtgagttcattcttgcca

SEQ ID NO: 48730 - DNA, 74 bp, Homo sapiens
aatccttatagtgagttcattcttgccacaggatcagctgacaaggtcagtttcgtttattttaatagaaaaca

SEQ ID NO: 48731 - DNA, 71 bp, Homo sapiens
ttttttcttaaaaaattgattactcttgcttttctttttgtacatagactgttgccttgtgggatctgaga

SEQ ID NO: 48732 - DNA, 72 bp, Homo sapiens
aaaaattgattactcttgcttttctttttgtacatagactgttgccttgtgggatctgagaaatctgaaact

SEQ ID NO: 48733 - DNA, 77 bp, Homo sapiens
actgttgccttgtgggatctgagaaatctgaaacttaagttgcattcctttgagtcacataaggatgaaatattcca

SEQ ID NO: 48734 - DNA, 76 bp, Homo sapiens
tgggatctgagaaatctgaaacttaagttgcattcctttgagtcacataaggatgaaatattccaggtaagagaaa

SEQ ID NO: 48735 - DNA, 76 bp, Homo sapiens
tgagaaatctgaaacttaagttgcattcctttgagtcacataaggatgaaatattccaggtaagagaaactaatgc

SEQ ID NO: 48736 - DNA, 73 bp, Homo sapiens
gaaacttaagttgcattcctttgagtcacataaggatgaaatattccaggtaagagaaactaatgctactatt

SEQ ID NO: 48737 - DNA, 71 bp, Homo sapiens
attcctttgagtcacataaggatgaaatattccaggtaagagaaactaatgctactattttgtttgtttta

SEQ ID NO: 48738 - DNA, 71 bp, Homo sapiens
tttgagtcacataaggatgaaatattccaggtaagagaaactaatgctactattttgtttgttttaagaaa

SEQ ID NO: 48739 - DNA, 71 bp, Homo sapiens
ttttttccctttattttctaattcatggctttgctcttttcttcattcctatgtgtaggttcagtggtcac

SEQ ID NO: 48740 - DNA, 77 bp, Homo sapiens
ttattttctaattcatggctttgctcttttcttcattcctatgtgtaggttcagtggtcacctcacaatgagactat

SEQ ID NO: 48741 - DNA, 78 bp, Homo sapiens
ttctaattcatggctttgctcttttcttcattcctatgtgtaggttcagtggtcacctcacaatgagactattttagc

SEQ ID NO: 48742 - DNA, 76 bp, Homo sapiens
ggctttgctcttttcttcattcctatgtgtaggttcagtggtcacctcacaatgagactattttagcttccagtgg

SEQ ID NO: 48743 - DNA, 79 bp, Homo sapiens
ttttcttcattcctatgtgtaggttcagtggtcacctcacaatgagactattttagcttccagtggtactgatcgcaga

SEQ ID NO: 48744 - DNA, 77 bp, Homo sapiens
cctcacaatgagactattttagcttccagtggtactgatcgcagactgaatgtctgggatttaaggtaattcttgta

SEQ ID NO: 48745 - DNA, 75 bp, Homo sapiens
agactattttagcttccagtggtactgatcgcagactgaatgtctgggatttaaggtaattcttgtattcattcc

SEQ ID NO: 48746 - DNA, 76 bp, Homo sapiens
attttagcttccagtggtactgatcgcagactgaatgtctgggatttaaggtaattcttgtattcattcctctctc

SEQ ID NO: 48747 - DNA, 76 bp, Homo sapiens
agtggtactgatcgcagactgaatgtctgggatttaaggtaattcttgtattcattcctctctctacataattatt

SEQ ID NO: 48748 - DNA, 75 bp, Homo sapiens
gatcgcagactgaatgtctgggatttaaggtaattcttgtattcattcctctctctacataattatttcctttat

SEQ ID NO: 48749 - DNA, 68 bp, Homo sapiens
attcattcctctctctacataattatttcctttatttacactttgcaaaggtagttactaagggtaaa

SEQ ID NO: 48750 - DNA, 64 bp, Homo sapiens
acactttgcaaaggtagttactaagggtaaatctgttttaacttttaaaattatgcttttgtac

SEQ ID NO: 48751 - DNA, 65 bp, Homo sapiens
ttgcaaaggtagttactaagggtaaatctgttttaacttttaaaattatgcttttgtactagtaa

SEQ ID NO: 48752 - DNA, 65 bp, Homo sapiens
ctaagggtaaatctgttttaacttttaaaattatgcttttgtactagtaaaattggagaggaaca

SEQ ID NO: 48753 - DNA, 65 bp, Homo sapiens
ggtaaatctgttttaacttttaaaattatgcttttgtactagtaaaattggagaggaacaatccc

SEQ ID NO: 48754 - DNA, 69 bp, Homo sapiens
acttttaaaattatgcttttgtactagtaaaattggagaggaacaatccccagaagatgcagaagacgg

SEQ ID NO: 48755 - DNA, 72 bp, Homo sapiens
aaaattatgcttttgtactagtaaaattggagaggaacaatccccagaagatgcagaagacgggccaccaga

SEQ ID NO: 48756 - DNA, 72 bp, Homo sapiens
ttttgtactagtaaaattggagaggaacaatccccagaagatgcagaagacgggccaccagagttgttggta

SEQ ID NO: 48757 - DNA, 71 bp, Homo sapiens
agtaaaattggagaggaacaatccccagaagatgcagaagacgggccaccagagttgttggtatgttaaaa

SEQ ID NO: 48758 - DNA, 75 bp, Homo sapiens
gaacaatccccagaagatgcagaagacgggccaccagagttgttggtatgttaaaagcattggacagtactgaaa

SEQ ID NO: 48759 - DNA, 76 bp, Homo sapiens
cagaagatgcagaagacgggccaccagagttgttggtatgttaaaagcattggacagtactgaaatagtctgtaat

SEQ ID NO: 48760 - DNA, 72 bp, Homo sapiens
agaagacgggccaccagagttgttggtatgttaaaagcattggacagtactgaaatagtctgtaatttaatg

SEQ ID NO: 48761 - DNA, 73 bp, Homo sapiens
attggacagtactgaaatagtctgtaatttaatgtcctctatctgcatttcacctctttgttttcttccctct

SEQ ID NO: 48762 - DNA, 76 bp, Homo sapiens
tttaatgtcctctatctgcatttcacctctttgttttcttccctctttcagtttattcatggtggtcatactgcca

SEQ ID NO: 48763 - DNA, 78 bp, Homo sapiens
tctatctgcatttcacctctttgttttcttccctctttcagtttattcatggtggtcatactgccaagatatctgatt

SEQ ID NO: 48764 - DNA, 75 bp, Homo sapiens
tttcacctctttgttttcttccctctttcagtttattcatggtggtcatactgccaagatatctgatttctcctg

SEQ ID NO: 48765 - DNA, 76 bp, Homo sapiens
ttcttccctctttcagtttattcatggtggtcatactgccaagatatctgatttctcctggaatcccaatgaacct

SEQ ID NO: 48766 - DNA, 77 bp, Homo sapiens
tttcagtttattcatggtggtcatactgccaagatatctgatttctcctggaatcccaatgaaccttgggtgatttg

SEQ ID NO: 48767 - DNA, 80 bp, Homo sapiens
ttcatggtggtcatactgccaagatatctgatttctcctggaatcccaatgaaccttgggtgatttgttctgtatcagaa

SEQ ID NO: 48768 - DNA, 81 bp, Homo sapiens
gtcatactgccaagatatctgatttctcctggaatcccaatgaaccttgggtgatttgttctgtatcagaagacaatatca

SEQ ID NO: 48769 - DNA, 80 bp, Homo sapiens
aagatatctgatttctcctggaatcccaatgaaccttgggtgatttgttctgtatcagaagacaatatcatgcaagtgtg

SEQ ID NO: 48770 - DNA, 80 bp, Homo sapiens
atctgatttctcctggaatcccaatgaaccttgggtgatttgttctgtatcagaagacaatatcatgcaagtgtggcaaa

SEQ ID NO: 48771 - DNA, 76 bp, Homo sapiens
gaatcccaatgaaccttgggtgatttgttctgtatcagaagacaatatcatgcaagtgtggcaaatggtaagggtt

SEQ ID NO: 48772 - DNA, 75 bp, Homo sapiens
tgaaccttgggtgatttgttctgtatcagaagacaatatcatgcaagtgtggcaaatggtaagggtttagtaatt

SEQ ID NO: 48773 - DNA, 74 bp, Homo sapiens
ttgggtgatttgttctgtatcagaagacaatatcatgcaagtgtggcaaatggtaagggtttagtaatttattt

SEQ ID NO: 48774 - DNA, 74 bp, Homo sapiens
tgtatcagaagacaatatcatgcaagtgtggcaaatggtaagggtttagtaatttattttggggaggtgaaata

SEQ ID NO: 48775 - DNA, 73 bp, Homo sapiens
tagaagaagtcttcatgtttaaattctttttcttgtttttgggcaggcagagaacatttataatgatgaagac

SEQ ID NO: 48776 - DNA, 72 bp, Homo sapiens
cttcatgtttaaattctttttcttgtttttgggcaggcagagaacatttataatgatgaagaccctgaagga

SEQ ID NO: 48777 - DNA, 71 bp, Homo sapiens
tgtttaaattctttttcttgtttttgggcaggcagagaacatttataatgatgaagaccctgaaggaagcg

SEQ ID NO: 48778 - DNA, 75 bp, Homo sapiens
ttttgggcaggcagagaacatttataatgatgaagaccctgaaggaagcgtggatccagaaggacaagggtccta

SEQ ID NO: 48779 - DNA, 74 bp, Homo sapiens
agaacatttataatgatgaagaccctgaaggaagcgtggatccagaaggacaagggtcctagatatgtctttac

SEQ ID NO: 48780 - DNA, 73 bp, Homo sapiens
atttataatgatgaagaccctgaaggaagcgtggatccagaaggacaagggtcctagatatgtctttacttgt

SEQ ID NO: 48781 - DNA, 73 bp, Homo sapiens
atgaagaccctgaaggaagcgtggatccagaaggacaagggtcctagatatgtctttacttgttgtgatttta

SEQ ID NO: 48782 - DNA, 70 bp, Homo sapiens
gaagcgtggatccagaaggacaagggtcctagatatgtctttacttgttgtgattttagactcccctttt

SEQ ID NO: 48783 - DNA, 70 bp, Homo sapiens
atccagaaggacaagggtcctagatatgtctttacttgttgtgattttagactccccttttttcttctca

SEQ ID NO: 48784 - DNA, 67 bp, Homo sapiens
aaggacaagggtcctagatatgtctttacttgttgtgattttagactccccttttttcttctcaacc

SEQ ID NO: 48785 - DNA, 70 bp, Homo sapiens
cctagatatgtctttacttgttgtgattttagactccccttttttcttctcaaccctgagagtgatttaa

SEQ ID NO: 48786 - DNA, 68 bp, Homo sapiens
tctttacttgttgtgattttagactccccttttttcttctcaaccctgagagtgatttaacactggtt

SEQ ID NO: 48787 - DNA, 70 bp, Homo sapiens
ttgtgattttagactccccttttttcttctcaaccctgagagtgatttaacactggttttgagacagact

SEQ ID NO: 48788 - DNA, 71 bp, Homo sapiens
agactccccttttttcttctcaaccctgagagtgatttaacactggttttgagacagactttattcagcta

SEQ ID NO: 48789 - DNA, 75 bp, Homo sapiens
tttcttctcaaccctgagagtgatttaacactggttttgagacagactttattcagctatccctctatataatag

SEQ ID NO: 48790 - DNA, 73 bp, Homo sapiens
aaccctgagagtgatttaacactggttttgagacagactttattcagctatccctctatataataggtaccac

SEQ ID NO: 48791 - DNA, 75 bp, Homo sapiens
gtgatttaacactggttttgagacagactttattcagctatccctctatataataggtaccaccgataatgctat

SEQ ID NO: 48792 - DNA, 74 bp, Homo sapiens
actggttttgagacagactttattcagctatccctctatataataggtaccaccgataatgctattagcccaaa

SEQ ID NO: 48793 - DNA, 72 bp, Homo sapiens
acagactttattcagctatccctctatataataggtaccaccgataatgctattagcccaaaccgtgggtgt

SEQ ID NO: 48794 - DNA, 72 bp, Homo sapiens
ttattcagctatccctctatataataggtaccaccgataatgctattagcccaaaccgtgggtgttttctaa

SEQ ID NO: 48795 - DNA, 70 bp, Homo sapiens
tatccctctatataataggtaccaccgataatgctattagcccaaaccgtgggtgttttctaaatattaa

SEQ ID NO: 48796 - DNA, 67 bp, Homo sapiens
atataataggtaccaccgataatgctattagcccaaaccgtgggtgttttctaaatattaatagggg

SEQ ID NO: 48797 - DNA, 68 bp, Homo sapiens
accgataatgctattagcccaaaccgtgggtgttttctaaatattaataggggggcttgattcaacaa

SEQ ID NO: 48798 - DNA, 69 bp, Homo sapiens
aatgctattagcccaaaccgtgggtgttttctaaatattaataggggggcttgattcaacaaagccaca

SEQ ID NO: 48799 - DNA, 65 bp, Homo sapiens
aaaccgtgggtgttttctaaatattaataggggggcttgattcaacaaagccacagacttaacgt

SEQ ID NO: 48800 - DNA, 66 bp, Homo sapiens
gggtgttttctaaatattaataggggggcttgattcaacaaagccacagacttaacgttgaaattt

SEQ ID NO: 48801 - DNA, 67 bp, Homo sapiens
aaatattaataggggggcttgattcaacaaagccacagacttaacgttgaaattttcttcaggaatt

SEQ ID NO: 48802 - DNA, 68 bp, Homo sapiens
ggggcttgattcaacaaagccacagacttaacgttgaaattttcttcaggaattttctagtaacccag

SEQ ID NO: 48803 - DNA, 67 bp, Homo sapiens
ttcaacaaagccacagacttaacgttgaaattttcttcaggaattttctagtaacccaggtctaaag

SEQ ID NO: 48804 - DNA, 68 bp, Homo sapiens
ggaattttctagtaacccaggtctaaagtagctacagaaaggggaatattatgtgtgattatttttct

SEQ ID NO: 48805 - DNA, 72 bp, Homo sapiens
gtaacccaggtctaaagtagctacagaaaggggaatattatgtgtgattatttttcttcttatgctatatcc

SEQ ID NO: 48806 - DNA, 72 bp, Homo sapiens
caggtctaaagtagctacagaaaggggaatattatgtgtgattatttttcttcttatgctatatccccaagt

SEQ ID NO: 48807 - DNA, 73 bp, Homo sapiens
aagtttttcagactcatttaagtaaaggctagagtgagtaaggaatagagccaaatgaggtaggtgtctgagc

SEQ ID NO: 48808 - DNA, 75 bp, Homo sapiens
actcatttaagtaaaggctagagtgagtaaggaatagagccaaatgaggtaggtgtctgagccatgaagtataaa

SEQ ID NO: 48809 - DNA, 75 bp, Homo sapiens
gaaatagggggagattcaagtcatatagattcctactcgaaaatcttgacacctgactttccaggatgcacattt

SEQ ID NO: 48810 - DNA, 79 bp, Homo sapiens
gagattcaagtcatatagattcctactcgaaaatcttgacacctgactttccaggatgcacattttcatacgtagacca

SEQ ID NO: 48811 - DNA, 75 bp, Homo sapiens
aagtcatatagattcctactcgaaaatcttgacacctgactttccaggatgcacattttcatacgtagaccagtt

SEQ ID NO: 48812 - DNA, 73 bp, Homo sapiens
aaatcttgacacctgactttccaggatgcacattttcatacgtagaccagtttcctcttggtttcttcagtta

SEQ ID NO: 48813 - DNA, 71 bp, Homo sapiens
acctgactttccaggatgcacattttcatacgtagaccagtttcctcttggtttcttcagttaagtcaaaa

SEQ ID NO: 48814 - DNA, 71 bp, Homo sapiens
actttccaggatgcacattttcatacgtagaccagtttcctcttggtttcttcagttaagtcaaaacaaca

SEQ ID NO: 48815 - DNA, 67 bp, Homo sapiens
tttcatacgtagaccagtttcctcttggtttcttcagttaagtcaaaacaacacgttcctctttccc

SEQ ID NO: 48816 - DNA, 67 bp, Homo sapiens
cgtagaccagtttcctcttggtttcttcagttaagtcaaaacaacacgttcctctttccccatatat

SEQ ID NO: 48817 - DNA, 72 bp, Homo sapiens
ttaagtcaaaacaacacgttcctctttccccatatattcatatatttttgctcgttagtgtatttcttgagc

SEQ ID NO: 48818 - DNA, 73 bp, Homo sapiens
aacaacacgttcctctttccccatatattcatatatttttgctcgttagtgtatttcttgagctgttttcatg

SEQ ID NO: 48819 - DNA, 72 bp, Homo sapiens
tatttttgctcgttagtgtatttcttgagctgttttcatgttgtttatttcctgtctgtgaaatggtgtttt

SEQ ID NO: 48820 - DNA, 69 bp, Homo sapiens
ctcgttagtgtatttcttgagctgttttcatgttgtttatttcctgtctgtgaaatggtgttttttttt

SEQ ID NO: 48821 - DNA, 66 bp, Homo sapiens
ttttttttaacttgggaccaccaagttgtaaagatgtatgtttttacctgacagttataccacagg

SEQ ID NO: 48822 - DNA, 72 bp, Homo sapiens
tttttacctgacagttataccacaggtagactgtcaagttgagaagagtgaatcaataacttgtatttgttt

SEQ ID NO: 48823 - DNA, 72 bp, Homo sapiens
acctgacagttataccacaggtagactgtcaagttgagaagagtgaatcaataacttgtatttgttttaaaa

SEQ ID NO: 48824 - DNA, 69 bp, Homo sapiens
ttttttttttaggagttagtccttgaccactagtttgatgccatctccattttgggtgacctgtttcac

SEQ ID NO: 48825 - DNA, 73 bp, Homo sapiens
tttttaggagttagtccttgaccactagtttgatgccatctccattttgggtgacctgtttcaccagcaggcc

SEQ ID NO: 48826 - DNA, 78 bp, Homo sapiens
tccttgaccactagtttgatgccatctccattttgggtgacctgtttcaccagcaggcctgttactctccatgactaa

SEQ ID NO: 48827 - DNA, 77 bp, Homo sapiens
actagtttgatgccatctccattttgggtgacctgtttcaccagcaggcctgttactctccatgactaactgtgtaa

SEQ ID NO: 48828 - DNA, 75 bp, Homo sapiens
ccatctccattttgggtgacctgtttcaccagcaggcctgttactctccatgactaactgtgtaagtgcttaaaa

SEQ ID NO: 48829 - DNA, 73 bp, Homo sapiens
acctgtttcaccagcaggcctgttactctccatgactaactgtgtaagtgcttaaaatggaataaattgcttt

SEQ ID NO: 48830 - DNA, 74 bp, Homo sapiens
accagcaggcctgttactctccatgactaactgtgtaagtgcttaaaatggaataaattgcttttctacataac

SEQ ID NO: 48831 - DNA, 76 bp, Homo sapiens
tgttactctccatgactaactgtgtaagtgcttaaaatggaataaattgcttttctacataaccccatgctgatgg

SEQ ID NO: 48832 - DNA, 74 bp, Homo sapiens
tccatgactaactgtgtaagtgcttaaaatggaataaattgcttttctacataaccccatgctgatgggtttta

SEQ ID NO: 48833 - DNA, 71 bp, Homo sapiens
gtgtaagtgcttaaaatggaataaattgcttttctacataaccccatgctgatgggttttatttagtataa

SEQ ID NO: 48834 - DNA, 71 bp, Homo sapiens
gcttaaaatggaataaattgcttttctacataaccccatgctgatgggttttatttagtataaaacatcca

SEQ ID NO: 48835 - DNA, 73 bp, Homo sapiens
taaattgcttttctacataaccccatgctgatgggttttatttagtataaaacatccatcaaacaccagtctc

SEQ ID NO: 48836 - DNA, 74 bp, Homo sapiens
ttttctacataaccccatgctgatgggttttatttagtataaaacatccatcaaacaccagtctctggcttcta

SEQ ID NO: 48837 - DNA, 74 bp, Homo sapiens
ataaccccatgctgatgggttttatttagtataaaacatccatcaaacaccagtctctggcttctagaagagtc

SEQ ID NO: 48838 - DNA, 74 bp, Homo sapiens
atgggttttatttagtataaaacatccatcaaacaccagtctctggcttctagaagagtccttcagatgacagt

SEQ ID NO: 48839 - DNA, 76 bp, Homo sapiens
ttttatttagtataaaacatccatcaaacaccagtctctggcttctagaagagtccttcagatgacagttgttgtc

SEQ ID NO: 48840 - DNA, 79 bp, Homo sapiens
taaaacatccatcaaacaccagtctctggcttctagaagagtccttcagatgacagttgttgtccatggtctttgacta

SEQ ID NO: 48841 - DNA, 81 bp, Homo sapiens
tctctggcttctagaagagtccttcagatgacagttgttgtccatggtctttgactatcaagagcagaattaaatgtaata

SEQ ID NO: 48842 - DNA, 79 bp, Homo sapiens
ttctagaagagtccttcagatgacagttgttgtccatggtctttgactatcaagagcagaattaaatgtaatagtccca

SEQ ID NO: 48843 - DNA, 75 bp, Homo sapiens
acagttgttgtccatggtctttgactatcaagagcagaattaaatgtaatagtcccagagctgtagaaaagaact

SEQ ID NO: 48844 - DNA, 75 bp, Homo sapiens
tccatggtctttgactatcaagagcagaattaaatgtaatagtcccagagctgtagaaaagaactttactccttc

SEQ ID NO: 48845 - DNA, 73 bp, Homo sapiens
gtctttgactatcaagagcagaattaaatgtaatagtcccagagctgtagaaaagaactttactccttcccag

SEQ ID NO: 48846 - DNA, 70 bp, Homo sapiens
agagcagaattaaatgtaatagtcccagagctgtagaaaagaactttactccttcccagggaaagtgaaa

SEQ ID NO: 48847 - DNA, 69 bp, Homo sapiens
attaaatgtaatagtcccagagctgtagaaaagaactttactccttcccagggaaagtgaaagacataa

SEQ ID NO: 48848 - DNA, 70 bp, Homo sapiens
taatagtcccagagctgtagaaaagaactttactccttcccagggaaagtgaaagacataaaacactgaa

SEQ ID NO: 48849 - DNA, 72 bp, Homo sapiens
tgtagaaaagaactttactccttcccagggaaagtgaaagacataaaacactgaatcagaggtggcacagat

SEQ ID NO: 48850 - DNA, 70 bp, Homo sapiens
aaaagaactttactccttcccagggaaagtgaaagacataaaacactgaatcagaggtggcacagattag

SEQ ID NO: 48851 - DNA, 74 bp, Homo sapiens
tactccttcccagggaaagtgaaagacataaaacactgaatcagaggtggcacagattagtctttgataaggta

SEQ ID NO: 48852 - DNA, 72 bp, Homo sapiens
aaagtgaaagacataaaacactgaatcagaggtggcacagattagtctttgataaggtaacgtttctttgaa

SEQ ID NO: 48853 - DNA, 75 bp, Homo sapiens
acataaaacactgaatcagaggtggcacagattagtctttgataaggtaacgtttctttgaagtctatctgtaga

SEQ ID NO: 48854 - DNA, 75 bp, Homo sapiens
aacactgaatcagaggtggcacagattagtctttgataaggtaacgtttctttgaagtctatctgtagagaacta

SEQ ID NO: 48855 - DNA, 73 bp, Homo sapiens
attagtctttgataaggtaacgtttctttgaagtctatctgtagagaactacatggacttccaagagtgtcaa

SEQ ID NO: 48856 - DNA, 74 bp, Homo sapiens
tttgataaggtaacgtttctttgaagtctatctgtagagaactacatggacttccaagagtgtcaaaggcagtg

SEQ ID NO: 48857 - DNA, 76 bp, Homo sapiens
taacgtttctttgaagtctatctgtagagaactacatggacttccaagagtgtcaaaggcagtgtggtagagagaa

SEQ ID NO: 48858 - DNA, 77 bp, Homo sapiens
tttgaagtctatctgtagagaactacatggacttccaagagtgtcaaaggcagtgtggtagagagaatttaaggcaa

SEQ ID NO: 48859 - DNA, 72 bp, Homo sapiens
aactacatggacttccaagagtgtcaaaggcagtgtggtagagagaatttaaggcaagatttaaatttggaa

SEQ ID NO: 48860 - DNA, 72 bp, Homo sapiens
ttccaagagtgtcaaaggcagtgtggtagagagaatttaaggcaagatttaaatttggaaaaggtgcttgaa

SEQ ID NO: 48861 - DNA, 71 bp, Homo sapiens
tcaaaggcagtgtggtagagagaatttaaggcaagatttaaatttggaaaaggtgcttgaaccttttctca

SEQ ID NO: 48862 - DNA, 66 bp, Homo sapiens
ggcaagatttaaatttggaaaaggtgcttgaaccttttctcagaggttttatttccccagtatgtt

SEQ ID NO: 48863 - DNA, 65 bp, Homo sapiens
aaatttggaaaaggtgcttgaaccttttctcagaggttttatttccccagtatgtttttcactgg

SEQ ID NO: 48864 - DNA, 65 bp, Homo sapiens
ttgaaccttttctcagaggttttatttccccagtatgtttttcactggggcctttacttaggtta

SEQ ID NO: 48865 - DNA, 64 bp, Homo sapiens
gaggttttatttccccagtatgtttttcactggggcctttacttaggttagaaataataggctt

SEQ ID NO: 48866 - DNA, 66 bp, Homo sapiens
tttatttccccagtatgtttttcactggggcctttacttaggttagaaataataggctttgaaggc

SEQ ID NO: 48867 - DNA, 72 bp, Homo sapiens
tgtttttcactggggcctttacttaggttagaaataataggctttgaaggcctctatcaccagatgcaataa

SEQ ID NO: 48868 - DNA, 72 bp, Homo sapiens
tggggcctttacttaggttagaaataataggctttgaaggcctctatcaccagatgcaataaccagataaaa

SEQ ID NO: 48869 - DNA, 72 bp, Homo sapiens
tttacttaggttagaaataataggctttgaaggcctctatcaccagatgcaataaccagataaaattcctgt

SEQ ID NO: 48870 - DNA, 72 bp, Homo sapiens
ttagaaataataggctttgaaggcctctatcaccagatgcaataaccagataaaattcctgttttttcccaa

SEQ ID NO: 48871 - DNA, 71 bp, Homo sapiens
gctttgaaggcctctatcaccagatgcaataaccagataaaattcctgttttttcccaatcgcttagtttt

SEQ ID NO: 48872 - DNA, 69 bp, Homo sapiens
aaggcctctatcaccagatgcaataaccagataaaattcctgttttttcccaatcgcttagttttttgt

SEQ ID NO: 48873 - DNA, 74 bp, Homo sapiens
ttttaactgagtagatcattctgacccagaactactttcatgaggtaagatctttgggaaaatctgaatagcgt

SEQ ID NO: 48874 - DNA, 74 bp, Homo sapiens
agtagatcattctgacccagaactactttcatgaggtaagatctttgggaaaatctgaatagcgttaaccatta

SEQ ID NO: 48875 - DNA, 73 bp, Homo sapiens
ccagaactactttcatgaggtaagatctttgggaaaatctgaatagcgttaaccattagattcaaatctcaaa

SEQ ID NO: 48876 - DNA, 73 bp, Homo sapiens
catgaggtaagatctttgggaaaatctgaatagcgttaaccattagattcaaatctcaaatggtttcttttca

SEQ ID NO: 48877 - DNA, 72 bp, Homo sapiens
tgaggtaagatctttgggaaaatctgaatagcgttaaccattagattcaaatctcaaatggtttcttttcaa

SEQ ID NO: 48878 - DNA, 71 bp, Homo sapiens
tctttgggaaaatctgaatagcgttaaccattagattcaaatctcaaatggtttcttttcaagtctagttg

SEQ ID NO: 48879 - DNA, 70 bp, Homo sapiens
ctttgggaaaatctgaatagcgttaaccattagattcaaatctcaaatggtttcttttcaagtctagttg

SEQ ID NO: 48880 - DNA, 69 bp, Homo sapiens
gggaaaatctgaatagcgttaaccattagattcaaatctcaaatggtttcttttcaagtctagttgttt

SEQ ID NO: 48881 - DNA, 71 bp, Homo sapiens
ctgaatagcgttaaccattagattcaaatctcaaatggtttcttttcaagtctagttgttttagagtatag

SEQ ID NO: 48882 - DNA, 71 bp, Homo sapiens
tcaaatctcaaatggtttcttttcaagtctagttgttttagagtatagtgagaaataccttgacacaattt

SEQ ID NO: 48883 - DNA, 69 bp, Homo sapiens
caaatggtttcttttcaagtctagttgttttagagtatagtgagaaataccttgacacaattttaagag

SEQ ID NO: 48884 - DNA, 70 bp, Homo sapiens
ttttcaagtctagttgttttagagtatagtgagaaataccttgacacaattttaagagtaaactatatgg

SEQ ID NO: 48885 - DNA, 74 bp, Homo sapiens
gttttagagtatagtgagaaataccttgacacaattttaagagtaaactatatgggtcagcatatccttgaaca

SEQ ID NO: 48886 - DNA, 73 bp, Homo sapiens
tagtgagaaataccttgacacaattttaagagtaaactatatgggtcagcatatccttgaacaaaaagtagac

SEQ ID NO: 48887 - DNA, 71 bp, Homo sapiens
ataccttgacacaattttaagagtaaactatatgggtcagcatatccttgaacaaaaagtagactttgtaa

SEQ ID NO: 48888 - DNA, 70 bp, Homo sapiens
acaattttaagagtaaactatatgggtcagcatatccttgaacaaaaagtagactttgtaaaagtattca

SEQ ID NO: 48889 - DNA, 72 bp, Homo sapiens
gggtcagcatatccttgaacaaaaagtagactttgtaaaagtattcatttaaattctaacactcgtggcaca

SEQ ID NO: 48890 - DNA, 69 bp, Homo sapiens
tccttgaacaaaaagtagactttgtaaaagtattcatttaaattctaacactcgtggcacaaaagaatg

SEQ ID NO: 48891 - DNA, 67 bp, Homo sapiens
aacaaaaagtagactttgtaaaagtattcatttaaattctaacactcgtggcacaaaagaatggaaa

SEQ ID NO: 48892 - DNA, 69 bp, Homo sapiens
gactttgtaaaagtattcatttaaattctaacactcgtggcacaaaagaatggaaattgtaaacccatg

SEQ ID NO: 48893 - DNA, 71 bp, Homo sapiens
gtattcatttaaattctaacactcgtggcacaaaagaatggaaattgtaaacccatgtaatggaaattggc

SEQ ID NO: 48894 - DNA, 71 bp, Homo sapiens
attctaacactcgtggcacaaaagaatggaaattgtaaacccatgtaatggaaattggctatctttttgac

SEQ ID NO: 48895 - DNA, 70 bp, Homo sapiens
aacactcgtggcacaaaagaatggaaattgtaaacccatgtaatggaaattggctatctttttgacccca

SEQ ID NO: 48896 - DNA, 70 bp, Homo sapiens
aaagaatggaaattgtaaacccatgtaatggaaattggctatctttttgaccccacatgtgcccctcaaa

SEQ ID NO: 48897 - DNA, 68 bp, Homo sapiens
aaattgtaaacccatgtaatggaaattggctatctttttgaccccacatgtgcccctcaaaaatgttt

SEQ ID NO: 48898 - DNA, 68 bp, Homo sapiens
taaacccatgtaatggaaattggctatctttttgaccccacatgtgcccctcaaaaatgtttttggtt

SEQ ID NO: 48899 - DNA, 70 bp, Homo sapiens
taatggaaattggctatctttttgaccccacatgtgcccctcaaaaatgtttttggtttgggtcaacaca

SEQ ID NO: 48900 - DNA, 71 bp, Homo sapiens
tatctttttgaccccacatgtgcccctcaaaaatgtttttggtttgggtcaacacaaggcaagatacattc

SEQ ID NO: 48901 - DNA, 73 bp, Homo sapiens
aatgtttttggtttgggtcaacacaaggcaagatacattctttaaaatactcccagatgtgtccatacattca

SEQ ID NO: 48902 - DNA, 75 bp, Homo sapiens
ttttggtttgggtcaacacaaggcaagatacattctttaaaatactcccagatgtgtccatacattcatccttca

SEQ ID NO: 48903 - DNA, 80 bp, Homo sapiens
acacaaggcaagatacattctttaaaatactcccagatgtgtccatacattcatccttcactcagtgcatatgtgagggt

SEQ ID NO: 48904 - DNA, 81 bp, Homo sapiens
agatacattctttaaaatactcccagatgtgtccatacattcatccttcactcagtgcatatgtgagggttgttgctggaa

SEQ ID NO: 48905 - DNA, 80 bp, Homo sapiens
attctttaaaatactcccagatgtgtccatacattcatccttcactcagtgcatatgtgagggttgttgctggaagacag

SEQ ID NO: 48906 - DNA, 83 bp, Homo sapiens
aatactcccagatgtgtccatacattcatccttcactcagtgcatatgtgagggttgttgctggaagacaggaggctcatctt

SEQ ID NO: 48907 - DNA, 81 bp, Homo sapiens
atgtgtccatacattcatccttcactcagtgcatatgtgagggttgttgctggaagacaggaggctcatctttcctttcct

SEQ ID NO: 48908 - DNA, 83 bp, Homo sapiens
tacattcatccttcactcagtgcatatgtgagggttgttgctggaagacaggaggctcatctttcctttccttggtgcattga

SEQ ID NO: 48909 - DNA, 83 bp, Homo sapiens
gttgttgctggaagacaggaggctcatctttcctttccttggtgcattgagatcagtatcaacagcagatgaaatagaatcca

SEQ ID NO: 48910 - DNA, 83 bp, Homo sapiens
aggctcatctttcctttccttggtgcattgagatcagtatcaacagcagatgaaatagaatccagcaaagagttgacatgttc

SEQ ID NO: 48911 - DNA, 82 bp, Homo sapiens
tttcctttccttggtgcattgagatcagtatcaacagcagatgaaatagaatccagcaaagagttgacatgttctgcctccg

SEQ ID NO: 48912 - DNA, 85 bp, Homo sapiens
tgcattgagatcagtatcaacagcagatgaaatagaatccagcaaagagttgacatgttctgcctccggccaactctagaatctt

SEQ ID NO: 48913 - DNA, 80 bp, Homo sapiens
atcagtatcaacagcagatgaaatagaatccagcaaagagttgacatgttctgcctccggccaactctagaatcttttta

SEQ ID NO: 48914 - DNA, 76 bp, Homo sapiens
aatagaatccagcaaagagttgacatgttctgcctccggccaactctagaatctttttaagcaggtcagccagtat

SEQ ID NO: 48915 - DNA, 76 bp, Homo sapiens
agcaaagagttgacatgttctgcctccggccaactctagaatctttttaagcaggtcagccagtatttgcaacttc

SEQ ID NO: 48916 - DNA, 78 bp, Homo sapiens
ttgacatgttctgcctccggccaactctagaatctttttaagcaggtcagccagtatttgcaacttccacaggatgaa

SEQ ID NO: 48917 - DNA, 77 bp, Homo sapiens
tgttctgcctccggccaactctagaatctttttaagcaggtcagccagtatttgcaacttccacaggatgaattgct

SEQ ID NO: 48918 - DNA, 76 bp, Homo sapiens
ccaactctagaatctttttaagcaggtcagccagtatttgcaacttccacaggatgaattgcttgccaagtttctg

SEQ ID NO: 48919 - DNA, 78 bp, Homo sapiens
cagtatttgcaacttccacaggatgaattgcttgccaagtttctggcactcttgtctggttggaagagtacatccaaa

SEQ ID NO: 48920 - DNA, 74 bp, Homo sapiens
aacttccacaggatgaattgcttgccaagtttctggcactcttgtctggttggaagagtacatccaaagggtac

SEQ ID NO: 48921 - DNA, 75 bp, Homo sapiens
ggatgaattgcttgccaagtttctggcactcttgtctggttggaagagtacatccaaagggtacttagtgatcct

SEQ ID NO: 48922 - DNA, 71 bp, Homo sapiens
tttctggcactcttgtctggttggaagagtacatccaaagggtacttagtgatcctttgctaagaagtttt

SEQ ID NO: 48923 - DNA, 70 bp, Homo sapiens
actcttgtctggttggaagagtacatccaaagggtacttagtgatcctttgctaagaagttttttgctgt

SEQ ID NO: 48924 - DNA, 68 bp, Homo sapiens
ttggaagagtacatccaaagggtacttagtgatcctttgctaagaagttttttgctgtttccgggtta

SEQ ID NO: 48925 - DNA, 67 bp, Homo sapiens
agtacatccaaagggtacttagtgatcctttgctaagaagttttttgctgtttccgggttacagatt

SEQ ID NO: 48926 - DNA, 70 bp, Homo sapiens
gtacttagtgatcctttgctaagaagttttttgctgtttccgggttacagatttggccatatatttctaa

SEQ ID NO: 48927 - DNA, 71 bp, Homo sapiens
tagtgatcctttgctaagaagttttttgctgtttccgggttacagatttggccatatatttctaaacagcc

SEQ ID NO: 48928 - DNA, 67 bp, Homo sapiens
taagaagttttttgctgtttccgggttacagatttggccatatatttctaaacagcccctgtaaagt

SEQ ID NO: 48929 - DNA, 68 bp, Homo sapiens
tttttgctgtttccgggttacagatttggccatatatttctaaacagcccctgtaaagttgaaagaaa

SEQ ID NO: 48930 - DNA, 69 bp, Homo sapiens
cagatttggccatatatttctaaacagcccctgtaaagttgaaagaaaaagtttataacagtgaacttc

SEQ ID NO: 48931 - DNA, 69 bp, Homo sapiens
tctaaacagcccctgtaaagttgaaagaaaaagtttataacagtgaacttctgaggtttagttactgca

SEQ ID NO: 48932 - DNA, 67 bp, Homo sapiens
ccctgtaaagttgaaagaaaaagtttataacagtgaacttctgaggtttagttactgcaggctttgt

SEQ ID NO: 48933 - DNA, 71 bp, Homo sapiens
agaaaaagtttataacagtgaacttctgaggtttagttactgcaggctttgttgagaagagattgttacag

SEQ ID NO: 48934 - DNA, 74 bp, Homo sapiens
agtttataacagtgaacttctgaggtttagttactgcaggctttgttgagaagagattgttacagtgtgattta

SEQ ID NO: 48935 - DNA, 78 bp, Homo sapiens
aacttctgaggtttagttactgcaggctttgttgagaagagattgttacagtgtgatttatggatgatcagggatgac

SEQ ID NO: 48936 - DNA, 76 bp, Homo sapiens
aggtttagttactgcaggctttgttgagaagagattgttacagtgtgatttatggatgatcagggatgactttccc

SEQ ID NO: 48937 - DNA, 79 bp, Homo sapiens
tactgcaggctttgttgagaagagattgttacagtgtgatttatggatgatcagggatgactttcccctagcaaatatt

SEQ ID NO: 48938 - DNA, 79 bp, Homo sapiens
tttgttgagaagagattgttacagtgtgatttatggatgatcagggatgactttcccctagcaaatatttggatgcctc

SEQ ID NO: 48939 - DNA, 78 bp, Homo sapiens
agattgttacagtgtgatttatggatgatcagggatgactttcccctagcaaatatttggatgcctcctgtttgtcaa

SEQ ID NO: 48940 - DNA, 78 bp, Homo sapiens
agtgtgatttatggatgatcagggatgactttcccctagcaaatatttggatgcctcctgtttgtcaaatagaatgaa

SEQ ID NO: 48941 - DNA, 78 bp, Homo sapiens
atcagggatgactttcccctagcaaatatttggatgcctcctgtttgtcaaatagaatgaatggtgatggtgatggga

SEQ ID NO: 48942 - DNA, 76 bp, Homo sapiens
tcccctagcaaatatttggatgcctcctgtttgtcaaatagaatgaatggtgatggtgatgggagggatagttaaa

SEQ ID NO: 48943 - DNA, 72 bp, Homo sapiens
aaatatttggatgcctcctgtttgtcaaatagaatgaatggtgatggtgatgggagggatagttaaacgttt

SEQ ID NO: 48944 - DNA, 75 bp, Homo sapiens
tgcctcctgtttgtcaaatagaatgaatggtgatggtgatgggagggatagttaaacgttttctctgctaggtta

SEQ ID NO: 48945 - DNA, 73 bp, Homo sapiens
ttgtcaaatagaatgaatggtgatggtgatgggagggatagttaaacgttttctctgctaggttaacttctta

SEQ ID NO: 48946 - DNA, 71 bp, Homo sapiens
aaatagaatgaatggtgatggtgatgggagggatagttaaacgttttctctgctaggttaacttcttacag

SEQ ID NO: 48947 - DNA, 72 bp, Homo sapiens
tgatggtgatgggagggatagttaaacgttttctctgctaggttaacttcttacaggtataattacaatgcc

SEQ ID NO: 48948 - DNA, 69 bp, Homo sapiens
atgggagggatagttaaacgttttctctgctaggttaacttcttacaggtataattacaatgcctgaaa

SEQ ID NO: 48949 - DNA, 70 bp, Homo sapiens
ggatagttaaacgttttctctgctaggttaacttcttacaggtataattacaatgcctgaaattctgtag

SEQ ID NO: 48950 - DNA, 70 bp, Homo sapiens
acgttttctctgctaggttaacttcttacaggtataattacaatgcctgaaattctgtagtttcatttct

SEQ ID NO: 48951 - DNA, 71 bp, Homo sapiens
gctaggttaacttcttacaggtataattacaatgcctgaaattctgtagtttcatttctttggattagtcg

SEQ ID NO: 48952 - DNA, 73 bp, Homo sapiens
tcttacaggtataattacaatgcctgaaattctgtagtttcatttctttggattagtcgttgtcttttccaga

SEQ ID NO: 48953 - DNA, 75 bp, Homo sapiens
cctgaaattctgtagtttcatttctttggattagtcgttgtcttttccagattgtacacaatctgatcaacacaa

SEQ ID NO: 48954 - DNA, 73 bp, Homo sapiens
ctgtagtttcatttctttggattagtcgttgtcttttccagattgtacacaatctgatcaacacaaaggtagt

SEQ ID NO: 48955 - DNA, 75 bp, Homo sapiens
catttctttggattagtcgttgtcttttccagattgtacacaatctgatcaacacaaaggtagttagtagatcat

SEQ ID NO: 48956 - DNA, 75 bp, Homo sapiens
gattagtcgttgtcttttccagattgtacacaatctgatcaacacaaaggtagttagtagatcattaacctcaat

SEQ ID NO: 48957 - DNA, 76 bp, Homo sapiens
gtcttttccagattgtacacaatctgatcaacacaaaggtagttagtagatcattaacctcaattgcaaggttata

SEQ ID NO: 48958 - DNA, 78 bp, Homo sapiens
tccagattgtacacaatctgatcaacacaaaggtagttagtagatcattaacctcaattgcaaggttataatttctca

SEQ ID NO: 48959 - DNA, 75 bp, Homo sapiens
acacaatctgatcaacacaaaggtagttagtagatcattaacctcaattgcaaggttataatttctcaaacatta

SEQ ID NO: 48960 - DNA, 76 bp, Homo sapiens
cacaaaggtagttagtagatcattaacctcaattgcaaggttataatttctcaaacattaagcatattatcagtca

SEQ ID NO: 48961 - DNA, 77 bp, Homo sapiens
ggtagttagtagatcattaacctcaattgcaaggttataatttctcaaacattaagcatattatcagtcatgtggat

SEQ ID NO: 48962 - DNA, 79 bp, Homo sapiens
agatcattaacctcaattgcaaggttataatttctcaaacattaagcatattatcagtcatgtggattcaaacacagta

SEQ ID NO: 48963 - DNA, 77 bp, Homo sapiens
acctcaattgcaaggttataatttctcaaacattaagcatattatcagtcatgtggattcaaacacagtataagaaa

SEQ ID NO: 48964 - DNA, 77 bp, Homo sapiens
ttataatttctcaaacattaagcatattatcagtcatgtggattcaaacacagtataagaaaatcctcaaggctggg

SEQ ID NO: 48965 - DNA, 79 bp, Homo sapiens
atttctcaaacattaagcatattatcagtcatgtggattcaaacacagtataagaaaatcctcaaggctgggtgtgatg

SEQ ID NO: 48966 - DNA, 72 bp, Homo sapiens
aaaaagaaagttgtgaatttgatgtaagcttaggaaatgaataaaatttataggcatctgtataatgtacaa

SEQ ID NO: 48967 - DNA, 75 bp, Homo sapiens
gttgtgaatttgatgtaagcttaggaaatgaataaaatttataggcatctgtataatgtacaacttgacacggac

SEQ ID NO: 48968 - DNA, 74 bp, Homo sapiens
tgatgtaagcttaggaaatgaataaaatttataggcatctgtataatgtacaacttgacacggactttctttta

SEQ ID NO: 48969 - DNA, 71 bp, Homo sapiens
aagcttaggaaatgaataaaatttataggcatctgtataatgtacaacttgacacggactttcttttatcc

SEQ ID NO: 48970 - DNA, 70 bp, Homo sapiens
ataaaatttataggcatctgtataatgtacaacttgacacggactttcttttatccttagtttctttcac

SEQ ID NO: 48971 - DNA, 72 bp, Homo sapiens
tttataggcatctgtataatgtacaacttgacacggactttcttttatccttagtttctttcacggactcta

SEQ ID NO: 48972 - DNA, 69 bp, Homo sapiens
atctgtataatgtacaacttgacacggactttcttttatccttagtttctttcacggactctagaactt

SEQ ID NO: 48973 - DNA, 69 bp, Homo sapiens
gtacaacttgacacggactttcttttatccttagtttctttcacggactctagaacttttatcagaata

SEQ ID NO: 48974 - DNA, 69 bp, Homo sapiens
gacacggactttcttttatccttagtttctttcacggactctagaacttttatcagaatatactggtaa

SEQ ID NO: 48975 - DNA, 68 bp, Homo sapiens
ttcttttatccttagtttctttcacggactctagaacttttatcagaatatactggtaaaacattggg

SEQ ID NO: 48976 - DNA, 70 bp, Homo sapiens
ttagtttctttcacggactctagaacttttatcagaatatactggtaaaacattgggggagggatcctga

SEQ ID NO: 48977 - DNA, 72 bp, Homo sapiens
ttcacggactctagaacttttatcagaatatactggtaaaacattgggggagggatcctgagtaggtgattg

SEQ ID NO: 48978 - DNA, 72 bp, Homo sapiens
ctagaacttttatcagaatatactggtaaaacattgggggagggatcctgagtaggtgattggtcagaaaga

SEQ ID NO: 48979 - DNA, 74 bp, Homo sapiens
tatcagaatatactggtaaaacattgggggagggatcctgagtaggtgattggtcagaaagatgccttcagttt

SEQ ID NO: 48980 - DNA, 73 bp, Homo sapiens
gtaaaacattgggggagggatcctgagtaggtgattggtcagaaagatgccttcagttttgtcagtgtctaaa

SEQ ID NO: 48981 - DNA, 72 bp, Homo sapiens
attgggggagggatcctgagtaggtgattggtcagaaagatgccttcagttttgtcagtgtctaaaagttaa

SEQ ID NO: 48982 - DNA, 73 bp, Homo sapiens
agggatcctgagtaggtgattggtcagaaagatgccttcagttttgtcagtgtctaaaagttaagtctgttta

SEQ ID NO: 48983 - DNA, 74 bp, Homo sapiens
agtaggtgattggtcagaaagatgccttcagttttgtcagtgtctaaaagttaagtctgtttaggccaagcatg

SEQ ID NO: 48984 - DNA, 73 bp, Homo sapiens
aaaaaaagagtaagtctgtgtaacatgaacatctctgcttccacccaaaaccacagcctttgaatattatata

SEQ ID NO: 48985 - DNA, 74 bp, Homo sapiens
aagagtaagtctgtgtaacatgaacatctctgcttccacccaaaaccacagcctttgaatattatataaggaac

SEQ ID NO: 48986 - DNA, 76 bp, Homo sapiens
taacatgaacatctctgcttccacccaaaaccacagcctttgaatattatataaggaacttaatggatagatatgt

SEQ ID NO: 48987 - DNA, 75 bp, Homo sapiens
tgaacatctctgcttccacccaaaaccacagcctttgaatattatataaggaacttaatggatagatatgtttat

SEQ ID NO: 48988 - DNA, 71 bp, Homo sapiens
tgcttccacccaaaaccacagcctttgaatattatataaggaacttaatggatagatatgtttattatttt

SEQ ID NO: 48989 - DNA, 75 bp, Homo sapiens
ccacagcctttgaatattatataaggaacttaatggatagatatgtttattatttttgatagcacaactgctttc

SEQ ID NO: 48990 - DNA, 77 bp, Homo sapiens
gcctttgaatattatataaggaacttaatggatagatatgtttattatttttgatagcacaactgctttctctgcta

SEQ ID NO: 48991 - DNA, 74 bp, Homo sapiens
ataaggaacttaatggatagatatgtttattatttttgatagcacaactgctttctctgctattataaggaaaa

SEQ ID NO: 48992 - DNA, 78 bp, Homo sapiens
taatggatagatatgtttattatttttgatagcacaactgctttctctgctattataaggaaaactgagaatagcagg

SEQ ID NO: 48993 - DNA, 76 bp, Homo sapiens
gatatgtttattatttttgatagcacaactgctttctctgctattataaggaaaactgagaatagcaggtgggtag

SEQ ID NO: 48994 - DNA, 74 bp, Homo sapiens
attatttttgatagcacaactgctttctctgctattataaggaaaactgagaatagcaggtgggtagggtagga

SEQ ID NO: 48995 - DNA, 75 bp, Homo sapiens
atagcacaactgctttctctgctattataaggaaaactgagaatagcaggtgggtagggtaggatgaggaaacaa

SEQ ID NO: 48996 - DNA, 75 bp, Homo sapiens
agcacaactgctttctctgctattataaggaaaactgagaatagcaggtgggtagggtaggatgaggaaacaaga

SEQ ID NO: 48997 - DNA, 73 bp, Homo sapiens
ctttctctgctattataaggaaaactgagaatagcaggtgggtagggtaggatgaggaaacaagatgcccaaa

SEQ ID NO: 48998 - DNA, 75 bp, Homo sapiens
tattataaggaaaactgagaatagcaggtgggtagggtaggatgaggaaacaagatgcccaaagcctagatgcca

SEQ ID NO: 48999 - DNA, 76 bp, Homo sapiens
aaaactgagaatagcaggtgggtagggtaggatgaggaaacaagatgcccaaagcctagatgccacagaattcatg

SEQ ID NO: 49000 - DNA, 79 bp, Homo sapiens
agaatagcaggtgggtagggtaggatgaggaaacaagatgcccaaagcctagatgccacagaattcatggtgataatca

SEQ ID NO: 49001 - DNA, 78 bp, Homo sapiens
aggtgggtagggtaggatgaggaaacaagatgcccaaagcctagatgccacagaattcatggtgataatcagggcata

SEQ ID NO: 49002 - DNA, 78 bp, Homo sapiens
tgggtagggtaggatgaggaaacaagatgcccaaagcctagatgccacagaattcatggtgataatcagggcatattt

SEQ ID NO: 49003 - DNA, 80 bp, Homo sapiens
tagggtaggatgaggaaacaagatgcccaaagcctagatgccacagaattcatggtgataatcagggcatattttgagtc

SEQ ID NO: 49004 - DNA, 78 bp, Homo sapiens
aggaaacaagatgcccaaagcctagatgccacagaattcatggtgataatcagggcatattttgagtcctactagaaa

SEQ ID NO: 49005 - DNA, 78 bp, Homo sapiens
aagatgcccaaagcctagatgccacagaattcatggtgataatcagggcatattttgagtcctactagaaacaaacat

SEQ ID NO: 49006 - DNA, 78 bp, Homo sapiens
aaagcctagatgccacagaattcatggtgataatcagggcatattttgagtcctactagaaacaaacattccaaatga

SEQ ID NO: 49007 - DNA, 79 bp, Homo sapiens
acagaattcatggtgataatcagggcatattttgagtcctactagaaacaaacattccaaatgaactctgaatgcctga

SEQ ID NO: 49008 - DNA, 80 bp, Homo sapiens
ttcatggtgataatcagggcatattttgagtcctactagaaacaaacattccaaatgaactctgaatgcctgactcaggc

SEQ ID NO: 49009 - DNA, 76 bp, Homo sapiens
taatcagggcatattttgagtcctactagaaacaaacattccaaatgaactctgaatgcctgactcaggcgttttg

SEQ ID NO: 49010 - DNA, 72 bp, Homo sapiens
atattttgagtcctactagaaacaaacattccaaatgaactctgaatgcctgactcaggcgttttggaggtt

SEQ ID NO: 49011 - DNA, 72 bp, Homo sapiens
tcctactagaaacaaacattccaaatgaactctgaatgcctgactcaggcgttttggaggtttgggttatcc

SEQ ID NO: 49012 - DNA, 71 bp, Homo sapiens
aaacattccaaatgaactctgaatgcctgactcaggcgttttggaggtttgggttatccccttgtcattag

SEQ ID NO: 49013 - DNA, 72 bp, Homo sapiens
aaatgaactctgaatgcctgactcaggcgttttggaggtttgggttatccccttgtcattaggcacacaagg

SEQ ID NO: 49014 - DNA, 69 bp, Homo sapiens
ctgaatgcctgactcaggcgttttggaggtttgggttatccccttgtcattaggcacacaagggttttt

SEQ ID NO: 49015 - DNA, 65 bp, Homo sapiens
actcaggcgttttggaggtttgggttatccccttgtcattaggcacacaagggttttttgttgtt

SEQ ID NO: 49016 - DNA, 68 bp, Homo sapiens
aggcgtgagccaccccgtccggcctgtttttaaggcattaattagtattgttaggaaagcagtaacaa

SEQ ID NO: 49017 - DNA, 69 bp, Homo sapiens
caccccgtccggcctgtttttaaggcattaattagtattgttaggaaagcagtaacaatgcaaacacca

SEQ ID NO: 49018 - DNA, 73 bp, Homo sapiens
ggcctgtttttaaggcattaattagtattgttaggaaagcagtaacaatgcaaacaccactcttctcttcaca

SEQ ID NO: 49019 - DNA, 74 bp, Homo sapiens
ttaaggcattaattagtattgttaggaaagcagtaacaatgcaaacaccactcttctcttcacaaagatcacct

SEQ ID NO: 49020 - DNA, 75 bp, Homo sapiens
attaattagtattgttaggaaagcagtaacaatgcaaacaccactcttctcttcacaaagatcaccttgagactg

SEQ ID NO: 49021 - DNA, 79 bp, Homo sapiens
tattgttaggaaagcagtaacaatgcaaacaccactcttctcttcacaaagatcaccttgagactgtgtctccattcca

SEQ ID NO: 49022 - DNA, 80 bp, Homo sapiens
aagcagtaacaatgcaaacaccactcttctcttcacaaagatcaccttgagactgtgtctccattccacctgcctgagaa

SEQ ID NO: 49023 - DNA, 82 bp, Homo sapiens
aatgcaaacaccactcttctcttcacaaagatcaccttgagactgtgtctccattccacctgcctgagaagtgggagcatca

SEQ ID NO: 49024 - DNA, 81 bp, Homo sapiens
actcttctcttcacaaagatcaccttgagactgtgtctccattccacctgcctgagaagtgggagcatcagcctgttccag

SEQ ID NO: 49025 - DNA, 82 bp, Homo sapiens
ttctcttcacaaagatcaccttgagactgtgtctccattccacctgcctgagaagtgggagcatcagcctgttccaggctct

SEQ ID NO: 49026 - DNA, 80 bp, Homo sapiens
acaaagatcaccttgagactgtgtctccattccacctgcctgagaagtgggagcatcagcctgttccaggctcttgggta

SEQ ID NO: 49027 - DNA, 80 bp, Homo sapiens
aagatcaccttgagactgtgtctccattccacctgcctgagaagtgggagcatcagcctgttccaggctcttgggtagta

SEQ ID NO: 49028 - DNA, 82 bp, Homo sapiens
atcaccttgagactgtgtctccattccacctgcctgagaagtgggagcatcagcctgttccaggctcttgggtagtagcata

SEQ ID NO: 49029 - DNA, 79 bp, Homo sapiens
agactgtgtctccattccacctgcctgagaagtgggagcatcagcctgttccaggctcttgggtagtagcatagccctt

SEQ ID NO: 49030 - DNA, 79 bp, Homo sapiens
tgtgtctccattccacctgcctgagaagtgggagcatcagcctgttccaggctcttgggtagtagcatagccctttaaa

SEQ ID NO: 49031 - DNA, 77 bp, Homo sapiens
tctccattccacctgcctgagaagtgggagcatcagcctgttccaggctcttgggtagtagcatagccctttaaaaa

SEQ ID NO: 49032 - DNA, 76 bp, Homo sapiens
attccacctgcctgagaagtgggagcatcagcctgttccaggctcttgggtagtagcatagccctttaaaaagaga

SEQ ID NO: 49033 - DNA, 77 bp, Homo sapiens
ctgcctgagaagtgggagcatcagcctgttccaggctcttgggtagtagcatagccctttaaaaagagagagccatt

SEQ ID NO: 49034 - DNA, 76 bp, Homo sapiens
ctgagaagtgggagcatcagcctgttccaggctcttgggtagtagcatagccctttaaaaagagagagccattttc

SEQ ID NO: 49035 - DNA, 74 bp, Homo sapiens
agcatcagcctgttccaggctcttgggtagtagcatagccctttaaaaagagagagccattttccatgtgtttt

SEQ ID NO: 49036 - DNA, 72 bp, Homo sapiens
ctgttccaggctcttgggtagtagcatagccctttaaaaagagagagccattttccatgtgtttttggataa

SEQ ID NO: 49037 - DNA, 72 bp, Homo sapiens
ttgggtagtagcatagccctttaaaaagagagagccattttccatgtgtttttggataagcacaatttgaaa

SEQ ID NO: 49038 - DNA, 73 bp, Homo sapiens
gtagcatagccctttaaaaagagagagccattttccatgtgtttttggataagcacaatttgaaaatcatttc

SEQ ID NO: 49039 - DNA, 70 bp, Homo sapiens
aaaaagagagagccattttccatgtgtttttggataagcacaatttgaaaatcatttcccaaatcctctt

SEQ ID NO: 49040 - DNA, 69 bp, Homo sapiens
catgtgtttttggataagcacaatttgaaaatcatttcccaaatcctctttttgtttttgattctaagg

SEQ ID NO: 49041 - DNA, 67 bp, Homo sapiens
gtttttggataagcacaatttgaaaatcatttcccaaatcctctttttgtttttgattctaaggtaa

SEQ ID NO: 49042 - DNA, 65 bp, Homo sapiens
agcacaatttgaaaatcatttcccaaatcctctttttgtttttgattctaaggtaaaattttccc

SEQ ID NO: 49043 - DNA, 64 bp, Homo sapiens
atcatttcccaaatcctctttttgtttttgattctaaggtaaaattttccctaagccctcccac

SEQ ID NO: 49044 - DNA, 64 bp, Homo sapiens
ttcccaaatcctctttttgtttttgattctaaggtaaaattttccctaagccctcccaccatcc

SEQ ID NO: 49045 - DNA, 69 bp, Homo sapiens
tttgtttttgattctaaggtaaaattttccctaagccctcccaccatcccctcagccagtattagatga

SEQ ID NO: 49046 - DNA, 72 bp, Homo sapiens
ttgattctaaggtaaaattttccctaagccctcccaccatcccctcagccagtattagatgagatttgtata

SEQ ID NO: 49047 - DNA, 73 bp, Homo sapiens
aggtaaaattttccctaagccctcccaccatcccctcagccagtattagatgagatttgtatagcagcagaaa

SEQ ID NO: 49048 - DNA, 77 bp, Homo sapiens
ttccctaagccctcccaccatcccctcagccagtattagatgagatttgtatagcagcagaaactgacttataagta

SEQ ID NO: 49049 - DNA, 82 bp, Homo sapiens
ccaccatcccctcagccagtattagatgagatttgtatagcagcagaaactgacttataagtagagagctcttcagcaagac

SEQ ID NO: 49050 - DNA, 83 bp, Homo sapiens
ccctcagccagtattagatgagatttgtatagcagcagaaactgacttataagtagagagctcttcagcaagactgagcctta

SEQ ID NO: 49051 - DNA, 83 bp, Homo sapiens
agtattagatgagatttgtatagcagcagaaactgacttataagtagagagctcttcagcaagactgagccttagctgttcca

SEQ ID NO: 49052 - DNA, 81 bp, Homo sapiens
agatttgtatagcagcagaaactgacttataagtagagagctcttcagcaagactgagccttagctgttccatctctttgt

SEQ ID NO: 49053 - DNA, 82 bp, Homo sapiens
tatagcagcagaaactgacttataagtagagagctcttcagcaagactgagccttagctgttccatctctttgttcttctgt

SEQ ID NO: 49054 - DNA, 79 bp, Homo sapiens
aaactgacttataagtagagagctcttcagcaagactgagccttagctgttccatctctttgttcttctgttgctggag

SEQ ID NO: 49055 - DNA, 77 bp, Homo sapiens
aagactgagccttagctgttccatctctttgttcttctgttgctggagttgcaccccatttcttaactgcctctggc

SEQ ID NO: 49056 - DNA, 75 bp, Homo sapiens
ttccatctctttgttcttctgttgctggagttgcaccccatttcttaactgcctctggcgttcttccatttcctc

SEQ ID NO: 49057 - DNA, 79 bp, Homo sapiens
tggagttgcaccccatttcttaactgcctctggcgttcttccatttcctccagctgttcctgcatgagatggccaagaa

SEQ ID NO: 49058 - DNA, 77 bp, Homo sapiens
ccccatttcttaactgcctctggcgttcttccatttcctccagctgttcctgcatgagatggccaagaacatttcta

SEQ ID NO: 49059 - DNA, 78 bp, Homo sapiens
tctggcgttcttccatttcctccagctgttcctgcatgagatggccaagaacatttctaatgagccaaacaataaaaa

SEQ ID NO: 49060 - DNA, 78 bp, Homo sapiens
ttcttccatttcctccagctgttcctgcatgagatggccaagaacatttctaatgagccaaacaataaaaactcacat

SEQ ID NO: 49061 - DNA, 79 bp, Homo sapiens
cagctgttcctgcatgagatggccaagaacatttctaatgagccaaacaataaaaactcacattgtccactcttactta

SEQ ID NO: 49062 - DNA, 73 bp, Homo sapiens
gagatggccaagaacatttctaatgagccaaacaataaaaactcacattgtccactcttacttataaaacact

SEQ ID NO: 49063 - DNA, 69 bp, Homo sapiens
agaacatttctaatgagccaaacaataaaaactcacattgtccactcttacttataaaacacttttttg

SEQ ID NO: 49064 - DNA, 69 bp, Homo sapiens
gagccaaacaataaaaactcacattgtccactcttacttataaaacacttttttgttcattgtttaatc

SEQ ID NO: 49065 - DNA, 71 bp, Homo sapiens
caataaaaactcacattgtccactcttacttataaaacacttttttgttcattgtttaatcttgatagcag

SEQ ID NO: 49066 - DNA, 74 bp, Homo sapiens
ctcacattgtccactcttacttataaaacacttttttgttcattgtttaatcttgatagcagtattgaggctgg

SEQ ID NO: 49067 - DNA, 73 bp, Homo sapiens
aaaacacttttttgttcattgtttaatcttgatagcagtattgaggctggtatttatatgataggttatgaaa

SEQ ID NO: 49068 - DNA, 76 bp, Homo sapiens
tttgttcattgtttaatcttgatagcagtattgaggctggtatttatatgataggttatgaaacaggttcaaagaa

SEQ ID NO: 49069 - DNA, 75 bp, Homo sapiens
gtttaatcttgatagcagtattgaggctggtatttatatgataggttatgaaacaggttcaaagaagttgtgtct

SEQ ID NO: 49070 - DNA, 76 bp, Homo sapiens
atcttgatagcagtattgaggctggtatttatatgataggttatgaaacaggttcaaagaagttgtgtcttggaaa

SEQ ID NO: 49071 - DNA, 71 bp, Homo sapiens
cagtattgaggctggtatttatatgataggttatgaaacaggttcaaagaagttgtgtcttggaaaaaaag

SEQ ID NO: 49072 - DNA, 72 bp, Homo sapiens
gctggtatttatatgataggttatgaaacaggttcaaagaagttgtgtcttggaaaaaaagtgacaatgctt

SEQ ID NO: 49073 - DNA, 73 bp, Homo sapiens
tgataggttatgaaacaggttcaaagaagttgtgtcttggaaaaaaagtgacaatgcttttgaaaatgatgac

SEQ ID NO: 49074 - DNA, 69 bp, Homo sapiens
gaaacaggttcaaagaagttgtgtcttggaaaaaaagtgacaatgcttttgaaaatgatgacgaaaaag

SEQ ID NO: 49075 - DNA, 72 bp, Homo sapiens
agttgtgtcttggaaaaaaagtgacaatgcttttgaaaatgatgacgaaaaaggcatcttgtctgttaacca

SEQ ID NO: 49076 - DNA, 74 bp, Homo sapiens
aaaaagtgacaatgcttttgaaaatgatgacgaaaaaggcatcttgtctgttaaccacagcttgctttaataga

SEQ ID NO: 49077 - DNA, 74 bp, Homo sapiens
aatgcttttgaaaatgatgacgaaaaaggcatcttgtctgttaaccacagcttgctttaatagaatcctgggag

SEQ ID NO: 49078 - DNA, 74 bp, Homo sapiens
tttgaaaatgatgacgaaaaaggcatcttgtctgttaaccacagcttgctttaatagaatcctgggagggtgat

SEQ ID NO: 49079 - DNA, 70 bp, Homo sapiens
acgaaaaaggcatcttgtctgttaaccacagcttgctttaatagaatcctgggagggtgattgggacttt

SEQ ID NO: 49080 - DNA, 71 bp, Homo sapiens
atcttgtctgttaaccacagcttgctttaatagaatcctgggagggtgattgggactttttagtattacaa

SEQ ID NO: 49081 - DNA, 70 bp, Homo sapiens
tctgttaaccacagcttgctttaatagaatcctgggagggtgattgggactttttagtattacaacctta

SEQ ID NO: 49082 - DNA, 71 bp, Homo sapiens
agcttgctttaatagaatcctgggagggtgattgggactttttagtattacaaccttagtgtcattgagga

SEQ ID NO: 49083 - DNA, 69 bp, Homo sapiens
ttaatagaatcctgggagggtgattgggactttttagtattacaaccttagtgtcattgaggaggattt

SEQ ID NO: 49084 - DNA, 69 bp, Homo sapiens
ggagggtgattgggactttttagtattacaaccttagtgtcattgaggaggattttggtctagttagtg

SEQ ID NO: 49085 - DNA, 69 bp, Homo sapiens
ttgggactttttagtattacaaccttagtgtcattgaggaggattttggtctagttagtgggctgagtt

SEQ ID NO: 49086 - DNA, 74 bp, Homo sapiens
ttacaaccttagtgtcattgaggaggattttggtctagttagtgggctgagtttcatatacctctccctccatg

SEQ ID NO: 49087 - DNA, 75 bp, Homo sapiens
agtgtcattgaggaggattttggtctagttagtgggctgagtttcatatacctctccctccatgtgcaggtttgt

SEQ ID NO: 49088 - DNA, 67 bp, Homo sapiens
tgcaggtttgttaagataattggtagtttttaataatataaaatacttaagttgaaatacaaaagtg

SEQ ID NO: 49089 - DNA, 70 bp, Homo sapiens
aataatataaaatacttaagttgaaatacaaaagtgtggcaacaattattaaatattggctagaattcta

SEQ ID NO: 49090 - DNA, 71 bp, Homo sapiens
aatacttaagttgaaatacaaaagtgtggcaacaattattaaatattggctagaattctaggagagttaca

SEQ ID NO: 49091 - DNA, 73 bp, Homo sapiens
gttgaaatacaaaagtgtggcaacaattattaaatattggctagaattctaggagagttacacaactagtgga

SEQ ID NO: 49092 - DNA, 74 bp, Homo sapiens
tacaaaagtgtggcaacaattattaaatattggctagaattctaggagagttacacaactagtggaagtccatg

SEQ ID NO: 49093 - DNA, 73 bp, Homo sapiens
gtggcaacaattattaaatattggctagaattctaggagagttacacaactagtggaagtccatgtttagaaa

SEQ ID NO: 49094 - DNA, 71 bp, Homo sapiens
gctagaattctaggagagttacacaactagtggaagtccatgtttagaaaataaatggcttgtttaaggaa

SEQ ID NO: 49095 - DNA, 67 bp, Homo sapiens
ctaggagagttacacaactagtggaagtccatgtttagaaaataaatggcttgtttaaggaaaagtt

SEQ ID NO: 49096 - DNA, 67 bp, Homo sapiens
gttacacaactagtggaagtccatgtttagaaaataaatggcttgtttaaggaaaagtttttgtgtc

SEQ ID NO: 49097 - DNA, 66 bp, Homo sapiens
ggaagtccatgtttagaaaataaatggcttgtttaaggaaaagtttttgtgtccaaagctccttaa

SEQ ID NO: 49098 - DNA, 67 bp, Homo sapiens
gtttagaaaataaatggcttgtttaaggaaaagtttttgtgtccaaagctccttaaagtcagagaga

SEQ ID NO: 49099 - DNA, 68 bp, Homo sapiens
taaatggcttgtttaaggaaaagtttttgtgtccaaagctccttaaagtcagagagatttctacctgg

SEQ ID NO: 49100 - DNA, 71 bp, Homo sapiens
gaaaagtttttgtgtccaaagctccttaaagtcagagagatttctacctggtacttaacatcatatggaaa

SEQ ID NO: 49101 - DNA, 77 bp, Homo sapiens
ttgtgtccaaagctccttaaagtcagagagatttctacctggtacttaacatcatatggaaattgatgctttagtga

SEQ ID NO: 49102 - DNA, 76 bp, Homo sapiens
cttaaagtcagagagatttctacctggtacttaacatcatatggaaattgatgctttagtgagggtgttggctatc

SEQ ID NO: 49103 - DNA, 77 bp, Homo sapiens
gagagatttctacctggtacttaacatcatatggaaattgatgctttagtgagggtgttggctatcctattgctaat

SEQ ID NO: 49104 - DNA, 75 bp, Homo sapiens
atttctacctggtacttaacatcatatggaaattgatgctttagtgagggtgttggctatcctattgctaatttc

SEQ ID NO: 49105 - DNA, 76 bp, Homo sapiens
tacttaacatcatatggaaattgatgctttagtgagggtgttggctatcctattgctaatttcctgcatccttttt

SEQ ID NO: 49106 - DNA, 75 bp, Homo sapiens
atcatatggaaattgatgctttagtgagggtgttggctatcctattgctaatttcctgcatccttttttcttctt

SEQ ID NO: 49107 - DNA, 72 bp, Homo sapiens
attgatgctttagtgagggtgttggctatcctattgctaatttcctgcatccttttttcttctttatttttg

SEQ ID NO: 49108 - DNA, 70 bp, Homo sapiens
ctgtgcccagcttatccttttttcattacacaaaaagactgaatttggttagttctaagttggaagataa

SEQ ID NO: 49109 - DNA, 69 bp, Homo sapiens
ccagcttatccttttttcattacacaaaaagactgaatttggttagttctaagttggaagataaagatg

SEQ ID NO: 49110 - DNA, 72 bp, Homo sapiens
tttttcattacacaaaaagactgaatttggttagttctaagttggaagataaagatggtatgcacaggaggc

SEQ ID NO: 49111 - DNA, 72 bp, Homo sapiens
tacacaaaaagactgaatttggttagttctaagttggaagataaagatggtatgcacaggaggcccttggga

SEQ ID NO: 49112 - DNA, 71 bp, Homo sapiens
aatttggttagttctaagttggaagataaagatggtatgcacaggaggcccttgggagccctcagataact

SEQ ID NO: 49113 - DNA, 74 bp, Homo sapiens
ttagttctaagttggaagataaagatggtatgcacaggaggcccttgggagccctcagataactttctcattct

SEQ ID NO: 49114 - DNA, 77 bp, Homo sapiens
taagttggaagataaagatggtatgcacaggaggcccttgggagccctcagataactttctcattcttccagaatca

SEQ ID NO: 49115 - DNA, 76 bp, Homo sapiens
aagttggaagataaagatggtatgcacaggaggcccttgggagccctcagataactttctcattcttccagaatca

SEQ ID NO: 49116 - DNA, 77 bp, Homo sapiens
aagataaagatggtatgcacaggaggcccttgggagccctcagataactttctcattcttccagaatcaggctggga

SEQ ID NO: 49117 - DNA, 79 bp, Homo sapiens
ataaagatggtatgcacaggaggcccttgggagccctcagataactttctcattcttccagaatcaggctgggatgcat

SEQ ID NO: 49118 - DNA, 75 bp, Homo sapiens
acaggaggcccttgggagccctcagataactttctcattcttccagaatcaggctgggatgcattctgtaaattt

SEQ ID NO: 49119 - DNA, 76 bp, Homo sapiens
ccttgggagccctcagataactttctcattcttccagaatcaggctgggatgcattctgtaaattttccctgccta

SEQ ID NO: 49120 - DNA, 79 bp, Homo sapiens
gagccctcagataactttctcattcttccagaatcaggctgggatgcattctgtaaattttccctgcctaggatgtata

SEQ ID NO: 49121 - DNA, 78 bp, Homo sapiens
agccctcagataactttctcattcttccagaatcaggctgggatgcattctgtaaattttccctgcctaggatgtata

SEQ ID NO: 49122 - DNA, 77 bp, Homo sapiens
ataactttctcattcttccagaatcaggctgggatgcattctgtaaattttccctgcctaggatgtatacctgagga

SEQ ID NO: 49123 - DNA, 75 bp, Homo sapiens
agaatcaggctgggatgcattctgtaaattttccctgcctaggatgtatacctgaggaataaggtaaggaagatg

SEQ ID NO: 49124 - DNA, 77 bp, Homo sapiens
tgggatgcattctgtaaattttccctgcctaggatgtatacctgaggaataaggtaaggaagatgtcagcaagtcag

SEQ ID NO: 49125 - DNA, 73 bp, Homo sapiens
aattttccctgcctaggatgtatacctgaggaataaggtaaggaagatgtcagcaagtcagtctctggtttac

SEQ ID NO: 49126 - DNA, 80 bp, Homo sapiens
taggatgtatacctgaggaataaggtaaggaagatgtcagcaagtcagtctctggtttacctgctagctggcatggatcc

SEQ ID NO: 49127 - DNA, 77 bp, Homo sapiens
aataaggtaaggaagatgtcagcaagtcagtctctggtttacctgctagctggcatggatccttaaggaagcaggag

SEQ ID NO: 49128 - DNA, 78 bp, Homo sapiens
aagatgtcagcaagtcagtctctggtttacctgctagctggcatggatccttaaggaagcaggagggagttgggaaga

SEQ ID NO: 49129 - DNA, 76 bp, Homo sapiens
agcaagtcagtctctggtttacctgctagctggcatggatccttaaggaagcaggagggagttgggaagagaggaa

SEQ ID NO: 49130 - DNA, 72 bp, Homo sapiens
tggtttacctgctagctggcatggatccttaaggaagcaggagggagttgggaagagaggaaggggtgaagt

SEQ ID NO: 49131 - DNA, 68 bp, Homo sapiens
atggatccttaaggaagcaggagggagttgggaagagaggaaggggtgaagttggtatcttttaaagc

SEQ ID NO: 49132 - DNA, 69 bp, Homo sapiens
taaggaagcaggagggagttgggaagagaggaaggggtgaagttggtatcttttaaagcgagagtgatt

SEQ ID NO: 49133 - DNA, 69 bp, Homo sapiens
gagggagttgggaagagaggaaggggtgaagttggtatcttttaaagcgagagtgattttacctcagat

SEQ ID NO: 49134 - DNA, 70 bp, Homo sapiens
ggaagagaggaaggggtgaagttggtatcttttaaagcgagagtgattttacctcagattttgaagaata

SEQ ID NO: 49135 - DNA, 68 bp, Homo sapiens
aggaaggggtgaagttggtatcttttaaagcgagagtgattttacctcagattttgaagaatactaag

SEQ ID NO: 49136 - DNA, 70 bp, Homo sapiens
atcttttaaagcgagagtgattttacctcagattttgaagaatactaaggaatccagttgttggggtaca

SEQ ID NO: 49137 - DNA, 72 bp, Homo sapiens
agagtgattttacctcagattttgaagaatactaaggaatccagttgttggggtacatgctattattagaag

SEQ ID NO: 49138 - DNA, 73 bp, Homo sapiens
acctcagattttgaagaatactaaggaatccagttgttggggtacatgctattattagaaggatctagataat

SEQ ID NO: 49139 - DNA, 75 bp, Homo sapiens
tttgaagaatactaaggaatccagttgttggggtacatgctattattagaaggatctagataatttgtcctctga

SEQ ID NO: 49140 - DNA, 75 bp, Homo sapiens
atactaaggaatccagttgttggggtacatgctattattagaaggatctagataatttgtcctctgagtcatact

SEQ ID NO: 49141 - DNA, 77 bp, Homo sapiens
aatccagttgttggggtacatgctattattagaaggatctagataatttgtcctctgagtcatacttgacattgtac

SEQ ID NO: 49142 - DNA, 82 bp, Homo sapiens
tattattagaaggatctagataatttgtcctctgagtcatacttgacattgtacctgtggcacatcaatccgcactgtttga

SEQ ID NO: 49143 - DNA, 83 bp, Homo sapiens
tagaaggatctagataatttgtcctctgagtcatacttgacattgtacctgtggcacatcaatccgcactgtttgatactctg

SEQ ID NO: 49144 - DNA, 84 bp, Homo sapiens
ataatttgtcctctgagtcatacttgacattgtacctgtggcacatcaatccgcactgtttgatactctggctgaatctcagct

SEQ ID NO: 49145 - DNA, 86 bp, Homo sapiens
tctgagtcatacttgacattgtacctgtggcacatcaatccgcactgtttgatactctggctgaatctcagctttcaccaacattg

SEQ ID NO: 49146 - DNA, 79 bp, Homo sapiens
tacctgtggcacatcaatccgcactgtttgatactctggctgaatctcagctttcaccaacattgtcaaaggacctttt

SEQ ID NO: 49147 - DNA, 77 bp, Homo sapiens
acatcaatccgcactgtttgatactctggctgaatctcagctttcaccaacattgtcaaaggaccttttttagtgcc

SEQ ID NO: 49148 - DNA, 76 bp, Homo sapiens
aatccgcactgtttgatactctggctgaatctcagctttcaccaacattgtcaaaggaccttttttagtgcccagc

SEQ ID NO: 49149 - DNA, 77 bp, Homo sapiens
gtttgatactctggctgaatctcagctttcaccaacattgtcaaaggaccttttttagtgcccagccatgcctaaga

SEQ ID NO: 49150 - DNA, 79 bp, Homo sapiens
tgaatctcagctttcaccaacattgtcaaaggaccttttttagtgcccagccatgcctaagagtgtgtcatctgaagag

SEQ ID NO: 49151 - DNA, 75 bp, Homo sapiens
agctttcaccaacattgtcaaaggaccttttttagtgcccagccatgcctaagagtgtgtcatctgaagagggaa

SEQ ID NO: 49152 - DNA, 79 bp, Homo sapiens
accaacattgtcaaaggaccttttttagtgcccagccatgcctaagagtgtgtcatctgaagagggaagcatctgcata

SEQ ID NO: 49153 - DNA, 80 bp, Homo sapiens
aaaggaccttttttagtgcccagccatgcctaagagtgtgtcatctgaagagggaagcatctgcatactgctgtcctgat

SEQ ID NO: 49154 - DNA, 87 bp, Homo sapiens
tttttagtgcccagccatgcctaagagtgtgtcatctgaagagggaagcatctgcatactgctgtcctgattgctcagtcctcacta

SEQ ID NO: 49155 - DNA, 83 bp, Homo sapiens
gagtgtgtcatctgaagagggaagcatctgcatactgctgtcctgattgctcagtcctcactacctaccagacccgttggtaa

SEQ ID NO: 49156 - DNA, 80 bp, Homo sapiens
tctgaagagggaagcatctgcatactgctgtcctgattgctcagtcctcactacctaccagacccgttggtaaggtacaa

SEQ ID NO: 49157 - DNA, 78 bp, Homo sapiens
ggaagcatctgcatactgctgtcctgattgctcagtcctcactacctaccagacccgttggtaaggtacaaaagtaca

SEQ ID NO: 49158 - DNA, 76 bp, Homo sapiens
catactgctgtcctgattgctcagtcctcactacctaccagacccgttggtaaggtacaaaagtacatgcttggaa

SEQ ID NO: 49159 - DNA, 74 bp, Homo sapiens
ctgtcctgattgctcagtcctcactacctaccagacccgttggtaaggtacaaaagtacatgcttggaaaagca

SEQ ID NO: 49160 - DNA, 74 bp, Homo sapiens
attgctcagtcctcactacctaccagacccgttggtaaggtacaaaagtacatgcttggaaaagcagtctgcac

SEQ ID NO: 49161 - DNA, 72 bp, Homo sapiens
actacctaccagacccgttggtaaggtacaaaagtacatgcttggaaaagcagtctgcaccaccagtgataa

SEQ ID NO: 49162 - DNA, 81 bp, Homo sapiens
taaggtacaaaagtacatgcttggaaaagcagtctgcaccaccagtgataagctgtgacagagtggaacagcctcaatgaa

SEQ ID NO: 49163 - DNA, 82 bp, Homo sapiens
tacaaaagtacatgcttggaaaagcagtctgcaccaccagtgataagctgtgacagagtggaacagcctcaatgaaatgaag

SEQ ID NO: 49164 - DNA, 83 bp, Homo sapiens
atgcttggaaaagcagtctgcaccaccagtgataagctgtgacagagtggaacagcctcaatgaaatgaaggaaggattgcta

SEQ ID NO: 49165 - DNA, 82 bp, Homo sapiens
agtctgcaccaccagtgataagctgtgacagagtggaacagcctcaatgaaatgaaggaaggattgctacagtggcattaag

SEQ ID NO: 49166 - DNA, 81 bp, Homo sapiens
accagtgataagctgtgacagagtggaacagcctcaatgaaatgaaggaaggattgctacagtggcattaaggatggtctc

SEQ ID NO: 49167 - DNA, 80 bp, Homo sapiens
ataagctgtgacagagtggaacagcctcaatgaaatgaaggaaggattgctacagtggcattaaggatggtctcttaatc

SEQ ID NO: 49168 - DNA, 77 bp, Homo sapiens
agagtggaacagcctcaatgaaatgaaggaaggattgctacagtggcattaaggatggtctcttaatcctgtgttaa

SEQ ID NO: 49169 - DNA, 73 bp, Homo sapiens
aatgaaggaaggattgctacagtggcattaaggatggtctcttaatcctgtgttaaccactagattaacttta

SEQ ID NO: 49170 - DNA, 73 bp, Homo sapiens
aaggattgctacagtggcattaaggatggtctcttaatcctgtgttaaccactagattaactttacaatcaac

SEQ ID NO: 49171 - DNA, 71 bp, Homo sapiens
agtggcattaaggatggtctcttaatcctgtgttaaccactagattaactttacaatcaactcaaaatcct

SEQ ID NO: 49172 - DNA, 70 bp, Homo sapiens
ggtctcttaatcctgtgttaaccactagattaactttacaatcaactcaaaatccttcaaaggctttcca

SEQ ID NO: 49173 - DNA, 70 bp, Homo sapiens
tgttaaccactagattaactttacaatcaactcaaaatccttcaaaggctttccactttctttagtggca

SEQ ID NO: 49174 - DNA, 70 bp, Homo sapiens
actagattaactttacaatcaactcaaaatccttcaaaggctttccactttctttagtggcattcagacc

SEQ ID NO: 49175 - DNA, 70 bp, Homo sapiens
taactttacaatcaactcaaaatccttcaaaggctttccactttctttagtggcattcagaccccctcta

SEQ ID NO: 49176 - DNA, 69 bp, Homo sapiens
atcaactcaaaatccttcaaaggctttccactttctttagtggcattcagaccccctctagtttgaccc

SEQ ID NO: 49177 - DNA, 69 bp, Homo sapiens
ttcaaaggctttccactttctttagtggcattcagaccccctctagtttgacccctacctccaacttga

SEQ ID NO: 49178 - DNA, 69 bp, Homo sapiens
ttccactttctttagtggcattcagaccccctctagtttgacccctacctccaacttgaacctctgtta

SEQ ID NO: 49179 - DNA, 69 bp, Homo sapiens
tttctttagtggcattcagaccccctctagtttgacccctacctccaacttgaacctctgttactcttc

SEQ ID NO: 49180 - DNA, 68 bp, Homo sapiens
ttcagaccccctctagtttgacccctacctccaacttgaacctctgttactcttccgtatgaacattt

SEQ ID NO: 49181 - DNA, 69 bp, Homo sapiens
ccctctagtttgacccctacctccaacttgaacctctgttactcttccgtatgaacattttcctctagc

SEQ ID NO: 49182 - DNA, 69 bp, Homo sapiens
acccctacctccaacttgaacctctgttactcttccgtatgaacattttcctctagccctggactacta

SEQ ID NO: 49183 - DNA, 72 bp, Homo sapiens
tccaacttgaacctctgttactcttccgtatgaacattttcctctagccctggactactagtaccgaagtca

SEQ ID NO: 49184 - DNA, 73 bp, Homo sapiens
ttgaacctctgttactcttccgtatgaacattttcctctagccctggactactagtaccgaagtcactagtca

SEQ ID NO: 49185 - DNA, 74 bp, Homo sapiens
ttactcttccgtatgaacattttcctctagccctggactactagtaccgaagtcactagtcacataggactcat

SEQ ID NO: 49186 - DNA, 76 bp, Homo sapiens
atgaacattttcctctagccctggactactagtaccgaagtcactagtcacataggactcatttgaaatatgacta

SEQ ID NO: 49187 - DNA, 76 bp, Homo sapiens
tttcctctagccctggactactagtaccgaagtcactagtcacataggactcatttgaaatatgactagtctcaat

SEQ ID NO: 49188 - DNA, 79 bp, Homo sapiens
ctggactactagtaccgaagtcactagtcacataggactcatttgaaatatgactagtctcaattgagatgtaatgtaa

SEQ ID NO: 49189 - DNA, 78 bp, Homo sapiens
tagtaccgaagtcactagtcacataggactcatttgaaatatgactagtctcaattgagatgtaatgtaagtgtaaaa

SEQ ID NO: 49190 - DNA, 82 bp, Homo sapiens
tcactagtcacataggactcatttgaaatatgactagtctcaattgagatgtaatgtaagtgtaaaatacacagcagatttc

SEQ ID NO: 49191 - DNA, 82 bp, Homo sapiens
cataggactcatttgaaatatgactagtctcaattgagatgtaatgtaagtgtaaaatacacagcagatttctaagacagca

SEQ ID NO: 49192 - DNA, 81 bp, Homo sapiens
ctcatttgaaatatgactagtctcaattgagatgtaatgtaagtgtaaaatacacagcagatttctaagacagcacacaaa

SEQ ID NO: 49193 - DNA, 79 bp, Homo sapiens
atatgactagtctcaattgagatgtaatgtaagtgtaaaatacacagcagatttctaagacagcacacaaaatgtaaaa

SEQ ID NO: 49194 - DNA, 77 bp, Homo sapiens
gatgtaatgtaagtgtaaaatacacagcagatttctaagacagcacacaaaatgtaaaatatgtcaaaaatatttga

SEQ ID NO: 49195 - DNA, 78 bp, Homo sapiens
gtgtaaaatacacagcagatttctaagacagcacacaaaatgtaaaatatgtcaaaaatatttgatactgattacatg

SEQ ID NO: 49196 - DNA, 80 bp, Homo sapiens
cagcagatttctaagacagcacacaaaatgtaaaatatgtcaaaaatatttgatactgattacatgttgaaatatatgtg

SEQ ID NO: 49197 - DNA, 77 bp, Homo sapiens
ttctaagacagcacacaaaatgtaaaatatgtcaaaaatatttgatactgattacatgttgaaatatatgtgttggg

SEQ ID NO: 49198 - DNA, 76 bp, Homo sapiens
cagcacacaaaatgtaaaatatgtcaaaaatatttgatactgattacatgttgaaatatatgtgttgggttaaata

SEQ ID NO: 49199 - DNA, 74 bp, Homo sapiens
tttgatactgattacatgttgaaatatatgtgttgggttaaataaaatgcattaaagttaatttcatctgtttc

SEQ ID NO: 49200 - DNA, 70 bp, Homo sapiens
gattacatgttgaaatatatgtgttgggttaaataaaatgcattaaagttaatttcatctgtttcttttt

SEQ ID NO: 49201 - DNA, 80 bp, Homo sapiens
ctgggtctccagctcactcaccaccacctcgttctctctcttgcagaggagcccacgttccgctgtgacgagtgtgacga

SEQ ID NO: 49202 - DNA, 79 bp, Homo sapiens
agctcactcaccaccacctcgttctctctcttgcagaggagcccacgttccgctgtgacgagtgtgacgaactcttcca

SEQ ID NO: 49203 - DNA, 76 bp, Homo sapiens
accaccacctcgttctctctcttgcagaggagcccacgttccgctgtgacgagtgtgacgaactcttccagtccaa

SEQ ID NO: 49204 - DNA, 77 bp, Homo sapiens
acctcgttctctctcttgcagaggagcccacgttccgctgtgacgagtgtgacgaactcttccagtccaagctggac

SEQ ID NO: 49205 - DNA, 79 bp, Homo sapiens
ttgcagaggagcccacgttccgctgtgacgagtgtgacgaactcttccagtccaagctggacctgcggcgccataagaa

SEQ ID NO: 49206 - DNA, 76 bp, Homo sapiens
agcccacgttccgctgtgacgagtgtgacgaactcttccagtccaagctggacctgcggcgccataagaagtacac

SEQ ID NO: 49207 - DNA, 79 bp, Homo sapiens
gttccgctgtgacgagtgtgacgaactcttccagtccaagctggacctgcggcgccataagaagtacacgtgtggctca

SEQ ID NO: 49208 - DNA, 76 bp, Homo sapiens
acgagtgtgacgaactcttccagtccaagctggacctgcggcgccataagaagtacacgtgtggctcagtgggggc

SEQ ID NO: 49209 - DNA, 77 bp, Homo sapiens
aactcttccagtccaagctggacctgcggcgccataagaagtacacgtgtggctcagtgggggctgcgctctacgag

SEQ ID NO: 49210 - DNA, 79 bp, Homo sapiens
agtccaagctggacctgcggcgccataagaagtacacgtgtggctcagtgggggctgcgctctacgagggcctggctga

SEQ ID NO: 49211 - DNA, 80 bp, Homo sapiens
ctggacctgcggcgccataagaagtacacgtgtggctcagtgggggctgcgctctacgagggcctggctgaggagctcaa

SEQ ID NO: 49212 - DNA, 77 bp, Homo sapiens
ccataagaagtacacgtgtggctcagtgggggctgcgctctacgagggcctggctgaggagctcaagcccgagggcc

SEQ ID NO: 49213 - DNA, 77 bp, Homo sapiens
agaagtacacgtgtggctcagtgggggctgcgctctacgagggcctggctgaggagctcaagcccgagggccttggc

SEQ ID NO: 49214 - DNA, 79 bp, Homo sapiens
tggctcagtgggggctgcgctctacgagggcctggctgaggagctcaagcccgagggccttggcggtggcagcggccaa

SEQ ID NO: 49215 - DNA, 80 bp, Homo sapiens
ggctgcgctctacgagggcctggctgaggagctcaagcccgagggccttggcggtggcagcggccaagcccacgagtgca

SEQ ID NO: 49216 - DNA, 77 bp, Homo sapiens
ctctacgagggcctggctgaggagctcaagcccgagggccttggcggtggcagcggccaagcccacgagtgcaagga

SEQ ID NO: 49217 - DNA, 80 bp, Homo sapiens
tggctgaggagctcaagcccgagggccttggcggtggcagcggccaagcccacgagtgcaaggactgcgagcggatgttc

SEQ ID NO: 49218 - DNA, 76 bp, Homo sapiens
aggagctcaagcccgagggccttggcggtggcagcggccaagcccacgagtgcaaggactgcgagcggatgttccc

SEQ ID NO: 49219 - DNA, 75 bp, Homo sapiens
ccgagggccttggcggtggcagcggccaagcccacgagtgcaaggactgcgagcggatgttccccaacaagtaca

SEQ ID NO: 49220 - DNA, 76 bp, Homo sapiens
ccttggcggtggcagcggccaagcccacgagtgcaaggactgcgagcggatgttccccaacaagtacaggtgccac

SEQ ID NO: 49221 - DNA, 76 bp, Homo sapiens
agcggccaagcccacgagtgcaaggactgcgagcggatgttccccaacaagtacaggtgccacgccctcctctgag

SEQ ID NO: 49222 - DNA, 75 bp, Homo sapiens
aagcccacgagtgcaaggactgcgagcggatgttccccaacaagtacaggtgccacgccctcctctgagtcttcc

SEQ ID NO: 49223 - DNA, 74 bp, Homo sapiens
gtgcaaggactgcgagcggatgttccccaacaagtacaggtgccacgccctcctctgagtcttcctccccttcc

SEQ ID NO: 49224 - DNA, 82 bp, Homo sapiens
agagggcaggtagtcgggccccgcagtgagcctcgtcctctgcgcagcctggagcagcacatggtcatccacacggaggagc

SEQ ID NO: 49225 - DNA, 83 bp, Homo sapiens
tagtcgggccccgcagtgagcctcgtcctctgcgcagcctggagcagcacatggtcatccacacggaggagcgcgagtacaaa

SEQ ID NO: 49226 - DNA, 86 bp, Homo sapiens
ccgcagtgagcctcgtcctctgcgcagcctggagcagcacatggtcatccacacggaggagcgcgagtacaaatgcgaccagtgtc

SEQ ID NO: 49227 - DNA, 85 bp, Homo sapiens
tgagcctcgtcctctgcgcagcctggagcagcacatggtcatccacacggaggagcgcgagtacaaatgcgaccagtgtcccaag

SEQ ID NO: 49228 - DNA, 84 bp, Homo sapiens
tctgcgcagcctggagcagcacatggtcatccacacggaggagcgcgagtacaaatgcgaccagtgtcccaaggccttcaactg

SEQ ID NO: 49229 - DNA, 80 bp, Homo sapiens
gagcagcacatggtcatccacacggaggagcgcgagtacaaatgcgaccagtgtcccaaggccttcaactggaagtccaa

SEQ ID NO: 49230 - DNA, 76 bp, Homo sapiens
atggtcatccacacggaggagcgcgagtacaaatgcgaccagtgtcccaaggccttcaactggaagtccaacctca

SEQ ID NO: 49231 - DNA, 75 bp, Homo sapiens
atccacacggaggagcgcgagtacaaatgcgaccagtgtcccaaggccttcaactggaagtccaacctcatccgc

SEQ ID NO: 49232 - DNA, 76 bp, Homo sapiens
aggagcgcgagtacaaatgcgaccagtgtcccaaggccttcaactggaagtccaacctcatccgccaccagatgtc

SEQ ID NO: 49233 - DNA, 76 bp, Homo sapiens
tacaaatgcgaccagtgtcccaaggccttcaactggaagtccaacctcatccgccaccagatgtcccacgacagcg

SEQ ID NO: 49234 - DNA, 74 bp, Homo sapiens
agtgtcccaaggccttcaactggaagtccaacctcatccgccaccagatgtcccacgacagcggcaaacgcttc

SEQ ID NO: 49235 - DNA, 75 bp, Homo sapiens
gccttcaactggaagtccaacctcatccgccaccagatgtcccacgacagcggcaaacgcttcgaatgtgaaaac

SEQ ID NO: 49236 - DNA, 76 bp, Homo sapiens
aactggaagtccaacctcatccgccaccagatgtcccacgacagcggcaaacgcttcgaatgtgaaaactgcgtga

SEQ ID NO: 49237 - DNA, 75 bp, Homo sapiens
aacctcatccgccaccagatgtcccacgacagcggcaaacgcttcgaatgtgaaaactgcgtgaaggtaacctgc

SEQ ID NO: 49238 - DNA, 73 bp, Homo sapiens
caccagatgtcccacgacagcggcaaacgcttcgaatgtgaaaactgcgtgaaggtaacctgcggggcggccc

SEQ ID NO: 49239 - DNA, 71 bp, Homo sapiens
atgtcccacgacagcggcaaacgcttcgaatgtgaaaactgcgtgaaggtaacctgcggggcggccccgtc

SEQ ID NO: 49240 - DNA, 70 bp, Homo sapiens
acagcggcaaacgcttcgaatgtgaaaactgcgtgaaggtaacctgcggggcggccccgtctcagccccg

SEQ ID NO: 49241 - DNA, 71 bp, Homo sapiens
aaggcgggtgtccaggcagggcacgcgccaacggcatccgtctccccaggtgttcacggaccccagcaacc

SEQ ID NO: 49242 - DNA, 76 bp, Homo sapiens
tccaggcagggcacgcgccaacggcatccgtctccccaggtgttcacggaccccagcaaccttcagcggcacatcc

SEQ ID NO: 49243 - DNA, 76 bp, Homo sapiens
acgcgccaacggcatccgtctccccaggtgttcacggaccccagcaaccttcagcggcacatccgctcgcagcacg

SEQ ID NO: 49244 - DNA, 76 bp, Homo sapiens
aacggcatccgtctccccaggtgttcacggaccccagcaaccttcagcggcacatccgctcgcagcacgtgggcgc

SEQ ID NO: 49245 - DNA, 76 bp, Homo sapiens
gtctccccaggtgttcacggaccccagcaaccttcagcggcacatccgctcgcagcacgtgggcgctcgggcccac

SEQ ID NO: 49246 - DNA, 77 bp, Homo sapiens
tgttcacggaccccagcaaccttcagcggcacatccgctcgcagcacgtgggcgctcgggcccacgcctgccccgac

SEQ ID NO: 49247 - DNA, 77 bp, Homo sapiens
cagcaaccttcagcggcacatccgctcgcagcacgtgggcgctcgggcccacgcctgccccgactgcgggaagacct

SEQ ID NO: 49248 - DNA, 76 bp, Homo sapiens
accttcagcggcacatccgctcgcagcacgtgggcgctcgggcccacgcctgccccgactgcgggaagaccttcgc

SEQ ID NO: 49249 - DNA, 74 bp, Homo sapiens
acatccgctcgcagcacgtgggcgctcgggcccacgcctgccccgactgcgggaagaccttcgccacgtcctcc

SEQ ID NO: 49250 - DNA, 73 bp, Homo sapiens
agcacgtgggcgctcgggcccacgcctgccccgactgcgggaagaccttcgccacgtcctccggcctcaagca

SEQ ID NO: 49251 - DNA, 77 bp, Homo sapiens
gctcgggcccacgcctgccccgactgcgggaagaccttcgccacgtcctccggcctcaagcagcacaagcatatcca

SEQ ID NO: 49252 - DNA, 78 bp, Homo sapiens
acgcctgccccgactgcgggaagaccttcgccacgtcctccggcctcaagcagcacaagcatatccacagcacggtga

SEQ ID NO: 49253 - DNA, 79 bp, Homo sapiens
cgactgcgggaagaccttcgccacgtcctccggcctcaagcagcacaagcatatccacagcacggtgaagcctttcata

SEQ ID NO: 49254 - DNA, 80 bp, Homo sapiens
aagaccttcgccacgtcctccggcctcaagcagcacaagcatatccacagcacggtgaagcctttcatatgtgagtggtc

SEQ ID NO: 49255 - DNA, 82 bp, Homo sapiens
cttcgccacgtcctccggcctcaagcagcacaagcatatccacagcacggtgaagcctttcatatgtgagtggtcgcccagc

SEQ ID NO: 49256 - DNA, 84 bp, Homo sapiens
tcctccggcctcaagcagcacaagcatatccacagcacggtgaagcctttcatatgtgagtggtcgcccagcctggccgcctgc

SEQ ID NO: 49257 - DNA, 80 bp, Homo sapiens
aagcagcacaagcatatccacagcacggtgaagcctttcatatgtgagtggtcgcccagcctggccgcctgccctccggg

SEQ ID NO: 49258 - DNA, 75 bp, Homo sapiens
gtttcccggtcatttcatgcgggtttgtcttggcttctgctgatgttttaggtgaggtctgccacaagtcctaca

SEQ ID NO: 49259 - DNA, 77 bp, Homo sapiens
atttcatgcgggtttgtcttggcttctgctgatgttttaggtgaggtctgccacaagtcctacacgcagttctccaa

SEQ ID NO: 49260 - DNA, 79 bp, Homo sapiens
ttgtcttggcttctgctgatgttttaggtgaggtctgccacaagtcctacacgcagttctccaacctgtgccggcacaa

SEQ ID NO: 49261 - DNA, 80 bp, Homo sapiens
cttctgctgatgttttaggtgaggtctgccacaagtcctacacgcagttctccaacctgtgccggcacaagcggatgcac

SEQ ID NO: 49262 - DNA, 77 bp, Homo sapiens
atgttttaggtgaggtctgccacaagtcctacacgcagttctccaacctgtgccggcacaagcggatgcacgccgac

SEQ ID NO: 49263 - DNA, 82 bp, Homo sapiens
aggtctgccacaagtcctacacgcagttctccaacctgtgccggcacaagcggatgcacgccgactgccgcacgcagatcaa

SEQ ID NO: 49264 - DNA, 82 bp, Homo sapiens
acaagtcctacacgcagttctccaacctgtgccggcacaagcggatgcacgccgactgccgcacgcagatcaagtgcaagga

SEQ ID NO: 49265 - DNA, 84 bp, Homo sapiens
ctacacgcagttctccaacctgtgccggcacaagcggatgcacgccgactgccgcacgcagatcaagtgcaaggactgtggcca

SEQ ID NO: 49266 - DNA, 87 bp, Homo sapiens
tctccaacctgtgccggcacaagcggatgcacgccgactgccgcacgcagatcaagtgcaaggactgtggccagatgttcagcacta

SEQ ID NO: 49267 - DNA, 86 bp, Homo sapiens
tgtgccggcacaagcggatgcacgccgactgccgcacgcagatcaagtgcaaggactgtggccagatgttcagcactacctcctcc

SEQ ID NO: 49268 - DNA, 83 bp, Homo sapiens
aagcggatgcacgccgactgccgcacgcagatcaagtgcaaggactgtggccagatgttcagcactacctcctccctcaacaa

SEQ ID NO: 49269 - DNA, 82 bp, Homo sapiens
cgactgccgcacgcagatcaagtgcaaggactgtggccagatgttcagcactacctcctccctcaacaagcaccggcgcttc

SEQ ID NO: 49270 - DNA, 82 bp, Homo sapiens
acgcagatcaagtgcaaggactgtggccagatgttcagcactacctcctccctcaacaagcaccggcgcttctgcgagggca

SEQ ID NO: 49271 - DNA, 80 bp, Homo sapiens
atcaagtgcaaggactgtggccagatgttcagcactacctcctccctcaacaagcaccggcgcttctgcgagggcaagaa

SEQ ID NO: 49272 - DNA, 77 bp, Homo sapiens
aaggactgtggccagatgttcagcactacctcctccctcaacaagcaccggcgcttctgcgagggcaagaaccatta

SEQ ID NO: 49273 - DNA, 75 bp, Homo sapiens
agatgttcagcactacctcctccctcaacaagcaccggcgcttctgcgagggcaagaaccattacacgccgggcg

SEQ ID NO: 49274 - DNA, 74 bp, Homo sapiens
actacctcctccctcaacaagcaccggcgcttctgcgagggcaagaaccattacacgccgggcggcatctttgc

SEQ ID NO: 49275 - DNA, 73 bp, Homo sapiens
tcctccctcaacaagcaccggcgcttctgcgagggcaagaaccattacacgccgggcggcatctttgccccgg

SEQ ID NO: 49276 - DNA, 73 bp, Homo sapiens
aagcaccggcgcttctgcgagggcaagaaccattacacgccgggcggcatctttgccccgggcctgcccttga

SEQ ID NO: 49277 - DNA, 71 bp, Homo sapiens
cttctgcgagggcaagaaccattacacgccgggcggcatctttgccccgggcctgcccttgacccccagcc

SEQ ID NO: 49278 - DNA, 72 bp, Homo sapiens
caagaaccattacacgccgggcggcatctttgccccgggcctgcccttgacccccagccccatgatggacaa

SEQ ID NO: 49279 - DNA, 71 bp, Homo sapiens
attacacgccgggcggcatctttgccccgggcctgcccttgacccccagccccatgatggacaaggcaaaa

SEQ ID NO: 49280 - DNA, 71 bp, Homo sapiens
tttgccccgggcctgcccttgacccccagccccatgatggacaaggcaaaaccctcccccagcctcaatca

SEQ ID NO: 49281 - DNA, 73 bp, Homo sapiens
gggcctgcccttgacccccagccccatgatggacaaggcaaaaccctcccccagcctcaatcacgccagcctg

SEQ ID NO: 49282 - DNA, 71 bp, Homo sapiens
cctcccccagcctcaatcacgccagcctgggcttcaacgagtactttccctccaggccgcacccggggagc

SEQ ID NO: 49283 - DNA, 72 bp, Homo sapiens
agcctcaatcacgccagcctgggcttcaacgagtactttccctccaggccgcacccggggagcctgcccttc

SEQ ID NO: 49284 - DNA, 70 bp, Homo sapiens
acgccagcctgggcttcaacgagtactttccctccaggccgcacccggggagcctgcccttctccacggc

SEQ ID NO: 49285 - DNA, 69 bp, Homo sapiens
gcttcaacgagtactttccctccaggccgcacccggggagcctgcccttctccacggcgcctcccacgt

SEQ ID NO: 49286 - DNA, 69 bp, Homo sapiens
ttccctccaggccgcacccggggagcctgcccttctccacggcgcctcccacgttccccgcactcaccc

SEQ ID NO: 49287 - DNA, 65 bp, Homo sapiens
acccggggagcctgcccttctccacggcgcctcccacgttccccgcactcacccccggcttcccg

SEQ ID NO: 49288 - DNA, 68 bp, Homo sapiens
cctgcccttctccacggcgcctcccacgttccccgcactcacccccggcttcccgggcatcttccctc

SEQ ID NO: 49289 - DNA, 68 bp, Homo sapiens
ccttctccacggcgcctcccacgttccccgcactcacccccggcttcccgggcatcttccctccatcc

SEQ ID NO: 49290 - DNA, 67 bp, Homo sapiens
ggcgcctcccacgttccccgcactcacccccggcttcccgggcatcttccctccatccttgtacccc

SEQ ID NO: 49291 - DNA, 74 bp, Homo sapiens
cttcccgggcatcttccctccatccttgtacccccggccgcctctgctacctcccacatcgctgctcaagagcc

SEQ ID NO: 49292 - DNA, 74 bp, Homo sapiens
cttccctccatccttgtacccccggccgcctctgctacctcccacatcgctgctcaagagccccctgaaccaca

SEQ ID NO: 49293 - DNA, 75 bp, Homo sapiens
cccggccgcctctgctacctcccacatcgctgctcaagagccccctgaaccacacccaggacgccaagctcccca

SEQ ID NO: 49294 - DNA, 75 bp, Homo sapiens
ccgcctctgctacctcccacatcgctgctcaagagccccctgaaccacacccaggacgccaagctccccagtccc

SEQ ID NO: 49295 - DNA, 73 bp, Homo sapiens
tacctcccacatcgctgctcaagagccccctgaaccacacccaggacgccaagctccccagtcccctggggaa

SEQ ID NO: 49296 - DNA, 71 bp, Homo sapiens
atcgctgctcaagagccccctgaaccacacccaggacgccaagctccccagtcccctggggaacccagccc

SEQ ID NO: 49297 - DNA, 67 bp, Homo sapiens
aagagccccctgaaccacacccaggacgccaagctccccagtcccctggggaacccagccctgcccc

SEQ ID NO: 49298 - DNA, 71 bp, Homo sapiens
cacacccaggacgccaagctccccagtcccctggggaacccagccctgcccctggtctccgccgtcagcaa

SEQ ID NO: 49299 - DNA, 75 bp, Homo sapiens
tcccctggggaacccagccctgcccctggtctccgccgtcagcaacagcagccagggcacgacggcagctgcggg

SEQ ID NO: 49300 - DNA, 77 bp, Homo sapiens
cagccctgcccctggtctccgccgtcagcaacagcagccagggcacgacggcagctgcggggcccgaggagaagttc

SEQ ID NO: 49301 - DNA, 77 bp, Homo sapiens
ccctggtctccgccgtcagcaacagcagccagggcacgacggcagctgcggggcccgaggagaagttcgagagccgc

SEQ ID NO: 49302 - DNA, 79 bp, Homo sapiens
tctccgccgtcagcaacagcagccagggcacgacggcagctgcggggcccgaggagaagttcgagagccgcctggagga

SEQ ID NO: 49303 - DNA, 77 bp, Homo sapiens
aacagcagccagggcacgacggcagctgcggggcccgaggagaagttcgagagccgcctggaggactcctgtgtgga

SEQ ID NO: 49304 - DNA, 76 bp, Homo sapiens
agggcacgacggcagctgcggggcccgaggagaagttcgagagccgcctggaggactcctgtgtggagaagctgaa

SEQ ID NO: 49305 - DNA, 76 bp, Homo sapiens
acggcagctgcggggcccgaggagaagttcgagagccgcctggaggactcctgtgtggagaagctgaagaccagga

SEQ ID NO: 49306 - DNA, 79 bp, Homo sapiens
ggcccgaggagaagttcgagagccgcctggaggactcctgtgtggagaagctgaagaccaggagcagcgacatgtcgga

SEQ ID NO: 49307 - DNA, 82 bp, Homo sapiens
tcgagagccgcctggaggactcctgtgtggagaagctgaagaccaggagcagcgacatgtcggacggcagtgactttgagga

SEQ ID NO: 49308 - DNA, 79 bp, Homo sapiens
aggactcctgtgtggagaagctgaagaccaggagcagcgacatgtcggacggcagtgactttgaggacgtcaacaccac

SEQ ID NO: 49309 - DNA, 79 bp, Homo sapiens
tcctgtgtggagaagctgaagaccaggagcagcgacatgtcggacggcagtgactttgaggacgtcaacaccaccacgg

SEQ ID NO: 49310 - DNA, 75 bp, Homo sapiens
ctgaagaccaggagcagcgacatgtcggacggcagtgactttgaggacgtcaacaccaccacggggaccgacctg

SEQ ID NO: 49311 - DNA, 74 bp, Homo sapiens
aggagcagcgacatgtcggacggcagtgactttgaggacgtcaacaccaccacggggaccgacctggacacgac

SEQ ID NO: 49312 - DNA, 72 bp, Homo sapiens
agcgacatgtcggacggcagtgactttgaggacgtcaacaccaccacggggaccgacctggacacgaccacg

SEQ ID NO: 49313 - DNA, 66 bp, Homo sapiens
actttgaggacgtcaacaccaccacggggaccgacctggacacgaccacggggacgggctcggacc

SEQ ID NO: 49314 - DNA, 70 bp, Homo sapiens
tcaacaccaccacggggaccgacctggacacgaccacggggacgggctcggacctggacagcgacgtgga

SEQ ID NO: 49315 - DNA, 69 bp, Homo sapiens
accacggggaccgacctggacacgaccacggggacgggctcggacctggacagcgacgtggacagcgac

SEQ ID NO: 49316 - DNA, 71 bp, Homo sapiens
accgacctggacacgaccacggggacgggctcggacctggacagcgacgtggacagcgaccctgacaagga

SEQ ID NO: 49317 - DNA, 72 bp, Homo sapiens
acgggctcggacctggacagcgacgtggacagcgaccctgacaaggacaagggcaagggcaagtccgccgag

SEQ ID NO: 49318 - DNA, 73 bp, Homo sapiens
acctggacagcgacgtggacagcgaccctgacaaggacaagggcaagggcaagtccgccgagggccagcccaa

SEQ ID NO: 49319 - DNA, 69 bp, Homo sapiens
agcgaccctgacaaggacaagggcaagggcaagtccgccgagggccagcccaagtttgggggcggcttg

SEQ ID NO: 49320 - DNA, 69 bp, Homo sapiens
cctgacaaggacaagggcaagggcaagtccgccgagggccagcccaagtttgggggcggcttggcgccc

SEQ ID NO: 49321 - DNA, 65 bp, Homo sapiens
acaagggcaagggcaagtccgccgagggccagcccaagtttgggggcggcttggcgcccccgggg

SEQ ID NO: 49322 - DNA, 64 bp, Homo sapiens
agggcaagtccgccgagggccagcccaagtttgggggcggcttggcgcccccgggggccccgaa

SEQ ID NO: 49323 - DNA, 67 bp, Homo sapiens
caagtttgggggcggcttggcgcccccgggggccccgaacagcgtggccgaggtgcctgtcttctat

SEQ ID NO: 49324 - DNA, 71 bp, Homo sapiens
gggcggcttggcgcccccgggggccccgaacagcgtggccgaggtgcctgtcttctattcccagcactcat

SEQ ID NO: 49325 - DNA, 71 bp, Homo sapiens
cttggcgcccccgggggccccgaacagcgtggccgaggtgcctgtcttctattcccagcactcattcttcc

SEQ ID NO: 49326 - DNA, 77 bp, Homo sapiens
ggccccgaacagcgtggccgaggtgcctgtcttctattcccagcactcattcttcccgccacccgacgagcagctgc

SEQ ID NO: 49327 - DNA, 80 bp, Homo sapiens
aacagcgtggccgaggtgcctgtcttctattcccagcactcattcttcccgccacccgacgagcagctgctgactgcaac

SEQ ID NO: 49328 - DNA, 78 bp, Homo sapiens
aggtgcctgtcttctattcccagcactcattcttcccgccacccgacgagcagctgctgactgcaacgggcgccgccg

SEQ ID NO: 49329 - DNA, 78 bp, Homo sapiens
tcttctattcccagcactcattcttcccgccacccgacgagcagctgctgactgcaacgggcgccgccggggactcca

SEQ ID NO: 49330 - DNA, 80 bp, Homo sapiens
tcattcttcccgccacccgacgagcagctgctgactgcaacgggcgccgccggggactccatcaaggccatcgcatccat

SEQ ID NO: 49331 - DNA, 79 bp, Homo sapiens
acccgacgagcagctgctgactgcaacgggcgccgccggggactccatcaaggccatcgcatccattgccgagaagtac

SEQ ID NO: 49332 - DNA, 80 bp, Homo sapiens
acgagcagctgctgactgcaacgggcgccgccggggactccatcaaggccatcgcatccattgccgagaagtactttggc

SEQ ID NO: 49333 - DNA, 75 bp, Homo sapiens
tgactgcaacgggcgccgccggggactccatcaaggccatcgcatccattgccgagaagtactttggccccggct

SEQ ID NO: 49334 - DNA, 73 bp, Homo sapiens
acgggcgccgccggggactccatcaaggccatcgcatccattgccgagaagtactttggccccggcttcatgg

SEQ ID NO: 49335 - DNA, 74 bp, Homo sapiens
ttgccgagaagtactttggccccggcttcatggggatgcaggagaagaagctgggctcgctcccctaccactcg

SEQ ID NO: 49336 - DNA, 72 bp, Homo sapiens
gtactttggccccggcttcatggggatgcaggagaagaagctgggctcgctcccctaccactcggcgttccc

SEQ ID NO: 49337 - DNA, 72 bp, Homo sapiens
cccggcttcatggggatgcaggagaagaagctgggctcgctcccctaccactcggcgttccccttccagttc

SEQ ID NO: 49338 - DNA, 71 bp, Homo sapiens
atgcaggagaagaagctgggctcgctcccctaccactcggcgttccccttccagttcctgcccaacttccc

SEQ ID NO: 49339 - DNA, 68 bp, Homo sapiens
aagaagctgggctcgctcccctaccactcggcgttccccttccagttcctgcccaacttcccccactc

SEQ ID NO: 49340 - DNA, 67 bp, Homo sapiens
tgggctcgctcccctaccactcggcgttccccttccagttcctgcccaacttcccccactcccttta

SEQ ID NO: 49341 - DNA, 65 bp, Homo sapiens
taccactcggcgttccccttccagttcctgcccaacttcccccactccctttaccccttcacgga

SEQ ID NO: 49342 - DNA, 64 bp, Homo sapiens
ctcggcgttccccttccagttcctgcccaacttcccccactccctttaccccttcacggaccga

SEQ ID NO: 49343 - DNA, 65 bp, Homo sapiens
ccagttcctgcccaacttcccccactccctttaccccttcacggaccgagccctcgcccacaact

SEQ ID NO: 49344 - DNA, 66 bp, Homo sapiens
cccaacttcccccactccctttaccccttcacggaccgagccctcgcccacaacttgctggtcaag

SEQ ID NO: 49345 - DNA, 68 bp, Homo sapiens
cccactccctttaccccttcacggaccgagccctcgcccacaacttgctggtcaaggccgagccaaag

SEQ ID NO: 49346 - DNA, 68 bp, Homo sapiens
ccctttaccccttcacggaccgagccctcgcccacaacttgctggtcaaggccgagccaaagtcaccc

SEQ ID NO: 49347 - DNA, 71 bp, Homo sapiens
ttcacggaccgagccctcgcccacaacttgctggtcaaggccgagccaaagtcaccccgggacgccctcaa

SEQ ID NO: 49348 - DNA, 70 bp, Homo sapiens
acaacttgctggtcaaggccgagccaaagtcaccccgggacgccctcaaggtgggcggccccagtgccga

SEQ ID NO: 49349 - DNA, 70 bp, Homo sapiens
agccaaagtcaccccgggacgccctcaaggtgggcggccccagtgccgagtgcccctttgatctcaccac

SEQ ID NO: 49350 - DNA, 70 bp, Homo sapiens
aagtcaccccgggacgccctcaaggtgggcggccccagtgccgagtgcccctttgatctcaccaccaagc

SEQ ID NO: 49351 - DNA, 73 bp, Homo sapiens
aaggtgggcggccccagtgccgagtgcccctttgatctcaccaccaagcccaaagacgtgaagcccatcctgc

SEQ ID NO: 49352 - DNA, 75 bp, Homo sapiens
cccagtgccgagtgcccctttgatctcaccaccaagcccaaagacgtgaagcccatcctgcccatgcccaagggc

SEQ ID NO: 49353 - DNA, 73 bp, Homo sapiens
ccgagtgcccctttgatctcaccaccaagcccaaagacgtgaagcccatcctgcccatgcccaagggcccctc

SEQ ID NO: 49354 - DNA, 74 bp, Homo sapiens
tttgatctcaccaccaagcccaaagacgtgaagcccatcctgcccatgcccaagggcccctcggcccccgcatc

SEQ ID NO: 49355 - DNA, 74 bp, Homo sapiens
aaagacgtgaagcccatcctgcccatgcccaagggcccctcggcccccgcatccggcgaggagcagccgctgga

SEQ ID NO: 49356 - DNA, 76 bp, Homo sapiens
aagcccatcctgcccatgcccaagggcccctcggcccccgcatccggcgaggagcagccgctggacctgagcatcg

SEQ ID NO: 49357 - DNA, 75 bp, Homo sapiens
catgcccaagggcccctcggcccccgcatccggcgaggagcagccgctggacctgagcatcggcagccgggcccg

SEQ ID NO: 49358 - DNA, 76 bp, Homo sapiens
ggcccctcggcccccgcatccggcgaggagcagccgctggacctgagcatcggcagccgggcccgtgccagccaaa

SEQ ID NO: 49359 - DNA, 76 bp, Homo sapiens
tcggcccccgcatccggcgaggagcagccgctggacctgagcatcggcagccgggcccgtgccagccaaaacggcg

SEQ ID NO: 49360 - DNA, 75 bp, Homo sapiens
atccggcgaggagcagccgctggacctgagcatcggcagccgggcccgtgccagccaaaacggcggcgggcggga

SEQ ID NO: 49361 - DNA, 74 bp, Homo sapiens
cagccgctggacctgagcatcggcagccgggcccgtgccagccaaaacggcggcgggcgggagccccgcaagaa

SEQ ID NO: 49362 - DNA, 71 bp, Homo sapiens
acctgagcatcggcagccgggcccgtgccagccaaaacggcggcgggcgggagccccgcaagaaccacgtc

SEQ ID NO: 49363 - DNA, 71 bp, Homo sapiens
agcatcggcagccgggcccgtgccagccaaaacggcggcgggcgggagccccgcaagaaccacgtctatgg

SEQ ID NO: 49364 - DNA, 70 bp, Homo sapiens
ggcccgtgccagccaaaacggcggcgggcgggagccccgcaagaaccacgtctatggggaacgcaagctg

SEQ ID NO: 49365 - DNA, 71 bp, Homo sapiens
tgccagccaaaacggcggcgggcgggagccccgcaagaaccacgtctatggggaacgcaagctgggcgccg

SEQ ID NO: 49366 - DNA, 68 bp, Homo sapiens
aacggcggcgggcgggagccccgcaagaaccacgtctatggggaacgcaagctgggcgccggcgaggg

SEQ ID NO: 49367 - DNA, 71 bp, Homo sapiens
ggcgggagccccgcaagaaccacgtctatggggaacgcaagctgggcgccggcgaggggctgccccaggtg

SEQ ID NO: 49368 - DNA, 73 bp, Homo sapiens
aagaaccacgtctatggggaacgcaagctgggcgccggcgaggggctgccccaggtgtgcccggcgcggatgc

SEQ ID NO: 49369 - DNA, 75 bp, Homo sapiens
acgcaagctgggcgccggcgaggggctgccccaggtgtgcccggcgcggatgccccagcagcccccgctccacta

SEQ ID NO: 49370 - DNA, 74 bp, Homo sapiens
ctgggcgccggcgaggggctgccccaggtgtgcccggcgcggatgccccagcagcccccgctccactacgccaa

SEQ ID NO: 49371 - DNA, 73 bp, Homo sapiens
ggggctgccccaggtgtgcccggcgcggatgccccagcagcccccgctccactacgccaagccctcgcccttc

SEQ ID NO: 49372 - DNA, 74 bp, Homo sapiens
cccggcgcggatgccccagcagcccccgctccactacgccaagccctcgcccttcttcatggaccccatctaca

SEQ ID NO: 49373 - DNA, 76 bp, Homo sapiens
atgccccagcagcccccgctccactacgccaagccctcgcccttcttcatggaccccatctacaggtattcagcac

SEQ ID NO: 49374 - DNA, 70 bp, Homo sapiens
tcggcggggcgggcggctcggtggggtacgtaaccctctgtgctgttgtccagcagggtagaaaagcgga

SEQ ID NO: 49375 - DNA, 71 bp, Homo sapiens
gggcggctcggtggggtacgtaaccctctgtgctgttgtccagcagggtagaaaagcggaaggtcacagac

SEQ ID NO: 49376 - DNA, 70 bp, Homo sapiens
tcggtggggtacgtaaccctctgtgctgttgtccagcagggtagaaaagcggaaggtcacagaccccgtg

SEQ ID NO: 49377 - DNA, 72 bp, Homo sapiens
tacgtaaccctctgtgctgttgtccagcagggtagaaaagcggaaggtcacagaccccgtgggagccctgaa

SEQ ID NO: 49378 - DNA, 73 bp, Homo sapiens
tctgtgctgttgtccagcagggtagaaaagcggaaggtcacagaccccgtgggagccctgaaggagaagtacc

SEQ ID NO: 49379 - DNA, 69 bp, Homo sapiens
agcagggtagaaaagcggaaggtcacagaccccgtgggagccctgaaggagaagtacctgcggccgtcc

SEQ ID NO: 49380 - DNA, 69 bp, Homo sapiens
aaaagcggaaggtcacagaccccgtgggagccctgaaggagaagtacctgcggccgtccccgctgctct

SEQ ID NO: 49381 - DNA, 70 bp, Homo sapiens
cggaaggtcacagaccccgtgggagccctgaaggagaagtacctgcggccgtccccgctgctcttccacc

SEQ ID NO: 49382 - DNA, 68 bp, Homo sapiens
cccgtgggagccctgaaggagaagtacctgcggccgtccccgctgctcttccacccccaggtacgtcc

SEQ ID NO: 49383 - DNA, 72 bp, Homo sapiens
ccctgaaggagaagtacctgcggccgtccccgctgctcttccacccccaggtacgtcctcagtgcaggtcag

SEQ ID NO: 49384 - DNA, 72 bp, Homo sapiens
aaggagaagtacctgcggccgtccccgctgctcttccacccccaggtacgtcctcagtgcaggtcagggcgc

SEQ ID NO: 49385 - DNA, 71 bp, Homo sapiens
acctgcggccgtccccgctgctcttccacccccaggtacgtcctcagtgcaggtcagggcgccctgtaacc

SEQ ID NO: 49386 - DNA, 78 bp, Homo sapiens
tgccgcgctctgcctgcccccgggtgctgtccgcggcggttcgattggagcagccgccgaagagcgcttggcgccatt

SEQ ID NO: 49387 - DNA, 76 bp, Homo sapiens
ctctgcctgcccccgggtgctgtccgcggcggttcgattggagcagccgccgaagagcgcttggcgccattttgaa

SEQ ID NO: 49388 - DNA, 75 bp, Homo sapiens
cccgggtgctgtccgcggcggttcgattggagcagccgccgaagagcgcttggcgccattttgaagcggagagga

SEQ ID NO: 49389 - DNA, 75 bp, Homo sapiens
ctgtccgcggcggttcgattggagcagccgccgaagagcgcttggcgccattttgaagcggagaggaggaggaac

SEQ ID NO: 49390 - DNA, 75 bp, Homo sapiens
cggttcgattggagcagccgccgaagagcgcttggcgccattttgaagcggagaggaggaggaacggcagggctg

SEQ ID NO: 49391 - DNA, 75 bp, Homo sapiens
agcagccgccgaagagcgcttggcgccattttgaagcggagaggaggaggaacggcagggctggctgcggaaggg

SEQ ID NO: 49392 - DNA, 72 bp, Homo sapiens
ccgaagagcgcttggcgccattttgaagcggagaggaggaggaacggcagggctggctgcggaaggggaggg

SEQ ID NO: 49393 - DNA, 68 bp, Homo sapiens
cgccattttgaagcggagaggaggaggaacggcagggctggctgcggaaggggagggggggggagaag

SEQ ID NO: 49394 - DNA, 68 bp, Homo sapiens
ttttgaagcggagaggaggaggaacggcagggctggctgcggaaggggagggggggggagaaggcgat

SEQ ID NO: 49395 - DNA, 70 bp, Homo sapiens
agaggaggaggaacggcagggctggctgcggaaggggagggggggggagaaggcgattggatgcggcggc

SEQ ID NO: 49396 - DNA, 70 bp, Homo sapiens
ggcggcggcggcggatcccggagagccccggagtgagcggagtagcgagtcggcaacccggaggtaggaa

SEQ ID NO: 49397 - DNA, 70 bp, Homo sapiens
cggcggatcccggagagccccggagtgagcggagtagcgagtcggcaacccggaggtaggaaacaattca

SEQ ID NO: 49398 - DNA, 69 bp, Homo sapiens
gagagccccggagtgagcggagtagcgagtcggcaacccggaggtaggaaacaattcagttaacggaaa

SEQ ID NO: 49399 - DNA, 71 bp, Homo sapiens
gtttatatctattttttggtttgcatctaatagttttcttgtttcaggggtagaaatatttctgtcatggc

SEQ ID NO: 49400 - DNA, 72 bp, Homo sapiens
ttttttggtttgcatctaatagttttcttgtttcaggggtagaaatatttctgtcatggctcattcaaagac

SEQ ID NO: 49401 - DNA, 76 bp, Homo sapiens
tttgcatctaatagttttcttgtttcaggggtagaaatatttctgtcatggctcattcaaagactaggaccaatga

SEQ ID NO: 49402 - DNA, 72 bp, Homo sapiens
agttttcttgtttcaggggtagaaatatttctgtcatggctcattcaaagactaggaccaatgatggaaaaa

SEQ ID NO: 49403 - DNA, 76 bp, Homo sapiens
tcttgtttcaggggtagaaatatttctgtcatggctcattcaaagactaggaccaatgatggaaaaattacatatc

SEQ ID NO: 49404 - DNA, 75 bp, Homo sapiens
agaaatatttctgtcatggctcattcaaagactaggaccaatgatggaaaaattacatatccgcctggggtcaag

SEQ ID NO: 49405 - DNA, 76 bp, Homo sapiens
tatttctgtcatggctcattcaaagactaggaccaatgatggaaaaattacatatccgcctggggtcaaggaaata

SEQ ID NO: 49406 - DNA, 75 bp, Homo sapiens
atggctcattcaaagactaggaccaatgatggaaaaattacatatccgcctggggtcaaggaaatatcagataaa

SEQ ID NO: 49407 - DNA, 72 bp, Homo sapiens
aaagactaggaccaatgatggaaaaattacatatccgcctggggtcaaggaaatatcagataaaatatctaa

SEQ ID NO: 49408 - DNA, 75 bp, Homo sapiens
aatgatggaaaaattacatatccgcctggggtcaaggaaatatcagataaaatatctaaagaggagatggtgaga

SEQ ID NO: 49409 - DNA, 73 bp, Homo sapiens
aaattacatatccgcctggggtcaaggaaatatcagataaaatatctaaagaggagatggtgagacgattaaa

SEQ ID NO: 49410 - DNA, 74 bp, Homo sapiens
atatccgcctggggtcaaggaaatatcagataaaatatctaaagaggagatggtgagacgattaaaggtgagta

SEQ ID NO: 49411 - DNA, 73 bp, Homo sapiens
ggtcaaggaaatatcagataaaatatctaaagaggagatggtgagacgattaaaggtgagtaaaattctattc

SEQ ID NO: 49412 - DNA, 71 bp, Homo sapiens
gaaatatcagataaaatatctaaagaggagatggtgagacgattaaaggtgagtaaaattctattcttttt

SEQ ID NO: 49413 - DNA, 71 bp, Homo sapiens
ttttatttttgtatagatggttgtgaaaacttttatggatatggaccaggactctgaagaagaaaaggagc

SEQ ID NO: 49414 - DNA, 71 bp, Homo sapiens
ttttgtatagatggttgtgaaaacttttatggatatggaccaggactctgaagaagaaaaggagctttatt

SEQ ID NO: 49415 - DNA, 70 bp, Homo sapiens
gatggttgtgaaaacttttatggatatggaccaggactctgaagaagaaaaggagctttatttaaaccta

SEQ ID NO: 49416 - DNA, 71 bp, Homo sapiens
atatggaccaggactctgaagaagaaaaggagctttatttaaacctagctttacatcttgcttcagatttt

SEQ ID NO: 49417 - DNA, 71 bp, Homo sapiens
ccaggactctgaagaagaaaaggagctttatttaaacctagctttacatcttgcttcagatttttttctca

SEQ ID NO: 49418 - DNA, 72 bp, Homo sapiens
agaaaaggagctttatttaaacctagctttacatcttgcttcagatttttttctcaagcatcctgataaaga

SEQ ID NO: 49419 - DNA, 74 bp, Homo sapiens
ggagctttatttaaacctagctttacatcttgcttcagatttttttctcaagcatcctgataaagatgttcgct

SEQ ID NO: 49420 - DNA, 75 bp, Homo sapiens
tttaaacctagctttacatcttgcttcagatttttttctcaagcatcctgataaagatgttcgcttactggtagc

SEQ ID NO: 49421 - DNA, 81 bp, Homo sapiens
tacatcttgcttcagatttttttctcaagcatcctgataaagatgttcgcttactggtagcctgctgccttgctgatattt

SEQ ID NO: 49422 - DNA, 80 bp, Homo sapiens
tcagatttttttctcaagcatcctgataaagatgttcgcttactggtagcctgctgccttgctgatattttcaggattta

SEQ ID NO: 49423 - DNA, 82 bp, Homo sapiens
ttttctcaagcatcctgataaagatgttcgcttactggtagcctgctgccttgctgatattttcaggatttatgctcctgaa

SEQ ID NO: 49424 - DNA, 81 bp, Homo sapiens
atcctgataaagatgttcgcttactggtagcctgctgccttgctgatattttcaggatttatgctcctgaagctccttaca

SEQ ID NO: 49425 - DNA, 80 bp, Homo sapiens
ataaagatgttcgcttactggtagcctgctgccttgctgatattttcaggatttatgctcctgaagctccttacacatcc

SEQ ID NO: 49426 - DNA, 79 bp, Homo sapiens
ttactggtagcctgctgccttgctgatattttcaggatttatgctcctgaagctccttacacatcccctgataaactaa

SEQ ID NO: 49427 - DNA, 78 bp, Homo sapiens
ctgctgccttgctgatattttcaggatttatgctcctgaagctccttacacatcccctgataaactaaaggcaagtac

SEQ ID NO: 49428 - DNA, 77 bp, Homo sapiens
tgctgatattttcaggatttatgctcctgaagctccttacacatcccctgataaactaaaggcaagtactgatttaa

SEQ ID NO: 49429 - DNA, 73 bp, Homo sapiens
ttttcaggatttatgctcctgaagctccttacacatcccctgataaactaaaggcaagtactgatttaaataa

SEQ ID NO: 49430 - DNA, 73 bp, Homo sapiens
atttatgctcctgaagctccttacacatcccctgataaactaaaggcaagtactgatttaaataactccaaga

SEQ ID NO: 49431 - DNA, 71 bp, Homo sapiens
gctccttacacatcccctgataaactaaaggcaagtactgatttaaataactccaagattgaccgatactt

SEQ ID NO: 49432 - DNA, 72 bp, Homo sapiens
cacatcccctgataaactaaaggcaagtactgatttaaataactccaagattgaccgatactttgatttatc

SEQ ID NO: 49433 - DNA, 71 bp, Homo sapiens
cctgataaactaaaggcaagtactgatttaaataactccaagattgaccgatactttgatttatctttcta

SEQ ID NO: 49434 - DNA, 70 bp, Homo sapiens
ggcaagtactgatttaaataactccaagattgaccgatactttgatttatctttctaactaaaatgggag

SEQ ID NO: 49435 - DNA, 68 bp, Homo sapiens
ctgatttaaataactccaagattgaccgatactttgatttatctttctaactaaaatgggagttaagg

SEQ ID NO: 49436 - DNA, 70 bp, Homo sapiens
ctccaagattgaccgatactttgatttatctttctaactaaaatgggagttaaggtatttagatgatttc

SEQ ID NO: 49437 - DNA, 70 bp, Homo sapiens
gattgaccgatactttgatttatctttctaactaaaatgggagttaaggtatttagatgatttccttgga

SEQ ID NO: 49438 - DNA, 71 bp, Homo sapiens
ttgatttatctttctaactaaaatgggagttaaggtatttagatgatttccttggattctttgacattagc

SEQ ID NO: 49439 - DNA, 71 bp, Homo sapiens
tttctaactaaaatgggagttaaggtatttagatgatttccttggattctttgacattagctacagtaatc

SEQ ID NO: 49440 - DNA, 72 bp, Homo sapiens
ctaaaatgggagttaaggtatttagatgatttccttggattctttgacattagctacagtaatcttttgcta

SEQ ID NO: 49441 - DNA, 71 bp, Homo sapiens
ggagttaaggtatttagatgatttccttggattctttgacattagctacagtaatcttttgctaaacttaa

SEQ ID NO: 49442 - DNA, 69 bp, Homo sapiens
atttagatgatttccttggattctttgacattagctacagtaatcttttgctaaacttaatgttttttt

SEQ ID NO: 49443 - DNA, 64 bp, Homo sapiens
ttttttttagaacttatttttgaaaaactttctggtcttgaggttaagaagtagattaatacag

SEQ ID NO: 49444 - DNA, 67 bp, Homo sapiens
tttagaacttatttttgaaaaactttctggtcttgaggttaagaagtagattaatacagtgtgtatt

SEQ ID NO: 49445 - DNA, 67 bp, Homo sapiens
tagaacttatttttgaaaaactttctggtcttgaggttaagaagtagattaatacagtgtgtatttt

SEQ ID NO: 49446 - DNA, 65 bp, Homo sapiens
aacttatttttgaaaaactttctggtcttgaggttaagaagtagattaatacagtgtgtattttt

SEQ ID NO: 49447 - DNA, 74 bp, Homo sapiens
aactttctggtcttgaggttaagaagtagattaatacagtgtgtattttttttatatcatgtcatcattagctc

SEQ ID NO: 49448 - DNA, 75 bp, Homo sapiens
ctttctggtcttgaggttaagaagtagattaatacagtgtgtattttttttatatcatgtcatcattagctctgt

SEQ ID NO: 49449 - DNA, 75 bp, Homo sapiens
cttgaggttaagaagtagattaatacagtgtgtattttttttatatcatgtcatcattagctctgtttctttcat

SEQ ID NO: 49450 - DNA, 75 bp, Homo sapiens
aggttaagaagtagattaatacagtgtgtattttttttatatcatgtcatcattagctctgtttctttcattata

SEQ ID NO: 49451 - DNA, 74 bp, Homo sapiens
gtagattaatacagtgtgtattttttttatatcatgtcatcattagctctgtttctttcattataattttgggg

SEQ ID NO: 49452 - DNA, 73 bp, Homo sapiens
gtgtattttttttatatcatgtcatcattagctctgtttctttcattataattttgggggcaattccttttca

SEQ ID NO: 49453 - DNA, 73 bp, Homo sapiens
tttttatatcatgtcatcattagctctgtttctttcattataattttgggggcaattccttttcacttttgaa

SEQ ID NO: 49454 - DNA, 73 bp, Homo sapiens
catgtcatcattagctctgtttctttcattataattttgggggcaattccttttcacttttgaaaatccatat

SEQ ID NO: 49455 - DNA, 71 bp, Homo sapiens
gctctgtttctttcattataattttgggggcaattccttttcacttttgaaaatccatattgaagaccatg

SEQ ID NO: 49456 - DNA, 70 bp, Homo sapiens
gtttctttcattataattttgggggcaattccttttcacttttgaaaatccatattgaagaccatggcca

SEQ ID NO: 49457 - DNA, 69 bp, Homo sapiens
taattttgggggcaattccttttcacttttgaaaatccatattgaagaccatggccattatttaaaaca

SEQ ID NO: 49458 - DNA, 70 bp, Homo sapiens
gggcaattccttttcacttttgaaaatccatattgaagaccatggccattatttaaaacataatacctag

SEQ ID NO: 49459 - DNA, 73 bp, Homo sapiens
tcacttttgaaaatccatattgaagaccatggccattatttaaaacataatacctagtataaacatgagttta

SEQ ID NO: 49460 - DNA, 73 bp, Homo sapiens
tttgaaaatccatattgaagaccatggccattatttaaaacataatacctagtataaacatgagtttataata

SEQ ID NO: 49461 - DNA, 75 bp, Homo sapiens
catattgaagaccatggccattatttaaaacataatacctagtataaacatgagtttataatatataatcctcat

SEQ ID NO: 49462 - DNA, 72 bp, Homo sapiens
accatggccattatttaaaacataatacctagtataaacatgagtttataatatataatcctcatttattta

SEQ ID NO: 49463 - DNA, 74 bp, Homo sapiens
taaaacataatacctagtataaacatgagtttataatatataatcctcatttatttaatggaaggtgtgatata

SEQ ID NO: 49464 - DNA, 74 bp, Homo sapiens
cataatacctagtataaacatgagtttataatatataatcctcatttatttaatggaaggtgtgatataaattg

SEQ ID NO: 49465 - DNA, 74 bp, Homo sapiens
gtataaacatgagtttataatatataatcctcatttatttaatggaaggtgtgatataaattgttatatttgtg

SEQ ID NO: 49466 - DNA, 73 bp, Homo sapiens
ttataatatataatcctcatttatttaatggaaggtgtgatataaattgttatatttgtgttataaattgtgt

SEQ ID NO: 49467 - DNA, 73 bp, Homo sapiens
taatcctcatttatttaatggaaggtgtgatataaattgttatatttgtgttataaattgtgttatacattgt

SEQ ID NO: 49468 - DNA, 74 bp, Homo sapiens
catttatttaatggaaggtgtgatataaattgttatatttgtgttataaattgtgttatacattgttatgaaga

SEQ ID NO: 49469 - DNA, 74 bp, Homo sapiens
ggaaggtgtgatataaattgttatatttgtgttataaattgtgttatacattgttatgaagaaaatacaggcca

SEQ ID NO: 49470 - DNA, 69 bp, Homo sapiens
ggttattttcatttagcgttcataatctaaatggcactttgtctttttttatttaaggatatatttatg

SEQ ID NO: 49471 - DNA, 70 bp, Homo sapiens
agcgttcataatctaaatggcactttgtctttttttatttaaggatatatttatgtttataacaagacag

SEQ ID NO: 49472 - DNA, 68 bp, Homo sapiens
atctaaatggcactttgtctttttttatttaaggatatatttatgtttataacaagacagttgaaggg

SEQ ID NO: 49473 - DNA, 69 bp, Homo sapiens
ggcactttgtctttttttatttaaggatatatttatgtttataacaagacagttgaaggggctagagga

SEQ ID NO: 49474 - DNA, 70 bp, Homo sapiens
ttttttatttaaggatatatttatgtttataacaagacagttgaaggggctagaggatacaaagagccca

SEQ ID NO: 49475 - DNA, 73 bp, Homo sapiens
taaggatatatttatgtttataacaagacagttgaaggggctagaggatacaaagagcccacaattcaatagg

SEQ ID NO: 49476 - DNA, 70 bp, Homo sapiens
atttatgtttataacaagacagttgaaggggctagaggatacaaagagcccacaattcaataggtatttt

SEQ ID NO: 49477 - DNA, 70 bp, Homo sapiens
tttataacaagacagttgaaggggctagaggatacaaagagcccacaattcaataggtatttttatttac

SEQ ID NO: 49478 - DNA, 72 bp, Homo sapiens
ttgaaggggctagaggatacaaagagcccacaattcaataggtatttttatttacttgaggtaagcaatatc

SEQ ID NO: 49479 - DNA, 73 bp, Homo sapiens
gggctagaggatacaaagagcccacaattcaataggtatttttatttacttgaggtaagcaatatcttgtatc

SEQ ID NO: 49480 - DNA, 76 bp, Homo sapiens
gatacaaagagcccacaattcaataggtatttttatttacttgaggtaagcaatatcttgtatcttgagatgacat

SEQ ID NO: 49481 - DNA, 73 bp, Homo sapiens
gcccacaattcaataggtatttttatttacttgaggtaagcaatatcttgtatcttgagatgacattttaaac

SEQ ID NO: 49482 - DNA, 70 bp, Homo sapiens
taataatcaaaatgcttaactttcacttttttacaccttatttttagaacattgcttgggtcaagtcata

SEQ ID NO: 49483 - DNA, 71 bp, Homo sapiens
aatgcttaactttcacttttttacaccttatttttagaacattgcttgggtcaagtcatataacatatgct

SEQ ID NO: 49484 - DNA, 72 bp, Homo sapiens
ctttcacttttttacaccttatttttagaacattgcttgggtcaagtcatataacatatgctttgagttaga

SEQ ID NO: 49485 - DNA, 76 bp, Homo sapiens
ttttacaccttatttttagaacattgcttgggtcaagtcatataacatatgctttgagttagaagatagcaatgaa

SEQ ID NO: 49486 - DNA, 77 bp, Homo sapiens
tttttagaacattgcttgggtcaagtcatataacatatgctttgagttagaagatagcaatgaaattttcacccagc

SEQ ID NO: 49487 - DNA, 79 bp, Homo sapiens
aacattgcttgggtcaagtcatataacatatgctttgagttagaagatagcaatgaaattttcacccagctatacagaa

SEQ ID NO: 49488 - DNA, 76 bp, Homo sapiens
gggtcaagtcatataacatatgctttgagttagaagatagcaatgaaattttcacccagctatacagaaccttatt

SEQ ID NO: 49489 - DNA, 77 bp, Homo sapiens
catataacatatgctttgagttagaagatagcaatgaaattttcacccagctatacagaaccttattttcagttata

SEQ ID NO: 49490 - DNA, 72 bp, Homo sapiens
gctttgagttagaagatagcaatgaaattttcacccagctatacagaaccttattttcagttataaagtaag

SEQ ID NO: 49491 - DNA, 70 bp, Homo sapiens
gttagaagatagcaatgaaattttcacccagctatacagaaccttattttcagttataaagtaagtttat

SEQ ID NO: 49492 - DNA, 68 bp, Homo sapiens
gcaatgaaattttcacccagctatacagaaccttattttcagttataaagtaagtttattttattaag

SEQ ID NO: 49493 - DNA, 69 bp, Homo sapiens
ttcacccagctatacagaaccttattttcagttataaagtaagtttattttattaagtatgtaacatta

SEQ ID NO: 49494 - DNA, 81 bp, Homo sapiens
aatcctgtatatctcagttgtaattgaaacaaaatctgttttgaattgcagcaatggccacaatcagaaagtccatatgca

SEQ ID NO: 49495 - DNA, 78 bp, Homo sapiens
agttgtaattgaaacaaaatctgttttgaattgcagcaatggccacaatcagaaagtccatatgcacatggtagacct

SEQ ID NO: 49496 - DNA, 83 bp, Homo sapiens
tgaaacaaaatctgttttgaattgcagcaatggccacaatcagaaagtccatatgcacatggtagaccttatgagctctatta

SEQ ID NO: 49497 - DNA, 83 bp, Homo sapiens
aatctgttttgaattgcagcaatggccacaatcagaaagtccatatgcacatggtagaccttatgagctctattatttgtgaa

SEQ ID NO: 49498 - DNA, 85 bp, Homo sapiens
ttgaattgcagcaatggccacaatcagaaagtccatatgcacatggtagaccttatgagctctattatttgtgaaggtgatacag

SEQ ID NO: 49499 - DNA, 83 bp, Homo sapiens
aatggccacaatcagaaagtccatatgcacatggtagaccttatgagctctattatttgtgaaggtgatacagtgtctcagga

SEQ ID NO: 49500 - DNA, 81 bp, Homo sapiens
agaaagtccatatgcacatggtagaccttatgagctctattatttgtgaaggtgatacagtgtctcaggagcttttggata

SEQ ID NO: 49501 - DNA, 79 bp, Homo sapiens
tatgcacatggtagaccttatgagctctattatttgtgaaggtgatacagtgtctcaggagcttttggatacggtttta

SEQ ID NO: 49502 - DNA, 74 bp, Homo sapiens
gtagaccttatgagctctattatttgtgaaggtgatacagtgtctcaggagcttttggatacggttttagtaaa

SEQ ID NO: 49503 - DNA, 75 bp, Homo sapiens
ttatgagctctattatttgtgaaggtgatacagtgtctcaggagcttttggatacggttttagtaaatctggtac

SEQ ID NO: 49504 - DNA, 75 bp, Homo sapiens
tattatttgtgaaggtgatacagtgtctcaggagcttttggatacggttttagtaaatctggtacctgctcataa

SEQ ID NO: 49505 - DNA, 75 bp, Homo sapiens
gtgaaggtgatacagtgtctcaggagcttttggatacggttttagtaaatctggtacctgctcataaggtgagta

SEQ ID NO: 49506 - DNA, 76 bp, Homo sapiens
tgtctcaggagcttttggatacggttttagtaaatctggtacctgctcataaggtgagtagcaatgtatactgtaa

SEQ ID NO: 49507 - DNA, 75 bp, Homo sapiens
agcttttggatacggttttagtaaatctggtacctgctcataaggtgagtagcaatgtatactgtaatgtgtcta

SEQ ID NO: 49508 - DNA, 76 bp, Homo sapiens
tattttgcttttcatagttagagatatataatatagatattgtttatgtttttcagaatttaaacaagcaagcata

SEQ ID NO: 49509 - DNA, 78 bp, Homo sapiens
ttcatagttagagatatataatatagatattgtttatgtttttcagaatttaaacaagcaagcatatgatttggcaaa

SEQ ID NO: 49510 - DNA, 76 bp, Homo sapiens
gagatatataatatagatattgtttatgtttttcagaatttaaacaagcaagcatatgatttggcaaaggctttac

SEQ ID NO: 49511 - DNA, 75 bp, Homo sapiens
atatagatattgtttatgtttttcagaatttaaacaagcaagcatatgatttggcaaaggctttactgaagagga

SEQ ID NO: 49512 - DNA, 77 bp, Homo sapiens
tgtttatgtttttcagaatttaaacaagcaagcatatgatttggcaaaggctttactgaagaggacagctcaagcta

SEQ ID NO: 49513 - DNA, 80 bp, Homo sapiens
tttcagaatttaaacaagcaagcatatgatttggcaaaggctttactgaagaggacagctcaagctattgagccatatat

SEQ ID NO: 49514 - DNA, 79 bp, Homo sapiens
atttaaacaagcaagcatatgatttggcaaaggctttactgaagaggacagctcaagctattgagccatatattaccaa

SEQ ID NO: 49515 - DNA, 79 bp, Homo sapiens
agcatatgatttggcaaaggctttactgaagaggacagctcaagctattgagccatatattaccaatgtaagtcttact

SEQ ID NO: 49516 - DNA, 76 bp, Homo sapiens
tttggcaaaggctttactgaagaggacagctcaagctattgagccatatattaccaatgtaagtcttacttgtaat

SEQ ID NO: 49517 - DNA, 77 bp, Homo sapiens
ctttactgaagaggacagctcaagctattgagccatatattaccaatgtaagtcttacttgtaattggttgtcagaa

SEQ ID NO: 49518 - DNA, 76 bp, Homo sapiens
aagaggacagctcaagctattgagccatatattaccaatgtaagtcttacttgtaattggttgtcagaaggattaa

SEQ ID NO: 49519 - DNA, 76 bp, Homo sapiens
cagctcaagctattgagccatatattaccaatgtaagtcttacttgtaattggttgtcagaaggattaaactgaaa

SEQ ID NO: 49520 - DNA, 71 bp, Homo sapiens
gtctctggtttttctactaatgataggctttctttctcctcaaaagttttttaatcaggttctgatgcttg

SEQ ID NO: 49521 - DNA, 71 bp, Homo sapiens
tttctactaatgataggctttctttctcctcaaaagttttttaatcaggttctgatgcttgggaaaacatc

SEQ ID NO: 49522 - DNA, 74 bp, Homo sapiens
taatgataggctttctttctcctcaaaagttttttaatcaggttctgatgcttgggaaaacatctatcagcgat

SEQ ID NO: 49523 - DNA, 76 bp, Homo sapiens
tttctttctcctcaaaagttttttaatcaggttctgatgcttgggaaaacatctatcagcgatttgtcagagcatg

SEQ ID NO: 49524 - DNA, 76 bp, Homo sapiens
caaaagttttttaatcaggttctgatgcttgggaaaacatctatcagcgatttgtcagagcatgtctttgacttaa

SEQ ID NO: 49525 - DNA, 78 bp, Homo sapiens
tttttaatcaggttctgatgcttgggaaaacatctatcagcgatttgtcagagcatgtctttgacttaattttggagc

SEQ ID NO: 49526 - DNA, 82 bp, Homo sapiens
gttctgatgcttgggaaaacatctatcagcgatttgtcagagcatgtctttgacttaattttggagctctacaatattgata

SEQ ID NO: 49527 - DNA, 79 bp, Homo sapiens
cttgggaaaacatctatcagcgatttgtcagagcatgtctttgacttaattttggagctctacaatattgatagtcatt

SEQ ID NO: 49528 - DNA, 83 bp, Homo sapiens
atctatcagcgatttgtcagagcatgtctttgacttaattttggagctctacaatattgatagtcatttgctgctctctgttt

SEQ ID NO: 49529 - DNA, 80 bp, Homo sapiens
agcgatttgtcagagcatgtctttgacttaattttggagctctacaatattgatagtcatttgctgctctctgttttacc

SEQ ID NO: 49530 - DNA, 77 bp, Homo sapiens
catgtctttgacttaattttggagctctacaatattgatagtcatttgctgctctctgttttaccccagcttgaatt

SEQ ID NO: 49531 - DNA, 75 bp, Homo sapiens
ctttgacttaattttggagctctacaatattgatagtcatttgctgctctctgttttaccccagcttgaatttaa

SEQ ID NO: 49532 - DNA, 73 bp, Homo sapiens
attttggagctctacaatattgatagtcatttgctgctctctgttttaccccagcttgaatttaaattaaagg

SEQ ID NO: 49533 - DNA, 72 bp, Homo sapiens
ctacaatattgatagtcatttgctgctctctgttttaccccagcttgaatttaaattaaaggtaacttgtaa

SEQ ID NO: 49534 - DNA, 71 bp, Homo sapiens
tgatagtcatttgctgctctctgttttaccccagcttgaatttaaattaaaggtaacttgtaaaaataata

SEQ ID NO: 49535 - DNA, 71 bp, Homo sapiens
tgctgctctctgttttaccccagcttgaatttaaattaaaggtaacttgtaaaaataatatgattctacca

SEQ ID NO: 49536 - DNA, 79 bp, Homo sapiens
agccttattctgaatatctactgcatggttttaaagctgtgattgtgttttattttagagcaatgataatgaggagcgc

SEQ ID NO: 49537 - DNA, 77 bp, Homo sapiens
aatatctactgcatggttttaaagctgtgattgtgttttattttagagcaatgataatgaggagcgcctacaagttg

SEQ ID NO: 49538 - DNA, 76 bp, Homo sapiens
tgcatggttttaaagctgtgattgtgttttattttagagcaatgataatgaggagcgcctacaagttgttaaacta

SEQ ID NO: 49539 - DNA, 75 bp, Homo sapiens
tttaaagctgtgattgtgttttattttagagcaatgataatgaggagcgcctacaagttgttaaactactggcaa

SEQ ID NO: 49540 - DNA, 72 bp, Homo sapiens
ttgtgttttattttagagcaatgataatgaggagcgcctacaagttgttaaactactggcaaaaatgtttgg

SEQ ID NO: 49541 - DNA, 72 bp, Homo sapiens
tttattttagagcaatgataatgaggagcgcctacaagttgttaaactactggcaaaaatgtttggggcaaa

SEQ ID NO: 49542 - DNA, 72 bp, Homo sapiens
aatgataatgaggagcgcctacaagttgttaaactactggcaaaaatgtttggggcaaaggattcagaattg

SEQ ID NO: 49543 - DNA, 71 bp, Homo sapiens
aatgaggagcgcctacaagttgttaaactactggcaaaaatgtttggggcaaaggattcagaattggcttc

SEQ ID NO: 49544 - DNA, 69 bp, Homo sapiens
cctacaagttgttaaactactggcaaaaatgtttggggcaaaggattcagaattggcttctcaaaacaa

SEQ ID NO: 49545 - DNA, 72 bp, Homo sapiens
tgttaaactactggcaaaaatgtttggggcaaaggattcagaattggcttctcaaaacaagccactttggca

SEQ ID NO: 49546 - DNA, 72 bp, Homo sapiens
aaaaatgtttggggcaaaggattcagaattggcttctcaaaacaagccactttggcagtgctacttgggcag

SEQ ID NO: 49547 - DNA, 75 bp, Homo sapiens
ttggggcaaaggattcagaattggcttctcaaaacaagccactttggcagtgctacttgggcaggtatatgattt

SEQ ID NO: 49548 - DNA, 73 bp, Homo sapiens
aaaggattcagaattggcttctcaaaacaagccactttggcagtgctacttgggcaggtatatgattttggtt

SEQ ID NO: 49549 - DNA, 72 bp, Homo sapiens
attggcttctcaaaacaagccactttggcagtgctacttgggcaggtatatgattttggtttcccatttaaa

SEQ ID NO: 49550 - DNA, 71 bp, Homo sapiens
ctcaaaacaagccactttggcagtgctacttgggcaggtatatgattttggtttcccatttaaaagtaata

SEQ ID NO: 49551 - DNA, 77 bp, Homo sapiens
tctgtttctcttattttgaagctcactctgtgcttttatattttatcaggtttaatgatatccatgtaccaatccgc

SEQ ID NO: 49552 - DNA, 77 bp, Homo sapiens
ttattttgaagctcactctgtgcttttatattttatcaggtttaatgatatccatgtaccaatccgcctggaatgtg

SEQ ID NO: 49553 - DNA, 76 bp, Homo sapiens
aagctcactctgtgcttttatattttatcaggtttaatgatatccatgtaccaatccgcctggaatgtgtgaaatt

SEQ ID NO: 49554 - DNA, 78 bp, Homo sapiens
tgcttttatattttatcaggtttaatgatatccatgtaccaatccgcctggaatgtgtgaaatttgctagccattgtc

SEQ ID NO: 49555 - DNA, 80 bp, Homo sapiens
ttatattttatcaggtttaatgatatccatgtaccaatccgcctggaatgtgtgaaatttgctagccattgtctcatgaa

SEQ ID NO: 49556 - DNA, 82 bp, Homo sapiens
tttaatgatatccatgtaccaatccgcctggaatgtgtgaaatttgctagccattgtctcatgaaccatcctgatttagcaa

SEQ ID NO: 49557 - DNA, 80 bp, Homo sapiens
tatccatgtaccaatccgcctggaatgtgtgaaatttgctagccattgtctcatgaaccatcctgatttagcaaaagact

SEQ ID NO: 49558 - DNA, 77 bp, Homo sapiens
aatccgcctggaatgtgtgaaatttgctagccattgtctcatgaaccatcctgatttagcaaaagacttaacaggta

SEQ ID NO: 49559 - DNA, 80 bp, Homo sapiens
tggaatgtgtgaaatttgctagccattgtctcatgaaccatcctgatttagcaaaagacttaacaggtactatatatatg

SEQ ID NO: 49560 - DNA, 78 bp, Homo sapiens
aaatttgctagccattgtctcatgaaccatcctgatttagcaaaagacttaacaggtactatatatatgtaacagcaa

SEQ ID NO: 49561 - DNA, 78 bp, Homo sapiens
ctagccattgtctcatgaaccatcctgatttagcaaaagacttaacaggtactatatatatgtaacagcaaatattct

SEQ ID NO: 49562 - DNA, 71 bp, Homo sapiens
attttagttattaaaatttccactgtaataaaatgttatctttcagagtatcttaaagtgaggtcacatga

SEQ ID NO: 49563 - DNA, 73 bp, Homo sapiens
ttaaaatttccactgtaataaaatgttatctttcagagtatcttaaagtgaggtcacatgaccctgaggaagc

SEQ ID NO: 49564 - DNA, 75 bp, Homo sapiens
atttccactgtaataaaatgttatctttcagagtatcttaaagtgaggtcacatgaccctgaggaagctattaga

SEQ ID NO: 49565 - DNA, 79 bp, Homo sapiens
aaatgttatctttcagagtatcttaaagtgaggtcacatgaccctgaggaagctattagacatgatgttattgtgtcaa

SEQ ID NO: 49566 - DNA, 80 bp, Homo sapiens
ttatctttcagagtatcttaaagtgaggtcacatgaccctgaggaagctattagacatgatgttattgtgtcaatagtta

SEQ ID NO: 49567 - DNA, 80 bp, Homo sapiens
tatcttaaagtgaggtcacatgaccctgaggaagctattagacatgatgttattgtgtcaatagttacagctgctaaaaa

SEQ ID NO: 49568 - DNA, 79 bp, Homo sapiens
aagtgaggtcacatgaccctgaggaagctattagacatgatgttattgtgtcaatagttacagctgctaaaaaggatat

SEQ ID NO: 49569 - DNA, 79 bp, Homo sapiens
accctgaggaagctattagacatgatgttattgtgtcaatagttacagctgctaaaaaggatattcttctggtcaatga

SEQ ID NO: 49570 - DNA, 80 bp, Homo sapiens
aggaagctattagacatgatgttattgtgtcaatagttacagctgctaaaaaggatattcttctggtcaatgatcactta

SEQ ID NO: 49571 - DNA, 78 bp, Homo sapiens
gacatgatgttattgtgtcaatagttacagctgctaaaaaggatattcttctggtcaatgatcacttacttaattttg

SEQ ID NO: 49572 - DNA, 78 bp, Homo sapiens
attgtgtcaatagttacagctgctaaaaaggatattcttctggtcaatgatcacttacttaattttgtgagagagaga

SEQ ID NO: 49573 - DNA, 78 bp, Homo sapiens
tagttacagctgctaaaaaggatattcttctggtcaatgatcacttacttaattttgtgagagagagaacattagaca

SEQ ID NO: 49574 - DNA, 76 bp, Homo sapiens
agctgctaaaaaggatattcttctggtcaatgatcacttacttaattttgtgagagagagaacattagacaaacga

SEQ ID NO: 49575 - DNA, 76 bp, Homo sapiens
aggatattcttctggtcaatgatcacttacttaattttgtgagagagagaacattagacaaacgagtaagtatgaa

SEQ ID NO: 49576 - DNA, 75 bp, Homo sapiens
cttctggtcaatgatcacttacttaattttgtgagagagagaacattagacaaacgagtaagtatgaataaataa

SEQ ID NO: 49577 - DNA, 74 bp, Homo sapiens
atgatcacttacttaattttgtgagagagagaacattagacaaacgagtaagtatgaataaataattattacta

SEQ ID NO: 49578 - DNA, 71 bp, Homo sapiens
cttaattttgtgagagagagaacattagacaaacgagtaagtatgaataaataattattactaagttttca

SEQ ID NO: 49579 - DNA, 66 bp, Homo sapiens
taatggaagcctttttacattataaataaaactttttgtttttaagtggagagtacgcaaagaagc

SEQ ID NO: 49580 - DNA, 68 bp, Homo sapiens
gcctttttacattataaataaaactttttgtttttaagtggagagtacgcaaagaagccatgatggga

SEQ ID NO: 49581 - DNA, 69 bp, Homo sapiens
cattataaataaaactttttgtttttaagtggagagtacgcaaagaagccatgatgggacttgcccaaa

SEQ ID NO: 49582 - DNA, 68 bp, Homo sapiens
aaactttttgtttttaagtggagagtacgcaaagaagccatgatgggacttgcccaaatttataagaa

SEQ ID NO: 49583 - DNA, 73 bp, Homo sapiens
ttgtttttaagtggagagtacgcaaagaagccatgatgggacttgcccaaatttataagaaatatgctttaca

SEQ ID NO: 49584 - DNA, 77 bp, Homo sapiens
agagtacgcaaagaagccatgatgggacttgcccaaatttataagaaatatgctttacagtcagcagctggaaaaga

SEQ ID NO: 49585 - DNA, 78 bp, Homo sapiens
aaagaagccatgatgggacttgcccaaatttataagaaatatgctttacagtcagcagctggaaaagatgctgcaaaa

SEQ ID NO: 49586 - DNA, 82 bp, Homo sapiens
atgggacttgcccaaatttataagaaatatgctttacagtcagcagctggaaaagatgctgcaaaacagatagcatggatca

SEQ ID NO: 49587 - DNA, 80 bp, Homo sapiens
cccaaatttataagaaatatgctttacagtcagcagctggaaaagatgctgcaaaacagatagcatggatcaaagacaaa

SEQ ID NO: 49588 - DNA, 86 bp, Homo sapiens
tataagaaatatgctttacagtcagcagctggaaaagatgctgcaaaacagatagcatggatcaaagacaaattgctacatatata

SEQ ID NO: 49589 - DNA, 86 bp, Homo sapiens
aatatgctttacagtcagcagctggaaaagatgctgcaaaacagatagcatggatcaaagacaaattgctacatatatattatcaa

SEQ ID NO: 49590 - DNA, 85 bp, Homo sapiens
agtcagcagctggaaaagatgctgcaaaacagatagcatggatcaaagacaaattgctacatatatattatcaaaatagtattga

SEQ ID NO: 49591 - DNA, 83 bp, Homo sapiens
ctggaaaagatgctgcaaaacagatagcatggatcaaagacaaattgctacatatatattatcaaaatagtattgatgatcgg

SEQ ID NO: 49592 - DNA, 82 bp, Homo sapiens
tgctgcaaaacagatagcatggatcaaagacaaattgctacatatatattatcaaaatagtattgatgatcggtaagttaag

SEQ ID NO: 49593 - DNA, 80 bp, Homo sapiens
acagatagcatggatcaaagacaaattgctacatatatattatcaaaatagtattgatgatcggtaagttaaggacacta

SEQ ID NO: 49594 - DNA, 76 bp, Homo sapiens
ggatcaaagacaaattgctacatatatattatcaaaatagtattgatgatcggtaagttaaggacactataaatat

SEQ ID NO: 49595 - DNA, 75 bp, Homo sapiens
acaaattgctacatatatattatcaaaatagtattgatgatcggtaagttaaggacactataaatatttggtgac

SEQ ID NO: 49596 - DNA, 74 bp, Homo sapiens
gaacattagaaaaaaatcaatacaatgccttctctgcttttttgtagactacttgttgaacggatctttgctca

SEQ ID NO: 49597 - DNA, 74 bp, Homo sapiens
aaaaatcaatacaatgccttctctgcttttttgtagactacttgttgaacggatctttgctcaatacatggttc

SEQ ID NO: 49598 - DNA, 76 bp, Homo sapiens
tacaatgccttctctgcttttttgtagactacttgttgaacggatctttgctcaatacatggttcctcacaattta

SEQ ID NO: 49599 - DNA, 72 bp, Homo sapiens
tttttgtagactacttgttgaacggatctttgctcaatacatggttcctcacaatttagaaactacagaacg

SEQ ID NO: 49600 - DNA, 76 bp, Homo sapiens
tacttgttgaacggatctttgctcaatacatggttcctcacaatttagaaactacagaacggatgaaatgcttata

SEQ ID NO: 49601 - DNA, 75 bp, Homo sapiens
acggatctttgctcaatacatggttcctcacaatttagaaactacagaacggatgaaatgcttatattacttgta

SEQ ID NO: 49602 - DNA, 77 bp, Homo sapiens
tcaatacatggttcctcacaatttagaaactacagaacggatgaaatgcttatattacttgtatgccacactggatt

SEQ ID NO: 49603 - DNA, 75 bp, Homo sapiens
acatggttcctcacaatttagaaactacagaacggatgaaatgcttatattacttgtatgccacactggatttaa

SEQ ID NO: 49604 - DNA, 77 bp, Homo sapiens
caatttagaaactacagaacggatgaaatgcttatattacttgtatgccacactggatttaaatgctgtgaagtatg

SEQ ID NO: 49605 - DNA, 77 bp, Homo sapiens
gaaactacagaacggatgaaatgcttatattacttgtatgccacactggatttaaatgctgtgaagtatgtttcaaa

SEQ ID NO: 49606 - DNA, 78 bp, Homo sapiens
acggatgaaatgcttatattacttgtatgccacactggatttaaatgctgtgaagtatgtttcaaatatcaaattctg

SEQ ID NO: 49607 - DNA, 79 bp, Homo sapiens
tgcttatattacttgtatgccacactggatttaaatgctgtgaagtatgtttcaaatatcaaattctgttcttttcatc

SEQ ID NO: 49608 - DNA, 77 bp, Homo sapiens
acttgtatgccacactggatttaaatgctgtgaagtatgtttcaaatatcaaattctgttcttttcatcctttgcaa

SEQ ID NO: 49609 - DNA, 77 bp, Homo sapiens
ccacactggatttaaatgctgtgaagtatgtttcaaatatcaaattctgttcttttcatcctttgcaatatattgga

SEQ ID NO: 49610 - DNA, 76 bp, Homo sapiens
atgctgtgaagtatgtttcaaatatcaaattctgttcttttcatcctttgcaatatattggattttatggaaaaga

SEQ ID NO: 49611 - DNA, 72 bp, Homo sapiens
gaagtatgtttcaaatatcaaattctgttcttttcatcctttgcaatatattggattttatggaaaagaaac

SEQ ID NO: 49612 - DNA, 71 bp, Homo sapiens
aatatcaaattctgttcttttcatcctttgcaatatattggattttatggaaaagaaactacaaacacctg

SEQ ID NO: 49613 - DNA, 70 bp, Homo sapiens
caaattctgttcttttcatcctttgcaatatattggattttatggaaaagaaactacaaacacctgtatt

SEQ ID NO: 49614 - DNA, 69 bp, Homo sapiens
cttttcatcctttgcaatatattggattttatggaaaagaaactacaaacacctgtattttaaaatgta

SEQ ID NO: 49615 - DNA, 72 bp, Homo sapiens
tgcaatatattggattttatggaaaagaaactacaaacacctgtattttaaaatgtaatctatgtagtgtaa

SEQ ID NO: 49616 - DNA, 69 bp, Homo sapiens
tggattttatggaaaagaaactacaaacacctgtattttaaaatgtaatctatgtagtgtaaacattgt

SEQ ID NO: 49617 - DNA, 67 bp, Homo sapiens
tggaaaagaaactacaaacacctgtattttaaaatgtaatctatgtagtgtaaacattgtttaaagg

SEQ ID NO: 49618 - DNA, 69 bp, Homo sapiens
cacctgtattttaaaatgtaatctatgtagtgtaaacattgtttaaagggttatgtcgtagtacttggc

SEQ ID NO: 49619 - DNA, 69 bp, Homo sapiens
atgtaatctatgtagtgtaaacattgtttaaagggttatgtcgtagtacttggctattttttcagaaag

SEQ ID NO: 49620 - DNA, 68 bp, Homo sapiens
acattgtttaaagggttatgtcgtagtacttggctattttttcagaaagtaccactttaaacatgaga

SEQ ID NO: 49621 - DNA, 69 bp, Homo sapiens
ttaaagggttatgtcgtagtacttggctattttttcagaaagtaccactttaaacatgagactaagcca

SEQ ID NO: 49622 - DNA, 72 bp, Homo sapiens
gtcgtagtacttggctattttttcagaaagtaccactttaaacatgagactaagccattacaagcaattgaa

SEQ ID NO: 49623 - DNA, 72 bp, Homo sapiens
cttggctattttttcagaaagtaccactttaaacatgagactaagccattacaagcaattgaaaaatagagc

SEQ ID NO: 49624 - DNA, 77 bp, Homo sapiens
ttcagaaagtaccactttaaacatgagactaagccattacaagcaattgaaaaatagagctgattgacatgaaatct

SEQ ID NO: 49625 - DNA, 76 bp, Homo sapiens
aacatgagactaagccattacaagcaattgaaaaatagagctgattgacatgaaatcttttaggatttgagttttc

SEQ ID NO: 49626 - DNA, 76 bp, Homo sapiens
agactaagccattacaagcaattgaaaaatagagctgattgacatgaaatcttttaggatttgagttttctattca

SEQ ID NO: 49627 - DNA, 74 bp, Homo sapiens
aaaatagagctgattgacatgaaatcttttaggatttgagttttctattcatattgttggtgtctcaagaaacg

SEQ ID NO: 49628 - DNA, 76 bp, Homo sapiens
gctgattgacatgaaatcttttaggatttgagttttctattcatattgttggtgtctcaagaaacgttgatgtacc

SEQ ID NO: 49629 - DNA, 74 bp, Homo sapiens
gacatgaaatcttttaggatttgagttttctattcatattgttggtgtctcaagaaacgttgatgtacctattc

SEQ ID NO: 49630 - DNA, 69 bp, Homo sapiens
cttttaggatttgagttttctattcatattgttggtgtctcaagaaacgttgatgtacctattcttttt

SEQ ID NO: 49631 - DNA, 69 bp, Homo sapiens
gagttttctattcatattgttggtgtctcaagaaacgttgatgtacctattcttttttatttgttttcc

SEQ ID NO: 49632 - DNA, 71 bp, Homo sapiens
tcatattgttggtgtctcaagaaacgttgatgtacctattcttttttatttgttttccttaaggcattaga

SEQ ID NO: 49633 - DNA, 69 bp, Homo sapiens
ggtgtctcaagaaacgttgatgtacctattcttttttatttgttttccttaaggcattagaaacattca

SEQ ID NO: 49634 - DNA, 70 bp, Homo sapiens
caagaaacgttgatgtacctattcttttttatttgttttccttaaggcattagaaacattcatattatga

SEQ ID NO: 49635 - DNA, 70 bp, Homo sapiens
tgatgtacctattcttttttatttgttttccttaaggcattagaaacattcatattatgaaaatactacc

SEQ ID NO: 49636 - DNA, 68 bp, Homo sapiens
tttttatttgttttccttaaggcattagaaacattcatattatgaaaatactacctttttattctcac

SEQ ID NO: 49637 - DNA, 71 bp, Homo sapiens
gttttccttaaggcattagaaacattcatattatgaaaatactacctttttattctcacttggtgtactga

SEQ ID NO: 49638 - DNA, 76 bp, Homo sapiens
ggcattagaaacattcatattatgaaaatactacctttttattctcacttggtgtactgatgtgcattacggtgga

SEQ ID NO: 49639 - DNA, 77 bp, Homo sapiens
ttatgaaaatactacctttttattctcacttggtgtactgatgtgcattacggtggagagcagtaggctgcagattt

SEQ ID NO: 49640 - DNA, 87 bp, Homo sapiens
ttggtgtactgatgtgcattacggtggagagcagtaggctgcagattttgtgctgcatagcctgagcagcaccgtgttatagtttga

SEQ ID NO: 49641 - DNA, 86 bp, Homo sapiens
atgtgcattacggtggagagcagtaggctgcagattttgtgctgcatagcctgagcagcaccgtgttatagtttgacataagagta

SEQ ID NO: 49642 - DNA, 81 bp, Homo sapiens
agtaggctgcagattttgtgctgcatagcctgagcagcaccgtgttatagtttgacataagagtaagcacaaatatatttt

SEQ ID NO: 49643 - DNA, 78 bp, Homo sapiens
agattttgtgctgcatagcctgagcagcaccgtgttatagtttgacataagagtaagcacaaatatatttttattacc

SEQ ID NO: 49644 - DNA, 82 bp, Homo sapiens
ctgcatagcctgagcagcaccgtgttatagtttgacataagagtaagcacaaatatatttttattaccgcatgtcattcaga

SEQ ID NO: 49645 - DNA, 78 bp, Homo sapiens
ctgagcagcaccgtgttatagtttgacataagagtaagcacaaatatatttttattaccgcatgtcattcagaaagta

SEQ ID NO: 49646 - DNA, 71 bp, Homo sapiens
agtttgacataagagtaagcacaaatatatttttattaccgcatgtcattcagaaagtacttttgggtgtt

SEQ ID NO: 49647 - DNA, 70 bp, Homo sapiens
gagtaagcacaaatatatttttattaccgcatgtcattcagaaagtacttttgggtgtttaggtaaggtg

SEQ ID NO: 49648 - DNA, 70 bp, Homo sapiens
caaatatatttttattaccgcatgtcattcagaaagtacttttgggtgtttaggtaaggtggcattggtg

SEQ ID NO: 49649 - DNA, 71 bp, Homo sapiens
tatttttattaccgcatgtcattcagaaagtacttttgggtgtttaggtaaggtggcattggtgtgttaga

SEQ ID NO: 49650 - DNA, 72 bp, Homo sapiens
accgcatgtcattcagaaagtacttttgggtgtttaggtaaggtggcattggtgtgttagacatggaaaaga

SEQ ID NO: 49651 - DNA, 74 bp, Homo sapiens
ttttgggtgtttaggtaaggtggcattggtgtgttagacatggaaaagacattgctagtctaattgaatcatac

SEQ ID NO: 49652 - DNA, 74 bp, Homo sapiens
tttaggtaaggtggcattggtgtgttagacatggaaaagacattgctagtctaattgaatcatactaagggtta

SEQ ID NO: 49653 - DNA, 75 bp, Homo sapiens
gcattggtgtgttagacatggaaaagacattgctagtctaattgaatcatactaagggttaggaaattgaagtct

SEQ ID NO: 49654 - DNA, 75 bp, Homo sapiens
gtgtgttagacatggaaaagacattgctagtctaattgaatcatactaagggttaggaaattgaagtcttagaga

SEQ ID NO: 49655 - DNA, 72 bp, Homo sapiens
gacattgctagtctaattgaatcatactaagggttaggaaattgaagtcttagagatttgctttaggtttta

SEQ ID NO: 49656 - DNA, 69 bp, Homo sapiens
gtctaattgaatcatactaagggttaggaaattgaagtcttagagatttgctttaggttttaggaaatg

SEQ ID NO: 49657 - DNA, 65 bp, Homo sapiens
actaagggttaggaaattgaagtcttagagatttgctttaggttttaggaaatgtagacccttag

SEQ ID NO: 49658 - DNA, 69 bp, Homo sapiens
ggttaggaaattgaagtcttagagatttgctttaggttttaggaaatgtagacccttagtattccagca

SEQ ID NO: 49659 - DNA, 70 bp, Homo sapiens
gaagtcttagagatttgctttaggttttaggaaatgtagacccttagtattccagcaaatgtagtttaca

SEQ ID NO: 49660 - DNA, 69 bp, Homo sapiens
agagatttgctttaggttttaggaaatgtagacccttagtattccagcaaatgtagtttacaaatatta

SEQ ID NO: 49661 - DNA, 69 bp, Homo sapiens
taggaaatgtagacccttagtattccagcaaatgtagtttacaaatattaagggttaaatgttgagaaa

SEQ ID NO: 49662 - DNA, 73 bp, Homo sapiens
tccagcaaatgtagtttacaaatattaagggttaaatgttgagaaatttgagagatctaaggggctgtatgta

SEQ ID NO: 49663 - DNA, 69 bp, Homo sapiens
agtttacaaatattaagggttaaatgttgagaaatttgagagatctaaggggctgtatgtaattttcat

SEQ ID NO: 49664 - DNA, 71 bp, Homo sapiens
tattaagggttaaatgttgagaaatttgagagatctaaggggctgtatgtaattttcatttgtaccactgt

SEQ ID NO: 49665 - DNA, 73 bp, Homo sapiens
gttaaatgttgagaaatttgagagatctaaggggctgtatgtaattttcatttgtaccactgtttaatgagac

SEQ ID NO: 49666 - DNA, 72 bp, Homo sapiens
gaaatttgagagatctaaggggctgtatgtaattttcatttgtaccactgtttaatgagacttttaacttca

SEQ ID NO: 49667 - DNA, 73 bp, Homo sapiens
tgagagatctaaggggctgtatgtaattttcatttgtaccactgtttaatgagacttttaacttcatttcttc

SEQ ID NO: 49668 - DNA, 71 bp, Homo sapiens
gggctgtatgtaattttcatttgtaccactgtttaatgagacttttaacttcatttcttccatggaaataa

SEQ ID NO: 49669 - DNA, 69 bp, Homo sapiens
gtaattttcatttgtaccactgtttaatgagacttttaacttcatttcttccatggaaataattatatt

SEQ ID NO: 49670 - DNA, 70 bp, Homo sapiens
cactgtttaatgagacttttaacttcatttcttccatggaaataattatattttctgtttatgttttata

SEQ ID NO: 49671 - DNA, 71 bp, Homo sapiens
gagacttttaacttcatttcttccatggaaataattatattttctgtttatgttttatacagaaatagtga

SEQ ID NO: 49672 - DNA, 72 bp, Homo sapiens
catttcttccatggaaataattatattttctgtttatgttttatacagaaatagtgaggacaaggttgtaga

SEQ ID NO: 49673 - DNA, 70 bp, Homo sapiens
ttatattttctgtttatgttttatacagaaatagtgaggacaaggttgtagaggggagaaatacacattt

SEQ ID NO: 49674 - DNA, 68 bp, Homo sapiens
ttttctgtttatgttttatacagaaatagtgaggacaaggttgtagaggggagaaatacacatttttt

SEQ ID NO: 49675 - DNA, 69 bp, Homo sapiens
agaaatagtgaggacaaggttgtagaggggagaaatacacatttttttttcctacctgctgtatttcag

SEQ ID NO: 49676 - DNA, 72 bp, Homo sapiens
ttgtagaggggagaaatacacatttttttttcctacctgctgtatttcaggcactggaatttgtattatgta

SEQ ID NO: 49677 - DNA, 74 bp, Homo sapiens
atacacatttttttttcctacctgctgtatttcaggcactggaatttgtattatgtataactgcttttgtgcta

SEQ ID NO: 49678 - DNA, 74 bp, Homo sapiens
ttttttcctacctgctgtatttcaggcactggaatttgtattatgtataactgcttttgtgctacagtggaaaa

SEQ ID NO: 49679 - DNA, 75 bp, Homo sapiens
tcctacctgctgtatttcaggcactggaatttgtattatgtataactgcttttgtgctacagtggaaaagtaggt

SEQ ID NO: 49680 - DNA, 78 bp, Homo sapiens
atttcaggcactggaatttgtattatgtataactgcttttgtgctacagtggaaaagtaggttgcagagagatctgat

SEQ ID NO: 49681 - DNA, 78 bp, Homo sapiens
tattatgtataactgcttttgtgctacagtggaaaagtaggttgcagagagatctgattgcccacaaagcttaaaata

SEQ ID NO: 49682 - DNA, 74 bp, Homo sapiens
tgctacagtggaaaagtaggttgcagagagatctgattgcccacaaagcttaaaatatttactgtccggccttt

SEQ ID NO: 49683 - DNA, 71 bp, Homo sapiens
aaaagtaggttgcagagagatctgattgcccacaaagcttaaaatatttactgtccggccttttacagaaa

SEQ ID NO: 49684 - DNA, 73 bp, Homo sapiens
taggttgcagagagatctgattgcccacaaagcttaaaatatttactgtccggccttttacagaaaaagcttg

SEQ ID NO: 49685 - DNA, 70 bp, Homo sapiens
agatctgattgcccacaaagcttaaaatatttactgtccggccttttacagaaaaagcttggcaaccctg

SEQ ID NO: 49686 - DNA, 67 bp, Homo sapiens
cacaaagcttaaaatatttactgtccggccttttacagaaaaagcttggcaaccctggtttaagtga

SEQ ID NO: 49687 - DNA, 65 bp, Homo sapiens
aaaatatttactgtccggccttttacagaaaaagcttggcaaccctggtttaagtgacatttttc

SEQ ID NO: 49688 - DNA, 65 bp, Homo sapiens
atttactgtccggccttttacagaaaaagcttggcaaccctggtttaagtgacatttttcctgtt

SEQ ID NO: 49689 - DNA, 69 bp, Homo sapiens
ggccttttacagaaaaagcttggcaaccctggtttaagtgacatttttcctgttttacatatgatgaaa

SEQ ID NO: 49690 - DNA, 72 bp, Homo sapiens
cagaaaaagcttggcaaccctggtttaagtgacatttttcctgttttacatatgatgaaataaatcacacaa

SEQ ID NO: 49691 - DNA, 76 bp, Homo sapiens
taagtgacatttttcctgttttacatatgatgaaataaatcacacaaatgttaagttccacagaatcacacaagga

SEQ ID NO: 49692 - DNA, 74 bp, Homo sapiens
ttttcctgttttacatatgatgaaataaatcacacaaatgttaagttccacagaatcacacaaggaataagagg

SEQ ID NO: 49693 - DNA, 77 bp, Homo sapiens
atgaaataaatcacacaaatgttaagttccacagaatcacacaaggaataagagggagccaggattcgcactcaatc

SEQ ID NO: 49694 - DNA, 78 bp, Homo sapiens
taaatcacacaaatgttaagttccacagaatcacacaaggaataagagggagccaggattcgcactcaatcctgcttg

SEQ ID NO: 49695 - DNA, 75 bp, Homo sapiens
aatgttaagttccacagaatcacacaaggaataagagggagccaggattcgcactcaatcctgcttggttccaaa

SEQ ID NO: 49696 - DNA, 74 bp, Homo sapiens
acagaatcacacaaggaataagagggagccaggattcgcactcaatcctgcttggttccaaagcttgttctttt

SEQ ID NO: 49697 - DNA, 73 bp, Homo sapiens
acacaaggaataagagggagccaggattcgcactcaatcctgcttggttccaaagcttgttctttttccacta

SEQ ID NO: 49698 - DNA, 72 bp, Homo sapiens
gagggagccaggattcgcactcaatcctgcttggttccaaagcttgttctttttccactacacgtagtaaaa

SEQ ID NO: 49699 - DNA, 71 bp, Homo sapiens
aggattcgcactcaatcctgcttggttccaaagcttgttctttttccactacacgtagtaaaatacattac

SEQ ID NO: 49700 - DNA, 69 bp, Homo sapiens
cctgcttggttccaaagcttgttctttttccactacacgtagtaaaatacattactctcatatttactt

SEQ ID NO: 49701 - DNA, 69 bp, Homo sapiens
tccaaagcttgttctttttccactacacgtagtaaaatacattactctcatatttacttttattacttg

SEQ ID NO: 49702 - DNA, 68 bp, Homo sapiens
ttttccactacacgtagtaaaatacattactctcatatttacttttattacttgtaaacttttctctg

SEQ ID NO: 49703 - DNA, 70 bp, Homo sapiens
cactacacgtagtaaaatacattactctcatatttacttttattacttgtaaacttttctctggaattga

SEQ ID NO: 49704 - DNA, 70 bp, Homo sapiens
gtaaaatacattactctcatatttacttttattacttgtaaacttttctctggaattgaaatacatccta

SEQ ID NO: 49705 - DNA, 72 bp, Homo sapiens
cttttctctggaattgaaatacatcctaaaattgttggtttgtcatagcctaattggtggctctttttctca

SEQ ID NO: 49706 - DNA, 74 bp, Homo sapiens
atacatcctaaaattgttggtttgtcatagcctaattggtggctctttttctcatggcaaaattaattgatggc

SEQ ID NO: 49707 - DNA, 75 bp, Homo sapiens
gtttgtcatagcctaattggtggctctttttctcatggcaaaattaattgatggcctcttaaattggatgaaata

SEQ ID NO: 49708 - DNA, 74 bp, Homo sapiens
gcctaattggtggctctttttctcatggcaaaattaattgatggcctcttaaattggatgaaatatggtattta

SEQ ID NO: 49709 - DNA, 76 bp, Homo sapiens
ggctctttttctcatggcaaaattaattgatggcctcttaaattggatgaaatatggtatttatatcatatttgaa

SEQ ID NO: 49710 - DNA, 75 bp, Homo sapiens
catggcaaaattaattgatggcctcttaaattggatgaaatatggtatttatatcatatttgaaactacctattg

SEQ ID NO: 49711 - DNA, 76 bp, Homo sapiens
taattgatggcctcttaaattggatgaaatatggtatttatatcatatttgaaactacctattggaaatcatagta

SEQ ID NO: 49712 - DNA, 74 bp, Homo sapiens
atggcctcttaaattggatgaaatatggtatttatatcatatttgaaactacctattggaaatcatagtaaatc

SEQ ID NO: 49713 - DNA, 77 bp, Homo sapiens
ggatgaaatatggtatttatatcatatttgaaactacctattggaaatcatagtaaatctagacttctctactcagc

SEQ ID NO: 49714 - DNA, 77 bp, Homo sapiens
tggtatttatatcatatttgaaactacctattggaaatcatagtaaatctagacttctctactcagcccaactgtca

SEQ ID NO: 49715 - DNA, 77 bp, Homo sapiens
atcatatttgaaactacctattggaaatcatagtaaatctagacttctctactcagcccaactgtcattcaagagta

SEQ ID NO: 49716 - DNA, 76 bp, Homo sapiens
tgaaactacctattggaaatcatagtaaatctagacttctctactcagcccaactgtcattcaagagtaaaaatga

SEQ ID NO: 49717 - DNA, 76 bp, Homo sapiens
acctattggaaatcatagtaaatctagacttctctactcagcccaactgtcattcaagagtaaaaatgaaatgtca

SEQ ID NO: 49718 - DNA, 75 bp, Homo sapiens
catagtaaatctagacttctctactcagcccaactgtcattcaagagtaaaaatgaaatgtcacttttaagcaaa

SEQ ID NO: 49719 - DNA, 75 bp, Homo sapiens
atctagacttctctactcagcccaactgtcattcaagagtaaaaatgaaatgtcacttttaagcaaaaatgaaga

SEQ ID NO: 49720 - DNA, 75 bp, Homo sapiens
tctctactcagcccaactgtcattcaagagtaaaaatgaaatgtcacttttaagcaaaaatgaagaatttgccag

SEQ ID NO: 49721 - DNA, 72 bp, Homo sapiens
gcccaactgtcattcaagagtaaaaatgaaatgtcacttttaagcaaaaatgaagaatttgccagtcctact

SEQ ID NO: 49722 - DNA, 70 bp, Homo sapiens
cattcaagagtaaaaatgaaatgtcacttttaagcaaaaatgaagaatttgccagtcctacttgaaaaaa

SEQ ID NO: 49723 - DNA, 67 bp, Homo sapiens
gcaaaaatgaagaatttgccagtcctacttgaaaaaattactaaagaataaccttattttggtaaga

SEQ ID NO: 49724 - DNA, 65 bp, Homo sapiens
gaagaatttgccagtcctacttgaaaaaattactaaagaataaccttattttggtaagaaaggaa

SEQ ID NO: 49725 - DNA, 62 bp, Homo sapiens
aaaaattactaaagaataaccttattttggtaagaaaggaaattaaatctataaagaagtaa

SEQ ID NO: 49726 - DNA, 66 bp, Homo sapiens
ctaaagaataaccttattttggtaagaaaggaaattaaatctataaagaagtaataagattcaaga

SEQ ID NO: 49727 - DNA, 66 bp, Homo sapiens
ccttattttggtaagaaaggaaattaaatctataaagaagtaataagattcaagaatttgaaacac

SEQ ID NO: 49728 - DNA, 68 bp, Homo sapiens
ggtaagaaaggaaattaaatctataaagaagtaataagattcaagaatttgaaacacttctataaata

SEQ ID NO: 49729 - DNA, 68 bp, Homo sapiens
aaggaaattaaatctataaagaagtaataagattcaagaatttgaaacacttctataaatataaataa

SEQ ID NO: 49730 - DNA, 69 bp, Homo sapiens
gaagtaataagattcaagaatttgaaacacttctataaatataaataataaaggactgtaaaaacagta

SEQ ID NO: 49731 - DNA, 78 bp, Homo sapiens
tgggagtgtggattaaaaagtaggtagcatgtaggccaatatttagccagtaccatacaccactgcagtactatgtga

SEQ ID NO: 49732 - DNA, 77 bp, Homo sapiens
attaaaaagtaggtagcatgtaggccaatatttagccagtaccatacaccactgcagtactatgtgagatttcctga

SEQ ID NO: 49733 - DNA, 78 bp, Homo sapiens
aaagtaggtagcatgtaggccaatatttagccagtaccatacaccactgcagtactatgtgagatttcctgagtgtcc

SEQ ID NO: 49734 - DNA, 78 bp, Homo sapiens
atgtaggccaatatttagccagtaccatacaccactgcagtactatgtgagatttcctgagtgtccctggaatcctcc

SEQ ID NO: 49735 - DNA, 77 bp, Homo sapiens
aatatttagccagtaccatacaccactgcagtactatgtgagatttcctgagtgtccctggaatcctccttcctatg

SEQ ID NO: 49736 - DNA, 78 bp, Homo sapiens
agtaccatacaccactgcagtactatgtgagatttcctgagtgtccctggaatcctccttcctatggtcctaccatgc

SEQ ID NO: 49737 - DNA, 78 bp, Homo sapiens
acaccactgcagtactatgtgagatttcctgagtgtccctggaatcctccttcctatggtcctaccatgcctgggcag

SEQ ID NO: 49738 - DNA, 76 bp, Homo sapiens
agtactatgtgagatttcctgagtgtccctggaatcctccttcctatggtcctaccatgcctgggcagggctggaa

SEQ ID NO: 49739 - DNA, 76 bp, Homo sapiens
agatttcctgagtgtccctggaatcctccttcctatggtcctaccatgcctgggcagggctggaatgtctccagga

SEQ ID NO: 49740 - DNA, 76 bp, Homo sapiens
agtgtccctggaatcctccttcctatggtcctaccatgcctgggcagggctggaatgtctccaggaccttcttgca

SEQ ID NO: 49741 - DNA, 78 bp, Homo sapiens
aatcctccttcctatggtcctaccatgcctgggcagggctggaatgtctccaggaccttcttgcactgcccatgattc

SEQ ID NO: 49742 - DNA, 85 bp, Homo sapiens
catgcctgggcagggctggaatgtctccaggaccttcttgcactgcccatgattctgactggttgatgcctgatgcctttgtgaa

SEQ ID NO: 49743 - DNA, 80 bp, Homo sapiens
gaccttcttgcactgcccatgattctgactggttgatgcctgatgcctttgtgaaaaattttgactgcaggtgggtccta

SEQ ID NO: 49744 - DNA, 83 bp, Homo sapiens
ttgcactgcccatgattctgactggttgatgcctgatgcctttgtgaaaaattttgactgcaggtgggtcctatcagataaca

SEQ ID NO: 49745 - DNA, 81 bp, Homo sapiens
atgattctgactggttgatgcctgatgcctttgtgaaaaattttgactgcaggtgggtcctatcagataacagcatgtaag

SEQ ID NO: 49746 - DNA, 77 bp, Homo sapiens
tgatgcctttgtgaaaaattttgactgcaggtgggtcctatcagataacagcatgtaaggtaataggtaagtaatga

SEQ ID NO: 49747 - DNA, 76 bp, Homo sapiens
ttgtgaaaaattttgactgcaggtgggtcctatcagataacagcatgtaaggtaataggtaagtaatgagtatgaa

SEQ ID NO: 49748 - DNA, 74 bp, Homo sapiens
aaattttgactgcaggtgggtcctatcagataacagcatgtaaggtaataggtaagtaatgagtatgaaggtgt

SEQ ID NO: 49749 - DNA, 72 bp, Homo sapiens
gtgggtcctatcagataacagcatgtaaggtaataggtaagtaatgagtatgaaggtgttccaaggttcttt

SEQ ID NO: 49750 - DNA, 75 bp, Homo sapiens
ctatcagataacagcatgtaaggtaataggtaagtaatgagtatgaaggtgttccaaggttcttttgtcatgtta

SEQ ID NO: 49751 - DNA, 72 bp, Homo sapiens
aacagcatgtaaggtaataggtaagtaatgagtatgaaggtgttccaaggttcttttgtcatgttagtgagg

SEQ ID NO: 49752 - DNA, 75 bp, Homo sapiens
taataggtaagtaatgagtatgaaggtgttccaaggttcttttgtcatgttagtgagggcagacatcttgactaa

SEQ ID NO: 49753 - DNA, 76 bp, Homo sapiens
gtaatgagtatgaaggtgttccaaggttcttttgtcatgttagtgagggcagacatcttgactaactatgttataa

SEQ ID NO: 49754 - DNA, 74 bp, Homo sapiens
agtatgaaggtgttccaaggttcttttgtcatgttagtgagggcagacatcttgactaactatgttataagtgg

SEQ ID NO: 49755 - DNA, 76 bp, Homo sapiens
ttccaaggttcttttgtcatgttagtgagggcagacatcttgactaactatgttataagtgggcatttaacagtca

SEQ ID NO: 49756 - DNA, 77 bp, Homo sapiens
ttcttttgtcatgttagtgagggcagacatcttgactaactatgttataagtgggcatttaacagtcacctctgaaa

SEQ ID NO: 49757 - DNA, 76 bp, Homo sapiens
atgttagtgagggcagacatcttgactaactatgttataagtgggcatttaacagtcacctctgaaagcagttaaa

SEQ ID NO: 49758 - DNA, 76 bp, Homo sapiens
agacatcttgactaactatgttataagtgggcatttaacagtcacctctgaaagcagttaaaatgtatagcttcca

SEQ ID NO: 49759 - DNA, 75 bp, Homo sapiens
tcttgactaactatgttataagtgggcatttaacagtcacctctgaaagcagttaaaatgtatagcttccaaaca

SEQ ID NO: 49760 - DNA, 73 bp, Homo sapiens
ttataagtgggcatttaacagtcacctctgaaagcagttaaaatgtatagcttccaaacacagaggaacaaaa

SEQ ID NO: 49761 - DNA, 72 bp, Homo sapiens
agtgggcatttaacagtcacctctgaaagcagttaaaatgtatagcttccaaacacagaggaacaaaaaata

SEQ ID NO: 49762 - DNA, 71 bp, Homo sapiens
cagtcacctctgaaagcagttaaaatgtatagcttccaaacacagaggaacaaaaaataattaatgaaaac

SEQ ID NO: 49763 - DNA, 68 bp, Homo sapiens
taaaatgtatagcttccaaacacagaggaacaaaaaataattaatgaaaactttaataccagaaacaa

SEQ ID NO: 49764 - DNA, 65 bp, Homo sapiens
aaacacagaggaacaaaaaataattaatgaaaactttaataccagaaacaaaatagaaaacaaga

SEQ ID NO: 49765 - DNA, 70 bp, Homo sapiens
gaaaacaagaaaaataacaataaatacacaaagtatagttgttataaaactaaacatgtcagatatcact

SEQ ID NO: 49766 - DNA, 71 bp, Homo sapiens
aaaataacaataaatacacaaagtatagttgttataaaactaaacatgtcagatatcacttatcacttaaa

SEQ ID NO: 49767 - DNA, 75 bp, Homo sapiens
caataaatacacaaagtatagttgttataaaactaaacatgtcagatatcacttatcacttaaatgataagtata

SEQ ID NO: 49768 - DNA, 76 bp, Homo sapiens
acacaaagtatagttgttataaaactaaacatgtcagatatcacttatcacttaaatgataagtatatttgattga

SEQ ID NO: 49769 - DNA, 76 bp, Homo sapiens
gttgttataaaactaaacatgtcagatatcacttatcacttaaatgataagtatatttgattgaattcaaaagtga

SEQ ID NO: 49770 - DNA, 80 bp, Homo sapiens
ctaaacatgtcagatatcacttatcacttaaatgataagtatatttgattgaattcaaaagtgaaacagtgccattcaca

SEQ ID NO: 49771 - DNA, 81 bp, Homo sapiens
atgtcagatatcacttatcacttaaatgataagtatatttgattgaattcaaaagtgaaacagtgccattcacaagagata

SEQ ID NO: 49772 - DNA, 79 bp, Homo sapiens
atgataagtatatttgattgaattcaaaagtgaaacagtgccattcacaagagatatattgaaaaataatgccattgaa

SEQ ID NO: 49773 - DNA, 76 bp, Homo sapiens
agtatatttgattgaattcaaaagtgaaacagtgccattcacaagagatatattgaaaaataatgccattgaaaag

SEQ ID NO: 49774 - DNA, 74 bp, Homo sapiens
gattgaattcaaaagtgaaacagtgccattcacaagagatatattgaaaaataatgccattgaaaagttaaaag

SEQ ID NO: 49775 - DNA, 74 bp, Homo sapiens
gtgaaacagtgccattcacaagagatatattgaaaaataatgccattgaaaagttaaaagtaaattccaatctg

SEQ ID NO: 49776 - DNA, 74 bp, Homo sapiens
cagtgccattcacaagagatatattgaaaaataatgccattgaaaagttaaaagtaaattccaatctggaccag

SEQ ID NO: 49777 - DNA, 71 bp, Homo sapiens
gagatatattgaaaaataatgccattgaaaagttaaaagtaaattccaatctggaccagtactcaaaagga

SEQ ID NO: 49778 - DNA, 69 bp, Homo sapiens
gccattgaaaagttaaaagtaaattccaatctggaccagtactcaaaaggaaaggctttgattctacaa

SEQ ID NO: 49779 - DNA, 72 bp, Homo sapiens
caatctggaccagtactcaaaaggaaaggctttgattctacaaaaatggttggtgaatgaatggatatttat

SEQ ID NO: 49780 - DNA, 69 bp, Homo sapiens
ccagtactcaaaaggaaaggctttgattctacaaaaatggttggtgaatgaatggatatttatttgttt

SEQ ID NO: 49781 - DNA, 68 bp, Homo sapiens
aaaggaaaggctttgattctacaaaaatggttggtgaatgaatggatatttatttgttttaagataaa

SEQ ID NO: 49782 - DNA, 71 bp, Homo sapiens
tgattctacaaaaatggttggtgaatgaatggatatttatttgttttaagataaaatatttagggtacata

SEQ ID NO: 49783 - DNA, 71 bp, Homo sapiens
acaaaaatggttggtgaatgaatggatatttatttgttttaagataaaatatttagggtacatatatatca

SEQ ID NO: 49784 - DNA, 72 bp, Homo sapiens
ggtgaatgaatggatatttatttgttttaagataaaatatttagggtacatatatatcattttttagatgat

SEQ ID NO: 49785 - DNA, 70 bp, Homo sapiens
atggatatttatttgttttaagataaaatatttagggtacatatatatcattttttagatgattttcatt

SEQ ID NO: 49786 - DNA, 69 bp, Homo sapiens
tgttttaagataaaatatttagggtacatatatatcattttttagatgattttcattttaaccagcttt

SEQ ID NO: 49787 - DNA, 70 bp, Homo sapiens
taaaatatttagggtacatatatatcattttttagatgattttcattttaaccagctttttataattagc

SEQ ID NO: 49788 - DNA, 71 bp, Homo sapiens
atatcattttttagatgattttcattttaaccagctttttataattagctgaccaactattatacttacca

SEQ ID NO: 49789 - DNA, 70 bp, Homo sapiens
ttagatgattttcattttaaccagctttttataattagctgaccaactattatacttaccagtattttag

SEQ ID NO: 49790 - DNA, 70 bp, Homo sapiens
ccagctttttataattagctgaccaactattatacttaccagtattttagtactttatatttatctgtgg

SEQ ID NO: 49791 - DNA, 70 bp, Homo sapiens
ataattagctgaccaactattatacttaccagtattttagtactttatatttatctgtggttgttttctc

SEQ ID NO: 49792 - DNA, 70 bp, Homo sapiens
gctgaccaactattatacttaccagtattttagtactttatatttatctgtggttgttttctccaaaatc

SEQ ID NO: 49793 - DNA, 68 bp, Homo sapiens
ctattatacttaccagtattttagtactttatatttatctgtggttgttttctccaaaatccattacc

SEQ ID NO: 49794 - DNA, 66 bp, Homo sapiens
ttaccagtattttagtactttatatttatctgtggttgttttctccaaaatccattacctttttaa

SEQ ID NO: 49795 - DNA, 69 bp, Homo sapiens
ttatctgtggttgttttctccaaaatccattacctttttaattatgtaataataaagaaatcacgtata

SEQ ID NO: 49796 - DNA, 69 bp, Homo sapiens
tgtggttgttttctccaaaatccattacctttttaattatgtaataataaagaaatcacgtatatatgt

SEQ ID NO: 49797 - DNA, 72 bp, Homo sapiens
ctccaaaatccattacctttttaattatgtaataataaagaaatcacgtatatatgttatgaagcatagtaa

SEQ ID NO: 49798 - DNA, 72 bp, Homo sapiens
tccattacctttttaattatgtaataataaagaaatcacgtatatatgttatgaagcatagtaataaagtaa

SEQ ID NO: 49799 - DNA, 74 bp, Homo sapiens
attatgtaataataaagaaatcacgtatatatgttatgaagcatagtaataaagtaaaaatacctatgaatcta

SEQ ID NO: 49800 - DNA, 73 bp, Homo sapiens
taataaagaaatcacgtatatatgttatgaagcatagtaataaagtaaaaatacctatgaatctattacccaa

SEQ ID NO: 49801 - DNA, 72 bp, Homo sapiens
atcacgtatatatgttatgaagcatagtaataaagtaaaaatacctatgaatctattacccaacttgtaaac

SEQ ID NO: 49802 - DNA, 70 bp, Homo sapiens
tatgttatgaagcatagtaataaagtaaaaatacctatgaatctattacccaacttgtaaacttttctcc

SEQ ID NO: 49803 - DNA, 71 bp, Homo sapiens
tgaagcatagtaataaagtaaaaatacctatgaatctattacccaacttgtaaacttttctcccattcatc

SEQ ID NO: 49804 - DNA, 69 bp, Homo sapiens
taaagtaaaaatacctatgaatctattacccaacttgtaaacttttctcccattcatcttctcccagag

SEQ ID NO: 49805 - DNA, 68 bp, Homo sapiens
aaaatacctatgaatctattacccaacttgtaaacttttctcccattcatcttctcccagaggtaacc

SEQ ID NO: 49806 - DNA, 67 bp, Homo sapiens
atctattacccaacttgtaaacttttctcccattcatcttctcccagaggtaacctctacccttgtt

SEQ ID NO: 49807 - DNA, 66 bp, Homo sapiens
aacttgtaaacttttctcccattcatcttctcccagaggtaacctctacccttgtttcttgtttcc

SEQ ID NO: 49808 - DNA, 65 bp, Homo sapiens
cttttctcccattcatcttctcccagaggtaacctctacccttgtttcttgtttcctttaaaaat

SEQ ID NO: 49809 - DNA, 64 bp, Homo sapiens
ctcccattcatcttctcccagaggtaacctctacccttgtttcttgtttcctttaaaaattttt

SEQ ID NO: 49810 - DNA, 74 bp, Homo sapiens
gtatatatgtgtatccctcagtaatatatttttgcttgtttttgaactttatgaaagaaacaattgtgtataca

SEQ ID NO: 49811 - DNA, 72 bp, Homo sapiens
cctcagtaatatatttttgcttgtttttgaactttatgaaagaaacaattgtgtatacagtgttgtgtgtct

SEQ ID NO: 49812 - DNA, 70 bp, Homo sapiens
ttttgcttgtttttgaactttatgaaagaaacaattgtgtatacagtgttgtgtgtctttttttctattc

SEQ ID NO: 49813 - DNA, 73 bp, Homo sapiens
tagaaagatttttattctgttttgttatttaaatgtgtatgtttgtgtttttcagagcattgaatgaaatgtg

SEQ ID NO: 49814 - DNA, 74 bp, Homo sapiens
tttattctgttttgttatttaaatgtgtatgtttgtgtttttcagagcattgaatgaaatgtggaaatgtcaaa

SEQ ID NO: 49815 - DNA, 77 bp, Homo sapiens
tttgttatttaaatgtgtatgtttgtgtttttcagagcattgaatgaaatgtggaaatgtcaaaatctgctccgaca

SEQ ID NO: 49816 - DNA, 77 bp, Homo sapiens
aaatgtgtatgtttgtgtttttcagagcattgaatgaaatgtggaaatgtcaaaatctgctccgacatcaagtaaag

SEQ ID NO: 49817 - DNA, 77 bp, Homo sapiens
atgtttgtgtttttcagagcattgaatgaaatgtggaaatgtcaaaatctgctccgacatcaagtaaaggatttgct

SEQ ID NO: 49818 - DNA, 79 bp, Homo sapiens
ttttcagagcattgaatgaaatgtggaaatgtcaaaatctgctccgacatcaagtaaaggatttgcttgacttgattaa

SEQ ID NO: 49819 - DNA, 77 bp, Homo sapiens
ttgaatgaaatgtggaaatgtcaaaatctgctccgacatcaagtaaaggatttgcttgacttgattaagcaacccaa

SEQ ID NO: 49820 - DNA, 74 bp, Homo sapiens
aatgtggaaatgtcaaaatctgctccgacatcaagtaaaggatttgcttgacttgattaagcaacccaaagtaa

SEQ ID NO: 49821 - DNA, 71 bp, Homo sapiens
caaaatctgctccgacatcaagtaaaggatttgcttgacttgattaagcaacccaaagtaagtaagaattt

SEQ ID NO: 49822 - DNA, 70 bp, Homo sapiens
tgctccgacatcaagtaaaggatttgcttgacttgattaagcaacccaaagtaagtaagaattttttcct

SEQ ID NO: 49823 - DNA, 69 bp, Homo sapiens
catcaagtaaaggatttgcttgacttgattaagcaacccaaagtaagtaagaattttttccttcaatgt

SEQ ID NO: 49824 - DNA, 66 bp, Homo sapiens
aggatttgcttgacttgattaagcaacccaaagtaagtaagaattttttccttcaatgttttttaa

SEQ ID NO: 49825 - DNA, 70 bp, Homo sapiens
gtctaattttttgcagagtatgatgaagttttcttgttagggaattttaattttgcatttttttgtgtga

SEQ ID NO: 49826 - DNA, 75 bp, Homo sapiens
gcagagtatgatgaagttttcttgttagggaattttaattttgcatttttttgtgtgatttacagacagatgcca

SEQ ID NO: 49827 - DNA, 72 bp, Homo sapiens
tgaagttttcttgttagggaattttaattttgcatttttttgtgtgatttacagacagatgccagtgtcaag

SEQ ID NO: 49828 - DNA, 73 bp, Homo sapiens
tcttgttagggaattttaattttgcatttttttgtgtgatttacagacagatgccagtgtcaaggccatattt

SEQ ID NO: 49829 - DNA, 75 bp, Homo sapiens
tttaattttgcatttttttgtgtgatttacagacagatgccagtgtcaaggccatattttcaaaagtgatggtta

SEQ ID NO: 49830 - DNA, 76 bp, Homo sapiens
gcatttttttgtgtgatttacagacagatgccagtgtcaaggccatattttcaaaagtgatggttattacaagtaa

SEQ ID NO: 49831 - DNA, 75 bp, Homo sapiens
ttttgtgtgatttacagacagatgccagtgtcaaggccatattttcaaaagtgatggttattacaagtaagttat

SEQ ID NO: 49832 - DNA, 72 bp, Homo sapiens
tttacagacagatgccagtgtcaaggccatattttcaaaagtgatggttattacaagtaagttattttaaaa

SEQ ID NO: 49833 - DNA, 72 bp, Homo sapiens
gatgccagtgtcaaggccatattttcaaaagtgatggttattacaagtaagttattttaaaatctgtataaa

SEQ ID NO: 49834 - DNA, 69 bp, Homo sapiens
tcaaggccatattttcaaaagtgatggttattacaagtaagttattttaaaatctgtataaaaatgtaa

SEQ ID NO: 49835 - DNA, 65 bp, Homo sapiens
attttcaaaagtgatggttattacaagtaagttattttaaaatctgtataaaaatgtaattttta

SEQ ID NO: 49836 - DNA, 63 bp, Homo sapiens
taaaaaaaattgattttaattgaactttaatttattttaaggaaatttacctgatcctggtaa

SEQ ID NO: 49837 - DNA, 70 bp, Homo sapiens
tgattttaattgaactttaatttattttaaggaaatttacctgatcctggtaaggctcaggatttcatga

SEQ ID NO: 49838 - DNA, 71 bp, Homo sapiens
tgaactttaatttattttaaggaaatttacctgatcctggtaaggctcaggatttcatgaagaaattcaca

SEQ ID NO: 49839 - DNA, 72 bp, Homo sapiens
tttattttaaggaaatttacctgatcctggtaaggctcaggatttcatgaagaaattcacacaggtgttaga

SEQ ID NO: 49840 - DNA, 76 bp, Homo sapiens
tttaaggaaatttacctgatcctggtaaggctcaggatttcatgaagaaattcacacaggtgttagaagatgatga

SEQ ID NO: 49841 - DNA, 77 bp, Homo sapiens
tttacctgatcctggtaaggctcaggatttcatgaagaaattcacacaggtgttagaagatgatgagaaaataagaa

SEQ ID NO: 49842 - DNA, 77 bp, Homo sapiens
gtaaggctcaggatttcatgaagaaattcacacaggtgttagaagatgatgagaaaataagaaagcagttagaagta

SEQ ID NO: 49843 - DNA, 76 bp, Homo sapiens
ctcaggatttcatgaagaaattcacacaggtgttagaagatgatgagaaaataagaaagcagttagaagtacttgt

SEQ ID NO: 49844 - DNA, 75 bp, Homo sapiens
aagaaattcacacaggtgttagaagatgatgagaaaataagaaagcagttagaagtacttgttagtccaacatgc

SEQ ID NO: 49845 - DNA, 80 bp, Homo sapiens
ttcacacaggtgttagaagatgatgagaaaataagaaagcagttagaagtacttgttagtccaacatgctcctgcaagca

SEQ ID NO: 49846 - DNA, 78 bp, Homo sapiens
ttagaagatgatgagaaaataagaaagcagttagaagtacttgttagtccaacatgctcctgcaagcaggctgaaggt

SEQ ID NO: 49847 - DNA, 75 bp, Homo sapiens
agaaaataagaaagcagttagaagtacttgttagtccaacatgctcctgcaagcaggctgaaggttgtgtggtaa

SEQ ID NO: 49848 - DNA, 75 bp, Homo sapiens
aaagcagttagaagtacttgttagtccaacatgctcctgcaagcaggctgaaggttgtgtggtaaggagagaaaa

SEQ ID NO: 49849 - DNA, 77 bp, Homo sapiens
agttagaagtacttgttagtccaacatgctcctgcaagcaggctgaaggttgtgtggtaaggagagaaaagagctga

SEQ ID NO: 49850 - DNA, 77 bp, Homo sapiens
acttgttagtccaacatgctcctgcaagcaggctgaaggttgtgtggtaaggagagaaaagagctgatgtttgaaaa

SEQ ID NO: 49851 - DNA, 71 bp, Homo sapiens
tttgtttaaatgtacttttgtaatactgaaataatctgtattacagcgtgaaataactaagaagttgggca

SEQ ID NO: 49852 - DNA, 70 bp, Homo sapiens
ttaaatgtacttttgtaatactgaaataatctgtattacagcgtgaaataactaagaagttgggcaaccc

SEQ ID NO: 49853 - DNA, 72 bp, Homo sapiens
taatactgaaataatctgtattacagcgtgaaataactaagaagttgggcaaccccaaacagcctacaaatc

SEQ ID NO: 49854 - DNA, 69 bp, Homo sapiens
aaataatctgtattacagcgtgaaataactaagaagttgggcaaccccaaacagcctacaaatcctttc

SEQ ID NO: 49855 - DNA, 69 bp, Homo sapiens
ctgtattacagcgtgaaataactaagaagttgggcaaccccaaacagcctacaaatcctttcctggaaa

SEQ ID NO: 49856 - DNA, 68 bp, Homo sapiens
aaataactaagaagttgggcaaccccaaacagcctacaaatcctttcctggaaatgatcaagtttctc

SEQ ID NO: 49857 - DNA, 70 bp, Homo sapiens
actaagaagttgggcaaccccaaacagcctacaaatcctttcctggaaatgatcaagtttctcttggaga

SEQ ID NO: 49858 - DNA, 75 bp, Homo sapiens
aaccccaaacagcctacaaatcctttcctggaaatgatcaagtttctcttggagaggatagcacctgtgcacata

SEQ ID NO: 49859 - DNA, 78 bp, Homo sapiens
agcctacaaatcctttcctggaaatgatcaagtttctcttggagaggatagcacctgtgcacatagataccgaatcta

SEQ ID NO: 49860 - DNA, 78 bp, Homo sapiens
atcctttcctggaaatgatcaagtttctcttggagaggatagcacctgtgcacatagataccgaatctatcaggtatt

SEQ ID NO: 49861 - DNA, 80 bp, Homo sapiens
ctggaaatgatcaagtttctcttggagaggatagcacctgtgcacatagataccgaatctatcaggtatttgtatataaa

SEQ ID NO: 49862 - DNA, 78 bp, Homo sapiens
atcaagtttctcttggagaggatagcacctgtgcacatagataccgaatctatcaggtatttgtatataaaatactaa

SEQ ID NO: 49863 - DNA, 80 bp, Homo sapiens
ttggagaggatagcacctgtgcacatagataccgaatctatcaggtatttgtatataaaatactaagttctcattgctgt

SEQ ID NO: 49864 - DNA, 72 bp, Homo sapiens
gacattgctagtaacatttgaaaaaatgacttttttggtcatattttagtgctcttattaaacaagtgaaca

SEQ ID NO: 49865 - DNA, 71 bp, Homo sapiens
acatttgaaaaaatgacttttttggtcatattttagtgctcttattaaacaagtgaacaaatcaatagatg

SEQ ID NO: 49866 - DNA, 77 bp, Homo sapiens
aaatgacttttttggtcatattttagtgctcttattaaacaagtgaacaaatcaatagatggaacagcagatgatga

SEQ ID NO: 49867 - DNA, 78 bp, Homo sapiens
tttttggtcatattttagtgctcttattaaacaagtgaacaaatcaatagatggaacagcagatgatgaagatgaggg

SEQ ID NO: 49868 - DNA, 78 bp, Homo sapiens
atattttagtgctcttattaaacaagtgaacaaatcaatagatggaacagcagatgatgaagatgagggtgttccaac

SEQ ID NO: 49869 - DNA, 83 bp, Homo sapiens
ctcttattaaacaagtgaacaaatcaatagatggaacagcagatgatgaagatgagggtgttccaactgatcaagccatcaga

SEQ ID NO: 49870 - DNA, 85 bp, Homo sapiens
acaagtgaacaaatcaatagatggaacagcagatgatgaagatgagggtgttccaactgatcaagccatcagagcaggtcttgaa

SEQ ID NO: 49871 - DNA, 85 bp, Homo sapiens
acaaatcaatagatggaacagcagatgatgaagatgagggtgttccaactgatcaagccatcagagcaggtcttgaactgcttaa

SEQ ID NO: 49872 - DNA, 84 bp, Homo sapiens
tggaacagcagatgatgaagatgagggtgttccaactgatcaagccatcagagcaggtcttgaactgcttaaggtaagtatcta

SEQ ID NO: 49873 - DNA, 79 bp, Homo sapiens
atgatgaagatgagggtgttccaactgatcaagccatcagagcaggtcttgaactgcttaaggtaagtatctatttaaa

SEQ ID NO: 49874 - DNA, 75 bp, Homo sapiens
aagatgagggtgttccaactgatcaagccatcagagcaggtcttgaactgcttaaggtaagtatctatttaaaat

SEQ ID NO: 49875 - DNA, 76 bp, Homo sapiens
tccaactgatcaagccatcagagcaggtcttgaactgcttaaggtaagtatctatttaaaattaagtgcctaatta

SEQ ID NO: 49876 - DNA, 73 bp, Homo sapiens
aaagatgaaaaagttttacaaatcatttttatgattcattttataggtactctcatttacacatcccatctca

SEQ ID NO: 49877 - DNA, 77 bp, Homo sapiens
aagttttacaaatcatttttatgattcattttataggtactctcatttacacatcccatctcatttcattctgctga

SEQ ID NO: 49878 - DNA, 80 bp, Homo sapiens
aatcatttttatgattcattttataggtactctcatttacacatcccatctcatttcattctgctgaaacatttgaatca

SEQ ID NO: 49879 - DNA, 81 bp, Homo sapiens
atgattcattttataggtactctcatttacacatcccatctcatttcattctgctgaaacatttgaatcattactggcttg

SEQ ID NO: 49880 - DNA, 80 bp, Homo sapiens
attttataggtactctcatttacacatcccatctcatttcattctgctgaaacatttgaatcattactggcttgtctgaa

SEQ ID NO: 49881 - DNA, 83 bp, Homo sapiens
tctcatttacacatcccatctcatttcattctgctgaaacatttgaatcattactggcttgtctgaaaatggatgatgaaaaa

SEQ ID NO: 49882 - DNA, 81 bp, Homo sapiens
tttacacatcccatctcatttcattctgctgaaacatttgaatcattactggcttgtctgaaaatggatgatgaaaaagta

SEQ ID NO: 49883 - DNA, 84 bp, Homo sapiens
tcatttcattctgctgaaacatttgaatcattactggcttgtctgaaaatggatgatgaaaaagtagcagaagctgcactacaa

SEQ ID NO: 49884 - DNA, 80 bp, Homo sapiens
ttctgctgaaacatttgaatcattactggcttgtctgaaaatggatgatgaaaaagtagcagaagctgcactacaaattt

SEQ ID NO: 49885 - DNA, 78 bp, Homo sapiens
gaaacatttgaatcattactggcttgtctgaaaatggatgatgaaaaagtagcagaagctgcactacaaattttcaaa

SEQ ID NO: 49886 - DNA, 77 bp, Homo sapiens
aatcattactggcttgtctgaaaatggatgatgaaaaagtagcagaagctgcactacaaattttcaaaaacacagga

SEQ ID NO: 49887 - DNA, 76 bp, Homo sapiens
cttgtctgaaaatggatgatgaaaaagtagcagaagctgcactacaaattttcaaaaacacaggaagcaaaattga

SEQ ID NO: 49888 - DNA, 75 bp, Homo sapiens
tggatgatgaaaaagtagcagaagctgcactacaaattttcaaaaacacaggaagcaaaattgaagaggattttc

SEQ ID NO: 49889 - DNA, 74 bp, Homo sapiens
aaaagtagcagaagctgcactacaaattttcaaaaacacaggaagcaaaattgaagaggattttccacacatca

SEQ ID NO: 49890 - DNA, 76 bp, Homo sapiens
aagctgcactacaaattttcaaaaacacaggaagcaaaattgaagaggattttccacacatcagatcgtgagttga

SEQ ID NO: 49891 - DNA, 73 bp, Homo sapiens
ctacaaattttcaaaaacacaggaagcaaaattgaagaggattttccacacatcagatcgtgagttgagttta

SEQ ID NO: 49892 - DNA, 73 bp, Homo sapiens
tttcaaaaacacaggaagcaaaattgaagaggattttccacacatcagatcgtgagttgagtttattttcaaa

SEQ ID NO: 49893 - DNA, 76 bp, Homo sapiens
ggaagcaaaattgaagaggattttccacacatcagatcgtgagttgagtttattttcaaaaatattctggacatca

SEQ ID NO: 49894 - DNA, 67 bp, Homo sapiens
ttttttaatagagccttgcttcctgttttacatcacaaatctaaaaaaggacccccccgtcaagcca

SEQ ID NO: 49895 - DNA, 71 bp, Homo sapiens
taatagagccttgcttcctgttttacatcacaaatctaaaaaaggacccccccgtcaagccaaatatgcca

SEQ ID NO: 49896 - DNA, 71 bp, Homo sapiens
cttcctgttttacatcacaaatctaaaaaaggacccccccgtcaagccaaatatgccattcattgtatcca

SEQ ID NO: 49897 - DNA, 73 bp, Homo sapiens
tttacatcacaaatctaaaaaaggacccccccgtcaagccaaatatgccattcattgtatccatgcgatattt

SEQ ID NO: 49898 - DNA, 71 bp, Homo sapiens
aatctaaaaaaggacccccccgtcaagccaaatatgccattcattgtatccatgcgatattttctagtaaa

SEQ ID NO: 49899 - DNA, 72 bp, Homo sapiens
aaaggacccccccgtcaagccaaatatgccattcattgtatccatgcgatattttctagtaaagagacccag

SEQ ID NO: 49900 - DNA, 80 bp, Homo sapiens
tcaagccaaatatgccattcattgtatccatgcgatattttctagtaaagagacccagtttgcacagatatttgaggtaa

SEQ ID NO: 49901 - DNA, 79 bp, Homo sapiens
atatgccattcattgtatccatgcgatattttctagtaaagagacccagtttgcacagatatttgaggtaatgagaaaa

SEQ ID NO: 49902 - DNA, 75 bp, Homo sapiens
attcattgtatccatgcgatattttctagtaaagagacccagtttgcacagatatttgaggtaatgagaaaaaaa

SEQ ID NO: 49903 - DNA, 73 bp, Homo sapiens
tccatgcgatattttctagtaaagagacccagtttgcacagatatttgaggtaatgagaaaaaaattttcttg

SEQ ID NO: 49904 - DNA, 68 bp, Homo sapiens
attttctagtaaagagacccagtttgcacagatatttgaggtaatgagaaaaaaattttcttgtttat

SEQ ID NO: 49905 - DNA, 78 bp, Homo sapiens
atttgtatatgtgtagagttgaaatatattttcctcccctcattttcagcctctgcataagagcctagatccaagcaa

SEQ ID NO: 49906 - DNA, 77 bp, Homo sapiens
atgtgtagagttgaaatatattttcctcccctcattttcagcctctgcataagagcctagatccaagcaacctggaa

SEQ ID NO: 49907 - DNA, 77 bp, Homo sapiens
aaatatattttcctcccctcattttcagcctctgcataagagcctagatccaagcaacctggaacatctcataacac

SEQ ID NO: 49908 - DNA, 78 bp, Homo sapiens
ctcccctcattttcagcctctgcataagagcctagatccaagcaacctggaacatctcataacaccattggttactat

SEQ ID NO: 49909 - DNA, 79 bp, Homo sapiens
attttcagcctctgcataagagcctagatccaagcaacctggaacatctcataacaccattggttactattggtcatat

SEQ ID NO: 49910 - DNA, 80 bp, Homo sapiens
cctctgcataagagcctagatccaagcaacctggaacatctcataacaccattggttactattggtcatattgctctcct

SEQ ID NO: 49911 - DNA, 80 bp, Homo sapiens
cctagatccaagcaacctggaacatctcataacaccattggttactattggtcatattgctctccttgcacctgatcaat

SEQ ID NO: 49912 - DNA, 82 bp, Homo sapiens
atccaagcaacctggaacatctcataacaccattggttactattggtcatattgctctccttgcacctgatcaatttgctgc

SEQ ID NO: 49913 - DNA, 80 bp, Homo sapiens
aacatctcataacaccattggttactattggtcatattgctctccttgcacctgatcaatttgctgctcctttgaaatct

SEQ ID NO: 49914 - DNA, 78 bp, Homo sapiens
ataacaccattggttactattggtcatattgctctccttgcacctgatcaatttgctgctcctttgaaatctttggta

SEQ ID NO: 49915 - DNA, 77 bp, Homo sapiens
attggttactattggtcatattgctctccttgcacctgatcaatttgctgctcctttgaaatctttggtagctactt

SEQ ID NO: 49916 - DNA, 81 bp, Homo sapiens
tattggtcatattgctctccttgcacctgatcaatttgctgctcctttgaaatctttggtagctactttcattgtgaaaga

SEQ ID NO: 49917 - DNA, 83 bp, Homo sapiens
tctccttgcacctgatcaatttgctgctcctttgaaatctttggtagctactttcattgtgaaagatcttctcatgaatgatc

SEQ ID NO: 49918 - DNA, 79 bp, Homo sapiens
cctgatcaatttgctgctcctttgaaatctttggtagctactttcattgtgaaagatcttctcatgaatgatcgggtaa

SEQ ID NO: 49919 - DNA, 77 bp, Homo sapiens
ttgctgctcctttgaaatctttggtagctactttcattgtgaaagatcttctcatgaatgatcgggtaatttatatt

SEQ ID NO: 49920 - DNA, 74 bp, Homo sapiens
gctcctttgaaatctttggtagctactttcattgtgaaagatcttctcatgaatgatcgggtaatttatatttt

SEQ ID NO: 49921 - DNA, 75 bp, Homo sapiens
ctttggtagctactttcattgtgaaagatcttctcatgaatgatcgggtaatttatattttttagattcatgttc

SEQ ID NO: 49922 - DNA, 76 bp, Homo sapiens
gctactttcattgtgaaagatcttctcatgaatgatcgggtaatttatattttttagattcatgttctttgtaatg

SEQ ID NO: 49923 - DNA, 64 bp, Homo sapiens
tttttttctcgtttatttttagcttccagggaaaaagacaactaaactttgggttccagatgaa

SEQ ID NO: 49924 - DNA, 68 bp, Homo sapiens
gtttatttttagcttccagggaaaaagacaactaaactttgggttccagatgaagaagtatctcctga

SEQ ID NO: 49925 - DNA, 70 bp, Homo sapiens
tttttagcttccagggaaaaagacaactaaactttgggttccagatgaagaagtatctcctgagacaatg

SEQ ID NO: 49926 - DNA, 72 bp, Homo sapiens
ggaaaaagacaactaaactttgggttccagatgaagaagtatctcctgagacaatggtcaaagtgagtaatg

SEQ ID NO: 49927 - DNA, 78 bp, Homo sapiens
actaaactttgggttccagatgaagaagtatctcctgagacaatggtcaaagtgagtaatgtgcatagatctattgat

SEQ ID NO: 49928 - DNA, 78 bp, Homo sapiens
actttgggttccagatgaagaagtatctcctgagacaatggtcaaagtgagtaatgtgcatagatctattgattttaa

SEQ ID NO: 49929 - DNA, 83 bp, Homo sapiens
gatgaagaagtatctcctgagacaatggtcaaagtgagtaatgtgcatagatctattgattttaatataatcaccacattgta

SEQ ID NO: 49930 - DNA, 73 bp, Homo sapiens
ttcaaaatgtaccagtgttttatttgtcgacttgtctcttaaatagattcaggctattaaaatgatggttcga

SEQ ID NO: 49931 - DNA, 74 bp, Homo sapiens
taccagtgttttatttgtcgacttgtctcttaaatagattcaggctattaaaatgatggttcgatggctacttg

SEQ ID NO: 49932 - DNA, 75 bp, Homo sapiens
tgttttatttgtcgacttgtctcttaaatagattcaggctattaaaatgatggttcgatggctacttggaatgaa

SEQ ID NO: 49933 - DNA, 76 bp, Homo sapiens
gtcgacttgtctcttaaatagattcaggctattaaaatgatggttcgatggctacttggaatgaaaaataatcaca

SEQ ID NO: 49934 - DNA, 74 bp, Homo sapiens
aaatagattcaggctattaaaatgatggttcgatggctacttggaatgaaaaataatcacagtaaatcaggaac

SEQ ID NO: 49935 - DNA, 75 bp, Homo sapiens
gattcaggctattaaaatgatggttcgatggctacttggaatgaaaaataatcacagtaaatcaggaacttctac

SEQ ID NO: 49936 - DNA, 73 bp, Homo sapiens
aaaatgatggttcgatggctacttggaatgaaaaataatcacagtaaatcaggaacttctaccttaagattgc

SEQ ID NO: 49937 - DNA, 74 bp, Homo sapiens
tggttcgatggctacttggaatgaaaaataatcacagtaaatcaggaacttctaccttaagattgctaacaaca

SEQ ID NO: 49938 - DNA, 77 bp, Homo sapiens
ttggaatgaaaaataatcacagtaaatcaggaacttctaccttaagattgctaacaacaatattgcatagtgatgga

SEQ ID NO: 49939 - DNA, 78 bp, Homo sapiens
aaataatcacagtaaatcaggaacttctaccttaagattgctaacaacaatattgcatagtgatggagacttgacaga

SEQ ID NO: 49940 - DNA, 78 bp, Homo sapiens
atcacagtaaatcaggaacttctaccttaagattgctaacaacaatattgcatagtgatggagacttgacagaacagg

SEQ ID NO: 49941 - DNA, 74 bp, Homo sapiens
aggaacttctaccttaagattgctaacaacaatattgcatagtgatggagacttgacagaacaggggaaaatta

SEQ ID NO: 49942 - DNA, 77 bp, Homo sapiens
taccttaagattgctaacaacaatattgcatagtgatggagacttgacagaacaggggaaaattaggtatgcaatta

SEQ ID NO: 49943 - DNA, 78 bp, Homo sapiens
attgctaacaacaatattgcatagtgatggagacttgacagaacaggggaaaattaggtatgcaattactatttcaca

SEQ ID NO: 49944 - DNA, 75 bp, Homo sapiens
aacaatattgcatagtgatggagacttgacagaacaggggaaaattaggtatgcaattactatttcacagttctt

SEQ ID NO: 49945 - DNA, 79 bp, Homo sapiens
caaatattttaaatgctaatctatattcattctactcatttttcagtaaaccagatatgtcacgtctgagacttgctgc

SEQ ID NO: 49946 - DNA, 79 bp, Homo sapiens
attttaaatgctaatctatattcattctactcatttttcagtaaaccagatatgtcacgtctgagacttgctgctggga

SEQ ID NO: 49947 - DNA, 82 bp, Homo sapiens
ctaatctatattcattctactcatttttcagtaaaccagatatgtcacgtctgagacttgctgctgggagtgctattgtgaa

SEQ ID NO: 49948 - DNA, 82 bp, Homo sapiens
attctactcatttttcagtaaaccagatatgtcacgtctgagacttgctgctgggagtgctattgtgaagctggcacaagaa

SEQ ID NO: 49949 - DNA, 80 bp, Homo sapiens
tttttcagtaaaccagatatgtcacgtctgagacttgctgctgggagtgctattgtgaagctggcacaagaaccctgtta

SEQ ID NO: 49950 - DNA, 83 bp, Homo sapiens
taaaccagatatgtcacgtctgagacttgctgctgggagtgctattgtgaagctggcacaagaaccctgttaccatgaaatca

SEQ ID NO: 49951 - DNA, 85 bp, Homo sapiens
tatgtcacgtctgagacttgctgctgggagtgctattgtgaagctggcacaagaaccctgttaccatgaaatcatcacattagaa

SEQ ID NO: 49952 - DNA, 84 bp, Homo sapiens
acttgctgctgggagtgctattgtgaagctggcacaagaaccctgttaccatgaaatcatcacattagaacaatatcagctatg

SEQ ID NO: 49953 - DNA, 86 bp, Homo sapiens
tgggagtgctattgtgaagctggcacaagaaccctgttaccatgaaatcatcacattagaacaatatcagctatgtgcattagcta

SEQ ID NO: 49954 - DNA, 85 bp, Homo sapiens
tattgtgaagctggcacaagaaccctgttaccatgaaatcatcacattagaacaatatcagctatgtgcattagctatcaacgta

SEQ ID NO: 49955 - DNA, 82 bp, Homo sapiens
tggcacaagaaccctgttaccatgaaatcatcacattagaacaatatcagctatgtgcattagctatcaacgtaaggaaatg

SEQ ID NO: 49956 - DNA, 80 bp, Homo sapiens
aagaaccctgttaccatgaaatcatcacattagaacaatatcagctatgtgcattagctatcaacgtaaggaaatggctg

SEQ ID NO: 49957 - DNA, 80 bp, Homo sapiens
atgaaatcatcacattagaacaatatcagctatgtgcattagctatcaacgtaaggaaatggctgtgtacaactactttt

SEQ ID NO: 49958 - DNA, 80 bp, Homo sapiens
atcatcacattagaacaatatcagctatgtgcattagctatcaacgtaaggaaatggctgtgtacaactactttttgaag

SEQ ID NO: 49959 - DNA, 78 bp, Homo sapiens
actctttgctgccatttgaataatatctggaataattgtgtctttacaggatgaatgctatcaagtaagacaagtgtt

SEQ ID NO: 49960 - DNA, 77 bp, Homo sapiens
catttgaataatatctggaataattgtgtctttacaggatgaatgctatcaagtaagacaagtgtttgcccagaaac

SEQ ID NO: 49961 - DNA, 76 bp, Homo sapiens
aatatctggaataattgtgtctttacaggatgaatgctatcaagtaagacaagtgtttgcccagaaacttcacaaa

SEQ ID NO: 49962 - DNA, 73 bp, Homo sapiens
aataattgtgtctttacaggatgaatgctatcaagtaagacaagtgtttgcccagaaacttcacaaaggcctt

SEQ ID NO: 49963 - DNA, 72 bp, Homo sapiens
tctttacaggatgaatgctatcaagtaagacaagtgtttgcccagaaacttcacaaaggcctttcccgttta

SEQ ID NO: 49964 - DNA, 71 bp, Homo sapiens
atgaatgctatcaagtaagacaagtgtttgcccagaaacttcacaaaggcctttcccgtttacggcttcca

SEQ ID NO: 49965 - DNA, 68 bp, Homo sapiens
agtaagacaagtgtttgcccagaaacttcacaaaggcctttcccgtttacggcttccacttgagtata

SEQ ID NO: 49966 - DNA, 70 bp, Homo sapiens
aagtgtttgcccagaaacttcacaaaggcctttcccgtttacggcttccacttgagtatatggcaatctg

SEQ ID NO: 49967 - DNA, 72 bp, Homo sapiens
agaaacttcacaaaggcctttcccgtttacggcttccacttgagtatatggcaatctgtgccctttgtgcaa

SEQ ID NO: 49968 - DNA, 73 bp, Homo sapiens
caaaggcctttcccgtttacggcttccacttgagtatatggcaatctgtgccctttgtgcaaaagatcctgta

SEQ ID NO: 49969 - DNA, 73 bp, Homo sapiens
ctttcccgtttacggcttccacttgagtatatggcaatctgtgccctttgtgcaaaagatcctgtaaaggaga

SEQ ID NO: 49970 - DNA, 80 bp, Homo sapiens
tttacggcttccacttgagtatatggcaatctgtgccctttgtgcaaaagatcctgtaaaggagagaagagctcatgcta

SEQ ID NO: 49971 - DNA, 82 bp, Homo sapiens
ttgagtatatggcaatctgtgccctttgtgcaaaagatcctgtaaaggagagaagagctcatgctaggcaatgtttggtgaa

SEQ ID NO: 49972 - DNA, 79 bp, Homo sapiens
gcaatctgtgccctttgtgcaaaagatcctgtaaaggagagaagagctcatgctaggcaatgtttggtgaaaaatataa

SEQ ID NO: 49973 - DNA, 75 bp, Homo sapiens
ccctttgtgcaaaagatcctgtaaaggagagaagagctcatgctaggcaatgtttggtgaaaaatataaatgtaa

SEQ ID NO: 49974 - DNA, 73 bp, Homo sapiens
aaaagatcctgtaaaggagagaagagctcatgctaggcaatgtttggtgaaaaatataaatgtaaggcgggag

SEQ ID NO: 49975 - DNA, 76 bp, Homo sapiens
atcctgtaaaggagagaagagctcatgctaggcaatgtttggtgaaaaatataaatgtaaggcgggagtatctgaa

SEQ ID NO: 49976 - DNA, 82 bp, Homo sapiens
agaagagctcatgctaggcaatgtttggtgaaaaatataaatgtaaggcgggagtatctgaagcagcatgcagctgttagtg

SEQ ID NO: 49977 - DNA, 82 bp, Homo sapiens
tgctaggcaatgtttggtgaaaaatataaatgtaaggcgggagtatctgaagcagcatgcagctgttagtggtaagcatata

SEQ ID NO: 49978 - DNA, 78 bp, Homo sapiens
aatgtttggtgaaaaatataaatgtaaggcgggagtatctgaagcagcatgcagctgttagtggtaagcatataagaa

SEQ ID NO: 49979 - DNA, 76 bp, Homo sapiens
aaaaatataaatgtaaggcgggagtatctgaagcagcatgcagctgttagtggtaagcatataagaaaatggaaag

SEQ ID NO: 49980 - DNA, 77 bp, Homo sapiens
ataaatgtaaggcgggagtatctgaagcagcatgcagctgttagtggtaagcatataagaaaatggaaaggatactt

SEQ ID NO: 49981 - DNA, 70 bp, Homo sapiens
ttgttttctttttcagaaaaattattgtctcttctaccagagtatgttgttccatatacaattcaccttt

SEQ ID NO: 49982 - DNA, 75 bp, Homo sapiens
ttttcagaaaaattattgtctcttctaccagagtatgttgttccatatacaattcaccttttggcacatgaccca

SEQ ID NO: 49983 - DNA, 77 bp, Homo sapiens
aattattgtctcttctaccagagtatgttgttccatatacaattcaccttttggcacatgacccagattatgtcaaa

SEQ ID NO: 49984 - DNA, 78 bp, Homo sapiens
tcttctaccagagtatgttgttccatatacaattcaccttttggcacatgacccagattatgtcaaagtacaggatat

SEQ ID NO: 49985 - DNA, 76 bp, Homo sapiens
agtatgttgttccatatacaattcaccttttggcacatgacccagattatgtcaaagtacaggatattgaacaact

SEQ ID NO: 49986 - DNA, 76 bp, Homo sapiens
ttccatatacaattcaccttttggcacatgacccagattatgtcaaagtacaggatattgaacaacttaaagatgt

SEQ ID NO: 49987 - DNA, 74 bp, Homo sapiens
caattcaccttttggcacatgacccagattatgtcaaagtacaggatattgaacaacttaaagatgttaaagag

SEQ ID NO: 49988 - DNA, 73 bp, Homo sapiens
ccttttggcacatgacccagattatgtcaaagtacaggatattgaacaacttaaagatgttaaagagtaagac

SEQ ID NO: 49989 - DNA, 73 bp, Homo sapiens
catgacccagattatgtcaaagtacaggatattgaacaacttaaagatgttaaagagtaagactttttccatc

SEQ ID NO: 49990 - DNA, 71 bp, Homo sapiens
ttatgtcaaagtacaggatattgaacaacttaaagatgttaaagagtaagactttttccatcccattttca

SEQ ID NO: 49991 - DNA, 69 bp, Homo sapiens
agtacaggatattgaacaacttaaagatgttaaagagtaagactttttccatcccattttcatattttc

SEQ ID NO: 49992 - DNA, 68 bp, Homo sapiens
tttttttttagatgtctttggtttgttctggaaatattaatggctaaaaatgaaaataacagtcacgc

SEQ ID NO: 49993 - DNA, 72 bp, Homo sapiens
gatgtctttggtttgttctggaaatattaatggctaaaaatgaaaataacagtcacgcttttatcagaaaga

SEQ ID NO: 49994 - DNA, 71 bp, Homo sapiens
ggtttgttctggaaatattaatggctaaaaatgaaaataacagtcacgcttttatcagaaagatggtagaa

SEQ ID NO: 49995 - DNA, 72 bp, Homo sapiens
tctggaaatattaatggctaaaaatgaaaataacagtcacgcttttatcagaaagatggtagaaaatattaa

SEQ ID NO: 49996 - DNA, 70 bp, Homo sapiens
attaatggctaaaaatgaaaataacagtcacgcttttatcagaaagatggtagaaaatattaaacaaaca

SEQ ID NO: 49997 - DNA, 71 bp, Homo sapiens
tgaaaataacagtcacgcttttatcagaaagatggtagaaaatattaaacaaacaaaagatgcccaaggac

SEQ ID NO: 49998 - DNA, 74 bp, Homo sapiens
agtcacgcttttatcagaaagatggtagaaaatattaaacaaacaaaagatgcccaaggaccagatgatgcaaa

SEQ ID NO: 49999 - DNA, 74 bp, Homo sapiens
cgcttttatcagaaagatggtagaaaatattaaacaaacaaaagatgcccaaggaccagatgatgcaaaaatga

SEQ ID NO: 50000 - DNA, 75 bp, Homo sapiens
gatggtagaaaatattaaacaaacaaaagatgcccaaggaccagatgatgcaaaaatgaatgaagtatgtaattc

SEQ ID NO: 50001 - DNA, 74 bp, Homo sapiens
gaaaatattaaacaaacaaaagatgcccaaggaccagatgatgcaaaaatgaatgaagtatgtaattctttgta

SEQ ID NO: 50002 - DNA, 74 bp, Homo sapiens
caaacaaaagatgcccaaggaccagatgatgcaaaaatgaatgaagtatgtaattctttgtaaataattatggt

SEQ ID NO: 50003 - DNA, 80 bp, Homo sapiens
tagattgccagcttaagtatctgtgtttttaaaaatatactattgcagaaactgtacactgtgtgtgatgttgccatgaa

SEQ ID NO: 50004 - DNA, 83 bp, Homo sapiens
gcttaagtatctgtgtttttaaaaatatactattgcagaaactgtacactgtgtgtgatgttgccatgaatatcatcatgtca

SEQ ID NO: 50005 - DNA, 81 bp, Homo sapiens
gtgtttttaaaaatatactattgcagaaactgtacactgtgtgtgatgttgccatgaatatcatcatgtcaaagagtacta

SEQ ID NO: 50006 - DNA, 82 bp, Homo sapiens
aaaaatatactattgcagaaactgtacactgtgtgtgatgttgccatgaatatcatcatgtcaaagagtactacatacagtt

SEQ ID NO: 50007 - DNA, 85 bp, Homo sapiens
tattgcagaaactgtacactgtgtgtgatgttgccatgaatatcatcatgtcaaagagtactacatacagtttggaatctcctaa

SEQ ID NO: 50008 - DNA, 81 bp, Homo sapiens
aaactgtacactgtgtgtgatgttgccatgaatatcatcatgtcaaagagtactacatacagtttggaatctcctaaagac

SEQ ID NO: 50009 - DNA, 80 bp, Homo sapiens
tgtgtgatgttgccatgaatatcatcatgtcaaagagtactacatacagtttggaatctcctaaagacccggtactacca

SEQ ID NO: 50010 - DNA, 77 bp, Homo sapiens
tgccatgaatatcatcatgtcaaagagtactacatacagtttggaatctcctaaagacccggtactaccagctcgtt

SEQ ID NO: 50011 - DNA, 73 bp, Homo sapiens
aatatcatcatgtcaaagagtactacatacagtttggaatctcctaaagacccggtactaccagctcgtttct

SEQ ID NO: 50012 - DNA, 72 bp, Homo sapiens
atgtcaaagagtactacatacagtttggaatctcctaaagacccggtactaccagctcgtttcttcactcaa

SEQ ID NO: 50013 - DNA, 71 bp, Homo sapiens
ctacatacagtttggaatctcctaaagacccggtactaccagctcgtttcttcactcaacctgacaaggta

SEQ ID NO: 50014 - DNA, 69 bp, Homo sapiens
ttggaatctcctaaagacccggtactaccagctcgtttcttcactcaacctgacaaggtagttacttta

SEQ ID NO: 50015 - DNA, 68 bp, Homo sapiens
tctcctaaagacccggtactaccagctcgtttcttcactcaacctgacaaggtagttactttacaatt

SEQ ID NO: 50016 - DNA, 70 bp, Homo sapiens
gtactaccagctcgtttcttcactcaacctgacaaggtagttactttacaatttgtttgtgtaagttgaa

SEQ ID NO: 50017 - DNA, 71 bp, Homo sapiens
gttggcttttgaaccacctgtagatagtgttttaatattcactgactacttctttttctcttggttgtaga

SEQ ID NO: 50018 - DNA, 71 bp, Homo sapiens
ccacctgtagatagtgttttaatattcactgactacttctttttctcttggttgtagaatttcagtaacac

SEQ ID NO: 50019 - DNA, 69 bp, Homo sapiens
agatagtgttttaatattcactgactacttctttttctcttggttgtagaatttcagtaacaccaaaaa

SEQ ID NO: 50020 - DNA, 73 bp, Homo sapiens
taatattcactgactacttctttttctcttggttgtagaatttcagtaacaccaaaaattatctgcctcctga

SEQ ID NO: 50021 - DNA, 71 bp, Homo sapiens
actgactacttctttttctcttggttgtagaatttcagtaacaccaaaaattatctgcctcctgaaatgaa

SEQ ID NO: 50022 - DNA, 73 bp, Homo sapiens
ttctcttggttgtagaatttcagtaacaccaaaaattatctgcctcctgaaatgaaatcatttttcactcctg

SEQ ID NO: 50023 - DNA, 73 bp, Homo sapiens
tgtagaatttcagtaacaccaaaaattatctgcctcctgaaatgaaatcatttttcactcctggaaaagtatg

SEQ ID NO: 50024 - DNA, 73 bp, Homo sapiens
ttcagtaacaccaaaaattatctgcctcctgaaatgaaatcatttttcactcctggaaaagtatgttttgaga

SEQ ID NO: 50025 - DNA, 72 bp, Homo sapiens
acaccaaaaattatctgcctcctgaaatgaaatcatttttcactcctggaaaagtatgttttgagaatcatt

SEQ ID NO: 50026 - DNA, 72 bp, Homo sapiens
ttatctgcctcctgaaatgaaatcatttttcactcctggaaaagtatgttttgagaatcattttaattttta

SEQ ID NO: 50027 - DNA, 71 bp, Homo sapiens
cctgaaatgaaatcatttttcactcctggaaaagtatgttttgagaatcattttaatttttatgtggtagc

SEQ ID NO: 50028 - DNA, 70 bp, Homo sapiens
tttttcactcctggaaaagtatgttttgagaatcattttaatttttatgtggtagcttattttagagtga

SEQ ID NO: 50029 - DNA, 72 bp, Homo sapiens
ttttggctttaaccaaataaaaagagatgtgcatttctcatttcagcctaaaacaaccaatgttctaggagc

SEQ ID NO: 50030 - DNA, 74 bp, Homo sapiens
taaccaaataaaaagagatgtgcatttctcatttcagcctaaaacaaccaatgttctaggagctgttaacaagc

SEQ ID NO: 50031 - DNA, 73 bp, Homo sapiens
aataaaaagagatgtgcatttctcatttcagcctaaaacaaccaatgttctaggagctgttaacaagccactt

SEQ ID NO: 50032 - DNA, 81 bp, Homo sapiens
gcatttctcatttcagcctaaaacaaccaatgttctaggagctgttaacaagccactttcatcagcaggcaagcaatctca

SEQ ID NO: 50033 - DNA, 78 bp, Homo sapiens
tttcagcctaaaacaaccaatgttctaggagctgttaacaagccactttcatcagcaggcaagcaatctcagaccaaa

SEQ ID NO: 50034 - DNA, 80 bp, Homo sapiens
taaaacaaccaatgttctaggagctgttaacaagccactttcatcagcaggcaagcaatctcagaccaaatcatcacgaa

SEQ ID NO: 50035 - DNA, 81 bp, Homo sapiens
aatgttctaggagctgttaacaagccactttcatcagcaggcaagcaatctcagaccaaatcatcacgaatggaaactgta

SEQ ID NO: 50036 - DNA, 84 bp, Homo sapiens
taggagctgttaacaagccactttcatcagcaggcaagcaatctcagaccaaatcatcacgaatggaaactgtaagcaatgcaa

SEQ ID NO: 50037 - DNA, 87 bp, Homo sapiens
taacaagccactttcatcagcaggcaagcaatctcagaccaaatcatcacgaatggaaactgtaagcaatgcaagcagcagctcaaa

SEQ ID NO: 50038 - DNA, 88 bp, Homo sapiens
ctttcatcagcaggcaagcaatctcagaccaaatcatcacgaatggaaactgtaagcaatgcaagcagcagctcaaatccaagctctc

SEQ ID NO: 50039 - DNA, 84 bp, Homo sapiens
aagcaatctcagaccaaatcatcacgaatggaaactgtaagcaatgcaagcagcagctcaaatccaagctctcctggaagaata

SEQ ID NO: 50040 - DNA, 82 bp, Homo sapiens
atctcagaccaaatcatcacgaatggaaactgtaagcaatgcaagcagcagctcaaatccaagctctcctggaagaataaag

SEQ ID NO: 50041 - DNA, 79 bp, Homo sapiens
aatcatcacgaatggaaactgtaagcaatgcaagcagcagctcaaatccaagctctcctggaagaataaaggggaggta

SEQ ID NO: 50042 - DNA, 77 bp, Homo sapiens
atggaaactgtaagcaatgcaagcagcagctcaaatccaagctctcctggaagaataaaggggaggtaagtgcaaaa

SEQ ID NO: 50043 - DNA, 79 bp, Homo sapiens
taagcaatgcaagcagcagctcaaatccaagctctcctggaagaataaaggggaggtaagtgcaaaagaaatgccacaa

SEQ ID NO: 50044 - DNA, 74 bp, Homo sapiens
cagcagctcaaatccaagctctcctggaagaataaaggggaggtaagtgcaaaagaaatgccacaatttacatt

SEQ ID NO: 50045 - DNA, 75 bp, Homo sapiens
tgtaaggttatttgattgtaataacaattacaaatgtctgtattaaaaggcttgatagttctgaaatggatcaca

SEQ ID NO: 50046 - DNA, 77 bp, Homo sapiens
ttgattgtaataacaattacaaatgtctgtattaaaaggcttgatagttctgaaatggatcacagtgaaaatgaaga

SEQ ID NO: 50047 - DNA, 77 bp, Homo sapiens
acaattacaaatgtctgtattaaaaggcttgatagttctgaaatggatcacagtgaaaatgaagattacacaatgtc

SEQ ID NO: 50048 - DNA, 77 bp, Homo sapiens
caaatgtctgtattaaaaggcttgatagttctgaaatggatcacagtgaaaatgaagattacacaatgtcttcacct

SEQ ID NO: 50049 - DNA, 76 bp, Homo sapiens
tgtattaaaaggcttgatagttctgaaatggatcacagtgaaaatgaagattacacaatgtcttcacctttgccgg

SEQ ID NO: 50050 - DNA, 74 bp, Homo sapiens
ggcttgatagttctgaaatggatcacagtgaaaatgaagattacacaatgtcttcacctttgccggggaaaaaa

SEQ ID NO: 50051 - DNA, 74 bp, Homo sapiens
ttctgaaatggatcacagtgaaaatgaagattacacaatgtcttcacctttgccggggaaaaaaagtgacaaga

SEQ ID NO: 50052 - DNA, 73 bp, Homo sapiens
acagtgaaaatgaagattacacaatgtcttcacctttgccggggaaaaaaagtgacaagagagacgactctga

SEQ ID NO: 50053 - DNA, 73 bp, Homo sapiens
aatgaagattacacaatgtcttcacctttgccggggaaaaaaagtgacaagagagacgactctgatcttgtaa

SEQ ID NO: 50054 - DNA, 72 bp, Homo sapiens
caatgtcttcacctttgccggggaaaaaaagtgacaagagagacgactctgatcttgtaagggtgagatatt

SEQ ID NO: 50055 - DNA, 72 bp, Homo sapiens
acctttgccggggaaaaaaagtgacaagagagacgactctgatcttgtaagggtgagatatttgcattgatt

SEQ ID NO: 50056 - DNA, 74 bp, Homo sapiens
gggaaaaaaagtgacaagagagacgactctgatcttgtaagggtgagatatttgcattgattttataataatat

SEQ ID NO: 50057 - DNA, 67 bp, Homo sapiens
tttttttttcccctagtctgaattggagaagcctagaggcaggaaaaaaacgcccgtcacagaacag

SEQ ID NO: 50058 - DNA, 70 bp, Homo sapiens
ccctagtctgaattggagaagcctagaggcaggaaaaaaacgcccgtcacagaacaggaggagaaattag

SEQ ID NO: 50059 - DNA, 71 bp, Homo sapiens
aattggagaagcctagaggcaggaaaaaaacgcccgtcacagaacaggaggagaaattaggtatggatgac

SEQ ID NO: 50060 - DNA, 71 bp, Homo sapiens
aagcctagaggcaggaaaaaaacgcccgtcacagaacaggaggagaaattaggtatggatgacttgactaa

SEQ ID NO: 50061 - DNA, 69 bp, Homo sapiens
aggaaaaaaacgcccgtcacagaacaggaggagaaattaggtatggatgacttgactaagttggtacag

SEQ ID NO: 50062 - DNA, 71 bp, Homo sapiens
aaaaacgcccgtcacagaacaggaggagaaattaggtatggatgacttgactaagttggtacaggaacaga

SEQ ID NO: 50063 - DNA, 72 bp, Homo sapiens
agaacaggaggagaaattaggtatggatgacttgactaagttggtacaggaacagaaacctaaaggcagtca

SEQ ID NO: 50064 - DNA, 72 bp, Homo sapiens
aggagaaattaggtatggatgacttgactaagttggtacaggaacagaaacctaaaggcagtcagcgaagtc

SEQ ID NO: 50065 - DNA, 71 bp, Homo sapiens
attaggtatggatgacttgactaagttggtacaggaacagaaacctaaaggcagtcagcgaagtcggaaaa

SEQ ID NO: 50066 - DNA, 71 bp, Homo sapiens
atgacttgactaagttggtacaggaacagaaacctaaaggcagtcagcgaagtcggaaaagaggccatacg

SEQ ID NO: 50067 - DNA, 72 bp, Homo sapiens
taagttggtacaggaacagaaacctaaaggcagtcagcgaagtcggaaaagaggccatacggcttcagaatc

SEQ ID NO: 50068 - DNA, 76 bp, Homo sapiens
aggaacagaaacctaaaggcagtcagcgaagtcggaaaagaggccatacggcttcagaatctgatgaacagcagtg

SEQ ID NO: 50069 - DNA, 77 bp, Homo sapiens
aaacctaaaggcagtcagcgaagtcggaaaagaggccatacggcttcagaatctgatgaacagcagtggcctgagga

SEQ ID NO: 50070 - DNA, 78 bp, Homo sapiens
agtcagcgaagtcggaaaagaggccatacggcttcagaatctgatgaacagcagtggcctgaggaaaagaggctcaaa

SEQ ID NO: 50071 - DNA, 77 bp, Homo sapiens
aagtcggaaaagaggccatacggcttcagaatctgatgaacagcagtggcctgaggaaaagaggctcaaagaagata

SEQ ID NO: 50072 - DNA, 79 bp, Homo sapiens
aggccatacggcttcagaatctgatgaacagcagtggcctgaggaaaagaggctcaaagaagatatattagaaaatgaa

SEQ ID NO: 50073 - DNA, 81 bp, Homo sapiens
cttcagaatctgatgaacagcagtggcctgaggaaaagaggctcaaagaagatatattagaaaatgaagatgaacagaata

SEQ ID NO: 50074 - DNA, 78 bp, Homo sapiens
atgaacagcagtggcctgaggaaaagaggctcaaagaagatatattagaaaatgaagatgaacagaatagtccgccaa

SEQ ID NO: 50075 - DNA, 75 bp, Homo sapiens
agcagtggcctgaggaaaagaggctcaaagaagatatattagaaaatgaagatgaacagaatagtccgccaaaaa

SEQ ID NO: 50076 - DNA, 71 bp, Homo sapiens
gaggaaaagaggctcaaagaagatatattagaaaatgaagatgaacagaatagtccgccaaaaaagggtaa

SEQ ID NO: 50077 - DNA, 71 bp, Homo sapiens
tcaaagaagatatattagaaaatgaagatgaacagaatagtccgccaaaaaagggtaaaagaggccgacca

SEQ ID NO: 50078 - DNA, 68 bp, Homo sapiens
atatattagaaaatgaagatgaacagaatagtccgccaaaaaagggtaaaagaggccgaccaccaaaa

SEQ ID NO: 50079 - DNA, 66 bp, Homo sapiens
aaaatgaagatgaacagaatagtccgccaaaaaagggtaaaagaggccgaccaccaaaacctcttg

SEQ ID NO: 50080 - DNA, 66 bp, Homo sapiens
atgaacagaatagtccgccaaaaaagggtaaaagaggccgaccaccaaaacctcttggtggaggta

SEQ ID NO: 50081 - DNA, 64 bp, Homo sapiens
aatagtccgccaaaaaagggtaaaagaggccgaccaccaaaacctcttggtggaggtacaccaa

SEQ ID NO: 50082 - DNA, 64 bp, Homo sapiens
aaaaagggtaaaagaggccgaccaccaaaacctcttggtggaggtacaccaaaagaagagccaa

SEQ ID NO: 50083 - DNA, 67 bp, Homo sapiens
taaaagaggccgaccaccaaaacctcttggtggaggtacaccaaaagaagagccaacaatgaaaact

SEQ ID NO: 50084 - DNA, 65 bp, Homo sapiens
accaaaacctcttggtggaggtacaccaaaagaagagccaacaatgaaaacttctaaaaaaggaa

SEQ ID NO: 50085 - DNA, 66 bp, Homo sapiens
ggaggtacaccaaaagaagagccaacaatgaaaacttctaaaaaaggaagcaaaaaaaaatctgga

SEQ ID NO: 50086 - DNA, 71 bp, Homo sapiens
gaggaagaagaagaaagacaaagtggaaatacggaacagaagtccaaaagcaaacagcaccgagtgtcaag

SEQ ID NO: 50087 - DNA, 75 bp, Homo sapiens
aagaaagacaaagtggaaatacggaacagaagtccaaaagcaaacagcaccgagtgtcaaggagagcacagcaga

SEQ ID NO: 50088 - DNA, 75 bp, Homo sapiens
agacaaagtggaaatacggaacagaagtccaaaagcaaacagcaccgagtgtcaaggagagcacagcagaggtaa

SEQ ID NO: 50089 - DNA, 78 bp, Homo sapiens
aatacggaacagaagtccaaaagcaaacagcaccgagtgtcaaggagagcacagcagaggtaagcatgtgtaactcta

SEQ ID NO: 50090 - DNA, 81 bp, Homo sapiens
ttataaatcataatttgatgctatccacatttgggtcttccccaaagcagagcagaatctcctgaatctagtgcaattgaa

SEQ ID NO: 50091 - DNA, 81 bp, Homo sapiens
ataatttgatgctatccacatttgggtcttccccaaagcagagcagaatctcctgaatctagtgcaattgaatccacacag

SEQ ID NO: 50092 - DNA, 82 bp, Homo sapiens
tatccacatttgggtcttccccaaagcagagcagaatctcctgaatctagtgcaattgaatccacacagtccacaccacaga

SEQ ID NO: 50093 - DNA, 79 bp, Homo sapiens
tttgggtcttccccaaagcagagcagaatctcctgaatctagtgcaattgaatccacacagtccacaccacagaaagga

SEQ ID NO: 50094 - DNA, 81 bp, Homo sapiens
aagcagagcagaatctcctgaatctagtgcaattgaatccacacagtccacaccacagaaaggacgaggaagaccatcaaa

SEQ ID NO: 50095 - DNA, 77 bp, Homo sapiens
agaatctcctgaatctagtgcaattgaatccacacagtccacaccacagaaaggacgaggaagaccatcaaaaacgc

SEQ ID NO: 50096 - DNA, 79 bp, Homo sapiens
aatctagtgcaattgaatccacacagtccacaccacagaaaggacgaggaagaccatcaaaaacgccatcaccatcaca

SEQ ID NO: 50097 - DNA, 75 bp, Homo sapiens
aattgaatccacacagtccacaccacagaaaggacgaggaagaccatcaaaaacgccatcaccatcacaaccaaa

SEQ ID NO: 50098 - DNA, 73 bp, Homo sapiens
aatccacacagtccacaccacagaaaggacgaggaagaccatcaaaaacgccatcaccatcacaaccaaaaaa

SEQ ID NO: 50099 - DNA, 69 bp, Homo sapiens
aaggacgaggaagaccatcaaaaacgccatcaccatcacaaccaaaaaaaaatgtgtaagttgtaaata

SEQ ID NO: 50100 - DNA, 70 bp, Homo sapiens
gaggaagaccatcaaaaacgccatcaccatcacaaccaaaaaaaaatgtgtaagttgtaaatattacatt

SEQ ID NO: 50101 - DNA, 69 bp, Homo sapiens
atcaaaaacgccatcaccatcacaaccaaaaaaaaatgtgtaagttgtaaatattacatttcaaaccaa

SEQ ID NO: 50102 - DNA, 69 bp, Homo sapiens
ccatcaccatcacaaccaaaaaaaaatgtgtaagttgtaaatattacatttcaaaccaatttcaaatta

SEQ ID NO: 50103 - DNA, 67 bp, Homo sapiens
cacaaccaaaaaaaaatgtgtaagttgtaaatattacatttcaaaccaatttcaaattattttgcaa

SEQ ID NO: 50104 - DNA, 67 bp, Homo sapiens
atgtgtaagttgtaaatattacatttcaaaccaatttcaaattattttgcaaaagttcctaaatttg

SEQ ID NO: 50105 - DNA, 66 bp, Homo sapiens
agttgtaaatattacatttcaaaccaatttcaaattattttgcaaaagttcctaaatttgtaaaca

SEQ ID NO: 50106 - DNA, 71 bp, Homo sapiens
tattacatttcaaaccaatttcaaattattttgcaaaagttcctaaatttgtaaacatacatattgctgta

SEQ ID NO: 50107 - DNA, 70 bp, Homo sapiens
ccaatttcaaattattttgcaaaagttcctaaatttgtaaacatacatattgctgtatttaaattccata

SEQ ID NO: 50108 - DNA, 70 bp, Homo sapiens
attattttgcaaaagttcctaaatttgtaaacatacatattgctgtatttaaattccatatatttagccc

SEQ ID NO: 50109 - DNA, 72 bp, Homo sapiens
gcaaaagttcctaaatttgtaaacatacatattgctgtatttaaattccatatatttagccccattacacta

SEQ ID NO: 50110 - DNA, 72 bp, Homo sapiens
cctaaatttgtaaacatacatattgctgtatttaaattccatatatttagccccattacactaggtaagata

SEQ ID NO: 50111 - DNA, 70 bp, Homo sapiens
gtaaacatacatattgctgtatttaaattccatatatttagccccattacactaggtaagataaaatttt

SEQ ID NO: 50112 - DNA, 73 bp, Homo sapiens
tctactgaaagattggaacgttcattgtgttttacatgtgttttactctagccgtgtaggacgctccaaacaa

SEQ ID NO: 50113 - DNA, 73 bp, Homo sapiens
attggaacgttcattgtgttttacatgtgttttactctagccgtgtaggacgctccaaacaagcagctactaa

SEQ ID NO: 50114 - DNA, 74 bp, Homo sapiens
ttcattgtgttttacatgtgttttactctagccgtgtaggacgctccaaacaagcagctactaaggaaaatgat

SEQ ID NO: 50115 - DNA, 74 bp, Homo sapiens
atgtgttttactctagccgtgtaggacgctccaaacaagcagctactaaggaaaatgattcaagtgaagaagta

SEQ ID NO: 50116 - DNA, 75 bp, Homo sapiens
ttttactctagccgtgtaggacgctccaaacaagcagctactaaggaaaatgattcaagtgaagaagtagatgtg

SEQ ID NO: 50117 - DNA, 74 bp, Homo sapiens
ccgtgtaggacgctccaaacaagcagctactaaggaaaatgattcaagtgaagaagtagatgtgtttcagggta

SEQ ID NO: 50118 - DNA, 79 bp, Homo sapiens
tccaaacaagcagctactaaggaaaatgattcaagtgaagaagtagatgtgtttcagggtagctctcctgtcgatgata

SEQ ID NO: 50119 - DNA, 79 bp, Homo sapiens
aagcagctactaaggaaaatgattcaagtgaagaagtagatgtgtttcagggtagctctcctgtcgatgatattccaca

SEQ ID NO: 50120 - DNA, 77 bp, Homo sapiens
taaggaaaatgattcaagtgaagaagtagatgtgtttcagggtagctctcctgtcgatgatattccacaggaagaaa

SEQ ID NO: 50121 - DNA, 77 bp, Homo sapiens
attcaagtgaagaagtagatgtgtttcagggtagctctcctgtcgatgatattccacaggaagaaacagaggaggag

SEQ ID NO: 50122 - DNA, 75 bp, Homo sapiens
aagtagatgtgtttcagggtagctctcctgtcgatgatattccacaggaagaaacagaggaggaggaagtttcta

SEQ ID NO: 50123 - DNA, 75 bp, Homo sapiens
tttcagggtagctctcctgtcgatgatattccacaggaagaaacagaggaggaggaagtttctacagtaaatgta

SEQ ID NO: 50124 - DNA, 77 bp, Homo sapiens
tagctctcctgtcgatgatattccacaggaagaaacagaggaggaggaagtttctacagtaaatgtatgtgttcaaa

SEQ ID NO: 50125 - DNA, 76 bp, Homo sapiens
tcgatgatattccacaggaagaaacagaggaggaggaagtttctacagtaaatgtatgtgttcaaagtttctgtga

SEQ ID NO: 50126 - DNA, 73 bp, Homo sapiens
atattccacaggaagaaacagaggaggaggaagtttctacagtaaatgtatgtgttcaaagtttctgtgagtg

SEQ ID NO: 50127 - DNA, 72 bp, Homo sapiens
tatgcacatatacccattttaattaagcatctggtgactttccttttaaggtacggcggcgaagtgctaaaa

SEQ ID NO: 50128 - DNA, 67 bp, Homo sapiens
atacccattttaattaagcatctggtgactttccttttaaggtacggcggcgaagtgctaaaaggga

SEQ ID NO: 50129 - DNA, 70 bp, Homo sapiens
taattaagcatctggtgactttccttttaaggtacggcggcgaagtgctaaaagggaacggcgatgaaca

SEQ ID NO: 50130 - DNA, 68 bp, Homo sapiens
tgactttccttttaaggtacggcggcgaagtgctaaaagggaacggcgatgaacaaatgtaattaata

SEQ ID NO: 50131 - DNA, 66 bp, Homo sapiens
ttccttttaaggtacggcggcgaagtgctaaaagggaacggcgatgaacaaatgtaattaataact

SEQ ID NO: 50132 - DNA, 70 bp, Homo sapiens
tacggcggcgaagtgctaaaagggaacggcgatgaacaaatgtaattaataactttctctgtgaaagctt

SEQ ID NO: 50133 - DNA, 69 bp, Homo sapiens
cgaagtgctaaaagggaacggcgatgaacaaatgtaattaataactttctctgtgaaagctttggaaaa

SEQ ID NO: 50134 - DNA, 66 bp, Homo sapiens
aaagggaacggcgatgaacaaatgtaattaataactttctctgtgaaagctttggaaaaatctttt

SEQ ID NO: 50135 - DNA, 76 bp, Homo sapiens
tttttttggtcaagcttgaggctgaataaagcctttgatgcacaaaatgggactgctgaagagtggacagttggac

SEQ ID NO: 50136 - DNA, 77 bp, Homo sapiens
ttggtcaagcttgaggctgaataaagcctttgatgcacaaaatgggactgctgaagagtggacagttggaccttact

SEQ ID NO: 50137 - DNA, 76 bp, Homo sapiens
ttgaggctgaataaagcctttgatgcacaaaatgggactgctgaagagtggacagttggaccttactttggtgacc

SEQ ID NO: 50138 - DNA, 74 bp, Homo sapiens
taaagcctttgatgcacaaaatgggactgctgaagagtggacagttggaccttactttggtgaccccatacatt

SEQ ID NO: 50139 - DNA, 75 bp, Homo sapiens
cacaaaatgggactgctgaagagtggacagttggaccttactttggtgaccccatacatttgtggtcacatgctt

SEQ ID NO: 50140 - DNA, 79 bp, Homo sapiens
gactgctgaagagtggacagttggaccttactttggtgaccccatacatttgtggtcacatgctttagccatacacatg

SEQ ID NO: 50141 - DNA, 75 bp, Homo sapiens
aagagtggacagttggaccttactttggtgaccccatacatttgtggtcacatgctttagccatacacatggtaa

SEQ ID NO: 50142 - DNA, 77 bp, Homo sapiens
gacagttggaccttactttggtgaccccatacatttgtggtcacatgctttagccatacacatggtaacattgacta

SEQ ID NO: 50143 - DNA, 76 bp, Homo sapiens
acagttggaccttactttggtgaccccatacatttgtggtcacatgctttagccatacacatggtaacattgacta

SEQ ID NO: 50144 - DNA, 76 bp, Homo sapiens
accttactttggtgaccccatacatttgtggtcacatgctttagccatacacatggtaacattgactatggagtct

SEQ ID NO: 50145 - DNA, 79 bp, Homo sapiens
ttactttggtgaccccatacatttgtggtcacatgctttagccatacacatggtaacattgactatggagtcttgtgaa

SEQ ID NO: 50146 - DNA, 80 bp, Homo sapiens
ttggtgaccccatacatttgtggtcacatgctttagccatacacatggtaacattgactatggagtcttgtgaaagtgta

SEQ ID NO: 50147 - DNA, 82 bp, Homo sapiens
cccatacatttgtggtcacatgctttagccatacacatggtaacattgactatggagtcttgtgaaagtgtaatgtgcgatg

SEQ ID NO: 50148 - DNA, 83 bp, Homo sapiens
atacatttgtggtcacatgctttagccatacacatggtaacattgactatggagtcttgtgaaagtgtaatgtgcgatggcta

SEQ ID NO: 50149 - DNA, 83 bp, Homo sapiens
atttgtggtcacatgctttagccatacacatggtaacattgactatggagtcttgtgaaagtgtaatgtgcgatggctatgta

SEQ ID NO: 50150 - DNA, 84 bp, Homo sapiens
gtcacatgctttagccatacacatggtaacattgactatggagtcttgtgaaagtgtaatgtgcgatggctatgtagacataaa

SEQ ID NO: 50151 - DNA, 82 bp, Homo sapiens
atgctttagccatacacatggtaacattgactatggagtcttgtgaaagtgtaatgtgcgatggctatgtagacataaagaa

SEQ ID NO: 50152 - DNA, 81 bp, Homo sapiens
tttagccatacacatggtaacattgactatggagtcttgtgaaagtgtaatgtgcgatggctatgtagacataaagaagaa

SEQ ID NO: 50153 - DNA, 78 bp, Homo sapiens
acatggtaacattgactatggagtcttgtgaaagtgtaatgtgcgatggctatgtagacataaagaagaaacttgtaa

SEQ ID NO: 50154 - DNA, 74 bp, Homo sapiens
atggagtcttgtgaaagtgtaatgtgcgatggctatgtagacataaagaagaaacttgtaaatatcttttttct

SEQ ID NO: 50155 - DNA, 74 bp, Homo sapiens
ttaatgtttctgatttctgaagtgcttgtatagcttttatctgcggctttaaactgacagtacccgactgttta

SEQ ID NO: 50156 - DNA, 77 bp, Homo sapiens
tgatttctgaagtgcttgtatagcttttatctgcggctttaaactgacagtacccgactgtttattggatctattga

SEQ ID NO: 50157 - DNA, 74 bp, Homo sapiens
aagtgcttgtatagcttttatctgcggctttaaactgacagtacccgactgtttattggatctattgatttgaa

SEQ ID NO: 50158 - DNA, 72 bp, Homo sapiens
gtatagcttttatctgcggctttaaactgacagtacccgactgtttattggatctattgatttgaaaagaat

SEQ ID NO: 50159 - DNA, 72 bp, Homo sapiens
ttatctgcggctttaaactgacagtacccgactgtttattggatctattgatttgaaaagaatttgttagga

SEQ ID NO: 50160 - DNA, 71 bp, Homo sapiens
cggctttaaactgacagtacccgactgtttattggatctattgatttgaaaagaatttgttaggatagatc

SEQ ID NO: 50161 - DNA, 73 bp, Homo sapiens
taaactgacagtacccgactgtttattggatctattgatttgaaaagaatttgttaggatagatcttaagcag

SEQ ID NO: 50162 - DNA, 75 bp, Homo sapiens
tgacagtacccgactgtttattggatctattgatttgaaaagaatttgttaggatagatcttaagcagtaatctg

SEQ ID NO: 50163 - DNA, 75 bp, Homo sapiens
cagtacccgactgtttattggatctattgatttgaaaagaatttgttaggatagatcttaagcagtaatctgtca

SEQ ID NO: 50164 - DNA, 75 bp, Homo sapiens
tacccgactgtttattggatctattgatttgaaaagaatttgttaggatagatcttaagcagtaatctgtcagtg

SEQ ID NO: 50165 - DNA, 77 bp, Homo sapiens
tggatctattgatttgaaaagaatttgttaggatagatcttaagcagtaatctgtcagtgtttgtatttgtattctc

SEQ ID NO: 50166 - DNA, 77 bp, Homo sapiens
ctattgatttgaaaagaatttgttaggatagatcttaagcagtaatctgtcagtgtttgtatttgtattctctgcaa

SEQ ID NO: 50167 - DNA, 76 bp, Homo sapiens
tgaaaagaatttgttaggatagatcttaagcagtaatctgtcagtgtttgtatttgtattctctgcaattttactg

SEQ ID NO: 50168 - DNA, 76 bp, Homo sapiens
aaagaatttgttaggatagatcttaagcagtaatctgtcagtgtttgtatttgtattctctgcaattttactgtga

SEQ ID NO: 50169 - DNA, 74 bp, Homo sapiens
gttaggatagatcttaagcagtaatctgtcagtgtttgtatttgtattctctgcaattttactgtgaaaaaaaa

SEQ ID NO: 50170 - DNA, 72 bp, Homo sapiens
gatcttaagcagtaatctgtcagtgtttgtatttgtattctctgcaattttactgtgaaaaaaaatttgttt

SEQ ID NO: 50171 - DNA, 70 bp, Homo sapiens
cagtgtttgtatttgtattctctgcaattttactgtgaaaaaaaatttgttttcaacaattggtgtcatt

SEQ ID NO: 50172 - DNA, 72 bp, Homo sapiens
gtattctctgcaattttactgtgaaaaaaaatttgttttcaacaattggtgtcattttcttgatgtcactat

SEQ ID NO: 50173 - DNA, 72 bp, Homo sapiens
tgcaattttactgtgaaaaaaaatttgttttcaacaattggtgtcattttcttgatgtcactatttgttgga

SEQ ID NO: 50174 - DNA, 70 bp, Homo sapiens
tgaaaaaaaatttgttttcaacaattggtgtcattttcttgatgtcactatttgttggagagttaaatgg

SEQ ID NO: 50175 - DNA, 71 bp, Homo sapiens
tttgttttcaacaattggtgtcattttcttgatgtcactatttgttggagagttaaatggtctcttccctt

SEQ ID NO: 50176 - DNA, 72 bp, Homo sapiens
ttcttgatgtcactatttgttggagagttaaatggtctcttccctttgtgtatcttacctagtgtttactcc

SEQ ID NO: 50177 - DNA, 69 bp, Homo sapiens
tttgttggagagttaaatggtctcttccctttgtgtatcttacctagtgtttactcctgggcaccctta

SEQ ID NO: 50178 - DNA, 70 bp, Homo sapiens
agagttaaatggtctcttccctttgtgtatcttacctagtgtttactcctgggcacccttaatcttcaga

SEQ ID NO: 50179 - DNA, 72 bp, Homo sapiens
tctcttccctttgtgtatcttacctagtgtttactcctgggcacccttaatcttcagaggtgctaaattgtc

SEQ ID NO: 50180 - DNA, 74 bp, Homo sapiens
ctttgtgtatcttacctagtgtttactcctgggcacccttaatcttcagaggtgctaaattgtctgccattaca

SEQ ID NO: 50181 - DNA, 74 bp, Homo sapiens
tatcttacctagtgtttactcctgggcacccttaatcttcagaggtgctaaattgtctgccattacaccagaag

SEQ ID NO: 50182 - DNA, 77 bp, Homo sapiens
agtgtttactcctgggcacccttaatcttcagaggtgctaaattgtctgccattacaccagaaggatgcctctgata

SEQ ID NO: 50183 - DNA, 80 bp, Homo sapiens
gcacccttaatcttcagaggtgctaaattgtctgccattacaccagaaggatgcctctgataggaggacaaccatgcaaa

SEQ ID NO: 50184 - DNA, 81 bp, Homo sapiens
ttaatcttcagaggtgctaaattgtctgccattacaccagaaggatgcctctgataggaggacaaccatgcaaattgtgaa

SEQ ID NO: 50185 - DNA, 80 bp, Homo sapiens
tgctaaattgtctgccattacaccagaaggatgcctctgataggaggacaaccatgcaaattgtgaaatagtcctgaagt

SEQ ID NO: 50186 - DNA, 78 bp, Homo sapiens
aattgtctgccattacaccagaaggatgcctctgataggaggacaaccatgcaaattgtgaaatagtcctgaagttct

SEQ ID NO: 50187 - DNA, 76 bp, Homo sapiens
attacaccagaaggatgcctctgataggaggacaaccatgcaaattgtgaaatagtcctgaagttcttggattact

SEQ ID NO: 50188 - DNA, 76 bp, Homo sapiens
atgcctctgataggaggacaaccatgcaaattgtgaaatagtcctgaagttcttggattactttacacctcagtat

SEQ ID NO: 50189 - DNA, 72 bp, Homo sapiens
caaattgtgaaatagtcctgaagttcttggattactttacacctcagtattgatttgtcccagaattttctg

SEQ ID NO: 50190 - DNA, 72 bp, Homo sapiens
gattactttacacctcagtattgatttgtcccagaattttctggcctttcatggcaatgaaaattttaagaa

SEQ ID NO: 50191 - DNA, 72 bp, Homo sapiens
cacctcagtattgatttgtcccagaattttctggcctttcatggcaatgaaaattttaagaagaaagattta

SEQ ID NO: 50192 - DNA, 66 bp, Homo sapiens
ccagaattttctggcctttcatggcaatgaaaattttaagaagaaagatttaaagtattttaattt

SEQ ID NO: 50193 - DNA, 67 bp, Homo sapiens
ctggcctttcatggcaatgaaaattttaagaagaaagatttaaagtattttaattttaaagagtgtg

SEQ ID NO: 50194 - DNA, 66 bp, Homo sapiens
tggcaatgaaaattttaagaagaaagatttaaagtattttaattttaaagagtgtgttataaaata

SEQ ID NO: 50195 - DNA, 66 bp, Homo sapiens
ttaagaagaaagatttaaagtattttaattttaaagagtgtgttataaaataatgtactgaattct

SEQ ID NO: 50196 - DNA, 67 bp, Homo sapiens
gaaagatttaaagtattttaattttaaagagtgtgttataaaataatgtactgaattctttatccca

SEQ ID NO: 50197 - DNA, 70 bp, Homo sapiens
tattttaattttaaagagtgtgttataaaataatgtactgaattctttatcccattttatcatcctttca

SEQ ID NO: 50198 - DNA, 68 bp, Homo sapiens
attttaaagagtgtgttataaaataatgtactgaattctttatcccattttatcatcctttcagtttt

SEQ ID NO: 50199 - DNA, 71 bp, Homo sapiens
gagtgtgttataaaataatgtactgaattctttatcccattttatcatcctttcagtttttattaatctac

SEQ ID NO: 50200 - DNA, 72 bp, Homo sapiens
taatgtactgaattctttatcccattttatcatcctttcagtttttattaatctactgtatcaataaaattc

SEQ ID NO: 50201 - DNA, 71 bp, Homo sapiens
actgaattctttatcccattttatcatcctttcagtttttattaatctactgtatcaataaaattctgtaa

SEQ ID NO: 50202 - DNA, 72 bp, Homo sapiens
tatcatcctttcagtttttattaatctactgtatcaataaaattctgtaatttgaatgagtttttaatagtc

SEQ ID NO: 50203 - DNA, 71 bp, Homo sapiens
cagtttttattaatctactgtatcaataaaattctgtaatttgaatgagtttttaatagtctagaatgtta

SEQ ID NO: 50204 - DNA, 74 bp, Homo sapiens
ctgtatcaataaaattctgtaatttgaatgagtttttaatagtctagaatgttattgtgtatagatatttcctc

SEQ ID NO: 50205 - DNA, 75 bp, Homo sapiens
tctgtaatttgaatgagtttttaatagtctagaatgttattgtgtatagatatttcctcttgaacgttatgttca

SEQ ID NO: 50206 - DNA, 75 bp, Homo sapiens
gaatgagtttttaatagtctagaatgttattgtgtatagatatttcctcttgaacgttatgttcagaaaatgcaa

SEQ ID NO: 50207 - DNA, 76 bp, Homo sapiens
agtctagaatgttattgtgtatagatatttcctcttgaacgttatgttcagaaaatgcaaattacactataatata

SEQ ID NO: 50208 - DNA, 74 bp, Homo sapiens
gttattgtgtatagatatttcctcttgaacgttatgttcagaaaatgcaaattacactataatataaaacctga

SEQ ID NO: 50209 - DNA, 76 bp, Homo sapiens
gatatttcctcttgaacgttatgttcagaaaatgcaaattacactataatataaaacctgatatatacacattaga

SEQ ID NO: 50210 - DNA, 74 bp, Homo sapiens
gttcagaaaatgcaaattacactataatataaaacctgatatatacacattagaaatattccagttctccgtaa

SEQ ID NO: 50211 - DNA, 74 bp, Homo sapiens
tgcaaattacactataatataaaacctgatatatacacattagaaatattccagttctccgtaacagtgtaaag

SEQ ID NO: 50212 - DNA, 74 bp, Homo sapiens
cactataatataaaacctgatatatacacattagaaatattccagttctccgtaacagtgtaaagttaatcaga

SEQ ID NO: 50213 - DNA, 72 bp, Homo sapiens
atataaaacctgatatatacacattagaaatattccagttctccgtaacagtgtaaagttaatcagaaagaa

SEQ ID NO: 50214 - DNA, 70 bp, Homo sapiens
ctgatatatacacattagaaatattccagttctccgtaacagtgtaaagttaatcagaaagaaaaaattt

SEQ ID NO: 50215 - DNA, 72 bp, Homo sapiens
tagaaatattccagttctccgtaacagtgtaaagttaatcagaaagaaaaaattttattgatgcagtgtgtc

SEQ ID NO: 50216 - DNA, 71 bp, Homo sapiens
atattccagttctccgtaacagtgtaaagttaatcagaaagaaaaaattttattgatgcagtgtgtcttta

SEQ ID NO: 50217 - DNA, 71 bp, Homo sapiens
ctccgtaacagtgtaaagttaatcagaaagaaaaaattttattgatgcagtgtgtctttataaagctgttc

SEQ ID NO: 50218 - DNA, 71 bp, Homo sapiens
gtaaagttaatcagaaagaaaaaattttattgatgcagtgtgtctttataaagctgttcttgaaagccaag

SEQ ID NO: 50219 - DNA, 75 bp, Homo sapiens
aattttattgatgcagtgtgtctttataaagctgttcttgaaagccaagtgttttgtattttatagtgagttgca

SEQ ID NO: 50220 - DNA, 77 bp, Homo sapiens
ttgatgcagtgtgtctttataaagctgttcttgaaagccaagtgttttgtattttatagtgagttgcatgtttttga

SEQ ID NO: 50221 - DNA, 72 bp, Homo sapiens
gtgtgtctttataaagctgttcttgaaagccaagtgttttgtattttatagtgagttgcatgtttttgaaaa

SEQ ID NO: 50222 - DNA, 72 bp, Homo sapiens
gctgttcttgaaagccaagtgttttgtattttatagtgagttgcatgtttttgaaaaaaagtgctgaaaatg

SEQ ID NO: 50223 - DNA, 73 bp, Homo sapiens
gtgttttgtattttatagtgagttgcatgtttttgaaaaaaagtgctgaaaatgggatgtgctgttttctgta

SEQ ID NO: 50224 - DNA, 75 bp, Homo sapiens
ttatagtgagttgcatgtttttgaaaaaaagtgctgaaaatgggatgtgctgttttctgtaaattcatatttagc

SEQ ID NO: 50225 - DNA, 75 bp, Homo sapiens
gtgagttgcatgtttttgaaaaaaagtgctgaaaatgggatgtgctgttttctgtaaattcatatttagccatag

SEQ ID NO: 50226 - DNA, 77 bp, Homo sapiens
ttgaaaaaaagtgctgaaaatgggatgtgctgttttctgtaaattcatatttagccatagtatatgatagattgccc

SEQ ID NO: 50227 - DNA, 79 bp, Homo sapiens
gtgctgaaaatgggatgtgctgttttctgtaaattcatatttagccatagtatatgatagattgccccataacatagtt

SEQ ID NO: 50228 - DNA, 80 bp, Homo sapiens
tgggatgtgctgttttctgtaaattcatatttagccatagtatatgatagattgccccataacatagtttttcatcaaga

SEQ ID NO: 50229 - DNA, 77 bp, Homo sapiens
gtgctgttttctgtaaattcatatttagccatagtatatgatagattgccccataacatagtttttcatcaagagtt

SEQ ID NO: 50230 - DNA, 76 bp, Homo sapiens
gtaaattcatatttagccatagtatatgatagattgccccataacatagtttttcatcaagagtttattattgtac

SEQ ID NO: 50231 - DNA, 75 bp, Homo sapiens
ttagccatagtatatgatagattgccccataacatagtttttcatcaagagtttattattgtactttattttgga

SEQ ID NO: 50232 - DNA, 75 bp, Homo sapiens
catagtatatgatagattgccccataacatagtttttcatcaagagtttattattgtactttattttggagccaa

SEQ ID NO: 50233 - DNA, 71 bp, Homo sapiens
tagattgccccataacatagtttttcatcaagagtttattattgtactttattttggagccaaaaaattga

SEQ ID NO: 50234 - DNA, 69 bp, Homo sapiens
cccataacatagtttttcatcaagagtttattattgtactttattttggagccaaaaaattgattctgg

SEQ ID NO: 50235 - DNA, 67 bp, Homo sapiens
agagtttattattgtactttattttggagccaaaaaattgattctggggggtgggggcagcgtagaa

SEQ ID NO: 50236 - DNA, 74 bp, Homo sapiens
aaaaattgattctggggggtgggggcagcgtagaagtggtatatccaagtatatcagctactgtagttgtcaca

SEQ ID NO: 50237 - DNA, 76 bp, Homo sapiens
attctggggggtgggggcagcgtagaagtggtatatccaagtatatcagctactgtagttgtcacagtcttgtgaa

SEQ ID NO: 50238 - DNA, 78 bp, Homo sapiens
ggggcagcgtagaagtggtatatccaagtatatcagctactgtagttgtcacagtcttgtgaactttgaatgaaattc

SEQ ID NO: 50239 - DNA, 76 bp, Homo sapiens
cgtagaagtggtatatccaagtatatcagctactgtagttgtcacagtcttgtgaactttgaatgaaattccactt

SEQ ID NO: 50240 - DNA, 73 bp, Homo sapiens
tgtagttgtcacagtcttgtgaactttgaatgaaattccactttgtccagattgggagaagtggaaatttatt

SEQ ID NO: 50241 - DNA, 73 bp, Homo sapiens
ttgtcacagtcttgtgaactttgaatgaaattccactttgtccagattgggagaagtggaaatttatttggat

SEQ ID NO: 50242 - DNA, 72 bp, Homo sapiens
tgaactttgaatgaaattccactttgtccagattgggagaagtggaaatttatttggatttagagcaggtct

SEQ ID NO: 50243 - DNA, 69 bp, Homo sapiens
ttccactttgtccagattgggagaagtggaaatttatttggatttagagcaggtctttttttttcttca

SEQ ID NO: 50244 - DNA, 71 bp, Homo sapiens
ccagattgggagaagtggaaatttatttggatttagagcaggtctttttttttcttcattgtaatctgcaa

SEQ ID NO: 50245 - DNA, 71 bp, Homo sapiens
gagaagtggaaatttatttggatttagagcaggtctttttttttcttcattgtaatctgcaaaatgtagaa

SEQ ID NO: 50246 - DNA, 69 bp, Homo sapiens
ctttttttttcttcattgtaatctgcaaaatgtagaaataaattacttaaggcagtatcctttatacag

SEQ ID NO: 50247 - DNA, 74 bp, Homo sapiens
tcttcattgtaatctgcaaaatgtagaaataaattacttaaggcagtatcctttatacagttgtataaactgta

SEQ ID NO: 50248 - DNA, 69 bp, Homo sapiens
gtagaaataaattacttaaggcagtatcctttatacagttgtataaactgtattttgaaccaaaacata

SEQ ID NO: 50249 - DNA, 69 bp, Homo sapiens
attacttaaggcagtatcctttatacagttgtataaactgtattttgaaccaaaacatataggttacta

SEQ ID NO: 50250 - DNA, 68 bp, Homo sapiens
cagttgtataaactgtattttgaaccaaaacatataggttactacttaatgcttacctaatttcattt

SEQ ID NO: 50251 - DNA, 68 bp, Homo sapiens
tattttgaaccaaaacatataggttactacttaatgcttacctaatttcattttagtattttaggtgc

SEQ ID NO: 50252 - DNA, 69 bp, Homo sapiens
gaaccaaaacatataggttactacttaatgcttacctaatttcattttagtattttaggtgctgttatg

SEQ ID NO: 50253 - DNA, 70 bp, Homo sapiens
catataggttactacttaatgcttacctaatttcattttagtattttaggtgctgttatgttttttcatg

SEQ ID NO: 50254 - DNA, 69 bp, Homo sapiens
ttaatgcttacctaatttcattttagtattttaggtgctgttatgttttttcatggttaacaccagagg

SEQ ID NO: 50255 - DNA, 68 bp, Homo sapiens
gcttacctaatttcattttagtattttaggtgctgttatgttttttcatggttaacaccagaggggaa

SEQ ID NO: 50256 - DNA, 69 bp, Homo sapiens
cattttagtattttaggtgctgttatgttttttcatggttaacaccagaggggaaaaaatcatattcta

SEQ ID NO: 50257 - DNA, 68 bp, Homo sapiens
gtattttaggtgctgttatgttttttcatggttaacaccagaggggaaaaaatcatattctaacttat

SEQ ID NO: 50258 - DNA, 70 bp, Homo sapiens
gctgttatgttttttcatggttaacaccagaggggaaaaaatcatattctaacttattaaatttatcaca

SEQ ID NO: 50259 - DNA, 72 bp, Homo sapiens
ttcatggttaacaccagaggggaaaaaatcatattctaacttattaaatttatcacattgaatagtggaaca

SEQ ID NO: 50260 - DNA, 73 bp, Homo sapiens
acaccagaggggaaaaaatcatattctaacttattaaatttatcacattgaatagtggaacattttcatatga

SEQ ID NO: 50261 - DNA, 75 bp, Homo sapiens
ggaaaaaatcatattctaacttattaaatttatcacattgaatagtggaacattttcatatgatacaccattatg

SEQ ID NO: 50262 - DNA, 76 bp, Homo sapiens
aatcatattctaacttattaaatttatcacattgaatagtggaacattttcatatgatacaccattatgtttaaga

SEQ ID NO: 50263 - DNA, 79 bp, Homo sapiens
tatcacattgaatagtggaacattttcatatgatacaccattatgtttaagatatatttccaagattggttataataga

SEQ ID NO: 50264 - DNA, 76 bp, Homo sapiens
ttgaatagtggaacattttcatatgatacaccattatgtttaagatatatttccaagattggttataatagatggg

SEQ ID NO: 50265 - DNA, 77 bp, Homo sapiens
ggaacattttcatatgatacaccattatgtttaagatatatttccaagattggttataatagatggggcatataata

SEQ ID NO: 50266 - DNA, 73 bp, Homo sapiens
ccattatgtttaagatatatttccaagattggttataatagatggggcatataataaagaagctactattttg

SEQ ID NO: 50267 - DNA, 73 bp, Homo sapiens
caagattggttataatagatggggcatataataaagaagctactattttggaaaatgacattttactatttgc

SEQ ID NO: 50268 - DNA, 73 bp, Homo sapiens
ggttataatagatggggcatataataaagaagctactattttggaaaatgacattttactatttgccaatgta

SEQ ID NO: 50269 - DNA, 77 bp, Homo sapiens
gggcatataataaagaagctactattttggaaaatgacattttactatttgccaatgtatattgcaattgatgtgat

SEQ ID NO: 50270 - DNA, 75 bp, Homo sapiens
taaagaagctactattttggaaaatgacattttactatttgccaatgtatattgcaattgatgtgattatttttc

SEQ ID NO: 50271 - DNA, 73 bp, Homo sapiens
aagctactattttggaaaatgacattttactatttgccaatgtatattgcaattgatgtgattatttttcttt

SEQ ID NO: 50272 - DNA, 73 bp, Homo sapiens
ttggaaaatgacattttactatttgccaatgtatattgcaattgatgtgattatttttcttttaaagatttgt

SEQ ID NO: 50273 - DNA, 73 bp, Homo sapiens
gacattttactatttgccaatgtatattgcaattgatgtgattatttttcttttaaagatttgtttgtgttta

SEQ ID NO: 50274 - DNA, 75 bp, Homo sapiens
tatttgccaatgtatattgcaattgatgtgattatttttcttttaaagatttgtttgtgtttatgaaacagccat

SEQ ID NO: 50275 - DNA, 72 bp, Homo sapiens
tgtatattgcaattgatgtgattatttttcttttaaagatttgtttgtgtttatgaaacagccatttatttt

SEQ ID NO: 50276 - DNA, 73 bp, Homo sapiens
ttttaaaaagtgttttgaattgtgtcttaatctctccatattcaactattcttcatttacaacaatagtgaca

SEQ ID NO: 50277 - DNA, 78 bp, Homo sapiens
tgttttgaattgtgtcttaatctctccatattcaactattcttcatttacaacaatagtgacaccagtaattatgaga

SEQ ID NO: 50278 - DNA, 83 bp, Homo sapiens
tgtgtcttaatctctccatattcaactattcttcatttacaacaatagtgacaccagtaattatgagaggctgtcatatatca

SEQ ID NO: 50279 - DNA, 82 bp, Homo sapiens
ttaatctctccatattcaactattcttcatttacaacaatagtgacaccagtaattatgagaggctgtcatatatcaaagca

SEQ ID NO: 50280 - DNA, 81 bp, Homo sapiens
atattcaactattcttcatttacaacaatagtgacaccagtaattatgagaggctgtcatatatcaaagcagctcaggtgg

SEQ ID NO: 50281 - DNA, 81 bp, Homo sapiens
aacaatagtgacaccagtaattatgagaggctgtcatatatcaaagcagctcaggtgggatcaacatacattggttttgaa

SEQ ID NO: 50282 - DNA, 81 bp, Homo sapiens
tagtgacaccagtaattatgagaggctgtcatatatcaaagcagctcaggtgggatcaacatacattggttttgaaatgtt

SEQ ID NO: 50283 - DNA, 79 bp, Homo sapiens
agtaattatgagaggctgtcatatatcaaagcagctcaggtgggatcaacatacattggttttgaaatgtttccttagc

SEQ ID NO: 50284 - DNA, 75 bp, Homo sapiens
atatatcaaagcagctcaggtgggatcaacatacattggttttgaaatgtttccttagctcggttctcccaaaca

SEQ ID NO: 50285 - DNA, 73 bp, Homo sapiens
atcaacatacattggttttgaaatgtttccttagctcggttctcccaaacacataatttctgtttcagcagta

SEQ ID NO: 50286 - DNA, 72 bp, Homo sapiens
ttggttttgaaatgtttccttagctcggttctcccaaacacataatttctgtttcagcagtacaaaggcatg

SEQ ID NO: 50287 - DNA, 70 bp, Homo sapiens
aaatgtttccttagctcggttctcccaaacacataatttctgtttcagcagtacaaaggcatgttttaaa

SEQ ID NO: 50288 - DNA, 70 bp, Homo sapiens
aatgtttccttagctcggttctcccaaacacataatttctgtttcagcagtacaaaggcatgttttaaaa

SEQ ID NO: 50289 - DNA, 72 bp, Homo sapiens
ttccttagctcggttctcccaaacacataatttctgtttcagcagtacaaaggcatgttttaaaatctataa

SEQ ID NO: 50290 - DNA, 73 bp, Homo sapiens
gctcggttctcccaaacacataatttctgtttcagcagtacaaaggcatgttttaaaatctataacataaaga

SEQ ID NO: 50291 - DNA, 71 bp, Homo sapiens
cggttctcccaaacacataatttctgtttcagcagtacaaaggcatgttttaaaatctataacataaagaa

SEQ ID NO: 50292 - DNA, 72 bp, Homo sapiens
ctcccaaacacataatttctgtttcagcagtacaaaggcatgttttaaaatctataacataaagaataagga

SEQ ID NO: 50293 - DNA, 73 bp, Homo sapiens
cacataatttctgtttcagcagtacaaaggcatgttttaaaatctataacataaagaataaggaatagctttg

SEQ ID NO: 50294 - DNA, 73 bp, Homo sapiens
cataatttctgtttcagcagtacaaaggcatgttttaaaatctataacataaagaataaggaatagctttgta

SEQ ID NO: 50295 - DNA, 72 bp, Homo sapiens
tctgtttcagcagtacaaaggcatgttttaaaatctataacataaagaataaggaatagctttgtatttttg

SEQ ID NO: 50296 - DNA, 72 bp, Homo sapiens
gtttcagcagtacaaaggcatgttttaaaatctataacataaagaataaggaatagctttgtatttttgtca

SEQ ID NO: 50297 - DNA, 72 bp, Homo sapiens
aggcatgttttaaaatctataacataaagaataaggaatagctttgtatttttgtcattgattaaattgcac

SEQ ID NO: 50298 - DNA, 72 bp, Homo sapiens
taaaatctataacataaagaataaggaatagctttgtatttttgtcattgattaaattgcaccagaaatgtt

SEQ ID NO: 50299 - DNA, 74 bp, Homo sapiens
tctataacataaagaataaggaatagctttgtatttttgtcattgattaaattgcaccagaaatgtttatggaa

SEQ ID NO: 50300 - DNA, 73 bp, Homo sapiens
gaataaggaatagctttgtatttttgtcattgattaaattgcaccagaaatgtttatggaaatattaagaaca

SEQ ID NO: 50301 - DNA, 71 bp, Homo sapiens
tttgtcattgattaaattgcaccagaaatgtttatggaaatattaagaacattttataaaacatacgaaaa

SEQ ID NO: 50302 - DNA, 71 bp, Homo sapiens
tgattaaattgcaccagaaatgtttatggaaatattaagaacattttataaaacatacgaaaaagtgattg

SEQ ID NO: 50303 - DNA, 70 bp, Homo sapiens
gcaccagaaatgtttatggaaatattaagaacattttataaaacatacgaaaaagtgattgtgaaggatt

SEQ ID NO: 50304 - DNA, 69 bp, Homo sapiens
gtttatggaaatattaagaacattttataaaacatacgaaaaagtgattgtgaaggatttttatttgca

SEQ ID NO: 50305 - DNA, 71 bp, Homo sapiens
ggaaatattaagaacattttataaaacatacgaaaaagtgattgtgaaggatttttatttgcatgattata

SEQ ID NO: 50306 - DNA, 72 bp, Homo sapiens
cattttataaaacatacgaaaaagtgattgtgaaggatttttatttgcatgattatagttaagcaaatttca

SEQ ID NO: 50307 - DNA, 76 bp, Homo sapiens
aagtgattgtgaaggatttttatttgcatgattatagttaagcaaatttcatttcacatttttgtaatgctgtaca

SEQ ID NO: 50308 - DNA, 78 bp, Homo sapiens
gtgaaggatttttatttgcatgattatagttaagcaaatttcatttcacatttttgtaatgctgtacagcagttcaca

SEQ ID NO: 50309 - DNA, 75 bp, Homo sapiens
atttttatttgcatgattatagttaagcaaatttcatttcacatttttgtaatgctgtacagcagttcacaaaaa

SEQ ID NO: 50310 - DNA, 78 bp, Homo sapiens
gcatgattatagttaagcaaatttcatttcacatttttgtaatgctgtacagcagttcacaaaaaaatgttcattgta

SEQ ID NO: 50311 - DNA, 75 bp, Homo sapiens
agcaaatttcatttcacatttttgtaatgctgtacagcagttcacaaaaaaatgttcattgtagattttgttatg

SEQ ID NO: 50312 - DNA, 77 bp, Homo sapiens
catttcacatttttgtaatgctgtacagcagttcacaaaaaaatgttcattgtagattttgttatgttcaatgccaa

SEQ ID NO: 50313 - DNA, 78 bp, Homo sapiens
catttttgtaatgctgtacagcagttcacaaaaaaatgttcattgtagattttgttatgttcaatgccaatgagtctg

SEQ ID NO: 50314 - DNA, 77 bp, Homo sapiens
gctgtacagcagttcacaaaaaaatgttcattgtagattttgttatgttcaatgccaatgagtctgtaattttacga

SEQ ID NO: 50315 - DNA, 75 bp, Homo sapiens
gcagttcacaaaaaaatgttcattgtagattttgttatgttcaatgccaatgagtctgtaattttacgacctgtc

SEQ ID NO: 50316 - DNA, 72 bp, Homo sapiens
aaatgttcattgtagattttgttatgttcaatgccaatgagtctgtaattttacgacctgtctgttcttttt

SEQ ID NO: 50317 - DNA, 71 bp, Homo sapiens
gtagattttgttatgttcaatgccaatgagtctgtaattttacgacctgtctgttctttttttgggtggat

SEQ ID NO: 50318 - DNA, 72 bp, Homo sapiens
ttatgttcaatgccaatgagtctgtaattttacgacctgtctgttctttttttgggtggattacgatgtaaa

SEQ ID NO: 50319 - DNA, 69 bp, Homo sapiens
atgccaatgagtctgtaattttacgacctgtctgttctttttttgggtggattacgatgtaaatttttc

SEQ ID NO: 50320 - DNA, 66 bp, Homo sapiens
atgagtctgtaattttacgacctgtctgttctttttttgggtggattacgatgtaaatttttcttt

SEQ ID NO: 50321 - DNA, 71 bp, Homo sapiens
tttttttttttgtgtagaaaaataggtgcaataatgatcaaagttttgatgtcttgagtctccatcttagg

SEQ ID NO: 50322 - DNA, 75 bp, Homo sapiens
tgtgtagaaaaataggtgcaataatgatcaaagttttgatgtcttgagtctccatcttaggggattatcttacgt

SEQ ID NO: 50323 - DNA, 74 bp, Homo sapiens
aataggtgcaataatgatcaaagttttgatgtcttgagtctccatcttaggggattatcttacgtttaagctta

SEQ ID NO: 50324 - DNA, 75 bp, Homo sapiens
taggtgcaataatgatcaaagttttgatgtcttgagtctccatcttaggggattatcttacgtttaagcttaaca

SEQ ID NO: 50325 - DNA, 74 bp, Homo sapiens
atgatcaaagttttgatgtcttgagtctccatcttaggggattatcttacgtttaagcttaacatttcatgtag

SEQ ID NO: 50326 - DNA, 74 bp, Homo sapiens
gatcaaagttttgatgtcttgagtctccatcttaggggattatcttacgtttaagcttaacatttcatgtagta

SEQ ID NO: 50327 - DNA, 75 bp, Homo sapiens
ttgatgtcttgagtctccatcttaggggattatcttacgtttaagcttaacatttcatgtagtaagatttggaga

SEQ ID NO: 50328 - DNA, 75 bp, Homo sapiens
ttgagtctccatcttaggggattatcttacgtttaagcttaacatttcatgtagtaagatttggagagccacata

SEQ ID NO: 50329 - DNA, 73 bp, Homo sapiens
tctccatcttaggggattatcttacgtttaagcttaacatttcatgtagtaagatttggagagccacatactt

SEQ ID NO: 50330 - DNA, 72 bp, Homo sapiens
ccatcttaggggattatcttacgtttaagcttaacatttcatgtagtaagatttggagagccacatacttta

SEQ ID NO: 50331 - DNA, 71 bp, Homo sapiens
gggattatcttacgtttaagcttaacatttcatgtagtaagatttggagagccacatactttacagtaaaa

SEQ ID NO: 50332 - DNA, 71 bp, Homo sapiens
acgtttaagcttaacatttcatgtagtaagatttggagagccacatactttacagtaaaattaagtgtgta

SEQ ID NO: 50333 - DNA, 73 bp, Homo sapiens
acatttcatgtagtaagatttggagagccacatactttacagtaaaattaagtgtgtataaaacattaattgc

SEQ ID NO: 50334 - DNA, 73 bp, Homo sapiens
gatttggagagccacatactttacagtaaaattaagtgtgtataaaacattaattgctaacaattgttagcaa

SEQ ID NO: 50335 - DNA, 72 bp, Homo sapiens
gccacatactttacagtaaaattaagtgtgtataaaacattaattgctaacaattgttagcaaactatttca

SEQ ID NO: 50336 - DNA, 73 bp, Homo sapiens
attaagtgtgtataaaacattaattgctaacaattgttagcaaactatttcagtgataatgttcattttgaaa

SEQ ID NO: 50337 - DNA, 75 bp, Homo sapiens
aacattaattgctaacaattgttagcaaactatttcagtgataatgttcattttgaaaatatgtactgtataaca

SEQ ID NO: 50338 - DNA, 73 bp, Homo sapiens
tatttcagtgataatgttcattttgaaaatatgtactgtataacattaagaaaatatttaactccctgtaaca

SEQ ID NO: 50339 - DNA, 72 bp, Homo sapiens
tgataatgttcattttgaaaatatgtactgtataacattaagaaaatatttaactccctgtaacaagttcca

SEQ ID NO: 50340 - DNA, 71 bp, Homo sapiens
gttcattttgaaaatatgtactgtataacattaagaaaatatttaactccctgtaacaagttccattatga

SEQ ID NO: 50341 - DNA, 72 bp, Homo sapiens
tatgtactgtataacattaagaaaatatttaactccctgtaacaagttccattatgaaaatcttattcctca

SEQ ID NO: 50342 - DNA, 71 bp, Homo sapiens
ctgtataacattaagaaaatatttaactccctgtaacaagttccattatgaaaatcttattcctcagtgag

SEQ ID NO: 50343 - DNA, 73 bp, Homo sapiens
aaaatatttaactccctgtaacaagttccattatgaaaatcttattcctcagtgaggttatcttgctgcactc

SEQ ID NO: 50344 - DNA, 76 bp, Homo sapiens
ttaactccctgtaacaagttccattatgaaaatcttattcctcagtgaggttatcttgctgcactctgtagcaaat

SEQ ID NO: 50345 - DNA, 76 bp, Homo sapiens
ctgtaacaagttccattatgaaaatcttattcctcagtgaggttatcttgctgcactctgtagcaaatttgtttaa

SEQ ID NO: 50346 - DNA, 78 bp, Homo sapiens
ccattatgaaaatcttattcctcagtgaggttatcttgctgcactctgtagcaaatttgtttaatctacattataata

SEQ ID NO: 50347 - DNA, 77 bp, Homo sapiens
tcttattcctcagtgaggttatcttgctgcactctgtagcaaatttgtttaatctacattataataaaatttcttgc

SEQ ID NO: 50348 - DNA, 79 bp, Homo sapiens
agtgaggttatcttgctgcactctgtagcaaatttgtttaatctacattataataaaatttcttgctgcagtgcaacag

SEQ ID NO: 50349 - DNA, 79 bp, Homo sapiens
tatcttgctgcactctgtagcaaatttgtttaatctacattataataaaatttcttgctgcagtgcaacaggaggcttt

SEQ ID NO: 50350 - DNA, 77 bp, Homo sapiens
cactctgtagcaaatttgtttaatctacattataataaaatttcttgctgcagtgcaacaggaggctttttcagtga

SEQ ID NO: 50351 - DNA, 78 bp, Homo sapiens
ataataaaatttcttgctgcagtgcaacaggaggctttttcagtgatcttcactgtatatgtaaattacaaatgtggc

SEQ ID NO: 50352 - DNA, 78 bp, Homo sapiens
aaatttcttgctgcagtgcaacaggaggctttttcagtgatcttcactgtatatgtaaattacaaatgtggctgtaaa

SEQ ID NO: 50353 - DNA, 73 bp, Homo sapiens
acaggaggctttttcagtgatcttcactgtatatgtaaattacaaatgtggctgtaaaacttattccaggtat

SEQ ID NO: 50354 - DNA, 71 bp, Homo sapiens
cagtgatcttcactgtatatgtaaattacaaatgtggctgtaaaacttattccaggtattaaaggttaaat

SEQ ID NO: 50355 - DNA, 69 bp, Homo sapiens
cttcactgtatatgtaaattacaaatgtggctgtaaaacttattccaggtattaaaggttaaattgctt

SEQ ID NO: 50356 - DNA, 68 bp, Homo sapiens
gtaaattacaaatgtggctgtaaaacttattccaggtattaaaggttaaattgctttctatatcttct

SEQ ID NO: 50357 - DNA, 69 bp, Homo sapiens
caaatgtggctgtaaaacttattccaggtattaaaggttaaattgctttctatatcttcttataacttg

SEQ ID NO: 50358 - DNA, 70 bp, Homo sapiens
gctgtaaaacttattccaggtattaaaggttaaattgctttctatatcttcttataacttgtaagtctga

SEQ ID NO: 50359 - DNA, 69 bp, Homo sapiens
tccaggtattaaaggttaaattgctttctatatcttcttataacttgtaagtctgatttttaagatttc

SEQ ID NO: 50360 - DNA, 68 bp, Homo sapiens
aaggttaaattgctttctatatcttcttataacttgtaagtctgatttttaagatttccttttgtcca

SEQ ID NO: 50361 - DNA, 73 bp, Homo sapiens
tgctttctatatcttcttataacttgtaagtctgatttttaagatttccttttgtccacttgtaagaatgtca

SEQ ID NO: 50362 - DNA, 71 bp, Homo sapiens
ctatatcttcttataacttgtaagtctgatttttaagatttccttttgtccacttgtaagaatgtcaggaa

SEQ ID NO: 50363 - DNA, 69 bp, Homo sapiens
cttataacttgtaagtctgatttttaagatttccttttgtccacttgtaagaatgtcaggaatttaaga

SEQ ID NO: 50364 - DNA, 68 bp, Homo sapiens
gtaagtctgatttttaagatttccttttgtccacttgtaagaatgtcaggaatttaagaatttgttta

SEQ ID NO: 50365 - DNA, 71 bp, Homo sapiens
aagatttccttttgtccacttgtaagaatgtcaggaatttaagaatttgtttaaattaggcatatctctgc

SEQ ID NO: 50366 - DNA, 75 bp, Homo sapiens
tccttttgtccacttgtaagaatgtcaggaatttaagaatttgtttaaattaggcatatctctgccatcacatag

SEQ ID NO: 50367 - DNA, 77 bp, Homo sapiens
ccacttgtaagaatgtcaggaatttaagaatttgtttaaattaggcatatctctgccatcacatagtattatgtcac

SEQ ID NO: 50368 - DNA, 78 bp, Homo sapiens
ttaagaatttgtttaaattaggcatatctctgccatcacatagtattatgtcaccataatgaacaattgctatttaaa

SEQ ID NO: 50369 - DNA, 82 bp, Homo sapiens
aggcatatctctgccatcacatagtattatgtcaccataatgaacaattgctatttaaatagataaccaattttcagacaca

SEQ ID NO: 50370 - DNA, 78 bp, Homo sapiens
ctctgccatcacatagtattatgtcaccataatgaacaattgctatttaaatagataaccaattttcagacacatttt

SEQ ID NO: 50371 - DNA, 75 bp, Homo sapiens
catagtattatgtcaccataatgaacaattgctatttaaatagataaccaattttcagacacatttttggatttc

SEQ ID NO: 50372 - DNA, 76 bp, Homo sapiens
tgtcaccataatgaacaattgctatttaaatagataaccaattttcagacacatttttggatttctgtgaagttga

SEQ ID NO: 50373 - DNA, 73 bp, Homo sapiens
atgaacaattgctatttaaatagataaccaattttcagacacatttttggatttctgtgaagttgaataaaca

SEQ ID NO: 50374 - DNA, 72 bp, Homo sapiens
gctatttaaatagataaccaattttcagacacatttttggatttctgtgaagttgaataaacataaaagcta

SEQ ID NO: 50375 - DNA, 72 bp, Homo sapiens
agataaccaattttcagacacatttttggatttctgtgaagttgaataaacataaaagctaatacagttgta

SEQ ID NO: 50376 - DNA, 74 bp, Homo sapiens
ttcagacacatttttggatttctgtgaagttgaataaacataaaagctaatacagttgtattattttgtgtatg

SEQ ID NO: 50377 - DNA, 73 bp, Homo sapiens
ttttggatttctgtgaagttgaataaacataaaagctaatacagttgtattattttgtgtatgtaaatcaaca

SEQ ID NO: 50378 - DNA, 86 bp, Homo sapiens
agacaggtgagagtcagctgagtccataacctcccactcttatgcctacagatgtcagccatagagaccatgacagagaagctgga

SEQ ID NO: 50379 - DNA, 88 bp, Homo sapiens
agctgagtccataacctcccactcttatgcctacagatgtcagccatagagaccatgacagagaagctggagagctttgcagccatga

SEQ ID NO: 50380 - DNA, 85 bp, Homo sapiens
agtccataacctcccactcttatgcctacagatgtcagccatagagaccatgacagagaagctggagagctttgcagccatgaag

SEQ ID NO: 50381 - DNA, 87 bp, Homo sapiens
actcttatgcctacagatgtcagccatagagaccatgacagagaagctggagagctttgcagccatgaaggcggactcgggcagctc

SEQ ID NO: 50382 - DNA, 90 bp, Homo sapiens
tatgcctacagatgtcagccatagagaccatgacagagaagctggagagctttgcagccatgaaggcggactcgggcagctccctgcagc

SEQ ID NO: 50383 - DNA, 85 bp, Homo sapiens
atgtcagccatagagaccatgacagagaagctggagagctttgcagccatgaaggcggactcgggcagctccctgcagcccctcc

SEQ ID NO: 50384 - DNA, 81 bp, Homo sapiens
atagagaccatgacagagaagctggagagctttgcagccatgaaggcggactcgggcagctccctgcagcccctcccccac

SEQ ID NO: 50385 - DNA, 77 bp, Homo sapiens
gagaagctggagagctttgcagccatgaaggcggactcgggcagctccctgcagcccctcccccaccaccccttcaa

SEQ ID NO: 50386 - DNA, 73 bp, Homo sapiens
agagctttgcagccatgaaggcggactcgggcagctccctgcagcccctcccccaccaccccttcaacttccg

SEQ ID NO: 50387 - DNA, 72 bp, Homo sapiens
tttgcagccatgaaggcggactcgggcagctccctgcagcccctcccccaccaccccttcaacttccggtcc

SEQ ID NO: 50388 - DNA, 68 bp, Homo sapiens
tgaaggcggactcgggcagctccctgcagcccctcccccaccaccccttcaacttccggtccccaccc

SEQ ID NO: 50389 - DNA, 68 bp, Homo sapiens
gcagctccctgcagcccctcccccaccaccccttcaacttccggtccccacccccaacgctctccgac

SEQ ID NO: 50390 - DNA, 65 bp, Homo sapiens
tccctgcagcccctcccccaccaccccttcaacttccggtccccacccccaacgctctccgaccc

SEQ ID NO: 50391 - DNA, 64 bp, Homo sapiens
ccccaccaccccttcaacttccggtccccacccccaacgctctccgaccccatcctcaggaagg

SEQ ID NO: 50392 - DNA, 69 bp, Homo sapiens
ccttcaacttccggtccccacccccaacgctctccgaccccatcctcaggaagggcaaggagcgataca

SEQ ID NO: 50393 - DNA, 70 bp, Homo sapiens
aacttccggtccccacccccaacgctctccgaccccatcctcaggaagggcaaggagcgatacacgtgca

SEQ ID NO: 50394 - DNA, 70 bp, Homo sapiens
acccccaacgctctccgaccccatcctcaggaagggcaaggagcgatacacgtgcaggtgaggggccctt

SEQ ID NO: 50395 - DNA, 75 bp, Homo sapiens
aacgctctccgaccccatcctcaggaagggcaaggagcgatacacgtgcaggtgaggggccctttggtgctgctg

SEQ ID NO: 50396 - DNA, 68 bp, Homo sapiens
aaatggccatgtaagcccaccctaatcctccctcaccctccccacctccctccaccccaggtactgtg

SEQ ID NO: 50397 - DNA, 68 bp, Homo sapiens
atgtaagcccaccctaatcctccctcaccctccccacctccctccaccccaggtactgtgggaagatc

SEQ ID NO: 50398 - DNA, 71 bp, Homo sapiens
taatcctccctcaccctccccacctccctccaccccaggtactgtgggaagatcttccccagatcagccaa

SEQ ID NO: 50399 - DNA, 74 bp, Homo sapiens
tcaccctccccacctccctccaccccaggtactgtgggaagatcttccccagatcagccaatctcaccagacac

SEQ ID NO: 50400 - DNA, 76 bp, Homo sapiens
acctccctccaccccaggtactgtgggaagatcttccccagatcagccaatctcaccagacacctgaggacgcaca

SEQ ID NO: 50401 - DNA, 76 bp, Homo sapiens
cctccaccccaggtactgtgggaagatcttccccagatcagccaatctcaccagacacctgaggacgcacactggg

SEQ ID NO: 50402 - DNA, 80 bp, Homo sapiens
tactgtgggaagatcttccccagatcagccaatctcaccagacacctgaggacgcacactggggagcagccgtacaggta

SEQ ID NO: 50403 - DNA, 80 bp, Homo sapiens
aagatcttccccagatcagccaatctcaccagacacctgaggacgcacactggggagcagccgtacaggtaggtgctgcg

SEQ ID NO: 50404 - DNA, 81 bp, Homo sapiens
agatcagccaatctcaccagacacctgaggacgcacactggggagcagccgtacaggtaggtgctgcgtgggctgggtgtg

SEQ ID NO: 50405 - DNA, 77 bp, Homo sapiens
ccaatctcaccagacacctgaggacgcacactggggagcagccgtacaggtaggtgctgcgtgggctgggtgtgggg

SEQ ID NO: 50406 - DNA, 74 bp, Homo sapiens
agacacctgaggacgcacactggggagcagccgtacaggtaggtgctgcgtgggctgggtgtgggggcggggcc

SEQ ID NO: 50407 - DNA, 74 bp, Homo sapiens
aggacgcacactggggagcagccgtacaggtaggtgctgcgtgggctgggtgtgggggcggggccgcctgcctc

SEQ ID NO: 50408 - DNA, 80 bp, Homo sapiens
atgcagagccggggcctgcactgaggagcgcgtgtgccccttccaggtgtaagtactgcgaccgctccttcagcatctct

SEQ ID NO: 50409 - DNA, 77 bp, Homo sapiens
ggggcctgcactgaggagcgcgtgtgccccttccaggtgtaagtactgcgaccgctccttcagcatctcttcgaacc

SEQ ID NO: 50410 - DNA, 78 bp, Homo sapiens
actgaggagcgcgtgtgccccttccaggtgtaagtactgcgaccgctccttcagcatctcttcgaacctccagcggca

SEQ ID NO: 50411 - DNA, 75 bp, Homo sapiens
cgtgtgccccttccaggtgtaagtactgcgaccgctccttcagcatctcttcgaacctccagcggcacgtccgga

SEQ ID NO: 50412 - DNA, 77 bp, Homo sapiens
ttccaggtgtaagtactgcgaccgctccttcagcatctcttcgaacctccagcggcacgtccggaacatccacaaca

SEQ ID NO: 50413 - DNA, 77 bp, Homo sapiens
tgtaagtactgcgaccgctccttcagcatctcttcgaacctccagcggcacgtccggaacatccacaacaaggagaa

SEQ ID NO: 50414 - DNA, 74 bp, Homo sapiens
accgctccttcagcatctcttcgaacctccagcggcacgtccggaacatccacaacaaggagaagcctttcaag

SEQ ID NO: 50415 - DNA, 79 bp, Homo sapiens
ttcagcatctcttcgaacctccagcggcacgtccggaacatccacaacaaggagaagcctttcaagtgccacctgtgca

SEQ ID NO: 50416 - DNA, 75 bp, Homo sapiens
tctcttcgaacctccagcggcacgtccggaacatccacaacaaggagaagcctttcaagtgccacctgtgcaacc

SEQ ID NO: 50417 - DNA, 78 bp, Homo sapiens
agcggcacgtccggaacatccacaacaaggagaagcctttcaagtgccacctgtgcaaccgctgcttcgggcagcaga

SEQ ID NO: 50418 - DNA, 76 bp, Homo sapiens
acgtccggaacatccacaacaaggagaagcctttcaagtgccacctgtgcaaccgctgcttcgggcagcagaccaa

SEQ ID NO: 50419 - DNA, 76 bp, Homo sapiens
acatccacaacaaggagaagcctttcaagtgccacctgtgcaaccgctgcttcgggcagcagaccaacctggaccg

SEQ ID NO: 50420 - DNA, 76 bp, Homo sapiens
aggagaagcctttcaagtgccacctgtgcaaccgctgcttcgggcagcagaccaacctggaccggcacctcaagaa

SEQ ID NO: 50421 - DNA, 80 bp, Homo sapiens
ttcaagtgccacctgtgcaaccgctgcttcgggcagcagaccaacctggaccggcacctcaagaagcacgagcacgagaa

SEQ ID NO: 50422 - DNA, 78 bp, Homo sapiens
acctgtgcaaccgctgcttcgggcagcagaccaacctggaccggcacctcaagaagcacgagcacgagaacgcaccag

SEQ ID NO: 50423 - DNA, 76 bp, Homo sapiens
aaccgctgcttcgggcagcagaccaacctggaccggcacctcaagaagcacgagcacgagaacgcaccaggtgggc

SEQ ID NO: 50424 - DNA, 75 bp, Homo sapiens
ttcgggcagcagaccaacctggaccggcacctcaagaagcacgagcacgagaacgcaccaggtgggccacgcggg

SEQ ID NO: 50425 - DNA, 73 bp, Homo sapiens
agaccaacctggaccggcacctcaagaagcacgagcacgagaacgcaccaggtgggccacgcggggtggggca

SEQ ID NO: 50426 - DNA, 75 bp, Homo sapiens
ggaccggcacctcaagaagcacgagcacgagaacgcaccaggtgggccacgcggggtggggcagcccccagagca

SEQ ID NO: 50427 - DNA, 72 bp, Homo sapiens
aggggtccagcgagaggccgccccctgatgctcccgcccctccgcagtgagccagcaccccggggtcctcac

SEQ ID NO: 50428 - DNA, 72 bp, Homo sapiens
cccctgatgctcccgcccctccgcagtgagccagcaccccggggtcctcacgaaccacctggggaccagcgc

SEQ ID NO: 50429 - DNA, 71 bp, Homo sapiens
tcccgcccctccgcagtgagccagcaccccggggtcctcacgaaccacctggggaccagcgcgtcctctcc

SEQ ID NO: 50430 - DNA, 72 bp, Homo sapiens
ccctccgcagtgagccagcaccccggggtcctcacgaaccacctggggaccagcgcgtcctctcccacctca

SEQ ID NO: 50431 - DNA, 73 bp, Homo sapiens
tgagccagcaccccggggtcctcacgaaccacctggggaccagcgcgtcctctcccacctcagagtcggacaa

SEQ ID NO: 50432 - DNA, 70 bp, Homo sapiens
ggggtcctcacgaaccacctggggaccagcgcgtcctctcccacctcagagtcggacaaccacgcacttt

SEQ ID NO: 50433 - DNA, 71 bp, Homo sapiens
cgaaccacctggggaccagcgcgtcctctcccacctcagagtcggacaaccacgcacttttagacgagaaa

SEQ ID NO: 50434 - DNA, 73 bp, Homo sapiens
tggggaccagcgcgtcctctcccacctcagagtcggacaaccacgcacttttagacgagaaagaagactctta

SEQ ID NO: 50435 - DNA, 72 bp, Homo sapiens
gcgtcctctcccacctcagagtcggacaaccacgcacttttagacgagaaagaagactcttatttctcggaa

SEQ ID NO: 50436 - DNA, 71 bp, Homo sapiens
cccacctcagagtcggacaaccacgcacttttagacgagaaagaagactcttatttctcggaaatcagaaa

SEQ ID NO: 50437 - DNA, 69 bp, Homo sapiens
agagtcggacaaccacgcacttttagacgagaaagaagactcttatttctcggaaatcagaaactttat

SEQ ID NO: 50438 - DNA, 70 bp, Homo sapiens
acaaccacgcacttttagacgagaaagaagactcttatttctcggaaatcagaaactttattgccaatag

SEQ ID NO: 50439 - DNA, 72 bp, Homo sapiens
acttttagacgagaaagaagactcttatttctcggaaatcagaaactttattgccaatagtgagatgaacca

SEQ ID NO: 50440 - DNA, 75 bp, Homo sapiens
aaagaagactcttatttctcggaaatcagaaactttattgccaatagtgagatgaaccaagcatcaacgcgaaca

SEQ ID NO: 50441 - DNA, 75 bp, Homo sapiens
actcttatttctcggaaatcagaaactttattgccaatagtgagatgaaccaagcatcaacgcgaacagagaaac

SEQ ID NO: 50442 - DNA, 73 bp, Homo sapiens
aaatcagaaactttattgccaatagtgagatgaaccaagcatcaacgcgaacagagaaacggtaagaaaacta

SEQ ID NO: 50443 - DNA, 72 bp, Homo sapiens
aaactttattgccaatagtgagatgaaccaagcatcaacgcgaacagagaaacggtaagaaaactatcgcgg

SEQ ID NO: 50444 - DNA, 72 bp, Homo sapiens
aatagtgagatgaaccaagcatcaacgcgaacagagaaacggtaagaaaactatcgcgggctggggaaagtc

SEQ ID NO: 50445 - DNA, 82 bp, Homo sapiens
aaggacagagacacccaaactcagtcaatctcctcctgcatcatttcagggcggacatgcagatcgtggacggcagtgccca

SEQ ID NO: 50446 - DNA, 82 bp, Homo sapiens
agacacccaaactcagtcaatctcctcctgcatcatttcagggcggacatgcagatcgtggacggcagtgcccagtgtccag

SEQ ID NO: 50447 - DNA, 84 bp, Homo sapiens
agtcaatctcctcctgcatcatttcagggcggacatgcagatcgtggacggcagtgcccagtgtccaggcctagccagtgagaa

SEQ ID NO: 50448 - DNA, 85 bp, Homo sapiens
tctcctcctgcatcatttcagggcggacatgcagatcgtggacggcagtgcccagtgtccaggcctagccagtgagaagcaggag

SEQ ID NO: 50449 - DNA, 82 bp, Homo sapiens
atcatttcagggcggacatgcagatcgtggacggcagtgcccagtgtccaggcctagccagtgagaagcaggaggacgtgga

SEQ ID NO: 50450 - DNA, 80 bp, Homo sapiens
cggacatgcagatcgtggacggcagtgcccagtgtccaggcctagccagtgagaagcaggaggacgtggaggaggaggac

SEQ ID NO: 50451 - DNA, 79 bp, Homo sapiens
agatcgtggacggcagtgcccagtgtccaggcctagccagtgagaagcaggaggacgtggaggaggaggacgacgatga

SEQ ID NO: 50452 - DNA, 78 bp, Homo sapiens
cagtgcccagtgtccaggcctagccagtgagaagcaggaggacgtggaggaggaggacgacgatgacctggaggagga

SEQ ID NO: 50453 - DNA, 77 bp, Homo sapiens
agtgtccaggcctagccagtgagaagcaggaggacgtggaggaggaggacgacgatgacctggaggaggacgatgag

SEQ ID NO: 50454 - DNA, 77 bp, Homo sapiens
aggcctagccagtgagaagcaggaggacgtggaggaggaggacgacgatgacctggaggaggacgatgaggacagcc

SEQ ID NO: 50455 - DNA, 74 bp, Homo sapiens
agaagcaggaggacgtggaggaggaggacgacgatgacctggaggaggacgatgaggacagcctggccgggaag

SEQ ID NO: 50456 - DNA, 76 bp, Homo sapiens
aggacgtggaggaggaggacgacgatgacctggaggaggacgatgaggacagcctggccgggaagtcgcaggatga

SEQ ID NO: 50457 - DNA, 75 bp, Homo sapiens
aggaggacgacgatgacctggaggaggacgatgaggacagcctggccgggaagtcgcaggatgacaccgtgtccc

SEQ ID NO: 50458 - DNA, 75 bp, Homo sapiens
acgacgatgacctggaggaggacgatgaggacagcctggccgggaagtcgcaggatgacaccgtgtcccccgcac

SEQ ID NO: 50459 - DNA, 73 bp, Homo sapiens
acctggaggaggacgatgaggacagcctggccgggaagtcgcaggatgacaccgtgtcccccgcacccgagcc

SEQ ID NO: 50460 - DNA, 73 bp, Homo sapiens
atgaggacagcctggccgggaagtcgcaggatgacaccgtgtcccccgcacccgagccccaggccgcctacga

SEQ ID NO: 50461 - DNA, 73 bp, Homo sapiens
acagcctggccgggaagtcgcaggatgacaccgtgtcccccgcacccgagccccaggccgcctacgaggatga

SEQ ID NO: 50462 - DNA, 73 bp, Homo sapiens
ccgggaagtcgcaggatgacaccgtgtcccccgcacccgagccccaggccgcctacgaggatgaggaggatga

SEQ ID NO: 50463 - DNA, 74 bp, Homo sapiens
aggatgacaccgtgtcccccgcacccgagccccaggccgcctacgaggatgaggaggatgaggagccagccgcc

SEQ ID NO: 50464 - DNA, 72 bp, Homo sapiens
accgtgtcccccgcacccgagccccaggccgcctacgaggatgaggaggatgaggagccagccgcctccctg

SEQ ID NO: 50465 - DNA, 73 bp, Homo sapiens
acccgagccccaggccgcctacgaggatgaggaggatgaggagccagccgcctccctggccgtgggctttgac

SEQ ID NO: 50466 - DNA, 73 bp, Homo sapiens
aggccgcctacgaggatgaggaggatgaggagccagccgcctccctggccgtgggctttgaccacacccgaag

SEQ ID NO: 50467 - DNA, 72 bp, Homo sapiens
cctacgaggatgaggaggatgaggagccagccgcctccctggccgtgggctttgaccacacccgaaggtggg

SEQ ID NO: 50468 - DNA, 75 bp, Homo sapiens
gaggatgaggagccagccgcctccctggccgtgggctttgaccacacccgaaggtgggggcagccgtgtgctcca

SEQ ID NO: 50469 - DNA, 75 bp, Homo sapiens
tgaggagccagccgcctccctggccgtgggctttgaccacacccgaaggtgggggcagccgtgtgctccaggatg

SEQ ID NO: 50470 - DNA, 71 bp, Homo sapiens
ccgcctccctggccgtgggctttgaccacacccgaaggtgggggcagccgtgtgctccaggatggggcagg

SEQ ID NO: 50471 - DNA, 78 bp, Homo sapiens
ccaggctgctgacagcaggccttccctctccccggtcattggtgcaggtgtgctgaggaccacgaaggcggtctgtta

SEQ ID NO: 50472 - DNA, 75 bp, Homo sapiens
acagcaggccttccctctccccggtcattggtgcaggtgtgctgaggaccacgaaggcggtctgttagctttgga

SEQ ID NO: 50473 - DNA, 76 bp, Homo sapiens
ttccctctccccggtcattggtgcaggtgtgctgaggaccacgaaggcggtctgttagctttggagccgatgccga

SEQ ID NO: 50474 - DNA, 75 bp, Homo sapiens
ccggtcattggtgcaggtgtgctgaggaccacgaaggcggtctgttagctttggagccgatgccgacttttggga

SEQ ID NO: 50475 - DNA, 73 bp, Homo sapiens
attggtgcaggtgtgctgaggaccacgaaggcggtctgttagctttggagccgatgccgacttttgggaaggg

SEQ ID NO: 50476 - DNA, 73 bp, Homo sapiens
gtgtgctgaggaccacgaaggcggtctgttagctttggagccgatgccgacttttgggaaggggctggacctc

SEQ ID NO: 50477 - DNA, 74 bp, Homo sapiens
acgaaggcggtctgttagctttggagccgatgccgacttttgggaaggggctggacctccgcagagcagctgag

SEQ ID NO: 50478 - DNA, 77 bp, Homo sapiens
gtctgttagctttggagccgatgccgacttttgggaaggggctggacctccgcagagcagctgaggaagcatttgaa

SEQ ID NO: 50479 - DNA, 76 bp, Homo sapiens
tagctttggagccgatgccgacttttgggaaggggctggacctccgcagagcagctgaggaagcatttgaagttaa

SEQ ID NO: 50480 - DNA, 75 bp, Homo sapiens
atgccgacttttgggaaggggctggacctccgcagagcagctgaggaagcatttgaagttaaagatgtgcttaat

SEQ ID NO: 50481 - DNA, 75 bp, Homo sapiens
tttgggaaggggctggacctccgcagagcagctgaggaagcatttgaagttaaagatgtgcttaattccacctta

SEQ ID NO: 50482 - DNA, 78 bp, Homo sapiens
ctggacctccgcagagcagctgaggaagcatttgaagttaaagatgtgcttaattccaccttagattctgaggcttta

SEQ ID NO: 50483 - DNA, 78 bp, Homo sapiens
tccgcagagcagctgaggaagcatttgaagttaaagatgtgcttaattccaccttagattctgaggctttaaaacata

SEQ ID NO: 50484 - DNA, 77 bp, Homo sapiens
agctgaggaagcatttgaagttaaagatgtgcttaattccaccttagattctgaggctttaaaacatacactgtgca

SEQ ID NO: 50485 - DNA, 75 bp, Homo sapiens
atttgaagttaaagatgtgcttaattccaccttagattctgaggctttaaaacatacactgtgcaggcaggctaa

SEQ ID NO: 50486 - DNA, 75 bp, Homo sapiens
agttaaagatgtgcttaattccaccttagattctgaggctttaaaacatacactgtgcaggcaggctaagaacca

SEQ ID NO: 50487 - DNA, 72 bp, Homo sapiens
ttaattccaccttagattctgaggctttaaaacatacactgtgcaggcaggctaagaaccaggtaggtaccc

SEQ ID NO: 50488 - DNA, 73 bp, Homo sapiens
accttagattctgaggctttaaaacatacactgtgcaggcaggctaagaaccaggtaggtacccgccagagcc

SEQ ID NO: 50489 - DNA, 72 bp, Homo sapiens
ttctgaggctttaaaacatacactgtgcaggcaggctaagaaccaggtaggtacccgccagagcccctcccc

SEQ ID NO: 50490 - DNA, 70 bp, Homo sapiens
ttaaaacatacactgtgcaggcaggctaagaaccaggtaggtacccgccagagcccctcccccaccccac

SEQ ID NO: 50491 - DNA, 83 bp, Homo sapiens
tgcctgtcctgtgtgtgtgtcatcccctccccgccaggcatatgcaatgatgctgtccctttccgaagacactcctctccaca

SEQ ID NO: 50492 - DNA, 79 bp, Homo sapiens
cctgtgtgtgtgtcatcccctccccgccaggcatatgcaatgatgctgtccctttccgaagacactcctctccacaccc

SEQ ID NO: 50493 - DNA, 77 bp, Homo sapiens
gtgtcatcccctccccgccaggcatatgcaatgatgctgtccctttccgaagacactcctctccacaccccctccca

SEQ ID NO: 50494 - DNA, 76 bp, Homo sapiens
cccgccaggcatatgcaatgatgctgtccctttccgaagacactcctctccacaccccctcccagggttctctgga

SEQ ID NO: 50495 - DNA, 74 bp, Homo sapiens
atatgcaatgatgctgtccctttccgaagacactcctctccacaccccctcccagggttctctggacgcttggt

SEQ ID NO: 50496 - DNA, 72 bp, Homo sapiens
atgatgctgtccctttccgaagacactcctctccacaccccctcccagggttctctggacgcttggttgaag

SEQ ID NO: 50497 - DNA, 70 bp, Homo sapiens
cctttccgaagacactcctctccacaccccctcccagggttctctggacgcttggttgaaggtcactgga

SEQ ID NO: 50498 - DNA, 72 bp, Homo sapiens
agacactcctctccacaccccctcccagggttctctggacgcttggttgaaggtcactggagccacgtcgga

SEQ ID NO: 50499 - DNA, 73 bp, Homo sapiens
acaccccctcccagggttctctggacgcttggttgaaggtcactggagccacgtcggagtctggagcatttca

SEQ ID NO: 50500 - DNA, 75 bp, Homo sapiens
cagggttctctggacgcttggttgaaggtcactggagccacgtcggagtctggagcatttcaccccatcaaccac

SEQ ID NO: 50501 - DNA, 77 bp, Homo sapiens
ttctctggacgcttggttgaaggtcactggagccacgtcggagtctggagcatttcaccccatcaaccacctctgac

SEQ ID NO: 50502 - DNA, 76 bp, Homo sapiens
cttggttgaaggtcactggagccacgtcggagtctggagcatttcaccccatcaaccacctctgacgggctgggca

SEQ ID NO: 50503 - DNA, 74 bp, Homo sapiens
aggtcactggagccacgtcggagtctggagcatttcaccccatcaaccacctctgacgggctgggcagccgggg

SEQ ID NO: 50504 - DNA, 73 bp, Homo sapiens
acgtcggagtctggagcatttcaccccatcaaccacctctgacgggctgggcagccgggggccggtggccaga

SEQ ID NO: 50505 - DNA, 75 bp, Homo sapiens
agtctggagcatttcaccccatcaaccacctctgacgggctgggcagccgggggccggtggccagagcgagggca

SEQ ID NO: 50506 - DNA, 73 bp, Homo sapiens
atttcaccccatcaaccacctctgacgggctgggcagccgggggccggtggccagagcgagggcaccagccac

SEQ ID NO: 50507 - DNA, 73 bp, Homo sapiens
atcaaccacctctgacgggctgggcagccgggggccggtggccagagcgagggcaccagccacgaaggacgga

SEQ ID NO: 50508 - DNA, 72 bp, Homo sapiens
ctctgacgggctgggcagccgggggccggtggccagagcgagggcaccagccacgaaggacggaggcgggcg

SEQ ID NO: 50509 - DNA, 69 bp, Homo sapiens
cagccgggggccggtggccagagcgagggcaccagccacgaaggacggaggcgggcggggccccggaga

SEQ ID NO: 50510 - DNA, 68 bp, Homo sapiens
ccggtggccagagcgagggcaccagccacgaaggacggaggcgggcggggccccggagaaccctgtcc

SEQ ID NO: 50511 - DNA, 70 bp, Homo sapiens
ccagagcgagggcaccagccacgaaggacggaggcgggcggggccccggagaaccctgtccctgcgtgtg

SEQ ID NO: 50512 - DNA, 70 bp, Homo sapiens
acgaaggacggaggcgggcggggccccggagaaccctgtccctgcgtgtggccactcctcagcatcctcc

SEQ ID NO: 50513 - DNA, 70 bp, Homo sapiens
cggaggcgggcggggccccggagaaccctgtccctgcgtgtggccactcctcagcatcctccccacccac

SEQ ID NO: 50514 - DNA, 72 bp, Homo sapiens
ccccggagaaccctgtccctgcgtgtggccactcctcagcatcctccccacccaccatggttcattccgact

SEQ ID NO: 50515 - DNA, 77 bp, Homo sapiens
tgcgtgtggccactcctcagcatcctccccacccaccatggttcattccgacttttccaatggaaactcagatccca

SEQ ID NO: 50516 - DNA, 72 bp, Homo sapiens
actcctcagcatcctccccacccaccatggttcattccgacttttccaatggaaactcagatcccaaaagtc

SEQ ID NO: 50517 - DNA, 68 bp, Homo sapiens
atcctccccacccaccatggttcattccgacttttccaatggaaactcagatcccaaaagtccctaaa

SEQ ID NO: 50518 - DNA, 70 bp, Homo sapiens
acccaccatggttcattccgacttttccaatggaaactcagatcccaaaagtccctaaagcagtcgtaga

SEQ ID NO: 50519 - DNA, 72 bp, Homo sapiens
atggttcattccgacttttccaatggaaactcagatcccaaaagtccctaaagcagtcgtagagtctcacca

SEQ ID NO: 50520 - DNA, 72 bp, Homo sapiens
acttttccaatggaaactcagatcccaaaagtccctaaagcagtcgtagagtctcaccatctccaaggattg

SEQ ID NO: 50521 - DNA, 74 bp, Homo sapiens
aatggaaactcagatcccaaaagtccctaaagcagtcgtagagtctcaccatctccaaggattggtcttgagaa

SEQ ID NO: 50522 - DNA, 76 bp, Homo sapiens
agatcccaaaagtccctaaagcagtcgtagagtctcaccatctccaaggattggtcttgagaacactgttcagtga

SEQ ID NO: 50523 - DNA, 75 bp, Homo sapiens
aaaagtccctaaagcagtcgtagagtctcaccatctccaaggattggtcttgagaacactgttcagtgacggcca

SEQ ID NO: 50524 - DNA, 78 bp, Homo sapiens
agtcgtagagtctcaccatctccaaggattggtcttgagaacactgttcagtgacggccatgcaggtggccgtccaaa

SEQ ID NO: 50525 - DNA, 79 bp, Homo sapiens
agtctcaccatctccaaggattggtcttgagaacactgttcagtgacggccatgcaggtggccgtccaaagacagccaa

SEQ ID NO: 50526 - DNA, 79 bp, Homo sapiens
atctccaaggattggtcttgagaacactgttcagtgacggccatgcaggtggccgtccaaagacagccaacggagctgc

SEQ ID NO: 50527 - DNA, 81 bp, Homo sapiens
attggtcttgagaacactgttcagtgacggccatgcaggtggccgtccaaagacagccaacggagctgcctcgcagaatca

SEQ ID NO: 50528 - DNA, 82 bp, Homo sapiens
agaacactgttcagtgacggccatgcaggtggccgtccaaagacagccaacggagctgcctcgcagaatcagccagtgggca

SEQ ID NO: 50529 - DNA, 84 bp, Homo sapiens
atgcaggtggccgtccaaagacagccaacggagctgcctcgcagaatcagccagtgggcaggtggacgctctgctgagacagaa

SEQ ID NO: 50530 - DNA, 84 bp, Homo sapiens
tggccgtccaaagacagccaacggagctgcctcgcagaatcagccagtgggcaggtggacgctctgctgagacagaagctggtg

SEQ ID NO: 50531 - DNA, 84 bp, Homo sapiens
aaagacagccaacggagctgcctcgcagaatcagccagtgggcaggtggacgctctgctgagacagaagctggtggccactgcc

SEQ ID NO: 50532 - DNA, 82 bp, Homo sapiens
aacggagctgcctcgcagaatcagccagtgggcaggtggacgctctgctgagacagaagctggtggccactgccgggtgccc

SEQ ID NO: 50533 - DNA, 81 bp, Homo sapiens
ctcgcagaatcagccagtgggcaggtggacgctctgctgagacagaagctggtggccactgccgggtgcccgcgtggggtc

SEQ ID NO: 50534 - DNA, 76 bp, Homo sapiens
aggtggacgctctgctgagacagaagctggtggccactgccgggtgcccgcgtggggtcgcggaagggaatggata

SEQ ID NO: 50535 - DNA, 75 bp, Homo sapiens
ggtgcccgcgtggggtcgcggaagggaatggatagactggtgtgctcaaaagagagagatcactcaaatgatttt

SEQ ID NO: 50536 - DNA, 76 bp, Homo sapiens
gtggggtcgcggaagggaatggatagactggtgtgctcaaaagagagagatcactcaaatgatttttataatgaaa

SEQ ID NO: 50537 - DNA, 78 bp, Homo sapiens
gaagggaatggatagactggtgtgctcaaaagagagagatcactcaaatgatttttataatgaaatgacaagaataac

SEQ ID NO: 50538 - DNA, 76 bp, Homo sapiens
ggatagactggtgtgctcaaaagagagagatcactcaaatgatttttataatgaaatgacaagaataacccttttg

SEQ ID NO: 50539 - DNA, 73 bp, Homo sapiens
gtgtgctcaaaagagagagatcactcaaatgatttttataatgaaatgacaagaataacccttttggtaaccg

SEQ ID NO: 50540 - DNA, 75 bp, Homo sapiens
agagagagatcactcaaatgatttttataatgaaatgacaagaataacccttttggtaaccgtattgactgcaga

SEQ ID NO: 50541 - DNA, 75 bp, Homo sapiens
gagatcactcaaatgatttttataatgaaatgacaagaataacccttttggtaaccgtattgactgcagagtcta

SEQ ID NO: 50542 - DNA, 73 bp, Homo sapiens
gatttttataatgaaatgacaagaataacccttttggtaaccgtattgactgcagagtctatttaagcatgtg

SEQ ID NO: 50543 - DNA, 71 bp, Homo sapiens
atgaaatgacaagaataacccttttggtaaccgtattgactgcagagtctatttaagcatgtggttttaaa

SEQ ID NO: 50544 - DNA, 70 bp, Homo sapiens
gacaagaataacccttttggtaaccgtattgactgcagagtctatttaagcatgtggttttaaaaataga

SEQ ID NO: 50545 - DNA, 68 bp, Homo sapiens
aacccttttggtaaccgtattgactgcagagtctatttaagcatgtggttttaaaaatagacagtatt

SEQ ID NO: 50546 - DNA, 72 bp, Homo sapiens
aatcaaaaaatgacttgcaaattgttttttaaaagtaattttgcattgctttgaaatttgagctcatttgca

SEQ ID NO: 50547 - DNA, 72 bp, Homo sapiens
tgacttgcaaattgttttttaaaagtaattttgcattgctttgaaatttgagctcatttgcaaacccgagtc

SEQ ID NO: 50548 - DNA, 71 bp, Homo sapiens
attgttttttaaaagtaattttgcattgctttgaaatttgagctcatttgcaaacccgagtctgcctggga

SEQ ID NO: 50549 - DNA, 73 bp, Homo sapiens
ttaaaagtaattttgcattgctttgaaatttgagctcatttgcaaacccgagtctgcctgggaacccgcactg

SEQ ID NO: 50550 - DNA, 77 bp, Homo sapiens
ttgcattgctttgaaatttgagctcatttgcaaacccgagtctgcctgggaacccgcactgtgcctgggtgtattct

SEQ ID NO: 50551 - DNA, 76 bp, Homo sapiens
atttgagctcatttgcaaacccgagtctgcctgggaacccgcactgtgcctgggtgtattctttatactgtagata

SEQ ID NO: 50552 - DNA, 74 bp, Homo sapiens
atttgcaaacccgagtctgcctgggaacccgcactgtgcctgggtgtattctttatactgtagataatggagaa

SEQ ID NO: 50553 - DNA, 75 bp, Homo sapiens
agtctgcctgggaacccgcactgtgcctgggtgtattctttatactgtagataatggagaaattttctatctctg

SEQ ID NO: 50554 - DNA, 73 bp, Homo sapiens
aacccgcactgtgcctgggtgtattctttatactgtagataatggagaaattttctatctctgtccctatttg

SEQ ID NO: 50555 - DNA, 75 bp, Homo sapiens
ctgtgcctgggtgtattctttatactgtagataatggagaaattttctatctctgtccctatttgtataagccaa

SEQ ID NO: 50556 - DNA, 76 bp, Homo sapiens
tgggtgtattctttatactgtagataatggagaaattttctatctctgtccctatttgtataagccaaggtgatgc

SEQ ID NO: 50557 - DNA, 75 bp, Homo sapiens
ctttatactgtagataatggagaaattttctatctctgtccctatttgtataagccaaggtgatgctgggtgccc

SEQ ID NO: 50558 - DNA, 75 bp, Homo sapiens
ataatggagaaattttctatctctgtccctatttgtataagccaaggtgatgctgggtgccccgaggcagaacaa

SEQ ID NO: 50559 - DNA, 74 bp, Homo sapiens
aaattttctatctctgtccctatttgtataagccaaggtgatgctgggtgccccgaggcagaacaagaggcgcg

SEQ ID NO: 50560 - DNA, 76 bp, Homo sapiens
tatctctgtccctatttgtataagccaaggtgatgctgggtgccccgaggcagaacaagaggcgcggggccacacc

SEQ ID NO: 50561 - DNA, 77 bp, Homo sapiens
tatttgtataagccaaggtgatgctgggtgccccgaggcagaacaagaggcgcggggccacacccgtgaaccatgca

SEQ ID NO: 50562 - DNA, 76 bp, Homo sapiens
caaggtgatgctgggtgccccgaggcagaacaagaggcgcggggccacacccgtgaaccatgcagacggccgaaga

SEQ ID NO: 50563 - DNA, 72 bp, Homo sapiens
agaacaagaggcgcggggccacacccgtgaaccatgcagacggccgaagaagtcttaggcagggcgccctgg

SEQ ID NO: 50564 - DNA, 75 bp, Homo sapiens
acacccgtgaaccatgcagacggccgaagaagtcttaggcagggcgccctgggctgcaggcctgcccgaggctgg

SEQ ID NO: 50565 - DNA, 75 bp, Homo sapiens
aaccatgcagacggccgaagaagtcttaggcagggcgccctgggctgcaggcctgcccgaggctgggatgggaag

SEQ ID NO: 50566 - DNA, 79 bp, Homo sapiens
tcttaggcagggcgccctgggctgcaggcctgcccgaggctgggatgggaagtgtgcctgccctcgtgtgacatggaat

SEQ ID NO: 50567 - DNA, 79 bp, Homo sapiens
ctgcaggcctgcccgaggctgggatgggaagtgtgcctgccctcgtgtgacatggaattggtgtcaggaccgccacgtg

SEQ ID NO: 50568 - DNA, 79 bp, Homo sapiens
tgcccgaggctgggatgggaagtgtgcctgccctcgtgtgacatggaattggtgtcaggaccgccacgtggccttcaga

SEQ ID NO: 50569 - DNA, 78 bp, Homo sapiens
ggatgggaagtgtgcctgccctcgtgtgacatggaattggtgtcaggaccgccacgtggccttcagaggaatccacag

SEQ ID NO: 50570 - DNA, 76 bp, Homo sapiens
aagtgtgcctgccctcgtgtgacatggaattggtgtcaggaccgccacgtggccttcagaggaatccacaggtccc

SEQ ID NO: 50571 - DNA, 75 bp, Homo sapiens
cctcgtgtgacatggaattggtgtcaggaccgccacgtggccttcagaggaatccacaggtccccacccaagatc

SEQ ID NO: 50572 - DNA, 73 bp, Homo sapiens
atggaattggtgtcaggaccgccacgtggccttcagaggaatccacaggtccccacccaagatccctcaatta

SEQ ID NO: 50573 - DNA, 71 bp, Homo sapiens
accgccacgtggccttcagaggaatccacaggtccccacccaagatccctcaattatatggggaagtcgag

SEQ ID NO: 50574 - DNA, 73 bp, Homo sapiens
cttcagaggaatccacaggtccccacccaagatccctcaattatatggggaagtcgagggcctgtggcttgga

SEQ ID NO: 50575 - DNA, 75 bp, Homo sapiens
aatccacaggtccccacccaagatccctcaattatatggggaagtcgagggcctgtggcttggatccgccatgca

SEQ ID NO: 50576 - DNA, 76 bp, Homo sapiens
aggtccccacccaagatccctcaattatatggggaagtcgagggcctgtggcttggatccgccatgcagagatgtg

SEQ ID NO: 50577 - DNA, 78 bp, Homo sapiens
agatccctcaattatatggggaagtcgagggcctgtggcttggatccgccatgcagagatgtggccgggcacccatct

SEQ ID NO: 50578 - DNA, 77 bp, Homo sapiens
gggaagtcgagggcctgtggcttggatccgccatgcagagatgtggccgggcacccatcttccttccctcctctgtc

SEQ ID NO: 50579 - DNA, 76 bp, Homo sapiens
cttggatccgccatgcagagatgtggccgggcacccatcttccttccctcctctgtccctgcctcggccaccccac

SEQ ID NO: 50580 - DNA, 71 bp, Homo sapiens
agatgtggccgggcacccatcttccttccctcctctgtccctgcctcggccaccccacgcgggaacccagc

SEQ ID NO: 50581 - DNA, 70 bp, Homo sapiens
acccatcttccttccctcctctgtccctgcctcggccaccccacgcgggaacccagcgccgtcctctgaa

SEQ ID NO: 50582 - DNA, 71 bp, Homo sapiens
ttccctcctctgtccctgcctcggccaccccacgcgggaacccagcgccgtcctctgaaggcagggccttg

SEQ ID NO: 50583 - DNA, 72 bp, Homo sapiens
tgtccctgcctcggccaccccacgcgggaacccagcgccgtcctctgaaggcagggccttggccacgtcctg

SEQ ID NO: 50584 - DNA, 71 bp, Homo sapiens
tcggccaccccacgcgggaacccagcgccgtcctctgaaggcagggccttggccacgtcctgggtctccca

SEQ ID NO: 50585 - DNA, 70 bp, Homo sapiens
cccacgcgggaacccagcgccgtcctctgaaggcagggccttggccacgtcctgggtctcccacctccca

SEQ ID NO: 50586 - DNA, 70 bp, Homo sapiens
gggaacccagcgccgtcctctgaaggcagggccttggccacgtcctgggtctcccacctcccacctgacc

SEQ ID NO: 50587 - DNA, 72 bp, Homo sapiens
tcctctgaaggcagggccttggccacgtcctgggtctcccacctcccacctgaccccagcggctccggtgtc

SEQ ID NO: 50588 - DNA, 70 bp, Homo sapiens
aaggcagggccttggccacgtcctgggtctcccacctcccacctgaccccagcggctccggtgtcctcca

SEQ ID NO: 50589 - DNA, 72 bp, Homo sapiens
ttggccacgtcctgggtctcccacctcccacctgaccccagcggctccggtgtcctccacgtggctgccctg

SEQ ID NO: 50590 - DNA, 73 bp, Homo sapiens
tgggtctcccacctcccacctgaccccagcggctccggtgtcctccacgtggctgccctggggagcaatccca

SEQ ID NO: 50591 - DNA, 74 bp, Homo sapiens
acctcccacctgaccccagcggctccggtgtcctccacgtggctgccctggggagcaatcccagcggatcgctc

SEQ ID NO: 50592 - DNA, 75 bp, Homo sapiens
tgaccccagcggctccggtgtcctccacgtggctgccctggggagcaatcccagcggatcgctccgggccaccaa

SEQ ID NO: 50593 - DNA, 75 bp, Homo sapiens
agcggctccggtgtcctccacgtggctgccctggggagcaatcccagcggatcgctccgggccaccaagccgcac

SEQ ID NO: 50594 - DNA, 79 bp, Homo sapiens
tgtcctccacgtggctgccctggggagcaatcccagcggatcgctccgggccaccaagccgcacctgtgcctgagactc

SEQ ID NO: 50595 - DNA, 78 bp, Homo sapiens
ggctgccctggggagcaatcccagcggatcgctccgggccaccaagccgcacctgtgcctgagactccggatggacga

SEQ ID NO: 50596 - DNA, 79 bp, Homo sapiens
gggagcaatcccagcggatcgctccgggccaccaagccgcacctgtgcctgagactccggatggacgacacagtcgtca

SEQ ID NO: 50597 - DNA, 77 bp, Homo sapiens
aatcccagcggatcgctccgggccaccaagccgcacctgtgcctgagactccggatggacgacacagtcgtcacgtc

SEQ ID NO: 50598 - DNA, 78 bp, Homo sapiens
atcgctccgggccaccaagccgcacctgtgcctgagactccggatggacgacacagtcgtcacgtcgctcttcctgcg

SEQ ID NO: 50599 - DNA, 77 bp, Homo sapiens
accaagccgcacctgtgcctgagactccggatggacgacacagtcgtcacgtcgctcttcctgcgggttcttggcga

SEQ ID NO: 50600 - DNA, 79 bp, Homo sapiens
acctgtgcctgagactccggatggacgacacagtcgtcacgtcgctcttcctgcgggttcttggcgagacacagcttga

SEQ ID NO: 50601 - DNA, 79 bp, Homo sapiens
ctgagactccggatggacgacacagtcgtcacgtcgctcttcctgcgggttcttggcgagacacagcttgagaacagaa

SEQ ID NO: 50602 - DNA, 76 bp, Homo sapiens
atggacgacacagtcgtcacgtcgctcttcctgcgggttcttggcgagacacagcttgagaacagaagggcgtcgg

SEQ ID NO: 50603 - DNA, 75 bp, Homo sapiens
tcacgtcgctcttcctgcgggttcttggcgagacacagcttgagaacagaagggcgtcgggggaacctgccgcaa

SEQ ID NO: 50604 - DNA, 76 bp, Homo sapiens
tcttcctgcgggttcttggcgagacacagcttgagaacagaagggcgtcgggggaacctgccgcaaggagcagaga

SEQ ID NO: 50605 - DNA, 77 bp, Homo sapiens
ggttcttggcgagacacagcttgagaacagaagggcgtcgggggaacctgccgcaaggagcagagacagcacagccc

SEQ ID NO: 50606 - DNA, 74 bp, Homo sapiens
acacagcttgagaacagaagggcgtcgggggaacctgccgcaaggagcagagacagcacagccccccgggccca

SEQ ID NO: 50607 - DNA, 73 bp, Homo sapiens
ttgagaacagaagggcgtcgggggaacctgccgcaaggagcagagacagcacagccccccgggcccagccgcc

SEQ ID NO: 50608 - DNA, 71 bp, Homo sapiens
aagggcgtcgggggaacctgccgcaaggagcagagacagcacagccccccgggcccagccgcctccctctc

SEQ ID NO: 50609 - DNA, 73 bp, Homo sapiens
aacctgccgcaaggagcagagacagcacagccccccgggcccagccgcctccctctcttgggacgcaacttct

SEQ ID NO: 50610 - DNA, 72 bp, Homo sapiens
aaggagcagagacagcacagccccccgggcccagccgcctccctctcttgggacgcaacttcttccccactc

SEQ ID NO: 50611 - DNA, 70 bp, Homo sapiens
acagcacagccccccgggcccagccgcctccctctcttgggacgcaacttcttccccactcggatgggct

SEQ ID NO: 50612 - DNA, 66 bp, Homo sapiens
cccccgggcccagccgcctccctctcttgggacgcaacttcttccccactcggatgggctttaaat

SEQ ID NO: 50613 - DNA, 69 bp, Homo sapiens
cctctcttgggacgcaacttcttccccactcggatgggctttaaattattcccataggggccaatttca

SEQ ID NO: 50614 - DNA, 68 bp, Homo sapiens
ttgggacgcaacttcttccccactcggatgggctttaaattattcccataggggccaatttcaaataa

SEQ ID NO: 50615 - DNA, 65 bp, Homo sapiens
aacttcttccccactcggatgggctttaaattattcccataggggccaatttcaaataataattt

SEQ ID NO: 50616 - DNA, 68 bp, Homo sapiens
cactcggatgggctttaaattattcccataggggccaatttcaaataataatttttttccctgatgga

SEQ ID NO: 50617 - DNA, 65 bp, Homo sapiens
gggctttaaattattcccataggggccaatttcaaataataatttttttccctgatggaatttac

SEQ ID NO: 50618 - DNA, 67 bp, Homo sapiens
gggccaatttcaaataataatttttttccctgatggaatttaccttaatctgtatataacttgtaat

SEQ ID NO: 50619 - DNA, 67 bp, Homo sapiens
ataataatttttttccctgatggaatttaccttaatctgtatataacttgtaattttttctaattca

SEQ ID NO: 50620 - DNA, 67 bp, Homo sapiens
tttttccctgatggaatttaccttaatctgtatataacttgtaattttttctaattcatttcttttc

SEQ ID NO: 50621 - DNA, 69 bp, Homo sapiens
catttcttttcttattttatttcctccttaacagtatttttggcattagacattcttattgtgaagaaa

SEQ ID NO: 50622 - DNA, 70 bp, Homo sapiens
cttattttatttcctccttaacagtatttttggcattagacattcttattgtgaagaaataatgttaata

SEQ ID NO: 50623 - DNA, 74 bp, Homo sapiens
ttcctccttaacagtatttttggcattagacattcttattgtgaagaaataatgttaatataagtatctggtga

SEQ ID NO: 50624 - DNA, 73 bp, Homo sapiens
aacagtatttttggcattagacattcttattgtgaagaaataatgttaatataagtatctggtgaaggaccaa

SEQ ID NO: 50625 - DNA, 74 bp, Homo sapiens
tttggcattagacattcttattgtgaagaaataatgttaatataagtatctggtgaaggaccaaaaccgtgtga

SEQ ID NO: 50626 - DNA, 72 bp, Homo sapiens
cattcttattgtgaagaaataatgttaatataagtatctggtgaaggaccaaaaccgtgtgataaggttgtg

SEQ ID NO: 50627 - DNA, 73 bp, Homo sapiens
tattgtgaagaaataatgttaatataagtatctggtgaaggaccaaaaccgtgtgataaggttgtgtgtcgtg

SEQ ID NO: 50628 - DNA, 71 bp, Homo sapiens
taatataagtatctggtgaaggaccaaaaccgtgtgataaggttgtgtgtcgtgtgggagtggggcgattt

SEQ ID NO: 50629 - DNA, 68 bp, Homo sapiens
cgtgtgataaggttgtgtgtcgtgtgggagtggggcgattttttatgtgccaaatacccccgtccccc

SEQ ID NO: 50630 - DNA, 71 bp, Homo sapiens
ttgtgtgtcgtgtgggagtggggcgattttttatgtgccaaatacccccgtcccccccatgaatcctgctg

SEQ ID NO: 50631 - DNA, 71 bp, Homo sapiens
cgattttttatgtgccaaatacccccgtcccccccatgaatcctgctgtccctgctgccgtttaccagaca

SEQ ID NO: 50632 - DNA, 70 bp, Homo sapiens
aaatacccccgtcccccccatgaatcctgctgtccctgctgccgtttaccagacaatcatatgtttttgt

SEQ ID NO: 50633 - DNA, 73 bp, Homo sapiens
cccccatgaatcctgctgtccctgctgccgtttaccagacaatcatatgtttttgttaaatttgcgtttcagt

SEQ ID NO: 50634 - DNA, 74 bp, Homo sapiens
atgaatcctgctgtccctgctgccgtttaccagacaatcatatgtttttgttaaatttgcgtttcagttacatt

SEQ ID NO: 50635 - DNA, 73 bp, Homo sapiens
ctgtccctgctgccgtttaccagacaatcatatgtttttgttaaatttgcgtttcagttacatttgcatttaa

SEQ ID NO: 50636 - DNA, 74 bp, Homo sapiens
tgtccctgctgccgtttaccagacaatcatatgtttttgttaaatttgcgtttcagttacatttgcatttaaga

SEQ ID NO: 50637 - DNA, 73 bp, Homo sapiens
cctgctgccgtttaccagacaatcatatgtttttgttaaatttgcgtttcagttacatttgcatttaagacaa

SEQ ID NO: 50638 - DNA, 72 bp, Homo sapiens
tgccgtttaccagacaatcatatgtttttgttaaatttgcgtttcagttacatttgcatttaagacaagtgt

SEQ ID NO: 50639 - DNA, 72 bp, Homo sapiens
cagacaatcatatgtttttgttaaatttgcgtttcagttacatttgcatttaagacaagtgttctatttatt

SEQ ID NO: 50640 - DNA, 71 bp, Homo sapiens
catatgtttttgttaaatttgcgtttcagttacatttgcatttaagacaagtgttctatttatttcttgta

SEQ ID NO: 50641 - DNA, 69 bp, Homo sapiens
gtttttgttaaatttgcgtttcagttacatttgcatttaagacaagtgttctatttatttcttgtattg

SEQ ID NO: 50642 - DNA, 71 bp, Homo sapiens
ttgttaaatttgcgtttcagttacatttgcatttaagacaagtgttctatttatttcttgtattgtttgga

SEQ ID NO: 50643 - DNA, 71 bp, Homo sapiens
ttaaatttgcgtttcagttacatttgcatttaagacaagtgttctatttatttcttgtattgtttggaaga

SEQ ID NO: 50644 - DNA, 70 bp, Homo sapiens
tttgcgtttcagttacatttgcatttaagacaagtgttctatttatttcttgtattgtttggaagaaaaa

SEQ ID NO: 50645 - DNA, 73 bp, Homo sapiens
catttgcatttaagacaagtgttctatttatttcttgtattgtttggaagaaaaaatgatgatagagtcccaa

SEQ ID NO: 50646 - DNA, 70 bp, Homo sapiens
caagtgttctatttatttcttgtattgtttggaagaaaaaatgatgatagagtcccaaaaagaagagaaa

SEQ ID NO: 50647 - DNA, 66 bp, Homo sapiens
aaaaatgcccaagttgccctttaaaaaaaaagagcgtaaatacaaacaggagtggtgcaagccgcc

SEQ ID NO: 50648 - DNA, 66 bp, Homo sapiens
aagttgccctttaaaaaaaaagagcgtaaatacaaacaggagtggtgcaagccgccttggtgtggg

SEQ ID NO: 50649 - DNA, 69 bp, Homo sapiens
ttaaaaaaaaagagcgtaaatacaaacaggagtggtgcaagccgccttggtgtgggtttgtgtcacgtg

SEQ ID NO: 50650 - DNA, 73 bp, Homo sapiens
aaaaagagcgtaaatacaaacaggagtggtgcaagccgccttggtgtgggtttgtgtcacgtgtggacatctc

SEQ ID NO: 50651 - DNA, 76 bp, Homo sapiens
taaatacaaacaggagtggtgcaagccgccttggtgtgggtttgtgtcacgtgtggacatctcctcaggctttgtg

SEQ ID NO: 50652 - DNA, 79 bp, Homo sapiens
agtggtgcaagccgccttggtgtgggtttgtgtcacgtgtggacatctcctcaggctttgtgtcacgcgtggacatctc

SEQ ID NO: 50653 - DNA, 78 bp, Homo sapiens
aagccgccttggtgtgggtttgtgtcacgtgtggacatctcctcaggctttgtgtcacgcgtggacatctcctcaggc

SEQ ID NO: 50654 - DNA, 81 bp, Homo sapiens
tgtgggtttgtgtcacgtgtggacatctcctcaggctttgtgtcacgcgtggacatctcctcaggctgtccccagcggtga

SEQ ID NO: 50655 - DNA, 80 bp, Homo sapiens
tttgtgtcacgtgtggacatctcctcaggctttgtgtcacgcgtggacatctcctcaggctgtccccagcggtgacggga

SEQ ID NO: 50656 - DNA, 80 bp, Homo sapiens
tctcctcaggctttgtgtcacgcgtggacatctcctcaggctgtccccagcggtgacgggaggtgtcctggctgctccag

SEQ ID NO: 50657 - DNA, 77 bp, Homo sapiens
ctttgtgtcacgcgtggacatctcctcaggctgtccccagcggtgacgggaggtgtcctggctgctccaggacaaaa

SEQ ID NO: 50658 - DNA, 79 bp, Homo sapiens
tgtcacgcgtggacatctcctcaggctgtccccagcggtgacgggaggtgtcctggctgctccaggacaaaagacaatc

SEQ ID NO: 50659 - DNA, 77 bp, Homo sapiens
acatctcctcaggctgtccccagcggtgacgggaggtgtcctggctgctccaggacaaaagacaatcgtctctgtgg

SEQ ID NO: 50660 - DNA, 74 bp, Homo sapiens
aggctgtccccagcggtgacgggaggtgtcctggctgctccaggacaaaagacaatcgtctctgtgggtgccgg

SEQ ID NO: 50661 - DNA, 73 bp, Homo sapiens
cggtgacgggaggtgtcctggctgctccaggacaaaagacaatcgtctctgtgggtgccgggtggtccaggct

SEQ ID NO: 50662 - DNA, 76 bp, Homo sapiens
aggtgtcctggctgctccaggacaaaagacaatcgtctctgtgggtgccgggtggtccaggcttgcactgaagacg

SEQ ID NO: 50663 - DNA, 76 bp, Homo sapiens
aagacaatcgtctctgtgggtgccgggtggtccaggcttgcactgaagacgtgccacggggaggctcctgcaggag

SEQ ID NO: 50664 - DNA, 77 bp, Homo sapiens
tctctgtgggtgccgggtggtccaggcttgcactgaagacgtgccacggggaggctcctgcaggaggctcaacccga

SEQ ID NO: 50665 - DNA, 77 bp, Homo sapiens
ggtggtccaggcttgcactgaagacgtgccacggggaggctcctgcaggaggctcaacccgacggatcacagtgaaa

SEQ ID NO: 50666 - DNA, 76 bp, Homo sapiens
aggcttgcactgaagacgtgccacggggaggctcctgcaggaggctcaacccgacggatcacagtgaaagggattc

SEQ ID NO: 50667 - DNA, 76 bp, Homo sapiens
acggggaggctcctgcaggaggctcaacccgacggatcacagtgaaagggattcctcccacgccagatctgcacaa

SEQ ID NO: 50668 - DNA, 79 bp, Homo sapiens
tcctgcaggaggctcaacccgacggatcacagtgaaagggattcctcccacgccagatctgcacaacgaggcaagacag

SEQ ID NO: 50669 - DNA, 76 bp, Homo sapiens
aggaggctcaacccgacggatcacagtgaaagggattcctcccacgccagatctgcacaacgaggcaagacaggac

SEQ ID NO: 50670 - DNA, 74 bp, Homo sapiens
aacccgacggatcacagtgaaagggattcctcccacgccagatctgcacaacgaggcaagacaggacccacctg

SEQ ID NO: 50671 - DNA, 78 bp, Homo sapiens
agtgaaagggattcctcccacgccagatctgcacaacgaggcaagacaggacccacctgtgcgtgcgctggggccatg

SEQ ID NO: 50672 - DNA, 76 bp, Homo sapiens
aagggattcctcccacgccagatctgcacaacgaggcaagacaggacccacctgtgcgtgcgctggggccatgggg

SEQ ID NO: 50673 - DNA, 77 bp, Homo sapiens
tcccacgccagatctgcacaacgaggcaagacaggacccacctgtgcgtgcgctggggccatggggtggccccgccg

SEQ ID NO: 50674 - DNA, 75 bp, Homo sapiens
atctgcacaacgaggcaagacaggacccacctgtgcgtgcgctggggccatggggtggccccgccggggcagcgg

SEQ ID NO: 50675 - DNA, 72 bp, Homo sapiens
acgaggcaagacaggacccacctgtgcgtgcgctggggccatggggtggccccgccggggcagcgggggagc

SEQ ID NO: 50676 - DNA, 75 bp, Homo sapiens
acaggacccacctgtgcgtgcgctggggccatggggtggccccgccggggcagcgggggagctgcctgcagaaga

SEQ ID NO: 50677 - DNA, 75 bp, Homo sapiens
gggccatggggtggccccgccggggcagcgggggagctgcctgcagaagagccagctggcgtgtcgggaaggatc

SEQ ID NO: 50678 - DNA, 78 bp, Homo sapiens
gtggccccgccggggcagcgggggagctgcctgcagaagagccagctggcgtgtcgggaaggatccaggatctgcaaa

SEQ ID NO: 50679 - DNA, 82 bp, Homo sapiens
ctgcagaagagccagctggcgtgtcgggaaggatccaggatctgcaaacacaactgctcaggccttctcacgcgtttccaca

SEQ ID NO: 50680 - DNA, 79 bp, Homo sapiens
aagagccagctggcgtgtcgggaaggatccaggatctgcaaacacaactgctcaggccttctcacgcgtttccacaaca

SEQ ID NO: 50681 - DNA, 76 bp, Homo sapiens
aaggatccaggatctgcaaacacaactgctcaggccttctcacgcgtttccacaacatcccctgggtcagacccac

SEQ ID NO: 50682 - DNA, 75 bp, Homo sapiens
aggatctgcaaacacaactgctcaggccttctcacgcgtttccacaacatcccctgggtcagacccaccaggtac

SEQ ID NO: 50683 - DNA, 71 bp, Homo sapiens
aacacaactgctcaggccttctcacgcgtttccacaacatcccctgggtcagacccaccaggtaccccgta

SEQ ID NO: 50684 - DNA, 68 bp, Homo sapiens
aggccttctcacgcgtttccacaacatcccctgggtcagacccaccaggtaccccgtaggaatttcca

SEQ ID NO: 50685 - DNA, 68 bp, Homo sapiens
tctcacgcgtttccacaacatcccctgggtcagacccaccaggtaccccgtaggaatttccagtttcc

SEQ ID NO: 50686 - DNA, 69 bp, Homo sapiens
ttccacaacatcccctgggtcagacccaccaggtaccccgtaggaatttccagtttcccttgatctaga

SEQ ID NO: 50687 - DNA, 69 bp, Homo sapiens
tgggtcagacccaccaggtaccccgtaggaatttccagtttcccttgatctagatgggattcttataaa

SEQ ID NO: 50688 - DNA, 70 bp, Homo sapiens
taccccgtaggaatttccagtttcccttgatctagatgggattcttataaaaattcaacctcagacataa

SEQ ID NO: 50689 - DNA, 70 bp, Homo sapiens
atttccagtttcccttgatctagatgggattcttataaaaattcaacctcagacataaacaccccatttc

SEQ ID NO: 50690 - DNA, 70 bp, Homo sapiens
gtttcccttgatctagatgggattcttataaaaattcaacctcagacataaacaccccatttctgtaaac

SEQ ID NO: 50691 - DNA, 70 bp, Homo sapiens
tcttataaaaattcaacctcagacataaacaccccatttctgtaaacccaaattatatggtttcttctgc

SEQ ID NO: 50692 - DNA, 70 bp, Homo sapiens
attcaacctcagacataaacaccccatttctgtaaacccaaattatatggtttcttctgcgaaagagtaa

SEQ ID NO: 50693 - DNA, 70 bp, Homo sapiens
agacataaacaccccatttctgtaaacccaaattatatggtttcttctgcgaaagagtaaggtgtgtgct

SEQ ID NO: 50694 - DNA, 72 bp, Homo sapiens
tttttttttttgcaatatgaccccgtctctctgaagtgggacattcggacggatggagccctcagcgtgtct

SEQ ID NO: 50695 - DNA, 77 bp, Homo sapiens
tttttgcaatatgaccccgtctctctgaagtgggacattcggacggatggagccctcagcgtgtcttttcagcagga

SEQ ID NO: 50696 - DNA, 78 bp, Homo sapiens
tatgaccccgtctctctgaagtgggacattcggacggatggagccctcagcgtgtcttttcagcaggagcagaaccga

SEQ ID NO: 50697 - DNA, 79 bp, Homo sapiens
tctgaagtgggacattcggacggatggagccctcagcgtgtcttttcagcaggagcagaaccgatgagagccgccctta

SEQ ID NO: 50698 - DNA, 75 bp, Homo sapiens
acattcggacggatggagccctcagcgtgtcttttcagcaggagcagaaccgatgagagccgcccttaccgttgg

SEQ ID NO: 50699 - DNA, 75 bp, Homo sapiens
acggatggagccctcagcgtgtcttttcagcaggagcagaaccgatgagagccgcccttaccgttggtctccgga

SEQ ID NO: 50700 - DNA, 74 bp, Homo sapiens
cctcagcgtgtcttttcagcaggagcagaaccgatgagagccgcccttaccgttggtctccggatcccccagtc

SEQ ID NO: 50701 - DNA, 73 bp, Homo sapiens
cgtgtcttttcagcaggagcagaaccgatgagagccgcccttaccgttggtctccggatcccccagtcccatc

SEQ ID NO: 50702 - DNA, 68 bp, Homo sapiens
aggagcagaaccgatgagagccgcccttaccgttggtctccggatcccccagtcccatcccgccgttt

SEQ ID NO: 50703 - DNA, 69 bp, Homo sapiens
cgatgagagccgcccttaccgttggtctccggatcccccagtcccatcccgccgttttcggctgtcttc

SEQ ID NO: 50704 - DNA, 66 bp, Homo sapiens
agccgcccttaccgttggtctccggatcccccagtcccatcccgccgttttcggctgtcttcctaa

SEQ ID NO: 50705 - DNA, 66 bp, Homo sapiens
ttaccgttggtctccggatcccccagtcccatcccgccgttttcggctgtcttcctaaccgtcctg

SEQ ID NO: 50706 - DNA, 68 bp, Homo sapiens
atcccgccgttttcggctgtcttcctaaccgtcctgtcttctcttggcgctctttccttccacctttc

SEQ ID NO: 50707 - DNA, 70 bp, Homo sapiens
tttcggctgtcttcctaaccgtcctgtcttctcttggcgctctttccttccacctttcccaagagtcctg

SEQ ID NO: 50708 - DNA, 69 bp, Homo sapiens
taaccgtcctgtcttctcttggcgctctttccttccacctttcccaagagtcctggttgcacgttttaa

SEQ ID NO: 50709 - DNA, 70 bp, Homo sapiens
ctcttggcgctctttccttccacctttcccaagagtcctggttgcacgttttaagtcatatattttcgtc

SEQ ID NO: 50710 - DNA, 68 bp, Homo sapiens
ccttccacctttcccaagagtcctggttgcacgttttaagtcatatattttcgtccccctgaaaatga

SEQ ID NO: 50711 - DNA, 70 bp, Homo sapiens
acctttcccaagagtcctggttgcacgttttaagtcatatattttcgtccccctgaaaatgatggcaagc

SEQ ID NO: 50712 - DNA, 71 bp, Homo sapiens
aagagtcctggttgcacgttttaagtcatatattttcgtccccctgaaaatgatggcaagcccagtttctc

SEQ ID NO: 50713 - DNA, 75 bp, Homo sapiens
gttgcacgttttaagtcatatattttcgtccccctgaaaatgatggcaagcccagtttctcctgagcattcagac

SEQ ID NO: 50714 - DNA, 74 bp, Homo sapiens
ttaagtcatatattttcgtccccctgaaaatgatggcaagcccagtttctcctgagcattcagacccccaggcc

SEQ ID NO: 50715 - DNA, 74 bp, Homo sapiens
tattttcgtccccctgaaaatgatggcaagcccagtttctcctgagcattcagacccccaggccccagcacttg

SEQ ID NO: 50716 - DNA, 75 bp, Homo sapiens
cctgaaaatgatggcaagcccagtttctcctgagcattcagacccccaggccccagcacttggcgttttcaggag

SEQ ID NO: 50717 - DNA, 74 bp, Homo sapiens
gcaagcccagtttctcctgagcattcagacccccaggccccagcacttggcgttttcaggaggccctgttctta

SEQ ID NO: 50718 - DNA, 71 bp, Homo sapiens
ccccaggccccagcacttggcgttttcaggaggccctgttcttagagcccctgacaaaggcagcacttatt

SEQ ID NO: 50719 - DNA, 73 bp, Homo sapiens
cttggcgttttcaggaggccctgttcttagagcccctgacaaaggcagcacttatttcctgggctggtgcgcc

SEQ ID NO: 50720 - DNA, 72 bp, Homo sapiens
tcttagagcccctgacaaaggcagcacttatttcctgggctggtgcgccccaaaacacggccccgacactta

SEQ ID NO: 50721 - DNA, 70 bp, Homo sapiens
aaaggcagcacttatttcctgggctggtgcgccccaaaacacggccccgacacttagtgtggccccaggc

SEQ ID NO: 50722 - DNA, 70 bp, Homo sapiens
ttatttcctgggctggtgcgccccaaaacacggccccgacacttagtgtggccccaggccccagcgagcc

SEQ ID NO: 50723 - DNA, 69 bp, Homo sapiens
cccaaaacacggccccgacacttagtgtggccccaggccccagcgagcctcgccctcccagttttgctc

SEQ ID NO: 50724 - DNA, 75 bp, Homo sapiens
cccgacacttagtgtggccccaggccccagcgagcctcgccctcccagttttgctctgcccagcagtgttggtgc

SEQ ID NO: 50725 - DNA, 79 bp, Homo sapiens
ttagtgtggccccaggccccagcgagcctcgccctcccagttttgctctgcccagcagtgttggtgcccagagatgaca

SEQ ID NO: 50726 - DNA, 78 bp, Homo sapiens
caggccccagcgagcctcgccctcccagttttgctctgcccagcagtgttggtgcccagagatgacaagggccaggga

SEQ ID NO: 50727 - DNA, 78 bp, Homo sapiens
cccagcgagcctcgccctcccagttttgctctgcccagcagtgttggtgcccagagatgacaagggccagggagcctg

SEQ ID NO: 50728 - DNA, 77 bp, Homo sapiens
cctcccagttttgctctgcccagcagtgttggtgcccagagatgacaagggccagggagcctggcccgggtgtgaga

SEQ ID NO: 50729 - DNA, 78 bp, Homo sapiens
agttttgctctgcccagcagtgttggtgcccagagatgacaagggccagggagcctggcccgggtgtgagaattcaga

SEQ ID NO: 50730 - DNA, 80 bp, Homo sapiens
tgttggtgcccagagatgacaagggccagggagcctggcccgggtgtgagaattcagagattctggcctccagctgtcac

SEQ ID NO: 50731 - DNA, 77 bp, Homo sapiens
agatgacaagggccagggagcctggcccgggtgtgagaattcagagattctggcctccagctgtcaccacaccgtaa

SEQ ID NO: 50732 - DNA, 73 bp, Homo sapiens
aagggccagggagcctggcccgggtgtgagaattcagagattctggcctccagctgtcaccacaccgtaacgg

SEQ ID NO: 50733 - DNA, 75 bp, Homo sapiens
agcctggcccgggtgtgagaattcagagattctggcctccagctgtcaccacaccgtaacggggccatgtaactg

SEQ ID NO: 50734 - DNA, 84 bp, Homo sapiens
tgtgagaattcagagattctggcctccagctgtcaccacaccgtaacggggccatgtaactgtgcagcatggacagggatgcga

SEQ ID NO: 50735 - DNA, 80 bp, Homo sapiens
aattcagagattctggcctccagctgtcaccacaccgtaacggggccatgtaactgtgcagcatggacagggatgcgacg

SEQ ID NO: 50736 - DNA, 80 bp, Homo sapiens
attctggcctccagctgtcaccacaccgtaacggggccatgtaactgtgcagcatggacagggatgcgacggggcagctg

SEQ ID NO: 50737 - DNA, 82 bp, Homo sapiens
ccagctgtcaccacaccgtaacggggccatgtaactgtgcagcatggacagggatgcgacggggcagctggctgtgtccatg

SEQ ID NO: 50738 - DNA, 80 bp, Homo sapiens
ccacaccgtaacggggccatgtaactgtgcagcatggacagggatgcgacggggcagctggctgtgtccatggccaggtg

SEQ ID NO: 50739 - DNA, 85 bp, Homo sapiens
ggccatgtaactgtgcagcatggacagggatgcgacggggcagctggctgtgtccatggccaggtggccagggtcagggctgcaa

SEQ ID NO: 50740 - DNA, 84 bp, Homo sapiens
gtaactgtgcagcatggacagggatgcgacggggcagctggctgtgtccatggccaggtggccagggtcagggctgcaagccag

SEQ ID NO: 50741 - DNA, 76 bp, Homo sapiens
agctggctgtgtccatggccaggtggccagggtcagggctgcaagccaggggtccagggcccttccgttcagccca

SEQ ID NO: 50742 - DNA, 75 bp, Homo sapiens
ctgtgtccatggccaggtggccagggtcagggctgcaagccaggggtccagggcccttccgttcagcccaaatgc

SEQ ID NO: 50743 - DNA, 74 bp, Homo sapiens
aggtggccagggtcagggctgcaagccaggggtccagggcccttccgttcagcccaaatgctgccccaatgcta

SEQ ID NO: 50744 - DNA, 74 bp, Homo sapiens
ggtcagggctgcaagccaggggtccagggcccttccgttcagcccaaatgctgccccaatgctaactccttgga

SEQ ID NO: 50745 - DNA, 74 bp, Homo sapiens
tgcaagccaggggtccagggcccttccgttcagcccaaatgctgccccaatgctaactccttggattgtcaacc

SEQ ID NO: 50746 - DNA, 71 bp, Homo sapiens
ggtccagggcccttccgttcagcccaaatgctgccccaatgctaactccttggattgtcaacccccatccc

SEQ ID NO: 50747 - DNA, 71 bp, Homo sapiens
ccttccgttcagcccaaatgctgccccaatgctaactccttggattgtcaacccccatcccccaaatggaa

SEQ ID NO: 50748 - DNA, 72 bp, Homo sapiens
ttcagcccaaatgctgccccaatgctaactccttggattgtcaacccccatcccccaaatggaaattccgaa

SEQ ID NO: 50749 - DNA, 70 bp, Homo sapiens
aaatgctgccccaatgctaactccttggattgtcaacccccatcccccaaatggaaattccgaaggaggc

SEQ ID NO: 50750 - DNA, 69 bp, Homo sapiens
ctccttggattgtcaacccccatcccccaaatggaaattccgaaggaggcctcctcgcacctgccctcc

SEQ ID NO: 50751 - DNA, 70 bp, Homo sapiens
aacccccatcccccaaatggaaattccgaaggaggcctcctcgcacctgccctccgctgctcctcagacc

SEQ ID NO: 50752 - DNA, 73 bp, Homo sapiens
cccaaatggaaattccgaaggaggcctcctcgcacctgccctccgctgctcctcagaccccagcccccagcga

SEQ ID NO: 50753 - DNA, 74 bp, Homo sapiens
atggaaattccgaaggaggcctcctcgcacctgccctccgctgctcctcagaccccagcccccagcgagccgac

SEQ ID NO: 50754 - DNA, 76 bp, Homo sapiens
tcctcgcacctgccctccgctgctcctcagaccccagcccccagcgagccgacgtccccacccgttcctgctctca

SEQ ID NO: 50755 - DNA, 73 bp, Homo sapiens
ctccgctgctcctcagaccccagcccccagcgagccgacgtccccacccgttcctgctctcatccccaggttg

SEQ ID NO: 50756 - DNA, 72 bp, Homo sapiens
tcctcagaccccagcccccagcgagccgacgtccccacccgttcctgctctcatccccaggttgggcacgtg

SEQ ID NO: 50757 - DNA, 70 bp, Homo sapiens
cccagcgagccgacgtccccacccgttcctgctctcatccccaggttgggcacgtggggttcctcctctg

SEQ ID NO: 50758 - DNA, 71 bp, Homo sapiens
acgtccccacccgttcctgctctcatccccaggttgggcacgtggggttcctcctctgtgggcctggcaga

SEQ ID NO: 50759 - DNA, 73 bp, Homo sapiens
acccgttcctgctctcatccccaggttgggcacgtggggttcctcctctgtgggcctggcagacccttcatga

SEQ ID NO: 50760 - DNA, 74 bp, Homo sapiens
tcatccccaggttgggcacgtggggttcctcctctgtgggcctggcagacccttcatgagtgggacccaagata

SEQ ID NO: 50761 - DNA, 74 bp, Homo sapiens
acgtggggttcctcctctgtgggcctggcagacccttcatgagtgggacccaagatatcactgacttcaaccca

SEQ ID NO: 50762 - DNA, 78 bp, Homo sapiens
tcctcctctgtgggcctggcagacccttcatgagtgggacccaagatatcactgacttcaacccagaggatcgagccc

SEQ ID NO: 50763 - DNA, 79 bp, Homo sapiens
tgggcctggcagacccttcatgagtgggacccaagatatcactgacttcaacccagaggatcgagcccctgcaccctgc

SEQ ID NO: 50764 - DNA, 76 bp, Homo sapiens
agacccttcatgagtgggacccaagatatcactgacttcaacccagaggatcgagcccctgcaccctgcctggggc

SEQ ID NO: 50765 - DNA, 73 bp, Homo sapiens
agtgggacccaagatatcactgacttcaacccagaggatcgagcccctgcaccctgcctggggccctggggtg

SEQ ID NO: 50766 - DNA, 74 bp, Homo sapiens
actgacttcaacccagaggatcgagcccctgcaccctgcctggggccctggggtgtggagcagtggctggggtg

SEQ ID NO: 50767 - DNA, 73 bp, Homo sapiens
acccagaggatcgagcccctgcaccctgcctggggccctggggtgtggagcagtggctggggtgggcgtggtg

SEQ ID NO: 50768 - DNA, 76 bp, Homo sapiens
tcgagcccctgcaccctgcctggggccctggggtgtggagcagtggctggggtgggcgtggtgtggcctgagagac

SEQ ID NO: 50769 - DNA, 76 bp, Homo sapiens
accctgcctggggccctggggtgtggagcagtggctggggtgggcgtggtgtggcctgagagactgcccagctgga

SEQ ID NO: 50770 - DNA, 75 bp, Homo sapiens
ccctggggtgtggagcagtggctggggtgggcgtggtgtggcctgagagactgcccagctggagaggccttcctt

SEQ ID NO: 50771 - DNA, 81 bp, Homo sapiens
tgggcgtggtgtggcctgagagactgcccagctggagaggccttcctttacaaggccacgcgtgcagctgtcccatccaga

SEQ ID NO: 50772 - DNA, 78 bp, Homo sapiens
ggcctgagagactgcccagctggagaggccttcctttacaaggccacgcgtgcagctgtcccatccagaccccgactg

SEQ ID NO: 50773 - DNA, 75 bp, Homo sapiens
tggagaggccttcctttacaaggccacgcgtgcagctgtcccatccagaccccgactggccaagacctccacgtc

SEQ ID NO: 50774 - DNA, 74 bp, Homo sapiens
ttcctttacaaggccacgcgtgcagctgtcccatccagaccccgactggccaagacctccacgtccccagagtc

SEQ ID NO: 50775 - DNA, 76 bp, Homo sapiens
tacaaggccacgcgtgcagctgtcccatccagaccccgactggccaagacctccacgtccccagagtccagccctg

SEQ ID NO: 50776 - DNA, 74 bp, Homo sapiens
cgtgcagctgtcccatccagaccccgactggccaagacctccacgtccccagagtccagccctggaaattccaa

SEQ ID NO: 50777 - DNA, 71 bp, Homo sapiens
tgtcccatccagaccccgactggccaagacctccacgtccccagagtccagccctggaaattccaagggcc

SEQ ID NO: 50778 - DNA, 71 bp, Homo sapiens
cccgactggccaagacctccacgtccccagagtccagccctggaaattccaagggccctggcgtcctctgc

SEQ ID NO: 50779 - DNA, 71 bp, Homo sapiens
tggccaagacctccacgtccccagagtccagccctggaaattccaagggccctggcgtcctctgccttccc

SEQ ID NO: 50780 - DNA, 69 bp, Homo sapiens
ctccacgtccccagagtccagccctggaaattccaagggccctggcgtcctctgccttccccgcttccc

SEQ ID NO: 50781 - DNA, 72 bp, Homo sapiens
agtccagccctggaaattccaagggccctggcgtcctctgccttccccgcttccccatgagcgtctgcaaaa

SEQ ID NO: 50782 - DNA, 77 bp, Homo sapiens
ttccaagggccctggcgtcctctgccttccccgcttccccatgagcgtctgcaaaacacttgcctgaatacatatca

SEQ ID NO: 50783 - DNA, 76 bp, Homo sapiens
cgtcctctgccttccccgcttccccatgagcgtctgcaaaacacttgcctgaatacatatcacgtattttagactc

SEQ ID NO: 50784 - DNA, 76 bp, Homo sapiens
cttccccgcttccccatgagcgtctgcaaaacacttgcctgaatacatatcacgtattttagactcgaagcctcaa

SEQ ID NO: 50785 - DNA, 79 bp, Homo sapiens
ttccccatgagcgtctgcaaaacacttgcctgaatacatatcacgtattttagactcgaagcctcaaagcactggattg

SEQ ID NO: 50786 - DNA, 79 bp, Homo sapiens
atgagcgtctgcaaaacacttgcctgaatacatatcacgtattttagactcgaagcctcaaagcactggattgtggtcc

SEQ ID NO: 50787 - DNA, 75 bp, Homo sapiens
tgaatacatatcacgtattttagactcgaagcctcaaagcactggattgtggtcccctgccccctctgtcccgtc

SEQ ID NO: 50788 - DNA, 71 bp, Homo sapiens
atatcacgtattttagactcgaagcctcaaagcactggattgtggtcccctgccccctctgtcccgtcccc

SEQ ID NO: 50789 - DNA, 73 bp, Homo sapiens
ccctctgtcccgtccccctgcccaagtgactgaaacctactgagctatattcactgtgctgtcctagggggag

SEQ ID NO: 50790 - DNA, 76 bp, Homo sapiens
tgtcccgtccccctgcccaagtgactgaaacctactgagctatattcactgtgctgtcctagggggagggagagca

SEQ ID NO: 50791 - DNA, 81 bp, Homo sapiens
cccaagtgactgaaacctactgagctatattcactgtgctgtcctagggggagggagagcagagctcgcccctgcactgca

SEQ ID NO: 50792 - DNA, 80 bp, Homo sapiens
cctactgagctatattcactgtgctgtcctagggggagggagagcagagctcgcccctgcactgcagccttgtgggggag

SEQ ID NO: 50793 - DNA, 80 bp, Homo sapiens
tatattcactgtgctgtcctagggggagggagagcagagctcgcccctgcactgcagccttgtgggggagggcaaggctc

SEQ ID NO: 50794 - DNA, 78 bp, Homo sapiens
gtgctgtcctagggggagggagagcagagctcgcccctgcactgcagccttgtgggggagggcaaggctctcctccca

SEQ ID NO: 50795 - DNA, 79 bp, Homo sapiens
gagggagagcagagctcgcccctgcactgcagccttgtgggggagggcaaggctctcctcccagccagggacgccagga

SEQ ID NO: 50796 - DNA, 80 bp, Homo sapiens
agagcagagctcgcccctgcactgcagccttgtgggggagggcaaggctctcctcccagccagggacgccaggacatagc

SEQ ID NO: 50797 - DNA, 80 bp, Homo sapiens
cctgcactgcagccttgtgggggagggcaaggctctcctcccagccagggacgccaggacatagctgctcctggtcagtg

SEQ ID NO: 50798 - DNA, 77 bp, Homo sapiens
agccttgtgggggagggcaaggctctcctcccagccagggacgccaggacatagctgctcctggtcagtggaggtca

SEQ ID NO: 50799 - DNA, 78 bp, Homo sapiens
gggagggcaaggctctcctcccagccagggacgccaggacatagctgctcctggtcagtggaggtcagccgggtatca

SEQ ID NO: 50800 - DNA, 77 bp, Homo sapiens
aaggctctcctcccagccagggacgccaggacatagctgctcctggtcagtggaggtcagccgggtatcaaaagcca

SEQ ID NO: 50801 - DNA, 79 bp, Homo sapiens
tcccagccagggacgccaggacatagctgctcctggtcagtggaggtcagccgggtatcaaaagccatgaaactgtgtc

SEQ ID NO: 50802 - DNA, 84 bp, Homo sapiens
acatagctgctcctggtcagtggaggtcagccgggtatcaaaagccatgaaactgtgtctctgtagcaatgagtgatactgtga

SEQ ID NO: 50803 - DNA, 78 bp, Homo sapiens
agtggaggtcagccgggtatcaaaagccatgaaactgtgtctctgtagcaatgagtgatactgtgacaaaaccatcct

SEQ ID NO: 50804 - DNA, 80 bp, Homo sapiens
gggtatcaaaagccatgaaactgtgtctctgtagcaatgagtgatactgtgacaaaaccatccttgcattcttcctagaa

SEQ ID NO: 50805 - DNA, 79 bp, Homo sapiens
aaaagccatgaaactgtgtctctgtagcaatgagtgatactgtgacaaaaccatccttgcattcttcctagaagagttc

SEQ ID NO: 50806 - DNA, 79 bp, Homo sapiens
aaactgtgtctctgtagcaatgagtgatactgtgacaaaaccatccttgcattcttcctagaagagttcctctgctcct

SEQ ID NO: 50807 - DNA, 79 bp, Homo sapiens
tgtagcaatgagtgatactgtgacaaaaccatccttgcattcttcctagaagagttcctctgctccttccattccattt

SEQ ID NO: 50808 - DNA, 76 bp, Homo sapiens
aatgagtgatactgtgacaaaaccatccttgcattcttcctagaagagttcctctgctccttccattccatttttg

SEQ ID NO: 50809 - DNA, 73 bp, Homo sapiens
actgtgacaaaaccatccttgcattcttcctagaagagttcctctgctccttccattccatttttgtgtttgt

SEQ ID NO: 50810 - DNA, 71 bp, Homo sapiens
accatccttgcattcttcctagaagagttcctctgctccttccattccatttttgtgtttgttttgttctt

SEQ ID NO: 50811 - DNA, 72 bp, Homo sapiens
aataaataaaaggcagcttgagtttccaaacgtgtgattcacttgtgaacaaaagtcattctaacaattgcc

SEQ ID NO: 50812 - DNA, 78 bp, Homo sapiens
ttgagtttccaaacgtgtgattcacttgtgaacaaaagtcattctaacaattgccttcagcgtcacgtgcattgccac

SEQ ID NO: 50813 - DNA, 78 bp, Homo sapiens
aaacgtgtgattcacttgtgaacaaaagtcattctaacaattgccttcagcgtcacgtgcattgccactgcgctttcg

SEQ ID NO: 50814 - DNA, 79 bp, Homo sapiens
attcacttgtgaacaaaagtcattctaacaattgccttcagcgtcacgtgcattgccactgcgctttcggcacgaggga

SEQ ID NO: 50815 - DNA, 80 bp, Homo sapiens
aacaaaagtcattctaacaattgccttcagcgtcacgtgcattgccactgcgctttcggcacgagggatgctgagccctg

SEQ ID NO: 50816 - DNA, 83 bp, Homo sapiens
tctaacaattgccttcagcgtcacgtgcattgccactgcgctttcggcacgagggatgctgagccctggtgtcagagtcgtaa

SEQ ID NO: 50817 - DNA, 81 bp, Homo sapiens
aattgccttcagcgtcacgtgcattgccactgcgctttcggcacgagggatgctgagccctggtgtcagagtcgtaattta

SEQ ID NO: 50818 - DNA, 81 bp, Homo sapiens
attgccttcagcgtcacgtgcattgccactgcgctttcggcacgagggatgctgagccctggtgtcagagtcgtaatttaa

SEQ ID NO: 50819 - DNA, 82 bp, Homo sapiens
tcacgtgcattgccactgcgctttcggcacgagggatgctgagccctggtgtcagagtcgtaatttaaagcgtgtgtgtata

SEQ ID NO: 50820 - DNA, 80 bp, Homo sapiens
acgtgcattgccactgcgctttcggcacgagggatgctgagccctggtgtcagagtcgtaatttaaagcgtgtgtgtata

SEQ ID NO: 50821 - DNA, 79 bp, Homo sapiens
attgccactgcgctttcggcacgagggatgctgagccctggtgtcagagtcgtaatttaaagcgtgtgtgtatatggac

SEQ ID NO: 50822 - DNA, 77 bp, Homo sapiens
actgcgctttcggcacgagggatgctgagccctggtgtcagagtcgtaatttaaagcgtgtgtgtatatggactttg

SEQ ID NO: 50823 - DNA, 75 bp, Homo sapiens
tttcggcacgagggatgctgagccctggtgtcagagtcgtaatttaaagcgtgtgtgtatatggactttgtccct

SEQ ID NO: 50824 - DNA, 76 bp, Homo sapiens
ttcggcacgagggatgctgagccctggtgtcagagtcgtaatttaaagcgtgtgtgtatatggactttgtccctta

SEQ ID NO: 50825 - DNA, 73 bp, Homo sapiens
acgagggatgctgagccctggtgtcagagtcgtaatttaaagcgtgtgtgtatatggactttgtcccttaagg

SEQ ID NO: 50826 - DNA, 75 bp, Homo sapiens
tgctgagccctggtgtcagagtcgtaatttaaagcgtgtgtgtatatggactttgtcccttaaggtcgatataaa

SEQ ID NO: 50827 - DNA, 72 bp, Homo sapiens
ctggtgtcagagtcgtaatttaaagcgtgtgtgtatatggactttgtcccttaaggtcgatataaagaatcc

SEQ ID NO: 50828 - DNA, 73 bp, Homo sapiens
agtcgtaatttaaagcgtgtgtgtatatggactttgtcccttaaggtcgatataaagaatcctcgcagaatca

SEQ ID NO: 50829 - DNA, 73 bp, Homo sapiens
aatttaaagcgtgtgtgtatatggactttgtcccttaaggtcgatataaagaatcctcgcagaatcacagacc

SEQ ID NO: 50830 - DNA, 75 bp, Homo sapiens
tgtatatggactttgtcccttaaggtcgatataaagaatcctcgcagaatcacagacctgtgccgcccgccacct

SEQ ID NO: 50831 - DNA, 74 bp, Homo sapiens
actttgtcccttaaggtcgatataaagaatcctcgcagaatcacagacctgtgccgcccgccaccttctgccat

SEQ ID NO: 50832 - DNA, 77 bp, Homo sapiens
cttaaggtcgatataaagaatcctcgcagaatcacagacctgtgccgcccgccaccttctgccattgttacattaca

SEQ ID NO: 50833 - DNA, 74 bp, Homo sapiens
aatcctcgcagaatcacagacctgtgccgcccgccaccttctgccattgttacattacagatttggtttagttt

SEQ ID NO: 50834 - DNA, 72 bp, Homo sapiens
agaatcacagacctgtgccgcccgccaccttctgccattgttacattacagatttggtttagttttgttttg

SEQ ID NO: 50835 - DNA, 70 bp, Homo sapiens
tgttttttcttttagaactgtatagtattgaaaaagaaatcaaatgtaaatgtctggttttcatataatg

SEQ ID NO: 50836 - DNA, 70 bp, Homo sapiens
tttcttttagaactgtatagtattgaaaaagaaatcaaatgtaaatgtctggttttcatataatgtttaa

SEQ ID NO: 50837 - DNA, 72 bp, Homo sapiens
ctgtatagtattgaaaaagaaatcaaatgtaaatgtctggttttcatataatgtttaaaaagaccattgaga

SEQ ID NO: 50838 - DNA, 71 bp, Homo sapiens
gaaaaagaaatcaaatgtaaatgtctggttttcatataatgtttaaaaagaccattgagaaggaggctggc

SEQ ID NO: 50839 - DNA, 72 bp, Homo sapiens
aaatcaaatgtaaatgtctggttttcatataatgtttaaaaagaccattgagaaggaggctggcgctcgccc

SEQ ID NO: 50840 - DNA, 72 bp, Homo sapiens
gtaaatgtctggttttcatataatgtttaaaaagaccattgagaaggaggctggcgctcgccccatgtcccc

SEQ ID NO: 50841 - DNA, 72 bp, Homo sapiens
tttcatataatgtttaaaaagaccattgagaaggaggctggcgctcgccccatgtcccccttgattgtaaat

SEQ ID NO: 50842 - DNA, 72 bp, Homo sapiens
atgtttaaaaagaccattgagaaggaggctggcgctcgccccatgtcccccttgattgtaaattgcttctgt

SEQ ID NO: 50843 - DNA, 74 bp, Homo sapiens
aaagaccattgagaaggaggctggcgctcgccccatgtcccccttgattgtaaattgcttctgttctgtttata

SEQ ID NO: 50844 - DNA, 76 bp, Homo sapiens
cgctcgccccatgtcccccttgattgtaaattgcttctgttctgtttataagtaaactgtgcatgactcctgctta

SEQ ID NO: 50845 - DNA, 76 bp, Homo sapiens
atgtcccccttgattgtaaattgcttctgttctgtttataagtaaactgtgcatgactcctgcttagcggtcatta

SEQ ID NO: 50846 - DNA, 79 bp, Homo sapiens
ttgattgtaaattgcttctgttctgtttataagtaaactgtgcatgactcctgcttagcggtcattatcgtgtctgttg

SEQ ID NO: 50847 - DNA, 77 bp, Homo sapiens
tgcttctgttctgtttataagtaaactgtgcatgactcctgcttagcggtcattatcgtgtctgttggtgaaatttt

SEQ ID NO: 50848 - DNA, 76 bp, Homo sapiens
tgttctgtttataagtaaactgtgcatgactcctgcttagcggtcattatcgtgtctgttggtgaaatttttatta

SEQ ID NO: 50849 - DNA, 74 bp, Homo sapiens
tataagtaaactgtgcatgactcctgcttagcggtcattatcgtgtctgttggtgaaatttttattaaaaggaa

SEQ ID NO: 50850 - DNA, 75 bp, Homo sapiens
ctgtgcatgactcctgcttagcggtcattatcgtgtctgttggtgaaatttttattaaaaggaaaattctgtaga

SEQ ID NO: 50851 - DNA, 72 bp, Homo sapiens
cctgcttagcggtcattatcgtgtctgttggtgaaatttttattaaaaggaaaattctgtagatgcacttat

SEQ ID NO: 50852 - DNA, 75 bp, Homo sapiens
gcggtcattatcgtgtctgttggtgaaatttttattaaaaggaaaattctgtagatgcacttattgaatatgtga

SEQ ID NO: 50853 - DNA, 74 bp, Homo sapiens
tctgttggtgaaatttttattaaaaggaaaattctgtagatgcacttattgaatatgtgattaggatctacgtc

SEQ ID NO: 50854 - DNA, 74 bp, Homo sapiens
ggtgaaatttttattaaaaggaaaattctgtagatgcacttattgaatatgtgattaggatctacgtctgagac

SEQ ID NO: 50855 - DNA, 76 bp, Homo sapiens
attaaaaggaaaattctgtagatgcacttattgaatatgtgattaggatctacgtctgagactaggagtcctgaac

SEQ ID NO: 50856 - DNA, 80 bp, Homo sapiens
aaaattctgtagatgcacttattgaatatgtgattaggatctacgtctgagactaggagtcctgaactgctgacgcgaaa

SEQ ID NO: 50857 - DNA, 83 bp, Homo sapiens
tagatgcacttattgaatatgtgattaggatctacgtctgagactaggagtcctgaactgctgacgcgaaagaggcgcagttc

SEQ ID NO: 50858 - DNA, 79 bp, Homo sapiens
gaatatgtgattaggatctacgtctgagactaggagtcctgaactgctgacgcgaaagaggcgcagttcccaattaata

SEQ ID NO: 50859 - DNA, 75 bp, Homo sapiens
attaggatctacgtctgagactaggagtcctgaactgctgacgcgaaagaggcgcagttcccaattaatacggaa

SEQ ID NO: 50860 - DNA, 76 bp, Homo sapiens
atctacgtctgagactaggagtcctgaactgctgacgcgaaagaggcgcagttcccaattaatacggaaatcgctg

SEQ ID NO: 50861 - DNA, 75 bp, Homo sapiens
gtcctgaactgctgacgcgaaagaggcgcagttcccaattaatacggaaatcgctgtgggagaagaatgaaataa

SEQ ID NO: 50862 - DNA, 73 bp, Homo sapiens
cgcgaaagaggcgcagttcccaattaatacggaaatcgctgtgggagaagaatgaaataagacgtgaagtgta

SEQ ID NO: 50863 - DNA, 75 bp, Homo sapiens
gcgcagttcccaattaatacggaaatcgctgtgggagaagaatgaaataagacgtgaagtgtaggaaatcatgaa

SEQ ID NO: 50864 - DNA, 72 bp, Homo sapiens
gttcccaattaatacggaaatcgctgtgggagaagaatgaaataagacgtgaagtgtaggaaatcatgaaaa

SEQ ID NO: 50865 - DNA, 71 bp, Homo sapiens
aatacggaaatcgctgtgggagaagaatgaaataagacgtgaagtgtaggaaatcatgaaaagaacaattt

SEQ ID NO: 50866 - DNA, 78 bp, Homo sapiens
tgtgggagaagaatgaaataagacgtgaagtgtaggaaatcatgaaaagaacaattttgcaaattgcattctgatgct

SEQ ID NO: 50867 - DNA, 81 bp, Homo sapiens
gaatgaaataagacgtgaagtgtaggaaatcatgaaaagaacaattttgcaaattgcattctgatgcttgtgatgaacaca

SEQ ID NO: 50868 - DNA, 79 bp, Homo sapiens
aataagacgtgaagtgtaggaaatcatgaaaagaacaattttgcaaattgcattctgatgcttgtgatgaacacaaatg

SEQ ID NO: 50869 - DNA, 82 bp, Homo sapiens
tgtaggaaatcatgaaaagaacaattttgcaaattgcattctgatgcttgtgatgaacacaaatgtacttgtgtagagacat

SEQ ID NO: 50870 - DNA, 80 bp, Homo sapiens
catgaaaagaacaattttgcaaattgcattctgatgcttgtgatgaacacaaatgtacttgtgtagagacatttccttaa

SEQ ID NO: 50871 - DNA, 79 bp, Homo sapiens
aagaacaattttgcaaattgcattctgatgcttgtgatgaacacaaatgtacttgtgtagagacatttccttaagagaa

SEQ ID NO: 50872 - DNA, 81 bp, Homo sapiens
ttgcaaattgcattctgatgcttgtgatgaacacaaatgtacttgtgtagagacatttccttaagagaaagcctaggagaa

SEQ ID NO: 50873 - DNA, 77 bp, Homo sapiens
attctgatgcttgtgatgaacacaaatgtacttgtgtagagacatttccttaagagaaagcctaggagaagccgatt

SEQ ID NO: 50874 - DNA, 73 bp, Homo sapiens
gatgaacacaaatgtacttgtgtagagacatttccttaagagaaagcctaggagaagccgatttggaggttaa

SEQ ID NO: 50875 - DNA, 73 bp, Homo sapiens
aatgtacttgtgtagagacatttccttaagagaaagcctaggagaagccgatttggaggttaatgctgtagaa

SEQ ID NO: 50876 - DNA, 75 bp, Homo sapiens
tgtagagacatttccttaagagaaagcctaggagaagccgatttggaggttaatgctgtagaataggactgtata

SEQ ID NO: 50877 - DNA, 71 bp, Homo sapiens
atttccttaagagaaagcctaggagaagccgatttggaggttaatgctgtagaataggactgtataccaaa

SEQ ID NO: 50878 - DNA, 73 bp, Homo sapiens
taagagaaagcctaggagaagccgatttggaggttaatgctgtagaataggactgtataccaaatgtaatctt

SEQ ID NO: 50879 - DNA, 77 bp, Homo sapiens
taggagaagccgatttggaggttaatgctgtagaataggactgtataccaaatgtaatctttccaatgctccaatga

SEQ ID NO: 50880 - DNA, 75 bp, Homo sapiens
ccgatttggaggttaatgctgtagaataggactgtataccaaatgtaatctttccaatgctccaatgaatttata

SEQ ID NO: 50881 - DNA, 82 bp, Homo sapiens
ggttaatgctgtagaataggactgtataccaaatgtaatctttccaatgctccaatgaatttatacatgagattgatatgca

SEQ ID NO: 50882 - DNA, 81 bp, Homo sapiens
ggactgtataccaaatgtaatctttccaatgctccaatgaatttatacatgagattgatatgcaataaatctgtgtgcttt

SEQ ID NO: 50883 - DNA, 80 bp, Homo sapiens
aatgtaatctttccaatgctccaatgaatttatacatgagattgatatgcaataaatctgtgtgcttttctaagcctcgg

SEQ ID NO: 50884 - DNA, 81 bp, Homo sapiens
aatgaatttatacatgagattgatatgcaataaatctgtgtgcttttctaagcctcggtgcccgcgagcttcattgaggga

SEQ ID NO: 50885 - DNA, 81 bp, Homo sapiens
atttatacatgagattgatatgcaataaatctgtgtgcttttctaagcctcggtgcccgcgagcttcattgagggagaggc

SEQ ID NO: 50886 - DNA, 71 bp, Homo sapiens
acacccttctctggagagcctgtgcacgtaggttgaaggataaaatagggctgaatggtatttggtttatt

SEQ ID NO: 50887 - DNA, 71 bp, Homo sapiens
agagcctgtgcacgtaggttgaaggataaaatagggctgaatggtatttggtttatttgtatttatccaag

SEQ ID NO: 50888 - DNA, 69 bp, Homo sapiens
acgtaggttgaaggataaaatagggctgaatggtatttggtttatttgtatttatccaagtcagtggcc

SEQ ID NO: 50889 - DNA, 72 bp, Homo sapiens
ttgaaggataaaatagggctgaatggtatttggtttatttgtatttatccaagtcagtggcccaggcaggaa

SEQ ID NO: 50890 - DNA, 71 bp, Homo sapiens
aaatagggctgaatggtatttggtttatttgtatttatccaagtcagtggcccaggcaggaacgtaatata

SEQ ID NO: 50891 - DNA, 72 bp, Homo sapiens
tggtatttggtttatttgtatttatccaagtcagtggcccaggcaggaacgtaatatatgacaagggacatt

SEQ ID NO: 50892 - DNA, 72 bp, Homo sapiens
gtttatttgtatttatccaagtcagtggcccaggcaggaacgtaatatatgacaagggacatttttgaaata

SEQ ID NO: 50893 - DNA, 73 bp, Homo sapiens
ttgtatttatccaagtcagtggcccaggcaggaacgtaatatatgacaagggacatttttgaaatagctgttt

SEQ ID NO: 50894 - DNA, 77 bp, Homo sapiens
tcagtggcccaggcaggaacgtaatatatgacaagggacatttttgaaatagctgtttttgaattatgctcatgaaa

SEQ ID NO: 50895 - DNA, 76 bp, Homo sapiens
aggcaggaacgtaatatatgacaagggacatttttgaaatagctgtttttgaattatgctcatgaaatacacactg

SEQ ID NO: 50896 - DNA, 78 bp, Homo sapiens
ggaacgtaatatatgacaagggacatttttgaaatagctgtttttgaattatgctcatgaaatacacactgtgctatg

SEQ ID NO: 50897 - DNA, 80 bp, Homo sapiens
atatgacaagggacatttttgaaatagctgtttttgaattatgctcatgaaatacacactgtgctatggaggacatgtgg

SEQ ID NO: 50898 - DNA, 79 bp, Homo sapiens
atttttgaaatagctgtttttgaattatgctcatgaaatacacactgtgctatggaggacatgtgggaaagctacactc

SEQ ID NO: 50899 - DNA, 84 bp, Homo sapiens
tagctgtttttgaattatgctcatgaaatacacactgtgctatggaggacatgtgggaaagctacactctgaccgcatgactaa

SEQ ID NO: 50900 - DNA, 81 bp, Homo sapiens
ttttgaattatgctcatgaaatacacactgtgctatggaggacatgtgggaaagctacactctgaccgcatgactaatttt

SEQ ID NO: 50901 - DNA, 80 bp, Homo sapiens
atgctcatgaaatacacactgtgctatggaggacatgtgggaaagctacactctgaccgcatgactaatttttaaagcct

SEQ ID NO: 50902 - DNA, 80 bp, Homo sapiens
aatacacactgtgctatggaggacatgtgggaaagctacactctgaccgcatgactaatttttaaagccttgcatagaga

SEQ ID NO: 50903 - DNA, 78 bp, Homo sapiens
gtgctatggaggacatgtgggaaagctacactctgaccgcatgactaatttttaaagccttgcatagagagaattccc

SEQ ID NO: 50904 - DNA, 74 bp, Homo sapiens
acatgtgggaaagctacactctgaccgcatgactaatttttaaagccttgcatagagagaattccccctaagaa

SEQ ID NO: 50905 - DNA, 74 bp, Homo sapiens
aaagctacactctgaccgcatgactaatttttaaagccttgcatagagagaattccccctaagaacacagctgg

SEQ ID NO: 50906 - DNA, 75 bp, Homo sapiens
tctgaccgcatgactaatttttaaagccttgcatagagagaattccccctaagaacacagctgggctattccttc

SEQ ID NO: 50907 - DNA, 73 bp, Homo sapiens
taatttttaaagccttgcatagagagaattccccctaagaacacagctgggctattccttcgtgaactgaatg

SEQ ID NO: 50908 - DNA, 75 bp, Homo sapiens
tttaaagccttgcatagagagaattccccctaagaacacagctgggctattccttcgtgaactgaatgtgtcaat

SEQ ID NO: 50909 - DNA, 76 bp, Homo sapiens
tagagagaattccccctaagaacacagctgggctattccttcgtgaactgaatgtgtcaattgtgaattgaactaa

SEQ ID NO: 50910 - DNA, 74 bp, Homo sapiens
tccccctaagaacacagctgggctattccttcgtgaactgaatgtgtcaattgtgaattgaactaaggtgaaat

SEQ ID NO: 50911 - DNA, 74 bp, Homo sapiens
aacacagctgggctattccttcgtgaactgaatgtgtcaattgtgaattgaactaaggtgaaattttactccaa

SEQ ID NO: 50912 - DNA, 76 bp, Homo sapiens
gctattccttcgtgaactgaatgtgtcaattgtgaattgaactaaggtgaaattttactccaatatggcaaatgaa

SEQ ID NO: 50913 - DNA, 76 bp, Homo sapiens
tccttcgtgaactgaatgtgtcaattgtgaattgaactaaggtgaaattttactccaatatggcaaatgaactgag

SEQ ID NO: 50914 - DNA, 73 bp, Homo sapiens
aatgtgtcaattgtgaattgaactaaggtgaaattttactccaatatggcaaatgaactgaggagcgtaccct

SEQ ID NO: 50915 - DNA, 73 bp, Homo sapiens
aattgtgaattgaactaaggtgaaattttactccaatatggcaaatgaactgaggagcgtacccttcagctaa

SEQ ID NO: 50916 - DNA, 72 bp, Homo sapiens
aactaaggtgaaattttactccaatatggcaaatgaactgaggagcgtacccttcagctaaggtattatgta

SEQ ID NO: 50917 - DNA, 76 bp, Homo sapiens
caatatggcaaatgaactgaggagcgtacccttcagctaaggtattatgtagtagttcatacaccaagtactatta

SEQ ID NO: 50918 - DNA, 72 bp, Homo sapiens
aaatgaactgaggagcgtacccttcagctaaggtattatgtagtagttcatacaccaagtactattatttta

SEQ ID NO: 50919 - DNA, 70 bp, Homo sapiens
cccttcagctaaggtattatgtagtagttcatacaccaagtactattattttattaactttaagaacatg

SEQ ID NO: 50920 - DNA, 70 bp, Homo sapiens
gctaaggtattatgtagtagttcatacaccaagtactattattttattaactttaagaacatgttttaca

SEQ ID NO: 50921 - DNA, 70 bp, Homo sapiens
tgtagtagttcatacaccaagtactattattttattaactttaagaacatgttttacataaaaacaggca

SEQ ID NO: 50922 - DNA, 70 bp, Homo sapiens
ttcatacaccaagtactattattttattaactttaagaacatgttttacataaaaacaggcaacatcaaa

SEQ ID NO: 50923 - DNA, 70 bp, Homo sapiens
ctattattttattaactttaagaacatgttttacataaaaacaggcaacatcaaaaaagctcagttgata

SEQ ID NO: 50924 - DNA, 71 bp, Homo sapiens
attaactttaagaacatgttttacataaaaacaggcaacatcaaaaaagctcagttgataaatgaacataa

SEQ ID NO: 50925 - DNA, 80 bp, Homo sapiens
ttacataaaaacaggcaacatcaaaaaagctcagttgataaatgaacataatatatcacagatgatttcattccacatta

SEQ ID NO: 50926 - DNA, 82 bp, Homo sapiens
caacatcaaaaaagctcagttgataaatgaacataatatatcacagatgatttcattccacattaacctacatgtatcagct

SEQ ID NO: 50927 - DNA, 79 bp, Homo sapiens
gataaatgaacataatatatcacagatgatttcattccacattaacctacatgtatcagcttaaactgaaggattaggg

SEQ ID NO: 50928 - DNA, 76 bp, Homo sapiens
cataatatatcacagatgatttcattccacattaacctacatgtatcagcttaaactgaaggattagggggaaaaa

SEQ ID NO: 50929 - DNA, 74 bp, Homo sapiens
agatgatttcattccacattaacctacatgtatcagcttaaactgaaggattagggggaaaaattggatctcat

SEQ ID NO: 50930 - DNA, 73 bp, Homo sapiens
tttcattccacattaacctacatgtatcagcttaaactgaaggattagggggaaaaattggatctcattccac

SEQ ID NO: 50931 - DNA, 70 bp, Homo sapiens
cattaacctacatgtatcagcttaaactgaaggattagggggaaaaattggatctcattccacctttaat

SEQ ID NO: 50932 - DNA, 70 bp, Homo sapiens
atgtatcagcttaaactgaaggattagggggaaaaattggatctcattccacctttaattaaggacacaa

SEQ ID NO: 50933 - DNA, 66 bp, Homo sapiens
aggattagggggaaaaattggatctcattccacctttaattaaggacacaaattgtttgaaagtta

SEQ ID NO: 50934 - DNA, 71 bp, Homo sapiens
ttaattaaggacacaaattgtttgaaagttatttcattaggattctgaaaatcaaagattaacctatgcca

SEQ ID NO: 50935 - DNA, 79 bp, Homo sapiens
gacacaaattgtttgaaagttatttcattaggattctgaaaatcaaagattaacctatgccatctgatccatgcagcaa

SEQ ID NO: 50936 - DNA, 78 bp, Homo sapiens
gtttgaaagttatttcattaggattctgaaaatcaaagattaacctatgccatctgatccatgcagcaagtgataaat

SEQ ID NO: 50937 - DNA, 79 bp, Homo sapiens
agttatttcattaggattctgaaaatcaaagattaacctatgccatctgatccatgcagcaagtgataaattcagtatt

SEQ ID NO: 50938 - DNA, 79 bp, Homo sapiens
attaggattctgaaaatcaaagattaacctatgccatctgatccatgcagcaagtgataaattcagtattttcaaaaga

SEQ ID NO: 50939 - DNA, 78 bp, Homo sapiens
gaaaatcaaagattaacctatgccatctgatccatgcagcaagtgataaattcagtattttcaaaagaaatattgaat

SEQ ID NO: 50940 - DNA, 76 bp, Homo sapiens
agattaacctatgccatctgatccatgcagcaagtgataaattcagtattttcaaaagaaatattgaatttttttc

SEQ ID NO: 50941 - DNA, 78 bp, Homo sapiens
gccatctgatccatgcagcaagtgataaattcagtattttcaaaagaaatattgaatttttttcttgagtcaaattga

SEQ ID NO: 50942 - DNA, 72 bp, Homo sapiens
ccatgcagcaagtgataaattcagtattttcaaaagaaatattgaatttttttcttgagtcaaattgaaacc

SEQ ID NO: 50943 - DNA, 66 bp, Homo sapiens
cagtattttcaaaagaaatattgaatttttttcttgagtcaaattgaaacctttcagaaacttgtt

SEQ ID NO: 50944 - DNA, 67 bp, Homo sapiens
aagaaatattgaatttttttcttgagtcaaattgaaacctttcagaaacttgtttaaatgcgccaag

SEQ ID NO: 50945 - DNA, 68 bp, Homo sapiens
gaatttttttcttgagtcaaattgaaacctttcagaaacttgtttaaatgcgccaagtccctacgcac

SEQ ID NO: 50946 - DNA, 68 bp, Homo sapiens
tttcttgagtcaaattgaaacctttcagaaacttgtttaaatgcgccaagtccctacgcaccttttta

SEQ ID NO: 50947 - DNA, 70 bp, Homo sapiens
attgaaacctttcagaaacttgtttaaatgcgccaagtccctacgcacctttttagtatgtatgagcaaa

SEQ ID NO: 50948 - DNA, 72 bp, Homo sapiens
tttcagaaacttgtttaaatgcgccaagtccctacgcacctttttagtatgtatgagcaaaatactgttgaa

SEQ ID NO: 50949 - DNA, 74 bp, Homo sapiens
aaatgcgccaagtccctacgcacctttttagtatgtatgagcaaaatactgttgaatttcacactcaactaatc

SEQ ID NO: 50950 - DNA, 72 bp, Homo sapiens
agtccctacgcacctttttagtatgtatgagcaaaatactgttgaatttcacactcaactaatcctttaata

SEQ ID NO: 50951 - DNA, 70 bp, Homo sapiens
cacctttttagtatgtatgagcaaaatactgttgaatttcacactcaactaatcctttaataattttctt

SEQ ID NO: 50952 - DNA, 75 bp, Homo sapiens
gtatgtatgagcaaaatactgttgaatttcacactcaactaatcctttaataattttctttcagccagaatgaaa

SEQ ID NO: 50953 - DNA, 72 bp, Homo sapiens
gcaaaatactgttgaatttcacactcaactaatcctttaataattttctttcagccagaatgaaaaaggcta

SEQ ID NO: 50954 - DNA, 69 bp, Homo sapiens
atttcacactcaactaatcctttaataattttctttcagccagaatgaaaaaggctagtattaatttcc

SEQ ID NO: 50955 - DNA, 69 bp, Homo sapiens
acactcaactaatcctttaataattttctttcagccagaatgaaaaaggctagtattaatttcctaata

SEQ ID NO: 50956 - DNA, 64 bp, Homo sapiens
cctttaataattttctttcagccagaatgaaaaaggctagtattaatttcctaataaaattttt

SEQ ID NO: 50957 - DNA, 66 bp, Homo sapiens
ttctttcagccagaatgaaaaaggctagtattaatttcctaataaaattttttttcaaaagttatc

SEQ ID NO: 50958 - DNA, 68 bp, Homo sapiens
gccagaatgaaaaaggctagtattaatttcctaataaaattttttttcaaaagttatcgaggatatga

SEQ ID NO: 50959 - DNA, 65 bp, Homo sapiens
aaggctagtattaatttcctaataaaattttttttcaaaagttatcgaggatatgactataacct

SEQ ID NO: 50960 - DNA, 65 bp, Homo sapiens
tttttttcaaaagttatcgaggatatgactataaccttggaccagtttcaatttctttttatttt

SEQ ID NO: 50961 - DNA, 74 bp, Homo sapiens
tttattttttctgagaatacaccaaagattaatgtcaatggcaagtgagaaattgtccctagagaactattcaa

SEQ ID NO: 50962 - DNA, 74 bp, Homo sapiens
tttctgagaatacaccaaagattaatgtcaatggcaagtgagaaattgtccctagagaactattcaaggacttt

SEQ ID NO: 50963 - DNA, 74 bp, Homo sapiens
taatgtcaatggcaagtgagaaattgtccctagagaactattcaaggactttttcttactacatttgattggac

SEQ ID NO: 50964 - DNA, 72 bp, Homo sapiens
aaattgtccctagagaactattcaaggactttttcttactacatttgattggactggagtgaactgacatta

SEQ ID NO: 50965 - DNA, 75 bp, Homo sapiens
cctagagaactattcaaggactttttcttactacatttgattggactggagtgaactgacattatagcatcttta

SEQ ID NO: 50966 - DNA, 76 bp, Homo sapiens
actattcaaggactttttcttactacatttgattggactggagtgaactgacattatagcatctttatcatcacct

SEQ ID NO: 50967 - DNA, 75 bp, Homo sapiens
gactttttcttactacatttgattggactggagtgaactgacattatagcatctttatcatcacctttaaaattc

SEQ ID NO: 50968 - DNA, 75 bp, Homo sapiens
tttcttactacatttgattggactggagtgaactgacattatagcatctttatcatcacctttaaaattctattt

SEQ ID NO: 50969 - DNA, 78 bp, Homo sapiens
catttgattggactggagtgaactgacattatagcatctttatcatcacctttaaaattctattttctcttagtagca

SEQ ID NO: 50970 - DNA, 78 bp, Homo sapiens
tgattggactggagtgaactgacattatagcatctttatcatcacctttaaaattctattttctcttagtagcaacag

SEQ ID NO: 50971 - DNA, 78 bp, Homo sapiens
ttggactggagtgaactgacattatagcatctttatcatcacctttaaaattctattttctcttagtagcaacagtga

SEQ ID NO: 50972 - DNA, 76 bp, Homo sapiens
gagtgaactgacattatagcatctttatcatcacctttaaaattctattttctcttagtagcaacagtgaagactt

SEQ ID NO: 50973 - DNA, 75 bp, Homo sapiens
ctgacattatagcatctttatcatcacctttaaaattctattttctcttagtagcaacagtgaagactttagaac

SEQ ID NO: 50974 - DNA, 73 bp, Homo sapiens
atagcatctttatcatcacctttaaaattctattttctcttagtagcaacagtgaagactttagaactattac

SEQ ID NO: 50975 - DNA, 71 bp, Homo sapiens
tctttatcatcacctttaaaattctattttctcttagtagcaacagtgaagactttagaactattacttac

SEQ ID NO: 50976 - DNA, 67 bp, Homo sapiens
aattctattttctcttagtagcaacagtgaagactttagaactattacttactttaaattattaaag

SEQ ID NO: 50977 - DNA, 72 bp, Homo sapiens
gtagcaacagtgaagactttagaactattacttactttaaattattaaagtatatcacagacaaaatattca

SEQ ID NO: 50978 - DNA, 68 bp, Homo sapiens
agtgaagactttagaactattacttactttaaattattaaagtatatcacagacaaaatattcaattt

SEQ ID NO: 50979 - DNA, 70 bp, Homo sapiens
gaactattacttactttaaattattaaagtatatcacagacaaaatattcaattttacattaaagcaaca

SEQ ID NO: 50980 - DNA, 70 bp, Homo sapiens
actttaaattattaaagtatatcacagacaaaatattcaattttacattaaagcaacattaagggtctca

SEQ ID NO: 50981 - DNA, 71 bp, Homo sapiens
attttacattaaagcaacattaagggtctcaatttcattgaacagaaacaaatgctgaagaaatttacagg

SEQ ID NO: 50982 - DNA, 74 bp, Homo sapiens
cattaaagcaacattaagggtctcaatttcattgaacagaaacaaatgctgaagaaatttacaggtatgattta

SEQ ID NO: 50983 - DNA, 72 bp, Homo sapiens
aagggtctcaatttcattgaacagaaacaaatgctgaagaaatttacaggtatgatttaattttagagagtg

SEQ ID NO: 50984 - DNA, 73 bp, Homo sapiens
ctcaatttcattgaacagaaacaaatgctgaagaaatttacaggtatgatttaattttagagagtgttctttc

SEQ ID NO: 50985 - DNA, 70 bp, Homo sapiens
acagaaacaaatgctgaagaaatttacaggtatgatttaattttagagagtgttctttctttagggaaca

SEQ ID NO: 50986 - DNA, 69 bp, Homo sapiens
atgctgaagaaatttacaggtatgatttaattttagagagtgttctttctttagggaacaaaatgaaac

SEQ ID NO: 50987 - DNA, 69 bp, Homo sapiens
gaaatttacaggtatgatttaattttagagagtgttctttctttagggaacaaaatgaaactagatctc

SEQ ID NO: 50988 - DNA, 72 bp, Homo sapiens
caggtatgatttaattttagagagtgttctttctttagggaacaaaatgaaactagatctctcatttgtctg

SEQ ID NO: 50989 - DNA, 74 bp, Homo sapiens
ttttagagagtgttctttctttagggaacaaaatgaaactagatctctcatttgtctgtatgggcaagatatgg

SEQ ID NO: 50990 - DNA, 76 bp, Homo sapiens
tgttctttctttagggaacaaaatgaaactagatctctcatttgtctgtatgggcaagatatggtaaacctcatga

SEQ ID NO: 50991 - DNA, 76 bp, Homo sapiens
ttctttagggaacaaaatgaaactagatctctcatttgtctgtatgggcaagatatggtaaacctcatgatcaaaa

SEQ ID NO: 50992 - DNA, 79 bp, Homo sapiens
aaactagatctctcatttgtctgtatgggcaagatatggtaaacctcatgatcaaaacacatgccagttagaaacttga

SEQ ID NO: 50993 - DNA, 83 bp, Homo sapiens
atttgtctgtatgggcaagatatggtaaacctcatgatcaaaacacatgccagttagaaacttgatcacagaaatgatgctca

SEQ ID NO: 50994 - DNA, 83 bp, Homo sapiens
tatgggcaagatatggtaaacctcatgatcaaaacacatgccagttagaaacttgatcacagaaatgatgctcagtgttgaaa

SEQ ID NO: 50995 - DNA, 80 bp, Homo sapiens
aagatatggtaaacctcatgatcaaaacacatgccagttagaaacttgatcacagaaatgatgctcagtgttgaaaccca

SEQ ID NO: 50996 - DNA, 76 bp, Homo sapiens
atcaaaacacatgccagttagaaacttgatcacagaaatgatgctcagtgttgaaacccaacaataaacaaacaaa

SEQ ID NO: 50997 - DNA, 67 bp, Homo sapiens
aacaaacaaaaacccccactctaaccagaggcatttaagcctctccactgaagttcctgtttcccac

SEQ ID NO: 50998 - DNA, 69 bp, Homo sapiens
ccactctaaccagaggcatttaagcctctccactgaagttcctgtttcccaccagtttacgacccttaa

SEQ ID NO: 50999 - DNA, 70 bp, Homo sapiens
tctaaccagaggcatttaagcctctccactgaagttcctgtttcccaccagtttacgacccttaatgtta

SEQ ID NO: 51000 - DNA, 69 bp, Homo sapiens
taaccagaggcatttaagcctctccactgaagttcctgtttcccaccagtttacgacccttaatgttac

SEQ ID NO: 51001 - DNA, 70 bp, Homo sapiens
atttaagcctctccactgaagttcctgtttcccaccagtttacgacccttaatgttactgcatgtatggt

SEQ ID NO: 51002 - DNA, 75 bp, Homo sapiens
ctctccactgaagttcctgtttcccaccagtttacgacccttaatgttactgcatgtatggttgcatatttgaga

SEQ ID NO: 51003 - DNA, 76 bp, Homo sapiens
cactgaagttcctgtttcccaccagtttacgacccttaatgttactgcatgtatggttgcatatttgagatgatta

SEQ ID NO: 51004 - DNA, 73 bp, Homo sapiens
aagttcctgtttcccaccagtttacgacccttaatgttactgcatgtatggttgcatatttgagatgattaaa

SEQ ID NO: 51005 - DNA, 75 bp, Homo sapiens
catgtatggttgcatatttgagatgattaaaaataaaagactggcttaaaagcacctcctcctctagtgtgtaat

SEQ ID NO: 51006 - DNA, 71 bp, Homo sapiens
gatgattaaaaataaaagactggcttaaaagcacctcctcctctagtgtgtaattacatacaaactaaaga

SEQ ID NO: 51007 - DNA, 72 bp, Homo sapiens
tggcttaaaagcacctcctcctctagtgtgtaattacatacaaactaaagattccttctgacgtcctaggaa

SEQ ID NO: 51008 - DNA, 69 bp, Homo sapiens
acctcctcctctagtgtgtaattacatacaaactaaagattccttctgacgtcctaggaaccccatttg

SEQ ID NO: 51009 - DNA, 68 bp, Homo sapiens
tctagtgtgtaattacatacaaactaaagattccttctgacgtcctaggaaccccatttgttaccgtt

SEQ ID NO: 51010 - DNA, 68 bp, Homo sapiens
aattacatacaaactaaagattccttctgacgtcctaggaaccccatttgttaccgtttcatgtgtaa

SEQ ID NO: 51011 - DNA, 69 bp, Homo sapiens
aaactaaagattccttctgacgtcctaggaaccccatttgttaccgtttcatgtgtaagcaccattgaa

SEQ ID NO: 51012 - DNA, 68 bp, Homo sapiens
attccttctgacgtcctaggaaccccatttgttaccgtttcatgtgtaagcaccattgaaccaatttt

SEQ ID NO: 51013 - DNA, 68 bp, Homo sapiens
acgtcctaggaaccccatttgttaccgtttcatgtgtaagcaccattgaaccaatttttaaagcacat

SEQ ID NO: 51014 - DNA, 71 bp, Homo sapiens
aaccccatttgttaccgtttcatgtgtaagcaccattgaaccaatttttaaagcacatttgcagttatcaa

SEQ ID NO: 51015 - DNA, 74 bp, Homo sapiens
taccgtttcatgtgtaagcaccattgaaccaatttttaaagcacatttgcagttatcaaatgtttagtgtgtcc

SEQ ID NO: 51016 - DNA, 75 bp, Homo sapiens
ttcatgtgtaagcaccattgaaccaatttttaaagcacatttgcagttatcaaatgtttagtgtgtcctcaagtt

SEQ ID NO: 51017 - DNA, 75 bp, Homo sapiens
gcaccattgaaccaatttttaaagcacatttgcagttatcaaatgtttagtgtgtcctcaagtttcattgatttg

SEQ ID NO: 51018 - DNA, 73 bp, Homo sapiens
gaaccaatttttaaagcacatttgcagttatcaaatgtttagtgtgtcctcaagtttcattgatttgtttgcc

SEQ ID NO: 51019 - DNA, 75 bp, Homo sapiens
gcacatttgcagttatcaaatgtttagtgtgtcctcaagtttcattgatttgtttgcctttaagcaagaaaagag

SEQ ID NO: 51020 - DNA, 73 bp, Homo sapiens
tgcagttatcaaatgtttagtgtgtcctcaagtttcattgatttgtttgcctttaagcaagaaaagagtaaag

SEQ ID NO: 51021 - DNA, 71 bp, Homo sapiens
caaatgtttagtgtgtcctcaagtttcattgatttgtttgcctttaagcaagaaaagagtaaagtgtatta

SEQ ID NO: 51022 - DNA, 71 bp, Homo sapiens
ttcattgatttgtttgcctttaagcaagaaaagagtaaagtgtattattttcccctgcttcttttcatatc

SEQ ID NO: 51023 - DNA, 72 bp, Homo sapiens
tgtttgcctttaagcaagaaaagagtaaagtgtattattttcccctgcttcttttcatatctgaattgtcaa

SEQ ID NO: 51024 - DNA, 70 bp, Homo sapiens
gcctttaagcaagaaaagagtaaagtgtattattttcccctgcttcttttcatatctgaattgtcaaaaa

SEQ ID NO: 51025 - DNA, 68 bp, Homo sapiens
aagaaaagagtaaagtgtattattttcccctgcttcttttcatatctgaattgtcaaaaaatgttaat

SEQ ID NO: 51026 - DNA, 69 bp, Homo sapiens
agtgtattattttcccctgcttcttttcatatctgaattgtcaaaaaatgttaattttggaagtgcttt

SEQ ID NO: 51027 - DNA, 71 bp, Homo sapiens
tcccctgcttcttttcatatctgaattgtcaaaaaatgttaattttggaagtgcttttaatcactattttc

SEQ ID NO: 51028 - DNA, 71 bp, Homo sapiens
tcttttcatatctgaattgtcaaaaaatgttaattttggaagtgcttttaatcactattttccccaacaga

SEQ ID NO: 51029 - DNA, 71 bp, Homo sapiens
gttaattttggaagtgcttttaatcactattttccccaacagactagaatggctccatgaaatttgacaat

SEQ ID NO: 51030 - DNA, 72 bp, Homo sapiens
gaagtgcttttaatcactattttccccaacagactagaatggctccatgaaatttgacaattaagtaaggaa

SEQ ID NO: 51031 - DNA, 71 bp, Homo sapiens
atcactattttccccaacagactagaatggctccatgaaatttgacaattaagtaaggaaatctttatccc

SEQ ID NO: 51032 - DNA, 70 bp, Homo sapiens
tttccccaacagactagaatggctccatgaaatttgacaattaagtaaggaaatctttatccccaaaaga

SEQ ID NO: 51033 - DNA, 71 bp, Homo sapiens
ctagaatggctccatgaaatttgacaattaagtaaggaaatctttatccccaaaagaagcacgtatcttac

SEQ ID NO: 51034 - DNA, 70 bp, Homo sapiens
gctccatgaaatttgacaattaagtaaggaaatctttatccccaaaagaagcacgtatcttaccctctaa

SEQ ID NO: 51035 - DNA, 71 bp, Homo sapiens
atttgacaattaagtaaggaaatctttatccccaaaagaagcacgtatcttaccctctaaactgcatgcaa

SEQ ID NO: 51036 - DNA, 69 bp, Homo sapiens
attaagtaaggaaatctttatccccaaaagaagcacgtatcttaccctctaaactgcatgcaaagtaag

SEQ ID NO: 51037 - DNA, 73 bp, Homo sapiens
tctttatccccaaaagaagcacgtatcttaccctctaaactgcatgcaaagtaagggtctgtgtgagagtatt

SEQ ID NO: 51038 - DNA, 72 bp, Homo sapiens
atccccaaaagaagcacgtatcttaccctctaaactgcatgcaaagtaagggtctgtgtgagagtattttcc

SEQ ID NO: 51039 - DNA, 71 bp, Homo sapiens
acgtatcttaccctctaaactgcatgcaaagtaagggtctgtgtgagagtattttccccaaactcctaatg

SEQ ID NO: 51040 - DNA, 75 bp, Homo sapiens
tcttaccctctaaactgcatgcaaagtaagggtctgtgtgagagtattttccccaaactcctaatggacatggca

SEQ ID NO: 51041 - DNA, 72 bp, Homo sapiens
aaagtaagggtctgtgtgagagtattttccccaaactcctaatggacatggcagacaatgtgtagaaaaatc

SEQ ID NO: 51042 - DNA, 73 bp, Homo sapiens
attttccccaaactcctaatggacatggcagacaatgtgtagaaaaatctgagttttgaactgaccaacttca

SEQ ID NO: 51043 - DNA, 73 bp, Homo sapiens
aaactcctaatggacatggcagacaatgtgtagaaaaatctgagttttgaactgaccaacttcaagtctttta

SEQ ID NO: 51044 - DNA, 71 bp, Homo sapiens
ggcagacaatgtgtagaaaaatctgagttttgaactgaccaacttcaagtcttttaaaatctttgggcaaa

SEQ ID NO: 51045 - DNA, 69 bp, Homo sapiens
ctgagttttgaactgaccaacttcaagtcttttaaaatctttgggcaaaaaaaaatatcatgtagcagt

SEQ ID NO: 51046 - DNA, 68 bp, Homo sapiens
ttgaactgaccaacttcaagtcttttaaaatctttgggcaaaaaaaaatatcatgtagcagttaaaaa

SEQ ID NO: 51047 - DNA, 67 bp, Homo sapiens
caacttcaagtcttttaaaatctttgggcaaaaaaaaatatcatgtagcagttaaaaaaattattga

SEQ ID NO: 51048 - DNA, 68 bp, Homo sapiens
ttaaaatctttgggcaaaaaaaaatatcatgtagcagttaaaaaaattattgacttacaaattataga

SEQ ID NO: 51049 - DNA, 69 bp, Homo sapiens
gggcaaaaaaaaatatcatgtagcagttaaaaaaattattgacttacaaattatagaaaagatatgtta

SEQ ID NO: 51050 - DNA, 75 bp, Homo sapiens
aaatatcatgtagcagttaaaaaaattattgacttacaaattatagaaaagatatgttatctacaatatatgcca

SEQ ID NO: 51051 - DNA, 74 bp, Homo sapiens
tagcagttaaaaaaattattgacttacaaattatagaaaagatatgttatctacaatatatgccaggtgaccca

SEQ ID NO: 51052 - DNA, 71 bp, Homo sapiens
aaaaattattgacttacaaattatagaaaagatatgttatctacaatatatgccaggtgacccattaaatt

SEQ ID NO: 51053 - DNA, 75 bp, Homo sapiens
ttatagaaaagatatgttatctacaatatatgccaggtgacccattaaatttaaaaaatgtgtgcgaatgagtaa

SEQ ID NO: 51054 - DNA, 75 bp, Homo sapiens
gaaaagatatgttatctacaatatatgccaggtgacccattaaatttaaaaaatgtgtgcgaatgagtaactaca

SEQ ID NO: 51055 - DNA, 72 bp, Homo sapiens
atgccaggtgacccattaaatttaaaaaatgtgtgcgaatgagtaactacattaaaactaccatcttggatc

SEQ ID NO: 51056 - DNA, 72 bp, Homo sapiens
gtgacccattaaatttaaaaaatgtgtgcgaatgagtaactacattaaaactaccatcttggatcttggtgc

SEQ ID NO: 51057 - DNA, 73 bp, Homo sapiens
ttaaaaaatgtgtgcgaatgagtaactacattaaaactaccatcttggatcttggtgctttccaaaattctga

SEQ ID NO: 51058 - DNA, 71 bp, Homo sapiens
gagtaactacattaaaactaccatcttggatcttggtgctttccaaaattctgaaatcactattaaggagg

SEQ ID NO: 51059 - DNA, 72 bp, Homo sapiens
tacattaaaactaccatcttggatcttggtgctttccaaaattctgaaatcactattaaggagggaccatac

SEQ ID NO: 51060 - DNA, 71 bp, Homo sapiens
actaccatcttggatcttggtgctttccaaaattctgaaatcactattaaggagggaccataccagatttt

SEQ ID NO: 51061 - DNA, 71 bp, Homo sapiens
tggatcttggtgctttccaaaattctgaaatcactattaaggagggaccataccagatttttttgttgttc

SEQ ID NO: 51062 - DNA, 68 bp, Homo sapiens
attctgaaatcactattaaggagggaccataccagatttttttgttgttcttttccttggagaatggg

SEQ ID NO: 51063 - DNA, 65 bp, Homo sapiens
actattaaggagggaccataccagatttttttgttgttcttttccttggagaatggggaagaagt

SEQ ID NO: 51064 - DNA, 66 bp, Homo sapiens
agggaccataccagatttttttgttgttcttttccttggagaatggggaagaagttggaaagagaa

SEQ ID NO: 51065 - DNA, 64 bp, Homo sapiens
gatttttttgttgttcttttccttggagaatggggaagaagttggaaagagaaggaagtaaacc

SEQ ID NO: 51066 - DNA, 67 bp, Homo sapiens
ttttccttggagaatggggaagaagttggaaagagaaggaagtaaaccttcactctttggtacagcc

SEQ ID NO: 51067 - DNA, 69 bp, Homo sapiens
agaatggggaagaagttggaaagagaaggaagtaaaccttcactctttggtacagccctgtatagcaaa

SEQ ID NO: 51068 - DNA, 70 bp, Homo sapiens
aagaagttggaaagagaaggaagtaaaccttcactctttggtacagccctgtatagcaaacttcagcctg

SEQ ID NO: 51069 - DNA, 71 bp, Homo sapiens
agaaggaagtaaaccttcactctttggtacagccctgtatagcaaacttcagcctggggcacatttttatg

SEQ ID NO: 51070 - DNA, 72 bp, Homo sapiens
taaaccttcactctttggtacagccctgtatagcaaacttcagcctggggcacatttttatggtcaaattaa

SEQ ID NO: 51071 - DNA, 69 bp, Homo sapiens
actctttggtacagccctgtatagcaaacttcagcctggggcacatttttatggtcaaattaaaaacct

SEQ ID NO: 51072 - DNA, 72 bp, Homo sapiens
tacagccctgtatagcaaacttcagcctggggcacatttttatggtcaaattaaaaacctttgagaatagga

SEQ ID NO: 51073 - DNA, 71 bp, Homo sapiens
gtatagcaaacttcagcctggggcacatttttatggtcaaattaaaaacctttgagaataggagtttatca

SEQ ID NO: 51074 - DNA, 74 bp, Homo sapiens
ttcagcctggggcacatttttatggtcaaattaaaaacctttgagaataggagtttatcatagaaatgctgaca

SEQ ID NO: 51075 - DNA, 73 bp, Homo sapiens
gcacatttttatggtcaaattaaaaacctttgagaataggagtttatcatagaaatgctgacagatcctaacc

SEQ ID NO: 51076 - DNA, 74 bp, Homo sapiens
ttaaaaacctttgagaataggagtttatcatagaaatgctgacagatcctaacccagagaagggctaagagcaa

SEQ ID NO: 51077 - DNA, 78 bp, Homo sapiens
tttgagaataggagtttatcatagaaatgctgacagatcctaacccagagaagggctaagagcaacacagtaatatta

SEQ ID NO: 51078 - DNA, 77 bp, Homo sapiens
agtttatcatagaaatgctgacagatcctaacccagagaagggctaagagcaacacagtaatattaagaaagctctc

SEQ ID NO: 51079 - DNA, 77 bp, Homo sapiens
aaatgctgacagatcctaacccagagaagggctaagagcaacacagtaatattaagaaagctctccctcagcacgat

SEQ ID NO: 51080 - DNA, 78 bp, Homo sapiens
acagatcctaacccagagaagggctaagagcaacacagtaatattaagaaagctctccctcagcacgattgagcttca

SEQ ID NO: 51081 - DNA, 80 bp, Homo sapiens
cagagaagggctaagagcaacacagtaatattaagaaagctctccctcagcacgattgagcttcagcgcaagggatagag

SEQ ID NO: 51082 - DNA, 80 bp, Homo sapiens
ctaagagcaacacagtaatattaagaaagctctccctcagcacgattgagcttcagcgcaagggatagagttgtctagtg

SEQ ID NO: 51083 - DNA, 78 bp, Homo sapiens
aacacagtaatattaagaaagctctccctcagcacgattgagcttcagcgcaagggatagagttgtctagtggacgcc

SEQ ID NO: 51084 - DNA, 78 bp, Homo sapiens
ttaagaaagctctccctcagcacgattgagcttcagcgcaagggatagagttgtctagtggacgcccttggccagtaa

SEQ ID NO: 51085 - DNA, 77 bp, Homo sapiens
aaagctctccctcagcacgattgagcttcagcgcaagggatagagttgtctagtggacgcccttggccagtaaacaa

SEQ ID NO: 51086 - DNA, 77 bp, Homo sapiens
agcacgattgagcttcagcgcaagggatagagttgtctagtggacgcccttggccagtaaacaaccatgatttaatg

SEQ ID NO: 51087 - DNA, 79 bp, Homo sapiens
ttgagcttcagcgcaagggatagagttgtctagtggacgcccttggccagtaaacaaccatgatttaatgtgcttgaga

SEQ ID NO: 51088 - DNA, 78 bp, Homo sapiens
tagagttgtctagtggacgcccttggccagtaaacaaccatgatttaatgtgcttgagacttggtcatatgggagctc

SEQ ID NO: 51089 - DNA, 78 bp, Homo sapiens
tggacgcccttggccagtaaacaaccatgatttaatgtgcttgagacttggtcatatgggagctctgtgaccctctaa

SEQ ID NO: 51090 - DNA, 77 bp, Homo sapiens
ttggccagtaaacaaccatgatttaatgtgcttgagacttggtcatatgggagctctgtgaccctctaagccaaatt

SEQ ID NO: 51091 - DNA, 75 bp, Homo sapiens
taaacaaccatgatttaatgtgcttgagacttggtcatatgggagctctgtgaccctctaagccaaattttcttt

SEQ ID NO: 51092 - DNA, 71 bp, Homo sapiens
tcttttctttttgttttcaactgaaatatgcctcaaagggtaaaggattgcaattttagccttcattcatg

SEQ ID NO: 51093 - DNA, 75 bp, Homo sapiens
ttgttttcaactgaaatatgcctcaaagggtaaaggattgcaattttagccttcattcatggatatattgctttc

SEQ ID NO: 51094 - DNA, 76 bp, Homo sapiens
caactgaaatatgcctcaaagggtaaaggattgcaattttagccttcattcatggatatattgctttctttcaaca

SEQ ID NO: 51095 - DNA, 78 bp, Homo sapiens
atatgcctcaaagggtaaaggattgcaattttagccttcattcatggatatattgctttctttcaacaatatctgatg

SEQ ID NO: 51096 - DNA, 75 bp, Homo sapiens
aagggtaaaggattgcaattttagccttcattcatggatatattgctttctttcaacaatatctgatgggcctgt

SEQ ID NO: 51097 - DNA, 76 bp, Homo sapiens
agggtaaaggattgcaattttagccttcattcatggatatattgctttctttcaacaatatctgatgggcctgtta

SEQ ID NO: 51098 - DNA, 79 bp, Homo sapiens
taaaggattgcaattttagccttcattcatggatatattgctttctttcaacaatatctgatgggcctgttaactgcca

SEQ ID NO: 51099 - DNA, 76 bp, Homo sapiens
aattttagccttcattcatggatatattgctttctttcaacaatatctgatgggcctgttaactgccacccatggg

SEQ ID NO: 51100 - DNA, 79 bp, Homo sapiens
attcatggatatattgctttctttcaacaatatctgatgggcctgttaactgccacccatggggagcaggttgcaggaa

SEQ ID NO: 51101 - DNA, 79 bp, Homo sapiens
ttcatggatatattgctttctttcaacaatatctgatgggcctgttaactgccacccatggggagcaggttgcaggaag

SEQ ID NO: 51102 - DNA, 78 bp, Homo sapiens
tatattgctttctttcaacaatatctgatgggcctgttaactgccacccatggggagcaggttgcaggaaggtctcat

SEQ ID NO: 51103 - DNA, 78 bp, Homo sapiens
ttgctttctttcaacaatatctgatgggcctgttaactgccacccatggggagcaggttgcaggaaggtctcattgaa

SEQ ID NO: 51104 - DNA, 77 bp, Homo sapiens
tttcaacaatatctgatgggcctgttaactgccacccatggggagcaggttgcaggaaggtctcattgaacacaaaa

SEQ ID NO: 51105 - DNA, 76 bp, Homo sapiens
aatatctgatgggcctgttaactgccacccatggggagcaggttgcaggaaggtctcattgaacacaaaacaccaa

SEQ ID NO: 51106 - DNA, 73 bp, Homo sapiens
cctgttaactgccacccatggggagcaggttgcaggaaggtctcattgaacacaaaacaccaagtgttttcag

SEQ ID NO: 51107 - DNA, 73 bp, Homo sapiens
taactgccacccatggggagcaggttgcaggaaggtctcattgaacacaaaacaccaagtgttttcagtagtt

SEQ ID NO: 51108 - DNA, 69 bp, Homo sapiens
caggttgcaggaaggtctcattgaacacaaaacaccaagtgttttcagtagtttattcacatttttttt

SEQ ID NO: 51109 - DNA, 70 bp, Homo sapiens
gaaggtctcattgaacacaaaacaccaagtgttttcagtagtttattcacatttttttttctctgcttat

SEQ ID NO: 51110 - DNA, 70 bp, Homo sapiens
cacaaaacaccaagtgttttcagtagtttattcacatttttttttctctgcttattttaatatgcaccac

SEQ ID NO: 51111 - DNA, 70 bp, Homo sapiens
caccaagtgttttcagtagtttattcacatttttttttctctgcttattttaatatgcaccacgtgtaag

SEQ ID NO: 51112 - DNA, 73 bp, Homo sapiens
tcagtagtttattcacatttttttttctctgcttattttaatatgcaccacgtgtaagttagatgagggctac

SEQ ID NO: 51113 - DNA, 71 bp, Homo sapiens
gtttattcacatttttttttctctgcttattttaatatgcaccacgtgtaagttagatgagggctacggta

SEQ ID NO: 51114 - DNA, 72 bp, Homo sapiens
tttttctctgcttattttaatatgcaccacgtgtaagttagatgagggctacggtaaaaacatttttgatga

SEQ ID NO: 51115 - DNA, 71 bp, Homo sapiens
aatatgcaccacgtgtaagttagatgagggctacggtaaaaacatttttgatgactgaaatcttacttttc

SEQ ID NO: 51116 - DNA, 68 bp, Homo sapiens
accacgtgtaagttagatgagggctacggtaaaaacatttttgatgactgaaatcttacttttccttc

SEQ ID NO: 51117 - DNA, 70 bp, Homo sapiens
agttagatgagggctacggtaaaaacatttttgatgactgaaatcttacttttccttctaacgatctgga

SEQ ID NO: 51118 - DNA, 72 bp, Homo sapiens
ggctacggtaaaaacatttttgatgactgaaatcttacttttccttctaacgatctggagcaaatcacatat

SEQ ID NO: 51119 - DNA, 81 bp, Homo sapiens
tgatgactgaaatcttacttttccttctaacgatctggagcaaatcacatattcattgatcatgacgaataaaatgatttc

SEQ ID NO: 51120 - DNA, 81 bp, Homo sapiens
ttacttttccttctaacgatctggagcaaatcacatattcattgatcatgacgaataaaatgatttctgctacaatgttga

SEQ ID NO: 51121 - DNA, 81 bp, Homo sapiens
tttccttctaacgatctggagcaaatcacatattcattgatcatgacgaataaaatgatttctgctacaatgttgagaaaa

SEQ ID NO: 51122 - DNA, 84 bp, Homo sapiens
tcattgatcatgacgaataaaatgatttctgctacaatgttgagaaaaaatgtgttcattaatatgaacacatgtctacagaga

SEQ ID NO: 51123 - DNA, 82 bp, Homo sapiens
tcatgacgaataaaatgatttctgctacaatgttgagaaaaaatgtgttcattaatatgaacacatgtctacagagatgatt

SEQ ID NO: 51124 - DNA, 83 bp, Homo sapiens
tgatttctgctacaatgttgagaaaaaatgtgttcattaatatgaacacatgtctacagagatgatttacacgatgcaagtaa

SEQ ID NO: 51125 - DNA, 82 bp, Homo sapiens
ctgctacaatgttgagaaaaaatgtgttcattaatatgaacacatgtctacagagatgatttacacgatgcaagtaatgaaa

SEQ ID NO: 51126 - DNA, 77 bp, Homo sapiens
acatgtctacagagatgatttacacgatgcaagtaatgaaagagttcttccttaactagtctactatcaaactgaaa

SEQ ID NO: 51127 - DNA, 77 bp, Homo sapiens
cagagatgatttacacgatgcaagtaatgaaagagttcttccttaactagtctactatcaaactgaaaagatgaatc

SEQ ID NO: 51128 - DNA, 73 bp, Homo sapiens
tttacacgatgcaagtaatgaaagagttcttccttaactagtctactatcaaactgaaaagatgaatcttaaa

SEQ ID NO: 51129 - DNA, 70 bp, Homo sapiens
gcaagtaatgaaagagttcttccttaactagtctactatcaaactgaaaagatgaatcttaaaattccct

SEQ ID NO: 51130 - DNA, 75 bp, Homo sapiens
aactagtctactatcaaactgaaaagatgaatcttaaaattcccttgaaaataccatatgattggtcatgtgtca

SEQ ID NO: 51131 - DNA, 75 bp, Homo sapiens
gtctactatcaaactgaaaagatgaatcttaaaattcccttgaaaataccatatgattggtcatgtgtcagtaaa

SEQ ID NO: 51132 - DNA, 73 bp, Homo sapiens
tgaaaagatgaatcttaaaattcccttgaaaataccatatgattggtcatgtgtcagtaaaagaaagacggtc

SEQ ID NO: 51133 - DNA, 71 bp, Homo sapiens
aatcttaaaattcccttgaaaataccatatgattggtcatgtgtcagtaaaagaaagacggtccccatcac

SEQ ID NO: 51134 - DNA, 72 bp, Homo sapiens
aaaattcccttgaaaataccatatgattggtcatgtgtcagtaaaagaaagacggtccccatcaccaggcca

SEQ ID NO: 51135 - DNA, 77 bp, Homo sapiens
tatgattggtcatgtgtcagtaaaagaaagacggtccccatcaccaggccaccaccataagagagctatattaaata

SEQ ID NO: 51136 - DNA, 72 bp, Homo sapiens
tgtcagtaaaagaaagacggtccccatcaccaggccaccaccataagagagctatattaaatacttgggaaa

SEQ ID NO: 51137 - DNA, 69 bp, Homo sapiens
gtaaaagaaagacggtccccatcaccaggccaccaccataagagagctatattaaatacttgggaaaaa

SEQ ID NO: 51138 - DNA, 70 bp, Homo sapiens
acggtccccatcaccaggccaccaccataagagagctatattaaatacttgggaaaaaatatggaaacac

SEQ ID NO: 51139 - DNA, 72 bp, Homo sapiens
caggccaccaccataagagagctatattaaatacttgggaaaaaatatggaaacaccggtggtgatgattaa

SEQ ID NO: 51140 - DNA, 72 bp, Homo sapiens
caccaccataagagagctatattaaatacttgggaaaaaatatggaaacaccggtggtgatgattaaattga

SEQ ID NO: 51141 - DNA, 73 bp, Homo sapiens
gagagctatattaaatacttgggaaaaaatatggaaacaccggtggtgatgattaaattgataattacataga

SEQ ID NO: 51142 - DNA, 75 bp, Homo sapiens
atacttgggaaaaaatatggaaacaccggtggtgatgattaaattgataattacatagatacactgccataatga

SEQ ID NO: 51143 - DNA, 79 bp, Homo sapiens
ggaaacaccggtggtgatgattaaattgataattacatagatacactgccataatgatacatatttgttctatgataag

SEQ ID NO: 51144 - DNA, 81 bp, Homo sapiens
ccggtggtgatgattaaattgataattacatagatacactgccataatgatacatatttgttctatgataagtgaaatcaa

SEQ ID NO: 51145 - DNA, 81 bp, Homo sapiens
gattaaattgataattacatagatacactgccataatgatacatatttgttctatgataagtgaaatcaaaaataagatca

SEQ ID NO: 51146 - DNA, 80 bp, Homo sapiens
ttacatagatacactgccataatgatacatatttgttctatgataagtgaaatcaaaaataagatcaatttggttataga

SEQ ID NO: 51147 - DNA, 75 bp, Homo sapiens
gccataatgatacatatttgttctatgataagtgaaatcaaaaataagatcaatttggttatagaaattccttaa

SEQ ID NO: 51148 - DNA, 70 bp, Homo sapiens
atttgttctatgataagtgaaatcaaaaataagatcaatttggttatagaaattccttaaagaacaccac

SEQ ID NO: 51149 - DNA, 70 bp, Homo sapiens
ctatgataagtgaaatcaaaaataagatcaatttggttatagaaattccttaaagaacaccaccacttaa

SEQ ID NO: 51150 - DNA, 69 bp, Homo sapiens
gtgaaatcaaaaataagatcaatttggttatagaaattccttaaagaacaccaccacttaattatttca

SEQ ID NO: 51151 - DNA, 69 bp, Homo sapiens
taagatcaatttggttatagaaattccttaaagaacaccaccacttaattatttcaaacttgaactatc

SEQ ID NO: 51152 - DNA, 67 bp, Homo sapiens
aattccttaaagaacaccaccacttaattatttcaaacttgaactatcccaagaatgtcgagaaaaa

SEQ ID NO: 51153 - DNA, 67 bp, Homo sapiens
cttaaagaacaccaccacttaattatttcaaacttgaactatcccaagaatgtcgagaaaaaaatta

SEQ ID NO: 51154 - DNA, 73 bp, Homo sapiens
aacttgaactatcccaagaatgtcgagaaaaaaattagaaagcactggctaaaagcaaagcaatctggataca

SEQ ID NO: 51155 - DNA, 75 bp, Homo sapiens
atcccaagaatgtcgagaaaaaaattagaaagcactggctaaaagcaaagcaatctggatacaccaatgtagtca

SEQ ID NO: 51156 - DNA, 79 bp, Homo sapiens
aaaattagaaagcactggctaaaagcaaagcaatctggatacaccaatgtagtcagcatgccttgtgcttgtctgttaa

SEQ ID NO: 51157 - DNA, 81 bp, Homo sapiens
actggctaaaagcaaagcaatctggatacaccaatgtagtcagcatgccttgtgcttgtctgttaaccctctgagtacatc

SEQ ID NO: 51158 - DNA, 82 bp, Homo sapiens
aaaagcaaagcaatctggatacaccaatgtagtcagcatgccttgtgcttgtctgttaaccctctgagtacatctctgacat

SEQ ID NO: 51159 - DNA, 84 bp, Homo sapiens
atctggatacaccaatgtagtcagcatgccttgtgcttgtctgttaaccctctgagtacatctctgacattcaggatcttggta

SEQ ID NO: 51160 - DNA, 82 bp, Homo sapiens
aatgtagtcagcatgccttgtgcttgtctgttaaccctctgagtacatctctgacattcaggatcttggtagcttaatgtta

SEQ ID NO: 51161 - DNA, 80 bp, Homo sapiens
agcatgccttgtgcttgtctgttaaccctctgagtacatctctgacattcaggatcttggtagcttaatgttagaaagat

SEQ ID NO: 51162 - DNA, 81 bp, Homo sapiens
ttgtgcttgtctgttaaccctctgagtacatctctgacattcaggatcttggtagcttaatgttagaaagattgcattcca

SEQ ID NO: 51163 - DNA, 81 bp, Homo sapiens
ttaaccctctgagtacatctctgacattcaggatcttggtagcttaatgttagaaagattgcattccatctgattactcaa

SEQ ID NO: 51164 - DNA, 82 bp, Homo sapiens
tgagtacatctctgacattcaggatcttggtagcttaatgttagaaagattgcattccatctgattactcaagatttctact

SEQ ID NO: 51165 - DNA, 81 bp, Homo sapiens
atctctgacattcaggatcttggtagcttaatgttagaaagattgcattccatctgattactcaagatttctacttgactg

SEQ ID NO: 51166 - DNA, 79 bp, Homo sapiens
attcaggatcttggtagcttaatgttagaaagattgcattccatctgattactcaagatttctacttgactggtcacat

SEQ ID NO: 51167 - DNA, 78 bp, Homo sapiens
gtagcttaatgttagaaagattgcattccatctgattactcaagatttctacttgactggtcacattccactgtttat

SEQ ID NO: 51168 - DNA, 84 bp, Homo sapiens
atctgattactcaagatttctacttgactggtcacattccactgtttattcagcatagatcactcaaattctacagtgatgtgc

SEQ ID NO: 51169 - DNA, 83 bp, Homo sapiens
actcaagatttctacttgactggtcacattccactgtttattcagcatagatcactcaaattctacagtgatgtgctgggatc

SEQ ID NO: 51170 - DNA, 86 bp, Homo sapiens
tctacttgactggtcacattccactgtttattcagcatagatcactcaaattctacagtgatgtgctgggatccccatgctgaatg

SEQ ID NO: 51171 - DNA, 87 bp, Homo sapiens
actgtttattcagcatagatcactcaaattctacagtgatgtgctgggatccccatgctgaatgggccctgcattcttctgagctgc

SEQ ID NO: 51172 - DNA, 89 bp, Homo sapiens
ttcagcatagatcactcaaattctacagtgatgtgctgggatccccatgctgaatgggccctgcattcttctgagctgcccttctgcag

SEQ ID NO: 51173 - DNA, 88 bp, Homo sapiens
tcaaattctacagtgatgtgctgggatccccatgctgaatgggccctgcattcttctgagctgcccttctgcagtgtgctgagaaaca

SEQ ID NO: 51174 - DNA, 86 bp, Homo sapiens
ttctacagtgatgtgctgggatccccatgctgaatgggccctgcattcttctgagctgcccttctgcagtgtgctgagaaacaccc

SEQ ID NO: 51175 - DNA, 83 bp, Homo sapiens
catgctgaatgggccctgcattcttctgagctgcccttctgcagtgtgctgagaaacaccccctagcttcacacggtccagag

SEQ ID NO: 51176 - DNA, 79 bp, Homo sapiens
aatgggccctgcattcttctgagctgcccttctgcagtgtgctgagaaacaccccctagcttcacacggtccagagtcc

SEQ ID NO: 51177 - DNA, 75 bp, Homo sapiens
ctgcccttctgcagtgtgctgagaaacaccccctagcttcacacggtccagagtccccctagacgtcgatgggaa

SEQ ID NO: 51178 - DNA, 73 bp, Homo sapiens
gtgctgagaaacaccccctagcttcacacggtccagagtccccctagacgtcgatgggaaaaggcctgagcca

SEQ ID NO: 51179 - DNA, 77 bp, Homo sapiens
cttcacacggtccagagtccccctagacgtcgatgggaaaaggcctgagccatgcaccgcaggctcagtacactaga

SEQ ID NO: 51180 - DNA, 80 bp, Homo sapiens
agagtccccctagacgtcgatgggaaaaggcctgagccatgcaccgcaggctcagtacactagatgctgtagcaatatag

SEQ ID NO: 51181 - DNA, 84 bp, Homo sapiens
tagacgtcgatgggaaaaggcctgagccatgcaccgcaggctcagtacactagatgctgtagcaatatagttaatgcccacaga

SEQ ID NO: 51182 - DNA, 82 bp, Homo sapiens
tcgatgggaaaaggcctgagccatgcaccgcaggctcagtacactagatgctgtagcaatatagttaatgcccacagaaaaa

SEQ ID NO: 51183 - DNA, 84 bp, Homo sapiens
ctgagccatgcaccgcaggctcagtacactagatgctgtagcaatatagttaatgcccacagaaaaagcagtaattcagagaaa

SEQ ID NO: 51184 - DNA, 77 bp, Homo sapiens
aggctcagtacactagatgctgtagcaatatagttaatgcccacagaaaaagcagtaattcagagaaagaaaggaaa

SEQ ID NO: 51185 - DNA, 77 bp, Homo sapiens
acactagatgctgtagcaatatagttaatgcccacagaaaaagcagtaattcagagaaagaaaggaaaatgacagtc

SEQ ID NO: 51186 - DNA, 77 bp, Homo sapiens
tgtagcaatatagttaatgcccacagaaaaagcagtaattcagagaaagaaaggaaaatgacagtccactgcaggta

SEQ ID NO: 51187 - DNA, 77 bp, Homo sapiens
agaaaaagcagtaattcagagaaagaaaggaaaatgacagtccactgcaggtaggtctctgcccattgcattcttca

SEQ ID NO: 51188 - DNA, 76 bp, Homo sapiens
agtaattcagagaaagaaaggaaaatgacagtccactgcaggtaggtctctgcccattgcattcttcacactttta

SEQ ID NO: 51189 - DNA, 77 bp, Homo sapiens
gaaagaaaggaaaatgacagtccactgcaggtaggtctctgcccattgcattcttcacacttttagagttgaggcca

SEQ ID NO: 51190 - DNA, 80 bp, Homo sapiens
aaaatgacagtccactgcaggtaggtctctgcccattgcattcttcacacttttagagttgaggccaggctgtagagcta

SEQ ID NO: 51191 - DNA, 81 bp, Homo sapiens
acagtccactgcaggtaggtctctgcccattgcattcttcacacttttagagttgaggccaggctgtagagctactccata

SEQ ID NO: 51192 - DNA, 79 bp, Homo sapiens
gtaggtctctgcccattgcattcttcacacttttagagttgaggccaggctgtagagctactccatagccttggaatag

SEQ ID NO: 51193 - DNA, 80 bp, Homo sapiens
tgcccattgcattcttcacacttttagagttgaggccaggctgtagagctactccatagccttggaatagtgctttgctt

SEQ ID NO: 51194 - DNA, 76 bp, Homo sapiens
attcttcacacttttagagttgaggccaggctgtagagctactccatagccttggaatagtgctttgctttatatt

SEQ ID NO: 51195 - DNA, 77 bp, Homo sapiens
tgtagagctactccatagccttggaatagtgctttgctttatatttctagagaaagcagtaatttccaactagttca

SEQ ID NO: 51196 - DNA, 75 bp, Homo sapiens
tactccatagccttggaatagtgctttgctttatatttctagagaaagcagtaatttccaactagttcagtgttc

SEQ ID NO: 51197 - DNA, 75 bp, Homo sapiens
tagccttggaatagtgctttgctttatatttctagagaaagcagtaatttccaactagttcagtgttcctcatta

SEQ ID NO: 51198 - DNA, 74 bp, Homo sapiens
gctttgctttatatttctagagaaagcagtaatttccaactagttcagtgttcctcattaatatggaatctacc

SEQ ID NO: 51199 - DNA, 74 bp, Homo sapiens
atatttctagagaaagcagtaatttccaactagttcagtgttcctcattaatatggaatctacctacacaccaa

SEQ ID NO: 51200 - DNA, 73 bp, Homo sapiens
agaaagcagtaatttccaactagttcagtgttcctcattaatatggaatctacctacacaccaacactctttc

SEQ ID NO: 51201 - DNA, 69 bp, Homo sapiens
attaatatggaatctacctacacaccaacactctttctggtgttctgtgccccctacccccacctcccc

SEQ ID NO: 51202 - DNA, 66 bp, Homo sapiens
aatctacctacacaccaacactctttctggtgttctgtgccccctacccccacctcccccccaaaa

SEQ ID NO: 51203 - DNA, 65 bp, Homo sapiens
ttctggtgttctgtgccccctacccccacctcccccccaaaaacaactcaactaatttactgatt

SEQ ID NO: 51204 - DNA, 66 bp, Homo sapiens
ttctgtgccccctacccccacctcccccccaaaaacaactcaactaatttactgatttatgctact

SEQ ID NO: 51205 - DNA, 65 bp, Homo sapiens
cctacccccacctcccccccaaaaacaactcaactaatttactgatttatgctactttgtgattt

SEQ ID NO: 51206 - DNA, 70 bp, Homo sapiens
tcccccccaaaaacaactcaactaatttactgatttatgctactttgtgattttgcgtgttatcacttcc

SEQ ID NO: 51207 - DNA, 74 bp, Homo sapiens
ccaaaaacaactcaactaatttactgatttatgctactttgtgattttgcgtgttatcacttccggatgctcta

SEQ ID NO: 51208 - DNA, 72 bp, Homo sapiens
actcaactaatttactgatttatgctactttgtgattttgcgtgttatcacttccggatgctctaaaagggg

SEQ ID NO: 51209 - DNA, 70 bp, Homo sapiens
tttactgatttatgctactttgtgattttgcgtgttatcacttccggatgctctaaaagggggggaaaaa

SEQ ID NO: 51210 - DNA, 67 bp, Homo sapiens
tactttgtgattttgcgtgttatcacttccggatgctctaaaagggggggaaaaaaacctcaataaa

SEQ ID NO: 51211 - DNA, 67 bp, Homo sapiens
ttttgcgtgttatcacttccggatgctctaaaagggggggaaaaaaacctcaataaacgatatgctt

SEQ ID NO: 51212 - DNA, 68 bp, Homo sapiens
tgttatcacttccggatgctctaaaagggggggaaaaaaacctcaataaacgatatgctttttacatg

SEQ ID NO: 51213 - DNA, 69 bp, Homo sapiens
tctaaaagggggggaaaaaaacctcaataaacgatatgctttttacatgtcaggacaacacagaccaca

SEQ ID NO: 51214 - DNA, 76 bp, Homo sapiens
tcaataaacgatatgctttttacatgtcaggacaacacagaccacagagatgaacctaaatgtaaaagagcaaaaa

SEQ ID NO: 51215 - DNA, 75 bp, Homo sapiens
tatgctttttacatgtcaggacaacacagaccacagagatgaacctaaatgtaaaagagcaaaaaattttggtga

SEQ ID NO: 51216 - DNA, 73 bp, Homo sapiens
tttttacatgtcaggacaacacagaccacagagatgaacctaaatgtaaaagagcaaaaaattttggtgatgg

SEQ ID NO: 51217 - DNA, 72 bp, Homo sapiens
acaacacagaccacagagatgaacctaaatgtaaaagagcaaaaaattttggtgatggtgttgcaaaagtaa

SEQ ID NO: 51218 - DNA, 73 bp, Homo sapiens
gagatgaacctaaatgtaaaagagcaaaaaattttggtgatggtgttgcaaaagtaatgacatgtgatttaaa

SEQ ID NO: 51219 - DNA, 72 bp, Homo sapiens
gtaaaagagcaaaaaattttggtgatggtgttgcaaaagtaatgacatgtgatttaaaaatccatattaatg

SEQ ID NO: 51220 - DNA, 74 bp, Homo sapiens
ggtgttgcaaaagtaatgacatgtgatttaaaaatccatattaatgtagaccatagtttcagggttgaagagta

SEQ ID NO: 51221 - DNA, 75 bp, Homo sapiens
gtaatgacatgtgatttaaaaatccatattaatgtagaccatagtttcagggttgaagagtaaaaatgcagcaag

SEQ ID NO: 51222 - DNA, 75 bp, Homo sapiens
gatttaaaaatccatattaatgtagaccatagtttcagggttgaagagtaaaaatgcagcaagtgaagatcaatg

SEQ ID NO: 51223 - DNA, 78 bp, Homo sapiens
aaatccatattaatgtagaccatagtttcagggttgaagagtaaaaatgcagcaagtgaagatcaatgtgcatttgaa

SEQ ID NO: 51224 - DNA, 76 bp, Homo sapiens
aatgtagaccatagtttcagggttgaagagtaaaaatgcagcaagtgaagatcaatgtgcatttgaaaataaagga

SEQ ID NO: 51225 - DNA, 76 bp, Homo sapiens
accatagtttcagggttgaagagtaaaaatgcagcaagtgaagatcaatgtgcatttgaaaataaaggactataga

SEQ ID NO: 51226 - DNA, 76 bp, Homo sapiens
ggttgaagagtaaaaatgcagcaagtgaagatcaatgtgcatttgaaaataaaggactatagaaacgttgttcaca

SEQ ID NO: 51227 - DNA, 74 bp, Homo sapiens
gagtaaaaatgcagcaagtgaagatcaatgtgcatttgaaaataaaggactatagaaacgttgttcacaaattt

SEQ ID NO: 51228 - DNA, 76 bp, Homo sapiens
gcagcaagtgaagatcaatgtgcatttgaaaataaaggactatagaaacgttgttcacaaattttaagactctcag

SEQ ID NO: 51229 - DNA, 71 bp, Homo sapiens
tcaatgtgcatttgaaaataaaggactatagaaacgttgttcacaaattttaagactctcaggtattaaag

SEQ ID NO: 51230 - DNA, 69 bp, Homo sapiens
ttgaaaataaaggactatagaaacgttgttcacaaattttaagactctcaggtattaaagtatattcaa

SEQ ID NO: 51231 - DNA, 70 bp, Homo sapiens
aggactatagaaacgttgttcacaaattttaagactctcaggtattaaagtatattcaaaacagagaaca

SEQ ID NO: 51232 - DNA, 77 bp, Homo sapiens
tcacaaattttaagactctcaggtattaaagtatattcaaaacagagaacataggtactgttcagccaccagatgca

SEQ ID NO: 51233 - DNA, 76 bp, Homo sapiens
tttaagactctcaggtattaaagtatattcaaaacagagaacataggtactgttcagccaccagatgcaaatttca

SEQ ID NO: 51234 - DNA, 77 bp, Homo sapiens
aggtattaaagtatattcaaaacagagaacataggtactgttcagccaccagatgcaaatttcatgagatatccctc

SEQ ID NO: 51235 - DNA, 80 bp, Homo sapiens
aaacagagaacataggtactgttcagccaccagatgcaaatttcatgagatatccctctctggttgtctcgtggatccca

SEQ ID NO: 51236 - DNA, 79 bp, Homo sapiens
agatgcaaatttcatgagatatccctctctggttgtctcgtggatcccagagcccagcaaaccttgggaatacatttga

SEQ ID NO: 51237 - DNA, 76 bp, Homo sapiens
agatatccctctctggttgtctcgtggatcccagagcccagcaaaccttgggaatacatttgagttgggcacctgc

SEQ ID NO: 51238 - DNA, 76 bp, Homo sapiens
ctctggttgtctcgtggatcccagagcccagcaaaccttgggaatacatttgagttgggcacctgcctctaagaca

SEQ ID NO: 51239 - DNA, 75 bp, Homo sapiens
tggatcccagagcccagcaaaccttgggaatacatttgagttgggcacctgcctctaagacaccccaggagaatc

SEQ ID NO: 51240 - DNA, 75 bp, Homo sapiens
agagcccagcaaaccttgggaatacatttgagttgggcacctgcctctaagacaccccaggagaatcctctctga

SEQ ID NO: 51241 - DNA, 74 bp, Homo sapiens
aaaccttgggaatacatttgagttgggcacctgcctctaagacaccccaggagaatcctctctgagcactgtgg

SEQ ID NO: 51242 - DNA, 80 bp, Homo sapiens
aatacatttgagttgggcacctgcctctaagacaccccaggagaatcctctctgagcactgtggtgatgcacagaacctg

SEQ ID NO: 51243 - DNA, 82 bp, Homo sapiens
tgggcacctgcctctaagacaccccaggagaatcctctctgagcactgtggtgatgcacagaacctgtgaatccccattcta

SEQ ID NO: 51244 - DNA, 79 bp, Homo sapiens
cctctaagacaccccaggagaatcctctctgagcactgtggtgatgcacagaacctgtgaatccccattctaaaatgga

SEQ ID NO: 51245 - DNA, 79 bp, Homo sapiens
aagacaccccaggagaatcctctctgagcactgtggtgatgcacagaacctgtgaatccccattctaaaatggaatctg

SEQ ID NO: 51246 - DNA, 80 bp, Homo sapiens
aatcctctctgagcactgtggtgatgcacagaacctgtgaatccccattctaaaatggaatctgttccagaagaaactca

SEQ ID NO: 51247 - DNA, 81 bp, Homo sapiens
tctctgagcactgtggtgatgcacagaacctgtgaatccccattctaaaatggaatctgttccagaagaaactcaggcctg

SEQ ID NO: 51248 - DNA, 75 bp, Homo sapiens
agaacctgtgaatccccattctaaaatggaatctgttccagaagaaactcaggcctggagacactgcactaggga

SEQ ID NO: 51249 - DNA, 75 bp, Homo sapiens
aatccccattctaaaatggaatctgttccagaagaaactcaggcctggagacactgcactagggagatagatttg

SEQ ID NO: 51250 - DNA, 75 bp, Homo sapiens
attctaaaatggaatctgttccagaagaaactcaggcctggagacactgcactagggagatagatttggtaacaa

SEQ ID NO: 51251 - DNA, 76 bp, Homo sapiens
aatctgttccagaagaaactcaggcctggagacactgcactagggagatagatttggtaacaagagtgaaaataca

SEQ ID NO: 51252 - DNA, 76 bp, Homo sapiens
acactgcactagggagatagatttggtaacaagagtgaaaatacaggtctcagacaggacttggcccaaagacaga

SEQ ID NO: 51253 - DNA, 72 bp, Homo sapiens
actagggagatagatttggtaacaagagtgaaaatacaggtctcagacaggacttggcccaaagacagaaaa

SEQ ID NO: 51254 - DNA, 73 bp, Homo sapiens
atagatttggtaacaagagtgaaaatacaggtctcagacaggacttggcccaaagacagaaaaaacactctga

SEQ ID NO: 51255 - DNA, 74 bp, Homo sapiens
agagtgaaaatacaggtctcagacaggacttggcccaaagacagaaaaaacactctgacctcctggacagctaa

SEQ ID NO: 51256 - DNA, 73 bp, Homo sapiens
aaaatacaggtctcagacaggacttggcccaaagacagaaaaaacactctgacctcctggacagctaaagaca

SEQ ID NO: 51257 - DNA, 71 bp, Homo sapiens
agacaggacttggcccaaagacagaaaaaacactctgacctcctggacagctaaagacagtggtatttaaa

SEQ ID NO: 51258 - DNA, 69 bp, Homo sapiens
ggacttggcccaaagacagaaaaaacactctgacctcctggacagctaaagacagtggtatttaaaaaa

SEQ ID NO: 51259 - DNA, 66 bp, Homo sapiens
acctcctggacagctaaagacagtggtatttaaaaaaaatcattttaggggatggaggttttatcc

SEQ ID NO: 51260 - DNA, 68 bp, Homo sapiens
gctaaagacagtggtatttaaaaaaaatcattttaggggatggaggttttatcctcaggggtatcatc

SEQ ID NO: 51261 - DNA, 67 bp, Homo sapiens
cagtggtatttaaaaaaaatcattttaggggatggaggttttatcctcaggggtatcatctaggtct

SEQ ID NO: 51262 - DNA, 72 bp, Homo sapiens
ttttatcctcaggggtatcatctaggtctttcatcctgatcttcctaggagactatataggtaacctaaagg

SEQ ID NO: 51263 - DNA, 76 bp, Homo sapiens
ggtatcatctaggtctttcatcctgatcttcctaggagactatataggtaacctaaaggtgcacatggaattgtct

SEQ ID NO: 51264 - DNA, 75 bp, Homo sapiens
atcctgatcttcctaggagactatataggtaacctaaaggtgcacatggaattgtcttgccagtggtttattcac

SEQ ID NO: 51265 - DNA, 73 bp, Homo sapiens
taggagactatataggtaacctaaaggtgcacatggaattgtcttgccagtggtttattcactgaaaacttat

SEQ ID NO: 51266 - DNA, 72 bp, Homo sapiens
actatataggtaacctaaaggtgcacatggaattgtcttgccagtggtttattcactgaaaacttattgtta

SEQ ID NO: 51267 - DNA, 74 bp, Homo sapiens
taacctaaaggtgcacatggaattgtcttgccagtggtttattcactgaaaacttattgttagaacattctgga

SEQ ID NO: 51268 - DNA, 74 bp, Homo sapiens
acatggaattgtcttgccagtggtttattcactgaaaacttattgttagaacattctggattgtgttcccagtg

SEQ ID NO: 51269 - DNA, 73 bp, Homo sapiens
aattgtcttgccagtggtttattcactgaaaacttattgttagaacattctggattgtgttcccagtgtgctt

SEQ ID NO: 51270 - DNA, 75 bp, Homo sapiens
agtggtttattcactgaaaacttattgttagaacattctggattgtgttcccagtgtgctttctcctcagccatc

SEQ ID NO: 51271 - DNA, 79 bp, Homo sapiens
tattcactgaaaacttattgttagaacattctggattgtgttcccagtgtgctttctcctcagccatcttgcaaagcaa

SEQ ID NO: 51272 - DNA, 78 bp, Homo sapiens
aaacttattgttagaacattctggattgtgttcccagtgtgctttctcctcagccatcttgcaaagcaactgcctcca

SEQ ID NO: 51273 - DNA, 80 bp, Homo sapiens
ttagaacattctggattgtgttcccagtgtgctttctcctcagccatcttgcaaagcaactgcctccagtccccttgtgc

SEQ ID NO: 51274 - DNA, 79 bp, Homo sapiens
attgtgttcccagtgtgctttctcctcagccatcttgcaaagcaactgcctccagtccccttgtgccccagctctccta

SEQ ID NO: 51275 - DNA, 81 bp, Homo sapiens
agtgtgctttctcctcagccatcttgcaaagcaactgcctccagtccccttgtgccccagctctcctatgtgtggatttca

SEQ ID NO: 51276 - DNA, 81 bp, Homo sapiens
tttctcctcagccatcttgcaaagcaactgcctccagtccccttgtgccccagctctcctatgtgtggatttcatactaga

SEQ ID NO: 51277 - DNA, 82 bp, Homo sapiens
atcttgcaaagcaactgcctccagtccccttgtgccccagctctcctatgtgtggatttcatactagatgtagattgcacag

SEQ ID NO: 51278 - DNA, 82 bp, Homo sapiens
aaagcaactgcctccagtccccttgtgccccagctctcctatgtgtggatttcatactagatgtagattgcacagtgatgac

SEQ ID NO: 51279 - DNA, 84 bp, Homo sapiens
tccagtccccttgtgccccagctctcctatgtgtggatttcatactagatgtagattgcacagtgatgaccacagtgcgtggaa

SEQ ID NO: 51280 - DNA, 85 bp, Homo sapiens
cttgtgccccagctctcctatgtgtggatttcatactagatgtagattgcacagtgatgaccacagtgcgtggaaaagcaggtga

SEQ ID NO: 51281 - DNA, 83 bp, Homo sapiens
tgtggatttcatactagatgtagattgcacagtgatgaccacagtgcgtggaaaagcaggtgagaaaaatcacaggatcttat

SEQ ID NO: 51282 - DNA, 81 bp, Homo sapiens
atttcatactagatgtagattgcacagtgatgaccacagtgcgtggaaaagcaggtgagaaaaatcacaggatcttattcc

SEQ ID NO: 51283 - DNA, 75 bp, Homo sapiens
acagtgatgaccacagtgcgtggaaaagcaggtgagaaaaatcacaggatcttattccctctttctgtttgaaat

SEQ ID NO: 51284 - DNA, 73 bp, Homo sapiens
accacagtgcgtggaaaagcaggtgagaaaaatcacaggatcttattccctctttctgtttgaaattccagcc

SEQ ID NO: 51285 - DNA, 75 bp, Homo sapiens
cgtggaaaagcaggtgagaaaaatcacaggatcttattccctctttctgtttgaaattccagccctgcagagcac

SEQ ID NO: 51286 - DNA, 74 bp, Homo sapiens
gtgagaaaaatcacaggatcttattccctctttctgtttgaaattccagccctgcagagcaccgggcaatttat

SEQ ID NO: 51287 - DNA, 74 bp, Homo sapiens
aaaatcacaggatcttattccctctttctgtttgaaattccagccctgcagagcaccgggcaatttattgctct

SEQ ID NO: 51288 - DNA, 72 bp, Homo sapiens
ctctttctgtttgaaattccagccctgcagagcaccgggcaatttattgctcttttccaccagttgtttctt

SEQ ID NO: 51289 - DNA, 74 bp, Homo sapiens
tttgaaattccagccctgcagagcaccgggcaatttattgctcttttccaccagttgtttctttcctgtagatg

SEQ ID NO: 51290 - DNA, 79 bp, Homo sapiens
ctgcagagcaccgggcaatttattgctcttttccaccagttgtttctttcctgtagatgtctgacactgagtagagaga

SEQ ID NO: 51291 - DNA, 73 bp, Homo sapiens
accgggcaatttattgctcttttccaccagttgtttctttcctgtagatgtctgacactgagtagagagaccc

SEQ ID NO: 51292 - DNA, 76 bp, Homo sapiens
atttattgctcttttccaccagttgtttctttcctgtagatgtctgacactgagtagagagaccctcactcaccaa

SEQ ID NO: 51293 - DNA, 78 bp, Homo sapiens
tcttttccaccagttgtttctttcctgtagatgtctgacactgagtagagagaccctcactcaccaagcacaagacaa

SEQ ID NO: 51294 - DNA, 80 bp, Homo sapiens
agttgtttctttcctgtagatgtctgacactgagtagagagaccctcactcaccaagcacaagacaagctgtggtgactc

SEQ ID NO: 51295 - DNA, 82 bp, Homo sapiens
ctttcctgtagatgtctgacactgagtagagagaccctcactcaccaagcacaagacaagctgtggtgactccctgagagtc

SEQ ID NO: 51296 - DNA, 87 bp, Homo sapiens
atgtctgacactgagtagagagaccctcactcaccaagcacaagacaagctgtggtgactccctgagagtctgcgctggcgctagca

SEQ ID NO: 51297 - DNA, 88 bp, Homo sapiens
actgagtagagagaccctcactcaccaagcacaagacaagctgtggtgactccctgagagtctgcgctggcgctagcagcagctgata

SEQ ID NO: 51298 - DNA, 88 bp, Homo sapiens
accctcactcaccaagcacaagacaagctgtggtgactccctgagagtctgcgctggcgctagcagcagctgatatggaagcagcatt

SEQ ID NO: 51299 - DNA, 89 bp, Homo sapiens
acaagctgtggtgactccctgagagtctgcgctggcgctagcagcagctgatatggaagcagcatttctggggcgtcatcagtacatct

SEQ ID NO: 51300 - DNA, 92 bp, Homo sapiens
tgtggtgactccctgagagtctgcgctggcgctagcagcagctgatatggaagcagcatttctggggcgtcatcagtacatcttcatgtgga

SEQ ID NO: 51301 - DNA, 90 bp, Homo sapiens
tccctgagagtctgcgctggcgctagcagcagctgatatggaagcagcatttctggggcgtcatcagtacatcttcatgtggagacaatt

SEQ ID NO: 51302 - DNA, 87 bp, Homo sapiens
gctggcgctagcagcagctgatatggaagcagcatttctggggcgtcatcagtacatcttcatgtggagacaatttggggggcacca

SEQ ID NO: 51303 - DNA, 79 bp, Homo sapiens
atatggaagcagcatttctggggcgtcatcagtacatcttcatgtggagacaatttggggggcaccatctatttcctgg

SEQ ID NO: 51304 - DNA, 78 bp, Homo sapiens
aagcagcatttctggggcgtcatcagtacatcttcatgtggagacaatttggggggcaccatctatttcctgggtcaa

SEQ ID NO: 51305 - DNA, 78 bp, Homo sapiens
gggcgtcatcagtacatcttcatgtggagacaatttggggggcaccatctatttcctgggtcaagctctttgccacaa

SEQ ID NO: 51306 - DNA, 74 bp, Homo sapiens
agtacatcttcatgtggagacaatttggggggcaccatctatttcctgggtcaagctctttgccacaaacccaa

SEQ ID NO: 51307 - DNA, 73 bp, Homo sapiens
atcttcatgtggagacaatttggggggcaccatctatttcctgggtcaagctctttgccacaaacccaattcc

SEQ ID NO: 51308 - DNA, 70 bp, Homo sapiens
agacaatttggggggcaccatctatttcctgggtcaagctctttgccacaaacccaattccctccacttg

SEQ ID NO: 51309 - DNA, 77 bp, Homo sapiens
ggcaccatctatttcctgggtcaagctctttgccacaaacccaattccctccacttgggatgcagaactcactgcaa

SEQ ID NO: 51310 - DNA, 81 bp, Homo sapiens
tcaagctctttgccacaaacccaattccctccacttgggatgcagaactcactgcaactgacagtcatatctctaatgaaa

SEQ ID NO: 51311 - DNA, 78 bp, Homo sapiens
ctctttgccacaaacccaattccctccacttgggatgcagaactcactgcaactgacagtcatatctctaatgaaaaa

SEQ ID NO: 51312 - DNA, 74 bp, Homo sapiens
aaacccaattccctccacttgggatgcagaactcactgcaactgacagtcatatctctaatgaaaaaaaaaatc

SEQ ID NO: 51313 - DNA, 68 bp, Homo sapiens
aaaaaaaatctgtttctgaataggattgtgaagaagaaagaaccgtgcgtgtgtcgaagttataaacc

SEQ ID NO: 51314 - DNA, 72 bp, Homo sapiens
tgtttctgaataggattgtgaagaagaaagaaccgtgcgtgtgtcgaagttataaacctgccacgttctaaa

SEQ ID NO: 51315 - DNA, 70 bp, Homo sapiens
aataggattgtgaagaagaaagaaccgtgcgtgtgtcgaagttataaacctgccacgttctaaacccaca

SEQ ID NO: 51316 - DNA, 68 bp, Homo sapiens
aagaagaaagaaccgtgcgtgtgtcgaagttataaacctgccacgttctaaacccacagaaaaggaca

SEQ ID NO: 51317 - DNA, 67 bp, Homo sapiens
aaagaaccgtgcgtgtgtcgaagttataaacctgccacgttctaaacccacagaaaaggacaaacaa

SEQ ID NO: 51318 - DNA, 69 bp, Homo sapiens
aagttataaacctgccacgttctaaacccacagaaaaggacaaacaagatatcattctaaatgtccttc

SEQ ID NO: 51319 - DNA, 71 bp, Homo sapiens
ctgccacgttctaaacccacagaaaaggacaaacaagatatcattctaaatgtccttcttttctggacatt

SEQ ID NO: 51320 - DNA, 74 bp, Homo sapiens
aacccacagaaaaggacaaacaagatatcattctaaatgtccttcttttctggacatttcagcatctaacaaca

SEQ ID NO: 51321 - DNA, 73 bp, Homo sapiens
aaaaggacaaacaagatatcattctaaatgtccttcttttctggacatttcagcatctaacaacaccccttga

SEQ ID NO: 51322 - DNA, 76 bp, Homo sapiens
aacaagatatcattctaaatgtccttcttttctggacatttcagcatctaacaacaccccttgatctgcagtaaaa

SEQ ID NO: 51323 - DNA, 77 bp, Homo sapiens
tatcattctaaatgtccttcttttctggacatttcagcatctaacaacaccccttgatctgcagtaaaatcaagaaa

SEQ ID NO: 51324 - DNA, 78 bp, Homo sapiens
atgtccttcttttctggacatttcagcatctaacaacaccccttgatctgcagtaaaatcaagaaacatgtgtgtata

SEQ ID NO: 51325 - DNA, 78 bp, Homo sapiens
ttttctggacatttcagcatctaacaacaccccttgatctgcagtaaaatcaagaaacatgtgtgtatacatccaaag

SEQ ID NO: 51326 - DNA, 77 bp, Homo sapiens
atttcagcatctaacaacaccccttgatctgcagtaaaatcaagaaacatgtgtgtatacatccaaaggcctgaaaa

SEQ ID NO: 51327 - DNA, 76 bp, Homo sapiens
ttgatctgcagtaaaatcaagaaacatgtgtgtatacatccaaaggcctgaaaaattcccaaacaagaattctcaa

SEQ ID NO: 51328 - DNA, 73 bp, Homo sapiens
gcagtaaaatcaagaaacatgtgtgtatacatccaaaggcctgaaaaattcccaaacaagaattctcaataaa

SEQ ID NO: 51329 - DNA, 76 bp, Homo sapiens
gaaacatgtgtgtatacatccaaaggcctgaaaaattcccaaacaagaattctcaataaaattctatgcactcaga

SEQ ID NO: 51330 - DNA, 71 bp, Homo sapiens
aaaggcctgaaaaattcccaaacaagaattctcaataaaattctatgcactcagagggttaacaagtgcta

SEQ ID NO: 51331 - DNA, 76 bp, Homo sapiens
aaattcccaaacaagaattctcaataaaattctatgcactcagagggttaacaagtgctatattacatactgcaga

SEQ ID NO: 51332 - DNA, 79 bp, Homo sapiens
aaacaagaattctcaataaaattctatgcactcagagggttaacaagtgctatattacatactgcagatcctagcttga

SEQ ID NO: 51333 - DNA, 81 bp, Homo sapiens
attctcaataaaattctatgcactcagagggttaacaagtgctatattacatactgcagatcctagcttgactgatgaaaa

SEQ ID NO: 51334 - DNA, 82 bp, Homo sapiens
aaaattctatgcactcagagggttaacaagtgctatattacatactgcagatcctagcttgactgatgaaaacattcattgc

SEQ ID NO: 51335 - DNA, 80 bp, Homo sapiens
tcagagggttaacaagtgctatattacatactgcagatcctagcttgactgatgaaaacattcattgcttctaagtttaa

SEQ ID NO: 51336 - DNA, 77 bp, Homo sapiens
ggttaacaagtgctatattacatactgcagatcctagcttgactgatgaaaacattcattgcttctaagtttaaaaa

SEQ ID NO: 51337 - DNA, 77 bp, Homo sapiens
gctatattacatactgcagatcctagcttgactgatgaaaacattcattgcttctaagtttaaaaaaaaattgcaaa

SEQ ID NO: 51338 - DNA, 70 bp, Homo sapiens
ttaaaaaaaaattgcaaattggccttaaccctttgaggactctattagcagcaaattaccatcttcacaa

SEQ ID NO: 51339 - DNA, 72 bp, Homo sapiens
aaaaattgcaaattggccttaaccctttgaggactctattagcagcaaattaccatcttcacaatcaccacg

SEQ ID NO: 51340 - DNA, 74 bp, Homo sapiens
aaattggccttaaccctttgaggactctattagcagcaaattaccatcttcacaatcaccacgtgtcatcttat

SEQ ID NO: 51341 - DNA, 76 bp, Homo sapiens
taaccctttgaggactctattagcagcaaattaccatcttcacaatcaccacgtgtcatcttattcagtaaaggga

SEQ ID NO: 51342 - DNA, 77 bp, Homo sapiens
tctattagcagcaaattaccatcttcacaatcaccacgtgtcatcttattcagtaaagggaaaccgctacaaagata

SEQ ID NO: 51343 - DNA, 74 bp, Homo sapiens
agcaaattaccatcttcacaatcaccacgtgtcatcttattcagtaaagggaaaccgctacaaagatacctgaa

SEQ ID NO: 51344 - DNA, 73 bp, Homo sapiens
atcttcacaatcaccacgtgtcatcttattcagtaaagggaaaccgctacaaagatacctgaaaacactttca

SEQ ID NO: 51345 - DNA, 71 bp, Homo sapiens
acaatcaccacgtgtcatcttattcagtaaagggaaaccgctacaaagatacctgaaaacactttcagttc

SEQ ID NO: 51346 - DNA, 75 bp, Homo sapiens
ttattcagtaaagggaaaccgctacaaagatacctgaaaacactttcagttctgccattcaagcattgagcgcta

SEQ ID NO: 51347 - DNA, 79 bp, Homo sapiens
aaaccgctacaaagatacctgaaaacactttcagttctgccattcaagcattgagcgctagatagatcagatgaaactg

SEQ ID NO: 51348 - DNA, 79 bp, Homo sapiens
aaagatacctgaaaacactttcagttctgccattcaagcattgagcgctagatagatcagatgaaactgttttacacaa

SEQ ID NO: 51349 - DNA, 78 bp, Homo sapiens
acctgaaaacactttcagttctgccattcaagcattgagcgctagatagatcagatgaaactgttttacacaaatttg

SEQ ID NO: 51350 - DNA, 76 bp, Homo sapiens
aaaacactttcagttctgccattcaagcattgagcgctagatagatcagatgaaactgttttacacaaatttgggg

SEQ ID NO: 51351 - DNA, 76 bp, Homo sapiens
actttcagttctgccattcaagcattgagcgctagatagatcagatgaaactgttttacacaaatttgggggaaaa

SEQ ID NO: 51352 - DNA, 75 bp, Homo sapiens
agttctgccattcaagcattgagcgctagatagatcagatgaaactgttttacacaaatttgggggaaaaaaatc

SEQ ID NO: 51353 - DNA, 75 bp, Homo sapiens
aagcattgagcgctagatagatcagatgaaactgttttacacaaatttgggggaaaaaaatctcagagtctcaaa

SEQ ID NO: 51354 - DNA, 71 bp, Homo sapiens
cgctagatagatcagatgaaactgttttacacaaatttgggggaaaaaaatctcagagtctcaaagggtta

SEQ ID NO: 51355 - DNA, 70 bp, Homo sapiens
agatagatcagatgaaactgttttacacaaatttgggggaaaaaaatctcagagtctcaaagggttaagc

SEQ ID NO: 51356 - DNA, 66 bp, Homo sapiens
ttacacaaatttgggggaaaaaaatctcagagtctcaaagggttaagctaggactttgagtaaaag

SEQ ID NO: 51357 - DNA, 65 bp, Homo sapiens
gggaaaaaaatctcagagtctcaaagggttaagctaggactttgagtaaaagggtcttattaaaa

SEQ ID NO: 51358 - DNA, 66 bp, Homo sapiens
aaaaatctcagagtctcaaagggttaagctaggactttgagtaaaagggtcttattaaaagggcga

SEQ ID NO: 51359 - DNA, 64 bp, Homo sapiens
agtctcaaagggttaagctaggactttgagtaaaagggtcttattaaaagggcgagttagggga

SEQ ID NO: 51360 - DNA, 66 bp, Homo sapiens
actttgagtaaaagggtcttattaaaagggcgagttaggggagcgaacagtctcggaggagcttgg

SEQ ID NO: 51361 - DNA, 66 bp, Homo sapiens
aaagggtcttattaaaagggcgagttaggggagcgaacagtctcggaggagcttggggagtagtct

SEQ ID NO: 51362 - DNA, 69 bp, Homo sapiens
ttattaaaagggcgagttaggggagcgaacagtctcggaggagcttggggagtagtcttccgattccga

SEQ ID NO: 51363 - DNA, 69 bp, Homo sapiens
agttaggggagcgaacagtctcggaggagcttggggagtagtcttccgattccgagttgagttcgggag

SEQ ID NO: 51364 - DNA, 74 bp, Homo sapiens
gggagcgaacagtctcggaggagcttggggagtagtcttccgattccgagttgagttcgggaggagctggctgc

SEQ ID NO: 51365 - DNA, 73 bp, Homo sapiens
agtctcggaggagcttggggagtagtcttccgattccgagttgagttcgggaggagctggctgcgccttgtac

SEQ ID NO: 51366 - DNA, 74 bp, Homo sapiens
agcttggggagtagtcttccgattccgagttgagttcgggaggagctggctgcgccttgtaccggctcctcaca

SEQ ID NO: 51367 - DNA, 75 bp, Homo sapiens
agtagtcttccgattccgagttgagttcgggaggagctggctgcgccttgtaccggctcctcacatcctggttgc

SEQ ID NO: 51368 - DNA, 75 bp, Homo sapiens
tccgagttgagttcgggaggagctggctgcgccttgtaccggctcctcacatcctggttgcgtcttcgtcggaaa

SEQ ID NO: 51369 - DNA, 75 bp, Homo sapiens
ttgagttcgggaggagctggctgcgccttgtaccggctcctcacatcctggttgcgtcttcgtcggaaaacctgc

SEQ ID NO: 51370 - DNA, 76 bp, Homo sapiens
agctggctgcgccttgtaccggctcctcacatcctggttgcgtcttcgtcggaaaacctgcctctccttatcaaga

SEQ ID NO: 51371 - DNA, 75 bp, Homo sapiens
tgcgccttgtaccggctcctcacatcctggttgcgtcttcgtcggaaaacctgcctctccttatcaagagcggtg

SEQ ID NO: 51372 - DNA, 75 bp, Homo sapiens
gtaccggctcctcacatcctggttgcgtcttcgtcggaaaacctgcctctccttatcaagagcggtggtctagca

SEQ ID NO: 51373 - DNA, 74 bp, Homo sapiens
atcctggttgcgtcttcgtcggaaaacctgcctctccttatcaagagcggtggtctagcaggggcataaaatga

SEQ ID NO: 51374 - DNA, 74 bp, Homo sapiens
tcgtcggaaaacctgcctctccttatcaagagcggtggtctagcaggggcataaaatgagaaagaggacaatta

SEQ ID NO: 51375 - DNA, 83 bp, Homo sapiens
gttaatggagactgccagcacgttgccatggaaacactgactgttgagctgcaccatctcataccttatccaatacattcctg

SEQ ID NO: 51376 - DNA, 82 bp, Homo sapiens
cagcacgttgccatggaaacactgactgttgagctgcaccatctcataccttatccaatacattcctggttgctggtagtag

SEQ ID NO: 51377 - DNA, 80 bp, Homo sapiens
ccatggaaacactgactgttgagctgcaccatctcataccttatccaatacattcctggttgctggtagtagtccaaaga

SEQ ID NO: 51378 - DNA, 77 bp, Homo sapiens
aaacactgactgttgagctgcaccatctcataccttatccaatacattcctggttgctggtagtagtccaaagaccc

SEQ ID NO: 51379 - DNA, 81 bp, Homo sapiens
tgagctgcaccatctcataccttatccaatacattcctggttgctggtagtagtccaaagaccctgatctcttgatggtaa

SEQ ID NO: 51380 - DNA, 75 bp, Homo sapiens
accatctcataccttatccaatacattcctggttgctggtagtagtccaaagaccctgatctcttgatggtaaac

SEQ ID NO: 51381 - DNA, 72 bp, Homo sapiens
ataccttatccaatacattcctggttgctggtagtagtccaaagaccctgatctcttgatggtaaacccgtg

SEQ ID NO: 51382 - DNA, 76 bp, Homo sapiens
aatacattcctggttgctggtagtagtccaaagaccctgatctcttgatggtaaacccgtggtccagctgagcaga

SEQ ID NO: 51383 - DNA, 76 bp, Homo sapiens
ctggttgctggtagtagtccaaagaccctgatctcttgatggtaaacccgtggtccagctgagcagagagaaatgg

SEQ ID NO: 51384 - DNA, 77 bp, Homo sapiens
tagtagtccaaagaccctgatctcttgatggtaaacccgtggtccagctgagcagagagaaatggggcaactcagtg

SEQ ID NO: 51385 - DNA, 81 bp, Homo sapiens
ccctgatctcttgatggtaaacccgtggtccagctgagcagagagaaatggggcaactcagtggatcagcattgtgctaaa

SEQ ID NO: 51386 - DNA, 75 bp, Homo sapiens
ttaggtgggttgctttaaaaaaagttataggtggatatttcagatgcttactgctatgacagaaactccagctgc

SEQ ID NO: 51387 - DNA, 78 bp, Homo sapiens
ttaaaaaaagttataggtggatatttcagatgcttactgctatgacagaaactccagctgctgtgctattcggcttgg

SEQ ID NO: 51388 - DNA, 82 bp, Homo sapiens
ttataggtggatatttcagatgcttactgctatgacagaaactccagctgctgtgctattcggcttggggcctgtgttgaaa

SEQ ID NO: 51389 - DNA, 82 bp, Homo sapiens
atatttcagatgcttactgctatgacagaaactccagctgctgtgctattcggcttggggcctgtgttgaaatgcttcttta

SEQ ID NO: 51390 - DNA, 81 bp, Homo sapiens
agatgcttactgctatgacagaaactccagctgctgtgctattcggcttggggcctgtgttgaaatgcttctttatctttc

SEQ ID NO: 51391 - DNA, 81 bp, Homo sapiens
ctatgacagaaactccagctgctgtgctattcggcttggggcctgtgttgaaatgcttctttatctttccagctactgaca

SEQ ID NO: 51392 - DNA, 80 bp, Homo sapiens
aaactccagctgctgtgctattcggcttggggcctgtgttgaaatgcttctttatctttccagctactgacagctgatgt

SEQ ID NO: 51393 - DNA, 80 bp, Homo sapiens
tgtgctattcggcttggggcctgtgttgaaatgcttctttatctttccagctactgacagctgatgttcattttctggga

SEQ ID NO: 51394 - DNA, 78 bp, Homo sapiens
tattcggcttggggcctgtgttgaaatgcttctttatctttccagctactgacagctgatgttcattttctgggaggc

SEQ ID NO: 51395 - DNA, 80 bp, Homo sapiens
ctgtgttgaaatgcttctttatctttccagctactgacagctgatgttcattttctgggaggccatcatcctggagaaaa

SEQ ID NO: 51396 - DNA, 77 bp, Homo sapiens
aaatgcttctttatctttccagctactgacagctgatgttcattttctgggaggccatcatcctggagaaaaagaaa

SEQ ID NO: 51397 - DNA, 68 bp, Homo sapiens
actgatttttaaaaggaatgttaggagagaacaaaggaaatggtgcgagtcacttacattaacccagg

SEQ ID NO: 51398 - DNA, 71 bp, Homo sapiens
ttttaaaaggaatgttaggagagaacaaaggaaatggtgcgagtcacttacattaacccagggatgctcaa

SEQ ID NO: 51399 - DNA, 75 bp, Homo sapiens
taggagagaacaaaggaaatggtgcgagtcacttacattaacccagggatgctcaagtacttgaacagcagaaaa

SEQ ID NO: 51400 - DNA, 77 bp, Homo sapiens
acaaaggaaatggtgcgagtcacttacattaacccagggatgctcaagtacttgaacagcagaaaatcgctgatcta

SEQ ID NO: 51401 - DNA, 79 bp, Homo sapiens
aaatggtgcgagtcacttacattaacccagggatgctcaagtacttgaacagcagaaaatcgctgatctacatcgacca

SEQ ID NO: 51402 - DNA, 80 bp, Homo sapiens
acttacattaacccagggatgctcaagtacttgaacagcagaaaatcgctgatctacatcgaccaacagcatcatggtaa

SEQ ID NO: 51403 - DNA, 82 bp, Homo sapiens
attaacccagggatgctcaagtacttgaacagcagaaaatcgctgatctacatcgaccaacagcatcatggtaatgagctcc

SEQ ID NO: 51404 - DNA, 83 bp, Homo sapiens
atgctcaagtacttgaacagcagaaaatcgctgatctacatcgaccaacagcatcatggtaatgagctcctgtgaaggggaac

SEQ ID NO: 51405 - DNA, 80 bp, Homo sapiens
agtacttgaacagcagaaaatcgctgatctacatcgaccaacagcatcatggtaatgagctcctgtgaaggggaacgtta

SEQ ID NO: 51406 - DNA, 79 bp, Homo sapiens
agaaaatcgctgatctacatcgaccaacagcatcatggtaatgagctcctgtgaaggggaacgttagagtccatttatc

SEQ ID NO: 51407 - DNA, 79 bp, Homo sapiens
ctgatctacatcgaccaacagcatcatggtaatgagctcctgtgaaggggaacgttagagtccatttatctgaatttaa

SEQ ID NO: 51408 - DNA, 73 bp, Homo sapiens
ttccgttaagacacacagaatatagggaagaggaaggcactggacacctacctttgcagaatcggaaacatta

SEQ ID NO: 51409 - DNA, 75 bp, Homo sapiens
cacagaatatagggaagaggaaggcactggacacctacctttgcagaatcggaaacattatcccagtatggagaa

SEQ ID NO: 51410 - DNA, 73 bp, Homo sapiens
tatagggaagaggaaggcactggacacctacctttgcagaatcggaaacattatcccagtatggagaaggaaa

SEQ ID NO: 51411 - DNA, 72 bp, Homo sapiens
agaggaaggcactggacacctacctttgcagaatcggaaacattatcccagtatggagaaggaaagtccacc

SEQ ID NO: 51412 - DNA, 72 bp, Homo sapiens
acacctacctttgcagaatcggaaacattatcccagtatggagaaggaaagtccacctgccccatcaaaatc

SEQ ID NO: 51413 - DNA, 74 bp, Homo sapiens
ctttgcagaatcggaaacattatcccagtatggagaaggaaagtccacctgccccatcaaaatctgatcaaaaa

SEQ ID NO: 51414 - DNA, 73 bp, Homo sapiens
aatcggaaacattatcccagtatggagaaggaaagtccacctgccccatcaaaatctgatcaaaaagcacctc

SEQ ID NO: 51415 - DNA, 76 bp, Homo sapiens
attatcccagtatggagaaggaaagtccacctgccccatcaaaatctgatcaaaaagcacctcctggtcatcacca

SEQ ID NO: 51416 - DNA, 76 bp, Homo sapiens
tatggagaaggaaagtccacctgccccatcaaaatctgatcaaaaagcacctcctggtcatcaccacttctgttta

SEQ ID NO: 51417 - DNA, 74 bp, Homo sapiens
aaagtccacctgccccatcaaaatctgatcaaaaagcacctcctggtcatcaccacttctgtttaggtgaacga

SEQ ID NO: 51418 - DNA, 73 bp, Homo sapiens
cccatcaaaatctgatcaaaaagcacctcctggtcatcaccacttctgtttaggtgaacgacaacaaggaaaa

SEQ ID NO: 51419 - DNA, 73 bp, Homo sapiens
aaaatctgatcaaaaagcacctcctggtcatcaccacttctgtttaggtgaacgacaacaaggaaaaacagca

SEQ ID NO: 51420 - DNA, 76 bp, Homo sapiens
atcactcagagagtagagaaatgctttgtcggcgctgaataaaagattgttgcccatacccacggaatggagggaa

SEQ ID NO: 51421 - DNA, 73 bp, Homo sapiens
agagtagagaaatgctttgtcggcgctgaataaaagattgttgcccatacccacggaatggagggaaaccaca

SEQ ID NO: 51422 - DNA, 75 bp, Homo sapiens
aatgctttgtcggcgctgaataaaagattgttgcccatacccacggaatggagggaaaccacacagcaggatata

SEQ ID NO: 51423 - DNA, 74 bp, Homo sapiens
cgctgaataaaagattgttgcccatacccacggaatggagggaaaccacacagcaggatataagtgattacacc

SEQ ID NO: 51424 - DNA, 75 bp, Homo sapiens
aataaaagattgttgcccatacccacggaatggagggaaaccacacagcaggatataagtgattacacctgctgc

SEQ ID NO: 51425 - DNA, 77 bp, Homo sapiens
ttgcccatacccacggaatggagggaaaccacacagcaggatataagtgattacacctgctgcccagatgtccacct

SEQ ID NO: 51426 - DNA, 77 bp, Homo sapiens
acggaatggagggaaaccacacagcaggatataagtgattacacctgctgcccagatgtccaccttgaggccgtatc

SEQ ID NO: 51427 - DNA, 77 bp, Homo sapiens
ggaaaccacacagcaggatataagtgattacacctgctgcccagatgtccaccttgaggccgtatctggaaaaataa

SEQ ID NO: 51428 - DNA, 77 bp, Homo sapiens
acagcaggatataagtgattacacctgctgcccagatgtccaccttgaggccgtatctggaaaaataagggatgtta

SEQ ID NO: 51429 - DNA, 75 bp, Homo sapiens
atataagtgattacacctgctgcccagatgtccaccttgaggccgtatctggaaaaataagggatgttagagtta

SEQ ID NO: 51430 - DNA, 72 bp, Homo sapiens
attacacctgctgcccagatgtccaccttgaggccgtatctggaaaaataagggatgttagagttaggaggg

SEQ ID NO: 51431 - DNA, 72 bp, Homo sapiens
ccagatgtccaccttgaggccgtatctggaaaaataagggatgttagagttaggagggtcaggctcggacaa

SEQ ID NO: 51432 - DNA, 80 bp, Homo sapiens
tagttcttttgcaagcatagcacttaaacataagagaagcatttacccagtctctgcaatgatttctggagccacgtatg

SEQ ID NO: 51433 - DNA, 79 bp, Homo sapiens
ttttgcaagcatagcacttaaacataagagaagcatttacccagtctctgcaatgatttctggagccacgtatgttggg

SEQ ID NO: 51434 - DNA, 79 bp, Homo sapiens
atagcacttaaacataagagaagcatttacccagtctctgcaatgatttctggagccacgtatgttggggtgccacaga

SEQ ID NO: 51435 - DNA, 79 bp, Homo sapiens
aaacataagagaagcatttacccagtctctgcaatgatttctggagccacgtatgttggggtgccacagactgtgtaca

SEQ ID NO: 51436 - DNA, 76 bp, Homo sapiens
atttacccagtctctgcaatgatttctggagccacgtatgttggggtgccacagactgtgtacagggggccgtcta

SEQ ID NO: 51437 - DNA, 78 bp, Homo sapiens
agtctctgcaatgatttctggagccacgtatgttggggtgccacagactgtgtacagggggccgtctacaatggtggc

SEQ ID NO: 51438 - DNA, 76 bp, Homo sapiens
tgatttctggagccacgtatgttggggtgccacagactgtgtacagggggccgtctacaatggtggccagtccaaa

SEQ ID NO: 51439 - DNA, 75 bp, Homo sapiens
ctggagccacgtatgttggggtgccacagactgtgtacagggggccgtctacaatggtggccagtccaaagtcac

SEQ ID NO: 51440 - DNA, 77 bp, Homo sapiens
tatgttggggtgccacagactgtgtacagggggccgtctacaatggtggccagtccaaagtcacccagcttcagtga

SEQ ID NO: 51441 - DNA, 78 bp, Homo sapiens
acagactgtgtacagggggccgtctacaatggtggccagtccaaagtcacccagcttcagtgatttgctgccatcttg

SEQ ID NO: 51442 - DNA, 81 bp, Homo sapiens
tgtgtacagggggccgtctacaatggtggccagtccaaagtcacccagcttcagtgatttgctgccatcttggtgctcata

SEQ ID NO: 51443 - DNA, 79 bp, Homo sapiens
cgtctacaatggtggccagtccaaagtcacccagcttcagtgatttgctgccatcttggtgctcatacacctaaaacaa

SEQ ID NO: 51444 - DNA, 77 bp, Homo sapiens
aatggtggccagtccaaagtcacccagcttcagtgatttgctgccatcttggtgctcatacacctaaaacaaaggta

SEQ ID NO: 51445 - DNA, 76 bp, Homo sapiens
tccaaagtcacccagcttcagtgatttgctgccatcttggtgctcatacacctaaaacaaaggtaaaaatcacaat

SEQ ID NO: 51446 - DNA, 76 bp, Homo sapiens
acccagcttcagtgatttgctgccatcttggtgctcatacacctaaaacaaaggtaaaaatcacaattgtctgaaa

SEQ ID NO: 51447 - DNA, 80 bp, Homo sapiens
ttcatgagtgcttggaactcaggatgccctgtaggtggaattcctcttaccagcaggttctctggcttgatatcacggtg

SEQ ID NO: 51448 - DNA, 78 bp, Homo sapiens
gaactcaggatgccctgtaggtggaattcctcttaccagcaggttctctggcttgatatcacggtggacgatgttcag

SEQ ID NO: 51449 - DNA, 80 bp, Homo sapiens
tgccctgtaggtggaattcctcttaccagcaggttctctggcttgatatcacggtggacgatgttcaggctatgcaggta

SEQ ID NO: 51450 - DNA, 80 bp, Homo sapiens
tgtaggtggaattcctcttaccagcaggttctctggcttgatatcacggtggacgatgttcaggctatgcaggtatttga

SEQ ID NO: 51451 - DNA, 82 bp, Homo sapiens
attcctcttaccagcaggttctctggcttgatatcacggtggacgatgttcaggctatgcaggtatttgatggcgctggcta

SEQ ID NO: 51452 - DNA, 82 bp, Homo sapiens
aggttctctggcttgatatcacggtggacgatgttcaggctatgcaggtatttgatggcgctggctaggttgtacagcatcc

SEQ ID NO: 51453 - DNA, 84 bp, Homo sapiens
tggcttgatatcacggtggacgatgttcaggctatgcaggtatttgatggcgctggctaggttgtacagcatcccactggcgtc

SEQ ID NO: 51454 - DNA, 83 bp, Homo sapiens
atatcacggtggacgatgttcaggctatgcaggtatttgatggcgctggctaggttgtacagcatcccactggcgtctctctc

SEQ ID NO: 51455 - DNA, 81 bp, Homo sapiens
atgttcaggctatgcaggtatttgatggcgctggctaggttgtacagcatcccactggcgtctctctcggtgtatttgtta

SEQ ID NO: 51456 - DNA, 80 bp, Homo sapiens
tatgcaggtatttgatggcgctggctaggttgtacagcatcccactggcgtctctctcggtgtatttgttagtggaagta

SEQ ID NO: 51457 - DNA, 76 bp, Homo sapiens
aggtatttgatggcgctggctaggttgtacagcatcccactggcgtctctctcggtgtatttgttagtggaagtaa

SEQ ID NO: 51458 - DNA, 78 bp, Homo sapiens
tggcgctggctaggttgtacagcatcccactggcgtctctctcggtgtatttgttagtggaagtaatggcatcaaaaa

SEQ ID NO: 51459 - DNA, 75 bp, Homo sapiens
taggttgtacagcatcccactggcgtctctctcggtgtatttgttagtggaagtaatggcatcaaaaaggtctcc

SEQ ID NO: 51460 - DNA, 72 bp, Homo sapiens
atcccactggcgtctctctcggtgtatttgttagtggaagtaatggcatcaaaaaggtctcccccctgagaa

SEQ ID NO: 51461 - DNA, 72 bp, Homo sapiens
cgtctctctcggtgtatttgttagtggaagtaatggcatcaaaaaggtctcccccctgagaagagaacagaa

SEQ ID NO: 51462 - DNA, 77 bp, Homo sapiens
tgtatttgttagtggaagtaatggcatcaaaaaggtctcccccctgagaagagaacagaagctgaagcagcacatta

SEQ ID NO: 51463 - DNA, 72 bp, Homo sapiens
aagtgcggtgccatcaataaagacttactttctttccaaaatacacacctttactaattccatgacaagata

SEQ ID NO: 51464 - DNA, 73 bp, Homo sapiens
gtgccatcaataaagacttactttctttccaaaatacacacctttactaattccatgacaagatacagttcag

SEQ ID NO: 51465 - DNA, 73 bp, Homo sapiens
aagacttactttctttccaaaatacacacctttactaattccatgacaagatacagttcagttggcacatcca

SEQ ID NO: 51466 - DNA, 78 bp, Homo sapiens
tttccaaaatacacacctttactaattccatgacaagatacagttcagttggcacatccatctcctcaatcagaagaa

SEQ ID NO: 51467 - DNA, 78 bp, Homo sapiens
aaatacacacctttactaattccatgacaagatacagttcagttggcacatccatctcctcaatcagaagaacgatat

SEQ ID NO: 51468 - DNA, 82 bp, Homo sapiens
ttactaattccatgacaagatacagttcagttggcacatccatctcctcaatcagaagaacgatattgggatgcttcactct

SEQ ID NO: 51469 - DNA, 81 bp, Homo sapiens
atgacaagatacagttcagttggcacatccatctcctcaatcagaagaacgatattgggatgcttcactcttcttaaaata

SEQ ID NO: 51470 - DNA, 79 bp, Homo sapiens
atacagttcagttggcacatccatctcctcaatcagaagaacgatattgggatgcttcactcttcttaaaatagacact

SEQ ID NO: 51471 - DNA, 80 bp, Homo sapiens
agttggcacatccatctcctcaatcagaagaacgatattgggatgcttcactcttcttaaaatagacacttcattctgga

SEQ ID NO: 51472 - DNA, 82 bp, Homo sapiens
atctcctcaatcagaagaacgatattgggatgcttcactcttcttaaaatagacacttcattctggatcatgtgctcctgtc

SEQ ID NO: 51473 - DNA, 79 bp, Homo sapiens
aatcagaagaacgatattgggatgcttcactcttcttaaaatagacacttcattctggatcatgtgctcctgtccaaag

SEQ ID NO: 51474 - DNA, 76 bp, Homo sapiens
aacgatattgggatgcttcactcttcttaaaatagacacttcattctggatcatgtgctcctgtccaaaggaaaag

SEQ ID NO: 51475 - DNA, 79 bp, Homo sapiens
atgcttcactcttcttaaaatagacacttcattctggatcatgtgctcctgtccaaaggaaaagttatcttcatcagct

SEQ ID NO: 51476 - DNA, 74 bp, Homo sapiens
gagtgatctttgtgtttcttttgacctcttgaacactcttatctcataagaacaaattttatacatactttgcc

SEQ ID NO: 51477 - DNA, 74 bp, Homo sapiens
gtgtttcttttgacctcttgaacactcttatctcataagaacaaattttatacatactttgcctcgacatttgc

SEQ ID NO: 51478 - DNA, 73 bp, Homo sapiens
cttttgacctcttgaacactcttatctcataagaacaaattttatacatactttgcctcgacatttgcttttc

SEQ ID NO: 51479 - DNA, 76 bp, Homo sapiens
tgaacactcttatctcataagaacaaattttatacatactttgcctcgacatttgcttttcttgataattttcaga

SEQ ID NO: 51480 - DNA, 79 bp, Homo sapiens
tctcataagaacaaattttatacatactttgcctcgacatttgcttttcttgataattttcagagcatactctctagca

SEQ ID NO: 51481 - DNA, 77 bp, Homo sapiens
aacaaattttatacatactttgcctcgacatttgcttttcttgataattttcagagcatactctctagcagtcgatc

SEQ ID NO: 51482 - DNA, 81 bp, Homo sapiens
ttatacatactttgcctcgacatttgcttttcttgataattttcagagcatactctctagcagtcgatctgcgaagagaaa

SEQ ID NO: 51483 - DNA, 80 bp, Homo sapiens
tttgcctcgacatttgcttttcttgataattttcagagcatactctctagcagtcgatctgcgaagagaaagttcatgtt

SEQ ID NO: 51484 - DNA, 77 bp, Homo sapiens
acatttgcttttcttgataattttcagagcatactctctagcagtcgatctgcgaagagaaagttcatgtttttaaa

SEQ ID NO: 51485 - DNA, 76 bp, Homo sapiens
tttcttgataattttcagagcatactctctagcagtcgatctgcgaagagaaagttcatgtttttaaaatgaaact

SEQ ID NO: 51486 - DNA, 76 bp, Homo sapiens
tttcagagcatactctctagcagtcgatctgcgaagagaaagttcatgtttttaaaatgaaacttaacttcaaatc

SEQ ID NO: 51487 - DNA, 75 bp, Homo sapiens
catactctctagcagtcgatctgcgaagagaaagttcatgtttttaaaatgaaacttaacttcaaatctattgaa

SEQ ID NO: 51488 - DNA, 73 bp, Homo sapiens
ataacgccaaatgtaacctttaaggtttgatgcaaatgatatccttctcacctttctacacattccttgacaa

SEQ ID NO: 51489 - DNA, 73 bp, Homo sapiens
atgtaacctttaaggtttgatgcaaatgatatccttctcacctttctacacattccttgacaacagcaaaatt

SEQ ID NO: 51490 - DNA, 78 bp, Homo sapiens
tttgatgcaaatgatatccttctcacctttctacacattccttgacaacagcaaaatttccatctcctattgttcttc

SEQ ID NO: 51491 - DNA, 74 bp, Homo sapiens
atgatatccttctcacctttctacacattccttgacaacagcaaaatttccatctcctattgttcttccgactt

SEQ ID NO: 51492 - DNA, 73 bp, Homo sapiens
ttctcacctttctacacattccttgacaacagcaaaatttccatctcctattgttcttccgactttatatcgt

SEQ ID NO: 51493 - DNA, 75 bp, Homo sapiens
tctacacattccttgacaacagcaaaatttccatctcctattgttcttccgactttatatcgttctgttattgta

SEQ ID NO: 51494 - DNA, 74 bp, Homo sapiens
ttccttgacaacagcaaaatttccatctcctattgttcttccgactttatatcgttctgttattgtagctggaa

SEQ ID NO: 51495 - DNA, 73 bp, Homo sapiens
agcaaaatttccatctcctattgttcttccgactttatatcgttctgttattgtagctggaatctggaagcct

SEQ ID NO: 51496 - DNA, 73 bp, Homo sapiens
atttccatctcctattgttcttccgactttatatcgttctgttattgtagctggaatctggaagccttcctcc

SEQ ID NO: 51497 - DNA, 74 bp, Homo sapiens
tattgttcttccgactttatatcgttctgttattgtagctggaatctggaagccttcctccgacacttctgaaa

SEQ ID NO: 51498 - DNA, 74 bp, Homo sapiens
actttatatcgttctgttattgtagctggaatctggaagccttcctccgacacttctgaaagaatcattaatac

SEQ ID NO: 51499 - DNA, 73 bp, Homo sapiens
atatcgttctgttattgtagctggaatctggaagccttcctccgacacttctgaaagaatcattaatactttt

SEQ ID NO: 51500 - DNA, 73 bp, Homo sapiens
ttattgtagctggaatctggaagccttcctccgacacttctgaaagaatcattaatacttttttattggttga

SEQ ID NO: 51501 - DNA, 76 bp, Homo sapiens
taaatttagccaacccatcctctgcctcctcagataccaagtcccaagctcatcaccttctccagggccatcgttc

SEQ ID NO: 51502 - DNA, 80 bp, Homo sapiens
agccaacccatcctctgcctcctcagataccaagtcccaagctcatcaccttctccagggccatcgttctcatccatcga

SEQ ID NO: 51503 - DNA, 83 bp, Homo sapiens
tgcctcctcagataccaagtcccaagctcatcaccttctccagggccatcgttctcatccatcgagctgcagactttggtgga

SEQ ID NO: 51504 - DNA, 80 bp, Homo sapiens
agataccaagtcccaagctcatcaccttctccagggccatcgttctcatccatcgagctgcagactttggtggacgcaag

SEQ ID NO: 51505 - DNA, 80 bp, Homo sapiens
aagtcccaagctcatcaccttctccagggccatcgttctcatccatcgagctgcagactttggtggacgcaagtgacgta

SEQ ID NO: 51506 - DNA, 84 bp, Homo sapiens
tcaccttctccagggccatcgttctcatccatcgagctgcagactttggtggacgcaagtgacgtagaggagccgccatgctga

SEQ ID NO: 51507 - DNA, 85 bp, Homo sapiens
ttctccagggccatcgttctcatccatcgagctgcagactttggtggacgcaagtgacgtagaggagccgccatgctgagagctc

SEQ ID NO: 51508 - DNA, 83 bp, Homo sapiens
atcgttctcatccatcgagctgcagactttggtggacgcaagtgacgtagaggagccgccatgctgagagctctgtaggggaa

SEQ ID NO: 51509 - DNA, 81 bp, Homo sapiens
atccatcgagctgcagactttggtggacgcaagtgacgtagaggagccgccatgctgagagctctgtaggggaacagaaac

SEQ ID NO: 51510 - DNA, 74 bp, Homo sapiens
agactttggtggacgcaagtgacgtagaggagccgccatgctgagagctctgtaggggaacagaaaccggtaat

SEQ ID NO: 51511 - DNA, 75 bp, Homo sapiens
tggtggacgcaagtgacgtagaggagccgccatgctgagagctctgtaggggaacagaaaccggtaattcaaaaa

SEQ ID NO: 51512 - DNA, 73 bp, Homo sapiens
aagtgacgtagaggagccgccatgctgagagctctgtaggggaacagaaaccggtaattcaaaaactgggtca

SEQ ID NO: 51513 - DNA, 72 bp, Homo sapiens
tttcagtgtctacttatcaaattttctgaaagaaactcactgaacaacataggcagtttttcctgtttatta

SEQ ID NO: 51514 - DNA, 70 bp, Homo sapiens
ctgaaagaaactcactgaacaacataggcagtttttcctgtttattatatagttattctaaggtggtaag

SEQ ID NO: 51515 - DNA, 71 bp, Homo sapiens
actcactgaacaacataggcagtttttcctgtttattatatagttattctaaggtggtaagtgtcacaaag

SEQ ID NO: 51516 - DNA, 69 bp, Homo sapiens
gaacaacataggcagtttttcctgtttattatatagttattctaaggtggtaagtgtcacaaagttaac

SEQ ID NO: 51517 - DNA, 69 bp, Homo sapiens
ggcagtttttcctgtttattatatagttattctaaggtggtaagtgtcacaaagttaacttcaagagga

SEQ ID NO: 51518 - DNA, 71 bp, Homo sapiens
tttattatatagttattctaaggtggtaagtgtcacaaagttaacttcaagaggaataacatggtccagtg

SEQ ID NO: 51519 - DNA, 72 bp, Homo sapiens
atatagttattctaaggtggtaagtgtcacaaagttaacttcaagaggaataacatggtccagtgtgaaaca

SEQ ID NO: 51520 - DNA, 72 bp, Homo sapiens
ttctaaggtggtaagtgtcacaaagttaacttcaagaggaataacatggtccagtgtgaaacacaaggtaca

SEQ ID NO: 51521 - DNA, 72 bp, Homo sapiens
gtaagtgtcacaaagttaacttcaagaggaataacatggtccagtgtgaaacacaaggtacaacattttaca

SEQ ID NO: 51522 - DNA, 71 bp, Homo sapiens
aagttaacttcaagaggaataacatggtccagtgtgaaacacaaggtacaacattttacaatgaaaccaca

SEQ ID NO: 51523 - DNA, 74 bp, Homo sapiens
ttcaagaggaataacatggtccagtgtgaaacacaaggtacaacattttacaatgaaaccacagcacaaagtaa

SEQ ID NO: 51524 - DNA, 72 bp, Homo sapiens
ataacatggtccagtgtgaaacacaaggtacaacattttacaatgaaaccacagcacaaagtaactgaactt

SEQ ID NO: 51525 - DNA, 71 bp, Homo sapiens
ccagtgtgaaacacaaggtacaacattttacaatgaaaccacagcacaaagtaactgaactttcaaaattg

SEQ ID NO: 51526 - DNA, 70 bp, Homo sapiens
cacaaggtacaacattttacaatgaaaccacagcacaaagtaactgaactttcaaaattgggtagttcaa

SEQ ID NO: 51527 - DNA, 71 bp, Homo sapiens
ttttacaatgaaaccacagcacaaagtaactgaactttcaaaattgggtagttcaatgaaacattttgtca

SEQ ID NO: 51528 - DNA, 71 bp, Homo sapiens
cagcacaaagtaactgaactttcaaaattgggtagttcaatgaaacattttgtcaacccttagctctataa

SEQ ID NO: 51529 - DNA, 74 bp, Homo sapiens
taactgaactttcaaaattgggtagttcaatgaaacattttgtcaacccttagctctataaagctctgctgatg

SEQ ID NO: 51530 - DNA, 73 bp, Homo sapiens
tttcaaaattgggtagttcaatgaaacattttgtcaacccttagctctataaagctctgctgatggacttagt

SEQ ID NO: 51531 - DNA, 75 bp, Homo sapiens
gtagttcaatgaaacattttgtcaacccttagctctataaagctctgctgatggacttagttgatggatttaaaa

SEQ ID NO: 51532 - DNA, 74 bp, Homo sapiens
atgaaacattttgtcaacccttagctctataaagctctgctgatggacttagttgatggatttaaaaaatatat

SEQ ID NO: 51533 - DNA, 76 bp, Homo sapiens
caacccttagctctataaagctctgctgatggacttagttgatggatttaaaaaatatattgctgtgtcaaatgtt

SEQ ID NO: 51534 - DNA, 77 bp, Homo sapiens
agctctataaagctctgctgatggacttagttgatggatttaaaaaatatattgctgtgtcaaatgttttaacacaa

SEQ ID NO: 51535 - DNA, 74 bp, Homo sapiens
aaagctctgctgatggacttagttgatggatttaaaaaatatattgctgtgtcaaatgttttaacacaaaatgt

SEQ ID NO: 51536 - DNA, 73 bp, Homo sapiens
agagaatacacatccaatcaactgaaactgtgagcagaaagtatgtaacctctttataaaaacgttatccaaa

SEQ ID NO: 51537 - DNA, 71 bp, Homo sapiens
caactgaaactgtgagcagaaagtatgtaacctctttataaaaacgttatccaaatttacaacattcataa

SEQ ID NO: 51538 - DNA, 72 bp, Homo sapiens
actgtgagcagaaagtatgtaacctctttataaaaacgttatccaaatttacaacattcataatatatttca

SEQ ID NO: 51539 - DNA, 68 bp, Homo sapiens
gtatgtaacctctttataaaaacgttatccaaatttacaacattcataatatatttcaaagtaaagag

SEQ ID NO: 51540 - DNA, 68 bp, Homo sapiens
cctctttataaaaacgttatccaaatttacaacattcataatatatttcaaagtaaagagttcttaga

SEQ ID NO: 51541 - DNA, 68 bp, Homo sapiens
acgttatccaaatttacaacattcataatatatttcaaagtaaagagttcttagaaaaaataaactca

SEQ ID NO: 51542 - DNA, 69 bp, Homo sapiens
caaatttacaacattcataatatatttcaaagtaaagagttcttagaaaaaataaactcaattccttgc

SEQ ID NO: 51543 - DNA, 74 bp, Homo sapiens
cattcataatatatttcaaagtaaagagttcttagaaaaaataaactcaattccttgcttactgatgagtatca

SEQ ID NO: 51544 - DNA, 72 bp, Homo sapiens
tatttcaaagtaaagagttcttagaaaaaataaactcaattccttgcttactgatgagtatcaactcctcaa

SEQ ID NO: 51545 - DNA, 73 bp, Homo sapiens
gtaaagagttcttagaaaaaataaactcaattccttgcttactgatgagtatcaactcctcaaaaacacatca

SEQ ID NO: 51546 - DNA, 73 bp, Homo sapiens
gttcttagaaaaaataaactcaattccttgcttactgatgagtatcaactcctcaaaaacacatcacagaaag

SEQ ID NO: 51547 - DNA, 75 bp, Homo sapiens
taaactcaattccttgcttactgatgagtatcaactcctcaaaaacacatcacagaaagttaactttcatacttc

SEQ ID NO: 51548 - DNA, 76 bp, Homo sapiens
ttccttgcttactgatgagtatcaactcctcaaaaacacatcacagaaagttaactttcatacttctttgcctata

SEQ ID NO: 51549 - DNA, 74 bp, Homo sapiens
gcttactgatgagtatcaactcctcaaaaacacatcacagaaagttaactttcatacttctttgcctataactt

SEQ ID NO: 51550 - DNA, 73 bp, Homo sapiens
gagtatcaactcctcaaaaacacatcacagaaagttaactttcatacttctttgcctataacttttagatatc

SEQ ID NO: 51551 - DNA, 71 bp, Homo sapiens
caaaaacacatcacagaaagttaactttcatacttctttgcctataacttttagatatctactaccctggc

SEQ ID NO: 51552 - DNA, 71 bp, Homo sapiens
taactttcatacttctttgcctataacttttagatatctactaccctggcttcaaaaacattttgtggcca

SEQ ID NO: 51553 - DNA, 72 bp, Homo sapiens
acttctttgcctataacttttagatatctactaccctggcttcaaaaacattttgtggccatatataataca

SEQ ID NO: 51554 - DNA, 73 bp, Homo sapiens
gcctataacttttagatatctactaccctggcttcaaaaacattttgtggccatatataatacaaacactcag

SEQ ID NO: 51555 - DNA, 78 bp, Homo sapiens
tttagatatctactaccctggcttcaaaaacattttgtggccatatataatacaaacactcaggtattacatgcatca

SEQ ID NO: 51556 - DNA, 76 bp, Homo sapiens
ctactaccctggcttcaaaaacattttgtggccatatataatacaaacactcaggtattacatgcatcatttatac

SEQ ID NO: 51557 - DNA, 79 bp, Homo sapiens
ttttgtggccatatataatacaaacactcaggtattacatgcatcatttatactatcttggaatttatccataatctac

SEQ ID NO: 51558 - DNA, 78 bp, Homo sapiens
ggccatatataatacaaacactcaggtattacatgcatcatttatactatcttggaatttatccataatctactaaaa

SEQ ID NO: 51559 - DNA, 77 bp, Homo sapiens
aatacaaacactcaggtattacatgcatcatttatactatcttggaatttatccataatctactaaaatgaaccaca

SEQ ID NO: 51560 - DNA, 76 bp, Homo sapiens
ctcaggtattacatgcatcatttatactatcttggaatttatccataatctactaaaatgaaccacattttaaaga

SEQ ID NO: 51561 - DNA, 80 bp, Homo sapiens
gcatcatttatactatcttggaatttatccataatctactaaaatgaaccacattttaaagacatcatatgtcatgcacc

SEQ ID NO: 51562 - DNA, 76 bp, Homo sapiens
tactatcttggaatttatccataatctactaaaatgaaccacattttaaagacatcatatgtcatgcacccttaaa

SEQ ID NO: 51563 - DNA, 73 bp, Homo sapiens
cttggaatttatccataatctactaaaatgaaccacattttaaagacatcatatgtcatgcacccttaaaaat

SEQ ID NO: 51564 - DNA, 75 bp, Homo sapiens
cataatctactaaaatgaaccacattttaaagacatcatatgtcatgcacccttaaaaattatagtgagggcctc

SEQ ID NO: 51565 - DNA, 75 bp, Homo sapiens
taaaatgaaccacattttaaagacatcatatgtcatgcacccttaaaaattatagtgagggcctctgatttcctc

SEQ ID NO: 51566 - DNA, 77 bp, Homo sapiens
ttaaagacatcatatgtcatgcacccttaaaaattatagtgagggcctctgatttcctcttttttccacatgcataa

SEQ ID NO: 51567 - DNA, 71 bp, Homo sapiens
ccttaaaaattatagtgagggcctctgatttcctcttttttccacatgcataacaggcacaaaattacaaa

SEQ ID NO: 51568 - DNA, 75 bp, Homo sapiens
tatagtgagggcctctgatttcctcttttttccacatgcataacaggcacaaaattacaaatatttttcaactga

SEQ ID NO: 51569 - DNA, 76 bp, Homo sapiens
tcctcttttttccacatgcataacaggcacaaaattacaaatatttttcaactgacagtacaacacgctatatcag

SEQ ID NO: 51570 - DNA, 79 bp, Homo sapiens
tccacatgcataacaggcacaaaattacaaatatttttcaactgacagtacaacacgctatatcaggcaattggtatat

SEQ ID NO: 51571 - DNA, 77 bp, Homo sapiens
gcataacaggcacaaaattacaaatatttttcaactgacagtacaacacgctatatcaggcaattggtatattgaat

SEQ ID NO: 51572 - DNA, 78 bp, Homo sapiens
gcacaaaattacaaatatttttcaactgacagtacaacacgctatatcaggcaattggtatattgaattcagtgtatc

SEQ ID NO: 51573 - DNA, 79 bp, Homo sapiens
tatttttcaactgacagtacaacacgctatatcaggcaattggtatattgaattcagtgtatctctatttttcacacta

SEQ ID NO: 51574 - DNA, 82 bp, Homo sapiens
ttcaactgacagtacaacacgctatatcaggcaattggtatattgaattcagtgtatctctatttttcacactatgcctctg

SEQ ID NO: 51575 - DNA, 81 bp, Homo sapiens
agtacaacacgctatatcaggcaattggtatattgaattcagtgtatctctatttttcacactatgcctctgtgcaatatt

SEQ ID NO: 51576 - DNA, 83 bp, Homo sapiens
ctatatcaggcaattggtatattgaattcagtgtatctctatttttcacactatgcctctgtgcaatatttcaatcaaagaca

SEQ ID NO: 51577 - DNA, 82 bp, Homo sapiens
tggtatattgaattcagtgtatctctatttttcacactatgcctctgtgcaatatttcaatcaaagacagttgtcactaaca

SEQ ID NO: 51578 - DNA, 82 bp, Homo sapiens
aattcagtgtatctctatttttcacactatgcctctgtgcaatatttcaatcaaagacagttgtcactaacatgcacaaata

SEQ ID NO: 51579 - DNA, 85 bp, Homo sapiens
atctctatttttcacactatgcctctgtgcaatatttcaatcaaagacagttgtcactaacatgcacaaatagagatgctagcaa

SEQ ID NO: 51580 - DNA, 84 bp, Homo sapiens
actatgcctctgtgcaatatttcaatcaaagacagttgtcactaacatgcacaaatagagatgctagcaaggttaatgcaaata

SEQ ID NO: 51581 - DNA, 84 bp, Homo sapiens
aatatttcaatcaaagacagttgtcactaacatgcacaaatagagatgctagcaaggttaatgcaaatatgcataaatgagcaa

SEQ ID NO: 51582 - DNA, 87 bp, Homo sapiens
acagttgtcactaacatgcacaaatagagatgctagcaaggttaatgcaaatatgcataaatgagcaaatgtatgcatatatagtaa

SEQ ID NO: 51583 - DNA, 87 bp, Homo sapiens
ctaacatgcacaaatagagatgctagcaaggttaatgcaaatatgcataaatgagcaaatgtatgcatatatagtaaattcattcga

SEQ ID NO: 51584 - DNA, 84 bp, Homo sapiens
caaatagagatgctagcaaggttaatgcaaatatgcataaatgagcaaatgtatgcatatatagtaaattcattcgattaacat

SEQ ID NO: 51585 - DNA, 82 bp, Homo sapiens
ggttaatgcaaatatgcataaatgagcaaatgtatgcatatatagtaaattcattcgattaacattttcaagtgtgtatata

SEQ ID NO: 51586 - DNA, 82 bp, Homo sapiens
aatatgcataaatgagcaaatgtatgcatatatagtaaattcattcgattaacattttcaagtgtgtatatatttatgtaga

SEQ ID NO: 51587 - DNA, 75 bp, Homo sapiens
atacacacatacagcaagtatattcaaaatttgtcaacagtttagagttttgaaagaacatacagaatcgcctta

SEQ ID NO: 51588 - DNA, 74 bp, Homo sapiens
cacatacagcaagtatattcaaaatttgtcaacagtttagagttttgaaagaacatacagaatcgccttacagg

SEQ ID NO: 51589 - DNA, 72 bp, Homo sapiens
tattcaaaatttgtcaacagtttagagttttgaaagaacatacagaatcgccttacaggttatctggctttg

SEQ ID NO: 51590 - DNA, 71 bp, Homo sapiens
ttgtcaacagtttagagttttgaaagaacatacagaatcgccttacaggttatctggctttgttattaaac

SEQ ID NO: 51591 - DNA, 69 bp, Homo sapiens
cagtttagagttttgaaagaacatacagaatcgccttacaggttatctggctttgttattaaacttact

SEQ ID NO: 51592 - DNA, 75 bp, Homo sapiens
tgaaagaacatacagaatcgccttacaggttatctggctttgttattaaacttacttcatatcaaatatactctg

SEQ ID NO: 51593 - DNA, 72 bp, Homo sapiens
aatcgccttacaggttatctggctttgttattaaacttacttcatatcaaatatactctggattttcttcta

SEQ ID NO: 51594 - DNA, 73 bp, Homo sapiens
caggttatctggctttgttattaaacttacttcatatcaaatatactctggattttcttctatttatgttcca

SEQ ID NO: 51595 - DNA, 72 bp, Homo sapiens
ggctttgttattaaacttacttcatatcaaatatactctggattttcttctatttatgttccaacattatac

SEQ ID NO: 51596 - DNA, 79 bp, Homo sapiens
cttacttcatatcaaatatactctggattttcttctatttatgttccaacattatacttgacaatctgcaactgtatca

SEQ ID NO: 51597 - DNA, 80 bp, Homo sapiens
catatcaaatatactctggattttcttctatttatgttccaacattatacttgacaatctgcaactgtatcaatgtttca

SEQ ID NO: 51598 - DNA, 76 bp, Homo sapiens
atatactctggattttcttctatttatgttccaacattatacttgacaatctgcaactgtatcaatgtttcatttt

SEQ ID NO: 51599 - DNA, 77 bp, Homo sapiens
tcttctatttatgttccaacattatacttgacaatctgcaactgtatcaatgtttcatttttttagagtatagtgat

SEQ ID NO: 51600 - DNA, 77 bp, Homo sapiens
atgttccaacattatacttgacaatctgcaactgtatcaatgtttcatttttttagagtatagtgattggcaaccac

SEQ ID NO: 51601 - DNA, 77 bp, Homo sapiens
aactgtatcaatgtttcatttttttagagtatagtgattggcaaccactacaagccatccatacacacacaatagaa

SEQ ID NO: 51602 - DNA, 77 bp, Homo sapiens
ttttagagtatagtgattggcaaccactacaagccatccatacacacacaatagaaaaaaatcatagtattcgatct

SEQ ID NO: 51603 - DNA, 78 bp, Homo sapiens
gtatagtgattggcaaccactacaagccatccatacacacacaatagaaaaaaatcatagtattcgatcttgttaata

SEQ ID NO: 51604 - DNA, 76 bp, Homo sapiens
attggcaaccactacaagccatccatacacacacaatagaaaaaaatcatagtattcgatcttgttaataattgaa

SEQ ID NO: 51605 - DNA, 74 bp, Homo sapiens
actacaagccatccatacacacacaatagaaaaaaatcatagtattcgatcttgttaataattgaaaacaaaga

SEQ ID NO: 51606 - DNA, 76 bp, Homo sapiens
tccatacacacacaatagaaaaaaatcatagtattcgatcttgttaataattgaaaacaaagatatatcaatataa

SEQ ID NO: 51607 - DNA, 73 bp, Homo sapiens
aaaatcatagtattcgatcttgttaataattgaaaacaaagatatatcaatataaacattaatgttacttata

SEQ ID NO: 51608 - DNA, 72 bp, Homo sapiens
gtattcgatcttgttaataattgaaaacaaagatatatcaatataaacattaatgttacttatatttaatag

SEQ ID NO: 51609 - DNA, 71 bp, Homo sapiens
cttgttaataattgaaaacaaagatatatcaatataaacattaatgttacttatatttaatagttaacaca

SEQ ID NO: 51610 - DNA, 69 bp, Homo sapiens
atataaacattaatgttacttatatttaatagttaacacaatattggatttagctgaatttcaattttt

SEQ ID NO: 51611 - DNA, 74 bp, Homo sapiens
taacacaatattggatttagctgaatttcaatttttttataaatcagtatatctgaatattttgaaccatttgc

SEQ ID NO: 51612 - DNA, 76 bp, Homo sapiens
gctgaatttcaatttttttataaatcagtatatctgaatattttgaaccatttgccataccagttgagcaaactgc

SEQ ID NO: 51613 - DNA, 73 bp, Homo sapiens
caatttttttataaatcagtatatctgaatattttgaaccatttgccataccagttgagcaaactgcttttta

SEQ ID NO: 51614 - DNA, 74 bp, Homo sapiens
aatcagtatatctgaatattttgaaccatttgccataccagttgagcaaactgctttttaatttaaacatgccc

SEQ ID NO: 51615 - DNA, 73 bp, Homo sapiens
gtatatctgaatattttgaaccatttgccataccagttgagcaaactgctttttaatttaaacatgccccaac

SEQ ID NO: 51616 - DNA, 74 bp, Homo sapiens
ttttgaaccatttgccataccagttgagcaaactgctttttaatttaaacatgccccaactaatatgtcacaga

SEQ ID NO: 51617 - DNA, 74 bp, Homo sapiens
ttgccataccagttgagcaaactgctttttaatttaaacatgccccaactaatatgtcacagagtaacacttta

SEQ ID NO: 51618 - DNA, 74 bp, Homo sapiens
ccagttgagcaaactgctttttaatttaaacatgccccaactaatatgtcacagagtaacactttattacatga

SEQ ID NO: 51619 - DNA, 72 bp, Homo sapiens
gcaaactgctttttaatttaaacatgccccaactaatatgtcacagagtaacactttattacatgaagattt

SEQ ID NO: 51620 - DNA, 75 bp, Homo sapiens
taatttaaacatgccccaactaatatgtcacagagtaacactttattacatgaagattttatgtataattccaca

SEQ ID NO: 51621 - DNA, 76 bp, Homo sapiens
aacatgccccaactaatatgtcacagagtaacactttattacatgaagattttatgtataattccacaagagccag

SEQ ID NO: 51622 - DNA, 77 bp, Homo sapiens
cacagagtaacactttattacatgaagattttatgtataattccacaagagccagtaacttataaggctgtatcaca

SEQ ID NO: 51623 - DNA, 75 bp, Homo sapiens
acactttattacatgaagattttatgtataattccacaagagccagtaacttataaggctgtatcacaaatacta

SEQ ID NO: 51624 - DNA, 75 bp, Homo sapiens
gaagattttatgtataattccacaagagccagtaacttataaggctgtatcacaaatactatactttactgttga

SEQ ID NO: 51625 - DNA, 75 bp, Homo sapiens
gtataattccacaagagccagtaacttataaggctgtatcacaaatactatactttactgttgatggtttataca

SEQ ID NO: 51626 - DNA, 77 bp, Homo sapiens
gccagtaacttataaggctgtatcacaaatactatactttactgttgatggtttatacacatacacagatacttaca

SEQ ID NO: 51627 - DNA, 79 bp, Homo sapiens
tatactttactgttgatggtttatacacatacacagatacttacagaagcatacccacatacacaccaagcctggcaaa

SEQ ID NO: 51628 - DNA, 79 bp, Homo sapiens
tgttgatggtttatacacatacacagatacttacagaagcatacccacatacacaccaagcctggcaaatttacataaa

SEQ ID NO: 51629 - DNA, 77 bp, Homo sapiens
ttatacacatacacagatacttacagaagcatacccacatacacaccaagcctggcaaatttacataaacacccaaa

SEQ ID NO: 51630 - DNA, 75 bp, Homo sapiens
acagatacttacagaagcatacccacatacacaccaagcctggcaaatttacataaacacccaaacacctgtata

SEQ ID NO: 51631 - DNA, 76 bp, Homo sapiens
tacttacagaagcatacccacatacacaccaagcctggcaaatttacataaacacccaaacacctgtatagatata

SEQ ID NO: 51632 - DNA, 76 bp, Homo sapiens
acccacatacacaccaagcctggcaaatttacataaacacccaaacacctgtatagatatatggccacatatgaaa

SEQ ID NO: 51633 - DNA, 74 bp, Homo sapiens
atacacaccaagcctggcaaatttacataaacacccaaacacctgtatagatatatggccacatatgaaaaatt

SEQ ID NO: 51634 - DNA, 75 bp, Homo sapiens
ctggcaaatttacataaacacccaaacacctgtatagatatatggccacatatgaaaaatttagcagtccaagaa

SEQ ID NO: 51635 - DNA, 73 bp, Homo sapiens
tttacataaacacccaaacacctgtatagatatatggccacatatgaaaaatttagcagtccaagaattaaaa

SEQ ID NO: 51636 - DNA, 74 bp, Homo sapiens
aacacccaaacacctgtatagatatatggccacatatgaaaaatttagcagtccaagaattaaaatatgtggaa

SEQ ID NO: 51637 - DNA, 76 bp, Homo sapiens
cacctgtatagatatatggccacatatgaaaaatttagcagtccaagaattaaaatatgtggaattttcaggaata

SEQ ID NO: 51638 - DNA, 76 bp, Homo sapiens
gatatatggccacatatgaaaaatttagcagtccaagaattaaaatatgtggaattttcaggaatattattctata

SEQ ID NO: 51639 - DNA, 75 bp, Homo sapiens
tttagcagtccaagaattaaaatatgtggaattttcaggaatattattctatatattcattcactttcattaaga

SEQ ID NO: 51640 - DNA, 76 bp, Homo sapiens
agaattaaaatatgtggaattttcaggaatattattctatatattcattcactttcattaagaaatctgacttgca

SEQ ID NO: 51641 - DNA, 78 bp, Homo sapiens
tatgtggaattttcaggaatattattctatatattcattcactttcattaagaaatctgacttgcacacttcattgtt

SEQ ID NO: 51642 - DNA, 75 bp, Homo sapiens
ggaattttcaggaatattattctatatattcattcactttcattaagaaatctgacttgcacacttcattgtttt

SEQ ID NO: 51643 - DNA, 75 bp, Homo sapiens
ggaatattattctatatattcattcactttcattaagaaatctgacttgcacacttcattgtttttaagcaaaaa

SEQ ID NO: 51644 - DNA, 74 bp, Homo sapiens
tctatatattcattcactttcattaagaaatctgacttgcacacttcattgtttttaagcaaaaaaaagaaaga

SEQ ID NO: 51645 - DNA, 73 bp, Homo sapiens
aagaaagaaaaagagcccaatcatgtatagatcttcagggcatgtgttggaaattccccggctggttatgtag

SEQ ID NO: 51646 - DNA, 74 bp, Homo sapiens
agaaaaagagcccaatcatgtatagatcttcagggcatgtgttggaaattccccggctggttatgtagggtata

SEQ ID NO: 51647 - DNA, 75 bp, Homo sapiens
aaaagagcccaatcatgtatagatcttcagggcatgtgttggaaattccccggctggttatgtagggtatatata

SEQ ID NO: 51648 - DNA, 77 bp, Homo sapiens
aagagcccaatcatgtatagatcttcagggcatgtgttggaaattccccggctggttatgtagggtatatatatata

SEQ ID NO: 51649 - DNA, 72 bp, Homo sapiens
atatatatagtacatcagcgctggttcaaatggttttagaaaatgttttttgggttcttaatatttagatga

SEQ ID NO: 51650 - DNA, 74 bp, Homo sapiens
tacatcagcgctggttcaaatggttttagaaaatgttttttgggttcttaatatttagatgagccaatatatgc

SEQ ID NO: 51651 - DNA, 74 bp, Homo sapiens
cagcgctggttcaaatggttttagaaaatgttttttgggttcttaatatttagatgagccaatatatgcgcaca

SEQ ID NO: 51652 - DNA, 76 bp, Homo sapiens
tggttttagaaaatgttttttgggttcttaatatttagatgagccaatatatgcgcacagggatgtatacagatga

SEQ ID NO: 51653 - DNA, 77 bp, Homo sapiens
aaaatgttttttgggttcttaatatttagatgagccaatatatgcgcacagggatgtatacagatgagagaacctga

SEQ ID NO: 51654 - DNA, 82 bp, Homo sapiens
aatatttagatgagccaatatatgcgcacagggatgtatacagatgagagaacctgacacttcttaaaattctatggcagta

SEQ ID NO: 51655 - DNA, 83 bp, Homo sapiens
tagatgagccaatatatgcgcacagggatgtatacagatgagagaacctgacacttcttaaaattctatggcagtacagaaac

SEQ ID NO: 51656 - DNA, 81 bp, Homo sapiens
aatatatgcgcacagggatgtatacagatgagagaacctgacacttcttaaaattctatggcagtacagaaactgtctaga

SEQ ID NO: 51657 - DNA, 76 bp, Homo sapiens
acagggatgtatacagatgagagaacctgacacttcttaaaattctatggcagtacagaaactgtctagatttttc

SEQ ID NO: 51658 - DNA, 74 bp, Homo sapiens
acagatgagagaacctgacacttcttaaaattctatggcagtacagaaactgtctagatttttccccctgccta

SEQ ID NO: 51659 - DNA, 71 bp, Homo sapiens
acctgacacttcttaaaattctatggcagtacagaaactgtctagatttttccccctgcctagttgattaa

SEQ ID NO: 51660 - DNA, 71 bp, Homo sapiens
tcttaaaattctatggcagtacagaaactgtctagatttttccccctgcctagttgattaaacaagacaaa

SEQ ID NO: 51661 - DNA, 70 bp, Homo sapiens
cttaaaattctatggcagtacagaaactgtctagatttttccccctgcctagttgattaaacaagacaaa

SEQ ID NO: 51662 - DNA, 70 bp, Homo sapiens
aaattctatggcagtacagaaactgtctagatttttccccctgcctagttgattaaacaagacaaaaaca

SEQ ID NO: 51663 - DNA, 73 bp, Homo sapiens
tatggcagtacagaaactgtctagatttttccccctgcctagttgattaaacaagacaaaaacacaccatgtg

SEQ ID NO: 51664 - DNA, 72 bp, Homo sapiens
tacagaaactgtctagatttttccccctgcctagttgattaaacaagacaaaaacacaccatgtggctttca

SEQ ID NO: 51665 - DNA, 71 bp, Homo sapiens
acagaaactgtctagatttttccccctgcctagttgattaaacaagacaaaaacacaccatgtggctttca

SEQ ID NO: 51666 - DNA, 73 bp, Homo sapiens
tctagatttttccccctgcctagttgattaaacaagacaaaaacacaccatgtggctttcagcactatagtct

SEQ ID NO: 51667 - DNA, 70 bp, Homo sapiens
atttttccccctgcctagttgattaaacaagacaaaaacacaccatgtggctttcagcactatagtcttt

SEQ ID NO: 51668 - DNA, 76 bp, Homo sapiens
cctgcctagttgattaaacaagacaaaaacacaccatgtggctttcagcactatagtcttttgagttcacactgaa

SEQ ID NO: 51669 - DNA, 76 bp, Homo sapiens
ctagttgattaaacaagacaaaaacacaccatgtggctttcagcactatagtcttttgagttcacactgaacttca

SEQ ID NO: 51670 - DNA, 76 bp, Homo sapiens
acaagacaaaaacacaccatgtggctttcagcactatagtcttttgagttcacactgaacttcatactttatatat

SEQ ID NO: 51671 - DNA, 74 bp, Homo sapiens
aaacacaccatgtggctttcagcactatagtcttttgagttcacactgaacttcatactttatatatttttaac

SEQ ID NO: 51672 - DNA, 74 bp, Homo sapiens
gtggctttcagcactatagtcttttgagttcacactgaacttcatactttatatatttttaacttttgcacttc

SEQ ID NO: 51673 - DNA, 72 bp, Homo sapiens
cacactgaacttcatactttatatatttttaacttttgcacttctaaaatgctgaaagcagggaaatattcc

SEQ ID NO: 51674 - DNA, 71 bp, Homo sapiens
cttcatactttatatatttttaacttttgcacttctaaaatgctgaaagcagggaaatattcctaatatct

SEQ ID NO: 51675 - DNA, 70 bp, Homo sapiens
atttttaacttttgcacttctaaaatgctgaaagcagggaaatattcctaatatctttttctacaatgtc

SEQ ID NO: 51676 - DNA, 74 bp, Homo sapiens
cttttgcacttctaaaatgctgaaagcagggaaatattcctaatatctttttctacaatgtctacatctaagaa

SEQ ID NO: 51677 - DNA, 75 bp, Homo sapiens
taaaatgctgaaagcagggaaatattcctaatatctttttctacaatgtctacatctaagaaaaaagtgagtgca

SEQ ID NO: 51678 - DNA, 72 bp, Homo sapiens
atatctttttctacaatgtctacatctaagaaaaaagtgagtgcaagtgaaaaagtatcgaactttgaacta

SEQ ID NO: 51679 - DNA, 77 bp, Homo sapiens
tacatctaagaaaaaagtgagtgcaagtgaaaaagtatcgaactttgaactacagcacgatgtcttcagagcgcatt

SEQ ID NO: 51680 - DNA, 74 bp, Homo sapiens
aaaaaagtgagtgcaagtgaaaaagtatcgaactttgaactacagcacgatgtcttcagagcgcatttaaggat

SEQ ID NO: 51681 - DNA, 78 bp, Homo sapiens
gtgcaagtgaaaaagtatcgaactttgaactacagcacgatgtcttcagagcgcatttaaggattatcattaggacaa

SEQ ID NO: 51682 - DNA, 75 bp, Homo sapiens
agtgaaaaagtatcgaactttgaactacagcacgatgtcttcagagcgcatttaaggattatcattaggacaaaa

SEQ ID NO: 51683 - DNA, 77 bp, Homo sapiens
tatcgaactttgaactacagcacgatgtcttcagagcgcatttaaggattatcattaggacaaaactgcgtggcttt

SEQ ID NO: 51684 - DNA, 79 bp, Homo sapiens
aactacagcacgatgtcttcagagcgcatttaaggattatcattaggacaaaactgcgtggcttttgctgaagcattcc

SEQ ID NO: 51685 - DNA, 79 bp, Homo sapiens
tgtcttcagagcgcatttaaggattatcattaggacaaaactgcgtggcttttgctgaagcattccccgctcagtagaa

SEQ ID NO: 51686 - DNA, 73 bp, Homo sapiens
tttaaggattatcattaggacaaaactgcgtggcttttgctgaagcattccccgctcagtagaacaatttaaa

SEQ ID NO: 51687 - DNA, 74 bp, Homo sapiens
atcattaggacaaaactgcgtggcttttgctgaagcattccccgctcagtagaacaatttaaaaattcattgcc

SEQ ID NO: 51688 - DNA, 70 bp, Homo sapiens
aaactgcgtggcttttgctgaagcattccccgctcagtagaacaatttaaaaattcattgccgaattttt

SEQ ID NO: 51689 - DNA, 69 bp, Homo sapiens
gaagcattccccgctcagtagaacaatttaaaaattcattgccgaattttttttataaagaattctata

SEQ ID NO: 51690 - DNA, 66 bp, Homo sapiens
cccgctcagtagaacaatttaaaaattcattgccgaattttttttataaagaattctataagtaac

SEQ ID NO: 51691 - DNA, 69 bp, Homo sapiens
caatttaaaaattcattgccgaattttttttataaagaattctataagtaactcaatcataagtgccta

SEQ ID NO: 51692 - DNA, 72 bp, Homo sapiens
ttcattgccgaattttttttataaagaattctataagtaactcaatcataagtgcctataaatcaccaattc

SEQ ID NO: 51693 - DNA, 72 bp, Homo sapiens
tgccgaattttttttataaagaattctataagtaactcaatcataagtgcctataaatcaccaattctgttc

SEQ ID NO: 51694 - DNA, 74 bp, Homo sapiens
ataaagaattctataagtaactcaatcataagtgcctataaatcaccaattctgttccaccaatgaactgaaaa

SEQ ID NO: 51695 - DNA, 75 bp, Homo sapiens
gaattctataagtaactcaatcataagtgcctataaatcaccaattctgttccaccaatgaactgaaaacttctg

SEQ ID NO: 51696 - DNA, 76 bp, Homo sapiens
taactcaatcataagtgcctataaatcaccaattctgttccaccaatgaactgaaaacttctgtgtttgttgctaa

SEQ ID NO: 51697 - DNA, 73 bp, Homo sapiens
cataagtgcctataaatcaccaattctgttccaccaatgaactgaaaacttctgtgtttgttgctaagaaatt

SEQ ID NO: 51698 - DNA, 70 bp, Homo sapiens
ctataaatcaccaattctgttccaccaatgaactgaaaacttctgtgtttgttgctaagaaatttttatt

SEQ ID NO: 51699 - DNA, 70 bp, Homo sapiens
ccaattctgttccaccaatgaactgaaaacttctgtgtttgttgctaagaaatttttatttctgctttag

SEQ ID NO: 51700 - DNA, 69 bp, Homo sapiens
ccaccaatgaactgaaaacttctgtgtttgttgctaagaaatttttatttctgctttagtttaatagaa

SEQ ID NO: 51701 - DNA, 70 bp, Homo sapiens
ctgaaaacttctgtgtttgttgctaagaaatttttatttctgctttagtttaatagaattatgttttgca

SEQ ID NO: 51702 - DNA, 71 bp, Homo sapiens
tgtgtttgttgctaagaaatttttatttctgctttagtttaatagaattatgttttgcataaaaagagatc

SEQ ID NO: 51703 - DNA, 71 bp, Homo sapiens
gctaagaaatttttatttctgctttagtttaatagaattatgttttgcataaaaagagatctcaaagacta

SEQ ID NO: 51704 - DNA, 74 bp, Homo sapiens
ttatttctgctttagtttaatagaattatgttttgcataaaaagagatctcaaagactataaatggtgtgctgt

SEQ ID NO: 51705 - DNA, 76 bp, Homo sapiens
tagaattatgttttgcataaaaagagatctcaaagactataaatggtgtgctgtttcaatctctgagggactttac

SEQ ID NO: 51706 - DNA, 74 bp, Homo sapiens
gttttgcataaaaagagatctcaaagactataaatggtgtgctgtttcaatctctgagggactttactttcaaa

SEQ ID NO: 51707 - DNA, 73 bp, Homo sapiens
cataaaaagagatctcaaagactataaatggtgtgctgtttcaatctctgagggactttactttcaaaaagta

SEQ ID NO: 51708 - DNA, 74 bp, Homo sapiens
taaatggtgtgctgtttcaatctctgagggactttactttcaaaaagtaaatgatatatatagcccctgaacag

SEQ ID NO: 51709 - DNA, 74 bp, Homo sapiens
tgtgctgtttcaatctctgagggactttactttcaaaaagtaaatgatatatatagcccctgaacagtccttta

SEQ ID NO: 51710 - DNA, 71 bp, Homo sapiens
caatctctgagggactttactttcaaaaagtaaatgatatatatagcccctgaacagtcctttaatagaag

SEQ ID NO: 51711 - DNA, 77 bp, Homo sapiens
aaatgatatatatagcccctgaacagtcctttaatagaagtcatatgttcaagagattaaatgctgtggaaagcact

SEQ ID NO: 51712 - DNA, 76 bp, Homo sapiens
tatatagcccctgaacagtcctttaatagaagtcatatgttcaagagattaaatgctgtggaaagcacttcccttg

SEQ ID NO: 51713 - DNA, 75 bp, Homo sapiens
aacagtcctttaatagaagtcatatgttcaagagattaaatgctgtggaaagcacttcccttggaactgcttgaa

SEQ ID NO: 51714 - DNA, 75 bp, Homo sapiens
tttaatagaagtcatatgttcaagagattaaatgctgtggaaagcacttcccttggaactgcttgaatggaaagt

SEQ ID NO: 51715 - DNA, 79 bp, Homo sapiens
atatgttcaagagattaaatgctgtggaaagcacttcccttggaactgcttgaatggaaagttggccatgatatctatc

SEQ ID NO: 51716 - DNA, 78 bp, Homo sapiens
agagattaaatgctgtggaaagcacttcccttggaactgcttgaatggaaagttggccatgatatctatcggcaatta

SEQ ID NO: 51717 - DNA, 77 bp, Homo sapiens
aaatgctgtggaaagcacttcccttggaactgcttgaatggaaagttggccatgatatctatcggcaattagtacaa

SEQ ID NO: 51718 - DNA, 74 bp, Homo sapiens
aaagcacttcccttggaactgcttgaatggaaagttggccatgatatctatcggcaattagtacaagtccagtt

SEQ ID NO: 51719 - DNA, 74 bp, Homo sapiens
cccttggaactgcttgaatggaaagttggccatgatatctatcggcaattagtacaagtccagtttctttttgc

SEQ ID NO: 51720 - DNA, 74 bp, Homo sapiens
ttgaatggaaagttggccatgatatctatcggcaattagtacaagtccagtttctttttgccctgtctaaacaa

SEQ ID NO: 51721 - DNA, 73 bp, Homo sapiens
aaagttggccatgatatctatcggcaattagtacaagtccagtttctttttgccctgtctaaacaaagccatg

SEQ ID NO: 51722 - DNA, 74 bp, Homo sapiens
atatctatcggcaattagtacaagtccagtttctttttgccctgtctaaacaaagccatgggctctatatcaat

SEQ ID NO: 51723 - DNA, 75 bp, Homo sapiens
caattagtacaagtccagtttctttttgccctgtctaaacaaagccatgggctctatatcaattggcaatatcta

SEQ ID NO: 51724 - DNA, 75 bp, Homo sapiens
tacaagtccagtttctttttgccctgtctaaacaaagccatgggctctatatcaattggcaatatctaccactta

SEQ ID NO: 51725 - DNA, 74 bp, Homo sapiens
gtttctttttgccctgtctaaacaaagccatgggctctatatcaattggcaatatctaccacttagaacaaata

SEQ ID NO: 51726 - DNA, 76 bp, Homo sapiens
ctgtctaaacaaagccatgggctctatatcaattggcaatatctaccacttagaacaaatagcatttattggacct

SEQ ID NO: 51727 - DNA, 76 bp, Homo sapiens
taaacaaagccatgggctctatatcaattggcaatatctaccacttagaacaaatagcatttattggacctttcta

SEQ ID NO: 51728 - DNA, 76 bp, Homo sapiens
aattggcaatatctaccacttagaacaaatagcatttattggacctttctagcagtagttgtccataagattgaca

SEQ ID NO: 51729 - DNA, 76 bp, Homo sapiens
aatatctaccacttagaacaaatagcatttattggacctttctagcagtagttgtccataagattgacagtgcagg

SEQ ID NO: 51730 - DNA, 74 bp, Homo sapiens
ttagaacaaatagcatttattggacctttctagcagtagttgtccataagattgacagtgcagggaagttaaaa

SEQ ID NO: 51731 - DNA, 72 bp, Homo sapiens
ttattggacctttctagcagtagttgtccataagattgacagtgcagggaagttaaaattattggaatttat

SEQ ID NO: 51732 - DNA, 72 bp, Homo sapiens
ctagcagtagttgtccataagattgacagtgcagggaagttaaaattattggaatttatttttgttctggac

SEQ ID NO: 51733 - DNA, 72 bp, Homo sapiens
agttgtccataagattgacagtgcagggaagttaaaattattggaatttatttttgttctggaccatctgac

SEQ ID NO: 51734 - DNA, 69 bp, Homo sapiens
ttgacagtgcagggaagttaaaattattggaatttatttttgttctggaccatctgaccccaccagttt

SEQ ID NO: 51735 - DNA, 66 bp, Homo sapiens
gcagggaagttaaaattattggaatttatttttgttctggaccatctgaccccaccagttttaaag

SEQ ID NO: 51736 - DNA, 66 bp, Homo sapiens
aaattattggaatttatttttgttctggaccatctgaccccaccagttttaaagtaactgttccac

SEQ ID NO: 51737 - DNA, 67 bp, Homo sapiens
aatttatttttgttctggaccatctgaccccaccagttttaaagtaactgttccactgctttctttg

SEQ ID NO: 51738 - DNA, 67 bp, Homo sapiens
atttttgttctggaccatctgaccccaccagttttaaagtaactgttccactgctttctttgtattt

SEQ ID NO: 51739 - DNA, 69 bp, Homo sapiens
catctgaccccaccagttttaaagtaactgttccactgctttctttgtatttttggcagtttagtcaaa

SEQ ID NO: 51740 - DNA, 71 bp, Homo sapiens
taaagtaactgttccactgctttctttgtatttttggcagtttagtcaaatacatactaatcttttatgga

SEQ ID NO: 51741 - DNA, 71 bp, Homo sapiens
ctgttccactgctttctttgtatttttggcagtttagtcaaatacatactaatcttttatggacccaactg

SEQ ID NO: 51742 - DNA, 71 bp, Homo sapiens
atttttggcagtttagtcaaatacatactaatcttttatggacccaactgtattaagtaatgcattttaca

SEQ ID NO: 51743 - DNA, 71 bp, Homo sapiens
acatactaatcttttatggacccaactgtattaagtaatgcattttacaaagacataactaaaacagacac

SEQ ID NO: 51744 - DNA, 76 bp, Homo sapiens
tgtattaagtaatgcattttacaaagacataactaaaacagacaccagcataggcaacctcacagatgtttactgt

SEQ ID NO: 51745 - DNA, 75 bp, Homo sapiens
cattttacaaagacataactaaaacagacaccagcataggcaacctcacagatgtttactgtttcagctaaaata

SEQ ID NO: 51746 - DNA, 77 bp, Homo sapiens
tacaaagacataactaaaacagacaccagcataggcaacctcacagatgtttactgtttcagctaaaataaagcagc

SEQ ID NO: 51747 - DNA, 76 bp, Homo sapiens
taactaaaacagacaccagcataggcaacctcacagatgtttactgtttcagctaaaataaagcagccttttgatc

SEQ ID NO: 51748 - DNA, 80 bp, Homo sapiens
agacaccagcataggcaacctcacagatgtttactgtttcagctaaaataaagcagccttttgatctcagcaggagtctc

SEQ ID NO: 51749 - DNA, 78 bp, Homo sapiens
caacctcacagatgtttactgtttcagctaaaataaagcagccttttgatctcagcaggagtctctggtcatttctat

SEQ ID NO: 51750 - DNA, 77 bp, Homo sapiens
acagatgtttactgtttcagctaaaataaagcagccttttgatctcagcaggagtctctggtcatttctattggaaa

SEQ ID NO: 51751 - DNA, 75 bp, Homo sapiens
tgtttcagctaaaataaagcagccttttgatctcagcaggagtctctggtcatttctattggaaacagttttaaa

SEQ ID NO: 51752 - DNA, 73 bp, Homo sapiens
taaaataaagcagccttttgatctcagcaggagtctctggtcatttctattggaaacagttttaaaacctgaa

SEQ ID NO: 51753 - DNA, 70 bp, Homo sapiens
aggagtctctggtcatttctattggaaacagttttaaaacctgaagtctggaacaggtattattatgaac

SEQ ID NO: 51754 - DNA, 69 bp, Homo sapiens
ggaaacagttttaaaacctgaagtctggaacaggtattattatgaactgttctttcaagatggaatgtt

SEQ ID NO: 51755 - DNA, 76 bp, Homo sapiens
aagtctggaacaggtattattatgaactgttctttcaagatggaatgtttcagtttgcagctcttgaataacctgc

SEQ ID NO: 51756 - DNA, 78 bp, Homo sapiens
ttattatgaactgttctttcaagatggaatgtttcagtttgcagctcttgaataacctgccagagaagtgtctttctc

SEQ ID NO: 51757 - DNA, 81 bp, Homo sapiens
tctttcaagatggaatgtttcagtttgcagctcttgaataacctgccagagaagtgtctttctctccaacagacagcataa

SEQ ID NO: 51758 - DNA, 82 bp, Homo sapiens
tggaatgtttcagtttgcagctcttgaataacctgccagagaagtgtctttctctccaacagacagcataatgaggcactaa

SEQ ID NO: 51759 - DNA, 82 bp, Homo sapiens
ttcagtttgcagctcttgaataacctgccagagaagtgtctttctctccaacagacagcataatgaggcactaattattata

SEQ ID NO: 51760 - DNA, 78 bp, Homo sapiens
tcttgaataacctgccagagaagtgtctttctctccaacagacagcataatgaggcactaattattatagggctaagt

SEQ ID NO: 51761 - DNA, 75 bp, Homo sapiens
aataacctgccagagaagtgtctttctctccaacagacagcataatgaggcactaattattatagggctaagttt

SEQ ID NO: 51762 - DNA, 76 bp, Homo sapiens
aagtgtctttctctccaacagacagcataatgaggcactaattattatagggctaagttttcaaatgctgttagat

SEQ ID NO: 51763 - DNA, 78 bp, Homo sapiens
tttctctccaacagacagcataatgaggcactaattattatagggctaagttttcaaatgctgttagattgcctggac

SEQ ID NO: 51764 - DNA, 74 bp, Homo sapiens
acagacagcataatgaggcactaattattatagggctaagttttcaaatgctgttagattgcctggacgttttt

SEQ ID NO: 51765 - DNA, 72 bp, Homo sapiens
cataatgaggcactaattattatagggctaagttttcaaatgctgttagattgcctggacgttttttcttct

SEQ ID NO: 51766 - DNA, 70 bp, Homo sapiens
cactaattattatagggctaagttttcaaatgctgttagattgcctggacgttttttcttcttcctcttc

SEQ ID NO: 51767 - DNA, 69 bp, Homo sapiens
cttcctcttcttttggttggaatattttattcacttgtaaagtgagatggtaacatacgtaactataaa

SEQ ID NO: 51768 - DNA, 71 bp, Homo sapiens
tcttttggttggaatattttattcacttgtaaagtgagatggtaacatacgtaactataaaccagatggta

SEQ ID NO: 51769 - DNA, 71 bp, Homo sapiens
gaatattttattcacttgtaaagtgagatggtaacatacgtaactataaaccagatggtaaaatttgctag

SEQ ID NO: 51770 - DNA, 72 bp, Homo sapiens
tcacttgtaaagtgagatggtaacatacgtaactataaaccagatggtaaaatttgctagttgaacaattta

SEQ ID NO: 51771 - DNA, 72 bp, Homo sapiens
aagtgagatggtaacatacgtaactataaaccagatggtaaaatttgctagttgaacaatttatcagggaga

SEQ ID NO: 51772 - DNA, 73 bp, Homo sapiens
gatggtaacatacgtaactataaaccagatggtaaaatttgctagttgaacaatttatcagggagataaatca

SEQ ID NO: 51773 - DNA, 71 bp, Homo sapiens
tacgtaactataaaccagatggtaaaatttgctagttgaacaatttatcagggagataaatcaataacatt

SEQ ID NO: 51774 - DNA, 74 bp, Homo sapiens
ccagatggtaaaatttgctagttgaacaatttatcagggagataaatcaataacatttaaaacagcgtgtgaca

SEQ ID NO: 51775 - DNA, 73 bp, Homo sapiens
ggtaaaatttgctagttgaacaatttatcagggagataaatcaataacatttaaaacagcgtgtgacaactga

SEQ ID NO: 51776 - DNA, 77 bp, Homo sapiens
tgaacaatttatcagggagataaatcaataacatttaaaacagcgtgtgacaactgaatttctctccatcttgaata

SEQ ID NO: 51777 - DNA, 75 bp, Homo sapiens
caatttatcagggagataaatcaataacatttaaaacagcgtgtgacaactgaatttctctccatcttgaataaa

SEQ ID NO: 51778 - DNA, 75 bp, Homo sapiens
tatcagggagataaatcaataacatttaaaacagcgtgtgacaactgaatttctctccatcttgaataaaacatt

SEQ ID NO: 51779 - DNA, 73 bp, Homo sapiens
gggagataaatcaataacatttaaaacagcgtgtgacaactgaatttctctccatcttgaataaaacatttaa

SEQ ID NO: 51780 - DNA, 71 bp, Homo sapiens
ataaatcaataacatttaaaacagcgtgtgacaactgaatttctctccatcttgaataaaacatttaaaaa

SEQ ID NO: 51781 - DNA, 70 bp, Homo sapiens
caataacatttaaaacagcgtgtgacaactgaatttctctccatcttgaataaaacatttaaaaattgtt

SEQ ID NO: 51782 - DNA, 73 bp, Homo sapiens
gaaaaaaaaaatcatgtaaaagcctccaaatggcatcaaacatttttaatttatcacctactgagatatgtca

SEQ ID NO: 51783 - DNA, 76 bp, Homo sapiens
aaatcatgtaaaagcctccaaatggcatcaaacatttttaatttatcacctactgagatatgtcaagcctggagaa

SEQ ID NO: 51784 - DNA, 76 bp, Homo sapiens
gtaaaagcctccaaatggcatcaaacatttttaatttatcacctactgagatatgtcaagcctggagaatatcaaa

SEQ ID NO: 51785 - DNA, 78 bp, Homo sapiens
aaatggcatcaaacatttttaatttatcacctactgagatatgtcaagcctggagaatatcaaaaccatgcttcacaa

SEQ ID NO: 51786 - DNA, 76 bp, Homo sapiens
catttttaatttatcacctactgagatatgtcaagcctggagaatatcaaaaccatgcttcacaagtcttaaactg

SEQ ID NO: 51787 - DNA, 77 bp, Homo sapiens
ttaatttatcacctactgagatatgtcaagcctggagaatatcaaaaccatgcttcacaagtcttaaactgttagtg

SEQ ID NO: 51788 - DNA, 77 bp, Homo sapiens
tactgagatatgtcaagcctggagaatatcaaaaccatgcttcacaagtcttaaactgttagtgtttgaactagtaa

SEQ ID NO: 51789 - DNA, 73 bp, Homo sapiens
atatgtcaagcctggagaatatcaaaaccatgcttcacaagtcttaaactgttagtgtttgaactagtaaaag

SEQ ID NO: 51790 - DNA, 71 bp, Homo sapiens
cctggagaatatcaaaaccatgcttcacaagtcttaaactgttagtgtttgaactagtaaaagtaaatgac

SEQ ID NO: 51791 - DNA, 71 bp, Homo sapiens
aaaccatgcttcacaagtcttaaactgttagtgtttgaactagtaaaagtaaatgaccactaggatatggc

SEQ ID NO: 51792 - DNA, 72 bp, Homo sapiens
tgcttcacaagtcttaaactgttagtgtttgaactagtaaaagtaaatgaccactaggatatggcttaaata

SEQ ID NO: 51793 - DNA, 70 bp, Homo sapiens
cacaagtcttaaactgttagtgtttgaactagtaaaagtaaatgaccactaggatatggcttaaatacaa

SEQ ID NO: 51794 - DNA, 71 bp, Homo sapiens
aaactgttagtgtttgaactagtaaaagtaaatgaccactaggatatggcttaaatacaatagaccataca

SEQ ID NO: 51795 - DNA, 72 bp, Homo sapiens
actgttagtgtttgaactagtaaaagtaaatgaccactaggatatggcttaaatacaatagaccatacacat

SEQ ID NO: 51796 - DNA, 72 bp, Homo sapiens
gttagtgtttgaactagtaaaagtaaatgaccactaggatatggcttaaatacaatagaccatacacattaa

SEQ ID NO: 51797 - DNA, 72 bp, Homo sapiens
tgtttgaactagtaaaagtaaatgaccactaggatatggcttaaatacaatagaccatacacattaaattaa

SEQ ID NO: 51798 - DNA, 70 bp, Homo sapiens
gaactagtaaaagtaaatgaccactaggatatggcttaaatacaatagaccatacacattaaattaattt

SEQ ID NO: 51799 - DNA, 72 bp, Homo sapiens
aagtaaatgaccactaggatatggcttaaatacaatagaccatacacattaaattaatttttaacattcaga

SEQ ID NO: 51800 - DNA, 72 bp, Homo sapiens
aatgaccactaggatatggcttaaatacaatagaccatacacattaaattaatttttaacattcagacttta

SEQ ID NO: 51801 - DNA, 66 bp, Homo sapiens
aatttttaacattcagactttaaaatcattattttatgtttaagcaaagacgactataatttttaa

SEQ ID NO: 51802 - DNA, 70 bp, Homo sapiens
taaaatcattattttatgtttaagcaaagacgactataatttttaaaatagaggactagaagagcagaat

SEQ ID NO: 51803 - DNA, 69 bp, Homo sapiens
tattttatgtttaagcaaagacgactataatttttaaaatagaggactagaagagcagaattagtaggt

SEQ ID NO: 51804 - DNA, 69 bp, Homo sapiens
tgtttaagcaaagacgactataatttttaaaatagaggactagaagagcagaattagtaggttaatgtt

SEQ ID NO: 51805 - DNA, 68 bp, Homo sapiens
agacgactataatttttaaaatagaggactagaagagcagaattagtaggttaatgtttaacaatggg

SEQ ID NO: 51806 - DNA, 71 bp, Homo sapiens
atagaggactagaagagcagaattagtaggttaatgtttaacaatgggttataatcatagacttaattggt

SEQ ID NO: 51807 - DNA, 71 bp, Homo sapiens
ctagaagagcagaattagtaggttaatgtttaacaatgggttataatcatagacttaattggtttaacaca

SEQ ID NO: 51808 - DNA, 67 bp, Homo sapiens
gaattagtaggttaatgtttaacaatgggttataatcatagacttaattggtttaacacaaaaggag

SEQ ID NO: 51809 - DNA, 70 bp, Homo sapiens
ggttaatgtttaacaatgggttataatcatagacttaattggtttaacacaaaaggagttttgcatatga

SEQ ID NO: 51810 - DNA, 70 bp, Homo sapiens
ttaacaatgggttataatcatagacttaattggtttaacacaaaaggagttttgcatatgaaaatttcca

SEQ ID NO: 51811 - DNA, 70 bp, Homo sapiens
taacaatgggttataatcatagacttaattggtttaacacaaaaggagttttgcatatgaaaatttccaa

SEQ ID NO: 51812 - DNA, 71 bp, Homo sapiens
gttataatcatagacttaattggtttaacacaaaaggagttttgcatatgaaaatttccaaaacaccagca

SEQ ID NO: 51813 - DNA, 70 bp, Homo sapiens
agacttaattggtttaacacaaaaggagttttgcatatgaaaatttccaaaacaccagcaagattgagaa

SEQ ID NO: 51814 - DNA, 70 bp, Homo sapiens
ggtttaacacaaaaggagttttgcatatgaaaatttccaaaacaccagcaagattgagaatttttcagag

SEQ ID NO: 51815 - DNA, 74 bp, Homo sapiens
aggagttttgcatatgaaaatttccaaaacaccagcaagattgagaatttttcagagtggagatttggatactc

SEQ ID NO: 51816 - DNA, 74 bp, Homo sapiens
agttttgcatatgaaaatttccaaaacaccagcaagattgagaatttttcagagtggagatttggatactctgg

SEQ ID NO: 51817 - DNA, 73 bp, Homo sapiens
aaaatttccaaaacaccagcaagattgagaatttttcagagtggagatttggatactctgggcctgatttata

SEQ ID NO: 51818 - DNA, 76 bp, Homo sapiens
aaacaccagcaagattgagaatttttcagagtggagatttggatactctgggcctgatttatacagcaccatttaa

SEQ ID NO: 51819 - DNA, 73 bp, Homo sapiens
agaatttttcagagtggagatttggatactctgggcctgatttatacagcaccatttaagtgaattttgcttt

SEQ ID NO: 51820 - DNA, 73 bp, Homo sapiens
atttggatactctgggcctgatttatacagcaccatttaagtgaattttgcttttcaaatggatttcttggaa

SEQ ID NO: 51821 - DNA, 73 bp, Homo sapiens
tgggcctgatttatacagcaccatttaagtgaattttgcttttcaaatggatttcttggaaaaagtccagaca

SEQ ID NO: 51822 - DNA, 69 bp, Homo sapiens
atacagcaccatttaagtgaattttgcttttcaaatggatttcttggaaaaagtccagacacaattttt

SEQ ID NO: 51823 - DNA, 69 bp, Homo sapiens
gtgaattttgcttttcaaatggatttcttggaaaaagtccagacacaattttttttaggtctgtatgga

SEQ ID NO: 51824 - DNA, 65 bp, Homo sapiens
cttttcaaatggatttcttggaaaaagtccagacacaattttttttaggtctgtatggaaaaaaa

SEQ ID NO: 51825 - DNA, 71 bp, Homo sapiens
ccagctttagtttttacacatttaaaaaattatgtatatgattgtaagaaaaaattatacaatctatagca

SEQ ID NO: 51826 - DNA, 74 bp, Homo sapiens
tttacacatttaaaaaattatgtatatgattgtaagaaaaaattatacaatctatagcaatgccattggccaag

SEQ ID NO: 51827 - DNA, 76 bp, Homo sapiens
taaaaaattatgtatatgattgtaagaaaaaattatacaatctatagcaatgccattggccaagttcttcatattg

SEQ ID NO: 51828 - DNA, 81 bp, Homo sapiens
tgtatatgattgtaagaaaaaattatacaatctatagcaatgccattggccaagttcttcatattggcatatagcttaagc

SEQ ID NO: 51829 - DNA, 77 bp, Homo sapiens
tgtaagaaaaaattatacaatctatagcaatgccattggccaagttcttcatattggcatatagcttaagctaaatt

SEQ ID NO: 51830 - DNA, 78 bp, Homo sapiens
aattatacaatctatagcaatgccattggccaagttcttcatattggcatatagcttaagctaaatttatactgtttc

SEQ ID NO: 51831 - DNA, 79 bp, Homo sapiens
tacaatctatagcaatgccattggccaagttcttcatattggcatatagcttaagctaaatttatactgtttctaataa

SEQ ID NO: 51832 - DNA, 75 bp, Homo sapiens
agcaatgccattggccaagttcttcatattggcatatagcttaagctaaatttatactgtttctaataaaataac

SEQ ID NO: 51833 - DNA, 71 bp, Homo sapiens
ttggccaagttcttcatattggcatatagcttaagctaaatttatactgtttctaataaaataactttaaa

SEQ ID NO: 51834 - DNA, 67 bp, Homo sapiens
aaaataaaatttacttgacaacaaaaacaaggcaagttcctaaagcctaacttcagagtctttatga

SEQ ID NO: 51835 - DNA, 70 bp, Homo sapiens
aatttacttgacaacaaaaacaaggcaagttcctaaagcctaacttcagagtctttatgagatgtgtcgt

SEQ ID NO: 51836 - DNA, 71 bp, Homo sapiens
acaaaaacaaggcaagttcctaaagcctaacttcagagtctttatgagatgtgtcgttgtcataatttttc

SEQ ID NO: 51837 - DNA, 70 bp, Homo sapiens
aacaaggcaagttcctaaagcctaacttcagagtctttatgagatgtgtcgttgtcataatttttctttt

SEQ ID NO: 51838 - DNA, 71 bp, Homo sapiens
aagttcctaaagcctaacttcagagtctttatgagatgtgtcgttgtcataatttttctttttctctcgga

SEQ ID NO: 51839 - DNA, 74 bp, Homo sapiens
tcctaaagcctaacttcagagtctttatgagatgtgtcgttgtcataatttttctttttctctcggatgtacta

SEQ ID NO: 51840 - DNA, 72 bp, Homo sapiens
aaagcctaacttcagagtctttatgagatgtgtcgttgtcataatttttctttttctctcggatgtactaac

SEQ ID NO: 51841 - DNA, 72 bp, Homo sapiens
aacttcagagtctttatgagatgtgtcgttgtcataatttttctttttctctcggatgtactaacccacaaa

SEQ ID NO: 51842 - DNA, 74 bp, Homo sapiens
tcagagtctttatgagatgtgtcgttgtcataatttttctttttctctcggatgtactaacccacaaaacagta

SEQ ID NO: 51843 - DNA, 71 bp, Homo sapiens
gtctttatgagatgtgtcgttgtcataatttttctttttctctcggatgtactaacccacaaaacagtaag

SEQ ID NO: 51844 - DNA, 70 bp, Homo sapiens
gagatgtgtcgttgtcataatttttctttttctctcggatgtactaacccacaaaacagtaagtagcttt

SEQ ID NO: 51845 - DNA, 66 bp, Homo sapiens
cggatgtactaacccacaaaacagtaagtagctttttctactgtctagggagaaaaaaaatctacc

SEQ ID NO: 51846 - DNA, 64 bp, Homo sapiens
cccacaaaacagtaagtagctttttctactgtctagggagaaaaaaaatctacccaagtatttt

SEQ ID NO: 51847 - DNA, 64 bp, Homo sapiens
acagtaagtagctttttctactgtctagggagaaaaaaaatctacccaagtatttttattattt

SEQ ID NO: 51848 - DNA, 64 bp, Homo sapiens
ttattattttgtaataaaagtacctctaaaaaccaagcaattcaaattttaaaaacaatataac

SEQ ID NO: 51849 - DNA, 64 bp, Homo sapiens
ttgtaataaaagtacctctaaaaaccaagcaattcaaattttaaaaacaatataacctttagaa

SEQ ID NO: 51850 - DNA, 66 bp, Homo sapiens
gtacctctaaaaaccaagcaattcaaattttaaaaacaatataacctttagaaaaaatatgcctgc

SEQ ID NO: 51851 - DNA, 69 bp, Homo sapiens
gcaattcaaattttaaaaacaatataacctttagaaaaaatatgcctgctagtgccgttttaatatgct

SEQ ID NO: 51852 - DNA, 69 bp, Homo sapiens
aaaaacaatataacctttagaaaaaatatgcctgctagtgccgttttaatatgctttacagaaagtaca

SEQ ID NO: 51853 - DNA, 70 bp, Homo sapiens
caatataacctttagaaaaaatatgcctgctagtgccgttttaatatgctttacagaaagtacagaaaaa

SEQ ID NO: 51854 - DNA, 74 bp, Homo sapiens
gaaaaaatatgcctgctagtgccgttttaatatgctttacagaaagtacagaaaaattatatctctatgtctac

SEQ ID NO: 51855 - DNA, 76 bp, Homo sapiens
tatgcctgctagtgccgttttaatatgctttacagaaagtacagaaaaattatatctctatgtctacttataatta

SEQ ID NO: 51856 - DNA, 72 bp, Homo sapiens
agtgccgttttaatatgctttacagaaagtacagaaaaattatatctctatgtctacttataattaagaaga

SEQ ID NO: 51857 - DNA, 75 bp, Homo sapiens
atgctttacagaaagtacagaaaaattatatctctatgtctacttataattaagaagaaaactccatctgcagaa

SEQ ID NO: 51858 - DNA, 78 bp, Homo sapiens
gaaaaattatatctctatgtctacttataattaagaagaaaactccatctgcagaaattctggctctatattgccaca

SEQ ID NO: 51859 - DNA, 80 bp, Homo sapiens
tatatctctatgtctacttataattaagaagaaaactccatctgcagaaattctggctctatattgccacatggttagtg

SEQ ID NO: 51860 - DNA, 78 bp, Homo sapiens
tctacttataattaagaagaaaactccatctgcagaaattctggctctatattgccacatggttagtgtgttcttgta

SEQ ID NO: 51861 - DNA, 77 bp, Homo sapiens
aattaagaagaaaactccatctgcagaaattctggctctatattgccacatggttagtgtgttcttgtactcaatat

SEQ ID NO: 51862 - DNA, 78 bp, Homo sapiens
aaactccatctgcagaaattctggctctatattgccacatggttagtgtgttcttgtactcaatattgggtccgtgta

SEQ ID NO: 51863 - DNA, 79 bp, Homo sapiens
cagaaattctggctctatattgccacatggttagtgtgttcttgtactcaatattgggtccgtgtatgaaattcatcta

SEQ ID NO: 51864 - DNA, 74 bp, Homo sapiens
atggttagtgtgttcttgtactcaatattgggtccgtgtatgaaattcatctagagccaggccctgtacaaaaa

SEQ ID NO: 51865 - DNA, 76 bp, Homo sapiens
gtgttcttgtactcaatattgggtccgtgtatgaaattcatctagagccaggccctgtacaaaaatctcagcattt

SEQ ID NO: 51866 - DNA, 76 bp, Homo sapiens
actcaatattgggtccgtgtatgaaattcatctagagccaggccctgtacaaaaatctcagcattttgtgttcaaa

SEQ ID NO: 51867 - DNA, 76 bp, Homo sapiens
cgtgtatgaaattcatctagagccaggccctgtacaaaaatctcagcattttgtgttcaaactctccccaatcaaa

SEQ ID NO: 51868 - DNA, 77 bp, Homo sapiens
atgaaattcatctagagccaggccctgtacaaaaatctcagcattttgtgttcaaactctccccaatcaaatccatg

SEQ ID NO: 51869 - DNA, 74 bp, Homo sapiens
agccaggccctgtacaaaaatctcagcattttgtgttcaaactctccccaatcaaatccatgtgggagatattt

SEQ ID NO: 51870 - DNA, 72 bp, Homo sapiens
ccctgtacaaaaatctcagcattttgtgttcaaactctccccaatcaaatccatgtgggagatatttttaaa

SEQ ID NO: 51871 - DNA, 75 bp, Homo sapiens
tctcagcattttgtgttcaaactctccccaatcaaatccatgtgggagatatttttaaaaatctctcaatttcaa

SEQ ID NO: 51872 - DNA, 72 bp, Homo sapiens
gcattttgtgttcaaactctccccaatcaaatccatgtgggagatatttttaaaaatctctcaatttcaagg

SEQ ID NO: 51873 - DNA, 74 bp, Homo sapiens
tcaaactctccccaatcaaatccatgtgggagatatttttaaaaatctctcaatttcaaggttgaacatcacga

SEQ ID NO: 51874 - DNA, 71 bp, Homo sapiens
cccaatcaaatccatgtgggagatatttttaaaaatctctcaatttcaaggttgaacatcacgaaaacaaa

SEQ ID NO: 51875 - DNA, 74 bp, Homo sapiens
atccatgtgggagatatttttaaaaatctctcaatttcaaggttgaacatcacgaaaacaaaatgcatacatat

SEQ ID NO: 51876 - DNA, 70 bp, Homo sapiens
atttttaaaaatctctcaatttcaaggttgaacatcacgaaaacaaaatgcatacatatttacttttgga

SEQ ID NO: 51877 - DNA, 73 bp, Homo sapiens
atctctcaatttcaaggttgaacatcacgaaaacaaaatgcatacatatttacttttggatgatttggtcttt

SEQ ID NO: 51878 - DNA, 73 bp, Homo sapiens
caatttcaaggttgaacatcacgaaaacaaaatgcatacatatttacttttggatgatttggtcttttatcat

SEQ ID NO: 51879 - DNA, 73 bp, Homo sapiens
cacgaaaacaaaatgcatacatatttacttttggatgatttggtcttttatcatttcaaggtatgcaaaactc

SEQ ID NO: 51880 - DNA, 74 bp, Homo sapiens
gcatacatatttacttttggatgatttggtcttttatcatttcaaggtatgcaaaactcttttgtgtattttgc

SEQ ID NO: 51881 - DNA, 72 bp, Homo sapiens
ttacttttggatgatttggtcttttatcatttcaaggtatgcaaaactcttttgtgtattttgctgtaagac

SEQ ID NO: 51882 - DNA, 74 bp, Homo sapiens
ggatgatttggtcttttatcatttcaaggtatgcaaaactcttttgtgtattttgctgtaagacttttgcttca

SEQ ID NO: 51883 - DNA, 74 bp, Homo sapiens
ggtcttttatcatttcaaggtatgcaaaactcttttgtgtattttgctgtaagacttttgcttcagaaatgtga

SEQ ID NO: 51884 - DNA, 72 bp, Homo sapiens
tttcaaggtatgcaaaactcttttgtgtattttgctgtaagacttttgcttcagaaatgtgaaaccttcacc

SEQ ID NO: 51885 - DNA, 75 bp, Homo sapiens
ttttgtgtattttgctgtaagacttttgcttcagaaatgtgaaaccttcacccaatcacaaaccatatacattgc

SEQ ID NO: 51886 - DNA, 76 bp, Homo sapiens
tattttgctgtaagacttttgcttcagaaatgtgaaaccttcacccaatcacaaaccatatacattgctccattgt

SEQ ID NO: 51887 - DNA, 74 bp, Homo sapiens
agacttttgcttcagaaatgtgaaaccttcacccaatcacaaaccatatacattgctccattgtttcttttaca

SEQ ID NO: 51888 - DNA, 74 bp, Homo sapiens
agaaatgtgaaaccttcacccaatcacaaaccatatacattgctccattgtttcttttacactgagtctcctac

SEQ ID NO: 51889 - DNA, 74 bp, Homo sapiens
aaaccttcacccaatcacaaaccatatacattgctccattgtttcttttacactgagtctcctactgaatccaa

SEQ ID NO: 51890 - DNA, 76 bp, Homo sapiens
acccaatcacaaaccatatacattgctccattgtttcttttacactgagtctcctactgaatccaagtcatccgaa

SEQ ID NO: 51891 - DNA, 75 bp, Homo sapiens
acaaaccatatacattgctccattgtttcttttacactgagtctcctactgaatccaagtcatccgaagagaggg

SEQ ID NO: 51892 - DNA, 75 bp, Homo sapiens
tttcttttacactgagtctcctactgaatccaagtcatccgaagagagggggcggtacaggtcctgcaagatgaa

SEQ ID NO: 51893 - DNA, 75 bp, Homo sapiens
ctactgaatccaagtcatccgaagagagggggcggtacaggtcctgcaagatgaagggcagtatagatttgttta

SEQ ID NO: 51894 - DNA, 78 bp, Homo sapiens
gtctgcaccaaggctgagacaggtctgaaacaagcagcttgcttatttccttaccctctgcttccgcaggcttcctgg

SEQ ID NO: 51895 - DNA, 78 bp, Homo sapiens
tgagacaggtctgaaacaagcagcttgcttatttccttaccctctgcttccgcaggcttcctgggctggtgggtgatg

SEQ ID NO: 51896 - DNA, 76 bp, Homo sapiens
gtctgaaacaagcagcttgcttatttccttaccctctgcttccgcaggcttcctgggctggtgggtgatgggcttg

SEQ ID NO: 51897 - DNA, 76 bp, Homo sapiens
agcttgcttatttccttaccctctgcttccgcaggcttcctgggctggtgggtgatgggcttggcgacttgcctga

SEQ ID NO: 51898 - DNA, 76 bp, Homo sapiens
ttatttccttaccctctgcttccgcaggcttcctgggctggtgggtgatgggcttggcgacttgcctgagcgcgga

SEQ ID NO: 51899 - DNA, 80 bp, Homo sapiens
ttaccctctgcttccgcaggcttcctgggctggtgggtgatgggcttggcgacttgcctgagcgcggagtagagagctga

SEQ ID NO: 51900 - DNA, 78 bp, Homo sapiens
cttccgcaggcttcctgggctggtgggtgatgggcttggcgacttgcctgagcgcggagtagagagctgactaccagg

SEQ ID NO: 51901 - DNA, 77 bp, Homo sapiens
tgggctggtgggtgatgggcttggcgacttgcctgagcgcggagtagagagctgactaccaggggttccattaacta

SEQ ID NO: 51902 - DNA, 76 bp, Homo sapiens
gtgggtgatgggcttggcgacttgcctgagcgcggagtagagagctgactaccaggggttccattaactagaaata

SEQ ID NO: 51903 - DNA, 75 bp, Homo sapiens
tgggcttggcgacttgcctgagcgcggagtagagagctgactaccaggggttccattaactagaaatacaaagaa

SEQ ID NO: 51904 - DNA, 77 bp, Homo sapiens
ttgcctgagcgcggagtagagagctgactaccaggggttccattaactagaaatacaaagaatcacacacagagaaa

SEQ ID NO: 51905 - DNA, 74 bp, Homo sapiens
agcgcggagtagagagctgactaccaggggttccattaactagaaatacaaagaatcacacacagagaaaaatg

SEQ ID NO: 51906 - DNA, 78 bp, Homo sapiens
aaataaatgctttccacaagggagagcagcaatgcatttcacttaccttctatgagttctaacatggacacagtctta

SEQ ID NO: 51907 - DNA, 79 bp, Homo sapiens
aatgctttccacaagggagagcagcaatgcatttcacttaccttctatgagttctaacatggacacagtcttagtgttg

SEQ ID NO: 51908 - DNA, 79 bp, Homo sapiens
acaagggagagcagcaatgcatttcacttaccttctatgagttctaacatggacacagtcttagtgttggacctgaata

SEQ ID NO: 51909 - DNA, 75 bp, Homo sapiens
aatgcatttcacttaccttctatgagttctaacatggacacagtcttagtgttggacctgaataccaacggcgga

SEQ ID NO: 51910 - DNA, 73 bp, Homo sapiens
atttcacttaccttctatgagttctaacatggacacagtcttagtgttggacctgaataccaacggcggaatc

SEQ ID NO: 51911 - DNA, 76 bp, Homo sapiens
ttctatgagttctaacatggacacagtcttagtgttggacctgaataccaacggcggaatcccgtctcagcactaa

SEQ ID NO: 51912 - DNA, 76 bp, Homo sapiens
gttctaacatggacacagtcttagtgttggacctgaataccaacggcggaatcccgtctcagcactaagccaagca

SEQ ID NO: 51913 - DNA, 72 bp, Homo sapiens
acagtcttagtgttggacctgaataccaacggcggaatcccgtctcagcactaagccaagcacccgcggaaa

SEQ ID NO: 51914 - DNA, 72 bp, Homo sapiens
ttagtgttggacctgaataccaacggcggaatcccgtctcagcactaagccaagcacccgcggaaatgggaa

SEQ ID NO: 51915 - DNA, 71 bp, Homo sapiens
aataccaacggcggaatcccgtctcagcactaagccaagcacccgcggaaatgggaatcggttggatgagt

SEQ ID NO: 51916 - DNA, 70 bp, Homo sapiens
aacggcggaatcccgtctcagcactaagccaagcacccgcggaaatgggaatcggttggatgagtttaag

SEQ ID NO: 51917 - DNA, 73 bp, Homo sapiens
atcccgtctcagcactaagccaagcacccgcggaaatgggaatcggttggatgagtttaaggatggctaaggc

SEQ ID NO: 51918 - DNA, 76 bp, Homo sapiens
agcactaagccaagcacccgcggaaatgggaatcggttggatgagtttaaggatggctaaggctgctcccagagca

SEQ ID NO: 51919 - DNA, 77 bp, Homo sapiens
aagcacccgcggaaatgggaatcggttggatgagtttaaggatggctaaggctgctcccagagcaggctgaatgaga

SEQ ID NO: 51920 - DNA, 84 bp, Homo sapiens
aaatgggaatcggttggatgagtttaaggatggctaaggctgctcccagagcaggctgaatgagatgcaggattcatcagcaga

SEQ ID NO: 51921 - DNA, 84 bp, Homo sapiens
aatcggttggatgagtttaaggatggctaaggctgctcccagagcaggctgaatgagatgcaggattcatcagcagatgccttt

SEQ ID NO: 51922 - DNA, 86 bp, Homo sapiens
agtttaaggatggctaaggctgctcccagagcaggctgaatgagatgcaggattcatcagcagatgccttttctgcgtaaagctga

SEQ ID NO: 51923 - DNA, 87 bp, Homo sapiens
atggctaaggctgctcccagagcaggctgaatgagatgcaggattcatcagcagatgccttttctgcgtaaagctgacgtctcccaa

SEQ ID NO: 51924 - DNA, 87 bp, Homo sapiens
ctcccagagcaggctgaatgagatgcaggattcatcagcagatgccttttctgcgtaaagctgacgtctcccaagcagcagtgggag

SEQ ID NO: 51925 - DNA, 85 bp, Homo sapiens
aggctgaatgagatgcaggattcatcagcagatgccttttctgcgtaaagctgacgtctcccaagcagcagtgggaggtgcaggt

SEQ ID NO: 51926 - DNA, 84 bp, Homo sapiens
agatgcaggattcatcagcagatgccttttctgcgtaaagctgacgtctcccaagcagcagtgggaggtgcaggttctgtctta

SEQ ID NO: 51927 - DNA, 84 bp, Homo sapiens
ttcatcagcagatgccttttctgcgtaaagctgacgtctcccaagcagcagtgggaggtgcaggttctgtcttaggctacatca

SEQ ID NO: 51928 - DNA, 78 bp, Homo sapiens
agatgccttttctgcgtaaagctgacgtctcccaagcagcagtgggaggtgcaggttctgtcttaggctacatcaaag

SEQ ID NO: 51929 - DNA, 79 bp, Homo sapiens
ttctgcgtaaagctgacgtctcccaagcagcagtgggaggtgcaggttctgtcttaggctacatcaaaggtgtcaatta

SEQ ID NO: 51930 - DNA, 78 bp, Homo sapiens
taaagctgacgtctcccaagcagcagtgggaggtgcaggttctgtcttaggctacatcaaaggtgtcaattaagcctc

SEQ ID NO: 51931 - DNA, 80 bp, Homo sapiens
tctcccaagcagcagtgggaggtgcaggttctgtcttaggctacatcaaaggtgtcaattaagcctcttgccaacagcaa

SEQ ID NO: 51932 - DNA, 75 bp, Homo sapiens
agtgggaggtgcaggttctgtcttaggctacatcaaaggtgtcaattaagcctcttgccaacagcaacccccatc

SEQ ID NO: 51933 - DNA, 75 bp, Homo sapiens
aggtgcaggttctgtcttaggctacatcaaaggtgtcaattaagcctcttgccaacagcaacccccatcccgaca

SEQ ID NO: 51934 - DNA, 74 bp, Homo sapiens
tctgtcttaggctacatcaaaggtgtcaattaagcctcttgccaacagcaacccccatcccgacaccactccct

SEQ ID NO: 51935 - DNA, 72 bp, Homo sapiens
tacatcaaaggtgtcaattaagcctcttgccaacagcaacccccatcccgacaccactcccttccggaagcc

SEQ ID NO: 51936 - DNA, 74 bp, Homo sapiens
tcaattaagcctcttgccaacagcaacccccatcccgacaccactcccttccggaagccccagtgctgtcagta

SEQ ID NO: 51937 - DNA, 72 bp, Homo sapiens
taagcctcttgccaacagcaacccccatcccgacaccactcccttccggaagccccagtgctgtcagtactt

SEQ ID NO: 51938 - DNA, 74 bp, Homo sapiens
aacagcaacccccatcccgacaccactcccttccggaagccccagtgctgtcagtactttgcactgaatcataa

SEQ ID NO: 51939 - DNA, 76 bp, Homo sapiens
ccatcccgacaccactcccttccggaagccccagtgctgtcagtactttgcactgaatcataatgaagtggccctg

SEQ ID NO: 51940 - DNA, 75 bp, Homo sapiens
acaccactcccttccggaagccccagtgctgtcagtactttgcactgaatcataatgaagtggccctgggggcaa

SEQ ID NO: 51941 - DNA, 80 bp, Homo sapiens
ttccggaagccccagtgctgtcagtactttgcactgaatcataatgaagtggccctgggggcaagagatccagtgactca

SEQ ID NO: 51942 - DNA, 77 bp, Homo sapiens
tgtgtcaggaacaaggcaatttcttcaaaatcccctctgctgctttacctgagctggtggaggcaggggacttgcta

SEQ ID NO: 51943 - DNA, 74 bp, Homo sapiens
aacaaggcaatttcttcaaaatcccctctgctgctttacctgagctggtggaggcaggggacttgctacgcctg

SEQ ID NO: 51944 - DNA, 73 bp, Homo sapiens
aatttcttcaaaatcccctctgctgctttacctgagctggtggaggcaggggacttgctacgcctggacggtc

SEQ ID NO: 51945 - DNA, 76 bp, Homo sapiens
ccctctgctgctttacctgagctggtggaggcaggggacttgctacgcctggacggtcctgggctcttggtggtgc

SEQ ID NO: 51946 - DNA, 76 bp, Homo sapiens
tgctttacctgagctggtggaggcaggggacttgctacgcctggacggtcctgggctcttggtggtgctcctgcgg

SEQ ID NO: 51947 - DNA, 78 bp, Homo sapiens
gctggtggaggcaggggacttgctacgcctggacggtcctgggctcttggtggtgctcctgcgggatgatgaagctat

SEQ ID NO: 51948 - DNA, 77 bp, Homo sapiens
gcaggggacttgctacgcctggacggtcctgggctcttggtggtgctcctgcgggatgatgaagctattttggtgta

SEQ ID NO: 51949 - DNA, 75 bp, Homo sapiens
acttgctacgcctggacggtcctgggctcttggtggtgctcctgcgggatgatgaagctattttggtgtaagaag

SEQ ID NO: 51950 - DNA, 75 bp, Homo sapiens
tggacggtcctgggctcttggtggtgctcctgcgggatgatgaagctattttggtgtaagaagtggactttacca

SEQ ID NO: 51951 - DNA, 77 bp, Homo sapiens
tgggctcttggtggtgctcctgcgggatgatgaagctattttggtgtaagaagtggactttaccactcgacattctg

SEQ ID NO: 51952 - DNA, 75 bp, Homo sapiens
ttggtggtgctcctgcgggatgatgaagctattttggtgtaagaagtggactttaccactcgacattctggggaa

SEQ ID NO: 51953 - DNA, 72 bp, Homo sapiens
tgcgggatgatgaagctattttggtgtaagaagtggactttaccactcgacattctggggaaagaacaaaaa

SEQ ID NO: 51954 - DNA, 71 bp, Homo sapiens
atgatgaagctattttggtgtaagaagtggactttaccactcgacattctggggaaagaacaaaaaccaca

SEQ ID NO: 51955 - DNA, 71 bp, Homo sapiens
tattttggtgtaagaagtggactttaccactcgacattctggggaaagaacaaaaaccacacatcattatg

SEQ ID NO: 51956 - DNA, 67 bp, Homo sapiens
ttcgaaagctgcctcaaatttcccctggttttgaactttttttttccttaccactttcatctagcaa

SEQ ID NO: 51957 - DNA, 67 bp, Homo sapiens
gcctcaaatttcccctggttttgaactttttttttccttaccactttcatctagcaagaaatcatcc

SEQ ID NO: 51958 - DNA, 67 bp, Homo sapiens
tggttttgaactttttttttccttaccactttcatctagcaagaaatcatcctggtaacggaacttc

SEQ ID NO: 51959 - DNA, 68 bp, Homo sapiens
ctttttttttccttaccactttcatctagcaagaaatcatcctggtaacggaacttctccggtccaca

SEQ ID NO: 51960 - DNA, 72 bp, Homo sapiens
ttttccttaccactttcatctagcaagaaatcatcctggtaacggaacttctccggtccacatgcaataaaa

SEQ ID NO: 51961 - DNA, 77 bp, Homo sapiens
tttcatctagcaagaaatcatcctggtaacggaacttctccggtccacatgcaataaaaatgtcatcatcaccaaaa

SEQ ID NO: 51962 - DNA, 72 bp, Homo sapiens
aagaaatcatcctggtaacggaacttctccggtccacatgcaataaaaatgtcatcatcaccaaaaaagtcc

SEQ ID NO: 51963 - DNA, 75 bp, Homo sapiens
atcatcctggtaacggaacttctccggtccacatgcaataaaaatgtcatcatcaccaaaaaagtcctgaaggca

SEQ ID NO: 51964 - DNA, 77 bp, Homo sapiens
gaacttctccggtccacatgcaataaaaatgtcatcatcaccaaaaaagtcctgaaggcacatcacctacaagagaa

SEQ ID NO: 51965 - DNA, 79 bp, Homo sapiens
tctccggtccacatgcaataaaaatgtcatcatcaccaaaaaagtcctgaaggcacatcacctacaagagaaaagcatg

SEQ ID NO: 51966 - DNA, 81 bp, Homo sapiens
acatgcaataaaaatgtcatcatcaccaaaaaagtcctgaaggcacatcacctacaagagaaaagcatggcactcagcaag

SEQ ID NO: 51967 - DNA, 78 bp, Homo sapiens
aaaatgtcatcatcaccaaaaaagtcctgaaggcacatcacctacaagagaaaagcatggcactcagcaagggtggta

SEQ ID NO: 51968 - DNA, 74 bp, Homo sapiens
tggttcttgccttaaagtcaaagtcacatcacaatatgtctcttacctgtttcccatccaacgtgtacaggcgt

SEQ ID NO: 51969 - DNA, 74 bp, Homo sapiens
cttaaagtcaaagtcacatcacaatatgtctcttacctgtttcccatccaacgtgtacaggcgtttcaccactc

SEQ ID NO: 51970 - DNA, 74 bp, Homo sapiens
aaagtcacatcacaatatgtctcttacctgtttcccatccaacgtgtacaggcgtttcaccactcccgagtcca

SEQ ID NO: 51971 - DNA, 76 bp, Homo sapiens
acatcacaatatgtctcttacctgtttcccatccaacgtgtacaggcgtttcaccactcccgagtccagcttgatg

SEQ ID NO: 51972 - DNA, 77 bp, Homo sapiens
tgtttcccatccaacgtgtacaggcgtttcaccactcccgagtccagcttgatggcatcggtgatatcggtgaggac

SEQ ID NO: 51973 - DNA, 78 bp, Homo sapiens
atccaacgtgtacaggcgtttcaccactcccgagtccagcttgatggcatcggtgatatcggtgaggacctgctcaaa

SEQ ID NO: 51974 - DNA, 77 bp, Homo sapiens
gcgtttcaccactcccgagtccagcttgatggcatcggtgatatcggtgaggacctgctcaaaggaatgagccgttt

SEQ ID NO: 51975 - DNA, 76 bp, Homo sapiens
accactcccgagtccagcttgatggcatcggtgatatcggtgaggacctgctcaaaggaatgagccgttttcttgt

SEQ ID NO: 51976 - DNA, 81 bp, Homo sapiens
agtccagcttgatggcatcggtgatatcggtgaggacctgctcaaaggaatgagccgttttcttgttcagcagaatcctga

SEQ ID NO: 51977 - DNA, 81 bp, Homo sapiens
ttgatggcatcggtgatatcggtgaggacctgctcaaaggaatgagccgttttcttgttcagcagaatcctgacagctttc

SEQ ID NO: 51978 - DNA, 77 bp, Homo sapiens
atatcggtgaggacctgctcaaaggaatgagccgttttcttgttcagcagaatcctgacagctttccgtggcttcac

SEQ ID NO: 51979 - DNA, 76 bp, Homo sapiens
aggacctgctcaaaggaatgagccgttttcttgttcagcagaatcctgacagctttccgtggcttcacgccacttc

SEQ ID NO: 51980 - DNA, 78 bp, Homo sapiens
aaaggaatgagccgttttcttgttcagcagaatcctgacagctttccgtggcttcacgccacttctgatgatggtgac

SEQ ID NO: 51981 - DNA, 80 bp, Homo sapiens
aatgagccgttttcttgttcagcagaatcctgacagctttccgtggcttcacgccacttctgatgatggtgaccagcttg

SEQ ID NO: 51982 - DNA, 81 bp, Homo sapiens
ttcttgttcagcagaatcctgacagctttccgtggcttcacgccacttctgatgatggtgaccagcttgggccgaatgaaa

SEQ ID NO: 51983 - DNA, 78 bp, Homo sapiens
agaatcctgacagctttccgtggcttcacgccacttctgatgatggtgaccagcttgggccgaatgaaatccttattc

SEQ ID NO: 51984 - DNA, 78 bp, Homo sapiens
agctttccgtggcttcacgccacttctgatgatggtgaccagcttgggccgaatgaaatccttattctctcgcacctc

SEQ ID NO: 51985 - DNA, 80 bp, Homo sapiens
tggcttcacgccacttctgatgatggtgaccagcttgggccgaatgaaatccttattctctcgcacctctgaagggcttc

SEQ ID NO: 51986 - DNA, 76 bp, Homo sapiens
acgccacttctgatgatggtgaccagcttgggccgaatgaaatccttattctctcgcacctctgaagggcttcctt

SEQ ID NO: 51987 - DNA, 77 bp, Homo sapiens
atgatggtgaccagcttgggccgaatgaaatccttattctctcgcacctctgaagggcttcctttggcagtggccag

SEQ ID NO: 51988 - DNA, 76 bp, Homo sapiens
accagcttgggccgaatgaaatccttattctctcgcacctctgaagggcttcctttggcagtggccagtgaagaca

SEQ ID NO: 51989 - DNA, 76 bp, Homo sapiens
aatgaaatccttattctctcgcacctctgaagggcttcctttggcagtggccagtgaagacactgcccgagaagcc

SEQ ID NO: 51990 - DNA, 75 bp, Homo sapiens
aatccttattctctcgcacctctgaagggcttcctttggcagtggccagtgaagacactgcccgagaagccgagg

SEQ ID NO: 51991 - DNA, 77 bp, Homo sapiens
tcgcacctctgaagggcttcctttggcagtggccagtgaagacactgcccgagaagccgaggtggtcttgacgttca

SEQ ID NO: 51992 - DNA, 73 bp, Homo sapiens
aagggcttcctttggcagtggccagtgaagacactgcccgagaagccgaggtggtcttgacgttcaccgacca

SEQ ID NO: 51993 - DNA, 73 bp, Homo sapiens
ttcctttggcagtggccagtgaagacactgcccgagaagccgaggtggtcttgacgttcaccgaccagttggg

SEQ ID NO: 51994 - DNA, 72 bp, Homo sapiens
ccagtgaagacactgcccgagaagccgaggtggtcttgacgttcaccgaccagttggggttcacattcttgg

SEQ ID NO: 51995 - DNA, 71 bp, Homo sapiens
aagacactgcccgagaagccgaggtggtcttgacgttcaccgaccagttggggttcacattcttggtgtac

SEQ ID NO: 51996 - DNA, 71 bp, Homo sapiens
agaagccgaggtggtcttgacgttcaccgaccagttggggttcacattcttggtgtactccagtttcttga

SEQ ID NO: 51997 - DNA, 73 bp, Homo sapiens
tggtcttgacgttcaccgaccagttggggttcacattcttggtgtactccagtttcttgaagggctctatgga

SEQ ID NO: 51998 - DNA, 75 bp, Homo sapiens
gttcaccgaccagttggggttcacattcttggtgtactccagtttcttgaagggctctatggagccacatacata

SEQ ID NO: 51999 - DNA, 76 bp, Homo sapiens
cagttggggttcacattcttggtgtactccagtttcttgaagggctctatggagccacatacataactctctccta

SEQ ID NO: 52000 - DNA, 74 bp, Homo sapiens
actccagtttcttgaagggctctatggagccacatacataactctctcctaaggaagagagaaatatatttaaa

SEQ ID NO: 52001 - DNA, 74 bp, Homo sapiens
cttgaagggctctatggagccacatacataactctctcctaaggaagagagaaatatatttaaatttatactaa

SEQ ID NO: 52002 - DNA, 73 bp, Homo sapiens
agcctggaacctgtagggtcacgtgggggttatctcacagcgctcaccttccaccagttggtccaggctggaa

SEQ ID NO: 52003 - DNA, 72 bp, Homo sapiens
aacctgtagggtcacgtgggggttatctcacagcgctcaccttccaccagttggtccaggctggaaatcttc

SEQ ID NO: 52004 - DNA, 81 bp, Homo sapiens
ttatctcacagcgctcaccttccaccagttggtccaggctggaaatcttcttgagcccatcaatggtgtagattgttctca

SEQ ID NO: 52005 - DNA, 78 bp, Homo sapiens
acagcgctcaccttccaccagttggtccaggctggaaatcttcttgagcccatcaatggtgtagattgttctcactcc

SEQ ID NO: 52006 - DNA, 77 bp, Homo sapiens
caccagttggtccaggctggaaatcttcttgagcccatcaatggtgtagattgttctcactccctggggcaaattca

SEQ ID NO: 52007 - DNA, 75 bp, Homo sapiens
aaatcttcttgagcccatcaatggtgtagattgttctcactccctggggcaaattcacgttatccgacagagttc

SEQ ID NO: 52008 - DNA, 75 bp, Homo sapiens
ttgagcccatcaatggtgtagattgttctcactccctggggcaaattcacgttatccgacagagttcgggtcaaa

SEQ ID NO: 52009 - DNA, 77 bp, Homo sapiens
atcaatggtgtagattgttctcactccctggggcaaattcacgttatccgacagagttcgggtcaaatcagccagca

SEQ ID NO: 52010 - DNA, 74 bp, Homo sapiens
attgttctcactccctggggcaaattcacgttatccgacagagttcgggtcaaatcagccagcagggcctcaaa

SEQ ID NO: 52011 - DNA, 73 bp, Homo sapiens
tccctggggcaaattcacgttatccgacagagttcgggtcaaatcagccagcagggcctcaaaagatcggaac

SEQ ID NO: 52012 - DNA, 71 bp, Homo sapiens
aaattcacgttatccgacagagttcgggtcaaatcagccagcagggcctcaaaagatcggaaccggtctgg

SEQ ID NO: 52013 - DNA, 72 bp, Homo sapiens
acgttatccgacagagttcgggtcaaatcagccagcagggcctcaaaagatcggaaccggtctggggagatg

SEQ ID NO: 52014 - DNA, 73 bp, Homo sapiens
agttcgggtcaaatcagccagcagggcctcaaaagatcggaaccggtctggggagatggcatacacaatccct

SEQ ID NO: 52015 - DNA, 75 bp, Homo sapiens
aaatcagccagcagggcctcaaaagatcggaaccggtctggggagatggcatacacaatccctttgaagtatcga

SEQ ID NO: 52016 - DNA, 73 bp, Homo sapiens
gcagggcctcaaaagatcggaaccggtctggggagatggcatacacaatccctttgaagtatcgatctccgtt

SEQ ID NO: 52017 - DNA, 72 bp, Homo sapiens
aaaagatcggaaccggtctggggagatggcatacacaatccctttgaagtatcgatctccgtttcgatagaa

SEQ ID NO: 52018 - DNA, 70 bp, Homo sapiens
aaccggtctggggagatggcatacacaatccctttgaagtatcgatctccgtttcgatagaaacgaactt

SEQ ID NO: 52019 - DNA, 72 bp, Homo sapiens
gggagatggcatacacaatccctttgaagtatcgatctccgtttcgatagaaacgaactttcttggccttct

SEQ ID NO: 52020 - DNA, 72 bp, Homo sapiens
atggcatacacaatccctttgaagtatcgatctccgtttcgatagaaacgaactttcttggccttcttctcg

SEQ ID NO: 52021 - DNA, 71 bp, Homo sapiens
aatccctttgaagtatcgatctccgtttcgatagaaacgaactttcttggccttcttctcggagctgagcg

SEQ ID NO: 52022 - DNA, 75 bp, Homo sapiens
aagtatcgatctccgtttcgatagaaacgaactttcttggccttcttctcggagctgagcgtctgcagcgtgcgg

SEQ ID NO: 52023 - DNA, 75 bp, Homo sapiens
tccgtttcgatagaaacgaactttcttggccttcttctcggagctgagcgtctgcagcgtgcgggtgcggtagaa

SEQ ID NO: 52024 - DNA, 78 bp, Homo sapiens
atagaaacgaactttcttggccttcttctcggagctgagcgtctgcagcgtgcgggtgcggtagaagctgcagtgggc

SEQ ID NO: 52025 - DNA, 80 bp, Homo sapiens
aactttcttggccttcttctcggagctgagcgtctgcagcgtgcgggtgcggtagaagctgcagtgggcgctgtgcgtcg

SEQ ID NO: 52026 - DNA, 82 bp, Homo sapiens
agctgagcgtctgcagcgtgcgggtgcggtagaagctgcagtgggcgctgtgcgtcgggctcggcaggccgttcacccgcga

SEQ ID NO: 52027 - DNA, 79 bp, Homo sapiens
gtctgcagcgtgcgggtgcggtagaagctgcagtgggcgctgtgcgtcgggctcggcaggccgttcacccgcgaccctc

SEQ ID NO: 52028 - DNA, 79 bp, Homo sapiens
ggtgcggtagaagctgcagtgggcgctgtgcgtcgggctcggcaggccgttcacccgcgaccctcggctgtatctctgc

SEQ ID NO: 52029 - DNA, 78 bp, Homo sapiens
aagctgcagtgggcgctgtgcgtcgggctcggcaggccgttcacccgcgaccctcggctgtatctctgcgccttatcc

SEQ ID NO: 52030 - DNA, 76 bp, Homo sapiens
agtgggcgctgtgcgtcgggctcggcaggccgttcacccgcgaccctcggctgtatctctgcgccttatcccgctc

SEQ ID NO: 52031 - DNA, 77 bp, Homo sapiens
tgtgcgtcgggctcggcaggccgttcacccgcgaccctcggctgtatctctgcgccttatcccgctcgtcgaagtgc

SEQ ID NO: 52032 - DNA, 78 bp, Homo sapiens
ggctcggcaggccgttcacccgcgaccctcggctgtatctctgcgccttatcccgctcgtcgaagtgctccagctcca

SEQ ID NO: 52033 - DNA, 80 bp, Homo sapiens
ttcacccgcgaccctcggctgtatctctgcgccttatcccgctcgtcgaagtgctccagctccatgtctctgccgaagga

SEQ ID NO: 52034 - DNA, 81 bp, Homo sapiens
accctcggctgtatctctgcgccttatcccgctcgtcgaagtgctccagctccatgtctctgccgaaggacatgatggact

SEQ ID NO: 52035 - DNA, 83 bp, Homo sapiens
ctgtatctctgcgccttatcccgctcgtcgaagtgctccagctccatgtctctgccgaaggacatgatggacttcaagtagga

SEQ ID NO: 52036 - DNA, 79 bp, Homo sapiens
cgccttatcccgctcgtcgaagtgctccagctccatgtctctgccgaaggacatgatggacttcaagtaggacctacga

SEQ ID NO: 52037 - DNA, 79 bp, Homo sapiens
ctcgtcgaagtgctccagctccatgtctctgccgaaggacatgatggacttcaagtaggacctacgagccccagaaaca

SEQ ID NO: 52038 - DNA, 68 bp, Homo sapiens
ccgccctccccgcagctcccgtccccagggaaggcaaaccacgcaccggtccgcggagagacgccgcc

SEQ ID NO: 52039 - DNA, 67 bp, Homo sapiens
cgcagctcccgtccccagggaaggcaaaccacgcaccggtccgcggagagacgccgccgggggtctt

SEQ ID NO: 52040 - DNA, 66 bp, Homo sapiens
ctcccgtccccagggaaggcaaaccacgcaccggtccgcggagagacgccgccgggggtctttgtg

SEQ ID NO: 52041 - DNA, 67 bp, Homo sapiens
agggaaggcaaaccacgcaccggtccgcggagagacgccgccgggggtctttgtggccgcgctgggg

SEQ ID NO: 52042 - DNA, 67 bp, Homo sapiens
aaaccacgcaccggtccgcggagagacgccgccgggggtctttgtggccgcgctgggggccgcctcc

SEQ ID NO: 52043 - DNA, 70 bp, Homo sapiens
ccggtccgcggagagacgccgccgggggtctttgtggccgcgctgggggccgcctcctggtgctgtcctc

SEQ ID NO: 52044 - DNA, 71 bp, Homo sapiens
agagacgccgccgggggtctttgtggccgcgctgggggccgcctcctggtgctgtcctcgccgggctgggc

SEQ ID NO: 52045 - DNA, 72 bp, Homo sapiens
gggtctttgtggccgcgctgggggccgcctcctggtgctgtcctcgccgggctgggcgcggccggggctgcg

SEQ ID NO: 52046 - DNA, 75 bp, Homo sapiens
tttgtggccgcgctgggggccgcctcctggtgctgtcctcgccgggctgggcgcggccggggctgcggggctgca

SEQ ID NO: 52047 - DNA, 73 bp, Homo sapiens
cgctgggggccgcctcctggtgctgtcctcgccgggctgggcgcggccggggctgcggggctgcagggctggg

SEQ ID NO: 52048 - DNA, 72 bp, Homo sapiens
cctcctggtgctgtcctcgccgggctgggcgcggccggggctgcggggctgcagggctggggggcggcggcg

SEQ ID NO: 52049 - DNA, 71 bp, Homo sapiens
tgctgtcctcgccgggctgggcgcggccggggctgcggggctgcagggctggggggcggcggcggggccgg

SEQ ID NO: 52050 - DNA, 72 bp, Homo sapiens
gggctgggcgcggccggggctgcggggctgcagggctggggggcggcggcggggccgggctgggcggcagca

SEQ ID NO: 52051 - DNA, 75 bp, Homo sapiens
ggccggggctgcggggctgcagggctggggggcggcggcggggccgggctgggcggcagcagctgctggagcgcg

SEQ ID NO: 52052 - DNA, 76 bp, Homo sapiens
tgcggggctgcagggctggggggcggcggcggggccgggctgggcggcagcagctgctggagcgcggcgcctcggt

SEQ ID NO: 52053 - DNA, 75 bp, Homo sapiens
gggctggggggcggcggcggggccgggctgggcggcagcagctgctggagcgcggcgcctcggttgcggccacta

SEQ ID NO: 52054 - DNA, 80 bp, Homo sapiens
gcggcggcggggccgggctgggcggcagcagctgctggagcgcggcgcctcggttgcggccactagtgcagggatgtgcc

SEQ ID NO: 52055 - DNA, 80 bp, Homo sapiens
ggccgggctgggcggcagcagctgctggagcgcggcgcctcggttgcggccactagtgcagggatgtgcctcggcccgtc

SEQ ID NO: 52056 - DNA, 83 bp, Homo sapiens
ggcggcagcagctgctggagcgcggcgcctcggttgcggccactagtgcagggatgtgcctcggcccgtcctcattgaaatgc

SEQ ID NO: 52057 - DNA, 80 bp, Homo sapiens
agctgctggagcgcggcgcctcggttgcggccactagtgcagggatgtgcctcggcccgtcctcattgaaatgcggcgct

SEQ ID NO: 52058 - DNA, 81 bp, Homo sapiens
tggagcgcggcgcctcggttgcggccactagtgcagggatgtgcctcggcccgtcctcattgaaatgcggcgcttcgcaca

SEQ ID NO: 52059 - DNA, 80 bp, Homo sapiens
cgcctcggttgcggccactagtgcagggatgtgcctcggcccgtcctcattgaaatgcggcgcttcgcacagcctcactc

SEQ ID NO: 52060 - DNA, 82 bp, Homo sapiens
cggccactagtgcagggatgtgcctcggcccgtcctcattgaaatgcggcgcttcgcacagcctcactccagcctctctctc

SEQ ID NO: 52061 - DNA, 82 bp, Homo sapiens
gtgcagggatgtgcctcggcccgtcctcattgaaatgcggcgcttcgcacagcctcactccagcctctctctccagaggagg

SEQ ID NO: 52062 - DNA, 80 bp, Homo sapiens
gtgcctcggcccgtcctcattgaaatgcggcgcttcgcacagcctcactccagcctctctctccagaggagggcggcggc

SEQ ID NO: 52063 - DNA, 73 bp, Homo sapiens
atcaagggcttactgacataggaacaacagaaatgctcctggaacttcaagttgctgaattataagtttattt

SEQ ID NO: 52064 - DNA, 74 bp, Homo sapiens
tactgacataggaacaacagaaatgctcctggaacttcaagttgctgaattataagtttattttttatcaataa

SEQ ID NO: 52065 - DNA, 70 bp, Homo sapiens
ggaacaacagaaatgctcctggaacttcaagttgctgaattataagtttattttttatcaataaatattt

SEQ ID NO: 52066 - DNA, 71 bp, Homo sapiens
gctcctggaacttcaagttgctgaattataagtttattttttatcaataaatatttttatacttacattga

SEQ ID NO: 52067 - DNA, 72 bp, Homo sapiens
gaacttcaagttgctgaattataagtttattttttatcaataaatatttttatacttacattgagtgatgtg

SEQ ID NO: 52068 - DNA, 72 bp, Homo sapiens
tgctgaattataagtttattttttatcaataaatatttttatacttacattgagtgatgtgtttaacaacaa

SEQ ID NO: 52069 - DNA, 72 bp, Homo sapiens
gtttattttttatcaataaatatttttatacttacattgagtgatgtgtttaacaacaaattgtgacagagc

SEQ ID NO: 52070 - DNA, 79 bp, Homo sapiens
tatcaataaatatttttatacttacattgagtgatgtgtttaacaacaaattgtgacagagctgagtgctcctatctta

SEQ ID NO: 52071 - DNA, 78 bp, Homo sapiens
tatttttatacttacattgagtgatgtgtttaacaacaaattgtgacagagctgagtgctcctatcttacagggtcaa

SEQ ID NO: 52072 - DNA, 80 bp, Homo sapiens
ttatacttacattgagtgatgtgtttaacaacaaattgtgacagagctgagtgctcctatcttacagggtcaatgaacta

SEQ ID NO: 52073 - DNA, 78 bp, Homo sapiens
attgagtgatgtgtttaacaacaaattgtgacagagctgagtgctcctatcttacagggtcaatgaactacttattaa

SEQ ID NO: 52074 - DNA, 76 bp, Homo sapiens
ttaacaacaaattgtgacagagctgagtgctcctatcttacagggtcaatgaactacttattaagccttactggta

SEQ ID NO: 52075 - DNA, 78 bp, Homo sapiens
attgtgacagagctgagtgctcctatcttacagggtcaatgaactacttattaagccttactggtagcactgaattta

SEQ ID NO: 52076 - DNA, 77 bp, Homo sapiens
agagctgagtgctcctatcttacagggtcaatgaactacttattaagccttactggtagcactgaatttagcagttc

SEQ ID NO: 52077 - DNA, 76 bp, Homo sapiens
ctcctatcttacagggtcaatgaactacttattaagccttactggtagcactgaatttagcagttctgagaacatg

SEQ ID NO: 52078 - DNA, 76 bp, Homo sapiens
ttacagggtcaatgaactacttattaagccttactggtagcactgaatttagcagttctgagaacatgtgaaacta

SEQ ID NO: 52079 - DNA, 76 bp, Homo sapiens
tgaactacttattaagccttactggtagcactgaatttagcagttctgagaacatgtgaaactatgttaaaactga

SEQ ID NO: 52080 - DNA, 77 bp, Homo sapiens
ttaagccttactggtagcactgaatttagcagttctgagaacatgtgaaactatgttaaaactgaaggcactatata

SEQ ID NO: 52081 - DNA, 75 bp, Homo sapiens
cttactggtagcactgaatttagcagttctgagaacatgtgaaactatgttaaaactgaaggcactatatatttt

SEQ ID NO: 52082 - DNA, 76 bp, Homo sapiens
gcactgaatttagcagttctgagaacatgtgaaactatgttaaaactgaaggcactatatatttttacataaaagc

SEQ ID NO: 52083 - DNA, 77 bp, Homo sapiens
gcagttctgagaacatgtgaaactatgttaaaactgaaggcactatatatttttacataaaagcttgaacatacaga

SEQ ID NO: 52084 - DNA, 76 bp, Homo sapiens
gagaacatgtgaaactatgttaaaactgaaggcactatatatttttacataaaagcttgaacatacagatgaatta

SEQ ID NO: 52085 - DNA, 76 bp, Homo sapiens
tatgttaaaactgaaggcactatatatttttacataaaagcttgaacatacagatgaattataacctatgtgaaga

SEQ ID NO: 52086 - DNA, 76 bp, Homo sapiens
actgaaggcactatatatttttacataaaagcttgaacatacagatgaattataacctatgtgaagaaatcttaga

SEQ ID NO: 52087 - DNA, 76 bp, Homo sapiens
ggcactatatatttttacataaaagcttgaacatacagatgaattataacctatgtgaagaaatcttagatataaa

SEQ ID NO: 52088 - DNA, 74 bp, Homo sapiens
ttacataaaagcttgaacatacagatgaattataacctatgtgaagaaatcttagatataaaactaacttttca

SEQ ID NO: 52089 - DNA, 74 bp, Homo sapiens
aagcttgaacatacagatgaattataacctatgtgaagaaatcttagatataaaactaacttttcaaagataca

SEQ ID NO: 52090 - DNA, 72 bp, Homo sapiens
acatacagatgaattataacctatgtgaagaaatcttagatataaaactaacttttcaaagatacaaaagaa

SEQ ID NO: 52091 - DNA, 65 bp, Homo sapiens
tcttagatataaaactaacttttcaaagatacaaaagaaattaaacaggtttcctgaaattttag

SEQ ID NO: 52092 - DNA, 64 bp, Homo sapiens
aactaacttttcaaagatacaaaagaaattaaacaggtttcctgaaattttagttcttggtctg

SEQ ID NO: 52093 - DNA, 68 bp, Homo sapiens
tcaaagatacaaaagaaattaaacaggtttcctgaaattttagttcttggtctgttcacctctgtggg

SEQ ID NO: 52094 - DNA, 67 bp, Homo sapiens
ttaaacaggtttcctgaaattttagttcttggtctgttcacctctgtggggaaaattcttagttcca

SEQ ID NO: 52095 - DNA, 71 bp, Homo sapiens
tctgttcacctctgtggggaaaattcttagttccagtgataactgttctagttactacttttaagtatgta

SEQ ID NO: 52096 - DNA, 69 bp, Homo sapiens
cacctctgtggggaaaattcttagttccagtgataactgttctagttactacttttaagtatgtaaata

SEQ ID NO: 52097 - DNA, 67 bp, Homo sapiens
gggaaaattcttagttccagtgataactgttctagttactacttttaagtatgtaaatactagaaag

SEQ ID NO: 52098 - DNA, 72 bp, Homo sapiens
gttccagtgataactgttctagttactacttttaagtatgtaaatactagaaaggtagtactagtgacatca

SEQ ID NO: 52099 - DNA, 73 bp, Homo sapiens
gtgataactgttctagttactacttttaagtatgtaaatactagaaaggtagtactagtgacatcatcacgtg

SEQ ID NO: 52100 - DNA, 73 bp, Homo sapiens
gttactacttttaagtatgtaaatactagaaaggtagtactagtgacatcatcacgtgtattgttatctatgg

SEQ ID NO: 52101 - DNA, 76 bp, Homo sapiens
tttaagtatgtaaatactagaaaggtagtactagtgacatcatcacgtgtattgttatctatggggcaaatgtgtg

SEQ ID NO: 52102 - DNA, 77 bp, Homo sapiens
aaatactagaaaggtagtactagtgacatcatcacgtgtattgttatctatggggcaaatgtgtggtgcccagaata

SEQ ID NO: 52103 - DNA, 78 bp, Homo sapiens
tagaaaggtagtactagtgacatcatcacgtgtattgttatctatggggcaaatgtgtggtgcccagaataaaatata

SEQ ID NO: 52104 - DNA, 80 bp, Homo sapiens
agtactagtgacatcatcacgtgtattgttatctatggggcaaatgtgtggtgcccagaataaaatatacctcatgccta

SEQ ID NO: 52105 - DNA, 77 bp, Homo sapiens
acatcatcacgtgtattgttatctatggggcaaatgtgtggtgcccagaataaaatatacctcatgcctagggtagg

SEQ ID NO: 52106 - DNA, 75 bp, Homo sapiens
tattgttatctatggggcaaatgtgtggtgcccagaataaaatatacctcatgcctagggtagggacatcctttc

SEQ ID NO: 52107 - DNA, 76 bp, Homo sapiens
atctatggggcaaatgtgtggtgcccagaataaaatatacctcatgcctagggtagggacatcctttccagctcaa

SEQ ID NO: 52108 - DNA, 73 bp, Homo sapiens
aatgtgtggtgcccagaataaaatatacctcatgcctagggtagggacatcctttccagctcaaacgtgggta

SEQ ID NO: 52109 - DNA, 71 bp, Homo sapiens
aaaatatacctcatgcctagggtagggacatcctttccagctcaaacgtgggtagggatgtgggagaataa

SEQ ID NO: 52110 - DNA, 72 bp, Homo sapiens
atgcctagggtagggacatcctttccagctcaaacgtgggtagggatgtgggagaataagaatgtgggagaa

SEQ ID NO: 52111 - DNA, 72 bp, Homo sapiens
tagggacatcctttccagctcaaacgtgggtagggatgtgggagaataagaatgtgggagaaccaagagaaa

SEQ ID NO: 52112 - DNA, 70 bp, Homo sapiens
ctcaaacgtgggtagggatgtgggagaataagaatgtgggagaaccaagagaaaaagtggggctgggaga

SEQ ID NO: 52113 - DNA, 71 bp, Homo sapiens
tgggagaataagaatgtgggagaaccaagagaaaaagtggggctgggagagtggagttcccgtagggcata

SEQ ID NO: 52114 - DNA, 69 bp, Homo sapiens
aaccaagagaaaaagtggggctgggagagtggagttcccgtagggcataggcctgtgaagtaacactgg

SEQ ID NO: 52115 - DNA, 76 bp, Homo sapiens
tgggagagtggagttcccgtagggcataggcctgtgaagtaacactggggcagatatgtatgttatatacaactat

SEQ ID NO: 52116 - DNA, 73 bp, Homo sapiens
agtggagttcccgtagggcataggcctgtgaagtaacactggggcagatatgtatgttatatacaactatttt

SEQ ID NO: 52117 - DNA, 71 bp, Homo sapiens
ccgtagggcataggcctgtgaagtaacactggggcagatatgtatgttatatacaactatttttttaaaaa

SEQ ID NO: 52118 - DNA, 71 bp, Homo sapiens
aaaacttatatccatgttgggagtagatgggtatataacagtttggaaatactatctttggagaatgtatt

SEQ ID NO: 52119 - DNA, 72 bp, Homo sapiens
atatccatgttgggagtagatgggtatataacagtttggaaatactatctttggagaatgtatttttgtatt

SEQ ID NO: 52120 - DNA, 72 bp, Homo sapiens
tgggagtagatgggtatataacagtttggaaatactatctttggagaatgtatttttgtatttataaatcaa

SEQ ID NO: 52121 - DNA, 69 bp, Homo sapiens
tgggtatataacagtttggaaatactatctttggagaatgtatttttgtatttataaatcaacttttaa

SEQ ID NO: 52122 - DNA, 69 bp, Homo sapiens
cagtttggaaatactatctttggagaatgtatttttgtatttataaatcaacttttaaaaactgtctca

SEQ ID NO: 52123 - DNA, 69 bp, Homo sapiens
tactatctttggagaatgtatttttgtatttataaatcaacttttaaaaactgtctcattcaaaaggga

SEQ ID NO: 52124 - DNA, 67 bp, Homo sapiens
gaatgtatttttgtatttataaatcaacttttaaaaactgtctcattcaaaagggaataaagacctg

SEQ ID NO: 52125 - DNA, 70 bp, Homo sapiens
ttgtatttataaatcaacttttaaaaactgtctcattcaaaagggaataaagacctgtgttatcaatgtg

SEQ ID NO: 52126 - DNA, 69 bp, Homo sapiens
aaatcaacttttaaaaactgtctcattcaaaagggaataaagacctgtgttatcaatgtgtcattttct

SEQ ID NO: 52127 - DNA, 69 bp, Homo sapiens
cttttaaaaactgtctcattcaaaagggaataaagacctgtgttatcaatgtgtcattttcttctttcc

SEQ ID NO: 52128 - DNA, 72 bp, Homo sapiens
aaactgtctcattcaaaagggaataaagacctgtgttatcaatgtgtcattttcttctttcctccataactg

SEQ ID NO: 52129 - DNA, 74 bp, Homo sapiens
tctcattcaaaagggaataaagacctgtgttatcaatgtgtcattttcttctttcctccataactgtaccttga

SEQ ID NO: 52130 - DNA, 69 bp, Homo sapiens
aagggaataaagacctgtgttatcaatgtgtcattttcttctttcctccataactgtaccttgaaacct

SEQ ID NO: 52131 - DNA, 70 bp, Homo sapiens
agggaataaagacctgtgttatcaatgtgtcattttcttctttcctccataactgtaccttgaaacctta

SEQ ID NO: 52132 - DNA, 76 bp, Homo sapiens
tgtgttatcaatgtgtcattttcttctttcctccataactgtaccttgaaaccttactgctgacctgcagaaaatg

SEQ ID NO: 52133 - DNA, 77 bp, Homo sapiens
tatcaatgtgtcattttcttctttcctccataactgtaccttgaaaccttactgctgacctgcagaaaatgtgccgc

SEQ ID NO: 52134 - DNA, 74 bp, Homo sapiens
gtcattttcttctttcctccataactgtaccttgaaaccttactgctgacctgcagaaaatgtgccgcgttatg

SEQ ID NO: 52135 - DNA, 74 bp, Homo sapiens
ttcttctttcctccataactgtaccttgaaaccttactgctgacctgcagaaaatgtgccgcgttatgtacctg

SEQ ID NO: 52136 - DNA, 78 bp, Homo sapiens
taactgtaccttgaaaccttactgctgacctgcagaaaatgtgccgcgttatgtacctggctcatcttcaacacacta

SEQ ID NO: 52137 - DNA, 79 bp, Homo sapiens
tgacctgcagaaaatgtgccgcgttatgtacctggctcatcttcaacacactaaccatgaacactaatagccattaggg

SEQ ID NO: 52138 - DNA, 77 bp, Homo sapiens
agaaaatgtgccgcgttatgtacctggctcatcttcaacacactaaccatgaacactaatagccattaggggacatg

SEQ ID NO: 52139 - DNA, 80 bp, Homo sapiens
gcgttatgtacctggctcatcttcaacacactaaccatgaacactaatagccattaggggacatggctacagatactaca

SEQ ID NO: 52140 - DNA, 79 bp, Homo sapiens
tacctggctcatcttcaacacactaaccatgaacactaatagccattaggggacatggctacagatactacattggaaa

SEQ ID NO: 52141 - DNA, 76 bp, Homo sapiens
acacactaaccatgaacactaatagccattaggggacatggctacagatactacattggaaagttgtctttaatca

SEQ ID NO: 52142 - DNA, 74 bp, Homo sapiens
aacactaatagccattaggggacatggctacagatactacattggaaagttgtctttaatcacacaggtgttaa

SEQ ID NO: 52143 - DNA, 74 bp, Homo sapiens
ccattaggggacatggctacagatactacattggaaagttgtctttaatcacacaggtgttaaactcaatataa

SEQ ID NO: 52144 - DNA, 73 bp, Homo sapiens
gggacatggctacagatactacattggaaagttgtctttaatcacacaggtgttaaactcaatataaatttac

SEQ ID NO: 52145 - DNA, 71 bp, Homo sapiens
gctacagatactacattggaaagttgtctttaatcacacaggtgttaaactcaatataaatttacctaaaa

SEQ ID NO: 52146 - DNA, 69 bp, Homo sapiens
ctacattggaaagttgtctttaatcacacaggtgttaaactcaatataaatttacctaaaaacaattgc

SEQ ID NO: 52147 - DNA, 69 bp, Homo sapiens
tgtctttaatcacacaggtgttaaactcaatataaatttacctaaaaacaattgctatacctaaaagga

SEQ ID NO: 52148 - DNA, 67 bp, Homo sapiens
cacacaggtgttaaactcaatataaatttacctaaaaacaattgctatacctaaaaggagttctggg

SEQ ID NO: 52149 - DNA, 66 bp, Homo sapiens
ataaatttacctaaaaacaattgctatacctaaaaggagttctgggtactaagggtagaagcctca

SEQ ID NO: 52150 - DNA, 68 bp, Homo sapiens
tttacctaaaaacaattgctatacctaaaaggagttctgggtactaagggtagaagcctcactggcta

SEQ ID NO: 52151 - DNA, 68 bp, Homo sapiens
aattgctatacctaaaaggagttctgggtactaagggtagaagcctcactggctacagttttttaata

SEQ ID NO: 52152 - DNA, 67 bp, Homo sapiens
atacctaaaaggagttctgggtactaagggtagaagcctcactggctacagttttttaatagtacaa

SEQ ID NO: 52153 - DNA, 68 bp, Homo sapiens
agttctgggtactaagggtagaagcctcactggctacagttttttaatagtacaaaagtcaagaaata

SEQ ID NO: 52154 - DNA, 70 bp, Homo sapiens
ctaagggtagaagcctcactggctacagttttttaatagtacaaaagtcaagaaataacacaatagtgac

SEQ ID NO: 52155 - DNA, 73 bp, Homo sapiens
gcctcactggctacagttttttaatagtacaaaagtcaagaaataacacaatagtgactataacctgtattca

SEQ ID NO: 52156 - DNA, 71 bp, Homo sapiens
ctggctacagttttttaatagtacaaaagtcaagaaataacacaatagtgactataacctgtattcaaatc

SEQ ID NO: 52157 - DNA, 73 bp, Homo sapiens
ttaatagtacaaaagtcaagaaataacacaatagtgactataacctgtattcaaatccctactctgtcactac

SEQ ID NO: 52158 - DNA, 75 bp, Homo sapiens
tacaaaagtcaagaaataacacaatagtgactataacctgtattcaaatccctactctgtcactacttgatctgg

SEQ ID NO: 52159 - DNA, 81 bp, Homo sapiens
acacaatagtgactataacctgtattcaaatccctactctgtcactacttgatctgggctgatatggtatggctctgtgtc

SEQ ID NO: 52160 - DNA, 79 bp, Homo sapiens
actataacctgtattcaaatccctactctgtcactacttgatctgggctgatatggtatggctctgtgtcctcacccaa

SEQ ID NO: 52161 - DNA, 78 bp, Homo sapiens
atgagatctgaaggttttataagcgtctggcatttccactgctggcagtcattttcatcctgccgccctgtgaaaaag

SEQ ID NO: 52162 - DNA, 76 bp, Homo sapiens
aaggttttataagcgtctggcatttccactgctggcagtcattttcatcctgccgccctgtgaaaaaggtgcctgc

SEQ ID NO: 52163 - DNA, 74 bp, Homo sapiens
gtgtgagaacagaccataaacctccattttctcatctgttaaatggagataacagtcctggcttaacagggctt

SEQ ID NO: 52164 - DNA, 72 bp, Homo sapiens
aacagaccataaacctccattttctcatctgttaaatggagataacagtcctggcttaacagggctttttga

SEQ ID NO: 52165 - DNA, 73 bp, Homo sapiens
cctccattttctcatctgttaaatggagataacagtcctggcttaacagggctttttgagttaagtgatatat

SEQ ID NO: 52166 - DNA, 74 bp, Homo sapiens
ttctcatctgttaaatggagataacagtcctggcttaacagggctttttgagttaagtgatatattccacgtaa

SEQ ID NO: 52167 - DNA, 72 bp, Homo sapiens
ttaaatggagataacagtcctggcttaacagggctttttgagttaagtgatatattccacgtaacctgctta

SEQ ID NO: 52168 - DNA, 73 bp, Homo sapiens
agataacagtcctggcttaacagggctttttgagttaagtgatatattccacgtaacctgcttagcataagaa

SEQ ID NO: 52169 - DNA, 72 bp, Homo sapiens
aacagtcctggcttaacagggctttttgagttaagtgatatattccacgtaacctgcttagcataagaactg

SEQ ID NO: 52170 - DNA, 74 bp, Homo sapiens
tggcttaacagggctttttgagttaagtgatatattccacgtaacctgcttagcataagaactggcactagaaa

SEQ ID NO: 52171 - DNA, 74 bp, Homo sapiens
ttaacagggctttttgagttaagtgatatattccacgtaacctgcttagcataagaactggcactagaaacaga

SEQ ID NO: 52172 - DNA, 73 bp, Homo sapiens
agggctttttgagttaagtgatatattccacgtaacctgcttagcataagaactggcactagaaacagaacat

SEQ ID NO: 52173 - DNA, 74 bp, Homo sapiens
gctttttgagttaagtgatatattccacgtaacctgcttagcataagaactggcactagaaacagaacatttta

SEQ ID NO: 52174 - DNA, 76 bp, Homo sapiens
ttgagttaagtgatatattccacgtaacctgcttagcataagaactggcactagaaacagaacattttagattatg

SEQ ID NO: 52175 - DNA, 76 bp, Homo sapiens
agtgatatattccacgtaacctgcttagcataagaactggcactagaaacagaacattttagattatggaatagaa

SEQ ID NO: 52176 - DNA, 76 bp, Homo sapiens
tgatatattccacgtaacctgcttagcataagaactggcactagaaacagaacattttagattatggaatagaact

SEQ ID NO: 52177 - DNA, 74 bp, Homo sapiens
tattccacgtaacctgcttagcataagaactggcactagaaacagaacattttagattatggaatagaacttag

SEQ ID NO: 52178 - DNA, 71 bp, Homo sapiens
aacctgcttagcataagaactggcactagaaacagaacattttagattatggaatagaacttaggggaaaa

SEQ ID NO: 52179 - DNA, 72 bp, Homo sapiens
cataagaactggcactagaaacagaacattttagattatggaatagaacttaggggaaaatagcaaagtctc

SEQ ID NO: 52180 - DNA, 76 bp, Homo sapiens
tggcactagaaacagaacattttagattatggaatagaacttaggggaaaatagcaaagtctctgatcatcttgaa

SEQ ID NO: 52181 - DNA, 74 bp, Homo sapiens
gaacattttagattatggaatagaacttaggggaaaatagcaaagtctctgatcatcttgaactactcaattgg

SEQ ID NO: 52182 - DNA, 73 bp, Homo sapiens
aatagaacttaggggaaaatagcaaagtctctgatcatcttgaactactcaattgggacttatccctgaatta

SEQ ID NO: 52183 - DNA, 75 bp, Homo sapiens
aaagtctctgatcatcttgaactactcaattgggacttatccctgaattaaacctttctagtagctgaagcacaa

SEQ ID NO: 52184 - DNA, 75 bp, Homo sapiens
tgatcatcttgaactactcaattgggacttatccctgaattaaacctttctagtagctgaagcacaagaaaataa

SEQ ID NO: 52185 - DNA, 69 bp, Homo sapiens
caattgggacttatccctgaattaaacctttctagtagctgaagcacaagaaaataaacttggaaagaa

SEQ ID NO: 52186 - DNA, 66 bp, Homo sapiens
cttatccctgaattaaacctttctagtagctgaagcacaagaaaataaacttggaaagaaaaaacc

SEQ ID NO: 52187 - DNA, 70 bp, Homo sapiens
ttaaacctttctagtagctgaagcacaagaaaataaacttggaaagaaaaaacctaaggccagtcatgca

SEQ ID NO: 52188 - DNA, 72 bp, Homo sapiens
ttctagtagctgaagcacaagaaaataaacttggaaagaaaaaacctaaggccagtcatgcactgccctact

SEQ ID NO: 52189 - DNA, 68 bp, Homo sapiens
cacaagaaaataaacttggaaagaaaaaacctaaggccagtcatgcactgccctacttccctttcttc

SEQ ID NO: 52190 - DNA, 67 bp, Homo sapiens
aaaataaacttggaaagaaaaaacctaaggccagtcatgcactgccctacttccctttcttctctat

SEQ ID NO: 52191 - DNA, 71 bp, Homo sapiens
aaagaaaaaacctaaggccagtcatgcactgccctacttccctttcttctctattgcaggttaactatggc

SEQ ID NO: 52192 - DNA, 74 bp, Homo sapiens
ctaaggccagtcatgcactgccctacttccctttcttctctattgcaggttaactatggcctgtaggcagtttt

SEQ ID NO: 52193 - DNA, 74 bp, Homo sapiens
agtcatgcactgccctacttccctttcttctctattgcaggttaactatggcctgtaggcagtttttcttctct

SEQ ID NO: 52194 - DNA, 69 bp, Homo sapiens
actgccctacttccctttcttctctattgcaggttaactatggcctgtaggcagtttttcttctctttt

SEQ ID NO: 52195 - DNA, 66 bp, Homo sapiens
gccaccgcacctagccggcaaacttttttaaatggttggcgggggtgggggaaatcaaatgagtaa

SEQ ID NO: 52196 - DNA, 63 bp, Homo sapiens
acctagccggcaaacttttttaaatggttggcgggggtgggggaaatcaaatgagtaatgttt

SEQ ID NO: 52197 - DNA, 66 bp, Homo sapiens
aacttttttaaatggttggcgggggtgggggaaatcaaatgagtaatgttttgtgacacatcaaaa

SEQ ID NO: 52198 - DNA, 70 bp, Homo sapiens
ttttaaatggttggcgggggtgggggaaatcaaatgagtaatgttttgtgacacatcaaaattataatga

SEQ ID NO: 52199 - DNA, 74 bp, Homo sapiens
gggggtgggggaaatcaaatgagtaatgttttgtgacacatcaaaattataatgatgtgctgcataacttttgg

SEQ ID NO: 52200 - DNA, 77 bp, Homo sapiens
gtgggggaaatcaaatgagtaatgttttgtgacacatcaaaattataatgatgtgctgcataacttttggtcaacaa

SEQ ID NO: 52201 - DNA, 79 bp, Homo sapiens
ggaaatcaaatgagtaatgttttgtgacacatcaaaattataatgatgtgctgcataacttttggtcaacaatggccaa

SEQ ID NO: 52202 - DNA, 79 bp, Homo sapiens
caaatgagtaatgttttgtgacacatcaaaattataatgatgtgctgcataacttttggtcaacaatggccaaatatac

SEQ ID NO: 52203 - DNA, 83 bp, Homo sapiens
tgagtaatgttttgtgacacatcaaaattataatgatgtgctgcataacttttggtcaacaatggccaaatatacgatgatga

SEQ ID NO: 52204 - DNA, 82 bp, Homo sapiens
taatgttttgtgacacatcaaaattataatgatgtgctgcataacttttggtcaacaatggccaaatatacgatgatgatcc

SEQ ID NO: 52205 - DNA, 81 bp, Homo sapiens
tttgtgacacatcaaaattataatgatgtgctgcataacttttggtcaacaatggccaaatatacgatgatgatcccgtaa

SEQ ID NO: 52206 - DNA, 80 bp, Homo sapiens
acacatcaaaattataatgatgtgctgcataacttttggtcaacaatggccaaatatacgatgatgatcccgtaagatta

SEQ ID NO: 52207 - DNA, 80 bp, Homo sapiens
tcaaaattataatgatgtgctgcataacttttggtcaacaatggccaaatatacgatgatgatcccgtaagattacaatg

SEQ ID NO: 52208 - DNA, 78 bp, Homo sapiens
aaaattataatgatgtgctgcataacttttggtcaacaatggccaaatatacgatgatgatcccgtaagattacaatg

SEQ ID NO: 52209 - DNA, 82 bp, Homo sapiens
attataatgatgtgctgcataacttttggtcaacaatggccaaatatacgatgatgatcccgtaagattacaatggagctga

SEQ ID NO: 52210 - DNA, 80 bp, Homo sapiens
aatgatgtgctgcataacttttggtcaacaatggccaaatatacgatgatgatcccgtaagattacaatggagctgaaaa

SEQ ID NO: 52211 - DNA, 76 bp, Homo sapiens
gagctgaaaaattcctattgcctggggacacagccatggtaacatcatagtgaaattactttatgtagcctaagta

SEQ ID NO: 52212 - DNA, 75 bp, Homo sapiens
attcctattgcctggggacacagccatggtaacatcatagtgaaattactttatgtagcctaagtatatagtgtt

SEQ ID NO: 52213 - DNA, 76 bp, Homo sapiens
tattgcctggggacacagccatggtaacatcatagtgaaattactttatgtagcctaagtatatagtgtttataaa

SEQ ID NO: 52214 - DNA, 75 bp, Homo sapiens
ggacacagccatggtaacatcatagtgaaattactttatgtagcctaagtatatagtgtttataaaagtctacag

SEQ ID NO: 52215 - DNA, 74 bp, Homo sapiens
actaaccacttactgactcacccagagccagcttccagtcctgccaacttgttcatggtaaatgtcctaaatag

SEQ ID NO: 52216 - DNA, 76 bp, Homo sapiens
tgactcacccagagccagcttccagtcctgccaacttgttcatggtaaatgtcctaaataggtgtaccattttata

SEQ ID NO: 52217 - DNA, 75 bp, Homo sapiens
agagccagcttccagtcctgccaacttgttcatggtaaatgtcctaaataggtgtaccattttatatcttatata

SEQ ID NO: 52218 - DNA, 76 bp, Homo sapiens
cagcttccagtcctgccaacttgttcatggtaaatgtcctaaataggtgtaccattttatatcttatatatatcta

SEQ ID NO: 52219 - DNA, 76 bp, Homo sapiens
gatacacaaatacttagcactgtgttacaaccgcctacagtaatcagtacagtaatatgccatacaggtttgtagg

SEQ ID NO: 52220 - DNA, 74 bp, Homo sapiens
acaaatacttagcactgtgttacaaccgcctacagtaatcagtacagtaatatgccatacaggtttgtaggtta

SEQ ID NO: 52221 - DNA, 76 bp, Homo sapiens
tacttagcactgtgttacaaccgcctacagtaatcagtacagtaatatgccatacaggtttgtaggttaggagcaa

SEQ ID NO: 52222 - DNA, 77 bp, Homo sapiens
cagtaatatgccatacaggtttgtaggttaggagcaataggctatcccatataggataccatagggtataccatcta

SEQ ID NO: 52223 - DNA, 76 bp, Homo sapiens
agtaatatgccatacaggtttgtaggttaggagcaataggctatcccatataggataccatagggtataccatcta

SEQ ID NO: 52224 - DNA, 75 bp, Homo sapiens
tatgccatacaggtttgtaggttaggagcaataggctatcccatataggataccatagggtataccatctaggtt

SEQ ID NO: 52225 - DNA, 87 bp, Homo sapiens
taactacatcatgattttcacacaatgatgaaattgccaagtgacatgtctcagaacatatccctgtcattaagtgacatatgacta

SEQ ID NO: 52226 - DNA, 86 bp, Homo sapiens
atgattttcacacaatgatgaaattgccaagtgacatgtctcagaacatatccctgtcattaagtgacatatgactatatatgaaa

SEQ ID NO: 52227 - DNA, 83 bp, Homo sapiens
acaatgatgaaattgccaagtgacatgtctcagaacatatccctgtcattaagtgacatatgactatatatgaaacttaacaa

SEQ ID NO: 52228 - DNA, 82 bp, Homo sapiens
atgaaattgccaagtgacatgtctcagaacatatccctgtcattaagtgacatatgactatatatgaaacttaacaaatcag

SEQ ID NO: 52229 - DNA, 82 bp, Homo sapiens
tgacatgtctcagaacatatccctgtcattaagtgacatatgactatatatgaaacttaacaaatcaggccttgttgaaaca

SEQ ID NO: 52230 - DNA, 80 bp, Homo sapiens
cagaacatatccctgtcattaagtgacatatgactatatatgaaacttaacaaatcaggccttgttgaaacacagtcatg

SEQ ID NO: 52231 - DNA, 78 bp, Homo sapiens
ccctgtcattaagtgacatatgactatatatgaaacttaacaaatcaggccttgttgaaacacagtcatgttgatttg

SEQ ID NO: 52232 - DNA, 78 bp, Homo sapiens
cattaagtgacatatgactatatatgaaacttaacaaatcaggccttgttgaaacacagtcatgttgatttgtttaca

SEQ ID NO: 52233 - DNA, 79 bp, Homo sapiens
tgactatatatgaaacttaacaaatcaggccttgttgaaacacagtcatgttgatttgtttacatattgtatatggctc

SEQ ID NO: 52234 - DNA, 78 bp, Homo sapiens
ttaacaaatcaggccttgttgaaacacagtcatgttgatttgtttacatattgtatatggctccttacacactatcaa

SEQ ID NO: 52235 - DNA, 79 bp, Homo sapiens
cttgttgaaacacagtcatgttgatttgtttacatattgtatatggctccttacacactatcaacggcagagttgtgta

SEQ ID NO: 52236 - DNA, 78 bp, Homo sapiens
aacacagtcatgttgatttgtttacatattgtatatggctccttacacactatcaacggcagagttgtgtactatagt

SEQ ID NO: 52237 - DNA, 80 bp, Homo sapiens
atgttgatttgtttacatattgtatatggctccttacacactatcaacggcagagttgtgtactatagttgcaatacaga

SEQ ID NO: 52238 - DNA, 81 bp, Homo sapiens
tacatattgtatatggctccttacacactatcaacggcagagttgtgtactatagttgcaatacagaccatagccaacaaa

SEQ ID NO: 52239 - DNA, 79 bp, Homo sapiens
tatatggctccttacacactatcaacggcagagttgtgtactatagttgcaatacagaccatagccaacaaagtctaaa

SEQ ID NO: 52240 - DNA, 78 bp, Homo sapiens
actatcaacggcagagttgtgtactatagttgcaatacagaccatagccaacaaagtctaaaatgttctagcacttca

SEQ ID NO: 52241 - DNA, 74 bp, Homo sapiens
agttgtgtactatagttgcaatacagaccatagccaacaaagtctaaaatgttctagcacttcacagaaaaggt

SEQ ID NO: 52242 - DNA, 72 bp, Homo sapiens
aaagtctaaaatgttctagcacttcacagaaaaggttttttgactcctactctactgtttcagtgtcactga

SEQ ID NO: 52243 - DNA, 70 bp, Homo sapiens
ttcacagaaaaggttttttgactcctactctactgtttcagtgtcactgacccattttacctggaccaaa

SEQ ID NO: 52244 - DNA, 68 bp, Homo sapiens
aaaaggttttttgactcctactctactgtttcagtgtcactgacccattttacctggaccaaagacta

SEQ ID NO: 52245 - DNA, 72 bp, Homo sapiens
ttttgactcctactctactgtttcagtgtcactgacccattttacctggaccaaagactactcaagtctatt

SEQ ID NO: 52246 - DNA, 72 bp, Homo sapiens
tactctactgtttcagtgtcactgacccattttacctggaccaaagactactcaagtctattttcctccaac

SEQ ID NO: 52247 - DNA, 72 bp, Homo sapiens
ttcagtgtcactgacccattttacctggaccaaagactactcaagtctattttcctccaactgacacaagtt

SEQ ID NO: 52248 - DNA, 72 bp, Homo sapiens
actgacccattttacctggaccaaagactactcaagtctattttcctccaactgacacaagtttctgcctca

SEQ ID NO: 52249 - DNA, 73 bp, Homo sapiens
tttacctggaccaaagactactcaagtctattttcctccaactgacacaagtttctgcctcagtgtatggagg

SEQ ID NO: 52250 - DNA, 73 bp, Homo sapiens
aagactactcaagtctattttcctccaactgacacaagtttctgcctcagtgtatggaggttttcctcagtaa

SEQ ID NO: 52251 - DNA, 71 bp, Homo sapiens
aagtctattttcctccaactgacacaagtttctgcctcagtgtatggaggttttcctcagtaataggaaac

SEQ ID NO: 52252 - DNA, 71 bp, Homo sapiens
ttttcctccaactgacacaagtttctgcctcagtgtatggaggttttcctcagtaataggaaactggaaaa

SEQ ID NO: 52253 - DNA, 71 bp, Homo sapiens
cacaagtttctgcctcagtgtatggaggttttcctcagtaataggaaactggaaaaattagtcaacattta

SEQ ID NO: 52254 - DNA, 71 bp, Homo sapiens
gtttctgcctcagtgtatggaggttttcctcagtaataggaaactggaaaaattagtcaacatttattgag

SEQ ID NO: 52255 - DNA, 71 bp, Homo sapiens
gtgtatggaggttttcctcagtaataggaaactggaaaaattagtcaacatttattgagtgcctaaatgac

SEQ ID NO: 52256 - DNA, 69 bp, Homo sapiens
aggttttcctcagtaataggaaactggaaaaattagtcaacatttattgagtgcctaaatgactaccta

SEQ ID NO: 52257 - DNA, 72 bp, Homo sapiens
ataggaaactggaaaaattagtcaacatttattgagtgcctaaatgactacctatttagtatacctgctgat

SEQ ID NO: 52258 - DNA, 73 bp, Homo sapiens
ggaaaaattagtcaacatttattgagtgcctaaatgactacctatttagtatacctgctgatttacttggcag

SEQ ID NO: 52259 - DNA, 79 bp, Homo sapiens
ttagtatacctgctgatttacttggcaggcttttctcactatactgcaagctccttgaaggcagagataatttacttga

SEQ ID NO: 52260 - DNA, 77 bp, Homo sapiens
ctgatttacttggcaggcttttctcactatactgcaagctccttgaaggcagagataatttacttgagtggaacctg

SEQ ID NO: 52261 - DNA, 76 bp, Homo sapiens
caggcttttctcactatactgcaagctccttgaaggcagagataatttacttgagtggaacctggcacaacgtaag

SEQ ID NO: 52262 - DNA, 77 bp, Homo sapiens
tttctcactatactgcaagctccttgaaggcagagataatttacttgagtggaacctggcacaacgtaagtgcttta

SEQ ID NO: 52263 - DNA, 76 bp, Homo sapiens
tgcaagctccttgaaggcagagataatttacttgagtggaacctggcacaacgtaagtgctttagaaattgaataa

SEQ ID NO: 52264 - DNA, 74 bp, Homo sapiens
tgaaggcagagataatttacttgagtggaacctggcacaacgtaagtgctttagaaattgaataagccaagtaa

SEQ ID NO: 52265 - DNA, 71 bp, Homo sapiens
gagataatttacttgagtggaacctggcacaacgtaagtgctttagaaattgaataagccaagtaaaatgt

SEQ ID NO: 52266 - DNA, 69 bp, Homo sapiens
ttacttgagtggaacctggcacaacgtaagtgctttagaaattgaataagccaagtaaaatgttttaag

SEQ ID NO: 52267 - DNA, 67 bp, Homo sapiens
cacaacgtaagtgctttagaaattgaataagccaagtaaaatgttttaaggcaaccctatcccaaaa

SEQ ID NO: 52268 - DNA, 69 bp, Homo sapiens
gaataagccaagtaaaatgttttaaggcaaccctatcccaaaatattcctgaagatattaatttaatca

SEQ ID NO: 52269 - DNA, 77 bp, Homo sapiens
aatattcctgaagatattaatttaatcattactaatctctgtgattagcaagggaagtagtcagtctggcacaccaa

SEQ ID NO: 52270 - DNA, 76 bp, Homo sapiens
tcctgaagatattaatttaatcattactaatctctgtgattagcaagggaagtagtcagtctggcacaccaaattt

SEQ ID NO: 52271 - DNA, 73 bp, Homo sapiens
cattactaatctctgtgattagcaagggaagtagtcagtctggcacaccaaattttattaataatacttattt

SEQ ID NO: 52272 - DNA, 73 bp, Homo sapiens
ctctgtgattagcaagggaagtagtcagtctggcacaccaaattttattaataatacttattttaatctgttc

SEQ ID NO: 52273 - DNA, 69 bp, Homo sapiens
gcaagggaagtagtcagtctggcacaccaaattttattaataatacttattttaatctgttccctttag

SEQ ID NO: 52274 - DNA, 69 bp, Homo sapiens
agtagtcagtctggcacaccaaattttattaataatacttattttaatctgttccctttagtatgtctt

SEQ ID NO: 52275 - DNA, 70 bp, Homo sapiens
ttattaataatacttattttaatctgttccctttagtatgtctttatacagttcccctcgtgtatataca

SEQ ID NO: 52276 - DNA, 72 bp, Homo sapiens
tacttattttaatctgttccctttagtatgtctttatacagttcccctcgtgtatatacactgatataacta

SEQ ID NO: 52277 - DNA, 71 bp, Homo sapiens
gttccctttagtatgtctttatacagttcccctcgtgtatatacactgatataactacaatttaaaagcca

SEQ ID NO: 52278 - DNA, 73 bp, Homo sapiens
gtatgtctttatacagttcccctcgtgtatatacactgatataactacaatttaaaagccactaattaatctg

SEQ ID NO: 52279 - DNA, 69 bp, Homo sapiens
cctcgtgtatatacactgatataactacaatttaaaagccactaattaatctgttttttattttgtaag

SEQ ID NO: 52280 - DNA, 70 bp, Homo sapiens
cactgatataactacaatttaaaagccactaattaatctgttttttattttgtaagtaacaagatataga

SEQ ID NO: 52281 - DNA, 72 bp, Homo sapiens
aagccactaattaatctgttttttattttgtaagtaacaagatatagacatttgaatgccaatgtcttattc

SEQ ID NO: 52282 - DNA, 75 bp, Homo sapiens
ttaatctgttttttattttgtaagtaacaagatatagacatttgaatgccaatgtcttattctggagagacactg

SEQ ID NO: 52283 - DNA, 78 bp, Homo sapiens
ttttattttgtaagtaacaagatatagacatttgaatgccaatgtcttattctggagagacactggagctgaagttca

SEQ ID NO: 52284 - DNA, 80 bp, Homo sapiens
ttttgtaagtaacaagatatagacatttgaatgccaatgtcttattctggagagacactggagctgaagttcaacaatga

SEQ ID NO: 52285 - DNA, 82 bp, Homo sapiens
aacaagatatagacatttgaatgccaatgtcttattctggagagacactggagctgaagttcaacaatgatcacacttatta

SEQ ID NO: 52286 - DNA, 80 bp, Homo sapiens
tttgaatgccaatgtcttattctggagagacactggagctgaagttcaacaatgatcacacttattacctggcaataaaa

SEQ ID NO: 52287 - DNA, 77 bp, Homo sapiens
cactggagctgaagttcaacaatgatcacacttattacctggcaataaaaacacaaccatctttccagtcaggtcaa

SEQ ID NO: 52288 - DNA, 74 bp, Homo sapiens
tcaacaatgatcacacttattacctggcaataaaaacacaaccatctttccagtcaggtcaaaatatcctactt

SEQ ID NO: 52289 - DNA, 69 bp, Homo sapiens
acacttattacctggcaataaaaacacaaccatctttccagtcaggtcaaaatatcctactttttgcct

SEQ ID NO: 52290 - DNA, 70 bp, Homo sapiens
tggcaataaaaacacaaccatctttccagtcaggtcaaaatatcctactttttgcctttctaccaattcc

SEQ ID NO: 52291 - DNA, 68 bp, Homo sapiens
aaacacaaccatctttccagtcaggtcaaaatatcctactttttgcctttctaccaattcccaaacat

SEQ ID NO: 52292 - DNA, 69 bp, Homo sapiens
catctttccagtcaggtcaaaatatcctactttttgcctttctaccaattcccaaacattcacagtttt

SEQ ID NO: 52293 - DNA, 68 bp, Homo sapiens
agtcaggtcaaaatatcctactttttgcctttctaccaattcccaaacattcacagtttttcaaggac

SEQ ID NO: 52294 - DNA, 67 bp, Homo sapiens
atatcctactttttgcctttctaccaattcccaaacattcacagtttttcaaggaccactaataaaa

SEQ ID NO: 52295 - DNA, 68 bp, Homo sapiens
tttgcctttctaccaattcccaaacattcacagtttttcaaggaccactaataaaatacaggaagctt

SEQ ID NO: 52296 - DNA, 69 bp, Homo sapiens
tctaccaattcccaaacattcacagtttttcaaggaccactaataaaatacaggaagcttttaaagaca

SEQ ID NO: 52297 - DNA, 70 bp, Homo sapiens
tcaaggaccactaataaaatacaggaagcttttaaagacagtaagagaacacctagtgtaagttaggtga

SEQ ID NO: 52298 - DNA, 70 bp, Homo sapiens
taaaatacaggaagcttttaaagacagtaagagaacacctagtgtaagttaggtgaattaaagatggcaa

SEQ ID NO: 52299 - DNA, 71 bp, Homo sapiens
gaagcttttaaagacagtaagagaacacctagtgtaagttaggtgaattaaagatggcaaaggagattaca

SEQ ID NO: 52300 - DNA, 74 bp, Homo sapiens
agtaagagaacacctagtgtaagttaggtgaattaaagatggcaaaggagattacatcctcaacactgacagct

SEQ ID NO: 52301 - DNA, 75 bp, Homo sapiens
tagtgtaagttaggtgaattaaagatggcaaaggagattacatcctcaacactgacagcttccaagacttagaaa

SEQ ID NO: 52302 - DNA, 75 bp, Homo sapiens
ttaggtgaattaaagatggcaaaggagattacatcctcaacactgacagcttccaagacttagaaaagagattgt

SEQ ID NO: 52303 - DNA, 73 bp, Homo sapiens
aaaggagattacatcctcaacactgacagcttccaagacttagaaaagagattgttccttgcttctaaaattg

SEQ ID NO: 52304 - DNA, 73 bp, Homo sapiens
attacatcctcaacactgacagcttccaagacttagaaaagagattgttccttgcttctaaaattgttctatt

SEQ ID NO: 52305 - DNA, 72 bp, Homo sapiens
aacactgacagcttccaagacttagaaaagagattgttccttgcttctaaaattgttctattttcctctgta

SEQ ID NO: 52306 - DNA, 71 bp, Homo sapiens
gcttccaagacttagaaaagagattgttccttgcttctaaaattgttctattttcctctgtaggaaaatga

SEQ ID NO: 52307 - DNA, 67 bp, Homo sapiens
acttagaaaagagattgttccttgcttctaaaattgttctattttcctctgtaggaaaatgaaagtt

SEQ ID NO: 52308 - DNA, 68 bp, Homo sapiens
gagattgttccttgcttctaaaattgttctattttcctctgtaggaaaatgaaagttttttcttacaa

SEQ ID NO: 52309 - DNA, 66 bp, Homo sapiens
cttgcttctaaaattgttctattttcctctgtaggaaaatgaaagttttttcttacaaatattaaa

SEQ ID NO: 52310 - DNA, 67 bp, Homo sapiens
tgttctattttcctctgtaggaaaatgaaagttttttcttacaaatattaaataatcaaagtactta

SEQ ID NO: 52311 - DNA, 67 bp, Homo sapiens
tcctctgtaggaaaatgaaagttttttcttacaaatattaaataatcaaagtacttacgcaaaatta

SEQ ID NO: 52312 - DNA, 69 bp, Homo sapiens
gaaaatgaaagttttttcttacaaatattaaataatcaaagtacttacgcaaaattaatctgctcctca

SEQ ID NO: 52313 - DNA, 77 bp, Homo sapiens
caaatattaaataatcaaagtacttacgcaaaattaatctgctcctcaatgagatgagcactccatttaaatgatct

SEQ ID NO: 52314 - DNA, 77 bp, Homo sapiens
aaagtacttacgcaaaattaatctgctcctcaatgagatgagcactccatttaaatgatctttacagatccctgaag

SEQ ID NO: 52315 - DNA, 82 bp, Homo sapiens
aaattaatctgctcctcaatgagatgagcactccatttaaatgatctttacagatccctgaagttgctgtcctgtcactgta

SEQ ID NO: 52316 - DNA, 82 bp, Homo sapiens
aatctgctcctcaatgagatgagcactccatttaaatgatctttacagatccctgaagttgctgtcctgtcactgtatttaa

SEQ ID NO: 52317 - DNA, 81 bp, Homo sapiens
aatgagatgagcactccatttaaatgatctttacagatccctgaagttgctgtcctgtcactgtatttaagtgatggatat

SEQ ID NO: 52318 - DNA, 78 bp, Homo sapiens
ctccatttaaatgatctttacagatccctgaagttgctgtcctgtcactgtatttaagtgatggatattcaattgaat

SEQ ID NO: 52319 - DNA, 82 bp, Homo sapiens
taaatgatctttacagatccctgaagttgctgtcctgtcactgtatttaagtgatggatattcaattgaattattctgcata

SEQ ID NO: 52320 - DNA, 79 bp, Homo sapiens
ctttacagatccctgaagttgctgtcctgtcactgtatttaagtgatggatattcaattgaattattctgcataaataa

SEQ ID NO: 52321 - DNA, 79 bp, Homo sapiens
gaagttgctgtcctgtcactgtatttaagtgatggatattcaattgaattattctgcataaataattctgttcaaccca

SEQ ID NO: 52322 - DNA, 79 bp, Homo sapiens
gctgtcctgtcactgtatttaagtgatggatattcaattgaattattctgcataaataattctgttcaacccagaagta

SEQ ID NO: 52323 - DNA, 78 bp, Homo sapiens
gtatttaagtgatggatattcaattgaattattctgcataaataattctgttcaacccagaagtatagtagtatgatg

SEQ ID NO: 52324 - DNA, 81 bp, Homo sapiens
tgatggatattcaattgaattattctgcataaataattctgttcaacccagaagtatagtagtatgatgggtcagatacag

SEQ ID NO: 52325 - DNA, 78 bp, Homo sapiens
caattgaattattctgcataaataattctgttcaacccagaagtatagtagtatgatgggtcagatacagtcaactgt

SEQ ID NO: 52326 - DNA, 77 bp, Homo sapiens
attctgcataaataattctgttcaacccagaagtatagtagtatgatgggtcagatacagtcaactgttcaataaaa

SEQ ID NO: 52327 - DNA, 78 bp, Homo sapiens
cataaataattctgttcaacccagaagtatagtagtatgatgggtcagatacagtcaactgttcaataaaaatgcaga

SEQ ID NO: 52328 - DNA, 78 bp, Homo sapiens
ccagaagtatagtagtatgatgggtcagatacagtcaactgttcaataaaaatgcagatgtctgaaattattaaaatg

SEQ ID NO: 52329 - DNA, 76 bp, Homo sapiens
agtagtatgatgggtcagatacagtcaactgttcaataaaaatgcagatgtctgaaattattaaaatgtacttaaa

SEQ ID NO: 52330 - DNA, 73 bp, Homo sapiens
gggtcagatacagtcaactgttcaataaaaatgcagatgtctgaaattattaaaatgtacttaaaagtaacaa

SEQ ID NO: 52331 - DNA, 74 bp, Homo sapiens
cagtcaactgttcaataaaaatgcagatgtctgaaattattaaaatgtacttaaaagtaacaaactgtatcaca

SEQ ID NO: 52332 - DNA, 72 bp, Homo sapiens
caataaaaatgcagatgtctgaaattattaaaatgtacttaaaagtaacaaactgtatcacacacttaggct

SEQ ID NO: 52333 - DNA, 73 bp, Homo sapiens
gcagatgtctgaaattattaaaatgtacttaaaagtaacaaactgtatcacacacttaggcttagaagtgttc

SEQ ID NO: 52334 - DNA, 67 bp, Homo sapiens
ttaaaatgtacttaaaagtaacaaactgtatcacacacttaggcttagaagtgttctttcaagtttt

SEQ ID NO: 52335 - DNA, 66 bp, Homo sapiens
cttaaaagtaacaaactgtatcacacacttaggcttagaagtgttctttcaagttttttcttttaa

SEQ ID NO: 52336 - DNA, 68 bp, Homo sapiens
ttttcttttaaaaaagaaaccagtctttgaagatttttgttgaatatagctattttccaagcttcatc

SEQ ID NO: 52337 - DNA, 68 bp, Homo sapiens
aaaaagaaaccagtctttgaagatttttgttgaatatagctattttccaagcttcatcttctttttct

SEQ ID NO: 52338 - DNA, 71 bp, Homo sapiens
gaaaccagtctttgaagatttttgttgaatatagctattttccaagcttcatcttctttttctttggtcca

SEQ ID NO: 52339 - DNA, 71 bp, Homo sapiens
gaagatttttgttgaatatagctattttccaagcttcatcttctttttctttggtccattaaggtccatgt

SEQ ID NO: 52340 - DNA, 72 bp, Homo sapiens
atagctattttccaagcttcatcttctttttctttggtccattaaggtccatgtttgaagtatcagtaggaa

SEQ ID NO: 52341 - DNA, 73 bp, Homo sapiens
agcttcatcttctttttctttggtccattaaggtccatgtttgaagtatcagtaggaatgcttattcctggta

SEQ ID NO: 52342 - DNA, 72 bp, Homo sapiens
attaaggtccatgtttgaagtatcagtaggaatgcttattcctggtatctaaagtaatgcaaatggggggaa

SEQ ID NO: 52343 - DNA, 69 bp, Homo sapiens
atatgtactgtttgttccatcacaacaaggaaattttaagtttggccttacctgtggttctaccaggga

SEQ ID NO: 52344 - DNA, 69 bp, Homo sapiens
ttgttccatcacaacaaggaaattttaagtttggccttacctgtggttctaccagggacattcggatct

SEQ ID NO: 52345 - DNA, 69 bp, Homo sapiens
aacaaggaaattttaagtttggccttacctgtggttctaccagggacattcggatcttctgatgttgaa

SEQ ID NO: 52346 - DNA, 74 bp, Homo sapiens
tttaagtttggccttacctgtggttctaccagggacattcggatcttctgatgttgaagattagatgagtctaa

SEQ ID NO: 52347 - DNA, 76 bp, Homo sapiens
tttggccttacctgtggttctaccagggacattcggatcttctgatgttgaagattagatgagtctaacatgattt

SEQ ID NO: 52348 - DNA, 76 bp, Homo sapiens
tggttctaccagggacattcggatcttctgatgttgaagattagatgagtctaacatgattttcactttaacttta

SEQ ID NO: 52349 - DNA, 77 bp, Homo sapiens
ccagggacattcggatcttctgatgttgaagattagatgagtctaacatgattttcactttaactttatcaaataca

SEQ ID NO: 52350 - DNA, 79 bp, Homo sapiens
tcggatcttctgatgttgaagattagatgagtctaacatgattttcactttaactttatcaaatacatggaacactgta

SEQ ID NO: 52351 - DNA, 78 bp, Homo sapiens
ctgatgttgaagattagatgagtctaacatgattttcactttaactttatcaaatacatggaacactgtatcttctat

SEQ ID NO: 52352 - DNA, 75 bp, Homo sapiens
tagatgagtctaacatgattttcactttaactttatcaaatacatggaacactgtatcttctattttaagtgagg

SEQ ID NO: 52353 - DNA, 73 bp, Homo sapiens
gagtctaacatgattttcactttaactttatcaaatacatggaacactgtatcttctattttaagtgagggta

SEQ ID NO: 52354 - DNA, 71 bp, Homo sapiens
ttcactttaactttatcaaatacatggaacactgtatcttctattttaagtgagggtatctaaacaaaaca

SEQ ID NO: 52355 - DNA, 70 bp, Homo sapiens
tttaactttatcaaatacatggaacactgtatcttctattttaagtgagggtatctaaacaaaacacatt

SEQ ID NO: 52356 - DNA, 73 bp, Homo sapiens
tacatggaacactgtatcttctattttaagtgagggtatctaaacaaaacacattttatcattcttaattgct

SEQ ID NO: 52357 - DNA, 68 bp, Homo sapiens
caaagaaaaagtgccccccggaaaagaaaacaaacatgagaaataccgtacctcatcatcataaataa

SEQ ID NO: 52358 - DNA, 68 bp, Homo sapiens
ccccggaaaagaaaacaaacatgagaaataccgtacctcatcatcataaataagctgtgggtttggtt

SEQ ID NO: 52359 - DNA, 70 bp, Homo sapiens
agaaaacaaacatgagaaataccgtacctcatcatcataaataagctgtgggtttggtttgtccttttct

SEQ ID NO: 52360 - DNA, 71 bp, Homo sapiens
caaacatgagaaataccgtacctcatcatcataaataagctgtgggtttggtttgtccttttcttcaaaaa

SEQ ID NO: 52361 - DNA, 69 bp, Homo sapiens
aaataccgtacctcatcatcataaataagctgtgggtttggtttgtccttttcttcaaaaaagactgtc

SEQ ID NO: 52362 - DNA, 69 bp, Homo sapiens
tcatcataaataagctgtgggtttggtttgtccttttcttcaaaaaagactgtcccttctaaaccatac

SEQ ID NO: 52363 - DNA, 65 bp, Homo sapiens
aataagctgtgggtttggtttgtccttttcttcaaaaaagactgtcccttctaaaccatactttg

SEQ ID NO: 52364 - DNA, 64 bp, Homo sapiens
gtgggtttggtttgtccttttcttcaaaaaagactgtcccttctaaaccatactttggaattaa

SEQ ID NO: 52365 - DNA, 68 bp, Homo sapiens
gtccttttcttcaaaaaagactgtcccttctaaaccatactttggaattaataccacaatggcattct

SEQ ID NO: 52366 - DNA, 69 bp, Homo sapiens
cttcaaaaaagactgtcccttctaaaccatactttggaattaataccacaatggcattctttcttacaa

SEQ ID NO: 52367 - DNA, 69 bp, Homo sapiens
aagactgtcccttctaaaccatactttggaattaataccacaatggcattctttcttacaaataaaata

SEQ ID NO: 52368 - DNA, 71 bp, Homo sapiens
tctaaaccatactttggaattaataccacaatggcattctttcttacaaataaaatataggcttcttcact

SEQ ID NO: 52369 - DNA, 70 bp, Homo sapiens
ctttggaattaataccacaatggcattctttcttacaaataaaatataggcttcttcacttactattcct

SEQ ID NO: 52370 - DNA, 72 bp, Homo sapiens
ataccacaatggcattctttcttacaaataaaatataggcttcttcacttactattcctttgcttttgaaga

SEQ ID NO: 52371 - DNA, 71 bp, Homo sapiens
caatggcattctttcttacaaataaaatataggcttcttcacttactattcctttgcttttgaagaataac

SEQ ID NO: 52372 - DNA, 69 bp, Homo sapiens
cttacaaataaaatataggcttcttcacttactattcctttgcttttgaagaataactgtaaaataaca

SEQ ID NO: 52373 - DNA, 70 bp, Homo sapiens
taaaatataggcttcttcacttactattcctttgcttttgaagaataactgtaaaataacatacaactta

SEQ ID NO: 52374 - DNA, 68 bp, Homo sapiens
aggcttcttcacttactattcctttgcttttgaagaataactgtaaaataacatacaacttatttaaa

SEQ ID NO: 52375 - DNA, 71 bp, Homo sapiens
aaatgaacaaaacttcattttttctagcagtatcgacaaaaggcaaatacctgggtatgaaaagccactga

SEQ ID NO: 52376 - DNA, 77 bp, Homo sapiens
ttcattttttctagcagtatcgacaaaaggcaaatacctgggtatgaaaagccactgatgcacgttgggcatattga

SEQ ID NO: 52377 - DNA, 77 bp, Homo sapiens
ttttctagcagtatcgacaaaaggcaaatacctgggtatgaaaagccactgatgcacgttgggcatattgagccatt

SEQ ID NO: 52378 - DNA, 75 bp, Homo sapiens
gacaaaaggcaaatacctgggtatgaaaagccactgatgcacgttgggcatattgagccattttgtgccggaaat

SEQ ID NO: 52379 - DNA, 73 bp, Homo sapiens
aaatacctgggtatgaaaagccactgatgcacgttgggcatattgagccattttgtgccggaaatttagattt

SEQ ID NO: 52380 - DNA, 76 bp, Homo sapiens
ctgggtatgaaaagccactgatgcacgttgggcatattgagccattttgtgccggaaatttagatttttacatata

SEQ ID NO: 52381 - DNA, 77 bp, Homo sapiens
aaaagccactgatgcacgttgggcatattgagccattttgtgccggaaatttagatttttacatatatctgcaagct

SEQ ID NO: 52382 - DNA, 77 bp, Homo sapiens
acgttgggcatattgagccattttgtgccggaaatttagatttttacatatatctgcaagcttgtgtttgtctgtca

SEQ ID NO: 52383 - DNA, 78 bp, Homo sapiens
tattgagccattttgtgccggaaatttagatttttacatatatctgcaagcttgtgtttgtctgtcaactctggataa

SEQ ID NO: 52384 - DNA, 75 bp, Homo sapiens
attttgtgccggaaatttagatttttacatatatctgcaagcttgtgtttgtctgtcaactctggataagtacag

SEQ ID NO: 52385 - DNA, 77 bp, Homo sapiens
ggaaatttagatttttacatatatctgcaagcttgtgtttgtctgtcaactctggataagtacagtcagccccaata

SEQ ID NO: 52386 - DNA, 79 bp, Homo sapiens
tttttacatatatctgcaagcttgtgtttgtctgtcaactctggataagtacagtcagccccaatagccacagccaaaa

SEQ ID NO: 52387 - DNA, 81 bp, Homo sapiens
atatatctgcaagcttgtgtttgtctgtcaactctggataagtacagtcagccccaatagccacagccaaaagccgatgaa

SEQ ID NO: 52388 - DNA, 79 bp, Homo sapiens
aagcttgtgtttgtctgtcaactctggataagtacagtcagccccaatagccacagccaaaagccgatgaacaatgaca

SEQ ID NO: 52389 - DNA, 84 bp, Homo sapiens
tctgtcaactctggataagtacagtcagccccaatagccacagccaaaagccgatgaacaatgacatctgcgtatctagataga

SEQ ID NO: 52390 - DNA, 82 bp, Homo sapiens
tctggataagtacagtcagccccaatagccacagccaaaagccgatgaacaatgacatctgcgtatctagatagatggaaaa

SEQ ID NO: 52391 - DNA, 80 bp, Homo sapiens
taagtacagtcagccccaatagccacagccaaaagccgatgaacaatgacatctgcgtatctagatagatggaaaaataa

SEQ ID NO: 52392 - DNA, 81 bp, Homo sapiens
ccaatagccacagccaaaagccgatgaacaatgacatctgcgtatctagatagatggaaaaataagaaccatggtatgtca

SEQ ID NO: 52393 - DNA, 65 bp, Homo sapiens
aaattaaccattttctatctcctttaatttcataaggaaaaaataccttctaatgggtgaagtaa

SEQ ID NO: 52394 - DNA, 67 bp, Homo sapiens
accattttctatctcctttaatttcataaggaaaaaataccttctaatgggtgaagtaaaatgtgtg

SEQ ID NO: 52395 - DNA, 75 bp, Homo sapiens
tcataaggaaaaaataccttctaatgggtgaagtaaaatgtgtgtatattggagacgctaagccatagtgatgaa

SEQ ID NO: 52396 - DNA, 76 bp, Homo sapiens
aaataccttctaatgggtgaagtaaaatgtgtgtatattggagacgctaagccatagtgatgaaaatcattatcca

SEQ ID NO: 52397 - DNA, 79 bp, Homo sapiens
ttctaatgggtgaagtaaaatgtgtgtatattggagacgctaagccatagtgatgaaaatcattatccattccagaaca

SEQ ID NO: 52398 - DNA, 79 bp, Homo sapiens
agtaaaatgtgtgtatattggagacgctaagccatagtgatgaaaatcattatccattccagaacagaagtacacagct

SEQ ID NO: 52399 - DNA, 85 bp, Homo sapiens
aatgtgtgtatattggagacgctaagccatagtgatgaaaatcattatccattccagaacagaagtacacagcttgcatcataca

SEQ ID NO: 52400 - DNA, 85 bp, Homo sapiens
gagacgctaagccatagtgatgaaaatcattatccattccagaacagaagtacacagcttgcatcatacagcgagtggctaatat

SEQ ID NO: 52401 - DNA, 86 bp, Homo sapiens
taagccatagtgatgaaaatcattatccattccagaacagaagtacacagcttgcatcatacagcgagtggctaatattctcaaca

SEQ ID NO: 52402 - DNA, 83 bp, Homo sapiens
atgaaaatcattatccattccagaacagaagtacacagcttgcatcatacagcgagtggctaatattctcaacagagtgttta

SEQ ID NO: 52403 - DNA, 83 bp, Homo sapiens
ttatccattccagaacagaagtacacagcttgcatcatacagcgagtggctaatattctcaacagagtgtttagatatggaaa

SEQ ID NO: 52404 - DNA, 81 bp, Homo sapiens
attccagaacagaagtacacagcttgcatcatacagcgagtggctaatattctcaacagagtgtttagatatggaaaagta

SEQ ID NO: 52405 - DNA, 80 bp, Homo sapiens
agaagtacacagcttgcatcatacagcgagtggctaatattctcaacagagtgtttagatatggaaaagtaggagattcg

SEQ ID NO: 52406 - DNA, 81 bp, Homo sapiens
ttgcatcatacagcgagtggctaatattctcaacagagtgtttagatatggaaaagtaggagattcggcctgatccaaaga

SEQ ID NO: 52407 - DNA, 78 bp, Homo sapiens
atacagcgagtggctaatattctcaacagagtgtttagatatggaaaagtaggagattcggcctgatccaaagactca

SEQ ID NO: 52408 - DNA, 75 bp, Homo sapiens
ctaatattctcaacagagtgtttagatatggaaaagtaggagattcggcctgatccaaagactcagccaaagact

SEQ ID NO: 52409 - DNA, 76 bp, Homo sapiens
aacagagtgtttagatatggaaaagtaggagattcggcctgatccaaagactcagccaaagacttggctgtatcag

SEQ ID NO: 52410 - DNA, 74 bp, Homo sapiens
atggaaaagtaggagattcggcctgatccaaagactcagccaaagacttggctgtatcagtcttaatttccaaa

SEQ ID NO: 52411 - DNA, 73 bp, Homo sapiens
attcggcctgatccaaagactcagccaaagacttggctgtatcagtcttaatttccaaattctgtaaacaaaa

SEQ ID NO: 52412 - DNA, 71 bp, Homo sapiens
atccaaagactcagccaaagacttggctgtatcagtcttaatttccaaattctgtaaacaaaaaggaggga

SEQ ID NO: 52413 - DNA, 73 bp, Homo sapiens
tcagccaaagacttggctgtatcagtcttaatttccaaattctgtaaacaaaaaggagggaagagcaccatat

SEQ ID NO: 52414 - DNA, 71 bp, Homo sapiens
caaagacttggctgtatcagtcttaatttccaaattctgtaaacaaaaaggagggaagagcaccatattaa

SEQ ID NO: 52415 - DNA, 72 bp, Homo sapiens
tagatcaaaacacaaatagatgatttttcaaactgtaggaccttacccttgacctggctgccttaacaagaa

SEQ ID NO: 52416 - DNA, 68 bp, Homo sapiens
aaaacacaaatagatgatttttcaaactgtaggaccttacccttgacctggctgccttaacaagaatt

SEQ ID NO: 52417 - DNA, 72 bp, Homo sapiens
atagatgatttttcaaactgtaggaccttacccttgacctggctgccttaacaagaatttcataatttgatg

SEQ ID NO: 52418 - DNA, 73 bp, Homo sapiens
tttcaaactgtaggaccttacccttgacctggctgccttaacaagaatttcataatttgatggaggtggagca

SEQ ID NO: 52419 - DNA, 72 bp, Homo sapiens
accttacccttgacctggctgccttaacaagaatttcataatttgatggaggtggagcaggatgttttcgaa

SEQ ID NO: 52420 - DNA, 80 bp, Homo sapiens
ttgacctggctgccttaacaagaatttcataatttgatggaggtggagcaggatgttttcgaagcagagcatgttcagaa

SEQ ID NO: 52421 - DNA, 77 bp, Homo sapiens
ccttaacaagaatttcataatttgatggaggtggagcaggatgttttcgaagcagagcatgttcagaaaattcctca

SEQ ID NO: 52422 - DNA, 76 bp, Homo sapiens
aatttcataatttgatggaggtggagcaggatgttttcgaagcagagcatgttcagaaaattcctcatgaattttt

SEQ ID NO: 52423 - DNA, 77 bp, Homo sapiens
ataatttgatggaggtggagcaggatgttttcgaagcagagcatgttcagaaaattcctcatgaattttttttgcaa

SEQ ID NO: 52424 - DNA, 76 bp, Homo sapiens
aggtggagcaggatgttttcgaagcagagcatgttcagaaaattcctcatgaattttttttgcaacagaaatattg

SEQ ID NO: 52425 - DNA, 76 bp, Homo sapiens
caggatgttttcgaagcagagcatgttcagaaaattcctcatgaattttttttgcaacagaaatattggcaagtaa

SEQ ID NO: 52426 - DNA, 75 bp, Homo sapiens
cgaagcagagcatgttcagaaaattcctcatgaattttttttgcaacagaaatattggcaagtaacataaattct

SEQ ID NO: 52427 - DNA, 75 bp, Homo sapiens
gcatgttcagaaaattcctcatgaattttttttgcaacagaaatattggcaagtaacataaattcttcaaccatg

SEQ ID NO: 52428 - DNA, 72 bp, Homo sapiens
ttcctcatgaattttttttgcaacagaaatattggcaagtaacataaattcttcaaccatggaatttgtttc

SEQ ID NO: 52429 - DNA, 71 bp, Homo sapiens
gaattttttttgcaacagaaatattggcaagtaacataaattcttcaaccatggaatttgtttccctgcca

SEQ ID NO: 52430 - DNA, 72 bp, Homo sapiens
caacagaaatattggcaagtaacataaattcttcaaccatggaatttgtttccctgccaatggaaaaagcat

SEQ ID NO: 52431 - DNA, 71 bp, Homo sapiens
gaaatattggcaagtaacataaattcttcaaccatggaatttgtttccctgccaatggaaaaagcattaaa

SEQ ID NO: 52432 - DNA, 69 bp, Homo sapiens
caagtaacataaattcttcaaccatggaatttgtttccctgccaatggaaaaagcattaaacaaacaaa

SEQ ID NO: 52433 - DNA, 67 bp, Homo sapiens
attaaaataaaaaaatcttatctaatgcccatcaaaaaaattacaaacctaagttccttggtctgca

SEQ ID NO: 52434 - DNA, 71 bp, Homo sapiens
aaaaatcttatctaatgcccatcaaaaaaattacaaacctaagttccttggtctgcagatctataggatcg

SEQ ID NO: 52435 - DNA, 75 bp, Homo sapiens
tcttatctaatgcccatcaaaaaaattacaaacctaagttccttggtctgcagatctataggatcgtgagtttca

SEQ ID NO: 52436 - DNA, 74 bp, Homo sapiens
atcaaaaaaattacaaacctaagttccttggtctgcagatctataggatcgtgagtttcactgtccatgtggaa

SEQ ID NO: 52437 - DNA, 76 bp, Homo sapiens
aattacaaacctaagttccttggtctgcagatctataggatcgtgagtttcactgtccatgtggaatcgaacttca

SEQ ID NO: 52438 - DNA, 77 bp, Homo sapiens
aacctaagttccttggtctgcagatctataggatcgtgagtttcactgtccatgtggaatcgaacttcaggagagga

SEQ ID NO: 52439 - DNA, 82 bp, Homo sapiens
gtctgcagatctataggatcgtgagtttcactgtccatgtggaatcgaacttcaggagaggatagagtcaaagccctacata

SEQ ID NO: 52440 - DNA, 77 bp, Homo sapiens
atctataggatcgtgagtttcactgtccatgtggaatcgaacttcaggagaggatagagtcaaagccctacataaaa

SEQ ID NO: 52441 - DNA, 75 bp, Homo sapiens
ggatcgtgagtttcactgtccatgtggaatcgaacttcaggagaggatagagtcaaagccctacataaaaattaa

SEQ ID NO: 52442 - DNA, 73 bp, Homo sapiens
tttcactgtccatgtggaatcgaacttcaggagaggatagagtcaaagccctacataaaaattaaagagaaaa

SEQ ID NO: 52443 - DNA, 73 bp, Homo sapiens
catgtggaatcgaacttcaggagaggatagagtcaaagccctacataaaaattaaagagaaaaattatagtca

SEQ ID NO: 52444 - DNA, 72 bp, Homo sapiens
gaacttcaggagaggatagagtcaaagccctacataaaaattaaagagaaaaattatagtcaagcaagccaa

SEQ ID NO: 52445 - DNA, 67 bp, Homo sapiens
caatgtaaagagtataaaaattatcttaatactatgaaaaacaaaatataccctttttcaatccttc

SEQ ID NO: 52446 - DNA, 67 bp, Homo sapiens
gtataaaaattatcttaatactatgaaaaacaaaatataccctttttcaatccttcttttcttcaga

SEQ ID NO: 52447 - DNA, 67 bp, Homo sapiens
atcttaatactatgaaaaacaaaatataccctttttcaatccttcttttcttcagaattttggctag

SEQ ID NO: 52448 - DNA, 67 bp, Homo sapiens
gaaaaacaaaatataccctttttcaatccttcttttcttcagaattttggctagtttattcagtcca

SEQ ID NO: 52449 - DNA, 69 bp, Homo sapiens
atataccctttttcaatccttcttttcttcagaattttggctagtttattcagtccacggagactagtg

SEQ ID NO: 52450 - DNA, 75 bp, Homo sapiens
tttcaatccttcttttcttcagaattttggctagtttattcagtccacggagactagtggtaatatcatcattca

SEQ ID NO: 52451 - DNA, 77 bp, Homo sapiens
ttcttttcttcagaattttggctagtttattcagtccacggagactagtggtaatatcatcattcatgtttgctgaa

SEQ ID NO: 52452 - DNA, 80 bp, Homo sapiens
ttcagaattttggctagtttattcagtccacggagactagtggtaatatcatcattcatgtttgctgaatcaattctcaa

SEQ ID NO: 52453 - DNA, 82 bp, Homo sapiens
tttggctagtttattcagtccacggagactagtggtaatatcatcattcatgtttgctgaatcaattctcaactgagcttca

SEQ ID NO: 52454 - DNA, 86 bp, Homo sapiens
ttattcagtccacggagactagtggtaatatcatcattcatgtttgctgaatcaattctcaactgagcttcagcatacgtcagaga

SEQ ID NO: 52455 - DNA, 84 bp, Homo sapiens
acggagactagtggtaatatcatcattcatgtttgctgaatcaattctcaactgagcttcagcatacgtcagagatgcctaaaa

SEQ ID NO: 52456 - DNA, 82 bp, Homo sapiens
agtggtaatatcatcattcatgtttgctgaatcaattctcaactgagcttcagcatacgtcagagatgcctaaaaaagaaaa

SEQ ID NO: 52457 - DNA, 83 bp, Homo sapiens
atcattcatgtttgctgaatcaattctcaactgagcttcagcatacgtcagagatgcctaaaaaagaaaatgtatgttatata

SEQ ID NO: 52458 - DNA, 79 bp, Homo sapiens
gtttgctgaatcaattctcaactgagcttcagcatacgtcagagatgcctaaaaaagaaaatgtatgttatataattct

SEQ ID NO: 52459 - DNA, 65 bp, Homo sapiens
tcaaaaaagtaccaaaaagtttaaaaattagagattaatagccatgaaacgaacctttgaattaa

SEQ ID NO: 52460 - DNA, 65 bp, Homo sapiens
aagtaccaaaaagtttaaaaattagagattaatagccatgaaacgaacctttgaattaataacac

SEQ ID NO: 52461 - DNA, 66 bp, Homo sapiens
ttaaaaattagagattaatagccatgaaacgaacctttgaattaataacacttttggtaaacttcg

SEQ ID NO: 52462 - DNA, 66 bp, Homo sapiens
gagattaatagccatgaaacgaacctttgaattaataacacttttggtaaacttcgtttttaagat

SEQ ID NO: 52463 - DNA, 69 bp, Homo sapiens
gccatgaaacgaacctttgaattaataacacttttggtaaacttcgtttttaagatttcagcattgtga

SEQ ID NO: 52464 - DNA, 68 bp, Homo sapiens
gaaacgaacctttgaattaataacacttttggtaaacttcgtttttaagatttcagcattgtgattca

SEQ ID NO: 52465 - DNA, 72 bp, Homo sapiens
tgaattaataacacttttggtaaacttcgtttttaagatttcagcattgtgattcatttcccaaatacatga

SEQ ID NO: 52466 - DNA, 72 bp, Homo sapiens
cttttggtaaacttcgtttttaagatttcagcattgtgattcatttcccaaatacatgaaaatgccagcctg

SEQ ID NO: 52467 - DNA, 74 bp, Homo sapiens
gtaaacttcgtttttaagatttcagcattgtgattcatttcccaaatacatgaaaatgccagcctgtgaaggaa

SEQ ID NO: 52468 - DNA, 78 bp, Homo sapiens
taagatttcagcattgtgattcatttcccaaatacatgaaaatgccagcctgtgaaggaaaatacagagtatttgtta

SEQ ID NO: 52469 - DNA, 77 bp, Homo sapiens
tttcagcattgtgattcatttcccaaatacatgaaaatgccagcctgtgaaggaaaatacagagtatttgttaatgg

SEQ ID NO: 52470 - DNA, 74 bp, Homo sapiens
tcatttcccaaatacatgaaaatgccagcctgtgaaggaaaatacagagtatttgttaatgggaatcaggttaa

SEQ ID NO: 52471 - DNA, 72 bp, Homo sapiens
aatgccagcctgtgaaggaaaatacagagtatttgttaatgggaatcaggttaaagtagtaaatacaatgtc

SEQ ID NO: 52472 - DNA, 71 bp, Homo sapiens
gcctgtgaaggaaaatacagagtatttgttaatgggaatcaggttaaagtagtaaatacaatgtcttcaag

SEQ ID NO: 52473 - DNA, 68 bp, Homo sapiens
aggaaaatacagagtatttgttaatgggaatcaggttaaagtagtaaatacaatgtcttcaaggaaaa

SEQ ID NO: 52474 - DNA, 69 bp, Homo sapiens
aatgggaatcaggttaaagtagtaaatacaatgtcttcaaggaaaaaaaaccatgcagaaatacctgtc

SEQ ID NO: 52475 - DNA, 70 bp, Homo sapiens
caggttaaagtagtaaatacaatgtcttcaaggaaaaaaaaccatgcagaaatacctgtccacgtcacat

SEQ ID NO: 52476 - DNA, 70 bp, Homo sapiens
agtagtaaatacaatgtcttcaaggaaaaaaaaccatgcagaaatacctgtccacgtcacattttaagga

SEQ ID NO: 52477 - DNA, 70 bp, Homo sapiens
aatgtcttcaaggaaaaaaaaccatgcagaaatacctgtccacgtcacattttaaggaacacaagttaga

SEQ ID NO: 52478 - DNA, 70 bp, Homo sapiens
aaggaaaaaaaaccatgcagaaatacctgtccacgtcacattttaaggaacacaagttagagctaagcaa

SEQ ID NO: 52479 - DNA, 72 bp, Homo sapiens
aaaaaccatgcagaaatacctgtccacgtcacattttaaggaacacaagttagagctaagcaactctggaac

SEQ ID NO: 52480 - DNA, 74 bp, Homo sapiens
agaaatacctgtccacgtcacattttaaggaacacaagttagagctaagcaactctggaaccatgtcaatcctc

SEQ ID NO: 52481 - DNA, 74 bp, Homo sapiens
acgtcacattttaaggaacacaagttagagctaagcaactctggaaccatgtcaatcctctgcaaaagataaaa

SEQ ID NO: 52482 - DNA, 74 bp, Homo sapiens
acattttaaggaacacaagttagagctaagcaactctggaaccatgtcaatcctctgcaaaagataaaaataga

SEQ ID NO: 52483 - DNA, 75 bp, Homo sapiens
acaagttagagctaagcaactctggaaccatgtcaatcctctgcaaaagataaaaatagaaccacagattactta

SEQ ID NO: 52484 - DNA, 76 bp, Homo sapiens
ctaagcaactctggaaccatgtcaatcctctgcaaaagataaaaatagaaccacagattacttagccataaccata

SEQ ID NO: 52485 - DNA, 75 bp, Homo sapiens
actctggaaccatgtcaatcctctgcaaaagataaaaatagaaccacagattacttagccataaccatacattta

SEQ ID NO: 52486 - DNA, 70 bp, Homo sapiens
gaatccttaagtgtccatgactgttaaatttttaaattcaatacatttaccttttcacaaagatacacag

SEQ ID NO: 52487 - DNA, 71 bp, Homo sapiens
tgtccatgactgttaaatttttaaattcaatacatttaccttttcacaaagatacacagttgttcctcttc

SEQ ID NO: 52488 - DNA, 72 bp, Homo sapiens
taaatttttaaattcaatacatttaccttttcacaaagatacacagttgttcctcttctggctgattcttga

SEQ ID NO: 52489 - DNA, 75 bp, Homo sapiens
taaattcaatacatttaccttttcacaaagatacacagttgttcctcttctggctgattcttgatccaaggcatt

SEQ ID NO: 52490 - DNA, 74 bp, Homo sapiens
atttaccttttcacaaagatacacagttgttcctcttctggctgattcttgatccaaggcatttcctggcctaa

SEQ ID NO: 52491 - DNA, 74 bp, Homo sapiens
ccttttcacaaagatacacagttgttcctcttctggctgattcttgatccaaggcatttcctggcctaataaaa

SEQ ID NO: 52492 - DNA, 82 bp, Homo sapiens
atacacagttgttcctcttctggctgattcttgatccaaggcatttcctggcctaataaaatggctcacatcagcaatatga

SEQ ID NO: 52493 - DNA, 81 bp, Homo sapiens
ttgttcctcttctggctgattcttgatccaaggcatttcctggcctaataaaatggctcacatcagcaatatgaacaccaa

SEQ ID NO: 52494 - DNA, 78 bp, Homo sapiens
tggctgattcttgatccaaggcatttcctggcctaataaaatggctcacatcagcaatatgaacaccaaccttaaaaa

SEQ ID NO: 52495 - DNA, 76 bp, Homo sapiens
ttcttgatccaaggcatttcctggcctaataaaatggctcacatcagcaatatgaacaccaaccttaaaaagataa

SEQ ID NO: 52496 - DNA, 72 bp, Homo sapiens
aaggcatttcctggcctaataaaatggctcacatcagcaatatgaacaccaaccttaaaaagataaaaataa

SEQ ID NO: 52497 - DNA, 73 bp, Homo sapiens
ctggcctaataaaatggctcacatcagcaatatgaacaccaaccttaaaaagataaaaataaaaggatgtcaa

SEQ ID NO: 52498 - DNA, 72 bp, Homo sapiens
cagaacagaactatatttaggtaagaacactattacatatgaatacctccaaatttccattttcgagttctc

SEQ ID NO: 52499 - DNA, 73 bp, Homo sapiens
ctatatttaggtaagaacactattacatatgaatacctccaaatttccattttcgagttctcgacaatgtaga

SEQ ID NO: 52500 - DNA, 78 bp, Homo sapiens
gtaagaacactattacatatgaatacctccaaatttccattttcgagttctcgacaatgtagagcatcgtctatatca

SEQ ID NO: 52501 - DNA, 78 bp, Homo sapiens
aacactattacatatgaatacctccaaatttccattttcgagttctcgacaatgtagagcatcgtctatatcagtaca

SEQ ID NO: 52502 - DNA, 77 bp, Homo sapiens
atatgaatacctccaaatttccattttcgagttctcgacaatgtagagcatcgtctatatcagtacatcctggtggg

SEQ ID NO: 52503 - DNA, 76 bp, Homo sapiens
aaatttccattttcgagttctcgacaatgtagagcatcgtctatatcagtacatcctggtgggtctacactacaaa

SEQ ID NO: 52504 - DNA, 80 bp, Homo sapiens
attttcgagttctcgacaatgtagagcatcgtctatatcagtacatcctggtgggtctacactacaaatacacagatgcc

SEQ ID NO: 52505 - DNA, 81 bp, Homo sapiens
agttctcgacaatgtagagcatcgtctatatcagtacatcctggtgggtctacactacaaatacacagatgcctcaggtct

SEQ ID NO: 52506 - DNA, 80 bp, Homo sapiens
tagagcatcgtctatatcagtacatcctggtgggtctacactacaaatacacagatgcctcaggtcttctcggtttttca

SEQ ID NO: 52507 - DNA, 78 bp, Homo sapiens
atcgtctatatcagtacatcctggtgggtctacactacaaatacacagatgcctcaggtcttctcggtttttcatgtc

SEQ ID NO: 52508 - DNA, 78 bp, Homo sapiens
tacatcctggtgggtctacactacaaatacacagatgcctcaggtcttctcggtttttcatgtcctagaagacatgaa

SEQ ID NO: 52509 - DNA, 77 bp, Homo sapiens
gtgggtctacactacaaatacacagatgcctcaggtcttctcggtttttcatgtcctagaagacatgaaatgataaa

SEQ ID NO: 52510 - DNA, 75 bp, Homo sapiens
actacaaatacacagatgcctcaggtcttctcggtttttcatgtcctagaagacatgaaatgataaacaaataaa

SEQ ID NO: 52511 - DNA, 73 bp, Homo sapiens
gcaggatataataatttataaagtcactacaaattactttcaacttaccttttcagtaatgctccagggcatc

SEQ ID NO: 52512 - DNA, 71 bp, Homo sapiens
aatttataaagtcactacaaattactttcaacttaccttttcagtaatgctccagggcatctttggcagaa

SEQ ID NO: 52513 - DNA, 70 bp, Homo sapiens
aaagtcactacaaattactttcaacttaccttttcagtaatgctccagggcatctttggcagaaaactaa

SEQ ID NO: 52514 - DNA, 72 bp, Homo sapiens
attactttcaacttaccttttcagtaatgctccagggcatctttggcagaaaactaagaacagcctgtgaaa

SEQ ID NO: 52515 - DNA, 72 bp, Homo sapiens
tttcaacttaccttttcagtaatgctccagggcatctttggcagaaaactaagaacagcctgtgaaaaaggc

SEQ ID NO: 52516 - DNA, 75 bp, Homo sapiens
ttttcagtaatgctccagggcatctttggcagaaaactaagaacagcctgtgaaaaaggctgatggggaacatcg

SEQ ID NO: 52517 - DNA, 75 bp, Homo sapiens
tccagggcatctttggcagaaaactaagaacagcctgtgaaaaaggctgatggggaacatcgtgttcaagtaaca

SEQ ID NO: 52518 - DNA, 71 bp, Homo sapiens
tctttggcagaaaactaagaacagcctgtgaaaaaggctgatggggaacatcgtgttcaagtaacaaaact

SEQ ID NO: 52519 - DNA, 69 bp, Homo sapiens
agaaaactaagaacagcctgtgaaaaaggctgatggggaacatcgtgttcaagtaacaaaacttctgtt

SEQ ID NO: 52520 - DNA, 71 bp, Homo sapiens
aagaacagcctgtgaaaaaggctgatggggaacatcgtgttcaagtaacaaaacttctgtttcagtctctt

SEQ ID NO: 52521 - DNA, 72 bp, Homo sapiens
aaaaaggctgatggggaacatcgtgttcaagtaacaaaacttctgtttcagtctctttctctccaacatcac

SEQ ID NO: 52522 - DNA, 71 bp, Homo sapiens
atggggaacatcgtgttcaagtaacaaaacttctgtttcagtctctttctctccaacatcacctaaatttc

SEQ ID NO: 52523 - DNA, 72 bp, Homo sapiens
aacatcgtgttcaagtaacaaaacttctgtttcagtctctttctctccaacatcacctaaatttctcacaaa

SEQ ID NO: 52524 - DNA, 71 bp, Homo sapiens
agtaacaaaacttctgtttcagtctctttctctccaacatcacctaaatttctcacaaagtgtccctgaaa

SEQ ID NO: 52525 - DNA, 75 bp, Homo sapiens
tctgtttcagtctctttctctccaacatcacctaaatttctcacaaagtgtccctgaaaccaagaggcattatta

SEQ ID NO: 52526 - DNA, 72 bp, Homo sapiens
agtctctttctctccaacatcacctaaatttctcacaaagtgtccctgaaaccaagaggcattattagaaac

SEQ ID NO: 52527 - DNA, 68 bp, Homo sapiens
aattttaattaaacatccccacataaaattaatactttaagcttacatttggatatctggaatttctg

SEQ ID NO: 52528 - DNA, 71 bp, Homo sapiens
aaacatccccacataaaattaatactttaagcttacatttggatatctggaatttctgggccaaccatcaa

SEQ ID NO: 52529 - DNA, 73 bp, Homo sapiens
cccacataaaattaatactttaagcttacatttggatatctggaatttctgggccaaccatcaatagcaacaa

SEQ ID NO: 52530 - DNA, 74 bp, Homo sapiens
ttaatactttaagcttacatttggatatctggaatttctgggccaaccatcaatagcaacaataattctccgtc

SEQ ID NO: 52531 - DNA, 74 bp, Homo sapiens
tttaagcttacatttggatatctggaatttctgggccaaccatcaatagcaacaataattctccgtccttctaa

SEQ ID NO: 52532 - DNA, 75 bp, Homo sapiens
atttggatatctggaatttctgggccaaccatcaatagcaacaataattctccgtccttctaatgtggaagcctg

SEQ ID NO: 52533 - DNA, 75 bp, Homo sapiens
aatttctgggccaaccatcaatagcaacaataattctccgtccttctaatgtggaagcctgtctggtttctatgc

SEQ ID NO: 52534 - DNA, 75 bp, Homo sapiens
ccaaccatcaatagcaacaataattctccgtccttctaatgtggaagcctgtctggtttctatgcgaattcgagg

SEQ ID NO: 52535 - DNA, 75 bp, Homo sapiens
atagcaacaataattctccgtccttctaatgtggaagcctgtctggtttctatgcgaattcgagggattctctta

SEQ ID NO: 52536 - DNA, 76 bp, Homo sapiens
aacaataattctccgtccttctaatgtggaagcctgtctggtttctatgcgaattcgagggattctcttatcagca

SEQ ID NO: 52537 - DNA, 78 bp, Homo sapiens
tccttctaatgtggaagcctgtctggtttctatgcgaattcgagggattctcttatcagcaggtgtaaagagatgtct

SEQ ID NO: 52538 - DNA, 79 bp, Homo sapiens
ctaatgtggaagcctgtctggtttctatgcgaattcgagggattctcttatcagcaggtgtaaagagatgtcttcttga

SEQ ID NO: 52539 - DNA, 78 bp, Homo sapiens
tgtctggtttctatgcgaattcgagggattctcttatcagcaggtgtaaagagatgtcttcttgactagcaaaaatta

SEQ ID NO: 52540 - DNA, 77 bp, Homo sapiens
tttctatgcgaattcgagggattctcttatcagcaggtgtaaagagatgtcttcttgactagcaaaaattaggaata

SEQ ID NO: 52541 - DNA, 74 bp, Homo sapiens
gaattcgagggattctcttatcagcaggtgtaaagagatgtcttcttgactagcaaaaattaggaataaagatt

SEQ ID NO: 52542 - DNA, 74 bp, Homo sapiens
gattctcttatcagcaggtgtaaagagatgtcttcttgactagcaaaaattaggaataaagattttacacaaaa

SEQ ID NO: 52543 - DNA, 72 bp, Homo sapiens
aaatgtttatcatttttttattacatagtaaatgctctttactcacctccttaatgtcagacttggaaagca

SEQ ID NO: 52544 - DNA, 76 bp, Homo sapiens
tcatttttttattacatagtaaatgctctttactcacctccttaatgtcagacttggaaagcatgccacaatatgg

SEQ ID NO: 52545 - DNA, 77 bp, Homo sapiens
tttattacatagtaaatgctctttactcacctccttaatgtcagacttggaaagcatgccacaatatggtctccaat

SEQ ID NO: 52546 - DNA, 75 bp, Homo sapiens
taaatgctctttactcacctccttaatgtcagacttggaaagcatgccacaatatggtctccaattcctttttat

SEQ ID NO: 52547 - DNA, 74 bp, Homo sapiens
tttactcacctccttaatgtcagacttggaaagcatgccacaatatggtctccaattcctttttattattccta

SEQ ID NO: 52548 - DNA, 75 bp, Homo sapiens
ttaatgtcagacttggaaagcatgccacaatatggtctccaattcctttttattattcctacaactctacctgta

SEQ ID NO: 52549 - DNA, 73 bp, Homo sapiens
acttggaaagcatgccacaatatggtctccaattcctttttattattcctacaactctacctgtaggcttcaa

SEQ ID NO: 52550 - DNA, 72 bp, Homo sapiens
aaagcatgccacaatatggtctccaattcctttttattattcctacaactctacctgtaggcttcaacattt

SEQ ID NO: 52551 - DNA, 71 bp, Homo sapiens
aatatggtctccaattcctttttattattcctacaactctacctgtaggcttcaacattttctcgcttaca

SEQ ID NO: 52552 - DNA, 71 bp, Homo sapiens
aattcctttttattattcctacaactctacctgtaggcttcaacattttctcgcttacagcagtcttaagc

SEQ ID NO: 52553 - DNA, 75 bp, Homo sapiens
ttattattcctacaactctacctgtaggcttcaacattttctcgcttacagcagtcttaagctgagatataaaaa

SEQ ID NO: 52554 - DNA, 74 bp, Homo sapiens
ttcctacaactctacctgtaggcttcaacattttctcgcttacagcagtcttaagctgagatataaaaattaaa

SEQ ID NO: 52555 - DNA, 75 bp, Homo sapiens
tctacctgtaggcttcaacattttctcgcttacagcagtcttaagctgagatataaaaattaaaatgttcagtta

SEQ ID NO: 52556 - DNA, 73 bp, Homo sapiens
aatacaaagctacacagacaaaaaaaaatcctgcttagattcataccattcgttctgtctcttcttctttctc

SEQ ID NO: 52557 - DNA, 74 bp, Homo sapiens
aaagctacacagacaaaaaaaaatcctgcttagattcataccattcgttctgtctcttcttctttctccacatc

SEQ ID NO: 52558 - DNA, 73 bp, Homo sapiens
aaaaaaaatcctgcttagattcataccattcgttctgtctcttcttctttctccacatcttcttcattttgac

SEQ ID NO: 52559 - DNA, 78 bp, Homo sapiens
ctgcttagattcataccattcgttctgtctcttcttctttctccacatcttcttcattttgaccttcatcatgtaaaa

SEQ ID NO: 52560 - DNA, 78 bp, Homo sapiens
tagattcataccattcgttctgtctcttcttctttctccacatcttcttcattttgaccttcatcatgtaaaaccaca

SEQ ID NO: 52561 - DNA, 78 bp, Homo sapiens
ttcgttctgtctcttcttctttctccacatcttcttcattttgaccttcatcatgtaaaaccacagaagatggtgcta

SEQ ID NO: 52562 - DNA, 77 bp, Homo sapiens
cttcttctttctccacatcttcttcattttgaccttcatcatgtaaaaccacagaagatggtgctacccactgactc

SEQ ID NO: 52563 - DNA, 77 bp, Homo sapiens
tctttctccacatcttcttcattttgaccttcatcatgtaaaaccacagaagatggtgctacccactgactcttggg

SEQ ID NO: 52564 - DNA, 77 bp, Homo sapiens
atcttcttcattttgaccttcatcatgtaaaaccacagaagatggtgctacccactgactcttggggagaagctcca

SEQ ID NO: 52565 - DNA, 78 bp, Homo sapiens
ttttgaccttcatcatgtaaaaccacagaagatggtgctacccactgactcttggggagaagctccacagccacaata

SEQ ID NO: 52566 - DNA, 79 bp, Homo sapiens
atcatgtaaaaccacagaagatggtgctacccactgactcttggggagaagctccacagccacaatatcttcgtgaaca

SEQ ID NO: 52567 - DNA, 78 bp, Homo sapiens
acagaagatggtgctacccactgactcttggggagaagctccacagccacaatatcttcgtgaacagctctgtttaaa

SEQ ID NO: 52568 - DNA, 77 bp, Homo sapiens
atggtgctacccactgactcttggggagaagctccacagccacaatatcttcgtgaacagctctgtttaaatgttta

SEQ ID NO: 52569 - DNA, 75 bp, Homo sapiens
ctgactcttggggagaagctccacagccacaatatcttcgtgaacagctctgtttaaatgtttaagtccctgtaa

SEQ ID NO: 52570 - DNA, 75 bp, Homo sapiens
gggagaagctccacagccacaatatcttcgtgaacagctctgtttaaatgtttaagtccctgtaagattatctgt

SEQ ID NO: 52571 - DNA, 74 bp, Homo sapiens
tccacagccacaatatcttcgtgaacagctctgtttaaatgtttaagtccctgtaagattatctgtttaaaaca

SEQ ID NO: 52572 - DNA, 73 bp, Homo sapiens
gccacaatatcttcgtgaacagctctgtttaaatgtttaagtccctgtaagattatctgtttaaaacaacaga

SEQ ID NO: 52573 - DNA, 70 bp, Homo sapiens
cttcgtgaacagctctgtttaaatgtttaagtccctgtaagattatctgtttaaaacaacagagggcacg

SEQ ID NO: 52574 - DNA, 74 bp, Homo sapiens
atatcatctttattttagtgtataaggaatttatttatatacttgcctctttattttcttcattgtcgccatga

SEQ ID NO: 52575 - DNA, 74 bp, Homo sapiens
tattttagtgtataaggaatttatttatatacttgcctctttattttcttcattgtcgccatgaatccatactg

SEQ ID NO: 52576 - DNA, 76 bp, Homo sapiens
gtgtataaggaatttatttatatacttgcctctttattttcttcattgtcgccatgaatccatactgtagcttcca

SEQ ID NO: 52577 - DNA, 74 bp, Homo sapiens
ttatttatatacttgcctctttattttcttcattgtcgccatgaatccatactgtagcttccaagtaattttcc

SEQ ID NO: 52578 - DNA, 77 bp, Homo sapiens
tatatacttgcctctttattttcttcattgtcgccatgaatccatactgtagcttccaagtaattttccctgctagc

SEQ ID NO: 52579 - DNA, 75 bp, Homo sapiens
ttattttcttcattgtcgccatgaatccatactgtagcttccaagtaattttccctgctagctctaaatgttcct

SEQ ID NO: 52580 - DNA, 78 bp, Homo sapiens
tcattgtcgccatgaatccatactgtagcttccaagtaattttccctgctagctctaaatgttccttgaaggtatgta

SEQ ID NO: 52581 - DNA, 74 bp, Homo sapiens
atgaatccatactgtagcttccaagtaattttccctgctagctctaaatgttccttgaaggtatgtaccagatt

SEQ ID NO: 52582 - DNA, 73 bp, Homo sapiens
tactgtagcttccaagtaattttccctgctagctctaaatgttccttgaaggtatgtaccagattttatgcct

SEQ ID NO: 52583 - DNA, 75 bp, Homo sapiens
tccaagtaattttccctgctagctctaaatgttccttgaaggtatgtaccagattttatgccttgctgtagctta

SEQ ID NO: 52584 - DNA, 74 bp, Homo sapiens
taattttccctgctagctctaaatgttccttgaaggtatgtaccagattttatgccttgctgtagcttacttaa

SEQ ID NO: 52585 - DNA, 77 bp, Homo sapiens
tagctctaaatgttccttgaaggtatgtaccagattttatgccttgctgtagcttacttaagggaagatgctctgaa

SEQ ID NO: 52586 - DNA, 74 bp, Homo sapiens
aaatgttccttgaaggtatgtaccagattttatgccttgctgtagcttacttaagggaagatgctctgaaaata

SEQ ID NO: 52587 - DNA, 75 bp, Homo sapiens
tgaaggtatgtaccagattttatgccttgctgtagcttacttaagggaagatgctctgaaaatattatttttcca

SEQ ID NO: 52588 - DNA, 73 bp, Homo sapiens
taccagattttatgccttgctgtagcttacttaagggaagatgctctgaaaatattatttttccactttctat

SEQ ID NO: 52589 - DNA, 74 bp, Homo sapiens
gccttgctgtagcttacttaagggaagatgctctgaaaatattatttttccactttctatttcattctatgaaa

SEQ ID NO: 52590 - DNA, 74 bp, Homo sapiens
tgtagcttacttaagggaagatgctctgaaaatattatttttccactttctatttcattctatgaaagaagcaa

SEQ ID NO: 52591 - DNA, 74 bp, Homo sapiens
ggaagatgctctgaaaatattatttttccactttctatttcattctatgaaagaagcaaaccaaaagatgccgc

SEQ ID NO: 52592 - DNA, 73 bp, Homo sapiens
gctctgaaaatattatttttccactttctatttcattctatgaaagaagcaaaccaaaagatgccgctaataa

SEQ ID NO: 52593 - DNA, 69 bp, Homo sapiens
aaaacaaaaacataccccttcttcagacaaacaagcaagacgatctatgagttcggggttagcagttag

SEQ ID NO: 52594 - DNA, 71 bp, Homo sapiens
aaaacataccccttcttcagacaaacaagcaagacgatctatgagttcggggttagcagttaggctcttta

SEQ ID NO: 52595 - DNA, 75 bp, Homo sapiens
ttcagacaaacaagcaagacgatctatgagttcggggttagcagttaggctctttacatattcttcacctgaaaa

SEQ ID NO: 52596 - DNA, 72 bp, Homo sapiens
aaacaagcaagacgatctatgagttcggggttagcagttaggctctttacatattcttcacctgaaaaaata

SEQ ID NO: 52597 - DNA, 70 bp, Homo sapiens
aagacgatctatgagttcggggttagcagttaggctctttacatattcttcacctgaaaaaataagttta

SEQ ID NO: 52598 - DNA, 68 bp, Homo sapiens
atgagttcggggttagcagttaggctctttacatattcttcacctgaaaaaataagtttatgttgttt

SEQ ID NO: 52599 - DNA, 69 bp, Homo sapiens
ggttagcagttaggctctttacatattcttcacctgaaaaaataagtttatgttgtttttgataagtgt

SEQ ID NO: 52600 - DNA, 67 bp, Homo sapiens
taggctctttacatattcttcacctgaaaaaataagtttatgttgtttttgataagtgttttttcct

SEQ ID NO: 52601 - DNA, 74 bp, Homo sapiens
ttttacacgcatttgcaaacatgcactaagtacttctacatttagacttacaagtgaaagctggtattccttct

SEQ ID NO: 52602 - DNA, 74 bp, Homo sapiens
atttgcaaacatgcactaagtacttctacatttagacttacaagtgaaagctggtattccttcttctatggctt

SEQ ID NO: 52603 - DNA, 71 bp, Homo sapiens
cactaagtacttctacatttagacttacaagtgaaagctggtattccttcttctatggctttctctttgtt

SEQ ID NO: 52604 - DNA, 73 bp, Homo sapiens
ttctacatttagacttacaagtgaaagctggtattccttcttctatggctttctctttgtttctcctgtcatt

SEQ ID NO: 52605 - DNA, 74 bp, Homo sapiens
tttagacttacaagtgaaagctggtattccttcttctatggctttctctttgtttctcctgtcatttgttatga

SEQ ID NO: 52606 - DNA, 75 bp, Homo sapiens
aagtgaaagctggtattccttcttctatggctttctctttgtttctcctgtcatttgttatgaagataacttgca

SEQ ID NO: 52607 - DNA, 80 bp, Homo sapiens
tattccttcttctatggctttctctttgtttctcctgtcatttgttatgaagataacttgcagctggttgtctgctgaca

SEQ ID NO: 52608 - DNA, 78 bp, Homo sapiens
ttcttctatggctttctctttgtttctcctgtcatttgttatgaagataacttgcagctggttgtctgctgacatttt

SEQ ID NO: 52609 - DNA, 76 bp, Homo sapiens
tttctctttgtttctcctgtcatttgttatgaagataacttgcagctggttgtctgctgacatttttttcaaatgt

SEQ ID NO: 52610 - DNA, 78 bp, Homo sapiens
ttctcctgtcatttgttatgaagataacttgcagctggttgtctgctgacatttttttcaaatgttcattgtaccatt

SEQ ID NO: 52611 - DNA, 78 bp, Homo sapiens
atttgttatgaagataacttgcagctggttgtctgctgacatttttttcaaatgttcattgtaccattttgctgctac

SEQ ID NO: 52612 - DNA, 80 bp, Homo sapiens
agataacttgcagctggttgtctgctgacatttttttcaaatgttcattgtaccattttgctgctactcgaatcgctcta

SEQ ID NO: 52613 - DNA, 81 bp, Homo sapiens
agctggttgtctgctgacatttttttcaaatgttcattgtaccattttgctgctactcgaatcgctctatcattcctgtca

SEQ ID NO: 52614 - DNA, 81 bp, Homo sapiens
tctgctgacatttttttcaaatgttcattgtaccattttgctgctactcgaatcgctctatcattcctgtcattagcattt

SEQ ID NO: 52615 - DNA, 78 bp, Homo sapiens
ttttttcaaatgttcattgtaccattttgctgctactcgaatcgctctatcattcctgtcattagcattttctccctg

SEQ ID NO: 52616 - DNA, 78 bp, Homo sapiens
aaatgttcattgtaccattttgctgctactcgaatcgctctatcattcctgtcattagcattttctccctgttcttgt

SEQ ID NO: 52617 - DNA, 78 bp, Homo sapiens
taccattttgctgctactcgaatcgctctatcattcctgtcattagcattttctccctgttcttgttctacataggtt

SEQ ID NO: 52618 - DNA, 79 bp, Homo sapiens
tttgctgctactcgaatcgctctatcattcctgtcattagcattttctccctgttcttgttctacataggtttctctaa

SEQ ID NO: 52619 - DNA, 75 bp, Homo sapiens
aatcgctctatcattcctgtcattagcattttctccctgttcttgttctacataggtttctctaaatggaaagaa

SEQ ID NO: 52620 - DNA, 71 bp, Homo sapiens
cattcctgtcattagcattttctccctgttcttgttctacataggtttctctaaatggaaagaaaaaacga

SEQ ID NO: 52621 - DNA, 70 bp, Homo sapiens
ctgtcattagcattttctccctgttcttgttctacataggtttctctaaatggaaagaaaaaacgaaata

SEQ ID NO: 52622 - DNA, 75 bp, Homo sapiens
ttgctaatcctgtggttttctgatatttaacgtaatattcctcctacctatggtgctcattagtgaaagtataga

SEQ ID NO: 52623 - DNA, 74 bp, Homo sapiens
ctgtggttttctgatatttaacgtaatattcctcctacctatggtgctcattagtgaaagtatagaaatgcttc

SEQ ID NO: 52624 - DNA, 75 bp, Homo sapiens
ttctgatatttaacgtaatattcctcctacctatggtgctcattagtgaaagtatagaaatgcttctcttggtta

SEQ ID NO: 52625 - DNA, 75 bp, Homo sapiens
ttaacgtaatattcctcctacctatggtgctcattagtgaaagtatagaaatgcttctcttggttattagtcaca

SEQ ID NO: 52626 - DNA, 79 bp, Homo sapiens
tcctacctatggtgctcattagtgaaagtatagaaatgcttctcttggttattagtcacatctcggatgcgtttatata

SEQ ID NO: 52627 - DNA, 77 bp, Homo sapiens
ctatggtgctcattagtgaaagtatagaaatgcttctcttggttattagtcacatctcggatgcgtttatatacggg

SEQ ID NO: 52628 - DNA, 76 bp, Homo sapiens
tagtgaaagtatagaaatgcttctcttggttattagtcacatctcggatgcgtttatatacgggggcactgcgatt

SEQ ID NO: 52629 - DNA, 76 bp, Homo sapiens
atagaaatgcttctcttggttattagtcacatctcggatgcgtttatatacgggggcactgcgatttctcacttct

SEQ ID NO: 52630 - DNA, 76 bp, Homo sapiens
tctcttggttattagtcacatctcggatgcgtttatatacgggggcactgcgatttctcacttcttgaagaactgt

SEQ ID NO: 52631 - DNA, 76 bp, Homo sapiens
tggttattagtcacatctcggatgcgtttatatacgggggcactgcgatttctcacttcttgaagaactgtttgta

SEQ ID NO: 52632 - DNA, 76 bp, Homo sapiens
acatctcggatgcgtttatatacgggggcactgcgatttctcacttcttgaagaactgtttgtagcacaattacat

SEQ ID NO: 52633 - DNA, 78 bp, Homo sapiens
atgcgtttatatacgggggcactgcgatttctcacttcttgaagaactgtttgtagcacaattacattcctgatggca

SEQ ID NO: 52634 - DNA, 78 bp, Homo sapiens
tatacgggggcactgcgatttctcacttcttgaagaactgtttgtagcacaattacattcctgatggcagggtcctca

SEQ ID NO: 52635 - DNA, 78 bp, Homo sapiens
cgatttctcacttcttgaagaactgtttgtagcacaattacattcctgatggcagggtcctcaagaacatcaatctta

SEQ ID NO: 52636 - DNA, 75 bp, Homo sapiens
acttcttgaagaactgtttgtagcacaattacattcctgatggcagggtcctcaagaacatcaatcttaaagaaa

SEQ ID NO: 52637 - DNA, 74 bp, Homo sapiens
aagaactgtttgtagcacaattacattcctgatggcagggtcctcaagaacatcaatcttaaagaaagataaag

SEQ ID NO: 52638 - DNA, 73 bp, Homo sapiens
tttgtagcacaattacattcctgatggcagggtcctcaagaacatcaatcttaaagaaagataaagttaattt

SEQ ID NO: 52639 - DNA, 73 bp, Homo sapiens
ttacattcctgatggcagggtcctcaagaacatcaatcttaaagaaagataaagttaatttttcctatattca

SEQ ID NO: 52640 - DNA, 67 bp, Homo sapiens
gaattaagggtattaataaaggaatacgttggcccacatagttttttgttcctaggcacttacaagc

SEQ ID NO: 52641 - DNA, 68 bp, Homo sapiens
agggtattaataaaggaatacgttggcccacatagttttttgttcctaggcacttacaagctgcctgg

SEQ ID NO: 52642 - DNA, 73 bp, Homo sapiens
taaaggaatacgttggcccacatagttttttgttcctaggcacttacaagctgcctgggagtcgcaggctgga

SEQ ID NO: 52643 - DNA, 76 bp, Homo sapiens
ttggcccacatagttttttgttcctaggcacttacaagctgcctgggagtcgcaggctggaggccacagaagccca

SEQ ID NO: 52644 - DNA, 73 bp, Homo sapiens
atagttttttgttcctaggcacttacaagctgcctgggagtcgcaggctggaggccacagaagcccaggtccc

SEQ ID NO: 52645 - DNA, 76 bp, Homo sapiens
ctaggcacttacaagctgcctgggagtcgcaggctggaggccacagaagcccaggtccccggcctccaggcactta

SEQ ID NO: 52646 - DNA, 76 bp, Homo sapiens
ttacaagctgcctgggagtcgcaggctggaggccacagaagcccaggtccccggcctccaggcacttacaatctaa

SEQ ID NO: 52647 - DNA, 77 bp, Homo sapiens
tgggagtcgcaggctggaggccacagaagcccaggtccccggcctccaggcacttacaatctaaggcagaagagaca

SEQ ID NO: 52648 - DNA, 74 bp, Homo sapiens
aggctggaggccacagaagcccaggtccccggcctccaggcacttacaatctaaggcagaagagacaccaggag

SEQ ID NO: 52649 - DNA, 72 bp, Homo sapiens
ccacagaagcccaggtccccggcctccaggcacttacaatctaaggcagaagagacaccaggagttagaaaa

SEQ ID NO: 52650 - DNA, 70 bp, Homo sapiens
aagcccaggtccccggcctccaggcacttacaatctaaggcagaagagacaccaggagttagaaaaataa

SEQ ID NO: 52651 - DNA, 75 bp, Homo sapiens
gtggggccgcgctgtccgcggttcgcccgcccacgcacctggtgcagtaacacattagtgtcgggcagcaagtag

SEQ ID NO: 52652 - DNA, 75 bp, Homo sapiens
ctgtccgcggttcgcccgcccacgcacctggtgcagtaacacattagtgtcgggcagcaagtagtgcggttgcgg

SEQ ID NO: 52653 - DNA, 79 bp, Homo sapiens
gttcgcccgcccacgcacctggtgcagtaacacattagtgtcgggcagcaagtagtgcggttgcgggcagacgctgctc

SEQ ID NO: 52654 - DNA, 78 bp, Homo sapiens
taacacattagtgtcgggcagcaagtagtgcggttgcgggcagacgctgctcgccgggtcctggggctgcggctccag

SEQ ID NO: 52655 - DNA, 76 bp, Homo sapiens
gtgtcgggcagcaagtagtgcggttgcgggcagacgctgctcgccgggtcctggggctgcggctccagggccggcc

SEQ ID NO: 52656 - DNA, 74 bp, Homo sapiens
aagtagtgcggttgcgggcagacgctgctcgccgggtcctggggctgcggctccagggccggcccctcgtgcgc

SEQ ID NO: 52657 - DNA, 74 bp, Homo sapiens
ggttgcgggcagacgctgctcgccgggtcctggggctgcggctccagggccggcccctcgtgcgcccctccaca

SEQ ID NO: 52658 - DNA, 75 bp, Homo sapiens
agacgctgctcgccgggtcctggggctgcggctccagggccggcccctcgtgcgcccctccacacgctgcgcacc

SEQ ID NO: 52659 - DNA, 74 bp, Homo sapiens
gggtcctggggctgcggctccagggccggcccctcgtgcgcccctccacacgctgcgcacccgggcgcaccgca

SEQ ID NO: 52660 - DNA, 78 bp, Homo sapiens
gctgcggctccagggccggcccctcgtgcgcccctccacacgctgcgcacccgggcgcaccgcagccgatgtcgtctc

SEQ ID NO: 52661 - DNA, 76 bp, Homo sapiens
cagggccggcccctcgtgcgcccctccacacgctgcgcacccgggcgcaccgcagccgatgtcgtctcgcaggtag

SEQ ID NO: 52662 - DNA, 81 bp, Homo sapiens
ccctcgtgcgcccctccacacgctgcgcacccgggcgcaccgcagccgatgtcgtctcgcaggtagtgctcgcgcacgatc

SEQ ID NO: 52663 - DNA, 82 bp, Homo sapiens
cccctccacacgctgcgcacccgggcgcaccgcagccgatgtcgtctcgcaggtagtgctcgcgcacgatcttcatcacgcc

SEQ ID NO: 52664 - DNA, 82 bp, Homo sapiens
acacgctgcgcacccgggcgcaccgcagccgatgtcgtctcgcaggtagtgctcgcgcacgatcttcatcacgccgcccgcc

SEQ ID NO: 52665 - DNA, 78 bp, Homo sapiens
cgcacccgggcgcaccgcagccgatgtcgtctcgcaggtagtgctcgcgcacgatcttcatcacgccgcccgcccggg

SEQ ID NO: 52666 - DNA, 75 bp, Homo sapiens
accgcagccgatgtcgtctcgcaggtagtgctcgcgcacgatcttcatcacgccgcccgcccgggtcttttttaa

SEQ ID NO: 52667 - DNA, 73 bp, Homo sapiens
atgtcgtctcgcaggtagtgctcgcgcacgatcttcatcacgccgcccgcccgggtcttttttaagaacgtct

SEQ ID NO: 52668 - DNA, 73 bp, Homo sapiens
aggtagtgctcgcgcacgatcttcatcacgccgcccgcccgggtcttttttaagaacgtcttggacttgagca

SEQ ID NO: 52669 - DNA, 74 bp, Homo sapiens
ctcgcgcacgatcttcatcacgccgcccgcccgggtcttttttaagaacgtcttggacttgagcatcttgcctc

SEQ ID NO: 52670 - DNA, 72 bp, Homo sapiens
acgatcttcatcacgccgcccgcccgggtcttttttaagaacgtcttggacttgagcatcttgcctcgccgc

SEQ ID NO: 52671 - DNA, 70 bp, Homo sapiens
ccgcccgcccgggtcttttttaagaacgtcttggacttgagcatcttgcctcgccgcgcagaatcctaac

SEQ ID NO: 52672 - DNA, 74 bp, Homo sapiens
gggtcttttttaagaacgtcttggacttgagcatcttgcctcgccgcgcagaatcctaaccccagcagcgctct

SEQ ID NO: 52673 - DNA, 77 bp, Homo sapiens
tttttaagaacgtcttggacttgagcatcttgcctcgccgcgcagaatcctaaccccagcagcgctcttccagcaaa

SEQ ID NO: 52674 - DNA, 81 bp, Homo sapiens
ttggacttgagcatcttgcctcgccgcgcagaatcctaaccccagcagcgctcttccagcaaaaggcgtcaatctagaata

SEQ ID NO: 52675 - DNA, 79 bp, Homo sapiens
agcatcttgcctcgccgcgcagaatcctaaccccagcagcgctcttccagcaaaaggcgtcaatctagaatacgcctaa

SEQ ID NO: 52676 - DNA, 71 bp, Homo sapiens
gaatcctaaccccagcagcgctcttccagcaaaaggcgtcaatctagaatacgcctaaccccggaggttct

SEQ ID NO: 52677 - DNA, 71 bp, Homo sapiens
cccagcagcgctcttccagcaaaaggcgtcaatctagaatacgcctaaccccggaggttcttccctttcca

SEQ ID NO: 52678 - DNA, 69 bp, Homo sapiens
agcgctcttccagcaaaaggcgtcaatctagaatacgcctaaccccggaggttcttccctttccattcc

SEQ ID NO: 52679 - DNA, 65 bp, Homo sapiens
aaaaggcgtcaatctagaatacgcctaaccccggaggttcttccctttccattcccggatattag

SEQ ID NO: 52680 - DNA, 65 bp, Homo sapiens
aatacgcctaaccccggaggttcttccctttccattcccggatattagtaacacttctcgcggga

SEQ ID NO: 52681 - DNA, 67 bp, Homo sapiens
ccggaggttcttccctttccattcccggatattagtaacacttctcgcgggaaaatgccgagataaa

SEQ ID NO: 52682 - DNA, 70 bp, Homo sapiens
ttccctttccattcccggatattagtaacacttctcgcgggaaaatgccgagataaacattggttggctc

SEQ ID NO: 52683 - DNA, 72 bp, Homo sapiens
tttccattcccggatattagtaacacttctcgcgggaaaatgccgagataaacattggttggctctctgacg

SEQ ID NO: 52684 - DNA, 72 bp, Homo sapiens
atattagtaacacttctcgcgggaaaatgccgagataaacattggttggctctctgacggccgcggggattg

SEQ ID NO: 52685 - DNA, 70 bp, Homo sapiens
cgggaaaatgccgagataaacattggttggctctctgacggccgcggggattgggcgagagtggggaggg

SEQ ID NO: 52686 - DNA, 72 bp, Homo sapiens
ccgagataaacattggttggctctctgacggccgcggggattgggcgagagtggggaggggcggcaaagcaa

SEQ ID NO: 52687 - DNA, 72 bp, Homo sapiens
aacattggttggctctctgacggccgcggggattgggcgagagtggggaggggcggcaaagcaaggcgagga

SEQ ID NO: 52688 - DNA, 72 bp, Homo sapiens
ctctctgacggccgcggggattgggcgagagtggggaggggcggcaaagcaaggcgaggagccatttccgcc

SEQ ID NO: 52689 - DNA, 70 bp, Homo sapiens
ccgcggggattgggcgagagtggggaggggcggcaaagcaaggcgaggagccatttccgcccgtggccta

SEQ ID NO: 52690 - DNA, 70 bp, Homo sapiens
attgggcgagagtggggaggggcggcaaagcaaggcgaggagccatttccgcccgtggcctaggcggggc

SEQ ID NO: 52691 - DNA, 70 bp, Homo sapiens
gggaggggcggcaaagcaaggcgaggagccatttccgcccgtggcctaggcggggcttccttctggacgc

SEQ ID NO: 52692 - DNA, 72 bp, Homo sapiens
gcaaagcaaggcgaggagccatttccgcccgtggcctaggcggggcttccttctggacgccacctcacaacg

SEQ ID NO: 52693 - DNA, 70 bp, Homo sapiens
aaggcgaggagccatttccgcccgtggcctaggcggggcttccttctggacgccacctcacaacgtgtgt

SEQ ID NO: 52694 - DNA, 71 bp, Homo sapiens
agccatttccgcccgtggcctaggcggggcttccttctggacgccacctcacaacgtgtgttgctttccgc

SEQ ID NO: 52695 - DNA, 72 bp, Homo sapiens
ccgtggcctaggcggggcttccttctggacgccacctcacaacgtgtgttgctttccgctcctcggaacatc

SEQ ID NO: 52696 - DNA, 72 bp, Homo sapiens
cggggcttccttctggacgccacctcacaacgtgtgttgctttccgctcctcggaacatccgggagagttga

SEQ ID NO: 52697 - DNA, 72 bp, Homo sapiens
ttccttctggacgccacctcacaacgtgtgttgctttccgctcctcggaacatccgggagagttgacttccg

SEQ ID NO: 52698 - DNA, 71 bp, Homo sapiens
aacgtgtgttgctttccgctcctcggaacatccgggagagttgacttccggcggcttgtgggagtgctggt

SEQ ID NO: 52699 - DNA, 74 bp, Homo sapiens
tcggaacatccgggagagttgacttccggcggcttgtgggagtgctggttctgtcctccttgcgggtgcggaga

SEQ ID NO: 52700 - DNA, 73 bp, Homo sapiens
acatccgggagagttgacttccggcggcttgtgggagtgctggttctgtcctccttgcgggtgcggagatggt

SEQ ID NO: 52701 - DNA, 73 bp, Homo sapiens
agttgacttccggcggcttgtgggagtgctggttctgtcctccttgcgggtgcggagatggttgtcttggtta

SEQ ID NO: 52702 - DNA, 71 bp, Homo sapiens
ggcttgtgggagtgctggttctgtcctccttgcgggtgcggagatggttgtcttggttacgggtcctaacg

SEQ ID NO: 52703 - DNA, 69 bp, Homo sapiens
ttctgtcctccttgcgggtgcggagatggttgtcttggttacgggtcctaacggtcccctgccttgaaa

SEQ ID NO: 52704 - DNA, 76 bp, Homo sapiens
cacaagattatacactgttaagtagcagagccagaatggacttcagaatcccaactacaatacaaatgtttattta

SEQ ID NO: 52705 - DNA, 73 bp, Homo sapiens
acactgttaagtagcagagccagaatggacttcagaatcccaactacaatacaaatgtttatttaaataaaga

SEQ ID NO: 52706 - DNA, 73 bp, Homo sapiens
gtagcagagccagaatggacttcagaatcccaactacaatacaaatgtttatttaaataaagaagaaagctat

SEQ ID NO: 52707 - DNA, 73 bp, Homo sapiens
gagccagaatggacttcagaatcccaactacaatacaaatgtttatttaaataaagaagaaagctattgtaca

SEQ ID NO: 52708 - DNA, 72 bp, Homo sapiens
gacttcagaatcccaactacaatacaaatgtttatttaaataaagaagaaagctattgtacaaatatcactc

SEQ ID NO: 52709 - DNA, 70 bp, Homo sapiens
tcccaactacaatacaaatgtttatttaaataaagaagaaagctattgtacaaatatcactcttcaggtt

SEQ ID NO: 52710 - DNA, 73 bp, Homo sapiens
caaatgtttatttaaataaagaagaaagctattgtacaaatatcactcttcaggtttagcttacagagccatg

SEQ ID NO: 52711 - DNA, 75 bp, Homo sapiens
tttaaataaagaagaaagctattgtacaaatatcactcttcaggtttagcttacagagccatggctatggattct

SEQ ID NO: 52712 - DNA, 78 bp, Homo sapiens
aagaagaaagctattgtacaaatatcactcttcaggtttagcttacagagccatggctatggattcttagctctgtaa

SEQ ID NO: 52713 - DNA, 80 bp, Homo sapiens
tattgtacaaatatcactcttcaggtttagcttacagagccatggctatggattcttagctctgtaaggaagtgcttcta

SEQ ID NO: 52714 - DNA, 77 bp, Homo sapiens
aaatatcactcttcaggtttagcttacagagccatggctatggattcttagctctgtaaggaagtgcttctataaat

SEQ ID NO: 52715 - DNA, 76 bp, Homo sapiens
tcaggtttagcttacagagccatggctatggattcttagctctgtaaggaagtgcttctataaattcttaggttta

SEQ ID NO: 52716 - DNA, 79 bp, Homo sapiens
ttagcttacagagccatggctatggattcttagctctgtaaggaagtgcttctataaattcttaggtttagagatgata

SEQ ID NO: 52717 - DNA, 76 bp, Homo sapiens
atggctatggattcttagctctgtaaggaagtgcttctataaattcttaggtttagagatgataccatctgggtac

SEQ ID NO: 52718 - DNA, 74 bp, Homo sapiens
tatggattcttagctctgtaaggaagtgcttctataaattcttaggtttagagatgataccatctgggtacctt

SEQ ID NO: 52719 - DNA, 74 bp, Homo sapiens
tagctctgtaaggaagtgcttctataaattcttaggtttagagatgataccatctgggtacctttgcttgaacc

SEQ ID NO: 52720 - DNA, 74 bp, Homo sapiens
aagtgcttctataaattcttaggtttagagatgataccatctgggtacctttgcttgaaccgtgcaaccacatc

SEQ ID NO: 52721 - DNA, 73 bp, Homo sapiens
aaattcttaggtttagagatgataccatctgggtacctttgcttgaaccgtgcaaccacatctgggtctagta

SEQ ID NO: 52722 - DNA, 75 bp, Homo sapiens
ttaggtttagagatgataccatctgggtacctttgcttgaaccgtgcaaccacatctgggtctagtaggtggatc

SEQ ID NO: 52723 - DNA, 73 bp, Homo sapiens
atctgggtacctttgcttgaaccgtgcaaccacatctgggtctagtaggtggatcccatccagttggtttcca

SEQ ID NO: 52724 - DNA, 75 bp, Homo sapiens
tttgcttgaaccgtgcaaccacatctgggtctagtaggtggatcccatccagttggtttccaagggtgatcctga

SEQ ID NO: 52725 - DNA, 74 bp, Homo sapiens
tgcaaccacatctgggtctagtaggtggatcccatccagttggtttccaagggtgatcctgaaacagtgtaaaa

SEQ ID NO: 52726 - DNA, 71 bp, Homo sapiens
acatctgggtctagtaggtggatcccatccagttggtttccaagggtgatcctgaaacagtgtaaaaggag

SEQ ID NO: 52727 - DNA, 70 bp, Homo sapiens
gtctagtaggtggatcccatccagttggtttccaagggtgatcctgaaacagtgtaaaaggaggggcaaa

SEQ ID NO: 52728 - DNA, 74 bp, Homo sapiens
aatcataaataatagccccttgaggactagcctgttctctggtcaccttaccagttgggttgcacattgtgtgg

SEQ ID NO: 52729 - DNA, 74 bp, Homo sapiens
tagccccttgaggactagcctgttctctggtcaccttaccagttgggttgcacattgtgtggtcgtccaaataa

SEQ ID NO: 52730 - DNA, 75 bp, Homo sapiens
actagcctgttctctggtcaccttaccagttgggttgcacattgtgtggtcgtccaaataactcaatcttgcgag

SEQ ID NO: 52731 - DNA, 78 bp, Homo sapiens
ttctctggtcaccttaccagttgggttgcacattgtgtggtcgtccaaataactcaatcttgcgagtgccaggagata

SEQ ID NO: 52732 - DNA, 76 bp, Homo sapiens
accttaccagttgggttgcacattgtgtggtcgtccaaataactcaatcttgcgagtgccaggagatagtctttca

SEQ ID NO: 52733 - DNA, 81 bp, Homo sapiens
ttgggttgcacattgtgtggtcgtccaaataactcaatcttgcgagtgccaggagatagtctttcaatcatgccatagatt

SEQ ID NO: 52734 - DNA, 80 bp, Homo sapiens
attgtgtggtcgtccaaataactcaatcttgcgagtgccaggagatagtctttcaatcatgccatagatttcatctggtt

SEQ ID NO: 52735 - DNA, 82 bp, Homo sapiens
tggtcgtccaaataactcaatcttgcgagtgccaggagatagtctttcaatcatgccatagatttcatctggtttatgactg

SEQ ID NO: 52736 - DNA, 80 bp, Homo sapiens
aaataactcaatcttgcgagtgccaggagatagtctttcaatcatgccatagatttcatctggtttatgactggtggaac

SEQ ID NO: 52737 - DNA, 80 bp, Homo sapiens
tgcgagtgccaggagatagtctttcaatcatgccatagatttcatctggtttatgactggtggaacgaacctaggaaata

SEQ ID NO: 52738 - DNA, 74 bp, Homo sapiens
aggagatagtctttcaatcatgccatagatttcatctggtttatgactggtggaacgaacctaggaaataaaaa

SEQ ID NO: 52739 - DNA, 74 bp, Homo sapiens
tttcaatcatgccatagatttcatctggtttatgactggtggaacgaacctaggaaataaaaactagctgcttt

SEQ ID NO: 52740 - DNA, 73 bp, Homo sapiens
atcatgccatagatttcatctggtttatgactggtggaacgaacctaggaaataaaaactagctgctttttaa

SEQ ID NO: 52741 - DNA, 76 bp, Homo sapiens
atacacccaacatgaataactgataccaacaaaaatgtggaagctttggaggcctgggaagcacatacctcagcta

SEQ ID NO: 52742 - DNA, 79 bp, Homo sapiens
atgaataactgataccaacaaaaatgtggaagctttggaggcctgggaagcacatacctcagctacgatcacatcacaa

SEQ ID NO: 52743 - DNA, 77 bp, Homo sapiens
ataccaacaaaaatgtggaagctttggaggcctgggaagcacatacctcagctacgatcacatcacaatccagaccc

SEQ ID NO: 52744 - DNA, 77 bp, Homo sapiens
aaaaatgtggaagctttggaggcctgggaagcacatacctcagctacgatcacatcacaatccagaccctggttgaa

SEQ ID NO: 52745 - DNA, 77 bp, Homo sapiens
tttggaggcctgggaagcacatacctcagctacgatcacatcacaatccagaccctggttgaagccttggggatttc

SEQ ID NO: 52746 - DNA, 78 bp, Homo sapiens
tgggaagcacatacctcagctacgatcacatcacaatccagaccctggttgaagccttggggatttcctttgacacca

SEQ ID NO: 52747 - DNA, 77 bp, Homo sapiens
atacctcagctacgatcacatcacaatccagaccctggttgaagccttggggatttcctttgacaccaacctgctca

SEQ ID NO: 52748 - DNA, 77 bp, Homo sapiens
tacgatcacatcacaatccagaccctggttgaagccttggggatttcctttgacaccaacctgctcaccacagataa

SEQ ID NO: 52749 - DNA, 75 bp, Homo sapiens
atcacaatccagaccctggttgaagccttggggatttcctttgacaccaacctgctcaccacagataacagatta

SEQ ID NO: 52750 - DNA, 72 bp, Homo sapiens
accctggttgaagccttggggatttcctttgacaccaacctgctcaccacagataacagattaccttatgaa

SEQ ID NO: 52751 - DNA, 71 bp, Homo sapiens
aagccttggggatttcctttgacaccaacctgctcaccacagataacagattaccttatgaaaccacacct

SEQ ID NO: 52752 - DNA, 71 bp, Homo sapiens
gatttcctttgacaccaacctgctcaccacagataacagattaccttatgaaaccacacctttgaactttt

SEQ ID NO: 52753 - DNA, 78 bp, Homo sapiens
atgattcttctttgtgctccacctattgaattgggccccactgctgctcaccaagcagtgttccttcccatggttcaa

SEQ ID NO: 52754 - DNA, 78 bp, Homo sapiens
tgctccacctattgaattgggccccactgctgctcaccaagcagtgttccttcccatggttcaaccagtgacctgtac

SEQ ID NO: 52755 - DNA, 75 bp, Homo sapiens
acctattgaattgggccccactgctgctcaccaagcagtgttccttcccatggttcaaccagtgacctgtacggc

SEQ ID NO: 52756 - DNA, 77 bp, Homo sapiens
ccccactgctgctcaccaagcagtgttccttcccatggttcaaccagtgacctgtacggcctgtccgaatgatgcgt

SEQ ID NO: 52757 - DNA, 79 bp, Homo sapiens
tgctcaccaagcagtgttccttcccatggttcaaccagtgacctgtacggcctgtccgaatgatgcgttgcagttgatt

SEQ ID NO: 52758 - DNA, 76 bp, Homo sapiens
aagcagtgttccttcccatggttcaaccagtgacctgtacggcctgtccgaatgatgcgttgcagttgatttgtct

SEQ ID NO: 52759 - DNA, 76 bp, Homo sapiens
ttccttcccatggttcaaccagtgacctgtacggcctgtccgaatgatgcgttgcagttgatttgtcttcacccaa

SEQ ID NO: 52760 - DNA, 77 bp, Homo sapiens
tggttcaaccagtgacctgtacggcctgtccgaatgatgcgttgcagttgatttgtcttcacccaaataatttcatc

SEQ ID NO: 52761 - DNA, 75 bp, Homo sapiens
acctgtacggcctgtccgaatgatgcgttgcagttgatttgtcttcacccaaataatttcatctacccgttcata

SEQ ID NO: 52762 - DNA, 75 bp, Homo sapiens
acggcctgtccgaatgatgcgttgcagttgatttgtcttcacccaaataatttcatctacccgttcatacctgtg

SEQ ID NO: 52763 - DNA, 74 bp, Homo sapiens
aatgatgcgttgcagttgatttgtcttcacccaaataatttcatctacccgttcatacctgtggggcataaaaa

SEQ ID NO: 52764 - DNA, 72 bp, Homo sapiens
ttgcagttgatttgtcttcacccaaataatttcatctacccgttcatacctgtggggcataaaaaagaacta

SEQ ID NO: 52765 - DNA, 70 bp, Homo sapiens
tcttcacccaaataatttcatctacccgttcatacctgtggggcataaaaaagaactagaattttagcca

SEQ ID NO: 52766 - DNA, 75 bp, Homo sapiens
agaatagtctgggagaagagaacatgtatctcactgtaacagtattaccctcaaaagaaagcaacacaaccacta

SEQ ID NO: 52767 - DNA, 72 bp, Homo sapiens
gggagaagagaacatgtatctcactgtaacagtattaccctcaaaagaaagcaacacaaccactacttaccc

SEQ ID NO: 52768 - DNA, 72 bp, Homo sapiens
atgtatctcactgtaacagtattaccctcaaaagaaagcaacacaaccactacttacccccagagatttaga

SEQ ID NO: 52769 - DNA, 70 bp, Homo sapiens
actgtaacagtattaccctcaaaagaaagcaacacaaccactacttacccccagagatttagacattctc

SEQ ID NO: 52770 - DNA, 69 bp, Homo sapiens
agtattaccctcaaaagaaagcaacacaaccactacttacccccagagatttagacattctctccccaa

SEQ ID NO: 52771 - DNA, 70 bp, Homo sapiens
aaaagaaagcaacacaaccactacttacccccagagatttagacattctctccccaactccatggcccta

SEQ ID NO: 52772 - DNA, 71 bp, Homo sapiens
aacacaaccactacttacccccagagatttagacattctctccccaactccatggccctagaaagaaatga

SEQ ID NO: 52773 - DNA, 70 bp, Homo sapiens
actacttacccccagagatttagacattctctccccaactccatggccctagaaagaaatgagttaaaca

SEQ ID NO: 52774 - DNA, 74 bp, Homo sapiens
cagagatttagacattctctccccaactccatggccctagaaagaaatgagttaaacaactatttgtatgccca

SEQ ID NO: 52775 - DNA, 72 bp, Homo sapiens
tagacattctctccccaactccatggccctagaaagaaatgagttaaacaactatttgtatgcccatatttt

SEQ ID NO: 52776 - DNA, 69 bp, Homo sapiens
tctccccaactccatggccctagaaagaaatgagttaaacaactatttgtatgcccatattttttttcc

SEQ ID NO: 52777 - DNA, 68 bp, Homo sapiens
actccatggccctagaaagaaatgagttaaacaactatttgtatgcccatattttttttcccttcaaa

SEQ ID NO: 52778 - DNA, 79 bp, Homo sapiens
attcactcttgtactgtatctgtccatacctacataactgaattgcattacctgcctgtgacccagaggaagagaaagc

SEQ ID NO: 52779 - DNA, 81 bp, Homo sapiens
tgtatctgtccatacctacataactgaattgcattacctgcctgtgacccagaggaagagaaagccatcatcctgtagtac

SEQ ID NO: 52780 - DNA, 77 bp, Homo sapiens
atacctacataactgaattgcattacctgcctgtgacccagaggaagagaaagccatcatcctgtagtacgggtatg

SEQ ID NO: 52781 - DNA, 79 bp, Homo sapiens
tacataactgaattgcattacctgcctgtgacccagaggaagagaaagccatcatcctgtagtacgggtatgttgagcc

SEQ ID NO: 52782 - DNA, 83 bp, Homo sapiens
aattgcattacctgcctgtgacccagaggaagagaaagccatcatcctgtagtacgggtatgttgagcctgcgcatctcatca

SEQ ID NO: 52783 - DNA, 83 bp, Homo sapiens
ctgtgacccagaggaagagaaagccatcatcctgtagtacgggtatgttgagcctgcgcatctcatcatctgtcagggtccca

SEQ ID NO: 52784 - DNA, 82 bp, Homo sapiens
gaggaagagaaagccatcatcctgtagtacgggtatgttgagcctgcgcatctcatcatctgtcagggtcccatagggcagt

SEQ ID NO: 52785 - DNA, 83 bp, Homo sapiens
aaagccatcatcctgtagtacgggtatgttgagcctgcgcatctcatcatctgtcagggtcccatagggcagttccatgtgaa

SEQ ID NO: 52786 - DNA, 84 bp, Homo sapiens
atcatcctgtagtacgggtatgttgagcctgcgcatctcatcatctgtcagggtcccatagggcagttccatgtgaatatccca

SEQ ID NO: 52787 - DNA, 80 bp, Homo sapiens
agtacgggtatgttgagcctgcgcatctcatcatctgtcagggtcccatagggcagttccatgtgaatatcccagggtgg

SEQ ID NO: 52788 - DNA, 85 bp, Homo sapiens
tgttgagcctgcgcatctcatcatctgtcagggtcccatagggcagttccatgtgaatatcccagggtgggtcagccatcacaac

SEQ ID NO: 52789 - DNA, 82 bp, Homo sapiens
atctcatcatctgtcagggtcccatagggcagttccatgtgaatatcccagggtgggtcagccatcacaactgcaaacttgc

SEQ ID NO: 52790 - DNA, 78 bp, Homo sapiens
atctgtcagggtcccatagggcagttccatgtgaatatcccagggtgggtcagccatcacaactgcaaacttgcccaa

SEQ ID NO: 52791 - DNA, 79 bp, Homo sapiens
ccatagggcagttccatgtgaatatcccagggtgggtcagccatcacaactgcaaacttgcccaagatactgacgtcca

SEQ ID NO: 52792 - DNA, 77 bp, Homo sapiens
agttccatgtgaatatcccagggtgggtcagccatcacaactgcaaacttgcccaagatactgacgtccaggtagcg

SEQ ID NO: 52793 - DNA, 78 bp, Homo sapiens
aatatcccagggtgggtcagccatcacaactgcaaacttgcccaagatactgacgtccaggtagcggatatcacaaca

SEQ ID NO: 52794 - DNA, 82 bp, Homo sapiens
ggtgggtcagccatcacaactgcaaacttgcccaagatactgacgtccaggtagcggatatcacaacagatccactgcataa

SEQ ID NO: 52795 - DNA, 80 bp, Homo sapiens
ccatcacaactgcaaacttgcccaagatactgacgtccaggtagcggatatcacaacagatccactgcataaagtggtat

SEQ ID NO: 52796 - DNA, 78 bp, Homo sapiens
acaactgcaaacttgcccaagatactgacgtccaggtagcggatatcacaacagatccactgcataaagtggtatttg

SEQ ID NO: 52797 - DNA, 78 bp, Homo sapiens
acttgcccaagatactgacgtccaggtagcggatatcacaacagatccactgcataaagtggtatttggtcatcttcc

SEQ ID NO: 52798 - DNA, 76 bp, Homo sapiens
atactgacgtccaggtagcggatatcacaacagatccactgcataaagtggtatttggtcatcttccctactttaa

SEQ ID NO: 52799 - DNA, 76 bp, Homo sapiens
tatcaaacataagtccgtaagttgagacgagttttctgagcagacaggtacctgaggtgggaagagtcggtctgca

SEQ ID NO: 52800 - DNA, 75 bp, Homo sapiens
aagtccgtaagttgagacgagttttctgagcagacaggtacctgaggtgggaagagtcggtctgcactggaatca

SEQ ID NO: 52801 - DNA, 78 bp, Homo sapiens
gacgagttttctgagcagacaggtacctgaggtgggaagagtcggtctgcactggaatcacctccgacactctgtgta

SEQ ID NO: 52802 - DNA, 77 bp, Homo sapiens
acaggtacctgaggtgggaagagtcggtctgcactggaatcacctccgacactctgtgtaagagcaagctcctggct

SEQ ID NO: 52803 - DNA, 78 bp, Homo sapiens
ggtgggaagagtcggtctgcactggaatcacctccgacactctgtgtaagagcaagctcctggcttggcgtgtggtct

SEQ ID NO: 52804 - DNA, 81 bp, Homo sapiens
aagagtcggtctgcactggaatcacctccgacactctgtgtaagagcaagctcctggcttggcgtgtggtctttgctgcca

SEQ ID NO: 52805 - DNA, 79 bp, Homo sapiens
actggaatcacctccgacactctgtgtaagagcaagctcctggcttggcgtgtggtctttgctgccaggggcctcagaa

SEQ ID NO: 52806 - DNA, 82 bp, Homo sapiens
aatcacctccgacactctgtgtaagagcaagctcctggcttggcgtgtggtctttgctgccaggggcctcagaatccatgca

SEQ ID NO: 52807 - DNA, 84 bp, Homo sapiens
actctgtgtaagagcaagctcctggcttggcgtgtggtctttgctgccaggggcctcagaatccatgcaagcatcaatttcata

SEQ ID NO: 52808 - DNA, 85 bp, Homo sapiens
taagagcaagctcctggcttggcgtgtggtctttgctgccaggggcctcagaatccatgcaagcatcaatttcatagtgaacata

SEQ ID NO: 52809 - DNA, 85 bp, Homo sapiens
tggcttggcgtgtggtctttgctgccaggggcctcagaatccatgcaagcatcaatttcatagtgaacatacttgcaggtatcca

SEQ ID NO: 52810 - DNA, 85 bp, Homo sapiens
tgtggtctttgctgccaggggcctcagaatccatgcaagcatcaatttcatagtgaacatacttgcaggtatccatgtggaaaca

SEQ ID NO: 52811 - DNA, 85 bp, Homo sapiens
tttgctgccaggggcctcagaatccatgcaagcatcaatttcatagtgaacatacttgcaggtatccatgtggaaacatgtatta

SEQ ID NO: 52812 - DNA, 82 bp, Homo sapiens
gggcctcagaatccatgcaagcatcaatttcatagtgaacatacttgcaggtatccatgtggaaacatgtattaaggaaaga

SEQ ID NO: 52813 - DNA, 83 bp, Homo sapiens
agaatccatgcaagcatcaatttcatagtgaacatacttgcaggtatccatgtggaaacatgtattaaggaaagagcagtcac

SEQ ID NO: 52814 - DNA, 79 bp, Homo sapiens
atcaatttcatagtgaacatacttgcaggtatccatgtggaaacatgtattaaggaaagagcagtcacctaaagactca

SEQ ID NO: 52815 - DNA, 80 bp, Homo sapiens
tttcatagtgaacatacttgcaggtatccatgtggaaacatgtattaaggaaagagcagtcacctaaagactcatcagtg

SEQ ID NO: 52816 - DNA, 77 bp, Homo sapiens
aacatacttgcaggtatccatgtggaaacatgtattaaggaaagagcagtcacctaaagactcatcagtgtgtttat

SEQ ID NO: 52817 - DNA, 76 bp, Homo sapiens
aggtatccatgtggaaacatgtattaaggaaagagcagtcacctaaagactcatcagtgtgtttattgataattcg

SEQ ID NO: 52818 - DNA, 75 bp, Homo sapiens
gaaacatgtattaaggaaagagcagtcacctaaagactcatcagtgtgtttattgataattcgtctgggaaaata

SEQ ID NO: 52819 - DNA, 71 bp, Homo sapiens
ttaaggaaagagcagtcacctaaagactcatcagtgtgtttattgataattcgtctgggaaaataaaaagg

SEQ ID NO: 52820 - DNA, 73 bp, Homo sapiens
aaagagcagtcacctaaagactcatcagtgtgtttattgataattcgtctgggaaaataaaaagggagaatca

SEQ ID NO: 52821 - DNA, 73 bp, Homo sapiens
acctaaagactcatcagtgtgtttattgataattcgtctgggaaaataaaaagggagaatcaagatggtgctc

SEQ ID NO: 52822 - DNA, 76 bp, Homo sapiens
atcagtgtgtttattgataattcgtctgggaaaataaaaagggagaatcaagatggtgctccagatgtagatccaa

SEQ ID NO: 52823 - DNA, 75 bp, Homo sapiens
tttattgataattcgtctgggaaaataaaaagggagaatcaagatggtgctccagatgtagatccaacagttcaa

SEQ ID NO: 52824 - DNA, 74 bp, Homo sapiens
taattcgtctgggaaaataaaaagggagaatcaagatggtgctccagatgtagatccaacagttcaaattccaa

SEQ ID NO: 52825 - DNA, 74 bp, Homo sapiens
ggaaaataaaaagggagaatcaagatggtgctccagatgtagatccaacagttcaaattccaaatgatttcaaa

SEQ ID NO: 52826 - DNA, 76 bp, Homo sapiens
atcaagatggtgctccagatgtagatccaacagttcaaattccaaatgatttcaaaatgtctattttattaccctc

SEQ ID NO: 52827 - DNA, 72 bp, Homo sapiens
gctccagatgtagatccaacagttcaaattccaaatgatttcaaaatgtctattttattaccctcccctaat

SEQ ID NO: 52828 - DNA, 72 bp, Homo sapiens
tccaacagttcaaattccaaatgatttcaaaatgtctattttattaccctcccctaattctatcattagagc

SEQ ID NO: 52829 - DNA, 71 bp, Homo sapiens
cagttcaaattccaaatgatttcaaaatgtctattttattaccctcccctaattctatcattagagcttcc

SEQ ID NO: 52830 - DNA, 70 bp, Homo sapiens
ccaaatgatttcaaaatgtctattttattaccctcccctaattctatcattagagcttccttcaagagtt

SEQ ID NO: 52831 - DNA, 69 bp, Homo sapiens
aaatgtctattttattaccctcccctaattctatcattagagcttccttcaagagttttaagggaggca

SEQ ID NO: 52832 - DNA, 75 bp, Homo sapiens
tcccctaattctatcattagagcttccttcaagagttttaagggaggcaggtagcatggaaatccataattcata

SEQ ID NO: 52833 - DNA, 76 bp, Homo sapiens
aattctatcattagagcttccttcaagagttttaagggaggcaggtagcatggaaatccataattcatactacaga

SEQ ID NO: 52834 - DNA, 73 bp, Homo sapiens
agcttccttcaagagttttaagggaggcaggtagcatggaaatccataattcatactacagaacaattgtaat

SEQ ID NO: 52835 - DNA, 76 bp, Homo sapiens
ttcaagagttttaagggaggcaggtagcatggaaatccataattcatactacagaacaattgtaattcctctctga

SEQ ID NO: 52836 - DNA, 75 bp, Homo sapiens
ttaagggaggcaggtagcatggaaatccataattcatactacagaacaattgtaattcctctctgagtaaagact

SEQ ID NO: 52837 - DNA, 74 bp, Homo sapiens
gtagcatggaaatccataattcatactacagaacaattgtaattcctctctgagtaaagacttggtttcctgtt

SEQ ID NO: 52838 - DNA, 72 bp, Homo sapiens
atccataattcatactacagaacaattgtaattcctctctgagtaaagacttggtttcctgttttaccactg

SEQ ID NO: 52839 - DNA, 70 bp, Homo sapiens
aattcatactacagaacaattgtaattcctctctgagtaaagacttggtttcctgttttaccactggaag

SEQ ID NO: 52840 - DNA, 73 bp, Homo sapiens
aacaattgtaattcctctctgagtaaagacttggtttcctgttttaccactggaaggcaagcagtgcaggaga

SEQ ID NO: 52841 - DNA, 73 bp, Homo sapiens
taattcctctctgagtaaagacttggtttcctgttttaccactggaaggcaagcagtgcaggagacttgggta

SEQ ID NO: 52842 - DNA, 73 bp, Homo sapiens
tgagtaaagacttggtttcctgttttaccactggaaggcaagcagtgcaggagacttgggtagaacagaataa

SEQ ID NO: 52843 - DNA, 71 bp, Homo sapiens
aagacttggtttcctgttttaccactggaaggcaagcagtgcaggagacttgggtagaacagaataaaaca

SEQ ID NO: 52844 - DNA, 73 bp, Homo sapiens
tgttttaccactggaaggcaagcagtgcaggagacttgggtagaacagaataaaacactgacctaagagttta

SEQ ID NO: 52845 - DNA, 71 bp, Homo sapiens
tggaaggcaagcagtgcaggagacttgggtagaacagaataaaacactgacctaagagtttaggttccttt

SEQ ID NO: 52846 - DNA, 70 bp, Homo sapiens
aagcagtgcaggagacttgggtagaacagaataaaacactgacctaagagtttaggttccttttctccta

SEQ ID NO: 52847 - DNA, 67 bp, Homo sapiens
aggagacttgggtagaacagaataaaacactgacctaagagtttaggttccttttctcctaagatta

SEQ ID NO: 52848 - DNA, 68 bp, Homo sapiens
agaacagaataaaacactgacctaagagtttaggttccttttctcctaagattatcctcctttcagag

SEQ ID NO: 52849 - DNA, 67 bp, Homo sapiens
gaataaaacactgacctaagagtttaggttccttttctcctaagattatcctcctttcagagtactt

SEQ ID NO: 52850 - DNA, 68 bp, Homo sapiens
tgacctaagagtttaggttccttttctcctaagattatcctcctttcagagtactttaactttcactg

SEQ ID NO: 52851 - DNA, 70 bp, Homo sapiens
agtttaggttccttttctcctaagattatcctcctttcagagtactttaactttcactgtggctcagaga

SEQ ID NO: 52852 - DNA, 77 bp, Homo sapiens
ttctcctaagattatcctcctttcagagtactttaactttcactgtggctcagagacagacatactttgctattcta

SEQ ID NO: 52853 - DNA, 75 bp, Homo sapiens
tttcagagtactttaactttcactgtggctcagagacagacatactttgctattctaagagggagggagctttta

SEQ ID NO: 52854 - DNA, 72 bp, Homo sapiens
agtactttaactttcactgtggctcagagacagacatactttgctattctaagagggagggagcttttaaaa

SEQ ID NO: 52855 - DNA, 70 bp, Homo sapiens
aaaaaaaaaactcagttatttgggagtacagcctgtattcttcccacacaatgcacttctgaaagtacac

SEQ ID NO: 52856 - DNA, 72 bp, Homo sapiens
aaaaactcagttatttgggagtacagcctgtattcttcccacacaatgcacttctgaaagtacaccttcagg

SEQ ID NO: 52857 - DNA, 75 bp, Homo sapiens
tatttgggagtacagcctgtattcttcccacacaatgcacttctgaaagtacaccttcagggtctggaggactta

SEQ ID NO: 52858 - DNA, 74 bp, Homo sapiens
agcctgtattcttcccacacaatgcacttctgaaagtacaccttcagggtctggaggacttacacaaaccataa

SEQ ID NO: 52859 - DNA, 73 bp, Homo sapiens
tattcttcccacacaatgcacttctgaaagtacaccttcagggtctggaggacttacacaaaccataaactaa

SEQ ID NO: 52860 - DNA, 72 bp, Homo sapiens
acacaatgcacttctgaaagtacaccttcagggtctggaggacttacacaaaccataaactaaataagatta

SEQ ID NO: 52861 - DNA, 71 bp, Homo sapiens
cttcagggtctggaggacttacacaaaccataaactaaataagattacagacagaaccccaatgactggaa

SEQ ID NO: 52862 - DNA, 71 bp, Homo sapiens
acttacacaaaccataaactaaataagattacagacagaaccccaatgactggaaggaatatgctgaaaag

SEQ ID NO: 52863 - DNA, 76 bp, Homo sapiens
taaataagattacagacagaaccccaatgactggaaggaatatgctgaaaaggaatggctgcttctgacaaaccca

SEQ ID NO: 52864 - DNA, 77 bp, Homo sapiens
tacagacagaaccccaatgactggaaggaatatgctgaaaaggaatggctgcttctgacaaacccatcccacctcat

SEQ ID NO: 52865 - DNA, 76 bp, Homo sapiens
aatgactggaaggaatatgctgaaaaggaatggctgcttctgacaaacccatcccacctcattcccttccaagaga

SEQ ID NO: 52866 - DNA, 74 bp, Homo sapiens
aaggaatatgctgaaaaggaatggctgcttctgacaaacccatcccacctcattcccttccaagagacctgaag

SEQ ID NO: 52867 - DNA, 80 bp, Homo sapiens
tatgctgaaaaggaatggctgcttctgacaaacccatcccacctcattcccttccaagagacctgaagtgcagcttgcga

SEQ ID NO: 52868 - DNA, 79 bp, Homo sapiens
aatggctgcttctgacaaacccatcccacctcattcccttccaagagacctgaagtgcagcttgcgacagggtcgatca

SEQ ID NO: 52869 - DNA, 80 bp, Homo sapiens
cttctgacaaacccatcccacctcattcccttccaagagacctgaagtgcagcttgcgacagggtcgatcagcatcactg

SEQ ID NO: 52870 - DNA, 82 bp, Homo sapiens
aacccatcccacctcattcccttccaagagacctgaagtgcagcttgcgacagggtcgatcagcatcactggctttcatgca

SEQ ID NO: 52871 - DNA, 81 bp, Homo sapiens
attcccttccaagagacctgaagtgcagcttgcgacagggtcgatcagcatcactggctttcatgcactcctccttggttc

SEQ ID NO: 52872 - DNA, 84 bp, Homo sapiens
aagagacctgaagtgcagcttgcgacagggtcgatcagcatcactggctttcatgcactcctccttggttccatagtcacagaa

SEQ ID NO: 52873 - DNA, 83 bp, Homo sapiens
acctgaagtgcagcttgcgacagggtcgatcagcatcactggctttcatgcactcctccttggttccatagtcacagaattct

SEQ ID NO: 52874 - DNA, 83 bp, Homo sapiens
agcttgcgacagggtcgatcagcatcactggctttcatgcactcctccttggttccatagtcacagaattcttgcacttgggc

SEQ ID NO: 52875 - DNA, 82 bp, Homo sapiens
gtcgatcagcatcactggctttcatgcactcctccttggttccatagtcacagaattcttgcacttgggcccgacctcgaga

SEQ ID NO: 52876 - DNA, 76 bp, Homo sapiens
ttcatgcactcctccttggttccatagtcacagaattcttgcacttgggcccgacctcgagagcgaaatttttcaa

SEQ ID NO: 52877 - DNA, 72 bp, Homo sapiens
actcctccttggttccatagtcacagaattcttgcacttgggcccgacctcgagagcgaaatttttcaacaa

SEQ ID NO: 52878 - DNA, 74 bp, Homo sapiens
ttccatagtcacagaattcttgcacttgggcccgacctcgagagcgaaatttttcaacaatggattgttccttg

SEQ ID NO: 52879 - DNA, 71 bp, Homo sapiens
cacttgggcccgacctcgagagcgaaatttttcaacaatggattgttccttggctgttgtagtatttaata

SEQ ID NO: 52880 - DNA, 74 bp, Homo sapiens
cgacctcgagagcgaaatttttcaacaatggattgttccttggctgttgtagtatttaatagctctaggatctc

SEQ ID NO: 52881 - DNA, 75 bp, Homo sapiens
agagcgaaatttttcaacaatggattgttccttggctgttgtagtatttaatagctctaggatctcctgactgac

SEQ ID NO: 52882 - DNA, 76 bp, Homo sapiens
aatttttcaacaatggattgttccttggctgttgtagtatttaatagctctaggatctcctgactgacctgtgaca

SEQ ID NO: 52883 - DNA, 77 bp, Homo sapiens
ttggctgttgtagtatttaatagctctaggatctcctgactgacctgtgacagaagtagccttggacttaaaatgtc

SEQ ID NO: 52884 - DNA, 75 bp, Homo sapiens
aaagctataattaagagcatattgtgagagtattttcacatgacccctaccttcttgctctgttgttccttagtg

SEQ ID NO: 52885 - DNA, 75 bp, Homo sapiens
ttaagagcatattgtgagagtattttcacatgacccctaccttcttgctctgttgttccttagtggactgttggt

SEQ ID NO: 52886 - DNA, 75 bp, Homo sapiens
tattgtgagagtattttcacatgacccctaccttcttgctctgttgttccttagtggactgttggttcagaaggc

SEQ ID NO: 52887 - DNA, 76 bp, Homo sapiens
tattttcacatgacccctaccttcttgctctgttgttccttagtggactgttggttcagaaggctctctatctcca

SEQ ID NO: 52888 - DNA, 79 bp, Homo sapiens
ccctaccttcttgctctgttgttccttagtggactgttggttcagaaggctctctatctccagatcaacatctgaggca

SEQ ID NO: 52889 - DNA, 83 bp, Homo sapiens
ttgctctgttgttccttagtggactgttggttcagaaggctctctatctccagatcaacatctgaggcagcatgtttccttga

SEQ ID NO: 52890 - DNA, 80 bp, Homo sapiens
ctgttgttccttagtggactgttggttcagaaggctctctatctccagatcaacatctgaggcagcatgtttccttgatt

SEQ ID NO: 52891 - DNA, 82 bp, Homo sapiens
ttggttcagaaggctctctatctccagatcaacatctgaggcagcatgtttccttgatttcttggctggctcctttgctggt

SEQ ID NO: 52892 - DNA, 84 bp, Homo sapiens
tctctatctccagatcaacatctgaggcagcatgtttccttgatttcttggctggctcctttgctggttccgatgctgaagagt

SEQ ID NO: 52893 - DNA, 84 bp, Homo sapiens
atctccagatcaacatctgaggcagcatgtttccttgatttcttggctggctcctttgctggttccgatgctgaagagttcaga

SEQ ID NO: 52894 - DNA, 81 bp, Homo sapiens
atctgaggcagcatgtttccttgatttcttggctggctcctttgctggttccgatgctgaagagttcagaccagagactaa

SEQ ID NO: 52895 - DNA, 77 bp, Homo sapiens
catgtttccttgatttcttggctggctcctttgctggttccgatgctgaagagttcagaccagagactaacgaactg

SEQ ID NO: 52896 - DNA, 77 bp, Homo sapiens
ttccttgatttcttggctggctcctttgctggttccgatgctgaagagttcagaccagagactaacgaactggcaaa

SEQ ID NO: 52897 - DNA, 80 bp, Homo sapiens
gctggctcctttgctggttccgatgctgaagagttcagaccagagactaacgaactggcaaaggcagctactgtagtcga

SEQ ID NO: 52898 - DNA, 78 bp, Homo sapiens
tttgctggttccgatgctgaagagttcagaccagagactaacgaactggcaaaggcagctactgtagtcgagtcctgt

SEQ ID NO: 52899 - DNA, 79 bp, Homo sapiens
ggttccgatgctgaagagttcagaccagagactaacgaactggcaaaggcagctactgtagtcgagtcctgttctgcac

SEQ ID NO: 52900 - DNA, 78 bp, Homo sapiens
aagagttcagaccagagactaacgaactggcaaaggcagctactgtagtcgagtcctgttctgcacgccgcttctgcc

SEQ ID NO: 52901 - DNA, 79 bp, Homo sapiens
agaccagagactaacgaactggcaaaggcagctactgtagtcgagtcctgttctgcacgccgcttctgccctgtgacag

SEQ ID NO: 52902 - DNA, 79 bp, Homo sapiens
actaacgaactggcaaaggcagctactgtagtcgagtcctgttctgcacgccgcttctgccctgtgacagtccctgcta

SEQ ID NO: 52903 - DNA, 77 bp, Homo sapiens
aaaggcagctactgtagtcgagtcctgttctgcacgccgcttctgccctgtgacagtccctgctacctccccagggc

SEQ ID NO: 52904 - DNA, 75 bp, Homo sapiens
tactgtagtcgagtcctgttctgcacgccgcttctgccctgtgacagtccctgctacctccccagggcccttctt

SEQ ID NO: 52905 - DNA, 76 bp, Homo sapiens
gtcgagtcctgttctgcacgccgcttctgccctgtgacagtccctgctacctccccagggcccttcttttctgcca

SEQ ID NO: 52906 - DNA, 80 bp, Homo sapiens
ttctgccctgtgacagtccctgctacctccccagggcccttcttttctgccacagcacccatcatggcagagagcttgga

SEQ ID NO: 52907 - DNA, 82 bp, Homo sapiens
tgacagtccctgctacctccccagggcccttcttttctgccacagcacccatcatggcagagagcttggaatggtcagcata

SEQ ID NO: 52908 - DNA, 80 bp, Homo sapiens
tgctacctccccagggcccttcttttctgccacagcacccatcatggcagagagcttggaatggtcagcataggttacaa

SEQ ID NO: 52909 - DNA, 83 bp, Homo sapiens
cagggcccttcttttctgccacagcacccatcatggcagagagcttggaatggtcagcataggttacaagagtaggatgtgca

SEQ ID NO: 52910 - DNA, 87 bp, Homo sapiens
tcttttctgccacagcacccatcatggcagagagcttggaatggtcagcataggttacaagagtaggatgtgcatcatcttgtagga

SEQ ID NO: 52911 - DNA, 84 bp, Homo sapiens
tcatggcagagagcttggaatggtcagcataggttacaagagtaggatgtgcatcatcttgtaggagacctcgctttacctcaa

SEQ ID NO: 52912 - DNA, 80 bp, Homo sapiens
agagcttggaatggtcagcataggttacaagagtaggatgtgcatcatcttgtaggagacctcgctttacctcaatcaac

SEQ ID NO: 52913 - DNA, 82 bp, Homo sapiens
tggaatggtcagcataggttacaagagtaggatgtgcatcatcttgtaggagacctcgctttacctcaatcaactcctgagc

SEQ ID NO: 52914 - DNA, 79 bp, Homo sapiens
ataggttacaagagtaggatgtgcatcatcttgtaggagacctcgctttacctcaatcaactcctgagctgcaaacttc

SEQ ID NO: 52915 - DNA, 80 bp, Homo sapiens
atgtgcatcatcttgtaggagacctcgctttacctcaatcaactcctgagctgcaaacttctgcaggaggctttctaccc

SEQ ID NO: 52916 - DNA, 76 bp, Homo sapiens
atcttgtaggagacctcgctttacctcaatcaactcctgagctgcaaacttctgcaggaggctttctaccccatct

SEQ ID NO: 52917 - DNA, 78 bp, Homo sapiens
agacctcgctttacctcaatcaactcctgagctgcaaacttctgcaggaggctttctaccccatcttgagtggcagga

SEQ ID NO: 52918 - DNA, 83 bp, Homo sapiens
ttacctcaatcaactcctgagctgcaaacttctgcaggaggctttctaccccatcttgagtggcaggagcatctggctagaga

SEQ ID NO: 52919 - DNA, 79 bp, Homo sapiens
aactcctgagctgcaaacttctgcaggaggctttctaccccatcttgagtggcaggagcatctggctagagaacgaggg

SEQ ID NO: 52920 - DNA, 77 bp, Homo sapiens
aaacttctgcaggaggctttctaccccatcttgagtggcaggagcatctggctagagaacgaggggaggtatgggca

SEQ ID NO: 52921 - DNA, 76 bp, Homo sapiens
aggaggctttctaccccatcttgagtggcaggagcatctggctagagaacgaggggaggtatgggcaataagacac

SEQ ID NO: 52922 - DNA, 78 bp, Homo sapiens
ttctaccccatcttgagtggcaggagcatctggctagagaacgaggggaggtatgggcaataagacactgaccgtgaa

SEQ ID NO: 52923 - DNA, 78 bp, Homo sapiens
atcttgagtggcaggagcatctggctagagaacgaggggaggtatgggcaataagacactgaccgtgaactgaaaata

SEQ ID NO: 52924 - DNA, 74 bp, Homo sapiens
aggagcatctggctagagaacgaggggaggtatgggcaataagacactgaccgtgaactgaaaataagtggtaa

SEQ ID NO: 52925 - DNA, 72 bp, Homo sapiens
tggctagagaacgaggggaggtatgggcaataagacactgaccgtgaactgaaaataagtggtaaatcctaa

SEQ ID NO: 52926 - DNA, 72 bp, Homo sapiens
aggtatgggcaataagacactgaccgtgaactgaaaataagtggtaaatcctaactctgtcaggtcattacc

SEQ ID NO: 52927 - DNA, 74 bp, Homo sapiens
ataagacactgaccgtgaactgaaaataagtggtaaatcctaactctgtcaggtcattaccgtggagatggcaa

SEQ ID NO: 52928 - DNA, 75 bp, Homo sapiens
accgtgaactgaaaataagtggtaaatcctaactctgtcaggtcattaccgtggagatggcaagacagatggaca

SEQ ID NO: 52929 - DNA, 79 bp, Homo sapiens
actgaaaataagtggtaaatcctaactctgtcaggtcattaccgtggagatggcaagacagatggacacagcatcagtg

SEQ ID NO: 52930 - DNA, 84 bp, Homo sapiens
cctaactctgtcaggtcattaccgtggagatggcaagacagatggacacagcatcagtgggcaatgttaaggccagatcagaga

SEQ ID NO: 52931 - DNA, 84 bp, Homo sapiens
tcattaccgtggagatggcaagacagatggacacagcatcagtgggcaatgttaaggccagatcagagaggtggtgtagcaact

SEQ ID NO: 52932 - DNA, 85 bp, Homo sapiens
tggagatggcaagacagatggacacagcatcagtgggcaatgttaaggccagatcagagaggtggtgtagcaacttcttctctaa

SEQ ID NO: 52933 - DNA, 82 bp, Homo sapiens
aagacagatggacacagcatcagtgggcaatgttaaggccagatcagagaggtggtgtagcaacttcttctctaactcagga

SEQ ID NO: 52934 - DNA, 82 bp, Homo sapiens
acacagcatcagtgggcaatgttaaggccagatcagagaggtggtgtagcaacttcttctctaactcaggatctgtagctaa

SEQ ID NO: 52935 - DNA, 80 bp, Homo sapiens
aatgttaaggccagatcagagaggtggtgtagcaacttcttctctaactcaggatctgtagctaattcaggaactgctga

SEQ ID NO: 52936 - DNA, 83 bp, Homo sapiens
gatcagagaggtggtgtagcaacttcttctctaactcaggatctgtagctaattcaggaactgctgaagctgtgctgggctta

SEQ ID NO: 52937 - DNA, 79 bp, Homo sapiens
agaggtggtgtagcaacttcttctctaactcaggatctgtagctaattcaggaactgctgaagctgtgctgggcttagg

SEQ ID NO: 52938 - DNA, 78 bp, Homo sapiens
aacttcttctctaactcaggatctgtagctaattcaggaactgctgaagctgtgctgggcttagggccaccagaggtg

SEQ ID NO: 52939 - DNA, 81 bp, Homo sapiens
ttctctaactcaggatctgtagctaattcaggaactgctgaagctgtgctgggcttagggccaccagaggtgggtgcagta

SEQ ID NO: 52940 - DNA, 82 bp, Homo sapiens
atctgtagctaattcaggaactgctgaagctgtgctgggcttagggccaccagaggtgggtgcagtaggcactgggctgtca

SEQ ID NO: 52941 - DNA, 76 bp, Homo sapiens
aagctgtgctgggcttagggccaccagaggtgggtgcagtaggcactgggctgtcactacggaaggttggagacaa

SEQ ID NO: 52942 - DNA, 78 bp, Homo sapiens
ttagggccaccagaggtgggtgcagtaggcactgggctgtcactacggaaggttggagacaatgctgcctctggattc

SEQ ID NO: 52943 - DNA, 79 bp, Homo sapiens
cagaggtgggtgcagtaggcactgggctgtcactacggaaggttggagacaatgctgcctctggattccgtagatctaa

SEQ ID NO: 52944 - DNA, 80 bp, Homo sapiens
tgggtgcagtaggcactgggctgtcactacggaaggttggagacaatgctgcctctggattccgtagatctaagaatgaa

SEQ ID NO: 52945 - DNA, 74 bp, Homo sapiens
aaggttggagacaatgctgcctctggattccgtagatctaagaatgaagagaagtgaaaatgaaaaaaggcaac

SEQ ID NO: 52946 - DNA, 70 bp, Homo sapiens
cccgtcctccccggttgagcctcggccccaacagcccagtgcctcacccaagtgccccgagtcctgcttc

SEQ ID NO: 52947 - DNA, 74 bp, Homo sapiens
cccggttgagcctcggccccaacagcccagtgcctcacccaagtgccccgagtcctgcttccgcctccgctgca

SEQ ID NO: 52948 - DNA, 78 bp, Homo sapiens
tcggccccaacagcccagtgcctcacccaagtgccccgagtcctgcttccgcctccgctgcagcctctcccgcagaga

SEQ ID NO: 52949 - DNA, 80 bp, Homo sapiens
aacagcccagtgcctcacccaagtgccccgagtcctgcttccgcctccgctgcagcctctcccgcagagagtccagctgc

SEQ ID NO: 52950 - DNA, 80 bp, Homo sapiens
agtgcctcacccaagtgccccgagtcctgcttccgcctccgctgcagcctctcccgcagagagtccagctgcttcttgtg

SEQ ID NO: 52951 - DNA, 80 bp, Homo sapiens
aagtgccccgagtcctgcttccgcctccgctgcagcctctcccgcagagagtccagctgcttcttgtgggcctggataga

SEQ ID NO: 52952 - DNA, 82 bp, Homo sapiens
agtcctgcttccgcctccgctgcagcctctcccgcagagagtccagctgcttcttgtgggcctggatagagctccacgtgtc

SEQ ID NO: 52953 - DNA, 83 bp, Homo sapiens
gcctccgctgcagcctctcccgcagagagtccagctgcttcttgtgggcctggatagagctccacgtgtccgacatcctagtc

SEQ ID NO: 52954 - DNA, 83 bp, Homo sapiens
ctgcagcctctcccgcagagagtccagctgcttcttgtgggcctggatagagctccacgtgtccgacatcctagtctcccagc

SEQ ID NO: 52955 - DNA, 82 bp, Homo sapiens
tctcccgcagagagtccagctgcttcttgtgggcctggatagagctccacgtgtccgacatcctagtctcccagccctgaca

SEQ ID NO: 52956 - DNA, 80 bp, Homo sapiens
tccagctgcttcttgtgggcctggatagagctccacgtgtccgacatcctagtctcccagccctgacacctctcgaataa

SEQ ID NO: 52957 - DNA, 77 bp, Homo sapiens
ttcttgtgggcctggatagagctccacgtgtccgacatcctagtctcccagccctgacacctctcgaataaggcgcg

SEQ ID NO: 52958 - DNA, 78 bp, Homo sapiens
tggatagagctccacgtgtccgacatcctagtctcccagccctgacacctctcgaataaggcgcggcggactagcacc

SEQ ID NO: 52959 - DNA, 76 bp, Homo sapiens
agctccacgtgtccgacatcctagtctcccagccctgacacctctcgaataaggcgcggcggactagcacctccca

SEQ ID NO: 52960 - DNA, 79 bp, Homo sapiens
tgtccgacatcctagtctcccagccctgacacctctcgaataaggcgcggcggactagcacctcccagcactcgctcca

SEQ ID NO: 52961 - DNA, 79 bp, Homo sapiens
tagtctcccagccctgacacctctcgaataaggcgcggcggactagcacctcccagcactcgctccaggatatagccaa

SEQ ID NO: 52962 - DNA, 79 bp, Homo sapiens
cctgacacctctcgaataaggcgcggcggactagcacctcccagcactcgctccaggatatagccaattctcacgcgga

SEQ ID NO: 52963 - DNA, 77 bp, Homo sapiens
acctctcgaataaggcgcggcggactagcacctcccagcactcgctccaggatatagccaattctcacgcggacacc

SEQ ID NO: 52964 - DNA, 77 bp, Homo sapiens
taaggcgcggcggactagcacctcccagcactcgctccaggatatagccaattctcacgcggacaccccgaaggcta

SEQ ID NO: 52965 - DNA, 73 bp, Homo sapiens
actagcacctcccagcactcgctccaggatatagccaattctcacgcggacaccccgaaggctaaccggaaaa

SEQ ID NO: 52966 - DNA, 72 bp, Homo sapiens
acctcccagcactcgctccaggatatagccaattctcacgcggacaccccgaaggctaaccggaaaatgacc

SEQ ID NO: 52967 - DNA, 74 bp, Homo sapiens
acagtcggcctctctgccccctagaaccgcccccagcttctgtctcacttcctctccagaggcgggccctgagc

SEQ ID NO: 52968 - DNA, 74 bp, Homo sapiens
tctctgccccctagaaccgcccccagcttctgtctcacttcctctccagaggcgggccctgagccggcacctcc

SEQ ID NO: 52969 - DNA, 72 bp, Homo sapiens
tagaaccgcccccagcttctgtctcacttcctctccagaggcgggccctgagccggcacctcccctttcgga

SEQ ID NO: 52970 - DNA, 75 bp, Homo sapiens
agcttctgtctcacttcctctccagaggcgggccctgagccggcacctcccctttcggacagctcaagggactca

SEQ ID NO: 52971 - DNA, 74 bp, Homo sapiens
cacttcctctccagaggcgggccctgagccggcacctcccctttcggacagctcaagggactcagccaactggc

SEQ ID NO: 52972 - DNA, 76 bp, Homo sapiens
tctccagaggcgggccctgagccggcacctcccctttcggacagctcaagggactcagccaactggctcacgcctc

SEQ ID NO: 52973 - DNA, 74 bp, Homo sapiens
ggccctgagccggcacctcccctttcggacagctcaagggactcagccaactggctcacgcctccccttcagct

SEQ ID NO: 52974 - DNA, 75 bp, Homo sapiens
agccggcacctcccctttcggacagctcaagggactcagccaactggctcacgcctccccttcagcttctcttca

SEQ ID NO: 52975 - DNA, 78 bp, Homo sapiens
ctttcggacagctcaagggactcagccaactggctcacgcctccccttcagcttctcttcacgcactccaagatctaa

SEQ ID NO: 52976 - DNA, 77 bp, Homo sapiens
agctcaagggactcagccaactggctcacgcctccccttcagcttctcttcacgcactccaagatctaaaccgagaa

SEQ ID NO: 52977 - DNA, 76 bp, Homo sapiens
ctcagccaactggctcacgcctccccttcagcttctcttcacgcactccaagatctaaaccgagaatcgaaactaa

SEQ ID NO: 52978 - DNA, 74 bp, Homo sapiens
aactggctcacgcctccccttcagcttctcttcacgcactccaagatctaaaccgagaatcgaaactaagctgg

SEQ ID NO: 52979 - DNA, 73 bp, Homo sapiens
acgcctccccttcagcttctcttcacgcactccaagatctaaaccgagaatcgaaactaagctggggtccatg

SEQ ID NO: 52980 - DNA, 76 bp, Homo sapiens
cttcagcttctcttcacgcactccaagatctaaaccgagaatcgaaactaagctggggtccatggagcctgcaccc

SEQ ID NO: 52981 - DNA, 76 bp, Homo sapiens
tcttcacgcactccaagatctaaaccgagaatcgaaactaagctggggtccatggagcctgcacccgcccgatctc

SEQ ID NO: 52982 - DNA, 73 bp, Homo sapiens
tccaagatctaaaccgagaatcgaaactaagctggggtccatggagcctgcacccgcccgatctccgaggccc

SEQ ID NO: 52983 - DNA, 73 bp, Homo sapiens
taaaccgagaatcgaaactaagctggggtccatggagcctgcacccgcccgatctccgaggccccagcaggac

SEQ ID NO: 52984 - DNA, 71 bp, Homo sapiens
atcgaaactaagctggggtccatggagcctgcacccgcccgatctccgaggccccagcaggaccccgcccg

SEQ ID NO: 52985 - DNA, 71 bp, Homo sapiens
gggtccatggagcctgcacccgcccgatctccgaggccccagcaggaccccgcccggccccaggagcccac

SEQ ID NO: 52986 - DNA, 73 bp, Homo sapiens
atggagcctgcacccgcccgatctccgaggccccagcaggaccccgcccggccccaggagcccaccatgcctc

SEQ ID NO: 52987 - DNA, 69 bp, Homo sapiens
ccgcccgatctccgaggccccagcaggaccccgcccggccccaggagcccaccatgcctccccccgaga

SEQ ID NO: 52988 - DNA, 69 bp, Homo sapiens
tccgaggccccagcaggaccccgcccggccccaggagcccaccatgcctccccccgagaccccctctga

SEQ ID NO: 52989 - DNA, 69 bp, Homo sapiens
ccagcaggaccccgcccggccccaggagcccaccatgcctccccccgagaccccctctgaaggccgcca

SEQ ID NO: 52990 - DNA, 68 bp, Homo sapiens
cccgcccggccccaggagcccaccatgcctccccccgagaccccctctgaaggccgccagcccagccc

SEQ ID NO: 52991 - DNA, 71 bp, Homo sapiens
ggccccaggagcccaccatgcctccccccgagaccccctctgaaggccgccagcccagccccagccccagc

SEQ ID NO: 52992 - DNA, 71 bp, Homo sapiens
gcttttgggacttctccaggcctcacctgcctctctggtcccccagcgagcccccgcttcggaggaggagt

SEQ ID NO: 52993 - DNA, 71 bp, Homo sapiens
acttctccaggcctcacctgcctctctggtcccccagcgagcccccgcttcggaggaggagttccagtttc

SEQ ID NO: 52994 - DNA, 77 bp, Homo sapiens
cctcacctgcctctctggtcccccagcgagcccccgcttcggaggaggagttccagtttctgcgctgccagcaatgc

SEQ ID NO: 52995 - DNA, 76 bp, Homo sapiens
ctctctggtcccccagcgagcccccgcttcggaggaggagttccagtttctgcgctgccagcaatgccaggcggaa

SEQ ID NO: 52996 - DNA, 76 bp, Homo sapiens
ccccagcgagcccccgcttcggaggaggagttccagtttctgcgctgccagcaatgccaggcggaagccaagtgcc

SEQ ID NO: 52997 - DNA, 77 bp, Homo sapiens
agcccccgcttcggaggaggagttccagtttctgcgctgccagcaatgccaggcggaagccaagtgcccgaagctgc

SEQ ID NO: 52998 - DNA, 83 bp, Homo sapiens
ttcggaggaggagttccagtttctgcgctgccagcaatgccaggcggaagccaagtgcccgaagctgctgccttgtctgcaca

SEQ ID NO: 52999 - DNA, 86 bp, Homo sapiens
agttccagtttctgcgctgccagcaatgccaggcggaagccaagtgcccgaagctgctgccttgtctgcacacgctgtgctcagga

SEQ ID NO: 53000 - DNA, 88 bp, Homo sapiens
gtttctgcgctgccagcaatgccaggcggaagccaagtgcccgaagctgctgccttgtctgcacacgctgtgctcaggatgcctggag

SEQ ID NO: 53001 - DNA, 88 bp, Homo sapiens
agcaatgccaggcggaagccaagtgcccgaagctgctgccttgtctgcacacgctgtgctcaggatgcctggaggcgtcgggcatgca

SEQ ID NO: 53002 - DNA, 85 bp, Homo sapiens
aggcggaagccaagtgcccgaagctgctgccttgtctgcacacgctgtgctcaggatgcctggaggcgtcgggcatgcagtgccc

SEQ ID NO: 53003 - DNA, 88 bp, Homo sapiens
agccaagtgcccgaagctgctgccttgtctgcacacgctgtgctcaggatgcctggaggcgtcgggcatgcagtgccccatctgccag

SEQ ID NO: 53004 - DNA, 87 bp, Homo sapiens
aagctgctgccttgtctgcacacgctgtgctcaggatgcctggaggcgtcgggcatgcagtgccccatctgccaggcgccctggccc

SEQ ID NO: 53005 - DNA, 87 bp, Homo sapiens
ttgtctgcacacgctgtgctcaggatgcctggaggcgtcgggcatgcagtgccccatctgccaggcgccctggcccctaggtgcaga

SEQ ID NO: 53006 - DNA, 84 bp, Homo sapiens
acacgctgtgctcaggatgcctggaggcgtcgggcatgcagtgccccatctgccaggcgccctggcccctaggtgcagacacac

SEQ ID NO: 53007 - DNA, 79 bp, Homo sapiens
aggatgcctggaggcgtcgggcatgcagtgccccatctgccaggcgccctggcccctaggtgcagacacacccgccctg

SEQ ID NO: 53008 - DNA, 78 bp, Homo sapiens
cctggaggcgtcgggcatgcagtgccccatctgccaggcgccctggcccctaggtgcagacacacccgccctggataa

SEQ ID NO: 53009 - DNA, 78 bp, Homo sapiens
gcatgcagtgccccatctgccaggcgccctggcccctaggtgcagacacacccgccctggataacgtctttttcgaga

SEQ ID NO: 53010 - DNA, 75 bp, Homo sapiens
ccccatctgccaggcgccctggcccctaggtgcagacacacccgccctggataacgtctttttcgagagtctgca

SEQ ID NO: 53011 - DNA, 75 bp, Homo sapiens
caggcgccctggcccctaggtgcagacacacccgccctggataacgtctttttcgagagtctgcagcggcgcctg

SEQ ID NO: 53012 - DNA, 75 bp, Homo sapiens
tggcccctaggtgcagacacacccgccctggataacgtctttttcgagagtctgcagcggcgcctgtcggtgtac

SEQ ID NO: 53013 - DNA, 78 bp, Homo sapiens
tgcagacacacccgccctggataacgtctttttcgagagtctgcagcggcgcctgtcggtgtaccggcagattgtgga

SEQ ID NO: 53014 - DNA, 76 bp, Homo sapiens
acacacccgccctggataacgtctttttcgagagtctgcagcggcgcctgtcggtgtaccggcagattgtggatgc

SEQ ID NO: 53015 - DNA, 81 bp, Homo sapiens
cctggataacgtctttttcgagagtctgcagcggcgcctgtcggtgtaccggcagattgtggatgcgcaggctgtgtgcac

SEQ ID NO: 53016 - DNA, 83 bp, Homo sapiens
tctttttcgagagtctgcagcggcgcctgtcggtgtaccggcagattgtggatgcgcaggctgtgtgcacccgctgcaaagag

SEQ ID NO: 53017 - DNA, 84 bp, Homo sapiens
tctgcagcggcgcctgtcggtgtaccggcagattgtggatgcgcaggctgtgtgcacccgctgcaaagagtcggccgacttctg

SEQ ID NO: 53018 - DNA, 80 bp, Homo sapiens
cgcctgtcggtgtaccggcagattgtggatgcgcaggctgtgtgcacccgctgcaaagagtcggccgacttctggtgctt

SEQ ID NO: 53019 - DNA, 83 bp, Homo sapiens
tcggtgtaccggcagattgtggatgcgcaggctgtgtgcacccgctgcaaagagtcggccgacttctggtgctttgagtgcga

SEQ ID NO: 53020 - DNA, 86 bp, Homo sapiens
attgtggatgcgcaggctgtgtgcacccgctgcaaagagtcggccgacttctggtgctttgagtgcgagcagctcctctgcgccaa

SEQ ID NO: 53021 - DNA, 86 bp, Homo sapiens
atgcgcaggctgtgtgcacccgctgcaaagagtcggccgacttctggtgctttgagtgcgagcagctcctctgcgccaagtgcttc

SEQ ID NO: 53022 - DNA, 85 bp, Homo sapiens
tgtgcacccgctgcaaagagtcggccgacttctggtgctttgagtgcgagcagctcctctgcgccaagtgcttcgaggcacacca

SEQ ID NO: 53023 - DNA, 82 bp, Homo sapiens
ctgcaaagagtcggccgacttctggtgctttgagtgcgagcagctcctctgcgccaagtgcttcgaggcacaccagtggttc

SEQ ID NO: 53024 - DNA, 81 bp, Homo sapiens
agagtcggccgacttctggtgctttgagtgcgagcagctcctctgcgccaagtgcttcgaggcacaccagtggttcctcaa

SEQ ID NO: 53025 - DNA, 81 bp, Homo sapiens
acttctggtgctttgagtgcgagcagctcctctgcgccaagtgcttcgaggcacaccagtggttcctcaagcacgaggccc

SEQ ID NO: 53026 - DNA, 79 bp, Homo sapiens
ctttgagtgcgagcagctcctctgcgccaagtgcttcgaggcacaccagtggttcctcaagcacgaggcccggccccta

SEQ ID NO: 53027 - DNA, 80 bp, Homo sapiens
agctcctctgcgccaagtgcttcgaggcacaccagtggttcctcaagcacgaggcccggcccctagcagagctgcgcaac

SEQ ID NO: 53028 - DNA, 80 bp, Homo sapiens
ctctgcgccaagtgcttcgaggcacaccagtggttcctcaagcacgaggcccggcccctagcagagctgcgcaaccagtc

SEQ ID NO: 53029 - DNA, 78 bp, Homo sapiens
ttcgaggcacaccagtggttcctcaagcacgaggcccggcccctagcagagctgcgcaaccagtcggtgcgtgagttc

SEQ ID NO: 53030 - DNA, 76 bp, Homo sapiens
acaccagtggttcctcaagcacgaggcccggcccctagcagagctgcgcaaccagtcggtgcgtgagttcctggac

SEQ ID NO: 53031 - DNA, 77 bp, Homo sapiens
ttcctcaagcacgaggcccggcccctagcagagctgcgcaaccagtcggtgcgtgagttcctggacggcacccgcaa

SEQ ID NO: 53032 - DNA, 76 bp, Homo sapiens
gaggcccggcccctagcagagctgcgcaaccagtcggtgcgtgagttcctggacggcacccgcaagaccaacaaca

SEQ ID NO: 53033 - DNA, 79 bp, Homo sapiens
ccctagcagagctgcgcaaccagtcggtgcgtgagttcctggacggcacccgcaagaccaacaacatcttctgctccaa

SEQ ID NO: 53034 - DNA, 72 bp, Homo sapiens
aaccagtcggtgcgtgagttcctggacggcacccgcaagaccaacaacatcttctgctccaaccccaaccac

SEQ ID NO: 53035 - DNA, 71 bp, Homo sapiens
cgtgagttcctggacggcacccgcaagaccaacaacatcttctgctccaaccccaaccaccgcacccctac

SEQ ID NO: 53036 - DNA, 72 bp, Homo sapiens
acccgcaagaccaacaacatcttctgctccaaccccaaccaccgcacccctacgctgaccaggtgagtaggc

SEQ ID NO: 53037 - DNA, 72 bp, Homo sapiens
aacaacatcttctgctccaaccccaaccaccgcacccctacgctgaccaggtgagtaggccggcacagggtg

SEQ ID NO: 53038 - DNA, 71 bp, Homo sapiens
atcttctgctccaaccccaaccaccgcacccctacgctgaccaggtgagtaggccggcacagggtggggtg

SEQ ID NO: 53039 - DNA, 74 bp, Homo sapiens
aggaaaaagtcaggagagtcctaacccaggccaaccttgtgtgtccacagcatctactgccgaggatgttccaa

SEQ ID NO: 53040 - DNA, 79 bp, Homo sapiens
aggagagtcctaacccaggccaaccttgtgtgtccacagcatctactgccgaggatgttccaagccgctgtgctgctcg

SEQ ID NO: 53041 - DNA, 83 bp, Homo sapiens
taacccaggccaaccttgtgtgtccacagcatctactgccgaggatgttccaagccgctgtgctgctcgtgcgcgctccttga

SEQ ID NO: 53042 - DNA, 86 bp, Homo sapiens
ccaaccttgtgtgtccacagcatctactgccgaggatgttccaagccgctgtgctgctcgtgcgcgctccttgacagcagccacag

SEQ ID NO: 53043 - DNA, 92 bp, Homo sapiens
atctactgccgaggatgttccaagccgctgtgctgctcgtgcgcgctccttgacagcagccacagtgagctcaagtgcgacatcagcgcaga

SEQ ID NO: 53044 - DNA, 94 bp, Homo sapiens
atgttccaagccgctgtgctgctcgtgcgcgctccttgacagcagccacagtgagctcaagtgcgacatcagcgcagagatccagcagcgacag

SEQ ID NO: 53045 - DNA, 94 bp, Homo sapiens
ccaagccgctgtgctgctcgtgcgcgctccttgacagcagccacagtgagctcaagtgcgacatcagcgcagagatccagcagcgacaggagga

SEQ ID NO: 53046 - DNA, 95 bp, Homo sapiens
ctgctcgtgcgcgctccttgacagcagccacagtgagctcaagtgcgacatcagcgcagagatccagcagcgacaggaggagctggacgccatga

SEQ ID NO: 53047 - DNA, 96 bp, Homo sapiens
gctccttgacagcagccacagtgagctcaagtgcgacatcagcgcagagatccagcagcgacaggaggagctggacgccatgacgcaggcgctgca

SEQ ID NO: 53048 - DNA, 95 bp, Homo sapiens
agcagccacagtgagctcaagtgcgacatcagcgcagagatccagcagcgacaggaggagctggacgccatgacgcaggcgctgcaggagcagga

SEQ ID NO: 53049 - DNA, 93 bp, Homo sapiens
gtgagctcaagtgcgacatcagcgcagagatccagcagcgacaggaggagctggacgccatgacgcaggcgctgcaggagcaggatagtgcct

SEQ ID NO: 53050 - DNA, 91 bp, Homo sapiens
ctcaagtgcgacatcagcgcagagatccagcagcgacaggaggagctggacgccatgacgcaggcgctgcaggagcaggatagtgcctttg

SEQ ID NO: 53051 - DNA, 89 bp, Homo sapiens
atcagcgcagagatccagcagcgacaggaggagctggacgccatgacgcaggcgctgcaggagcaggatagtgcctttggcgcggttca

SEQ ID NO: 53052 - DNA, 89 bp, Homo sapiens
atccagcagcgacaggaggagctggacgccatgacgcaggcgctgcaggagcaggatagtgcctttggcgcggttcacgcgcagatgca

SEQ ID NO: 53053 - DNA, 85 bp, Homo sapiens
acaggaggagctggacgccatgacgcaggcgctgcaggagcaggatagtgcctttggcgcggttcacgcgcagatgcacgcggcc

SEQ ID NO: 53054 - DNA, 85 bp, Homo sapiens
agctggacgccatgacgcaggcgctgcaggagcaggatagtgcctttggcgcggttcacgcgcagatgcacgcggccgtcggcca

SEQ ID NO: 53055 - DNA, 84 bp, Homo sapiens
ccatgacgcaggcgctgcaggagcaggatagtgcctttggcgcggttcacgcgcagatgcacgcggccgtcggccagctgggcc

SEQ ID NO: 53056 - DNA, 84 bp, Homo sapiens
gctgcaggagcaggatagtgcctttggcgcggttcacgcgcagatgcacgcggccgtcggccagctgggccgcgcgcgtgccga

SEQ ID NO: 53057 - DNA, 81 bp, Homo sapiens
aggagcaggatagtgcctttggcgcggttcacgcgcagatgcacgcggccgtcggccagctgggccgcgcgcgtgccgaga

SEQ ID NO: 53058 - DNA, 80 bp, Homo sapiens
tagtgcctttggcgcggttcacgcgcagatgcacgcggccgtcggccagctgggccgcgcgcgtgccgagaccgaggagc

SEQ ID NO: 53059 - DNA, 83 bp, Homo sapiens
ggttcacgcgcagatgcacgcggccgtcggccagctgggccgcgcgcgtgccgagaccgaggagctgatccgcgagcgcgtgc

SEQ ID NO: 53060 - DNA, 82 bp, Homo sapiens
cagatgcacgcggccgtcggccagctgggccgcgcgcgtgccgagaccgaggagctgatccgcgagcgcgtgcgccaggtgg

SEQ ID NO: 53061 - DNA, 79 bp, Homo sapiens
acgcggccgtcggccagctgggccgcgcgcgtgccgagaccgaggagctgatccgcgagcgcgtgcgccaggtggtagc

SEQ ID NO: 53062 - DNA, 82 bp, Homo sapiens
ccagctgggccgcgcgcgtgccgagaccgaggagctgatccgcgagcgcgtgcgccaggtggtagctcacgtgcgggctcag

SEQ ID NO: 53063 - DNA, 85 bp, Homo sapiens
cgcgcgcgtgccgagaccgaggagctgatccgcgagcgcgtgcgccaggtggtagctcacgtgcgggctcaggagcgcgagctgc

SEQ ID NO: 53064 - DNA, 84 bp, Homo sapiens
cgtgccgagaccgaggagctgatccgcgagcgcgtgcgccaggtggtagctcacgtgcgggctcaggagcgcgagctgctggag

SEQ ID NO: 53065 - DNA, 84 bp, Homo sapiens
accgaggagctgatccgcgagcgcgtgcgccaggtggtagctcacgtgcgggctcaggagcgcgagctgctggaggctgtggac

SEQ ID NO: 53066 - DNA, 85 bp, Homo sapiens
tgatccgcgagcgcgtgcgccaggtggtagctcacgtgcgggctcaggagcgcgagctgctggaggctgtggacgcgcggtacca

SEQ ID NO: 53067 - DNA, 83 bp, Homo sapiens
gtgcgccaggtggtagctcacgtgcgggctcaggagcgcgagctgctggaggctgtggacgcgcggtaccagcgcgactacga

SEQ ID NO: 53068 - DNA, 81 bp, Homo sapiens
aggtggtagctcacgtgcgggctcaggagcgcgagctgctggaggctgtggacgcgcggtaccagcgcgactacgaggaga

SEQ ID NO: 53069 - DNA, 82 bp, Homo sapiens
ctcacgtgcgggctcaggagcgcgagctgctggaggctgtggacgcgcggtaccagcgcgactacgaggagatggccagtcg

SEQ ID NO: 53070 - DNA, 82 bp, Homo sapiens
tcaggagcgcgagctgctggaggctgtggacgcgcggtaccagcgcgactacgaggagatggccagtcggctgggccgcctg

SEQ ID NO: 53071 - DNA, 86 bp, Homo sapiens
tggaggctgtggacgcgcggtaccagcgcgactacgaggagatggccagtcggctgggccgcctggatgctgtgctgcagcgcatc

SEQ ID NO: 53072 - DNA, 89 bp, Homo sapiens
taccagcgcgactacgaggagatggccagtcggctgggccgcctggatgctgtgctgcagcgcatccgcacgggcagcgcgctggtgca

SEQ ID NO: 53073 - DNA, 88 bp, Homo sapiens
actacgaggagatggccagtcggctgggccgcctggatgctgtgctgcagcgcatccgcacgggcagcgcgctggtgcagaggatgaa

SEQ ID NO: 53074 - DNA, 89 bp, Homo sapiens
atggccagtcggctgggccgcctggatgctgtgctgcagcgcatccgcacgggcagcgcgctggtgcagaggatgaagtgctacgcctc

SEQ ID NO: 53075 - DNA, 87 bp, Homo sapiens
ctgggccgcctggatgctgtgctgcagcgcatccgcacgggcagcgcgctggtgcagaggatgaagtgctacgcctcggaccaggag

SEQ ID NO: 53076 - DNA, 92 bp, Homo sapiens
tggatgctgtgctgcagcgcatccgcacgggcagcgcgctggtgcagaggatgaagtgctacgcctcggaccaggaggtgctggacatgcac

SEQ ID NO: 53077 - DNA, 82 bp, Homo sapiens
atccgcacgggcagcgcgctggtgcagaggatgaagtgctacgcctcggaccaggaggtgctggacatgcacggtttcctgc

SEQ ID NO: 53078 - DNA, 84 bp, Homo sapiens
agcgcgctggtgcagaggatgaagtgctacgcctcggaccaggaggtgctggacatgcacggtttcctgcgccaggcgctctgc

SEQ ID NO: 53079 - DNA, 85 bp, Homo sapiens
tgcagaggatgaagtgctacgcctcggaccaggaggtgctggacatgcacggtttcctgcgccaggcgctctgccgcctgcgcca

SEQ ID NO: 53080 - DNA, 83 bp, Homo sapiens
aggaggtgctggacatgcacggtttcctgcgccaggcgctctgccgcctgcgccaggaggagccccagagcctgcaagctgcc

SEQ ID NO: 53081 - DNA, 85 bp, Homo sapiens
tggacatgcacggtttcctgcgccaggcgctctgccgcctgcgccaggaggagccccagagcctgcaagctgccgtgcgcaccga

SEQ ID NO: 53082 - DNA, 83 bp, Homo sapiens
ggtttcctgcgccaggcgctctgccgcctgcgccaggaggagccccagagcctgcaagctgccgtgcgcaccgatggcttcga

SEQ ID NO: 53083 - DNA, 85 bp, Homo sapiens
tgcgccaggcgctctgccgcctgcgccaggaggagccccagagcctgcaagctgccgtgcgcaccgatggcttcgacgagttcaa

SEQ ID NO: 53084 - DNA, 85 bp, Homo sapiens
agccccagagcctgcaagctgccgtgcgcaccgatggcttcgacgagttcaaggtgcgcctgcaggacctcagctcttgcatcac

SEQ ID NO: 53085 - DNA, 84 bp, Homo sapiens
agagcctgcaagctgccgtgcgcaccgatggcttcgacgagttcaaggtgcgcctgcaggacctcagctcttgcatcacccagg

SEQ ID NO: 53086 - DNA, 80 bp, Homo sapiens
aagctgccgtgcgcaccgatggcttcgacgagttcaaggtgcgcctgcaggacctcagctcttgcatcacccaggggaaa

SEQ ID NO: 53087 - DNA, 78 bp, Homo sapiens
accgatggcttcgacgagttcaaggtgcgcctgcaggacctcagctcttgcatcacccaggggaaaggtaagcacgca

SEQ ID NO: 53088 - DNA, 77 bp, Homo sapiens
ttcgacgagttcaaggtgcgcctgcaggacctcagctcttgcatcacccaggggaaaggtaagcacgcacgccacct

SEQ ID NO: 53089 - DNA, 76 bp, Homo sapiens
agttcaaggtgcgcctgcaggacctcagctcttgcatcacccaggggaaaggtaagcacgcacgccaccttcctgg

SEQ ID NO: 53090 - DNA, 77 bp, Homo sapiens
cctgcaggacctcagctcttgcatcacccaggggaaaggtaagcacgcacgccaccttcctgggcggcctgtgcctc

SEQ ID NO: 53091 - DNA, 79 bp, Homo sapiens
tcagctcttgcatcacccaggggaaaggtaagcacgcacgccaccttcctgggcggcctgtgcctctgctgcaccctag

SEQ ID NO: 53092 - DNA, 76 bp, Homo sapiens
ttgcatcacccaggggaaaggtaagcacgcacgccaccttcctgggcggcctgtgcctctgctgcaccctagggaa

SEQ ID NO: 53093 - DNA, 76 bp, Homo sapiens
ggaaaggtaagcacgcacgccaccttcctgggcggcctgtgcctctgctgcaccctagggaaggcgagtcagaaga

SEQ ID NO: 53094 - DNA, 81 bp, Homo sapiens
taagcacgcacgccaccttcctgggcggcctgtgcctctgctgcaccctagggaaggcgagtcagaagagatcatctccat

SEQ ID NO: 53095 - DNA, 79 bp, Homo sapiens
caccttcctgggcggcctgtgcctctgctgcaccctagggaaggcgagtcagaagagatcatctccatttgacagaaaa

SEQ ID NO: 53096 - DNA, 77 bp, Homo sapiens
tgcctctgctgcaccctagggaaggcgagtcagaagagatcatctccatttgacagaaaagaaaactgggtgtttat

SEQ ID NO: 53097 - DNA, 73 bp, Homo sapiens
caccctagggaaggcgagtcagaagagatcatctccatttgacagaaaagaaaactgggtgtttattcagtct

SEQ ID NO: 53098 - DNA, 73 bp, Homo sapiens
tagggaaggcgagtcagaagagatcatctccatttgacagaaaagaaaactgggtgtttattcagtctttggg

SEQ ID NO: 53099 - DNA, 71 bp, Homo sapiens
agtcagaagagatcatctccatttgacagaaaagaaaactgggtgtttattcagtctttgggggttggtaa

SEQ ID NO: 53100 - DNA, 69 bp, Homo sapiens
agatcatctccatttgacagaaaagaaaactgggtgtttattcagtctttgggggttggtaaggtctta

SEQ ID NO: 53101 - DNA, 65 bp, Homo sapiens
atttgacagaaaagaaaactgggtgtttattcagtctttgggggttggtaaggtcttaggttcca

SEQ ID NO: 53102 - DNA, 68 bp, Homo sapiens
gtctttgggggttggtaaggtcttaggttccagggcacaggataagggggagatgaggccctgacaaa

SEQ ID NO: 53103 - DNA, 72 bp, Homo sapiens
gggttggtaaggtcttaggttccagggcacaggataagggggagatgaggccctgacaaagggctgcagcca

SEQ ID NO: 53104 - DNA, 73 bp, Homo sapiens
agggcacaggataagggggagatgaggccctgacaaagggctgcagccacccagaggggacacattttactaa

SEQ ID NO: 53105 - DNA, 76 bp, Homo sapiens
agatgaggccctgacaaagggctgcagccacccagaggggacacattttactaatttacaagactctgtggattga

SEQ ID NO: 53106 - DNA, 77 bp, Homo sapiens
tgacaaagggctgcagccacccagaggggacacattttactaatttacaagactctgtggattgacctagcgatgac

SEQ ID NO: 53107 - DNA, 77 bp, Homo sapiens
aagggctgcagccacccagaggggacacattttactaatttacaagactctgtggattgacctagcgatgactcatg

SEQ ID NO: 53108 - DNA, 75 bp, Homo sapiens
ccagaggggacacattttactaatttacaagactctgtggattgacctagcgatgactcatggggaacacgtgaa

SEQ ID NO: 53109 - DNA, 74 bp, Homo sapiens
cacattttactaatttacaagactctgtggattgacctagcgatgactcatggggaacacgtgaaagttgaaaa

SEQ ID NO: 53110 - DNA, 75 bp, Homo sapiens
ttactaatttacaagactctgtggattgacctagcgatgactcatggggaacacgtgaaagttgaaaaactgcaa

SEQ ID NO: 53111 - DNA, 77 bp, Homo sapiens
attgacctagcgatgactcatggggaacacgtgaaagttgaaaaactgcaaagctgagaatcagacccagtatcatt

SEQ ID NO: 53112 - DNA, 75 bp, Homo sapiens
actcatggggaacacgtgaaagttgaaaaactgcaaagctgagaatcagacccagtatcattttggcgccagagg

SEQ ID NO: 53113 - DNA, 75 bp, Homo sapiens
agttgaaaaactgcaaagctgagaatcagacccagtatcattttggcgccagagggaccaagcacttcaggaggt

SEQ ID NO: 53114 - DNA, 75 bp, Homo sapiens
aaagctgagaatcagacccagtatcattttggcgccagagggaccaagcacttcaggaggttctcttaagccacc

SEQ ID NO: 53115 - DNA, 74 bp, Homo sapiens
gtatcattttggcgccagagggaccaagcacttcaggaggttctcttaagccaccggtgtctcggaacagagaa

SEQ ID NO: 53116 - DNA, 73 bp, Homo sapiens
ttttggcgccagagggaccaagcacttcaggaggttctcttaagccaccggtgtctcggaacagagaagtcaa

SEQ ID NO: 53117 - DNA, 71 bp, Homo sapiens
agggaccaagcacttcaggaggttctcttaagccaccggtgtctcggaacagagaagtcaattgggacctg

SEQ ID NO: 53118 - DNA, 69 bp, Homo sapiens
ttcaggaggttctcttaagccaccggtgtctcggaacagagaagtcaattgggacctggggttacggta

SEQ ID NO: 53119 - DNA, 67 bp, Homo sapiens
aggttctcttaagccaccggtgtctcggaacagagaagtcaattgggacctggggttacggtagaag

SEQ ID NO: 53120 - DNA, 66 bp, Homo sapiens
caccggtgtctcggaacagagaagtcaattgggacctggggttacggtagaagggggctaagaaaa

SEQ ID NO: 53121 - DNA, 66 bp, Homo sapiens
gtgtctcggaacagagaagtcaattgggacctggggttacggtagaagggggctaagaaaacctcc

SEQ ID NO: 53122 - DNA, 64 bp, Homo sapiens
agagaagtcaattgggacctggggttacggtagaagggggctaagaaaacctcctggggatggt

SEQ ID NO: 53123 - DNA, 65 bp, Homo sapiens
aattgggacctggggttacggtagaagggggctaagaaaacctcctggggatggttggatgctta

SEQ ID NO: 53124 - DNA, 70 bp, Homo sapiens
gtagaagggggctaagaaaacctcctggggatggttggatgcttacccaaaaccatacagtggctcagtg

SEQ ID NO: 53125 - DNA, 72 bp, Homo sapiens
taagaaaacctcctggggatggttggatgcttacccaaaaccatacagtggctcagtggaggagatcccttg

SEQ ID NO: 53126 - DNA, 77 bp, Homo sapiens
acctcctggggatggttggatgcttacccaaaaccatacagtggctcagtggaggagatcccttgtctgcaggatga

SEQ ID NO: 53127 - DNA, 81 bp, Homo sapiens
atggttggatgcttacccaaaaccatacagtggctcagtggaggagatcccttgtctgcaggatgacctgctgtctgccaa

SEQ ID NO: 53128 - DNA, 79 bp, Homo sapiens
cttacccaaaaccatacagtggctcagtggaggagatcccttgtctgcaggatgacctgctgtctgccaacctttgcgc

SEQ ID NO: 53129 - DNA, 83 bp, Homo sapiens
tcagtggaggagatcccttgtctgcaggatgacctgctgtctgccaacctttgcgcgccctgcctagtgttggacgcttgaga

SEQ ID NO: 53130 - DNA, 79 bp, Homo sapiens
agatcccttgtctgcaggatgacctgctgtctgccaacctttgcgcgccctgcctagtgttggacgcttgagaggtaag

SEQ ID NO: 53131 - DNA, 82 bp, Homo sapiens
ttgtctgcaggatgacctgctgtctgccaacctttgcgcgccctgcctagtgttggacgcttgagaggtaaggagacacaga

SEQ ID NO: 53132 - DNA, 77 bp, Homo sapiens
atgacctgctgtctgccaacctttgcgcgccctgcctagtgttggacgcttgagaggtaaggagacacagactagtt

SEQ ID NO: 53133 - DNA, 79 bp, Homo sapiens
tgtctgccaacctttgcgcgccctgcctagtgttggacgcttgagaggtaaggagacacagactagtttctgatctcaa

SEQ ID NO: 53134 - DNA, 76 bp, Homo sapiens
aacctttgcgcgccctgcctagtgttggacgcttgagaggtaaggagacacagactagtttctgatctcaaggagc

SEQ ID NO: 53135 - DNA, 79 bp, Homo sapiens
ctgcctagtgttggacgcttgagaggtaaggagacacagactagtttctgatctcaaggagccagagccacttcacgta

SEQ ID NO: 53136 - DNA, 81 bp, Homo sapiens
ttggacgcttgagaggtaaggagacacagactagtttctgatctcaaggagccagagccacttcacgtagctggagaatga

SEQ ID NO: 53137 - DNA, 84 bp, Homo sapiens
ttgagaggtaaggagacacagactagtttctgatctcaaggagccagagccacttcacgtagctggagaatgagacagtgctca

SEQ ID NO: 53138 - DNA, 86 bp, Homo sapiens
agacacagactagtttctgatctcaaggagccagagccacttcacgtagctggagaatgagacagtgctcagctctgcaatccaaa

SEQ ID NO: 53139 - DNA, 84 bp, Homo sapiens
agactagtttctgatctcaaggagccagagccacttcacgtagctggagaatgagacagtgctcagctctgcaatccaaatccg

SEQ ID NO: 53140 - DNA, 87 bp, Homo sapiens
atctcaaggagccagagccacttcacgtagctggagaatgagacagtgctcagctctgcaatccaaatccgggagatgtagcagctg

SEQ ID NO: 53141 - DNA, 87 bp, Homo sapiens
ccagagccacttcacgtagctggagaatgagacagtgctcagctctgcaatccaaatccgggagatgtagcagctgtgtattagctg

SEQ ID NO: 53142 - DNA, 85 bp, Homo sapiens
acttcacgtagctggagaatgagacagtgctcagctctgcaatccaaatccgggagatgtagcagctgtgtattagctggaacag

SEQ ID NO: 53143 - DNA, 84 bp, Homo sapiens
tggagaatgagacagtgctcagctctgcaatccaaatccgggagatgtagcagctgtgtattagctggaacaggggggctttca

SEQ ID NO: 53144 - DNA, 80 bp, Homo sapiens
gacagtgctcagctctgcaatccaaatccgggagatgtagcagctgtgtattagctggaacaggggggctttcaaaataa

SEQ ID NO: 53145 - DNA, 70 bp, Homo sapiens
atccgggagatgtagcagctgtgtattagctggaacaggggggctttcaaaataaggggtagggggagtg

SEQ ID NO: 53146 - DNA, 84 bp, Homo sapiens
gagtgtgccagagagtctccaggagtctttgactaaatctccaagctggaatgtgagctctgagcagctagtataggatgccct

SEQ ID NO: 53147 - DNA, 81 bp, Homo sapiens
agagagtctccaggagtctttgactaaatctccaagctggaatgtgagctctgagcagctagtataggatgcccttactgg

SEQ ID NO: 53148 - DNA, 77 bp, Homo sapiens
aggagtctttgactaaatctccaagctggaatgtgagctctgagcagctagtataggatgcccttactgggaaaggg

SEQ ID NO: 53149 - DNA, 78 bp, Homo sapiens
tctttgactaaatctccaagctggaatgtgagctctgagcagctagtataggatgcccttactgggaaaggggaggga

SEQ ID NO: 53150 - DNA, 78 bp, Homo sapiens
aatctccaagctggaatgtgagctctgagcagctagtataggatgcccttactgggaaaggggagggaggctatggaa

SEQ ID NO: 53151 - DNA, 78 bp, Homo sapiens
aatgtgagctctgagcagctagtataggatgcccttactgggaaaggggagggaggctatggaatctgaaggcacctg

SEQ ID NO: 53152 - DNA, 76 bp, Homo sapiens
agctctgagcagctagtataggatgcccttactgggaaaggggagggaggctatggaatctgaaggcacctgggta

SEQ ID NO: 53153 - DNA, 72 bp, Homo sapiens
agctagtataggatgcccttactgggaaaggggagggaggctatggaatctgaaggcacctgggtagggtgc

SEQ ID NO: 53154 - DNA, 72 bp, Homo sapiens
atgcccttactgggaaaggggagggaggctatggaatctgaaggcacctgggtagggtgccagtgacaaaga

SEQ ID NO: 53155 - DNA, 72 bp, Homo sapiens
gaaaggggagggaggctatggaatctgaaggcacctgggtagggtgccagtgacaaagagcttatttacttc

SEQ ID NO: 53156 - DNA, 78 bp, Homo sapiens
gaatctgaaggcacctgggtagggtgccagtgacaaagagcttatttacttctcctggagctggacatgggtcatgaa

SEQ ID NO: 53157 - DNA, 77 bp, Homo sapiens
gcacctgggtagggtgccagtgacaaagagcttatttacttctcctggagctggacatgggtcatgaaggataatct

SEQ ID NO: 53158 - DNA, 76 bp, Homo sapiens
aagagcttatttacttctcctggagctggacatgggtcatgaaggataatcttagagggcctggacctgtgccttc

SEQ ID NO: 53159 - DNA, 78 bp, Homo sapiens
tctcctggagctggacatgggtcatgaaggataatcttagagggcctggacctgtgccttctccacctaggtagtgaa

SEQ ID NO: 53160 - DNA, 77 bp, Homo sapiens
ctggacatgggtcatgaaggataatcttagagggcctggacctgtgccttctccacctaggtagtgaatgtcaccca

SEQ ID NO: 53161 - DNA, 76 bp, Homo sapiens
gtcatgaaggataatcttagagggcctggacctgtgccttctccacctaggtagtgaatgtcacccatattaagga

SEQ ID NO: 53162 - DNA, 72 bp, Homo sapiens
aaggataatcttagagggcctggacctgtgccttctccacctaggtagtgaatgtcacccatattaaggaaa

SEQ ID NO: 53163 - DNA, 74 bp, Homo sapiens
ttagagggcctggacctgtgccttctccacctaggtagtgaatgtcacccatattaaggaaatgaccccacaga

SEQ ID NO: 53164 - DNA, 73 bp, Homo sapiens
acctgtgccttctccacctaggtagtgaatgtcacccatattaaggaaatgaccccacagagtttacacagct

SEQ ID NO: 53165 - DNA, 73 bp, Homo sapiens
ccttctccacctaggtagtgaatgtcacccatattaaggaaatgaccccacagagtttacacagcttgccttg

SEQ ID NO: 53166 - DNA, 73 bp, Homo sapiens
aatgtcacccatattaaggaaatgaccccacagagtttacacagcttgccttgggtgttataactgggcaata

SEQ ID NO: 53167 - DNA, 71 bp, Homo sapiens
accccacagagtttacacagcttgccttgggtgttataactgggcaatagcagagagaagggttattttat

SEQ ID NO: 53168 - DNA, 74 bp, Homo sapiens
agtttacacagcttgccttgggtgttataactgggcaatagcagagagaagggttattttattctgaagcataa

SEQ ID NO: 53169 - DNA, 74 bp, Homo sapiens
cttgccttgggtgttataactgggcaatagcagagagaagggttattttattctgaagcataagagatttagat

SEQ ID NO: 53170 - DNA, 73 bp, Homo sapiens
cttgggtgttataactgggcaatagcagagagaagggttattttattctgaagcataagagatttagatttaa

SEQ ID NO: 53171 - DNA, 72 bp, Homo sapiens
actgggcaatagcagagagaagggttattttattctgaagcataagagatttagatttaataaaaaccaggc

SEQ ID NO: 53172 - DNA, 74 bp, Homo sapiens
gcagagagaagggttattttattctgaagcataagagatttagatttaataaaaaccaggctgcagataaggaa

SEQ ID NO: 53173 - DNA, 76 bp, Homo sapiens
ggttattttattctgaagcataagagatttagatttaataaaaaccaggctgcagataaggaagatcatggagctc

SEQ ID NO: 53174 - DNA, 81 bp, Homo sapiens
ttattctgaagcataagagatttagatttaataaaaaccaggctgcagataaggaagatcatggagctctcactatatgta

SEQ ID NO: 53175 - DNA, 80 bp, Homo sapiens
tttagatttaataaaaaccaggctgcagataaggaagatcatggagctctcactatatgtagagagtcagtgagccggta

SEQ ID NO: 53176 - DNA, 82 bp, Homo sapiens
ataaaaaccaggctgcagataaggaagatcatggagctctcactatatgtagagagtcagtgagccggtagtgatggcttta

SEQ ID NO: 53177 - DNA, 88 bp, Homo sapiens
tgcagataaggaagatcatggagctctcactatatgtagagagtcagtgagccggtagtgatggctttatgattgcgcacacttagcc

SEQ ID NO: 53178 - DNA, 87 bp, Homo sapiens
atggagctctcactatatgtagagagtcagtgagccggtagtgatggctttatgattgcgcacacttagccttgctgttggctcaga

SEQ ID NO: 53179 - DNA, 87 bp, Homo sapiens
ctcactatatgtagagagtcagtgagccggtagtgatggctttatgattgcgcacacttagccttgctgttggctcagagatggaga

SEQ ID NO: 53180 - DNA, 83 bp, Homo sapiens
agagtcagtgagccggtagtgatggctttatgattgcgcacacttagccttgctgttggctcagagatggagagaggtacact

SEQ ID NO: 53181 - DNA, 81 bp, Homo sapiens
agtgagccggtagtgatggctttatgattgcgcacacttagccttgctgttggctcagagatggagagaggtacacttggg

SEQ ID NO: 53182 - DNA, 79 bp, Homo sapiens
atggctttatgattgcgcacacttagccttgctgttggctcagagatggagagaggtacacttggggtttggagccaaa

SEQ ID NO: 53183 - DNA, 79 bp, Homo sapiens
tttatgattgcgcacacttagccttgctgttggctcagagatggagagaggtacacttggggtttggagccaaaagcaa

SEQ ID NO: 53184 - DNA, 78 bp, Homo sapiens
acttagccttgctgttggctcagagatggagagaggtacacttggggtttggagccaaaagcaagcactctaatgcca

SEQ ID NO: 53185 - DNA, 77 bp, Homo sapiens
ttgctgttggctcagagatggagagaggtacacttggggtttggagccaaaagcaagcactctaatgccacctcctt

SEQ ID NO: 53186 - DNA, 74 bp, Homo sapiens
tcagagatggagagaggtacacttggggtttggagccaaaagcaagcactctaatgccacctccttttcccttc

SEQ ID NO: 53187 - DNA, 72 bp, Homo sapiens
atggagagaggtacacttggggtttggagccaaaagcaagcactctaatgccacctccttttcccttctggc

SEQ ID NO: 53188 - DNA, 76 bp, Homo sapiens
tttggagccaaaagcaagcactctaatgccacctccttttcccttctggctgggttcctgcccactgcattcgaga

SEQ ID NO: 53189 - DNA, 76 bp, Homo sapiens
aaagcaagcactctaatgccacctccttttcccttctggctgggttcctgcccactgcattcgagagagctctcct

SEQ ID NO: 53190 - DNA, 77 bp, Homo sapiens
actctaatgccacctccttttcccttctggctgggttcctgcccactgcattcgagagagctctccttccagctgcc

SEQ ID NO: 53191 - DNA, 75 bp, Homo sapiens
tccttttcccttctggctgggttcctgcccactgcattcgagagagctctccttccagctgcccctccagggagt

SEQ ID NO: 53192 - DNA, 79 bp, Homo sapiens
ctgggttcctgcccactgcattcgagagagctctccttccagctgcccctccagggagttgtccagtgctttgggatgc

SEQ ID NO: 53193 - DNA, 77 bp, Homo sapiens
actgcattcgagagagctctccttccagctgcccctccagggagttgtccagtgctttgggatgccctggaaaatag

SEQ ID NO: 53194 - DNA, 73 bp, Homo sapiens
tctccttccagctgcccctccagggagttgtccagtgctttgggatgccctggaaaataggtatcctggaaaa

SEQ ID NO: 53195 - DNA, 72 bp, Homo sapiens
tgcccctccagggagttgtccagtgctttgggatgccctggaaaataggtatcctggaaaagcaacagggac

SEQ ID NO: 53196 - DNA, 73 bp, Homo sapiens
agtgctttgggatgccctggaaaataggtatcctggaaaagcaacagggacctcctctctatcactgtcccag

SEQ ID NO: 53197 - DNA, 73 bp, Homo sapiens
tttgggatgccctggaaaataggtatcctggaaaagcaacagggacctcctctctatcactgtcccaggtcag

SEQ ID NO: 53198 - DNA, 72 bp, Homo sapiens
aaaataggtatcctggaaaagcaacagggacctcctctctatcactgtcccaggtcaggatgtcccttacca

SEQ ID NO: 53199 - DNA, 77 bp, Homo sapiens
tatcctggaaaagcaacagggacctcctctctatcactgtcccaggtcaggatgtcccttaccagcatgtccttgac

SEQ ID NO: 53200 - DNA, 76 bp, Homo sapiens
aaaagcaacagggacctcctctctatcactgtcccaggtcaggatgtcccttaccagcatgtccttgacctgcctg

SEQ ID NO: 53201 - DNA, 80 bp, Homo sapiens
tctctatcactgtcccaggtcaggatgtcccttaccagcatgtccttgacctgcctgtgaccttctttgtgttctacaga

SEQ ID NO: 53202 - DNA, 82 bp, Homo sapiens
caggtcaggatgtcccttaccagcatgtccttgacctgcctgtgaccttctttgtgttctacagatgcagctgtatccaaga

SEQ ID NO: 53203 - DNA, 80 bp, Homo sapiens
aggatgtcccttaccagcatgtccttgacctgcctgtgaccttctttgtgttctacagatgcagctgtatccaagaaagc

SEQ ID NO: 53204 - DNA, 81 bp, Homo sapiens
cttaccagcatgtccttgacctgcctgtgaccttctttgtgttctacagatgcagctgtatccaagaaagccagcccagag

SEQ ID NO: 53205 - DNA, 84 bp, Homo sapiens
tgtccttgacctgcctgtgaccttctttgtgttctacagatgcagctgtatccaagaaagccagcccagaggctgccagcactc

SEQ ID NO: 53206 - DNA, 81 bp, Homo sapiens
tgtgaccttctttgtgttctacagatgcagctgtatccaagaaagccagcccagaggctgccagcactcccagggacccta

SEQ ID NO: 53207 - DNA, 81 bp, Homo sapiens
tttgtgttctacagatgcagctgtatccaagaaagccagcccagaggctgccagcactcccagggaccctattgacgttga

SEQ ID NO: 53208 - DNA, 76 bp, Homo sapiens
ctgtatccaagaaagccagcccagaggctgccagcactcccagggaccctattgacgttgacctggtgagatgggt

SEQ ID NO: 53209 - DNA, 76 bp, Homo sapiens
tccaagaaagccagcccagaggctgccagcactcccagggaccctattgacgttgacctggtgagatgggtttgag

SEQ ID NO: 53210 - DNA, 74 bp, Homo sapiens
agcccagaggctgccagcactcccagggaccctattgacgttgacctggtgagatgggtttgaggtctgaaggg

SEQ ID NO: 53211 - DNA, 73 bp, Homo sapiens
ctgccagcactcccagggaccctattgacgttgacctggtgagatgggtttgaggtctgaaggggtggtggtg

SEQ ID NO: 53212 - DNA, 77 bp, Homo sapiens
gggctgctgcctagtcatttctgactcaattttcccaactttgcagcccgaggaggcagagagagtgaaggcccagg

SEQ ID NO: 53213 - DNA, 76 bp, Homo sapiens
ctgcctagtcatttctgactcaattttcccaactttgcagcccgaggaggcagagagagtgaaggcccaggttcag

SEQ ID NO: 53214 - DNA, 73 bp, Homo sapiens
atttctgactcaattttcccaactttgcagcccgaggaggcagagagagtgaaggcccaggttcaggccctgg

SEQ ID NO: 53215 - DNA, 73 bp, Homo sapiens
aattttcccaactttgcagcccgaggaggcagagagagtgaaggcccaggttcaggccctggggctggctgaa

SEQ ID NO: 53216 - DNA, 76 bp, Homo sapiens
aactttgcagcccgaggaggcagagagagtgaaggcccaggttcaggccctggggctggctgaagcccagcctatg

SEQ ID NO: 53217 - DNA, 78 bp, Homo sapiens
aggaggcagagagagtgaaggcccaggttcaggccctggggctggctgaagcccagcctatggctgtggtacagtcag

SEQ ID NO: 53218 - DNA, 77 bp, Homo sapiens
agagagagtgaaggcccaggttcaggccctggggctggctgaagcccagcctatggctgtggtacagtcagtgcccg

SEQ ID NO: 53219 - DNA, 75 bp, Homo sapiens
aaggcccaggttcaggccctggggctggctgaagcccagcctatggctgtggtacagtcagtgcccggggcacac

SEQ ID NO: 53220 - DNA, 76 bp, Homo sapiens
aggccctggggctggctgaagcccagcctatggctgtggtacagtcagtgcccggggcacaccccgtgccagtgta

SEQ ID NO: 53221 - DNA, 80 bp, Homo sapiens
gctggctgaagcccagcctatggctgtggtacagtcagtgcccggggcacaccccgtgccagtgtacgccttctccatca

SEQ ID NO: 53222 - DNA, 77 bp, Homo sapiens
ctgaagcccagcctatggctgtggtacagtcagtgcccggggcacaccccgtgccagtgtacgccttctccatcaaa

SEQ ID NO: 53223 - DNA, 75 bp, Homo sapiens
tatggctgtggtacagtcagtgcccggggcacaccccgtgccagtgtacgccttctccatcaaaggcccttccta

SEQ ID NO: 53224 - DNA, 74 bp, Homo sapiens
tacagtcagtgcccggggcacaccccgtgccagtgtacgccttctccatcaaaggcccttcctatggagaggta

SEQ ID NO: 53225 - DNA, 69 bp, Homo sapiens
cccggggcacaccccgtgccagtgtacgccttctccatcaaaggcccttcctatggagaggtaaggttc

SEQ ID NO: 53226 - DNA, 70 bp, Homo sapiens
acaccccgtgccagtgtacgccttctccatcaaaggcccttcctatggagaggtaaggttctccccagcc

SEQ ID NO: 53227 - DNA, 69 bp, Homo sapiens
agtgtacgccttctccatcaaaggcccttcctatggagaggtaaggttctccccagccccagccttccc

SEQ ID NO: 53228 - DNA, 80 bp, Homo sapiens
acccctgcaggcacctgacctggctctgtgactccctctatgcaggatgtctccaatacaacgacagcccagaagaggaa

SEQ ID NO: 53229 - DNA, 82 bp, Homo sapiens
acctggctctgtgactccctctatgcaggatgtctccaatacaacgacagcccagaagaggaagtgcagccagacccagtgc

SEQ ID NO: 53230 - DNA, 81 bp, Homo sapiens
tgtgactccctctatgcaggatgtctccaatacaacgacagcccagaagaggaagtgcagccagacccagtgccccaggaa

SEQ ID NO: 53231 - DNA, 82 bp, Homo sapiens
tctatgcaggatgtctccaatacaacgacagcccagaagaggaagtgcagccagacccagtgccccaggaaggtcatcaaga

SEQ ID NO: 53232 - DNA, 79 bp, Homo sapiens
atgtctccaatacaacgacagcccagaagaggaagtgcagccagacccagtgccccaggaaggtcatcaagatggagtc

SEQ ID NO: 53233 - DNA, 78 bp, Homo sapiens
atacaacgacagcccagaagaggaagtgcagccagacccagtgccccaggaaggtcatcaagatggagtctgaggagg

SEQ ID NO: 53234 - DNA, 76 bp, Homo sapiens
agcccagaagaggaagtgcagccagacccagtgccccaggaaggtcatcaagatggagtctgaggaggggaaggag

SEQ ID NO: 53235 - DNA, 75 bp, Homo sapiens
aggaagtgcagccagacccagtgccccaggaaggtcatcaagatggagtctgaggaggggaaggaggcaaggttg

SEQ ID NO: 53236 - DNA, 74 bp, Homo sapiens
agacccagtgccccaggaaggtcatcaagatggagtctgaggaggggaaggaggcaaggttggctcggagctcc

SEQ ID NO: 53237 - DNA, 75 bp, Homo sapiens
ccaggaaggtcatcaagatggagtctgaggaggggaaggaggcaaggttggctcggagctccccggagcagccca

SEQ ID NO: 53238 - DNA, 74 bp, Homo sapiens
aaggtcatcaagatggagtctgaggaggggaaggaggcaaggttggctcggagctccccggagcagcccaggcc

SEQ ID NO: 53239 - DNA, 74 bp, Homo sapiens
atggagtctgaggaggggaaggaggcaaggttggctcggagctccccggagcagcccaggcccagcacctccaa

SEQ ID NO: 53240 - DNA, 74 bp, Homo sapiens
aaggaggcaaggttggctcggagctccccggagcagcccaggcccagcacctccaaggcagtctcaccacccca

SEQ ID NO: 53241 - DNA, 75 bp, Homo sapiens
ggttggctcggagctccccggagcagcccaggcccagcacctccaaggcagtctcaccaccccacctggatggac

SEQ ID NO: 53242 - DNA, 74 bp, Homo sapiens
agctccccggagcagcccaggcccagcacctccaaggcagtctcaccaccccacctggatggaccgcctagccc

SEQ ID NO: 53243 - DNA, 74 bp, Homo sapiens
gcccaggcccagcacctccaaggcagtctcaccaccccacctggatggaccgcctagccccaggagccccgtca

SEQ ID NO: 53244 - DNA, 74 bp, Homo sapiens
agcacctccaaggcagtctcaccaccccacctggatggaccgcctagccccaggagccccgtcataggaagtga

SEQ ID NO: 53245 - DNA, 71 bp, Homo sapiens
accaccccacctggatggaccgcctagccccaggagccccgtcataggaagtgaggtcttcctgcccaaca

SEQ ID NO: 53246 - DNA, 72 bp, Homo sapiens
acctggatggaccgcctagccccaggagccccgtcataggaagtgaggtcttcctgcccaacagcaaccacg

SEQ ID NO: 53247 - DNA, 74 bp, Homo sapiens
tggaccgcctagccccaggagccccgtcataggaagtgaggtcttcctgcccaacagcaaccacgtggccagtg

SEQ ID NO: 53248 - DNA, 74 bp, Homo sapiens
ccaggagccccgtcataggaagtgaggtcttcctgcccaacagcaaccacgtggccagtggcgccggggaggca

SEQ ID NO: 53249 - DNA, 72 bp, Homo sapiens
cccgtcataggaagtgaggtcttcctgcccaacagcaaccacgtggccagtggcgccggggaggcaggtagg

SEQ ID NO: 53250 - DNA, 71 bp, Homo sapiens
aagtgaggtcttcctgcccaacagcaaccacgtggccagtggcgccggggaggcaggtagggaggtgggta

SEQ ID NO: 53251 - DNA, 72 bp, Homo sapiens
gtcttcctgcccaacagcaaccacgtggccagtggcgccggggaggcaggtagggaggtgggtagggcagtg

SEQ ID NO: 53252 - DNA, 73 bp, Homo sapiens
aacagcaaccacgtggccagtggcgccggggaggcaggtagggaggtgggtagggcagtggcctgggtgctgc

SEQ ID NO: 53253 - DNA, 73 bp, Homo sapiens
tggccagtggcgccggggaggcaggtagggaggtgggtagggcagtggcctgggtgctgcccgccagggtctg

SEQ ID NO: 53254 - DNA, 71 bp, Homo sapiens
agtggcgccggggaggcaggtagggaggtgggtagggcagtggcctgggtgctgcccgccagggtctgggc

SEQ ID NO: 53255 - DNA, 73 bp, Homo sapiens
gcaggtagggaggtgggtagggcagtggcctgggtgctgcccgccagggtctgggcggtgcccctcttctgta

SEQ ID NO: 53256 - DNA, 74 bp, Homo sapiens
tagggcagtggcctgggtgctgcccgccagggtctgggcggtgcccctcttctgtattttggccccatccagaa

SEQ ID NO: 53257 - DNA, 71 bp, Homo sapiens
cctgggtgctgcccgccagggtctgggcggtgcccctcttctgtattttggccccatccagaaagcccaaa

SEQ ID NO: 53258 - DNA, 70 bp, Homo sapiens
cccgccagggtctgggcggtgcccctcttctgtattttggccccatccagaaagcccaaagccaacagga

SEQ ID NO: 53259 - DNA, 71 bp, Homo sapiens
tctgggcggtgcccctcttctgtattttggccccatccagaaagcccaaagccaacaggagtcccttattc

SEQ ID NO: 53260 - DNA, 70 bp, Homo sapiens
cccctcttctgtattttggccccatccagaaagcccaaagccaacaggagtcccttattcccactgaata

SEQ ID NO: 53261 - DNA, 71 bp, Homo sapiens
tgtattttggccccatccagaaagcccaaagccaacaggagtcccttattcccactgaataagatagggaa

SEQ ID NO: 53262 - DNA, 71 bp, Homo sapiens
cccatccagaaagcccaaagccaacaggagtcccttattcccactgaataagatagggaaagttcacagtg

SEQ ID NO: 53263 - DNA, 70 bp, Homo sapiens
aaagcccaaagccaacaggagtcccttattcccactgaataagatagggaaagttcacagtgtgcgtggg

SEQ ID NO: 53264 - DNA, 71 bp, Homo sapiens
aaagccaacaggagtcccttattcccactgaataagatagggaaagttcacagtgtgcgtgggggtgagag

SEQ ID NO: 53265 - DNA, 72 bp, Homo sapiens
agtcccttattcccactgaataagatagggaaagttcacagtgtgcgtgggggtgagagtggacacagttta

SEQ ID NO: 53266 - DNA, 74 bp, Homo sapiens
tattcccactgaataagatagggaaagttcacagtgtgcgtgggggtgagagtggacacagtttaccatgtgtt

SEQ ID NO: 53267 - DNA, 76 bp, Homo sapiens
aataagatagggaaagttcacagtgtgcgtgggggtgagagtggacacagtttaccatgtgttttgccatgattga

SEQ ID NO: 53268 - DNA, 75 bp, Homo sapiens
gggaaagttcacagtgtgcgtgggggtgagagtggacacagtttaccatgtgttttgccatgattgaggtgtggg

SEQ ID NO: 53269 - DNA, 78 bp, Homo sapiens
tgtgcgtgggggtgagagtggacacagtttaccatgtgttttgccatgattgaggtgtggggagcctgacaggctaaa

SEQ ID NO: 53270 - DNA, 80 bp, Homo sapiens
gtgagagtggacacagtttaccatgtgttttgccatgattgaggtgtggggagcctgacaggctaaaatgcacagttcta

SEQ ID NO: 53271 - DNA, 75 bp, Homo sapiens
attgaggtgtggggagcctgacaggctaaaatgcacagttctatgagtcctttctcccaaacactactgtgcctt

SEQ ID NO: 53272 - DNA, 79 bp, Homo sapiens
gagcctgacaggctaaaatgcacagttctatgagtcctttctcccaaacactactgtgcctttgcacagggcaggtctc

SEQ ID NO: 53273 - DNA, 77 bp, Homo sapiens
ggctaaaatgcacagttctatgagtcctttctcccaaacactactgtgcctttgcacagggcaggtctccacaagaa

SEQ ID NO: 53274 - DNA, 75 bp, Homo sapiens
aaatgcacagttctatgagtcctttctcccaaacactactgtgcctttgcacagggcaggtctccacaagaagtt

SEQ ID NO: 53275 - DNA, 78 bp, Homo sapiens
aaacactactgtgcctttgcacagggcaggtctccacaagaagtttgttggctgatgcctagcatactcccagagagg

SEQ ID NO: 53276 - DNA, 80 bp, Homo sapiens
tttgcacagggcaggtctccacaagaagtttgttggctgatgcctagcatactcccagagagggcttgggcataccataa

SEQ ID NO: 53277 - DNA, 78 bp, Homo sapiens
gcaggtctccacaagaagtttgttggctgatgcctagcatactcccagagagggcttgggcataccataacaggaaac

SEQ ID NO: 53278 - DNA, 76 bp, Homo sapiens
acaagaagtttgttggctgatgcctagcatactcccagagagggcttgggcataccataacaggaaactggactcc

SEQ ID NO: 53279 - DNA, 77 bp, Homo sapiens
aagtttgttggctgatgcctagcatactcccagagagggcttgggcataccataacaggaaactggactccccatga

SEQ ID NO: 53280 - DNA, 77 bp, Homo sapiens
atgcctagcatactcccagagagggcttgggcataccataacaggaaactggactccccatgaccttaactctgctc

SEQ ID NO: 53281 - DNA, 76 bp, Homo sapiens
atactcccagagagggcttgggcataccataacaggaaactggactccccatgaccttaactctgctctctcagtc

SEQ ID NO: 53282 - DNA, 76 bp, Homo sapiens
agggcttgggcataccataacaggaaactggactccccatgaccttaactctgctctctcagtctacacccatcat

SEQ ID NO: 53283 - DNA, 76 bp, Homo sapiens
ttgggcataccataacaggaaactggactccccatgaccttaactctgctctctcagtctacacccatcatttccc

SEQ ID NO: 53284 - DNA, 75 bp, Homo sapiens
aactggactccccatgaccttaactctgctctctcagtctacacccatcatttccccaagtgtttctgcaaaggc

SEQ ID NO: 53285 - DNA, 75 bp, Homo sapiens
tgaccttaactctgctctctcagtctacacccatcatttccccaagtgtttctgcaaaggccacctacctaagta

SEQ ID NO: 53286 - DNA, 76 bp, Homo sapiens
taactctgctctctcagtctacacccatcatttccccaagtgtttctgcaaaggccacctacctaagtatctcatt

SEQ ID NO: 53287 - DNA, 77 bp, Homo sapiens
cccaagtgtttctgcaaaggccacctacctaagtatctcatttgtcagagttatcttctatgaacactgccaggcag

SEQ ID NO: 53288 - DNA, 78 bp, Homo sapiens
tttctgcaaaggccacctacctaagtatctcatttgtcagagttatcttctatgaacactgccaggcaggtagtcagt

SEQ ID NO: 53289 - DNA, 79 bp, Homo sapiens
cacctacctaagtatctcatttgtcagagttatcttctatgaacactgccaggcaggtagtcagttgggcaggagttga

SEQ ID NO: 53290 - DNA, 77 bp, Homo sapiens
atttgtcagagttatcttctatgaacactgccaggcaggtagtcagttgggcaggagttgaggtcaacccagaggaa

SEQ ID NO: 53291 - DNA, 78 bp, Homo sapiens
ttatcttctatgaacactgccaggcaggtagtcagttgggcaggagttgaggtcaacccagaggaatctggaacaaga

SEQ ID NO: 53292 - DNA, 78 bp, Homo sapiens
tatgaacactgccaggcaggtagtcagttgggcaggagttgaggtcaacccagaggaatctggaacaagagagttcta

SEQ ID NO: 53293 - DNA, 75 bp, Homo sapiens
aggcaggtagtcagttgggcaggagttgaggtcaacccagaggaatctggaacaagagagttctaaggatctgct

SEQ ID NO: 53294 - DNA, 77 bp, Homo sapiens
tagtcagttgggcaggagttgaggtcaacccagaggaatctggaacaagagagttctaaggatctgcttcacccaga

SEQ ID NO: 53295 - DNA, 75 bp, Homo sapiens
aggagttgaggtcaacccagaggaatctggaacaagagagttctaaggatctgcttcacccagagtacagctttg

SEQ ID NO: 53296 - DNA, 75 bp, Homo sapiens
aggtcaacccagaggaatctggaacaagagagttctaaggatctgcttcacccagagtacagctttgttcctcat

SEQ ID NO: 53297 - DNA, 78 bp, Homo sapiens
aggaatctggaacaagagagttctaaggatctgcttcacccagagtacagctttgttcctcattctgactgagcccta

SEQ ID NO: 53298 - DNA, 78 bp, Homo sapiens
aacaagagagttctaaggatctgcttcacccagagtacagctttgttcctcattctgactgagccctagccttggtca

SEQ ID NO: 53299 - DNA, 80 bp, Homo sapiens
agagttctaaggatctgcttcacccagagtacagctttgttcctcattctgactgagccctagccttggtcacacactga

SEQ ID NO: 53300 - DNA, 84 bp, Homo sapiens
atctgcttcacccagagtacagctttgttcctcattctgactgagccctagccttggtcacacactgagcactgactgatattc

SEQ ID NO: 53301 - DNA, 80 bp, Homo sapiens
acccagagtacagctttgttcctcattctgactgagccctagccttggtcacacactgagcactgactgatattccttac

SEQ ID NO: 53302 - DNA, 83 bp, Homo sapiens
tcattctgactgagccctagccttggtcacacactgagcactgactgatattccttacccacaaatgctattggtaatcgatg

SEQ ID NO: 53303 - DNA, 78 bp, Homo sapiens
tgagccctagccttggtcacacactgagcactgactgatattccttacccacaaatgctattggtaatcgatgggttt

SEQ ID NO: 53304 - DNA, 76 bp, Homo sapiens
acacactgagcactgactgatattccttacccacaaatgctattggtaatcgatgggttttgattaactaaatgaa

SEQ ID NO: 53305 - DNA, 73 bp, Homo sapiens
tgactgatattccttacccacaaatgctattggtaatcgatgggttttgattaactaaatgaagcgtctttta

SEQ ID NO: 53306 - DNA, 71 bp, Homo sapiens
tccttacccacaaatgctattggtaatcgatgggttttgattaactaaatgaagcgtcttttaactctaga

SEQ ID NO: 53307 - DNA, 71 bp, Homo sapiens
acccacaaatgctattggtaatcgatgggttttgattaactaaatgaagcgtcttttaactctagacatcc

SEQ ID NO: 53308 - DNA, 76 bp, Homo sapiens
ctattggtaatcgatgggttttgattaactaaatgaagcgtcttttaactctagacatcccagctcatggagctga

SEQ ID NO: 53309 - DNA, 76 bp, Homo sapiens
atcgatgggttttgattaactaaatgaagcgtcttttaactctagacatcccagctcatggagctgagaatgggga

SEQ ID NO: 53310 - DNA, 77 bp, Homo sapiens
attaactaaatgaagcgtcttttaactctagacatcccagctcatggagctgagaatggggacagtgtgcttcttta

SEQ ID NO: 53311 - DNA, 81 bp, Homo sapiens
taaatgaagcgtcttttaactctagacatcccagctcatggagctgagaatggggacagtgtgcttctttaggattgcaga

SEQ ID NO: 53312 - DNA, 80 bp, Homo sapiens
tcttttaactctagacatcccagctcatggagctgagaatggggacagtgtgcttctttaggattgcagaaggttccaga

SEQ ID NO: 53313 - DNA, 81 bp, Homo sapiens
tagacatcccagctcatggagctgagaatggggacagtgtgcttctttaggattgcagaaggttccagaccaggtagcagt

SEQ ID NO: 53314 - DNA, 80 bp, Homo sapiens
tcatggagctgagaatggggacagtgtgcttctttaggattgcagaaggttccagaccaggtagcagttgtcaggcctcc

SEQ ID NO: 53315 - DNA, 78 bp, Homo sapiens
tgagaatggggacagtgtgcttctttaggattgcagaaggttccagaccaggtagcagttgtcaggcctcctgtacag

SEQ ID NO: 53316 - DNA, 75 bp, Homo sapiens
acagtgtgcttctttaggattgcagaaggttccagaccaggtagcagttgtcaggcctcctgtacagggggcaaa

SEQ ID NO: 53317 - DNA, 74 bp, Homo sapiens
ttctttaggattgcagaaggttccagaccaggtagcagttgtcaggcctcctgtacagggggcaaattctgaat

SEQ ID NO: 53318 - DNA, 77 bp, Homo sapiens
attgcagaaggttccagaccaggtagcagttgtcaggcctcctgtacagggggcaaattctgaattctgggcagata

SEQ ID NO: 53319 - DNA, 76 bp, Homo sapiens
ttccagaccaggtagcagttgtcaggcctcctgtacagggggcaaattctgaattctgggcagataacttaattga

SEQ ID NO: 53320 - DNA, 78 bp, Homo sapiens
gtagcagttgtcaggcctcctgtacagggggcaaattctgaattctgggcagataacttaattgaatattcatagata

SEQ ID NO: 53321 - DNA, 75 bp, Homo sapiens
agttgtcaggcctcctgtacagggggcaaattctgaattctgggcagataacttaattgaatattcatagataag

SEQ ID NO: 53322 - DNA, 77 bp, Homo sapiens
gcaaattctgaattctgggcagataacttaattgaatattcatagataaggcacagcaagaaattatggaaacccat

SEQ ID NO: 53323 - DNA, 78 bp, Homo sapiens
ttctgaattctgggcagataacttaattgaatattcatagataaggcacagcaagaaattatggaaacccatttgtga

SEQ ID NO: 53324 - DNA, 76 bp, Homo sapiens
gggcagataacttaattgaatattcatagataaggcacagcaagaaattatggaaacccatttgtgaattactcaa

SEQ ID NO: 53325 - DNA, 78 bp, Homo sapiens
attgaatattcatagataaggcacagcaagaaattatggaaacccatttgtgaattactcaaatccaaatgcaaagca

SEQ ID NO: 53326 - DNA, 79 bp, Homo sapiens
atattcatagataaggcacagcaagaaattatggaaacccatttgtgaattactcaaatccaaatgcaaagcagagtca

SEQ ID NO: 53327 - DNA, 79 bp, Homo sapiens
ataaggcacagcaagaaattatggaaacccatttgtgaattactcaaatccaaatgcaaagcagagtcacattggcaca

SEQ ID NO: 53328 - DNA, 78 bp, Homo sapiens
aaattatggaaacccatttgtgaattactcaaatccaaatgcaaagcagagtcacattggcacacacagtggctgttc

SEQ ID NO: 53329 - DNA, 78 bp, Homo sapiens
atggaaacccatttgtgaattactcaaatccaaatgcaaagcagagtcacattggcacacacagtggctgttcccgtc

SEQ ID NO: 53330 - DNA, 78 bp, Homo sapiens
atttgtgaattactcaaatccaaatgcaaagcagagtcacattggcacacacagtggctgttcccgtccccctgcagg

SEQ ID NO: 53331 - DNA, 79 bp, Homo sapiens
tactcaaatccaaatgcaaagcagagtcacattggcacacacagtggctgttcccgtccccctgcagggcatccgtttc

SEQ ID NO: 53332 - DNA, 76 bp, Homo sapiens
aaatgcaaagcagagtcacattggcacacacagtggctgttcccgtccccctgcagggcatccgtttcccccagcc

SEQ ID NO: 53333 - DNA, 76 bp, Homo sapiens
agtcacattggcacacacagtggctgttcccgtccccctgcagggcatccgtttcccccagccgactggcctgcaa

SEQ ID NO: 53334 - DNA, 74 bp, Homo sapiens
attggcacacacagtggctgttcccgtccccctgcagggcatccgtttcccccagccgactggcctgcaaggat

SEQ ID NO: 53335 - DNA, 73 bp, Homo sapiens
ttcccgtccccctgcagggcatccgtttcccccagccgactggcctgcaaggattcccataggtgcacaccca

SEQ ID NO: 53336 - DNA, 74 bp, Homo sapiens
cctgcagggcatccgtttcccccagccgactggcctgcaaggattcccataggtgcacacccacacccctccca

SEQ ID NO: 53337 - DNA, 76 bp, Homo sapiens
atccgtttcccccagccgactggcctgcaaggattcccataggtgcacacccacacccctcccagcatgcatccta

SEQ ID NO: 53338 - DNA, 82 bp, Homo sapiens
tggcctgcaaggattcccataggtgcacacccacacccctcccagcatgcatcctaggcagttcataatgcatctccccttc

SEQ ID NO: 53339 - DNA, 76 bp, Homo sapiens
attcccataggtgcacacccacacccctcccagcatgcatcctaggcagttcataatgcatctccccttccccgtt

SEQ ID NO: 53340 - DNA, 77 bp, Homo sapiens
aggtgcacacccacacccctcccagcatgcatcctaggcagttcataatgcatctccccttccccgtttcagaggaa

SEQ ID NO: 53341 - DNA, 78 bp, Homo sapiens
cccctcccagcatgcatcctaggcagttcataatgcatctccccttccccgtttcagaggaacgcgttgtggtgatca

SEQ ID NO: 53342 - DNA, 77 bp, Homo sapiens
atcctaggcagttcataatgcatctccccttccccgtttcagaggaacgcgttgtggtgatcagcagctcggaagac

SEQ ID NO: 53343 - DNA, 77 bp, Homo sapiens
ataatgcatctccccttccccgtttcagaggaacgcgttgtggtgatcagcagctcggaagactcagatgccgaaaa

SEQ ID NO: 53344 - DNA, 74 bp, Homo sapiens
atctccccttccccgtttcagaggaacgcgttgtggtgatcagcagctcggaagactcagatgccgaaaactcg

SEQ ID NO: 53345 - DNA, 77 bp, Homo sapiens
gtttcagaggaacgcgttgtggtgatcagcagctcggaagactcagatgccgaaaactcggtgagtggcccagaagt

SEQ ID NO: 53346 - DNA, 81 bp, Homo sapiens
cttgccttggccctctgaatccctgacgcttggtttttctgtgttgcagtcctcccgagagctggatgacagcagcagtga

SEQ ID NO: 53347 - DNA, 83 bp, Homo sapiens
tctgaatccctgacgcttggtttttctgtgttgcagtcctcccgagagctggatgacagcagcagtgagtccagtgacctcca

SEQ ID NO: 53348 - DNA, 82 bp, Homo sapiens
atccctgacgcttggtttttctgtgttgcagtcctcccgagagctggatgacagcagcagtgagtccagtgacctccagctg

SEQ ID NO: 53349 - DNA, 80 bp, Homo sapiens
cttggtttttctgtgttgcagtcctcccgagagctggatgacagcagcagtgagtccagtgacctccagctggaaggccc

SEQ ID NO: 53350 - DNA, 83 bp, Homo sapiens
ctgtgttgcagtcctcccgagagctggatgacagcagcagtgagtccagtgacctccagctggaaggccccagcaccctcagg

SEQ ID NO: 53351 - DNA, 82 bp, Homo sapiens
tcccgagagctggatgacagcagcagtgagtccagtgacctccagctggaaggccccagcaccctcagggtcctggacgaga

SEQ ID NO: 53352 - DNA, 82 bp, Homo sapiens
tggatgacagcagcagtgagtccagtgacctccagctggaaggccccagcaccctcagggtcctggacgagaaccttgctga

SEQ ID NO: 53353 - DNA, 78 bp, Homo sapiens
acagcagcagtgagtccagtgacctccagctggaaggccccagcaccctcagggtcctggacgagaaccttgctgacc

SEQ ID NO: 53354 - DNA, 74 bp, Homo sapiens
agtccagtgacctccagctggaaggccccagcaccctcagggtcctggacgagaaccttgctgacccccaagca

SEQ ID NO: 53355 - DNA, 74 bp, Homo sapiens
acctccagctggaaggccccagcaccctcagggtcctggacgagaaccttgctgacccccaagcagaagacaga

SEQ ID NO: 53356 - DNA, 71 bp, Homo sapiens
aggccccagcaccctcagggtcctggacgagaaccttgctgacccccaagcagaagacagacctctggttt

SEQ ID NO: 53357 - DNA, 70 bp, Homo sapiens
accctcagggtcctggacgagaaccttgctgacccccaagcagaagacagacctctggttttctttgacc

SEQ ID NO: 53358 - DNA, 76 bp, Homo sapiens
tcctggacgagaaccttgctgacccccaagcagaagacagacctctggttttctttgacctcaagattgacaatga

SEQ ID NO: 53359 - DNA, 73 bp, Homo sapiens
acgagaaccttgctgacccccaagcagaagacagacctctggttttctttgacctcaagattgacaatgaaag

SEQ ID NO: 53360 - DNA, 71 bp, Homo sapiens
acccccaagcagaagacagacctctggttttctttgacctcaagattgacaatgaaagtgggttctcctgg

SEQ ID NO: 53361 - DNA, 72 bp, Homo sapiens
aagcagaagacagacctctggttttctttgacctcaagattgacaatgaaagtgggttctcctggggctacc

SEQ ID NO: 53362 - DNA, 69 bp, Homo sapiens
acagacctctggttttctttgacctcaagattgacaatgaaagtgggttctcctggggctacccccacc

SEQ ID NO: 53363 - DNA, 68 bp, Homo sapiens
ttctttgacctcaagattgacaatgaaagtgggttctcctggggctacccccacccctttctaattta

SEQ ID NO: 53364 - DNA, 69 bp, Homo sapiens
acctcaagattgacaatgaaagtgggttctcctggggctacccccacccctttctaatttagtctctga

SEQ ID NO: 53365 - DNA, 65 bp, Homo sapiens
aatgaaagtgggttctcctggggctacccccacccctttctaatttagtctctgagtcccaaaaa

SEQ ID NO: 53366 - DNA, 64 bp, Homo sapiens
aagtgggttctcctggggctacccccacccctttctaatttagtctctgagtcccaaaaagaag

SEQ ID NO: 53367 - DNA, 73 bp, Homo sapiens
gggctacccccacccctttctaatttagtctctgagtcccaaaaagaagtgcaggcagagccatctgccaggc

SEQ ID NO: 53368 - DNA, 78 bp, Homo sapiens
cacccctttctaatttagtctctgagtcccaaaaagaagtgcaggcagagccatctgccaggcccaggagagctctga

SEQ ID NO: 53369 - DNA, 82 bp, Homo sapiens
taatttagtctctgagtcccaaaaagaagtgcaggcagagccatctgccaggcccaggagagctctgagctctggccaacaa

SEQ ID NO: 53370 - DNA, 86 bp, Homo sapiens
tagtctctgagtcccaaaaagaagtgcaggcagagccatctgccaggcccaggagagctctgagctctggccaacaactgcagcca

SEQ ID NO: 53371 - DNA, 86 bp, Homo sapiens
tcccaaaaagaagtgcaggcagagccatctgccaggcccaggagagctctgagctctggccaacaactgcagccaggctgggcaga

SEQ ID NO: 53372 - DNA, 89 bp, Homo sapiens
aagtgcaggcagagccatctgccaggcccaggagagctctgagctctggccaacaactgcagccaggctgggcagagcactccggctca

SEQ ID NO: 53373 - DNA, 86 bp, Homo sapiens
agagccatctgccaggcccaggagagctctgagctctggccaacaactgcagccaggctgggcagagcactccggctcacctgggc

SEQ ID NO: 53374 - DNA, 85 bp, Homo sapiens
ggcccaggagagctctgagctctggccaacaactgcagccaggctgggcagagcactccggctcacctgggctcctggcgtgtca

SEQ ID NO: 53375 - DNA, 85 bp, Homo sapiens
agctctgagctctggccaacaactgcagccaggctgggcagagcactccggctcacctgggctcctggcgtgtcatttgctggct

SEQ ID NO: 53376 - DNA, 83 bp, Homo sapiens
tctggccaacaactgcagccaggctgggcagagcactccggctcacctgggctcctggcgtgtcatttgctggcttgaataaa

SEQ ID NO: 53377 - DNA, 82 bp, Homo sapiens
aacaactgcagccaggctgggcagagcactccggctcacctgggctcctggcgtgtcatttgctggcttgaataaagatgtc

SEQ ID NO: 53378 - DNA, 80 bp, Homo sapiens
aggctgggcagagcactccggctcacctgggctcctggcgtgtcatttgctggcttgaataaagatgtccgccttatcca

SEQ ID NO: 53379 - DNA, 80 bp, Homo sapiens
agagcactccggctcacctgggctcctggcgtgtcatttgctggcttgaataaagatgtccgccttatccagtgcctgag

SEQ ID NO: 53380 - DNA, 84 bp, Homo sapiens
gctcacctgggctcctggcgtgtcatttgctggcttgaataaagatgtccgccttatccagtgcctgagtgtgcgagagaggca

SEQ ID NO: 53381 - DNA, 86 bp, Homo sapiens
gctcctggcgtgtcatttgctggcttgaataaagatgtccgccttatccagtgcctgagtgtgcgagagaggcagatgcctccaca

SEQ ID NO: 53382 - DNA, 85 bp, Homo sapiens
tttgctggcttgaataaagatgtccgccttatccagtgcctgagtgtgcgagagaggcagatgcctccacaagtgcacctctgac

SEQ ID NO: 53383 - DNA, 82 bp, Homo sapiens
aataaagatgtccgccttatccagtgcctgagtgtgcgagagaggcagatgcctccacaagtgcacctctgaccagttcttc

SEQ ID NO: 53384 - DNA, 87 bp, Homo sapiens
tgtccgccttatccagtgcctgagtgtgcgagagaggcagatgcctccacaagtgcacctctgaccagttcttctctcagacagaga

SEQ ID NO: 53385 - DNA, 79 bp, Homo sapiens
agctctctgtgaccctgggtcctcaccctgcccttctctcctgcccagcccagaagattagccagctggctgcggtgaa

SEQ ID NO: 53386 - DNA, 76 bp, Homo sapiens
tgaccctgggtcctcaccctgcccttctctcctgcccagcccagaagattagccagctggctgcggtgaaccggga

SEQ ID NO: 53387 - DNA, 76 bp, Homo sapiens
tcctcaccctgcccttctctcctgcccagcccagaagattagccagctggctgcggtgaaccgggaaagcaagttc

SEQ ID NO: 53388 - DNA, 77 bp, Homo sapiens
cttctctcctgcccagcccagaagattagccagctggctgcggtgaaccgggaaagcaagttccgcgtggtcatcca

SEQ ID NO: 53389 - DNA, 77 bp, Homo sapiens
gcccagcccagaagattagccagctggctgcggtgaaccgggaaagcaagttccgcgtggtcatccagcctgaagcc

SEQ ID NO: 53390 - DNA, 75 bp, Homo sapiens
cccagaagattagccagctggctgcggtgaaccgggaaagcaagttccgcgtggtcatccagcctgaagccttct

SEQ ID NO: 53391 - DNA, 79 bp, Homo sapiens
ttagccagctggctgcggtgaaccgggaaagcaagttccgcgtggtcatccagcctgaagccttcttcagcatctactc

SEQ ID NO: 53392 - DNA, 74 bp, Homo sapiens
cggtgaaccgggaaagcaagttccgcgtggtcatccagcctgaagccttcttcagcatctactccaaggccgtg

SEQ ID NO: 53393 - DNA, 73 bp, Homo sapiens
aaccgggaaagcaagttccgcgtggtcatccagcctgaagccttcttcagcatctactccaaggccgtgtccc

SEQ ID NO: 53394 - DNA, 81 bp, Homo sapiens
tcatccagcctgaagccttcttcagcatctactccaaggccgtgtccctggaggtggggctgcagcacttcctcagctttc

SEQ ID NO: 53395 - DNA, 81 bp, Homo sapiens
ctgaagccttcttcagcatctactccaaggccgtgtccctggaggtggggctgcagcacttcctcagctttctgagctcca

SEQ ID NO: 53396 - DNA, 81 bp, Homo sapiens
ccttcttcagcatctactccaaggccgtgtccctggaggtggggctgcagcacttcctcagctttctgagctccatgcgcc

SEQ ID NO: 53397 - DNA, 79 bp, Homo sapiens
atctactccaaggccgtgtccctggaggtggggctgcagcacttcctcagctttctgagctccatgcgccgccctatct

SEQ ID NO: 53398 - DNA, 80 bp, Homo sapiens
aaggccgtgtccctggaggtggggctgcagcacttcctcagctttctgagctccatgcgccgccctatcttggcctgcta

SEQ ID NO: 53399 - DNA, 81 bp, Homo sapiens
ccctggaggtggggctgcagcacttcctcagctttctgagctccatgcgccgccctatcttggcctgctacaagctgtggg

SEQ ID NO: 53400 - DNA, 82 bp, Homo sapiens
ctgcagcacttcctcagctttctgagctccatgcgccgccctatcttggcctgctacaagctgtgggggcctggcctcccaa

SEQ ID NO: 53401 - DNA, 77 bp, Homo sapiens
acttcctcagctttctgagctccatgcgccgccctatcttggcctgctacaagctgtgggggcctggcctcccaaac

SEQ ID NO: 53402 - DNA, 75 bp, Homo sapiens
tttctgagctccatgcgccgccctatcttggcctgctacaagctgtgggggcctggcctcccaaacttcttccgg

SEQ ID NO: 53403 - DNA, 74 bp, Homo sapiens
tccatgcgccgccctatcttggcctgctacaagctgtgggggcctggcctcccaaacttcttccgggccctgga

SEQ ID NO: 53404 - DNA, 72 bp, Homo sapiens
ctatcttggcctgctacaagctgtgggggcctggcctcccaaacttcttccgggccctggaggacattaaca

SEQ ID NO: 53405 - DNA, 72 bp, Homo sapiens
tgctacaagctgtgggggcctggcctcccaaacttcttccgggccctggaggacattaacaggctgtgggaa

SEQ ID NO: 53406 - DNA, 69 bp, Homo sapiens
aagctgtgggggcctggcctcccaaacttcttccgggccctggaggacattaacaggctgtgggaattc

SEQ ID NO: 53407 - DNA, 71 bp, Homo sapiens
tggcctcccaaacttcttccgggccctggaggacattaacaggctgtgggaattccaggaggccatctcgg

SEQ ID NO: 53408 - DNA, 70 bp, Homo sapiens
aaacttcttccgggccctggaggacattaacaggctgtgggaattccaggaggccatctcgggcttcctg

SEQ ID NO: 53409 - DNA, 74 bp, Homo sapiens
cttccgggccctggaggacattaacaggctgtgggaattccaggaggccatctcgggcttcctggctgccctgc

SEQ ID NO: 53410 - DNA, 77 bp, Homo sapiens
ttaacaggctgtgggaattccaggaggccatctcgggcttcctggctgccctgcctctcatccgggagcgtgtgccc

SEQ ID NO: 53411 - DNA, 78 bp, Homo sapiens
aggccatctcgggcttcctggctgccctgcctctcatccgggagcgtgtgcccggggccagcagcttcaaactcaaga

SEQ ID NO: 53412 - DNA, 75 bp, Homo sapiens
tccgggagcgtgtgcccggggccagcagcttcaaactcaagaacctggcccagacctacctggcgagaaacatga

SEQ ID NO: 53413 - DNA, 78 bp, Homo sapiens
cccggggccagcagcttcaaactcaagaacctggcccagacctacctggcgagaaacatgagcgagcgcagcgccatg

SEQ ID NO: 53414 - DNA, 83 bp, Homo sapiens
cagcttcaaactcaagaacctggcccagacctacctggcgagaaacatgagcgagcgcagcgccatggctgccgtgctggcca

SEQ ID NO: 53415 - DNA, 83 bp, Homo sapiens
aaactcaagaacctggcccagacctacctggcgagaaacatgagcgagcgcagcgccatggctgccgtgctggccatgcgtga

SEQ ID NO: 53416 - DNA, 84 bp, Homo sapiens
agacctacctggcgagaaacatgagcgagcgcagcgccatggctgccgtgctggccatgcgtgacctgtgccgcctcctcgagg

SEQ ID NO: 53417 - DNA, 84 bp, Homo sapiens
tggcgagaaacatgagcgagcgcagcgccatggctgccgtgctggccatgcgtgacctgtgccgcctcctcgaggtctccccgg

SEQ ID NO: 53418 - DNA, 82 bp, Homo sapiens
atgagcgagcgcagcgccatggctgccgtgctggccatgcgtgacctgtgccgcctcctcgaggtctccccgggcccccagc

SEQ ID NO: 53419 - DNA, 80 bp, Homo sapiens
cgcagcgccatggctgccgtgctggccatgcgtgacctgtgccgcctcctcgaggtctccccgggcccccagctggccca

SEQ ID NO: 53420 - DNA, 80 bp, Homo sapiens
tggctgccgtgctggccatgcgtgacctgtgccgcctcctcgaggtctccccgggcccccagctggcccagcatgtctac

SEQ ID NO: 53421 - DNA, 75 bp, Homo sapiens
ccatgcgtgacctgtgccgcctcctcgaggtctccccgggcccccagctggcccagcatgtctaccccttcagta

SEQ ID NO: 53422 - DNA, 76 bp, Homo sapiens
gtgacctgtgccgcctcctcgaggtctccccgggcccccagctggcccagcatgtctaccccttcagtagcctgca

SEQ ID NO: 53423 - DNA, 83 bp, Homo sapiens
cccccagctggcccagcatgtctaccccttcagtagcctgcagtgctttgcctccctgcagcccctggtgcaggcagctgtgc

SEQ ID NO: 53424 - DNA, 82 bp, Homo sapiens
atgtctaccccttcagtagcctgcagtgctttgcctccctgcagcccctggtgcaggcagctgtgctgccccgggctgaggc

SEQ ID NO: 53425 - DNA, 82 bp, Homo sapiens
cttcagtagcctgcagtgctttgcctccctgcagcccctggtgcaggcagctgtgctgccccgggctgaggcccgcctcctg

SEQ ID NO: 53426 - DNA, 82 bp, Homo sapiens
tgcagtgctttgcctccctgcagcccctggtgcaggcagctgtgctgccccgggctgaggcccgcctcctggccctacacaa

SEQ ID NO: 53427 - DNA, 79 bp, Homo sapiens
tttgcctccctgcagcccctggtgcaggcagctgtgctgccccgggctgaggcccgcctcctggccctacacaacgtga

SEQ ID NO: 53428 - DNA, 81 bp, Homo sapiens
agcccctggtgcaggcagctgtgctgccccgggctgaggcccgcctcctggccctacacaacgtgagcttcatggagctgc

SEQ ID NO: 53429 - DNA, 86 bp, Homo sapiens
tggtgcaggcagctgtgctgccccgggctgaggcccgcctcctggccctacacaacgtgagcttcatggagctgctgagtgcacac

SEQ ID NO: 53430 - DNA, 82 bp, Homo sapiens
tgtgctgccccgggctgaggcccgcctcctggccctacacaacgtgagcttcatggagctgctgagtgcacaccgccgtgac

SEQ ID NO: 53431 - DNA, 79 bp, Homo sapiens
cgggctgaggcccgcctcctggccctacacaacgtgagcttcatggagctgctgagtgcacaccgccgtgaccggcagg

SEQ ID NO: 53432 - DNA, 79 bp, Homo sapiens
cgcctcctggccctacacaacgtgagcttcatggagctgctgagtgcacaccgccgtgaccggcaggggggcctgaaga

SEQ ID NO: 53433 - DNA, 79 bp, Homo sapiens
ctggccctacacaacgtgagcttcatggagctgctgagtgcacaccgccgtgaccggcaggggggcctgaagaagtaca

SEQ ID NO: 53434 - DNA, 79 bp, Homo sapiens
aacgtgagcttcatggagctgctgagtgcacaccgccgtgaccggcaggggggcctgaagaagtacagccgctatctaa

SEQ ID NO: 53435 - DNA, 80 bp, Homo sapiens
atggagctgctgagtgcacaccgccgtgaccggcaggggggcctgaagaagtacagccgctatctaagcctgcagaccac

SEQ ID NO: 53436 - DNA, 76 bp, Homo sapiens
ctgagtgcacaccgccgtgaccggcaggggggcctgaagaagtacagccgctatctaagcctgcagaccaccacgt

SEQ ID NO: 53437 - DNA, 73 bp, Homo sapiens
acaccgccgtgaccggcaggggggcctgaagaagtacagccgctatctaagcctgcagaccaccacgttgccc

SEQ ID NO: 53438 - DNA, 75 bp, Homo sapiens
gtgaccggcaggggggcctgaagaagtacagccgctatctaagcctgcagaccaccacgttgccccctgcccagc

SEQ ID NO: 53439 - DNA, 78 bp, Homo sapiens
ggcctgaagaagtacagccgctatctaagcctgcagaccaccacgttgccccctgcccagcctgctttcaacctgcag

SEQ ID NO: 53440 - DNA, 78 bp, Homo sapiens
aagaagtacagccgctatctaagcctgcagaccaccacgttgccccctgcccagcctgctttcaacctgcaggctctg

SEQ ID NO: 53441 - DNA, 78 bp, Homo sapiens
tatctaagcctgcagaccaccacgttgccccctgcccagcctgctttcaacctgcaggctctgggcacctactttgaa

SEQ ID NO: 53442 - DNA, 77 bp, Homo sapiens
tgcagaccaccacgttgccccctgcccagcctgctttcaacctgcaggctctgggcacctactttgaaggcctgttg

SEQ ID NO: 53443 - DNA, 74 bp, Homo sapiens
accaccacgttgccccctgcccagcctgctttcaacctgcaggctctgggcacctactttgaaggcctgttgga

SEQ ID NO: 53444 - DNA, 76 bp, Homo sapiens
cctgcccagcctgctttcaacctgcaggctctgggcacctactttgaaggcctgttggagggtccggcgctggcac

SEQ ID NO: 53445 - DNA, 75 bp, Homo sapiens
ctgctttcaacctgcaggctctgggcacctactttgaaggcctgttggagggtccggcgctggcacgggcagaag

SEQ ID NO: 53446 - DNA, 72 bp, Homo sapiens
aggctctgggcacctactttgaaggcctgttggagggtccggcgctggcacgggcagaaggagtctccaccc

SEQ ID NO: 53447 - DNA, 72 bp, Homo sapiens
acctactttgaaggcctgttggagggtccggcgctggcacgggcagaaggagtctccaccccacttgctggc

SEQ ID NO: 53448 - DNA, 75 bp, Homo sapiens
cctgttggagggtccggcgctggcacgggcagaaggagtctccaccccacttgctggccgtggcttggcagagag

SEQ ID NO: 53449 - DNA, 80 bp, Homo sapiens
ctggcacgggcagaaggagtctccaccccacttgctggccgtggcttggcagagagggcctcccagcagagctgagagga

SEQ ID NO: 53450 - DNA, 77 bp, Homo sapiens
cgggcagaaggagtctccaccccacttgctggccgtggcttggcagagagggcctcccagcagagctgagaggaggg

SEQ ID NO: 53451 - DNA, 79 bp, Homo sapiens
tctccaccccacttgctggccgtggcttggcagagagggcctcccagcagagctgagaggagggggtgaccagcttgga

SEQ ID NO: 53452 - DNA, 79 bp, Homo sapiens
acttgctggccgtggcttggcagagagggcctcccagcagagctgagaggagggggtgaccagcttggagtctctggtg

SEQ ID NO: 53453 - DNA, 81 bp, Homo sapiens
tggcttggcagagagggcctcccagcagagctgagaggagggggtgaccagcttggagtctctggtgggcagagagggatg

SEQ ID NO: 53454 - DNA, 77 bp, Homo sapiens
agagagggcctcccagcagagctgagaggagggggtgaccagcttggagtctctggtgggcagagagggatggggtc

SEQ ID NO: 53455 - DNA, 78 bp, Homo sapiens
ctcccagcagagctgagaggagggggtgaccagcttggagtctctggtgggcagagagggatggggtccctgagccag

SEQ ID NO: 53456 - DNA, 77 bp, Homo sapiens
ggggtgaccagcttggagtctctggtgggcagagagggatggggtccctgagccaggccccacccatcacagcattc

SEQ ID NO: 53457 - DNA, 76 bp, Homo sapiens
accagcttggagtctctggtgggcagagagggatggggtccctgagccaggccccacccatcacagcattcccagg

SEQ ID NO: 53458 - DNA, 73 bp, Homo sapiens
agagagggatggggtccctgagccaggccccacccatcacagcattcccaggtcctggtacccagccctcagt

SEQ ID NO: 53459 - DNA, 74 bp, Homo sapiens
atggggtccctgagccaggccccacccatcacagcattcccaggtcctggtacccagccctcagttgtcatttg

SEQ ID NO: 53460 - DNA, 75 bp, Homo sapiens
agccaggccccacccatcacagcattcccaggtcctggtacccagccctcagttgtcatttggttcagaatcagt

SEQ ID NO: 53461 - DNA, 74 bp, Homo sapiens
ccacccatcacagcattcccaggtcctggtacccagccctcagttgtcatttggttcagaatcagttccctttc

SEQ ID NO: 53462 - DNA, 75 bp, Homo sapiens
atcacagcattcccaggtcctggtacccagccctcagttgtcatttggttcagaatcagttccctttctctggga

SEQ ID NO: 53463 - DNA, 70 bp, Homo sapiens
aatcagttccctttctctgggaccaaatttcccttctctaaacatcctacagagaaggttccaaagctga

SEQ ID NO: 53464 - DNA, 72 bp, Homo sapiens
tttctctgggaccaaatttcccttctctaaacatcctacagagaaggttccaaagctgagcacccatcaccc

SEQ ID NO: 53465 - DNA, 73 bp, Homo sapiens
accaaatttcccttctctaaacatcctacagagaaggttccaaagctgagcacccatcaccctaggtgtgcac

SEQ ID NO: 53466 - DNA, 76 bp, Homo sapiens
ccttctctaaacatcctacagagaaggttccaaagctgagcacccatcaccctaggtgtgcaccagactcctatta

SEQ ID NO: 53467 - DNA, 76 bp, Homo sapiens
taaacatcctacagagaaggttccaaagctgagcacccatcaccctaggtgtgcaccagactcctattagcccctc

SEQ ID NO: 53468 - DNA, 76 bp, Homo sapiens
tacagagaaggttccaaagctgagcacccatcaccctaggtgtgcaccagactcctattagcccctccttccagga

SEQ ID NO: 53469 - DNA, 73 bp, Homo sapiens
acccatcaccctaggtgtgcaccagactcctattagcccctccttccaggagctagaaccagggaggtcctga

SEQ ID NO: 53470 - DNA, 73 bp, Homo sapiens
accctaggtgtgcaccagactcctattagcccctccttccaggagctagaaccagggaggtcctgagtgagga

SEQ ID NO: 53471 - DNA, 76 bp, Homo sapiens
tcctattagcccctccttccaggagctagaaccagggaggtcctgagtgaggaaggcatgacctctgggctctcta

SEQ ID NO: 53472 - DNA, 75 bp, Homo sapiens
aggagctagaaccagggaggtcctgagtgaggaaggcatgacctctgggctctctaggtggccctggtcttgccc

SEQ ID NO: 53473 - DNA, 75 bp, Homo sapiens
aaccagggaggtcctgagtgaggaaggcatgacctctgggctctctaggtggccctggtcttgccccatccatcc

SEQ ID NO: 53474 - DNA, 78 bp, Homo sapiens
tgagtgaggaaggcatgacctctgggctctctaggtggccctggtcttgccccatccatcccacctgccactaccttg

SEQ ID NO: 53475 - DNA, 75 bp, Homo sapiens
aaggcatgacctctgggctctctaggtggccctggtcttgccccatccatcccacctgccactaccttgggtgtc

SEQ ID NO: 53476 - DNA, 76 bp, Homo sapiens
ctctctaggtggccctggtcttgccccatccatcccacctgccactaccttgggtgtccttacagctctgccctga

SEQ ID NO: 53477 - DNA, 75 bp, Homo sapiens
tggccctggtcttgccccatccatcccacctgccactaccttgggtgtccttacagctctgccctgaccccagcc

SEQ ID NO: 53478 - DNA, 74 bp, Homo sapiens
cccatccatcccacctgccactaccttgggtgtccttacagctctgccctgaccccagcccctgcccctggaca

SEQ ID NO: 53479 - DNA, 75 bp, Homo sapiens
atcccacctgccactaccttgggtgtccttacagctctgccctgaccccagcccctgcccctggacacctgctga

SEQ ID NO: 53480 - DNA, 76 bp, Homo sapiens
actaccttgggtgtccttacagctctgccctgaccccagcccctgcccctggacacctgctgacagctcccacaca

SEQ ID NO: 53481 - DNA, 81 bp, Homo sapiens
tgtccttacagctctgccctgaccccagcccctgcccctggacacctgctgacagctcccacacagaacagtctgaggtga

SEQ ID NO: 53482 - DNA, 84 bp, Homo sapiens
tacagctctgccctgaccccagcccctgcccctggacacctgctgacagctcccacacagaacagtctgaggtgatgctggcta

SEQ ID NO: 53483 - DNA, 83 bp, Homo sapiens
ctgaccccagcccctgcccctggacacctgctgacagctcccacacagaacagtctgaggtgatgctggctacagccctggca

SEQ ID NO: 53484 - DNA, 86 bp, Homo sapiens
cctgcccctggacacctgctgacagctcccacacagaacagtctgaggtgatgctggctacagccctggcagcccatggcaactca

SEQ ID NO: 53485 - DNA, 86 bp, Homo sapiens
tggacacctgctgacagctcccacacagaacagtctgaggtgatgctggctacagccctggcagcccatggcaactcaaagtgcct

SEQ ID NO: 53486 - DNA, 84 bp, Homo sapiens
tgacagctcccacacagaacagtctgaggtgatgctggctacagccctggcagcccatggcaactcaaagtgccttccaaacca

SEQ ID NO: 53487 - DNA, 80 bp, Homo sapiens
acacagaacagtctgaggtgatgctggctacagccctggcagcccatggcaactcaaagtgccttccaaaccaaactgcc

SEQ ID NO: 53488 - DNA, 79 bp, Homo sapiens
aacagtctgaggtgatgctggctacagccctggcagcccatggcaactcaaagtgccttccaaaccaaactgcccctca

SEQ ID NO: 53489 - DNA, 78 bp, Homo sapiens
aggtgatgctggctacagccctggcagcccatggcaactcaaagtgccttccaaaccaaactgcccctcatgaggtta

SEQ ID NO: 53490 - DNA, 70 bp, Homo sapiens
atggcaactcaaagtgccttccaaaccaaactgcccctcatgaggttagggtcccccaccctccacctgc

SEQ ID NO: 53491 - DNA, 68 bp, Homo sapiens
aaagtgccttccaaaccaaactgcccctcatgaggttagggtcccccaccctccacctgcccagaggc

SEQ ID NO: 53492 - DNA, 68 bp, Homo sapiens
aaaccaaactgcccctcatgaggttagggtcccccaccctccacctgcccagaggccaactctgttcc

SEQ ID NO: 53493 - DNA, 75 bp, Homo sapiens
ccaccctccacctgcccagaggccaactctgttcccttctcctttcatcccagaggggcctcatcagcaaagaca

SEQ ID NO: 53494 - DNA, 79 bp, Homo sapiens
aggccaactctgttcccttctcctttcatcccagaggggcctcatcagcaaagacagaaactgatgttccatgcatgtc

SEQ ID NO: 53495 - DNA, 80 bp, Homo sapiens
tgttcccttctcctttcatcccagaggggcctcatcagcaaagacagaaactgatgttccatgcatgtccctgcttccaa

SEQ ID NO: 53496 - DNA, 81 bp, Homo sapiens
ttctcctttcatcccagaggggcctcatcagcaaagacagaaactgatgttccatgcatgtccctgcttccaaagcctgac

SEQ ID NO: 53497 - DNA, 79 bp, Homo sapiens
atcccagaggggcctcatcagcaaagacagaaactgatgttccatgcatgtccctgcttccaaagcctgaccttccaaa

SEQ ID NO: 53498 - DNA, 80 bp, Homo sapiens
cctcatcagcaaagacagaaactgatgttccatgcatgtccctgcttccaaagcctgaccttccaaagcttgcttccttc

SEQ ID NO: 53499 - DNA, 76 bp, Homo sapiens
aaagacagaaactgatgttccatgcatgtccctgcttccaaagcctgaccttccaaagcttgcttccttcctcctg

SEQ ID NO: 53500 - DNA, 80 bp, Homo sapiens
aaactgatgttccatgcatgtccctgcttccaaagcctgaccttccaaagcttgcttccttcctcctggctgcacagaca

SEQ ID NO: 53501 - DNA, 81 bp, Homo sapiens
ttccatgcatgtccctgcttccaaagcctgaccttccaaagcttgcttccttcctcctggctgcacagacacctctgcttg

SEQ ID NO: 53502 - DNA, 78 bp, Homo sapiens
cctgcttccaaagcctgaccttccaaagcttgcttccttcctcctggctgcacagacacctctgcttggccacagctt

SEQ ID NO: 53503 - DNA, 78 bp, Homo sapiens
aaagcctgaccttccaaagcttgcttccttcctcctggctgcacagacacctctgcttggccacagctttgctctttg

SEQ ID NO: 53504 - DNA, 79 bp, Homo sapiens
cttgcttccttcctcctggctgcacagacacctctgcttggccacagctttgctctttggtcctcaggccaccagaccc

SEQ ID NO: 53505 - DNA, 82 bp, Homo sapiens
tcctggctgcacagacacctctgcttggccacagctttgctctttggtcctcaggccaccagacccctcacagcatggccct

SEQ ID NO: 53506 - DNA, 79 bp, Homo sapiens
acagacacctctgcttggccacagctttgctctttggtcctcaggccaccagacccctcacagcatggcccttggctct

SEQ ID NO: 53507 - DNA, 80 bp, Homo sapiens
acctctgcttggccacagctttgctctttggtcctcaggccaccagacccctcacagcatggcccttggctcttcctgca

SEQ ID NO: 53508 - DNA, 79 bp, Homo sapiens
ttgctctttggtcctcaggccaccagacccctcacagcatggcccttggctcttcctgcactgccctcaccctcagccg

SEQ ID NO: 53509 - DNA, 78 bp, Homo sapiens
tcctcaggccaccagacccctcacagcatggcccttggctcttcctgcactgccctcaccctcagccgtcccaaggag

SEQ ID NO: 53510 - DNA, 80 bp, Homo sapiens
gacccctcacagcatggcccttggctcttcctgcactgccctcaccctcagccgtcccaaggagtgcccagcactactca

SEQ ID NO: 53511 - DNA, 82 bp, Homo sapiens
agcatggcccttggctcttcctgcactgccctcaccctcagccgtcccaaggagtgcccagcactactcagcatgtagtcca

SEQ ID NO: 53512 - DNA, 81 bp, Homo sapiens
ttggctcttcctgcactgccctcaccctcagccgtcccaaggagtgcccagcactactcagcatgtagtccaggacctgcg

SEQ ID NO: 53513 - DNA, 85 bp, Homo sapiens
ttcctgcactgccctcaccctcagccgtcccaaggagtgcccagcactactcagcatgtagtccaggacctgcggcatcagcatc

SEQ ID NO: 53514 - DNA, 80 bp, Homo sapiens
ccctcaccctcagccgtcccaaggagtgcccagcactactcagcatgtagtccaggacctgcggcatcagcatcccctgg

SEQ ID NO: 53515 - DNA, 82 bp, Homo sapiens
ctcagccgtcccaaggagtgcccagcactactcagcatgtagtccaggacctgcggcatcagcatcccctgggagcttctta

SEQ ID NO: 53516 - DNA, 82 bp, Homo sapiens
aaggagtgcccagcactactcagcatgtagtccaggacctgcggcatcagcatcccctgggagcttcttagaaatgcagacc

SEQ ID NO: 53517 - DNA, 83 bp, Homo sapiens
agcactactcagcatgtagtccaggacctgcggcatcagcatcccctgggagcttcttagaaatgcagacctgtgggctctac

SEQ ID NO: 53518 - DNA, 82 bp, Homo sapiens
actcagcatgtagtccaggacctgcggcatcagcatcccctgggagcttcttagaaatgcagacctgtgggctctaccacag

SEQ ID NO: 53519 - DNA, 83 bp, Homo sapiens
ctgcggcatcagcatcccctgggagcttcttagaaatgcagacctgtgggctctaccacaggcctctggaatcagaatcttca

SEQ ID NO: 53520 - DNA, 76 bp, Homo sapiens
atcccctgggagcttcttagaaatgcagacctgtgggctctaccacaggcctctggaatcagaatcttcagggtgg

SEQ ID NO: 53521 - DNA, 78 bp, Homo sapiens
agcttcttagaaatgcagacctgtgggctctaccacaggcctctggaatcagaatcttcagggtggggcccagcagtc

SEQ ID NO: 53522 - DNA, 77 bp, Homo sapiens
aaatgcagacctgtgggctctaccacaggcctctggaatcagaatcttcagggtggggcccagcagtctgtgtttta

SEQ ID NO: 53523 - DNA, 76 bp, Homo sapiens
tgtgggctctaccacaggcctctggaatcagaatcttcagggtggggcccagcagtctgtgttttaacaggttctc

SEQ ID NO: 53524 - DNA, 80 bp, Homo sapiens
tctggaatcagaatcttcagggtggggcccagcagtctgtgttttaacaggttctcccggtgatgctggtgcatgctcaa

SEQ ID NO: 53525 - DNA, 77 bp, Homo sapiens
atcagaatcttcagggtggggcccagcagtctgtgttttaacaggttctcccggtgatgctggtgcatgctcaagtt

SEQ ID NO: 53526 - DNA, 76 bp, Homo sapiens
ttcagggtggggcccagcagtctgtgttttaacaggttctcccggtgatgctggtgcatgctcaagtttgagaacc

SEQ ID NO: 53527 - DNA, 82 bp, Homo sapiens
agcagtctgtgttttaacaggttctcccggtgatgctggtgcatgctcaagtttgagaaccgctgctctcatagactgctcc

SEQ ID NO: 53528 - DNA, 86 bp, Homo sapiens
gtgatgctggtgcatgctcaagtttgagaaccgctgctctcatagactgctcctccaaggggaagcagtgtggaacagcagagaaa

SEQ ID NO: 53529 - DNA, 83 bp, Homo sapiens
ctggtgcatgctcaagtttgagaaccgctgctctcatagactgctcctccaaggggaagcagtgtggaacagcagagaaagtc

SEQ ID NO: 53530 - DNA, 77 bp, Homo sapiens
gtttgagaaccgctgctctcatagactgctcctccaaggggaagcagtgtggaacagcagagaaagtcccgtcccta

SEQ ID NO: 53531 - DNA, 79 bp, Homo sapiens
agaaccgctgctctcatagactgctcctccaaggggaagcagtgtggaacagcagagaaagtcccgtccctatctctga

SEQ ID NO: 53532 - DNA, 80 bp, Homo sapiens
atagactgctcctccaaggggaagcagtgtggaacagcagagaaagtcccgtccctatctctgactgtgcagtgagtgtg

SEQ ID NO: 53533 - DNA, 79 bp, Homo sapiens
tcctccaaggggaagcagtgtggaacagcagagaaagtcccgtccctatctctgactgtgcagtgagtgtggcctagga

SEQ ID NO: 53534 - DNA, 78 bp, Homo sapiens
gaagcagtgtggaacagcagagaaagtcccgtccctatctctgactgtgcagtgagtgtggcctaggaacaggtccct

SEQ ID NO: 53535 - DNA, 77 bp, Homo sapiens
tgtggaacagcagagaaagtcccgtccctatctctgactgtgcagtgagtgtggcctaggaacaggtcccttcctaa

SEQ ID NO: 53536 - DNA, 75 bp, Homo sapiens
agagaaagtcccgtccctatctctgactgtgcagtgagtgtggcctaggaacaggtcccttcctaagctctagtg

SEQ ID NO: 53537 - DNA, 77 bp, Homo sapiens
gtccctatctctgactgtgcagtgagtgtggcctaggaacaggtcccttcctaagctctagtgtccccatctgtaaa

SEQ ID NO: 53538 - DNA, 80 bp, Homo sapiens
ctgtaaaatgggctgattggcctccacggtcagagcggccatctggctgtgccatcctgcatttttaggaatggaaagca

SEQ ID NO: 53539 - DNA, 79 bp, Homo sapiens
aaatgggctgattggcctccacggtcagagcggccatctggctgtgccatcctgcatttttaggaatggaaagcaggcc

SEQ ID NO: 53540 - DNA, 81 bp, Homo sapiens
atctggctgtgccatcctgcatttttaggaatggaaagcaggcctctgaggcagtggacaggaagacttctcatccttgaa

SEQ ID NO: 53541 - DNA, 80 bp, Homo sapiens
ctgtgccatcctgcatttttaggaatggaaagcaggcctctgaggcagtggacaggaagacttctcatccttgaattcta

SEQ ID NO: 53542 - DNA, 76 bp, Homo sapiens
atttttaggaatggaaagcaggcctctgaggcagtggacaggaagacttctcatccttgaattctagctcccattc

SEQ ID NO: 53543 - DNA, 77 bp, Homo sapiens
aatggaaagcaggcctctgaggcagtggacaggaagacttctcatccttgaattctagctcccattccaaactgtta

SEQ ID NO: 53544 - DNA, 76 bp, Homo sapiens
aagcaggcctctgaggcagtggacaggaagacttctcatccttgaattctagctcccattccaaactgttagtccc

SEQ ID NO: 53545 - DNA, 73 bp, Homo sapiens
aggcagtggacaggaagacttctcatccttgaattctagctcccattccaaactgttagtccccaaccttgtg

SEQ ID NO: 53546 - DNA, 75 bp, Homo sapiens
acaggaagacttctcatccttgaattctagctcccattccaaactgttagtccccaaccttgtggtcacatcaga

SEQ ID NO: 53547 - DNA, 75 bp, Homo sapiens
acttctcatccttgaattctagctcccattccaaactgttagtccccaaccttgtggtcacatcagaggtcaaca

SEQ ID NO: 53548 - DNA, 76 bp, Homo sapiens
aattctagctcccattccaaactgttagtccccaaccttgtggtcacatcagaggtcaacagcagaacagaggcag

SEQ ID NO: 53549 - DNA, 78 bp, Homo sapiens
ctgttagtccccaaccttgtggtcacatcagaggtcaacagcagaacagaggcaggtcagggttgtccgctctgatta

SEQ ID NO: 53550 - DNA, 80 bp, Homo sapiens
cccaaccttgtggtcacatcagaggtcaacagcagaacagaggcaggtcagggttgtccgctctgattagcagaacgaca

SEQ ID NO: 53551 - DNA, 81 bp, Homo sapiens
ttgtggtcacatcagaggtcaacagcagaacagaggcaggtcagggttgtccgctctgattagcagaacgacagccccttc

SEQ ID NO: 53552 - DNA, 75 bp, Homo sapiens
aacagcagaacagaggcaggtcagggttgtccgctctgattagcagaacgacagccccttcctcctcctccctcc

SEQ ID NO: 53553 - DNA, 75 bp, Homo sapiens
ttcctcctcctccctccttcccatccctactcattagctccctgctcctgggatgcttcccaagcagcccaggcc

SEQ ID NO: 53554 - DNA, 81 bp, Homo sapiens
ttcccatccctactcattagctccctgctcctgggatgcttcccaagcagcccaggcctctagcctccatggctgatgacc

SEQ ID NO: 53555 - DNA, 84 bp, Homo sapiens
ctactcattagctccctgctcctgggatgcttcccaagcagcccaggcctctagcctccatggctgatgacctcagctttcaca

SEQ ID NO: 53556 - DNA, 84 bp, Homo sapiens
ctgctcctgggatgcttcccaagcagcccaggcctctagcctccatggctgatgacctcagctttcacactggtgaagtctgtg

SEQ ID NO: 53557 - DNA, 83 bp, Homo sapiens
tcctgggatgcttcccaagcagcccaggcctctagcctccatggctgatgacctcagctttcacactggtgaagtctgtgtac

SEQ ID NO: 53558 - DNA, 83 bp, Homo sapiens
gatgcttcccaagcagcccaggcctctagcctccatggctgatgacctcagctttcacactggtgaagtctgtgtacccatac

SEQ ID NO: 53559 - DNA, 82 bp, Homo sapiens
atgcttcccaagcagcccaggcctctagcctccatggctgatgacctcagctttcacactggtgaagtctgtgtacccatac

SEQ ID NO: 53560 - DNA, 84 bp, Homo sapiens
ttcccaagcagcccaggcctctagcctccatggctgatgacctcagctttcacactggtgaagtctgtgtacccatactgcagc

SEQ ID NO: 53561 - DNA, 82 bp, Homo sapiens
agcccaggcctctagcctccatggctgatgacctcagctttcacactggtgaagtctgtgtacccatactgcagccccatcc

SEQ ID NO: 53562 - DNA, 82 bp, Homo sapiens
aggcctctagcctccatggctgatgacctcagctttcacactggtgaagtctgtgtacccatactgcagccccatcccatgg

SEQ ID NO: 53563 - DNA, 79 bp, Homo sapiens
tgatgacctcagctttcacactggtgaagtctgtgtacccatactgcagccccatcccatggggcccctgaagacccac

SEQ ID NO: 53564 - DNA, 77 bp, Homo sapiens
acctcagctttcacactggtgaagtctgtgtacccatactgcagccccatcccatggggcccctgaagacccactga

SEQ ID NO: 53565 - DNA, 76 bp, Homo sapiens
tttcacactggtgaagtctgtgtacccatactgcagccccatcccatggggcccctgaagacccactgaggaattc

SEQ ID NO: 53566 - DNA, 72 bp, Homo sapiens
aagtctgtgtacccatactgcagccccatcccatggggcccctgaagacccactgaggaattccgtagggtc

SEQ ID NO: 53567 - DNA, 69 bp, Homo sapiens
cagccccatcccatggggcccctgaagacccactgaggaattccgtagggtcttgttcccacgaccgga

SEQ ID NO: 53568 - DNA, 72 bp, Homo sapiens
ccatggggcccctgaagacccactgaggaattccgtagggtcttgttcccacgaccggagtgctggctctca

SEQ ID NO: 53569 - DNA, 72 bp, Homo sapiens
cctgaagacccactgaggaattccgtagggtcttgttcccacgaccggagtgctggctctcacagtgaattt

SEQ ID NO: 53570 - DNA, 74 bp, Homo sapiens
acccactgaggaattccgtagggtcttgttcccacgaccggagtgctggctctcacagtgaattttgatgcatt

SEQ ID NO: 53571 - DNA, 73 bp, Homo sapiens
aggaattccgtagggtcttgttcccacgaccggagtgctggctctcacagtgaattttgatgcatttaaaata

SEQ ID NO: 53572 - DNA, 80 bp, Homo sapiens
tcttgttcccacgaccggagtgctggctctcacagtgaattttgatgcatttaaaataagattctgatgccagactgtta

SEQ ID NO: 53573 - DNA, 81 bp, Homo sapiens
gtgctggctctcacagtgaattttgatgcatttaaaataagattctgatgccagactgttaaaacaggcgctggttctgaa

SEQ ID NO: 53574 - DNA, 80 bp, Homo sapiens
tcacagtgaattttgatgcatttaaaataagattctgatgccagactgttaaaacaggcgctggttctgaagcaccgatg

SEQ ID NO: 53575 - DNA, 76 bp, Homo sapiens
aattttgatgcatttaaaataagattctgatgccagactgttaaaacaggcgctggttctgaagcaccgatggaaa

SEQ ID NO: 53576 - DNA, 80 bp, Homo sapiens
tttaaaataagattctgatgccagactgttaaaacaggcgctggttctgaagcaccgatggaaacagattgatgcagatg

SEQ ID NO: 53577 - DNA, 81 bp, Homo sapiens
ataagattctgatgccagactgttaaaacaggcgctggttctgaagcaccgatggaaacagattgatgcagatggaaggag

SEQ ID NO: 53578 - DNA, 79 bp, Homo sapiens
atgccagactgttaaaacaggcgctggttctgaagcaccgatggaaacagattgatgcagatggaaggaggaagggaga

SEQ ID NO: 53579 - DNA, 77 bp, Homo sapiens
tgttaaaacaggcgctggttctgaagcaccgatggaaacagattgatgcagatggaaggaggaagggagactgggcc

SEQ ID NO: 53580 - DNA, 78 bp, Homo sapiens
ctggttctgaagcaccgatggaaacagattgatgcagatggaaggaggaagggagactgggcccactgatttccagcc

SEQ ID NO: 53581 - DNA, 79 bp, Homo sapiens
tgaagcaccgatggaaacagattgatgcagatggaaggaggaagggagactgggcccactgatttccagccccaccatg

SEQ ID NO: 53582 - DNA, 80 bp, Homo sapiens
attgatgcagatggaaggaggaagggagactgggcccactgatttccagccccaccatgtgtgctgttttcagatgtgat

SEQ ID NO: 53583 - DNA, 76 bp, Homo sapiens
atggaaggaggaagggagactgggcccactgatttccagccccaccatgtgtgctgttttcagatgtgattgaggg

SEQ ID NO: 53584 - DNA, 76 bp, Homo sapiens
aagggagactgggcccactgatttccagccccaccatgtgtgctgttttcagatgtgattgaggggtgttctgccc

SEQ ID NO: 53585 - DNA, 80 bp, Homo sapiens
tccagccccaccatgtgtgctgttttcagatgtgattgaggggtgttctgccctgcctccactgtcacagcctttaataa

SEQ ID NO: 53586 - DNA, 80 bp, Homo sapiens
accatgtgtgctgttttcagatgtgattgaggggtgttctgccctgcctccactgtcacagcctttaataaagatgtgaa

SEQ ID NO: 53587 - DNA, 78 bp, Homo sapiens
ctgttttcagatgtgattgaggggtgttctgccctgcctccactgtcacagcctttaataaagatgtgaatcttgaaa

SEQ ID NO: 53588 - DNA, 87 bp, Homo sapiens
ttctgccctgcctccactgtcacagcctttaataaagatgtgaatcttgaaagcctgatgctccaatcacagactctgctcagcatc

SEQ ID NO: 53589 - DNA, 83 bp, Homo sapiens
actgtcacagcctttaataaagatgtgaatcttgaaagcctgatgctccaatcacagactctgctcagcatccccagaggaac

SEQ ID NO: 53590 - DNA, 82 bp, Homo sapiens
cctttaataaagatgtgaatcttgaaagcctgatgctccaatcacagactctgctcagcatccccagaggaaccactgagaa

SEQ ID NO: 53591 - DNA, 82 bp, Homo sapiens
aataaagatgtgaatcttgaaagcctgatgctccaatcacagactctgctcagcatccccagaggaaccactgagaagcctt

SEQ ID NO: 53592 - DNA, 82 bp, Homo sapiens
aatcttgaaagcctgatgctccaatcacagactctgctcagcatccccagaggaaccactgagaagccttttgcctggatag

SEQ ID NO: 53593 - DNA, 80 bp, Homo sapiens
atcacagactctgctcagcatccccagaggaaccactgagaagccttttgcctggataggagggggctctcccaggcata

SEQ ID NO: 53594 - DNA, 79 bp, Homo sapiens
tctgctcagcatccccagaggaaccactgagaagccttttgcctggataggagggggctctcccaggcataggcttgtg

SEQ ID NO: 53595 - DNA, 74 bp, Homo sapiens
atccccagaggaaccactgagaagccttttgcctggataggagggggctctcccaggcataggcttgtggccac

SEQ ID NO: 53596 - DNA, 76 bp, Homo sapiens
aaccactgagaagccttttgcctggataggagggggctctcccaggcataggcttgtggccacttgcccagcacaa

SEQ ID NO: 53597 - DNA, 74 bp, Homo sapiens
aagccttttgcctggataggagggggctctcccaggcataggcttgtggccacttgcccagcacaactgtgttt

SEQ ID NO: 53598 - DNA, 75 bp, Homo sapiens
ttttgcctggataggagggggctctcccaggcataggcttgtggccacttgcccagcacaactgtgttttgtggg

SEQ ID NO: 53599 - DNA, 76 bp, Homo sapiens
ctctcccaggcataggcttgtggccacttgcccagcacaactgtgttttgtggggcgtcttttaggacttagcaga

SEQ ID NO: 53600 - DNA, 76 bp, Homo sapiens
ataggcttgtggccacttgcccagcacaactgtgttttgtggggcgtcttttaggacttagcagagctgagagccc

SEQ ID NO: 53601 - DNA, 76 bp, Homo sapiens
ccacttgcccagcacaactgtgttttgtggggcgtcttttaggacttagcagagctgagagccctttgttgctcaa

SEQ ID NO: 53602 - DNA, 79 bp, Homo sapiens
gcacaactgtgttttgtggggcgtcttttaggacttagcagagctgagagccctttgttgctcaatgctgtgagcctta

SEQ ID NO: 53603 - DNA, 80 bp, Homo sapiens
tgttttgtggggcgtcttttaggacttagcagagctgagagccctttgttgctcaatgctgtgagccttaagcatgtgaa

SEQ ID NO: 53604 - DNA, 82 bp, Homo sapiens
gcgtcttttaggacttagcagagctgagagccctttgttgctcaatgctgtgagccttaagcatgtgaatccccccacatga

SEQ ID NO: 53605 - DNA, 81 bp, Homo sapiens
ttttaggacttagcagagctgagagccctttgttgctcaatgctgtgagccttaagcatgtgaatccccccacatgacaag

SEQ ID NO: 53606 - DNA, 80 bp, Homo sapiens
gagctgagagccctttgttgctcaatgctgtgagccttaagcatgtgaatccccccacatgacaagtggggagacccagg

SEQ ID NO: 53607 - DNA, 76 bp, Homo sapiens
ttgctcaatgctgtgagccttaagcatgtgaatccccccacatgacaagtggggagacccagggtaggctttcctt

SEQ ID NO: 53608 - DNA, 76 bp, Homo sapiens
tgtgagccttaagcatgtgaatccccccacatgacaagtggggagacccagggtaggctttcctttggatcatctc

SEQ ID NO: 53609 - DNA, 74 bp, Homo sapiens
ttaagcatgtgaatccccccacatgacaagtggggagacccagggtaggctttcctttggatcatctccaaatg

SEQ ID NO: 53610 - DNA, 72 bp, Homo sapiens
aatccccccacatgacaagtggggagacccagggtaggctttcctttggatcatctccaaatgggagtgcca

SEQ ID NO: 53611 - DNA, 75 bp, Homo sapiens
acatgacaagtggggagacccagggtaggctttcctttggatcatctccaaatgggagtgccatgtggcaggaaa

SEQ ID NO: 53612 - DNA, 76 bp, Homo sapiens
gagacccagggtaggctttcctttggatcatctccaaatgggagtgccatgtggcaggaaagaagcaccgatttca

SEQ ID NO: 53613 - DNA, 75 bp, Homo sapiens
gtaggctttcctttggatcatctccaaatgggagtgccatgtggcaggaaagaagcaccgatttcaagaattact

SEQ ID NO: 53614 - DNA, 76 bp, Homo sapiens
tttcctttggatcatctccaaatgggagtgccatgtggcaggaaagaagcaccgatttcaagaattacttcctaga

SEQ ID NO: 53615 - DNA, 75 bp, Homo sapiens
atctccaaatgggagtgccatgtggcaggaaagaagcaccgatttcaagaattacttcctagagaaagtcaggaa

SEQ ID NO: 53616 - DNA, 74 bp, Homo sapiens
aaatgggagtgccatgtggcaggaaagaagcaccgatttcaagaattacttcctagagaaagtcaggaactaga

SEQ ID NO: 53617 - DNA, 76 bp, Homo sapiens
atgtggcaggaaagaagcaccgatttcaagaattacttcctagagaaagtcaggaactagagaccagagtctgcag

SEQ ID NO: 53618 - DNA, 75 bp, Homo sapiens
aattacttcctagagaaagtcaggaactagagaccagagtctgcaggaactttgccactgcccttcactggctaa

SEQ ID NO: 53619 - DNA, 78 bp, Homo sapiens
tagagaaagtcaggaactagagaccagagtctgcaggaactttgccactgcccttcactggctaatcctgtacttctc

SEQ ID NO: 53620 - DNA, 81 bp, Homo sapiens
tagagaccagagtctgcaggaactttgccactgcccttcactggctaatcctgtacttctctctgtgttccttgagtgaca

SEQ ID NO: 53621 - DNA, 77 bp, Homo sapiens
tgcaggaactttgccactgcccttcactggctaatcctgtacttctctctgtgttccttgagtgacaggtggtaaaa

SEQ ID NO: 53622 - DNA, 74 bp, Homo sapiens
tgccactgcccttcactggctaatcctgtacttctctctgtgttccttgagtgacaggtggtaaaacccttaaa

SEQ ID NO: 53623 - DNA, 70 bp, Homo sapiens
cttcactggctaatcctgtacttctctctgtgttccttgagtgacaggtggtaaaacccttaaaaaggga

SEQ ID NO: 53624 - DNA, 69 bp, Homo sapiens
taatcctgtacttctctctgtgttccttgagtgacaggtggtaaaacccttaaaaagggaggtgtggga

SEQ ID NO: 53625 - DNA, 69 bp, Homo sapiens
tgtacttctctctgtgttccttgagtgacaggtggtaaaacccttaaaaagggaggtgtgggaggccca

SEQ ID NO: 53626 - DNA, 66 bp, Homo sapiens
tgttccttgagtgacaggtggtaaaacccttaaaaagggaggtgtgggaggcccaggactttggta

SEQ ID NO: 53627 - DNA, 65 bp, Homo sapiens
agtgacaggtggtaaaacccttaaaaagggaggtgtgggaggcccaggactttggtaacaggtga

SEQ ID NO: 53628 - DNA, 67 bp, Homo sapiens
gtaaaacccttaaaaagggaggtgtgggaggcccaggactttggtaacaggtgatgaatgtgttgtc

SEQ ID NO: 53629 - DNA, 72 bp, Homo sapiens
ttaaaaagggaggtgtgggaggcccaggactttggtaacaggtgatgaatgtgttgtcttggccatcacagg

SEQ ID NO: 53630 - DNA, 76 bp, Homo sapiens
aggtgtgggaggcccaggactttggtaacaggtgatgaatgtgttgtcttggccatcacaggtggagcttcagtta

SEQ ID NO: 53631 - DNA, 75 bp, Homo sapiens
aggcccaggactttggtaacaggtgatgaatgtgttgtcttggccatcacaggtggagcttcagttagtacccga

SEQ ID NO: 53632 - DNA, 74 bp, Homo sapiens
actttggtaacaggtgatgaatgtgttgtcttggccatcacaggtggagcttcagttagtacccgagggattcc

SEQ ID NO: 53633 - DNA, 79 bp, Homo sapiens
gtgatgaatgtgttgtcttggccatcacaggtggagcttcagttagtacccgagggattcccctggcacaagcattata

SEQ ID NO: 53634 - DNA, 76 bp, Homo sapiens
tgttgtcttggccatcacaggtggagcttcagttagtacccgagggattcccctggcacaagcattataggaatta

SEQ ID NO: 53635 - DNA, 73 bp, Homo sapiens
acaggtggagcttcagttagtacccgagggattcccctggcacaagcattataggaattagtccaccactggc

SEQ ID NO: 53636 - DNA, 74 bp, Homo sapiens
cttcagttagtacccgagggattcccctggcacaagcattataggaattagtccaccactggcgtgggtgagca

SEQ ID NO: 53637 - DNA, 76 bp, Homo sapiens
aagcattataggaattagtccaccactggcgtgggtgagcagccaggtaatgggaattgatcagtgccaccaccct

SEQ ID NO: 53638 - DNA, 76 bp, Homo sapiens
tataggaattagtccaccactggcgtgggtgagcagccaggtaatgggaattgatcagtgccaccacccttgaccc

SEQ ID NO: 53639 - DNA, 75 bp, Homo sapiens
agtccaccactggcgtgggtgagcagccaggtaatgggaattgatcagtgccaccacccttgaccccaactacca

SEQ ID NO: 53640 - DNA, 78 bp, Homo sapiens
tgggtgagcagccaggtaatgggaattgatcagtgccaccacccttgaccccaactaccatcccagatgcccagattc

SEQ ID NO: 53641 - DNA, 75 bp, Homo sapiens
taatgggaattgatcagtgccaccacccttgaccccaactaccatcccagatgcccagattccagtcctggagtt

SEQ ID NO: 53642 - DNA, 77 bp, Homo sapiens
ttgatcagtgccaccacccttgaccccaactaccatcccagatgcccagattccagtcctggagttttattctctca

SEQ ID NO: 53643 - DNA, 73 bp, Homo sapiens
acccttgaccccaactaccatcccagatgcccagattccagtcctggagttttattctctcagcttgatcctt

SEQ ID NO: 53644 - DNA, 77 bp, Homo sapiens
ccaactaccatcccagatgcccagattccagtcctggagttttattctctcagcttgatcctttgaccaagaagatc

SEQ ID NO: 53645 - DNA, 77 bp, Homo sapiens
ccagattccagtcctggagttttattctctcagcttgatcctttgaccaagaagatccagtcccaatatgtcacctg

SEQ ID NO: 53646 - DNA, 78 bp, Homo sapiens
agtcctggagttttattctctcagcttgatcctttgaccaagaagatccagtcccaatatgtcacctgtgcttcatct

SEQ ID NO: 53647 - DNA, 80 bp, Homo sapiens
cagcttgatcctttgaccaagaagatccagtcccaatatgtcacctgtgcttcatctttggactatatctcaggtgttta

SEQ ID NO: 53648 - DNA, 78 bp, Homo sapiens
ctttgaccaagaagatccagtcccaatatgtcacctgtgcttcatctttggactatatctcaggtgtttacgtgtcaa

SEQ ID NO: 53649 - DNA, 77 bp, Homo sapiens
aagaagatccagtcccaatatgtcacctgtgcttcatctttggactatatctcaggtgtttacgtgtcaactaatgg

SEQ ID NO: 53650 - DNA, 77 bp, Homo sapiens
agtcccaatatgtcacctgtgcttcatctttggactatatctcaggtgtttacgtgtcaactaatgggagcttactg

SEQ ID NO: 53651 - DNA, 77 bp, Homo sapiens
atatgtcacctgtgcttcatctttggactatatctcaggtgtttacgtgtcaactaatgggagcttactgggttaga

SEQ ID NO: 53652 - DNA, 76 bp, Homo sapiens
ttcatctttggactatatctcaggtgtttacgtgtcaactaatgggagcttactgggttagaagtcaggacactga

SEQ ID NO: 53653 - DNA, 73 bp, Homo sapiens
tttggactatatctcaggtgtttacgtgtcaactaatgggagcttactgggttagaagtcaggacactgagtt

SEQ ID NO: 53654 - DNA, 74 bp, Homo sapiens
tcaggtgtttacgtgtcaactaatgggagcttactgggttagaagtcaggacactgagtttcaatcctcactta

SEQ ID NO: 53655 - DNA, 73 bp, Homo sapiens
tttacgtgtcaactaatgggagcttactgggttagaagtcaggacactgagtttcaatcctcacttagtagtc

SEQ ID NO: 53656 - DNA, 74 bp, Homo sapiens
taatgggagcttactgggttagaagtcaggacactgagtttcaatcctcacttagtagtctgtggccctctttg

SEQ ID NO: 53657 - DNA, 74 bp, Homo sapiens
tagaagtcaggacactgagtttcaatcctcacttagtagtctgtggccctctttggcacattaacctccctcct

SEQ ID NO: 53658 - DNA, 75 bp, Homo sapiens
aggacactgagtttcaatcctcacttagtagtctgtggccctctttggcacattaacctccctccttgatcctca

SEQ ID NO: 53659 - DNA, 75 bp, Homo sapiens
agtttcaatcctcacttagtagtctgtggccctctttggcacattaacctccctccttgatcctcaggctgcacc

SEQ ID NO: 53660 - DNA, 76 bp, Homo sapiens
acttagtagtctgtggccctctttggcacattaacctccctccttgatcctcaggctgcacctctggcaaatggga

SEQ ID NO: 53661 - DNA, 78 bp, Homo sapiens
tgtggccctctttggcacattaacctccctccttgatcctcaggctgcacctctggcaaatgggagaatgcggctcct

SEQ ID NO: 53662 - DNA, 78 bp, Homo sapiens
tttggcacattaacctccctccttgatcctcaggctgcacctctggcaaatgggagaatgcggctccttttgacttca

SEQ ID NO: 53663 - DNA, 75 bp, Homo sapiens
acattaacctccctccttgatcctcaggctgcacctctggcaaatgggagaatgcggctccttttgacttcaagg

SEQ ID NO: 53664 - DNA, 77 bp, Homo sapiens
cttgatcctcaggctgcacctctggcaaatgggagaatgcggctccttttgacttcaagggatctttgtgggaacca

SEQ ID NO: 53665 - DNA, 75 bp, Homo sapiens
aggctgcacctctggcaaatgggagaatgcggctccttttgacttcaagggatctttgtgggaaccaatgagaaa

SEQ ID NO: 53666 - DNA, 74 bp, Homo sapiens
aaatgggagaatgcggctccttttgacttcaagggatctttgtgggaaccaatgagaaaatgtgtgtgaagata

SEQ ID NO: 53667 - DNA, 73 bp, Homo sapiens
ggctccttttgacttcaagggatctttgtgggaaccaatgagaaaatgtgtgtgaagatagctttttggtata

SEQ ID NO: 53668 - DNA, 71 bp, Homo sapiens
cttttgacttcaagggatctttgtgggaaccaatgagaaaatgtgtgtgaagatagctttttggtatattt

SEQ ID NO: 53669 - DNA, 72 bp, Homo sapiens
aagggatctttgtgggaaccaatgagaaaatgtgtgtgaagatagctttttggtatattttaaaagtgcaca

SEQ ID NO: 53670 - DNA, 73 bp, Homo sapiens
caatgagaaaatgtgtgtgaagatagctttttggtatattttaaaagtgcacaaatttaagatcttactgctt

SEQ ID NO: 53671 - DNA, 73 bp, Homo sapiens
atgtgtgtgaagatagctttttggtatattttaaaagtgcacaaatttaagatcttactgctttataaagtgc

SEQ ID NO: 53672 - DNA, 71 bp, Homo sapiens
agatagctttttggtatattttaaaagtgcacaaatttaagatcttactgctttataaagtgctttatgaa

SEQ ID NO: 53673 - DNA, 71 bp, Homo sapiens
caaatttaagatcttactgctttataaagtgctttatgaattataggaaaataaacacattttagatctta

SEQ ID NO: 53674 - DNA, 70 bp, Homo sapiens
gatcttactgctttataaagtgctttatgaattataggaaaataaacacattttagatcttagaaaaaaa

SEQ ID NO: 53675 - DNA, 85 bp, Homo sapiens
actggagctgtgtgcagggccagcgcggagcccgagcagccgcggtgaagcgcctgtgctctgccgagactgccgtgcccattgc

SEQ ID NO: 53676 - DNA, 84 bp, Homo sapiens
tgtgcagggccagcgcggagcccgagcagccgcggtgaagcgcctgtgctctgccgagactgccgtgcccattgctcgcctcgg

SEQ ID NO: 53677 - DNA, 81 bp, Homo sapiens
agggccagcgcggagcccgagcagccgcggtgaagcgcctgtgctctgccgagactgccgtgcccattgctcgcctcggtc

SEQ ID NO: 53678 - DNA, 80 bp, Homo sapiens
agcccgagcagccgcggtgaagcgcctgtgctctgccgagactgccgtgcccattgctcgcctcggtcgccgccgcttta

SEQ ID NO: 53679 - DNA, 73 bp, Homo sapiens
tgcccattgctcgcctcggtcgccgccgctttagccgcctccgggggagcggccgcctattgtctttctccgc

SEQ ID NO: 53680 - DNA, 71 bp, Homo sapiens
attgctcgcctcggtcgccgccgctttagccgcctccgggggagcggccgcctattgtctttctccgcggc

SEQ ID NO: 53681 - DNA, 70 bp, Homo sapiens
tcgccgccgctttagccgcctccgggggagcggccgcctattgtctttctccgcggcgaaggtgaagagt

SEQ ID NO: 53682 - DNA, 71 bp, Homo sapiens
tttagccgcctccgggggagcggccgcctattgtctttctccgcggcgaaggtgaagagttgtcccagctc

SEQ ID NO: 53683 - DNA, 70 bp, Homo sapiens
tccgggggagcggccgcctattgtctttctccgcggcgaaggtgaagagttgtcccagctcggcccgcgg

SEQ ID NO: 53684 - DNA, 70 bp, Homo sapiens
agcggccgcctattgtctttctccgcggcgaaggtgaagagttgtcccagctcggcccgcgggggagccc

SEQ ID NO: 53685 - DNA, 69 bp, Homo sapiens
cctattgtctttctccgcggcgaaggtgaagagttgtcccagctcggcccgcgggggagccccgggagc

SEQ ID NO: 53686 - DNA, 68 bp, Homo sapiens
cacctaggactttaggtggcttatatattttcggtgacaacttttaattttattctcatttattccat

SEQ ID NO: 53687 - DNA, 71 bp, Homo sapiens
gtggcttatatattttcggtgacaacttttaattttattctcatttattccatttctgtttcagtgtcctg

SEQ ID NO: 53688 - DNA, 71 bp, Homo sapiens
atattttcggtgacaacttttaattttattctcatttattccatttctgtttcagtgtcctgggtcatgaa

SEQ ID NO: 53689 - DNA, 72 bp, Homo sapiens
gacaacttttaattttattctcatttattccatttctgtttcagtgtcctgggtcatgaaacttaatccaca

SEQ ID NO: 53690 - DNA, 74 bp, Homo sapiens
tttaattttattctcatttattccatttctgtttcagtgtcctgggtcatgaaacttaatccacagcaagctcc

SEQ ID NO: 53691 - DNA, 77 bp, Homo sapiens
tcatttattccatttctgtttcagtgtcctgggtcatgaaacttaatccacagcaagctcccttatatgtgagtaaa

SEQ ID NO: 53692 - DNA, 79 bp, Homo sapiens
catttctgtttcagtgtcctgggtcatgaaacttaatccacagcaagctcccttatatgtgagtaaatcatgagatttc

SEQ ID NO: 53693 - DNA, 78 bp, Homo sapiens
tttcagtgtcctgggtcatgaaacttaatccacagcaagctcccttatatgtgagtaaatcatgagatttcttattat

SEQ ID NO: 53694 - DNA, 76 bp, Homo sapiens
ctgggtcatgaaacttaatccacagcaagctcccttatatgtgagtaaatcatgagatttcttattattttgtgtt

SEQ ID NO: 53695 - DNA, 77 bp, Homo sapiens
aacttaatccacagcaagctcccttatatgtgagtaaatcatgagatttcttattattttgtgtttatctgttctgc

SEQ ID NO: 53696 - DNA, 78 bp, Homo sapiens
tccacagcaagctcccttatatgtgagtaaatcatgagatttcttattattttgtgtttatctgttctgcttacttgt

SEQ ID NO: 53697 - DNA, 70 bp, Homo sapiens
aagaggaaccttactaatgtaaacttgctatattgtttcctttcctagggtgattgtgttgttacagtgc

SEQ ID NO: 53698 - DNA, 74 bp, Homo sapiens
accttactaatgtaaacttgctatattgtttcctttcctagggtgattgtgttgttacagtgctgcttgctgaa

SEQ ID NO: 53699 - DNA, 77 bp, Homo sapiens
taaacttgctatattgtttcctttcctagggtgattgtgttgttacagtgctgcttgctgaagaggacaaagctgaa

SEQ ID NO: 53700 - DNA, 78 bp, Homo sapiens
ttgtttcctttcctagggtgattgtgttgttacagtgctgcttgctgaagaggacaaagctgaagatgatgtagtgtt

SEQ ID NO: 53701 - DNA, 79 bp, Homo sapiens
ttcctagggtgattgtgttgttacagtgctgcttgctgaagaggacaaagctgaagatgatgtagtgttttacttggta

SEQ ID NO: 53702 - DNA, 76 bp, Homo sapiens
attgtgttgttacagtgctgcttgctgaagaggacaaagctgaagatgatgtagtgttttacttggtatttttggg

SEQ ID NO: 53703 - DNA, 76 bp, Homo sapiens
gttgttacagtgctgcttgctgaagaggacaaagctgaagatgatgtagtgttttacttggtatttttgggttcca

SEQ ID NO: 53704 - DNA, 72 bp, Homo sapiens
cttgctgaagaggacaaagctgaagatgatgtagtgttttacttggtatttttgggttccaccctccgtcac

SEQ ID NO: 53705 - DNA, 70 bp, Homo sapiens
aggacaaagctgaagatgatgtagtgttttacttggtatttttgggttccaccctccgtcactgtacaag

SEQ ID NO: 53706 - DNA, 70 bp, Homo sapiens
aaagctgaagatgatgtagtgttttacttggtatttttgggttccaccctccgtcactgtacaagtactc

SEQ ID NO: 53707 - DNA, 66 bp, Homo sapiens
gtagtgttttacttggtatttttgggttccaccctccgtcactgtacaagtactcggaaggtcagt

SEQ ID NO: 53708 - DNA, 69 bp, Homo sapiens
tttacttggtatttttgggttccaccctccgtcactgtacaagtactcggaaggtcagttctgatacat

SEQ ID NO: 53709 - DNA, 71 bp, Homo sapiens
gtatttttgggttccaccctccgtcactgtacaagtactcggaaggtcagttctgatacattggagaccat

SEQ ID NO: 53710 - DNA, 73 bp, Homo sapiens
accctccgtcactgtacaagtactcggaaggtcagttctgatacattggagaccattgctcctggtaagtatt

SEQ ID NO: 53711 - DNA, 75 bp, Homo sapiens
actgtacaagtactcggaaggtcagttctgatacattggagaccattgctcctggtaagtatttgaatgggatcc

SEQ ID NO: 53712 - DNA, 74 bp, Homo sapiens
aagtactcggaaggtcagttctgatacattggagaccattgctcctggtaagtatttgaatgggatccttacta

SEQ ID NO: 53713 - DNA, 74 bp, Homo sapiens
aaggtcagttctgatacattggagaccattgctcctggtaagtatttgaatgggatccttactagcttttccta

SEQ ID NO: 53714 - DNA, 77 bp, Homo sapiens
agtgaggctctaatactgttttatttgctgcctgtgtttcctttaggtcatgattgttgtgaaacagtgaaggtgca

SEQ ID NO: 53715 - DNA, 79 bp, Homo sapiens
tctaatactgttttatttgctgcctgtgtttcctttaggtcatgattgttgtgaaacagtgaaggtgcagctctgtgct

SEQ ID NO: 53716 - DNA, 79 bp, Homo sapiens
tgttttatttgctgcctgtgtttcctttaggtcatgattgttgtgaaacagtgaaggtgcagctctgtgcttccaaaga

SEQ ID NO: 53717 - DNA, 75 bp, Homo sapiens
cctgtgtttcctttaggtcatgattgttgtgaaacagtgaaggtgcagctctgtgcttccaaagagggccttccc

SEQ ID NO: 53718 - DNA, 77 bp, Homo sapiens
atgattgttgtgaaacagtgaaggtgcagctctgtgcttccaaagagggccttcccgtgtttgtggtggctgaagaa

SEQ ID NO: 53719 - DNA, 76 bp, Homo sapiens
tgaaacagtgaaggtgcagctctgtgcttccaaagagggccttcccgtgtttgtggtggctgaagaagactttcat

SEQ ID NO: 53720 - DNA, 74 bp, Homo sapiens
aaggtgcagctctgtgcttccaaagagggccttcccgtgtttgtggtggctgaagaagactttcatttcgtcca

SEQ ID NO: 53721 - DNA, 74 bp, Homo sapiens
tctgtgcttccaaagagggccttcccgtgtttgtggtggctgaagaagactttcatttcgtccaggatgaagcg

SEQ ID NO: 53722 - DNA, 76 bp, Homo sapiens
ttccaaagagggccttcccgtgtttgtggtggctgaagaagactttcatttcgtccaggatgaagcgtatgatgca

SEQ ID NO: 53723 - DNA, 82 bp, Homo sapiens
tttgtggtggctgaagaagactttcatttcgtccaggatgaagcgtatgatgcagctcaattcctagcaaccagtgctggaa

SEQ ID NO: 53724 - DNA, 83 bp, Homo sapiens
tgaagaagactttcatttcgtccaggatgaagcgtatgatgcagctcaattcctagcaaccagtgctggaaatcagcaggctt

SEQ ID NO: 53725 - DNA, 82 bp, Homo sapiens
tttcatttcgtccaggatgaagcgtatgatgcagctcaattcctagcaaccagtgctggaaatcagcaggctttgaacttta

SEQ ID NO: 53726 - DNA, 79 bp, Homo sapiens
tccaggatgaagcgtatgatgcagctcaattcctagcaaccagtgctggaaatcagcaggctttgaactttacccgttt

SEQ ID NO: 53727 - DNA, 79 bp, Homo sapiens
atgaagcgtatgatgcagctcaattcctagcaaccagtgctggaaatcagcaggctttgaactttacccgttttcttga

SEQ ID NO: 53728 - DNA, 77 bp, Homo sapiens
atgcagctcaattcctagcaaccagtgctggaaatcagcaggctttgaactttacccgttttcttgaccagtcagga

SEQ ID NO: 53729 - DNA, 71 bp, Homo sapiens
aattcctagcaaccagtgctggaaatcagcaggctttgaactttacccgttttcttgaccagtcaggaccc

SEQ ID NO: 53730 - DNA, 70 bp, Homo sapiens
aaccagtgctggaaatcagcaggctttgaactttacccgttttcttgaccagtcaggacccccatctggg

SEQ ID NO: 53731 - DNA, 70 bp, Homo sapiens
aaatcagcaggctttgaactttacccgttttcttgaccagtcaggacccccatctggggatgtgaattcc

SEQ ID NO: 53732 - DNA, 69 bp, Homo sapiens
tttgaactttacccgttttcttgaccagtcaggacccccatctggggatgtgaattcccttgataagaa

SEQ ID NO: 53733 - DNA, 68 bp, Homo sapiens
actttacccgttttcttgaccagtcaggacccccatctggggatgtgaattcccttgataagaagttg

SEQ ID NO: 53734 - DNA, 76 bp, Homo sapiens
ttttcttgaccagtcaggacccccatctggggatgtgaattcccttgataagaagttggtgctggcattcaggcac

SEQ ID NO: 53735 - DNA, 78 bp, Homo sapiens
agtcaggacccccatctggggatgtgaattcccttgataagaagttggtgctggcattcaggcacctgaagctgccca

SEQ ID NO: 53736 - DNA, 79 bp, Homo sapiens
tctggggatgtgaattcccttgataagaagttggtgctggcattcaggcacctgaagctgcccacggagtggaatgtat

SEQ ID NO: 53737 - DNA, 78 bp, Homo sapiens
ggatgtgaattcccttgataagaagttggtgctggcattcaggcacctgaagctgcccacggagtggaatgtattggg

SEQ ID NO: 53738 - DNA, 79 bp, Homo sapiens
cttgataagaagttggtgctggcattcaggcacctgaagctgcccacggagtggaatgtattggggacagatcagagtt

SEQ ID NO: 53739 - DNA, 82 bp, Homo sapiens
ttggtgctggcattcaggcacctgaagctgcccacggagtggaatgtattggggacagatcagagtttgcatggtgagaatt

SEQ ID NO: 53740 - DNA, 83 bp, Homo sapiens
cattcaggcacctgaagctgcccacggagtggaatgtattggggacagatcagagtttgcatggtgagaatttatatgatcta

SEQ ID NO: 53741 - DNA, 80 bp, Homo sapiens
acctgaagctgcccacggagtggaatgtattggggacagatcagagtttgcatggtgagaatttatatgatctacaaaca

SEQ ID NO: 53742 - DNA, 77 bp, Homo sapiens
cccacggagtggaatgtattggggacagatcagagtttgcatggtgagaatttatatgatctacaaacacactttaa

SEQ ID NO: 53743 - DNA, 75 bp, Homo sapiens
cagatcagagtttgcatggtgagaatttatatgatctacaaacacactttaagtttgtgatatttctactttttt

SEQ ID NO: 53744 - DNA, 69 bp, Homo sapiens
gagaatttatatgatctacaaacacactttaagtttgtgatatttctactttttttttaatggggctac

SEQ ID NO: 53745 - DNA, 67 bp, Homo sapiens
ctacaaacacactttaagtttgtgatatttctactttttttttaatggggctacttttctatggtca

SEQ ID NO: 53746 - DNA, 69 bp, Homo sapiens
cactttaagtttgtgatatttctactttttttttaatggggctacttttctatggtcatcatattcagg

SEQ ID NO: 53747 - DNA, 73 bp, Homo sapiens
ttgtgatatttctactttttttttaatggggctacttttctatggtcatcatattcaggtcttccacagaggc

SEQ ID NO: 53748 - DNA, 72 bp, Homo sapiens
ctactttttttttaatggggctacttttctatggtcatcatattcaggtcttccacagaggctgcgtaaatc

SEQ ID NO: 53749 - DNA, 76 bp, Homo sapiens
tttaatggggctacttttctatggtcatcatattcaggtcttccacagaggctgcgtaaatcttagaattactgta

SEQ ID NO: 53750 - DNA, 76 bp, Homo sapiens
ctacttttctatggtcatcatattcaggtcttccacagaggctgcgtaaatcttagaattactgtaggaaagtggc

SEQ ID NO: 53751 - DNA, 78 bp, Homo sapiens
tttctatggtcatcatattcaggtcttccacagaggctgcgtaaatcttagaattactgtaggaaagtggcctcaatg

SEQ ID NO: 53752 - DNA, 79 bp, Homo sapiens
atcatattcaggtcttccacagaggctgcgtaaatcttagaattactgtaggaaagtggcctcaatggcatctcttcta

SEQ ID NO: 53753 - DNA, 76 bp, Homo sapiens
ttccacagaggctgcgtaaatcttagaattactgtaggaaagtggcctcaatggcatctcttctaggttcttcaat

SEQ ID NO: 53754 - DNA, 77 bp, Homo sapiens
taaatcttagaattactgtaggaaagtggcctcaatggcatctcttctaggttcttcaattgagctgttaagcatgt

SEQ ID NO: 53755 - DNA, 79 bp, Homo sapiens
attactgtaggaaagtggcctcaatggcatctcttctaggttcttcaattgagctgttaagcatgttgttgcagcgaaa

SEQ ID NO: 53756 - DNA, 79 bp, Homo sapiens
aggaaagtggcctcaatggcatctcttctaggttcttcaattgagctgttaagcatgttgttgcagcgaaatgacccta

SEQ ID NO: 53757 - DNA, 77 bp, Homo sapiens
aatggcatctcttctaggttcttcaattgagctgttaagcatgttgttgcagcgaaatgaccctagggattacccaa

SEQ ID NO: 53758 - DNA, 76 bp, Homo sapiens
atctcttctaggttcttcaattgagctgttaagcatgttgttgcagcgaaatgaccctagggattacccaaggaga

SEQ ID NO: 53759 - DNA, 77 bp, Homo sapiens
ttgagctgttaagcatgttgttgcagcgaaatgaccctagggattacccaaggagagtggcacgtcaccttcctgtg

SEQ ID NO: 53760 - DNA, 73 bp, Homo sapiens
atgttgttgcagcgaaatgaccctagggattacccaaggagagtggcacgtcaccttcctgtgggtctggatt

SEQ ID NO: 53761 - DNA, 74 bp, Homo sapiens
ttgcagcgaaatgaccctagggattacccaaggagagtggcacgtcaccttcctgtgggtctggatttcagatt

SEQ ID NO: 53762 - DNA, 76 bp, Homo sapiens
attacccaaggagagtggcacgtcaccttcctgtgggtctggatttcagatttgatctctcaagtgtagaaagtga

SEQ ID NO: 53763 - DNA, 82 bp, Homo sapiens
aggagagtggcacgtcaccttcctgtgggtctggatttcagatttgatctctcaagtgtagaaagtgacatgctcttcatga

SEQ ID NO: 53764 - DNA, 83 bp, Homo sapiens
tcaccttcctgtgggtctggatttcagatttgatctctcaagtgtagaaagtgacatgctcttcatgaggagagtagcagagt

SEQ ID NO: 53765 - DNA, 81 bp, Homo sapiens
tgggtctggatttcagatttgatctctcaagtgtagaaagtgacatgctcttcatgaggagagtagcagagttactttttg

SEQ ID NO: 53766 - DNA, 79 bp, Homo sapiens
atttcagatttgatctctcaagtgtagaaagtgacatgctcttcatgaggagagtagcagagttactttttggtgttta

SEQ ID NO: 53767 - DNA, 80 bp, Homo sapiens
atttgatctctcaagtgtagaaagtgacatgctcttcatgaggagagtagcagagttactttttggtgtttaatgatcaa

SEQ ID NO: 53768 - DNA, 77 bp, Homo sapiens
agtgtagaaagtgacatgctcttcatgaggagagtagcagagttactttttggtgtttaatgatcaaagacatggtt

SEQ ID NO: 53769 - DNA, 77 bp, Homo sapiens
aaagtgacatgctcttcatgaggagagtagcagagttactttttggtgtttaatgatcaaagacatggttttcatta

SEQ ID NO: 53770 - DNA, 77 bp, Homo sapiens
ctcttcatgaggagagtagcagagttactttttggtgtttaatgatcaaagacatggttttcattattgtattctga

SEQ ID NO: 53771 - DNA, 74 bp, Homo sapiens
gaggagagtagcagagttactttttggtgtttaatgatcaaagacatggttttcattattgtattctgaagttc

SEQ ID NO: 53772 - DNA, 72 bp, Homo sapiens
gttactttttggtgtttaatgatcaaagacatggttttcattattgtattctgaagttctctaaagatagcc

SEQ ID NO: 53773 - DNA, 73 bp, Homo sapiens
aagacatggttttcattattgtattctgaagttctctaaagatagcctggaagtgaaggagaggaaagattgg

SEQ ID NO: 53774 - DNA, 76 bp, Homo sapiens
tttcattattgtattctgaagttctctaaagatagcctggaagtgaaggagaggaaagattgggcagtgagtggga

SEQ ID NO: 53775 - DNA, 79 bp, Homo sapiens
ttctctaaagatagcctggaagtgaaggagaggaaagattgggcagtgagtgggaggagcatgagaacagggtgtgctc

SEQ ID NO: 53776 - DNA, 79 bp, Homo sapiens
atagcctggaagtgaaggagaggaaagattgggcagtgagtgggaggagcatgagaacagggtgtgctctgagaaacca

SEQ ID NO: 53777 - DNA, 77 bp, Homo sapiens
aaggagaggaaagattgggcagtgagtgggaggagcatgagaacagggtgtgctctgagaaaccacacacttcctta

SEQ ID NO: 53778 - DNA, 76 bp, Homo sapiens
aagattgggcagtgagtgggaggagcatgagaacagggtgtgctctgagaaaccacacacttccttaaccaggtta

SEQ ID NO: 53779 - DNA, 76 bp, Homo sapiens
agtgagtgggaggagcatgagaacagggtgtgctctgagaaaccacacacttccttaaccaggttagtgtcactct

SEQ ID NO: 53780 - DNA, 75 bp, Homo sapiens
aggagcatgagaacagggtgtgctctgagaaaccacacacttccttaaccaggttagtgtcactcttactgactt

SEQ ID NO: 53781 - DNA, 73 bp, Homo sapiens
agaacagggtgtgctctgagaaaccacacacttccttaaccaggttagtgtcactcttactgactttatctgt

SEQ ID NO: 53782 - DNA, 74 bp, Homo sapiens
tgctctgagaaaccacacacttccttaaccaggttagtgtcactcttactgactttatctgttggccctcccta

SEQ ID NO: 53783 - DNA, 71 bp, Homo sapiens
aaccacacacttccttaaccaggttagtgtcactcttactgactttatctgttggccctccctatgagagt

SEQ ID NO: 53784 - DNA, 73 bp, Homo sapiens
ttccttaaccaggttagtgtcactcttactgactttatctgttggccctccctatgagagttcactgaagaaa

SEQ ID NO: 53785 - DNA, 71 bp, Homo sapiens
aggttagtgtcactcttactgactttatctgttggccctccctatgagagttcactgaagaaaggactttt

SEQ ID NO: 53786 - DNA, 72 bp, Homo sapiens
agtgtcactcttactgactttatctgttggccctccctatgagagttcactgaagaaaggactttttgtttg

SEQ ID NO: 53787 - DNA, 67 bp, Homo sapiens
gcgcccggccagaactccactttttcaaaaatatttacatagtaagtcctcttactcaaacaagggt

SEQ ID NO: 53788 - DNA, 66 bp, Homo sapiens
cggccagaactccactttttcaaaaatatttacatagtaagtcctcttactcaaacaagggttttc

SEQ ID NO: 53789 - DNA, 66 bp, Homo sapiens
ccactttttcaaaaatatttacatagtaagtcctcttactcaaacaagggttttcccacataattc

SEQ ID NO: 53790 - DNA, 72 bp, Homo sapiens
atatttacatagtaagtcctcttactcaaacaagggttttcccacataattctagtagccaatgacatctac

SEQ ID NO: 53791 - DNA, 75 bp, Homo sapiens
atagtaagtcctcttactcaaacaagggttttcccacataattctagtagccaatgacatctacttgatgtcata

SEQ ID NO: 53792 - DNA, 77 bp, Homo sapiens
ctcttactcaaacaagggttttcccacataattctagtagccaatgacatctacttgatgtcataattgtatagata

SEQ ID NO: 53793 - DNA, 75 bp, Homo sapiens
tcaaacaagggttttcccacataattctagtagccaatgacatctacttgatgtcataattgtatagatattttt

SEQ ID NO: 53794 - DNA, 80 bp, Homo sapiens
tcccacataattctagtagccaatgacatctacttgatgtcataattgtatagatattttttaatgaaacataatgtgta

SEQ ID NO: 53795 - DNA, 80 bp, Homo sapiens
tctagtagccaatgacatctacttgatgtcataattgtatagatattttttaatgaaacataatgtgtacctggagttca

SEQ ID NO: 53796 - DNA, 72 bp, Homo sapiens
agatattttttaatgaaacataatgtgtacctggagttcaataagtaacatccagtttcccttctgagttca

SEQ ID NO: 53797 - DNA, 74 bp, Homo sapiens
taatgaaacataatgtgtacctggagttcaataagtaacatccagtttcccttctgagttcaagtccaattgaa

SEQ ID NO: 53798 - DNA, 72 bp, Homo sapiens
ataatgtgtacctggagttcaataagtaacatccagtttcccttctgagttcaagtccaattgaacgatttg

SEQ ID NO: 53799 - DNA, 72 bp, Homo sapiens
tgtacctggagttcaataagtaacatccagtttcccttctgagttcaagtccaattgaacgatttgggagtc

SEQ ID NO: 53800 - DNA, 73 bp, Homo sapiens
ttcaataagtaacatccagtttcccttctgagttcaagtccaattgaacgatttgggagtcctgagatagaaa

SEQ ID NO: 53801 - DNA, 70 bp, Homo sapiens
atccagtttcccttctgagttcaagtccaattgaacgatttgggagtcctgagatagaaaccaaaatgtt

SEQ ID NO: 53802 - DNA, 73 bp, Homo sapiens
cttctgagttcaagtccaattgaacgatttgggagtcctgagatagaaaccaaaatgtttattactgatgaaa

SEQ ID NO: 53803 - DNA, 75 bp, Homo sapiens
tcaagtccaattgaacgatttgggagtcctgagatagaaaccaaaatgtttattactgatgaaatctagattgga

SEQ ID NO: 53804 - DNA, 74 bp, Homo sapiens
aattgaacgatttgggagtcctgagatagaaaccaaaatgtttattactgatgaaatctagattggaagcctga

SEQ ID NO: 53805 - DNA, 76 bp, Homo sapiens
atttgggagtcctgagatagaaaccaaaatgtttattactgatgaaatctagattggaagcctgatgttagagctc

SEQ ID NO: 53806 - DNA, 76 bp, Homo sapiens
agatagaaaccaaaatgtttattactgatgaaatctagattggaagcctgatgttagagctcctgccagaagggtc

SEQ ID NO: 53807 - DNA, 77 bp, Homo sapiens
caaaatgtttattactgatgaaatctagattggaagcctgatgttagagctcctgccagaagggtctgcttgtactt

SEQ ID NO: 53808 - DNA, 79 bp, Homo sapiens
tttattactgatgaaatctagattggaagcctgatgttagagctcctgccagaagggtctgcttgtactttctatgtct

SEQ ID NO: 53809 - DNA, 80 bp, Homo sapiens
atgaaatctagattggaagcctgatgttagagctcctgccagaagggtctgcttgtactttctatgtcttcaatgaaaga

SEQ ID NO: 53810 - DNA, 81 bp, Homo sapiens
tagattggaagcctgatgttagagctcctgccagaagggtctgcttgtactttctatgtcttcaatgaaagagctggtcag

SEQ ID NO: 53811 - DNA, 81 bp, Homo sapiens
tcctgccagaagggtctgcttgtactttctatgtcttcaatgaaagagctggtcagtcacaccattgccctgtagagtcca

SEQ ID NO: 53812 - DNA, 78 bp, Homo sapiens
agaagggtctgcttgtactttctatgtcttcaatgaaagagctggtcagtcacaccattgccctgtagagtccaccca

SEQ ID NO: 53813 - DNA, 80 bp, Homo sapiens
tgtactttctatgtcttcaatgaaagagctggtcagtcacaccattgccctgtagagtccacccagccttgagtattgaa

SEQ ID NO: 53814 - DNA, 79 bp, Homo sapiens
ttctatgtcttcaatgaaagagctggtcagtcacaccattgccctgtagagtccacccagccttgagtattgaattatt

SEQ ID NO: 53815 - DNA, 76 bp, Homo sapiens
ctggtcagtcacaccattgccctgtagagtccacccagccttgagtattgaattattttgggtaagcagaccacaa

SEQ ID NO: 53816 - DNA, 75 bp, Homo sapiens
acaccattgccctgtagagtccacccagccttgagtattgaattattttgggtaagcagaccacaagtcactctc

SEQ ID NO: 53817 - DNA, 75 bp, Homo sapiens
ctgtagagtccacccagccttgagtattgaattattttgggtaagcagaccacaagtcactctccccacaggtga

SEQ ID NO: 53818 - DNA, 75 bp, Homo sapiens
acccagccttgagtattgaattattttgggtaagcagaccacaagtcactctccccacaggtgagcagttcctga

SEQ ID NO: 53819 - DNA, 76 bp, Homo sapiens
ttgagtattgaattattttgggtaagcagaccacaagtcactctccccacaggtgagcagttcctgaggagaaata

SEQ ID NO: 53820 - DNA, 75 bp, Homo sapiens
ttgaattattttgggtaagcagaccacaagtcactctccccacaggtgagcagttcctgaggagaaatacccaga

SEQ ID NO: 53821 - DNA, 76 bp, Homo sapiens
acaagtcactctccccacaggtgagcagttcctgaggagaaatacccagaggggcctgagccatagcatagttagt

SEQ ID NO: 53822 - DNA, 76 bp, Homo sapiens
actctccccacaggtgagcagttcctgaggagaaatacccagaggggcctgagccatagcatagttagtttctaca

SEQ ID NO: 53823 - DNA, 78 bp, Homo sapiens
gtgagcagttcctgaggagaaatacccagaggggcctgagccatagcatagttagtttctacactcagatgaattttg

SEQ ID NO: 53824 - DNA, 75 bp, Homo sapiens
agttcctgaggagaaatacccagaggggcctgagccatagcatagttagtttctacactcagatgaattttgtct

SEQ ID NO: 53825 - DNA, 76 bp, Homo sapiens
agaaatacccagaggggcctgagccatagcatagttagtttctacactcagatgaattttgtcttcttccatggaa

SEQ ID NO: 53826 - DNA, 76 bp, Homo sapiens
aggggcctgagccatagcatagttagtttctacactcagatgaattttgtcttcttccatggaagaatggtaaaga

SEQ ID NO: 53827 - DNA, 76 bp, Homo sapiens
ctgagccatagcatagttagtttctacactcagatgaattttgtcttcttccatggaagaatggtaaagaggtctt

SEQ ID NO: 53828 - DNA, 73 bp, Homo sapiens
atagttagtttctacactcagatgaattttgtcttcttccatggaagaatggtaaagaggtctttgccagctt

SEQ ID NO: 53829 - DNA, 76 bp, Homo sapiens
tttctacactcagatgaattttgtcttcttccatggaagaatggtaaagaggtctttgccagctttgattctctta

SEQ ID NO: 53830 - DNA, 74 bp, Homo sapiens
tgaattttgtcttcttccatggaagaatggtaaagaggtctttgccagctttgattctcttaaatctacactaa

SEQ ID NO: 53831 - DNA, 72 bp, Homo sapiens
gtcttcttccatggaagaatggtaaagaggtctttgccagctttgattctcttaaatctacactaaatttaa

SEQ ID NO: 53832 - DNA, 71 bp, Homo sapiens
ccatggaagaatggtaaagaggtctttgccagctttgattctcttaaatctacactaaatttaacagttaa

SEQ ID NO: 53833 - DNA, 70 bp, Homo sapiens
ggtaaagaggtctttgccagctttgattctcttaaatctacactaaatttaacagttaaacctgtggtca

SEQ ID NO: 53834 - DNA, 71 bp, Homo sapiens
tttgattctcttaaatctacactaaatttaacagttaaacctgtggtcagccgtcagaacggtgtcccata

SEQ ID NO: 53835 - DNA, 76 bp, Homo sapiens
taaatttaacagttaaacctgtggtcagccgtcagaacggtgtcccatactgtcaggtgcatactgtcagattcta

SEQ ID NO: 53836 - DNA, 78 bp, Homo sapiens
taacagttaaacctgtggtcagccgtcagaacggtgtcccatactgtcaggtgcatactgtcagattctacctggata

SEQ ID NO: 53837 - DNA, 79 bp, Homo sapiens
aacctgtggtcagccgtcagaacggtgtcccatactgtcaggtgcatactgtcagattctacctggatagtcctgccca

SEQ ID NO: 53838 - DNA, 74 bp, Homo sapiens
aacggtgtcccatactgtcaggtgcatactgtcagattctacctggatagtcctgcccaggtaaaacctgaaag

SEQ ID NO: 53839 - DNA, 77 bp, Homo sapiens
atactgtcaggtgcatactgtcagattctacctggatagtcctgcccaggtaaaacctgaaaggaagtatcaaatca

SEQ ID NO: 53840 - DNA, 72 bp, Homo sapiens
atactgtcagattctacctggatagtcctgcccaggtaaaacctgaaaggaagtatcaaatcaaggaagaaa

SEQ ID NO: 53841 - DNA, 69 bp, Homo sapiens
attctacctggatagtcctgcccaggtaaaacctgaaaggaagtatcaaatcaaggaagaaaggattta

SEQ ID NO: 53842 - DNA, 68 bp, Homo sapiens
gatagtcctgcccaggtaaaacctgaaaggaagtatcaaatcaaggaagaaaggatttatccttttct

SEQ ID NO: 53843 - DNA, 68 bp, Homo sapiens
tcctgcccaggtaaaacctgaaaggaagtatcaaatcaaggaagaaaggatttatccttttcttcttc

SEQ ID NO: 53844 - DNA, 73 bp, Homo sapiens
cttctttttttaagtatagtgtccaagaaacttctgtcttgctaatatttagagatcagaatatttgacattc

SEQ ID NO: 53845 - DNA, 80 bp, Homo sapiens
gtgtccaagaaacttctgtcttgctaatatttagagatcagaatatttgacattctgaaaaggcactcatgccttatata

SEQ ID NO: 53846 - DNA, 77 bp, Homo sapiens
aacttctgtcttgctaatatttagagatcagaatatttgacattctgaaaaggcactcatgccttatataaacctgg

SEQ ID NO: 53847 - DNA, 77 bp, Homo sapiens
ctaatatttagagatcagaatatttgacattctgaaaaggcactcatgccttatataaacctggtgatgggccttaa

SEQ ID NO: 53848 - DNA, 76 bp, Homo sapiens
atttagagatcagaatatttgacattctgaaaaggcactcatgccttatataaacctggtgatgggccttaatacc

SEQ ID NO: 53849 - DNA, 76 bp, Homo sapiens
tatttgacattctgaaaaggcactcatgccttatataaacctggtgatgggccttaatacctctagctcctcctat

SEQ ID NO: 53850 - DNA, 75 bp, Homo sapiens
attctgaaaaggcactcatgccttatataaacctggtgatgggccttaatacctctagctcctcctatttctgta

SEQ ID NO: 53851 - DNA, 76 bp, Homo sapiens
aaaggcactcatgccttatataaacctggtgatgggccttaatacctctagctcctcctatttctgtattgataca

SEQ ID NO: 53852 - DNA, 76 bp, Homo sapiens
taaacctggtgatgggccttaatacctctagctcctcctatttctgtattgatacaggaatgtttattctggctgc

SEQ ID NO: 53853 - DNA, 75 bp, Homo sapiens
atgggccttaatacctctagctcctcctatttctgtattgatacaggaatgtttattctggctgcctttcacaaa

SEQ ID NO: 53854 - DNA, 79 bp, Homo sapiens
atacctctagctcctcctatttctgtattgatacaggaatgtttattctggctgcctttcacaaatcagtgtcaagata

SEQ ID NO: 53855 - DNA, 80 bp, Homo sapiens
tcctatttctgtattgatacaggaatgtttattctggctgcctttcacaaatcagtgtcaagatagtactgcattagtta

SEQ ID NO: 53856 - DNA, 79 bp, Homo sapiens
tttctgtattgatacaggaatgtttattctggctgcctttcacaaatcagtgtcaagatagtactgcattagttatttg

SEQ ID NO: 53857 - DNA, 77 bp, Homo sapiens
atacaggaatgtttattctggctgcctttcacaaatcagtgtcaagatagtactgcattagttatttgtggggctta

SEQ ID NO: 53858 - DNA, 76 bp, Homo sapiens
tttattctggctgcctttcacaaatcagtgtcaagatagtactgcattagttatttgtggggcttatggtgtttta

SEQ ID NO: 53859 - DNA, 72 bp, Homo sapiens
cctttcacaaatcagtgtcaagatagtactgcattagttatttgtggggcttatggtgttttatggttttgt

SEQ ID NO: 53860 - DNA, 70 bp, Homo sapiens
gtcaagatagtactgcattagttatttgtggggcttatggtgttttatggttttgttttgtcttgtttaa

SEQ ID NO: 53861 - DNA, 67 bp, Homo sapiens
gtactgcattagttatttgtggggcttatggtgttttatggttttgttttgtcttgtttaaagaggg

SEQ ID NO: 53862 - DNA, 65 bp, Homo sapiens
agttatttgtggggcttatggtgttttatggttttgttttgtcttgtttaaagaggggcccagga

SEQ ID NO: 53863 - DNA, 69 bp, Homo sapiens
ttatggttttgttttgtcttgtttaaagaggggcccaggagttggatagttttatgttgccatgattaa

SEQ ID NO: 53864 - DNA, 68 bp, Homo sapiens
gttttgtcttgtttaaagaggggcccaggagttggatagttttatgttgccatgattaaaaacaacta

SEQ ID NO: 53865 - DNA, 69 bp, Homo sapiens
gtcttgtttaaagaggggcccaggagttggatagttttatgttgccatgattaaaaacaactattagaa

SEQ ID NO: 53866 - DNA, 71 bp, Homo sapiens
gggcccaggagttggatagttttatgttgccatgattaaaaacaactattagaaaaagcaaacatctgaaa

SEQ ID NO: 53867 - DNA, 71 bp, Homo sapiens
caggagttggatagttttatgttgccatgattaaaaacaactattagaaaaagcaaacatctgaaactttg

SEQ ID NO: 53868 - DNA, 72 bp, Homo sapiens
gttttatgttgccatgattaaaaacaactattagaaaaagcaaacatctgaaactttggacatatcacttcc

SEQ ID NO: 53869 - DNA, 73 bp, Homo sapiens
gttgccatgattaaaaacaactattagaaaaagcaaacatctgaaactttggacatatcacttcctctttctc

SEQ ID NO: 53870 - DNA, 70 bp, Homo sapiens
cactgtgcccggccacttcctctctttgggccttaacttccttgtctttaataggagggaattggccagc

SEQ ID NO: 53871 - DNA, 67 bp, Homo sapiens
ggccacttcctctctttgggccttaacttccttgtctttaataggagggaattggccagctttaatt

SEQ ID NO: 53872 - DNA, 65 bp, Homo sapiens
cttcctctctttgggccttaacttccttgtctttaataggagggaattggccagctttaattttt

SEQ ID NO: 53873 - DNA, 73 bp, Homo sapiens
tttttttttgtactgtcagtgtactggtaaattttctgttgcacaaaattgctcaagcagtgctaacaaaggc

SEQ ID NO: 53874 - DNA, 74 bp, Homo sapiens
tactgtcagtgtactggtaaattttctgttgcacaaaattgctcaagcagtgctaacaaaggccaaaccaaatt

SEQ ID NO: 53875 - DNA, 73 bp, Homo sapiens
agtgtactggtaaattttctgttgcacaaaattgctcaagcagtgctaacaaaggccaaaccaaatttgaaca

SEQ ID NO: 53876 - DNA, 73 bp, Homo sapiens
taaattttctgttgcacaaaattgctcaagcagtgctaacaaaggccaaaccaaatttgaacacttgaggaag

SEQ ID NO: 53877 - DNA, 75 bp, Homo sapiens
tgttgcacaaaattgctcaagcagtgctaacaaaggccaaaccaaatttgaacacttgaggaaggaaatacatat

SEQ ID NO: 53878 - DNA, 86 bp, Homo sapiens
aatgagatatcattacacatttatcataatggctaagatgaagaataccaagtgctggcaaagatgaagaacatatcatatgttgc

SEQ ID NO: 53879 - DNA, 85 bp, Homo sapiens
atatcattacacatttatcataatggctaagatgaagaataccaagtgctggcaaagatgaagaacatatcatatgttgcttgta

SEQ ID NO: 53880 - DNA, 83 bp, Homo sapiens
atttatcataatggctaagatgaagaataccaagtgctggcaaagatgaagaacatatcatatgttgcttgtaggaatgcaaa

SEQ ID NO: 53881 - DNA, 83 bp, Homo sapiens
ataatggctaagatgaagaataccaagtgctggcaaagatgaagaacatatcatatgttgcttgtaggaatgcaaaatgtata

SEQ ID NO: 53882 - DNA, 80 bp, Homo sapiens
aagaataccaagtgctggcaaagatgaagaacatatcatatgttgcttgtaggaatgcaaaatgtataaccactctagaa

SEQ ID NO: 53883 - DNA, 80 bp, Homo sapiens
taccaagtgctggcaaagatgaagaacatatcatatgttgcttgtaggaatgcaaaatgtataaccactctagaaatatt

SEQ ID NO: 53884 - DNA, 80 bp, Homo sapiens
tggcaaagatgaagaacatatcatatgttgcttgtaggaatgcaaaatgtataaccactctagaaatatttggcagtttc

SEQ ID NO: 53885 - DNA, 78 bp, Homo sapiens
aagatgaagaacatatcatatgttgcttgtaggaatgcaaaatgtataaccactctagaaatatttggcagtttcttg

SEQ ID NO: 53886 - DNA, 77 bp, Homo sapiens
gaagaacatatcatatgttgcttgtaggaatgcaaaatgtataaccactctagaaatatttggcagtttcttgtaaa

SEQ ID NO: 53887 - DNA, 76 bp, Homo sapiens
acatatcatatgttgcttgtaggaatgcaaaatgtataaccactctagaaatatttggcagtttcttgtaaagtta

SEQ ID NO: 53888 - DNA, 75 bp, Homo sapiens
tcatatgttgcttgtaggaatgcaaaatgtataaccactctagaaatatttggcagtttcttgtaaagttaaaca

SEQ ID NO: 53889 - DNA, 73 bp, Homo sapiens
gttgcttgtaggaatgcaaaatgtataaccactctagaaatatttggcagtttcttgtaaagttaaacataca

SEQ ID NO: 53890 - DNA, 73 bp, Homo sapiens
tgcaaaatgtataaccactctagaaatatttggcagtttcttgtaaagttaaacatacacttagcgtatgacc

SEQ ID NO: 53891 - DNA, 71 bp, Homo sapiens
aatgtataaccactctagaaatatttggcagtttcttgtaaagttaaacatacacttagcgtatgacccag

SEQ ID NO: 53892 - DNA, 69 bp, Homo sapiens
ttggcagtttcttgtaaagttaaacatacacttagcgtatgacccagtaatcccacttttgggtgttta

SEQ ID NO: 53893 - DNA, 69 bp, Homo sapiens
ttgtaaagttaaacatacacttagcgtatgacccagtaatcccacttttgggtgtttatcctagagaaa

SEQ ID NO: 53894 - DNA, 71 bp, Homo sapiens
acccagtaatcccacttttgggtgtttatcctagagaaatgaaaatctgtagtcaccaaaaagtctgtgca

SEQ ID NO: 53895 - DNA, 71 bp, Homo sapiens
taatcccacttttgggtgtttatcctagagaaatgaaaatctgtagtcaccaaaaagtctgtgcacggacg

SEQ ID NO: 53896 - DNA, 75 bp, Homo sapiens
ggtgtttatcctagagaaatgaaaatctgtagtcaccaaaaagtctgtgcacggacgtgctcatagtaatgttat

SEQ ID NO: 53897 - DNA, 78 bp, Homo sapiens
ctagagaaatgaaaatctgtagtcaccaaaaagtctgtgcacggacgtgctcatagtaatgttattcataatcttcaa

SEQ ID NO: 53898 - DNA, 75 bp, Homo sapiens
aatgaaaatctgtagtcaccaaaaagtctgtgcacggacgtgctcatagtaatgttattcataatcttcaaaaac

SEQ ID NO: 53899 - DNA, 76 bp, Homo sapiens
tctgtagtcaccaaaaagtctgtgcacggacgtgctcatagtaatgttattcataatcttcaaaaactggaaataa

SEQ ID NO: 53900 - DNA, 72 bp, Homo sapiens
aaaaagtctgtgcacggacgtgctcatagtaatgttattcataatcttcaaaaactggaaataacccagatt

SEQ ID NO: 53901 - DNA, 74 bp, Homo sapiens
acggacgtgctcatagtaatgttattcataatcttcaaaaactggaaataacccagatttccctcactgagtga

SEQ ID NO: 53902 - DNA, 76 bp, Homo sapiens
gtgctcatagtaatgttattcataatcttcaaaaactggaaataacccagatttccctcactgagtgaatacagaa

SEQ ID NO: 53903 - DNA, 73 bp, Homo sapiens
gtaatgttattcataatcttcaaaaactggaaataacccagatttccctcactgagtgaatacagaagcaaac

SEQ ID NO: 53904 - DNA, 75 bp, Homo sapiens
cataatcttcaaaaactggaaataacccagatttccctcactgagtgaatacagaagcaaactataatatatcca

SEQ ID NO: 53905 - DNA, 74 bp, Homo sapiens
aaaactggaaataacccagatttccctcactgagtgaatacagaagcaaactataatatatccatacagtggaa

SEQ ID NO: 53906 - DNA, 76 bp, Homo sapiens
actcagcaataaaaagaagcaaactgttgacatgtgcaacaacttggatgtgttttaaatgcattatgcgggaaaa

SEQ ID NO: 53907 - DNA, 76 bp, Homo sapiens
ataaaaagaagcaaactgttgacatgtgcaacaacttggatgtgttttaaatgcattatgcgggaaaatgaagtca

SEQ ID NO: 53908 - DNA, 74 bp, Homo sapiens
aaactgttgacatgtgcaacaacttggatgtgttttaaatgcattatgcgggaaaatgaagtcagtttccaaag

SEQ ID NO: 53909 - DNA, 73 bp, Homo sapiens
acaacttggatgtgttttaaatgcattatgcgggaaaatgaagtcagtttccaaaggttccatactatgtgat

SEQ ID NO: 53910 - DNA, 78 bp, Homo sapiens
atgcattatgcgggaaaatgaagtcagtttccaaaggttccatactatgtgattctatttatatgatattctggaaga

SEQ ID NO: 53911 - DNA, 76 bp, Homo sapiens
gcgggaaaatgaagtcagtttccaaaggttccatactatgtgattctatttatatgatattctggaagatgcaaaa

SEQ ID NO: 53912 - DNA, 77 bp, Homo sapiens
atgaagtcagtttccaaaggttccatactatgtgattctatttatatgatattctggaagatgcaaaattatagaaa

SEQ ID NO: 53913 - DNA, 78 bp, Homo sapiens
ccaaaggttccatactatgtgattctatttatatgatattctggaagatgcaaaattatagaaaaagagaacagatga

SEQ ID NO: 53914 - DNA, 79 bp, Homo sapiens
tactatgtgattctatttatatgatattctggaagatgcaaaattatagaaaaagagaacagatgagtagttgctaggg

SEQ ID NO: 53915 - DNA, 77 bp, Homo sapiens
ttctatttatatgatattctggaagatgcaaaattatagaaaaagagaacagatgagtagttgctaggggctgggag

SEQ ID NO: 53916 - DNA, 76 bp, Homo sapiens
tttatatgatattctggaagatgcaaaattatagaaaaagagaacagatgagtagttgctaggggctgggagtggg

SEQ ID NO: 53917 - DNA, 73 bp, Homo sapiens
atgcaaaattatagaaaaagagaacagatgagtagttgctaggggctgggagtgggggaagtctgactggaaa

SEQ ID NO: 53918 - DNA, 71 bp, Homo sapiens
aaaattatagaaaaagagaacagatgagtagttgctaggggctgggagtgggggaagtctgactggaaaga

SEQ ID NO: 53919 - DNA, 71 bp, Homo sapiens
aaattatagaaaaagagaacagatgagtagttgctaggggctgggagtgggggaagtctgactggaaagag

SEQ ID NO: 53920 - DNA, 75 bp, Homo sapiens
atagaaaaagagaacagatgagtagttgctaggggctgggagtgggggaagtctgactggaaagaggtatcatga

SEQ ID NO: 53921 - DNA, 74 bp, Homo sapiens
agaacagatgagtagttgctaggggctgggagtgggggaagtctgactggaaagaggtatcatgagggaattct

SEQ ID NO: 53922 - DNA, 70 bp, Homo sapiens
agtagttgctaggggctgggagtgggggaagtctgactggaaagaggtatcatgagggaattctttgggt

SEQ ID NO: 53923 - DNA, 70 bp, Homo sapiens
taggggctgggagtgggggaagtctgactggaaagaggtatcatgagggaattctttgggttgttggagt

SEQ ID NO: 53924 - DNA, 69 bp, Homo sapiens
agtgggggaagtctgactggaaagaggtatcatgagggaattctttgggttgttggagttgttttgtct

SEQ ID NO: 53925 - DNA, 70 bp, Homo sapiens
aagtctgactggaaagaggtatcatgagggaattctttgggttgttggagttgttttgtcttgttcgtgg

SEQ ID NO: 53926 - DNA, 72 bp, Homo sapiens
ggtatcatgagggaattctttgggttgttggagttgttttgtcttgttcgtggtggtggctgtaagaatcta

SEQ ID NO: 53927 - DNA, 72 bp, Homo sapiens
aattctttgggttgttggagttgttttgtcttgttcgtggtggtggctgtaagaatctatgcatgtgttaaa

SEQ ID NO: 53928 - DNA, 76 bp, Homo sapiens
ttgttggagttgttttgtcttgttcgtggtggtggctgtaagaatctatgcatgtgttaaaactcataggagtgta

SEQ ID NO: 53929 - DNA, 75 bp, Homo sapiens
agttgttttgtcttgttcgtggtggtggctgtaagaatctatgcatgtgttaaaactcataggagtgtacatccc

SEQ ID NO: 53930 - DNA, 75 bp, Homo sapiens
ttgttcgtggtggtggctgtaagaatctatgcatgtgttaaaactcataggagtgtacatcccctaaaggtgaat

SEQ ID NO: 53931 - DNA, 76 bp, Homo sapiens
gtggctgtaagaatctatgcatgtgttaaaactcataggagtgtacatcccctaaaggtgaattttattgtacata

SEQ ID NO: 53932 - DNA, 75 bp, Homo sapiens
tgtaagaatctatgcatgtgttaaaactcataggagtgtacatcccctaaaggtgaattttattgtacatatatt

SEQ ID NO: 53933 - DNA, 72 bp, Homo sapiens
atgcatgtgttaaaactcataggagtgtacatcccctaaaggtgaattttattgtacatatatttaaaataa

SEQ ID NO: 53934 - DNA, 75 bp, Homo sapiens
tttttatattttcctcacttacgttcattttctcccccatttacagatgctggcccgcgagagacattgatgcat

SEQ ID NO: 53935 - DNA, 77 bp, Homo sapiens
atattttcctcacttacgttcattttctcccccatttacagatgctggcccgcgagagacattgatgcattttgctg

SEQ ID NO: 53936 - DNA, 78 bp, Homo sapiens
acttacgttcattttctcccccatttacagatgctggcccgcgagagacattgatgcattttgctgtgcggctgggac

SEQ ID NO: 53937 - DNA, 81 bp, Homo sapiens
attttctcccccatttacagatgctggcccgcgagagacattgatgcattttgctgtgcggctgggactgctgaggttgac

SEQ ID NO: 53938 - DNA, 84 bp, Homo sapiens
atttacagatgctggcccgcgagagacattgatgcattttgctgtgcggctgggactgctgaggttgacgtggttcctgttgca

SEQ ID NO: 53939 - DNA, 84 bp, Homo sapiens
atgctggcccgcgagagacattgatgcattttgctgtgcggctgggactgctgaggttgacgtggttcctgttgcagaagccag

SEQ ID NO: 53940 - DNA, 82 bp, Homo sapiens
agagacattgatgcattttgctgtgcggctgggactgctgaggttgacgtggttcctgttgcagaagccaggtggccgcgga

SEQ ID NO: 53941 - DNA, 82 bp, Homo sapiens
atgcattttgctgtgcggctgggactgctgaggttgacgtggttcctgttgcagaagccaggtggccgcggagctctcagta

SEQ ID NO: 53942 - DNA, 82 bp, Homo sapiens
tttgctgtgcggctgggactgctgaggttgacgtggttcctgttgcagaagccaggtggccgcggagctctcagtatccaca

SEQ ID NO: 53943 - DNA, 78 bp, Homo sapiens
tgggactgctgaggttgacgtggttcctgttgcagaagccaggtggccgcggagctctcagtatccacaaccaggaag

SEQ ID NO: 53944 - DNA, 74 bp, Homo sapiens
aggttgacgtggttcctgttgcagaagccaggtggccgcggagctctcagtatccacaaccaggaaggggcgac

SEQ ID NO: 53945 - DNA, 78 bp, Homo sapiens
tggttcctgttgcagaagccaggtggccgcggagctctcagtatccacaaccaggaaggggcgacgcctgtgagcttg

SEQ ID NO: 53946 - DNA, 79 bp, Homo sapiens
tgttgcagaagccaggtggccgcggagctctcagtatccacaaccaggaaggggcgacgcctgtgagcttggccttgga

SEQ ID NO: 53947 - DNA, 79 bp, Homo sapiens
gtggccgcggagctctcagtatccacaaccaggaaggggcgacgcctgtgagcttggccttggagcgaggctatcacaa

SEQ ID NO: 53948 - DNA, 81 bp, Homo sapiens
agctctcagtatccacaaccaggaaggggcgacgcctgtgagcttggccttggagcgaggctatcacaagctgcaccagct

SEQ ID NO: 53949 - DNA, 79 bp, Homo sapiens
agtatccacaaccaggaaggggcgacgcctgtgagcttggccttggagcgaggctatcacaagctgcaccagcttctaa

SEQ ID NO: 53950 - DNA, 77 bp, Homo sapiens
accaggaaggggcgacgcctgtgagcttggccttggagcgaggctatcacaagctgcaccagcttctaaccgagtaa

SEQ ID NO: 53951 - DNA, 81 bp, Homo sapiens
gacgcctgtgagcttggccttggagcgaggctatcacaagctgcaccagcttctaaccgagtaagtgctccttctgcctta

SEQ ID NO: 53952 - DNA, 80 bp, Homo sapiens
ctgtgagcttggccttggagcgaggctatcacaagctgcaccagcttctaaccgagtaagtgctccttctgccttatttc

SEQ ID NO: 53953 - DNA, 78 bp, Homo sapiens
ccttggagcgaggctatcacaagctgcaccagcttctaaccgagtaagtgctccttctgccttatttccctcctctca

SEQ ID NO: 53954 - DNA, 83 bp, Homo sapiens
tgggaggcagaatgtatatatattaaccagagatgcttgcatgtagggagaatgctggagaaccagactcctggagcagttta

SEQ ID NO: 53955 - DNA, 82 bp, Homo sapiens
aatgtatatatattaaccagagatgcttgcatgtagggagaatgctggagaaccagactcctggagcagtttatcctatgaa

SEQ ID NO: 53956 - DNA, 81 bp, Homo sapiens
atatatattaaccagagatgcttgcatgtagggagaatgctggagaaccagactcctggagcagtttatcctatgaaatac

SEQ ID NO: 53957 - DNA, 80 bp, Homo sapiens
agatgcttgcatgtagggagaatgctggagaaccagactcctggagcagtttatcctatgaaataccgtatggagactgt

SEQ ID NO: 53958 - DNA, 78 bp, Homo sapiens
atgtagggagaatgctggagaaccagactcctggagcagtttatcctatgaaataccgtatggagactgttctgtgag

SEQ ID NO: 53959 - DNA, 82 bp, Homo sapiens
agaatgctggagaaccagactcctggagcagtttatcctatgaaataccgtatggagactgttctgtgaggcatcatcgaga

SEQ ID NO: 53960 - DNA, 80 bp, Homo sapiens
aaccagactcctggagcagtttatcctatgaaataccgtatggagactgttctgtgaggcatcatcgagagttggacatc

SEQ ID NO: 53961 - DNA, 82 bp, Homo sapiens
tcctggagcagtttatcctatgaaataccgtatggagactgttctgtgaggcatcatcgagagttggacatctatacattaa

SEQ ID NO: 53962 - DNA, 80 bp, Homo sapiens
agtttatcctatgaaataccgtatggagactgttctgtgaggcatcatcgagagttggacatctatacattaacctctga

SEQ ID NO: 53963 - DNA, 86 bp, Homo sapiens
tatgaaataccgtatggagactgttctgtgaggcatcatcgagagttggacatctatacattaacctctgagtctgattcacatca

SEQ ID NO: 53964 - DNA, 86 bp, Homo sapiens
tatggagactgttctgtgaggcatcatcgagagttggacatctatacattaacctctgagtctgattcacatcatgaacacccatt

SEQ ID NO: 53965 - DNA, 84 bp, Homo sapiens
actgttctgtgaggcatcatcgagagttggacatctatacattaacctctgagtctgattcacatcatgaacacccatttcctg

SEQ ID NO: 53966 - DNA, 82 bp, Homo sapiens
atcatcgagagttggacatctatacattaacctctgagtctgattcacatcatgaacacccatttcctggagacggttgcac

SEQ ID NO: 53967 - DNA, 80 bp, Homo sapiens
gttggacatctatacattaacctctgagtctgattcacatcatgaacacccatttcctggagacggttgcactggaccaa

SEQ ID NO: 53968 - DNA, 77 bp, Homo sapiens
tatacattaacctctgagtctgattcacatcatgaacacccatttcctggagacggttgcactggaccaatttttaa

SEQ ID NO: 53969 - DNA, 74 bp, Homo sapiens
attaacctctgagtctgattcacatcatgaacacccatttcctggagacggttgcactggaccaatttttaaac

SEQ ID NO: 53970 - DNA, 77 bp, Homo sapiens
tctgattcacatcatgaacacccatttcctggagacggttgcactggaccaatttttaaacttatgaacatccaaca

SEQ ID NO: 53971 - DNA, 74 bp, Homo sapiens
tcatgaacacccatttcctggagacggttgcactggaccaatttttaaacttatgaacatccaacagcaactaa

SEQ ID NO: 53972 - DNA, 73 bp, Homo sapiens
catttcctggagacggttgcactggaccaatttttaaacttatgaacatccaacagcaactaatggtaagtca

SEQ ID NO: 53973 - DNA, 71 bp, Homo sapiens
agacggttgcactggaccaatttttaaacttatgaacatccaacagcaactaatggtaagtcagaaagctt

SEQ ID NO: 53974 - DNA, 71 bp, Homo sapiens
gttgcactggaccaatttttaaacttatgaacatccaacagcaactaatggtaagtcagaaagcttttatt

SEQ ID NO: 53975 - DNA, 67 bp, Homo sapiens
accaatttttaaacttatgaacatccaacagcaactaatggtaagtcagaaagcttttatttttaag

SEQ ID NO: 53976 - DNA, 70 bp, Homo sapiens
atcttctcctacaggcagttttttaaaagtgtatttcatttcctcctagaaaacaaacctcaagcagatg

SEQ ID NO: 53977 - DNA, 70 bp, Homo sapiens
acaggcagttttttaaaagtgtatttcatttcctcctagaaaacaaacctcaagcagatggacagtctta

SEQ ID NO: 53978 - DNA, 75 bp, Homo sapiens
ttaaaagtgtatttcatttcctcctagaaaacaaacctcaagcagatggacagtcttatgcccttaatgatgaca

SEQ ID NO: 53979 - DNA, 78 bp, Homo sapiens
tatttcatttcctcctagaaaacaaacctcaagcagatggacagtcttatgcccttaatgatgacagcacaggatcct

SEQ ID NO: 53980 - DNA, 79 bp, Homo sapiens
tttcctcctagaaaacaaacctcaagcagatggacagtcttatgcccttaatgatgacagcacaggatccttccagtgc

SEQ ID NO: 53981 - DNA, 80 bp, Homo sapiens
aaaacaaacctcaagcagatggacagtcttatgcccttaatgatgacagcacaggatccttccagtgccccagagacaga

SEQ ID NO: 53982 - DNA, 82 bp, Homo sapiens
aagcagatggacagtcttatgcccttaatgatgacagcacaggatccttccagtgccccagagacagatggccagtttcttc

SEQ ID NO: 53983 - DNA, 81 bp, Homo sapiens
acagtcttatgcccttaatgatgacagcacaggatccttccagtgccccagagacagatggccagtttcttccctgtgcac

SEQ ID NO: 53984 - DNA, 81 bp, Homo sapiens
tatgcccttaatgatgacagcacaggatccttccagtgccccagagacagatggccagtttcttccctgtgcaccggagcc

SEQ ID NO: 53985 - DNA, 79 bp, Homo sapiens
atgatgacagcacaggatccttccagtgccccagagacagatggccagtttcttccctgtgcaccggagcccacggacc

SEQ ID NO: 53986 - DNA, 75 bp, Homo sapiens
gatccttccagtgccccagagacagatggccagtttcttccctgtgcaccggagcccacggaccctcagcgactt

SEQ ID NO: 53987 - DNA, 74 bp, Homo sapiens
agtgccccagagacagatggccagtttcttccctgtgcaccggagcccacggaccctcagcgactttcttcttc

SEQ ID NO: 53988 - DNA, 76 bp, Homo sapiens
agacagatggccagtttcttccctgtgcaccggagcccacggaccctcagcgactttcttcttctgaagagactga

SEQ ID NO: 53989 - DNA, 76 bp, Homo sapiens
ccagtttcttccctgtgcaccggagcccacggaccctcagcgactttcttcttctgaagagactgagagcactcag

SEQ ID NO: 53990 - DNA, 80 bp, Homo sapiens
tcttccctgtgcaccggagcccacggaccctcagcgactttcttcttctgaagagactgagagcactcagtgctgcccag

SEQ ID NO: 53991 - DNA, 82 bp, Homo sapiens
gaccctcagcgactttcttcttctgaagagactgagagcactcagtgctgcccagggagccctgttgcacagactgaaagtc

SEQ ID NO: 53992 - DNA, 81 bp, Homo sapiens
gactttcttcttctgaagagactgagagcactcagtgctgcccagggagccctgttgcacagactgaaagtccctgtgatt

SEQ ID NO: 53993 - DNA, 85 bp, Homo sapiens
ttcttctgaagagactgagagcactcagtgctgcccagggagccctgttgcacagactgaaagtccctgtgatttgtcaagcata

SEQ ID NO: 53994 - DNA, 83 bp, Homo sapiens
aagagactgagagcactcagtgctgcccagggagccctgttgcacagactgaaagtccctgtgatttgtcaagcatagttgag

SEQ ID NO: 53995 - DNA, 81 bp, Homo sapiens
actcagtgctgcccagggagccctgttgcacagactgaaagtccctgtgatttgtcaagcatagttgaggaggagaataca

SEQ ID NO: 53996 - DNA, 76 bp, Homo sapiens
cccagggagccctgttgcacagactgaaagtccctgtgatttgtcaagcatagttgaggaggagaatacagaccgt

SEQ ID NO: 53997 - DNA, 77 bp, Homo sapiens
cctgttgcacagactgaaagtccctgtgatttgtcaagcatagttgaggaggagaatacagaccgttcctgtaggaa

SEQ ID NO: 53998 - DNA, 73 bp, Homo sapiens
agactgaaagtccctgtgatttgtcaagcatagttgaggaggagaatacagaccgttcctgtaggaagaaaaa

SEQ ID NO: 53999 - DNA, 71 bp, Homo sapiens
aaagtccctgtgatttgtcaagcatagttgaggaggagaatacagaccgttcctgtaggaagaaaaataaa

SEQ ID NO: 54000 - DNA, 71 bp, Homo sapiens
ttgtcaagcatagttgaggaggagaatacagaccgttcctgtaggaagaaaaataaaggcgtggaaagaaa

SEQ ID NO: 54001 - DNA, 65 bp, Homo sapiens
aggaggagaatacagaccgttcctgtaggaagaaaaataaaggcgtggaaagaaaaggggaagag

SEQ ID NO: 54002 - DNA, 68 bp, Homo sapiens
atacagaccgttcctgtaggaagaaaaataaaggcgtggaaagaaaaggggaagaggtggagccagca

SEQ ID NO: 54003 - DNA, 69 bp, Homo sapiens
ttcctgtaggaagaaaaataaaggcgtggaaagaaaaggggaagaggtggagccagcacctattgtgga

SEQ ID NO: 54004 - DNA, 69 bp, Homo sapiens
aaaaataaaggcgtggaaagaaaaggggaagaggtggagccagcacctattgtggactctggaactgta

SEQ ID NO: 54005 - DNA, 75 bp, Homo sapiens
aaggcgtggaaagaaaaggggaagaggtggagccagcacctattgtggactctggaactgtatctgatcaagaca

SEQ ID NO: 54006 - DNA, 80 bp, Homo sapiens
aaaaggggaagaggtggagccagcacctattgtggactctggaactgtatctgatcaagacagctgccttcagagcttgc

SEQ ID NO: 54007 - DNA, 84 bp, Homo sapiens
ggtggagccagcacctattgtggactctggaactgtatctgatcaagacagctgccttcagagcttgcctgattgtggagtaaa

SEQ ID NO: 54008 - DNA, 82 bp, Homo sapiens
agcacctattgtggactctggaactgtatctgatcaagacagctgccttcagagcttgcctgattgtggagtaaagggcacg

SEQ ID NO: 54009 - DNA, 82 bp, Homo sapiens
tattgtggactctggaactgtatctgatcaagacagctgccttcagagcttgcctgattgtggagtaaagggcacggaaggc

SEQ ID NO: 54010 - DNA, 79 bp, Homo sapiens
tatctgatcaagacagctgccttcagagcttgcctgattgtggagtaaagggcacggaaggcctttcgtcctgtggaaa

SEQ ID NO: 54011 - DNA, 75 bp, Homo sapiens
agacagctgccttcagagcttgcctgattgtggagtaaagggcacggaaggcctttcgtcctgtggaaacagaaa

SEQ ID NO: 54012 - DNA, 70 bp, Homo sapiens
tgattgtggagtaaagggcacggaaggcctttcgtcctgtggaaacagaaatgaagaaactggaacaaaa

SEQ ID NO: 54013 - DNA, 69 bp, Homo sapiens
taaagggcacggaaggcctttcgtcctgtggaaacagaaatgaagaaactggaacaaaatcttctggaa

SEQ ID NO: 54014 - DNA, 71 bp, Homo sapiens
acggaaggcctttcgtcctgtggaaacagaaatgaagaaactggaacaaaatcttctggaatgcccacaga

SEQ ID NO: 54015 - DNA, 72 bp, Homo sapiens
cctttcgtcctgtggaaacagaaatgaagaaactggaacaaaatcttctggaatgcccacagaccaggagtc

SEQ ID NO: 54016 - DNA, 80 bp, Homo sapiens
aaactggaacaaaatcttctggaatgcccacagaccaggagtccctgagcagtggagatgctgtgcttcagagagacttg

SEQ ID NO: 54017 - DNA, 83 bp, Homo sapiens
aaaatcttctggaatgcccacagaccaggagtccctgagcagtggagatgctgtgcttcagagagacttggtcatggagccag

SEQ ID NO: 54018 - DNA, 85 bp, Homo sapiens
aatgcccacagaccaggagtccctgagcagtggagatgctgtgcttcagagagacttggtcatggagccaggcacagcccagtat

SEQ ID NO: 54019 - DNA, 85 bp, Homo sapiens
agaccaggagtccctgagcagtggagatgctgtgcttcagagagacttggtcatggagccaggcacagcccagtattcctctgga

SEQ ID NO: 54020 - DNA, 83 bp, Homo sapiens
agatgctgtgcttcagagagacttggtcatggagccaggcacagcccagtattcctctggaggtgaactgggaggcatttcaa

SEQ ID NO: 54021 - DNA, 79 bp, Homo sapiens
cttcagagagacttggtcatggagccaggcacagcccagtattcctctggaggtgaactgggaggcatttcaacaacaa

SEQ ID NO: 54022 - DNA, 77 bp, Homo sapiens
atggagccaggcacagcccagtattcctctggaggtgaactgggaggcatttcaacaacaaatgtcagtaccccaga

SEQ ID NO: 54023 - DNA, 77 bp, Homo sapiens
aggcacagcccagtattcctctggaggtgaactgggaggcatttcaacaacaaatgtcagtaccccagacactgcag

SEQ ID NO: 54024 - DNA, 74 bp, Homo sapiens
agtattcctctggaggtgaactgggaggcatttcaacaacaaatgtcagtaccccagacactgcaggggaaatg

SEQ ID NO: 54025 - DNA, 77 bp, Homo sapiens
aggtgaactgggaggcatttcaacaacaaatgtcagtaccccagacactgcaggggaaatggaacatgggctcatga

SEQ ID NO: 54026 - DNA, 75 bp, Homo sapiens
aactgggaggcatttcaacaacaaatgtcagtaccccagacactgcaggggaaatggaacatgggctcatgaacc

SEQ ID NO: 54027 - DNA, 77 bp, Homo sapiens
tttcaacaacaaatgtcagtaccccagacactgcaggggaaatggaacatgggctcatgaacccagatgccactgtt

SEQ ID NO: 54028 - DNA, 77 bp, Homo sapiens
acaaatgtcagtaccccagacactgcaggggaaatggaacatgggctcatgaacccagatgccactgtttggaagaa

SEQ ID NO: 54029 - DNA, 78 bp, Homo sapiens
ccagacactgcaggggaaatggaacatgggctcatgaacccagatgccactgtttggaagaatgtgcttcagggaggg

SEQ ID NO: 54030 - DNA, 75 bp, Homo sapiens
caggggaaatggaacatgggctcatgaacccagatgccactgtttggaagaatgtgcttcagggaggggaaagta

SEQ ID NO: 54031 - DNA, 74 bp, Homo sapiens
aaatggaacatgggctcatgaacccagatgccactgtttggaagaatgtgcttcagggaggggaaagtacaaag

SEQ ID NO: 54032 - DNA, 74 bp, Homo sapiens
ctcatgaacccagatgccactgtttggaagaatgtgcttcagggaggggaaagtacaaaggaaagatttgagaa

SEQ ID NO: 54033 - DNA, 73 bp, Homo sapiens
cagatgccactgtttggaagaatgtgcttcagggaggggaaagtacaaaggaaagatttgagaactctaatat

SEQ ID NO: 54034 - DNA, 74 bp, Homo sapiens
aagaatgtgcttcagggaggggaaagtacaaaggaaagatttgagaactctaatattggcacagctggagcctc

SEQ ID NO: 54035 - DNA, 75 bp, Homo sapiens
agggaggggaaagtacaaaggaaagatttgagaactctaatattggcacagctggagcctctgacgtgcacgtca

SEQ ID NO: 54036 - DNA, 76 bp, Homo sapiens
aaagtacaaaggaaagatttgagaactctaatattggcacagctggagcctctgacgtgcacgtcacaagtaagcc

SEQ ID NO: 54037 - DNA, 80 bp, Homo sapiens
atttgagaactctaatattggcacagctggagcctctgacgtgcacgtcacaagtaagcctgtggataaaatcagtgttc

SEQ ID NO: 54038 - DNA, 79 bp, Homo sapiens
agctggagcctctgacgtgcacgtcacaagtaagcctgtggataaaatcagtgttccaaactgtgcccctgctgccagt

SEQ ID NO: 54039 - DNA, 77 bp, Homo sapiens
agcctctgacgtgcacgtcacaagtaagcctgtggataaaatcagtgttccaaactgtgcccctgctgccagttccc

SEQ ID NO: 54040 - DNA, 72 bp, Homo sapiens
aagtaagcctgtggataaaatcagtgttccaaactgtgcccctgctgccagttccctggatggtaacaaacc

SEQ ID NO: 54041 - DNA, 77 bp, Homo sapiens
ataaaatcagtgttccaaactgtgcccctgctgccagttccctggatggtaacaaacctgctgagtcttcacttgca

SEQ ID NO: 54042 - DNA, 78 bp, Homo sapiens
tgttccaaactgtgcccctgctgccagttccctggatggtaacaaacctgctgagtcttcacttgcatttagtaatga

SEQ ID NO: 54043 - DNA, 76 bp, Homo sapiens
aaactgtgcccctgctgccagttccctggatggtaacaaacctgctgagtcttcacttgcatttagtaatgaagaa

SEQ ID NO: 54044 - DNA, 75 bp, Homo sapiens
ctgccagttccctggatggtaacaaacctgctgagtcttcacttgcatttagtaatgaagaaacctccactgaaa

SEQ ID NO: 54045 - DNA, 72 bp, Homo sapiens
agttccctggatggtaacaaacctgctgagtcttcacttgcatttagtaatgaagaaacctccactgaaaaa

SEQ ID NO: 54046 - DNA, 73 bp, Homo sapiens
taacaaacctgctgagtcttcacttgcatttagtaatgaagaaacctccactgaaaaaacagcagaaacggaa

SEQ ID NO: 54047 - DNA, 72 bp, Homo sapiens
ctgagtcttcacttgcatttagtaatgaagaaacctccactgaaaaaacagcagaaacggaaacttcacgaa

SEQ ID NO: 54048 - DNA, 72 bp, Homo sapiens
ttcacttgcatttagtaatgaagaaacctccactgaaaaaacagcagaaacggaaacttcacgaagtcgtga

SEQ ID NO: 54049 - DNA, 69 bp, Homo sapiens
atttagtaatgaagaaacctccactgaaaaaacagcagaaacggaaacttcacgaagtcgtgaggagag

SEQ ID NO: 54050 - DNA, 74 bp, Homo sapiens
aagaaacctccactgaaaaaacagcagaaacggaaacttcacgaagtcgtgaggagagtgctgatgctccagta

SEQ ID NO: 54051 - DNA, 78 bp, Homo sapiens
actgaaaaaacagcagaaacggaaacttcacgaagtcgtgaggagagtgctgatgctccagtagatcagaattctgtg

SEQ ID NO: 54052 - DNA, 82 bp, Homo sapiens
aacggaaacttcacgaagtcgtgaggagagtgctgatgctccagtagatcagaattctgtggtgattccagctgctgcaaaa

SEQ ID NO: 54053 - DNA, 86 bp, Homo sapiens
gagagtgctgatgctccagtagatcagaattctgtggtgattccagctgctgcaaaagacaagatttcagatggattagaacctta

SEQ ID NO: 54054 - DNA, 82 bp, Homo sapiens
agtagatcagaattctgtggtgattccagctgctgcaaaagacaagatttcagatggattagaaccttatactctcttagca

SEQ ID NO: 54055 - DNA, 83 bp, Homo sapiens
agaattctgtggtgattccagctgctgcaaaagacaagatttcagatggattagaaccttatactctcttagcagcaggcata

SEQ ID NO: 54056 - DNA, 82 bp, Homo sapiens
tgcaaaagacaagatttcagatggattagaaccttatactctcttagcagcaggcataggtgaggcaatgtcaccctcagat

SEQ ID NO: 54057 - DNA, 80 bp, Homo sapiens
aagacaagatttcagatggattagaaccttatactctcttagcagcaggcataggtgaggcaatgtcaccctcagattta

SEQ ID NO: 54058 - DNA, 80 bp, Homo sapiens
ttcagatggattagaaccttatactctcttagcagcaggcataggtgaggcaatgtcaccctcagatttagcccttcttg

SEQ ID NO: 54059 - DNA, 81 bp, Homo sapiens
atactctcttagcagcaggcataggtgaggcaatgtcaccctcagatttagcccttcttgggctggaagaagatgtaatgc

SEQ ID NO: 54060 - DNA, 78 bp, Homo sapiens
ataggtgaggcaatgtcaccctcagatttagcccttcttgggctggaagaagatgtaatgccacaccagaactcagaa

SEQ ID NO: 54061 - DNA, 76 bp, Homo sapiens
aatgtcaccctcagatttagcccttcttgggctggaagaagatgtaatgccacaccagaactcagaaacaaattca

SEQ ID NO: 54062 - DNA, 80 bp, Homo sapiens
ctcagatttagcccttcttgggctggaagaagatgtaatgccacaccagaactcagaaacaaattcatctcatgctcaaa

SEQ ID NO: 54063 - DNA, 79 bp, Homo sapiens
gaagaagatgtaatgccacaccagaactcagaaacaaattcatctcatgctcaaagccaaaagggcaaatcctcaccca

SEQ ID NO: 54064 - DNA, 78 bp, Homo sapiens
taatgccacaccagaactcagaaacaaattcatctcatgctcaaagccaaaagggcaaatcctcacccatttgttcta

SEQ ID NO: 54065 - DNA, 75 bp, Homo sapiens
accagaactcagaaacaaattcatctcatgctcaaagccaaaagggcaaatcctcacccatttgttctacaactg

SEQ ID NO: 54066 - DNA, 75 bp, Homo sapiens
gaaacaaattcatctcatgctcaaagccaaaagggcaaatcctcacccatttgttctacaactggagacgataaa

SEQ ID NO: 54067 - DNA, 73 bp, Homo sapiens
aaattcatctcatgctcaaagccaaaagggcaaatcctcacccatttgttctacaactggagacgataaactt

SEQ ID NO: 54068 - DNA, 76 bp, Homo sapiens
aaaagggcaaatcctcacccatttgttctacaactggagacgataaactttgtgcagactctgcatgtcaacagaa

SEQ ID NO: 54069 - DNA, 78 bp, Homo sapiens
aaatcctcacccatttgttctacaactggagacgataaactttgtgcagactctgcatgtcaacagaacacagtgact

SEQ ID NO: 54070 - DNA, 79 bp, Homo sapiens
atttgttctacaactggagacgataaactttgtgcagactctgcatgtcaacagaacacagtgacttctagtggcgatt

SEQ ID NO: 54071 - DNA, 79 bp, Homo sapiens
aactggagacgataaactttgtgcagactctgcatgtcaacagaacacagtgacttctagtggcgatttggttgcaaaa

SEQ ID NO: 54072 - DNA, 81 bp, Homo sapiens
ataaactttgtgcagactctgcatgtcaacagaacacagtgacttctagtggcgatttggttgcaaaactgtgtgataaca

SEQ ID NO: 54073 - DNA, 82 bp, Homo sapiens
ctttgtgcagactctgcatgtcaacagaacacagtgacttctagtggcgatttggttgcaaaactgtgtgataacatagtta

SEQ ID NO: 54074 - DNA, 80 bp, Homo sapiens
tgcatgtcaacagaacacagtgacttctagtggcgatttggttgcaaaactgtgtgataacatagttagcgagtccgaaa

SEQ ID NO: 54075 - DNA, 77 bp, Homo sapiens
agaacacagtgacttctagtggcgatttggttgcaaaactgtgtgataacatagttagcgagtccgaaagcaccaca

SEQ ID NO: 54076 - DNA, 77 bp, Homo sapiens
acagtgacttctagtggcgatttggttgcaaaactgtgtgataacatagttagcgagtccgaaagcaccacagcaag

SEQ ID NO: 54077 - DNA, 79 bp, Homo sapiens
tagtggcgatttggttgcaaaactgtgtgataacatagttagcgagtccgaaagcaccacagcaaggcaacccagctca

SEQ ID NO: 54078 - DNA, 78 bp, Homo sapiens
aaactgtgtgataacatagttagcgagtccgaaagcaccacagcaaggcaacccagctcacaagatccacccgatgcc

SEQ ID NO: 54079 - DNA, 79 bp, Homo sapiens
ataacatagttagcgagtccgaaagcaccacagcaaggcaacccagctcacaagatccacccgatgcctcccactgtga

SEQ ID NO: 54080 - DNA, 79 bp, Homo sapiens
tagcgagtccgaaagcaccacagcaaggcaacccagctcacaagatccacccgatgcctcccactgtgaagacccacag

SEQ ID NO: 54081 - DNA, 81 bp, Homo sapiens
aaagcaccacagcaaggcaacccagctcacaagatccacccgatgcctcccactgtgaagacccacaggctcatacagtca

SEQ ID NO: 54082 - DNA, 78 bp, Homo sapiens
aaggcaacccagctcacaagatccacccgatgcctcccactgtgaagacccacaggctcatacagtcacctctgaccc

SEQ ID NO: 54083 - DNA, 76 bp, Homo sapiens
aagatccacccgatgcctcccactgtgaagacccacaggctcatacagtcacctctgaccctgtaagggataccca

SEQ ID NO: 54084 - DNA, 76 bp, Homo sapiens
tgcctcccactgtgaagacccacaggctcatacagtcacctctgaccctgtaagggatacccaggaacgtgcggat

SEQ ID NO: 54085 - DNA, 73 bp, Homo sapiens
actgtgaagacccacaggctcatacagtcacctctgaccctgtaagggatacccaggaacgtgcggatttttg

SEQ ID NO: 54086 - DNA, 72 bp, Homo sapiens
acccacaggctcatacagtcacctctgaccctgtaagggatacccaggaacgtgcggatttttgtcctttca

SEQ ID NO: 54087 - DNA, 67 bp, Homo sapiens
taagggatacccaggaacgtgcggatttttgtcctttcaaagtggtggataacaaaggccaacgaaa

SEQ ID NO: 54088 - DNA, 67 bp, Homo sapiens
cggatttttgtcctttcaaagtggtggataacaaaggccaacgaaaagatgtgaaactagataaacc

SEQ ID NO: 54089 - DNA, 67 bp, Homo sapiens
gtcctttcaaagtggtggataacaaaggccaacgaaaagatgtgaaactagataaacctttaacaaa

SEQ ID NO: 54090 - DNA, 70 bp, Homo sapiens
caaagtggtggataacaaaggccaacgaaaagatgtgaaactagataaacctttaacaaatatgcttgag

SEQ ID NO: 54091 - DNA, 70 bp, Homo sapiens
ggataacaaaggccaacgaaaagatgtgaaactagataaacctttaacaaatatgcttgaggtggtttca

SEQ ID NO: 54092 - DNA, 72 bp, Homo sapiens
aacgaaaagatgtgaaactagataaacctttaacaaatatgcttgaggtggtttcacatccacatccagttg

SEQ ID NO: 54093 - DNA, 72 bp, Homo sapiens
atgtgaaactagataaacctttaacaaatatgcttgaggtggtttcacatccacatccagttgtccctaaaa

SEQ ID NO: 54094 - DNA, 72 bp, Homo sapiens
actagataaacctttaacaaatatgcttgaggtggtttcacatccacatccagttgtccctaaaatggagaa

SEQ ID NO: 54095 - DNA, 75 bp, Homo sapiens
tttaacaaatatgcttgaggtggtttcacatccacatccagttgtccctaaaatggagaaagaactggtgccaga

SEQ ID NO: 54096 - DNA, 76 bp, Homo sapiens
atccacatccagttgtccctaaaatggagaaagaactggtgccagaccaggcagtaatatcagacagtactttctc

SEQ ID NO: 54097 - DNA, 75 bp, Homo sapiens
agttgtccctaaaatggagaaagaactggtgccagaccaggcagtaatatcagacagtactttctctctggcaaa

SEQ ID NO: 54098 - DNA, 81 bp, Homo sapiens
atggagaaagaactggtgccagaccaggcagtaatatcagacagtactttctctctggcaaacagtccaggcagtgaatca

SEQ ID NO: 54099 - DNA, 79 bp, Homo sapiens
aaagaactggtgccagaccaggcagtaatatcagacagtactttctctctggcaaacagtccaggcagtgaatcagtaa

SEQ ID NO: 54100 - DNA, 80 bp, Homo sapiens
gaccaggcagtaatatcagacagtactttctctctggcaaacagtccaggcagtgaatcagtaaccaaggatgacgcact

SEQ ID NO: 54101 - DNA, 75 bp, Homo sapiens
agacagtactttctctctggcaaacagtccaggcagtgaatcagtaaccaaggatgacgcactttcttttgtccc

SEQ ID NO: 54102 - DNA, 70 bp, Homo sapiens
aaacagtccaggcagtgaatcagtaaccaaggatgacgcactttcttttgtcccctcccagaaagaaaag

SEQ ID NO: 54103 - DNA, 70 bp, Homo sapiens
aatcagtaaccaaggatgacgcactttcttttgtcccctcccagaaagaaaagggaacagcaactcctga

SEQ ID NO: 54104 - DNA, 73 bp, Homo sapiens
atgacgcactttcttttgtcccctcccagaaagaaaagggaacagcaactcctgaactacatacagctacaga

SEQ ID NO: 54105 - DNA, 71 bp, Homo sapiens
actttcttttgtcccctcccagaaagaaaagggaacagcaactcctgaactacatacagctacagattata

SEQ ID NO: 54106 - DNA, 76 bp, Homo sapiens
ccctcccagaaagaaaagggaacagcaactcctgaactacatacagctacagattatagagatggcccagatggaa

SEQ ID NO: 54107 - DNA, 77 bp, Homo sapiens
aaagaaaagggaacagcaactcctgaactacatacagctacagattatagagatggcccagatggaaattcgaatga

SEQ ID NO: 54108 - DNA, 80 bp, Homo sapiens
aagggaacagcaactcctgaactacatacagctacagattatagagatggcccagatggaaattcgaatgagcctgatac

SEQ ID NO: 54109 - DNA, 81 bp, Homo sapiens
actcctgaactacatacagctacagattatagagatggcccagatggaaattcgaatgagcctgatacgcggccactagaa

SEQ ID NO: 54110 - DNA, 83 bp, Homo sapiens
tacatacagctacagattatagagatggcccagatggaaattcgaatgagcctgatacgcggccactagaagacagggcagta

SEQ ID NO: 54111 - DNA, 82 bp, Homo sapiens
atggaaattcgaatgagcctgatacgcggccactagaagacagggcagtaggcctgtccacatcctccactgctgcagagct

SEQ ID NO: 54112 - DNA, 84 bp, Homo sapiens
aattcgaatgagcctgatacgcggccactagaagacagggcagtaggcctgtccacatcctccactgctgcagagcttcagcac

SEQ ID NO: 54113 - DNA, 83 bp, Homo sapiens
cactagaagacagggcagtaggcctgtccacatcctccactgctgcagagcttcagcacgggatggggaataccagtctcaca

SEQ ID NO: 54114 - DNA, 81 bp, Homo sapiens
aagacagggcagtaggcctgtccacatcctccactgctgcagagcttcagcacgggatggggaataccagtctcacaggac

SEQ ID NO: 54115 - DNA, 81 bp, Homo sapiens
agtaggcctgtccacatcctccactgctgcagagcttcagcacgggatggggaataccagtctcacaggacttggtggaga

SEQ ID NO: 54116 - DNA, 79 bp, Homo sapiens
actgctgcagagcttcagcacgggatggggaataccagtctcacaggacttggtggagagcatgagggtcccgcccctc

SEQ ID NO: 54117 - DNA, 74 bp, Homo sapiens
acgggatggggaataccagtctcacaggacttggtggagagcatgagggtcccgcccctccagcaatcccagaa

SEQ ID NO: 54118 - DNA, 78 bp, Homo sapiens
aataccagtctcacaggacttggtggagagcatgagggtcccgcccctccagcaatcccagaagctctgaatatcaag

SEQ ID NO: 54119 - DNA, 77 bp, Homo sapiens
acaggacttggtggagagcatgagggtcccgcccctccagcaatcccagaagctctgaatatcaaggggaacactga

SEQ ID NO: 54120 - DNA, 76 bp, Homo sapiens
acttggtggagagcatgagggtcccgcccctccagcaatcccagaagctctgaatatcaaggggaacactgactct

SEQ ID NO: 54121 - DNA, 75 bp, Homo sapiens
atgagggtcccgcccctccagcaatcccagaagctctgaatatcaaggggaacactgactcttccctgcaaagtg

SEQ ID NO: 54122 - DNA, 75 bp, Homo sapiens
tcccgcccctccagcaatcccagaagctctgaatatcaaggggaacactgactcttccctgcaaagtgtgggtaa

SEQ ID NO: 54123 - DNA, 74 bp, Homo sapiens
caatcccagaagctctgaatatcaaggggaacactgactcttccctgcaaagtgtgggtaaggccactttggct

SEQ ID NO: 54124 - DNA, 74 bp, Homo sapiens
aagctctgaatatcaaggggaacactgactcttccctgcaaagtgtgggtaaggccactttggctttagattca

SEQ ID NO: 54125 - DNA, 70 bp, Homo sapiens
aatatcaaggggaacactgactcttccctgcaaagtgtgggtaaggccactttggctttagattcagttt

SEQ ID NO: 54126 - DNA, 69 bp, Homo sapiens
actcttccctgcaaagtgtgggtaaggccactttggctttagattcagttttgactgaagaaggaaaac

SEQ ID NO: 54127 - DNA, 67 bp, Homo sapiens
aaagtgtgggtaaggccactttggctttagattcagttttgactgaagaaggaaaacttctggtggt

SEQ ID NO: 54128 - DNA, 68 bp, Homo sapiens
gggtaaggccactttggctttagattcagttttgactgaagaaggaaaacttctggtggtttcagaaa

SEQ ID NO: 54129 - DNA, 75 bp, Homo sapiens
ttggctttagattcagttttgactgaagaaggaaaacttctggtggtttcagaaagctctgcagctcaggaacaa

SEQ ID NO: 54130 - DNA, 76 bp, Homo sapiens
tagattcagttttgactgaagaaggaaaacttctggtggtttcagaaagctctgcagctcaggaacaagataagga

SEQ ID NO: 54131 - DNA, 74 bp, Homo sapiens
tttgactgaagaaggaaaacttctggtggtttcagaaagctctgcagctcaggaacaagataaggataaagcgg

SEQ ID NO: 54132 - DNA, 74 bp, Homo sapiens
aaaacttctggtggtttcagaaagctctgcagctcaggaacaagataaggataaagcggtgacctgttcctcta

SEQ ID NO: 54133 - DNA, 74 bp, Homo sapiens
gtggtttcagaaagctctgcagctcaggaacaagataaggataaagcggtgacctgttcctctattaaggaaaa

SEQ ID NO: 54134 - DNA, 77 bp, Homo sapiens
aaagctctgcagctcaggaacaagataaggataaagcggtgacctgttcctctattaaggaaaatgctctctcttca

SEQ ID NO: 54135 - DNA, 73 bp, Homo sapiens
agctcaggaacaagataaggataaagcggtgacctgttcctctattaaggaaaatgctctctcttcaggaact

SEQ ID NO: 54136 - DNA, 73 bp, Homo sapiens
acaagataaggataaagcggtgacctgttcctctattaaggaaaatgctctctcttcaggaactttgcaggaa

SEQ ID NO: 54137 - DNA, 77 bp, Homo sapiens
tgacctgttcctctattaaggaaaatgctctctcttcaggaactttgcaggaagagcagagaacaccacctcctgga

SEQ ID NO: 54138 - DNA, 78 bp, Homo sapiens
tctattaaggaaaatgctctctcttcaggaactttgcaggaagagcagagaacaccacctcctggacaagatactcaa

SEQ ID NO: 54139 - DNA, 79 bp, Homo sapiens
aaaatgctctctcttcaggaactttgcaggaagagcagagaacaccacctcctggacaagatactcaacaatttcatga

SEQ ID NO: 54140 - DNA, 78 bp, Homo sapiens
tctcttcaggaactttgcaggaagagcagagaacaccacctcctggacaagatactcaacaatttcatgaaaaatcaa

SEQ ID NO: 54141 - DNA, 79 bp, Homo sapiens
aactttgcaggaagagcagagaacaccacctcctggacaagatactcaacaatttcatgaaaaatcaatctcagctgac

SEQ ID NO: 54142 - DNA, 81 bp, Homo sapiens
aagagcagagaacaccacctcctggacaagatactcaacaatttcatgaaaaatcaatctcagctgactgtgccaaggaca

SEQ ID NO: 54143 - DNA, 78 bp, Homo sapiens
aacaccacctcctggacaagatactcaacaatttcatgaaaaatcaatctcagctgactgtgccaaggacaaagcact

SEQ ID NO: 54144 - DNA, 81 bp, Homo sapiens
tcctggacaagatactcaacaatttcatgaaaaatcaatctcagctgactgtgccaaggacaaagcacttcagctaagtaa

SEQ ID NO: 54145 - DNA, 79 bp, Homo sapiens
tcagctgactgtgccaaggacaaagcacttcagctaagtaattcaccgggtgcatcctctgcctttcttaaggcagaaa

SEQ ID NO: 54146 - DNA, 74 bp, Homo sapiens
aaagcacttcagctaagtaattcaccgggtgcatcctctgcctttcttaaggcagaaactgaacataacaagga

SEQ ID NO: 54147 - DNA, 73 bp, Homo sapiens
acttcagctaagtaattcaccgggtgcatcctctgcctttcttaaggcagaaactgaacataacaaggaagtg

SEQ ID NO: 54148 - DNA, 72 bp, Homo sapiens
agtaattcaccgggtgcatcctctgcctttcttaaggcagaaactgaacataacaaggaagtggccccacaa

SEQ ID NO: 54149 - DNA, 75 bp, Homo sapiens
tctgcctttcttaaggcagaaactgaacataacaaggaagtggccccacaagtctcactgctgactcaaggtggg

SEQ ID NO: 54150 - DNA, 77 bp, Homo sapiens
aaactgaacataacaaggaagtggccccacaagtctcactgctgactcaaggtggggctgcccagagcctggtgcca

SEQ ID NO: 54151 - DNA, 78 bp, Homo sapiens
taacaaggaagtggccccacaagtctcactgctgactcaaggtggggctgcccagagcctggtgccaccaggagcaag

SEQ ID NO: 54152 - DNA, 81 bp, Homo sapiens
cccacaagtctcactgctgactcaaggtggggctgcccagagcctggtgccaccaggagcaagtctggccacagagtcaag

SEQ ID NO: 54153 - DNA, 82 bp, Homo sapiens
aagtctcactgctgactcaaggtggggctgcccagagcctggtgccaccaggagcaagtctggccacagagtcaaggcagga

SEQ ID NO: 54154 - DNA, 79 bp, Homo sapiens
ctgactcaaggtggggctgcccagagcctggtgccaccaggagcaagtctggccacagagtcaaggcaggaagccttgg

SEQ ID NO: 54155 - DNA, 81 bp, Homo sapiens
gggctgcccagagcctggtgccaccaggagcaagtctggccacagagtcaaggcaggaagccttgggggcagagcacaaca

SEQ ID NO: 54156 - DNA, 81 bp, Homo sapiens
agcctggtgccaccaggagcaagtctggccacagagtcaaggcaggaagccttgggggcagagcacaacagctccgctctg

SEQ ID NO: 54157 - DNA, 83 bp, Homo sapiens
caccaggagcaagtctggccacagagtcaaggcaggaagccttgggggcagagcacaacagctccgctctgttgccatgtctg

SEQ ID NO: 54158 - DNA, 83 bp, Homo sapiens
aagtctggccacagagtcaaggcaggaagccttgggggcagagcacaacagctccgctctgttgccatgtctgttgccagatg

SEQ ID NO: 54159 - DNA, 83 bp, Homo sapiens
acagagtcaaggcaggaagccttgggggcagagcacaacagctccgctctgttgccatgtctgttgccagatgggtctgatgg

SEQ ID NO: 54160 - DNA, 81 bp, Homo sapiens
aaggcaggaagccttgggggcagagcacaacagctccgctctgttgccatgtctgttgccagatgggtctgatgggtccga

SEQ ID NO: 54161 - DNA, 84 bp, Homo sapiens
cttgggggcagagcacaacagctccgctctgttgccatgtctgttgccagatgggtctgatgggtccgatgctcttaactgcag

SEQ ID NO: 54162 - DNA, 84 bp, Homo sapiens
aacagctccgctctgttgccatgtctgttgccagatgggtctgatgggtccgatgctcttaactgcagtcagccttctcctctg

SEQ ID NO: 54163 - DNA, 81 bp, Homo sapiens
agatgggtctgatgggtccgatgctcttaactgcagtcagccttctcctctggatgttggagtgaagaacactcaatccca

SEQ ID NO: 54164 - DNA, 77 bp, Homo sapiens
atgggtccgatgctcttaactgcagtcagccttctcctctggatgttggagtgaagaacactcaatcccagggaaaa

SEQ ID NO: 54165 - DNA, 77 bp, Homo sapiens
atgctcttaactgcagtcagccttctcctctggatgttggagtgaagaacactcaatcccagggaaaaactagtgcc

SEQ ID NO: 54166 - DNA, 77 bp, Homo sapiens
taactgcagtcagccttctcctctggatgttggagtgaagaacactcaatcccagggaaaaactagtgcctgtgagg

SEQ ID NO: 54167 - DNA, 78 bp, Homo sapiens
ttctcctctggatgttggagtgaagaacactcaatcccagggaaaaactagtgcctgtgaggtgagtggagatgtgac

SEQ ID NO: 54168 - DNA, 77 bp, Homo sapiens
gatgttggagtgaagaacactcaatcccagggaaaaactagtgcctgtgaggtgagtggagatgtgacggtggatgt

SEQ ID NO: 54169 - DNA, 75 bp, Homo sapiens
agtgaagaacactcaatcccagggaaaaactagtgcctgtgaggtgagtggagatgtgacggtggatgttacagg

SEQ ID NO: 54170 - DNA, 76 bp, Homo sapiens
tcaatcccagggaaaaactagtgcctgtgaggtgagtggagatgtgacggtggatgttacaggggttaatgctcta

SEQ ID NO: 54171 - DNA, 78 bp, Homo sapiens
aactagtgcctgtgaggtgagtggagatgtgacggtggatgttacaggggttaatgctctacaaggtatggctgagcc

SEQ ID NO: 54172 - DNA, 78 bp, Homo sapiens
aggtgagtggagatgtgacggtggatgttacaggggttaatgctctacaaggtatggctgagcccagaagagagaata

SEQ ID NO: 54173 - DNA, 80 bp, Homo sapiens
agatgtgacggtggatgttacaggggttaatgctctacaaggtatggctgagcccagaagagagaatatatcacacaaca

SEQ ID NO: 54174 - DNA, 80 bp, Homo sapiens
tggatgttacaggggttaatgctctacaaggtatggctgagcccagaagagagaatatatcacacaacacccaagacatc

SEQ ID NO: 54175 - DNA, 79 bp, Homo sapiens
ttacaggggttaatgctctacaaggtatggctgagcccagaagagagaatatatcacacaacacccaagacatcctgat

SEQ ID NO: 54176 - DNA, 80 bp, Homo sapiens
taatgctctacaaggtatggctgagcccagaagagagaatatatcacacaacacccaagacatcctgattccaaacgtct

SEQ ID NO: 54177 - DNA, 78 bp, Homo sapiens
agagagaatatatcacacaacacccaagacatcctgattccaaacgtcttgttgagccaagagaagaatgccgttcta

SEQ ID NO: 54178 - DNA, 77 bp, Homo sapiens
tatatcacacaacacccaagacatcctgattccaaacgtcttgttgagccaagagaagaatgccgttctaggtttgc

SEQ ID NO: 54179 - DNA, 75 bp, Homo sapiens
atcctgattccaaacgtcttgttgagccaagagaagaatgccgttctaggtttgccagtggctctacaggacaaa

SEQ ID NO: 54180 - DNA, 76 bp, Homo sapiens
aaacgtcttgttgagccaagagaagaatgccgttctaggtttgccagtggctctacaggacaaagctgtgactgac

SEQ ID NO: 54181 - DNA, 75 bp, Homo sapiens
aagagaagaatgccgttctaggtttgccagtggctctacaggacaaagctgtgactgacccacagggagttggaa

SEQ ID NO: 54182 - DNA, 76 bp, Homo sapiens
cgttctaggtttgccagtggctctacaggacaaagctgtgactgacccacagggagttggaaccccagagatgata

SEQ ID NO: 54183 - DNA, 78 bp, Homo sapiens
tttgccagtggctctacaggacaaagctgtgactgacccacagggagttggaaccccagagatgatacctcttgattg

SEQ ID NO: 54184 - DNA, 75 bp, Homo sapiens
ctctacaggacaaagctgtgactgacccacagggagttggaaccccagagatgatacctcttgattgggagaaag

SEQ ID NO: 54185 - DNA, 74 bp, Homo sapiens
acaaagctgtgactgacccacagggagttggaaccccagagatgatacctcttgattgggagaaagggaagctg

SEQ ID NO: 54186 - DNA, 74 bp, Homo sapiens
actgacccacagggagttggaaccccagagatgatacctcttgattgggagaaagggaagctggagggagcaga

SEQ ID NO: 54187 - DNA, 75 bp, Homo sapiens
agggagttggaaccccagagatgatacctcttgattgggagaaagggaagctggagggagcagaccacagctgta

SEQ ID NO: 54188 - DNA, 76 bp, Homo sapiens
aaccccagagatgatacctcttgattgggagaaagggaagctggagggagcagaccacagctgtaccatgggtgac

SEQ ID NO: 54189 - DNA, 79 bp, Homo sapiens
agatgatacctcttgattgggagaaagggaagctggagggagcagaccacagctgtaccatgggtgacgctgaggaagc

SEQ ID NO: 54190 - DNA, 78 bp, Homo sapiens
tcttgattgggagaaagggaagctggagggagcagaccacagctgtaccatgggtgacgctgaggaagcccaaataga

SEQ ID NO: 54191 - DNA, 79 bp, Homo sapiens
aaagggaagctggagggagcagaccacagctgtaccatgggtgacgctgaggaagcccaaatagacgatgaagcacatc

SEQ ID NO: 54192 - DNA, 81 bp, Homo sapiens
aagctggagggagcagaccacagctgtaccatgggtgacgctgaggaagcccaaatagacgatgaagcacatcctgtccta

SEQ ID NO: 54193 - DNA, 83 bp, Homo sapiens
gaccacagctgtaccatgggtgacgctgaggaagcccaaatagacgatgaagcacatcctgtcctactgcagcctgttgccaa

SEQ ID NO: 54194 - DNA, 82 bp, Homo sapiens
agctgtaccatgggtgacgctgaggaagcccaaatagacgatgaagcacatcctgtcctactgcagcctgttgccaaggagc

SEQ ID NO: 54195 - DNA, 81 bp, Homo sapiens
atgggtgacgctgaggaagcccaaatagacgatgaagcacatcctgtcctactgcagcctgttgccaaggagctccccaca

SEQ ID NO: 54196 - DNA, 87 bp, Homo sapiens
aaatagacgatgaagcacatcctgtcctactgcagcctgttgccaaggagctccccacagacatggagctctcagcccatgatgatg

SEQ ID NO: 54197 - DNA, 84 bp, Homo sapiens
atcctgtcctactgcagcctgttgccaaggagctccccacagacatggagctctcagcccatgatgatggggccccagctggtg

SEQ ID NO: 54198 - DNA, 84 bp, Homo sapiens
agcctgttgccaaggagctccccacagacatggagctctcagcccatgatgatggggccccagctggtgtgagggaagtcatgc

SEQ ID NO: 54199 - DNA, 84 bp, Homo sapiens
ttgccaaggagctccccacagacatggagctctcagcccatgatgatggggccccagctggtgtgagggaagtcatgcgagccc

SEQ ID NO: 54200 - DNA, 83 bp, Homo sapiens
cccacagacatggagctctcagcccatgatgatggggccccagctggtgtgagggaagtcatgcgagccccgccttcaggcag

SEQ ID NO: 54201 - DNA, 81 bp, Homo sapiens
acatggagctctcagcccatgatgatggggccccagctggtgtgagggaagtcatgcgagccccgccttcaggcagggaaa

SEQ ID NO: 54202 - DNA, 81 bp, Homo sapiens
tctcagcccatgatgatggggccccagctggtgtgagggaagtcatgcgagccccgccttcaggcagggaaaggagcactc

SEQ ID NO: 54203 - DNA, 79 bp, Homo sapiens
tgatgatggggccccagctggtgtgagggaagtcatgcgagccccgccttcaggcagggaaaggagcactccctctcta

SEQ ID NO: 54204 - DNA, 79 bp, Homo sapiens
cagctggtgtgagggaagtcatgcgagccccgccttcaggcagggaaaggagcactccctctctaccttgcatggtctc

SEQ ID NO: 54205 - DNA, 78 bp, Homo sapiens
ggtgtgagggaagtcatgcgagccccgccttcaggcagggaaaggagcactccctctctaccttgcatggtctctgcc

SEQ ID NO: 54206 - DNA, 78 bp, Homo sapiens
aagtcatgcgagccccgccttcaggcagggaaaggagcactccctctctaccttgcatggtctctgcccaggacgcac

SEQ ID NO: 54207 - DNA, 76 bp, Homo sapiens
cccgccttcaggcagggaaaggagcactccctctctaccttgcatggtctctgcccaggacgcacctctgcctaag

SEQ ID NO: 54208 - DNA, 77 bp, Homo sapiens
cagggaaaggagcactccctctctaccttgcatggtctctgcccaggacgcacctctgcctaagggggcagacttga

SEQ ID NO: 54209 - DNA, 81 bp, Homo sapiens
tctctaccttgcatggtctctgcccaggacgcacctctgcctaagggggcagacttgatagaggaggctgccagccgtata

SEQ ID NO: 54210 - DNA, 83 bp, Homo sapiens
catggtctctgcccaggacgcacctctgcctaagggggcagacttgatagaggaggctgccagccgtatagtggatgctgtca

SEQ ID NO: 54211 - DNA, 81 bp, Homo sapiens
cctaagggggcagacttgatagaggaggctgccagccgtatagtggatgctgtcatcgaacaagtcaaggccgctggagca

SEQ ID NO: 54212 - DNA, 83 bp, Homo sapiens
agacttgatagaggaggctgccagccgtatagtggatgctgtcatcgaacaagtcaaggccgctggagcactgcttactgagg

SEQ ID NO: 54213 - DNA, 81 bp, Homo sapiens
atagaggaggctgccagccgtatagtggatgctgtcatcgaacaagtcaaggccgctggagcactgcttactgagggggag

SEQ ID NO: 54214 - DNA, 83 bp, Homo sapiens
ccagccgtatagtggatgctgtcatcgaacaagtcaaggccgctggagcactgcttactgagggggaggcctgtcacatgtca

SEQ ID NO: 54215 - DNA, 84 bp, Homo sapiens
gtatagtggatgctgtcatcgaacaagtcaaggccgctggagcactgcttactgagggggaggcctgtcacatgtcactgtcca

SEQ ID NO: 54216 - DNA, 82 bp, Homo sapiens
tgtcatcgaacaagtcaaggccgctggagcactgcttactgagggggaggcctgtcacatgtcactgtccagccctgagttg

SEQ ID NO: 54217 - DNA, 78 bp, Homo sapiens
aacaagtcaaggccgctggagcactgcttactgagggggaggcctgtcacatgtcactgtccagccctgagttgggtc

SEQ ID NO: 54218 - DNA, 79 bp, Homo sapiens
cgctggagcactgcttactgagggggaggcctgtcacatgtcactgtccagccctgagttgggtcctctcactaaagga

SEQ ID NO: 54219 - DNA, 77 bp, Homo sapiens
actgcttactgagggggaggcctgtcacatgtcactgtccagccctgagttgggtcctctcactaaaggactagaga

SEQ ID NO: 54220 - DNA, 75 bp, Homo sapiens
agggggaggcctgtcacatgtcactgtccagccctgagttgggtcctctcactaaaggactagagagtgctttta

SEQ ID NO: 54221 - DNA, 76 bp, Homo sapiens
aggcctgtcacatgtcactgtccagccctgagttgggtcctctcactaaaggactagagagtgcttttacagaaaa

SEQ ID NO: 54222 - DNA, 73 bp, Homo sapiens
tcactgtccagccctgagttgggtcctctcactaaaggactagagagtgcttttacagaaaaagtgagtactt

SEQ ID NO: 54223 - DNA, 70 bp, Homo sapiens
agccctgagttgggtcctctcactaaaggactagagagtgcttttacagaaaaagtgagtactttcccac

SEQ ID NO: 54224 - DNA, 68 bp, Homo sapiens
agttgggtcctctcactaaaggactagagagtgcttttacagaaaaagtgagtactttcccacctggg

SEQ ID NO: 54225 - DNA, 71 bp, Homo sapiens
actagagagtgcttttacagaaaaagtgagtactttcccacctggggagagcctaccaatgggcagtactc

SEQ ID NO: 54226 - DNA, 69 bp, Homo sapiens
agaaaaagtgagtactttcccacctggggagagcctaccaatgggcagtactcctgaggaagccacggg

SEQ ID NO: 54227 - DNA, 72 bp, Homo sapiens
tttcccacctggggagagcctaccaatgggcagtactcctgaggaagccacggggagccttgcaggatgttt

SEQ ID NO: 54228 - DNA, 74 bp, Homo sapiens
acctggggagagcctaccaatgggcagtactcctgaggaagccacggggagccttgcaggatgttttgctggaa

SEQ ID NO: 54229 - DNA, 75 bp, Homo sapiens
agcctaccaatgggcagtactcctgaggaagccacggggagccttgcaggatgttttgctggaagggaggagcca

SEQ ID NO: 54230 - DNA, 76 bp, Homo sapiens
cagtactcctgaggaagccacggggagccttgcaggatgttttgctggaagggaggagccagagaagatcatttta

SEQ ID NO: 54231 - DNA, 76 bp, Homo sapiens
tcctgaggaagccacggggagccttgcaggatgttttgctggaagggaggagccagagaagatcattttacctgtc

SEQ ID NO: 54232 - DNA, 74 bp, Homo sapiens
acggggagccttgcaggatgttttgctggaagggaggagccagagaagatcattttacctgtccaggggcctga

SEQ ID NO: 54233 - DNA, 79 bp, Homo sapiens
ttgcaggatgttttgctggaagggaggagccagagaagatcattttacctgtccaggggcctgagccagcagcaggtaa

SEQ ID NO: 54234 - DNA, 78 bp, Homo sapiens
tttgctggaagggaggagccagagaagatcattttacctgtccaggggcctgagccagcagcaggtaagcaaaacata

SEQ ID NO: 54235 - DNA, 76 bp, Homo sapiens
aagggaggagccagagaagatcattttacctgtccaggggcctgagccagcagcaggtaagcaaaacataatacaa

SEQ ID NO: 54236 - DNA, 75 bp, Homo sapiens
agagaagatcattttacctgtccaggggcctgagccagcagcaggtaagcaaaacataatacaaaattaacagtc

SEQ ID NO: 54237 - DNA, 76 bp, Homo sapiens
agatcattttacctgtccaggggcctgagccagcagcaggtaagcaaaacataatacaaaattaacagtctgagaa

SEQ ID NO: 54238 - DNA, 88 bp, Homo sapiens
ttgtgtctgctttatcttggtgaagcagctgcactgagcagattgctcacacagcagcctgttccatctgtgggtaaccatgttccga

SEQ ID NO: 54239 - DNA, 87 bp, Homo sapiens
tttatcttggtgaagcagctgcactgagcagattgctcacacagcagcctgttccatctgtgggtaaccatgttccgaggcagcaaa

SEQ ID NO: 54240 - DNA, 86 bp, Homo sapiens
gcagctgcactgagcagattgctcacacagcagcctgttccatctgtgggtaaccatgttccgaggcagcaaagagaaaccgctat

SEQ ID NO: 54241 - DNA, 83 bp, Homo sapiens
actgagcagattgctcacacagcagcctgttccatctgtgggtaaccatgttccgaggcagcaaagagaaaccgctattgctc

SEQ ID NO: 54242 - DNA, 80 bp, Homo sapiens
tgctcacacagcagcctgttccatctgtgggtaaccatgttccgaggcagcaaagagaaaccgctattgctccgtggaaa

SEQ ID NO: 54243 - DNA, 75 bp, Homo sapiens
agcagcctgttccatctgtgggtaaccatgttccgaggcagcaaagagaaaccgctattgctccgtggaaataaa

SEQ ID NO: 54244 - DNA, 75 bp, Homo sapiens
catctgtgggtaaccatgttccgaggcagcaaagagaaaccgctattgctccgtggaaataaactatctgaataa

SEQ ID NO: 54245 - DNA, 71 bp, Homo sapiens
atgttccgaggcagcaaagagaaaccgctattgctccgtggaaataaactatctgaataaaacttcttaac

SEQ ID NO: 54246 - DNA, 66 bp, Homo sapiens
aaagagaaaccgctattgctccgtggaaataaactatctgaataaaacttcttaacgggggttgag

SEQ ID NO: 54247 - DNA, 68 bp, Homo sapiens
aaaccgctattgctccgtggaaataaactatctgaataaaacttcttaacgggggttgaggctgaagc

SEQ ID NO: 54248 - DNA, 69 bp, Homo sapiens
ttgctccgtggaaataaactatctgaataaaacttcttaacgggggttgaggctgaagctgaaacggga

SEQ ID NO: 54249 - DNA, 67 bp, Homo sapiens
aaataaactatctgaataaaacttcttaacgggggttgaggctgaagctgaaacgggagtcggacac

SEQ ID NO: 54250 - DNA, 69 bp, Homo sapiens
aataaaacttcttaacgggggttgaggctgaagctgaaacgggagtcggacacgatcttggctcctgaa

SEQ ID NO: 54251 - DNA, 70 bp, Homo sapiens
ttcttaacgggggttgaggctgaagctgaaacgggagtcggacacgatcttggctcctgaagtctttaaa

SEQ ID NO: 54252 - DNA, 76 bp, Homo sapiens
gttgaggctgaagctgaaacgggagtcggacacgatcttggctcctgaagtctttaaaggtcagtttgatgcacac

SEQ ID NO: 54253 - DNA, 74 bp, Homo sapiens
aagctgaaacgggagtcggacacgatcttggctcctgaagtctttaaaggtcagtttgatgcacacttctatac

SEQ ID NO: 54254 - DNA, 73 bp, Homo sapiens
aaacgggagtcggacacgatcttggctcctgaagtctttaaaggtcagtttgatgcacacttctataccacca

SEQ ID NO: 54255 - DNA, 77 bp, Homo sapiens
cacgatcttggctcctgaagtctttaaaggtcagtttgatgcacacttctataccaccacctgttaccagctgtaga

SEQ ID NO: 54256 - DNA, 77 bp, Homo sapiens
ttggctcctgaagtctttaaaggtcagtttgatgcacacttctataccaccacctgttaccagctgtagacagaaga

SEQ ID NO: 54257 - DNA, 75 bp, Homo sapiens
aagtctttaaaggtcagtttgatgcacacttctataccaccacctgttaccagctgtagacagaagacctatctc

SEQ ID NO: 54258 - DNA, 78 bp, Homo sapiens
aaaggtcagtttgatgcacacttctataccaccacctgttaccagctgtagacagaagacctatctccatgcttgccc

SEQ ID NO: 54259 - DNA, 78 bp, Homo sapiens
atgcacacttctataccaccacctgttaccagctgtagacagaagacctatctccatgcttgcccctaggcttttgta

SEQ ID NO: 54260 - DNA, 75 bp, Homo sapiens
ttctataccaccacctgttaccagctgtagacagaagacctatctccatgcttgcccctaggcttttgtaggtaa

SEQ ID NO: 54261 - DNA, 75 bp, Homo sapiens
ctgttaccagctgtagacagaagacctatctccatgcttgcccctaggcttttgtaggtaagaagcagcctgttt

SEQ ID NO: 54262 - DNA, 74 bp, Homo sapiens
ctgtagacagaagacctatctccatgcttgcccctaggcttttgtaggtaagaagcagcctgttttgtctttat

SEQ ID NO: 54263 - DNA, 71 bp, Homo sapiens
aagacctatctccatgcttgcccctaggcttttgtaggtaagaagcagcctgttttgtctttattgtttat

SEQ ID NO: 54264 - DNA, 71 bp, Homo sapiens
aggaatcagtttttaaaaatgtactctgtaacccccctgcactttcagaaatgccagacgtgaaagctgaa

SEQ ID NO: 54265 - DNA, 73 bp, Homo sapiens
ttaaaaatgtactctgtaacccccctgcactttcagaaatgccagacgtgaaagctgaagatgaagtggattt

SEQ ID NO: 54266 - DNA, 76 bp, Homo sapiens
aatgtactctgtaacccccctgcactttcagaaatgccagacgtgaaagctgaagatgaagtggattttagagcaa

SEQ ID NO: 54267 - DNA, 77 bp, Homo sapiens
ccccctgcactttcagaaatgccagacgtgaaagctgaagatgaagtggattttagagcaagttcaatttctgaaga

SEQ ID NO: 54268 - DNA, 78 bp, Homo sapiens
tttcagaaatgccagacgtgaaagctgaagatgaagtggattttagagcaagttcaatttctgaagaagtggctgtag

SEQ ID NO: 54269 - DNA, 79 bp, Homo sapiens
aatgccagacgtgaaagctgaagatgaagtggattttagagcaagttcaatttctgaagaagtggctgtagggagcata

SEQ ID NO: 54270 - DNA, 80 bp, Homo sapiens
aaagctgaagatgaagtggattttagagcaagttcaatttctgaagaagtggctgtagggagcatagctgctacactgaa

SEQ ID NO: 54271 - DNA, 82 bp, Homo sapiens
aagatgaagtggattttagagcaagttcaatttctgaagaagtggctgtagggagcatagctgctacactgaagatgaagca

SEQ ID NO: 54272 - DNA, 81 bp, Homo sapiens
attttagagcaagttcaatttctgaagaagtggctgtagggagcatagctgctacactgaagatgaagcaaggcccaatga

SEQ ID NO: 54273 - DNA, 79 bp, Homo sapiens
aagttcaatttctgaagaagtggctgtagggagcatagctgctacactgaagatgaagcaaggcccaatgacccaggcg

SEQ ID NO: 54274 - DNA, 78 bp, Homo sapiens
aatttctgaagaagtggctgtagggagcatagctgctacactgaagatgaagcaaggcccaatgacccaggcggtaag

SEQ ID NO: 54275 - DNA, 83 bp, Homo sapiens
tggctgtagggagcatagctgctacactgaagatgaagcaaggcccaatgacccaggcggtaagtggcatcagtaagtctata

SEQ ID NO: 54276 - DNA, 81 bp, Homo sapiens
agcatagctgctacactgaagatgaagcaaggcccaatgacccaggcggtaagtggcatcagtaagtctataagggcacaa

SEQ ID NO: 54277 - DNA, 67 bp, Homo sapiens
aagtatatactggatttttattgccttcttgggtttttttccctacgtgtatcggccgttatgctta

SEQ ID NO: 54278 - DNA, 66 bp, Homo sapiens
tttttattgccttcttgggtttttttccctacgtgtatcggccgttatgcttagccagtttattct

SEQ ID NO: 54279 - DNA, 66 bp, Homo sapiens
attgccttcttgggtttttttccctacgtgtatcggccgttatgcttagccagtttattctttatt

SEQ ID NO: 54280 - DNA, 67 bp, Homo sapiens
ttttttccctacgtgtatcggccgttatgcttagccagtttattctttatttttttactggagtcat

SEQ ID NO: 54281 - DNA, 73 bp, Homo sapiens
tacgtgtatcggccgttatgcttagccagtttattctttatttttttactggagtcattgccagtgatggaaa

SEQ ID NO: 54282 - DNA, 70 bp, Homo sapiens
ggccgttatgcttagccagtttattctttatttttttactggagtcattgccagtgatggaaacggtgtt

SEQ ID NO: 54283 - DNA, 72 bp, Homo sapiens
ttagccagtttattctttatttttttactggagtcattgccagtgatggaaacggtgtttgcttctctttca

SEQ ID NO: 54284 - DNA, 77 bp, Homo sapiens
tattctttatttttttactggagtcattgccagtgatggaaacggtgtttgcttctctttcagtcaagatctgcaca

SEQ ID NO: 54285 - DNA, 78 bp, Homo sapiens
ttttttactggagtcattgccagtgatggaaacggtgtttgcttctctttcagtcaagatctgcacaaagtatagcat

SEQ ID NO: 54286 - DNA, 79 bp, Homo sapiens
gagtcattgccagtgatggaaacggtgtttgcttctctttcagtcaagatctgcacaaagtatagcattaggtggtatt

SEQ ID NO: 54287 - DNA, 76 bp, Homo sapiens
cagtgatggaaacggtgtttgcttctctttcagtcaagatctgcacaaagtatagcattaggtggtatttattgtt

SEQ ID NO: 54288 - DNA, 80 bp, Homo sapiens
gcttctctttcagtcaagatctgcacaaagtatagcattaggtggtatttattgtttatattatgagttctacattcatc

SEQ ID NO: 54289 - DNA, 81 bp, Homo sapiens
tcagtcaagatctgcacaaagtatagcattaggtggtatttattgtttatattatgagttctacattcatctttccagcac

SEQ ID NO: 54290 - DNA, 78 bp, Homo sapiens
ctgcacaaagtatagcattaggtggtatttattgtttatattatgagttctacattcatctttccagcactctgaagt

SEQ ID NO: 54291 - DNA, 79 bp, Homo sapiens
gtatagcattaggtggtatttattgtttatattatgagttctacattcatctttccagcactctgaagttatcagcaag

SEQ ID NO: 54292 - DNA, 78 bp, Homo sapiens
ttaggtggtatttattgtttatattatgagttctacattcatctttccagcactctgaagttatcagcaagttctcag

SEQ ID NO: 54293 - DNA, 81 bp, Homo sapiens
attgtttatattatgagttctacattcatctttccagcactctgaagttatcagcaagttctcagtcagttcaaggcattg

SEQ ID NO: 54294 - DNA, 84 bp, Homo sapiens
tatattatgagttctacattcatctttccagcactctgaagttatcagcaagttctcagtcagttcaaggcattggattctgct

SEQ ID NO: 54295 - DNA, 81 bp, Homo sapiens
tacattcatctttccagcactctgaagttatcagcaagttctcagtcagttcaaggcattggattctgcttgatttctttt

SEQ ID NO: 54296 - DNA, 78 bp, Homo sapiens
atctttccagcactctgaagttatcagcaagttctcagtcagttcaaggcattggattctgcttgatttctttttaat

SEQ ID NO: 54297 - DNA, 76 bp, Homo sapiens
actctgaagttatcagcaagttctcagtcagttcaaggcattggattctgcttgatttctttttaattcattgttt

SEQ ID NO: 54298 - DNA, 75 bp, Homo sapiens
agttatcagcaagttctcagtcagttcaaggcattggattctgcttgatttctttttaattcattgtttttgacc

SEQ ID NO: 54299 - DNA, 72 bp, Homo sapiens
aagttctcagtcagttcaaggcattggattctgcttgatttctttttaattcattgtttttgacccctttga

SEQ ID NO: 54300 - DNA, 70 bp, Homo sapiens
ggattctgcttgatttctttttaattcattgtttttgacccctttgagagttttaatagagaggagtctg

SEQ ID NO: 54301 - DNA, 71 bp, Homo sapiens
tgatttctttttaattcattgtttttgacccctttgagagttttaatagagaggagtctggaaggcagaga

SEQ ID NO: 54302 - DNA, 71 bp, Homo sapiens
tttttaattcattgtttttgacccctttgagagttttaatagagaggagtctggaaggcagagatctccac

SEQ ID NO: 54303 - DNA, 70 bp, Homo sapiens
attgtttttgacccctttgagagttttaatagagaggagtctggaaggcagagatctccaccacctaacc

SEQ ID NO: 54304 - DNA, 72 bp, Homo sapiens
cctttgagagttttaatagagaggagtctggaaggcagagatctccaccacctaaccgtgagaaatttggaa

SEQ ID NO: 54305 - DNA, 71 bp, Homo sapiens
ttttaatagagaggagtctggaaggcagagatctccaccacctaaccgtgagaaatttggaactaaggact

SEQ ID NO: 54306 - DNA, 74 bp, Homo sapiens
atagagaggagtctggaaggcagagatctccaccacctaaccgtgagaaatttggaactaaggacttgcactgg

SEQ ID NO: 54307 - DNA, 71 bp, Homo sapiens
gaaggcagagatctccaccacctaaccgtgagaaatttggaactaaggacttgcactggtccccaagttaa

SEQ ID NO: 54308 - DNA, 70 bp, Homo sapiens
atctccaccacctaaccgtgagaaatttggaactaaggacttgcactggtccccaagttaacagtggata

SEQ ID NO: 54309 - DNA, 68 bp, Homo sapiens
accacctaaccgtgagaaatttggaactaaggacttgcactggtccccaagttaacagtggatatact

SEQ ID NO: 54310 - DNA, 71 bp, Homo sapiens
agaaatttggaactaaggacttgcactggtccccaagttaacagtggatatacttcctgcattttctctgt

SEQ ID NO: 54311 - DNA, 72 bp, Homo sapiens
tttggaactaaggacttgcactggtccccaagttaacagtggatatacttcctgcattttctctgttctttc

SEQ ID NO: 54312 - DNA, 75 bp, Homo sapiens
ttgcactggtccccaagttaacagtggatatacttcctgcattttctctgttctttcttgcatttgggcaaaatg

SEQ ID NO: 54313 - DNA, 75 bp, Homo sapiens
tggtccccaagttaacagtggatatacttcctgcattttctctgttctttcttgcatttgggcaaaatgtatgaa

SEQ ID NO: 54314 - DNA, 76 bp, Homo sapiens
agttaacagtggatatacttcctgcattttctctgttctttcttgcatttgggcaaaatgtatgaacggcacaaga

SEQ ID NO: 54315 - DNA, 78 bp, Homo sapiens
atatacttcctgcattttctctgttctttcttgcatttgggcaaaatgtatgaacggcacaagaggcgctacagcctc

SEQ ID NO: 54316 - DNA, 79 bp, Homo sapiens
attttctctgttctttcttgcatttgggcaaaatgtatgaacggcacaagaggcgctacagcctctgtgacatctccaa

SEQ ID NO: 54317 - DNA, 80 bp, Homo sapiens
ttctttcttgcatttgggcaaaatgtatgaacggcacaagaggcgctacagcctctgtgacatctccaaggtggacagga

SEQ ID NO: 54318 - DNA, 82 bp, Homo sapiens
tcttgcatttgggcaaaatgtatgaacggcacaagaggcgctacagcctctgtgacatctccaaggtggacaggactgtgga

SEQ ID NO: 54319 - DNA, 81 bp, Homo sapiens
tatgaacggcacaagaggcgctacagcctctgtgacatctccaaggtggacaggactgtggacgtggtattgctgaaggta

SEQ ID NO: 54320 - DNA, 76 bp, Homo sapiens
acaagaggcgctacagcctctgtgacatctccaaggtggacaggactgtggacgtggtattgctgaaggtaagggg

SEQ ID NO: 54321 - DNA, 79 bp, Homo sapiens
agcctctgtgacatctccaaggtggacaggactgtggacgtggtattgctgaaggtaaggggggctgcacctcatgcat

SEQ ID NO: 54322 - DNA, 79 bp, Homo sapiens
acatctccaaggtggacaggactgtggacgtggtattgctgaaggtaaggggggctgcacctcatgcattctgaagctc

SEQ ID NO: 54323 - DNA, 78 bp, Homo sapiens
ctttttctttcagataaaccgagaaaactggtgtacaatagagccatgccctgatgcagcatctcttctggcttccaa

SEQ ID NO: 54324 - DNA, 83 bp, Homo sapiens
tctttcagataaaccgagaaaactggtgtacaatagagccatgccctgatgcagcatctcttctggcttccaagcagagccca

SEQ ID NO: 54325 - DNA, 80 bp, Homo sapiens
aaaccgagaaaactggtgtacaatagagccatgccctgatgcagcatctcttctggcttccaagcagagcccaggtaagc

SEQ ID NO: 54326 - DNA, 86 bp, Homo sapiens
tggtgtacaatagagccatgccctgatgcagcatctcttctggcttccaagcagagcccaggtaagctgagattatccattcattt

SEQ ID NO: 54327 - DNA, 86 bp, Homo sapiens
aatagagccatgccctgatgcagcatctcttctggcttccaagcagagcccaggtaagctgagattatccattcattttctggagc

SEQ ID NO: 54328 - DNA, 87 bp, Homo sapiens
atgccctgatgcagcatctcttctggcttccaagcagagcccaggtaagctgagattatccattcattttctggagctgcagcccca

SEQ ID NO: 54329 - DNA, 70 bp, Homo sapiens
tttttttttttcaatattggtgaataaattctctttttcagaatgtgagaacttcctggatgttggactg

SEQ ID NO: 54330 - DNA, 76 bp, Homo sapiens
ttttcaatattggtgaataaattctctttttcagaatgtgagaacttcctggatgttggactgggcagagagtgta

SEQ ID NO: 54331 - DNA, 75 bp, Homo sapiens
tgaataaattctctttttcagaatgtgagaacttcctggatgttggactgggcagagagtgtacctcaaaacaag

SEQ ID NO: 54332 - DNA, 74 bp, Homo sapiens
ctctttttcagaatgtgagaacttcctggatgttggactgggcagagagtgtacctcaaaacaaggtgtactta

SEQ ID NO: 54333 - DNA, 73 bp, Homo sapiens
agaatgtgagaacttcctggatgttggactgggcagagagtgtacctcaaaacaaggtgtacttaaaagagaa

SEQ ID NO: 54334 - DNA, 72 bp, Homo sapiens
agaacttcctggatgttggactgggcagagagtgtacctcaaaacaaggtgtacttaaaagagaatctggga

SEQ ID NO: 54335 - DNA, 74 bp, Homo sapiens
tgttggactgggcagagagtgtacctcaaaacaaggtgtacttaaaagagaatctgggagtgattctgacctct

SEQ ID NO: 54336 - DNA, 73 bp, Homo sapiens
actgggcagagagtgtacctcaaaacaaggtgtacttaaaagagaatctgggagtgattctgacctctttcac

SEQ ID NO: 54337 - DNA, 73 bp, Homo sapiens
agtgtacctcaaaacaaggtgtacttaaaagagaatctgggagtgattctgacctctttcactcacccagtga

SEQ ID NO: 54338 - DNA, 77 bp, Homo sapiens
aaaacaaggtgtacttaaaagagaatctgggagtgattctgacctctttcactcacccagtgatgacatggacagca

SEQ ID NO: 54339 - DNA, 81 bp, Homo sapiens
tgtacttaaaagagaatctgggagtgattctgacctctttcactcacccagtgatgacatggacagcatcatcttcccaaa

SEQ ID NO: 54340 - DNA, 81 bp, Homo sapiens
aagagaatctgggagtgattctgacctctttcactcacccagtgatgacatggacagcatcatcttcccaaaggtactgtg

SEQ ID NO: 54341 - DNA, 81 bp, Homo sapiens
tgattctgacctctttcactcacccagtgatgacatggacagcatcatcttcccaaaggtactgtgtggaccttcctttca

SEQ ID NO: 54342 - DNA, 76 bp, Homo sapiens
acctctttcactcacccagtgatgacatggacagcatcatcttcccaaaggtactgtgtggaccttcctttcattt

SEQ ID NO: 54343 - DNA, 77 bp, Homo sapiens
actcacccagtgatgacatggacagcatcatcttcccaaaggtactgtgtggaccttcctttcatttttgtcacacg

SEQ ID NO: 54344 - DNA, 84 bp, Homo sapiens
atctgattggccctgctggcttcaaccatatgtgctttctctccattacagccagaggaagagcatttggcctgtgatatcacc

SEQ ID NO: 54345 - DNA, 83 bp, Homo sapiens
ctggcttcaaccatatgtgctttctctccattacagccagaggaagagcatttggcctgtgatatcaccggatccagttcatc

SEQ ID NO: 54346 - DNA, 82 bp, Homo sapiens
ttcaaccatatgtgctttctctccattacagccagaggaagagcatttggcctgtgatatcaccggatccagttcatccacc

SEQ ID NO: 54347 - DNA, 82 bp, Homo sapiens
tttctctccattacagccagaggaagagcatttggcctgtgatatcaccggatccagttcatccaccgatgacacggcttca

SEQ ID NO: 54348 - DNA, 80 bp, Homo sapiens
attacagccagaggaagagcatttggcctgtgatatcaccggatccagttcatccaccgatgacacggcttcactggacc

SEQ ID NO: 54349 - DNA, 79 bp, Homo sapiens
aggaagagcatttggcctgtgatatcaccggatccagttcatccaccgatgacacggcttcactggaccgacattcttc

SEQ ID NO: 54350 - DNA, 82 bp, Homo sapiens
agcatttggcctgtgatatcaccggatccagttcatccaccgatgacacggcttcactggaccgacattcttctcatggcag

SEQ ID NO: 54351 - DNA, 86 bp, Homo sapiens
tgtgatatcaccggatccagttcatccaccgatgacacggcttcactggaccgacattcttctcatggcagtgatgtgtctctctc

SEQ ID NO: 54352 - DNA, 83 bp, Homo sapiens
gatccagttcatccaccgatgacacggcttcactggaccgacattcttctcatggcagtgatgtgtctctctcccagatttta

SEQ ID NO: 54353 - DNA, 80 bp, Homo sapiens
agttcatccaccgatgacacggcttcactggaccgacattcttctcatggcagtgatgtgtctctctcccagattttaaa

SEQ ID NO: 54354 - DNA, 80 bp, Homo sapiens
atgacacggcttcactggaccgacattcttctcatggcagtgatgtgtctctctcccagattttaaagccaaacaggtca

SEQ ID NO: 54355 - DNA, 80 bp, Homo sapiens
ggcttcactggaccgacattcttctcatggcagtgatgtgtctctctcccagattttaaagccaaacaggtcaagagatc

SEQ ID NO: 54356 - DNA, 80 bp, Homo sapiens
acattcttctcatggcagtgatgtgtctctctcccagattttaaagccaaacaggtcaagagatcggcaaagccttgatg

SEQ ID NO: 54357 - DNA, 82 bp, Homo sapiens
tctcatggcagtgatgtgtctctctcccagattttaaagccaaacaggtcaagagatcggcaaagccttgatggattctaca

SEQ ID NO: 54358 - DNA, 79 bp, Homo sapiens
agtgatgtgtctctctcccagattttaaagccaaacaggtcaagagatcggcaaagccttgatggattctacagccatg

SEQ ID NO: 54359 - DNA, 78 bp, Homo sapiens
tctctctcccagattttaaagccaaacaggtcaagagatcggcaaagccttgatggattctacagccatgggatggga

SEQ ID NO: 54360 - DNA, 76 bp, Homo sapiens
attttaaagccaaacaggtcaagagatcggcaaagccttgatggattctacagccatgggatgggagctgagggtc

SEQ ID NO: 54361 - DNA, 78 bp, Homo sapiens
aaacaggtcaagagatcggcaaagccttgatggattctacagccatgggatgggagctgagggtcgagaaagtgagag

SEQ ID NO: 54362 - DNA, 82 bp, Homo sapiens
aagagatcggcaaagccttgatggattctacagccatgggatgggagctgagggtcgagaaagtgagagtgagcctgctgac

SEQ ID NO: 54363 - DNA, 80 bp, Homo sapiens
aaagccttgatggattctacagccatgggatgggagctgagggtcgagaaagtgagagtgagcctgctgacccaggcgac

SEQ ID NO: 54364 - DNA, 80 bp, Homo sapiens
atggattctacagccatgggatgggagctgagggtcgagaaagtgagagtgagcctgctgacccaggcgacgtggaggag

SEQ ID NO: 54365 - DNA, 81 bp, Homo sapiens
tacagccatgggatgggagctgagggtcgagaaagtgagagtgagcctgctgacccaggcgacgtggaggaggaggagatg

SEQ ID NO: 54366 - DNA, 81 bp, Homo sapiens
ggagctgagggtcgagaaagtgagagtgagcctgctgacccaggcgacgtggaggaggaggagatggacagtatcactgaa

SEQ ID NO: 54367 - DNA, 82 bp, Homo sapiens
gtcgagaaagtgagagtgagcctgctgacccaggcgacgtggaggaggaggagatggacagtatcactgaagtgcctgcaaa

SEQ ID NO: 54368 - DNA, 82 bp, Homo sapiens
aaagtgagagtgagcctgctgacccaggcgacgtggaggaggaggagatggacagtatcactgaagtgcctgcaaactgctc

SEQ ID NO: 54369 - DNA, 81 bp, Homo sapiens
agcctgctgacccaggcgacgtggaggaggaggagatggacagtatcactgaagtgcctgcaaactgctctgtcctaagga

SEQ ID NO: 54370 - DNA, 81 bp, Homo sapiens
acccaggcgacgtggaggaggaggagatggacagtatcactgaagtgcctgcaaactgctctgtcctaaggagctccatgc

SEQ ID NO: 54371 - DNA, 82 bp, Homo sapiens
ggaggaggaggagatggacagtatcactgaagtgcctgcaaactgctctgtcctaaggagctccatgcgctctctttctccc

SEQ ID NO: 54372 - DNA, 81 bp, Homo sapiens
aggagatggacagtatcactgaagtgcctgcaaactgctctgtcctaaggagctccatgcgctctctttctcccttccgga

SEQ ID NO: 54373 - DNA, 82 bp, Homo sapiens
acagtatcactgaagtgcctgcaaactgctctgtcctaaggagctccatgcgctctctttctcccttccggaggcacagctg

SEQ ID NO: 54374 - DNA, 79 bp, Homo sapiens
actgaagtgcctgcaaactgctctgtcctaaggagctccatgcgctctctttctcccttccggaggcacagctgggggc

SEQ ID NO: 54375 - DNA, 74 bp, Homo sapiens
aactgctctgtcctaaggagctccatgcgctctctttctcccttccggaggcacagctgggggcctgggaaaaa

SEQ ID NO: 54376 - DNA, 77 bp, Homo sapiens
ctctgtcctaaggagctccatgcgctctctttctcccttccggaggcacagctgggggcctgggaaaaatgcagcca

SEQ ID NO: 54377 - DNA, 80 bp, Homo sapiens
agctccatgcgctctctttctcccttccggaggcacagctgggggcctgggaaaaatgcagccagcgatgcagaaatgaa

SEQ ID NO: 54378 - DNA, 76 bp, Homo sapiens
ttctcccttccggaggcacagctgggggcctgggaaaaatgcagccagcgatgcagaaatgaaccaccggaggtga

SEQ ID NO: 54379 - DNA, 74 bp, Homo sapiens
gggcctgggaaaaatgcagccagcgatgcagaaatgaaccaccggaggtgagatgggaggcggtttgtttagtg

SEQ ID NO: 54380 - DNA, 79 bp, Homo sapiens
gtctgtatgtttcatgcatttgtatcccattttgtttcacctgcaacactgacctcttcaccattcattttcagttcaa

SEQ ID NO: 54381 - DNA, 78 bp, Homo sapiens
atgcatttgtatcccattttgtttcacctgcaacactgacctcttcaccattcattttcagttcaatgcgagttcttg

SEQ ID NO: 54382 - DNA, 75 bp, Homo sapiens
atcccattttgtttcacctgcaacactgacctcttcaccattcattttcagttcaatgcgagttcttggggatgt

SEQ ID NO: 54383 - DNA, 78 bp, Homo sapiens
tttgtttcacctgcaacactgacctcttcaccattcattttcagttcaatgcgagttcttggggatgttgtcaggaga

SEQ ID NO: 54384 - DNA, 77 bp, Homo sapiens
aacactgacctcttcaccattcattttcagttcaatgcgagttcttggggatgttgtcaggagacctcccattcata

SEQ ID NO: 54385 - DNA, 76 bp, Homo sapiens
cttcaccattcattttcagttcaatgcgagttcttggggatgttgtcaggagacctcccattcataggagaaggta

SEQ ID NO: 54386 - DNA, 76 bp, Homo sapiens
cattttcagttcaatgcgagttcttggggatgttgtcaggagacctcccattcataggagaaggtacagagttcat

SEQ ID NO: 54387 - DNA, 74 bp, Homo sapiens
agttcaatgcgagttcttggggatgttgtcaggagacctcccattcataggagaaggtacagagttcattaact

SEQ ID NO: 54388 - DNA, 74 bp, Homo sapiens
agttcttggggatgttgtcaggagacctcccattcataggagaaggtacagagttcattaacttgatggactaa

SEQ ID NO: 54389 - DNA, 78 bp, Homo sapiens
atgttgtcaggagacctcccattcataggagaaggtacagagttcattaacttgatggactaaccatgtcacctctga

SEQ ID NO: 54390 - DNA, 78 bp, Homo sapiens
agacctcccattcataggagaaggtacagagttcattaacttgatggactaaccatgtcacctctgagcatatactaa

SEQ ID NO: 54391 - DNA, 75 bp, Homo sapiens
taataaccccattcctgtttcctcttttctccctgcatttctgtttctgtctttgatgtcatccccagtatgagc

SEQ ID NO: 54392 - DNA, 76 bp, Homo sapiens
attcctgtttcctcttttctccctgcatttctgtttctgtctttgatgtcatccccagtatgagctggtgcccctc

SEQ ID NO: 54393 - DNA, 82 bp, Homo sapiens
ttttctccctgcatttctgtttctgtctttgatgtcatccccagtatgagctggtgcccctctggtgtgcagtactctgctg

SEQ ID NO: 54394 - DNA, 85 bp, Homo sapiens
catttctgtttctgtctttgatgtcatccccagtatgagctggtgcccctctggtgtgcagtactctgctggcctgagtgctgac

SEQ ID NO: 54395 - DNA, 84 bp, Homo sapiens
ttctgtctttgatgtcatccccagtatgagctggtgcccctctggtgtgcagtactctgctggcctgagtgctgactttaatta

SEQ ID NO: 54396 - DNA, 83 bp, Homo sapiens
ctttgatgtcatccccagtatgagctggtgcccctctggtgtgcagtactctgctggcctgagtgctgactttaattacagaa

SEQ ID NO: 54397 - DNA, 83 bp, Homo sapiens
cagtatgagctggtgcccctctggtgtgcagtactctgctggcctgagtgctgactttaattacagaaggtatgatattgtta

SEQ ID NO: 54398 - DNA, 81 bp, Homo sapiens
tggtgcccctctggtgtgcagtactctgctggcctgagtgctgactttaattacagaaggtatgatattgttatgtgtccc

SEQ ID NO: 54399 - DNA, 81 bp, Homo sapiens
tctggtgtgcagtactctgctggcctgagtgctgactttaattacagaaggtatgatattgttatgtgtcccgccaccaaa

SEQ ID NO: 54400 - DNA, 79 bp, Homo sapiens
gtgcagtactctgctggcctgagtgctgactttaattacagaaggtatgatattgttatgtgtcccgccaccaaatggg

SEQ ID NO: 54401 - DNA, 75 bp, Homo sapiens
tggcctgagtgctgactttaattacagaaggtatgatattgttatgtgtcccgccaccaaatggggaaccataaa

SEQ ID NO: 54402 - DNA, 72 bp, Homo sapiens
agtgctgactttaattacagaaggtatgatattgttatgtgtcccgccaccaaatggggaaccataaaatac

SEQ ID NO: 54403 - DNA, 73 bp, Homo sapiens
tttttgagacccagaaatagaatgaattaacttttgtgccctatgttcagtttcagtctagaaggcttgacag

SEQ ID NO: 54404 - DNA, 75 bp, Homo sapiens
agaaatagaatgaattaacttttgtgccctatgttcagtttcagtctagaaggcttgacaggaggagctggtgtc

SEQ ID NO: 54405 - DNA, 73 bp, Homo sapiens
aattaacttttgtgccctatgttcagtttcagtctagaaggcttgacaggaggagctggtgtcggaaacaagc

SEQ ID NO: 54406 - DNA, 79 bp, Homo sapiens
tttgtgccctatgttcagtttcagtctagaaggcttgacaggaggagctggtgtcggaaacaagccatcctcatctcta

SEQ ID NO: 54407 - DNA, 78 bp, Homo sapiens
ctatgttcagtttcagtctagaaggcttgacaggaggagctggtgtcggaaacaagccatcctcatctctagaagtaa

SEQ ID NO: 54408 - DNA, 79 bp, Homo sapiens
gtttcagtctagaaggcttgacaggaggagctggtgtcggaaacaagccatcctcatctctagaagtaagctctgcaaa

SEQ ID NO: 54409 - DNA, 81 bp, Homo sapiens
aaggcttgacaggaggagctggtgtcggaaacaagccatcctcatctctagaagtaagctctgcaaatgccgaagagctca

SEQ ID NO: 54410 - DNA, 81 bp, Homo sapiens
aggagctggtgtcggaaacaagccatcctcatctctagaagtaagctctgcaaatgccgaagagctcagacacccattcag

SEQ ID NO: 54411 - DNA, 82 bp, Homo sapiens
tgtcggaaacaagccatcctcatctctagaagtaagctctgcaaatgccgaagagctcagacacccattcagtggtgaggaa

SEQ ID NO: 54412 - DNA, 79 bp, Homo sapiens
aaacaagccatcctcatctctagaagtaagctctgcaaatgccgaagagctcagacacccattcagtggtgaggaacgg

SEQ ID NO: 54413 - DNA, 77 bp, Homo sapiens
atctctagaagtaagctctgcaaatgccgaagagctcagacacccattcagtggtgaggaacgggttgactctttgg

SEQ ID NO: 54414 - DNA, 76 bp, Homo sapiens
aagtaagctctgcaaatgccgaagagctcagacacccattcagtggtgaggaacgggttgactctttggtgtcact

SEQ ID NO: 54415 - DNA, 78 bp, Homo sapiens
ctctgcaaatgccgaagagctcagacacccattcagtggtgaggaacgggttgactctttggtgtcactttcagaaga

SEQ ID NO: 54416 - DNA, 77 bp, Homo sapiens
aagagctcagacacccattcagtggtgaggaacgggttgactctttggtgtcactttcagaagaggatctggagtca

SEQ ID NO: 54417 - DNA, 76 bp, Homo sapiens
agacacccattcagtggtgaggaacgggttgactctttggtgtcactttcagaagaggatctggagtcagaccaga

SEQ ID NO: 54418 - DNA, 77 bp, Homo sapiens
attcagtggtgaggaacgggttgactctttggtgtcactttcagaagaggatctggagtcagaccagagagaacata

SEQ ID NO: 54419 - DNA, 80 bp, Homo sapiens
tctttggtgtcactttcagaagaggatctggagtcagaccagagagaacataggatgtttgatcagcaggtaagtcttaa

SEQ ID NO: 54420 - DNA, 81 bp, Homo sapiens
tcactttcagaagaggatctggagtcagaccagagagaacataggatgtttgatcagcaggtaagtcttaaatatgtctaa

SEQ ID NO: 54421 - DNA, 78 bp, Homo sapiens
aagaggatctggagtcagaccagagagaacataggatgtttgatcagcaggtaagtcttaaatatgtctaatttggaa

SEQ ID NO: 54422 - DNA, 76 bp, Homo sapiens
atctggagtcagaccagagagaacataggatgtttgatcagcaggtaagtcttaaatatgtctaatttggaaaaaa

SEQ ID NO: 54423 - DNA, 80 bp, Homo sapiens
tatgagagtatatgcttacaacgtgttcttcacttttttacttcacagatatgtcacagatctaagcagcagggatttaa

SEQ ID NO: 54424 - DNA, 78 bp, Homo sapiens
tatatgcttacaacgtgttcttcacttttttacttcacagatatgtcacagatctaagcagcagggatttaattactg

SEQ ID NO: 54425 - DNA, 78 bp, Homo sapiens
acaacgtgttcttcacttttttacttcacagatatgtcacagatctaagcagcagggatttaattactgtacatcagc

SEQ ID NO: 54426 - DNA, 78 bp, Homo sapiens
acttttttacttcacagatatgtcacagatctaagcagcagggatttaattactgtacatcagccatttcctctccat

SEQ ID NO: 54427 - DNA, 82 bp, Homo sapiens
ttacttcacagatatgtcacagatctaagcagcagggatttaattactgtacatcagccatttcctctccattgacaaaatc

SEQ ID NO: 54428 - DNA, 82 bp, Homo sapiens
atatgtcacagatctaagcagcagggatttaattactgtacatcagccatttcctctccattgacaaaatccatctcattaa

SEQ ID NO: 54429 - DNA, 82 bp, Homo sapiens
agatctaagcagcagggatttaattactgtacatcagccatttcctctccattgacaaaatccatctcattaatgacaatca

SEQ ID NO: 54430 - DNA, 81 bp, Homo sapiens
ggatttaattactgtacatcagccatttcctctccattgacaaaatccatctcattaatgacaatcagccatcctggattg

SEQ ID NO: 54431 - DNA, 84 bp, Homo sapiens
taattactgtacatcagccatttcctctccattgacaaaatccatctcattaatgacaatcagccatcctggattggacagtga

SEQ ID NO: 54432 - DNA, 80 bp, Homo sapiens
agccatttcctctccattgacaaaatccatctcattaatgacaatcagccatcctggattggacagtgagtatactactt

SEQ ID NO: 54433 - DNA, 79 bp, Homo sapiens
tttcctctccattgacaaaatccatctcattaatgacaatcagccatcctggattggacagtgagtatactacttttta

SEQ ID NO: 54434 - DNA, 75 bp, Homo sapiens
attgacaaaatccatctcattaatgacaatcagccatcctggattggacagtgagtatactactttttaaaaaaa

SEQ ID NO: 54435 - DNA, 84 bp, Homo sapiens
ttctcagctcagcagcagatgcggccagcaaggcggatctccatcagcatctctccgctcctccttaagtctaaaactctcttt

SEQ ID NO: 54436 - DNA, 81 bp, Homo sapiens
agcagcagatgcggccagcaaggcggatctccatcagcatctctccgctcctccttaagtctaaaactctcttttctcttg

SEQ ID NO: 54437 - DNA, 78 bp, Homo sapiens
gccagcaaggcggatctccatcagcatctctccgctcctccttaagtctaaaactctcttttctcttggctcttctta

SEQ ID NO: 54438 - DNA, 75 bp, Homo sapiens
aaggcggatctccatcagcatctctccgctcctccttaagtctaaaactctcttttctcttggctcttcttattc

SEQ ID NO: 54439 - DNA, 77 bp, Homo sapiens
atcagcatctctccgctcctccttaagtctaaaactctcttttctcttggctcttcttattcgagtgatgaggagga

SEQ ID NO: 54440 - DNA, 74 bp, Homo sapiens
atctctccgctcctccttaagtctaaaactctcttttctcttggctcttcttattcgagtgatgaggaggagga

SEQ ID NO: 54441 - DNA, 74 bp, Homo sapiens
cttaagtctaaaactctcttttctcttggctcttcttattcgagtgatgaggaggaggagttgcatagtaagta

SEQ ID NO: 54442 - DNA, 74 bp, Homo sapiens
taaaactctcttttctcttggctcttcttattcgagtgatgaggaggaggagttgcatagtaagtaagcaactt

SEQ ID NO: 54443 - DNA, 77 bp, Homo sapiens
ttttctcttggctcttcttattcgagtgatgaggaggaggagttgcatagtaagtaagcaactttggtgtccagtga

SEQ ID NO: 54444 - DNA, 77 bp, Homo sapiens
ctcttcttattcgagtgatgaggaggaggagttgcatagtaagtaagcaactttggtgtccagtgactgttcttgaa

SEQ ID NO: 54445 - DNA, 78 bp, Homo sapiens
ttattcgagtgatgaggaggaggagttgcatagtaagtaagcaactttggtgtccagtgactgttcttgaaggtctga

SEQ ID NO: 54446 - DNA, 66 bp, Homo sapiens
tataaatattctacccggcatcagtgttaaattttttggttctaactttttttctgccttgttttc

SEQ ID NO: 54447 - DNA, 66 bp, Homo sapiens
ctacccggcatcagtgttaaattttttggttctaactttttttctgccttgttttctagattcacg

SEQ ID NO: 54448 - DNA, 68 bp, Homo sapiens
gcatcagtgttaaattttttggttctaactttttttctgccttgttttctagattcacggcccttcca

SEQ ID NO: 54449 - DNA, 64 bp, Homo sapiens
aattttttggttctaactttttttctgccttgttttctagattcacggcccttccacagtacct

SEQ ID NO: 54450 - DNA, 68 bp, Homo sapiens
ttggttctaactttttttctgccttgttttctagattcacggcccttccacagtaccttccacaatac

SEQ ID NO: 54451 - DNA, 75 bp, Homo sapiens
tttttctgccttgttttctagattcacggcccttccacagtaccttccacaataccagtgctaatctgactgaga

SEQ ID NO: 54452 - DNA, 74 bp, Homo sapiens
gttttctagattcacggcccttccacagtaccttccacaataccagtgctaatctgactgagaggtactataaa

SEQ ID NO: 54453 - DNA, 75 bp, Homo sapiens
tagattcacggcccttccacagtaccttccacaataccagtgctaatctgactgagaggtactataaatttgtta

SEQ ID NO: 54454 - DNA, 73 bp, Homo sapiens
ttccacagtaccttccacaataccagtgctaatctgactgagaggtactataaatttgttactcctttttcca

SEQ ID NO: 54455 - DNA, 71 bp, Homo sapiens
agtaccttccacaataccagtgctaatctgactgagaggtactataaatttgttactcctttttccagaaa

SEQ ID NO: 54456 - DNA, 73 bp, Homo sapiens
cacaataccagtgctaatctgactgagaggtactataaatttgttactcctttttccagaaataaaatgaaga

SEQ ID NO: 54457 - DNA, 70 bp, Homo sapiens
gtgctaatctgactgagaggtactataaatttgttactcctttttccagaaataaaatgaagaaaattta

SEQ ID NO: 54458 - DNA, 66 bp, Homo sapiens
ttaacttctgtagccctttaaaaaaaatcaatcttcttgtttttatttagtataacagaagagaac

SEQ ID NO: 54459 - DNA, 67 bp, Homo sapiens
gccctttaaaaaaaatcaatcttcttgtttttatttagtataacagaagagaactataatttcctgc

SEQ ID NO: 54460 - DNA, 69 bp, Homo sapiens
aaaaaaatcaatcttcttgtttttatttagtataacagaagagaactataatttcctgccacatagccc

SEQ ID NO: 54461 - DNA, 73 bp, Homo sapiens
tcttgtttttatttagtataacagaagagaactataatttcctgccacatagcccctccaagaaagattctga

SEQ ID NO: 54462 - DNA, 74 bp, Homo sapiens
tttatttagtataacagaagagaactataatttcctgccacatagcccctccaagaaagattctgaatggaaga

SEQ ID NO: 54463 - DNA, 75 bp, Homo sapiens
tataacagaagagaactataatttcctgccacatagcccctccaagaaagattctgaatggaagagtggaacaaa

SEQ ID NO: 54464 - DNA, 73 bp, Homo sapiens
aactataatttcctgccacatagcccctccaagaaagattctgaatggaagagtggaacaaaagtcagtcgta

SEQ ID NO: 54465 - DNA, 76 bp, Homo sapiens
atttcctgccacatagcccctccaagaaagattctgaatggaagagtggaacaaaagtcagtcgtacattcagcta

SEQ ID NO: 54466 - DNA, 76 bp, Homo sapiens
atagcccctccaagaaagattctgaatggaagagtggaacaaaagtcagtcgtacattcagctacatcaagaataa

SEQ ID NO: 54467 - DNA, 77 bp, Homo sapiens
ctccaagaaagattctgaatggaagagtggaacaaaagtcagtcgtacattcagctacatcaagaataaaatgtcta

SEQ ID NO: 54468 - DNA, 81 bp, Homo sapiens
ttctgaatggaagagtggaacaaaagtcagtcgtacattcagctacatcaagaataaaatgtctagcagcaagaagagcaa

SEQ ID NO: 54469 - DNA, 79 bp, Homo sapiens
aagagtggaacaaaagtcagtcgtacattcagctacatcaagaataaaatgtctagcagcaagaagagcaaagtgagta

SEQ ID NO: 54470 - DNA, 80 bp, Homo sapiens
aacaaaagtcagtcgtacattcagctacatcaagaataaaatgtctagcagcaagaagagcaaagtgagtatcactgtgg

SEQ ID NO: 54471 - DNA, 86 bp, Homo sapiens
agtcgtacattcagctacatcaagaataaaatgtctagcagcaagaagagcaaagtgagtatcactgtgggcattgcttgtgatca

SEQ ID NO: 54472 - DNA, 66 bp, Homo sapiens
aaagccctccagtgttcaattaactgtggattattttcttttcttcggcaggaaaaggaaaaagaa

SEQ ID NO: 54473 - DNA, 70 bp, Homo sapiens
aaagaaaaagataagattaaggagaaggagaaagattctaaagacaaggagaaagataagaagactgtca

SEQ ID NO: 54474 - DNA, 71 bp, Homo sapiens
aaagataagattaaggagaaggagaaagattctaaagacaaggagaaagataagaagactgtcaacgggca

SEQ ID NO: 54475 - DNA, 72 bp, Homo sapiens
ggagaaggagaaagattctaaagacaaggagaaagataagaagactgtcaacgggcacactttcagttccat

SEQ ID NO: 54476 - DNA, 72 bp, Homo sapiens
aaagattctaaagacaaggagaaagataagaagactgtcaacgggcacactttcagttccattcctgttgtg

SEQ ID NO: 54477 - DNA, 72 bp, Homo sapiens
ttctaaagacaaggagaaagataagaagactgtcaacgggcacactttcagttccattcctgttgtgggtcc

SEQ ID NO: 54478 - DNA, 77 bp, Homo sapiens
gaaagataagaagactgtcaacgggcacactttcagttccattcctgttgtgggtcccatcagctgtagccagtgta

SEQ ID NO: 54479 - DNA, 78 bp, Homo sapiens
ataagaagactgtcaacgggcacactttcagttccattcctgttgtgggtcccatcagctgtagccagtgtatgaagc

SEQ ID NO: 54480 - DNA, 76 bp, Homo sapiens
aacgggcacactttcagttccattcctgttgtgggtcccatcagctgtagccagtgtatgaagcccttcaccaaca

SEQ ID NO: 54481 - DNA, 78 bp, Homo sapiens
tttcagttccattcctgttgtgggtcccatcagctgtagccagtgtatgaagcccttcaccaacaaagatgcctatac

SEQ ID NO: 54482 - DNA, 79 bp, Homo sapiens
attcctgttgtgggtcccatcagctgtagccagtgtatgaagcccttcaccaacaaagatgcctatacttgtgcaagta

SEQ ID NO: 54483 - DNA, 81 bp, Homo sapiens
tgttgtgggtcccatcagctgtagccagtgtatgaagcccttcaccaacaaagatgcctatacttgtgcaagtaagagaca

SEQ ID NO: 54484 - DNA, 82 bp, Homo sapiens
atcagctgtagccagtgtatgaagcccttcaccaacaaagatgcctatacttgtgcaagtaagagacatgcttcttcctctc

SEQ ID NO: 54485 - DNA, 80 bp, Homo sapiens
cagtgtatgaagcccttcaccaacaaagatgcctatacttgtgcaagtaagagacatgcttcttcctctcgtaagatgga

SEQ ID NO: 54486 - DNA, 79 bp, Homo sapiens
tatgaagcccttcaccaacaaagatgcctatacttgtgcaagtaagagacatgcttcttcctctcgtaagatggaactc

SEQ ID NO: 54487 - DNA, 75 bp, Homo sapiens
aaactcagaatctgggatctgtttgctttgtccatgtgaccttgggtttgctttcttttcagattgcagtgcttt

SEQ ID NO: 54488 - DNA, 76 bp, Homo sapiens
atctgggatctgtttgctttgtccatgtgaccttgggtttgctttcttttcagattgcagtgcttttgtccacaaa

SEQ ID NO: 54489 - DNA, 76 bp, Homo sapiens
atctgtttgctttgtccatgtgaccttgggtttgctttcttttcagattgcagtgcttttgtccacaaaggctgcc

SEQ ID NO: 54490 - DNA, 76 bp, Homo sapiens
ttgtccatgtgaccttgggtttgctttcttttcagattgcagtgcttttgtccacaaaggctgccgagaaagtcta

SEQ ID NO: 54491 - DNA, 76 bp, Homo sapiens
cttgggtttgctttcttttcagattgcagtgcttttgtccacaaaggctgccgagaaagtctagcctcctgtgcaa

SEQ ID NO: 54492 - DNA, 75 bp, Homo sapiens
ctttcttttcagattgcagtgcttttgtccacaaaggctgccgagaaagtctagcctcctgtgcaaaggtcaaaa

SEQ ID NO: 54493 - DNA, 77 bp, Homo sapiens
tttcagattgcagtgcttttgtccacaaaggctgccgagaaagtctagcctcctgtgcaaaggtcaaaatgaaggta

SEQ ID NO: 54494 - DNA, 72 bp, Homo sapiens
agtgcttttgtccacaaaggctgccgagaaagtctagcctcctgtgcaaaggtcaaaatgaaggtaagactt

SEQ ID NO: 54495 - DNA, 72 bp, Homo sapiens
acaaaggctgccgagaaagtctagcctcctgtgcaaaggtcaaaatgaaggtaagactttctggctaaaaca

SEQ ID NO: 54496 - DNA, 70 bp, Homo sapiens
ccgagaaagtctagcctcctgtgcaaaggtcaaaatgaaggtaagactttctggctaaaacaaggcttaa

SEQ ID NO: 54497 - DNA, 69 bp, Homo sapiens
aaagtctagcctcctgtgcaaaggtcaaaatgaaggtaagactttctggctaaaacaaggcttaaaata

SEQ ID NO: 54498 - DNA, 66 bp, Homo sapiens
ctcctgtgcaaaggtcaaaatgaaggtaagactttctggctaaaacaaggcttaaaataaaagggt

SEQ ID NO: 54499 - DNA, 75 bp, Homo sapiens
ttcctactcggcttctcagggcttgtcagaggtgaattgtcaatggacttactttctttctctttagcagcccaa

SEQ ID NO: 54500 - DNA, 75 bp, Homo sapiens
ttctcagggcttgtcagaggtgaattgtcaatggacttactttctttctctttagcagcccaaagggagccttca

SEQ ID NO: 54501 - DNA, 78 bp, Homo sapiens
ttgtcagaggtgaattgtcaatggacttactttctttctctttagcagcccaaagggagccttcaggcacatgacaca

SEQ ID NO: 54502 - DNA, 78 bp, Homo sapiens
aggtgaattgtcaatggacttactttctttctctttagcagcccaaagggagccttcaggcacatgacacatcatcac

SEQ ID NO: 54503 - DNA, 79 bp, Homo sapiens
tggacttactttctttctctttagcagcccaaagggagccttcaggcacatgacacatcatcactgcccacggtcatta

SEQ ID NO: 54504 - DNA, 80 bp, Homo sapiens
tttctttctctttagcagcccaaagggagccttcaggcacatgacacatcatcactgcccacggtcattatgagaaacaa

SEQ ID NO: 54505 - DNA, 81 bp, Homo sapiens
tctttagcagcccaaagggagccttcaggcacatgacacatcatcactgcccacggtcattatgagaaacaagcgtaagta

SEQ ID NO: 54506 - DNA, 80 bp, Homo sapiens
aaagggagccttcaggcacatgacacatcatcactgcccacggtcattatgagaaacaagcgtaagtagctcagcccacc

SEQ ID NO: 54507 - DNA, 82 bp, Homo sapiens
ttcaggcacatgacacatcatcactgcccacggtcattatgagaaacaagcgtaagtagctcagcccacctctcaattccct

SEQ ID NO: 54508 - DNA, 81 bp, Homo sapiens
acatgacacatcatcactgcccacggtcattatgagaaacaagcgtaagtagctcagcccacctctcaattccctttctga

SEQ ID NO: 54509 - DNA, 77 bp, Homo sapiens
atcatcactgcccacggtcattatgagaaacaagcgtaagtagctcagcccacctctcaattccctttctgactttc

SEQ ID NO: 54510 - DNA, 79 bp, Homo sapiens
gtggagctggatgggtgatgcttcagttagtgtcctccttttgcagcctcacagcccaaggagcgtcctcggtccgcag

SEQ ID NO: 54511 - DNA, 77 bp, Homo sapiens
atgggtgatgcttcagttagtgtcctccttttgcagcctcacagcccaaggagcgtcctcggtccgcagtcctcctg

SEQ ID NO: 54512 - DNA, 76 bp, Homo sapiens
cttcagttagtgtcctccttttgcagcctcacagcccaaggagcgtcctcggtccgcagtcctcctggtggatgaa

SEQ ID NO: 54513 - DNA, 76 bp, Homo sapiens
tagtgtcctccttttgcagcctcacagcccaaggagcgtcctcggtccgcagtcctcctggtggatgaaaccgcta

SEQ ID NO: 54514 - DNA, 74 bp, Homo sapiens
tccttttgcagcctcacagcccaaggagcgtcctcggtccgcagtcctcctggtggatgaaaccgctaccaccc

SEQ ID NO: 54515 - DNA, 72 bp, Homo sapiens
acagcccaaggagcgtcctcggtccgcagtcctcctggtggatgaaaccgctaccaccccaatatttgccaa

SEQ ID NO: 54516 - DNA, 72 bp, Homo sapiens
aaggagcgtcctcggtccgcagtcctcctggtggatgaaaccgctaccaccccaatatttgccaatagacga

SEQ ID NO: 54517 - DNA, 75 bp, Homo sapiens
tcctcggtccgcagtcctcctggtggatgaaaccgctaccaccccaatatttgccaatagacgatcccagcagag

SEQ ID NO: 54518 - DNA, 77 bp, Homo sapiens
tcctcctggtggatgaaaccgctaccaccccaatatttgccaatagacgatcccagcagagtgtctcgctctccaaa

SEQ ID NO: 54519 - DNA, 77 bp, Homo sapiens
tggtggatgaaaccgctaccaccccaatatttgccaatagacgatcccagcagagtgtctcgctctccaaaagtgtc

SEQ ID NO: 54520 - DNA, 78 bp, Homo sapiens
ctaccaccccaatatttgccaatagacgatcccagcagagtgtctcgctctccaaaagtgtctccatacagaacatta

SEQ ID NO: 54521 - DNA, 77 bp, Homo sapiens
aatatttgccaatagacgatcccagcagagtgtctcgctctccaaaagtgtctccatacagaacattactgggtaag

SEQ ID NO: 54522 - DNA, 77 bp, Homo sapiens
aatagacgatcccagcagagtgtctcgctctccaaaagtgtctccatacagaacattactgggtaagtggagatatt

SEQ ID NO: 54523 - DNA, 77 bp, Homo sapiens
atcccagcagagtgtctcgctctccaaaagtgtctccatacagaacattactgggtaagtggagatatttaaagata

SEQ ID NO: 54524 - DNA, 76 bp, Homo sapiens
agtgtctcgctctccaaaagtgtctccatacagaacattactgggtaagtggagatatttaaagatagcacagttg

SEQ ID NO: 54525 - DNA, 77 bp, Homo sapiens
ataggttatcagaatgtatttgacagtatgtatttttcttttgtccccagagttggcaatgatgagaacatgtcaaa

SEQ ID NO: 54526 - DNA, 75 bp, Homo sapiens
aatgtatttgacagtatgtatttttcttttgtccccagagttggcaatgatgagaacatgtcaaacacctggaaa

SEQ ID NO: 54527 - DNA, 75 bp, Homo sapiens
agtatgtatttttcttttgtccccagagttggcaatgatgagaacatgtcaaacacctggaaattcctgtctcat

SEQ ID NO: 54528 - DNA, 76 bp, Homo sapiens
atttttcttttgtccccagagttggcaatgatgagaacatgtcaaacacctggaaattcctgtctcattcaacaga

SEQ ID NO: 54529 - DNA, 78 bp, Homo sapiens
tccccagagttggcaatgatgagaacatgtcaaacacctggaaattcctgtctcattcaacagactcactaaataaaa

SEQ ID NO: 54530 - DNA, 79 bp, Homo sapiens
agttggcaatgatgagaacatgtcaaacacctggaaattcctgtctcattcaacagactcactaaataaaatcagcaag

SEQ ID NO: 54531 - DNA, 78 bp, Homo sapiens
agaacatgtcaaacacctggaaattcctgtctcattcaacagactcactaaataaaatcagcaaggtcaatgagtcaa

SEQ ID NO: 54532 - DNA, 78 bp, Homo sapiens
atgtcaaacacctggaaattcctgtctcattcaacagactcactaaataaaatcagcaaggtcaatgagtcaacagaa

SEQ ID NO: 54533 - DNA, 79 bp, Homo sapiens
aaattcctgtctcattcaacagactcactaaataaaatcagcaaggtcaatgagtcaacagaatcacttactgatgagg

SEQ ID NO: 54534 - DNA, 80 bp, Homo sapiens
tctcattcaacagactcactaaataaaatcagcaaggtcaatgagtcaacagaatcacttactgatgagggtaagaggaa

SEQ ID NO: 54535 - DNA, 76 bp, Homo sapiens
aacagactcactaaataaaatcagcaaggtcaatgagtcaacagaatcacttactgatgagggtaagaggaagtta

SEQ ID NO: 54536 - DNA, 74 bp, Homo sapiens
aataaaatcagcaaggtcaatgagtcaacagaatcacttactgatgagggtaagaggaagttatggcctttatt

SEQ ID NO: 54537 - DNA, 76 bp, Homo sapiens
aatcagcaaggtcaatgagtcaacagaatcacttactgatgagggtaagaggaagttatggcctttattttatgcc

SEQ ID NO: 54538 - DNA, 78 bp, Homo sapiens
ttttacaggtcacaaacctgattctgatattgattttttgatatattgaggagtaggtacagacatgaatgaaggaca

SEQ ID NO: 54539 - DNA, 77 bp, Homo sapiens
aaacctgattctgatattgattttttgatatattgaggagtaggtacagacatgaatgaaggacaactactgggaga

SEQ ID NO: 54540 - DNA, 78 bp, Homo sapiens
ttctgatattgattttttgatatattgaggagtaggtacagacatgaatgaaggacaactactgggagactttgagat

SEQ ID NO: 54541 - DNA, 77 bp, Homo sapiens
tttttgatatattgaggagtaggtacagacatgaatgaaggacaactactgggagactttgagattgagtccaaaca

SEQ ID NO: 54542 - DNA, 78 bp, Homo sapiens
atatattgaggagtaggtacagacatgaatgaaggacaactactgggagactttgagattgagtccaaacagctggaa

SEQ ID NO: 54543 - DNA, 78 bp, Homo sapiens
agtaggtacagacatgaatgaaggacaactactgggagactttgagattgagtccaaacagctggaagcagagtcttg

SEQ ID NO: 54544 - DNA, 78 bp, Homo sapiens
atgaatgaaggacaactactgggagactttgagattgagtccaaacagctggaagcagagtcttggagtcggataata

SEQ ID NO: 54545 - DNA, 78 bp, Homo sapiens
aggacaactactgggagactttgagattgagtccaaacagctggaagcagagtcttggagtcggataatagacagcaa

SEQ ID NO: 54546 - DNA, 77 bp, Homo sapiens
tgggagactttgagattgagtccaaacagctggaagcagagtcttggagtcggataatagacagcaagtttctaaaa

SEQ ID NO: 54547 - DNA, 77 bp, Homo sapiens
actttgagattgagtccaaacagctggaagcagagtcttggagtcggataatagacagcaagtttctaaaacagcaa

SEQ ID NO: 54548 - DNA, 75 bp, Homo sapiens
agtccaaacagctggaagcagagtcttggagtcggataatagacagcaagtttctaaaacagcaaaagaaagatg

SEQ ID NO: 54549 - DNA, 75 bp, Homo sapiens
agctggaagcagagtcttggagtcggataatagacagcaagtttctaaaacagcaaaagaaagatgtggtcaaac

SEQ ID NO: 54550 - DNA, 73 bp, Homo sapiens
tcttggagtcggataatagacagcaagtttctaaaacagcaaaagaaagatgtggtcaaacggcaagaagtaa

SEQ ID NO: 54551 - DNA, 73 bp, Homo sapiens
agtcggataatagacagcaagtttctaaaacagcaaaagaaagatgtggtcaaacggcaagaagtaatatatg

SEQ ID NO: 54552 - DNA, 74 bp, Homo sapiens
cagcaagtttctaaaacagcaaaagaaagatgtggtcaaacggcaagaagtaatatatggtgagagtcttcatt

SEQ ID NO: 54553 - DNA, 73 bp, Homo sapiens
agtttctaaaacagcaaaagaaagatgtggtcaaacggcaagaagtaatatatggtgagagtcttcattttgc

SEQ ID NO: 54554 - DNA, 77 bp, Homo sapiens
gcaaaagaaagatgtggtcaaacggcaagaagtaatatatggtgagagtcttcattttgctctgattatatttgatt

SEQ ID NO: 54555 - DNA, 77 bp, Homo sapiens
aatgcttataaaagagtgttcctgacacttgatctttttcctccttttagagttgatgcagacagagtttcatcatg

SEQ ID NO: 54556 - DNA, 77 bp, Homo sapiens
aaaagagtgttcctgacacttgatctttttcctccttttagagttgatgcagacagagtttcatcatgtccgcactc

SEQ ID NO: 54557 - DNA, 82 bp, Homo sapiens
acacttgatctttttcctccttttagagttgatgcagacagagtttcatcatgtccgcactctcaagatcatgagtggtgtg

SEQ ID NO: 54558 - DNA, 82 bp, Homo sapiens
tttttcctccttttagagttgatgcagacagagtttcatcatgtccgcactctcaagatcatgagtggtgtgtacagccagg

SEQ ID NO: 54559 - DNA, 87 bp, Homo sapiens
ttttagagttgatgcagacagagtttcatcatgtccgcactctcaagatcatgagtggtgtgtacagccaggggatgatggcggatc

SEQ ID NO: 54560 - DNA, 89 bp, Homo sapiens
ttgatgcagacagagtttcatcatgtccgcactctcaagatcatgagtggtgtgtacagccaggggatgatggcggatctgctttttga

SEQ ID NO: 54561 - DNA, 88 bp, Homo sapiens
gagtttcatcatgtccgcactctcaagatcatgagtggtgtgtacagccaggggatgatggcggatctgctttttgagcagcagatgg

SEQ ID NO: 54562 - DNA, 85 bp, Homo sapiens
atgtccgcactctcaagatcatgagtggtgtgtacagccaggggatgatggcggatctgctttttgagcagcagatggtagaaaa

SEQ ID NO: 54563 - DNA, 84 bp, Homo sapiens
actctcaagatcatgagtggtgtgtacagccaggggatgatggcggatctgctttttgagcagcagatggtagaaaagctgttc

SEQ ID NO: 54564 - DNA, 79 bp, Homo sapiens
atgagtggtgtgtacagccaggggatgatggcggatctgctttttgagcagcagatggtagaaaagctgttcccctgtt

SEQ ID NO: 54565 - DNA, 81 bp, Homo sapiens
tggtgtgtacagccaggggatgatggcggatctgctttttgagcagcagatggtagaaaagctgttcccctgtttggatga

SEQ ID NO: 54566 - DNA, 83 bp, Homo sapiens
ggggatgatggcggatctgctttttgagcagcagatggtagaaaagctgttcccctgtttggatgagctgatcagtatccata

SEQ ID NO: 54567 - DNA, 82 bp, Homo sapiens
atggcggatctgctttttgagcagcagatggtagaaaagctgttcccctgtttggatgagctgatcagtatccatagccaat

SEQ ID NO: 54568 - DNA, 81 bp, Homo sapiens
tttttgagcagcagatggtagaaaagctgttcccctgtttggatgagctgatcagtatccatagccaattcttccagagga

SEQ ID NO: 54569 - DNA, 82 bp, Homo sapiens
agcagcagatggtagaaaagctgttcccctgtttggatgagctgatcagtatccatagccaattcttccagaggattctgga

SEQ ID NO: 54570 - DNA, 79 bp, Homo sapiens
tagaaaagctgttcccctgtttggatgagctgatcagtatccatagccaattcttccagaggattctggagcggaagaa

SEQ ID NO: 54571 - DNA, 80 bp, Homo sapiens
tgttcccctgtttggatgagctgatcagtatccatagccaattcttccagaggattctggagcggaagaaggagtctctg

SEQ ID NO: 54572 - DNA, 80 bp, Homo sapiens
tttggatgagctgatcagtatccatagccaattcttccagaggattctggagcggaagaaggagtctctggtggataaaa

SEQ ID NO: 54573 - DNA, 77 bp, Homo sapiens
ctgatcagtatccatagccaattcttccagaggattctggagcggaagaaggagtctctggtggataaaagtgaaaa

SEQ ID NO: 54574 - DNA, 74 bp, Homo sapiens
tatccatagccaattcttccagaggattctggagcggaagaaggagtctctggtggataaaagtgaaaagaact

SEQ ID NO: 54575 - DNA, 73 bp, Homo sapiens
aattcttccagaggattctggagcggaagaaggagtctctggtggataaaagtgaaaagaactttctcatcaa

SEQ ID NO: 54576 - DNA, 73 bp, Homo sapiens
agaggattctggagcggaagaaggagtctctggtggataaaagtgaaaagaactttctcatcaagaggatagg

SEQ ID NO: 54577 - DNA, 73 bp, Homo sapiens
ggaagaaggagtctctggtggataaaagtgaaaagaactttctcatcaagaggataggggatgtgcttgtaaa

SEQ ID NO: 54578 - DNA, 75 bp, Homo sapiens
agtctctggtggataaaagtgaaaagaactttctcatcaagaggataggggatgtgcttgtaaatcaggtgagaa

SEQ ID NO: 54579 - DNA, 75 bp, Homo sapiens
tggtggataaaagtgaaaagaactttctcatcaagaggataggggatgtgcttgtaaatcaggtgagaatgggaa

SEQ ID NO: 54580 - DNA, 74 bp, Homo sapiens
aaaagaactttctcatcaagaggataggggatgtgcttgtaaatcaggtgagaatgggaaggatctcaggttct

SEQ ID NO: 54581 - DNA, 77 bp, Homo sapiens
aactttctcatcaagaggataggggatgtgcttgtaaatcaggtgagaatgggaaggatctcaggttcttacataca

SEQ ID NO: 54582 - DNA, 77 bp, Homo sapiens
ttatgagtttggcgccccatggcataacttctgttctcttttctctgcagttttcaggtgagaatgcagaacgttta

SEQ ID NO: 54583 - DNA, 76 bp, Homo sapiens
ccccatggcataacttctgttctcttttctctgcagttttcaggtgagaatgcagaacgtttaaagaagacatatg

SEQ ID NO: 54584 - DNA, 74 bp, Homo sapiens
ataacttctgttctcttttctctgcagttttcaggtgagaatgcagaacgtttaaagaagacatatggcaagtt

SEQ ID NO: 54585 - DNA, 77 bp, Homo sapiens
tctcttttctctgcagttttcaggtgagaatgcagaacgtttaaagaagacatatggcaagttttgtgggcaacata

SEQ ID NO: 54586 - DNA, 76 bp, Homo sapiens
tttctctgcagttttcaggtgagaatgcagaacgtttaaagaagacatatggcaagttttgtgggcaacataacca

SEQ ID NO: 54587 - DNA, 74 bp, Homo sapiens
ttttcaggtgagaatgcagaacgtttaaagaagacatatggcaagttttgtgggcaacataaccagtctgtaaa

SEQ ID NO: 54588 - DNA, 72 bp, Homo sapiens
aatgcagaacgtttaaagaagacatatggcaagttttgtgggcaacataaccagtctgtaaactacttcaaa

SEQ ID NO: 54589 - DNA, 70 bp, Homo sapiens
gtttaaagaagacatatggcaagttttgtgggcaacataaccagtctgtaaactacttcaaagaccttta

SEQ ID NO: 54590 - DNA, 73 bp, Homo sapiens
agacatatggcaagttttgtgggcaacataaccagtctgtaaactacttcaaagacctttatgccaaggataa

SEQ ID NO: 54591 - DNA, 68 bp, Homo sapiens
aagttttgtgggcaacataaccagtctgtaaactacttcaaagacctttatgccaaggataagcgttt

SEQ ID NO: 54592 - DNA, 70 bp, Homo sapiens
caacataaccagtctgtaaactacttcaaagacctttatgccaaggataagcgttttcaagcctttgtaa

SEQ ID NO: 54593 - DNA, 69 bp, Homo sapiens
agtctgtaaactacttcaaagacctttatgccaaggataagcgttttcaagcctttgtaaaggtattga

SEQ ID NO: 54594 - DNA, 69 bp, Homo sapiens
gtaaactacttcaaagacctttatgccaaggataagcgttttcaagcctttgtaaaggtattgataaga

SEQ ID NO: 54595 - DNA, 69 bp, Homo sapiens
agacctttatgccaaggataagcgttttcaagcctttgtaaaggtattgataagaaacatgaaaatccc

SEQ ID NO: 54596 - DNA, 70 bp, Homo sapiens
tatgccaaggataagcgttttcaagcctttgtaaaggtattgataagaaacatgaaaatccccgttattg

SEQ ID NO: 54597 - DNA, 78 bp, Homo sapiens
actagagcctttttcatgtgattcctcacagtctgtttactcccttgcagaagaagatgagcagttcagttgttagaa

SEQ ID NO: 54598 - DNA, 78 bp, Homo sapiens
ttttcatgtgattcctcacagtctgtttactcccttgcagaagaagatgagcagttcagttgttagaaggcttggaat

SEQ ID NO: 54599 - DNA, 80 bp, Homo sapiens
tcctcacagtctgtttactcccttgcagaagaagatgagcagttcagttgttagaaggcttggaattccagagtgcatat

SEQ ID NO: 54600 - DNA, 79 bp, Homo sapiens
tgtttactcccttgcagaagaagatgagcagttcagttgttagaaggcttggaattccagagtgcatattgcttgtaac

SEQ ID NO: 54601 - DNA, 82 bp, Homo sapiens
ttgcagaagaagatgagcagttcagttgttagaaggcttggaattccagagtgcatattgcttgtaactcagcggattacca

SEQ ID NO: 54602 - DNA, 79 bp, Homo sapiens
agaagatgagcagttcagttgttagaaggcttggaattccagagtgcatattgcttgtaactcagcggattaccaagta

SEQ ID NO: 54603 - DNA, 74 bp, Homo sapiens
ttcagttgttagaaggcttggaattccagagtgcatattgcttgtaactcagcggattaccaagtacccagttt

SEQ ID NO: 54604 - DNA, 74 bp, Homo sapiens
ttgttagaaggcttggaattccagagtgcatattgcttgtaactcagcggattaccaagtacccagttttattc

SEQ ID NO: 54605 - DNA, 73 bp, Homo sapiens
cttggaattccagagtgcatattgcttgtaactcagcggattaccaagtacccagttttattccaaagaatat

SEQ ID NO: 54606 - DNA, 74 bp, Homo sapiens
agtgcatattgcttgtaactcagcggattaccaagtacccagttttattccaaagaatattgcagtgtaccaaa

SEQ ID NO: 54607 - DNA, 71 bp, Homo sapiens
ttgcttgtaactcagcggattaccaagtacccagttttattccaaagaatattgcagtgtaccaaaggtaa

SEQ ID NO: 54608 - DNA, 68 bp, Homo sapiens
agcggattaccaagtacccagttttattccaaagaatattgcagtgtaccaaaggtaagtctcctttc

SEQ ID NO: 54609 - DNA, 68 bp, Homo sapiens
ttaccaagtacccagttttattccaaagaatattgcagtgtaccaaaggtaagtctcctttctaactc

SEQ ID NO: 54610 - DNA, 70 bp, Homo sapiens
agttttattccaaagaatattgcagtgtaccaaaggtaagtctcctttctaactcggtcttgtatggtca

SEQ ID NO: 54611 - DNA, 73 bp, Homo sapiens
ttgtccaaaaagagccataaaaaacagaattattctttccttccaagacaatgaagtggagcaggaagatcta

SEQ ID NO: 54612 - DNA, 73 bp, Homo sapiens
aaaaagagccataaaaaacagaattattctttccttccaagacaatgaagtggagcaggaagatctagcacag

SEQ ID NO: 54613 - DNA, 76 bp, Homo sapiens
aaaacagaattattctttccttccaagacaatgaagtggagcaggaagatctagcacagtccttgagcctggtgaa

SEQ ID NO: 54614 - DNA, 78 bp, Homo sapiens
aattattctttccttccaagacaatgaagtggagcaggaagatctagcacagtccttgagcctggtgaaggatgtgat

SEQ ID NO: 54615 - DNA, 84 bp, Homo sapiens
ttccaagacaatgaagtggagcaggaagatctagcacagtccttgagcctggtgaaggatgtgattggagctgtagacagcaaa

SEQ ID NO: 54616 - DNA, 84 bp, Homo sapiens
tgaagtggagcaggaagatctagcacagtccttgagcctggtgaaggatgtgattggagctgtagacagcaaagtggcaagtta

SEQ ID NO: 54617 - DNA, 82 bp, Homo sapiens
agcaggaagatctagcacagtccttgagcctggtgaaggatgtgattggagctgtagacagcaaagtggcaagttatgaaaa

SEQ ID NO: 54618 - DNA, 80 bp, Homo sapiens
agatctagcacagtccttgagcctggtgaaggatgtgattggagctgtagacagcaaagtggcaagttatgaaaagaaag

SEQ ID NO: 54619 - DNA, 80 bp, Homo sapiens
gtgaaggatgtgattggagctgtagacagcaaagtggcaagttatgaaaagaaagtgcgtctcaatgagatttatacaaa

SEQ ID NO: 54620 - DNA, 81 bp, Homo sapiens
atgtgattggagctgtagacagcaaagtggcaagttatgaaaagaaagtgcgtctcaatgagatttatacaaagacagata

SEQ ID NO: 54621 - DNA, 83 bp, Homo sapiens
tgtagacagcaaagtggcaagttatgaaaagaaagtgcgtctcaatgagatttatacaaagacagatagcaagtcaatcatga

SEQ ID NO: 54622 - DNA, 80 bp, Homo sapiens
aaagtggcaagttatgaaaagaaagtgcgtctcaatgagatttatacaaagacagatagcaagtcaatcatgaggatgaa

SEQ ID NO: 54623 - DNA, 81 bp, Homo sapiens
aagttatgaaaagaaagtgcgtctcaatgagatttatacaaagacagatagcaagtcaatcatgaggatgaagagtggtca

SEQ ID NO: 54624 - DNA, 82 bp, Homo sapiens
aaaagaaagtgcgtctcaatgagatttatacaaagacagatagcaagtcaatcatgaggatgaagagtggtcagatgtttgc

SEQ ID NO: 54625 - DNA, 84 bp, Homo sapiens
tctcaatgagatttatacaaagacagatagcaagtcaatcatgaggatgaagagtggtcagatgtttgccaaggaagatttgaa

SEQ ID NO: 54626 - DNA, 79 bp, Homo sapiens
tttatacaaagacagatagcaagtcaatcatgaggatgaagagtggtcagatgtttgccaaggaagatttgaaacggaa

SEQ ID NO: 54627 - DNA, 78 bp, Homo sapiens
aaagacagatagcaagtcaatcatgaggatgaagagtggtcagatgtttgccaaggaagatttgaaacggaagaagct

SEQ ID NO: 54628 - DNA, 79 bp, Homo sapiens
atagcaagtcaatcatgaggatgaagagtggtcagatgtttgccaaggaagatttgaaacggaagaagcttgtacgtga

SEQ ID NO: 54629 - DNA, 76 bp, Homo sapiens
tgaggatgaagagtggtcagatgtttgccaaggaagatttgaaacggaagaagcttgtacgtgatgggagtgtgtt

SEQ ID NO: 54630 - DNA, 74 bp, Homo sapiens
aagagtggtcagatgtttgccaaggaagatttgaaacggaagaagcttgtacgtgatgggagtgtgtttctgaa

SEQ ID NO: 54631 - DNA, 76 bp, Homo sapiens
atgtttgccaaggaagatttgaaacggaagaagcttgtacgtgatgggagtgtgtttctgaagaatgcagcaggaa

SEQ ID NO: 54632 - DNA, 74 bp, Homo sapiens
aggaagatttgaaacggaagaagcttgtacgtgatgggagtgtgtttctgaagaatgcagcaggaaggttgaaa

SEQ ID NO: 54633 - DNA, 73 bp, Homo sapiens
atttgaaacggaagaagcttgtacgtgatgggagtgtgtttctgaagaatgcagcaggaaggttgaaaggtaa

SEQ ID NO: 54634 - DNA, 74 bp, Homo sapiens
aagaagcttgtacgtgatgggagtgtgtttctgaagaatgcagcaggaaggttgaaaggtaaggcttggctctt

SEQ ID NO: 54635 - DNA, 75 bp, Homo sapiens
tgtacgtgatgggagtgtgtttctgaagaatgcagcaggaaggttgaaaggtaaggcttggctcttttgtcttaa

SEQ ID NO: 54636 - DNA, 69 bp, Homo sapiens
actgtgggtaactattaagtagtcatcgttttatcttcccttctcccatttccattttccagaggttca

SEQ ID NO: 54637 - DNA, 75 bp, Homo sapiens
gttcaagcagttcttctcactgacattttagttttccttcaagaaaaagaccagaagtacatctttgcatcattg

SEQ ID NO: 54638 - DNA, 75 bp, Homo sapiens
ttcttctcactgacattttagttttccttcaagaaaaagaccagaagtacatctttgcatcattggtaagctgaa

SEQ ID NO: 54639 - DNA, 74 bp, Homo sapiens
ctcactgacattttagttttccttcaagaaaaagaccagaagtacatctttgcatcattggtaagctgaattgt

SEQ ID NO: 54640 - DNA, 71 bp, Homo sapiens
tttagttttccttcaagaaaaagaccagaagtacatctttgcatcattggtaagctgaattgttatttttg

SEQ ID NO: 54641 - DNA, 76 bp, Homo sapiens
tcaagaaaaagaccagaagtacatctttgcatcattggtaagctgaattgttatttttgtaatagtattataagca

SEQ ID NO: 54642 - DNA, 76 bp, Homo sapiens
gaccagaagtacatctttgcatcattggtaagctgaattgttatttttgtaatagtattataagcagctagtttag

SEQ ID NO: 54643 - DNA, 73 bp, Homo sapiens
gaatattgtatatgtatcttttatttgccctcttccctttttccaggaccagaagtcaacagtgatctcttta

SEQ ID NO: 54644 - DNA, 72 bp, Homo sapiens
tgtatatgtatcttttatttgccctcttccctttttccaggaccagaagtcaacagtgatctctttaaagaa

SEQ ID NO: 54645 - DNA, 71 bp, Homo sapiens
atcttttatttgccctcttccctttttccaggaccagaagtcaacagtgatctctttaaagaagctgattg

SEQ ID NO: 54646 - DNA, 78 bp, Homo sapiens
tcttccctttttccaggaccagaagtcaacagtgatctctttaaagaagctgattgtgagagaagtggcacatgagga

SEQ ID NO: 54647 - DNA, 78 bp, Homo sapiens
ttccaggaccagaagtcaacagtgatctctttaaagaagctgattgtgagagaagtggcacatgaggagaaaggttta

SEQ ID NO: 54648 - DNA, 78 bp, Homo sapiens
accagaagtcaacagtgatctctttaaagaagctgattgtgagagaagtggcacatgaggagaaaggtttattcctga

SEQ ID NO: 54649 - DNA, 80 bp, Homo sapiens
aacagtgatctctttaaagaagctgattgtgagagaagtggcacatgaggagaaaggtttattcctgatcagcatgggga

SEQ ID NO: 54650 - DNA, 83 bp, Homo sapiens
tttaaagaagctgattgtgagagaagtggcacatgaggagaaaggtttattcctgatcagcatggggatgacagatccagaga

SEQ ID NO: 54651 - DNA, 84 bp, Homo sapiens
aagctgattgtgagagaagtggcacatgaggagaaaggtttattcctgatcagcatggggatgacagatccagagatggtagaa

SEQ ID NO: 54652 - DNA, 85 bp, Homo sapiens
gtgagagaagtggcacatgaggagaaaggtttattcctgatcagcatggggatgacagatccagagatggtagaagtccatgcca

SEQ ID NO: 54653 - DNA, 82 bp, Homo sapiens
acatgaggagaaaggtttattcctgatcagcatggggatgacagatccagagatggtagaagtccatgccagctccaaagag

SEQ ID NO: 54654 - DNA, 79 bp, Homo sapiens
aaggtttattcctgatcagcatggggatgacagatccagagatggtagaagtccatgccagctccaaagaggaacgaaa

SEQ ID NO: 54655 - DNA, 83 bp, Homo sapiens
ttattcctgatcagcatggggatgacagatccagagatggtagaagtccatgccagctccaaagaggaacgaaacagctggat

SEQ ID NO: 54656 - DNA, 83 bp, Homo sapiens
atggggatgacagatccagagatggtagaagtccatgccagctccaaagaggaacgaaacagctggattcagatcattcagga

SEQ ID NO: 54657 - DNA, 83 bp, Homo sapiens
acagatccagagatggtagaagtccatgccagctccaaagaggaacgaaacagctggattcagatcattcaggacacaatcaa

SEQ ID NO: 54658 - DNA, 80 bp, Homo sapiens
agatggtagaagtccatgccagctccaaagaggaacgaaacagctggattcagatcattcaggacacaatcaacaccctg

SEQ ID NO: 54659 - DNA, 78 bp, Homo sapiens
agtccatgccagctccaaagaggaacgaaacagctggattcagatcattcaggacacaatcaacaccctgtaagttaa

SEQ ID NO: 54660 - DNA, 75 bp, Homo sapiens
agctccaaagaggaacgaaacagctggattcagatcattcaggacacaatcaacaccctgtaagttaaccaccag

SEQ ID NO: 54661 - DNA, 73 bp, Homo sapiens
aaagaggaacgaaacagctggattcagatcattcaggacacaatcaacaccctgtaagttaaccaccaggccc

SEQ ID NO: 54662 - DNA, 73 bp, Homo sapiens
aaacagctggattcagatcattcaggacacaatcaacaccctgtaagttaaccaccaggccccacccttccca

SEQ ID NO: 54663 - DNA, 73 bp, Homo sapiens
gtgaccagagtaattgacatcttaggaattttttgttctgtcttgtttgggttgtattaggaacagagatgaa

SEQ ID NO: 54664 - DNA, 73 bp, Homo sapiens
tgacatcttaggaattttttgttctgtcttgtttgggttgtattaggaacagagatgaagatgaaggaattcc

SEQ ID NO: 54665 - DNA, 74 bp, Homo sapiens
gaattttttgttctgtcttgtttgggttgtattaggaacagagatgaagatgaaggaattcctagtgagaatga

SEQ ID NO: 54666 - DNA, 75 bp, Homo sapiens
ttttgttctgtcttgtttgggttgtattaggaacagagatgaagatgaaggaattcctagtgagaatgaggaaga

SEQ ID NO: 54667 - DNA, 73 bp, Homo sapiens
tcttgtttgggttgtattaggaacagagatgaagatgaaggaattcctagtgagaatgaggaagaaaagaaaa

SEQ ID NO: 54668 - DNA, 76 bp, Homo sapiens
ttgtattaggaacagagatgaagatgaaggaattcctagtgagaatgaggaagaaaagaaaatgttggacaccaga

SEQ ID NO: 54669 - DNA, 75 bp, Homo sapiens
gagatgaagatgaaggaattcctagtgagaatgaggaagaaaagaaaatgttggacaccagagcccgagaattaa

SEQ ID NO: 54670 - DNA, 71 bp, Homo sapiens
aagatgaaggaattcctagtgagaatgaggaagaaaagaaaatgttggacaccagagcccgagaattaaaa

SEQ ID NO: 54671 - DNA, 71 bp, Homo sapiens
aattcctagtgagaatgaggaagaaaagaaaatgttggacaccagagcccgagaattaaaaggtgaggcat

SEQ ID NO: 54672 - DNA, 74 bp, Homo sapiens
agaatgaggaagaaaagaaaatgttggacaccagagcccgagaattaaaaggtgaggcattgcgagtggtctga

SEQ ID NO: 54673 - DNA, 73 bp, Homo sapiens
aaagaaaatgttggacaccagagcccgagaattaaaaggtgaggcattgcgagtggtctgagccccttgtctg

SEQ ID NO: 54674 - DNA, 75 bp, Homo sapiens
aaatgttggacaccagagcccgagaattaaaaggtgaggcattgcgagtggtctgagccccttgtctggaatgtc

SEQ ID NO: 54675 - DNA, 74 bp, Homo sapiens
taattactaaacaccaatcaaatcacagatcattttctccttcctgcagaacaacttcaccagaaggaccaaaa

SEQ ID NO: 54676 - DNA, 73 bp, Homo sapiens
aaacaccaatcaaatcacagatcattttctccttcctgcagaacaacttcaccagaaggaccaaaaaatccta

SEQ ID NO: 54677 - DNA, 73 bp, Homo sapiens
aatcacagatcattttctccttcctgcagaacaacttcaccagaaggaccaaaaaatcctactcttgttggaa

SEQ ID NO: 54678 - DNA, 70 bp, Homo sapiens
attttctccttcctgcagaacaacttcaccagaaggaccaaaaaatcctactcttgttggaagagaagga

SEQ ID NO: 54679 - DNA, 72 bp, Homo sapiens
ttcctgcagaacaacttcaccagaaggaccaaaaaatcctactcttgttggaagagaaggagatgattttcc

SEQ ID NO: 54680 - DNA, 69 bp, Homo sapiens
aacaacttcaccagaaggaccaaaaaatcctactcttgttggaagagaaggagatgattttccgggaca

SEQ ID NO: 54681 - DNA, 75 bp, Homo sapiens
accagaaggaccaaaaaatcctactcttgttggaagagaaggagatgattttccgggacatggctgagtgcagca

SEQ ID NO: 54682 - DNA, 75 bp, Homo sapiens
aaaaatcctactcttgttggaagagaaggagatgattttccgggacatggctgagtgcagcacccctctcccaga

SEQ ID NO: 54683 - DNA, 78 bp, Homo sapiens
tactcttgttggaagagaaggagatgattttccgggacatggctgagtgcagcacccctctcccagaggattgctccc

SEQ ID NO: 54684 - DNA, 79 bp, Homo sapiens
gagaaggagatgattttccgggacatggctgagtgcagcacccctctcccagaggattgctccccaacacatagcccta

SEQ ID NO: 54685 - DNA, 78 bp, Homo sapiens
agatgattttccgggacatggctgagtgcagcacccctctcccagaggattgctccccaacacatagccctagagttc

SEQ ID NO: 54686 - DNA, 80 bp, Homo sapiens
ggacatggctgagtgcagcacccctctcccagaggattgctccccaacacatagccctagagttctcttccgctccaaca

SEQ ID NO: 54687 - DNA, 79 bp, Homo sapiens
ctgagtgcagcacccctctcccagaggattgctccccaacacatagccctagagttctcttccgctccaacacagaaga

SEQ ID NO: 54688 - DNA, 76 bp, Homo sapiens
cccctctcccagaggattgctccccaacacatagccctagagttctcttccgctccaacacagaagaggctctcaa

SEQ ID NO: 54689 - DNA, 74 bp, Homo sapiens
tccccaacacatagccctagagttctcttccgctccaacacagaagaggctctcaaaggaggacctttaatgaa

SEQ ID NO: 54690 - DNA, 72 bp, Homo sapiens
aacacatagccctagagttctcttccgctccaacacagaagaggctctcaaaggaggacctttaatgaaaag

SEQ ID NO: 54691 - DNA, 74 bp, Homo sapiens
ctagagttctcttccgctccaacacagaagaggctctcaaaggaggacctttaatgaaaagtgcaataaatgag

SEQ ID NO: 54692 - DNA, 72 bp, Homo sapiens
ttccgctccaacacagaagaggctctcaaaggaggacctttaatgaaaagtgcaataaatgagggtaattaa

SEQ ID NO: 54693 - DNA, 73 bp, Homo sapiens
aacacagaagaggctctcaaaggaggacctttaatgaaaagtgcaataaatgagggtaattaacattcagcat

SEQ ID NO: 54694 - DNA, 74 bp, Homo sapiens
tctcaaaggaggacctttaatgaaaagtgcaataaatgagggtaattaacattcagcattgccccctcttcatc

SEQ ID NO: 54695 - DNA, 72 bp, Homo sapiens
aaggaggacctttaatgaaaagtgcaataaatgagggtaattaacattcagcattgccccctcttcatctac

SEQ ID NO: 54696 - DNA, 77 bp, Homo sapiens
tcattgaaagataagatgtcagctttgcatgtttcctttattccagtggagatccttcagggtttggtgagtggaaa

SEQ ID NO: 54697 - DNA, 75 bp, Homo sapiens
aaagataagatgtcagctttgcatgtttcctttattccagtggagatccttcagggtttggtgagtggaaatctg

SEQ ID NO: 54698 - DNA, 74 bp, Homo sapiens
agctttgcatgtttcctttattccagtggagatccttcagggtttggtgagtggaaatctgggaggcacacttg

SEQ ID NO: 54699 - DNA, 72 bp, Homo sapiens
atgtttcctttattccagtggagatccttcagggtttggtgagtggaaatctgggaggcacacttgggccga

SEQ ID NO: 54700 - DNA, 76 bp, Homo sapiens
tttattccagtggagatccttcagggtttggtgagtggaaatctgggaggcacacttgggccgactgtcagcagcc

SEQ ID NO: 54701 - DNA, 78 bp, Homo sapiens
agatccttcagggtttggtgagtggaaatctgggaggcacacttgggccgactgtcagcagccccattgagcaagatg

SEQ ID NO: 54702 - DNA, 78 bp, Homo sapiens
ttcagggtttggtgagtggaaatctgggaggcacacttgggccgactgtcagcagccccattgagcaagatgtggtcg

SEQ ID NO: 54703 - DNA, 75 bp, Homo sapiens
agtggaaatctgggaggcacacttgggccgactgtcagcagccccattgagcaagatgtggtcggtcccgtttcc

SEQ ID NO: 54704 - DNA, 75 bp, Homo sapiens
aatctgggaggcacacttgggccgactgtcagcagccccattgagcaagatgtggtcggtcccgtttccctgccc

SEQ ID NO: 54705 - DNA, 76 bp, Homo sapiens
acacttgggccgactgtcagcagccccattgagcaagatgtggtcggtcccgtttccctgccccggagagcagaga

SEQ ID NO: 54706 - DNA, 75 bp, Homo sapiens
ctgtcagcagccccattgagcaagatgtggtcggtcccgtttccctgccccggagagcagagacctttggaggat

SEQ ID NO: 54707 - DNA, 73 bp, Homo sapiens
agccccattgagcaagatgtggtcggtcccgtttccctgccccggagagcagagacctttggaggatttgaca

SEQ ID NO: 54708 - DNA, 76 bp, Homo sapiens
agcaagatgtggtcggtcccgtttccctgccccggagagcagagacctttggaggatttgacagccatcagatgaa

SEQ ID NO: 54709 - DNA, 76 bp, Homo sapiens
tggtcggtcccgtttccctgccccggagagcagagacctttggaggatttgacagccatcagatgaatgcttcaaa

SEQ ID NO: 54710 - DNA, 79 bp, Homo sapiens
tttccctgccccggagagcagagacctttggaggatttgacagccatcagatgaatgcttcaaaaggtaaatgatgtga

SEQ ID NO: 54711 - DNA, 81 bp, Homo sapiens
cggagagcagagacctttggaggatttgacagccatcagatgaatgcttcaaaaggtaaatgatgtgaagtcatgagcttt

SEQ ID NO: 54712 - DNA, 80 bp, Homo sapiens
agacctttggaggatttgacagccatcagatgaatgcttcaaaaggtaaatgatgtgaagtcatgagcttttataggcaa

SEQ ID NO: 54713 - DNA, 68 bp, Homo sapiens
aaaaaacaaccctattttttgtttaggaggcgagaaggaagagggagatgatggccaagatcttagga

SEQ ID NO: 54714 - DNA, 73 bp, Homo sapiens
cctattttttgtttaggaggcgagaaggaagagggagatgatggccaagatcttaggagaacggaatcagata

SEQ ID NO: 54715 - DNA, 75 bp, Homo sapiens
tttgtttaggaggcgagaaggaagagggagatgatggccaagatcttaggagaacggaatcagatagtggcctaa

SEQ ID NO: 54716 - DNA, 72 bp, Homo sapiens
cgagaaggaagagggagatgatggccaagatcttaggagaacggaatcagatagtggcctaaaaaaggtatt

SEQ ID NO: 54717 - DNA, 72 bp, Homo sapiens
agagggagatgatggccaagatcttaggagaacggaatcagatagtggcctaaaaaaggtatttctctttaa

SEQ ID NO: 54718 - DNA, 72 bp, Homo sapiens
agatgatggccaagatcttaggagaacggaatcagatagtggcctaaaaaaggtatttctctttaaaataca

SEQ ID NO: 54719 - DNA, 70 bp, Homo sapiens
caagatcttaggagaacggaatcagatagtggcctaaaaaaggtatttctctttaaaatacaccatgaac

SEQ ID NO: 54720 - DNA, 68 bp, Homo sapiens
aacggaatcagatagtggcctaaaaaaggtatttctctttaaaatacaccatgaacctccttggcact

SEQ ID NO: 54721 - DNA, 74 bp, Homo sapiens
gcctaacacagaaacacactgaatgtcatttttgcatcaagatcttcatttttttatatgtatgttttttgttt

SEQ ID NO: 54722 - DNA, 73 bp, Homo sapiens
cacactgaatgtcatttttgcatcaagatcttcatttttttatatgtatgttttttgttttatagggtggaaa

SEQ ID NO: 54723 - DNA, 72 bp, Homo sapiens
tcatttttgcatcaagatcttcatttttttatatgtatgttttttgttttatagggtggaaatgctaacctg

SEQ ID NO: 54724 - DNA, 72 bp, Homo sapiens
tgcatcaagatcttcatttttttatatgtatgttttttgttttatagggtggaaatgctaacctggtattta

SEQ ID NO: 54725 - DNA, 70 bp, Homo sapiens
gatcttcatttttttatatgtatgttttttgttttatagggtggaaatgctaacctggtatttatgctta

SEQ ID NO: 54726 - DNA, 69 bp, Homo sapiens
atatgtatgttttttgttttatagggtggaaatgctaacctggtatttatgcttaaaagaaacagtgag

SEQ ID NO: 54727 - DNA, 68 bp, Homo sapiens
tttttgttttatagggtggaaatgctaacctggtatttatgcttaaaagaaacagtgaggtaaggaca

SEQ ID NO: 54728 - DNA, 70 bp, Homo sapiens
ttttatagggtggaaatgctaacctggtatttatgcttaaaagaaacagtgaggtaaggacattatgaac

SEQ ID NO: 54729 - DNA, 71 bp, Homo sapiens
gtggaaatgctaacctggtatttatgcttaaaagaaacagtgaggtaaggacattatgaactatttaagaa

SEQ ID NO: 54730 - DNA, 70 bp, Homo sapiens
cctggtatttatgcttaaaagaaacagtgaggtaaggacattatgaactatttaagaaaatatgtgtttg

SEQ ID NO: 54731 - DNA, 72 bp, Homo sapiens
gcttaaaagaaacagtgaggtaaggacattatgaactatttaagaaaatatgtgtttgttgtcattgtcaag

SEQ ID NO: 54732 - DNA, 72 bp, Homo sapiens
agaaacagtgaggtaaggacattatgaactatttaagaaaatatgtgtttgttgtcattgtcaagttaggaa

SEQ ID NO: 54733 - DNA, 72 bp, Homo sapiens
aggtaaacattagtgtgatggattctgagattcataaagccctgaaacgaatgtttccattttgttcctttg

SEQ ID NO: 54734 - DNA, 77 bp, Homo sapiens
tagtgtgatggattctgagattcataaagccctgaaacgaatgtttccattttgttcctttggcagcaggttgtcca

SEQ ID NO: 54735 - DNA, 74 bp, Homo sapiens
ttctgagattcataaagccctgaaacgaatgtttccattttgttcctttggcagcaggttgtccagagcgttgt

SEQ ID NO: 54736 - DNA, 75 bp, Homo sapiens
ttcataaagccctgaaacgaatgtttccattttgttcctttggcagcaggttgtccagagcgttgttcatctcta

SEQ ID NO: 54737 - DNA, 76 bp, Homo sapiens
cctgaaacgaatgtttccattttgttcctttggcagcaggttgtccagagcgttgttcatctctacgagctcctca

SEQ ID NO: 54738 - DNA, 82 bp, Homo sapiens
tttccattttgttcctttggcagcaggttgtccagagcgttgttcatctctacgagctcctcagcgctctgcaggtgcgtgc

SEQ ID NO: 54739 - DNA, 83 bp, Homo sapiens
tttgttcctttggcagcaggttgtccagagcgttgttcatctctacgagctcctcagcgctctgcaggtgcgtgccttcatct

SEQ ID NO: 54740 - DNA, 84 bp, Homo sapiens
gcaggttgtccagagcgttgttcatctctacgagctcctcagcgctctgcaggtgcgtgccttcatcttccatccctgcgttta

SEQ ID NO: 54741 - DNA, 84 bp, Homo sapiens
tccagagcgttgttcatctctacgagctcctcagcgctctgcaggtgcgtgccttcatcttccatccctgcgtttatttgtcta

SEQ ID NO: 54742 - DNA, 83 bp, Homo sapiens
gttgttcatctctacgagctcctcagcgctctgcaggtgcgtgccttcatcttccatccctgcgtttatttgtctagagaaca

SEQ ID NO: 54743 - DNA, 83 bp, Homo sapiens
ctctacgagctcctcagcgctctgcaggtgcgtgccttcatcttccatccctgcgtttatttgtctagagaacagcagcttgg

SEQ ID NO: 54744 - DNA, 83 bp, Homo sapiens
tgtcgtcctggccagagttgcagggctcccctctgtgtgcctcccagggtgtggtgctgcagcaggacagctacattgaggac

SEQ ID NO: 54745 - DNA, 81 bp, Homo sapiens
ccagagttgcagggctcccctctgtgtgcctcccagggtgtggtgctgcagcaggacagctacattgaggaccagaaactg

SEQ ID NO: 54746 - DNA, 83 bp, Homo sapiens
gttgcagggctcccctctgtgtgcctcccagggtgtggtgctgcagcaggacagctacattgaggaccagaaactggtgctga

SEQ ID NO: 54747 - DNA, 86 bp, Homo sapiens
tctgtgtgcctcccagggtgtggtgctgcagcaggacagctacattgaggaccagaaactggtgctgagcgagagggcgctcactc

SEQ ID NO: 54748 - DNA, 86 bp, Homo sapiens
tcccagggtgtggtgctgcagcaggacagctacattgaggaccagaaactggtgctgagcgagagggcgctcactcgcagcttgtc

SEQ ID NO: 54749 - DNA, 86 bp, Homo sapiens
tgtggtgctgcagcaggacagctacattgaggaccagaaactggtgctgagcgagagggcgctcactcgcagcttgtcccgcccga

SEQ ID NO: 54750 - DNA, 81 bp, Homo sapiens
agcaggacagctacattgaggaccagaaactggtgctgagcgagagggcgctcactcgcagcttgtcccgcccgagctccc

SEQ ID NO: 54751 - DNA, 82 bp, Homo sapiens
aggaccagaaactggtgctgagcgagagggcgctcactcgcagcttgtcccgcccgagctccctcattgagcaggagaagca

SEQ ID NO: 54752 - DNA, 84 bp, Homo sapiens
aaactggtgctgagcgagagggcgctcactcgcagcttgtcccgcccgagctccctcattgagcaggagaagcagcgcagcctg

SEQ ID NO: 54753 - DNA, 88 bp, Homo sapiens
tgagcgagagggcgctcactcgcagcttgtcccgcccgagctccctcattgagcaggagaagcagcgcagcctggagaagcagcgcca

SEQ ID NO: 54754 - DNA, 85 bp, Homo sapiens
tcactcgcagcttgtcccgcccgagctccctcattgagcaggagaagcagcgcagcctggagaagcagcgccaggacctggccaa

SEQ ID NO: 54755 - DNA, 83 bp, Homo sapiens
agcttgtcccgcccgagctccctcattgagcaggagaagcagcgcagcctggagaagcagcgccaggacctggccaacctgca

SEQ ID NO: 54756 - DNA, 85 bp, Homo sapiens
cccgcccgagctccctcattgagcaggagaagcagcgcagcctggagaagcagcgccaggacctggccaacctgcagaagcagca

SEQ ID NO: 54757 - DNA, 82 bp, Homo sapiens
aggagaagcagcgcagcctggagaagcagcgccaggacctggccaacctgcagaagcagcaggcccagtacctcgaggagaa

SEQ ID NO: 54758 - DNA, 84 bp, Homo sapiens
agcagcgcagcctggagaagcagcgccaggacctggccaacctgcagaagcagcaggcccagtacctcgaggagaagcgcaggc

SEQ ID NO: 54759 - DNA, 82 bp, Homo sapiens
agaagcagcgccaggacctggccaacctgcagaagcagcaggcccagtacctcgaggagaagcgcaggcgcgagcgtgagtg

SEQ ID NO: 54760 - DNA, 80 bp, Homo sapiens
ccaggacctggccaacctgcagaagcagcaggcccagtacctcgaggagaagcgcaggcgcgagcgtgagtgggaagctc

SEQ ID NO: 54761 - DNA, 81 bp, Homo sapiens
acctggccaacctgcagaagcagcaggcccagtacctcgaggagaagcgcaggcgcgagcgtgagtgggaagctcgtgaga

SEQ ID NO: 54762 - DNA, 81 bp, Homo sapiens
agaagcagcaggcccagtacctcgaggagaagcgcaggcgcgagcgtgagtgggaagctcgtgagagggagctgcgggagc

SEQ ID NO: 54763 - DNA, 79 bp, Homo sapiens
agcaggcccagtacctcgaggagaagcgcaggcgcgagcgtgagtgggaagctcgtgagagggagctgcgggagcggga

SEQ ID NO: 54764 - DNA, 77 bp, Homo sapiens
agtacctcgaggagaagcgcaggcgcgagcgtgagtgggaagctcgtgagagggagctgcgggagcgggaggccctc

SEQ ID NO: 54765 - DNA, 79 bp, Homo sapiens
agaagcgcaggcgcgagcgtgagtgggaagctcgtgagagggagctgcgggagcgggaggccctcctggcccagcgcga

SEQ ID NO: 54766 - DNA, 78 bp, Homo sapiens
cgagcgtgagtgggaagctcgtgagagggagctgcgggagcgggaggccctcctggcccagcgcgaggaggaggtgca

SEQ ID NO: 54767 - DNA, 78 bp, Homo sapiens
gtgagtgggaagctcgtgagagggagctgcgggagcgggaggccctcctggcccagcgcgaggaggaggtgcagcagg

SEQ ID NO: 54768 - DNA, 79 bp, Homo sapiens
agctcgtgagagggagctgcgggagcgggaggccctcctggcccagcgcgaggaggaggtgcagcaggggcagcaggac

SEQ ID NO: 54769 - DNA, 76 bp, Homo sapiens
agctgcgggagcgggaggccctcctggcccagcgcgaggaggaggtgcagcaggggcagcaggacctggaaaagga

SEQ ID NO: 54770 - DNA, 74 bp, Homo sapiens
agcgggaggccctcctggcccagcgcgaggaggaggtgcagcaggggcagcaggacctggaaaaggagcgggag

SEQ ID NO: 54771 - DNA, 79 bp, Homo sapiens
tcctggcccagcgcgaggaggaggtgcagcaggggcagcaggacctggaaaaggagcgggaggagctccagcagaagaa

SEQ ID NO: 54772 - DNA, 79 bp, Homo sapiens
agcgcgaggaggaggtgcagcaggggcagcaggacctggaaaaggagcgggaggagctccagcagaagaagggcacata

SEQ ID NO: 54773 - DNA, 79 bp, Homo sapiens
aggaggtgcagcaggggcagcaggacctggaaaaggagcgggaggagctccagcagaagaagggcacataccagtatga

SEQ ID NO: 54774 - DNA, 77 bp, Homo sapiens
aggggcagcaggacctggaaaaggagcgggaggagctccagcagaagaagggcacataccagtatgacctggagcga

SEQ ID NO: 54775 - DNA, 79 bp, Homo sapiens
aggacctggaaaaggagcgggaggagctccagcagaagaagggcacataccagtatgacctggagcgactgcgtgctgc

SEQ ID NO: 54776 - DNA, 79 bp, Homo sapiens
aaaaggagcgggaggagctccagcagaagaagggcacataccagtatgacctggagcgactgcgtgctgcccagaaaca

SEQ ID NO: 54777 - DNA, 82 bp, Homo sapiens
aggagctccagcagaagaagggcacataccagtatgacctggagcgactgcgtgctgcccagaaacagcttgagagggaaca

SEQ ID NO: 54778 - DNA, 83 bp, Homo sapiens
ctccagcagaagaagggcacataccagtatgacctggagcgactgcgtgctgcccagaaacagcttgagagggaacaggagca

SEQ ID NO: 54779 - DNA, 83 bp, Homo sapiens
ataccagtatgacctggagcgactgcgtgctgcccagaaacagcttgagagggaacaggagcagctgcgccgggaggcagagc

SEQ ID NO: 54780 - DNA, 84 bp, Homo sapiens
acctggagcgactgcgtgctgcccagaaacagcttgagagggaacaggagcagctgcgccgggaggcagagcggctcagccagc

SEQ ID NO: 54781 - DNA, 85 bp, Homo sapiens
actgcgtgctgcccagaaacagcttgagagggaacaggagcagctgcgccgggaggcagagcggctcagccagcggcagacagaa

SEQ ID NO: 54782 - DNA, 80 bp, Homo sapiens
agaaacagcttgagagggaacaggagcagctgcgccgggaggcagagcggctcagccagcggcagacagaacgggacctg

SEQ ID NO: 54783 - DNA, 81 bp, Homo sapiens
ttgagagggaacaggagcagctgcgccgggaggcagagcggctcagccagcggcagacagaacgggacctgtgtcaggtaa

SEQ ID NO: 54784 - DNA, 80 bp, Homo sapiens
aacaggagcagctgcgccgggaggcagagcggctcagccagcggcagacagaacgggacctgtgtcaggtaatgggactc

SEQ ID NO: 54785 - DNA, 81 bp, Homo sapiens
tgcgccgggaggcagagcggctcagccagcggcagacagaacgggacctgtgtcaggtaatgggactccctgccgagagca

SEQ ID NO: 54786 - DNA, 77 bp, Homo sapiens
acgctgacagcctccaagtgaaaacccttctcttgaatatgtacaggtttcccatccacataccaagctgatgagga

SEQ ID NO: 54787 - DNA, 76 bp, Homo sapiens
agcctccaagtgaaaacccttctcttgaatatgtacaggtttcccatccacataccaagctgatgaggatcccatc

SEQ ID NO: 54788 - DNA, 73 bp, Homo sapiens
aaaacccttctcttgaatatgtacaggtttcccatccacataccaagctgatgaggatcccatcgttcttccc

SEQ ID NO: 54789 - DNA, 78 bp, Homo sapiens
ttctcttgaatatgtacaggtttcccatccacataccaagctgatgaggatcccatcgttcttccccagtcctgagga

SEQ ID NO: 54790 - DNA, 75 bp, Homo sapiens
aatatgtacaggtttcccatccacataccaagctgatgaggatcccatcgttcttccccagtcctgaggagcccc

SEQ ID NO: 54791 - DNA, 78 bp, Homo sapiens
tttcccatccacataccaagctgatgaggatcccatcgttcttccccagtcctgaggagcccccctcgccatctgcac

SEQ ID NO: 54792 - DNA, 78 bp, Homo sapiens
acataccaagctgatgaggatcccatcgttcttccccagtcctgaggagcccccctcgccatctgcaccttccatagc

SEQ ID NO: 54793 - DNA, 78 bp, Homo sapiens
agctgatgaggatcccatcgttcttccccagtcctgaggagcccccctcgccatctgcaccttccatagccaaatcag

SEQ ID NO: 54794 - DNA, 75 bp, Homo sapiens
atcccatcgttcttccccagtcctgaggagcccccctcgccatctgcaccttccatagccaaatcagggtcattg

SEQ ID NO: 54795 - DNA, 75 bp, Homo sapiens
ttccccagtcctgaggagcccccctcgccatctgcaccttccatagccaaatcagggtcattggactcagaactt

SEQ ID NO: 54796 - DNA, 77 bp, Homo sapiens
tcctgaggagcccccctcgccatctgcaccttccatagccaaatcagggtcattggactcagaactttcagtgtccc

SEQ ID NO: 54797 - DNA, 74 bp, Homo sapiens
ccctcgccatctgcaccttccatagccaaatcagggtcattggactcagaactttcagtgtccccaaaaaggaa

SEQ ID NO: 54798 - DNA, 77 bp, Homo sapiens
atctgcaccttccatagccaaatcagggtcattggactcagaactttcagtgtccccaaaaaggaacagcatctctc

SEQ ID NO: 54799 - DNA, 75 bp, Homo sapiens
atagccaaatcagggtcattggactcagaactttcagtgtccccaaaaaggaacagcatctctcggacacacaaa

SEQ ID NO: 54800 - DNA, 74 bp, Homo sapiens
aaatcagggtcattggactcagaactttcagtgtccccaaaaaggaacagcatctctcggacacacaaagataa

SEQ ID NO: 54801 - DNA, 71 bp, Homo sapiens
ttggactcagaactttcagtgtccccaaaaaggaacagcatctctcggacacacaaagataaggggccttt

SEQ ID NO: 54802 - DNA, 72 bp, Homo sapiens
aactttcagtgtccccaaaaaggaacagcatctctcggacacacaaagataaggggccttttcacatactga

SEQ ID NO: 54803 - DNA, 72 bp, Homo sapiens
agtgtccccaaaaaggaacagcatctctcggacacacaaagataaggggccttttcacatactgagttcaac

SEQ ID NO: 54804 - DNA, 74 bp, Homo sapiens
aaaaggaacagcatctctcggacacacaaagataaggggccttttcacatactgagttcaaccagccagacaaa

SEQ ID NO: 54805 - DNA, 74 bp, Homo sapiens
atctctcggacacacaaagataaggggccttttcacatactgagttcaaccagccagacaaacaaaggaccaga

SEQ ID NO: 54806 - DNA, 73 bp, Homo sapiens
acacacaaagataaggggccttttcacatactgagttcaaccagccagacaaacaaaggaccagaagggcaga

SEQ ID NO: 54807 - DNA, 72 bp, Homo sapiens
ataaggggccttttcacatactgagttcaaccagccagacaaacaaaggaccagaagggcagagccaggccc

SEQ ID NO: 54808 - DNA, 75 bp, Homo sapiens
ttttcacatactgagttcaaccagccagacaaacaaaggaccagaagggcagagccaggcccctgcgtccacctc

SEQ ID NO: 54809 - DNA, 75 bp, Homo sapiens
actgagttcaaccagccagacaaacaaaggaccagaagggcagagccaggcccctgcgtccacctctgcctctac

SEQ ID NO: 54810 - DNA, 73 bp, Homo sapiens
agccagacaaacaaaggaccagaagggcagagccaggcccctgcgtccacctctgcctctacccgcctgtttg

SEQ ID NO: 54811 - DNA, 70 bp, Homo sapiens
aagggcagagccaggcccctgcgtccacctctgcctctacccgcctgtttgggttaacaaagccaaagga

SEQ ID NO: 54812 - DNA, 68 bp, Homo sapiens
agccaggcccctgcgtccacctctgcctctacccgcctgtttgggttaacaaagccaaaggaaaagaa

SEQ ID NO: 54813 - DNA, 67 bp, Homo sapiens
ctgcgtccacctctgcctctacccgcctgtttgggttaacaaagccaaaggaaaagaaggagaaaaa

SEQ ID NO: 54814 - DNA, 64 bp, Homo sapiens
acctctgcctctacccgcctgtttgggttaacaaagccaaaggaaaagaaggagaaaaaaaaga

SEQ ID NO: 54815 - DNA, 72 bp, Homo sapiens
aagaaggagaaaaaaaagaagaacaaaaccagccgctctcagcccggtggtgagtcacgcacacctgctctc

SEQ ID NO: 54816 - DNA, 70 bp, Homo sapiens
aaggagcagtttttctgaatttttttcattcttggttttcacatttccagatggtcccgcgtcagaagta

SEQ ID NO: 54817 - DNA, 75 bp, Homo sapiens
ttctgaatttttttcattcttggttttcacatttccagatggtcccgcgtcagaagtatcagcagagggtgaaga

SEQ ID NO: 54818 - DNA, 79 bp, Homo sapiens
tttttcattcttggttttcacatttccagatggtcccgcgtcagaagtatcagcagagggtgaagagatcttctgctga

SEQ ID NO: 54819 - DNA, 78 bp, Homo sapiens
ttggttttcacatttccagatggtcccgcgtcagaagtatcagcagagggtgaagagatcttctgctgaccctcttcc

SEQ ID NO: 54820 - DNA, 83 bp, Homo sapiens
acatttccagatggtcccgcgtcagaagtatcagcagagggtgaagagatcttctgctgaccctcttcctctctgctgaggca

SEQ ID NO: 54821 - DNA, 86 bp, Homo sapiens
agaagtatcagcagagggtgaagagatcttctgctgaccctcttcctctctgctgaggcagctgcctcctgatcctggccagccca

SEQ ID NO: 54822 - DNA, 86 bp, Homo sapiens
atcagcagagggtgaagagatcttctgctgaccctcttcctctctgctgaggcagctgcctcctgatcctggccagcccacctctc

SEQ ID NO: 54823 - DNA, 85 bp, Homo sapiens
ggtgaagagatcttctgctgaccctcttcctctctgctgaggcagctgcctcctgatcctggccagcccacctctcctgctgtcc

SEQ ID NO: 54824 - DNA, 85 bp, Homo sapiens
ttctgctgaccctcttcctctctgctgaggcagctgcctcctgatcctggccagcccacctctcctgctgtccccgcgtgcacaa

SEQ ID NO: 54825 - DNA, 84 bp, Homo sapiens
tcttcctctctgctgaggcagctgcctcctgatcctggccagcccacctctcctgctgtccccgcgtgcacaagtctcttacac

SEQ ID NO: 54826 - DNA, 84 bp, Homo sapiens
tgctgaggcagctgcctcctgatcctggccagcccacctctcctgctgtccccgcgtgcacaagtctcttacactggacgccca

SEQ ID NO: 54827 - DNA, 81 bp, Homo sapiens
agctgcctcctgatcctggccagcccacctctcctgctgtccccgcgtgcacaagtctcttacactggacgcccactgctc

SEQ ID NO: 54828 - DNA, 80 bp, Homo sapiens
atcctggccagcccacctctcctgctgtccccgcgtgcacaagtctcttacactggacgcccactgctcctcagcgtcca

SEQ ID NO: 54829 - DNA, 78 bp, Homo sapiens
agcccacctctcctgctgtccccgcgtgcacaagtctcttacactggacgcccactgctcctcagcgtccagtcctcc

SEQ ID NO: 54830 - DNA, 78 bp, Homo sapiens
tcctgctgtccccgcgtgcacaagtctcttacactggacgcccactgctcctcagcgtccagtcctcctgggcggccc

SEQ ID NO: 54831 - DNA, 76 bp, Homo sapiens
ccgcgtgcacaagtctcttacactggacgcccactgctcctcagcgtccagtcctcctgggcggccccaggtcctg

SEQ ID NO: 54832 - DNA, 74 bp, Homo sapiens
aagtctcttacactggacgcccactgctcctcagcgtccagtcctcctgggcggccccaggtcctggacaataa

SEQ ID NO: 54833 - DNA, 77 bp, Homo sapiens
tcttacactggacgcccactgctcctcagcgtccagtcctcctgggcggccccaggtcctggacaataagcaacaga

SEQ ID NO: 54834 - DNA, 78 bp, Homo sapiens
ccactgctcctcagcgtccagtcctcctgggcggccccaggtcctggacaataagcaacagatgatattgagtgtcgg

SEQ ID NO: 54835 - DNA, 76 bp, Homo sapiens
tcctcagcgtccagtcctcctgggcggccccaggtcctggacaataagcaacagatgatattgagtgtcgggtggg

SEQ ID NO: 54836 - DNA, 74 bp, Homo sapiens
gtccagtcctcctgggcggccccaggtcctggacaataagcaacagatgatattgagtgtcgggtggggaagga

SEQ ID NO: 54837 - DNA, 76 bp, Homo sapiens
gcggccccaggtcctggacaataagcaacagatgatattgagtgtcgggtggggaaggaggcccagactctgcttc

SEQ ID NO: 54838 - DNA, 78 bp, Homo sapiens
gtcctggacaataagcaacagatgatattgagtgtcgggtggggaaggaggcccagactctgcttcggccatgatttg

SEQ ID NO: 54839 - DNA, 79 bp, Homo sapiens
aataagcaacagatgatattgagtgtcgggtggggaaggaggcccagactctgcttcggccatgatttgtgactgccca

SEQ ID NO: 54840 - DNA, 78 bp, Homo sapiens
aacagatgatattgagtgtcgggtggggaaggaggcccagactctgcttcggccatgatttgtgactgcccaggactc

SEQ ID NO: 54841 - DNA, 80 bp, Homo sapiens
gcccagactctgcttcggccatgatttgtgactgcccaggactctcaggttgggctggccctactcaggattacactgaa

SEQ ID NO: 54842 - DNA, 78 bp, Homo sapiens
actctgcttcggccatgatttgtgactgcccaggactctcaggttgggctggccctactcaggattacactgaaagta

SEQ ID NO: 54843 - DNA, 76 bp, Homo sapiens
ttgtgactgcccaggactctcaggttgggctggccctactcaggattacactgaaagtaatggcctcgtaagtaca

SEQ ID NO: 54844 - DNA, 72 bp, Homo sapiens
actctcaggttgggctggccctactcaggattacactgaaagtaatggcctcgtaagtacaggtgatggttt

SEQ ID NO: 54845 - DNA, 73 bp, Homo sapiens
ctactcaggattacactgaaagtaatggcctcgtaagtacaggtgatggttttggacacgtcaggaattccta

SEQ ID NO: 54846 - DNA, 70 bp, Homo sapiens
aggattacactgaaagtaatggcctcgtaagtacaggtgatggttttggacacgtcaggaattcctaaag

SEQ ID NO: 54847 - DNA, 71 bp, Homo sapiens
aagtaatggcctcgtaagtacaggtgatggttttggacacgtcaggaattcctaaaggctgaaagagtgta

SEQ ID NO: 54848 - DNA, 71 bp, Homo sapiens
cctcgtaagtacaggtgatggttttggacacgtcaggaattcctaaaggctgaaagagtgtatccaagtaa

SEQ ID NO: 54849 - DNA, 72 bp, Homo sapiens
agtacaggtgatggttttggacacgtcaggaattcctaaaggctgaaagagtgtatccaagtaaggtctgaa

SEQ ID NO: 54850 - DNA, 70 bp, Homo sapiens
atggttttggacacgtcaggaattcctaaaggctgaaagagtgtatccaagtaaggtctgaacctccgaa

SEQ ID NO: 54851 - DNA, 69 bp, Homo sapiens
acgtcaggaattcctaaaggctgaaagagtgtatccaagtaaggtctgaacctccgaatgccttttatt

SEQ ID NO: 54852 - DNA, 68 bp, Homo sapiens
aattcctaaaggctgaaagagtgtatccaagtaaggtctgaacctccgaatgccttttatttggggga

SEQ ID NO: 54853 - DNA, 66 bp, Homo sapiens
aaagagtgtatccaagtaaggtctgaacctccgaatgccttttatttgggggaacacaaaaccaaa

SEQ ID NO: 54854 - DNA, 69 bp, Homo sapiens
tatccaagtaaggtctgaacctccgaatgccttttatttgggggaacacaaaaccaaacagcagatgtt

SEQ ID NO: 54855 - DNA, 68 bp, Homo sapiens
taaggtctgaacctccgaatgccttttatttgggggaacacaaaaccaaacagcagatgttttggact

SEQ ID NO: 54856 - DNA, 77 bp, Homo sapiens
ggaacacaaaaccaaacagcagatgttttggacttgatctgtgtacgtacatggggacctgtctgcatatacacacg

SEQ ID NO: 54857 - DNA, 75 bp, Homo sapiens
aaaaccaaacagcagatgttttggacttgatctgtgtacgtacatggggacctgtctgcatatacacacggggaa

SEQ ID NO: 54858 - DNA, 79 bp, Homo sapiens
acagcagatgttttggacttgatctgtgtacgtacatggggacctgtctgcatatacacacggggaatgccagaagaag

SEQ ID NO: 54859 - DNA, 77 bp, Homo sapiens
ttttggacttgatctgtgtacgtacatggggacctgtctgcatatacacacggggaatgccagaagaaggcccagtc

SEQ ID NO: 54860 - DNA, 79 bp, Homo sapiens
atctgtgtacgtacatggggacctgtctgcatatacacacggggaatgccagaagaaggcccagtctgcaccaggcgtc

SEQ ID NO: 54861 - DNA, 78 bp, Homo sapiens
acctgtctgcatatacacacggggaatgccagaagaaggcccagtctgcaccaggcgtctggtcaacttagcacaagg

SEQ ID NO: 54862 - DNA, 76 bp, Homo sapiens
aatgccagaagaaggcccagtctgcaccaggcgtctggtcaacttagcacaagggcagtgcctggacggacccgga

SEQ ID NO: 54863 - DNA, 74 bp, Homo sapiens
agaagaaggcccagtctgcaccaggcgtctggtcaacttagcacaagggcagtgcctggacggacccggagccc

SEQ ID NO: 54864 - DNA, 77 bp, Homo sapiens
agtctgcaccaggcgtctggtcaacttagcacaagggcagtgcctggacggacccggagcccccgcatatcagcagt

SEQ ID NO: 54865 - DNA, 77 bp, Homo sapiens
tggtcaacttagcacaagggcagtgcctggacggacccggagcccccgcatatcagcagttcacccagtactcctca

SEQ ID NO: 54866 - DNA, 74 bp, Homo sapiens
aagggcagtgcctggacggacccggagcccccgcatatcagcagttcacccagtactcctcagagactggtttc

SEQ ID NO: 54867 - DNA, 72 bp, Homo sapiens
cctggacggacccggagcccccgcatatcagcagttcacccagtactcctcagagactggtttccctctaaa

SEQ ID NO: 54868 - DNA, 71 bp, Homo sapiens
acggacccggagcccccgcatatcagcagttcacccagtactcctcagagactggtttccctctaaaccca

SEQ ID NO: 54869 - DNA, 73 bp, Homo sapiens
tatcagcagttcacccagtactcctcagagactggtttccctctaaacccatcccgggcacataccacccgtg

SEQ ID NO: 54870 - DNA, 71 bp, Homo sapiens
cagtactcctcagagactggtttccctctaaacccatcccgggcacataccacccgtgttttgcatgtatt

SEQ ID NO: 54871 - DNA, 72 bp, Homo sapiens
tcctcagagactggtttccctctaaacccatcccgggcacataccacccgtgttttgcatgtatttctcatt

SEQ ID NO: 54872 - DNA, 69 bp, Homo sapiens
actggtttccctctaaacccatcccgggcacataccacccgtgttttgcatgtatttctcatttcattt

SEQ ID NO: 54873 - DNA, 72 bp, Homo sapiens
taaacccatcccgggcacataccacccgtgttttgcatgtatttctcatttcattttagggatgacaaacat

SEQ ID NO: 54874 - DNA, 73 bp, Homo sapiens
atcccgggcacataccacccgtgttttgcatgtatttctcatttcattttagggatgacaaacatttgtgaaa

SEQ ID NO: 54875 - DNA, 74 bp, Homo sapiens
ataccacccgtgttttgcatgtatttctcatttcattttagggatgacaaacatttgtgaaaccagtgagagaa

SEQ ID NO: 54876 - DNA, 78 bp, Homo sapiens
ttgcatgtatttctcatttcattttagggatgacaaacatttgtgaaaccagtgagagaaggcttgatgtgtataaaa

SEQ ID NO: 54877 - DNA, 77 bp, Homo sapiens
atttcattttagggatgacaaacatttgtgaaaccagtgagagaaggcttgatgtgtataaaagacgtgatgtgcac

SEQ ID NO: 54878 - DNA, 79 bp, Homo sapiens
agtgagagaaggcttgatgtgtataaaagacgtgatgtgcaccacctcgatctcggtgtttcaggcactaaagcaacaa

SEQ ID NO: 54879 - DNA, 77 bp, Homo sapiens
agaaggcttgatgtgtataaaagacgtgatgtgcaccacctcgatctcggtgtttcaggcactaaagcaacaaaaca

SEQ ID NO: 54880 - DNA, 76 bp, Homo sapiens
tgtataaaagacgtgatgtgcaccacctcgatctcggtgtttcaggcactaaagcaacaaaacaacccatagtatc

SEQ ID NO: 54881 - DNA, 76 bp, Homo sapiens
aaagacgtgatgtgcaccacctcgatctcggtgtttcaggcactaaagcaacaaaacaacccatagtatctcattc

SEQ ID NO: 54882 - DNA, 78 bp, Homo sapiens
accacctcgatctcggtgtttcaggcactaaagcaacaaaacaacccatagtatctcattctgtcatcagatccagaa

SEQ ID NO: 54883 - DNA, 78 bp, Homo sapiens
atctcggtgtttcaggcactaaagcaacaaaacaacccatagtatctcattctgtcatcagatccagaagaaatatcc

SEQ ID NO: 54884 - DNA, 77 bp, Homo sapiens
tgtttcaggcactaaagcaacaaaacaacccatagtatctcattctgtcatcagatccagaagaaatatcctggttt

SEQ ID NO: 54885 - DNA, 78 bp, Homo sapiens
taaagcaacaaaacaacccatagtatctcattctgtcatcagatccagaagaaatatcctggttttccagcatgttta

SEQ ID NO: 54886 - DNA, 77 bp, Homo sapiens
aaacaacccatagtatctcattctgtcatcagatccagaagaaatatcctggttttccagcatgtttacccacatgt

SEQ ID NO: 54887 - DNA, 81 bp, Homo sapiens
tagtatctcattctgtcatcagatccagaagaaatatcctggttttccagcatgtttacccacatgttttggccatggata

SEQ ID NO: 54888 - DNA, 78 bp, Homo sapiens
ttctgtcatcagatccagaagaaatatcctggttttccagcatgtttacccacatgttttggccatggataaagtgaa

SEQ ID NO: 54889 - DNA, 74 bp, Homo sapiens
atccagaagaaatatcctggttttccagcatgtttacccacatgttttggccatggataaagtgaagaggccta

SEQ ID NO: 54890 - DNA, 74 bp, Homo sapiens
aatatcctggttttccagcatgtttacccacatgttttggccatggataaagtgaagaggcctactcaccatta

SEQ ID NO: 54891 - DNA, 78 bp, Homo sapiens
ttttccagcatgtttacccacatgttttggccatggataaagtgaagaggcctactcaccattatccctgcagcgtga

SEQ ID NO: 54892 - DNA, 77 bp, Homo sapiens
ataaagtgaagaggcctactcaccattatccctgcagcgtgacaccttttgattgtcactgaccactcagaaggggc

SEQ ID NO: 54893 - DNA, 77 bp, Homo sapiens
agaggcctactcaccattatccctgcagcgtgacaccttttgattgtcactgaccactcagaaggggccacggcctc

SEQ ID NO: 54894 - DNA, 77 bp, Homo sapiens
accattatccctgcagcgtgacaccttttgattgtcactgaccactcagaaggggccacggcctcctggctgtgttc

SEQ ID NO: 54895 - DNA, 77 bp, Homo sapiens
ccctgcagcgtgacaccttttgattgtcactgaccactcagaaggggccacggcctcctggctgtgttcctgagccc

SEQ ID NO: 54896 - DNA, 74 bp, Homo sapiens
acaccttttgattgtcactgaccactcagaaggggccacggcctcctggctgtgttcctgagcccccgtcgtgc

SEQ ID NO: 54897 - DNA, 76 bp, Homo sapiens
attgtcactgaccactcagaaggggccacggcctcctggctgtgttcctgagcccccgtcgtgcctctcccagaca

SEQ ID NO: 54898 - DNA, 79 bp, Homo sapiens
tgaccactcagaaggggccacggcctcctggctgtgttcctgagcccccgtcgtgcctctcccagacagcagctgtctg

SEQ ID NO: 54899 - DNA, 79 bp, Homo sapiens
ggccacggcctcctggctgtgttcctgagcccccgtcgtgcctctcccagacagcagctgtctggcccttgctgggtga

SEQ ID NO: 54900 - DNA, 80 bp, Homo sapiens
tcctggctgtgttcctgagcccccgtcgtgcctctcccagacagcagctgtctggcccttgctgggtgagggcacaccac

SEQ ID NO: 54901 - DNA, 80 bp, Homo sapiens
tgtgttcctgagcccccgtcgtgcctctcccagacagcagctgtctggcccttgctgggtgagggcacaccactgccagg

SEQ ID NO: 54902 - DNA, 80 bp, Homo sapiens
ccccgtcgtgcctctcccagacagcagctgtctggcccttgctgggtgagggcacaccactgccaggggtcagcctcgca

SEQ ID NO: 54903 - DNA, 80 bp, Homo sapiens
cctctcccagacagcagctgtctggcccttgctgggtgagggcacaccactgccaggggtcagcctcgcacccaggccag

SEQ ID NO: 54904 - DNA, 81 bp, Homo sapiens
cccagacagcagctgtctggcccttgctgggtgagggcacaccactgccaggggtcagcctcgcacccaggccaggcagaa

SEQ ID NO: 54905 - DNA, 83 bp, Homo sapiens
tctggcccttgctgggtgagggcacaccactgccaggggtcagcctcgcacccaggccaggcagaagctgtgctctgaagcta

SEQ ID NO: 54906 - DNA, 84 bp, Homo sapiens
ttgctgggtgagggcacaccactgccaggggtcagcctcgcacccaggccaggcagaagctgtgctctgaagctaggacagctg

SEQ ID NO: 54907 - DNA, 85 bp, Homo sapiens
gtgagggcacaccactgccaggggtcagcctcgcacccaggccaggcagaagctgtgctctgaagctaggacagctggctgagaa

SEQ ID NO: 54908 - DNA, 82 bp, Homo sapiens
actgccaggggtcagcctcgcacccaggccaggcagaagctgtgctctgaagctaggacagctggctgagaagtgggttcag

SEQ ID NO: 54909 - DNA, 83 bp, Homo sapiens
tcagcctcgcacccaggccaggcagaagctgtgctctgaagctaggacagctggctgagaagtgggttcaggcgaagggtgaa

SEQ ID NO: 54910 - DNA, 82 bp, Homo sapiens
cccaggccaggcagaagctgtgctctgaagctaggacagctggctgagaagtgggttcaggcgaagggtgaagccatgtgta

SEQ ID NO: 54911 - DNA, 82 bp, Homo sapiens
aggcagaagctgtgctctgaagctaggacagctggctgagaagtgggttcaggcgaagggtgaagccatgtgtagcagttcc

SEQ ID NO: 54912 - DNA, 86 bp, Homo sapiens
tgctctgaagctaggacagctggctgagaagtgggttcaggcgaagggtgaagccatgtgtagcagttcctgccagtgcagatctg

SEQ ID NO: 54913 - DNA, 80 bp, Homo sapiens
gcgaagggtgaagccatgtgtagcagttcctgccagtgcagatctggagaggagctggcccggaaggcgtggttgtgaaa

SEQ ID NO: 54914 - DNA, 79 bp, Homo sapiens
tgtagcagttcctgccagtgcagatctggagaggagctggcccggaaggcgtggttgtgaaagcgcccttcttatgtta

SEQ ID NO: 54915 - DNA, 76 bp, Homo sapiens
gttcctgccagtgcagatctggagaggagctggcccggaaggcgtggttgtgaaagcgcccttcttatgttaggag

SEQ ID NO: 54916 - DNA, 73 bp, Homo sapiens
gatctggagaggagctggcccggaaggcgtggttgtgaaagcgcccttcttatgttaggaggccttggcaaaa

SEQ ID NO: 54917 - DNA, 70 bp, Homo sapiens
aggagctggcccggaaggcgtggttgtgaaagcgcccttcttatgttaggaggccttggcaaaattggat

SEQ ID NO: 54918 - DNA, 69 bp, Homo sapiens
cggaaggcgtggttgtgaaagcgcccttcttatgttaggaggccttggcaaaattggatttcttcaaaa

SEQ ID NO: 54919 - DNA, 71 bp, Homo sapiens
gtggttgtgaaagcgcccttcttatgttaggaggccttggcaaaattggatttcttcaaaaatacatgtaa

SEQ ID NO: 54920 - DNA, 69 bp, Homo sapiens
aaagcgcccttcttatgttaggaggccttggcaaaattggatttcttcaaaaatacatgtaaaggtctg

SEQ ID NO: 54921 - DNA, 72 bp, Homo sapiens
taggaggccttggcaaaattggatttcttcaaaaatacatgtaaaggtctgttgttgaattgtactctgccc

SEQ ID NO: 54922 - DNA, 73 bp, Homo sapiens
aaaattggatttcttcaaaaatacatgtaaaggtctgttgttgaattgtactctgcccctggaagcagataca

SEQ ID NO: 54923 - DNA, 78 bp, Homo sapiens
atttcttcaaaaatacatgtaaaggtctgttgttgaattgtactctgcccctggaagcagatacagatggctgcctgc

SEQ ID NO: 54924 - DNA, 79 bp, Homo sapiens
aaaatacatgtaaaggtctgttgttgaattgtactctgcccctggaagcagatacagatggctgcctgctgctcggctt

SEQ ID NO: 54925 - DNA, 80 bp, Homo sapiens
taaaggtctgttgttgaattgtactctgcccctggaagcagatacagatggctgcctgctgctcggctttgcttttgctt

SEQ ID NO: 54926 - DNA, 79 bp, Homo sapiens
tgaattgtactctgcccctggaagcagatacagatggctgcctgctgctcggctttgcttttgcttttcccaccgtgtt

SEQ ID NO: 54927 - DNA, 80 bp, Homo sapiens
tggaagcagatacagatggctgcctgctgctcggctttgcttttgcttttcccaccgtgttttcatctttgttcacttga

SEQ ID NO: 54928 - DNA, 73 bp, Homo sapiens
cctgctgctcggctttgcttttgcttttcccaccgtgttttcatctttgttcacttgaggctttccccagctg

SEQ ID NO: 54929 - DNA, 74 bp, Homo sapiens
tcggctttgcttttgcttttcccaccgtgttttcatctttgttcacttgaggctttccccagctggtgtgtgca

SEQ ID NO: 54930 - DNA, 74 bp, Homo sapiens
ttttgcttttcccaccgtgttttcatctttgttcacttgaggctttccccagctggtgtgtgcaggacagttca

SEQ ID NO: 54931 - DNA, 75 bp, Homo sapiens
tttcccaccgtgttttcatctttgttcacttgaggctttccccagctggtgtgtgcaggacagttcatggtaatg

SEQ ID NO: 54932 - DNA, 78 bp, Homo sapiens
ttttcatctttgttcacttgaggctttccccagctggtgtgtgcaggacagttcatggtaatgttgccctctgaggcc

SEQ ID NO: 54933 - DNA, 77 bp, Homo sapiens
tttgttcacttgaggctttccccagctggtgtgtgcaggacagttcatggtaatgttgccctctgaggccccgtaca

SEQ ID NO: 54934 - DNA, 75 bp, Homo sapiens
aggctttccccagctggtgtgtgcaggacagttcatggtaatgttgccctctgaggccccgtacaccagaaggga

SEQ ID NO: 54935 - DNA, 74 bp, Homo sapiens
ctggtgtgtgcaggacagttcatggtaatgttgccctctgaggccccgtacaccagaagggaggccctggaaaa

SEQ ID NO: 54936 - DNA, 73 bp, Homo sapiens
tgtgcaggacagttcatggtaatgttgccctctgaggccccgtacaccagaagggaggccctggaaaattttg

SEQ ID NO: 54937 - DNA, 71 bp, Homo sapiens
agttcatggtaatgttgccctctgaggccccgtacaccagaagggaggccctggaaaattttgtgcttcca

SEQ ID NO: 54938 - DNA, 67 bp, Homo sapiens
ccgtacaccagaagggaggccctggaaaattttgtgcttccaacgtggccttcaattcttgcttttt

SEQ ID NO: 54939 - DNA, 69 bp, Homo sapiens
aaaattttgtgcttccaacgtggccttcaattcttgcttttttgcccctcggaagcatggggcttttga

SEQ ID NO: 54940 - DNA, 72 bp, Homo sapiens
tgcttccaacgtggccttcaattcttgcttttttgcccctcggaagcatggggcttttgagcacacttaaaa

SEQ ID NO: 54941 - DNA, 68 bp, Homo sapiens
aacgtggccttcaattcttgcttttttgcccctcggaagcatggggcttttgagcacacttaaaaaaa

SEQ ID NO: 54942 - DNA, 77 bp, Homo sapiens
aaaagaaaaatctgtaacttggtgcttattgatgaattgcaagctggccttgcagatggagatatttatctttcagt

SEQ ID NO: 54943 - DNA, 78 bp, Homo sapiens
aacttggtgcttattgatgaattgcaagctggccttgcagatggagatatttatctttcagtttatttgaaagaggtc

SEQ ID NO: 54944 - DNA, 76 bp, Homo sapiens
ttgatgaattgcaagctggccttgcagatggagatatttatctttcagtttatttgaaagaggtctggtttaaaat

SEQ ID NO: 54945 - DNA, 72 bp, Homo sapiens
ggccttgcagatggagatatttatctttcagtttatttgaaagaggtctggtttaaaatttgtagcctacat

SEQ ID NO: 54946 - DNA, 69 bp, Homo sapiens
tggagatatttatctttcagtttatttgaaagaggtctggtttaaaatttgtagcctacatttgtttta

SEQ ID NO: 54947 - DNA, 67 bp, Homo sapiens
ttatctttcagtttatttgaaagaggtctggtttaaaatttgtagcctacatttgttttatttattg

SEQ ID NO: 54948 - DNA, 68 bp, Homo sapiens
tttgaaagaggtctggtttaaaatttgtagcctacatttgttttatttattgtatttgtgtgtttgtg

SEQ ID NO: 54949 - DNA, 70 bp, Homo sapiens
tgtttttttttaagggtgagccaggtctagcccaacagtctaaactatccagtcaataccgagtgaagtg

SEQ ID NO: 54950 - DNA, 75 bp, Homo sapiens
tttttaagggtgagccaggtctagcccaacagtctaaactatccagtcaataccgagtgaagtggcagccagcac

SEQ ID NO: 54951 - DNA, 78 bp, Homo sapiens
ccaggtctagcccaacagtctaaactatccagtcaataccgagtgaagtggcagccagcactgttcactctgtgtctt

SEQ ID NO: 54952 - DNA, 79 bp, Homo sapiens
tctagcccaacagtctaaactatccagtcaataccgagtgaagtggcagccagcactgttcactctgtgtcttttgaag

SEQ ID NO: 54953 - DNA, 78 bp, Homo sapiens
agtctaaactatccagtcaataccgagtgaagtggcagccagcactgttcactctgtgtcttttgaagtgccttgaag

SEQ ID NO: 54954 - DNA, 78 bp, Homo sapiens
agtcaataccgagtgaagtggcagccagcactgttcactctgtgtcttttgaagtgccttgaaggcccagatgaaatt

SEQ ID NO: 54955 - DNA, 77 bp, Homo sapiens
ataccgagtgaagtggcagccagcactgttcactctgtgtcttttgaagtgccttgaaggcccagatgaaattttaa

SEQ ID NO: 54956 - DNA, 74 bp, Homo sapiens
aagtggcagccagcactgttcactctgtgtcttttgaagtgccttgaaggcccagatgaaattttaaagggagg

SEQ ID NO: 54957 - DNA, 71 bp, Homo sapiens
actgttcactctgtgtcttttgaagtgccttgaaggcccagatgaaattttaaagggagggggtccatgtc

SEQ ID NO: 54958 - DNA, 70 bp, Homo sapiens
tctgtgtcttttgaagtgccttgaaggcccagatgaaattttaaagggagggggtccatgtccttccctc

SEQ ID NO: 54959 - DNA, 66 bp, Homo sapiens
cttttgaagtgccttgaaggcccagatgaaattttaaagggagggggtccatgtccttccctcccc

SEQ ID NO: 54960 - DNA, 66 bp, Homo sapiens
ttgaaggcccagatgaaattttaaagggagggggtccatgtccttccctcccccaccccgcctcat

SEQ ID NO: 54961 - DNA, 64 bp, Homo sapiens
attttaaagggagggggtccatgtccttccctcccccaccccgcctcattctttaatcaaagga

SEQ ID NO: 54962 - DNA, 70 bp, Homo sapiens
ggtccatgtccttccctcccccaccccgcctcattctttaatcaaaggatgtcttctcccttgtttgaga

SEQ ID NO: 54963 - DNA, 69 bp, Homo sapiens
cttccctcccccaccccgcctcattctttaatcaaaggatgtcttctcccttgtttgagaatgaagaaa

SEQ ID NO: 54964 - DNA, 72 bp, Homo sapiens
ctcattctttaatcaaaggatgtcttctcccttgtttgagaatgaagaaactcgccacctctgacctacctt

SEQ ID NO: 54965 - DNA, 73 bp, Homo sapiens
aggatgtcttctcccttgtttgagaatgaagaaactcgccacctctgacctacctttgcctttttctgtcatg

SEQ ID NO: 54966 - DNA, 73 bp, Homo sapiens
ttgtttgagaatgaagaaactcgccacctctgacctacctttgcctttttctgtcatggagaatactcaccct

SEQ ID NO: 54967 - DNA, 72 bp, Homo sapiens
aaactcgccacctctgacctacctttgcctttttctgtcatggagaatactcacccttcagaaacagaccaa

SEQ ID NO: 54968 - DNA, 71 bp, Homo sapiens
ctctgacctacctttgcctttttctgtcatggagaatactcacccttcagaaacagaccaaaggccaaaac

SEQ ID NO: 54969 - DNA, 73 bp, Homo sapiens
ttgcctttttctgtcatggagaatactcacccttcagaaacagaccaaaggccaaaacctgctgatttttcta

SEQ ID NO: 54970 - DNA, 73 bp, Homo sapiens
tttttctgtcatggagaatactcacccttcagaaacagaccaaaggccaaaacctgctgatttttctattgaa

SEQ ID NO: 54971 - DNA, 72 bp, Homo sapiens
atggagaatactcacccttcagaaacagaccaaaggccaaaacctgctgatttttctattgaaaatatgtcc

SEQ ID NO: 54972 - DNA, 70 bp, Homo sapiens
acccttcagaaacagaccaaaggccaaaacctgctgatttttctattgaaaatatgtccccttgcaaaga

SEQ ID NO: 54973 - DNA, 68 bp, Homo sapiens
aaacagaccaaaggccaaaacctgctgatttttctattgaaaatatgtccccttgcaaagaccctaaa

SEQ ID NO: 54974 - DNA, 67 bp, Homo sapiens
caaaggccaaaacctgctgatttttctattgaaaatatgtccccttgcaaagaccctaaacaaaaag

SEQ ID NO: 54975 - DNA, 66 bp, Homo sapiens
aacctgctgatttttctattgaaaatatgtccccttgcaaagaccctaaacaaaaagttaagtttc

SEQ ID NO: 54976 - DNA, 65 bp, Homo sapiens
tttctattgaaaatatgtccccttgcaaagaccctaaacaaaaagttaagtttctttctttcacc

SEQ ID NO: 54977 - DNA, 66 bp, Homo sapiens
tatgtccccttgcaaagaccctaaacaaaaagttaagtttctttctttcacctatttgtacaactc

SEQ ID NO: 54978 - DNA, 67 bp, Homo sapiens
ccctaaacaaaaagttaagtttctttctttcacctatttgtacaactccaagttacagctgaatctg

SEQ ID NO: 54979 - DNA, 69 bp, Homo sapiens
aaagttaagtttctttctttcacctatttgtacaactccaagttacagctgaatctgtcgtgactttcc

SEQ ID NO: 54980 - DNA, 73 bp, Homo sapiens
agtttctttctttcacctatttgtacaactccaagttacagctgaatctgtcgtgactttcctgagatctacc

SEQ ID NO: 54981 - DNA, 76 bp, Homo sapiens
tgaatctgtcgtgactttcctgagatctacccggggcttggctgtctgttctgggcactggctccgagttcccctc

SEQ ID NO: 54982 - DNA, 75 bp, Homo sapiens
tgggcactggctccgagttcccctcctgggatttgcaggagggcagtactgaacctgcattcttctccttgtaaa

SEQ ID NO: 54983 - DNA, 73 bp, Homo sapiens
tccgagttcccctcctgggatttgcaggagggcagtactgaacctgcattcttctccttgtaaatgtaggccg

SEQ ID NO: 54984 - DNA, 73 bp, Homo sapiens
ctcctgggatttgcaggagggcagtactgaacctgcattcttctccttgtaaatgtaggccgggtgcccctgt

SEQ ID NO: 54985 - DNA, 72 bp, Homo sapiens
atttgcaggagggcagtactgaacctgcattcttctccttgtaaatgtaggccgggtgcccctgttctccgg

SEQ ID NO: 54986 - DNA, 71 bp, Homo sapiens
gcagtactgaacctgcattcttctccttgtaaatgtaggccgggtgcccctgttctccgggtttggaacaa

SEQ ID NO: 54987 - DNA, 66 bp, Homo sapiens
attcttctccttgtaaatgtaggccgggtgcccctgttctccgggtttggaacaatacgaggttgg

SEQ ID NO: 54988 - DNA, 70 bp, Homo sapiens
tgtaaatgtaggccgggtgcccctgttctccgggtttggaacaatacgaggttggtgctgatgggattta

SEQ ID NO: 54989 - DNA, 72 bp, Homo sapiens
tgttctccgggtttggaacaatacgaggttggtgctgatgggatttacttgcgtacgtgctcttcacaaaaa

SEQ ID NO: 54990 - DNA, 72 bp, Homo sapiens
ggtttggaacaatacgaggttggtgctgatgggatttacttgcgtacgtgctcttcacaaaaacaccgtgga

SEQ ID NO: 54991 - DNA, 74 bp, Homo sapiens
aacaatacgaggttggtgctgatgggatttacttgcgtacgtgctcttcacaaaaacaccgtggatgctgaagt

SEQ ID NO: 54992 - DNA, 76 bp, Homo sapiens
aggttggtgctgatgggatttacttgcgtacgtgctcttcacaaaaacaccgtggatgctgaagttagagcacgtc

SEQ ID NO: 54993 - DNA, 81 bp, Homo sapiens
tacttgcgtacgtgctcttcacaaaaacaccgtggatgctgaagttagagcacgtcgccacagagcttgacatcaatgtta

SEQ ID NO: 54994 - DNA, 79 bp, Homo sapiens
tcttcacaaaaacaccgtggatgctgaagttagagcacgtcgccacagagcttgacatcaatgttagagggtctcttac

SEQ ID NO: 54995 - DNA, 80 bp, Homo sapiens
atgctgaagttagagcacgtcgccacagagcttgacatcaatgttagagggtctcttactccccgcccagctgtgatgtt

SEQ ID NO: 54996 - DNA, 79 bp, Homo sapiens
aagttagagcacgtcgccacagagcttgacatcaatgttagagggtctcttactccccgcccagctgtgatgtttcatc

SEQ ID NO: 54997 - DNA, 79 bp, Homo sapiens
tcgccacagagcttgacatcaatgttagagggtctcttactccccgcccagctgtgatgtttcatctgctttggttgtt

SEQ ID NO: 54998 - DNA, 76 bp, Homo sapiens
agagcttgacatcaatgttagagggtctcttactccccgcccagctgtgatgtttcatctgctttggttgttttgg

SEQ ID NO: 54999 - DNA, 71 bp, Homo sapiens
aatgttagagggtctcttactccccgcccagctgtgatgtttcatctgctttggttgttttggtggtcttt

SEQ ID NO: 55000 - DNA, 69 bp, Homo sapiens
agggtctcttactccccgcccagctgtgatgtttcatctgctttggttgttttggtggtcttttttaaa

SEQ ID NO: 55001 - DNA, 70 bp, Homo sapiens
ttactccccgcccagctgtgatgtttcatctgctttggttgttttggtggtcttttttaaaaatagagat

SEQ ID NO: 55002 - DNA, 74 bp, Homo sapiens
agctgtgatgtttcatctgctttggttgttttggtggtcttttttaaaaatagagatttcacatctgcccagac

SEQ ID NO: 55003 - DNA, 71 bp, Homo sapiens
atgtttcatctgctttggttgttttggtggtcttttttaaaaatagagatttcacatctgcccagacccca

SEQ ID NO: 55004 - DNA, 68 bp, Homo sapiens
tggttgttttggtggtcttttttaaaaatagagatttcacatctgcccagaccccactcaaaacgatt

SEQ ID NO: 55005 - DNA, 69 bp, Homo sapiens
ttttggtggtcttttttaaaaatagagatttcacatctgcccagaccccactcaaaacgatttggtcag

SEQ ID NO: 55006 - DNA, 71 bp, Homo sapiens
atagagatttcacatctgcccagaccccactcaaaacgatttggtcaggttctggttggacaagtttaaaa

SEQ ID NO: 55007 - DNA, 66 bp, Homo sapiens
accccactcaaaacgatttggtcaggttctggttggacaagtttaaaatcaaagtagtgcccggaa

SEQ ID NO: 55008 - DNA, 66 bp, Homo sapiens
aaacgatttggtcaggttctggttggacaagtttaaaatcaaagtagtgcccggaattccctcaaa

SEQ ID NO: 55009 - DNA, 66 bp, Homo sapiens
gtcaggttctggttggacaagtttaaaatcaaagtagtgcccggaattccctcaaaccacccaact

SEQ ID NO: 55010 - DNA, 75 bp, Homo sapiens
ccggaattccctcaaaccacccaacttcatccaggaatacagtctgcagtgcagcaacagaaccgcttaccaaga

SEQ ID NO: 55011 - DNA, 77 bp, Homo sapiens
acccaacttcatccaggaatacagtctgcagtgcagcaacagaaccgcttaccaagaactgtgcttacatacctttg

SEQ ID NO: 55012 - DNA, 82 bp, Homo sapiens
ttcatccaggaatacagtctgcagtgcagcaacagaaccgcttaccaagaactgtgcttacatacctttgtcatctctcttc

SEQ ID NO: 55013 - DNA, 77 bp, Homo sapiens
aatacagtctgcagtgcagcaacagaaccgcttaccaagaactgtgcttacatacctttgtcatctctcttcccccc

SEQ ID NO: 55014 - DNA, 73 bp, Homo sapiens
agtgcagcaacagaaccgcttaccaagaactgtgcttacatacctttgtcatctctcttccccccttggaagt

SEQ ID NO: 55015 - DNA, 70 bp, Homo sapiens
aacagaaccgcttaccaagaactgtgcttacatacctttgtcatctctcttccccccttggaagttgtcc

SEQ ID NO: 55016 - DNA, 70 bp, Homo sapiens
ttaccaagaactgtgcttacatacctttgtcatctctcttccccccttggaagttgtcctcagggggatt

SEQ ID NO: 55017 - DNA, 71 bp, Homo sapiens
actgtgcttacatacctttgtcatctctcttccccccttggaagttgtcctcagggggatttgttcctgtc

SEQ ID NO: 55018 - DNA, 68 bp, Homo sapiens
ctttgtcatctctcttccccccttggaagttgtcctcagggggatttgttcctgtcctggggatttac

SEQ ID NO: 55019 - DNA, 67 bp, Homo sapiens
atctctcttccccccttggaagttgtcctcagggggatttgttcctgtcctggggatttacctggga

SEQ ID NO: 55020 - DNA, 71 bp, Homo sapiens
ccttggaagttgtcctcagggggatttgttcctgtcctggggatttacctgggatggtggctgcctgtgct

SEQ ID NO: 55021 - DNA, 73 bp, Homo sapiens
aagttgtcctcagggggatttgttcctgtcctggggatttacctgggatggtggctgcctgtgcttttgctca

SEQ ID NO: 55022 - DNA, 78 bp, Homo sapiens
gggatttgttcctgtcctggggatttacctgggatggtggctgcctgtgcttttgctcatggccttgacagtgctcta

SEQ ID NO: 55023 - DNA, 82 bp, Homo sapiens
tcctgtcctggggatttacctgggatggtggctgcctgtgcttttgctcatggccttgacagtgctctagttgctggatcta

SEQ ID NO: 55024 - DNA, 82 bp, Homo sapiens
ggatttacctgggatggtggctgcctgtgcttttgctcatggccttgacagtgctctagttgctggatctaatggcctgtct

SEQ ID NO: 55025 - DNA, 85 bp, Homo sapiens
tgggatggtggctgcctgtgcttttgctcatggccttgacagtgctctagttgctggatctaatggcctgtcttggtttctatca

SEQ ID NO: 55026 - DNA, 84 bp, Homo sapiens
ctgcctgtgcttttgctcatggccttgacagtgctctagttgctggatctaatggcctgtcttggtttctatcacatgagaagg

SEQ ID NO: 55027 - DNA, 80 bp, Homo sapiens
ttttgctcatggccttgacagtgctctagttgctggatctaatggcctgtcttggtttctatcacatgagaaggggttgt

SEQ ID NO: 55028 - DNA, 76 bp, Homo sapiens
atggccttgacagtgctctagttgctggatctaatggcctgtcttggtttctatcacatgagaaggggttgttttt

SEQ ID NO: 55029 - DNA, 73 bp, Homo sapiens
acagtgctctagttgctggatctaatggcctgtcttggtttctatcacatgagaaggggttgtttttttgggg

SEQ ID NO: 55030 - DNA, 73 bp, Homo sapiens
tagttgctggatctaatggcctgtcttggtttctatcacatgagaaggggttgtttttttggggtgactcgga

SEQ ID NO: 55031 - DNA, 69 bp, Homo sapiens
tcttggtttctatcacatgagaaggggttgtttttttggggtgactcggactgaattccccatactgtt

SEQ ID NO: 55032 - DNA, 70 bp, Homo sapiens
tttctatcacatgagaaggggttgtttttttggggtgactcggactgaattccccatactgtttccacgc

SEQ ID NO: 55033 - DNA, 67 bp, Homo sapiens
atgagaaggggttgtttttttggggtgactcggactgaattccccatactgtttccacgccgggaca

SEQ ID NO: 55034 - DNA, 72 bp, Homo sapiens
ttttttggggtgactcggactgaattccccatactgtttccacgccgggacaccatgttctccatcaagcta

SEQ ID NO: 55035 - DNA, 74 bp, Homo sapiens
gggtgactcggactgaattccccatactgtttccacgccgggacaccatgttctccatcaagctaaagaaatca

SEQ ID NO: 55036 - DNA, 74 bp, Homo sapiens
actgaattccccatactgtttccacgccgggacaccatgttctccatcaagctaaagaaatcacgtgcctgaaa

SEQ ID NO: 55037 - DNA, 74 bp, Homo sapiens
atactgtttccacgccgggacaccatgttctccatcaagctaaagaaatcacgtgcctgaaactgtgcttaagt

SEQ ID NO: 55038 - DNA, 73 bp, Homo sapiens
gtttccacgccgggacaccatgttctccatcaagctaaagaaatcacgtgcctgaaactgtgcttaagttttg

SEQ ID NO: 55039 - DNA, 73 bp, Homo sapiens
caccatgttctccatcaagctaaagaaatcacgtgcctgaaactgtgcttaagttttgggggaaagatggagt

SEQ ID NO: 55040 - DNA, 71 bp, Homo sapiens
aagctaaagaaatcacgtgcctgaaactgtgcttaagttttgggggaaagatggagttcctatccagagcc

SEQ ID NO: 55041 - DNA, 70 bp, Homo sapiens
aaatcacgtgcctgaaactgtgcttaagttttgggggaaagatggagttcctatccagagcccccagatt

SEQ ID NO: 55042 - DNA, 71 bp, Homo sapiens
aaactgtgcttaagttttgggggaaagatggagttcctatccagagcccccagatttccagaatcgagtga

SEQ ID NO: 55043 - DNA, 71 bp, Homo sapiens
aagttttgggggaaagatggagttcctatccagagcccccagatttccagaatcgagtgagcttcctggaa

SEQ ID NO: 55044 - DNA, 77 bp, Homo sapiens
atggagttcctatccagagcccccagatttccagaatcgagtgagcttcctggaaggagactgcgtcttctctcaat

SEQ ID NO: 55045 - DNA, 81 bp, Homo sapiens
ctatccagagcccccagatttccagaatcgagtgagcttcctggaaggagactgcgtcttctctcaattccagtcatctca

SEQ ID NO: 55046 - DNA, 79 bp, Homo sapiens
agatttccagaatcgagtgagcttcctggaaggagactgcgtcttctctcaattccagtcatctcagtcgttgtcgtta

SEQ ID NO: 55047 - DNA, 80 bp, Homo sapiens
agaatcgagtgagcttcctggaaggagactgcgtcttctctcaattccagtcatctcagtcgttgtcgttaggtgacatg

SEQ ID NO: 55048 - DNA, 79 bp, Homo sapiens
agcttcctggaaggagactgcgtcttctctcaattccagtcatctcagtcgttgtcgttaggtgacatgtgcactttaa

SEQ ID NO: 55049 - DNA, 81 bp, Homo sapiens
aaggagactgcgtcttctctcaattccagtcatctcagtcgttgtcgttaggtgacatgtgcactttaaatgctctcatcg

SEQ ID NO: 55050 - DNA, 81 bp, Homo sapiens
gtcttctctcaattccagtcatctcagtcgttgtcgttaggtgacatgtgcactttaaatgctctcatcggttggcttcat

SEQ ID NO: 55051 - DNA, 79 bp, Homo sapiens
aattccagtcatctcagtcgttgtcgttaggtgacatgtgcactttaaatgctctcatcggttggcttcattttcaaga

SEQ ID NO: 55052 - DNA, 79 bp, Homo sapiens
atctcagtcgttgtcgttaggtgacatgtgcactttaaatgctctcatcggttggcttcattttcaagacaatcaaatg

SEQ ID NO: 55053 - DNA, 78 bp, Homo sapiens
gttaggtgacatgtgcactttaaatgctctcatcggttggcttcattttcaagacaatcaaatgtattgactgtgttt

SEQ ID NO: 55054 - DNA, 76 bp, Homo sapiens
gcactttaaatgctctcatcggttggcttcattttcaagacaatcaaatgtattgactgtgttttcttcttagaaa

SEQ ID NO: 55055 - DNA, 73 bp, Homo sapiens
cttcattttcaagacaatcaaatgtattgactgtgttttcttcttagaaaatggagagggttaaaaacatgca

SEQ ID NO: 55056 - DNA, 72 bp, Homo sapiens
gacaatcaaatgtattgactgtgttttcttcttagaaaatggagagggttaaaaacatgcaaactgccactt

SEQ ID NO: 55057 - DNA, 70 bp, Homo sapiens
tgtattgactgtgttttcttcttagaaaatggagagggttaaaaacatgcaaactgccactttcaacctt

SEQ ID NO: 55058 - DNA, 70 bp, Homo sapiens
ttcttagaaaatggagagggttaaaaacatgcaaactgccactttcaacctttgccagtattccctctac

SEQ ID NO: 55059 - DNA, 70 bp, Homo sapiens
agagggttaaaaacatgcaaactgccactttcaacctttgccagtattccctctacccccgtgagagcta

SEQ ID NO: 55060 - DNA, 70 bp, Homo sapiens
actgccactttcaacctttgccagtattccctctacccccgtgagagctatctggggggaagaatcctta

SEQ ID NO: 55061 - DNA, 68 bp, Homo sapiens
actttcaacctttgccagtattccctctacccccgtgagagctatctggggggaagaatccttaccaa

SEQ ID NO: 55062 - DNA, 66 bp, Homo sapiens
tttgccagtattccctctacccccgtgagagctatctggggggaagaatccttaccaaggtttttt

SEQ ID NO: 55063 - DNA, 65 bp, Homo sapiens
tctacccccgtgagagctatctggggggaagaatccttaccaaggtttttttggaaaggtacgaa

SEQ ID NO: 55064 - DNA, 65 bp, Homo sapiens
tgagagctatctggggggaagaatccttaccaaggtttttttggaaaggtacgaatcttaacttt

SEQ ID NO: 55065 - DNA, 62 bp, Homo sapiens
gctatctggggggaagaatccttaccaaggtttttttggaaaggtacgaatcttaacttttt

SEQ ID NO: 55066 - DNA, 60 bp, Homo sapiens
gggaagaatccttaccaaggtttttttggaaaggtacgaatcttaacttttttccccttc

SEQ ID NO: 55067 - DNA, 67 bp, Homo sapiens
tttttggaaaggtacgaatcttaacttttttccccttctgtgtctcagggtaatactattcagagtc

SEQ ID NO: 55068 - DNA, 70 bp, Homo sapiens
tacgaatcttaacttttttccccttctgtgtctcagggtaatactattcagagtcgcccctttgctcatt

SEQ ID NO: 55069 - DNA, 70 bp, Homo sapiens
tcttaacttttttccccttctgtgtctcagggtaatactattcagagtcgcccctttgctcattttctcc

SEQ ID NO: 55070 - DNA, 72 bp, Homo sapiens
agtcgcccctttgctcattttctcccgtatttgttaccttcctgaggcctcagtattagtcgtgagcacaaa

SEQ ID NO: 55071 - DNA, 73 bp, Homo sapiens
tttgctcattttctcccgtatttgttaccttcctgaggcctcagtattagtcgtgagcacaaagttttgagac

SEQ ID NO: 55072 - DNA, 69 bp, Homo sapiens
attttctcccgtatttgttaccttcctgaggcctcagtattagtcgtgagcacaaagttttgagacctt

SEQ ID NO: 55073 - DNA, 71 bp, Homo sapiens
tatttgttaccttcctgaggcctcagtattagtcgtgagcacaaagttttgagacctttggcgttgtttct

SEQ ID NO: 55074 - DNA, 73 bp, Homo sapiens
ttcctgaggcctcagtattagtcgtgagcacaaagttttgagacctttggcgttgtttcttgatgtgggaggg

SEQ ID NO: 55075 - DNA, 72 bp, Homo sapiens
ctcagtattagtcgtgagcacaaagttttgagacctttggcgttgtttcttgatgtgggaggggaggtgtta

SEQ ID NO: 55076 - DNA, 75 bp, Homo sapiens
ttagtcgtgagcacaaagttttgagacctttggcgttgtttcttgatgtgggaggggaggtgttagtgcatgcaa

SEQ ID NO: 55077 - DNA, 71 bp, Homo sapiens
aagttttgagacctttggcgttgtttcttgatgtgggaggggaggtgttagtgcatgcaagggttgaacta

SEQ ID NO: 55078 - DNA, 74 bp, Homo sapiens
ttgagacctttggcgttgtttcttgatgtgggaggggaggtgttagtgcatgcaagggttgaactagatagacc

SEQ ID NO: 55079 - DNA, 74 bp, Homo sapiens
cgttgtttcttgatgtgggaggggaggtgttagtgcatgcaagggttgaactagatagaccctgccttagtaga

SEQ ID NO: 55080 - DNA, 73 bp, Homo sapiens
atgtgggaggggaggtgttagtgcatgcaagggttgaactagatagaccctgccttagtagagggtgggacta

SEQ ID NO: 55081 - DNA, 73 bp, Homo sapiens
ggaggtgttagtgcatgcaagggttgaactagatagaccctgccttagtagagggtgggactataaccttaga

SEQ ID NO: 55082 - DNA, 74 bp, Homo sapiens
ttagtgcatgcaagggttgaactagatagaccctgccttagtagagggtgggactataaccttagaggccagaa

SEQ ID NO: 55083 - DNA, 70 bp, Homo sapiens
aagggttgaactagatagaccctgccttagtagagggtgggactataaccttagaggccagaacttgatc

SEQ ID NO: 55084 - DNA, 72 bp, Homo sapiens
aactagatagaccctgccttagtagagggtgggactataaccttagaggccagaacttgatccagaagttgc

SEQ ID NO: 55085 - DNA, 75 bp, Homo sapiens
tgccttagtagagggtgggactataaccttagaggccagaacttgatccagaagttgctgtccacagaagtgctt

SEQ ID NO: 55086 - DNA, 75 bp, Homo sapiens
tagtagagggtgggactataaccttagaggccagaacttgatccagaagttgctgtccacagaagtgctttctat

SEQ ID NO: 55087 - DNA, 76 bp, Homo sapiens
tgggactataaccttagaggccagaacttgatccagaagttgctgtccacagaagtgctttctatttcatcatttt

SEQ ID NO: 55088 - DNA, 75 bp, Homo sapiens
acttgatccagaagttgctgtccacagaagtgctttctatttcatcatttttgtttctagggctctttttctgta

SEQ ID NO: 55089 - DNA, 75 bp, Homo sapiens
atccagaagttgctgtccacagaagtgctttctatttcatcatttttgtttctagggctctttttctgtagccag

SEQ ID NO: 55090 - DNA, 71 bp, Homo sapiens
tgctttctatttcatcatttttgtttctagggctctttttctgtagccaggtcttcccaaggattttagta

SEQ ID NO: 55091 - DNA, 70 bp, Homo sapiens
atttcatcatttttgtttctagggctctttttctgtagccaggtcttcccaaggattttagtatttgcat

SEQ ID NO: 55092 - DNA, 68 bp, Homo sapiens
atttttgtttctagggctctttttctgtagccaggtcttcccaaggattttagtatttgcattggagt

SEQ ID NO: 55093 - DNA, 72 bp, Homo sapiens
ggctctttttctgtagccaggtcttcccaaggattttagtatttgcattggagttgaggtttactctaatga

SEQ ID NO: 55094 - DNA, 72 bp, Homo sapiens
tttttctgtagccaggtcttcccaaggattttagtatttgcattggagttgaggtttactctaatgatggtg

SEQ ID NO: 55095 - DNA, 76 bp, Homo sapiens
aaggattttagtatttgcattggagttgaggtttactctaatgatggtggcccagctgtgcccagaggacagccag

SEQ ID NO: 55096 - DNA, 76 bp, Homo sapiens
gagttgaggtttactctaatgatggtggcccagctgtgcccagaggacagccaggcaggccctgggagggagttta

SEQ ID NO: 55097 - DNA, 74 bp, Homo sapiens
aggtttactctaatgatggtggcccagctgtgcccagaggacagccaggcaggccctgggagggagtttagaaa

SEQ ID NO: 55098 - DNA, 78 bp, Homo sapiens
taatgatggtggcccagctgtgcccagaggacagccaggcaggccctgggagggagtttagaaagacagtcctggtga

SEQ ID NO: 55099 - DNA, 75 bp, Homo sapiens
cagaggacagccaggcaggccctgggagggagtttagaaagacagtcctggtgaatgggcttcaagtggtcacaa

SEQ ID NO: 55100 - DNA, 73 bp, Homo sapiens
acagccaggcaggccctgggagggagtttagaaagacagtcctggtgaatgggcttcaagtggtcacaaagag

SEQ ID NO: 55101 - DNA, 72 bp, Homo sapiens
ccctgggagggagtttagaaagacagtcctggtgaatgggcttcaagtggtcacaaagagggtggctgtgag

SEQ ID NO: 55102 - DNA, 72 bp, Homo sapiens
agggagtttagaaagacagtcctggtgaatgggcttcaagtggtcacaaagagggtggctgtgaggtgaccc

SEQ ID NO: 55103 - DNA, 79 bp, Homo sapiens
ctggtgaatgggcttcaagtggtcacaaagagggtggctgtgaggtgaccccagacactgcagaacgatgtgcaccctc

SEQ ID NO: 55104 - DNA, 79 bp, Homo sapiens
ttcaagtggtcacaaagagggtggctgtgaggtgaccccagacactgcagaacgatgtgcaccctctgcgttttggatg

SEQ ID NO: 55105 - DNA, 79 bp, Homo sapiens
tcacaaagagggtggctgtgaggtgaccccagacactgcagaacgatgtgcaccctctgcgttttggatgtccttggaa

SEQ ID NO: 55106 - DNA, 77 bp, Homo sapiens
aggtgaccccagacactgcagaacgatgtgcaccctctgcgttttggatgtccttggaatgtgggagcctagaaata

SEQ ID NO: 55107 - DNA, 77 bp, Homo sapiens
agacactgcagaacgatgtgcaccctctgcgttttggatgtccttggaatgtgggagcctagaaataaccctgtgga

SEQ ID NO: 55108 - DNA, 74 bp, Homo sapiens
agaacgatgtgcaccctctgcgttttggatgtccttggaatgtgggagcctagaaataaccctgtggatggaat

SEQ ID NO: 55109 - DNA, 72 bp, Homo sapiens
accctctgcgttttggatgtccttggaatgtgggagcctagaaataaccctgtggatggaattggggcagcg

SEQ ID NO: 55110 - DNA, 77 bp, Homo sapiens
ttttggatgtccttggaatgtgggagcctagaaataaccctgtggatggaattggggcagcggctgctggagatctg

SEQ ID NO: 55111 - DNA, 79 bp, Homo sapiens
gaaataaccctgtggatggaattggggcagcggctgctggagatctgtgtgccttgccttccttcagcaggaccgtcta

SEQ ID NO: 55112 - DNA, 79 bp, Homo sapiens
aaccctgtggatggaattggggcagcggctgctggagatctgtgtgccttgccttccttcagcaggaccgtctaggtgc

SEQ ID NO: 55113 - DNA, 82 bp, Homo sapiens
atggaattggggcagcggctgctggagatctgtgtgccttgccttccttcagcaggaccgtctaggtgcgcagccacctatg

SEQ ID NO: 55114 - DNA, 84 bp, Homo sapiens
agcggctgctggagatctgtgtgccttgccttccttcagcaggaccgtctaggtgcgcagccacctatggatgcgtcccagcca

SEQ ID NO: 55115 - DNA, 80 bp, Homo sapiens
agatctgtgtgccttgccttccttcagcaggaccgtctaggtgcgcagccacctatggatgcgtcccagccagccccgtc

SEQ ID NO: 55116 - DNA, 80 bp, Homo sapiens
tgccttgccttccttcagcaggaccgtctaggtgcgcagccacctatggatgcgtcccagccagccccgtcgctctcgtc

SEQ ID NO: 55117 - DNA, 81 bp, Homo sapiens
ttccttcagcaggaccgtctaggtgcgcagccacctatggatgcgtcccagccagccccgtcgctctcgtccatcctcaga

SEQ ID NO: 55118 - DNA, 80 bp, Homo sapiens
agcaggaccgtctaggtgcgcagccacctatggatgcgtcccagccagccccgtcgctctcgtccatcctcagagacaaa

SEQ ID NO: 55119 - DNA, 74 bp, Homo sapiens
atgcgtcccagccagccccgtcgctctcgtccatcctcagagacaaagaagagggcagggagtttgggcttggt

SEQ ID NO: 55120 - DNA, 71 bp, Homo sapiens
cagccccgtcgctctcgtccatcctcagagacaaagaagagggcagggagtttgggcttggttttgaactt

SEQ ID NO: 55121 - DNA, 72 bp, Homo sapiens
atcctcagagacaaagaagagggcagggagtttgggcttggttttgaactttcctttcaatgtagcaaagca

SEQ ID NO: 55122 - DNA, 70 bp, Homo sapiens
agacaaagaagagggcagggagtttgggcttggttttgaactttcctttcaatgtagcaaagcattccta

SEQ ID NO: 55123 - DNA, 68 bp, Homo sapiens
aagagggcagggagtttgggcttggttttgaactttcctttcaatgtagcaaagcattcctagttaac

SEQ ID NO: 55124 - DNA, 71 bp, Homo sapiens
tttgggcttggttttgaactttcctttcaatgtagcaaagcattcctagttaaccagagccttggaatcta

SEQ ID NO: 55125 - DNA, 76 bp, Homo sapiens
ttcaatgtagcaaagcattcctagttaaccagagccttggaatctactgcctgctggccaggctttaaaatgaaaa

SEQ ID NO: 55126 - DNA, 74 bp, Homo sapiens
ttaaccagagccttggaatctactgcctgctggccaggctttaaaatgaaaagtgttttaatgctgccataaaa

SEQ ID NO: 55127 - DNA, 73 bp, Homo sapiens
agagccttggaatctactgcctgctggccaggctttaaaatgaaaagtgttttaatgctgccataaaagggag

SEQ ID NO: 55128 - DNA, 70 bp, Homo sapiens
aatctactgcctgctggccaggctttaaaatgaaaagtgttttaatgctgccataaaagggaggcggggg

SEQ ID NO: 55129 - DNA, 67 bp, Homo sapiens
tggccaggctttaaaatgaaaagtgttttaatgctgccataaaagggaggcgggggggaggaaggga

SEQ ID NO: 55130 - DNA, 64 bp, Homo sapiens
ttaaaatgaaaagtgttttaatgctgccataaaagggaggcgggggggaggaagggaaaataaa

SEQ ID NO: 55131 - DNA, 64 bp, Homo sapiens
aaaagtgttttaatgctgccataaaagggaggcgggggggaggaagggaaaataaaggcatctt

SEQ ID NO: 55132 - DNA, 76 bp, Homo sapiens
aaaggcatctttccaagtactcatctaatttaattgtcaaaagattgataggccatgaattacttctccatctcac

SEQ ID NO: 55133 - DNA, 76 bp, Homo sapiens
catctttccaagtactcatctaatttaattgtcaaaagattgataggccatgaattacttctccatctcactaagg

SEQ ID NO: 55134 - DNA, 72 bp, Homo sapiens
aatttaattgtcaaaagattgataggccatgaattacttctccatctcactaagggttaaaggcgtgcaacc

SEQ ID NO: 55135 - DNA, 72 bp, Homo sapiens
aaaagattgataggccatgaattacttctccatctcactaagggttaaaggcgtgcaaccccccactggctg

SEQ ID NO: 55136 - DNA, 73 bp, Homo sapiens
ataggccatgaattacttctccatctcactaagggttaaaggcgtgcaaccccccactggctgtgtcccctgc

SEQ ID NO: 55137 - DNA, 70 bp, Homo sapiens
aattacttctccatctcactaagggttaaaggcgtgcaaccccccactggctgtgtcccctgccaccgaa

SEQ ID NO: 55138 - DNA, 72 bp, Homo sapiens
atctcactaagggttaaaggcgtgcaaccccccactggctgtgtcccctgccaccgaagtgagtgacctgcc

SEQ ID NO: 55139 - DNA, 71 bp, Homo sapiens
taagggttaaaggcgtgcaaccccccactggctgtgtcccctgccaccgaagtgagtgacctgccctacaa

SEQ ID NO: 55140 - DNA, 72 bp, Homo sapiens
aaggcgtgcaaccccccactggctgtgtcccctgccaccgaagtgagtgacctgccctacaaccaggtggga

SEQ ID NO: 55141 - DNA, 76 bp, Homo sapiens
ccactggctgtgtcccctgccaccgaagtgagtgacctgccctacaaccaggtgggaccacctgtgctgcagtccg

SEQ ID NO: 55142 - DNA, 74 bp, Homo sapiens
ctgtgtcccctgccaccgaagtgagtgacctgccctacaaccaggtgggaccacctgtgctgcagtccggaggg

SEQ ID NO: 55143 - DNA, 75 bp, Homo sapiens
ccaccgaagtgagtgacctgccctacaaccaggtgggaccacctgtgctgcagtccggaggggcttctgcaggaa

SEQ ID NO: 55144 - DNA, 77 bp, Homo sapiens
aagtgagtgacctgccctacaaccaggtgggaccacctgtgctgcagtccggaggggcttctgcaggaagcactcac

SEQ ID NO: 55145 - DNA, 73 bp, Homo sapiens
cctacaaccaggtgggaccacctgtgctgcagtccggaggggcttctgcaggaagcactcaccccccacacct

SEQ ID NO: 55146 - DNA, 72 bp, Homo sapiens
aaccaggtgggaccacctgtgctgcagtccggaggggcttctgcaggaagcactcaccccccacaccttccc

SEQ ID NO: 55147 - DNA, 74 bp, Homo sapiens
accacctgtgctgcagtccggaggggcttctgcaggaagcactcaccccccacaccttccccggcctgagcttc

SEQ ID NO: 55148 - DNA, 68 bp, Homo sapiens
agtccggaggggcttctgcaggaagcactcaccccccacaccttccccggcctgagcttcccctacct

SEQ ID NO: 55149 - DNA, 70 bp, Homo sapiens
ggcttctgcaggaagcactcaccccccacaccttccccggcctgagcttcccctacctttcgtcaccacc

SEQ ID NO: 55150 - DNA, 69 bp, Homo sapiens
aggaagcactcaccccccacaccttccccggcctgagcttcccctacctttcgtcaccacctgagggca

SEQ ID NO: 55151 - DNA, 71 bp, Homo sapiens
actcaccccccacaccttccccggcctgagcttcccctacctttcgtcaccacctgagggcatgagcacag

SEQ ID NO: 55152 - DNA, 74 bp, Homo sapiens
acaccttccccggcctgagcttcccctacctttcgtcaccacctgagggcatgagcacaggccatggggcgtgc

SEQ ID NO: 55153 - DNA, 79 bp, Homo sapiens
cctgagcttcccctacctttcgtcaccacctgagggcatgagcacaggccatggggcgtgcctggtgagtctgcctgtg

SEQ ID NO: 55154 - DNA, 78 bp, Homo sapiens
ccctacctttcgtcaccacctgagggcatgagcacaggccatggggcgtgcctggtgagtctgcctgtggttcaggct

SEQ ID NO: 55155 - DNA, 81 bp, Homo sapiens
ctttcgtcaccacctgagggcatgagcacaggccatggggcgtgcctggtgagtctgcctgtggttcaggcttagcctgtg

SEQ ID NO: 55156 - DNA, 83 bp, Homo sapiens
acctgagggcatgagcacaggccatggggcgtgcctggtgagtctgcctgtggttcaggcttagcctgtggtctcctgtgtgc

SEQ ID NO: 55157 - DNA, 86 bp, Homo sapiens
atgagcacaggccatggggcgtgcctggtgagtctgcctgtggttcaggcttagcctgtggtctcctgtgtgctgctgcccgcatg

SEQ ID NO: 55158 - DNA, 84 bp, Homo sapiens
atggggcgtgcctggtgagtctgcctgtggttcaggcttagcctgtggtctcctgtgtgctgctgcccgcatgggatgcgcagg

SEQ ID NO: 55159 - DNA, 83 bp, Homo sapiens
cctggtgagtctgcctgtggttcaggcttagcctgtggtctcctgtgtgctgctgcccgcatgggatgcgcaggggaggcgtg

SEQ ID NO: 55160 - DNA, 82 bp, Homo sapiens
tgtggttcaggcttagcctgtggtctcctgtgtgctgctgcccgcatgggatgcgcaggggaggcgtggggatccgcaggag

SEQ ID NO: 55161 - DNA, 79 bp, Homo sapiens
cttagcctgtggtctcctgtgtgctgctgcccgcatgggatgcgcaggggaggcgtggggatccgcaggagggtggttg

SEQ ID NO: 55162 - DNA, 79 bp, Homo sapiens
tcctgtgtgctgctgcccgcatgggatgcgcaggggaggcgtggggatccgcaggagggtggttgggatacaccggata

SEQ ID NO: 55163 - DNA, 78 bp, Homo sapiens
tgctgcccgcatgggatgcgcaggggaggcgtggggatccgcaggagggtggttgggatacaccggatacctctgctc

SEQ ID NO: 55164 - DNA, 76 bp, Homo sapiens
atgggatgcgcaggggaggcgtggggatccgcaggagggtggttgggatacaccggatacctctgctctcattgct

SEQ ID NO: 55165 - DNA, 75 bp, Homo sapiens
atgcgcaggggaggcgtggggatccgcaggagggtggttgggatacaccggatacctctgctctcattgcttgtt

SEQ ID NO: 55166 - DNA, 79 bp, Homo sapiens
gtggggatccgcaggagggtggttgggatacaccggatacctctgctctcattgcttgtttgcaaatgctctatggaca

SEQ ID NO: 55167 - DNA, 79 bp, Homo sapiens
atccgcaggagggtggttgggatacaccggatacctctgctctcattgcttgtttgcaaatgctctatggacatttgtg

SEQ ID NO: 55168 - DNA, 81 bp, Homo sapiens
tggttgggatacaccggatacctctgctctcattgcttgtttgcaaatgctctatggacatttgtgtgctaaatcctatta

SEQ ID NO: 55169 - DNA, 79 bp, Homo sapiens
atacaccggatacctctgctctcattgcttgtttgcaaatgctctatggacatttgtgtgctaaatcctattaaataaa

SEQ ID NO: 55170 - DNA, 77 bp, Homo sapiens
atacctctgctctcattgcttgtttgcaaatgctctatggacatttgtgtgctaaatcctattaaataaaaaagacg

SEQ ID NO: 55171 - DNA, 74 bp, Homo sapiens
ctctcattgcttgtttgcaaatgctctatggacatttgtgtgctaaatcctattaaataaaaaagacgggttaa

SEQ ID NO: 55172 - DNA, 74 bp, Homo sapiens
tgcaaatgctctatggacatttgtgtgctaaatcctattaaataaaaaagacgggttaaaacccagatgctgta

SEQ ID NO: 55173 - DNA, 71 bp, Homo sapiens
gacatttgtgtgctaaatcctattaaataaaaaagacgggttaaaacccagatgctgtatattcatttgta

SEQ ID NO: 55174 - DNA, 70 bp, Homo sapiens
gctaaatcctattaaataaaaaagacgggttaaaacccagatgctgtatattcatttgtaattatgtata

SEQ ID NO: 55175 - DNA, 69 bp, Homo sapiens
aataaaaaagacgggttaaaacccagatgctgtatattcatttgtaattatgtataaagtgaagcagtt

SEQ ID NO: 55176 - DNA, 71 bp, Homo sapiens
agacgggttaaaacccagatgctgtatattcatttgtaattatgtataaagtgaagcagttttaaactgta

SEQ ID NO: 55177 - DNA, 70 bp, Homo sapiens
aaaacccagatgctgtatattcatttgtaattatgtataaagtgaagcagttttaaactgtaaagatttt

SEQ ID NO: 55178 - DNA, 73 bp, Homo sapiens
gatgctgtatattcatttgtaattatgtataaagtgaagcagttttaaactgtaaagatttttttcagtgtgt

SEQ ID NO: 55179 - DNA, 70 bp, Homo sapiens
tcatttgtaattatgtataaagtgaagcagttttaaactgtaaagatttttttcagtgtgttttctcgaa

SEQ ID NO: 55180 - DNA, 70 bp, Homo sapiens
tgtataaagtgaagcagttttaaactgtaaagatttttttcagtgtgttttctcgaattttgccacaaca

SEQ ID NO: 55181 - DNA, 70 bp, Homo sapiens
gaagcagttttaaactgtaaagatttttttcagtgtgttttctcgaattttgccacaacatactggcttc

SEQ ID NO: 55182 - DNA, 68 bp, Homo sapiens
gttttaaactgtaaagatttttttcagtgtgttttctcgaattttgccacaacatactggcttcgtat

SEQ ID NO: 55183 - DNA, 69 bp, Homo sapiens
gtaaagatttttttcagtgtgttttctcgaattttgccacaacatactggcttcgtattttatttatct

SEQ ID NO: 55184 - DNA, 71 bp, Homo sapiens
cagtgtgttttctcgaattttgccacaacatactggcttcgtattttatttatctttctttctagttacca

SEQ ID NO: 55185 - DNA, 72 bp, Homo sapiens
tttctcgaattttgccacaacatactggcttcgtattttatttatctttctttctagttaccagcttcagac

SEQ ID NO: 55186 - DNA, 70 bp, Homo sapiens
aattttgccacaacatactggcttcgtattttatttatctttctttctagttaccagcttcagacccttg

SEQ ID NO: 55187 - DNA, 69 bp, Homo sapiens
aacatactggcttcgtattttatttatctttctttctagttaccagcttcagacccttgtaaagtctcc

SEQ ID NO: 55188 - DNA, 69 bp, Homo sapiens
gtattttatttatctttctttctagttaccagcttcagacccttgtaaagtctccctcagccctttcaa

SEQ ID NO: 55189 - DNA, 68 bp, Homo sapiens
tttatctttctttctagttaccagcttcagacccttgtaaagtctccctcagccctttcaaaaaataa

SEQ ID NO: 55190 - DNA, 67 bp, Homo sapiens
ttctttctagttaccagcttcagacccttgtaaagtctccctcagccctttcaaaaaataataaatt

SEQ ID NO: 55191 - DNA, 68 bp, Homo sapiens
ttaccagcttcagacccttgtaaagtctccctcagccctttcaaaaaataataaatttcctgtgaagt

SEQ ID NO: 55192 - DNA, 70 bp, Homo sapiens
taaagtctccctcagccctttcaaaaaataataaatttcctgtgaagttctggttggtgctgtgacttat

SEQ ID NO: 55193 - DNA, 71 bp, Homo sapiens
agggtcccactacctcctcccctcagggacaaacacagcagacaattttgtgaagagctttttagtagcta

SEQ ID NO: 55194 - DNA, 75 bp, Homo sapiens
ccctcagggacaaacacagcagacaattttgtgaagagctttttagtagctaaatatggcaccatgtgttccaag

SEQ ID NO: 55195 - DNA, 75 bp, Homo sapiens
aacacagcagacaattttgtgaagagctttttagtagctaaatatggcaccatgtgttccaagggcaatataaat

SEQ ID NO: 55196 - DNA, 76 bp, Homo sapiens
tttgtgaagagctttttagtagctaaatatggcaccatgtgttccaagggcaatataaattacagtatgcaaaaca

SEQ ID NO: 55197 - DNA, 78 bp, Homo sapiens
tttttagtagctaaatatggcaccatgtgttccaagggcaatataaattacagtatgcaaaacatactgactggctga

SEQ ID NO: 55198 - DNA, 77 bp, Homo sapiens
agctaaatatggcaccatgtgttccaagggcaatataaattacagtatgcaaaacatactgactggctgaggtaaaa

SEQ ID NO: 55199 - DNA, 78 bp, Homo sapiens
accatgtgttccaagggcaatataaattacagtatgcaaaacatactgactggctgaggtaaaacgcactgctcctgc

SEQ ID NO: 55200 - DNA, 79 bp, Homo sapiens
ttccaagggcaatataaattacagtatgcaaaacatactgactggctgaggtaaaacgcactgctcctgcctcacgtca

SEQ ID NO: 55201 - DNA, 78 bp, Homo sapiens
aatataaattacagtatgcaaaacatactgactggctgaggtaaaacgcactgctcctgcctcacgtcaccatgaggg

SEQ ID NO: 55202 - DNA, 81 bp, Homo sapiens
tacagtatgcaaaacatactgactggctgaggtaaaacgcactgctcctgcctcacgtcaccatgaggggaaacacacata

SEQ ID NO: 55203 - DNA, 77 bp, Homo sapiens
aaaacatactgactggctgaggtaaaacgcactgctcctgcctcacgtcaccatgaggggaaacacacatatgcttt

SEQ ID NO: 55204 - DNA, 76 bp, Homo sapiens
actggctgaggtaaaacgcactgctcctgcctcacgtcaccatgaggggaaacacacatatgcttttaaaaacatc

SEQ ID NO: 55205 - DNA, 76 bp, Homo sapiens
taaaacgcactgctcctgcctcacgtcaccatgaggggaaacacacatatgcttttaaaaacatctggcttataaa

SEQ ID NO: 55206 - DNA, 73 bp, Homo sapiens
tcctgcctcacgtcaccatgaggggaaacacacatatgcttttaaaaacatctggcttataaaaaaacatccc

SEQ ID NO: 55207 - DNA, 70 bp, Homo sapiens
acgtcaccatgaggggaaacacacatatgcttttaaaaacatctggcttataaaaaaacatcccctagaa

SEQ ID NO: 55208 - DNA, 69 bp, Homo sapiens
atgaggggaaacacacatatgcttttaaaaacatctggcttataaaaaaacatcccctagaaaggcctc

SEQ ID NO: 55209 - DNA, 69 bp, Homo sapiens
aaacacacatatgcttttaaaaacatctggcttataaaaaaacatcccctagaaaggcctccagagagg

SEQ ID NO: 55210 - DNA, 70 bp, Homo sapiens
ttttaaaaacatctggcttataaaaaaacatcccctagaaaggcctccagagaggggctgtgaggctcac

SEQ ID NO: 55211 - DNA, 72 bp, Homo sapiens
aaacatctggcttataaaaaaacatcccctagaaaggcctccagagaggggctgtgaggctcaccctctgcc

SEQ ID NO: 55212 - DNA, 74 bp, Homo sapiens
ttataaaaaaacatcccctagaaaggcctccagagaggggctgtgaggctcaccctctgccgcgctcaggagga

SEQ ID NO: 55213 - DNA, 76 bp, Homo sapiens
acatcccctagaaaggcctccagagaggggctgtgaggctcaccctctgccgcgctcaggaggacccgccggctca

SEQ ID NO: 55214 - DNA, 76 bp, Homo sapiens
agaaaggcctccagagaggggctgtgaggctcaccctctgccgcgctcaggaggacccgccggctcagccctggcc

SEQ ID NO: 55215 - DNA, 79 bp, Homo sapiens
agagaggggctgtgaggctcaccctctgccgcgctcaggaggacccgccggctcagccctggcccctccactgcagcca

SEQ ID NO: 55216 - DNA, 77 bp, Homo sapiens
tcaccctctgccgcgctcaggaggacccgccggctcagccctggcccctccactgcagccatgggtggcgcctcccc

SEQ ID NO: 55217 - DNA, 76 bp, Homo sapiens
ctcaggaggacccgccggctcagccctggcccctccactgcagccatgggtggcgcctccccctactgcctgccca

SEQ ID NO: 55218 - DNA, 74 bp, Homo sapiens
aggacccgccggctcagccctggcccctccactgcagccatgggtggcgcctccccctactgcctgcccagggc

SEQ ID NO: 55219 - DNA, 78 bp, Homo sapiens
tcagccctggcccctccactgcagccatgggtggcgcctccccctactgcctgcccagggctctgtccaggttgctct

SEQ ID NO: 55220 - DNA, 79 bp, Homo sapiens
ccctccactgcagccatgggtggcgcctccccctactgcctgcccagggctctgtccaggttgctcttgatggtgtcga

SEQ ID NO: 55221 - DNA, 78 bp, Homo sapiens
actgcagccatgggtggcgcctccccctactgcctgcccagggctctgtccaggttgctcttgatggtgtcgaggaag

SEQ ID NO: 55222 - DNA, 77 bp, Homo sapiens
tggcgcctccccctactgcctgcccagggctctgtccaggttgctcttgatggtgtcgaggaagtccgtggtgttca

SEQ ID NO: 55223 - DNA, 77 bp, Homo sapiens
ccctactgcctgcccagggctctgtccaggttgctcttgatggtgtcgaggaagtccgtggtgttcaggaagtgctc

SEQ ID NO: 55224 - DNA, 82 bp, Homo sapiens
ctctgtccaggttgctcttgatggtgtcgaggaagtccgtggtgttcaggaagtgctcgttcagcttcacactgcagagaga

SEQ ID NO: 55225 - DNA, 86 bp, Homo sapiens
ttgctcttgatggtgtcgaggaagtccgtggtgttcaggaagtgctcgttcagcttcacactgcagagagagcaccactcacatca

SEQ ID NO: 55226 - DNA, 83 bp, Homo sapiens
cttgatggtgtcgaggaagtccgtggtgttcaggaagtgctcgttcagcttcacactgcagagagagcaccactcacatcagg

SEQ ID NO: 55227 - DNA, 83 bp, Homo sapiens
tcgaggaagtccgtggtgttcaggaagtgctcgttcagcttcacactgcagagagagcaccactcacatcaggggtggctcca

SEQ ID NO: 55228 - DNA, 78 bp, Homo sapiens
gcttcctcccacatggccccagggtctgcctaccaccccaggccacgcacttgctgaggccgtgaatgcagcccgcca

SEQ ID NO: 55229 - DNA, 76 bp, Homo sapiens
acatggccccagggtctgcctaccaccccaggccacgcacttgctgaggccgtgaatgcagcccgccaggtccttg

SEQ ID NO: 55230 - DNA, 78 bp, Homo sapiens
agggtctgcctaccaccccaggccacgcacttgctgaggccgtgaatgcagcccgccaggtccttggtcatggctcca

SEQ ID NO: 55231 - DNA, 80 bp, Homo sapiens
ctgcctaccaccccaggccacgcacttgctgaggccgtgaatgcagcccgccaggtccttggtcatggctccactctcca

SEQ ID NO: 55232 - DNA, 81 bp, Homo sapiens
aggccacgcacttgctgaggccgtgaatgcagcccgccaggtccttggtcatggctccactctccaccgtctccacgcaca

SEQ ID NO: 55233 - DNA, 79 bp, Homo sapiens
acttgctgaggccgtgaatgcagcccgccaggtccttggtcatggctccactctccaccgtctccacgcacaccttctc

SEQ ID NO: 55234 - DNA, 80 bp, Homo sapiens
aggccgtgaatgcagcccgccaggtccttggtcatggctccactctccaccgtctccacgcacaccttctccagcatctg

SEQ ID NO: 55235 - DNA, 77 bp, Homo sapiens
agcccgccaggtccttggtcatggctccactctccaccgtctccacgcacaccttctccagcatctgggcaaaccta

SEQ ID NO: 55236 - DNA, 77 bp, Homo sapiens
aggtccttggtcatggctccactctccaccgtctccacgcacaccttctccagcatctgggcaaacctatggggatg

SEQ ID NO: 55237 - DNA, 79 bp, Homo sapiens
atggctccactctccaccgtctccacgcacaccttctccagcatctgggcaaacctatggggatggggcagaatgagac

SEQ ID NO: 55238 - DNA, 77 bp, Homo sapiens
ccactctccaccgtctccacgcacaccttctccagcatctgggcaaacctatggggatggggcagaatgagacccca

SEQ ID NO: 55239 - DNA, 78 bp, Homo sapiens
atggggatggggcagaatgagaccccatctgtgcaagggcaggacccagagcctgtcctgggcagctccggcctctcc

SEQ ID NO: 55240 - DNA, 78 bp, Homo sapiens
aggacccagagcctgtcctgggcagctccggcctctccctccatgctcacctgatgaggtcttggttcccatccagct

SEQ ID NO: 55241 - DNA, 78 bp, Homo sapiens
tgtcctgggcagctccggcctctccctccatgctcacctgatgaggtcttggttcccatccagcttcccccggtgctc

SEQ ID NO: 55242 - DNA, 76 bp, Homo sapiens
agctccggcctctccctccatgctcacctgatgaggtcttggttcccatccagcttcccccggtgctccaggccac

SEQ ID NO: 55243 - DNA, 78 bp, Homo sapiens
tctccctccatgctcacctgatgaggtcttggttcccatccagcttcccccggtgctccaggccacgtgtccaggcaa

SEQ ID NO: 55244 - DNA, 80 bp, Homo sapiens
tccatgctcacctgatgaggtcttggttcccatccagcttcccccggtgctccaggccacgtgtccaggcaaagatgctg

SEQ ID NO: 55245 - DNA, 77 bp, Homo sapiens
acctgatgaggtcttggttcccatccagcttcccccggtgctccaggccacgtgtccaggcaaagatgctggcgatg

SEQ ID NO: 55246 - DNA, 76 bp, Homo sapiens
ttggttcccatccagcttcccccggtgctccaggccacgtgtccaggcaaagatgctggcgatggggttggtgctg

SEQ ID NO: 55247 - DNA, 75 bp, Homo sapiens
atccagcttcccccggtgctccaggccacgtgtccaggcaaagatgctggcgatggggttggtgctggtgggccg

SEQ ID NO: 55248 - DNA, 74 bp, Homo sapiens
cggtgctccaggccacgtgtccaggcaaagatgctggcgatggggttggtgctggtgggccggccctggggacg

SEQ ID NO: 55249 - DNA, 72 bp, Homo sapiens
ctccaggccacgtgtccaggcaaagatgctggcgatggggttggtgctggtgggccggccctggggacgggg

SEQ ID NO: 55250 - DNA, 74 bp, Homo sapiens
tccaggcaaagatgctggcgatggggttggtgctggtgggccggccctggggacgggggttgcagggagatcaa

SEQ ID NO: 55251 - DNA, 72 bp, Homo sapiens
aaagatgctggcgatggggttggtgctggtgggccggccctggggacgggggttgcagggagatcaagagcc

SEQ ID NO: 55252 - DNA, 75 bp, Homo sapiens
ttaggcccctggggtagaggggcattgtgaggccccatgccctgcactcaccttctggtgctcccgatagtggcg

SEQ ID NO: 55253 - DNA, 78 bp, Homo sapiens
gtagaggggcattgtgaggccccatgccctgcactcaccttctggtgctcccgatagtggcgggtgacggtcccatga

SEQ ID NO: 55254 - DNA, 79 bp, Homo sapiens
attgtgaggccccatgccctgcactcaccttctggtgctcccgatagtggcgggtgacggtcccatgagcggcctcagc

SEQ ID NO: 55255 - DNA, 80 bp, Homo sapiens
catgccctgcactcaccttctggtgctcccgatagtggcgggtgacggtcccatgagcggcctcagcctcaatcgtcttc

SEQ ID NO: 55256 - DNA, 77 bp, Homo sapiens
actcaccttctggtgctcccgatagtggcgggtgacggtcccatgagcggcctcagcctcaatcgtcttcccatcag

SEQ ID NO: 55257 - DNA, 79 bp, Homo sapiens
ttctggtgctcccgatagtggcgggtgacggtcccatgagcggcctcagcctcaatcgtcttcccatcagggcagacca

SEQ ID NO: 55258 - DNA, 78 bp, Homo sapiens
gatagtggcgggtgacggtcccatgagcggcctcagcctcaatcgtcttcccatcagggcagaccaggacggacgtca

SEQ ID NO: 55259 - DNA, 78 bp, Homo sapiens
ggtgacggtcccatgagcggcctcagcctcaatcgtcttcccatcagggcagaccaggacggacgtcatcaggccaag

SEQ ID NO: 55260 - DNA, 79 bp, Homo sapiens
tcccatgagcggcctcagcctcaatcgtcttcccatcagggcagaccaggacggacgtcatcaggccaagggagccaaa

SEQ ID NO: 55261 - DNA, 77 bp, Homo sapiens
agcggcctcagcctcaatcgtcttcccatcagggcagaccaggacggacgtcatcaggccaagggagccaaagcctg

SEQ ID NO: 55262 - DNA, 73 bp, Homo sapiens
aatcgtcttcccatcagggcagaccaggacggacgtcatcaggccaagggagccaaagcctggagggtagaaa

SEQ ID NO: 55263 - DNA, 73 bp, Homo sapiens
ttcccatcagggcagaccaggacggacgtcatcaggccaagggagccaaagcctggagggtagaaagcctttc

SEQ ID NO: 55264 - DNA, 72 bp, Homo sapiens
agggcagaccaggacggacgtcatcaggccaagggagccaaagcctggagggtagaaagcctttctctcagg

SEQ ID NO: 55265 - DNA, 77 bp, Homo sapiens
agaagaccaacagtccacccccacagggagcagcgtcctcccagcgtaccctgggccaggatgtctgactgcacatc

SEQ ID NO: 55266 - DNA, 78 bp, Homo sapiens
tccacccccacagggagcagcgtcctcccagcgtaccctgggccaggatgtctgactgcacatctccgtcatagttct

SEQ ID NO: 55267 - DNA, 81 bp, Homo sapiens
acagggagcagcgtcctcccagcgtaccctgggccaggatgtctgactgcacatctccgtcatagttcttgcaggcccaca

SEQ ID NO: 55268 - DNA, 80 bp, Homo sapiens
agcgtcctcccagcgtaccctgggccaggatgtctgactgcacatctccgtcatagttcttgcaggcccacacaaagcca

SEQ ID NO: 55269 - DNA, 78 bp, Homo sapiens
gcgtaccctgggccaggatgtctgactgcacatctccgtcatagttcttgcaggcccacacaaagccacccgaagact

SEQ ID NO: 55270 - DNA, 81 bp, Homo sapiens
tgggccaggatgtctgactgcacatctccgtcatagttcttgcaggcccacacaaagccacccgaagacttgaggacctga

SEQ ID NO: 55271 - DNA, 81 bp, Homo sapiens
ggatgtctgactgcacatctccgtcatagttcttgcaggcccacacaaagccacccgaagacttgaggacctgagccacca

SEQ ID NO: 55272 - DNA, 83 bp, Homo sapiens
ctgcacatctccgtcatagttcttgcaggcccacacaaagccacccgaagacttgaggacctgagccaccatgtcatcaatga

SEQ ID NO: 55273 - DNA, 81 bp, Homo sapiens
atagttcttgcaggcccacacaaagccacccgaagacttgaggacctgagccaccatgtcatcaatgagccggtgctcata

SEQ ID NO: 55274 - DNA, 81 bp, Homo sapiens
caggcccacacaaagccacccgaagacttgaggacctgagccaccatgtcatcaatgagccggtgctcataccagatctta

SEQ ID NO: 55275 - DNA, 80 bp, Homo sapiens
acacaaagccacccgaagacttgaggacctgagccaccatgtcatcaatgagccggtgctcataccagatcttattcttg

SEQ ID NO: 55276 - DNA, 80 bp, Homo sapiens
cgaagacttgaggacctgagccaccatgtcatcaatgagccggtgctcataccagatcttattcttgtcgaagtcggtct

SEQ ID NO: 55277 - DNA, 79 bp, Homo sapiens
ccaccatgtcatcaatgagccggtgctcataccagatcttattcttgtcgaagtcggtcttatagtgcctgggagtaaa

SEQ ID NO: 55278 - DNA, 77 bp, Homo sapiens
atgtcatcaatgagccggtgctcataccagatcttattcttgtcgaagtcggtcttatagtgcctgggagtaaaaag

SEQ ID NO: 55279 - DNA, 73 bp, Homo sapiens
agccggtgctcataccagatcttattcttgtcgaagtcggtcttatagtgcctgggagtaaaaaggtctgtta

SEQ ID NO: 55280 - DNA, 71 bp, Homo sapiens
ataccagatcttattcttgtcgaagtcggtcttatagtgcctgggagtaaaaaggtctgttatggggagag

SEQ ID NO: 55281 - DNA, 74 bp, Homo sapiens
atggggggaagggaagaaaggccacagagtacatggatgaggctttacttgtcaaagatctcctggaagatgtc

SEQ ID NO: 55282 - DNA, 74 bp, Homo sapiens
aagggaagaaaggccacagagtacatggatgaggctttacttgtcaaagatctcctggaagatgtccttgaaac

SEQ ID NO: 55283 - DNA, 78 bp, Homo sapiens
cacagagtacatggatgaggctttacttgtcaaagatctcctggaagatgtccttgaaacgcccatcgtaggctttca

SEQ ID NO: 55284 - DNA, 76 bp, Homo sapiens
agtacatggatgaggctttacttgtcaaagatctcctggaagatgtccttgaaacgcccatcgtaggctttcagta

SEQ ID NO: 55285 - DNA, 73 bp, Homo sapiens
aggctttacttgtcaaagatctcctggaagatgtccttgaaacgcccatcgtaggctttcagtatggtgttct

SEQ ID NO: 55286 - DNA, 79 bp, Homo sapiens
ttgtcaaagatctcctggaagatgtccttgaaacgcccatcgtaggctttcagtatggtgttcttggtgctcatgtaca

SEQ ID NO: 55287 - DNA, 77 bp, Homo sapiens
ctggaagatgtccttgaaacgcccatcgtaggctttcagtatggtgttcttggtgctcatgtacagcggccatttct

SEQ ID NO: 55288 - DNA, 78 bp, Homo sapiens
agatgtccttgaaacgcccatcgtaggctttcagtatggtgttcttggtgctcatgtacagcggccatttcttctgga

SEQ ID NO: 55289 - DNA, 79 bp, Homo sapiens
aaacgcccatcgtaggctttcagtatggtgttcttggtgctcatgtacagcggccatttcttctggatggcatactgga

SEQ ID NO: 55290 - DNA, 84 bp, Homo sapiens
taggctttcagtatggtgttcttggtgctcatgtacagcggccatttcttctggatggcatactggaagcagctgtgcgcaaaa

SEQ ID NO: 55291 - DNA, 84 bp, Homo sapiens
agtatggtgttcttggtgctcatgtacagcggccatttcttctggatggcatactggaagcagctgtgcgcaaaacctgagatg

SEQ ID NO: 55292 - DNA, 85 bp, Homo sapiens
ttcttggtgctcatgtacagcggccatttcttctggatggcatactggaagcagctgtgcgcaaaacctgagatggactgcaggg

SEQ ID NO: 55293 - DNA, 85 bp, Homo sapiens
ctcatgtacagcggccatttcttctggatggcatactggaagcagctgtgcgcaaaacctgagatggactgcagggggagagaca

SEQ ID NO: 55294 - DNA, 81 bp, Homo sapiens
catttcttctggatggcatactggaagcagctgtgcgcaaaacctgagatggactgcagggggagagacagggccctggcg

SEQ ID NO: 55295 - DNA, 82 bp, Homo sapiens
tggatggcatactggaagcagctgtgcgcaaaacctgagatggactgcagggggagagacagggccctggcgtggtgcccta

SEQ ID NO: 55296 - DNA, 77 bp, Homo sapiens
aagagacaagctgggagaggaggggcccaggatgcccaagccagcctcacctcgtcggtgttgtacatgcccatgcc

SEQ ID NO: 55297 - DNA, 77 bp, Homo sapiens
gagaggaggggcccaggatgcccaagccagcctcacctcgtcggtgttgtacatgcccatgcccacgccgcctgcgg

SEQ ID NO: 55298 - DNA, 77 bp, Homo sapiens
gcccaggatgcccaagccagcctcacctcgtcggtgttgtacatgcccatgcccacgccgcctgcggggaagttgta

SEQ ID NO: 55299 - DNA, 76 bp, Homo sapiens
atgcccaagccagcctcacctcgtcggtgttgtacatgcccatgcccacgccgcctgcggggaagttgtacacttc

SEQ ID NO: 55300 - DNA, 73 bp, Homo sapiens
agcctcacctcgtcggtgttgtacatgcccatgcccacgccgcctgcggggaagttgtacacttcccactcct

SEQ ID NO: 55301 - DNA, 74 bp, Homo sapiens
cctcgtcggtgttgtacatgcccatgcccacgccgcctgcggggaagttgtacacttcccactccttgacacca

SEQ ID NO: 55302 - DNA, 76 bp, Homo sapiens
ttgtacatgcccatgcccacgccgcctgcggggaagttgtacacttcccactccttgacaccactgccatcttttg

SEQ ID NO: 55303 - DNA, 73 bp, Homo sapiens
atgcccacgccgcctgcggggaagttgtacacttcccactccttgacaccactgccatcttttggggtgaaga

SEQ ID NO: 55304 - DNA, 71 bp, Homo sapiens
cctgcggggaagttgtacacttcccactccttgacaccactgccatcttttggggtgaagaccattttgaa

SEQ ID NO: 55305 - DNA, 71 bp, Homo sapiens
aagttgtacacttcccactccttgacaccactgccatcttttggggtgaagaccattttgaaagtgccggc

SEQ ID NO: 55306 - DNA, 71 bp, Homo sapiens
tacacttcccactccttgacaccactgccatcttttggggtgaagaccattttgaaagtgccggcccggtc

SEQ ID NO: 55307 - DNA, 71 bp, Homo sapiens
actccttgacaccactgccatcttttggggtgaagaccattttgaaagtgccggcccggtctgccacaaag

SEQ ID NO: 55308 - DNA, 72 bp, Homo sapiens
actgccatcttttggggtgaagaccattttgaaagtgccggcccggtctgccacaaagtctgtggccttgta

SEQ ID NO: 55309 - DNA, 74 bp, Homo sapiens
tttggggtgaagaccattttgaaagtgccggcccggtctgccacaaagtctgtggccttgtactgcagagacaa

SEQ ID NO: 55310 - DNA, 76 bp, Homo sapiens
aagaccattttgaaagtgccggcccggtctgccacaaagtctgtggccttgtactgcagagacaagaggatggcta

SEQ ID NO: 55311 - DNA, 78 bp, Homo sapiens
tttgaaagtgccggcccggtctgccacaaagtctgtggccttgtactgcagagacaagaggatggctaggcgaggagc

SEQ ID NO: 55312 - DNA, 78 bp, Homo sapiens
ttgtactgcagagacaagaggatggctaggcgaggagctccagtcggggggtgcccaggtcagtggatcccctctcca

SEQ ID NO: 55313 - DNA, 74 bp, Homo sapiens
tcggggggtgcccaggtcagtggatcccctctccaccctggcctacctggtcgccatgggcgtgcctgccaatg

SEQ ID NO: 55314 - DNA, 76 bp, Homo sapiens
cccaggtcagtggatcccctctccaccctggcctacctggtcgccatgggcgtgcctgccaatggtgatgggcttg

SEQ ID NO: 55315 - DNA, 77 bp, Homo sapiens
agtggatcccctctccaccctggcctacctggtcgccatgggcgtgcctgccaatggtgatgggcttggtccagcca

SEQ ID NO: 55316 - DNA, 77 bp, Homo sapiens
tctccaccctggcctacctggtcgccatgggcgtgcctgccaatggtgatgggcttggtccagccagggactaggcg

SEQ ID NO: 55317 - DNA, 76 bp, Homo sapiens
gcctacctggtcgccatgggcgtgcctgccaatggtgatgggcttggtccagccagggactaggcgtgggatgttt

SEQ ID NO: 55318 - DNA, 78 bp, Homo sapiens
cctggtcgccatgggcgtgcctgccaatggtgatgggcttggtccagccagggactaggcgtgggatgtttttgcaga

SEQ ID NO: 55319 - DNA, 79 bp, Homo sapiens
atgggcgtgcctgccaatggtgatgggcttggtccagccagggactaggcgtgggatgtttttgcagatgatgggctcc

SEQ ID NO: 55320 - DNA, 76 bp, Homo sapiens
aatggtgatgggcttggtccagccagggactaggcgtgggatgtttttgcagatgatgggctcccggaagacagtc

SEQ ID NO: 55321 - DNA, 73 bp, Homo sapiens
atgggcttggtccagccagggactaggcgtgggatgtttttgcagatgatgggctcccggaagacagtccccc

SEQ ID NO: 55322 - DNA, 72 bp, Homo sapiens
agccagggactaggcgtgggatgtttttgcagatgatgggctcccggaagacagtcccccccaggatgttcc

SEQ ID NO: 55323 - DNA, 71 bp, Homo sapiens
actaggcgtgggatgtttttgcagatgatgggctcccggaagacagtcccccccaggatgttccggatagt

SEQ ID NO: 55324 - DNA, 71 bp, Homo sapiens
atgtttttgcagatgatgggctcccggaagacagtcccccccaggatgttccggatagttccattgggact

SEQ ID NO: 55325 - DNA, 72 bp, Homo sapiens
tttgcagatgatgggctcccggaagacagtcccccccaggatgttccggatagttccattgggacttttcca

SEQ ID NO: 55326 - DNA, 69 bp, Homo sapiens
atgggctcccggaagacagtcccccccaggatgttccggatagttccattgggacttttccacatcttc

SEQ ID NO: 55327 - DNA, 71 bp, Homo sapiens
aagacagtcccccccaggatgttccggatagttccattgggacttttccacatcttcttcagcttgaactc

SEQ ID NO: 55328 - DNA, 77 bp, Homo sapiens
ccaggatgttccggatagttccattgggacttttccacatcttcttcagcttgaactctgtgaggacagagataata

SEQ ID NO: 55329 - DNA, 76 bp, Homo sapiens
atgttccggatagttccattgggacttttccacatcttcttcagcttgaactctgtgaggacagagataatagtgg

SEQ ID NO: 55330 - DNA, 79 bp, Homo sapiens
tagttccattgggacttttccacatcttcttcagcttgaactctgtgaggacagagataatagtggtcccactgcagcc

SEQ ID NO: 55331 - DNA, 73 bp, Homo sapiens
tgggagaagcctgtgaccctccctggcccgcccacctccacaccctcgcaccttccacacgggcctcatcagg

SEQ ID NO: 55332 - DNA, 73 bp, Homo sapiens
ctgtgaccctccctggcccgcccacctccacaccctcgcaccttccacacgggcctcatcaggggtgatggtg

SEQ ID NO: 55333 - DNA, 78 bp, Homo sapiens
tggcccgcccacctccacaccctcgcaccttccacacgggcctcatcaggggtgatggtggcacacttgacagccaca

SEQ ID NO: 55334 - DNA, 77 bp, Homo sapiens
acctccacaccctcgcaccttccacacgggcctcatcaggggtgatggtggcacacttgacagccacactgtacttc

SEQ ID NO: 55335 - DNA, 77 bp, Homo sapiens
accctcgcaccttccacacgggcctcatcaggggtgatggtggcacacttgacagccacactgtacttctgggtggc

SEQ ID NO: 55336 - DNA, 82 bp, Homo sapiens
ttccacacgggcctcatcaggggtgatggtggcacacttgacagccacactgtacttctgggtggccagtgcagagtcaatg

SEQ ID NO: 55337 - DNA, 85 bp, Homo sapiens
ctcatcaggggtgatggtggcacacttgacagccacactgtacttctgggtggccagtgcagagtcaatggtgacctggtcatca

SEQ ID NO: 55338 - DNA, 85 bp, Homo sapiens
tgatggtggcacacttgacagccacactgtacttctgggtggccagtgcagagtcaatggtgacctggtcatcagtctggtcacg

SEQ ID NO: 55339 - DNA, 80 bp, Homo sapiens
acacttgacagccacactgtacttctgggtggccagtgcagagtcaatggtgacctggtcatcagtctggtcacggtttg

SEQ ID NO: 55340 - DNA, 79 bp, Homo sapiens
acagccacactgtacttctgggtggccagtgcagagtcaatggtgacctggtcatcagtctggtcacggtttgggagcc

SEQ ID NO: 55341 - DNA, 77 bp, Homo sapiens
tacttctgggtggccagtgcagagtcaatggtgacctggtcatcagtctggtcacggtttgggagcccgaggtcaaa

SEQ ID NO: 55342 - DNA, 76 bp, Homo sapiens
gtggccagtgcagagtcaatggtgacctggtcatcagtctggtcacggtttgggagcccgaggtcaaaatacttta

SEQ ID NO: 55343 - DNA, 75 bp, Homo sapiens
agagtcaatggtgacctggtcatcagtctggtcacggtttgggagcccgaggtcaaaatactttagctggatgtc

SEQ ID NO: 55344 - DNA, 73 bp, Homo sapiens
aatggtgacctggtcatcagtctggtcacggtttgggagcccgaggtcaaaatactttagctggatgtccacg

SEQ ID NO: 55345 - DNA, 76 bp, Homo sapiens
tggtcatcagtctggtcacggtttgggagcccgaggtcaaaatactttagctggatgtccacgtggggcaggatga

SEQ ID NO: 55346 - DNA, 74 bp, Homo sapiens
tctggtcacggtttgggagcccgaggtcaaaatactttagctggatgtccacgtggggcaggatgagctgggga

SEQ ID NO: 55347 - DNA, 77 bp, Homo sapiens
tgggagcccgaggtcaaaatactttagctggatgtccacgtggggcaggatgagctggggacagagggccagagcaa

SEQ ID NO: 55348 - DNA, 76 bp, Homo sapiens
aggtcaaaatactttagctggatgtccacgtggggcaggatgagctggggacagagggccagagcaaggcgtcacc

SEQ ID NO: 55349 - DNA, 74 bp, Homo sapiens
aacaatccctggccagcccacctggagagccacccacttcaggagggggcactaccttctccttgatgaactgc

SEQ ID NO: 55350 - DNA, 75 bp, Homo sapiens
gcccacctggagagccacccacttcaggagggggcactaccttctccttgatgaactgccagataatacgggtca

SEQ ID NO: 55351 - DNA, 78 bp, Homo sapiens
agagccacccacttcaggagggggcactaccttctccttgatgaactgccagataatacgggtcatctcatcaccatc

SEQ ID NO: 55352 - DNA, 78 bp, Homo sapiens
acccacttcaggagggggcactaccttctccttgatgaactgccagataatacgggtcatctcatcaccatccatctc

SEQ ID NO: 55353 - DNA, 79 bp, Homo sapiens
ggggcactaccttctccttgatgaactgccagataatacgggtcatctcatcaccatccatctccaccacgggcttcgc

SEQ ID NO: 55354 - DNA, 80 bp, Homo sapiens
taccttctccttgatgaactgccagataatacgggtcatctcatcaccatccatctccaccacgggcttcgccaccttga

SEQ ID NO: 55355 - DNA, 80 bp, Homo sapiens
ttgatgaactgccagataatacgggtcatctcatcaccatccatctccaccacgggcttcgccaccttgatccttttgtc

SEQ ID NO: 55356 - DNA, 78 bp, Homo sapiens
agataatacgggtcatctcatcaccatccatctccaccacgggcttcgccaccttgatccttttgtcggcatctagaa

SEQ ID NO: 55357 - DNA, 78 bp, Homo sapiens
atacgggtcatctcatcaccatccatctccaccacgggcttcgccaccttgatccttttgtcggcatctagaagcagg

SEQ ID NO: 55358 - DNA, 83 bp, Homo sapiens
atcaccatccatctccaccacgggcttcgccaccttgatccttttgtcggcatctagaagcagggacacacagcgcatcatgc

SEQ ID NO: 55359 - DNA, 80 bp, Homo sapiens
atccatctccaccacgggcttcgccaccttgatccttttgtcggcatctagaagcagggacacacagcgcatcatgcccc

SEQ ID NO: 55360 - DNA, 77 bp, Homo sapiens
accacgggcttcgccaccttgatccttttgtcggcatctagaagcagggacacacagcgcatcatgcccctggggag

SEQ ID NO: 55361 - DNA, 79 bp, Homo sapiens
tgagccgttcacagaactggtccgcactgccccaagctctaacttaccagaaacatcaccagcagtcgctggaagccta

SEQ ID NO: 55362 - DNA, 78 bp, Homo sapiens
ttcacagaactggtccgcactgccccaagctctaacttaccagaaacatcaccagcagtcgctggaagcctatggcgt

SEQ ID NO: 55363 - DNA, 78 bp, Homo sapiens
tccgcactgccccaagctctaacttaccagaaacatcaccagcagtcgctggaagcctatggcgttgcaaaataggaa

SEQ ID NO: 55364 - DNA, 79 bp, Homo sapiens
ccaagctctaacttaccagaaacatcaccagcagtcgctggaagcctatggcgttgcaaaataggaaaagatgcgtgca

SEQ ID NO: 55365 - DNA, 78 bp, Homo sapiens
taacttaccagaaacatcaccagcagtcgctggaagcctatggcgttgcaaaataggaaaagatgcgtgcaggaatta

SEQ ID NO: 55366 - DNA, 79 bp, Homo sapiens
aaacatcaccagcagtcgctggaagcctatggcgttgcaaaataggaaaagatgcgtgcaggaattaccaggcagcaaa

SEQ ID NO: 55367 - DNA, 78 bp, Homo sapiens
accagcagtcgctggaagcctatggcgttgcaaaataggaaaagatgcgtgcaggaattaccaggcagcaaagacacg

SEQ ID NO: 55368 - DNA, 75 bp, Homo sapiens
gaagcctatggcgttgcaaaataggaaaagatgcgtgcaggaattaccaggcagcaaagacacggggctctttta

SEQ ID NO: 55369 - DNA, 74 bp, Homo sapiens
ctatggcgttgcaaaataggaaaagatgcgtgcaggaattaccaggcagcaaagacacggggctcttttagccc

SEQ ID NO: 55370 - DNA, 71 bp, Homo sapiens
aataggaaaagatgcgtgcaggaattaccaggcagcaaagacacggggctcttttagccccaaaatattct

SEQ ID NO: 55371 - DNA, 70 bp, Homo sapiens
aaaagatgcgtgcaggaattaccaggcagcaaagacacggggctcttttagccccaaaatattctttcct

SEQ ID NO: 55372 - DNA, 69 bp, Homo sapiens
aggaattaccaggcagcaaagacacggggctcttttagccccaaaatattctttccttgtcatcaaggg

SEQ ID NO: 55373 - DNA, 72 bp, Homo sapiens
gcagcaaagacacggggctcttttagccccaaaatattctttccttgtcatcaaggggaatgccaagtattc

SEQ ID NO: 55374 - DNA, 69 bp, Homo sapiens
aaagacacggggctcttttagccccaaaatattctttccttgtcatcaaggggaatgccaagtattctg

SEQ ID NO: 55375 - DNA, 80 bp, Homo sapiens
acgtcgcagctgggggcgcgcgcctgcctggaccctccgcgcggcactcacagtggcgccgcggctgctcttgcgaggtg

SEQ ID NO: 55376 - DNA, 79 bp, Homo sapiens
gggcgcgcgcctgcctggaccctccgcgcggcactcacagtggcgccgcggctgctcttgcgaggtgggggctgtcagg

SEQ ID NO: 55377 - DNA, 79 bp, Homo sapiens
tgcctggaccctccgcgcggcactcacagtggcgccgcggctgctcttgcgaggtgggggctgtcagggccgccggcgc

SEQ ID NO: 55378 - DNA, 76 bp, Homo sapiens
accctccgcgcggcactcacagtggcgccgcggctgctcttgcgaggtgggggctgtcagggccgccggcgcccag

SEQ ID NO: 55379 - DNA, 76 bp, Homo sapiens
actcacagtggcgccgcggctgctcttgcgaggtgggggctgtcagggccgccggcgcccaggccggccgcgagcc

SEQ ID NO: 55380 - DNA, 76 bp, Homo sapiens
agtggcgccgcggctgctcttgcgaggtgggggctgtcagggccgccggcgcccaggccggccgcgagcctgaggc

SEQ ID NO: 55381 - DNA, 82 bp, Homo sapiens
tgctcttgcgaggtgggggctgtcagggccgccggcgcccaggccggccgcgagcctgaggctctgcagagcgagcgcacga

SEQ ID NO: 55382 - DNA, 79 bp, Homo sapiens
ttgcgaggtgggggctgtcagggccgccggcgcccaggccggccgcgagcctgaggctctgcagagcgagcgcacgacc

SEQ ID NO: 55383 - DNA, 80 bp, Homo sapiens
tgtcagggccgccggcgcccaggccggccgcgagcctgaggctctgcagagcgagcgcacgacccgcaggtagccggcca

SEQ ID NO: 55384 - DNA, 80 bp, Homo sapiens
gccggcgcccaggccggccgcgagcctgaggctctgcagagcgagcgcacgacccgcaggtagccggccatcccaagctg

SEQ ID NO: 55385 - DNA, 80 bp, Homo sapiens
aggccggccgcgagcctgaggctctgcagagcgagcgcacgacccgcaggtagccggccatcccaagctggagagcgaac

SEQ ID NO: 55386 - DNA, 81 bp, Homo sapiens
cgagcctgaggctctgcagagcgagcgcacgacccgcaggtagccggccatcccaagctggagagcgaacgagcagggcgg

SEQ ID NO: 55387 - DNA, 79 bp, Homo sapiens
aggctctgcagagcgagcgcacgacccgcaggtagccggccatcccaagctggagagcgaacgagcagggcgggagagg

SEQ ID NO: 55388 - DNA, 77 bp, Homo sapiens
agagcgagcgcacgacccgcaggtagccggccatcccaagctggagagcgaacgagcagggcgggagaggtccgagc

SEQ ID NO: 55389 - DNA, 75 bp, Homo sapiens
acgacccgcaggtagccggccatcccaagctggagagcgaacgagcagggcgggagaggtccgagcgcgcgccgc

SEQ ID NO: 55390 - DNA, 74 bp, Homo sapiens
aggtagccggccatcccaagctggagagcgaacgagcagggcgggagaggtccgagcgcgcgccgctcctcccg

SEQ ID NO: 55391 - DNA, 76 bp, Homo sapiens
atcccaagctggagagcgaacgagcagggcgggagaggtccgagcgcgcgccgctcctcccggctgcctggccgcg

SEQ ID NO: 55392 - DNA, 76 bp, Homo sapiens
agctggagagcgaacgagcagggcgggagaggtccgagcgcgcgccgctcctcccggctgcctggccgcgggctaa

SEQ ID NO: 55393 - DNA, 73 bp, Homo sapiens
aacgagcagggcgggagaggtccgagcgcgcgccgctcctcccggctgcctggccgcgggctaacgctgggcc

SEQ ID NO: 55394 - DNA, 74 bp, Homo sapiens
cgggagaggtccgagcgcgcgccgctcctcccggctgcctggccgcgggctaacgctgggcctggcgggcgctg

SEQ ID NO: 55395 - DNA, 77 bp, Homo sapiens
gagcgcgcgccgctcctcccggctgcctggccgcgggctaacgctgggcctggcgggcgctggccgcgcgggcacca

SEQ ID NO: 55396 - DNA, 72 bp, Homo sapiens
cgctcctcccggctgcctggccgcgggctaacgctgggcctggcgggcgctggccgcgcgggcaccaccggg

SEQ ID NO: 55397 - DNA, 71 bp, Homo sapiens
ccaactccttttcctctatagaaaacagctcaacagaaaagccaacgacattgtgatttataaccatttat

SEQ ID NO: 55398 - DNA, 73 bp, Homo sapiens
tcctctatagaaaacagctcaacagaaaagccaacgacattgtgatttataaccatttattagtgaaagtgtt

SEQ ID NO: 55399 - DNA, 74 bp, Homo sapiens
acagctcaacagaaaagccaacgacattgtgatttataaccatttattagtgaaagtgtttttaagcacagtca

SEQ ID NO: 55400 - DNA, 71 bp, Homo sapiens
acagaaaagccaacgacattgtgatttataaccatttattagtgaaagtgtttttaagcacagtcagggtg

SEQ ID NO: 55401 - DNA, 71 bp, Homo sapiens
agccaacgacattgtgatttataaccatttattagtgaaagtgtttttaagcacagtcagggtgtaaacag

SEQ ID NO: 55402 - DNA, 75 bp, Homo sapiens
attgtgatttataaccatttattagtgaaagtgtttttaagcacagtcagggtgtaaacagtgcagcattcctgc

SEQ ID NO: 55403 - DNA, 73 bp, Homo sapiens
ataaccatttattagtgaaagtgtttttaagcacagtcagggtgtaaacagtgcagcattcctgctcccctcc

SEQ ID NO: 55404 - DNA, 75 bp, Homo sapiens
attagtgaaagtgtttttaagcacagtcagggtgtaaacagtgcagcattcctgctcccctccgtgggagcagcg

SEQ ID NO: 55405 - DNA, 75 bp, Homo sapiens
tttttaagcacagtcagggtgtaaacagtgcagcattcctgctcccctccgtgggagcagcgtctccttttcaat

SEQ ID NO: 55406 - DNA, 79 bp, Homo sapiens
acagtcagggtgtaaacagtgcagcattcctgctcccctccgtgggagcagcgtctccttttcaattcatgtgactaca

SEQ ID NO: 55407 - DNA, 80 bp, Homo sapiens
tgtaaacagtgcagcattcctgctcccctccgtgggagcagcgtctccttttcaattcatgtgactacagaaggcacttg

SEQ ID NO: 55408 - DNA, 79 bp, Homo sapiens
agcattcctgctcccctccgtgggagcagcgtctccttttcaattcatgtgactacagaaggcacttggtgaactgtgc

SEQ ID NO: 55409 - DNA, 78 bp, Homo sapiens
ctcccctccgtgggagcagcgtctccttttcaattcatgtgactacagaaggcacttggtgaactgtgcgtgtctgag

SEQ ID NO: 55410 - DNA, 80 bp, Homo sapiens
tgggagcagcgtctccttttcaattcatgtgactacagaaggcacttggtgaactgtgcgtgtctgaggtgtggaaacca

SEQ ID NO: 55411 - DNA, 78 bp, Homo sapiens
agcgtctccttttcaattcatgtgactacagaaggcacttggtgaactgtgcgtgtctgaggtgtggaaaccaggaga

SEQ ID NO: 55412 - DNA, 76 bp, Homo sapiens
ttttcaattcatgtgactacagaaggcacttggtgaactgtgcgtgtctgaggtgtggaaaccaggagagggggaa

SEQ ID NO: 55413 - DNA, 73 bp, Homo sapiens
actacagaaggcacttggtgaactgtgcgtgtctgaggtgtggaaaccaggagagggggaaagaattctcaaa

SEQ ID NO: 55414 - DNA, 73 bp, Homo sapiens
aaggcacttggtgaactgtgcgtgtctgaggtgtggaaaccaggagagggggaaagaattctcaaaggcctga

SEQ ID NO: 55415 - DNA, 72 bp, Homo sapiens
aactgtgcgtgtctgaggtgtggaaaccaggagagggggaaagaattctcaaaggcctgacgtgagaagttg

SEQ ID NO: 55416 - DNA, 70 bp, Homo sapiens
tgtctgaggtgtggaaaccaggagagggggaaagaattctcaaaggcctgacgtgagaagttggaaaggt

SEQ ID NO: 55417 - DNA, 69 bp, Homo sapiens
tggaaaccaggagagggggaaagaattctcaaaggcctgacgtgagaagttggaaaggtttgcaggtta

SEQ ID NO: 55418 - DNA, 69 bp, Homo sapiens
gagagggggaaagaattctcaaaggcctgacgtgagaagttggaaaggtttgcaggttagggaatgaat

SEQ ID NO: 55419 - DNA, 69 bp, Homo sapiens
aaagaattctcaaaggcctgacgtgagaagttggaaaggtttgcaggttagggaatgaattgggagtgg

SEQ ID NO: 55420 - DNA, 69 bp, Homo sapiens
ttctcaaaggcctgacgtgagaagttggaaaggtttgcaggttagggaatgaattgggagtgggggccg

SEQ ID NO: 55421 - DNA, 67 bp, Homo sapiens
acgtgagaagttggaaaggtttgcaggttagggaatgaattgggagtgggggccggcggcacccatt

SEQ ID NO: 55422 - DNA, 67 bp, Homo sapiens
aggtttgcaggttagggaatgaattgggagtgggggccggcggcacccatttcggtgactttctccc

SEQ ID NO: 55423 - DNA, 69 bp, Homo sapiens
ttagggaatgaattgggagtgggggccggcggcacccatttcggtgactttctccccatttcatgtaaa

SEQ ID NO: 55424 - DNA, 70 bp, Homo sapiens
aattgggagtgggggccggcggcacccatttcggtgactttctccccatttcatgtaaacagaattgcca

SEQ ID NO: 55425 - DNA, 69 bp, Homo sapiens
acccatttcggtgactttctccccatttcatgtaaacagaattgccagggaccggttaccgtggatatg

SEQ ID NO: 55426 - DNA, 72 bp, Homo sapiens
tgtaaacagaattgccagggaccggttaccgtggatatgtttttctaaaaactcagtgtctgcacaatccat

SEQ ID NO: 55427 - DNA, 73 bp, Homo sapiens
agaattgccagggaccggttaccgtggatatgtttttctaaaaactcagtgtctgcacaatccattgatagaa

SEQ ID NO: 55428 - DNA, 74 bp, Homo sapiens
accggttaccgtggatatgtttttctaaaaactcagtgtctgcacaatccattgatagaactggaggatgtgtc

SEQ ID NO: 55429 - DNA, 77 bp, Homo sapiens
taccgtggatatgtttttctaaaaactcagtgtctgcacaatccattgatagaactggaggatgtgtctgtgtttcc

SEQ ID NO: 55430 - DNA, 74 bp, Homo sapiens
tttttctaaaaactcagtgtctgcacaatccattgatagaactggaggatgtgtctgtgtttcctgttgggttt

SEQ ID NO: 55431 - DNA, 77 bp, Homo sapiens
aaaaactcagtgtctgcacaatccattgatagaactggaggatgtgtctgtgtttcctgttgggtttttctcatctc

SEQ ID NO: 55432 - DNA, 79 bp, Homo sapiens
tgcacaatccattgatagaactggaggatgtgtctgtgtttcctgttgggtttttctcatctcttacatcatacaaact

SEQ ID NO: 55433 - DNA, 75 bp, Homo sapiens
attgatagaactggaggatgtgtctgtgtttcctgttgggtttttctcatctcttacatcatacaaacttcaatt

SEQ ID NO: 55434 - DNA, 73 bp, Homo sapiens
agaactggaggatgtgtctgtgtttcctgttgggtttttctcatctcttacatcatacaaacttcaattttta

SEQ ID NO: 55435 - DNA, 71 bp, Homo sapiens
gtctgtgtttcctgttgggtttttctcatctcttacatcatacaaacttcaatttttaccttgaatacagg

SEQ ID NO: 55436 - DNA, 70 bp, Homo sapiens
tcctgttgggtttttctcatctcttacatcatacaaacttcaatttttaccttgaatacaggggtagtag

SEQ ID NO: 55437 - DNA, 69 bp, Homo sapiens
tttttctcatctcttacatcatacaaacttcaatttttaccttgaatacaggggtagtaggggtggtgg

SEQ ID NO: 55438 - DNA, 72 bp, Homo sapiens
cccaggctggagggtggtggtttttatattccttgtgtgaggggtgtctgtgatatttggaatttgagaatg

SEQ ID NO: 55439 - DNA, 72 bp, Homo sapiens
agggtggtggtttttatattccttgtgtgaggggtgtctgtgatatttggaatttgagaatggatttagaca

SEQ ID NO: 55440 - DNA, 75 bp, Homo sapiens
tttttatattccttgtgtgaggggtgtctgtgatatttggaatttgagaatggatttagacaatgctaagtacag

SEQ ID NO: 55441 - DNA, 78 bp, Homo sapiens
atattccttgtgtgaggggtgtctgtgatatttggaatttgagaatggatttagacaatgctaagtacagtctgctgg

SEQ ID NO: 55442 - DNA, 75 bp, Homo sapiens
aggggtgtctgtgatatttggaatttgagaatggatttagacaatgctaagtacagtctgctgggttttgctttg

SEQ ID NO: 55443 - DNA, 75 bp, Homo sapiens
tgatatttggaatttgagaatggatttagacaatgctaagtacagtctgctgggttttgctttgttctgggttgt

SEQ ID NO: 55444 - DNA, 73 bp, Homo sapiens
tttggaatttgagaatggatttagacaatgctaagtacagtctgctgggttttgctttgttctgggttgttgt

SEQ ID NO: 55445 - DNA, 69 bp, Homo sapiens
aatggatttagacaatgctaagtacagtctgctgggttttgctttgttctgggttgttgttgggttttt

SEQ ID NO: 55446 - DNA, 68 bp, Homo sapiens
ttagacaatgctaagtacagtctgctgggttttgctttgttctgggttgttgttgggttttttttgtt

SEQ ID NO: 55447 - DNA, 68 bp, Homo sapiens
tttgttttggtttttggttttcttgccgtggtgcaaaactgtagaaagttgcttattcactggccttg

SEQ ID NO: 55448 - DNA, 70 bp, Homo sapiens
tttttggttttcttgccgtggtgcaaaactgtagaaagttgcttattcactggccttggttccattgaag

SEQ ID NO: 55449 - DNA, 75 bp, Homo sapiens
ttttcttgccgtggtgcaaaactgtagaaagttgcttattcactggccttggttccattgaagtctgcgtctcga

SEQ ID NO: 55450 - DNA, 75 bp, Homo sapiens
tggtgcaaaactgtagaaagttgcttattcactggccttggttccattgaagtctgcgtctcgagtgtccgtttc

SEQ ID NO: 55451 - DNA, 72 bp, Homo sapiens
aaactgtagaaagttgcttattcactggccttggttccattgaagtctgcgtctcgagtgtccgtttcctcc

SEQ ID NO: 55452 - DNA, 77 bp, Homo sapiens
ttgcttattcactggccttggttccattgaagtctgcgtctcgagtgtccgtttcctcctcagaaccatctgcattt

SEQ ID NO: 55453 - DNA, 77 bp, Homo sapiens
ttcactggccttggttccattgaagtctgcgtctcgagtgtccgtttcctcctcagaaccatctgcattttcaataa

SEQ ID NO: 55454 - DNA, 76 bp, Homo sapiens
ttggttccattgaagtctgcgtctcgagtgtccgtttcctcctcagaaccatctgcattttcaataactctacgtc

SEQ ID NO: 55455 - DNA, 74 bp, Homo sapiens
aagtctgcgtctcgagtgtccgtttcctcctcagaaccatctgcattttcaataactctacgtcctccagacct

SEQ ID NO: 55456 - DNA, 74 bp, Homo sapiens
tcgagtgtccgtttcctcctcagaaccatctgcattttcaataactctacgtcctccagaccttctagaaggaa

SEQ ID NO: 55457 - DNA, 72 bp, Homo sapiens
tccgtttcctcctcagaaccatctgcattttcaataactctacgtcctccagaccttctagaaggaacgaaa

SEQ ID NO: 55458 - DNA, 71 bp, Homo sapiens
agaaccatctgcattttcaataactctacgtcctccagaccttctagaaggaacgaaagaggtctcgtttc

SEQ ID NO: 55459 - DNA, 70 bp, Homo sapiens
cattttcaataactctacgtcctccagaccttctagaaggaacgaaagaggtctcgtttcctcgcctgtg

SEQ ID NO: 55460 - DNA, 68 bp, Homo sapiens
tacgtcctccagaccttctagaaggaacgaaagaggtctcgtttcctcgcctgtgggttgtaagaaaa

SEQ ID NO: 55461 - DNA, 67 bp, Homo sapiens
agaccttctagaaggaacgaaagaggtctcgtttcctcgcctgtgggttgtaagaaaacacattatt

SEQ ID NO: 55462 - DNA, 85 bp, Homo sapiens
tgggcagaggggcgcattgggcagaaaagaaatggatactgagacaacacacagctgcgaagctgaaggcatgatacctggtgca

SEQ ID NO: 55463 - DNA, 86 bp, Homo sapiens
gggcgcattgggcagaaaagaaatggatactgagacaacacacagctgcgaagctgaaggcatgatacctggtgcatcactgcgaa

SEQ ID NO: 55464 - DNA, 85 bp, Homo sapiens
gcagaaaagaaatggatactgagacaacacacagctgcgaagctgaaggcatgatacctggtgcatcactgcgaagtttcctgtg

SEQ ID NO: 55465 - DNA, 82 bp, Homo sapiens
aaagaaatggatactgagacaacacacagctgcgaagctgaaggcatgatacctggtgcatcactgcgaagtttcctgtggg

SEQ ID NO: 55466 - DNA, 82 bp, Homo sapiens
tgagacaacacacagctgcgaagctgaaggcatgatacctggtgcatcactgcgaagtttcctgtggggggggccctctgaa

SEQ ID NO: 55467 - DNA, 79 bp, Homo sapiens
aacacacagctgcgaagctgaaggcatgatacctggtgcatcactgcgaagtttcctgtggggggggccctctgaaaca

SEQ ID NO: 55468 - DNA, 77 bp, Homo sapiens
aagctgaaggcatgatacctggtgcatcactgcgaagtttcctgtggggggggccctctgaaacagagagagaatcc

SEQ ID NO: 55469 - DNA, 74 bp, Homo sapiens
aaggcatgatacctggtgcatcactgcgaagtttcctgtggggggggccctctgaaacagagagagaatccccg

SEQ ID NO: 55470 - DNA, 74 bp, Homo sapiens
tggtgcatcactgcgaagtttcctgtggggggggccctctgaaacagagagagaatccccggaggttaccatca

SEQ ID NO: 55471 - DNA, 71 bp, Homo sapiens
tgcgaagtttcctgtggggggggccctctgaaacagagagagaatccccggaggttaccatcagcaaacaa

SEQ ID NO: 55472 - DNA, 70 bp, Homo sapiens
tttcctgtggggggggccctctgaaacagagagagaatccccggaggttaccatcagcaaacaagaagga

SEQ ID NO: 55473 - DNA, 71 bp, Homo sapiens
ggccctctgaaacagagagagaatccccggaggttaccatcagcaaacaagaaggagcccggttaagtata

SEQ ID NO: 55474 - DNA, 71 bp, Homo sapiens
cagggtttcggcattcacatccagttttgtagtaagggtagcaaggtagacatggggctaagaggttattc

SEQ ID NO: 55475 - DNA, 71 bp, Homo sapiens
gtttcggcattcacatccagttttgtagtaagggtagcaaggtagacatggggctaagaggttattccatt

SEQ ID NO: 55476 - DNA, 73 bp, Homo sapiens
tttcggcattcacatccagttttgtagtaagggtagcaaggtagacatggggctaagaggttattccatttgc

SEQ ID NO: 55477 - DNA, 76 bp, Homo sapiens
tcacatccagttttgtagtaagggtagcaaggtagacatggggctaagaggttattccatttgctgatggagcaaa

SEQ ID NO: 55478 - DNA, 74 bp, Homo sapiens
acatccagttttgtagtaagggtagcaaggtagacatggggctaagaggttattccatttgctgatggagcaaa

SEQ ID NO: 55479 - DNA, 73 bp, Homo sapiens
agttttgtagtaagggtagcaaggtagacatggggctaagaggttattccatttgctgatggagcaaatgaaa

SEQ ID NO: 55480 - DNA, 75 bp, Homo sapiens
tttgtagtaagggtagcaaggtagacatggggctaagaggttattccatttgctgatggagcaaatgaaagagaa

SEQ ID NO: 55481 - DNA, 73 bp, Homo sapiens
agtaagggtagcaaggtagacatggggctaagaggttattccatttgctgatggagcaaatgaaagagaaaac

SEQ ID NO: 55482 - DNA, 76 bp, Homo sapiens
tagcaaggtagacatggggctaagaggttattccatttgctgatggagcaaatgaaagagaaaaccttgcaaaata

SEQ ID NO: 55483 - DNA, 73 bp, Homo sapiens
aaggtagacatggggctaagaggttattccatttgctgatggagcaaatgaaagagaaaaccttgcaaaataa

SEQ ID NO: 55484 - DNA, 72 bp, Homo sapiens
acatggggctaagaggttattccatttgctgatggagcaaatgaaagagaaaaccttgcaaaataaggattt

SEQ ID NO: 55485 - DNA, 72 bp, Homo sapiens
gggctaagaggttattccatttgctgatggagcaaatgaaagagaaaaccttgcaaaataaggatttttgga

SEQ ID NO: 55486 - DNA, 74 bp, Homo sapiens
aggttattccatttgctgatggagcaaatgaaagagaaaaccttgcaaaataaggatttttggagctatgtgct

SEQ ID NO: 55487 - DNA, 77 bp, Homo sapiens
atttgctgatggagcaaatgaaagagaaaaccttgcaaaataaggatttttggagctatgtgcttgagtgaacaaga

SEQ ID NO: 55488 - DNA, 74 bp, Homo sapiens
atggagcaaatgaaagagaaaaccttgcaaaataaggatttttggagctatgtgcttgagtgaacaagagggtc

SEQ ID NO: 55489 - DNA, 70 bp, Homo sapiens
aaagagaaaaccttgcaaaataaggatttttggagctatgtgcttgagtgaacaagagggtcgggtccaa

SEQ ID NO: 55490 - DNA, 71 bp, Homo sapiens
aaccttgcaaaataaggatttttggagctatgtgcttgagtgaacaagagggtcgggtccaatggaggtgt

SEQ ID NO: 55491 - DNA, 71 bp, Homo sapiens
aataaggatttttggagctatgtgcttgagtgaacaagagggtcgggtccaatggaggtgttggcctcggt

SEQ ID NO: 55492 - DNA, 74 bp, Homo sapiens
ttggagctatgtgcttgagtgaacaagagggtcgggtccaatggaggtgttggcctcggttggtgccagagggt

SEQ ID NO: 55493 - DNA, 73 bp, Homo sapiens
cttgagtgaacaagagggtcgggtccaatggaggtgttggcctcggttggtgccagagggttcagcatagaaa

SEQ ID NO: 55494 - DNA, 71 bp, Homo sapiens
aacaagagggtcgggtccaatggaggtgttggcctcggttggtgccagagggttcagcatagaaatggaaa

SEQ ID NO: 55495 - DNA, 71 bp, Homo sapiens
tcgggtccaatggaggtgttggcctcggttggtgccagagggttcagcatagaaatggaaaaaaaatagaa

SEQ ID NO: 55496 - DNA, 72 bp, Homo sapiens
aatggaggtgttggcctcggttggtgccagagggttcagcatagaaatggaaaaaaaatagaagtgtacaga

SEQ ID NO: 55497 - DNA, 72 bp, Homo sapiens
cctcggttggtgccagagggttcagcatagaaatggaaaaaaaatagaagtgtacagaggtgcacggaggta

SEQ ID NO: 55498 - DNA, 76 bp, Homo sapiens
ttggtgccagagggttcagcatagaaatggaaaaaaaatagaagtgtacagaggtgcacggaggtaggatgatgag

SEQ ID NO: 55499 - DNA, 75 bp, Homo sapiens
agggttcagcatagaaatggaaaaaaaatagaagtgtacagaggtgcacggaggtaggatgatgaggcagtggga

SEQ ID NO: 55500 - DNA, 76 bp, Homo sapiens
aatggaaaaaaaatagaagtgtacagaggtgcacggaggtaggatgatgaggcagtgggagcttgtgcacgtttca

SEQ ID NO: 55501 - DNA, 81 bp, Homo sapiens
aaaatagaagtgtacagaggtgcacggaggtaggatgatgaggcagtgggagcttgtgcacgtttcatgatcatttctgct

SEQ ID NO: 55502 - DNA, 81 bp, Homo sapiens
aagtgtacagaggtgcacggaggtaggatgatgaggcagtgggagcttgtgcacgtttcatgatcatttctgcttttgagt

SEQ ID NO: 55503 - DNA, 81 bp, Homo sapiens
tgcacggaggtaggatgatgaggcagtgggagcttgtgcacgtttcatgatcatttctgcttttgagttaagtaggaagta

SEQ ID NO: 55504 - DNA, 77 bp, Homo sapiens
aggtaggatgatgaggcagtgggagcttgtgcacgtttcatgatcatttctgcttttgagttaagtaggaagtaagg

SEQ ID NO: 55505 - DNA, 78 bp, Homo sapiens
atgaggcagtgggagcttgtgcacgtttcatgatcatttctgcttttgagttaagtaggaagtaaggtccccagctga

SEQ ID NO: 55506 - DNA, 76 bp, Homo sapiens
agcttgtgcacgtttcatgatcatttctgcttttgagttaagtaggaagtaaggtccccagctgagagagaatggg

SEQ ID NO: 55507 - DNA, 77 bp, Homo sapiens
gtttcatgatcatttctgcttttgagttaagtaggaagtaaggtccccagctgagagagaatggggaggagcgatca

SEQ ID NO: 55508 - DNA, 76 bp, Homo sapiens
tcatttctgcttttgagttaagtaggaagtaaggtccccagctgagagagaatggggaggagcgatcataagttca

SEQ ID NO: 55509 - DNA, 72 bp, Homo sapiens
ttttgagttaagtaggaagtaaggtccccagctgagagagaatggggaggagcgatcataagttcaaagaaa

SEQ ID NO: 55510 - DNA, 72 bp, Homo sapiens
ttaagtaggaagtaaggtccccagctgagagagaatggggaggagcgatcataagttcaaagaaaaagtgaa

SEQ ID NO: 55511 - DNA, 75 bp, Homo sapiens
aagtaaggtccccagctgagagagaatggggaggagcgatcataagttcaaagaaaaagtgaaaagcagcagaga

SEQ ID NO: 55512 - DNA, 75 bp, Homo sapiens
agaatggggaggagcgatcataagttcaaagaaaaagtgaaaagcagcagagagtgagaagatgagggaggggtg

SEQ ID NO: 55513 - DNA, 76 bp, Homo sapiens
aaaaagtgaaaagcagcagagagtgagaagatgagggaggggtgtgggaggacccctgagcaaggcctgctctgtg

SEQ ID NO: 55514 - DNA, 75 bp, Homo sapiens
aaaagcagcagagagtgagaagatgagggaggggtgtgggaggacccctgagcaaggcctgctctgtgggaaaag

SEQ ID NO: 55515 - DNA, 74 bp, Homo sapiens
agagtgagaagatgagggaggggtgtgggaggacccctgagcaaggcctgctctgtgggaaaaggtggagagtg

SEQ ID NO: 55516 - DNA, 70 bp, Homo sapiens
atgagggaggggtgtgggaggacccctgagcaaggcctgctctgtgggaaaaggtggagagtgggttttg

SEQ ID NO: 55517 - DNA, 67 bp, Homo sapiens
ggtgtgggaggacccctgagcaaggcctgctctgtgggaaaaggtggagagtgggttttgggttttt

SEQ ID NO: 55518 - DNA, 68 bp, Homo sapiens
aggacccctgagcaaggcctgctctgtgggaaaaggtggagagtgggttttgggttttttgagacagg

SEQ ID NO: 55519 - DNA, 81 bp, Homo sapiens
tataggtgtgagtcccgtgcccagccaagcttgagtttcatttgggttgtgctttcaccaaatgattgcagcaatgcaaga

SEQ ID NO: 55520 - DNA, 79 bp, Homo sapiens
gtgtgagtcccgtgcccagccaagcttgagtttcatttgggttgtgctttcaccaaatgattgcagcaatgcaagaggg

SEQ ID NO: 55521 - DNA, 76 bp, Homo sapiens
ccagccaagcttgagtttcatttgggttgtgctttcaccaaatgattgcagcaatgcaagagggggaaccggatgt

SEQ ID NO: 55522 - DNA, 76 bp, Homo sapiens
aagcttgagtttcatttgggttgtgctttcaccaaatgattgcagcaatgcaagagggggaaccggatgttgagga

SEQ ID NO: 55523 - DNA, 77 bp, Homo sapiens
tttcatttgggttgtgctttcaccaaatgattgcagcaatgcaagagggggaaccggatgttgaggatgcgcgacgg

SEQ ID NO: 55524 - DNA, 77 bp, Homo sapiens
ttgtgctttcaccaaatgattgcagcaatgcaagagggggaaccggatgttgaggatgcgcgacgggggttactaga

SEQ ID NO: 55525 - DNA, 75 bp, Homo sapiens
aaatgattgcagcaatgcaagagggggaaccggatgttgaggatgcgcgacgggggttactagacagctggtttg

SEQ ID NO: 55526 - DNA, 73 bp, Homo sapiens
agcaatgcaagagggggaaccggatgttgaggatgcgcgacgggggttactagacagctggtttggagctggg

SEQ ID NO: 55527 - DNA, 71 bp, Homo sapiens
aagagggggaaccggatgttgaggatgcgcgacgggggttactagacagctggtttggagctgggtcagag

SEQ ID NO: 55528 - DNA, 76 bp, Homo sapiens
aaccggatgttgaggatgcgcgacgggggttactagacagctggtttggagctgggtcagaggctgatggcattaa

SEQ ID NO: 55529 - DNA, 79 bp, Homo sapiens
ttgaggatgcgcgacgggggttactagacagctggtttggagctgggtcagaggctgatggcattaatggagtgaagac

SEQ ID NO: 55530 - DNA, 73 bp, Homo sapiens
acgggggttactagacagctggtttggagctgggtcagaggctgatggcattaatggagtgaagaccccgttg

SEQ ID NO: 55531 - DNA, 78 bp, Homo sapiens
ttactagacagctggtttggagctgggtcagaggctgatggcattaatggagtgaagaccccgttggggacagagcca

SEQ ID NO: 55532 - DNA, 74 bp, Homo sapiens
ctggtttggagctgggtcagaggctgatggcattaatggagtgaagaccccgttggggacagagccaaagaaag

SEQ ID NO: 55533 - DNA, 77 bp, Homo sapiens
ggtcagaggctgatggcattaatggagtgaagaccccgttggggacagagccaaagaaaggtggcaccaggcagaca

SEQ ID NO: 55534 - DNA, 75 bp, Homo sapiens
aggctgatggcattaatggagtgaagaccccgttggggacagagccaaagaaaggtggcaccaggcagacaatgg

SEQ ID NO: 55535 - DNA, 74 bp, Homo sapiens
attaatggagtgaagaccccgttggggacagagccaaagaaaggtggcaccaggcagacaatgggatgcctgag

SEQ ID NO: 55536 - DNA, 76 bp, Homo sapiens
ggggacagagccaaagaaaggtggcaccaggcagacaatgggatgcctgagggtcaaattgtgagggctcctagga

SEQ ID NO: 55537 - DNA, 74 bp, Homo sapiens
ccaaagaaaggtggcaccaggcagacaatgggatgcctgagggtcaaattgtgagggctcctaggagtactggt

SEQ ID NO: 55538 - DNA, 74 bp, Homo sapiens
aaaggtggcaccaggcagacaatgggatgcctgagggtcaaattgtgagggctcctaggagtactggttggccc

SEQ ID NO: 55539 - DNA, 75 bp, Homo sapiens
aatgggatgcctgagggtcaaattgtgagggctcctaggagtactggttggcccggtagaagcagcaggatcacc

SEQ ID NO: 55540 - DNA, 73 bp, Homo sapiens
agggtcaaattgtgagggctcctaggagtactggttggcccggtagaagcagcaggatcacccagagggtcaa

SEQ ID NO: 55541 - DNA, 72 bp, Homo sapiens
aaattgtgagggctcctaggagtactggttggcccggtagaagcagcaggatcacccagagggtcaaggaac

SEQ ID NO: 55542 - DNA, 78 bp, Homo sapiens
cggtagaagcagcaggatcacccagagggtcaaggaaccgagaggctgcgtcgcccacctggatgttgaaatcatgga

SEQ ID NO: 55543 - DNA, 78 bp, Homo sapiens
aagcagcaggatcacccagagggtcaaggaaccgagaggctgcgtcgcccacctggatgttgaaatcatggagaactg

SEQ ID NO: 55544 - DNA, 77 bp, Homo sapiens
atcacccagagggtcaaggaaccgagaggctgcgtcgcccacctggatgttgaaatcatggagaactgtgaggagtg

SEQ ID NO: 55545 - DNA, 78 bp, Homo sapiens
ggtcaaggaaccgagaggctgcgtcgcccacctggatgttgaaatcatggagaactgtgaggagtggtgtgggagaca

SEQ ID NO: 55546 - DNA, 77 bp, Homo sapiens
accgagaggctgcgtcgcccacctggatgttgaaatcatggagaactgtgaggagtggtgtgggagacaggaagccc

SEQ ID NO: 55547 - DNA, 75 bp, Homo sapiens
cgtcgcccacctggatgttgaaatcatggagaactgtgaggagtggtgtgggagacaggaagcccggagctaaaa

SEQ ID NO: 55548 - DNA, 74 bp, Homo sapiens
acctggatgttgaaatcatggagaactgtgaggagtggtgtgggagacaggaagcccggagctaaaacctcctg

SEQ ID NO: 55549 - DNA, 73 bp, Homo sapiens
aaatcatggagaactgtgaggagtggtgtgggagacaggaagcccggagctaaaacctcctgggagccaatcg

SEQ ID NO: 55550 - DNA, 73 bp, Homo sapiens
aactgtgaggagtggtgtgggagacaggaagcccggagctaaaacctcctgggagccaatcgggatggatgga

SEQ ID NO: 55551 - DNA, 71 bp, Homo sapiens
agtggtgtgggagacaggaagcccggagctaaaacctcctgggagccaatcgggatggatggacagggtgg

SEQ ID NO: 55552 - DNA, 72 bp, Homo sapiens
agacaggaagcccggagctaaaacctcctgggagccaatcgggatggatggacagggtggtggaagcagccc

SEQ ID NO: 55553 - DNA, 71 bp, Homo sapiens
aagcccggagctaaaacctcctgggagccaatcgggatggatggacagggtggtggaagcagcccttggga

SEQ ID NO: 55554 - DNA, 71 bp, Homo sapiens
taaaacctcctgggagccaatcgggatggatggacagggtggtggaagcagcccttgggagcaggggggac

SEQ ID NO: 55555 - DNA, 69 bp, Homo sapiens
aatcgggatggatggacagggtggtggaagcagcccttgggagcaggggggacccccaaggtaccagag

SEQ ID NO: 55556 - DNA, 70 bp, Homo sapiens
gtggtggaagcagcccttgggagcaggggggacccccaaggtaccagaggcatgggagagaaaacagccc

SEQ ID NO: 55557 - DNA, 70 bp, Homo sapiens
ccttgggagcaggggggacccccaaggtaccagaggcatgggagagaaaacagcccccactccagtgaca

SEQ ID NO: 55558 - DNA, 70 bp, Homo sapiens
aggggggacccccaaggtaccagaggcatgggagagaaaacagcccccactccagtgacagcaggaattc

SEQ ID NO: 55559 - DNA, 76 bp, Homo sapiens
ccaaggtaccagaggcatgggagagaaaacagcccccactccagtgacagcaggaattctcagcggggtggcagtc

SEQ ID NO: 55560 - DNA, 76 bp, Homo sapiens
taccagaggcatgggagagaaaacagcccccactccagtgacagcaggaattctcagcggggtggcagtcgtaccc

SEQ ID NO: 55561 - DNA, 76 bp, Homo sapiens
gagagaaaacagcccccactccagtgacagcaggaattctcagcggggtggcagtcgtaccctcccatctctagag

SEQ ID NO: 55562 - DNA, 74 bp, Homo sapiens
aaacagcccccactccagtgacagcaggaattctcagcggggtggcagtcgtaccctcccatctctagaggact

SEQ ID NO: 55563 - DNA, 79 bp, Homo sapiens
actccagtgacagcaggaattctcagcggggtggcagtcgtaccctcccatctctagaggacttctggcaacatctaga

SEQ ID NO: 55564 - DNA, 76 bp, Homo sapiens
agcaggaattctcagcggggtggcagtcgtaccctcccatctctagaggacttctggcaacatctagagacatttt

SEQ ID NO: 55565 - DNA, 75 bp, Homo sapiens
attctcagcggggtggcagtcgtaccctcccatctctagaggacttctggcaacatctagagacatttttggttg

SEQ ID NO: 55566 - DNA, 73 bp, Homo sapiens
tttttggttgtcacattgcagggtggtgggggactactgcagccggtgggtagaggccagaaatgtaagcacc

SEQ ID NO: 55567 - DNA, 75 bp, Homo sapiens
ttgtcacattgcagggtggtgggggactactgcagccggtgggtagaggccagaaatgtaagcacctgctacttt

SEQ ID NO: 55568 - DNA, 72 bp, Homo sapiens
gggtggtgggggactactgcagccggtgggtagaggccagaaatgtaagcacctgctacttttcagggatct

SEQ ID NO: 55569 - DNA, 74 bp, Homo sapiens
ggactactgcagccggtgggtagaggccagaaatgtaagcacctgctacttttcagggatctttttccttctga

SEQ ID NO: 55570 - DNA, 73 bp, Homo sapiens
actgcagccggtgggtagaggccagaaatgtaagcacctgctacttttcagggatctttttccttctgatggg

SEQ ID NO: 55571 - DNA, 74 bp, Homo sapiens
tagaggccagaaatgtaagcacctgctacttttcagggatctttttccttctgatggggaatgtcggacagccc

SEQ ID NO: 55572 - DNA, 72 bp, Homo sapiens
agaaatgtaagcacctgctacttttcagggatctttttccttctgatggggaatgtcggacagcccccatac

SEQ ID NO: 55573 - DNA, 70 bp, Homo sapiens
acctgctacttttcagggatctttttccttctgatggggaatgtcggacagcccccatacccgagaataa

SEQ ID NO: 55574 - DNA, 73 bp, Homo sapiens
tacttttcagggatctttttccttctgatggggaatgtcggacagcccccatacccgagaataatgcagccca

SEQ ID NO: 55575 - DNA, 79 bp, Homo sapiens
atctttttccttctgatggggaatgtcggacagcccccatacccgagaataatgcagcccagatggcagcagtgctgag

SEQ ID NO: 55576 - DNA, 79 bp, Homo sapiens
cttctgatggggaatgtcggacagcccccatacccgagaataatgcagcccagatggcagcagtgctgagggggagaaa

SEQ ID NO: 55577 - DNA, 80 bp, Homo sapiens
ggaatgtcggacagcccccatacccgagaataatgcagcccagatggcagcagtgctgagggggagaaaggaggagcaga

SEQ ID NO: 55578 - DNA, 82 bp, Homo sapiens
acagcccccatacccgagaataatgcagcccagatggcagcagtgctgagggggagaaaggaggagcagagcatgtcaggaa

SEQ ID NO: 55579 - DNA, 82 bp, Homo sapiens
atacccgagaataatgcagcccagatggcagcagtgctgagggggagaaaggaggagcagagcatgtcaggaaggaggtgaa

SEQ ID NO: 55580 - DNA, 81 bp, Homo sapiens
aataatgcagcccagatggcagcagtgctgagggggagaaaggaggagcagagcatgtcaggaaggaggtgaagtggcggg

SEQ ID NO: 55581 - DNA, 79 bp, Homo sapiens
atggcagcagtgctgagggggagaaaggaggagcagagcatgtcaggaaggaggtgaagtggcggggggtggtgttgca

SEQ ID NO: 55582 - DNA, 78 bp, Homo sapiens
tgctgagggggagaaaggaggagcagagcatgtcaggaaggaggtgaagtggcggggggtggtgttgcagcttcaatg

SEQ ID NO: 55583 - DNA, 79 bp, Homo sapiens
gagaaaggaggagcagagcatgtcaggaaggaggtgaagtggcggggggtggtgttgcagcttcaatggatgtcgtgaa

SEQ ID NO: 55584 - DNA, 81 bp, Homo sapiens
aggagcagagcatgtcaggaaggaggtgaagtggcggggggtggtgttgcagcttcaatggatgtcgtgaagactcagtga

SEQ ID NO: 55585 - DNA, 80 bp, Homo sapiens
atgtcaggaaggaggtgaagtggcggggggtggtgttgcagcttcaatggatgtcgtgaagactcagtgatgcaatgaag

SEQ ID NO: 55586 - DNA, 77 bp, Homo sapiens
aaggaggtgaagtggcggggggtggtgttgcagcttcaatggatgtcgtgaagactcagtgatgcaatgaaggaggg

SEQ ID NO: 55587 - DNA, 79 bp, Homo sapiens
aagtggcggggggtggtgttgcagcttcaatggatgtcgtgaagactcagtgatgcaatgaaggaggggctggaggaga

SEQ ID NO: 55588 - DNA, 83 bp, Homo sapiens
tggtgttgcagcttcaatggatgtcgtgaagactcagtgatgcaatgaaggaggggctggaggagacagtggggatagcctct

SEQ ID NO: 55589 - DNA, 80 bp, Homo sapiens
agcttcaatggatgtcgtgaagactcagtgatgcaatgaaggaggggctggaggagacagtggggatagcctcttcctcc

SEQ ID NO: 55590 - DNA, 73 bp, Homo sapiens
ctcctcagccggaggaccggatgggagacggtcgatcgttaaaggatctagaaggttagctgctaccaggcaa

SEQ ID NO: 55591 - DNA, 71 bp, Homo sapiens
ccggaggaccggatgggagacggtcgatcgttaaaggatctagaaggttagctgctaccaggcaaggcagg

SEQ ID NO: 55592 - DNA, 73 bp, Homo sapiens
atgggagacggtcgatcgttaaaggatctagaaggttagctgctaccaggcaaggcagggcccgggtctgatc

SEQ ID NO: 55593 - DNA, 75 bp, Homo sapiens
cggtcgatcgttaaaggatctagaaggttagctgctaccaggcaaggcagggcccgggtctgatctcagtgcctg

SEQ ID NO: 55594 - DNA, 76 bp, Homo sapiens
ttaaaggatctagaaggttagctgctaccaggcaaggcagggcccgggtctgatctcagtgcctggcccacactaa

SEQ ID NO: 55595 - DNA, 77 bp, Homo sapiens
taccaggcaaggcagggcccgggtctgatctcagtgcctggcccacactaagcttagtgattaaggagaagcaggaa

SEQ ID NO: 55596 - DNA, 74 bp, Homo sapiens
aaggcagggcccgggtctgatctcagtgcctggcccacactaagcttagtgattaaggagaagcaggaataaac

SEQ ID NO: 55597 - DNA, 76 bp, Homo sapiens
atctcagtgcctggcccacactaagcttagtgattaaggagaagcaggaataaaccacagaagggagtggcggctg

SEQ ID NO: 55598 - DNA, 75 bp, Homo sapiens
ctggcccacactaagcttagtgattaaggagaagcaggaataaaccacagaagggagtggcggctgtgggcacaa

SEQ ID NO: 55599 - DNA, 76 bp, Homo sapiens
taagcttagtgattaaggagaagcaggaataaaccacagaagggagtggcggctgtgggcacaaggggcatttgca

SEQ ID NO: 55600 - DNA, 73 bp, Homo sapiens
aagcaggaataaaccacagaagggagtggcggctgtgggcacaaggggcatttgcaggccgaaaggagcccga

SEQ ID NO: 55601 - DNA, 72 bp, Homo sapiens
agaagggagtggcggctgtgggcacaaggggcatttgcaggccgaaaggagcccgagcccccagtgcttttc

SEQ ID NO: 55602 - DNA, 74 bp, Homo sapiens
ctgtgggcacaaggggcatttgcaggccgaaaggagcccgagcccccagtgcttttctctggcctgagagacgg

SEQ ID NO: 55603 - DNA, 71 bp, Homo sapiens
aaggggcatttgcaggccgaaaggagcccgagcccccagtgcttttctctggcctgagagacggggtcctc

SEQ ID NO: 55604 - DNA, 70 bp, Homo sapiens
atttgcaggccgaaaggagcccgagcccccagtgcttttctctggcctgagagacggggtcctcccgggc

SEQ ID NO: 55605 - DNA, 70 bp, Homo sapiens
aaggagcccgagcccccagtgcttttctctggcctgagagacggggtcctcccgggccacgggctcctca

SEQ ID NO: 55606 - DNA, 77 bp, Homo sapiens
tgcttttctctggcctgagagacggggtcctcccgggccacgggctcctcacctgagcttgctcttgagtgcgttca

SEQ ID NO: 55607 - DNA, 76 bp, Homo sapiens
tctggcctgagagacggggtcctcccgggccacgggctcctcacctgagcttgctcttgagtgcgttcacctcgcg

SEQ ID NO: 55608 - DNA, 74 bp, Homo sapiens
agagacggggtcctcccgggccacgggctcctcacctgagcttgctcttgagtgcgttcacctcgcggcccatg

SEQ ID NO: 55609 - DNA, 78 bp, Homo sapiens
tcctcccgggccacgggctcctcacctgagcttgctcttgagtgcgttcacctcgcggcccatggcctcgttgctctc

SEQ ID NO: 55610 - DNA, 84 bp, Homo sapiens
ctcacctgagcttgctcttgagtgcgttcacctcgcggcccatggcctcgttgctctccgtggcctcatccagctcccgctgca

SEQ ID NO: 55611 - DNA, 83 bp, Homo sapiens
cttgctcttgagtgcgttcacctcgcggcccatggcctcgttgctctccgtggcctcatccagctcccgctgcagcttcctgc

SEQ ID NO: 55612 - DNA, 80 bp, Homo sapiens
tgcgttcacctcgcggcccatggcctcgttgctctccgtggcctcatccagctcccgctgcagcttcctgcggttggcgt

SEQ ID NO: 55613 - DNA, 83 bp, Homo sapiens
tcgcggcccatggcctcgttgctctccgtggcctcatccagctcccgctgcagcttcctgcggttggcgttgatgcgctggga

SEQ ID NO: 55614 - DNA, 82 bp, Homo sapiens
gttgctctccgtggcctcatccagctcccgctgcagcttcctgcggttggcgttgatgcgctgggactcctcctctgcctcc

SEQ ID NO: 55615 - DNA, 84 bp, Homo sapiens
cctcatccagctcccgctgcagcttcctgcggttggcgttgatgcgctgggactcctcctctgcctcctccagctgcctcttga

SEQ ID NO: 55616 - DNA, 85 bp, Homo sapiens
agctcccgctgcagcttcctgcggttggcgttgatgcgctgggactcctcctctgcctcctccagctgcctcttgagctgcttga

SEQ ID NO: 55617 - DNA, 82 bp, Homo sapiens
ggttggcgttgatgcgctgggactcctcctctgcctcctccagctgcctcttgagctgcttgaccctggcattgcctttctc

SEQ ID NO: 55618 - DNA, 84 bp, Homo sapiens
cgttgatgcgctgggactcctcctctgcctcctccagctgcctcttgagctgcttgaccctggcattgcctttctctgcctgtc

SEQ ID NO: 55619 - DNA, 82 bp, Homo sapiens
actcctcctctgcctcctccagctgcctcttgagctgcttgaccctggcattgcctttctctgcctgtcgcggagagttgga

SEQ ID NO: 55620 - DNA, 78 bp, Homo sapiens
tccagctgcctcttgagctgcttgaccctggcattgcctttctctgcctgtcgcggagagttggaggggtggttaggg

SEQ ID NO: 55621 - DNA, 75 bp, Homo sapiens
cggctgggggctgggggctcgagggaggctgggtggcaggggctacctgctccttgtactgctcggccatcttgc

SEQ ID NO: 55622 - DNA, 77 bp, Homo sapiens
ctgggggctcgagggaggctgggtggcaggggctacctgctccttgtactgctcggccatcttgcgctcgtcctcca

SEQ ID NO: 55623 - DNA, 80 bp, Homo sapiens
gagggaggctgggtggcaggggctacctgctccttgtactgctcggccatcttgcgctcgtcctccacctgcagcaagat

SEQ ID NO: 55624 - DNA, 80 bp, Homo sapiens
ctgggtggcaggggctacctgctccttgtactgctcggccatcttgcgctcgtcctccacctgcagcaagatttccttca

SEQ ID NO: 55625 - DNA, 80 bp, Homo sapiens
ggctacctgctccttgtactgctcggccatcttgcgctcgtcctccacctgcagcaagatttccttcagcttcttgtctt

SEQ ID NO: 55626 - DNA, 83 bp, Homo sapiens
ctgctccttgtactgctcggccatcttgcgctcgtcctccacctgcagcaagatttccttcagcttcttgtctttctgcttca

SEQ ID NO: 55627 - DNA, 82 bp, Homo sapiens
gtactgctcggccatcttgcgctcgtcctccacctgcagcaagatttccttcagcttcttgtctttctgcttcagcgacttg

SEQ ID NO: 55628 - DNA, 80 bp, Homo sapiens
atcttgcgctcgtcctccacctgcagcaagatttccttcagcttcttgtctttctgcttcagcgacttggtggccgcctg

SEQ ID NO: 55629 - DNA, 81 bp, Homo sapiens
tcctccacctgcagcaagatttccttcagcttcttgtctttctgcttcagcgacttggtggccgcctgtttctctctgcaa

SEQ ID NO: 55630 - DNA, 82 bp, Homo sapiens
tgcagcaagatttccttcagcttcttgtctttctgcttcagcgacttggtggccgcctgtttctctctgcaaacagcaagga

SEQ ID NO: 55631 - DNA, 76 bp, Homo sapiens
atttccttcagcttcttgtctttctgcttcagcgacttggtggccgcctgtttctctctgcaaacagcaaggaaaa

SEQ ID NO: 55632 - DNA, 76 bp, Homo sapiens
ttcttgtctttctgcttcagcgacttggtggccgcctgtttctctctgcaaacagcaaggaaaacaggtggtttca

SEQ ID NO: 55633 - DNA, 75 bp, Homo sapiens
tccatcacccccctgcaaactgggttcggaactccacacccgcatacctggcctcctgctcgacctgctcctcca

SEQ ID NO: 55634 - DNA, 77 bp, Homo sapiens
ccctgcaaactgggttcggaactccacacccgcatacctggcctcctgctcgacctgctcctccagctgtgcaatct

SEQ ID NO: 55635 - DNA, 76 bp, Homo sapiens
aaactgggttcggaactccacacccgcatacctggcctcctgctcgacctgctcctccagctgtgcaatcttggcc

SEQ ID NO: 55636 - DNA, 81 bp, Homo sapiens
aactccacacccgcatacctggcctcctgctcgacctgctcctccagctgtgcaatcttggcctccagcgccgcgatggtg

SEQ ID NO: 55637 - DNA, 83 bp, Homo sapiens
gcatacctggcctcctgctcgacctgctcctccagctgtgcaatcttggcctccagcgccgcgatggtggacttgaacttgga

SEQ ID NO: 55638 - DNA, 82 bp, Homo sapiens
ctggcctcctgctcgacctgctcctccagctgtgcaatcttggcctccagcgccgcgatggtggacttgaacttggacttga

SEQ ID NO: 55639 - DNA, 80 bp, Homo sapiens
tgctcgacctgctcctccagctgtgcaatcttggcctccagcgccgcgatggtggacttgaacttggacttgacggcccc

SEQ ID NO: 55640 - DNA, 79 bp, Homo sapiens
tccagctgtgcaatcttggcctccagcgccgcgatggtggacttgaacttggacttgacggccccctccatctcgtgga

SEQ ID NO: 55641 - DNA, 77 bp, Homo sapiens
caatcttggcctccagcgccgcgatggtggacttgaacttggacttgacggccccctccatctcgtggagcttgctc

SEQ ID NO: 55642 - DNA, 76 bp, Homo sapiens
ttggcctccagcgccgcgatggtggacttgaacttggacttgacggccccctccatctcgtggagcttgctccgga

SEQ ID NO: 55643 - DNA, 74 bp, Homo sapiens
ccgcgatggtggacttgaacttggacttgacggccccctccatctcgtggagcttgctccggagctccttgttc

SEQ ID NO: 55644 - DNA, 77 bp, Homo sapiens
acttgaacttggacttgacggccccctccatctcgtggagcttgctccggagctccttgttctgccgctcgagctgc

SEQ ID NO: 55645 - DNA, 77 bp, Homo sapiens
aacttggacttgacggccccctccatctcgtggagcttgctccggagctccttgttctgccgctcgagctgctgccg

SEQ ID NO: 55646 - DNA, 81 bp, Homo sapiens
tgacggccccctccatctcgtggagcttgctccggagctccttgttctgccgctcgagctgctgccgggcactctcattct

SEQ ID NO: 55647 - DNA, 83 bp, Homo sapiens
ctccatctcgtggagcttgctccggagctccttgttctgccgctcgagctgctgccgggcactctcattcttctgggccgtgc

SEQ ID NO: 55648 - DNA, 85 bp, Homo sapiens
agcttgctccggagctccttgttctgccgctcgagctgctgccgggcactctcattcttctgggccgtgctgcgctctgtggcca

SEQ ID NO: 55649 - DNA, 87 bp, Homo sapiens
agctccttgttctgccgctcgagctgctgccgggcactctcattcttctgggccgtgctgcgctctgtggccagctcgttgctgagc

SEQ ID NO: 55650 - DNA, 88 bp, Homo sapiens
cttgttctgccgctcgagctgctgccgggcactctcattcttctgggccgtgctgcgctctgtggccagctcgttgctgagctgctcg

SEQ ID NO: 55651 - DNA, 87 bp, Homo sapiens
tcgagctgctgccgggcactctcattcttctgggccgtgctgcgctctgtggccagctcgttgctgagctgctcggcctggggagga

SEQ ID NO: 55652 - DNA, 83 bp, Homo sapiens
ccgggcactctcattcttctgggccgtgctgcgctctgtggccagctcgttgctgagctgctcggcctggggaggagagtgaa

SEQ ID NO: 55653 - DNA, 85 bp, Homo sapiens
actctcattcttctgggccgtgctgcgctctgtggccagctcgttgctgagctgctcggcctggggaggagagtgaaggccatga

SEQ ID NO: 55654 - DNA, 85 bp, Homo sapiens
ttctgggccgtgctgcgctctgtggccagctcgttgctgagctgctcggcctggggaggagagtgaaggccatgaggcggactca

SEQ ID NO: 55655 - DNA, 79 bp, Homo sapiens
aggagagacagtaggcagcgtgactgtggtgtccaggcggccctcacctgctgtgtggctttgcggacccggtcgctca

SEQ ID NO: 55656 - DNA, 80 bp, Homo sapiens
taggcagcgtgactgtggtgtccaggcggccctcacctgctgtgtggctttgcggacccggtcgctcatggcctccatgt

SEQ ID NO: 55657 - DNA, 79 bp, Homo sapiens
agcgtgactgtggtgtccaggcggccctcacctgctgtgtggctttgcggacccggtcgctcatggcctccatgttgcc

SEQ ID NO: 55658 - DNA, 79 bp, Homo sapiens
tggtgtccaggcggccctcacctgctgtgtggctttgcggacccggtcgctcatggcctccatgttgccctgctcctcc

SEQ ID NO: 55659 - DNA, 79 bp, Homo sapiens
cggccctcacctgctgtgtggctttgcggacccggtcgctcatggcctccatgttgccctgctcctcctccagctcctc

SEQ ID NO: 55660 - DNA, 81 bp, Homo sapiens
tgtgtggctttgcggacccggtcgctcatggcctccatgttgccctgctcctcctccagctcctcctccagctgggcgatc

SEQ ID NO: 55661 - DNA, 77 bp, Homo sapiens
ctttgcggacccggtcgctcatggcctccatgttgccctgctcctcctccagctcctcctccagctgggcgatccgg

SEQ ID NO: 55662 - DNA, 77 bp, Homo sapiens
acccggtcgctcatggcctccatgttgccctgctcctcctccagctcctcctccagctgggcgatccgggcctccag

SEQ ID NO: 55663 - DNA, 80 bp, Homo sapiens
tcatggcctccatgttgccctgctcctcctccagctcctcctccagctgggcgatccgggcctccaggcggcgcttctcg

SEQ ID NO: 55664 - DNA, 77 bp, Homo sapiens
atgttgccctgctcctcctccagctcctcctccagctgggcgatccgggcctccaggcggcgcttctcgtcctggag

SEQ ID NO: 55665 - DNA, 75 bp, Homo sapiens
ctcctccagctcctcctccagctgggcgatccgggcctccaggcggcgcttctcgtcctggagtgcgttcctggg

SEQ ID NO: 55666 - DNA, 72 bp, Homo sapiens
ctcctcctccagctgggcgatccgggcctccaggcggcgcttctcgtcctggagtgcgttcctgggggaagg

SEQ ID NO: 55667 - DNA, 74 bp, Homo sapiens
tccagctgggcgatccgggcctccaggcggcgcttctcgtcctggagtgcgttcctgggggaagggcggccatg

SEQ ID NO: 55668 - DNA, 70 bp, Homo sapiens
cgatccgggcctccaggcggcgcttctcgtcctggagtgcgttcctgggggaagggcggccatggtgggg

SEQ ID NO: 55669 - DNA, 74 bp, Homo sapiens
ctgtccccccatcctctgcttcagagccctcttcctccattcagtttcctaccttcccgacaggctactggcca

SEQ ID NO: 55670 - DNA, 77 bp, Homo sapiens
atcctctgcttcagagccctcttcctccattcagtttcctaccttcccgacaggctactggccagctcctctgccag

SEQ ID NO: 55671 - DNA, 75 bp, Homo sapiens
cttcagagccctcttcctccattcagtttcctaccttcccgacaggctactggccagctcctctgccagttcctc

SEQ ID NO: 55672 - DNA, 74 bp, Homo sapiens
tcttcctccattcagtttcctaccttcccgacaggctactggccagctcctctgccagttcctccttctcgagg

SEQ ID NO: 55673 - DNA, 73 bp, Homo sapiens
tcagtttcctaccttcccgacaggctactggccagctcctctgccagttcctccttctcgaggtccgcttgtt

SEQ ID NO: 55674 - DNA, 75 bp, Homo sapiens
ttcctaccttcccgacaggctactggccagctcctctgccagttcctccttctcgaggtccgcttgtttgcgagc

SEQ ID NO: 55675 - DNA, 78 bp, Homo sapiens
acaggctactggccagctcctctgccagttcctccttctcgaggtccgcttgtttgcgagccctctcagcggcggcga

SEQ ID NO: 55676 - DNA, 76 bp, Homo sapiens
gccagctcctctgccagttcctccttctcgaggtccgcttgtttgcgagccctctcagcggcggcgaggtcctagg

SEQ ID NO: 55677 - DNA, 74 bp, Homo sapiens
tctgccagttcctccttctcgaggtccgcttgtttgcgagccctctcagcggcggcgaggtcctaggtgggagg

SEQ ID NO: 55678 - DNA, 71 bp, Homo sapiens
agttcctccttctcgaggtccgcttgtttgcgagccctctcagcggcggcgaggtcctaggtgggagggag

SEQ ID NO: 55679 - DNA, 74 bp, Homo sapiens
tctcgaggtccgcttgtttgcgagccctctcagcggcggcgaggtcctaggtgggagggaggaaggctgttgtc

SEQ ID NO: 55680 - DNA, 73 bp, Homo sapiens
cttgtttgcgagccctctcagcggcggcgaggtcctaggtgggagggaggaaggctgttgtctgccagggaaa

SEQ ID NO: 55681 - DNA, 81 bp, Homo sapiens
ctaccgtgacacccgcatctgaggctctcctagcaaggcgaggctttacctcttgtagctgcatgaggtctgcttccaagc

SEQ ID NO: 55682 - DNA, 80 bp, Homo sapiens
acccgcatctgaggctctcctagcaaggcgaggctttacctcttgtagctgcatgaggtctgcttccaagctcttggctt

SEQ ID NO: 55683 - DNA, 80 bp, Homo sapiens
aggctctcctagcaaggcgaggctttacctcttgtagctgcatgaggtctgcttccaagctcttggctttcttctcattc

SEQ ID NO: 55684 - DNA, 79 bp, Homo sapiens
aaggcgaggctttacctcttgtagctgcatgaggtctgcttccaagctcttggctttcttctcattctctttggctgtg

SEQ ID NO: 55685 - DNA, 83 bp, Homo sapiens
tttacctcttgtagctgcatgaggtctgcttccaagctcttggctttcttctcattctctttggctgtggcaaagatctcatc

SEQ ID NO: 55686 - DNA, 85 bp, Homo sapiens
ctcttgtagctgcatgaggtctgcttccaagctcttggctttcttctcattctctttggctgtggcaaagatctcatctctggag

SEQ ID NO: 55687 - DNA, 83 bp, Homo sapiens
tgaggtctgcttccaagctcttggctttcttctcattctctttggctgtggcaaagatctcatctctggaggcacgggcatct

SEQ ID NO: 55688 - DNA, 83 bp, Homo sapiens
tccaagctcttggctttcttctcattctctttggctgtggcaaagatctcatctctggaggcacgggcatcttccagctctct

SEQ ID NO: 55689 - DNA, 81 bp, Homo sapiens
ttggctttcttctcattctctttggctgtggcaaagatctcatctctggaggcacgggcatcttccagctctctttgaaag

SEQ ID NO: 55690 - DNA, 84 bp, Homo sapiens
ttctcattctctttggctgtggcaaagatctcatctctggaggcacgggcatcttccagctctctttgaaagtccttcatctga

SEQ ID NO: 55691 - DNA, 87 bp, Homo sapiens
ttggctgtggcaaagatctcatctctggaggcacgggcatcttccagctctctttgaaagtccttcatctgagcctgcatgagtcaa

SEQ ID NO: 55692 - DNA, 84 bp, Homo sapiens
caaagatctcatctctggaggcacgggcatcttccagctctctttgaaagtccttcatctgagcctgcatgagtcaacagggag

SEQ ID NO: 55693 - DNA, 84 bp, Homo sapiens
atctcatctctggaggcacgggcatcttccagctctctttgaaagtccttcatctgagcctgcatgagtcaacagggaggacaa

SEQ ID NO: 55694 - DNA, 84 bp, Homo sapiens
gcacgggcatcttccagctctctttgaaagtccttcatctgagcctgcatgagtcaacagggaggacaagctcagatgtcctta

SEQ ID NO: 55695 - DNA, 81 bp, Homo sapiens
atcttccagctctctttgaaagtccttcatctgagcctgcatgagtcaacagggaggacaagctcagatgtccttactccc

SEQ ID NO: 55696 - DNA, 80 bp, Homo sapiens
aaagtccttcatctgagcctgcatgagtcaacagggaggacaagctcagatgtccttactcccccaagttctgctgccca

SEQ ID NO: 55697 - DNA, 83 bp, Homo sapiens
atctgagcctgcatgagtcaacagggaggacaagctcagatgtccttactcccccaagttctgctgcccagttcagctttgca

SEQ ID NO: 55698 - DNA, 78 bp, Homo sapiens
atgagtcaacagggaggacaagctcagatgtccttactcccccaagttctgctgcccagttcagctttgcacacccac

SEQ ID NO: 55699 - DNA, 75 bp, Homo sapiens
ggaggacaagctcagatgtccttactcccccaagttctgctgcccagttcagctttgcacacccaccccttggat

SEQ ID NO: 55700 - DNA, 74 bp, Homo sapiens
acaagctcagatgtccttactcccccaagttctgctgcccagttcagctttgcacacccaccccttggattttc

SEQ ID NO: 55701 - DNA, 74 bp, Homo sapiens
atgtccttactcccccaagttctgctgcccagttcagctttgcacacccaccccttggattttctgcagttgac

SEQ ID NO: 55702 - DNA, 75 bp, Homo sapiens
caagttctgctgcccagttcagctttgcacacccaccccttggattttctgcagttgaccacaaagaagttccca

SEQ ID NO: 55703 - DNA, 78 bp, Homo sapiens
tgcccagttcagctttgcacacccaccccttggattttctgcagttgaccacaaagaagttcccattgcacgagcatg

SEQ ID NO: 55704 - DNA, 77 bp, Homo sapiens
agctttgcacacccaccccttggattttctgcagttgaccacaaagaagttcccattgcacgagcatggctctcagt

SEQ ID NO: 55705 - DNA, 75 bp, Homo sapiens
acacccaccccttggattttctgcagttgaccacaaagaagttcccattgcacgagcatggctctcagttccagg

SEQ ID NO: 55706 - DNA, 77 bp, Homo sapiens
cccttggattttctgcagttgaccacaaagaagttcccattgcacgagcatggctctcagttccaggtggctggtgg

SEQ ID NO: 55707 - DNA, 82 bp, Homo sapiens
tttctgcagttgaccacaaagaagttcccattgcacgagcatggctctcagttccaggtggctggtggtgcgctgggagcac

SEQ ID NO: 55708 - DNA, 79 bp, Homo sapiens
accacaaagaagttcccattgcacgagcatggctctcagttccaggtggctggtggtgcgctgggagcaccattctggg

SEQ ID NO: 55709 - DNA, 85 bp, Homo sapiens
tggtggtgcgctgggagcaccattctgggtgggctccacagacctgcctgagaagctgagcccctgatgtgatctgagggcagtg

SEQ ID NO: 55710 - DNA, 83 bp, Homo sapiens
ctgggagcaccattctgggtgggctccacagacctgcctgagaagctgagcccctgatgtgatctgagggcagtggccaaata

SEQ ID NO: 55711 - DNA, 80 bp, Homo sapiens
attctgggtgggctccacagacctgcctgagaagctgagcccctgatgtgatctgagggcagtggccaaatacctaataa

SEQ ID NO: 55712 - DNA, 82 bp, Homo sapiens
ctccacagacctgcctgagaagctgagcccctgatgtgatctgagggcagtggccaaatacctaataatgctgccctaccca

SEQ ID NO: 55713 - DNA, 81 bp, Homo sapiens
agacctgcctgagaagctgagcccctgatgtgatctgagggcagtggccaaatacctaataatgctgccctacccagggca

SEQ ID NO: 55714 - DNA, 81 bp, Homo sapiens
agaagctgagcccctgatgtgatctgagggcagtggccaaatacctaataatgctgccctacccagggcaggagacagcca

SEQ ID NO: 55715 - DNA, 80 bp, Homo sapiens
ctgatgtgatctgagggcagtggccaaatacctaataatgctgccctacccagggcaggagacagccaccaaatcctgaa

SEQ ID NO: 55716 - DNA, 76 bp, Homo sapiens
atctgagggcagtggccaaatacctaataatgctgccctacccagggcaggagacagccaccaaatcctgaatggt

SEQ ID NO: 55717 - DNA, 74 bp, Homo sapiens
tggccaaatacctaataatgctgccctacccagggcaggagacagccaccaaatcctgaatggttccagaaaaa

SEQ ID NO: 55718 - DNA, 71 bp, Homo sapiens
aaatacctaataatgctgccctacccagggcaggagacagccaccaaatcctgaatggttccagaaaaacc

SEQ ID NO: 55719 - DNA, 74 bp, Homo sapiens
taatgctgccctacccagggcaggagacagccaccaaatcctgaatggttccagaaaaaccccagctgaaccca

SEQ ID NO: 55720 - DNA, 72 bp, Homo sapiens
ctacccagggcaggagacagccaccaaatcctgaatggttccagaaaaaccccagctgaacccacaccaatg

SEQ ID NO: 55721 - DNA, 77 bp, Homo sapiens
aatggttccagaaaaaccccagctgaacccacaccaatggcaggtgcaggcttgcttcctggagcccgctctgctga

SEQ ID NO: 55722 - DNA, 76 bp, Homo sapiens
agaaaaaccccagctgaacccacaccaatggcaggtgcaggcttgcttcctggagcccgctctgctgacttcggtg

SEQ ID NO: 55723 - DNA, 78 bp, Homo sapiens
acaccaatggcaggtgcaggcttgcttcctggagcccgctctgctgacttcggtggcctgaggggaactgtgccctcc

SEQ ID NO: 55724 - DNA, 78 bp, Homo sapiens
tggcaggtgcaggcttgcttcctggagcccgctctgctgacttcggtggcctgaggggaactgtgccctccctccacc

SEQ ID NO: 55725 - DNA, 75 bp, Homo sapiens
aggcttgcttcctggagcccgctctgctgacttcggtggcctgaggggaactgtgccctccctccacccatgccc

SEQ ID NO: 55726 - DNA, 76 bp, Homo sapiens
agcccgctctgctgacttcggtggcctgaggggaactgtgccctccctccacccatgccccaagctcctagtgtca

SEQ ID NO: 55727 - DNA, 78 bp, Homo sapiens
gggaactgtgccctccctccacccatgccccaagctcctagtgtcacccacctgcagtttgcgtagctgcttgatggc

SEQ ID NO: 55728 - DNA, 76 bp, Homo sapiens
ccctccctccacccatgccccaagctcctagtgtcacccacctgcagtttgcgtagctgcttgatggcttcctccc

SEQ ID NO: 55729 - DNA, 76 bp, Homo sapiens
cctccacccatgccccaagctcctagtgtcacccacctgcagtttgcgtagctgcttgatggcttcctccctcccc

SEQ ID NO: 55730 - DNA, 78 bp, Homo sapiens
cccaagctcctagtgtcacccacctgcagtttgcgtagctgcttgatggcttcctccctccccttgatggcagagtcg

SEQ ID NO: 55731 - DNA, 81 bp, Homo sapiens
tagtgtcacccacctgcagtttgcgtagctgcttgatggcttcctccctccccttgatggcagagtcggcctgaagctcca

SEQ ID NO: 55732 - DNA, 79 bp, Homo sapiens
acctgcagtttgcgtagctgcttgatggcttcctccctccccttgatggcagagtcggcctgaagctccaggtctttca

SEQ ID NO: 55733 - DNA, 77 bp, Homo sapiens
agtttgcgtagctgcttgatggcttcctccctccccttgatggcagagtcggcctgaagctccaggtctttcaggtc

SEQ ID NO: 55734 - DNA, 75 bp, Homo sapiens
ttgatggcttcctccctccccttgatggcagagtcggcctgaagctccaggtctttcaggtccccttccagcttc

SEQ ID NO: 55735 - DNA, 72 bp, Homo sapiens
ttcctccctccccttgatggcagagtcggcctgaagctccaggtctttcaggtccccttccagcttcttctt

SEQ ID NO: 55736 - DNA, 77 bp, Homo sapiens
gagtcggcctgaagctccaggtctttcaggtccccttccagcttcttctttgctgcagctgccagggcacgttgctt

SEQ ID NO: 55737 - DNA, 78 bp, Homo sapiens
tgaagctccaggtctttcaggtccccttccagcttcttctttgctgcagctgccagggcacgttgctttcgctcgtct

SEQ ID NO: 55738 - DNA, 77 bp, Homo sapiens
aggtccccttccagcttcttctttgctgcagctgccagggcacgttgctttcgctcgtcttccagttccgtctcata

SEQ ID NO: 55739 - DNA, 80 bp, Homo sapiens
agcttcttctttgctgcagctgccagggcacgttgctttcgctcgtcttccagttccgtctcatactcgtgaagctgggc

SEQ ID NO: 55740 - DNA, 82 bp, Homo sapiens
ttgctgcagctgccagggcacgttgctttcgctcgtcttccagttccgtctcatactcgtgaagctgggcgaggaatagaga

SEQ ID NO: 55741 - DNA, 79 bp, Homo sapiens
agctgccagggcacgttgctttcgctcgtcttccagttccgtctcatactcgtgaagctgggcgaggaatagagatgtg

SEQ ID NO: 55742 - DNA, 78 bp, Homo sapiens
acgttgctttcgctcgtcttccagttccgtctcatactcgtgaagctgggcgaggaatagagatgtgtgctgccccac

SEQ ID NO: 55743 - DNA, 79 bp, Homo sapiens
tctcatactcgtgaagctgggcgaggaatagagatgtgtgctgccccacttgcccctgggaggtcctttggctcaccta

SEQ ID NO: 55744 - DNA, 79 bp, Homo sapiens
aagctgggcgaggaatagagatgtgtgctgccccacttgcccctgggaggtcctttggctcacctaggcagcacatcac

SEQ ID NO: 55745 - DNA, 80 bp, Homo sapiens
gggcgaggaatagagatgtgtgctgccccacttgcccctgggaggtcctttggctcacctaggcagcacatcactgcacc

SEQ ID NO: 55746 - DNA, 79 bp, Homo sapiens
tagagatgtgtgctgccccacttgcccctgggaggtcctttggctcacctaggcagcacatcactgcaccccttcccca

SEQ ID NO: 55747 - DNA, 78 bp, Homo sapiens
tgctgccccacttgcccctgggaggtcctttggctcacctaggcagcacatcactgcaccccttccccagcacagccc

SEQ ID NO: 55748 - DNA, 75 bp, Homo sapiens
ccctgggaggtcctttggctcacctaggcagcacatcactgcaccccttccccagcacagcccccttgtgaggtg

SEQ ID NO: 55749 - DNA, 79 bp, Homo sapiens
aggtcctttggctcacctaggcagcacatcactgcaccccttccccagcacagcccccttgtgaggtgggcatctcatc

SEQ ID NO: 55750 - DNA, 84 bp, Homo sapiens
tcacctaggcagcacatcactgcaccccttccccagcacagcccccttgtgaggtgggcatctcatccccagttgcagatgaga

SEQ ID NO: 55751 - DNA, 81 bp, Homo sapiens
aggcagcacatcactgcaccccttccccagcacagcccccttgtgaggtgggcatctcatccccagttgcagatgagaaaa

SEQ ID NO: 55752 - DNA, 77 bp, Homo sapiens
actgcaccccttccccagcacagcccccttgtgaggtgggcatctcatccccagttgcagatgagaaaacggaatca

SEQ ID NO: 55753 - DNA, 76 bp, Homo sapiens
cccagcacagcccccttgtgaggtgggcatctcatccccagttgcagatgagaaaacggaatcacgccgggcgtgg

SEQ ID NO: 55754 - DNA, 76 bp, Homo sapiens
agcccccttgtgaggtgggcatctcatccccagttgcagatgagaaaacggaatcacgccgggcgtgggtggctca

SEQ ID NO: 55755 - DNA, 67 bp, Homo sapiens
aaaaaaataaagaaaacgaagtttccacaccaaccatgagagtggtgataggaatgaaaaaggccac

SEQ ID NO: 55756 - DNA, 68 bp, Homo sapiens
aaaataaagaaaacgaagtttccacaccaaccatgagagtggtgataggaatgaaaaaggccacccga

SEQ ID NO: 55757 - DNA, 68 bp, Homo sapiens
aataaagaaaacgaagtttccacaccaaccatgagagtggtgataggaatgaaaaaggccacccgacc

SEQ ID NO: 55758 - DNA, 69 bp, Homo sapiens
agaaaacgaagtttccacaccaaccatgagagtggtgataggaatgaaaaaggccacccgacctccctc

SEQ ID NO: 55759 - DNA, 72 bp, Homo sapiens
acgaagtttccacaccaaccatgagagtggtgataggaatgaaaaaggccacccgacctccctctgctggcc

SEQ ID NO: 55760 - DNA, 72 bp, Homo sapiens
gtttccacaccaaccatgagagtggtgataggaatgaaaaaggccacccgacctccctctgctggcctcccc

SEQ ID NO: 55761 - DNA, 74 bp, Homo sapiens
acaccaaccatgagagtggtgataggaatgaaaaaggccacccgacctccctctgctggcctccccggcagcac

SEQ ID NO: 55762 - DNA, 74 bp, Homo sapiens
aaccatgagagtggtgataggaatgaaaaaggccacccgacctccctctgctggcctccccggcagcacgcacc

SEQ ID NO: 55763 - DNA, 76 bp, Homo sapiens
atgagagtggtgataggaatgaaaaaggccacccgacctccctctgctggcctccccggcagcacgcacctgtctc

SEQ ID NO: 55764 - DNA, 76 bp, Homo sapiens
agtggtgataggaatgaaaaaggccacccgacctccctctgctggcctccccggcagcacgcacctgtctctgcag

SEQ ID NO: 55765 - DNA, 76 bp, Homo sapiens
ataggaatgaaaaaggccacccgacctccctctgctggcctccccggcagcacgcacctgtctctgcagttgcctc

SEQ ID NO: 55766 - DNA, 78 bp, Homo sapiens
aggccacccgacctccctctgctggcctccccggcagcacgcacctgtctctgcagttgcctcctcttctcctcattc

SEQ ID NO: 55767 - DNA, 80 bp, Homo sapiens
cctctgctggcctccccggcagcacgcacctgtctctgcagttgcctcctcttctcctcattctgctcgtcccgggcttg

SEQ ID NO: 55768 - DNA, 80 bp, Homo sapiens
tggcctccccggcagcacgcacctgtctctgcagttgcctcctcttctcctcattctgctcgtcccgggcttggagatcc

SEQ ID NO: 55769 - DNA, 78 bp, Homo sapiens
agcacgcacctgtctctgcagttgcctcctcttctcctcattctgctcgtcccgggcttggagatccctttcgaactg

SEQ ID NO: 55770 - DNA, 77 bp, Homo sapiens
cttctcctcattctgctcgtcccgggcttggagatccctttcgaactggcccttgagcgcctgcatgttgacttcca

SEQ ID NO: 55771 - DNA, 76 bp, Homo sapiens
attctgctcgtcccgggcttggagatccctttcgaactggcccttgagcgcctgcatgttgacttccagccgcagt

SEQ ID NO: 55772 - DNA, 75 bp, Homo sapiens
ctcgtcccgggcttggagatccctttcgaactggcccttgagcgcctgcatgttgacttccagccgcagtttggc

SEQ ID NO: 55773 - DNA, 79 bp, Homo sapiens
tttcgaactggcccttgagcgcctgcatgttgacttccagccgcagtttggcgtcctccgtggcttgcagctcgtcctc

SEQ ID NO: 55774 - DNA, 83 bp, Homo sapiens
cgcctgcatgttgacttccagccgcagtttggcgtcctccgtggcttgcagctcgtcctccagctcttccagctgcgtcttca

SEQ ID NO: 55775 - DNA, 82 bp, Homo sapiens
tgttgacttccagccgcagtttggcgtcctccgtggcttgcagctcgtcctccagctcttccagctgcgtcttcatctcctc

SEQ ID NO: 55776 - DNA, 82 bp, Homo sapiens
cgcagtttggcgtcctccgtggcttgcagctcgtcctccagctcttccagctgcgtcttcatctcctccatctgggtctcca

SEQ ID NO: 55777 - DNA, 81 bp, Homo sapiens
ttggcgtcctccgtggcttgcagctcgtcctccagctcttccagctgcgtcttcatctcctccatctgggtctccagggcc

SEQ ID NO: 55778 - DNA, 82 bp, Homo sapiens
tggcttgcagctcgtcctccagctcttccagctgcgtcttcatctcctccatctgggtctccagggcccgcttggacttctc

SEQ ID NO: 55779 - DNA, 82 bp, Homo sapiens
tcgtcctccagctcttccagctgcgtcttcatctcctccatctgggtctccagggcccgcttggacttctccagctcatgga

SEQ ID NO: 55780 - DNA, 80 bp, Homo sapiens
agctcttccagctgcgtcttcatctcctccatctgggtctccagggcccgcttggacttctccagctcatggacctgccg

SEQ ID NO: 55781 - DNA, 80 bp, Homo sapiens
agctgcgtcttcatctcctccatctgggtctccagggcccgcttggacttctccagctcatggacctgccggcagagcgg

SEQ ID NO: 55782 - DNA, 79 bp, Homo sapiens
cttcatctcctccatctgggtctccagggcccgcttggacttctccagctcatggacctgccggcagagcgggcagccc

SEQ ID NO: 55783 - DNA, 80 bp, Homo sapiens
tccatctgggtctccagggcccgcttggacttctccagctcatggacctgccggcagagcgggcagccccattctatgag

SEQ ID NO: 55784 - DNA, 83 bp, Homo sapiens
tggacttctccagctcatggacctgccggcagagcgggcagccccattctatgaggctcaacttcatgaagacgattgagaaa

SEQ ID NO: 55785 - DNA, 82 bp, Homo sapiens
ttctccagctcatggacctgccggcagagcgggcagccccattctatgaggctcaacttcatgaagacgattgagaaaccca

SEQ ID NO: 55786 - DNA, 79 bp, Homo sapiens
atggacctgccggcagagcgggcagccccattctatgaggctcaacttcatgaagacgattgagaaacccaccgtgagc

SEQ ID NO: 55787 - DNA, 78 bp, Homo sapiens
agccccattctatgaggctcaacttcatgaagacgattgagaaacccaccgtgagcggcacctcaggagatcagggag

SEQ ID NO: 55788 - DNA, 78 bp, Homo sapiens
attctatgaggctcaacttcatgaagacgattgagaaacccaccgtgagcggcacctcaggagatcagggaggtggct

SEQ ID NO: 55789 - DNA, 76 bp, Homo sapiens
ctcaacttcatgaagacgattgagaaacccaccgtgagcggcacctcaggagatcagggaggtggctttggcctcc

SEQ ID NO: 55790 - DNA, 78 bp, Homo sapiens
atgaagacgattgagaaacccaccgtgagcggcacctcaggagatcagggaggtggctttggcctcccacaggatgca

SEQ ID NO: 55791 - DNA, 77 bp, Homo sapiens
ttgagaaacccaccgtgagcggcacctcaggagatcagggaggtggctttggcctcccacaggatgcatggccggga

SEQ ID NO: 55792 - DNA, 78 bp, Homo sapiens
accgtgagcggcacctcaggagatcagggaggtggctttggcctcccacaggatgcatggccgggactcaagatgacc

SEQ ID NO: 55793 - DNA, 77 bp, Homo sapiens
agatcagggaggtggctttggcctcccacaggatgcatggccgggactcaagatgacccctgagagttcagacccca

SEQ ID NO: 55794 - DNA, 75 bp, Homo sapiens
ggcctcccacaggatgcatggccgggactcaagatgacccctgagagttcagaccccagccttatcctcggaccc

SEQ ID NO: 55795 - DNA, 74 bp, Homo sapiens
aggatgcatggccgggactcaagatgacccctgagagttcagaccccagccttatcctcggaccccccaactca

SEQ ID NO: 55796 - DNA, 73 bp, Homo sapiens
gactcaagatgacccctgagagttcagaccccagccttatcctcggaccccccaactcagacccatcctcgac

SEQ ID NO: 55797 - DNA, 73 bp, Homo sapiens
atgacccctgagagttcagaccccagccttatcctcggaccccccaactcagacccatcctcgactgccattc

SEQ ID NO: 55798 - DNA, 73 bp, Homo sapiens
agagttcagaccccagccttatcctcggaccccccaactcagacccatcctcgactgccattctcagcccctc

SEQ ID NO: 55799 - DNA, 72 bp, Homo sapiens
agaccccagccttatcctcggaccccccaactcagacccatcctcgactgccattctcagcccctcccagcc

SEQ ID NO: 55800 - DNA, 75 bp, Homo sapiens
ttatcctcggaccccccaactcagacccatcctcgactgccattctcagcccctcccagcccctgcaccagtcca

SEQ ID NO: 55801 - DNA, 75 bp, Homo sapiens
gactgccattctcagcccctcccagcccctgcaccagtccaaaaacctccttccatttccgatgatagttcgcta

SEQ ID NO: 55802 - DNA, 73 bp, Homo sapiens
tctcagcccctcccagcccctgcaccagtccaaaaacctccttccatttccgatgatagttcgctatgaaaaa

SEQ ID NO: 55803 - DNA, 72 bp, Homo sapiens
ctcccagcccctgcaccagtccaaaaacctccttccatttccgatgatagttcgctatgaaaaaggccagga

SEQ ID NO: 55804 - DNA, 77 bp, Homo sapiens
tgcaccagtccaaaaacctccttccatttccgatgatagttcgctatgaaaaaggccaggagctagcctcgcatgga

SEQ ID NO: 55805 - DNA, 74 bp, Homo sapiens
aaaaacctccttccatttccgatgatagttcgctatgaaaaaggccaggagctagcctcgcatggactggtgaa

SEQ ID NO: 55806 - DNA, 79 bp, Homo sapiens
ctccttccatttccgatgatagttcgctatgaaaaaggccaggagctagcctcgcatggactggtgaatagcacagagg

SEQ ID NO: 55807 - DNA, 80 bp, Homo sapiens
tttccgatgatagttcgctatgaaaaaggccaggagctagcctcgcatggactggtgaatagcacagagggtgggcaggc

SEQ ID NO: 55808 - DNA, 80 bp, Homo sapiens
tagttcgctatgaaaaaggccaggagctagcctcgcatggactggtgaatagcacagagggtgggcaggcgaaacatgga

SEQ ID NO: 55809 - DNA, 76 bp, Homo sapiens
aaaaggccaggagctagcctcgcatggactggtgaatagcacagagggtgggcaggcgaaacatggacgagaaaaa

SEQ ID NO: 55810 - DNA, 77 bp, Homo sapiens
aggagctagcctcgcatggactggtgaatagcacagagggtgggcaggcgaaacatggacgagaaaaaccacccaga

SEQ ID NO: 55811 - DNA, 74 bp, Homo sapiens
catggactggtgaatagcacagagggtgggcaggcgaaacatggacgagaaaaaccacccagagccacttacgt

SEQ ID NO: 55812 - DNA, 72 bp, Homo sapiens
actggtgaatagcacagagggtgggcaggcgaaacatggacgagaaaaaccacccagagccacttacgttct

SEQ ID NO: 55813 - DNA, 74 bp, Homo sapiens
caggcgaaacatggacgagaaaaaccacccagagccacttacgttcttgcccacgtcatccttggagctgacca

SEQ ID NO: 55814 - DNA, 72 bp, Homo sapiens
aaacatggacgagaaaaaccacccagagccacttacgttcttgcccacgtcatccttggagctgaccaggtc

SEQ ID NO: 55815 - DNA, 74 bp, Homo sapiens
agagccacttacgttcttgcccacgtcatccttggagctgaccaggtcttccatttcggctttgagcattttgt

SEQ ID NO: 55816 - DNA, 72 bp, Homo sapiens
gtcttccatttcggctttgagcattttgttggtccgctcgagttcctctttggcttccaaggcctcttcaag

SEQ ID NO: 55817 - DNA, 70 bp, Homo sapiens
tccgctcgagttcctctttggcttccaaggcctcttcaagggcccgagccagggacagggccttggtttc

SEQ ID NO: 55818 - DNA, 68 bp, Homo sapiens
agttcctctttggcttccaaggcctcttcaagggcccgagccagggacagggccttggtttccttctc

SEQ ID NO: 55819 - DNA, 71 bp, Homo sapiens
cttccaaggcctcttcaagggcccgagccagggacagggccttggtttccttctccctggcttctgcctca

SEQ ID NO: 55820 - DNA, 75 bp, Homo sapiens
tcttcaagggcccgagccagggacagggccttggtttccttctccctggcttctgcctcagctctgtccctctca

SEQ ID NO: 55821 - DNA, 74 bp, Homo sapiens
ccgagccagggacagggccttggtttccttctccctggcttctgcctcagctctgtccctctcatccgcgtatt

SEQ ID NO: 55822 - DNA, 76 bp, Homo sapiens
gacagggccttggtttccttctccctggcttctgcctcagctctgtccctctcatccgcgtatttggaagagatgt

SEQ ID NO: 55823 - DNA, 75 bp, Homo sapiens
ttggtttccttctccctggcttctgcctcagctctgtccctctcatccgcgtatttggaagagatgtttttctcc

SEQ ID NO: 55824 - DNA, 77 bp, Homo sapiens
ttctccctggcttctgcctcagctctgtccctctcatccgcgtatttggaagagatgtttttctcctcggctaacaa

SEQ ID NO: 55825 - DNA, 77 bp, Homo sapiens
ttctgcctcagctctgtccctctcatccgcgtatttggaagagatgtttttctcctcggctaacaactacaacacaa

SEQ ID NO: 55826 - DNA, 74 bp, Homo sapiens
ctctgtccctctcatccgcgtatttggaagagatgtttttctcctcggctaacaactacaacacaagacccaga

SEQ ID NO: 55827 - DNA, 74 bp, Homo sapiens
tctcatccgcgtatttggaagagatgtttttctcctcggctaacaactacaacacaagacccagaggtgacttc

SEQ ID NO: 55828 - DNA, 74 bp, Homo sapiens
taacaactacaacacaagacccagaggtgacttctaggcatatccggggtcagcgtcactgaattgtaaatacc

SEQ ID NO: 55829 - DNA, 72 bp, Homo sapiens
ctacaacacaagacccagaggtgacttctaggcatatccggggtcagcgtcactgaattgtaaataccgggg

SEQ ID NO: 55830 - DNA, 71 bp, Homo sapiens
acccagaggtgacttctaggcatatccggggtcagcgtcactgaattgtaaataccgggggaagccctgtg

SEQ ID NO: 55831 - DNA, 76 bp, Homo sapiens
ttctaggcatatccggggtcagcgtcactgaattgtaaataccgggggaagccctgtgtcctgctgaatgtattga

SEQ ID NO: 55832 - DNA, 75 bp, Homo sapiens
atatccggggtcagcgtcactgaattgtaaataccgggggaagccctgtgtcctgctgaatgtattgaggtgcag

SEQ ID NO: 55833 - DNA, 77 bp, Homo sapiens
agcgtcactgaattgtaaataccgggggaagccctgtgtcctgctgaatgtattgaggtgcaggtgtaagcagtgta

SEQ ID NO: 55834 - DNA, 75 bp, Homo sapiens
ctgaattgtaaataccgggggaagccctgtgtcctgctgaatgtattgaggtgcaggtgtaagcagtgtaggtta

SEQ ID NO: 55835 - DNA, 76 bp, Homo sapiens
taaataccgggggaagccctgtgtcctgctgaatgtattgaggtgcaggtgtaagcagtgtaggttagctatggga

SEQ ID NO: 55836 - DNA, 79 bp, Homo sapiens
aagccctgtgtcctgctgaatgtattgaggtgcaggtgtaagcagtgtaggttagctatgggagtaatttatataatca

SEQ ID NO: 55837 - DNA, 82 bp, Homo sapiens
tcctgctgaatgtattgaggtgcaggtgtaagcagtgtaggttagctatgggagtaatttatataatcatctggcgttctga

SEQ ID NO: 55838 - DNA, 79 bp, Homo sapiens
atgtattgaggtgcaggtgtaagcagtgtaggttagctatgggagtaatttatataatcatctggcgttctgacttcta

SEQ ID NO: 55839 - DNA, 77 bp, Homo sapiens
caggtgtaagcagtgtaggttagctatgggagtaatttatataatcatctggcgttctgacttctacatcaacctta

SEQ ID NO: 55840 - DNA, 81 bp, Homo sapiens
taagcagtgtaggttagctatgggagtaatttatataatcatctggcgttctgacttctacatcaaccttatgcagagcca

SEQ ID NO: 55841 - DNA, 81 bp, Homo sapiens
taggttagctatgggagtaatttatataatcatctggcgttctgacttctacatcaaccttatgcagagccagaaatcagc

SEQ ID NO: 55842 - DNA, 78 bp, Homo sapiens
agtaatttatataatcatctggcgttctgacttctacatcaaccttatgcagagccagaaatcagctgacttgttttt

SEQ ID NO: 55843 - DNA, 78 bp, Homo sapiens
tttatataatcatctggcgttctgacttctacatcaaccttatgcagagccagaaatcagctgacttgtttttttttg

SEQ ID NO: 55844 - DNA, 75 bp, Homo sapiens
atctggcgttctgacttctacatcaaccttatgcagagccagaaatcagctgacttgtttttttttgttggtttg

SEQ ID NO: 55845 - DNA, 76 bp, Homo sapiens
acacctggccaaatccttgtgcttcgaaaccactagacctgcccacgttgcttagagcacactgaggtcaaagtga

SEQ ID NO: 55846 - DNA, 74 bp, Homo sapiens
aaatccttgtgcttcgaaaccactagacctgcccacgttgcttagagcacactgaggtcaaagtgagatttaaa

SEQ ID NO: 55847 - DNA, 78 bp, Homo sapiens
ttgtgcttcgaaaccactagacctgcccacgttgcttagagcacactgaggtcaaagtgagatttaaagctgccagaa

SEQ ID NO: 55848 - DNA, 76 bp, Homo sapiens
actagacctgcccacgttgcttagagcacactgaggtcaaagtgagatttaaagctgccagaagctagttattagt

SEQ ID NO: 55849 - DNA, 75 bp, Homo sapiens
acctgcccacgttgcttagagcacactgaggtcaaagtgagatttaaagctgccagaagctagttattagtttgt

SEQ ID NO: 55850 - DNA, 77 bp, Homo sapiens
cttagagcacactgaggtcaaagtgagatttaaagctgccagaagctagttattagtttgtttcatggccacaagta

SEQ ID NO: 55851 - DNA, 76 bp, Homo sapiens
ctgaggtcaaagtgagatttaaagctgccagaagctagttattagtttgtttcatggccacaagtagctattaata

SEQ ID NO: 55852 - DNA, 76 bp, Homo sapiens
gtcaaagtgagatttaaagctgccagaagctagttattagtttgtttcatggccacaagtagctattaatatctta

SEQ ID NO: 55853 - DNA, 75 bp, Homo sapiens
taaagctgccagaagctagttattagtttgtttcatggccacaagtagctattaatatcttacaaaagtatccta

SEQ ID NO: 55854 - DNA, 75 bp, Homo sapiens
cagaagctagttattagtttgtttcatggccacaagtagctattaatatcttacaaaagtatcctaagagcctca

SEQ ID NO: 55855 - DNA, 72 bp, Homo sapiens
attagtttgtttcatggccacaagtagctattaatatcttacaaaagtatcctaagagcctcagtagggaaa

SEQ ID NO: 55856 - DNA, 73 bp, Homo sapiens
tttgtttcatggccacaagtagctattaatatcttacaaaagtatcctaagagcctcagtagggaaatggtaa

SEQ ID NO: 55857 - DNA, 72 bp, Homo sapiens
acaagtagctattaatatcttacaaaagtatcctaagagcctcagtagggaaatggtaagcatgggtggccc

SEQ ID NO: 55858 - DNA, 76 bp, Homo sapiens
attaatatcttacaaaagtatcctaagagcctcagtagggaaatggtaagcatgggtggccctgcacacatatctc

SEQ ID NO: 55859 - DNA, 78 bp, Homo sapiens
atcttacaaaagtatcctaagagcctcagtagggaaatggtaagcatgggtggccctgcacacatatctctctgcttg

SEQ ID NO: 55860 - DNA, 81 bp, Homo sapiens
agtatcctaagagcctcagtagggaaatggtaagcatgggtggccctgcacacatatctctctgcttggagaagcaactca

SEQ ID NO: 55861 - DNA, 82 bp, Homo sapiens
agcctcagtagggaaatggtaagcatgggtggccctgcacacatatctctctgcttggagaagcaactcagagaacattcca

SEQ ID NO: 55862 - DNA, 79 bp, Homo sapiens
acattccatgctcacgttaatctcatcttcagagagaacagagcagattataaattgtaacatccaaaagccaaacttc

SEQ ID NO: 55863 - DNA, 78 bp, Homo sapiens
atgctcacgttaatctcatcttcagagagaacagagcagattataaattgtaacatccaaaagccaaacttccagtat

SEQ ID NO: 55864 - DNA, 79 bp, Homo sapiens
ttaatctcatcttcagagagaacagagcagattataaattgtaacatccaaaagccaaacttccagtattcagcaaaga

SEQ ID NO: 55865 - DNA, 75 bp, Homo sapiens
agagagaacagagcagattataaattgtaacatccaaaagccaaacttccagtattcagcaaagacagggacctc

SEQ ID NO: 55866 - DNA, 73 bp, Homo sapiens
aacagagcagattataaattgtaacatccaaaagccaaacttccagtattcagcaaagacagggacctctaaa

SEQ ID NO: 55867 - DNA, 74 bp, Homo sapiens
ttataaattgtaacatccaaaagccaaacttccagtattcagcaaagacagggacctctaaatggcacagtcaa

SEQ ID NO: 55868 - DNA, 74 bp, Homo sapiens
tgtaacatccaaaagccaaacttccagtattcagcaaagacagggacctctaaatggcacagtcaacacaaaaa

SEQ ID NO: 55869 - DNA, 73 bp, Homo sapiens
aaagccaaacttccagtattcagcaaagacagggacctctaaatggcacagtcaacacaaaaatcccacacta

SEQ ID NO: 55870 - DNA, 79 bp, Homo sapiens
cttccagtattcagcaaagacagggacctctaaatggcacagtcaacacaaaaatcccacactatgtgtgccactgcac

SEQ ID NO: 55871 - DNA, 80 bp, Homo sapiens
aaagacagggacctctaaatggcacagtcaacacaaaaatcccacactatgtgtgccactgcactacactctatgtgaca

SEQ ID NO: 55872 - DNA, 79 bp, Homo sapiens
acctctaaatggcacagtcaacacaaaaatcccacactatgtgtgccactgcactacactctatgtgacaggaaaataa

SEQ ID NO: 55873 - DNA, 80 bp, Homo sapiens
taaatggcacagtcaacacaaaaatcccacactatgtgtgccactgcactacactctatgtgacaggaaaataaaagcaa

SEQ ID NO: 55874 - DNA, 76 bp, Homo sapiens
aacacaaaaatcccacactatgtgtgccactgcactacactctatgtgacaggaaaataaaagcaacctcaggcct

SEQ ID NO: 55875 - DNA, 77 bp, Homo sapiens
aaaatcccacactatgtgtgccactgcactacactctatgtgacaggaaaataaaagcaacctcaggccttcaacca

SEQ ID NO: 55876 - DNA, 81 bp, Homo sapiens
tatgtgtgccactgcactacactctatgtgacaggaaaataaaagcaacctcaggccttcaaccagataacgaagcattga

SEQ ID NO: 55877 - DNA, 79 bp, Homo sapiens
actgcactacactctatgtgacaggaaaataaaagcaacctcaggccttcaaccagataacgaagcattgaagatgagc

SEQ ID NO: 55878 - DNA, 79 bp, Homo sapiens
acactctatgtgacaggaaaataaaagcaacctcaggccttcaaccagataacgaagcattgaagatgagctgacagcc

SEQ ID NO: 55879 - DNA, 77 bp, Homo sapiens
ggaaaataaaagcaacctcaggccttcaaccagataacgaagcattgaagatgagctgacagcccagaggagaggta

SEQ ID NO: 55880 - DNA, 80 bp, Homo sapiens
ataaaagcaacctcaggccttcaaccagataacgaagcattgaagatgagctgacagcccagaggagaggtagctgatgg

SEQ ID NO: 55881 - DNA, 79 bp, Homo sapiens
aggccttcaaccagataacgaagcattgaagatgagctgacagcccagaggagaggtagctgatgggaagaggagaaac

SEQ ID NO: 55882 - DNA, 82 bp, Homo sapiens
cagataacgaagcattgaagatgagctgacagcccagaggagaggtagctgatgggaagaggagaaactgggatgttatcta

SEQ ID NO: 55883 - DNA, 80 bp, Homo sapiens
aacgaagcattgaagatgagctgacagcccagaggagaggtagctgatgggaagaggagaaactgggatgttatctagaa

SEQ ID NO: 55884 - DNA, 80 bp, Homo sapiens
aagatgagctgacagcccagaggagaggtagctgatgggaagaggagaaactgggatgttatctagaatcctgacactag

SEQ ID NO: 55885 - DNA, 78 bp, Homo sapiens
agcccagaggagaggtagctgatgggaagaggagaaactgggatgttatctagaatcctgacactaggaggtcagtca

SEQ ID NO: 55886 - DNA, 74 bp, Homo sapiens
tgatgggaagaggagaaactgggatgttatctagaatcctgacactaggaggtcagtcagggaggggtagggaa

SEQ ID NO: 55887 - DNA, 73 bp, Homo sapiens
aagaggagaaactgggatgttatctagaatcctgacactaggaggtcagtcagggaggggtagggaacctgca

SEQ ID NO: 55888 - DNA, 76 bp, Homo sapiens
aactgggatgttatctagaatcctgacactaggaggtcagtcagggaggggtagggaacctgcaggcatctggcat

SEQ ID NO: 55889 - DNA, 79 bp, Homo sapiens
tatctagaatcctgacactaggaggtcagtcagggaggggtagggaacctgcaggcatctggcatttagcctcactgta

SEQ ID NO: 55890 - DNA, 76 bp, Homo sapiens
acactaggaggtcagtcagggaggggtagggaacctgcaggcatctggcatttagcctcactgtacaatcctcatt

SEQ ID NO: 55891 - DNA, 75 bp, Homo sapiens
aggtcagtcagggaggggtagggaacctgcaggcatctggcatttagcctcactgtacaatcctcattttattta

SEQ ID NO: 55892 - DNA, 71 bp, Homo sapiens
cgtgcctggcctctcaaactgatttttagaataaccctgagtcacttgtaaactaaatcatatttactaaa

SEQ ID NO: 55893 - DNA, 70 bp, Homo sapiens
ggcctctcaaactgatttttagaataaccctgagtcacttgtaaactaaatcatatttactaaataataa

SEQ ID NO: 55894 - DNA, 70 bp, Homo sapiens
actgatttttagaataaccctgagtcacttgtaaactaaatcatatttactaaataataatgtatcttaa

SEQ ID NO: 55895 - DNA, 69 bp, Homo sapiens
agaataaccctgagtcacttgtaaactaaatcatatttactaaataataatgtatcttaaaagttggta

SEQ ID NO: 55896 - DNA, 68 bp, Homo sapiens
tgagtcacttgtaaactaaatcatatttactaaataataatgtatcttaaaagttggtatttaggggt

SEQ ID NO: 55897 - DNA, 67 bp, Homo sapiens
ctaaatcatatttactaaataataatgtatcttaaaagttggtatttaggggtttgggtcatacagg

SEQ ID NO: 55898 - DNA, 66 bp, Homo sapiens
tttactaaataataatgtatcttaaaagttggtatttaggggtttgggtcatacaggggtctccat

SEQ ID NO: 55899 - DNA, 67 bp, Homo sapiens
aataatgtatcttaaaagttggtatttaggggtttgggtcatacaggggtctccatttatcgtacaa

SEQ ID NO: 55900 - DNA, 65 bp, Homo sapiens
cttaaaagttggtatttaggggtttgggtcatacaggggtctccatttatcgtacaattaagatt

SEQ ID NO: 55901 - DNA, 68 bp, Homo sapiens
aagttggtatttaggggtttgggtcatacaggggtctccatttatcgtacaattaagatttgtgaatc

SEQ ID NO: 55902 - DNA, 73 bp, Homo sapiens
gggtttgggtcatacaggggtctccatttatcgtacaattaagatttgtgaatctcatcacatgtaagtttta

SEQ ID NO: 55903 - DNA, 73 bp, Homo sapiens
ggtttgggtcatacaggggtctccatttatcgtacaattaagatttgtgaatctcatcacatgtaagttttac

SEQ ID NO: 55904 - DNA, 73 bp, Homo sapiens
gtcatacaggggtctccatttatcgtacaattaagatttgtgaatctcatcacatgtaagttttaccccaaaa

SEQ ID NO: 55905 - DNA, 72 bp, Homo sapiens
atacaggggtctccatttatcgtacaattaagatttgtgaatctcatcacatgtaagttttaccccaaaaga

SEQ ID NO: 55906 - DNA, 72 bp, Homo sapiens
gggtctccatttatcgtacaattaagatttgtgaatctcatcacatgtaagttttaccccaaaagaagcaaa

SEQ ID NO: 55907 - DNA, 72 bp, Homo sapiens
ctccatttatcgtacaattaagatttgtgaatctcatcacatgtaagttttaccccaaaagaagcaaaattg

SEQ ID NO: 55908 - DNA, 71 bp, Homo sapiens
tttatcgtacaattaagatttgtgaatctcatcacatgtaagttttaccccaaaagaagcaaaattgtgtt

SEQ ID NO: 55909 - DNA, 70 bp, Homo sapiens
cgtacaattaagatttgtgaatctcatcacatgtaagttttaccccaaaagaagcaaaattgtgtttaaa

SEQ ID NO: 55910 - DNA, 69 bp, Homo sapiens
agatttgtgaatctcatcacatgtaagttttaccccaaaagaagcaaaattgtgtttaaaaataaactc

SEQ ID NO: 55911 - DNA, 70 bp, Homo sapiens
tgtgaatctcatcacatgtaagttttaccccaaaagaagcaaaattgtgtttaaaaataaactctaatta

SEQ ID NO: 55912 - DNA, 70 bp, Homo sapiens
ctcatcacatgtaagttttaccccaaaagaagcaaaattgtgtttaaaaataaactctaattaatatgca

SEQ ID NO: 55913 - DNA, 66 bp, Homo sapiens
agttttaccccaaaagaagcaaaattgtgtttaaaaataaactctaattaatatgcaatgttgagg

SEQ ID NO: 55914 - DNA, 68 bp, Homo sapiens
cccaaaagaagcaaaattgtgtttaaaaataaactctaattaatatgcaatgttgaggtgtggaaggg

SEQ ID NO: 55915 - DNA, 72 bp, Homo sapiens
gcaaaattgtgtttaaaaataaactctaattaatatgcaatgttgaggtgtggaaggggaaatgtactgaca

SEQ ID NO: 55916 - DNA, 74 bp, Homo sapiens
ttaaaaataaactctaattaatatgcaatgttgaggtgtggaaggggaaatgtactgacatctgtaatttgctc

SEQ ID NO: 55917 - DNA, 78 bp, Homo sapiens
ttaatatgcaatgttgaggtgtggaaggggaaatgtactgacatctgtaatttgctctgaaatgtacccaagagataa

SEQ ID NO: 55918 - DNA, 78 bp, Homo sapiens
aatgttgaggtgtggaaggggaaatgtactgacatctgtaatttgctctgaaatgtacccaagagataaggcatgata

SEQ ID NO: 55919 - DNA, 78 bp, Homo sapiens
gaaggggaaatgtactgacatctgtaatttgctctgaaatgtacccaagagataaggcatgatagatagaattagtct

SEQ ID NO: 55920 - DNA, 79 bp, Homo sapiens
ggaaatgtactgacatctgtaatttgctctgaaatgtacccaagagataaggcatgatagatagaattagtctttataa

SEQ ID NO: 55921 - DNA, 78 bp, Homo sapiens
tctgtaatttgctctgaaatgtacccaagagataaggcatgatagatagaattagtctttataaataaatatgtgggc

SEQ ID NO: 55922 - DNA, 75 bp, Homo sapiens
aaatgtacccaagagataaggcatgatagatagaattagtctttataaataaatatgtgggccgggcatagtggc

SEQ ID NO: 55923 - DNA, 77 bp, Homo sapiens
tgtctcaaaataagtatctgataaagttcatataatacagtgtcaatgactgaatccaggtggtggccttaaaggtg

SEQ ID NO: 55924 - DNA, 75 bp, Homo sapiens
aaaataagtatctgataaagttcatataatacagtgtcaatgactgaatccaggtggtggccttaaaggtgttca

SEQ ID NO: 55925 - DNA, 74 bp, Homo sapiens
ataaagttcatataatacagtgtcaatgactgaatccaggtggtggccttaaaggtgttcaccgtacaattctg

SEQ ID NO: 55926 - DNA, 75 bp, Homo sapiens
ttcatataatacagtgtcaatgactgaatccaggtggtggccttaaaggtgttcaccgtacaattctgtcaactt

SEQ ID NO: 55927 - DNA, 74 bp, Homo sapiens
agtgtcaatgactgaatccaggtggtggccttaaaggtgttcaccgtacaattctgtcaactttgctgtgtact

SEQ ID NO: 55928 - DNA, 72 bp, Homo sapiens
tgaatccaggtggtggccttaaaggtgttcaccgtacaattctgtcaactttgctgtgtacttggaatttta

SEQ ID NO: 55929 - DNA, 72 bp, Homo sapiens
tggtggccttaaaggtgttcaccgtacaattctgtcaactttgctgtgtacttggaattttacagaatgaaa

SEQ ID NO: 55930 - DNA, 71 bp, Homo sapiens
ccttaaaggtgttcaccgtacaattctgtcaactttgctgtgtacttggaattttacagaatgaaatctta

SEQ ID NO: 55931 - DNA, 71 bp, Homo sapiens
accgtacaattctgtcaactttgctgtgtacttggaattttacagaatgaaatcttagggaagagtggtat

SEQ ID NO: 55932 - DNA, 71 bp, Homo sapiens
caattctgtcaactttgctgtgtacttggaattttacagaatgaaatcttagggaagagtggtattaaaag

SEQ ID NO: 55933 - DNA, 71 bp, Homo sapiens
ctttgctgtgtacttggaattttacagaatgaaatcttagggaagagtggtattaaaagtatagaaactga

SEQ ID NO: 55934 - DNA, 69 bp, Homo sapiens
cttggaattttacagaatgaaatcttagggaagagtggtattaaaagtatagaaactgaattacttgga

SEQ ID NO: 55935 - DNA, 71 bp, Homo sapiens
tttacagaatgaaatcttagggaagagtggtattaaaagtatagaaactgaattacttggaatactactca

SEQ ID NO: 55936 - DNA, 69 bp, Homo sapiens
gaaatcttagggaagagtggtattaaaagtatagaaactgaattacttggaatactactcaataggtat

SEQ ID NO: 55937 - DNA, 69 bp, Homo sapiens
agggaagagtggtattaaaagtatagaaactgaattacttggaatactactcaataggtattcagtaaa

SEQ ID NO: 55938 - DNA, 72 bp, Homo sapiens
tggtattaaaagtatagaaactgaattacttggaatactactcaataggtattcagtaaatacatttagtga

SEQ ID NO: 55939 - DNA, 73 bp, Homo sapiens
agaaactgaattacttggaatactactcaataggtattcagtaaatacatttagtgaataaataagcacctca

SEQ ID NO: 55940 - DNA, 74 bp, Homo sapiens
tgaattacttggaatactactcaataggtattcagtaaatacatttagtgaataaataagcacctcattccttc

SEQ ID NO: 55941 - DNA, 75 bp, Homo sapiens
ggaatactactcaataggtattcagtaaatacatttagtgaataaataagcacctcattccttcttcaggctaga

SEQ ID NO: 55942 - DNA, 75 bp, Homo sapiens
taggtattcagtaaatacatttagtgaataaataagcacctcattccttcttcaggctagaaactaaggcatcac

SEQ ID NO: 55943 - DNA, 76 bp, Homo sapiens
attcagtaaatacatttagtgaataaataagcacctcattccttcttcaggctagaaactaaggcatcaccatgtg

SEQ ID NO: 55944 - DNA, 78 bp, Homo sapiens
atttagtgaataaataagcacctcattccttcttcaggctagaaactaaggcatcaccatgtgtgcaggtgaccctca

SEQ ID NO: 55945 - DNA, 80 bp, Homo sapiens
tcattccttcttcaggctagaaactaaggcatcaccatgtgtgcaggtgaccctcatggtgctggtacccagaaaagtca

SEQ ID NO: 55946 - DNA, 82 bp, Homo sapiens
tcttcaggctagaaactaaggcatcaccatgtgtgcaggtgaccctcatggtgctggtacccagaaaagtcacagtcatcaa

SEQ ID NO: 55947 - DNA, 78 bp, Homo sapiens
aaactaaggcatcaccatgtgtgcaggtgaccctcatggtgctggtacccagaaaagtcacagtcatcaaggcttctt

SEQ ID NO: 55948 - DNA, 80 bp, Homo sapiens
atgtgtgcaggtgaccctcatggtgctggtacccagaaaagtcacagtcatcaaggcttctttgccatccttactgtgac

SEQ ID NO: 55949 - DNA, 77 bp, Homo sapiens
ggtgaccctcatggtgctggtacccagaaaagtcacagtcatcaaggcttctttgccatccttactgtgacctggta

SEQ ID NO: 55950 - DNA, 79 bp, Homo sapiens
tgctggtacccagaaaagtcacagtcatcaaggcttctttgccatccttactgtgacctggtagcgttaatgctccatg

SEQ ID NO: 55951 - DNA, 77 bp, Homo sapiens
agaaaagtcacagtcatcaaggcttctttgccatccttactgtgacctggtagcgttaatgctccatggtcgcccaa

SEQ ID NO: 55952 - DNA, 78 bp, Homo sapiens
acagtcatcaaggcttctttgccatccttactgtgacctggtagcgttaatgctccatggtcgcccaagacaagataa

SEQ ID NO: 55953 - DNA, 78 bp, Homo sapiens
atcaaggcttctttgccatccttactgtgacctggtagcgttaatgctccatggtcgcccaagacaagataagacagc

SEQ ID NO: 55954 - DNA, 78 bp, Homo sapiens
ctttgccatccttactgtgacctggtagcgttaatgctccatggtcgcccaagacaagataagacagcctcccatggc

SEQ ID NO: 55955 - DNA, 78 bp, Homo sapiens
cttactgtgacctggtagcgttaatgctccatggtcgcccaagacaagataagacagcctcccatggctccccacaga

SEQ ID NO: 55956 - DNA, 81 bp, Homo sapiens
ttaatgctccatggtcgcccaagacaagataagacagcctcccatggctccccacagagtggagaggggatgcaggcacag

SEQ ID NO: 55957 - DNA, 81 bp, Homo sapiens
aagacaagataagacagcctcccatggctccccacagagtggagaggggatgcaggcacaggccagagccacgcgtcatac

SEQ ID NO: 55958 - DNA, 83 bp, Homo sapiens
atggctccccacagagtggagaggggatgcaggcacaggccagagccacgcgtcatactctgcagagctgattccccaaccca

SEQ ID NO: 55959 - DNA, 84 bp, Homo sapiens
agagtggagaggggatgcaggcacaggccagagccacgcgtcatactctgcagagctgattccccaacccagcgtccatggcca

SEQ ID NO: 55960 - DNA, 83 bp, Homo sapiens
agaggggatgcaggcacaggccagagccacgcgtcatactctgcagagctgattccccaacccagcgtccatggccagagtgg

SEQ ID NO: 55961 - DNA, 79 bp, Homo sapiens
tcatactctgcagagctgattccccaacccagcgtccatggccagagtgggggacaccccacgccctctacctgatcaa

SEQ ID NO: 55962 - DNA, 74 bp, Homo sapiens
cagagctgattccccaacccagcgtccatggccagagtgggggacaccccacgccctctacctgatcaaatttc

SEQ ID NO: 55963 - DNA, 72 bp, Homo sapiens
ctgattccccaacccagcgtccatggccagagtgggggacaccccacgccctctacctgatcaaatttcctc

SEQ ID NO: 55964 - DNA, 72 bp, Homo sapiens
atggccagagtgggggacaccccacgccctctacctgatcaaatttcctctgcttcttttccaggttggaca

SEQ ID NO: 55965 - DNA, 72 bp, Homo sapiens
gggacaccccacgccctctacctgatcaaatttcctctgcttcttttccaggttggacacgagttgccgctg

SEQ ID NO: 55966 - DNA, 72 bp, Homo sapiens
acgccctctacctgatcaaatttcctctgcttcttttccaggttggacacgagttgccgctggttgtccaaa

SEQ ID NO: 55967 - DNA, 70 bp, Homo sapiens
aaatttcctctgcttcttttccaggttggacacgagttgccgctggttgtccaaatcaacaaccaggtcg

SEQ ID NO: 55968 - DNA, 74 bp, Homo sapiens
cttcttttccaggttggacacgagttgccgctggttgtccaaatcaacaaccaggtcgtccagctcctgctgaa

SEQ ID NO: 55969 - DNA, 75 bp, Homo sapiens
aggttggacacgagttgccgctggttgtccaaatcaacaaccaggtcgtccagctcctgctgaagcctgttcttg

SEQ ID NO: 55970 - DNA, 74 bp, Homo sapiens
acacgagttgccgctggttgtccaaatcaacaaccaggtcgtccagctcctgctgaagcctgttcttggtcttt

SEQ ID NO: 55971 - DNA, 76 bp, Homo sapiens
agctcctgctgaagcctgttcttggtcttttccagtttatcataagcggccgccttctcctcgtactgctgggtga

SEQ ID NO: 55972 - DNA, 74 bp, Homo sapiens
tgaagcctgttcttggtcttttccagtttatcataagcggccgccttctcctcgtactgctgggtgaggttctc

SEQ ID NO: 55973 - DNA, 73 bp, Homo sapiens
ttcttggtcttttccagtttatcataagcggccgccttctcctcgtactgctgggtgaggttctcgatctcct

SEQ ID NO: 55974 - DNA, 74 bp, Homo sapiens
ttccagtttatcataagcggccgccttctcctcgtactgctgggtgaggttctcgatctccttctggaacctct

SEQ ID NO: 55975 - DNA, 74 bp, Homo sapiens
tttatcataagcggccgccttctcctcgtactgctgggtgaggttctcgatctccttctggaacctcttcttcc

SEQ ID NO: 55976 - DNA, 74 bp, Homo sapiens
tgggtgaggttctcgatctccttctggaacctcttcttcccctcttccagagcttccacggtgctggcaaagtc

SEQ ID NO: 55977 - DNA, 76 bp, Homo sapiens
tctccttctggaacctcttcttcccctcttccagagcttccacggtgctggcaaagtcctgcagcttcttcttcga

SEQ ID NO: 55978 - DNA, 77 bp, Homo sapiens
tcttcttcccctcttccagagcttccacggtgctggcaaagtcctgcagcttcttcttcgagtcggagagctacaag

SEQ ID NO: 55979 - DNA, 79 bp, Homo sapiens
ctcttccagagcttccacggtgctggcaaagtcctgcagcttcttcttcgagtcggagagctacaaggacagcgtccag

SEQ ID NO: 55980 - DNA, 77 bp, Homo sapiens
agagcttccacggtgctggcaaagtcctgcagcttcttcttcgagtcggagagctacaaggacagcgtccagggtag

SEQ ID NO: 55981 - DNA, 76 bp, Homo sapiens
acggtgctggcaaagtcctgcagcttcttcttcgagtcggagagctacaaggacagcgtccagggtagggtgagag

SEQ ID NO: 55982 - DNA, 73 bp, Homo sapiens
aaagtcctgcagcttcttcttcgagtcggagagctacaaggacagcgtccagggtagggtgagagggggacca

SEQ ID NO: 55983 - DNA, 73 bp, Homo sapiens
agcttcttcttcgagtcggagagctacaaggacagcgtccagggtagggtgagagggggaccatgagtggccc

SEQ ID NO: 55984 - DNA, 73 bp, Homo sapiens
agagctacaaggacagcgtccagggtagggtgagagggggaccatgagtggcccctgtccctggccccacaga

SEQ ID NO: 55985 - DNA, 73 bp, Homo sapiens
aggacagcgtccagggtagggtgagagggggaccatgagtggcccctgtccctggccccacagactctgagaa

SEQ ID NO: 55986 - DNA, 75 bp, Homo sapiens
atgagtggcccctgtccctggccccacagactctgagaagcgaagaccatgtctcctcgttggagaaacccaata

SEQ ID NO: 55987 - DNA, 74 bp, Homo sapiens
cctggccccacagactctgagaagcgaagaccatgtctcctcgttggagaaacccaatagcaggggaagctggg

SEQ ID NO: 55988 - DNA, 74 bp, Homo sapiens
actctgagaagcgaagaccatgtctcctcgttggagaaacccaatagcaggggaagctggggggtcaagcacca

SEQ ID NO: 55989 - DNA, 74 bp, Homo sapiens
aagcgaagaccatgtctcctcgttggagaaacccaatagcaggggaagctggggggtcaagcaccatcgcacca

SEQ ID NO: 55990 - DNA, 73 bp, Homo sapiens
atgtctcctcgttggagaaacccaatagcaggggaagctggggggtcaagcaccatcgcaccaacactccacc

SEQ ID NO: 55991 - DNA, 75 bp, Homo sapiens
tcgttggagaaacccaatagcaggggaagctggggggtcaagcaccatcgcaccaacactccaccgcgatctgcc

SEQ ID NO: 55992 - DNA, 74 bp, Homo sapiens
aacccaatagcaggggaagctggggggtcaagcaccatcgcaccaacactccaccgcgatctgcctgcggggga

SEQ ID NO: 55993 - DNA, 80 bp, Homo sapiens
ggaagctggggggtcaagcaccatcgcaccaacactccaccgcgatctgcctgcgggggatctcagcgcagagaagttga

SEQ ID NO: 55994 - DNA, 82 bp, Homo sapiens
ggtcaagcaccatcgcaccaacactccaccgcgatctgcctgcgggggatctcagcgcagagaagttgagaggacccatgaa

SEQ ID NO: 55995 - DNA, 81 bp, Homo sapiens
agcaccatcgcaccaacactccaccgcgatctgcctgcgggggatctcagcgcagagaagttgagaggacccatgaaggaa

SEQ ID NO: 55996 - DNA, 79 bp, Homo sapiens
accaacactccaccgcgatctgcctgcgggggatctcagcgcagagaagttgagaggacccatgaaggaagcaaggaca

SEQ ID NO: 55997 - DNA, 79 bp, Homo sapiens
accgcgatctgcctgcgggggatctcagcgcagagaagttgagaggacccatgaaggaagcaaggacacggggcaggca

SEQ ID NO: 55998 - DNA, 80 bp, Homo sapiens
tgcgggggatctcagcgcagagaagttgagaggacccatgaaggaagcaaggacacggggcaggcacctggatgttgaga

SEQ ID NO: 55999 - DNA, 81 bp, Homo sapiens
atctcagcgcagagaagttgagaggacccatgaaggaagcaaggacacggggcaggcacctggatgttgagagtggagatg

SEQ ID NO: 56000 - DNA, 79 bp, Homo sapiens
agaagttgagaggacccatgaaggaagcaaggacacggggcaggcacctggatgttgagagtggagatgtggcgctcca

SEQ ID NO: 56001 - DNA, 79 bp, Homo sapiens
ttgagaggacccatgaaggaagcaaggacacggggcaggcacctggatgttgagagtggagatgtggcgctccaggttc

SEQ ID NO: 56002 - DNA, 79 bp, Homo sapiens
aaggaagcaaggacacggggcaggcacctggatgttgagagtggagatgtggcgctccaggttctgcttggcctccatc

SEQ ID NO: 56003 - DNA, 82 bp, Homo sapiens
acctggatgttgagagtggagatgtggcgctccaggttctgcttggcctccatctcctcgtccagctggtcttgcaggctgt

SEQ ID NO: 56004 - DNA, 81 bp, Homo sapiens
agtggagatgtggcgctccaggttctgcttggcctccatctcctcgtccagctggtcttgcaggctgttccgctcctcctc

SEQ ID NO: 56005 - DNA, 82 bp, Homo sapiens
atgtggcgctccaggttctgcttggcctccatctcctcgtccagctggtcttgcaggctgttccgctcctcctccagctggc

SEQ ID NO: 56006 - DNA, 82 bp, Homo sapiens
gcctccatctcctcgtccagctggtcttgcaggctgttccgctcctcctccagctggcgcagcttcgtagacacgttgagct

SEQ ID NO: 56007 - DNA, 82 bp, Homo sapiens
atctcctcgtccagctggtcttgcaggctgttccgctcctcctccagctggcgcagcttcgtagacacgttgagcttctgcc

SEQ ID NO: 56008 - DNA, 78 bp, Homo sapiens
ctggtcttgcaggctgttccgctcctcctccagctggcgcagcttcgtagacacgttgagcttctgccgggtttcttc

SEQ ID NO: 56009 - DNA, 78 bp, Homo sapiens
cttgcaggctgttccgctcctcctccagctggcgcagcttcgtagacacgttgagcttctgccgggtttcttcttgaa

SEQ ID NO: 56010 - DNA, 79 bp, Homo sapiens
gctcctcctccagctggcgcagcttcgtagacacgttgagcttctgccgggtttcttcttgaagcagctcctgcaaaag

SEQ ID NO: 56011 - DNA, 80 bp, Homo sapiens
tccagctggcgcagcttcgtagacacgttgagcttctgccgggtttcttcttgaagcagctcctgcaaaagggatgcaaa

SEQ ID NO: 56012 - DNA, 75 bp, Homo sapiens
agcttcgtagacacgttgagcttctgccgggtttcttcttgaagcagctcctgcaaaagggatgcaaagaggtcc

SEQ ID NO: 56013 - DNA, 74 bp, Homo sapiens
cgtagacacgttgagcttctgccgggtttcttcttgaagcagctcctgcaaaagggatgcaaagaggtcccagg

SEQ ID NO: 56014 - DNA, 74 bp, Homo sapiens
ttgagcttctgccgggtttcttcttgaagcagctcctgcaaaagggatgcaaagaggtcccagggacctgcccc

SEQ ID NO: 56015 - DNA, 70 bp, Homo sapiens
ccgggtttcttcttgaagcagctcctgcaaaagggatgcaaagaggtcccagggacctgccccgaggaag

SEQ ID NO: 56016 - DNA, 68 bp, Homo sapiens
agctcctgcaaaagggatgcaaagaggtcccagggacctgccccgaggaaggccaccccccaggtccc

SEQ ID NO: 56017 - DNA, 71 bp, Homo sapiens
agggacctgccccgaggaaggccaccccccaggtcccctggatgatgtggcaggacactcacctgggtgtc

SEQ ID NO: 56018 - DNA, 74 bp, Homo sapiens
aggaaggccaccccccaggtcccctggatgatgtggcaggacactcacctgggtgtcctggagctgggaactga

SEQ ID NO: 56019 - DNA, 74 bp, Homo sapiens
accccccaggtcccctggatgatgtggcaggacactcacctgggtgtcctggagctgggaactgagggacgcca

SEQ ID NO: 56020 - DNA, 75 bp, Homo sapiens
aggtcccctggatgatgtggcaggacactcacctgggtgtcctggagctgggaactgagggacgccacgtccttg

SEQ ID NO: 56021 - DNA, 72 bp, Homo sapiens
gagctgggaactgagggacgccacgtccttggccagcttaatggccttcccctcggcctcgttaagcatccc

SEQ ID NO: 56022 - DNA, 72 bp, Homo sapiens
gggaactgagggacgccacgtccttggccagcttaatggccttcccctcggcctcgttaagcatccctgtga

SEQ ID NO: 56023 - DNA, 74 bp, Homo sapiens
ccacgtccttggccagcttaatggccttcccctcggcctcgttaagcatccctgtgacgctctcaacttcattc

SEQ ID NO: 56024 - DNA, 74 bp, Homo sapiens
tccttggccagcttaatggccttcccctcggcctcgttaagcatccctgtgacgctctcaacttcattctaagg

SEQ ID NO: 56025 - DNA, 74 bp, Homo sapiens
cttaatggccttcccctcggcctcgttaagcatccctgtgacgctctcaacttcattctaagggtgccaagaga

SEQ ID NO: 56026 - DNA, 74 bp, Homo sapiens
ccctcggcctcgttaagcatccctgtgacgctctcaacttcattctaagggtgccaagagactggttagtcaaa

SEQ ID NO: 56027 - DNA, 76 bp, Homo sapiens
ctcgttaagcatccctgtgacgctctcaacttcattctaagggtgccaagagactggttagtcaaagcctctagaa

SEQ ID NO: 56028 - DNA, 74 bp, Homo sapiens
atccctgtgacgctctcaacttcattctaagggtgccaagagactggttagtcaaagcctctagaaggggatcc

SEQ ID NO: 56029 - DNA, 73 bp, Homo sapiens
tctcaacttcattctaagggtgccaagagactggttagtcaaagcctctagaaggggatcctcgttgaaagga

SEQ ID NO: 56030 - DNA, 69 bp, Homo sapiens
attctaagggtgccaagagactggttagtcaaagcctctagaaggggatcctcgttgaaaggagccctt

SEQ ID NO: 56031 - DNA, 70 bp, Homo sapiens
tgccaagagactggttagtcaaagcctctagaaggggatcctcgttgaaaggagccctttttactcaaaa

SEQ ID NO: 56032 - DNA, 69 bp, Homo sapiens
agagactggttagtcaaagcctctagaaggggatcctcgttgaaaggagccctttttactcaaaacaca

SEQ ID NO: 56033 - DNA, 71 bp, Homo sapiens
tctagaaggggatcctcgttgaaaggagccctttttactcaaaacacatgggctagtacttgaggtgttca

SEQ ID NO: 56034 - DNA, 72 bp, Homo sapiens
ctcgttgaaaggagccctttttactcaaaacacatgggctagtacttgaggtgttcactgattgagaaaata

SEQ ID NO: 56035 - DNA, 69 bp, Homo sapiens
aaaggagccctttttactcaaaacacatgggctagtacttgaggtgttcactgattgagaaaatacccg

SEQ ID NO: 56036 - DNA, 72 bp, Homo sapiens
tttttactcaaaacacatgggctagtacttgaggtgttcactgattgagaaaatacccgtgaggtatgggac

SEQ ID NO: 56037 - DNA, 70 bp, Homo sapiens
acacaaaaaaaacagaatctgtggcttgaagggaactccgtcacctatgagttgggaccctggccctaga

SEQ ID NO: 56038 - DNA, 73 bp, Homo sapiens
aacagaatctgtggcttgaagggaactccgtcacctatgagttgggaccctggccctagactctgtggttcta

SEQ ID NO: 56039 - DNA, 71 bp, Homo sapiens
tggcttgaagggaactccgtcacctatgagttgggaccctggccctagactctgtggttctaagaacttat

SEQ ID NO: 56040 - DNA, 73 bp, Homo sapiens
gtcacctatgagttgggaccctggccctagactctgtggttctaagaacttatttgagccccaatggtattga

SEQ ID NO: 56041 - DNA, 72 bp, Homo sapiens
atgagttgggaccctggccctagactctgtggttctaagaacttatttgagccccaatggtattgactggga

SEQ ID NO: 56042 - DNA, 73 bp, Homo sapiens
tggccctagactctgtggttctaagaacttatttgagccccaatggtattgactgggacctgatcccactaaa

SEQ ID NO: 56043 - DNA, 73 bp, Homo sapiens
actctgtggttctaagaacttatttgagccccaatggtattgactgggacctgatcccactaaatggatccta

SEQ ID NO: 56044 - DNA, 74 bp, Homo sapiens
taagaacttatttgagccccaatggtattgactgggacctgatcccactaaatggatcctagatccctgccaag

SEQ ID NO: 56045 - DNA, 74 bp, Homo sapiens
ttatttgagccccaatggtattgactgggacctgatcccactaaatggatcctagatccctgccaaggttggta

SEQ ID NO: 56046 - DNA, 75 bp, Homo sapiens
cccaatggtattgactgggacctgatcccactaaatggatcctagatccctgccaaggttggtagagacaaagca

SEQ ID NO: 56047 - DNA, 79 bp, Homo sapiens
tattgactgggacctgatcccactaaatggatcctagatccctgccaaggttggtagagacaaagcagcaggtctgaga

SEQ ID NO: 56048 - DNA, 78 bp, Homo sapiens
acctgatcccactaaatggatcctagatccctgccaaggttggtagagacaaagcagcaggtctgagagtccagacga

SEQ ID NO: 56049 - DNA, 79 bp, Homo sapiens
actaaatggatcctagatccctgccaaggttggtagagacaaagcagcaggtctgagagtccagacgaggtgctctggc

SEQ ID NO: 56050 - DNA, 81 bp, Homo sapiens
tagatccctgccaaggttggtagagacaaagcagcaggtctgagagtccagacgaggtgctctggctggtccactctctaa

SEQ ID NO: 56051 - DNA, 80 bp, Homo sapiens
caaggttggtagagacaaagcagcaggtctgagagtccagacgaggtgctctggctggtccactctctaaggctggagaa

SEQ ID NO: 56052 - DNA, 81 bp, Homo sapiens
ttggtagagacaaagcagcaggtctgagagtccagacgaggtgctctggctggtccactctctaaggctggagaagggaga

SEQ ID NO: 56053 - DNA, 80 bp, Homo sapiens
aagcagcaggtctgagagtccagacgaggtgctctggctggtccactctctaaggctggagaagggagaccaggatggta

SEQ ID NO: 56054 - DNA, 78 bp, Homo sapiens
tgagagtccagacgaggtgctctggctggtccactctctaaggctggagaagggagaccaggatggtacttgaacgtc

SEQ ID NO: 56055 - DNA, 74 bp, Homo sapiens
agacgaggtgctctggctggtccactctctaaggctggagaagggagaccaggatggtacttgaacgtcccagg

SEQ ID NO: 56056 - DNA, 77 bp, Homo sapiens
tctggctggtccactctctaaggctggagaagggagaccaggatggtacttgaacgtcccagggatgctgtcccatc

SEQ ID NO: 56057 - DNA, 73 bp, Homo sapiens
cactctctaaggctggagaagggagaccaggatggtacttgaacgtcccagggatgctgtcccatcccttcct

SEQ ID NO: 56058 - DNA, 74 bp, Homo sapiens
tctaaggctggagaagggagaccaggatggtacttgaacgtcccagggatgctgtcccatcccttccttcctca

SEQ ID NO: 56059 - DNA, 73 bp, Homo sapiens
aggatggtacttgaacgtcccagggatgctgtcccatcccttccttcctcactcctactctttgaccctgatg

SEQ ID NO: 56060 - DNA, 74 bp, Homo sapiens
tacttgaacgtcccagggatgctgtcccatcccttccttcctcactcctactctttgaccctgatggccaaagc

SEQ ID NO: 56061 - DNA, 76 bp, Homo sapiens
gggatgctgtcccatcccttccttcctcactcctactctttgaccctgatggccaaagccagagacgcaggcccta

SEQ ID NO: 56062 - DNA, 73 bp, Homo sapiens
tcccatcccttccttcctcactcctactctttgaccctgatggccaaagccagagacgcaggccctaaaggta

SEQ ID NO: 56063 - DNA, 70 bp, Homo sapiens
ccttcctcactcctactctttgaccctgatggccaaagccagagacgcaggccctaaaggtaaaaacgtc

SEQ ID NO: 56064 - DNA, 72 bp, Homo sapiens
tcctactctttgaccctgatggccaaagccagagacgcaggccctaaaggtaaaaacgtcctctctgtattc

SEQ ID NO: 56065 - DNA, 72 bp, Homo sapiens
tttgaccctgatggccaaagccagagacgcaggccctaaaggtaaaaacgtcctctctgtattctctggctt

SEQ ID NO: 56066 - DNA, 73 bp, Homo sapiens
agagacgcaggccctaaaggtaaaaacgtcctctctgtattctctggcttttactccctagtgtctctgcata

SEQ ID NO: 56067 - DNA, 70 bp, Homo sapiens
gccctaaaggtaaaaacgtcctctctgtattctctggcttttactccctagtgtctctgcataagtccct

SEQ ID NO: 56068 - DNA, 70 bp, Homo sapiens
aaaggtaaaaacgtcctctctgtattctctggcttttactccctagtgtctctgcataagtccctttgag

SEQ ID NO: 56069 - DNA, 74 bp, Homo sapiens
acgtcctctctgtattctctggcttttactccctagtgtctctgcataagtccctttgaggctgttagcctacc

SEQ ID NO: 56070 - DNA, 75 bp, Homo sapiens
tgtattctctggcttttactccctagtgtctctgcataagtccctttgaggctgttagcctacccctccatctct

SEQ ID NO: 56071 - DNA, 74 bp, Homo sapiens
cttttactccctagtgtctctgcataagtccctttgaggctgttagcctacccctccatctcttccattgacaa

SEQ ID NO: 56072 - DNA, 80 bp, Homo sapiens
tagtgtctctgcataagtccctttgaggctgttagcctacccctccatctcttccattgacaaggaggatatgaatgatc

SEQ ID NO: 56073 - DNA, 78 bp, Homo sapiens
ataagtccctttgaggctgttagcctacccctccatctcttccattgacaaggaggatatgaatgatcttgacactgc

SEQ ID NO: 56074 - DNA, 81 bp, Homo sapiens
tccctttgaggctgttagcctacccctccatctcttccattgacaaggaggatatgaatgatcttgacactgcttatatga

SEQ ID NO: 56075 - DNA, 85 bp, Homo sapiens
ctccatctcttccattgacaaggaggatatgaatgatcttgacactgcttatatgagggcggcaaaagccctgctctcaactgca

SEQ ID NO: 56076 - DNA, 85 bp, Homo sapiens
ttccattgacaaggaggatatgaatgatcttgacactgcttatatgagggcggcaaaagccctgctctcaactgcatgtgagaaa

SEQ ID NO: 56077 - DNA, 81 bp, Homo sapiens
acaaggaggatatgaatgatcttgacactgcttatatgagggcggcaaaagccctgctctcaactgcatgtgagaaaaaaa

SEQ ID NO: 56078 - DNA, 83 bp, Homo sapiens
atatgaatgatcttgacactgcttatatgagggcggcaaaagccctgctctcaactgcatgtgagaaaaaaacatctcactta

SEQ ID NO: 56079 - DNA, 79 bp, Homo sapiens
atcttgacactgcttatatgagggcggcaaaagccctgctctcaactgcatgtgagaaaaaaacatctcacttaattct

SEQ ID NO: 56080 - DNA, 76 bp, Homo sapiens
cttatatgagggcggcaaaagccctgctctcaactgcatgtgagaaaaaaacatctcacttaattcttccctcgcc

SEQ ID NO: 56081 - DNA, 74 bp, Homo sapiens
aagccctgctctcaactgcatgtgagaaaaaaacatctcacttaattcttccctcgccccttggtccctggctg

SEQ ID NO: 56082 - DNA, 73 bp, Homo sapiens
aactgcatgtgagaaaaaaacatctcacttaattcttccctcgccccttggtccctggctgtggacatgttaa

SEQ ID NO: 56083 - DNA, 69 bp, Homo sapiens
agaaaaaaacatctcacttaattcttccctcgccccttggtccctggctgtggacatgttaaacatttg

SEQ ID NO: 56084 - DNA, 70 bp, Homo sapiens
aaacatctcacttaattcttccctcgccccttggtccctggctgtggacatgttaaacatttgtgaaaac

SEQ ID NO: 56085 - DNA, 69 bp, Homo sapiens
ttaattcttccctcgccccttggtccctggctgtggacatgttaaacatttgtgaaaactttggccacg

SEQ ID NO: 56086 - DNA, 73 bp, Homo sapiens
tcgccccttggtccctggctgtggacatgttaaacatttgtgaaaactttggccacgtccccatgagtggcaa

SEQ ID NO: 56087 - DNA, 73 bp, Homo sapiens
tccctggctgtggacatgttaaacatttgtgaaaactttggccacgtccccatgagtggcaaggcagggtaaa

SEQ ID NO: 56088 - DNA, 75 bp, Homo sapiens
tggacatgttaaacatttgtgaaaactttggccacgtccccatgagtggcaaggcagggtaaatggctatgccaa

SEQ ID NO: 56089 - DNA, 73 bp, Homo sapiens
ttaaacatttgtgaaaactttggccacgtccccatgagtggcaaggcagggtaaatggctatgccaagtgaaa

SEQ ID NO: 56090 - DNA, 74 bp, Homo sapiens
ttgtgaaaactttggccacgtccccatgagtggcaaggcagggtaaatggctatgccaagtgaaagaagaccaa

SEQ ID NO: 56091 - DNA, 73 bp, Homo sapiens
tttggccacgtccccatgagtggcaaggcagggtaaatggctatgccaagtgaaagaagaccaaagacaaaaa

SEQ ID NO: 56092 - DNA, 78 bp, Homo sapiens
atgagtggcaaggcagggtaaatggctatgccaagtgaaagaagaccaaagacaaaaagaccatgtcattcagcagct

SEQ ID NO: 56093 - DNA, 74 bp, Homo sapiens
aaggcagggtaaatggctatgccaagtgaaagaagaccaaagacaaaaagaccatgtcattcagcagcttaaaa

SEQ ID NO: 56094 - DNA, 75 bp, Homo sapiens
taaatggctatgccaagtgaaagaagaccaaagacaaaaagaccatgtcattcagcagcttaaaacccctcaaca

SEQ ID NO: 56095 - DNA, 75 bp, Homo sapiens
agaagaccaaagacaaaaagaccatgtcattcagcagcttaaaacccctcaacagcttcacattgcccagagtaa

SEQ ID NO: 56096 - DNA, 77 bp, Homo sapiens
aagacaaaaagaccatgtcattcagcagcttaaaacccctcaacagcttcacattgcccagagtaaggatcaacata

SEQ ID NO: 56097 - DNA, 79 bp, Homo sapiens
aaagaccatgtcattcagcagcttaaaacccctcaacagcttcacattgcccagagtaaggatcaacatacatgtaata

SEQ ID NO: 56098 - DNA, 77 bp, Homo sapiens
ttcagcagcttaaaacccctcaacagcttcacattgcccagagtaaggatcaacatacatgtaataggttctcaaaa

SEQ ID NO: 56099 - DNA, 74 bp, Homo sapiens
ttaaaacccctcaacagcttcacattgcccagagtaaggatcaacatacatgtaataggttctcaaaagcccta

SEQ ID NO: 56100 - DNA, 78 bp, Homo sapiens
aacagcttcacattgcccagagtaaggatcaacatacatgtaataggttctcaaaagccctacatcatctgggtacaa

SEQ ID NO: 56101 - DNA, 78 bp, Homo sapiens
ttcacattgcccagagtaaggatcaacatacatgtaataggttctcaaaagccctacatcatctgggtacaagctccc

SEQ ID NO: 56102 - DNA, 73 bp, Homo sapiens
aacatacatgtaataggttctcaaaagccctacatcatctgggtacaagctccccctccaaccccactctgta

SEQ ID NO: 56103 - DNA, 68 bp, Homo sapiens
ccctacatcatctgggtacaagctccccctccaaccccactctgtactatctccccctacccccaacc

SEQ ID NO: 56104 - DNA, 67 bp, Homo sapiens
atctgggtacaagctccccctccaaccccactctgtactatctccccctacccccaaccccagctgg

SEQ ID NO: 56105 - DNA, 70 bp, Homo sapiens
tccccctccaaccccactctgtactatctccccctacccccaaccccagctgggcactccagctctactg

SEQ ID NO: 56106 - DNA, 73 bp, Homo sapiens
aaccccactctgtactatctccccctacccccaaccccagctgggcactccagctctactggctgtatgtctc

SEQ ID NO: 56107 - DNA, 73 bp, Homo sapiens
tactatctccccctacccccaaccccagctgggcactccagctctactggctgtatgtctctctcctaatttt

SEQ ID NO: 56108 - DNA, 72 bp, Homo sapiens
ccctacccccaaccccagctgggcactccagctctactggctgtatgtctctctcctaatttttctacttac

SEQ ID NO: 56109 - DNA, 73 bp, Homo sapiens
aaccccagctgggcactccagctctactggctgtatgtctctctcctaatttttctacttaccacagggcctt

SEQ ID NO: 56110 - DNA, 78 bp, Homo sapiens
tgggcactccagctctactggctgtatgtctctctcctaatttttctacttaccacagggcctttgcacacgctgttc

SEQ ID NO: 56111 - DNA, 76 bp, Homo sapiens
ctccagctctactggctgtatgtctctctcctaatttttctacttaccacagggcctttgcacacgctgttccctc

SEQ ID NO: 56112 - DNA, 75 bp, Homo sapiens
ctttgcacacgctgttccctctgcctggtagacttatccatgctccttagggaagcctttcgtggctcctcctcc

SEQ ID NO: 56113 - DNA, 71 bp, Homo sapiens
ttccctctgcctggtagacttatccatgctccttagggaagcctttcgtggctcctcctcccccaggttag

SEQ ID NO: 56114 - DNA, 68 bp, Homo sapiens
ttatccatgctccttagggaagcctttcgtggctcctcctcccccaggttaggccccctggttattta

SEQ ID NO: 56115 - DNA, 65 bp, Homo sapiens
tccttagggaagcctttcgtggctcctcctcccccaggttaggccccctggttatttacacttgg

SEQ ID NO: 56116 - DNA, 69 bp, Homo sapiens
aagcctttcgtggctcctcctcccccaggttaggccccctggttatttacacttgggcatcatgtgcct

SEQ ID NO: 56117 - DNA, 73 bp, Homo sapiens
ctcctcctcccccaggttaggccccctggttatttacacttgggcatcatgtgccttccctttgctgcatcat

SEQ ID NO: 56118 - DNA, 75 bp, Homo sapiens
cccaggttaggccccctggttatttacacttgggcatcatgtgccttccctttgctgcatcatttgacattcatt

SEQ ID NO: 56119 - DNA, 79 bp, Homo sapiens
ttaggccccctggttatttacacttgggcatcatgtgccttccctttgctgcatcatttgacattcatttgtgtgatta

SEQ ID NO: 56120 - DNA, 81 bp, Homo sapiens
ttatttacacttgggcatcatgtgccttccctttgctgcatcatttgacattcatttgtgtgattattcatgtctttccct

SEQ ID NO: 56121 - DNA, 82 bp, Homo sapiens
tatttacacttgggcatcatgtgccttccctttgctgcatcatttgacattcatttgtgtgattattcatgtctttcccttc

SEQ ID NO: 56122 - DNA, 80 bp, Homo sapiens
acacttgggcatcatgtgccttccctttgctgcatcatttgacattcatttgtgtgattattcatgtctttcccttccct

SEQ ID NO: 56123 - DNA, 73 bp, Homo sapiens
tcccttcccttccccttactcggctggagtcctactggggcagcgacagtgtctcttcttccttgctgttgga

SEQ ID NO: 56124 - DNA, 76 bp, Homo sapiens
ttccccttactcggctggagtcctactggggcagcgacagtgtctcttcttccttgctgttggatctcaggattaa

SEQ ID NO: 56125 - DNA, 80 bp, Homo sapiens
ttactcggctggagtcctactggggcagcgacagtgtctcttcttccttgctgttggatctcaggattaagcacagtgcc

SEQ ID NO: 56126 - DNA, 83 bp, Homo sapiens
ggagtcctactggggcagcgacagtgtctcttcttccttgctgttggatctcaggattaagcacagtgcctggcatacagcag

SEQ ID NO: 56127 - DNA, 70 bp, Homo sapiens
accgtgcctggccagaaggtttttttaatatttaattgaacagggagatcatcgcctctcctccaggaac

SEQ ID NO: 56128 - DNA, 72 bp, Homo sapiens
gccagaaggtttttttaatatttaattgaacagggagatcatcgcctctcctccaggaacgcaactagagga

SEQ ID NO: 56129 - DNA, 72 bp, Homo sapiens
ttttttaatatttaattgaacagggagatcatcgcctctcctccaggaacgcaactagaggaaaggacttgc

SEQ ID NO: 56130 - DNA, 76 bp, Homo sapiens
aatatttaattgaacagggagatcatcgcctctcctccaggaacgcaactagaggaaaggacttgccttgcagcaa

SEQ ID NO: 56131 - DNA, 80 bp, Homo sapiens
ttgaacagggagatcatcgcctctcctccaggaacgcaactagaggaaaggacttgccttgcagcaagagagacctcagc

SEQ ID NO: 56132 - DNA, 78 bp, Homo sapiens
atcatcgcctctcctccaggaacgcaactagaggaaaggacttgccttgcagcaagagagacctcagcgagccgggaa

SEQ ID NO: 56133 - DNA, 77 bp, Homo sapiens
tctcctccaggaacgcaactagaggaaaggacttgccttgcagcaagagagacctcagcgagccgggaagaggctcc

SEQ ID NO: 56134 - DNA, 76 bp, Homo sapiens
aacgcaactagaggaaaggacttgccttgcagcaagagagacctcagcgagccgggaagaggctcctccccacaga

SEQ ID NO: 56135 - DNA, 77 bp, Homo sapiens
tagaggaaaggacttgccttgcagcaagagagacctcagcgagccgggaagaggctcctccccacagaactgggcac

SEQ ID NO: 56136 - DNA, 76 bp, Homo sapiens
aaggacttgccttgcagcaagagagacctcagcgagccgggaagaggctcctccccacagaactgggcaccaccca

SEQ ID NO: 56137 - DNA, 79 bp, Homo sapiens
acttgccttgcagcaagagagacctcagcgagccgggaagaggctcctccccacagaactgggcaccacccagcactgc

SEQ ID NO: 56138 - DNA, 80 bp, Homo sapiens
ttgcagcaagagagacctcagcgagccgggaagaggctcctccccacagaactgggcaccacccagcactgcccaccaca

SEQ ID NO: 56139 - DNA, 76 bp, Homo sapiens
aagagagacctcagcgagccgggaagaggctcctccccacagaactgggcaccacccagcactgcccaccacacca

SEQ ID NO: 56140 - DNA, 76 bp, Homo sapiens
tcagcgagccgggaagaggctcctccccacagaactgggcaccacccagcactgcccaccacaccaccgcgccacc

SEQ ID NO: 56141 - DNA, 74 bp, Homo sapiens
ccgggaagaggctcctccccacagaactgggcaccacccagcactgcccaccacaccaccgcgccacctcctca

SEQ ID NO: 56142 - DNA, 74 bp, Homo sapiens
gggaagaggctcctccccacagaactgggcaccacccagcactgcccaccacaccaccgcgccacctcctcacc

SEQ ID NO: 56143 - DNA, 79 bp, Homo sapiens
agaactgggcaccacccagcactgcccaccacaccaccgcgccacctcctcacctgcagcttgtggactttgtcattga

SEQ ID NO: 56144 - DNA, 77 bp, Homo sapiens
acccagcactgcccaccacaccaccgcgccacctcctcacctgcagcttgtggactttgtcattgagctccgcccgg

SEQ ID NO: 56145 - DNA, 77 bp, Homo sapiens
accgcgccacctcctcacctgcagcttgtggactttgtcattgagctccgcccgggcccgctccccatcgctgcact

SEQ ID NO: 56146 - DNA, 82 bp, Homo sapiens
ttgtggactttgtcattgagctccgcccgggcccgctccccatcgctgcacttggactgcagctcctgcacctgcgcctcca

SEQ ID NO: 56147 - DNA, 83 bp, Homo sapiens
tgtcattgagctccgcccgggcccgctccccatcgctgcacttggactgcagctcctgcacctgcgcctccagcttcttcttc

SEQ ID NO: 56148 - DNA, 79 bp, Homo sapiens
cccgggcccgctccccatcgctgcacttggactgcagctcctgcacctgcgcctccagcttcttcttcttatgttccac

SEQ ID NO: 56149 - DNA, 82 bp, Homo sapiens
ccgctccccatcgctgcacttggactgcagctcctgcacctgcgcctccagcttcttcttcttatgttccacctcctgcttg

SEQ ID NO: 56150 - DNA, 83 bp, Homo sapiens
atcgctgcacttggactgcagctcctgcacctgcgcctccagcttcttcttcttatgttccacctcctgcttggcctggccca

SEQ ID NO: 56151 - DNA, 79 bp, Homo sapiens
cttggactgcagctcctgcacctgcgcctccagcttcttcttcttatgttccacctcctgcttggcctggcccaggacc

SEQ ID NO: 56152 - DNA, 78 bp, Homo sapiens
agctcctgcacctgcgcctccagcttcttcttcttatgttccacctcctgcttggcctggcccaggacccgcagctcc

SEQ ID NO: 56153 - DNA, 74 bp, Homo sapiens
gcctccagcttcttcttcttatgttccacctcctgcttggcctggcccaggacccgcagctccccggccaggtc

SEQ ID NO: 56154 - DNA, 74 bp, Homo sapiens
tcttcttcttatgttccacctcctgcttggcctggcccaggacccgcagctccccggccaggtctgcgttctct

SEQ ID NO: 56155 - DNA, 74 bp, Homo sapiens
ttcttatgttccacctcctgcttggcctggcccaggacccgcagctccccggccaggtctgcgttctctttctc

SEQ ID NO: 56156 - DNA, 76 bp, Homo sapiens
tcctgcttggcctggcccaggacccgcagctccccggccaggtctgcgttctctttctccagcgtctgcttattct

SEQ ID NO: 56157 - DNA, 74 bp, Homo sapiens
cctggcccaggacccgcagctccccggccaggtctgcgttctctttctccagcgtctgcttattcttgtctagg

SEQ ID NO: 56158 - DNA, 73 bp, Homo sapiens
aggacccgcagctccccggccaggtctgcgttctctttctccagcgtctgcttattcttgtctaggttcgcct

SEQ ID NO: 56159 - DNA, 75 bp, Homo sapiens
aggtctgcgttctctttctccagcgtctgcttattcttgtctaggttcgccttggcctggcgaaggaagcagagg

SEQ ID NO: 56160 - DNA, 75 bp, Homo sapiens
tctctttctccagcgtctgcttattcttgtctaggttcgccttggcctggcgaaggaagcagaggggagggataa

SEQ ID NO: 56161 - DNA, 75 bp, Homo sapiens
tctccagcgtctgcttattcttgtctaggttcgccttggcctggcgaaggaagcagaggggagggataacaggga

SEQ ID NO: 56162 - DNA, 74 bp, Homo sapiens
ctgcttattcttgtctaggttcgccttggcctggcgaaggaagcagaggggagggataacagggaggctgtggc

SEQ ID NO: 56163 - DNA, 72 bp, Homo sapiens
ttgtctaggttcgccttggcctggcgaaggaagcagaggggagggataacagggaggctgtggccgggagaa

SEQ ID NO: 56164 - DNA, 72 bp, Homo sapiens
ttggcctggcgaaggaagcagaggggagggataacagggaggctgtggccgggagaacgtttcaggccctgc

SEQ ID NO: 56165 - DNA, 69 bp, Homo sapiens
cgaaggaagcagaggggagggataacagggaggctgtggccgggagaacgtttcaggccctgccctttc

SEQ ID NO: 56166 - DNA, 68 bp, Homo sapiens
aagcagaggggagggataacagggaggctgtggccgggagaacgtttcaggccctgccctttcctccc

SEQ ID NO: 56167 - DNA, 70 bp, Homo sapiens
ataacagggaggctgtggccgggagaacgtttcaggccctgccctttcctccctcagagaggtccaggaa

SEQ ID NO: 56168 - DNA, 72 bp, Homo sapiens
aggctgtggccgggagaacgtttcaggccctgccctttcctccctcagagaggtccaggaaggcacacaaca

SEQ ID NO: 56169 - DNA, 70 bp, Homo sapiens
tggccgggagaacgtttcaggccctgccctttcctccctcagagaggtccaggaaggcacacaacagggg

SEQ ID NO: 56170 - DNA, 74 bp, Homo sapiens
tttcaggccctgccctttcctccctcagagaggtccaggaaggcacacaacagggggcacacaatcaccagtaa

SEQ ID NO: 56171 - DNA, 74 bp, Homo sapiens
tgccctttcctccctcagagaggtccaggaaggcacacaacagggggcacacaatcaccagtaagagatttggg

SEQ ID NO: 56172 - DNA, 71 bp, Homo sapiens
ctccctcagagaggtccaggaaggcacacaacagggggcacacaatcaccagtaagagatttggggttttt

SEQ ID NO: 56173 - DNA, 70 bp, Homo sapiens
agagaggtccaggaaggcacacaacagggggcacacaatcaccagtaagagatttggggtttttttgttg

SEQ ID NO: 56174 - DNA, 79 bp, Homo sapiens
acaggcgtgagctgccgcacccagctgatattttggattctattttcctaaagctcatgggttgcaatctggaatccca

SEQ ID NO: 56175 - DNA, 78 bp, Homo sapiens
gctgccgcacccagctgatattttggattctattttcctaaagctcatgggttgcaatctggaatcccacaagcggta

SEQ ID NO: 56176 - DNA, 75 bp, Homo sapiens
acccagctgatattttggattctattttcctaaagctcatgggttgcaatctggaatcccacaagcggtatccaa

SEQ ID NO: 56177 - DNA, 76 bp, Homo sapiens
atattttggattctattttcctaaagctcatgggttgcaatctggaatcccacaagcggtatccaacctgctgaca

SEQ ID NO: 56178 - DNA, 76 bp, Homo sapiens
tattttcctaaagctcatgggttgcaatctggaatcccacaagcggtatccaacctgctgacatgtcccctttgac

SEQ ID NO: 56179 - DNA, 76 bp, Homo sapiens
ctaaagctcatgggttgcaatctggaatcccacaagcggtatccaacctgctgacatgtcccctttgaccctttca

SEQ ID NO: 56180 - DNA, 73 bp, Homo sapiens
gttgcaatctggaatcccacaagcggtatccaacctgctgacatgtcccctttgaccctttcactacttttaa

SEQ ID NO: 56181 - DNA, 70 bp, Homo sapiens
aatctggaatcccacaagcggtatccaacctgctgacatgtcccctttgaccctttcactacttttaaaa

SEQ ID NO: 56182 - DNA, 68 bp, Homo sapiens
ggaatcccacaagcggtatccaacctgctgacatgtcccctttgaccctttcactacttttaaaaaaa

SEQ ID NO: 56183 - DNA, 68 bp, Homo sapiens
cccacaagcggtatccaacctgctgacatgtcccctttgaccctttcactacttttaaaaaaatgagt

SEQ ID NO: 56184 - DNA, 69 bp, Homo sapiens
gtatccaacctgctgacatgtcccctttgaccctttcactacttttaaaaaaatgagttgccgacattt

SEQ ID NO: 56185 - DNA, 69 bp, Homo sapiens
caacctgctgacatgtcccctttgaccctttcactacttttaaaaaaatgagttgccgacattttaata

SEQ ID NO: 56186 - DNA, 68 bp, Homo sapiens
cctgctgacatgtcccctttgaccctttcactacttttaaaaaaatgagttgccgacattttaataaa

SEQ ID NO: 56187 - DNA, 70 bp, Homo sapiens
gctgacatgtcccctttgaccctttcactacttttaaaaaaatgagttgccgacattttaataaatgtca

SEQ ID NO: 56188 - DNA, 68 bp, Homo sapiens
acatgtcccctttgaccctttcactacttttaaaaaaatgagttgccgacattttaataaatgtcaca

SEQ ID NO: 56189 - DNA, 66 bp, Homo sapiens
ccctttgaccctttcactacttttaaaaaaatgagttgccgacattttaataaatgtcacataaaa

SEQ ID NO: 56190 - DNA, 69 bp, Homo sapiens
ttgaccctttcactacttttaaaaaaatgagttgccgacattttaataaatgtcacataaaaatctgga

SEQ ID NO: 56191 - DNA, 71 bp, Homo sapiens
tcactacttttaaaaaaatgagttgccgacattttaataaatgtcacataaaaatctggattcccagcttc

SEQ ID NO: 56192 - DNA, 69 bp, Homo sapiens
aaaaatgagttgccgacattttaataaatgtcacataaaaatctggattcccagcttctttttcaaaaa

SEQ ID NO: 56193 - DNA, 68 bp, Homo sapiens
agttgccgacattttaataaatgtcacataaaaatctggattcccagcttctttttcaaaaaacttta

SEQ ID NO: 56194 - DNA, 71 bp, Homo sapiens
aataaatgtcacataaaaatctggattcccagcttctttttcaaaaaactttaatgtttgaaggcatgcca

SEQ ID NO: 56195 - DNA, 74 bp, Homo sapiens
acataaaaatctggattcccagcttctttttcaaaaaactttaatgtttgaaggcatgccatggcagctcatac

SEQ ID NO: 56196 - DNA, 75 bp, Homo sapiens
aaaatctggattcccagcttctttttcaaaaaactttaatgtttgaaggcatgccatggcagctcatacttgtca

SEQ ID NO: 56197 - DNA, 76 bp, Homo sapiens
tcccagcttctttttcaaaaaactttaatgtttgaaggcatgccatggcagctcatacttgtcatccccagcactt

SEQ ID NO: 56198 - DNA, 75 bp, Homo sapiens
atcaatcaatcaataactaacattctatgtggtgactgtggtggtggtagttacacaatacacatttgttaaaat

SEQ ID NO: 56199 - DNA, 76 bp, Homo sapiens
tcaataactaacattctatgtggtgactgtggtggtggtagttacacaatacacatttgttaaaattaatggagca

SEQ ID NO: 56200 - DNA, 74 bp, Homo sapiens
ctaacattctatgtggtgactgtggtggtggtagttacacaatacacatttgttaaaattaatggagcagtaaa

SEQ ID NO: 56201 - DNA, 73 bp, Homo sapiens
atgtggtgactgtggtggtggtagttacacaatacacatttgttaaaattaatggagcagtaaaatggataaa

SEQ ID NO: 56202 - DNA, 70 bp, Homo sapiens
ctgtggtggtggtagttacacaatacacatttgttaaaattaatggagcagtaaaatggataaattttac

SEQ ID NO: 56203 - DNA, 73 bp, Homo sapiens
gtagttacacaatacacatttgttaaaattaatggagcagtaaaatggataaattttactacatatgcctcag

SEQ ID NO: 56204 - DNA, 71 bp, Homo sapiens
cacatttgttaaaattaatggagcagtaaaatggataaattttactacatatgcctcagtaatcctaaact

SEQ ID NO: 56205 - DNA, 69 bp, Homo sapiens
gttaaaattaatggagcagtaaaatggataaattttactacatatgcctcagtaatcctaaacttaaaa

SEQ ID NO: 56206 - DNA, 70 bp, Homo sapiens
taatggagcagtaaaatggataaattttactacatatgcctcagtaatcctaaacttaaaaacaaaaaca

SEQ ID NO: 56207 - DNA, 68 bp, Homo sapiens
aaacaaaaaaccaacaacaacgaaagatctggaaacagagggtcttgctttccttcaaggcaacaatc

SEQ ID NO: 56208 - DNA, 73 bp, Homo sapiens
aaaccaacaacaacgaaagatctggaaacagagggtcttgctttccttcaaggcaacaatctgccacatctaa

SEQ ID NO: 56209 - DNA, 75 bp, Homo sapiens
aacaacgaaagatctggaaacagagggtcttgctttccttcaaggcaacaatctgccacatctaagtagcggctg

SEQ ID NO: 56210 - DNA, 78 bp, Homo sapiens
atctggaaacagagggtcttgctttccttcaaggcaacaatctgccacatctaagtagcggctggctctgcaggtggg

SEQ ID NO: 56211 - DNA, 79 bp, Homo sapiens
ggtcttgctttccttcaaggcaacaatctgccacatctaagtagcggctggctctgcaggtggggcagtcacctttcac

SEQ ID NO: 56212 - DNA, 75 bp, Homo sapiens
aaggcaacaatctgccacatctaagtagcggctggctctgcaggtggggcagtcacctttcaccgcccccgtcct

SEQ ID NO: 56213 - DNA, 77 bp, Homo sapiens
atctgccacatctaagtagcggctggctctgcaggtggggcagtcacctttcaccgcccccgtccttcacaggtgtc

SEQ ID NO: 56214 - DNA, 77 bp, Homo sapiens
tctaagtagcggctggctctgcaggtggggcagtcacctttcaccgcccccgtccttcacaggtgtcgtgtgattga

SEQ ID NO: 56215 - DNA, 78 bp, Homo sapiens
gctctgcaggtggggcagtcacctttcaccgcccccgtccttcacaggtgtcgtgtgattgacactgctacttctgtc

SEQ ID NO: 56216 - DNA, 75 bp, Homo sapiens
tggggcagtcacctttcaccgcccccgtccttcacaggtgtcgtgtgattgacactgctacttctgtcctagtta

SEQ ID NO: 56217 - DNA, 71 bp, Homo sapiens
gcccccgtccttcacaggtgtcgtgtgattgacactgctacttctgtcctagttaagggaaacttatttta

SEQ ID NO: 56218 - DNA, 72 bp, Homo sapiens
cgtccttcacaggtgtcgtgtgattgacactgctacttctgtcctagttaagggaaacttattttatggaac

SEQ ID NO: 56219 - DNA, 73 bp, Homo sapiens
aggtgtcgtgtgattgacactgctacttctgtcctagttaagggaaacttattttatggaaccagctcctgta

SEQ ID NO: 56220 - DNA, 75 bp, Homo sapiens
attgacactgctacttctgtcctagttaagggaaacttattttatggaaccagctcctgtaggcatgtgagttgc

SEQ ID NO: 56221 - DNA, 73 bp, Homo sapiens
tacttctgtcctagttaagggaaacttattttatggaaccagctcctgtaggcatgtgagttgccctacagga

SEQ ID NO: 56222 - DNA, 70 bp, Homo sapiens
gtcctagttaagggaaacttattttatggaaccagctcctgtaggcatgtgagttgccctacaggaaaaa

SEQ ID NO: 56223 - DNA, 69 bp, Homo sapiens
agggaaacttattttatggaaccagctcctgtaggcatgtgagttgccctacaggaaaaaaaaagtgtg

SEQ ID NO: 56224 - DNA, 71 bp, Homo sapiens
attttatggaaccagctcctgtaggcatgtgagttgccctacaggaaaaaaaaagtgtgttggggccaggc

SEQ ID NO: 56225 - DNA, 65 bp, Homo sapiens
aaaaaaaaaagcgtgttgggcaaaagtaggacgcggtgaggggcttctttccaggttgtagagaa

SEQ ID NO: 56226 - DNA, 66 bp, Homo sapiens
aaaaagcgtgttgggcaaaagtaggacgcggtgaggggcttctttccaggttgtagagaaggggaa

SEQ ID NO: 56227 - DNA, 69 bp, Homo sapiens
caaaagtaggacgcggtgaggggcttctttccaggttgtagagaaggggaaagagaagcgcaagtatcc

SEQ ID NO: 56228 - DNA, 71 bp, Homo sapiens
taggacgcggtgaggggcttctttccaggttgtagagaaggggaaagagaagcgcaagtatcccgagagga

SEQ ID NO: 56229 - DNA, 70 bp, Homo sapiens
gggcttctttccaggttgtagagaaggggaaagagaagcgcaagtatcccgagaggacgagacccaccac

SEQ ID NO: 56230 - DNA, 72 bp, Homo sapiens
tctttccaggttgtagagaaggggaaagagaagcgcaagtatcccgagaggacgagacccaccactcagtct

SEQ ID NO: 56231 - DNA, 73 bp, Homo sapiens
ttgtagagaaggggaaagagaagcgcaagtatcccgagaggacgagacccaccactcagtcttcccatagtcc

SEQ ID NO: 56232 - DNA, 73 bp, Homo sapiens
gggaaagagaagcgcaagtatcccgagaggacgagacccaccactcagtcttcccatagtccctgggaggtgc

SEQ ID NO: 56233 - DNA, 74 bp, Homo sapiens
aagcgcaagtatcccgagaggacgagacccaccactcagtcttcccatagtccctgggaggtgctggacgttga

SEQ ID NO: 56234 - DNA, 73 bp, Homo sapiens
atcccgagaggacgagacccaccactcagtcttcccatagtccctgggaggtgctggacgttgaccggtcagc

SEQ ID NO: 56235 - DNA, 73 bp, Homo sapiens
acgagacccaccactcagtcttcccatagtccctgggaggtgctggacgttgaccggtcagccctggatgccc

SEQ ID NO: 56236 - DNA, 75 bp, Homo sapiens
catagtccctgggaggtgctggacgttgaccggtcagccctggatgcccgtcctccctccaagacatgactaaga

SEQ ID NO: 56237 - DNA, 79 bp, Homo sapiens
gtgctggacgttgaccggtcagccctggatgcccgtcctccctccaagacatgactaagagctgccagacctcagatgg

SEQ ID NO: 56238 - DNA, 78 bp, Homo sapiens
ttgaccggtcagccctggatgcccgtcctccctccaagacatgactaagagctgccagacctcagatggggacaggga

SEQ ID NO: 56239 - DNA, 79 bp, Homo sapiens
tcctccctccaagacatgactaagagctgccagacctcagatggggacagggagtctcttggtggtaacaaagcagtga

SEQ ID NO: 56240 - DNA, 78 bp, Homo sapiens
tccaagacatgactaagagctgccagacctcagatggggacagggagtctcttggtggtaacaaagcagtgaagcggg

SEQ ID NO: 56241 - DNA, 74 bp, Homo sapiens
actaagagctgccagacctcagatggggacagggagtctcttggtggtaacaaagcagtgaagcggggacccta

SEQ ID NO: 56242 - DNA, 72 bp, Homo sapiens
cagacctcagatggggacagggagtctcttggtggtaacaaagcagtgaagcggggaccctaggggacatgg

SEQ ID NO: 56243 - DNA, 69 bp, Homo sapiens
gggagtctcttggtggtaacaaagcagtgaagcggggaccctaggggacatgggctcccagaaacctta

SEQ ID NO: 56244 - DNA, 70 bp, Homo sapiens
ttggtggtaacaaagcagtgaagcggggaccctaggggacatgggctcccagaaaccttagcccagccta

SEQ ID NO: 56245 - DNA, 69 bp, Homo sapiens
taacaaagcagtgaagcggggaccctaggggacatgggctcccagaaaccttagcccagcctaagaccc

SEQ ID NO: 56246 - DNA, 68 bp, Homo sapiens
gtgaagcggggaccctaggggacatgggctcccagaaaccttagcccagcctaagaccccagaactgg

SEQ ID NO: 56247 - DNA, 66 bp, Homo sapiens
accctaggggacatgggctcccagaaaccttagcccagcctaagaccccagaactggggccaaacc

SEQ ID NO: 56248 - DNA, 69 bp, Homo sapiens
acatgggctcccagaaaccttagcccagcctaagaccccagaactggggccaaaccgcacgagggcctg

SEQ ID NO: 56249 - DNA, 67 bp, Homo sapiens
cccagaaaccttagcccagcctaagaccccagaactggggccaaaccgcacgagggcctggggagcc

SEQ ID NO: 56250 - DNA, 71 bp, Homo sapiens
ccagcctaagaccccagaactggggccaaaccgcacgagggcctggggagcccaggtaggagctgatgtta

SEQ ID NO: 56251 - DNA, 67 bp, Homo sapiens
agaactggggccaaaccgcacgagggcctggggagcccaggtaggagctgatgttaaacgtttcccc

SEQ ID NO: 56252 - DNA, 70 bp, Homo sapiens
aaaccgcacgagggcctggggagcccaggtaggagctgatgttaaacgtttcccccacaagcagatggaa

SEQ ID NO: 56253 - DNA, 75 bp, Homo sapiens
gcctggggagcccaggtaggagctgatgttaaacgtttcccccacaagcagatggaaccaggtctctacatcaga

SEQ ID NO: 56254 - DNA, 73 bp, Homo sapiens
cccaggtaggagctgatgttaaacgtttcccccacaagcagatggaaccaggtctctacatcagaattcaagt

SEQ ID NO: 56255 - DNA, 75 bp, Homo sapiens
agctgatgttaaacgtttcccccacaagcagatggaaccaggtctctacatcagaattcaagttgttagaggcaa

SEQ ID NO: 56256 - DNA, 72 bp, Homo sapiens
atgttaaacgtttcccccacaagcagatggaaccaggtctctacatcagaattcaagttgttagaggcaaag

SEQ ID NO: 56257 - DNA, 76 bp, Homo sapiens
cccacaagcagatggaaccaggtctctacatcagaattcaagttgttagaggcaaaggcctctgtttccctgcacc

SEQ ID NO: 56258 - DNA, 78 bp, Homo sapiens
aagcagatggaaccaggtctctacatcagaattcaagttgttagaggcaaaggcctctgtttccctgcacctgagatg

SEQ ID NO: 56259 - DNA, 75 bp, Homo sapiens
attcaagttgttagaggcaaaggcctctgtttccctgcacctgagatgggcagaggtttgcacctctacctgctt

SEQ ID NO: 56260 - DNA, 76 bp, Homo sapiens
aggcaaaggcctctgtttccctgcacctgagatgggcagaggtttgcacctctacctgctttgtgcgggtcagtaa

SEQ ID NO: 56261 - DNA, 81 bp, Homo sapiens
tctgtttccctgcacctgagatgggcagaggtttgcacctctacctgctttgtgcgggtcagtaatggacatgccgtctgc

SEQ ID NO: 56262 - DNA, 82 bp, Homo sapiens
tgcacctgagatgggcagaggtttgcacctctacctgctttgtgcgggtcagtaatggacatgccgtctgctggtggtctta

SEQ ID NO: 56263 - DNA, 78 bp, Homo sapiens
agatgggcagaggtttgcacctctacctgctttgtgcgggtcagtaatggacatgccgtctgctggtggtcttaataa

SEQ ID NO: 56264 - DNA, 76 bp, Homo sapiens
aggtttgcacctctacctgctttgtgcgggtcagtaatggacatgccgtctgctggtggtcttaataactgcgtct

SEQ ID NO: 56265 - DNA, 76 bp, Homo sapiens
ctctacctgctttgtgcgggtcagtaatggacatgccgtctgctggtggtcttaataactgcgtcttcccaaagag

SEQ ID NO: 56266 - DNA, 76 bp, Homo sapiens
ctttgtgcgggtcagtaatggacatgccgtctgctggtggtcttaataactgcgtcttcccaaagaggcctggctg

SEQ ID NO: 56267 - DNA, 75 bp, Homo sapiens
gggtcagtaatggacatgccgtctgctggtggtcttaataactgcgtcttcccaaagaggcctggctgggaatgg

SEQ ID NO: 56268 - DNA, 77 bp, Homo sapiens
tggacatgccgtctgctggtggtcttaataactgcgtcttcccaaagaggcctggctgggaatgggcttggcttcta

SEQ ID NO: 56269 - DNA, 77 bp, Homo sapiens
tctgctggtggtcttaataactgcgtcttcccaaagaggcctggctgggaatgggcttggcttctagctcctgttca

SEQ ID NO: 56270 - DNA, 75 bp, Homo sapiens
ttaataactgcgtcttcccaaagaggcctggctgggaatgggcttggcttctagctcctgttcacgtctaatgaa

SEQ ID NO: 56271 - DNA, 74 bp, Homo sapiens
actgcgtcttcccaaagaggcctggctgggaatgggcttggcttctagctcctgttcacgtctaatgaacccca

SEQ ID NO: 56272 - DNA, 73 bp, Homo sapiens
aaagaggcctggctgggaatgggcttggcttctagctcctgttcacgtctaatgaaccccaagcatggggagg

SEQ ID NO: 56273 - DNA, 76 bp, Homo sapiens
ctgggaatgggcttggcttctagctcctgttcacgtctaatgaaccccaagcatggggagggtcagtgattctgtc

SEQ ID NO: 56274 - DNA, 75 bp, Homo sapiens
aatgggcttggcttctagctcctgttcacgtctaatgaaccccaagcatggggagggtcagtgattctgtctggg

SEQ ID NO: 56275 - DNA, 77 bp, Homo sapiens
ttctagctcctgttcacgtctaatgaaccccaagcatggggagggtcagtgattctgtctggggcctcactcttcca

SEQ ID NO: 56276 - DNA, 74 bp, Homo sapiens
ttcacgtctaatgaaccccaagcatggggagggtcagtgattctgtctggggcctcactcttccaaccataatt

SEQ ID NO: 56277 - DNA, 72 bp, Homo sapiens
tctaatgaaccccaagcatggggagggtcagtgattctgtctggggcctcactcttccaaccataatttttt

SEQ ID NO: 56278 - DNA, 73 bp, Homo sapiens
ccgcgcccggcctttgggggcagtttctaatggtttagcactatccctttggtgctgccctcatgagatctgg

SEQ ID NO: 56279 - DNA, 78 bp, Homo sapiens
tgtttaaaagtgtctggcagctccccattctctctcttctgcctgctctggtcatgtaaaacatgcctgcctccccgt

SEQ ID NO: 56280 - DNA, 80 bp, Homo sapiens
aagtgtctggcagctccccattctctctcttctgcctgctctggtcatgtaaaacatgcctgcctccccgttgccttcca

SEQ ID NO: 56281 - DNA, 73 bp, Homo sapiens
aaaaataaacaaataatccaatcttgggtatttctgtagagcagtgcaacaacggaccaatacactagtgata

SEQ ID NO: 56282 - DNA, 76 bp, Homo sapiens
aaataatccaatcttgggtatttctgtagagcagtgcaacaacggaccaatacactagtgatagaaccaaatgcaa

SEQ ID NO: 56283 - DNA, 76 bp, Homo sapiens
atccaatcttgggtatttctgtagagcagtgcaacaacggaccaatacactagtgatagaaccaaatgcaaattcc

SEQ ID NO: 56284 - DNA, 73 bp, Homo sapiens
tatttctgtagagcagtgcaacaacggaccaatacactagtgatagaaccaaatgcaaattccccaaaatttt

SEQ ID NO: 56285 - DNA, 73 bp, Homo sapiens
gtagagcagtgcaacaacggaccaatacactagtgatagaaccaaatgcaaattccccaaaatttttaggcaa

SEQ ID NO: 56286 - DNA, 72 bp, Homo sapiens
aacaacggaccaatacactagtgatagaaccaaatgcaaattccccaaaatttttaggcaatgctgcaccca

SEQ ID NO: 56287 - DNA, 74 bp, Homo sapiens
tagtgatagaaccaaatgcaaattccccaaaatttttaggcaatgctgcacccacttaatctagcagaaccaaa

SEQ ID NO: 56288 - DNA, 73 bp, Homo sapiens
aatgcaaattccccaaaatttttaggcaatgctgcacccacttaatctagcagaaccaaaagcttccactgaa

SEQ ID NO: 56289 - DNA, 70 bp, Homo sapiens
aattccccaaaatttttaggcaatgctgcacccacttaatctagcagaaccaaaagcttccactgaaggg

SEQ ID NO: 56290 - DNA, 77 bp, Homo sapiens
atttttaggcaatgctgcacccacttaatctagcagaaccaaaagcttccactgaaggggatgtggaggagctgcaa

SEQ ID NO: 56291 - DNA, 78 bp, Homo sapiens
atgctgcacccacttaatctagcagaaccaaaagcttccactgaaggggatgtggaggagctgcaacgctgagggtaa

SEQ ID NO: 56292 - DNA, 76 bp, Homo sapiens
acttaatctagcagaaccaaaagcttccactgaaggggatgtggaggagctgcaacgctgagggtaatgtaactca

SEQ ID NO: 56293 - DNA, 74 bp, Homo sapiens
aaaagcttccactgaaggggatgtggaggagctgcaacgctgagggtaatgtaactcaggctttcaggaaaaca

SEQ ID NO: 56294 - DNA, 75 bp, Homo sapiens
actgaaggggatgtggaggagctgcaacgctgagggtaatgtaactcaggctttcaggaaaacaatctggccgaa

SEQ ID NO: 56295 - DNA, 76 bp, Homo sapiens
tggaggagctgcaacgctgagggtaatgtaactcaggctttcaggaaaacaatctggccgaaggtcgcaagctaaa

SEQ ID NO: 56296 - DNA, 70 bp, Homo sapiens
caacgctgagggtaatgtaactcaggctttcaggaaaacaatctggccgaaggtcgcaagctaaaaaact

SEQ ID NO: 56297 - DNA, 67 bp, Homo sapiens
agggtaatgtaactcaggctttcaggaaaacaatctggccgaaggtcgcaagctaaaaaacttaccc

SEQ ID NO: 56298 - DNA, 69 bp, Homo sapiens
taactcaggctttcaggaaaacaatctggccgaaggtcgcaagctaaaaaacttaccctggggaatgaa

SEQ ID NO: 56299 - DNA, 69 bp, Homo sapiens
aggctttcaggaaaacaatctggccgaaggtcgcaagctaaaaaacttaccctggggaatgaagcacag

SEQ ID NO: 56300 - DNA, 71 bp, Homo sapiens
tttcaggaaaacaatctggccgaaggtcgcaagctaaaaaacttaccctggggaatgaagcacaggcacta

SEQ ID NO: 56301 - DNA, 69 bp, Homo sapiens
aggaaaacaatctggccgaaggtcgcaagctaaaaaacttaccctggggaatgaagcacaggcactacc

SEQ ID NO: 56302 - DNA, 69 bp, Homo sapiens
aaacaatctggccgaaggtcgcaagctaaaaaacttaccctggggaatgaagcacaggcactaccccaa

SEQ ID NO: 56303 - DNA, 70 bp, Homo sapiens
atctggccgaaggtcgcaagctaaaaaacttaccctggggaatgaagcacaggcactaccccaaaggaga

SEQ ID NO: 56304 - DNA, 69 bp, Homo sapiens
ccgaaggtcgcaagctaaaaaacttaccctggggaatgaagcacaggcactaccccaaaggagagaaga

SEQ ID NO: 56305 - DNA, 71 bp, Homo sapiens
gcaagctaaaaaacttaccctggggaatgaagcacaggcactaccccaaaggagagaagagcacccaagat

SEQ ID NO: 56306 - DNA, 69 bp, Homo sapiens
aagctaaaaaacttaccctggggaatgaagcacaggcactaccccaaaggagagaagagcacccaagat

SEQ ID NO: 56307 - DNA, 72 bp, Homo sapiens
aaaaacttaccctggggaatgaagcacaggcactaccccaaaggagagaagagcacccaagattcagcattc

SEQ ID NO: 56308 - DNA, 77 bp, Homo sapiens
tggggaatgaagcacaggcactaccccaaaggagagaagagcacccaagattcagcattcggtactgctatttacca

SEQ ID NO: 56309 - DNA, 75 bp, Homo sapiens
actaccccaaaggagagaagagcacccaagattcagcattcggtactgctatttaccagctcccactcccataca

SEQ ID NO: 56310 - DNA, 76 bp, Homo sapiens
aggagagaagagcacccaagattcagcattcggtactgctatttaccagctcccactcccatacaccgcaaagagt

SEQ ID NO: 56311 - DNA, 74 bp, Homo sapiens
aagattcagcattcggtactgctatttaccagctcccactcccatacaccgcaaagagttccaacaacgggaga

SEQ ID NO: 56312 - DNA, 73 bp, Homo sapiens
attcggtactgctatttaccagctcccactcccatacaccgcaaagagttccaacaacgggagagtgatttga

SEQ ID NO: 56313 - DNA, 75 bp, Homo sapiens
agctcccactcccatacaccgcaaagagttccaacaacgggagagtgatttgacctagtcattctcaaattatgc

SEQ ID NO: 56314 - DNA, 75 bp, Homo sapiens
atacaccgcaaagagttccaacaacgggagagtgatttgacctagtcattctcaaattatgccggagagagctgt

SEQ ID NO: 56315 - DNA, 77 bp, Homo sapiens
aagagttccaacaacgggagagtgatttgacctagtcattctcaaattatgccggagagagctgttctgccattgaa

SEQ ID NO: 56316 - DNA, 77 bp, Homo sapiens
aacaacgggagagtgatttgacctagtcattctcaaattatgccggagagagctgttctgccattgaaatcaaataa

SEQ ID NO: 56317 - DNA, 79 bp, Homo sapiens
agagtgatttgacctagtcattctcaaattatgccggagagagctgttctgccattgaaatcaaataatgacaagtttc

SEQ ID NO: 56318 - DNA, 77 bp, Homo sapiens
ctagtcattctcaaattatgccggagagagctgttctgccattgaaatcaaataatgacaagtttcctccagtcttt

SEQ ID NO: 56319 - DNA, 74 bp, Homo sapiens
attctcaaattatgccggagagagctgttctgccattgaaatcaaataatgacaagtttcctccagtctttttt

SEQ ID NO: 56320 - DNA, 77 bp, Homo sapiens
agtgttaggattacgggaggcatgagccgccatgcctggccttcctccagtctgcagagaaattaaagtggatagaa

SEQ ID NO: 56321 - DNA, 78 bp, Homo sapiens
attacgggaggcatgagccgccatgcctggccttcctccagtctgcagagaaattaaagtggatagaatgatcccagt

SEQ ID NO: 56322 - DNA, 77 bp, Homo sapiens
atgagccgccatgcctggccttcctccagtctgcagagaaattaaagtggatagaatgatcccagttttaagtttca

SEQ ID NO: 56323 - DNA, 73 bp, Homo sapiens
atgcctggccttcctccagtctgcagagaaattaaagtggatagaatgatcccagttttaagtttcatttaaa

SEQ ID NO: 56324 - DNA, 71 bp, Homo sapiens
ccttcctccagtctgcagagaaattaaagtggatagaatgatcccagttttaagtttcatttaaatctccc

SEQ ID NO: 56325 - DNA, 70 bp, Homo sapiens
ctgcagagaaattaaagtggatagaatgatcccagttttaagtttcatttaaatctccccgaaagtgttg

SEQ ID NO: 56326 - DNA, 67 bp, Homo sapiens
attaaagtggatagaatgatcccagttttaagtttcatttaaatctccccgaaagtgttgttacacc

SEQ ID NO: 56327 - DNA, 68 bp, Homo sapiens
agtggatagaatgatcccagttttaagtttcatttaaatctccccgaaagtgttgttacacctttgct

SEQ ID NO: 56328 - DNA, 70 bp, Homo sapiens
tggatagaatgatcccagttttaagtttcatttaaatctccccgaaagtgttgttacacctttgcttatc

SEQ ID NO: 56329 - DNA, 70 bp, Homo sapiens
aagtttcatttaaatctccccgaaagtgttgttacacctttgcttatccctgaagggcagtatattgata

SEQ ID NO: 56330 - DNA, 70 bp, Homo sapiens
agtttcatttaaatctccccgaaagtgttgttacacctttgcttatccctgaagggcagtatattgatag

SEQ ID NO: 56331 - DNA, 70 bp, Homo sapiens
atttaaatctccccgaaagtgttgttacacctttgcttatccctgaagggcagtatattgataggcccca

SEQ ID NO: 56332 - DNA, 70 bp, Homo sapiens
aaatctccccgaaagtgttgttacacctttgcttatccctgaagggcagtatattgataggccccaccca

SEQ ID NO: 56333 - DNA, 71 bp, Homo sapiens
aaagtgttgttacacctttgcttatccctgaagggcagtatattgataggccccacccatcctataggcct

SEQ ID NO: 56334 - DNA, 75 bp, Homo sapiens
ttacacctttgcttatccctgaagggcagtatattgataggccccacccatcctataggccttcagtcctgtaga

SEQ ID NO: 56335 - DNA, 74 bp, Homo sapiens
cttatccctgaagggcagtatattgataggccccacccatcctataggccttcagtcctgtagaggccagaaag

SEQ ID NO: 56336 - DNA, 73 bp, Homo sapiens
aagggcagtatattgataggccccacccatcctataggccttcagtcctgtagaggccagaaagtggggtcta

SEQ ID NO: 56337 - DNA, 73 bp, Homo sapiens
atattgataggccccacccatcctataggccttcagtcctgtagaggccagaaagtggggtctaggaccagac

SEQ ID NO: 56338 - DNA, 72 bp, Homo sapiens
acccatcctataggccttcagtcctgtagaggccagaaagtggggtctaggaccagactgtttgggtgcaaa

SEQ ID NO: 56339 - DNA, 76 bp, Homo sapiens
tcctataggccttcagtcctgtagaggccagaaagtggggtctaggaccagactgtttgggtgcaaatcatggctc

SEQ ID NO: 56340 - DNA, 76 bp, Homo sapiens
aggccagaaagtggggtctaggaccagactgtttgggtgcaaatcatggctctgtcacttaccagcagtgtgacct

SEQ ID NO: 56341 - DNA, 78 bp, Homo sapiens
tctaggaccagactgtttgggtgcaaatcatggctctgtcacttaccagcagtgtgaccttgggtaagtctcttcacc

SEQ ID NO: 56342 - DNA, 78 bp, Homo sapiens
tttgggtgcaaatcatggctctgtcacttaccagcagtgtgaccttgggtaagtctcttcacctctaggcacctagga

SEQ ID NO: 56343 - DNA, 76 bp, Homo sapiens
aatcatggctctgtcacttaccagcagtgtgaccttgggtaagtctcttcacctctaggcacctaggacctcagtt

SEQ ID NO: 56344 - DNA, 75 bp, Homo sapiens
tctgtcacttaccagcagtgtgaccttgggtaagtctcttcacctctaggcacctaggacctcagtttctttgct

SEQ ID NO: 56345 - DNA, 73 bp, Homo sapiens
taccagcagtgtgaccttgggtaagtctcttcacctctaggcacctaggacctcagtttctttgcttgtaaaa

SEQ ID NO: 56346 - DNA, 70 bp, Homo sapiens
gaccttgggtaagtctcttcacctctaggcacctaggacctcagtttctttgcttgtaaaatgagtttaa

SEQ ID NO: 56347 - DNA, 72 bp, Homo sapiens
taagtctcttcacctctaggcacctaggacctcagtttctttgcttgtaaaatgagtttaatagtacacgtc

SEQ ID NO: 56348 - DNA, 73 bp, Homo sapiens
tcttcacctctaggcacctaggacctcagtttctttgcttgtaaaatgagtttaatagtacacgtctcacagg

SEQ ID NO: 56349 - DNA, 71 bp, Homo sapiens
acctaggacctcagtttctttgcttgtaaaatgagtttaatagtacacgtctcacagggtggttgtgaaga

SEQ ID NO: 56350 - DNA, 74 bp, Homo sapiens
tcagtttctttgcttgtaaaatgagtttaatagtacacgtctcacagggtggttgtgaagattaattgacatac

SEQ ID NO: 56351 - DNA, 76 bp, Homo sapiens
tttgcttgtaaaatgagtttaatagtacacgtctcacagggtggttgtgaagattaattgacatactgtatgagaa

SEQ ID NO: 56352 - DNA, 76 bp, Homo sapiens
aaatgagtttaatagtacacgtctcacagggtggttgtgaagattaattgacatactgtatgagaagcatttctat

SEQ ID NO: 56353 - DNA, 77 bp, Homo sapiens
tttaatagtacacgtctcacagggtggttgtgaagattaattgacatactgtatgagaagcatttctattcattctt

SEQ ID NO: 56354 - DNA, 80 bp, Homo sapiens
gccacctcacccagcctgtatgggaagcattttgtaaataaatataagctgctatcatcatcattagaatcttatgtaac

SEQ ID NO: 56355 - DNA, 79 bp, Homo sapiens
ccacctcacccagcctgtatgggaagcattttgtaaataaatataagctgctatcatcatcattagaatcttatgtaac

SEQ ID NO: 56356 - DNA, 78 bp, Homo sapiens
cacccagcctgtatgggaagcattttgtaaataaatataagctgctatcatcatcattagaatcttatgtaacttgtt

SEQ ID NO: 56357 - DNA, 77 bp, Homo sapiens
tgtatgggaagcattttgtaaataaatataagctgctatcatcatcattagaatcttatgtaacttgttttttgtct

SEQ ID NO: 56358 - DNA, 78 bp, Homo sapiens
ttgtaaataaatataagctgctatcatcatcattagaatcttatgtaacttgttttttgtctttatgcagaccctgac

SEQ ID NO: 56359 - DNA, 79 bp, Homo sapiens
taaatataagctgctatcatcatcattagaatcttatgtaacttgttttttgtctttatgcagaccctgacctgtagta

SEQ ID NO: 56360 - DNA, 78 bp, Homo sapiens
agctgctatcatcatcattagaatcttatgtaacttgttttttgtctttatgcagaccctgacctgtagtaatttgag

SEQ ID NO: 56361 - DNA, 78 bp, Homo sapiens
atcatcattagaatcttatgtaacttgttttttgtctttatgcagaccctgacctgtagtaatttgaggctgctgatg

SEQ ID NO: 56362 - DNA, 76 bp, Homo sapiens
aatcttatgtaacttgttttttgtctttatgcagaccctgacctgtagtaatttgaggctgctgatgtcactctta

SEQ ID NO: 56363 - DNA, 79 bp, Homo sapiens
tgttttttgtctttatgcagaccctgacctgtagtaatttgaggctgctgatgtcactcttatgtgtcatcaccaaaaa

SEQ ID NO: 56364 - DNA, 82 bp, Homo sapiens
tctttatgcagaccctgacctgtagtaatttgaggctgctgatgtcactcttatgtgtcatcaccaaaaagcatcaccaaaa

SEQ ID NO: 56365 - DNA, 80 bp, Homo sapiens
agaccctgacctgtagtaatttgaggctgctgatgtcactcttatgtgtcatcaccaaaaagcatcaccaaaaagcatta

SEQ ID NO: 56366 - DNA, 80 bp, Homo sapiens
tgtagtaatttgaggctgctgatgtcactcttatgtgtcatcaccaaaaagcatcaccaaaaagcattaccctcttgaac

SEQ ID NO: 56367 - DNA, 81 bp, Homo sapiens
aatttgaggctgctgatgtcactcttatgtgtcatcaccaaaaagcatcaccaaaaagcattaccctcttgaactgctcaa

SEQ ID NO: 56368 - DNA, 83 bp, Homo sapiens
atgtcactcttatgtgtcatcaccaaaaagcatcaccaaaaagcattaccctcttgaactgctcaagctgctctgtgagctcc

SEQ ID NO: 56369 - DNA, 82 bp, Homo sapiens
actcttatgtgtcatcaccaaaaagcatcaccaaaaagcattaccctcttgaactgctcaagctgctctgtgagctcctcca

SEQ ID NO: 56370 - DNA, 80 bp, Homo sapiens
atcaccaaaaagcatcaccaaaaagcattaccctcttgaactgctcaagctgctctgtgagctcctccaccgcctgtgcg

SEQ ID NO: 56371 - DNA, 79 bp, Homo sapiens
aaaagcatcaccaaaaagcattaccctcttgaactgctcaagctgctctgtgagctcctccaccgcctgtgcgtgtttc

SEQ ID NO: 56372 - DNA, 81 bp, Homo sapiens
aaaaagcattaccctcttgaactgctcaagctgctctgtgagctcctccaccgcctgtgcgtgtttctgcctcatctcctg

SEQ ID NO: 56373 - DNA, 83 bp, Homo sapiens
ttaccctcttgaactgctcaagctgctctgtgagctcctccaccgcctgtgcgtgtttctgcctcatctcctggacctgagcc

SEQ ID NO: 56374 - DNA, 84 bp, Homo sapiens
aactgctcaagctgctctgtgagctcctccaccgcctgtgcgtgtttctgcctcatctcctggacctgagcctcatgggaccgc

SEQ ID NO: 56375 - DNA, 83 bp, Homo sapiens
ctctgtgagctcctccaccgcctgtgcgtgtttctgcctcatctcctggacctgagcctcatgggaccgcgtctcttcatcca

SEQ ID NO: 56376 - DNA, 79 bp, Homo sapiens
tcctccaccgcctgtgcgtgtttctgcctcatctcctggacctgagcctcatgggaccgcgtctcttcatccagggcct

SEQ ID NO: 56377 - DNA, 79 bp, Homo sapiens
accgcctgtgcgtgtttctgcctcatctcctggacctgagcctcatgggaccgcgtctcttcatccagggccttcttca

SEQ ID NO: 56378 - DNA, 80 bp, Homo sapiens
tgtttctgcctcatctcctggacctgagcctcatgggaccgcgtctcttcatccagggccttcttcagcaccgtcacctc

SEQ ID NO: 56379 - DNA, 79 bp, Homo sapiens
cctcatctcctggacctgagcctcatgggaccgcgtctcttcatccagggccttcttcagcaccgtcacctcctgctcc

SEQ ID NO: 56380 - DNA, 76 bp, Homo sapiens
acctgagcctcatgggaccgcgtctcttcatccagggccttcttcagcaccgtcacctcctgctccctcttggccc

SEQ ID NO: 56381 - DNA, 76 bp, Homo sapiens
tcatgggaccgcgtctcttcatccagggccttcttcagcaccgtcacctcctgctccctcttggcccttggtggga

SEQ ID NO: 56382 - DNA, 76 bp, Homo sapiens
gtctcttcatccagggccttcttcagcaccgtcacctcctgctccctcttggcccttggtgggaggaacacagtga

SEQ ID NO: 56383 - DNA, 77 bp, Homo sapiens
ttcatccagggccttcttcagcaccgtcacctcctgctccctcttggcccttggtgggaggaacacagtgaatggca

SEQ ID NO: 56384 - DNA, 85 bp, Homo sapiens
attggtgcagtgggatagcaggatggtgggattgatgggcccctcacctgagctcctgctgagtggctgtgctgtccagtgtgtc

SEQ ID NO: 56385 - DNA, 84 bp, Homo sapiens
agtgggatagcaggatggtgggattgatgggcccctcacctgagctcctgctgagtggctgtgctgtccagtgtgtcttccagc

SEQ ID NO: 56386 - DNA, 83 bp, Homo sapiens
aggatggtgggattgatgggcccctcacctgagctcctgctgagtggctgtgctgtccagtgtgtcttccagctctgtcttta

SEQ ID NO: 56387 - DNA, 83 bp, Homo sapiens
tgggattgatgggcccctcacctgagctcctgctgagtggctgtgctgtccagtgtgtcttccagctctgtctttagggcctc

SEQ ID NO: 56388 - DNA, 83 bp, Homo sapiens
cctcacctgagctcctgctgagtggctgtgctgtccagtgtgtcttccagctctgtctttagggcctccagctcctcgccgag

SEQ ID NO: 56389 - DNA, 84 bp, Homo sapiens
tgagctcctgctgagtggctgtgctgtccagtgtgtcttccagctctgtctttagggcctccagctcctcgccgaggtctcgct

SEQ ID NO: 56390 - DNA, 79 bp, Homo sapiens
agtggctgtgctgtccagtgtgtcttccagctctgtctttagggcctccagctcctcgccgaggtctcgcttctgcttt

SEQ ID NO: 56391 - DNA, 78 bp, Homo sapiens
ctgtccagtgtgtcttccagctctgtctttagggcctccagctcctcgccgaggtctcgcttctgcttttcagccttg

SEQ ID NO: 56392 - DNA, 76 bp, Homo sapiens
agtgtgtcttccagctctgtctttagggcctccagctcctcgccgaggtctcgcttctgcttttcagccttgttcc

SEQ ID NO: 56393 - DNA, 75 bp, Homo sapiens
ctctgtctttagggcctccagctcctcgccgaggtctcgcttctgcttttcagccttgttcctggcggcccgctc

SEQ ID NO: 56394 - DNA, 76 bp, Homo sapiens
tttagggcctccagctcctcgccgaggtctcgcttctgcttttcagccttgttcctggcggcccgctctgagtcca

SEQ ID NO: 56395 - DNA, 77 bp, Homo sapiens
tccagctcctcgccgaggtctcgcttctgcttttcagccttgttcctggcggcccgctctgagtccaggtcctcctg

SEQ ID NO: 56396 - DNA, 76 bp, Homo sapiens
ccgaggtctcgcttctgcttttcagccttgttcctggcggcccgctctgagtccaggtcctcctggaggtctgaga

SEQ ID NO: 56397 - DNA, 77 bp, Homo sapiens
cttctgcttttcagccttgttcctggcggcccgctctgagtccaggtcctcctggaggtctgagatgtggccctcca

SEQ ID NO: 56398 - DNA, 76 bp, Homo sapiens
cttttcagccttgttcctggcggcccgctctgagtccaggtcctcctggaggtctgagatgtggccctccagctcc

SEQ ID NO: 56399 - DNA, 76 bp, Homo sapiens
ttgttcctggcggcccgctctgagtccaggtcctcctggaggtctgagatgtggccctccagctcccggatcttct

SEQ ID NO: 56400 - DNA, 78 bp, Homo sapiens
cgctctgagtccaggtcctcctggaggtctgagatgtggccctccagctcccggatcttcttcagggcattgttcttc

SEQ ID NO: 56401 - DNA, 78 bp, Homo sapiens
tccaggtcctcctggaggtctgagatgtggccctccagctcccggatcttcttcagggcattgttcttctgagcgatt

SEQ ID NO: 56402 - DNA, 80 bp, Homo sapiens
ctcctggaggtctgagatgtggccctccagctcccggatcttcttcagggcattgttcttctgagcgatttcatcgtcaa

SEQ ID NO: 56403 - DNA, 80 bp, Homo sapiens
tctgagatgtggccctccagctcccggatcttcttcagggcattgttcttctgagcgatttcatcgtcaagccttccagg

SEQ ID NO: 56404 - DNA, 77 bp, Homo sapiens
cctccagctcccggatcttcttcagggcattgttcttctgagcgatttcatcgtcaagccttccagggagagaccca

SEQ ID NO: 56405 - DNA, 79 bp, Homo sapiens
tcccggatcttcttcagggcattgttcttctgagcgatttcatcgtcaagccttccagggagagacccagcagaatgaa

SEQ ID NO: 56406 - DNA, 78 bp, Homo sapiens
tcttcttcagggcattgttcttctgagcgatttcatcgtcaagccttccagggagagacccagcagaatgaaccccca

SEQ ID NO: 56407 - DNA, 77 bp, Homo sapiens
cccaggggatacatggacacacagcaaatgccccttgccagccccgctacctggccagggccgcctgcagctcctcc

SEQ ID NO: 56408 - DNA, 79 bp, Homo sapiens
tacatggacacacagcaaatgccccttgccagccccgctacctggccagggccgcctgcagctcctcctccttcttggc

SEQ ID NO: 56409 - DNA, 80 bp, Homo sapiens
agcaaatgccccttgccagccccgctacctggccagggccgcctgcagctcctcctccttcttggccagctgcatcttga

SEQ ID NO: 56410 - DNA, 84 bp, Homo sapiens
ccttgccagccccgctacctggccagggccgcctgcagctcctcctccttcttggccagctgcatcttgagctctgcgatctgc

SEQ ID NO: 56411 - DNA, 85 bp, Homo sapiens
ccgctacctggccagggccgcctgcagctcctcctccttcttggccagctgcatcttgagctctgcgatctgcgcctggaggtca

SEQ ID NO: 56412 - DNA, 88 bp, Homo sapiens
ccagggccgcctgcagctcctcctccttcttggccagctgcatcttgagctctgcgatctgcgcctggaggtcagcgatctgctcgtg

SEQ ID NO: 56413 - DNA, 91 bp, Homo sapiens
ctgcagctcctcctccttcttggccagctgcatcttgagctctgcgatctgcgcctggaggtcagcgatctgctcgtggaagtcgctggca

SEQ ID NO: 56414 - DNA, 89 bp, Homo sapiens
tcctccttcttggccagctgcatcttgagctctgcgatctgcgcctggaggtcagcgatctgctcgtggaagtcgctggcatcaccctc

SEQ ID NO: 56415 - DNA, 90 bp, Homo sapiens
ttcttggccagctgcatcttgagctctgcgatctgcgcctggaggtcagcgatctgctcgtggaagtcgctggcatcaccctccagcttc

SEQ ID NO: 56416 - DNA, 86 bp, Homo sapiens
catcttgagctctgcgatctgcgcctggaggtcagcgatctgctcgtggaagtcgctggcatcaccctccagcttccgtttcagct

SEQ ID NO: 56417 - DNA, 85 bp, Homo sapiens
agctctgcgatctgcgcctggaggtcagcgatctgctcgtggaagtcgctggcatcaccctccagcttccgtttcagcttctcca

SEQ ID NO: 56418 - DNA, 83 bp, Homo sapiens
atctgcgcctggaggtcagcgatctgctcgtggaagtcgctggcatcaccctccagcttccgtttcagcttctccagctcctg

SEQ ID NO: 56419 - DNA, 82 bp, Homo sapiens
gtcagcgatctgctcgtggaagtcgctggcatcaccctccagcttccgtttcagcttctccagctcctgtcggctcttctct

SEQ ID NO: 56420 - DNA, 79 bp, Homo sapiens
atctgctcgtggaagtcgctggcatcaccctccagcttccgtttcagcttctccagctcctgtcggctcttctcttcct

SEQ ID NO: 56421 - DNA, 77 bp, Homo sapiens
gtggaagtcgctggcatcaccctccagcttccgtttcagcttctccagctcctgtcggctcttctcttccttcttta

SEQ ID NO: 56422 - DNA, 76 bp, Homo sapiens
atcaccctccagcttccgtttcagcttctccagctcctgtcggctcttctcttccttctttagccgcactgcaaaa

SEQ ID NO: 56423 - DNA, 73 bp, Homo sapiens
agcttccgtttcagcttctccagctcctgtcggctcttctcttccttctttagccgcactgcaaaaaccaagg

SEQ ID NO: 56424 - DNA, 77 bp, Homo sapiens
ttcagcttctccagctcctgtcggctcttctcttccttctttagccgcactgcaaaaaccaaggtgctcttcaggaa

SEQ ID NO: 56425 - DNA, 74 bp, Homo sapiens
ttctccagctcctgtcggctcttctcttccttctttagccgcactgcaaaaaccaaggtgctcttcaggaaggg

SEQ ID NO: 56426 - DNA, 73 bp, Homo sapiens
ataaaaataaatctcttggtagctggtttaccttccagttctgaaatcatagattcatgcttgtttttcagct

SEQ ID NO: 56427 - DNA, 74 bp, Homo sapiens
aataaatctcttggtagctggtttaccttccagttctgaaatcatagattcatgcttgtttttcagcttggtaa

SEQ ID NO: 56428 - DNA, 74 bp, Homo sapiens
tagctggtttaccttccagttctgaaatcatagattcatgcttgtttttcagcttggtaagattcttggccttt

SEQ ID NO: 56429 - DNA, 73 bp, Homo sapiens
gtttaccttccagttctgaaatcatagattcatgcttgtttttcagcttggtaagattcttggccttttcttc

SEQ ID NO: 56430 - DNA, 77 bp, Homo sapiens
ttctgaaatcatagattcatgcttgtttttcagcttggtaagattcttggccttttcttcctcttctgcaagatttg

SEQ ID NO: 56431 - DNA, 74 bp, Homo sapiens
atagattcatgcttgtttttcagcttggtaagattcttggccttttcttcctcttctgcaagatttgtcgttaa

SEQ ID NO: 56432 - DNA, 72 bp, Homo sapiens
ttgtttttcagcttggtaagattcttggccttttcttcctcttctgcaagatttgtcgttaagtcactaatc

SEQ ID NO: 56433 - DNA, 73 bp, Homo sapiens
tttcagcttggtaagattcttggccttttcttcctcttctgcaagatttgtcgttaagtcactaatcctctcc

SEQ ID NO: 56434 - DNA, 72 bp, Homo sapiens
taagattcttggccttttcttcctcttctgcaagatttgtcgttaagtcactaatcctctcctcaaggagtt

SEQ ID NO: 56435 - DNA, 69 bp, Homo sapiens
ttttcttcctcttctgcaagatttgtcgttaagtcactaatcctctcctcaaggagttttcgttccttt

SEQ ID NO: 56436 - DNA, 69 bp, Homo sapiens
ttcctcttctgcaagatttgtcgttaagtcactaatcctctcctcaaggagttttcgttcctttttggg

SEQ ID NO: 56437 - DNA, 66 bp, Homo sapiens
aagatttgtcgttaagtcactaatcctctcctcaaggagttttcgttcctttttggggaaagagaa

SEQ ID NO: 56438 - DNA, 68 bp, Homo sapiens
ttaagtcactaatcctctcctcaaggagttttcgttcctttttggggaaagagaaagagatagcttta

SEQ ID NO: 56439 - DNA, 77 bp, Homo sapiens
ctgcacccggcccctactcacttttgatagtttattgttctgatcatccatgaccaggatctcatcctccagtttct

SEQ ID NO: 56440 - DNA, 77 bp, Homo sapiens
ccggcccctactcacttttgatagtttattgttctgatcatccatgaccaggatctcatcctccagtttcttgatct

SEQ ID NO: 56441 - DNA, 80 bp, Homo sapiens
acttttgatagtttattgttctgatcatccatgaccaggatctcatcctccagtttcttgatcttggcctcagccgtgac

SEQ ID NO: 56442 - DNA, 81 bp, Homo sapiens
atagtttattgttctgatcatccatgaccaggatctcatcctccagtttcttgatcttggcctcagccgtgaccttctcaa

SEQ ID NO: 56443 - DNA, 86 bp, Homo sapiens
tgttctgatcatccatgaccaggatctcatcctccagtttcttgatcttggcctcagccgtgaccttctcaagttgcagcttctgc

SEQ ID NO: 56444 - DNA, 83 bp, Homo sapiens
atgaccaggatctcatcctccagtttcttgatcttggcctcagccgtgaccttctcaagttgcagcttctgcctggcagcttc

SEQ ID NO: 56445 - DNA, 81 bp, Homo sapiens
aggatctcatcctccagtttcttgatcttggcctcagccgtgaccttctcaagttgcagcttctgcctggcagcttcctcc

SEQ ID NO: 56446 - DNA, 80 bp, Homo sapiens
agtttcttgatcttggcctcagccgtgaccttctcaagttgcagcttctgcctggcagcttcctcctcctccagctgttc

SEQ ID NO: 56447 - DNA, 81 bp, Homo sapiens
ttgatcttggcctcagccgtgaccttctcaagttgcagcttctgcctggcagcttcctcctcctccagctgttcttcaagg

SEQ ID NO: 56448 - DNA, 77 bp, Homo sapiens
agccgtgaccttctcaagttgcagcttctgcctggcagcttcctcctcctccagctgttcttcaaggtcctttgttg

SEQ ID NO: 56449 - DNA, 77 bp, Homo sapiens
ttctcaagttgcagcttctgcctggcagcttcctcctcctccagctgttcttcaaggtcctttgttgtggagggaaa

SEQ ID NO: 56450 - DNA, 76 bp, Homo sapiens
ttgcagcttctgcctggcagcttcctcctcctccagctgttcttcaaggtcctttgttgtggagggaaaagagtaa

SEQ ID NO: 56451 - DNA, 72 bp, Homo sapiens
cctggcagcttcctcctcctccagctgttcttcaaggtcctttgttgtggagggaaaagagtaacagctttg

SEQ ID NO: 56452 - DNA, 78 bp, Homo sapiens
gtcaagtgatttgctacccaccacgggctgcccctgtgacaccttaccagcatctgctgggccatcttcttcctttca

SEQ ID NO: 56453 - DNA, 77 bp, Homo sapiens
atttgctacccaccacgggctgcccctgtgacaccttaccagcatctgctgggccatcttcttcctttcagcctgta

SEQ ID NO: 56454 - DNA, 79 bp, Homo sapiens
cccaccacgggctgcccctgtgacaccttaccagcatctgctgggccatcttcttcctttcagcctgtagctgctggcc

SEQ ID NO: 56455 - DNA, 79 bp, Homo sapiens
ccctgtgacaccttaccagcatctgctgggccatcttcttcctttcagcctgtagctgctggcccctgtcttcctcctc

SEQ ID NO: 56456 - DNA, 80 bp, Homo sapiens
tgacaccttaccagcatctgctgggccatcttcttcctttcagcctgtagctgctggcccctgtcttcctcctcctccag

SEQ ID NO: 56457 - DNA, 78 bp, Homo sapiens
atctgctgggccatcttcttcctttcagcctgtagctgctggcccctgtcttcctcctcctccaggcgggcctccatc

SEQ ID NO: 56458 - DNA, 80 bp, Homo sapiens
ccatcttcttcctttcagcctgtagctgctggcccctgtcttcctcctcctccaggcgggcctccatctcatgcagtatc

SEQ ID NO: 56459 - DNA, 80 bp, Homo sapiens
ttcttcctttcagcctgtagctgctggcccctgtcttcctcctcctccaggcgggcctccatctcatgcagtatctcctc

SEQ ID NO: 56460 - DNA, 82 bp, Homo sapiens
ctgtagctgctggcccctgtcttcctcctcctccaggcgggcctccatctcatgcagtatctcctccagctcctgcttcttg

SEQ ID NO: 56461 - DNA, 80 bp, Homo sapiens
ctggcccctgtcttcctcctcctccaggcgggcctccatctcatgcagtatctcctccagctcctgcttcttggccgcca

SEQ ID NO: 56462 - DNA, 82 bp, Homo sapiens
ttcctcctcctccaggcgggcctccatctcatgcagtatctcctccagctcctgcttcttggccgccagccgcacccgcatc

SEQ ID NO: 56463 - DNA, 83 bp, Homo sapiens
cctcctccaggcgggcctccatctcatgcagtatctcctccagctcctgcttcttggccgccagccgcacccgcatctcctca

SEQ ID NO: 56464 - DNA, 89 bp, Homo sapiens
cctccatctcatgcagtatctcctccagctcctgcttcttggccgccagccgcacccgcatctcctcagcctctgcatacagctctgtc

SEQ ID NO: 56465 - DNA, 90 bp, Homo sapiens
atctcatgcagtatctcctccagctcctgcttcttggccgccagccgcacccgcatctcctcagcctctgcatacagctctgtctctgcc

SEQ ID NO: 56466 - DNA, 90 bp, Homo sapiens
tatctcctccagctcctgcttcttggccgccagccgcacccgcatctcctcagcctctgcatacagctctgtctctgcctgcagctgttc

SEQ ID NO: 56467 - DNA, 88 bp, Homo sapiens
tcctgcttcttggccgccagccgcacccgcatctcctcagcctctgcatacagctctgtctctgcctgcagctgttcctgtagcaggt

SEQ ID NO: 56468 - DNA, 87 bp, Homo sapiens
ttcttggccgccagccgcacccgcatctcctcagcctctgcatacagctctgtctctgcctgcagctgttcctgtagcaggttcttc

SEQ ID NO: 56469 - DNA, 87 bp, Homo sapiens
ccagccgcacccgcatctcctcagcctctgcatacagctctgtctctgcctgcagctgttcctgtagcaggttcttctcctcggtca

SEQ ID NO: 56470 - DNA, 88 bp, Homo sapiens
atctcctcagcctctgcatacagctctgtctctgcctgcagctgttcctgtagcaggttcttctcctcggtcagctgcacgcaggtgg

SEQ ID NO: 56471 - DNA, 86 bp, Homo sapiens
agcctctgcatacagctctgtctctgcctgcagctgttcctgtagcaggttcttctcctcggtcagctgcacgcaggtggtgggga

SEQ ID NO: 56472 - DNA, 83 bp, Homo sapiens
atacagctctgtctctgcctgcagctgttcctgtagcaggttcttctcctcggtcagctgcacgcaggtggtggggaggaggc

SEQ ID NO: 56473 - DNA, 80 bp, Homo sapiens
caagtcctgttccccagcaaccccagccatgcatccatacaggtacctgcgagtgcttctgttccagctccttaagctca

SEQ ID NO: 56474 - DNA, 81 bp, Homo sapiens
ttccccagcaaccccagccatgcatccatacaggtacctgcgagtgcttctgttccagctccttaagctcattctctgcct

SEQ ID NO: 56475 - DNA, 84 bp, Homo sapiens
agcaaccccagccatgcatccatacaggtacctgcgagtgcttctgttccagctccttaagctcattctctgccttctgctgcc

SEQ ID NO: 56476 - DNA, 83 bp, Homo sapiens
atgcatccatacaggtacctgcgagtgcttctgttccagctccttaagctcattctctgccttctgctgccgctccttggtct

SEQ ID NO: 56477 - DNA, 82 bp, Homo sapiens
atacaggtacctgcgagtgcttctgttccagctccttaagctcattctctgccttctgctgccgctccttggtcttctgcag

SEQ ID NO: 56478 - DNA, 82 bp, Homo sapiens
cgagtgcttctgttccagctccttaagctcattctctgccttctgctgccgctccttggtcttctgcagttcatcctccttg

SEQ ID NO: 56479 - DNA, 84 bp, Homo sapiens
ttctgttccagctccttaagctcattctctgccttctgctgccgctccttggtcttctgcagttcatcctccttggcctgcatc

SEQ ID NO: 56480 - DNA, 83 bp, Homo sapiens
agctccttaagctcattctctgccttctgctgccgctccttggtcttctgcagttcatcctccttggcctgcatctcctcctc

SEQ ID NO: 56481 - DNA, 82 bp, Homo sapiens
attctctgccttctgctgccgctccttggtcttctgcagttcatcctccttggcctgcatctcctcctcctgccgtgtcacc

SEQ ID NO: 56482 - DNA, 85 bp, Homo sapiens
ttctgctgccgctccttggtcttctgcagttcatcctccttggcctgcatctcctcctcctgccgtgtcacctgcagcagtggct

SEQ ID NO: 56483 - DNA, 85 bp, Homo sapiens
ctccttggtcttctgcagttcatcctccttggcctgcatctcctcctcctgccgtgtcacctgcagcagtggcttcacctgcaca

SEQ ID NO: 56484 - DNA, 85 bp, Homo sapiens
ttctgcagttcatcctccttggcctgcatctcctcctcctgccgtgtcacctgcagcagtggcttcacctgcacacacacggtta

SEQ ID NO: 56485 - DNA, 85 bp, Homo sapiens
tcatcctccttggcctgcatctcctcctcctgccgtgtcacctgcagcagtggcttcacctgcacacacacggttagcccatcat

SEQ ID NO: 56486 - DNA, 82 bp, Homo sapiens
ttggcctgcatctcctcctcctgccgtgtcacctgcagcagtggcttcacctgcacacacacggttagcccatcatttgttt

SEQ ID NO: 56487 - DNA, 70 bp, Homo sapiens
aagaagcagggctgggggcccctgggaagggggctggggcagagcactcactttggtgaaaagcctccac

SEQ ID NO: 56488 - DNA, 73 bp, Homo sapiens
gggcccctgggaagggggctggggcagagcactcactttggtgaaaagcctccaccactgccagttccgcagc

SEQ ID NO: 56489 - DNA, 75 bp, Homo sapiens
gaagggggctggggcagagcactcactttggtgaaaagcctccaccactgccagttccgcagcttgaggtaggcg

SEQ ID NO: 56490 - DNA, 78 bp, Homo sapiens
tggggcagagcactcactttggtgaaaagcctccaccactgccagttccgcagcttgaggtaggcggcgcagttcctc

SEQ ID NO: 56491 - DNA, 79 bp, Homo sapiens
agagcactcactttggtgaaaagcctccaccactgccagttccgcagcttgaggtaggcggcgcagttcctctgaatca

SEQ ID NO: 56492 - DNA, 77 bp, Homo sapiens
ctttggtgaaaagcctccaccactgccagttccgcagcttgaggtaggcggcgcagttcctctgaatcaccttcatg

SEQ ID NO: 56493 - DNA, 82 bp, Homo sapiens
aagcctccaccactgccagttccgcagcttgaggtaggcggcgcagttcctctgaatcaccttcatggcggtcagctgctgc

SEQ ID NO: 56494 - DNA, 82 bp, Homo sapiens
ccagttccgcagcttgaggtaggcggcgcagttcctctgaatcaccttcatggcggtcagctgctgctgcctcttggcaaaa

SEQ ID NO: 56495 - DNA, 80 bp, Homo sapiens
agcttgaggtaggcggcgcagttcctctgaatcaccttcatggcggtcagctgctgctgcctcttggcaaaagccctagg

SEQ ID NO: 56496 - DNA, 78 bp, Homo sapiens
aggtaggcggcgcagttcctctgaatcaccttcatggcggtcagctgctgctgcctcttggcaaaagccctagggagg

SEQ ID NO: 56497 - DNA, 76 bp, Homo sapiens
agttcctctgaatcaccttcatggcggtcagctgctgctgcctcttggcaaaagccctagggaggggggaagagaa

SEQ ID NO: 56498 - DNA, 77 bp, Homo sapiens
tctgaatcaccttcatggcggtcagctgctgctgcctcttggcaaaagccctagggaggggggaagagaaggtgcgg

SEQ ID NO: 56499 - DNA, 76 bp, Homo sapiens
ttcatggcggtcagctgctgctgcctcttggcaaaagccctagggaggggggaagagaaggtgcgggggtcatgaa

SEQ ID NO: 56500 - DNA, 77 bp, Homo sapiens
ctgtttgtgattcgcgtttgaggtattaggatgcaggaaagcatctttactttctggccaagtagccacgacacatc

SEQ ID NO: 56501 - DNA, 76 bp, Homo sapiens
attcgcgtttgaggtattaggatgcaggaaagcatctttactttctggccaagtagccacgacacatcgcctggaa

SEQ ID NO: 56502 - DNA, 80 bp, Homo sapiens
aggtattaggatgcaggaaagcatctttactttctggccaagtagccacgacacatcgcctggaaggccatgatgacatc

SEQ ID NO: 56503 - DNA, 79 bp, Homo sapiens
aggaaagcatctttactttctggccaagtagccacgacacatcgcctggaaggccatgatgacatcggtgatcttcaaa

SEQ ID NO: 56504 - DNA, 80 bp, Homo sapiens
ctttactttctggccaagtagccacgacacatcgcctggaaggccatgatgacatcggtgatcttcaaatctcgctcctc

SEQ ID NO: 56505 - DNA, 81 bp, Homo sapiens
tttctggccaagtagccacgacacatcgcctggaaggccatgatgacatcggtgatcttcaaatctcgctcctcctctagg

SEQ ID NO: 56506 - DNA, 80 bp, Homo sapiens
aagtagccacgacacatcgcctggaaggccatgatgacatcggtgatcttcaaatctcgctcctcctctaggtgggccag

SEQ ID NO: 56507 - DNA, 80 bp, Homo sapiens
acacatcgcctggaaggccatgatgacatcggtgatcttcaaatctcgctcctcctctaggtgggccaggacgccagttc

SEQ ID NO: 56508 - DNA, 77 bp, Homo sapiens
aggccatgatgacatcggtgatcttcaaatctcgctcctcctctaggtgggccaggacgccagttcggaagaagatt

SEQ ID NO: 56509 - DNA, 78 bp, Homo sapiens
atgatgacatcggtgatcttcaaatctcgctcctcctctaggtgggccaggacgccagttcggaagaagattttgctc

SEQ ID NO: 56510 - DNA, 75 bp, Homo sapiens
atcttcaaatctcgctcctcctctaggtgggccaggacgccagttcggaagaagattttgctctgccctatcctg

SEQ ID NO: 56511 - DNA, 74 bp, Homo sapiens
aaatctcgctcctcctctaggtgggccaggacgccagttcggaagaagattttgctctgccctatcctgtataa

SEQ ID NO: 56512 - DNA, 73 bp, Homo sapiens
tcctctaggtgggccaggacgccagttcggaagaagattttgctctgccctatcctgtataagttggggtcaa

SEQ ID NO: 56513 - DNA, 72 bp, Homo sapiens
ggtgggccaggacgccagttcggaagaagattttgctctgccctatcctgtataagttggggtcaagttcca

SEQ ID NO: 56514 - DNA, 74 bp, Homo sapiens
cagttcggaagaagattttgctctgccctatcctgtataagttggggtcaagttccagggctttgatctgcaaa

SEQ ID NO: 56515 - DNA, 72 bp, Homo sapiens
aagaagattttgctctgccctatcctgtataagttggggtcaagttccagggctttgatctgcaaaaggaag

SEQ ID NO: 56516 - DNA, 72 bp, Homo sapiens
ttttgctctgccctatcctgtataagttggggtcaagttccagggctttgatctgcaaaaggaaggaaagga

SEQ ID NO: 56517 - DNA, 72 bp, Homo sapiens
tatcctgtataagttggggtcaagttccagggctttgatctgcaaaaggaaggaaaggaagagctcctgatt

SEQ ID NO: 56518 - DNA, 81 bp, Homo sapiens
aagagcagcaggtggcttgcggccagaggttgggaggtctctggtggacttctgggctcaccatgagaatgcaggcctgct

SEQ ID NO: 56519 - DNA, 79 bp, Homo sapiens
agcaggtggcttgcggccagaggttgggaggtctctggtggacttctgggctcaccatgagaatgcaggcctgcttccc

SEQ ID NO: 56520 - DNA, 79 bp, Homo sapiens
cttgcggccagaggttgggaggtctctggtggacttctgggctcaccatgagaatgcaggcctgcttcccgtccatgaa

SEQ ID NO: 56521 - DNA, 76 bp, Homo sapiens
aggttgggaggtctctggtggacttctgggctcaccatgagaatgcaggcctgcttcccgtccatgaagcctttgg

SEQ ID NO: 56522 - DNA, 80 bp, Homo sapiens
gtctctggtggacttctgggctcaccatgagaatgcaggcctgcttcccgtccatgaagcctttggggatggcattcgcc

SEQ ID NO: 56523 - DNA, 81 bp, Homo sapiens
ttctgggctcaccatgagaatgcaggcctgcttcccgtccatgaagcctttggggatggcattcgccgccaggatctcgta

SEQ ID NO: 56524 - DNA, 79 bp, Homo sapiens
accatgagaatgcaggcctgcttcccgtccatgaagcctttggggatggcattcgccgccaggatctcgtagcttgaaa

SEQ ID NO: 56525 - DNA, 79 bp, Homo sapiens
agaatgcaggcctgcttcccgtccatgaagcctttggggatggcattcgccgccaggatctcgtagcttgaaacacaga

SEQ ID NO: 56526 - DNA, 79 bp, Homo sapiens
cctgcttcccgtccatgaagcctttggggatggcattcgccgccaggatctcgtagcttgaaacacagagcagaagtca

SEQ ID NO: 56527 - DNA, 75 bp, Homo sapiens
atgaagcctttggggatggcattcgccgccaggatctcgtagcttgaaacacagagcagaagtcaccccgggtac

SEQ ID NO: 56528 - DNA, 77 bp, Homo sapiens
tttggggatggcattcgccgccaggatctcgtagcttgaaacacagagcagaagtcaccccgggtacctccagcatc

SEQ ID NO: 56529 - DNA, 67 bp, Homo sapiens
agtcccgctcaccccctgccctacctgggccagaccttgggacttaccgttggcggaactcctggaa

SEQ ID NO: 56530 - DNA, 66 bp, Homo sapiens
accccctgccctacctgggccagaccttgggacttaccgttggcggaactcctggaagacgatccg

SEQ ID NO: 56531 - DNA, 66 bp, Homo sapiens
cctacctgggccagaccttgggacttaccgttggcggaactcctggaagacgatccggttggggaa

SEQ ID NO: 56532 - DNA, 68 bp, Homo sapiens
agaccttgggacttaccgttggcggaactcctggaagacgatccggttggggaagccctgccggcaga

SEQ ID NO: 56533 - DNA, 71 bp, Homo sapiens
acttaccgttggcggaactcctggaagacgatccggttggggaagccctgccggcagatgcgaatgccttc

SEQ ID NO: 56534 - DNA, 73 bp, Homo sapiens
ccgttggcggaactcctggaagacgatccggttggggaagccctgccggcagatgcgaatgccttccagcacc

SEQ ID NO: 56535 - DNA, 76 bp, Homo sapiens
aactcctggaagacgatccggttggggaagccctgccggcagatgcgaatgccttccagcaccccattgcaccgca

SEQ ID NO: 56536 - DNA, 81 bp, Homo sapiens
agacgatccggttggggaagccctgccggcagatgcgaatgccttccagcaccccattgcaccgcagctgctccagcacca

SEQ ID NO: 56537 - DNA, 85 bp, Homo sapiens
ggaagccctgccggcagatgcgaatgccttccagcaccccattgcaccgcagctgctccagcaccaggaacgcatccagcttgcc

SEQ ID NO: 56538 - DNA, 87 bp, Homo sapiens
tgccggcagatgcgaatgccttccagcaccccattgcaccgcagctgctccagcaccaggaacgcatccagcttgccggactgcaaa

SEQ ID NO: 56539 - DNA, 84 bp, Homo sapiens
atgcgaatgccttccagcaccccattgcaccgcagctgctccagcaccaggaacgcatccagcttgccggactgcaaaggtcaa

SEQ ID NO: 56540 - DNA, 80 bp, Homo sapiens
ccttccagcaccccattgcaccgcagctgctccagcaccaggaacgcatccagcttgccggactgcaaaggtcaaagagg

SEQ ID NO: 56541 - DNA, 81 bp, Homo sapiens
attgcaccgcagctgctccagcaccaggaacgcatccagcttgccggactgcaaaggtcaaagagggcagtggatccctgg

SEQ ID NO: 56542 - DNA, 77 bp, Homo sapiens
ttacaggcgtgagcaacacgcctggacactatctagcattttcttacctagttccttcacttctcacctccacactc

SEQ ID NO: 56543 - DNA, 77 bp, Homo sapiens
cgtgagcaacacgcctggacactatctagcattttcttacctagttccttcacttctcacctccacactcttgctta

SEQ ID NO: 56544 - DNA, 75 bp, Homo sapiens
acacgcctggacactatctagcattttcttacctagttccttcacttctcacctccacactcttgcttagcctgg

SEQ ID NO: 56545 - DNA, 75 bp, Homo sapiens
actatctagcattttcttacctagttccttcacttctcacctccacactcttgcttagcctgggccctctgctta

SEQ ID NO: 56546 - DNA, 76 bp, Homo sapiens
tctagcattttcttacctagttccttcacttctcacctccacactcttgcttagcctgggccctctgcttatccta

SEQ ID NO: 56547 - DNA, 73 bp, Homo sapiens
attttcttacctagttccttcacttctcacctccacactcttgcttagcctgggccctctgcttatcctaggc

SEQ ID NO: 56548 - DNA, 73 bp, Homo sapiens
ttcttacctagttccttcacttctcacctccacactcttgcttagcctgggccctctgcttatcctaggcccc

SEQ ID NO: 56549 - DNA, 75 bp, Homo sapiens
gttccttcacttctcacctccacactcttgcttagcctgggccctctgcttatcctaggccccctgcttatccta

SEQ ID NO: 56550 - DNA, 75 bp, Homo sapiens
ttccttcacttctcacctccacactcttgcttagcctgggccctctgcttatcctaggccccctgcttatcctag

SEQ ID NO: 56551 - DNA, 75 bp, Homo sapiens
ttcacttctcacctccacactcttgcttagcctgggccctctgcttatcctaggccccctgcttatcctaggccc

SEQ ID NO: 56552 - DNA, 75 bp, Homo sapiens
tcttgcttagcctgggccctctgcttatcctaggccccctgcttatcctaggccccaccctgccttccatgtcac

SEQ ID NO: 56553 - DNA, 73 bp, Homo sapiens
cctgggccctctgcttatcctaggccccctgcttatcctaggccccaccctgccttccatgtcaccaagttga

SEQ ID NO: 56554 - DNA, 77 bp, Homo sapiens
tctgcttatcctaggccccctgcttatcctaggccccaccctgccttccatgtcaccaagttgatggccacacattc

SEQ ID NO: 56555 - DNA, 75 bp, Homo sapiens
tatcctaggccccctgcttatcctaggccccaccctgccttccatgtcaccaagttgatggccacacattcttaa

SEQ ID NO: 56556 - DNA, 76 bp, Homo sapiens
tgcttatcctaggccccaccctgccttccatgtcaccaagttgatggccacacattcttaacgttcaagttcacca

SEQ ID NO: 56557 - DNA, 74 bp, Homo sapiens
taggccccaccctgccttccatgtcaccaagttgatggccacacattcttaacgttcaagttcaccagaagctt

SEQ ID NO: 56558 - DNA, 76 bp, Homo sapiens
accctgccttccatgtcaccaagttgatggccacacattcttaacgttcaagttcaccagaagctttctctgagtc

SEQ ID NO: 56559 - DNA, 78 bp, Homo sapiens
atgtcaccaagttgatggccacacattcttaacgttcaagttcaccagaagctttctctgagtcctgaggctgtggga

SEQ ID NO: 56560 - DNA, 76 bp, Homo sapiens
aagttgatggccacacattcttaacgttcaagttcaccagaagctttctctgagtcctgaggctgtgggaggagcc

SEQ ID NO: 56561 - DNA, 75 bp, Homo sapiens
acacattcttaacgttcaagttcaccagaagctttctctgagtcctgaggctgtgggaggagccctggctctttg

SEQ ID NO: 56562 - DNA, 75 bp, Homo sapiens
aagttcaccagaagctttctctgagtcctgaggctgtgggaggagccctggctctttggtgttctcctaactgac

SEQ ID NO: 56563 - DNA, 77 bp, Homo sapiens
aagctttctctgagtcctgaggctgtgggaggagccctggctctttggtgttctcctaactgaccacattccatcac

SEQ ID NO: 56564 - DNA, 81 bp, Homo sapiens
tcctgaggctgtgggaggagccctggctctttggtgttctcctaactgaccacattccatcaccatcatcagctgtatgtt

SEQ ID NO: 56565 - DNA, 80 bp, Homo sapiens
tgtgggaggagccctggctctttggtgttctcctaactgaccacattccatcaccatcatcagctgtatgtttacctctc

SEQ ID NO: 56566 - DNA, 77 bp, Homo sapiens
ccctggctctttggtgttctcctaactgaccacattccatcaccatcatcagctgtatgtttacctctccccgtgtc

SEQ ID NO: 56567 - DNA, 78 bp, Homo sapiens
tctttggtgttctcctaactgaccacattccatcaccatcatcagctgtatgtttacctctccccgtgtctcccataa

SEQ ID NO: 56568 - DNA, 80 bp, Homo sapiens
ttctcctaactgaccacattccatcaccatcatcagctgtatgtttacctctccccgtgtctcccataacctcagcacta

SEQ ID NO: 56569 - DNA, 80 bp, Homo sapiens
atcaccatcatcagctgtatgtttacctctccccgtgtctcccataacctcagcactactggcatcttgtagggattctg

SEQ ID NO: 56570 - DNA, 78 bp, Homo sapiens
atcagctgtatgtttacctctccccgtgtctcccataacctcagcactactggcatcttgtagggattctgtgctggg

SEQ ID NO: 56571 - DNA, 76 bp, Homo sapiens
tatgtttacctctccccgtgtctcccataacctcagcactactggcatcttgtagggattctgtgctgggggttga

SEQ ID NO: 56572 - DNA, 80 bp, Homo sapiens
agcactactggcatcttgtagggattctgtgctgggggttgagggaccatcctgtgcattgtacaatgcttagggcatcc

SEQ ID NO: 56573 - DNA, 79 bp, Homo sapiens
actggcatcttgtagggattctgtgctgggggttgagggaccatcctgtgcattgtacaatgcttagggcatccctggc

SEQ ID NO: 56574 - DNA, 76 bp, Homo sapiens
tgtagggattctgtgctgggggttgagggaccatcctgtgcattgtacaatgcttagggcatccctggcccctacc

SEQ ID NO: 56575 - DNA, 77 bp, Homo sapiens
ctgggggttgagggaccatcctgtgcattgtacaatgcttagggcatccctggcccctacccactagatgctgacta

SEQ ID NO: 56576 - DNA, 78 bp, Homo sapiens
gttgagggaccatcctgtgcattgtacaatgcttagggcatccctggcccctacccactagatgctgactaacagccc

SEQ ID NO: 56577 - DNA, 78 bp, Homo sapiens
ctgtgcattgtacaatgcttagggcatccctggcccctacccactagatgctgactaacagccccctcctggttgtga

SEQ ID NO: 56578 - DNA, 75 bp, Homo sapiens
attgtacaatgcttagggcatccctggcccctacccactagatgctgactaacagccccctcctggttgtgacaa

SEQ ID NO: 56579 - DNA, 73 bp, Homo sapiens
tgcttagggcatccctggcccctacccactagatgctgactaacagccccctcctggttgtgacaaccaaaaa

SEQ ID NO: 56580 - DNA, 84 bp, Homo sapiens
tgacaaccaaaaatgtctgtagcatgtccatatagaggacacaatcgccccaagctgaagatgcctgcaccagattatgagaaa

SEQ ID NO: 56581 - DNA, 81 bp, Homo sapiens
accaaaaatgtctgtagcatgtccatatagaggacacaatcgccccaagctgaagatgcctgcaccagattatgagaaacc

SEQ ID NO: 56582 - DNA, 82 bp, Homo sapiens
tctgtagcatgtccatatagaggacacaatcgccccaagctgaagatgcctgcaccagattatgagaaacccacagggaagg

SEQ ID NO: 56583 - DNA, 77 bp, Homo sapiens
tatagaggacacaatcgccccaagctgaagatgcctgcaccagattatgagaaacccacagggaagggctacaattt

SEQ ID NO: 56584 - DNA, 75 bp, Homo sapiens
acacaatcgccccaagctgaagatgcctgcaccagattatgagaaacccacagggaagggctacaatttttctaa

SEQ ID NO: 56585 - DNA, 75 bp, Homo sapiens
cccaagctgaagatgcctgcaccagattatgagaaacccacagggaagggctacaatttttctaacactgctccc

SEQ ID NO: 56586 - DNA, 75 bp, Homo sapiens
aagatgcctgcaccagattatgagaaacccacagggaagggctacaatttttctaacactgctccccagcaccca

SEQ ID NO: 56587 - DNA, 71 bp, Homo sapiens
accagattatgagaaacccacagggaagggctacaatttttctaacactgctccccagcacccaggacagg

SEQ ID NO: 56588 - DNA, 71 bp, Homo sapiens
agaaacccacagggaagggctacaatttttctaacactgctccccagcacccaggacagggcagagcccag

SEQ ID NO: 56589 - DNA, 73 bp, Homo sapiens
acagggaagggctacaatttttctaacactgctccccagcacccaggacagggcagagcccagtgaatacttc

SEQ ID NO: 56590 - DNA, 77 bp, Homo sapiens
tacaatttttctaacactgctccccagcacccaggacagggcagagcccagtgaatacttcctgggataatgaatga

SEQ ID NO: 56591 - DNA, 78 bp, Homo sapiens
ttttctaacactgctccccagcacccaggacagggcagagcccagtgaatacttcctgggataatgaatgaatgagtg

SEQ ID NO: 56592 - DNA, 84 bp, Homo sapiens
tccccagcacccaggacagggcagagcccagtgaatacttcctgggataatgaatgaatgagtggctggatgacctgcacagca

SEQ ID NO: 56593 - DNA, 82 bp, Homo sapiens
cagagcccagtgaatacttcctgggataatgaatgaatgagtggctggatgacctgcacagcaactccacaactgaaaagtc

SEQ ID NO: 56594 - DNA, 84 bp, Homo sapiens
agtgaatacttcctgggataatgaatgaatgagtggctggatgacctgcacagcaactccacaactgaaaagtctctggatgca

SEQ ID NO: 56595 - DNA, 83 bp, Homo sapiens
ttcctgggataatgaatgaatgagtggctggatgacctgcacagcaactccacaactgaaaagtctctggatgcatcctccct

SEQ ID NO: 56596 - DNA, 81 bp, Homo sapiens
gaatgaatgagtggctggatgacctgcacagcaactccacaactgaaaagtctctggatgcatcctcccttcctccttttc

SEQ ID NO: 56597 - DNA, 79 bp, Homo sapiens
aatgagtggctggatgacctgcacagcaactccacaactgaaaagtctctggatgcatcctcccttcctccttttcctc

SEQ ID NO: 56598 - DNA, 76 bp, Homo sapiens
atgacctgcacagcaactccacaactgaaaagtctctggatgcatcctcccttcctccttttcctccagggatggg

SEQ ID NO: 56599 - DNA, 76 bp, Homo sapiens
ctgcacagcaactccacaactgaaaagtctctggatgcatcctcccttcctccttttcctccagggatggggaatg

SEQ ID NO: 56600 - DNA, 73 bp, Homo sapiens
acagcaactccacaactgaaaagtctctggatgcatcctcccttcctccttttcctccagggatggggaatgg

SEQ ID NO: 56601 - DNA, 74 bp, Homo sapiens
tccacaactgaaaagtctctggatgcatcctcccttcctccttttcctccagggatggggaatgggtctgagat

SEQ ID NO: 56602 - DNA, 74 bp, Homo sapiens
aactgaaaagtctctggatgcatcctcccttcctccttttcctccagggatggggaatgggtctgagattcaga

SEQ ID NO: 56603 - DNA, 74 bp, Homo sapiens
aaagtctctggatgcatcctcccttcctccttttcctccagggatggggaatgggtctgagattcagatagcct

SEQ ID NO: 56604 - DNA, 73 bp, Homo sapiens
catcctcccttcctccttttcctccagggatggggaatgggtctgagattcagatagccttccccacatggaa

SEQ ID NO: 56605 - DNA, 72 bp, Homo sapiens
tcccttcctccttttcctccagggatggggaatgggtctgagattcagatagccttccccacatggaaaatg

SEQ ID NO: 56606 - DNA, 71 bp, Homo sapiens
cttcctccttttcctccagggatggggaatgggtctgagattcagatagccttccccacatggaaaatggg

SEQ ID NO: 56607 - DNA, 72 bp, Homo sapiens
tccttttcctccagggatggggaatgggtctgagattcagatagccttccccacatggaaaatggggtcctc

SEQ ID NO: 56608 - DNA, 70 bp, Homo sapiens
agggatggggaatgggtctgagattcagatagccttccccacatggaaaatggggtcctcggggtaggtg

SEQ ID NO: 56609 - DNA, 71 bp, Homo sapiens
ggaatgggtctgagattcagatagccttccccacatggaaaatggggtcctcggggtaggtgggggcagag

SEQ ID NO: 56610 - DNA, 67 bp, Homo sapiens
agatagccttccccacatggaaaatggggtcctcggggtaggtgggggcagagggcgccctggggac

SEQ ID NO: 56611 - DNA, 68 bp, Homo sapiens
acatggaaaatggggtcctcggggtaggtgggggcagagggcgccctggggacgctgtgaccgcttgg

SEQ ID NO: 56612 - DNA, 68 bp, Homo sapiens
aaaatggggtcctcggggtaggtgggggcagagggcgccctggggacgctgtgaccgcttgggacagc

SEQ ID NO: 56613 - DNA, 71 bp, Homo sapiens
tcctcggggtaggtgggggcagagggcgccctggggacgctgtgaccgcttgggacagccctggcttctgg

SEQ ID NO: 56614 - DNA, 72 bp, Homo sapiens
ggggcagagggcgccctggggacgctgtgaccgcttgggacagccctggcttctgggagccccagggtctgg

SEQ ID NO: 56615 - DNA, 72 bp, Homo sapiens
agagggcgccctggggacgctgtgaccgcttgggacagccctggcttctgggagccccagggtctgggcggc

SEQ ID NO: 56616 - DNA, 73 bp, Homo sapiens
tgtgaccgcttgggacagccctggcttctgggagccccagggtctgggcggcgggcctcaccctcttctcgtg

SEQ ID NO: 56617 - DNA, 74 bp, Homo sapiens
acagccctggcttctgggagccccagggtctgggcggcgggcctcaccctcttctcgtggttggggatgatgca

SEQ ID NO: 56618 - DNA, 73 bp, Homo sapiens
cccagggtctgggcggcgggcctcaccctcttctcgtggttggggatgatgcagcgcacgaagttgggcgtgg

SEQ ID NO: 56619 - DNA, 76 bp, Homo sapiens
gtctgggcggcgggcctcaccctcttctcgtggttggggatgatgcagcgcacgaagttgggcgtggtgttgcgta

SEQ ID NO: 56620 - DNA, 80 bp, Homo sapiens
ccctcttctcgtggttggggatgatgcagcgcacgaagttgggcgtggtgttgcgtagcgtggtcatcagcttgcccagc

SEQ ID NO: 56621 - DNA, 83 bp, Homo sapiens
gtggttggggatgatgcagcgcacgaagttgggcgtggtgttgcgtagcgtggtcatcagcttgcccagctgctccttgtaca

SEQ ID NO: 56622 - DNA, 85 bp, Homo sapiens
atgatgcagcgcacgaagttgggcgtggtgttgcgtagcgtggtcatcagcttgcccagctgctccttgtacagctgccccactg

SEQ ID NO: 56623 - DNA, 82 bp, Homo sapiens
aagttgggcgtggtgttgcgtagcgtggtcatcagcttgcccagctgctccttgtacagctgccccactgtgcggaacatgc

SEQ ID NO: 56624 - DNA, 82 bp, Homo sapiens
cgtggtgttgcgtagcgtggtcatcagcttgcccagctgctccttgtacagctgccccactgtgcggaacatgcccttcttg

SEQ ID NO: 56625 - DNA, 83 bp, Homo sapiens
ttgcgtagcgtggtcatcagcttgcccagctgctccttgtacagctgccccactgtgcggaacatgcccttcttggtcttgga

SEQ ID NO: 56626 - DNA, 83 bp, Homo sapiens
ttgcccagctgctccttgtacagctgccccactgtgcggaacatgcccttcttggtcttggaggcgctgggcagcgagctctc

SEQ ID NO: 56627 - DNA, 81 bp, Homo sapiens
tccttgtacagctgccccactgtgcggaacatgcccttcttggtcttggaggcgctgggcagcgagctctccgtcatcttg

SEQ ID NO: 56628 - DNA, 82 bp, Homo sapiens
tgccccactgtgcggaacatgcccttcttggtcttggaggcgctgggcagcgagctctccgtcatcttggccatctggtcca

SEQ ID NO: 56629 - DNA, 80 bp, Homo sapiens
actgtgcggaacatgcccttcttggtcttggaggcgctgggcagcgagctctccgtcatcttggccatctggtccaggcc

SEQ ID NO: 56630 - DNA, 81 bp, Homo sapiens
tcttggtcttggaggcgctgggcagcgagctctccgtcatcttggccatctggtccaggcccacgatgcggtccactatgg

SEQ ID NO: 56631 - DNA, 81 bp, Homo sapiens
aggcgctgggcagcgagctctccgtcatcttggccatctggtccaggcccacgatgcggtccactatggggcacagccagg

SEQ ID NO: 56632 - DNA, 82 bp, Homo sapiens
agcgagctctccgtcatcttggccatctggtccaggcccacgatgcggtccactatggggcacagccagggtggcatcagcc

SEQ ID NO: 56633 - DNA, 82 bp, Homo sapiens
tctccgtcatcttggccatctggtccaggcccacgatgcggtccactatggggcacagccagggtggcatcagcctctggcc

SEQ ID NO: 56634 - DNA, 74 bp, Homo sapiens
aattctccagctcaaagcagaacatggacccgagcagagaaggccttaccgtccttccacaggtcggccacaaa

SEQ ID NO: 56635 - DNA, 71 bp, Homo sapiens
aaagcagaacatggacccgagcagagaaggccttaccgtccttccacaggtcggccacaaacttgtcggag

SEQ ID NO: 56636 - DNA, 71 bp, Homo sapiens
aacatggacccgagcagagaaggccttaccgtccttccacaggtcggccacaaacttgtcggaggaggcat

SEQ ID NO: 56637 - DNA, 74 bp, Homo sapiens
agcagagaaggccttaccgtccttccacaggtcggccacaaacttgtcggaggaggcattgagcagggaagtca

SEQ ID NO: 56638 - DNA, 72 bp, Homo sapiens
ccttaccgtccttccacaggtcggccacaaacttgtcggaggaggcattgagcagggaagtcacgttgtcat

SEQ ID NO: 56639 - DNA, 76 bp, Homo sapiens
cttccacaggtcggccacaaacttgtcggaggaggcattgagcagggaagtcacgttgtcattcagcgggtccata

SEQ ID NO: 56640 - DNA, 75 bp, Homo sapiens
acaggtcggccacaaacttgtcggaggaggcattgagcagggaagtcacgttgtcattcagcgggtccatattct

SEQ ID NO: 56641 - DNA, 78 bp, Homo sapiens
acaaacttgtcggaggaggcattgagcagggaagtcacgttgtcattcagcgggtccatattcttggtcagccaggca

SEQ ID NO: 56642 - DNA, 81 bp, Homo sapiens
aggaggcattgagcagggaagtcacgttgtcattcagcgggtccatattcttggtcagccaggcactcgcattatagtcca

SEQ ID NO: 56643 - DNA, 81 bp, Homo sapiens
ttgagcagggaagtcacgttgtcattcagcgggtccatattcttggtcagccaggcactcgcattatagtccacctgccaa

SEQ ID NO: 56644 - DNA, 78 bp, Homo sapiens
aagtcacgttgtcattcagcgggtccatattcttggtcagccaggcactcgcattatagtccacctgccaaggacacc

SEQ ID NO: 56645 - DNA, 82 bp, Homo sapiens
ttgtcattcagcgggtccatattcttggtcagccaggcactcgcattatagtccacctgccaaggacaccctgctggtcaga

SEQ ID NO: 56646 - DNA, 78 bp, Homo sapiens
tccatattcttggtcagccaggcactcgcattatagtccacctgccaaggacaccctgctggtcagaacccctgggaa

SEQ ID NO: 56647 - DNA, 74 bp, Homo sapiens
actgggggtcccctgagacagagtcccctgggccctgtggctggtaccttcccagcataatggatgatggagaa

SEQ ID NO: 56648 - DNA, 77 bp, Homo sapiens
cctgagacagagtcccctgggccctgtggctggtaccttcccagcataatggatgatggagaactcagtcttgtcct

SEQ ID NO: 56649 - DNA, 78 bp, Homo sapiens
agtcccctgggccctgtggctggtaccttcccagcataatggatgatggagaactcagtcttgtccttgagctgcttg

SEQ ID NO: 56650 - DNA, 80 bp, Homo sapiens
gccctgtggctggtaccttcccagcataatggatgatggagaactcagtcttgtccttgagctgcttgggcttctggaac

SEQ ID NO: 56651 - DNA, 79 bp, Homo sapiens
gtggctggtaccttcccagcataatggatgatggagaactcagtcttgtccttgagctgcttgggcttctggaacttgg

SEQ ID NO: 56652 - DNA, 79 bp, Homo sapiens
ccttcccagcataatggatgatggagaactcagtcttgtccttgagctgcttgggcttctggaacttggggtggctgcc

SEQ ID NO: 56653 - DNA, 81 bp, Homo sapiens
ataatggatgatggagaactcagtcttgtccttgagctgcttgggcttctggaacttggggtggctgccctgctccgtgca

SEQ ID NO: 56654 - DNA, 80 bp, Homo sapiens
atggagaactcagtcttgtccttgagctgcttgggcttctggaacttggggtggctgccctgctccgtgcacagcttctc

SEQ ID NO: 56655 - DNA, 78 bp, Homo sapiens
ttgtccttgagctgcttgggcttctggaacttggggtggctgccctgctccgtgcacagcttctccacgaaagacttg

SEQ ID NO: 56656 - DNA, 78 bp, Homo sapiens
ttgagctgcttgggcttctggaacttggggtggctgccctgctccgtgcacagcttctccacgaaagacttgtccgtg

SEQ ID NO: 56657 - DNA, 75 bp, Homo sapiens
ttgggcttctggaacttggggtggctgccctgctccgtgcacagcttctccacgaaagacttgtccgtggctttg

SEQ ID NO: 56658 - DNA, 74 bp, Homo sapiens
aacttggggtggctgccctgctccgtgcacagcttctccacgaaagacttgtccgtggctttggggaaccagca

SEQ ID NO: 56659 - DNA, 77 bp, Homo sapiens
tgccctgctccgtgcacagcttctccacgaaagacttgtccgtggctttggggaaccagcattcctcgtccagcagg

SEQ ID NO: 56660 - DNA, 77 bp, Homo sapiens
ctccgtgcacagcttctccacgaaagacttgtccgtggctttggggaaccagcattcctcgtccagcagggccagca

SEQ ID NO: 56661 - DNA, 75 bp, Homo sapiens
acagcttctccacgaaagacttgtccgtggctttggggaaccagcattcctcgtccagcagggccagcacacctg

SEQ ID NO: 56662 - DNA, 72 bp, Homo sapiens
aaagacttgtccgtggctttggggaaccagcattcctcgtccagcagggccagcacacctggagggttgttc

SEQ ID NO: 56663 - DNA, 75 bp, Homo sapiens
ttgtccgtggctttggggaaccagcattcctcgtccagcagggccagcacacctggagggttgttctgtgggaga

SEQ ID NO: 56664 - DNA, 75 bp, Homo sapiens
gggaaccagcattcctcgtccagcagggccagcacacctggagggttgttctgtgggagacaagtagggcttgaa

SEQ ID NO: 56665 - DNA, 77 bp, Homo sapiens
attcctcgtccagcagggccagcacacctggagggttgttctgtgggagacaagtagggcttgaatcagagagaaca

SEQ ID NO: 56666 - DNA, 78 bp, Homo sapiens
cgtgtacaaggtgtgacggagccccgcacgcccacgtgcccctcaccggtcgctcgatgagctcgatgcagggctgta

SEQ ID NO: 56667 - DNA, 77 bp, Homo sapiens
acaaggtgtgacggagccccgcacgcccacgtgcccctcaccggtcgctcgatgagctcgatgcagggctgtaggtc

SEQ ID NO: 56668 - DNA, 79 bp, Homo sapiens
gccccgcacgcccacgtgcccctcaccggtcgctcgatgagctcgatgcagggctgtaggtccagcccaaagtcgatga

SEQ ID NO: 56669 - DNA, 77 bp, Homo sapiens
acgcccacgtgcccctcaccggtcgctcgatgagctcgatgcagggctgtaggtccagcccaaagtcgatgaagttc

SEQ ID NO: 56670 - DNA, 79 bp, Homo sapiens
ccctcaccggtcgctcgatgagctcgatgcagggctgtaggtccagcccaaagtcgatgaagttccactcgatgccctc

SEQ ID NO: 56671 - DNA, 82 bp, Homo sapiens
gtcgctcgatgagctcgatgcagggctgtaggtccagcccaaagtcgatgaagttccactcgatgccctcgcgctggtactc

SEQ ID NO: 56672 - DNA, 81 bp, Homo sapiens
atgagctcgatgcagggctgtaggtccagcccaaagtcgatgaagttccactcgatgccctcgcgctggtactcctcctgc

SEQ ID NO: 56673 - DNA, 79 bp, Homo sapiens
atgcagggctgtaggtccagcccaaagtcgatgaagttccactcgatgccctcgcgctggtactcctcctgctccagga

SEQ ID NO: 56674 - DNA, 79 bp, Homo sapiens
tccagcccaaagtcgatgaagttccactcgatgccctcgcgctggtactcctcctgctccaggatgaacatggtgtggt

SEQ ID NO: 56675 - DNA, 79 bp, Homo sapiens
ccaaagtcgatgaagttccactcgatgccctcgcgctggtactcctcctgctccaggatgaacatggtgtggttgaaga

SEQ ID NO: 56676 - DNA, 84 bp, Homo sapiens
atgaagttccactcgatgccctcgcgctggtactcctcctgctccaggatgaacatggtgtggttgaagagctgctgcagcttc

SEQ ID NO: 56677 - DNA, 82 bp, Homo sapiens
atgccctcgcgctggtactcctcctgctccaggatgaacatggtgtggttgaagagctgctgcagcttctcgttggtgtagt

SEQ ID NO: 56678 - DNA, 86 bp, Homo sapiens
ctcgcgctggtactcctcctgctccaggatgaacatggtgtggttgaagagctgctgcagcttctcgttggtgtagttgatgcaca

SEQ ID NO: 56679 - DNA, 86 bp, Homo sapiens
ctcctgctccaggatgaacatggtgtggttgaagagctgctgcagcttctcgttggtgtagttgatgcacagctgctcgaaggagt

SEQ ID NO: 56680 - DNA, 87 bp, Homo sapiens
aggatgaacatggtgtggttgaagagctgctgcagcttctcgttggtgtagttgatgcacagctgctcgaaggagttcacctgagca

SEQ ID NO: 56681 - DNA, 87 bp, Homo sapiens
aacatggtgtggttgaagagctgctgcagcttctcgttggtgtagttgatgcacagctgctcgaaggagttcacctgagcacatggc

SEQ ID NO: 56682 - DNA, 86 bp, Homo sapiens
tggttgaagagctgctgcagcttctcgttggtgtagttgatgcacagctgctcgaaggagttcacctgagcacatggcgtgggggc

SEQ ID NO: 56683 - DNA, 85 bp, Homo sapiens
tgcagcttctcgttggtgtagttgatgcacagctgctcgaaggagttcacctgagcacatggcgtgggggcggggcgtgagcatc

SEQ ID NO: 56684 - DNA, 82 bp, Homo sapiens
ttctcgttggtgtagttgatgcacagctgctcgaaggagttcacctgagcacatggcgtgggggcggggcgtgagcatcttg

SEQ ID NO: 56685 - DNA, 80 bp, Homo sapiens
atctcagacaaccaagaccatggctcttaggatcccaccgagctgtacctcaaagatctcaaatccagctatatccagga

SEQ ID NO: 56686 - DNA, 77 bp, Homo sapiens
acaaccaagaccatggctcttaggatcccaccgagctgtacctcaaagatctcaaatccagctatatccaggatccc

SEQ ID NO: 56687 - DNA, 77 bp, Homo sapiens
ccatggctcttaggatcccaccgagctgtacctcaaagatctcaaatccagctatatccaggatccccaggaaggaa

SEQ ID NO: 56688 - DNA, 76 bp, Homo sapiens
taggatcccaccgagctgtacctcaaagatctcaaatccagctatatccaggatccccaggaaggaagccccttgc

SEQ ID NO: 56689 - DNA, 75 bp, Homo sapiens
ctgtacctcaaagatctcaaatccagctatatccaggatccccaggaaggaagccccttgccgatgggtcttgtc

SEQ ID NO: 56690 - DNA, 73 bp, Homo sapiens
aaagatctcaaatccagctatatccaggatccccaggaaggaagccccttgccgatgggtcttgtccagggct

SEQ ID NO: 56691 - DNA, 72 bp, Homo sapiens
aaatccagctatatccaggatccccaggaaggaagccccttgccgatgggtcttgtccagggctttgttcac

SEQ ID NO: 56692 - DNA, 72 bp, Homo sapiens
tatccaggatccccaggaaggaagccccttgccgatgggtcttgtccagggctttgttcacgcgggtgagta

SEQ ID NO: 56693 - DNA, 71 bp, Homo sapiens
cccaggaaggaagccccttgccgatgggtcttgtccagggctttgttcacgcgggtgagtatccagcggaa

SEQ ID NO: 56694 - DNA, 73 bp, Homo sapiens
aagccccttgccgatgggtcttgtccagggctttgttcacgcgggtgagtatccagcggaaaaggcgctcata

SEQ ID NO: 56695 - DNA, 76 bp, Homo sapiens
ttgccgatgggtcttgtccagggctttgttcacgcgggtgagtatccagcggaaaaggcgctcatatgttgccttg

SEQ ID NO: 56696 - DNA, 76 bp, Homo sapiens
ttgtccagggctttgttcacgcgggtgagtatccagcggaaaaggcgctcatatgttgccttggccaaagcctcta

SEQ ID NO: 56697 - DNA, 77 bp, Homo sapiens
ctttgttcacgcgggtgagtatccagcggaaaaggcgctcatatgttgccttggccaaagcctctacagcaaagtca

SEQ ID NO: 56698 - DNA, 81 bp, Homo sapiens
ttcacgcgggtgagtatccagcggaaaaggcgctcatatgttgccttggccaaagcctctacagcaaagtcagcctgcaga

SEQ ID NO: 56699 - DNA, 79 bp, Homo sapiens
agtatccagcggaaaaggcgctcatatgttgccttggccaaagcctctacagcaaagtcagcctgcagagggcaaccag

SEQ ID NO: 56700 - DNA, 75 bp, Homo sapiens
aaaaggcgctcatatgttgccttggccaaagcctctacagcaaagtcagcctgcagagggcaaccaggggaaccc

SEQ ID NO: 56701 - DNA, 75 bp, Homo sapiens
atatgttgccttggccaaagcctctacagcaaagtcagcctgcagagggcaaccaggggaacccggttattctca

SEQ ID NO: 56702 - DNA, 81 bp, Homo sapiens
tggatgggtgggtgcatggatggataagtgataagtacatcattacctgttcttttgtctgagctttctgtaccacatctc

SEQ ID NO: 56703 - DNA, 79 bp, Homo sapiens
ggtgcatggatggataagtgataagtacatcattacctgttcttttgtctgagctttctgtaccacatctcgcccaacc

SEQ ID NO: 56704 - DNA, 77 bp, Homo sapiens
atggataagtgataagtacatcattacctgttcttttgtctgagctttctgtaccacatctcgcccaaccttgatac

SEQ ID NO: 56705 - DNA, 76 bp, Homo sapiens
aagtgataagtacatcattacctgttcttttgtctgagctttctgtaccacatctcgcccaaccttgatacgagga

SEQ ID NO: 56706 - DNA, 79 bp, Homo sapiens
tacatcattacctgttcttttgtctgagctttctgtaccacatctcgcccaaccttgatacgaggagtgaggatggatc

SEQ ID NO: 56707 - DNA, 80 bp, Homo sapiens
ttcttttgtctgagctttctgtaccacatctcgcccaaccttgatacgaggagtgaggatggatctggtgaaatctgtca

SEQ ID NO: 56708 - DNA, 81 bp, Homo sapiens
tgtctgagctttctgtaccacatctcgcccaaccttgatacgaggagtgaggatggatctggtgaaatctgtcacattaat

SEQ ID NO: 56709 - DNA, 80 bp, Homo sapiens
ttctgtaccacatctcgcccaaccttgatacgaggagtgaggatggatctggtgaaatctgtcacattaattcccatgag

SEQ ID NO: 56710 - DNA, 77 bp, Homo sapiens
tcgcccaaccttgatacgaggagtgaggatggatctggtgaaatctgtcacattaattcccatgaggtggcaaactt

SEQ ID NO: 56711 - DNA, 79 bp, Homo sapiens
aaccttgatacgaggagtgaggatggatctggtgaaatctgtcacattaattcccatgaggtggcaaactttctgagca

SEQ ID NO: 56712 - DNA, 81 bp, Homo sapiens
agtgaggatggatctggtgaaatctgtcacattaattcccatgaggtggcaaactttctgagcagctggatggagaaaaga

SEQ ID NO: 56713 - DNA, 80 bp, Homo sapiens
atggatctggtgaaatctgtcacattaattcccatgaggtggcaaactttctgagcagctggatggagaaaagaaacatc

SEQ ID NO: 56714 - DNA, 82 bp, Homo sapiens
aatctgtcacattaattcccatgaggtggcaaactttctgagcagctggatggagaaaagaaacatcgtgagtgcatcacaa

SEQ ID NO: 56715 - DNA, 71 bp, Homo sapiens
acccccccaaccccaaagtcattggtcatcaggaaaaagtggcaagtacctgtgttatctggcatggacgc

SEQ ID NO: 56716 - DNA, 75 bp, Homo sapiens
cccaaagtcattggtcatcaggaaaaagtggcaagtacctgtgttatctggcatggacgcctggtctgtgtttct

SEQ ID NO: 56717 - DNA, 75 bp, Homo sapiens
agtcattggtcatcaggaaaaagtggcaagtacctgtgttatctggcatggacgcctggtctgtgtttctttcct

SEQ ID NO: 56718 - DNA, 74 bp, Homo sapiens
ggaaaaagtggcaagtacctgtgttatctggcatggacgcctggtctgtgtttctttccttcttgaagacgata

SEQ ID NO: 56719 - DNA, 75 bp, Homo sapiens
agtggcaagtacctgtgttatctggcatggacgcctggtctgtgtttctttccttcttgaagacgatatttccaa

SEQ ID NO: 56720 - DNA, 80 bp, Homo sapiens
tgtgttatctggcatggacgcctggtctgtgtttctttccttcttgaagacgatatttccaagctgcaggaccgatgata

SEQ ID NO: 56721 - DNA, 78 bp, Homo sapiens
atctggcatggacgcctggtctgtgtttctttccttcttgaagacgatatttccaagctgcaggaccgatgataccac

SEQ ID NO: 56722 - DNA, 78 bp, Homo sapiens
ctggtctgtgtttctttccttcttgaagacgatatttccaagctgcaggaccgatgataccaccttcaatatggctga

SEQ ID NO: 56723 - DNA, 75 bp, Homo sapiens
gtttctttccttcttgaagacgatatttccaagctgcaggaccgatgataccaccttcaatatggctgaggtggg

SEQ ID NO: 56724 - DNA, 77 bp, Homo sapiens
ttccttcttgaagacgatatttccaagctgcaggaccgatgataccaccttcaatatggctgaggtggggagagaag

SEQ ID NO: 56725 - DNA, 80 bp, Homo sapiens
aagacgatatttccaagctgcaggaccgatgataccaccttcaatatggctgaggtggggagagaagggcagagcagaca

SEQ ID NO: 56726 - DNA, 80 bp, Homo sapiens
ttccaagctgcaggaccgatgataccaccttcaatatggctgaggtggggagagaagggcagagcagacacaaaggtcaa

SEQ ID NO: 56727 - DNA, 79 bp, Homo sapiens
actggtatccaggcaagctaccctccagactcaaggtgtgaggcttacatagctgctcctcctcgctgaaacccatgat

SEQ ID NO: 56728 - DNA, 81 bp, Homo sapiens
aggcaagctaccctccagactcaaggtgtgaggcttacatagctgctcctcctcgctgaaacccatgattgccatggcctc

SEQ ID NO: 56729 - DNA, 79 bp, Homo sapiens
ctccagactcaaggtgtgaggcttacatagctgctcctcctcgctgaaacccatgattgccatggcctccacggtttcc

SEQ ID NO: 56730 - DNA, 78 bp, Homo sapiens
aaggtgtgaggcttacatagctgctcctcctcgctgaaacccatgattgccatggcctccacggtttcctggaacatc

SEQ ID NO: 56731 - DNA, 81 bp, Homo sapiens
aggcttacatagctgctcctcctcgctgaaacccatgattgccatggcctccacggtttcctggaacatctcatcatcctg

SEQ ID NO: 56732 - DNA, 82 bp, Homo sapiens
atagctgctcctcctcgctgaaacccatgattgccatggcctccacggtttcctggaacatctcatcatcctgggctgctgg

SEQ ID NO: 56733 - DNA, 81 bp, Homo sapiens
ctcgctgaaacccatgattgccatggcctccacggtttcctggaacatctcatcatcctgggctgctgggatgggcacaaa

SEQ ID NO: 56734 - DNA, 79 bp, Homo sapiens
aaacccatgattgccatggcctccacggtttcctggaacatctcatcatcctgggctgctgggatgggcacaaagccat

SEQ ID NO: 56735 - DNA, 80 bp, Homo sapiens
attgccatggcctccacggtttcctggaacatctcatcatcctgggctgctgggatgggcacaaagccattggagaggaa

SEQ ID NO: 56736 - DNA, 76 bp, Homo sapiens
acggtttcctggaacatctcatcatcctgggctgctgggatgggcacaaagccattggagaggaaggtgtagttgt

SEQ ID NO: 56737 - DNA, 80 bp, Homo sapiens
tggaacatctcatcatcctgggctgctgggatgggcacaaagccattggagaggaaggtgtagttgttgaagccctccaa

SEQ ID NO: 56738 - DNA, 79 bp, Homo sapiens
atctcatcatcctgggctgctgggatgggcacaaagccattggagaggaaggtgtagttgttgaagccctccaaaagca

SEQ ID NO: 56739 - DNA, 76 bp, Homo sapiens
gctgctgggatgggcacaaagccattggagaggaaggtgtagttgttgaagccctccaaaagcaagtcacctagaa

SEQ ID NO: 56740 - DNA, 73 bp, Homo sapiens
atgggcacaaagccattggagaggaaggtgtagttgttgaagccctccaaaagcaagtcacctagaaggagag

SEQ ID NO: 56741 - DNA, 72 bp, Homo sapiens
acaaagccattggagaggaaggtgtagttgttgaagccctccaaaagcaagtcacctagaaggagaggaaga

SEQ ID NO: 56742 - DNA, 71 bp, Homo sapiens
aggaaggtgtagttgttgaagccctccaaaagcaagtcacctagaaggagaggaagacaggtcagggtcaa

SEQ ID NO: 56743 - DNA, 83 bp, Homo sapiens
aaagggaaggctcaagccatccaatcacatgtcattgctagtcacttacttctcatcttctccttggctccagcaatcatgta

SEQ ID NO: 56744 - DNA, 84 bp, Homo sapiens
aagccatccaatcacatgtcattgctagtcacttacttctcatcttctccttggctccagcaatcatgtagtaaaagatgtgga

SEQ ID NO: 56745 - DNA, 84 bp, Homo sapiens
atccaatcacatgtcattgctagtcacttacttctcatcttctccttggctccagcaatcatgtagtaaaagatgtggaatgtc

SEQ ID NO: 56746 - DNA, 82 bp, Homo sapiens
atgtcattgctagtcacttacttctcatcttctccttggctccagcaatcatgtagtaaaagatgtggaatgtcctctcgtc

SEQ ID NO: 56747 - DNA, 81 bp, Homo sapiens
tagtcacttacttctcatcttctccttggctccagcaatcatgtagtaaaagatgtggaatgtcctctcgtctctggcttg

SEQ ID NO: 56748 - DNA, 82 bp, Homo sapiens
tcatcttctccttggctccagcaatcatgtagtaaaagatgtggaatgtcctctcgtctctggcttggcgaattgcccgtga

SEQ ID NO: 56749 - DNA, 79 bp, Homo sapiens
ttggctccagcaatcatgtagtaaaagatgtggaatgtcctctcgtctctggcttggcgaattgcccgtgatttttcta

SEQ ID NO: 56750 - DNA, 80 bp, Homo sapiens
agcaatcatgtagtaaaagatgtggaatgtcctctcgtctctggcttggcgaattgcccgtgatttttctagcagatctg

SEQ ID NO: 56751 - DNA, 76 bp, Homo sapiens
atgtagtaaaagatgtggaatgtcctctcgtctctggcttggcgaattgcccgtgatttttctagcagatctggtt

SEQ ID NO: 56752 - DNA, 76 bp, Homo sapiens
atgtggaatgtcctctcgtctctggcttggcgaattgcccgtgatttttctagcagatctggtttggagggagtta

SEQ ID NO: 56753 - DNA, 75 bp, Homo sapiens
tgtcctctcgtctctggcttggcgaattgcccgtgatttttctagcagatctggtttggagggagttagggattc

SEQ ID NO: 56754 - DNA, 74 bp, Homo sapiens
tctctggcttggcgaattgcccgtgatttttctagcagatctggtttggagggagttagggattctggggatac

SEQ ID NO: 56755 - DNA, 72 bp, Homo sapiens
ctctgggcaggagattggtagggggcaggggtacccatttggcccaggctcagggaaaggatacaggtctca

SEQ ID NO: 56756 - DNA, 70 bp, Homo sapiens
aggagattggtagggggcaggggtacccatttggcccaggctcagggaaaggatacaggtctcaatgttg

SEQ ID NO: 56757 - DNA, 72 bp, Homo sapiens
gggggcaggggtacccatttggcccaggctcagggaaaggatacaggtctcaatgttggctcccacgatgta

SEQ ID NO: 56758 - DNA, 72 bp, Homo sapiens
gtacccatttggcccaggctcagggaaaggatacaggtctcaatgttggctcccacgatgtaacccgtgacg

SEQ ID NO: 56759 - DNA, 72 bp, Homo sapiens
tttggcccaggctcagggaaaggatacaggtctcaatgttggctcccacgatgtaacccgtgacgtcgaagt

SEQ ID NO: 56760 - DNA, 75 bp, Homo sapiens
tcagggaaaggatacaggtctcaatgttggctcccacgatgtaacccgtgacgtcgaagttgatgcggatgaatt

SEQ ID NO: 56761 - DNA, 74 bp, Homo sapiens
aaaggatacaggtctcaatgttggctcccacgatgtaacccgtgacgtcgaagttgatgcggatgaatttgccc

SEQ ID NO: 56762 - DNA, 76 bp, Homo sapiens
tctcaatgttggctcccacgatgtaacccgtgacgtcgaagttgatgcggatgaatttgccctgccaacaggaaaa

SEQ ID NO: 56763 - DNA, 74 bp, Homo sapiens
ttggctcccacgatgtaacccgtgacgtcgaagttgatgcggatgaatttgccctgccaacaggaaaacacagt

SEQ ID NO: 56764 - DNA, 76 bp, Homo sapiens
atgtaacccgtgacgtcgaagttgatgcggatgaatttgccctgccaacaggaaaacacagttcaggctttgctgc

SEQ ID NO: 56765 - DNA, 77 bp, Homo sapiens
cgtgacgtcgaagttgatgcggatgaatttgccctgccaacaggaaaacacagttcaggctttgctgcccaacttca

SEQ ID NO: 56766 - DNA, 75 bp, Homo sapiens
aagttgatgcggatgaatttgccctgccaacaggaaaacacagttcaggctttgctgcccaacttcagccgttaa

SEQ ID NO: 56767 - DNA, 75 bp, Homo sapiens
agatgacaccaaagcttttctggaaaatccatgtggctttgctacttacgaatcgtgaggagttgtcgttcttca

SEQ ID NO: 56768 - DNA, 71 bp, Homo sapiens
aaagcttttctggaaaatccatgtggctttgctacttacgaatcgtgaggagttgtcgttcttcactgttt

SEQ ID NO: 56769 - DNA, 72 bp, Homo sapiens
aaaatccatgtggctttgctacttacgaatcgtgaggagttgtcgttcttcactgttttggcgttgccgaaa

SEQ ID NO: 56770 - DNA, 74 bp, Homo sapiens
tgtggctttgctacttacgaatcgtgaggagttgtcgttcttcactgttttggcgttgccgaaagcctccagaa

SEQ ID NO: 56771 - DNA, 70 bp, Homo sapiens
tacttacgaatcgtgaggagttgtcgttcttcactgttttggcgttgccgaaagcctccagaatcgggtt

SEQ ID NO: 56772 - DNA, 72 bp, Homo sapiens
aatcgtgaggagttgtcgttcttcactgttttggcgttgccgaaagcctccagaatcgggtttgcttgtaga

SEQ ID NO: 56773 - DNA, 71 bp, Homo sapiens
agttgtcgttcttcactgttttggcgttgccgaaagcctccagaatcgggtttgcttgtagaagctgcttt

SEQ ID NO: 56774 - DNA, 74 bp, Homo sapiens
ttcttcactgttttggcgttgccgaaagcctccagaatcgggtttgcttgtagaagctgcttttccagctctcc

SEQ ID NO: 56775 - DNA, 71 bp, Homo sapiens
ttttggcgttgccgaaagcctccagaatcgggtttgcttgtagaagctgcttttccagctctccctaaaat

SEQ ID NO: 56776 - DNA, 74 bp, Homo sapiens
aagcctccagaatcgggtttgcttgtagaagctgcttttccagctctccctaaaattcattcacatctagttat

SEQ ID NO: 56777 - DNA, 74 bp, Homo sapiens
agaatcgggtttgcttgtagaagctgcttttccagctctccctaaaattcattcacatctagttattggagaaa

SEQ ID NO: 56778 - DNA, 75 bp, Homo sapiens
tttgcttgtagaagctgcttttccagctctccctaaaattcattcacatctagttattggagaaagcaacctagg

SEQ ID NO: 56779 - DNA, 74 bp, Homo sapiens
aagctgcttttccagctctccctaaaattcattcacatctagttattggagaaagcaacctaggtcctgacagt

SEQ ID NO: 56780 - DNA, 73 bp, Homo sapiens
tttccagctctccctaaaattcattcacatctagttattggagaaagcaacctaggtcctgacagttctacct

SEQ ID NO: 56781 - DNA, 77 bp, Homo sapiens
taaaattcattcacatctagttattggagaaagcaacctaggtcctgacagttctaccttggatggatgttgtcaca

SEQ ID NO: 56782 - DNA, 75 bp, Homo sapiens
attcacatctagttattggagaaagcaacctaggtcctgacagttctaccttggatggatgttgtcacaaaactc

SEQ ID NO: 56783 - DNA, 74 bp, Homo sapiens
tagttattggagaaagcaacctaggtcctgacagttctaccttggatggatgttgtcacaaaactctgccctta

SEQ ID NO: 56784 - DNA, 72 bp, Homo sapiens
agaaagcaacctaggtcctgacagttctaccttggatggatgttgtcacaaaactctgcccttaacccacag

SEQ ID NO: 56785 - DNA, 74 bp, Homo sapiens
taggtcctgacagttctaccttggatggatgttgtcacaaaactctgcccttaacccacaggttctctcctatc

SEQ ID NO: 56786 - DNA, 72 bp, Homo sapiens
acagttctaccttggatggatgttgtcacaaaactctgcccttaacccacaggttctctcctatctcctacc

SEQ ID NO: 56787 - DNA, 72 bp, Homo sapiens
accttggatggatgttgtcacaaaactctgcccttaacccacaggttctctcctatctcctacctcctctta

SEQ ID NO: 56788 - DNA, 74 bp, Homo sapiens
actctgcccttaacccacaggttctctcctatctcctacctcctcttagaccctgatgctaatgttcagattta

SEQ ID NO: 56789 - DNA, 74 bp, Homo sapiens
ttaacccacaggttctctcctatctcctacctcctcttagaccctgatgctaatgttcagatttacaggaggat

SEQ ID NO: 56790 - DNA, 76 bp, Homo sapiens
acaggttctctcctatctcctacctcctcttagaccctgatgctaatgttcagatttacaggaggatttcagaaga

SEQ ID NO: 56791 - DNA, 79 bp, Homo sapiens
ctatctcctacctcctcttagaccctgatgctaatgttcagatttacaggaggatttcagaagagaagcaactgtctga

SEQ ID NO: 56792 - DNA, 83 bp, Homo sapiens
tagaccctgatgctaatgttcagatttacaggaggatttcagaagagaagcaactgtctgagctctctaatagctaggacatc

SEQ ID NO: 56793 - DNA, 81 bp, Homo sapiens
atgttcagatttacaggaggatttcagaagagaagcaactgtctgagctctctaatagctaggacatctgctccctaggaa

SEQ ID NO: 56794 - DNA, 80 bp, Homo sapiens
agatttacaggaggatttcagaagagaagcaactgtctgagctctctaatagctaggacatctgctccctaggaaggtca

SEQ ID NO: 56795 - DNA, 77 bp, Homo sapiens
ggaggatttcagaagagaagcaactgtctgagctctctaatagctaggacatctgctccctaggaaggtcacttttt

SEQ ID NO: 56796 - DNA, 77 bp, Homo sapiens
agaagagaagcaactgtctgagctctctaatagctaggacatctgctccctaggaaggtcacttttttcaagaccag

SEQ ID NO: 56797 - DNA, 78 bp, Homo sapiens
aactgtctgagctctctaatagctaggacatctgctccctaggaaggtcacttttttcaagaccagggcctgctcatc

SEQ ID NO: 56798 - DNA, 81 bp, Homo sapiens
agctctctaatagctaggacatctgctccctaggaaggtcacttttttcaagaccagggcctgctcatctgtgcaacatca

SEQ ID NO: 56799 - DNA, 80 bp, Homo sapiens
ctaggacatctgctccctaggaaggtcacttttttcaagaccagggcctgctcatctgtgcaacatcactgccactcaaa

SEQ ID NO: 56800 - DNA, 81 bp, Homo sapiens
atctgctccctaggaaggtcacttttttcaagaccagggcctgctcatctgtgcaacatcactgccactcaaagccactgc

SEQ ID NO: 56801 - DNA, 81 bp, Homo sapiens
aaggtcacttttttcaagaccagggcctgctcatctgtgcaacatcactgccactcaaagccactgccttgcacaatgtcg

SEQ ID NO: 56802 - DNA, 85 bp, Homo sapiens
tttttcaagaccagggcctgctcatctgtgcaacatcactgccactcaaagccactgccttgcacaatgtcggtgatgtcattta

SEQ ID NO: 56803 - DNA, 90 bp, Homo sapiens
accagggcctgctcatctgtgcaacatcactgccactcaaagccactgccttgcacaatgtcggtgatgtcatttacatcatgatgaatg

SEQ ID NO: 56804 - DNA, 90 bp, Homo sapiens
ctgctcatctgtgcaacatcactgccactcaaagccactgccttgcacaatgtcggtgatgtcatttacatcatgatgaatggtgccccc

SEQ ID NO: 56805 - DNA, 82 bp, Homo sapiens
aacatcactgccactcaaagccactgccttgcacaatgtcggtgatgtcatttacatcatgatgaatggtgccccccggagt

SEQ ID NO: 56806 - DNA, 83 bp, Homo sapiens
actgccactcaaagccactgccttgcacaatgtcggtgatgtcatttacatcatgatgaatggtgccccccggagttgtgcag

SEQ ID NO: 56807 - DNA, 84 bp, Homo sapiens
ttgcacaatgtcggtgatgtcatttacatcatgatgaatggtgccccccggagttgtgcagtgcaccacctgtcccactgtaca

SEQ ID NO: 56808 - DNA, 84 bp, Homo sapiens
tgtcggtgatgtcatttacatcatgatgaatggtgccccccggagttgtgcagtgcaccacctgtcccactgtacatggcagtc

SEQ ID NO: 56809 - DNA, 82 bp, Homo sapiens
atgatgaatggtgccccccggagttgtgcagtgcaccacctgtcccactgtacatggcagtcgtgctgctgttcatgtttaa

SEQ ID NO: 56810 - DNA, 79 bp, Homo sapiens
ccccccggagttgtgcagtgcaccacctgtcccactgtacatggcagtcgtgctgctgttcatgtttaacaagcagcct

SEQ ID NO: 56811 - DNA, 82 bp, Homo sapiens
ttgtgcagtgcaccacctgtcccactgtacatggcagtcgtgctgctgttcatgtttaacaagcagccttcttcaagttaaa

SEQ ID NO: 56812 - DNA, 78 bp, Homo sapiens
caccacctgtcccactgtacatggcagtcgtgctgctgttcatgtttaacaagcagccttcttcaagttaaaccacta

SEQ ID NO: 56813 - DNA, 79 bp, Homo sapiens
tgtcccactgtacatggcagtcgtgctgctgttcatgtttaacaagcagccttcttcaagttaaaccactacaagcctc

SEQ ID NO: 56814 - DNA, 76 bp, Homo sapiens
atggcagtcgtgctgctgttcatgtttaacaagcagccttcttcaagttaaaccactacaagcctccttctaatta

SEQ ID NO: 56815 - DNA, 71 bp, Homo sapiens
gttcatgtttaacaagcagccttcttcaagttaaaccactacaagcctccttctaattattttagtgcaat

SEQ ID NO: 56816 - DNA, 68 bp, Homo sapiens
gccttcttcaagttaaaccactacaagcctccttctaattattttagtgcaattttttttaagttgca

SEQ ID NO: 56817 - DNA, 64 bp, Homo sapiens
agttaaaccactacaagcctccttctaattattttagtgcaattttttttaagttgcaattttt

SEQ ID NO: 56818 - DNA, 67 bp, Homo sapiens
taattattttagtgcaattttttttaagttgcaattttttctttctcaggactggttttctgaagtc

SEQ ID NO: 56819 - DNA, 71 bp, Homo sapiens
agtgcaattttttttaagttgcaattttttctttctcaggactggttttctgaagtcttctacagcagaca

SEQ ID NO: 56820 - DNA, 70 bp, Homo sapiens
tttttaagttgcaattttttctttctcaggactggttttctgaagtcttctacagcagacaagtaaggaa

SEQ ID NO: 56821 - DNA, 73 bp, Homo sapiens
agttgcaattttttctttctcaggactggttttctgaagtcttctacagcagacaagtaaggaatgcacaaaa

SEQ ID NO: 56822 - DNA, 73 bp, Homo sapiens
tttctttctcaggactggttttctgaagtcttctacagcagacaagtaaggaatgcacaaaacccaccaggaa

SEQ ID NO: 56823 - DNA, 73 bp, Homo sapiens
actggttttctgaagtcttctacagcagacaagtaaggaatgcacaaaacccaccaggaatcctcttagcgga

SEQ ID NO: 56824 - DNA, 75 bp, Homo sapiens
tgaagtcttctacagcagacaagtaaggaatgcacaaaacccaccaggaatcctcttagcggactgcggaataaa

SEQ ID NO: 56825 - DNA, 75 bp, Homo sapiens
ttctacagcagacaagtaaggaatgcacaaaacccaccaggaatcctcttagcggactgcggaataaagcttcaa

SEQ ID NO: 56826 - DNA, 71 bp, Homo sapiens
acaagtaaggaatgcacaaaacccaccaggaatcctcttagcggactgcggaataaagcttcaaagcaggt

SEQ ID NO: 56827 - DNA, 75 bp, Homo sapiens
aatgcacaaaacccaccaggaatcctcttagcggactgcggaataaagcttcaaagcaggttgcctgagctccat

SEQ ID NO: 56828 - DNA, 74 bp, Homo sapiens
aaaacccaccaggaatcctcttagcggactgcggaataaagcttcaaagcaggttgcctgagctccattcattg

SEQ ID NO: 56829 - DNA, 74 bp, Homo sapiens
aggaatcctcttagcggactgcggaataaagcttcaaagcaggttgcctgagctccattcattgggttaaagga

SEQ ID NO: 56830 - DNA, 77 bp, Homo sapiens
ttagcggactgcggaataaagcttcaaagcaggttgcctgagctccattcattgggttaaaggaagctgagactgta

SEQ ID NO: 56831 - DNA, 75 bp, Homo sapiens
ttcaaagcaggttgcctgagctccattcattgggttaaaggaagctgagactgtacacagcccaccggccccctc

SEQ ID NO: 56832 - DNA, 74 bp, Homo sapiens
cattcattgggttaaaggaagctgagactgtacacagcccaccggccccctctgccgggatgcctttgcacaaa

SEQ ID NO: 56833 - DNA, 72 bp, Homo sapiens
attgggttaaaggaagctgagactgtacacagcccaccggccccctctgccgggatgcctttgcacaaacgc

SEQ ID NO: 56834 - DNA, 76 bp, Homo sapiens
aagctgagactgtacacagcccaccggccccctctgccgggatgcctttgcacaaacgcggtcacgtgattaatca

SEQ ID NO: 56835 - DNA, 76 bp, Homo sapiens
tgtacacagcccaccggccccctctgccgggatgcctttgcacaaacgcggtcacgtgattaatcatggcaggaaa

SEQ ID NO: 56836 - DNA, 73 bp, Homo sapiens
accggccccctctgccgggatgcctttgcacaaacgcggtcacgtgattaatcatggcaggaaagggccaatg

SEQ ID NO: 56837 - DNA, 75 bp, Homo sapiens
ctctgccgggatgcctttgcacaaacgcggtcacgtgattaatcatggcaggaaagggccaatgtggtaagttaa

SEQ ID NO: 56838 - DNA, 74 bp, Homo sapiens
atgcctttgcacaaacgcggtcacgtgattaatcatggcaggaaagggccaatgtggtaagttaagctgggaaa

SEQ ID NO: 56839 - DNA, 72 bp, Homo sapiens
acaaacgcggtcacgtgattaatcatggcaggaaagggccaatgtggtaagttaagctgggaaagcaaacga

SEQ ID NO: 56840 - DNA, 75 bp, Homo sapiens
taatcatggcaggaaagggccaatgtggtaagttaagctgggaaagcaaacgagctgctcttggcctagccctaa

SEQ ID NO: 56841 - DNA, 71 bp, Homo sapiens
aggaaagggccaatgtggtaagttaagctgggaaagcaaacgagctgctcttggcctagccctaaaacatg

SEQ ID NO: 56842 - DNA, 74 bp, Homo sapiens
aatgtggtaagttaagctgggaaagcaaacgagctgctcttggcctagccctaaaacatggcggctgcagttgg

SEQ ID NO: 56843 - DNA, 74 bp, Homo sapiens
taagttaagctgggaaagcaaacgagctgctcttggcctagccctaaaacatggcggctgcagttgggccccga

SEQ ID NO: 56844 - DNA, 74 bp, Homo sapiens
ctgggaaagcaaacgagctgctcttggcctagccctaaaacatggcggctgcagttgggccccgaggcctccag

SEQ ID NO: 56845 - DNA, 73 bp, Homo sapiens
aaacgagctgctcttggcctagccctaaaacatggcggctgcagttgggccccgaggcctccaggccctggat

SEQ ID NO: 56846 - DNA, 71 bp, Homo sapiens
ttggcctagccctaaaacatggcggctgcagttgggccccgaggcctccaggccctggattctgggagttt

SEQ ID NO: 56847 - DNA, 70 bp, Homo sapiens
cctaaaacatggcggctgcagttgggccccgaggcctccaggccctggattctgggagtttttctccttg

SEQ ID NO: 56848 - DNA, 70 bp, Homo sapiens
atggcggctgcagttgggccccgaggcctccaggccctggattctgggagtttttctccttgtcctcccc

SEQ ID NO: 56849 - DNA, 67 bp, Homo sapiens
agttgggccccgaggcctccaggccctggattctgggagtttttctccttgtcctcccctcctgctt

SEQ ID NO: 56850 - DNA, 67 bp, Homo sapiens
aggcctccaggccctggattctgggagtttttctccttgtcctcccctcctgctttcccttccttat

SEQ ID NO: 56851 - DNA, 66 bp, Homo sapiens
aggccctggattctgggagtttttctccttgtcctcccctcctgctttcccttccttatttttcca

SEQ ID NO: 56852 - DNA, 70 bp, Homo sapiens
tttttctccttgtcctcccctcctgctttcccttccttatttttccaggcatcagggctgggctggacag

SEQ ID NO: 56853 - DNA, 70 bp, Homo sapiens
ctcccctcctgctttcccttccttatttttccaggcatcagggctgggctggacaggagccgggaaagtg

SEQ ID NO: 56854 - DNA, 71 bp, Homo sapiens
ctgctttcccttccttatttttccaggcatcagggctgggctggacaggagccgggaaagtgtctagaggg

SEQ ID NO: 56855 - DNA, 72 bp, Homo sapiens
ttccttatttttccaggcatcagggctgggctggacaggagccgggaaagtgtctagaggggacaaggatgg

SEQ ID NO: 56856 - DNA, 75 bp, Homo sapiens
atcagggctgggctggacaggagccgggaaagtgtctagaggggacaaggatgggcatggcttcctcctcattcc

SEQ ID NO: 56857 - DNA, 77 bp, Homo sapiens
tggacaggagccgggaaagtgtctagaggggacaaggatgggcatggcttcctcctcattcctccgcatgctaggaa

SEQ ID NO: 56858 - DNA, 77 bp, Homo sapiens
agccgggaaagtgtctagaggggacaaggatgggcatggcttcctcctcattcctccgcatgctaggaaggcatcag

SEQ ID NO: 56859 - DNA, 77 bp, Homo sapiens
aagtgtctagaggggacaaggatgggcatggcttcctcctcattcctccgcatgctaggaaggcatcagggtacctg

SEQ ID NO: 56860 - DNA, 81 bp, Homo sapiens
gcatggcttcctcctcattcctccgcatgctaggaaggcatcagggtacctggtctacaggacaaagcaggaagctgctat

SEQ ID NO: 56861 - DNA, 78 bp, Homo sapiens
ctcctcattcctccgcatgctaggaaggcatcagggtacctggtctacaggacaaagcaggaagctgctatttgtttc

SEQ ID NO: 56862 - DNA, 76 bp, Homo sapiens
attcctccgcatgctaggaaggcatcagggtacctggtctacaggacaaagcaggaagctgctatttgtttctgtt

SEQ ID NO: 56863 - DNA, 76 bp, Homo sapiens
atgctaggaaggcatcagggtacctggtctacaggacaaagcaggaagctgctatttgtttctgttttgatttgtc

SEQ ID NO: 56864 - DNA, 74 bp, Homo sapiens
tacctggtctacaggacaaagcaggaagctgctatttgtttctgttttgatttgtccacacatcctcctttttg

SEQ ID NO: 56865 - DNA, 74 bp, Homo sapiens
atttgtttctgttttgatttgtccacacatcctcctttttgtagctcccagagaaagatgaagcaaaagcctca

SEQ ID NO: 56866 - DNA, 77 bp, Homo sapiens
ttttgatttgtccacacatcctcctttttgtagctcccagagaaagatgaagcaaaagcctcatccgcatacaaatc

SEQ ID NO: 56867 - DNA, 76 bp, Homo sapiens
tacgggactcggtgggtgcaagaggatcatgcagatctaagttcactccgtgcctcccctacacaccaggaaaaca

SEQ ID NO: 56868 - DNA, 79 bp, Homo sapiens
gtgcaagaggatcatgcagatctaagttcactccgtgcctcccctacacaccaggaaaacactctcagttactcacgta

SEQ ID NO: 56869 - DNA, 76 bp, Homo sapiens
atcatgcagatctaagttcactccgtgcctcccctacacaccaggaaaacactctcagttactcacgtaggcaaaa

SEQ ID NO: 56870 - DNA, 73 bp, Homo sapiens
agatctaagttcactccgtgcctcccctacacaccaggaaaacactctcagttactcacgtaggcaaaagatg

SEQ ID NO: 56871 - DNA, 74 bp, Homo sapiens
ttcactccgtgcctcccctacacaccaggaaaacactctcagttactcacgtaggcaaaagatgggccttgctg

SEQ ID NO: 56872 - DNA, 74 bp, Homo sapiens
tcccctacacaccaggaaaacactctcagttactcacgtaggcaaaagatgggccttgctgtggttgaacaaca

SEQ ID NO: 56873 - DNA, 73 bp, Homo sapiens
accaggaaaacactctcagttactcacgtaggcaaaagatgggccttgctgtggttgaacaacacagtataaa

SEQ ID NO: 56874 - DNA, 72 bp, Homo sapiens
aaaacactctcagttactcacgtaggcaaaagatgggccttgctgtggttgaacaacacagtataaaacaaa

SEQ ID NO: 56875 - DNA, 74 bp, Homo sapiens
ttactcacgtaggcaaaagatgggccttgctgtggttgaacaacacagtataaaacaaatgtcagcgttatttc

SEQ ID NO: 56876 - DNA, 78 bp, Homo sapiens
taggcaaaagatgggccttgctgtggttgaacaacacagtataaaacaaatgtcagcgttatttccatcacatggaca

SEQ ID NO: 56877 - DNA, 78 bp, Homo sapiens
atgggccttgctgtggttgaacaacacagtataaaacaaatgtcagcgttatttccatcacatggacatcaggggctg

SEQ ID NO: 56878 - DNA, 74 bp, Homo sapiens
caggcatgagcccccatgctcagccattccctcctttttctaatttcttagagatccagacatttcaaaggttt

SEQ ID NO: 56879 - DNA, 71 bp, Homo sapiens
cccccatgctcagccattccctcctttttctaatttcttagagatccagacatttcaaaggttttcataat

SEQ ID NO: 56880 - DNA, 72 bp, Homo sapiens
atgctcagccattccctcctttttctaatttcttagagatccagacatttcaaaggttttcataattactgg

SEQ ID NO: 56881 - DNA, 70 bp, Homo sapiens
tccctcctttttctaatttcttagagatccagacatttcaaaggttttcataattactggggccacatta

SEQ ID NO: 56882 - DNA, 71 bp, Homo sapiens
taatttcttagagatccagacatttcaaaggttttcataattactggggccacattaggctccttaaaaca

SEQ ID NO: 56883 - DNA, 73 bp, Homo sapiens
tcttagagatccagacatttcaaaggttttcataattactggggccacattaggctccttaaaacagtatcca

SEQ ID NO: 56884 - DNA, 72 bp, Homo sapiens
ccagacatttcaaaggttttcataattactggggccacattaggctccttaaaacagtatccagtgagacaa

SEQ ID NO: 56885 - DNA, 72 bp, Homo sapiens
acatttcaaaggttttcataattactggggccacattaggctccttaaaacagtatccagtgagacaatgtc

SEQ ID NO: 56886 - DNA, 73 bp, Homo sapiens
atttcaaaggttttcataattactggggccacattaggctccttaaaacagtatccagtgagacaatgtctga

SEQ ID NO: 56887 - DNA, 75 bp, Homo sapiens
gttttcataattactggggccacattaggctccttaaaacagtatccagtgagacaatgtctgagatgtgtttac

SEQ ID NO: 56888 - DNA, 80 bp, Homo sapiens
taattactggggccacattaggctccttaaaacagtatccagtgagacaatgtctgagatgtgtttacgcatgcagccaa

SEQ ID NO: 56889 - DNA, 82 bp, Homo sapiens
attaggctccttaaaacagtatccagtgagacaatgtctgagatgtgtttacgcatgcagccaaaacaagcagcacatagta

SEQ ID NO: 56890 - DNA, 83 bp, Homo sapiens
taaaacagtatccagtgagacaatgtctgagatgtgtttacgcatgcagccaaaacaagcagcacatagtaggcccttgataa

SEQ ID NO: 56891 - DNA, 80 bp, Homo sapiens
aatgtctgagatgtgtttacgcatgcagccaaaacaagcagcacatagtaggcccttgataacgatgagttgttagaaag

SEQ ID NO: 56892 - DNA, 79 bp, Homo sapiens
agatgtgtttacgcatgcagccaaaacaagcagcacatagtaggcccttgataacgatgagttgttagaaagtattatc

SEQ ID NO: 56893 - DNA, 79 bp, Homo sapiens
tttacgcatgcagccaaaacaagcagcacatagtaggcccttgataacgatgagttgttagaaagtattatctcctgtg

SEQ ID NO: 56894 - DNA, 73 bp, Homo sapiens
aaaacaagcagcacatagtaggcccttgataacgatgagttgttagaaagtattatctcctgtgtttactctt

SEQ ID NO: 56895 - DNA, 69 bp, Homo sapiens
ataacgatgagttgttagaaagtattatctcctgtgtttactctttagggaaagggaaggcagtggaaa

SEQ ID NO: 56896 - DNA, 68 bp, Homo sapiens
ttgttagaaagtattatctcctgtgtttactctttagggaaagggaaggcagtggaaactgtgtttaa

SEQ ID NO: 56897 - DNA, 68 bp, Homo sapiens
aaagtattatctcctgtgtttactctttagggaaagggaaggcagtggaaactgtgtttaaactgcca

SEQ ID NO: 56898 - DNA, 71 bp, Homo sapiens
tctcctgtgtttactctttagggaaagggaaggcagtggaaactgtgtttaaactgccacacagcctctgg

SEQ ID NO: 56899 - DNA, 70 bp, Homo sapiens
ttactctttagggaaagggaaggcagtggaaactgtgtttaaactgccacacagcctctggggccattgt

SEQ ID NO: 56900 - DNA, 73 bp, Homo sapiens
aaagggaaggcagtggaaactgtgtttaaactgccacacagcctctggggccattgttcccactcactatggc

SEQ ID NO: 56901 - DNA, 73 bp, Homo sapiens
gtggaaactgtgtttaaactgccacacagcctctggggccattgttcccactcactatggctggaaaccaact

SEQ ID NO: 56902 - DNA, 76 bp, Homo sapiens
tgtttaaactgccacacagcctctggggccattgttcccactcactatggctggaaaccaacttgccagagacaat

SEQ ID NO: 56903 - DNA, 76 bp, Homo sapiens
aaactgccacacagcctctggggccattgttcccactcactatggctggaaaccaacttgccagagacaattctag

SEQ ID NO: 56904 - DNA, 78 bp, Homo sapiens
ctctggggccattgttcccactcactatggctggaaaccaacttgccagagacaattctaggatgctgaatcttgagt

SEQ ID NO: 56905 - DNA, 78 bp, Homo sapiens
attgttcccactcactatggctggaaaccaacttgccagagacaattctaggatgctgaatcttgagtttcctgcatt

SEQ ID NO: 56906 - DNA, 79 bp, Homo sapiens
actcactatggctggaaaccaacttgccagagacaattctaggatgctgaatcttgagtttcctgcatttgtttggaga

SEQ ID NO: 56907 - DNA, 78 bp, Homo sapiens
tatggctggaaaccaacttgccagagacaattctaggatgctgaatcttgagtttcctgcatttgtttggagaaggaa

SEQ ID NO: 56908 - DNA, 74 bp, Homo sapiens
aatcttgagtttcctgcatttgtttggagaaggaaagttctccaaagccacgaccagcgcccatcctagatctc

SEQ ID NO: 56909 - DNA, 74 bp, Homo sapiens
agaaggaaagttctccaaagccacgaccagcgcccatcctagatctccaagggcctccagacaagccggccatg

SEQ ID NO: 56910 - DNA, 78 bp, Homo sapiens
ttctccaaagccacgaccagcgcccatcctagatctccaagggcctccagacaagccggccatggtggctgccccaga

SEQ ID NO: 56911 - DNA, 77 bp, Homo sapiens
acgaccagcgcccatcctagatctccaagggcctccagacaagccggccatggtggctgccccagagtcccctctga

SEQ ID NO: 56912 - DNA, 77 bp, Homo sapiens
atcctagatctccaagggcctccagacaagccggccatggtggctgccccagagtcccctctgaggacgcaaagtga

SEQ ID NO: 56913 - DNA, 78 bp, Homo sapiens
tccaagggcctccagacaagccggccatggtggctgccccagagtcccctctgaggacgcaaagtgacatctggaatg

SEQ ID NO: 56914 - DNA, 80 bp, Homo sapiens
tccagacaagccggccatggtggctgccccagagtcccctctgaggacgcaaagtgacatctggaatggcgaacactgga

SEQ ID NO: 56915 - DNA, 77 bp, Homo sapiens
ccggccatggtggctgccccagagtcccctctgaggacgcaaagtgacatctggaatggcgaacactggagacaccc

SEQ ID NO: 56916 - DNA, 80 bp, Homo sapiens
tggctgccccagagtcccctctgaggacgcaaagtgacatctggaatggcgaacactggagacaccccatgccgtggtca

SEQ ID NO: 56917 - DNA, 80 bp, Homo sapiens
agagtcccctctgaggacgcaaagtgacatctggaatggcgaacactggagacaccccatgccgtggtcagatctccatc

SEQ ID NO: 56918 - DNA, 82 bp, Homo sapiens
tctgaggacgcaaagtgacatctggaatggcgaacactggagacaccccatgccgtggtcagatctccatcctaccatcttc

SEQ ID NO: 56919 - DNA, 79 bp, Homo sapiens
acgcaaagtgacatctggaatggcgaacactggagacaccccatgccgtggtcagatctccatcctaccatcttcccac

SEQ ID NO: 56920 - DNA, 77 bp, Homo sapiens
acatctggaatggcgaacactggagacaccccatgccgtggtcagatctccatcctaccatcttcccacccacaaac

SEQ ID NO: 56921 - DNA, 77 bp, Homo sapiens
atggcgaacactggagacaccccatgccgtggtcagatctccatcctaccatcttcccacccacaaacctgcagacg

SEQ ID NO: 56922 - DNA, 76 bp, Homo sapiens
cccatgccgtggtcagatctccatcctaccatcttcccacccacaaacctgcagacggaggcaccggccagtccta

SEQ ID NO: 56923 - DNA, 72 bp, Homo sapiens
atcctaccatcttcccacccacaaacctgcagacggaggcaccggccagtcctagcggccctaccacgtgcc

SEQ ID NO: 56924 - DNA, 71 bp, Homo sapiens
ttcccacccacaaacctgcagacggaggcaccggccagtcctagcggccctaccacgtgccccctcctgtg

SEQ ID NO: 56925 - DNA, 72 bp, Homo sapiens
acaaacctgcagacggaggcaccggccagtcctagcggccctaccacgtgccccctcctgtgggatagatgg

SEQ ID NO: 56926 - DNA, 73 bp, Homo sapiens
agacggaggcaccggccagtcctagcggccctaccacgtgccccctcctgtgggatagatggggcagggctga

SEQ ID NO: 56927 - DNA, 74 bp, Homo sapiens
gtcctagcggccctaccacgtgccccctcctgtgggatagatggggcagggctgacacacgaggaggaagagaa

SEQ ID NO: 56928 - DNA, 78 bp, Homo sapiens
cctcctgtgggatagatggggcagggctgacacacgaggaggaagagaaggatgggccctagaggtgatgactctaga

SEQ ID NO: 56929 - DNA, 78 bp, Homo sapiens
gatagatggggcagggctgacacacgaggaggaagagaaggatgggccctagaggtgatgactctagaaacctgctct

SEQ ID NO: 56930 - DNA, 76 bp, Homo sapiens
ggcagggctgacacacgaggaggaagagaaggatgggccctagaggtgatgactctagaaacctgctcttcttttc

SEQ ID NO: 56931 - DNA, 73 bp, Homo sapiens
acacacgaggaggaagagaaggatgggccctagaggtgatgactctagaaacctgctcttcttttcctcccaa

SEQ ID NO: 56932 - DNA, 75 bp, Homo sapiens
ggaagagaaggatgggccctagaggtgatgactctagaaacctgctcttcttttcctcccaagctcttagtcata

SEQ ID NO: 56933 - DNA, 73 bp, Homo sapiens
aaggatgggccctagaggtgatgactctagaaacctgctcttcttttcctcccaagctcttagtcataccgtg

SEQ ID NO: 56934 - DNA, 77 bp, Homo sapiens
tagaggtgatgactctagaaacctgctcttcttttcctcccaagctcttagtcataccgtgtcatcatctgtttatt

SEQ ID NO: 56935 - DNA, 74 bp, Homo sapiens
actctagaaacctgctcttcttttcctcccaagctcttagtcataccgtgtcatcatctgtttatttgagggat

SEQ ID NO: 56936 - DNA, 77 bp, Homo sapiens
ttttcctcccaagctcttagtcataccgtgtcatcatctgtttatttgagggattctttgacaactacatgctcttc

SEQ ID NO: 56937 - DNA, 80 bp, Homo sapiens
atctgtttatttgagggattctttgacaactacatgctcttccacaggtctggaagctcagagaagagaataacagcatc

SEQ ID NO: 56938 - DNA, 83 bp, Homo sapiens
ttgagggattctttgacaactacatgctcttccacaggtctggaagctcagagaagagaataacagcatctctcagacttatc

SEQ ID NO: 56939 - DNA, 81 bp, Homo sapiens
tttgacaactacatgctcttccacaggtctggaagctcagagaagagaataacagcatctctcagacttatccccaggtcc

SEQ ID NO: 56940 - DNA, 78 bp, Homo sapiens
atgctcttccacaggtctggaagctcagagaagagaataacagcatctctcagacttatccccaggtccccaccccaa

SEQ ID NO: 56941 - DNA, 75 bp, Homo sapiens
acaggtctggaagctcagagaagagaataacagcatctctcagacttatccccaggtccccaccccaagtggttc

SEQ ID NO: 56942 - DNA, 77 bp, Homo sapiens
agctcagagaagagaataacagcatctctcagacttatccccaggtccccaccccaagtggttcctggcatacagta

SEQ ID NO: 56943 - DNA, 75 bp, Homo sapiens
agaagagaataacagcatctctcagacttatccccaggtccccaccccaagtggttcctggcatacagtaggtgc

SEQ ID NO: 56944 - DNA, 73 bp, Homo sapiens
agacttatccccaggtccccaccccaagtggttcctggcatacagtaggtgctcaatccacagttactgaatg

SEQ ID NO: 56945 - DNA, 77 bp, Homo sapiens
cccaggtccccaccccaagtggttcctggcatacagtaggtgctcaatccacagttactgaatggcattgcactgaa

SEQ ID NO: 56946 - DNA, 77 bp, Homo sapiens
accccaagtggttcctggcatacagtaggtgctcaatccacagttactgaatggcattgcactgaagcccacgggcc

SEQ ID NO: 56947 - DNA, 80 bp, Homo sapiens
agtggttcctggcatacagtaggtgctcaatccacagttactgaatggcattgcactgaagcccacgggccgagtgatac

SEQ ID NO: 56948 - DNA, 82 bp, Homo sapiens
acagtaggtgctcaatccacagttactgaatggcattgcactgaagcccacgggccgagtgataccagcatctccatcccag

SEQ ID NO: 56949 - DNA, 82 bp, Homo sapiens
aggtgctcaatccacagttactgaatggcattgcactgaagcccacgggccgagtgataccagcatctccatcccagggaca

SEQ ID NO: 56950 - DNA, 78 bp, Homo sapiens
acagttactgaatggcattgcactgaagcccacgggccgagtgataccagcatctccatcccagggacagggggacac

SEQ ID NO: 56951 - DNA, 77 bp, Homo sapiens
aatggcattgcactgaagcccacgggccgagtgataccagcatctccatcccagggacagggggacacgtggaggaa

SEQ ID NO: 56952 - DNA, 73 bp, Homo sapiens
ctgaagcccacgggccgagtgataccagcatctccatcccagggacagggggacacgtggaggaatccgggaa

SEQ ID NO: 56953 - DNA, 70 bp, Homo sapiens
acgggccgagtgataccagcatctccatcccagggacagggggacacgtggaggaatccgggaacccaaa

SEQ ID NO: 56954 - DNA, 70 bp, Homo sapiens
tgataccagcatctccatcccagggacagggggacacgtggaggaatccgggaacccaaaaggtacctta

SEQ ID NO: 56955 - DNA, 64 bp, Homo sapiens
atctccatcccagggacagggggacacgtggaggaatccgggaacccaaaaggtaccttaaccc

SEQ ID NO: 56956 - DNA, 61 bp, Homo sapiens
agggacagggggacacgtggaggaatccgggaacccaaaaggtaccttaacccctgggacg

SEQ ID NO: 56957 - DNA, 65 bp, Homo sapiens
gggacacgtggaggaatccgggaacccaaaaggtaccttaacccctgggacgttacagagattca

SEQ ID NO: 56958 - DNA, 65 bp, Homo sapiens
cgtggaggaatccgggaacccaaaaggtaccttaacccctgggacgttacagagattcatgaaag

SEQ ID NO: 56959 - DNA, 69 bp, Homo sapiens
gggaacccaaaaggtaccttaacccctgggacgttacagagattcatgaaaggagtgcttctcaatcaa

SEQ ID NO: 56960 - DNA, 70 bp, Homo sapiens
aaaaggtaccttaacccctgggacgttacagagattcatgaaaggagtgcttctcaatcaagggcaactg

SEQ ID NO: 56961 - DNA, 72 bp, Homo sapiens
cttaacccctgggacgttacagagattcatgaaaggagtgcttctcaatcaagggcaactgtcccaccccag

SEQ ID NO: 56962 - DNA, 79 bp, Homo sapiens
gttacagagattcatgaaaggagtgcttctcaatcaagggcaactgtcccaccccagggaacatctgacaatgtctaga

SEQ ID NO: 56963 - DNA, 77 bp, Homo sapiens
attcatgaaaggagtgcttctcaatcaagggcaactgtcccaccccagggaacatctgacaatgtctagagatattt

SEQ ID NO: 56964 - DNA, 74 bp, Homo sapiens
aaaggagtgcttctcaatcaagggcaactgtcccaccccagggaacatctgacaatgtctagagatatttttgg

SEQ ID NO: 56965 - DNA, 75 bp, Homo sapiens
cttctcaatcaagggcaactgtcccaccccagggaacatctgacaatgtctagagatatttttggttgtcacaac

SEQ ID NO: 56966 - DNA, 73 bp, Homo sapiens
tttggttgtcacaactggagggaagggggctgtcggcatctggcgggtcgaggccagggatgttgtgaaacat

SEQ ID NO: 56967 - DNA, 75 bp, Homo sapiens
ttgtcacaactggagggaagggggctgtcggcatctggcgggtcgaggccagggatgttgtgaaacattctacga

SEQ ID NO: 56968 - DNA, 73 bp, Homo sapiens
agggaagggggctgtcggcatctggcgggtcgaggccagggatgttgtgaaacattctacgagccacagggaa

SEQ ID NO: 56969 - DNA, 73 bp, Homo sapiens
tctggcgggtcgaggccagggatgttgtgaaacattctacgagccacagggaagcccctccaaggaagagtta

SEQ ID NO: 56970 - DNA, 74 bp, Homo sapiens
aaacattctacgagccacagggaagcccctccaaggaagagttatctggtccaaaatgacatcagtgccaccac

SEQ ID NO: 56971 - DNA, 74 bp, Homo sapiens
agcccctccaaggaagagttatctggtccaaaatgacatcagtgccaccactgagaagccccgacgtggaggaa

SEQ ID NO: 56972 - DNA, 76 bp, Homo sapiens
atctggtccaaaatgacatcagtgccaccactgagaagccccgacgtggaggaagatctcgctatggaaggaaagg

SEQ ID NO: 56973 - DNA, 75 bp, Homo sapiens
aaaatgacatcagtgccaccactgagaagccccgacgtggaggaagatctcgctatggaaggaaagggcttattc

SEQ ID NO: 56974 - DNA, 77 bp, Homo sapiens
acatcagtgccaccactgagaagccccgacgtggaggaagatctcgctatggaaggaaagggcttattctcatttca

SEQ ID NO: 56975 - DNA, 72 bp, Homo sapiens
accactgagaagccccgacgtggaggaagatctcgctatggaaggaaagggcttattctcatttcacaaaac

SEQ ID NO: 56976 - DNA, 71 bp, Homo sapiens
tggaggaagatctcgctatggaaggaaagggcttattctcatttcacaaaacgggcccccttctggaggga

SEQ ID NO: 56977 - DNA, 72 bp, Homo sapiens
atctcgctatggaaggaaagggcttattctcatttcacaaaacgggcccccttctggagggatgcttctagc

SEQ ID NO: 56978 - DNA, 73 bp, Homo sapiens
tatggaaggaaagggcttattctcatttcacaaaacgggcccccttctggagggatgcttctagctgagccaa

SEQ ID NO: 56979 - DNA, 71 bp, Homo sapiens
aaggaaagggcttattctcatttcacaaaacgggcccccttctggagggatgcttctagctgagccaagaa

SEQ ID NO: 56980 - DNA, 72 bp, Homo sapiens
aaagggcttattctcatttcacaaaacgggcccccttctggagggatgcttctagctgagccaagaaatcac

SEQ ID NO: 56981 - DNA, 75 bp, Homo sapiens
attctcatttcacaaaacgggcccccttctggagggatgcttctagctgagccaagaaatcacccacactcaaca

SEQ ID NO: 56982 - DNA, 73 bp, Homo sapiens
atttcacaaaacgggcccccttctggagggatgcttctagctgagccaagaaatcacccacactcaacaggcc

SEQ ID NO: 56983 - DNA, 75 bp, Homo sapiens
acaaaacgggcccccttctggagggatgcttctagctgagccaagaaatcacccacactcaacaggcctgctcgc

SEQ ID NO: 56984 - DNA, 76 bp, Homo sapiens
gcccccttctggagggatgcttctagctgagccaagaaatcacccacactcaacaggcctgctcgccaaaaagacg

SEQ ID NO: 56985 - DNA, 76 bp, Homo sapiens
cttctggagggatgcttctagctgagccaagaaatcacccacactcaacaggcctgctcgccaaaaagacggtccc

SEQ ID NO: 56986 - DNA, 76 bp, Homo sapiens
tggagggatgcttctagctgagccaagaaatcacccacactcaacaggcctgctcgccaaaaagacggtccctctt

SEQ ID NO: 56987 - DNA, 76 bp, Homo sapiens
ttctagctgagccaagaaatcacccacactcaacaggcctgctcgccaaaaagacggtccctctttgagtcttcag

SEQ ID NO: 56988 - DNA, 70 bp, Homo sapiens
aagaaatcacccacactcaacaggcctgctcgccaaaaagacggtccctctttgagtcttcaggggaggg

SEQ ID NO: 56989 - DNA, 71 bp, Homo sapiens
acactcaacaggcctgctcgccaaaaagacggtccctctttgagtcttcaggggaggggtagtcagatggg

SEQ ID NO: 56990 - DNA, 72 bp, Homo sapiens
ccaaaaagacggtccctctttgagtcttcaggggaggggtagtcagatggggcctgagttcttgcaatgatg

SEQ ID NO: 56991 - DNA, 73 bp, Homo sapiens
aagacggtccctctttgagtcttcaggggaggggtagtcagatggggcctgagttcttgcaatgatgttctgt

SEQ ID NO: 56992 - DNA, 75 bp, Homo sapiens
tttgagtcttcaggggaggggtagtcagatggggcctgagttcttgcaatgatgttctgtttgtatctcggttgg

SEQ ID NO: 56993 - DNA, 78 bp, Homo sapiens
ttcaggggaggggtagtcagatggggcctgagttcttgcaatgatgttctgtttgtatctcggttgggctgcaagctg

SEQ ID NO: 56994 - DNA, 80 bp, Homo sapiens
tagtcagatggggcctgagttcttgcaatgatgttctgtttgtatctcggttgggctgcaagctggagaccggttggcta

SEQ ID NO: 56995 - DNA, 79 bp, Homo sapiens
gggcctgagttcttgcaatgatgttctgtttgtatctcggttgggctgcaagctggagaccggttggctaaatcatggc

SEQ ID NO: 56996 - DNA, 79 bp, Homo sapiens
agttcttgcaatgatgttctgtttgtatctcggttgggctgcaagctggagaccggttggctaaatcatggcctctgat

SEQ ID NO: 56997 - DNA, 78 bp, Homo sapiens
tgtttgtatctcggttgggctgcaagctggagaccggttggctaaatcatggcctctgattgggaactgccactcacc

SEQ ID NO: 56998 - DNA, 79 bp, Homo sapiens
ttgggctgcaagctggagaccggttggctaaatcatggcctctgattgggaactgccactcaccgtgatacttgtgtct

SEQ ID NO: 56999 - DNA, 77 bp, Homo sapiens
ctaaatcatggcctctgattgggaactgccactcaccgtgatacttgtgtctttcttgcccttgtgggaggaggcca

SEQ ID NO: 57000 - DNA, 75 bp, Homo sapiens
cctctgattgggaactgccactcaccgtgatacttgtgtctttcttgcccttgtgggaggaggccaccacggcca

SEQ ID NO: 57001 - DNA, 75 bp, Homo sapiens
aactgccactcaccgtgatacttgtgtctttcttgcccttgtgggaggaggccaccacggccaggtactgaatga

SEQ ID NO: 57002 - DNA, 72 bp, Homo sapiens
accgtgatacttgtgtctttcttgcccttgtgggaggaggccaccacggccaggtactgaatgaccttcttg

SEQ ID NO: 57003 - DNA, 71 bp, Homo sapiens
atacttgtgtctttcttgcccttgtgggaggaggccaccacggccaggtactgaatgaccttcttggtgtt

SEQ ID NO: 57004 - DNA, 68 bp, Homo sapiens
tttcttgcccttgtgggaggaggccaccacggccaggtactgaatgaccttcttggtgttttcggttt

SEQ ID NO: 57005 - DNA, 69 bp, Homo sapiens
ttgtgggaggaggccaccacggccaggtactgaatgaccttcttggtgttttcggttttcccggctcca

SEQ ID NO: 57006 - DNA, 70 bp, Homo sapiens
caggtactgaatgaccttcttggtgttttcggttttcccggctccagactcgcctctgaaagacacggga

SEQ ID NO: 57007 - DNA, 71 bp, Homo sapiens
aatgaccttcttggtgttttcggttttcccggctccagactcgcctctgaaagacacgggaacatcatcta

SEQ ID NO: 57008 - DNA, 72 bp, Homo sapiens
aaaaaaacagaagaaaaagcagttccacttacgtgcatagaatggactggtcctcccgatctgcaaacagaa

SEQ ID NO: 57009 - DNA, 74 bp, Homo sapiens
aacagaagaaaaagcagttccacttacgtgcatagaatggactggtcctcccgatctgcaaacagaaagaagaa

SEQ ID NO: 57010 - DNA, 74 bp, Homo sapiens
agttccacttacgtgcatagaatggactggtcctcccgatctgcaaacagaaagaagaaaaaagagccatgaat

SEQ ID NO: 57011 - DNA, 73 bp, Homo sapiens
acttacgtgcatagaatggactggtcctcccgatctgcaaacagaaagaagaaaaaagagccatgaattaaaa

SEQ ID NO: 57012 - DNA, 77 bp, Homo sapiens
tagaatggactggtcctcccgatctgcaaacagaaagaagaaaaaagagccatgaattaaaatgagctctgagctaa

SEQ ID NO: 57013 - DNA, 75 bp, Homo sapiens
tcctcccgatctgcaaacagaaagaagaaaaaagagccatgaattaaaatgagctctgagctaagggtctggact

SEQ ID NO: 57014 - DNA, 76 bp, Homo sapiens
atctgcaaacagaaagaagaaaaaagagccatgaattaaaatgagctctgagctaagggtctggacttggctcctc

SEQ ID NO: 57015 - DNA, 79 bp, Homo sapiens
gaggggctccctggagctggccccgtgcagccctgagttcactcaccttgaagcatgctccggtaggccgtgtctgcga

SEQ ID NO: 57016 - DNA, 83 bp, Homo sapiens
ctggagctggccccgtgcagccctgagttcactcaccttgaagcatgctccggtaggccgtgtctgcgatggcgtagatgtga

SEQ ID NO: 57017 - DNA, 82 bp, Homo sapiens
ccccgtgcagccctgagttcactcaccttgaagcatgctccggtaggccgtgtctgcgatggcgtagatgtgaggcggcatc

SEQ ID NO: 57018 - DNA, 82 bp, Homo sapiens
ccctgagttcactcaccttgaagcatgctccggtaggccgtgtctgcgatggcgtagatgtgaggcggcatctcgtgcctct

SEQ ID NO: 57019 - DNA, 83 bp, Homo sapiens
agttcactcaccttgaagcatgctccggtaggccgtgtctgcgatggcgtagatgtgaggcggcatctcgtgcctcttcttgc

SEQ ID NO: 57020 - DNA, 84 bp, Homo sapiens
ttgaagcatgctccggtaggccgtgtctgcgatggcgtagatgtgaggcggcatctcgtgcctcttcttgcccttgtacatgtc

SEQ ID NO: 57021 - DNA, 81 bp, Homo sapiens
tccggtaggccgtgtctgcgatggcgtagatgtgaggcggcatctcgtgcctcttcttgcccttgtacatgtcgacgatct

SEQ ID NO: 57022 - DNA, 84 bp, Homo sapiens
gtgtctgcgatggcgtagatgtgaggcggcatctcgtgcctcttcttgcccttgtacatgtcgacgatcttctccgagtagatg

SEQ ID NO: 57023 - DNA, 81 bp, Homo sapiens
atggcgtagatgtgaggcggcatctcgtgcctcttcttgcccttgtacatgtcgacgatcttctccgagtagatgggcagg

SEQ ID NO: 57024 - DNA, 80 bp, Homo sapiens
atgtgaggcggcatctcgtgcctcttcttgcccttgtacatgtcgacgatcttctccgagtagatgggcaggtgtttata

SEQ ID NO: 57025 - DNA, 76 bp, Homo sapiens
atctcgtgcctcttcttgcccttgtacatgtcgacgatcttctccgagtagatgggcaggtgtttataggggttga

SEQ ID NO: 57026 - DNA, 75 bp, Homo sapiens
cttcttgcccttgtacatgtcgacgatcttctccgagtagatgggcaggtgtttataggggttgaccaccacgca

SEQ ID NO: 57027 - DNA, 74 bp, Homo sapiens
cccttgtacatgtcgacgatcttctccgagtagatgggcaggtgtttataggggttgaccaccacgcagaagag

SEQ ID NO: 57028 - DNA, 75 bp, Homo sapiens
atgtcgacgatcttctccgagtagatgggcaggtgtttataggggttgaccaccacgcagaagaggccagagtac

SEQ ID NO: 57029 - DNA, 77 bp, Homo sapiens
atcttctccgagtagatgggcaggtgtttataggggttgaccaccacgcagaagaggccagagtacgtctgcagaca

SEQ ID NO: 57030 - DNA, 76 bp, Homo sapiens
agtagatgggcaggtgtttataggggttgaccaccacgcagaagaggccagagtacgtctgcagacagagaaccca

SEQ ID NO: 57031 - DNA, 74 bp, Homo sapiens
aggtgtttataggggttgaccaccacgcagaagaggccagagtacgtctgcagacagagaacccagcttacttc

SEQ ID NO: 57032 - DNA, 78 bp, Homo sapiens
tactttccttatgaggccaggagtaggtacctggctgcctgcaatactcacatatattagccctgagaagtaccgctc

SEQ ID NO: 57033 - DNA, 78 bp, Homo sapiens
agtaggtacctggctgcctgcaatactcacatatattagccctgagaagtaccgctccctcaggttgtgtagcacgga

SEQ ID NO: 57034 - DNA, 80 bp, Homo sapiens
tgcctgcaatactcacatatattagccctgagaagtaccgctccctcaggttgtgtagcacggaggcttcgttgaggcac

SEQ ID NO: 57035 - DNA, 77 bp, Homo sapiens
aatactcacatatattagccctgagaagtaccgctccctcaggttgtgtagcacggaggcttcgttgaggcacgtca

SEQ ID NO: 57036 - DNA, 77 bp, Homo sapiens
atatattagccctgagaagtaccgctccctcaggttgtgtagcacggaggcttcgttgaggcacgtcagctccgcca

SEQ ID NO: 57037 - DNA, 77 bp, Homo sapiens
ccctgagaagtaccgctccctcaggttgtgtagcacggaggcttcgttgaggcacgtcagctccgccatgtcctcca

SEQ ID NO: 57038 - DNA, 77 bp, Homo sapiens
taccgctccctcaggttgtgtagcacggaggcttcgttgaggcacgtcagctccgccatgtcctccaccttggagaa

SEQ ID NO: 57039 - DNA, 76 bp, Homo sapiens
ttgtgtagcacggaggcttcgttgaggcacgtcagctccgccatgtcctccaccttggagaacttgggtgggttca

SEQ ID NO: 57040 - DNA, 76 bp, Homo sapiens
tagcacggaggcttcgttgaggcacgtcagctccgccatgtcctccaccttggagaacttgggtgggttcatcttc

SEQ ID NO: 57041 - DNA, 74 bp, Homo sapiens
acgtcagctccgccatgtcctccaccttggagaacttgggtgggttcatcttctggatgtcatctttcccaacc

SEQ ID NO: 57042 - DNA, 72 bp, Homo sapiens
ccatgtcctccaccttggagaacttgggtgggttcatcttctggatgtcatctttcccaaccgtgaccttct

SEQ ID NO: 57043 - DNA, 74 bp, Homo sapiens
tccaccttggagaacttgggtgggttcatcttctggatgtcatctttcccaaccgtgaccttcttgccattctc

SEQ ID NO: 57044 - DNA, 75 bp, Homo sapiens
agaacttgggtgggttcatcttctggatgtcatctttcccaaccgtgaccttcttgccattctccaccagctcca

SEQ ID NO: 57045 - DNA, 75 bp, Homo sapiens
atcttctggatgtcatctttcccaaccgtgaccttcttgccattctccaccagctccacaaccacctcatccccc

SEQ ID NO: 57046 - DNA, 71 bp, Homo sapiens
atctttcccaaccgtgaccttcttgccattctccaccagctccacaaccacctcatcccccttctcctcct

SEQ ID NO: 57047 - DNA, 73 bp, Homo sapiens
cccaaccgtgaccttcttgccattctccaccagctccacaaccacctcatcccccttctcctccttaatgctg

SEQ ID NO: 57048 - DNA, 76 bp, Homo sapiens
accttcttgccattctccaccagctccacaaccacctcatcccccttctcctccttaatgctggctgcctcgaagc

SEQ ID NO: 57049 - DNA, 76 bp, Homo sapiens
attctccaccagctccacaaccacctcatcccccttctcctccttaatgctggctgcctcgaagccctgcttctcc

SEQ ID NO: 57050 - DNA, 74 bp, Homo sapiens
tccacaaccacctcatcccccttctcctccttaatgctggctgcctcgaagccctgcttctccgaggggaccca

SEQ ID NO: 57051 - DNA, 74 bp, Homo sapiens
ctcatcccccttctcctccttaatgctggctgcctcgaagccctgcttctccgaggggacccagacgagtctct

SEQ ID NO: 57052 - DNA, 75 bp, Homo sapiens
ttctcctccttaatgctggctgcctcgaagccctgcttctccgaggggacccagacgagtctcttggcggcccag

SEQ ID NO: 57053 - DNA, 77 bp, Homo sapiens
tccttaatgctggctgcctcgaagccctgcttctccgaggggacccagacgagtctcttggcggcccagtcagcctg

SEQ ID NO: 57054 - DNA, 76 bp, Homo sapiens
ctggctgcctcgaagccctgcttctccgaggggacccagacgagtctcttggcggcccagtcagcctgggccactg

SEQ ID NO: 57055 - DNA, 76 bp, Homo sapiens
agccctgcttctccgaggggacccagacgagtctcttggcggcccagtcagcctgggccactgggctgttgatgaa

SEQ ID NO: 57056 - DNA, 73 bp, Homo sapiens
ttctccgaggggacccagacgagtctcttggcggcccagtcagcctgggccactgggctgttgatgaagtttt

SEQ ID NO: 57057 - DNA, 75 bp, Homo sapiens
ccagacgagtctcttggcggcccagtcagcctgggccactgggctgttgatgaagtttttgtccacaaagaggaa

SEQ ID NO: 57058 - DNA, 75 bp, Homo sapiens
agtctcttggcggcccagtcagcctgggccactgggctgttgatgaagtttttgtccacaaagaggaacttctca

SEQ ID NO: 57059 - DNA, 76 bp, Homo sapiens
cccagtcagcctgggccactgggctgttgatgaagtttttgtccacaaagaggaacttctcatcgtcactgagttg

SEQ ID NO: 57060 - DNA, 74 bp, Homo sapiens
cctgggccactgggctgttgatgaagtttttgtccacaaagaggaacttctcatcgtcactgagttggcccttc

SEQ ID NO: 57061 - DNA, 76 bp, Homo sapiens
actgggctgttgatgaagtttttgtccacaaagaggaacttctcatcgtcactgagttggcccttctgcgccatgg

SEQ ID NO: 57062 - DNA, 77 bp, Homo sapiens
ttgatgaagtttttgtccacaaagaggaacttctcatcgtcactgagttggcccttctgcgccatggtgccttgttg

SEQ ID NO: 57063 - DNA, 74 bp, Homo sapiens
tttttgtccacaaagaggaacttctcatcgtcactgagttggcccttctgcgccatggtgccttgttggtcccc

SEQ ID NO: 57064 - DNA, 74 bp, Homo sapiens
aggaacttctcatcgtcactgagttggcccttctgcgccatggtgccttgttggtcccctgtggaataaggtaa

SEQ ID NO: 57065 - DNA, 76 bp, Homo sapiens
ttctcatcgtcactgagttggcccttctgcgccatggtgccttgttggtcccctgtggaataaggtaacagggtca

SEQ ID NO: 57066 - DNA, 74 bp, Homo sapiens
actgagttggcccttctgcgccatggtgccttgttggtcccctgtggaataaggtaacagggtcagaatcagac

SEQ ID NO: 57067 - DNA, 71 bp, Homo sapiens
acttttaacacccccctgccctgcaatctgcccccagaatgacaactactacttacagatctccaactggg

SEQ ID NO: 57068 - DNA, 75 bp, Homo sapiens
ctgccctgcaatctgcccccagaatgacaactactacttacagatctccaactggggggactagtggagaggaaa

SEQ ID NO: 57069 - DNA, 73 bp, Homo sapiens
aatctgcccccagaatgacaactactacttacagatctccaactggggggactagtggagaggaaactggatg

SEQ ID NO: 57070 - DNA, 75 bp, Homo sapiens
agaatgacaactactacttacagatctccaactggggggactagtggagaggaaactggatggcgagctcggatc

SEQ ID NO: 57071 - DNA, 76 bp, Homo sapiens
acaactactacttacagatctccaactggggggactagtggagaggaaactggatggcgagctcggatctgacgca

SEQ ID NO: 57072 - DNA, 75 bp, Homo sapiens
acttacagatctccaactggggggactagtggagaggaaactggatggcgagctcggatctgacgcacctcccag

SEQ ID NO: 57073 - DNA, 74 bp, Homo sapiens
aactggggggactagtggagaggaaactggatggcgagctcggatctgacgcacctcccaggccggagcgtcca

SEQ ID NO: 57074 - DNA, 75 bp, Homo sapiens
gggactagtggagaggaaactggatggcgagctcggatctgacgcacctcccaggccggagcgtccaaatctccc

SEQ ID NO: 57075 - DNA, 76 bp, Homo sapiens
aggaaactggatggcgagctcggatctgacgcacctcccaggccggagcgtccaaatctccctgcgcgtcctcgga

SEQ ID NO: 57076 - DNA, 77 bp, Homo sapiens
tggcgagctcggatctgacgcacctcccaggccggagcgtccaaatctccctgcgcgtcctcggacgcctctcttta

SEQ ID NO: 57077 - DNA, 76 bp, Homo sapiens
agctcggatctgacgcacctcccaggccggagcgtccaaatctccctgcgcgtcctcggacgcctctctttataga

SEQ ID NO: 57078 - DNA, 72 bp, Homo sapiens
acgcacctcccaggccggagcgtccaaatctccctgcgcgtcctcggacgcctctctttatagacccggagc

SEQ ID NO: 57079 - DNA, 71 bp, Homo sapiens
tcaagttttccaaaatctattttgaccaataaattcagaacttaaatgctgtatcttttgagactgaacct

SEQ ID NO: 57080 - DNA, 70 bp, Homo sapiens
tttgaccaataaattcagaacttaaatgctgtatcttttgagactgaacctttattttctgaaaaacagg

SEQ ID NO: 57081 - DNA, 69 bp, Homo sapiens
ccaataaattcagaacttaaatgctgtatcttttgagactgaacctttattttctgaaaaacaggtatt

SEQ ID NO: 57082 - DNA, 75 bp, Homo sapiens
gctgtatcttttgagactgaacctttattttctgaaaaacaggtatttcatacaatctttgccatgttaatgcaa

SEQ ID NO: 57083 - DNA, 75 bp, Homo sapiens
gagactgaacctttattttctgaaaaacaggtatttcatacaatctttgccatgttaatgcaaatatgcacaaag

SEQ ID NO: 57084 - DNA, 75 bp, Homo sapiens
acctttattttctgaaaaacaggtatttcatacaatctttgccatgttaatgcaaatatgcacaaagtaggcatg

SEQ ID NO: 57085 - DNA, 77 bp, Homo sapiens
ctgaaaaacaggtatttcatacaatctttgccatgttaatgcaaatatgcacaaagtaggcatgtatttgttttcca

SEQ ID NO: 57086 - DNA, 79 bp, Homo sapiens
acaggtatttcatacaatctttgccatgttaatgcaaatatgcacaaagtaggcatgtatttgttttccaaaagatgca

SEQ ID NO: 57087 - DNA, 80 bp, Homo sapiens
catacaatctttgccatgttaatgcaaatatgcacaaagtaggcatgtatttgttttccaaaagatgcattatgaacatt

SEQ ID NO: 57088 - DNA, 78 bp, Homo sapiens
caaatatgcacaaagtaggcatgtatttgttttccaaaagatgcattatgaacattttcaggaagctggtgtgattta

SEQ ID NO: 57089 - DNA, 76 bp, Homo sapiens
cacaaagtaggcatgtatttgttttccaaaagatgcattatgaacattttcaggaagctggtgtgatttattcaac

SEQ ID NO: 57090 - DNA, 74 bp, Homo sapiens
aggcatgtatttgttttccaaaagatgcattatgaacattttcaggaagctggtgtgatttattcaacttttaa

SEQ ID NO: 57091 - DNA, 74 bp, Homo sapiens
gttttccaaaagatgcattatgaacattttcaggaagctggtgtgatttattcaacttttaaatacaatcacaa

SEQ ID NO: 57092 - DNA, 78 bp, Homo sapiens
tgcattatgaacattttcaggaagctggtgtgatttattcaacttttaaatacaatcacaaaattatatccatcagga

SEQ ID NO: 57093 - DNA, 75 bp, Homo sapiens
gaacattttcaggaagctggtgtgatttattcaacttttaaatacaatcacaaaattatatccatcaggaggcat

SEQ ID NO: 57094 - DNA, 75 bp, Homo sapiens
tcaggaagctggtgtgatttattcaacttttaaatacaatcacaaaattatatccatcaggaggcattacaacct

SEQ ID NO: 57095 - DNA, 74 bp, Homo sapiens
gtgtgatttattcaacttttaaatacaatcacaaaattatatccatcaggaggcattacaaccttttgtacaga

SEQ ID NO: 57096 - DNA, 72 bp, Homo sapiens
caacttttaaatacaatcacaaaattatatccatcaggaggcattacaaccttttgtacagaaaagccacta

SEQ ID NO: 57097 - DNA, 74 bp, Homo sapiens
atacaatcacaaaattatatccatcaggaggcattacaaccttttgtacagaaaagccactatttatacattgt

SEQ ID NO: 57098 - DNA, 73 bp, Homo sapiens
aaattatatccatcaggaggcattacaaccttttgtacagaaaagccactatttatacattgttactaagaca

SEQ ID NO: 57099 - DNA, 74 bp, Homo sapiens
catcaggaggcattacaaccttttgtacagaaaagccactatttatacattgttactaagacaaggaagattca

SEQ ID NO: 57100 - DNA, 74 bp, Homo sapiens
acagaaaagccactatttatacattgttactaagacaaggaagattcagttcaactcaacttgctcttagaata

SEQ ID NO: 57101 - DNA, 72 bp, Homo sapiens
ccactatttatacattgttactaagacaaggaagattcagttcaactcaacttgctcttagaataagggtaa

SEQ ID NO: 57102 - DNA, 69 bp, Homo sapiens
acattgttactaagacaaggaagattcagttcaactcaacttgctcttagaataagggtaaaaagtaaa

SEQ ID NO: 57103 - DNA, 68 bp, Homo sapiens
ctaagacaaggaagattcagttcaactcaacttgctcttagaataagggtaaaaagtaaattaacaag

SEQ ID NO: 57104 - DNA, 71 bp, Homo sapiens
gattcagttcaactcaacttgctcttagaataagggtaaaaagtaaattaacaagtaagtgaagtatgatg

SEQ ID NO: 57105 - DNA, 72 bp, Homo sapiens
ctcaacttgctcttagaataagggtaaaaagtaaattaacaagtaagtgaagtatgatgttgttgccactga

SEQ ID NO: 57106 - DNA, 73 bp, Homo sapiens
tgctcttagaataagggtaaaaagtaaattaacaagtaagtgaagtatgatgttgttgccactgacattacag

SEQ ID NO: 57107 - DNA, 71 bp, Homo sapiens
gaataagggtaaaaagtaaattaacaagtaagtgaagtatgatgttgttgccactgacattacaggtggaa

SEQ ID NO: 57108 - DNA, 71 bp, Homo sapiens
agtaaattaacaagtaagtgaagtatgatgttgttgccactgacattacaggtggaaatataagggaaatt

SEQ ID NO: 57109 - DNA, 72 bp, Homo sapiens
aacaagtaagtgaagtatgatgttgttgccactgacattacaggtggaaatataagggaaatttaaaccaga

SEQ ID NO: 57110 - DNA, 73 bp, Homo sapiens
agtgaagtatgatgttgttgccactgacattacaggtggaaatataagggaaatttaaaccagaaaaatgaca

SEQ ID NO: 57111 - DNA, 71 bp, Homo sapiens
gatgttgttgccactgacattacaggtggaaatataagggaaatttaaaccagaaaaatgacacaataact

SEQ ID NO: 57112 - DNA, 69 bp, Homo sapiens
tgacattacaggtggaaatataagggaaatttaaaccagaaaaatgacacaataactttaaagaggagc

SEQ ID NO: 57113 - DNA, 67 bp, Homo sapiens
caggtggaaatataagggaaatttaaaccagaaaaatgacacaataactttaaagaggagctgaaac

SEQ ID NO: 57114 - DNA, 67 bp, Homo sapiens
aatataagggaaatttaaaccagaaaaatgacacaataactttaaagaggagctgaaactttgtcaa

SEQ ID NO: 57115 - DNA, 65 bp, Homo sapiens
aaatttaaaccagaaaaatgacacaataactttaaagaggagctgaaactttgtcaaaaaaagaa

SEQ ID NO: 57116 - DNA, 69 bp, Homo sapiens
aagaaaaaactattagcctgttttcaaagaaaaacattctaaaagtgtgcatttcagaacatagaattc

SEQ ID NO: 57117 - DNA, 70 bp, Homo sapiens
aaactattagcctgttttcaaagaaaaacattctaaaagtgtgcatttcagaacatagaattcttctaag

SEQ ID NO: 57118 - DNA, 71 bp, Homo sapiens
gcctgttttcaaagaaaaacattctaaaagtgtgcatttcagaacatagaattcttctaagtttaccatct

SEQ ID NO: 57119 - DNA, 72 bp, Homo sapiens
gaaaaacattctaaaagtgtgcatttcagaacatagaattcttctaagtttaccatcttcaaaaatcttcta

SEQ ID NO: 57120 - DNA, 73 bp, Homo sapiens
aaaagtgtgcatttcagaacatagaattcttctaagtttaccatcttcaaaaatcttctaaattgtatgacac

SEQ ID NO: 57121 - DNA, 73 bp, Homo sapiens
catagaattcttctaagtttaccatcttcaaaaatcttctaaattgtatgacacttttacattagcacaacaa

SEQ ID NO: 57122 - DNA, 71 bp, Homo sapiens
cttctaagtttaccatcttcaaaaatcttctaaattgtatgacacttttacattagcacaacaaacagctt

SEQ ID NO: 57123 - DNA, 73 bp, Homo sapiens
ccatcttcaaaaatcttctaaattgtatgacacttttacattagcacaacaaacagctttttctaagtctagc

SEQ ID NO: 57124 - DNA, 71 bp, Homo sapiens
aaatcttctaaattgtatgacacttttacattagcacaacaaacagctttttctaagtctagccaagttcc

SEQ ID NO: 57125 - DNA, 73 bp, Homo sapiens
tctaaattgtatgacacttttacattagcacaacaaacagctttttctaagtctagccaagttcccatggaag

SEQ ID NO: 57126 - DNA, 73 bp, Homo sapiens
tatgacacttttacattagcacaacaaacagctttttctaagtctagccaagttcccatggaaggcaaacgac

SEQ ID NO: 57127 - DNA, 71 bp, Homo sapiens
ttacattagcacaacaaacagctttttctaagtctagccaagttcccatggaaggcaaacgaccctaagta

SEQ ID NO: 57128 - DNA, 68 bp, Homo sapiens
aaacagctttttctaagtctagccaagttcccatggaaggcaaacgaccctaagtagttcatatttta

SEQ ID NO: 57129 - DNA, 68 bp, Homo sapiens
tttttctaagtctagccaagttcccatggaaggcaaacgaccctaagtagttcatattttacagccct

SEQ ID NO: 57130 - DNA, 70 bp, Homo sapiens
agtctagccaagttcccatggaaggcaaacgaccctaagtagttcatattttacagcccttgaacttata

SEQ ID NO: 57131 - DNA, 70 bp, Homo sapiens
tctagccaagttcccatggaaggcaaacgaccctaagtagttcatattttacagcccttgaacttataaa

SEQ ID NO: 57132 - DNA, 67 bp, Homo sapiens
agttcccatggaaggcaaacgaccctaagtagttcatattttacagcccttgaacttataaagcttt

SEQ ID NO: 57133 - DNA, 70 bp, Homo sapiens
catggaaggcaaacgaccctaagtagttcatattttacagcccttgaacttataaagcttttctcattaa

SEQ ID NO: 57134 - DNA, 70 bp, Homo sapiens
aggcaaacgaccctaagtagttcatattttacagcccttgaacttataaagcttttctcattaagagtca

SEQ ID NO: 57135 - DNA, 69 bp, Homo sapiens
gaccctaagtagttcatattttacagcccttgaacttataaagcttttctcattaagagtcagttttac

SEQ ID NO: 57136 - DNA, 69 bp, Homo sapiens
ttacagcccttgaacttataaagcttttctcattaagagtcagttttacccttctgtaaataaggatgg

SEQ ID NO: 57137 - DNA, 72 bp, Homo sapiens
tcagttttacccttctgtaaataaggatggtgatactgttatccaggcctaaaaagcaggaagtgcaacaaa

SEQ ID NO: 57138 - DNA, 72 bp, Homo sapiens
aataaggatggtgatactgttatccaggcctaaaaagcaggaagtgcaacaaacccttagggtttcatgata

SEQ ID NO: 57139 - DNA, 72 bp, Homo sapiens
gtgatactgttatccaggcctaaaaagcaggaagtgcaacaaacccttagggtttcatgatacagtgaattt

SEQ ID NO: 57140 - DNA, 70 bp, Homo sapiens
tgttatccaggcctaaaaagcaggaagtgcaacaaacccttagggtttcatgatacagtgaattttcccc

SEQ ID NO: 57141 - DNA, 65 bp, Homo sapiens
aagtgcaacaaacccttagggtttcatgatacagtgaattttcccctccccaacgtttggaaaaa

SEQ ID NO: 57142 - DNA, 63 bp, Homo sapiens
aacaaacccttagggtttcatgatacagtgaattttcccctccccaacgtttggaaaaaattg

SEQ ID NO: 57143 - DNA, 68 bp, Homo sapiens
tttcatgatacagtgaattttcccctccccaacgtttggaaaaaattgggacacttgctagttcttcc

SEQ ID NO: 57144 - DNA, 65 bp, Homo sapiens
ttcccctccccaacgtttggaaaaaattgggacacttgctagttcttccctgtgggaagaatctt

SEQ ID NO: 57145 - DNA, 66 bp, Homo sapiens
aacgtttggaaaaaattgggacacttgctagttcttccctgtgggaagaatctttctaatattacc

SEQ ID NO: 57146 - DNA, 68 bp, Homo sapiens
aaaaattgggacacttgctagttcttccctgtgggaagaatctttctaatattacccaaatattgaaa

SEQ ID NO: 57147 - DNA, 69 bp, Homo sapiens
tgctagttcttccctgtgggaagaatctttctaatattacccaaatattgaaaacaaaatctaccttct

SEQ ID NO: 57148 - DNA, 66 bp, Homo sapiens
tccctgtgggaagaatctttctaatattacccaaatattgaaaacaaaatctaccttctttaaccc

SEQ ID NO: 57149 - DNA, 66 bp, Homo sapiens
tctttctaatattacccaaatattgaaaacaaaatctaccttctttaacccttgtattagtaattc

SEQ ID NO: 57150 - DNA, 64 bp, Homo sapiens
ttctttaacccttgtattagtaattctacctccttggcttatggggggaaaagtcctagtttta

SEQ ID NO: 57151 - DNA, 69 bp, Homo sapiens
tccttggcttatggggggaaaagtcctagttttaaattgctggcattttacaagctcaacaagataaaa

SEQ ID NO: 57152 - DNA, 67 bp, Homo sapiens
ggcttatggggggaaaagtcctagttttaaattgctggcattttacaagctcaacaagataaaaaat

SEQ ID NO: 57153 - DNA, 68 bp, Homo sapiens
gggaaaagtcctagttttaaattgctggcattttacaagctcaacaagataaaaaattgaacactggt

SEQ ID NO: 57154 - DNA, 71 bp, Homo sapiens
ctagttttaaattgctggcattttacaagctcaacaagataaaaaattgaacactggttttcatactctaa

SEQ ID NO: 57155 - DNA, 73 bp, Homo sapiens
tgctggcattttacaagctcaacaagataaaaaattgaacactggttttcatactctaattttatgtaaaaca

SEQ ID NO: 57156 - DNA, 71 bp, Homo sapiens
tttacaagctcaacaagataaaaaattgaacactggttttcatactctaattttatgtaaaacaaagatgc

SEQ ID NO: 57157 - DNA, 71 bp, Homo sapiens
caagataaaaaattgaacactggttttcatactctaattttatgtaaaacaaagatgcttaaatgtgcgaa

SEQ ID NO: 57158 - DNA, 74 bp, Homo sapiens
attgaacactggttttcatactctaattttatgtaaaacaaagatgcttaaatgtgcgaatagtaaagcattca

SEQ ID NO: 57159 - DNA, 75 bp, Homo sapiens
cactggttttcatactctaattttatgtaaaacaaagatgcttaaatgtgcgaatagtaaagcattcactgatat

SEQ ID NO: 57160 - DNA, 79 bp, Homo sapiens
atgtaaaacaaagatgcttaaatgtgcgaatagtaaagcattcactgatatttgatgtatctgaataggactaacaggc

SEQ ID NO: 57161 - DNA, 79 bp, Homo sapiens
aagcattcactgatatttgatgtatctgaataggactaacaggctaattgtaggtgctttcatatgaaaataattggga

SEQ ID NO: 57162 - DNA, 75 bp, Homo sapiens
tgtatctgaataggactaacaggctaattgtaggtgctttcatatgaaaataattgggagaaaagaagaaccagc

SEQ ID NO: 57163 - DNA, 71 bp, Homo sapiens
actaacaggctaattgtaggtgctttcatatgaaaataattgggagaaaagaagaaccagctcctttgatt

SEQ ID NO: 57164 - DNA, 74 bp, Homo sapiens
taattgtaggtgctttcatatgaaaataattgggagaaaagaagaaccagctcctttgatttcagtactgccaa

SEQ ID NO: 57165 - DNA, 72 bp, Homo sapiens
gctttcatatgaaaataattgggagaaaagaagaaccagctcctttgatttcagtactgccaaaacaagtaa

SEQ ID NO: 57166 - DNA, 70 bp, Homo sapiens
atatgaaaataattgggagaaaagaagaaccagctcctttgatttcagtactgccaaaacaagtaagccc

SEQ ID NO: 57167 - DNA, 69 bp, Homo sapiens
gggagaaaagaagaaccagctcctttgatttcagtactgccaaaacaagtaagcccccagagttaatta

SEQ ID NO: 57168 - DNA, 68 bp, Homo sapiens
aaagaagaaccagctcctttgatttcagtactgccaaaacaagtaagcccccagagttaattacaaaa

SEQ ID NO: 57169 - DNA, 68 bp, Homo sapiens
ctcctttgatttcagtactgccaaaacaagtaagcccccagagttaattacaaaaatgtagaggaaaa

SEQ ID NO: 57170 - DNA, 67 bp, Homo sapiens
atttcagtactgccaaaacaagtaagcccccagagttaattacaaaaatgtagaggaaaataggccc

SEQ ID NO: 57171 - DNA, 64 bp, Homo sapiens
ccaaaacaagtaagcccccagagttaattacaaaaatgtagaggaaaataggcccggaagactt

SEQ ID NO: 57172 - DNA, 66 bp, Homo sapiens
aagtaagcccccagagttaattacaaaaatgtagaggaaaataggcccggaagactttgcaattta

SEQ ID NO: 57173 - DNA, 68 bp, Homo sapiens
ccagagttaattacaaaaatgtagaggaaaataggcccggaagactttgcaatttaaagtactgccta

SEQ ID NO: 57174 - DNA, 67 bp, Homo sapiens
attacaaaaatgtagaggaaaataggcccggaagactttgcaatttaaagtactgcctataataccc

SEQ ID NO: 57175 - DNA, 67 bp, Homo sapiens
tagaggaaaataggcccggaagactttgcaatttaaagtactgcctataataccccagattaaaaag

SEQ ID NO: 57176 - DNA, 66 bp, Homo sapiens
aataggcccggaagactttgcaatttaaagtactgcctataataccccagattaaaaaggaccgaa

SEQ ID NO: 57177 - DNA, 72 bp, Homo sapiens
ctttgcaatttaaagtactgcctataataccccagattaaaaaggaccgaagattgcacatcaagtctaata

SEQ ID NO: 57178 - DNA, 71 bp, Homo sapiens
atttaaagtactgcctataataccccagattaaaaaggaccgaagattgcacatcaagtctaatatttggc

SEQ ID NO: 57179 - DNA, 77 bp, Homo sapiens
tactgcctataataccccagattaaaaaggaccgaagattgcacatcaagtctaatatttggctgtacttgcattgc

SEQ ID NO: 57180 - DNA, 75 bp, Homo sapiens
attaaaaaggaccgaagattgcacatcaagtctaatatttggctgtacttgcattgccctgctcggcatttttaa

SEQ ID NO: 57181 - DNA, 76 bp, Homo sapiens
aagattgcacatcaagtctaatatttggctgtacttgcattgccctgctcggcatttttaaaaaatggctctttcc

SEQ ID NO: 57182 - DNA, 72 bp, Homo sapiens
atcaagtctaatatttggctgtacttgcattgccctgctcggcatttttaaaaaatggctctttccttaaat

SEQ ID NO: 57183 - DNA, 73 bp, Homo sapiens
tctaatatttggctgtacttgcattgccctgctcggcatttttaaaaaatggctctttccttaaatttcacac

SEQ ID NO: 57184 - DNA, 73 bp, Homo sapiens
tgtacttgcattgccctgctcggcatttttaaaaaatggctctttccttaaatttcacacgtcagaacaacca

SEQ ID NO: 57185 - DNA, 70 bp, Homo sapiens
attgccctgctcggcatttttaaaaaatggctctttccttaaatttcacacgtcagaacaaccacaatta

SEQ ID NO: 57186 - DNA, 67 bp, Homo sapiens
gctcggcatttttaaaaaatggctctttccttaaatttcacacgtcagaacaaccacaattaaaaaa

SEQ ID NO: 57187 - DNA, 68 bp, Homo sapiens
aaacaaaaaacaatgcagataacaccaaacattggacaatattaagaaaactacttactaagcttagg

SEQ ID NO: 57188 - DNA, 72 bp, Homo sapiens
caatgcagataacaccaaacattggacaatattaagaaaactacttactaagcttaggtaatagaggcaagg

SEQ ID NO: 57189 - DNA, 69 bp, Homo sapiens
attggacaatattaagaaaactacttactaagcttaggtaatagaggcaagggttaagggcagaagtga

SEQ ID NO: 57190 - DNA, 68 bp, Homo sapiens
aatattaagaaaactacttactaagcttaggtaatagaggcaagggttaagggcagaagtgatggaag

SEQ ID NO: 57191 - DNA, 69 bp, Homo sapiens
taatagaggcaagggttaagggcagaagtgatggaagtgtttctttgtattacaaaccctcaccctaaa

SEQ ID NO: 57192 - DNA, 65 bp, Homo sapiens
aagggttaagggcagaagtgatggaagtgtttctttgtattacaaaccctcaccctaaacctggg

SEQ ID NO: 57193 - DNA, 67 bp, Homo sapiens
cagaagtgatggaagtgtttctttgtattacaaaccctcaccctaaacctggggtttgggctctaaa

SEQ ID NO: 57194 - DNA, 64 bp, Homo sapiens
tggaagtgtttctttgtattacaaaccctcaccctaaacctggggtttgggctctaaaaaagta

SEQ ID NO: 57195 - DNA, 62 bp, Homo sapiens
ttctttgtattacaaaccctcaccctaaacctggggtttgggctctaaaaaagtaatttagg

SEQ ID NO: 57196 - DNA, 66 bp, Homo sapiens
tattacaaaccctcaccctaaacctggggtttgggctctaaaaaagtaatttagggaagcagatca

SEQ ID NO: 57197 - DNA, 68 bp, Homo sapiens
ccctaaacctggggtttgggctctaaaaaagtaatttagggaagcagatcaagagcctgattatcagt

SEQ ID NO: 57198 - DNA, 74 bp, Homo sapiens
tggggtttgggctctaaaaaagtaatttagggaagcagatcaagagcctgattatcagttctcacatggaaatc

SEQ ID NO: 57199 - DNA, 77 bp, Homo sapiens
ctctaaaaaagtaatttagggaagcagatcaagagcctgattatcagttctcacatggaaatctcaacagatttcaa

SEQ ID NO: 57200 - DNA, 81 bp, Homo sapiens
atcaagagcctgattatcagttctcacatggaaatctcaacagatttcaaaagcaactcaccacaagtgtcagacacaaaa

SEQ ID NO: 57201 - DNA, 79 bp, Homo sapiens
ttatcagttctcacatggaaatctcaacagatttcaaaagcaactcaccacaagtgtcagacacaaaagaatcttaata

SEQ ID NO: 57202 - DNA, 80 bp, Homo sapiens
ttctcacatggaaatctcaacagatttcaaaagcaactcaccacaagtgtcagacacaaaagaatcttaataatcatcta

SEQ ID NO: 57203 - DNA, 78 bp, Homo sapiens
aatctcaacagatttcaaaagcaactcaccacaagtgtcagacacaaaagaatcttaataatcatctagcaaactaca

SEQ ID NO: 57204 - DNA, 76 bp, Homo sapiens
gatttcaaaagcaactcaccacaagtgtcagacacaaaagaatcttaataatcatctagcaaactacactaagaac

SEQ ID NO: 57205 - DNA, 77 bp, Homo sapiens
aaaagcaactcaccacaagtgtcagacacaaaagaatcttaataatcatctagcaaactacactaagaactcaatga

SEQ ID NO: 57206 - DNA, 76 bp, Homo sapiens
caccacaagtgtcagacacaaaagaatcttaataatcatctagcaaactacactaagaactcaatgaccaaaaata

SEQ ID NO: 57207 - DNA, 75 bp, Homo sapiens
cagacacaaaagaatcttaataatcatctagcaaactacactaagaactcaatgaccaaaaataatcaatcaaac

SEQ ID NO: 57208 - DNA, 76 bp, Homo sapiens
atcttaataatcatctagcaaactacactaagaactcaatgaccaaaaataatcaatcaaacttcaagacacacca

SEQ ID NO: 57209 - DNA, 76 bp, Homo sapiens
atcatctagcaaactacactaagaactcaatgaccaaaaataatcaatcaaacttcaagacacaccaaagcaacag

SEQ ID NO: 57210 - DNA, 73 bp, Homo sapiens
cactaagaactcaatgaccaaaaataatcaatcaaacttcaagacacaccaaagcaacagtaaaagagaaata

SEQ ID NO: 57211 - DNA, 73 bp, Homo sapiens
caatgaccaaaaataatcaatcaaacttcaagacacaccaaagcaacagtaaaagagaaataactacacaagc

SEQ ID NO: 57212 - DNA, 75 bp, Homo sapiens
atcaaacttcaagacacaccaaagcaacagtaaaagagaaataactacacaagctaagctctgtagagaaatcaa

SEQ ID NO: 57213 - DNA, 72 bp, Homo sapiens
aagacacaccaaagcaacagtaaaagagaaataactacacaagctaagctctgtagagaaatcaactaaaaa

SEQ ID NO: 57214 - DNA, 73 bp, Homo sapiens
gcaacagtaaaagagaaataactacacaagctaagctctgtagagaaatcaactaaaaattaggcaattctag

SEQ ID NO: 57215 - DNA, 72 bp, Homo sapiens
gagaaataactacacaagctaagctctgtagagaaatcaactaaaaattaggcaattctagtaaattaaaga

SEQ ID NO: 57216 - DNA, 72 bp, Homo sapiens
aactacacaagctaagctctgtagagaaatcaactaaaaattaggcaattctagtaaattaaagacagcaaa

SEQ ID NO: 57217 - DNA, 69 bp, Homo sapiens
aagctaagctctgtagagaaatcaactaaaaattaggcaattctagtaaattaaagacagcaaaaaact

SEQ ID NO: 57218 - DNA, 69 bp, Homo sapiens
gagaaatcaactaaaaattaggcaattctagtaaattaaagacagcaaaaaacttaagattgaacttca

SEQ ID NO: 57219 - DNA, 68 bp, Homo sapiens
tcaactaaaaattaggcaattctagtaaattaaagacagcaaaaaacttaagattgaacttcaatttc

SEQ ID NO: 57220 - DNA, 68 bp, Homo sapiens
ggcaattctagtaaattaaagacagcaaaaaacttaagattgaacttcaatttccaagggtactttga

SEQ ID NO: 57221 - DNA, 66 bp, Homo sapiens
gtaaattaaagacagcaaaaaacttaagattgaacttcaatttccaagggtactttgaagaggttg

SEQ ID NO: 57222 - DNA, 66 bp, Homo sapiens
agacagcaaaaaacttaagattgaacttcaatttccaagggtactttgaagaggttgtttgtaggt

SEQ ID NO: 57223 - DNA, 66 bp, Homo sapiens
aacttaagattgaacttcaatttccaagggtactttgaagaggttgtttgtaggttattctgtacc

SEQ ID NO: 57224 - DNA, 68 bp, Homo sapiens
tgaacttcaatttccaagggtactttgaagaggttgtttgtaggttattctgtaccccctgattctta

SEQ ID NO: 57225 - DNA, 67 bp, Homo sapiens
ttcaatttccaagggtactttgaagaggttgtttgtaggttattctgtaccccctgattcttaaaga

SEQ ID NO: 57226 - DNA, 65 bp, Homo sapiens
aagggtactttgaagaggttgtttgtaggttattctgtaccccctgattcttaaagaaagtggag

SEQ ID NO: 57227 - DNA, 66 bp, Homo sapiens
aagaggttgtttgtaggttattctgtaccccctgattcttaaagaaagtggaggagagggggaggc

SEQ ID NO: 57228 - DNA, 69 bp, Homo sapiens
tattctgtaccccctgattcttaaagaaagtggaggagagggggaggcgacagaggaatggagggaaag

SEQ ID NO: 57229 - DNA, 71 bp, Homo sapiens
tgattcttaaagaaagtggaggagagggggaggcgacagaggaatggagggaaagggggaggcaagagaga

SEQ ID NO: 57230 - DNA, 69 bp, Homo sapiens
ttaaagaaagtggaggagagggggaggcgacagaggaatggagggaaagggggaggcaagagagagaaa

SEQ ID NO: 57231 - DNA, 68 bp, Homo sapiens
aaagggggaggcaagagagagaaacaggagaggatccctggttttccacaggtattttatcaaaaatg

SEQ ID NO: 57232 - DNA, 74 bp, Homo sapiens
gcaagagagagaaacaggagaggatccctggttttccacaggtattttatcaaaaatgtatgacttcataacta

SEQ ID NO: 57233 - DNA, 74 bp, Homo sapiens
gaaacaggagaggatccctggttttccacaggtattttatcaaaaatgtatgacttcataactacagcactcta

SEQ ID NO: 57234 - DNA, 71 bp, Homo sapiens
aggatccctggttttccacaggtattttatcaaaaatgtatgacttcataactacagcactctaacttttc

SEQ ID NO: 57235 - DNA, 73 bp, Homo sapiens
cctggttttccacaggtattttatcaaaaatgtatgacttcataactacagcactctaacttttctcagtcta

SEQ ID NO: 57236 - DNA, 76 bp, Homo sapiens
ggtattttatcaaaaatgtatgacttcataactacagcactctaacttttctcagtctaactgctgaggtctctta

SEQ ID NO: 57237 - DNA, 76 bp, Homo sapiens
tttatcaaaaatgtatgacttcataactacagcactctaacttttctcagtctaactgctgaggtctcttacgaaa

SEQ ID NO: 57238 - DNA, 78 bp, Homo sapiens
atgtatgacttcataactacagcactctaacttttctcagtctaactgctgaggtctcttacgaaagttcaaatggca

SEQ ID NO: 57239 - DNA, 74 bp, Homo sapiens
ataactacagcactctaacttttctcagtctaactgctgaggtctcttacgaaagttcaaatggcaagtcacct

SEQ ID NO: 57240 - DNA, 75 bp, Homo sapiens
tctaacttttctcagtctaactgctgaggtctcttacgaaagttcaaatggcaagtcaccttgtagaatgactta

SEQ ID NO: 57241 - DNA, 75 bp, Homo sapiens
ttttctcagtctaactgctgaggtctcttacgaaagttcaaatggcaagtcaccttgtagaatgacttaacagag

SEQ ID NO: 57242 - DNA, 75 bp, Homo sapiens
tctaactgctgaggtctcttacgaaagttcaaatggcaagtcaccttgtagaatgacttaacagaggaagccaaa

SEQ ID NO: 57243 - DNA, 73 bp, Homo sapiens
aggtctcttacgaaagttcaaatggcaagtcaccttgtagaatgacttaacagaggaagccaaactatacaga

SEQ ID NO: 57244 - DNA, 76 bp, Homo sapiens
aaatggcaagtcaccttgtagaatgacttaacagaggaagccaaactatacagaccagggccttgtccagagtgca

SEQ ID NO: 57245 - DNA, 75 bp, Homo sapiens
aatgacttaacagaggaagccaaactatacagaccagggccttgtccagagtgcagtaaggagcaggcttttgaa

SEQ ID NO: 57246 - DNA, 78 bp, Homo sapiens
aaactatacagaccagggccttgtccagagtgcagtaaggagcaggcttttgaagtcatctattacatctgccttaca

SEQ ID NO: 57247 - DNA, 77 bp, Homo sapiens
ccttgtccagagtgcagtaaggagcaggcttttgaagtcatctattacatctgccttacaaccaaacccactgtgta

SEQ ID NO: 57248 - DNA, 76 bp, Homo sapiens
agtaaggagcaggcttttgaagtcatctattacatctgccttacaaccaaacccactgtgtatgccacattattct

SEQ ID NO: 57249 - DNA, 75 bp, Homo sapiens
aggcttttgaagtcatctattacatctgccttacaaccaaacccactgtgtatgccacattattcttggagggac

SEQ ID NO: 57250 - DNA, 74 bp, Homo sapiens
agtcatctattacatctgccttacaaccaaacccactgtgtatgccacattattcttggagggaccactttaaa

SEQ ID NO: 57251 - DNA, 71 bp, Homo sapiens
ttacaaccaaacccactgtgtatgccacattattcttggagggaccactttaaaacaaaagtgatggataa

SEQ ID NO: 57252 - DNA, 70 bp, Homo sapiens
aaacccactgtgtatgccacattattcttggagggaccactttaaaacaaaagtgatggataatttacca

SEQ ID NO: 57253 - DNA, 75 bp, Homo sapiens
tatgccacattattcttggagggaccactttaaaacaaaagtgatggataatttaccagaggcacatgcttttga

SEQ ID NO: 57254 - DNA, 71 bp, Homo sapiens
attattcttggagggaccactttaaaacaaaagtgatggataatttaccagaggcacatgcttttgaagta

SEQ ID NO: 57255 - DNA, 69 bp, Homo sapiens
agggaccactttaaaacaaaagtgatggataatttaccagaggcacatgcttttgaagtaaagctgttt

SEQ ID NO: 57256 - DNA, 69 bp, Homo sapiens
cactttaaaacaaaagtgatggataatttaccagaggcacatgcttttgaagtaaagctgttttttgtt

SEQ ID NO: 57257 - DNA, 71 bp, Homo sapiens
taaggtgccaggtacctctgaagcctgaaaacacaggcaataaaattcacctatttatcttctttaccaaa

SEQ ID NO: 57258 - DNA, 72 bp, Homo sapiens
ctgaagcctgaaaacacaggcaataaaattcacctatttatcttctttaccaaagagaaagcaatttctgaa

SEQ ID NO: 57259 - DNA, 75 bp, Homo sapiens
cacaggcaataaaattcacctatttatcttctttaccaaagagaaagcaatttctgaatactatctatagtgcta

SEQ ID NO: 57260 - DNA, 73 bp, Homo sapiens
gcaataaaattcacctatttatcttctttaccaaagagaaagcaatttctgaatactatctatagtgctaaac

SEQ ID NO: 57261 - DNA, 74 bp, Homo sapiens
cctatttatcttctttaccaaagagaaagcaatttctgaatactatctatagtgctaaactaatgtgaactgac

SEQ ID NO: 57262 - DNA, 78 bp, Homo sapiens
cttctttaccaaagagaaagcaatttctgaatactatctatagtgctaaactaatgtgaactgactatcattgcgata

SEQ ID NO: 57263 - DNA, 76 bp, Homo sapiens
gagaaagcaatttctgaatactatctatagtgctaaactaatgtgaactgactatcattgcgataaaagtttttcc

SEQ ID NO: 57264 - DNA, 79 bp, Homo sapiens
gcaatttctgaatactatctatagtgctaaactaatgtgaactgactatcattgcgataaaagtttttccttatgatga

SEQ ID NO: 57265 - DNA, 78 bp, Homo sapiens
tttctgaatactatctatagtgctaaactaatgtgaactgactatcattgcgataaaagtttttccttatgatgacaa

SEQ ID NO: 57266 - DNA, 77 bp, Homo sapiens
gaatactatctatagtgctaaactaatgtgaactgactatcattgcgataaaagtttttccttatgatgacaataaa

SEQ ID NO: 57267 - DNA, 77 bp, Homo sapiens
ctatagtgctaaactaatgtgaactgactatcattgcgataaaagtttttccttatgatgacaataaagaatgttgc

SEQ ID NO: 57268 - DNA, 79 bp, Homo sapiens
tatagtgctaaactaatgtgaactgactatcattgcgataaaagtttttccttatgatgacaataaagaatgttgctga

SEQ ID NO: 57269 - DNA, 77 bp, Homo sapiens
gctaaactaatgtgaactgactatcattgcgataaaagtttttccttatgatgacaataaagaatgttgctgaaaga

SEQ ID NO: 57270 - DNA, 75 bp, Homo sapiens
actaatgtgaactgactatcattgcgataaaagtttttccttatgatgacaataaagaatgttgctgaaagactt

SEQ ID NO: 57271 - DNA, 75 bp, Homo sapiens
gtgaactgactatcattgcgataaaagtttttccttatgatgacaataaagaatgttgctgaaagactttaatct

SEQ ID NO: 57272 - DNA, 79 bp, Homo sapiens
tgactatcattgcgataaaagtttttccttatgatgacaataaagaatgttgctgaaagactttaatcttgagagagca

SEQ ID NO: 57273 - DNA, 76 bp, Homo sapiens
cattgcgataaaagtttttccttatgatgacaataaagaatgttgctgaaagactttaatcttgagagagcagagg

SEQ ID NO: 57274 - DNA, 77 bp, Homo sapiens
aaagtttttccttatgatgacaataaagaatgttgctgaaagactttaatcttgagagagcagaggtaatgtgatga

SEQ ID NO: 57275 - DNA, 81 bp, Homo sapiens
ttccttatgatgacaataaagaatgttgctgaaagactttaatcttgagagagcagaggtaatgtgatgaatgtaatttgc

SEQ ID NO: 57276 - DNA, 80 bp, Homo sapiens
atgttgctgaaagactttaatcttgagagagcagaggtaatgtgatgaatgtaatttgctcccagagcctctagaaaata

SEQ ID NO: 57277 - DNA, 77 bp, Homo sapiens
aaagactttaatcttgagagagcagaggtaatgtgatgaatgtaatttgctcccagagcctctagaaaataaagcag

SEQ ID NO: 57278 - DNA, 81 bp, Homo sapiens
ttaatcttgagagagcagaggtaatgtgatgaatgtaatttgctcccagagcctctagaaaataaagcagtgtgcaaaata

SEQ ID NO: 57279 - DNA, 75 bp, Homo sapiens
ccagagcctctagaaaataaagcagtgtgcaaaatacaatatggcattattattccagctaggttttttgcgaaa

SEQ ID NO: 57280 - DNA, 75 bp, Homo sapiens
agcagtgtgcaaaatacaatatggcattattattccagctaggttttttgcgaaaataaggttccaaatgaatga

SEQ ID NO: 57281 - DNA, 73 bp, Homo sapiens
gtgcaaaatacaatatggcattattattccagctaggttttttgcgaaaataaggttccaaatgaatgaagaa

SEQ ID NO: 57282 - DNA, 70 bp, Homo sapiens
acaatatggcattattattccagctaggttttttgcgaaaataaggttccaaatgaatgaagaaaacaaa

SEQ ID NO: 57283 - DNA, 70 bp, Homo sapiens
tattccagctaggttttttgcgaaaataaggttccaaatgaatgaagaaaacaaaatttgatgcgctagg

SEQ ID NO: 57284 - DNA, 69 bp, Homo sapiens
cagctaggttttttgcgaaaataaggttccaaatgaatgaagaaaacaaaatttgatgcgctaggttcc

SEQ ID NO: 57285 - DNA, 71 bp, Homo sapiens
gcgaaaataaggttccaaatgaatgaagaaaacaaaatttgatgcgctaggttccttaacttgctattgga

SEQ ID NO: 57286 - DNA, 72 bp, Homo sapiens
gttccaaatgaatgaagaaaacaaaatttgatgcgctaggttccttaacttgctattggacacatgggtatt

SEQ ID NO: 57287 - DNA, 72 bp, Homo sapiens
atgaatgaagaaaacaaaatttgatgcgctaggttccttaacttgctattggacacatgggtatttcaaaaa

SEQ ID NO: 57288 - DNA, 69 bp, Homo sapiens
aaacaaaatttgatgcgctaggttccttaacttgctattggacacatgggtatttcaaaaaaatccacc

SEQ ID NO: 57289 - DNA, 73 bp, Homo sapiens
tttgatgcgctaggttccttaacttgctattggacacatgggtatttcaaaaaaatccaccgtgcctacaata

SEQ ID NO: 57290 - DNA, 69 bp, Homo sapiens
gttccttaacttgctattggacacatgggtatttcaaaaaaatccaccgtgcctacaatacttgttaaa

SEQ ID NO: 57291 - DNA, 70 bp, Homo sapiens
taacttgctattggacacatgggtatttcaaaaaaatccaccgtgcctacaatacttgttaaagtaccaa

SEQ ID NO: 57292 - DNA, 68 bp, Homo sapiens
ttggacacatgggtatttcaaaaaaatccaccgtgcctacaatacttgttaaagtaccaaaaaagcac

SEQ ID NO: 57293 - DNA, 71 bp, Homo sapiens
aaaatccaccgtgcctacaatacttgttaaagtaccaaaaaagcactgatactgaaacacattctttcatg

SEQ ID NO: 57294 - DNA, 71 bp, Homo sapiens
gcctacaatacttgttaaagtaccaaaaaagcactgatactgaaacacattctttcatgggtacttaacga

SEQ ID NO: 57295 - DNA, 70 bp, Homo sapiens
acttgttaaagtaccaaaaaagcactgatactgaaacacattctttcatgggtacttaacgattacagat

SEQ ID NO: 57296 - DNA, 74 bp, Homo sapiens
accaaaaaagcactgatactgaaacacattctttcatgggtacttaacgattacagattaacgtggcaatcaga

SEQ ID NO: 57297 - DNA, 75 bp, Homo sapiens
aaaagcactgatactgaaacacattctttcatgggtacttaacgattacagattaacgtggcaatcagaatacaa

SEQ ID NO: 57298 - DNA, 72 bp, Homo sapiens
atactgaaacacattctttcatgggtacttaacgattacagattaacgtggcaatcagaatacaaaaaaggc

SEQ ID NO: 57299 - DNA, 73 bp, Homo sapiens
acattctttcatgggtacttaacgattacagattaacgtggcaatcagaatacaaaaaaggcccagagctatg

SEQ ID NO: 57300 - DNA, 70 bp, Homo sapiens
ggtacttaacgattacagattaacgtggcaatcagaatacaaaaaaggcccagagctatgtggaattttt

SEQ ID NO: 57301 - DNA, 70 bp, Homo sapiens
aacgattacagattaacgtggcaatcagaatacaaaaaaggcccagagctatgtggaattttttccttaa

SEQ ID NO: 57302 - DNA, 70 bp, Homo sapiens
gattaacgtggcaatcagaatacaaaaaaggcccagagctatgtggaattttttccttaatacctttcaa

SEQ ID NO: 57303 - DNA, 70 bp, Homo sapiens
cagaatacaaaaaaggcccagagctatgtggaattttttccttaatacctttcaagtttgtctgtgaaga

SEQ ID NO: 57304 - DNA, 69 bp, Homo sapiens
aaaaggcccagagctatgtggaattttttccttaatacctttcaagtttgtctgtgaagacggcaacta

SEQ ID NO: 57305 - DNA, 71 bp, Homo sapiens
agagctatgtggaattttttccttaatacctttcaagtttgtctgtgaagacggcaactagaaagtgacca

SEQ ID NO: 57306 - DNA, 69 bp, Homo sapiens
gaattttttccttaatacctttcaagtttgtctgtgaagacggcaactagaaagtgaccactgtcctaa

SEQ ID NO: 57307 - DNA, 71 bp, Homo sapiens
tttccttaatacctttcaagtttgtctgtgaagacggcaactagaaagtgaccactgtcctaatctctaaa

SEQ ID NO: 57308 - DNA, 74 bp, Homo sapiens
tttcaagtttgtctgtgaagacggcaactagaaagtgaccactgtcctaatctctaaaatgcagggaaaatgta

SEQ ID NO: 57309 - DNA, 74 bp, Homo sapiens
tctgtgaagacggcaactagaaagtgaccactgtcctaatctctaaaatgcagggaaaatgtactcaaacaatt

SEQ ID NO: 57310 - DNA, 70 bp, Homo sapiens
aagacggcaactagaaagtgaccactgtcctaatctctaaaatgcagggaaaatgtactcaaacaatttt

SEQ ID NO: 57311 - DNA, 67 bp, Homo sapiens
actagaaagtgaccactgtcctaatctctaaaatgcagggaaaatgtactcaaacaatttttttttt

SEQ ID NO: 57312 - DNA, 70 bp, Homo sapiens
gtgcccagccaacaattaagattttaattgtgttctattttgtattgatacttgattttaagaaccctat

SEQ ID NO: 57313 - DNA, 71 bp, Homo sapiens
tgcccagccaacaattaagattttaattgtgttctattttgtattgatacttgattttaagaaccctattc

SEQ ID NO: 57314 - DNA, 70 bp, Homo sapiens
gccaacaattaagattttaattgtgttctattttgtattgatacttgattttaagaaccctattctagtc

SEQ ID NO: 57315 - DNA, 67 bp, Homo sapiens
agattttaattgtgttctattttgtattgatacttgattttaagaaccctattctagtctgggtttt

SEQ ID NO: 57316 - DNA, 71 bp, Homo sapiens
gtgttctattttgtattgatacttgattttaagaaccctattctagtctgggtttttattttggatcagca

SEQ ID NO: 57317 - DNA, 71 bp, Homo sapiens
gtattgatacttgattttaagaaccctattctagtctgggtttttattttggatcagcaatttagcttaca

SEQ ID NO: 57318 - DNA, 74 bp, Homo sapiens
ttaagaaccctattctagtctgggtttttattttggatcagcaatttagcttacacagtcagtactgaaatgca

SEQ ID NO: 57319 - DNA, 75 bp, Homo sapiens
ctattctagtctgggtttttattttggatcagcaatttagcttacacagtcagtactgaaatgcaatgctaaatt

SEQ ID NO: 57320 - DNA, 72 bp, Homo sapiens
ggtttttattttggatcagcaatttagcttacacagtcagtactgaaatgcaatgctaaatttaaggaaacc

SEQ ID NO: 57321 - DNA, 80 bp, Homo sapiens
ggatcagcaatttagcttacacagtcagtactgaaatgcaatgctaaatttaaggaaaccttgatcatgaattcactata

SEQ ID NO: 57322 - DNA, 78 bp, Homo sapiens
agcaatttagcttacacagtcagtactgaaatgcaatgctaaatttaaggaaaccttgatcatgaattcactataatg

SEQ ID NO: 57323 - DNA, 80 bp, Homo sapiens
acacagtcagtactgaaatgcaatgctaaatttaaggaaaccttgatcatgaattcactataatgtattactgaatagca

SEQ ID NO: 57324 - DNA, 79 bp, Homo sapiens
cagtactgaaatgcaatgctaaatttaaggaaaccttgatcatgaattcactataatgtattactgaatagcaagctat

SEQ ID NO: 57325 - DNA, 79 bp, Homo sapiens
gcaatgctaaatttaaggaaaccttgatcatgaattcactataatgtattactgaatagcaagctattaaaattgtgca

SEQ ID NO: 57326 - DNA, 74 bp, Homo sapiens
atttaaggaaaccttgatcatgaattcactataatgtattactgaatagcaagctattaaaattgtgcaaaaag

SEQ ID NO: 57327 - DNA, 79 bp, Homo sapiens
ccttgatcatgaattcactataatgtattactgaatagcaagctattaaaattgtgcaaaaagtaaagcacttcacaga

SEQ ID NO: 57328 - DNA, 80 bp, Homo sapiens
tgatcatgaattcactataatgtattactgaatagcaagctattaaaattgtgcaaaaagtaaagcacttcacagactaa

SEQ ID NO: 57329 - DNA, 78 bp, Homo sapiens
catgaattcactataatgtattactgaatagcaagctattaaaattgtgcaaaaagtaaagcacttcacagactaata

SEQ ID NO: 57330 - DNA, 75 bp, Homo sapiens
ctataatgtattactgaatagcaagctattaaaattgtgcaaaaagtaaagcacttcacagactaataactgaac

SEQ ID NO: 57331 - DNA, 74 bp, Homo sapiens
gtattactgaatagcaagctattaaaattgtgcaaaaagtaaagcacttcacagactaataactgaacttaata

SEQ ID NO: 57332 - DNA, 73 bp, Homo sapiens
ctgaatagcaagctattaaaattgtgcaaaaagtaaagcacttcacagactaataactgaacttaataaaaga

SEQ ID NO: 57333 - DNA, 72 bp, Homo sapiens
gcaagctattaaaattgtgcaaaaagtaaagcacttcacagactaataactgaacttaataaaagatgttgg

SEQ ID NO: 57334 - DNA, 72 bp, Homo sapiens
gctattaaaattgtgcaaaaagtaaagcacttcacagactaataactgaacttaataaaagatgttggtgga

SEQ ID NO: 57335 - DNA, 72 bp, Homo sapiens
aaaattgtgcaaaaagtaaagcacttcacagactaataactgaacttaataaaagatgttggtggatctcat

SEQ ID NO: 57336 - DNA, 74 bp, Homo sapiens
ttgtgcaaaaagtaaagcacttcacagactaataactgaacttaataaaagatgttggtggatctcattttcac

SEQ ID NO: 57337 - DNA, 74 bp, Homo sapiens
gtgcaaaaagtaaagcacttcacagactaataactgaacttaataaaagatgttggtggatctcattttcactg

SEQ ID NO: 57338 - DNA, 77 bp, Homo sapiens
aagcacttcacagactaataactgaacttaataaaagatgttggtggatctcattttcactgtttcatgtacatgtc

SEQ ID NO: 57339 - DNA, 76 bp, Homo sapiens
cagactaataactgaacttaataaaagatgttggtggatctcattttcactgtttcatgtacatgtcctaaaatgc

SEQ ID NO: 57340 - DNA, 74 bp, Homo sapiens
aactgaacttaataaaagatgttggtggatctcattttcactgtttcatgtacatgtcctaaaatgccaagtaa

SEQ ID NO: 57341 - DNA, 72 bp, Homo sapiens
aaaagatgttggtggatctcattttcactgtttcatgtacatgtcctaaaatgccaagtaaattaaacaact

SEQ ID NO: 57342 - DNA, 69 bp, Homo sapiens
cattttcactgtttcatgtacatgtcctaaaatgccaagtaaattaaacaacttttaatttactaagtg

SEQ ID NO: 57343 - DNA, 68 bp, Homo sapiens
cactgtttcatgtacatgtcctaaaatgccaagtaaattaaacaacttttaatttactaagtgtaaat

SEQ ID NO: 57344 - DNA, 66 bp, Homo sapiens
tgtacatgtcctaaaatgccaagtaaattaaacaacttttaatttactaagtgtaaattaaaagta

SEQ ID NO: 57345 - DNA, 65 bp, Homo sapiens
ctaaaatgccaagtaaattaaacaacttttaatttactaagtgtaaattaaaagtatcaaatgaa

SEQ ID NO: 57346 - DNA, 64 bp, Homo sapiens
aagtaaattaaacaacttttaatttactaagtgtaaattaaaagtatcaaatgaaaaacatgaa

SEQ ID NO: 57347 - DNA, 63 bp, Homo sapiens
aacaacttttaatttactaagtgtaaattaaaagtatcaaatgaaaaacatgaattaaaaaaa

SEQ ID NO: 57348 - DNA, 68 bp, Homo sapiens
tactaagtgtaaattaaaagtatcaaatgaaaaacatgaattaaaaaaatttcagtctacctccacca

SEQ ID NO: 57349 - DNA, 69 bp, Homo sapiens
gtaaattaaaagtatcaaatgaaaaacatgaattaaaaaaatttcagtctacctccaccagaacatcac

SEQ ID NO: 57350 - DNA, 71 bp, Homo sapiens
gtatcaaatgaaaaacatgaattaaaaaaatttcagtctacctccaccagaacatcactttattgttaatc

SEQ ID NO: 57351 - DNA, 73 bp, Homo sapiens
aaacatgaattaaaaaaatttcagtctacctccaccagaacatcactttattgttaatctatcatcaacaatg

SEQ ID NO: 57352 - DNA, 73 bp, Homo sapiens
taaaaaaatttcagtctacctccaccagaacatcactttattgttaatctatcatcaacaatgtaaaactcta

SEQ ID NO: 57353 - DNA, 78 bp, Homo sapiens
tcagtctacctccaccagaacatcactttattgttaatctatcatcaacaatgtaaaactctaatagatactctatct

SEQ ID NO: 57354 - DNA, 76 bp, Homo sapiens
ctacctccaccagaacatcactttattgttaatctatcatcaacaatgtaaaactctaatagatactctatcttgg

SEQ ID NO: 57355 - DNA, 74 bp, Homo sapiens
cagaacatcactttattgttaatctatcatcaacaatgtaaaactctaatagatactctatcttggtttttaaa

SEQ ID NO: 57356 - DNA, 70 bp, Homo sapiens
ctttattgttaatctatcatcaacaatgtaaaactctaatagatactctatcttggtttttaaaaaggta

SEQ ID NO: 57357 - DNA, 70 bp, Homo sapiens
atcatcaacaatgtaaaactctaatagatactctatcttggtttttaaaaaggtaaaagattacactgga

SEQ ID NO: 57358 - DNA, 68 bp, Homo sapiens
atgtaaaactctaatagatactctatcttggtttttaaaaaggtaaaagattacactggattagctac

SEQ ID NO: 57359 - DNA, 70 bp, Homo sapiens
actctaatagatactctatcttggtttttaaaaaggtaaaagattacactggattagctactttctatga

SEQ ID NO: 57360 - DNA, 68 bp, Homo sapiens
gatactctatcttggtttttaaaaaggtaaaagattacactggattagctactttctatgaaagaaac

SEQ ID NO: 57361 - DNA, 71 bp, Homo sapiens
aaaaggtaaaagattacactggattagctactttctatgaaagaaactacagctatcacagaagagggaaa

SEQ ID NO: 57362 - DNA, 76 bp, Homo sapiens
tctatgaaagaaactacagctatcacagaagagggaaaatttgaatgacctccaaaaaaaatgcacactataagca

SEQ ID NO: 57363 - DNA, 71 bp, Homo sapiens
aaactacagctatcacagaagagggaaaatttgaatgacctccaaaaaaaatgcacactataagcaaaagg

SEQ ID NO: 57364 - DNA, 73 bp, Homo sapiens
tatcacagaagagggaaaatttgaatgacctccaaaaaaaatgcacactataagcaaaagggagtgtacatta

SEQ ID NO: 57365 - DNA, 71 bp, Homo sapiens
gaagagggaaaatttgaatgacctccaaaaaaaatgcacactataagcaaaagggagtgtacattaaatca

SEQ ID NO: 57366 - DNA, 75 bp, Homo sapiens
ttgaatgacctccaaaaaaaatgcacactataagcaaaagggagtgtacattaaatcaaatgtctgttagattca

SEQ ID NO: 57367 - DNA, 79 bp, Homo sapiens
aatgcacactataagcaaaagggagtgtacattaaatcaaatgtctgttagattcattacttttgaatgcacagtgaca

SEQ ID NO: 57368 - DNA, 77 bp, Homo sapiens
agggagtgtacattaaatcaaatgtctgttagattcattacttttgaatgcacagtgacaattctggaaactgtaca

SEQ ID NO: 57369 - DNA, 82 bp, Homo sapiens
cattaaatcaaatgtctgttagattcattacttttgaatgcacagtgacaattctggaaactgtacatgatagaatcacaga

SEQ ID NO: 57370 - DNA, 82 bp, Homo sapiens
tcaaatgtctgttagattcattacttttgaatgcacagtgacaattctggaaactgtacatgatagaatcacagaaatgact

SEQ ID NO: 57371 - DNA, 77 bp, Homo sapiens
atgcacagtgacaattctggaaactgtacatgatagaatcacagaaatgacttaaataaccggaattacattttgtg

SEQ ID NO: 57372 - DNA, 78 bp, Homo sapiens
attctggaaactgtacatgatagaatcacagaaatgacttaaataaccggaattacattttgtgtgtgatcatcagac

SEQ ID NO: 57373 - DNA, 77 bp, Homo sapiens
ctgtacatgatagaatcacagaaatgacttaaataaccggaattacattttgtgtgtgatcatcagacctttaaaca

SEQ ID NO: 57374 - DNA, 74 bp, Homo sapiens
gaatcacagaaatgacttaaataaccggaattacattttgtgtgtgatcatcagacctttaaacaatccttgaa

SEQ ID NO: 57375 - DNA, 71 bp, Homo sapiens
aatgacttaaataaccggaattacattttgtgtgtgatcatcagacctttaaacaatccttgaattttcca

SEQ ID NO: 57376 - DNA, 73 bp, Homo sapiens
ataaccggaattacattttgtgtgtgatcatcagacctttaaacaatccttgaattttccatgttatcagaag

SEQ ID NO: 57377 - DNA, 77 bp, Homo sapiens
ttttgtgtgtgatcatcagacctttaaacaatccttgaattttccatgttatcagaagttgttaacagcatcgagac

SEQ ID NO: 57378 - DNA, 75 bp, Homo sapiens
atccttgaattttccatgttatcagaagttgttaacagcatcgagacggaagtatatgaaatataaggactgaaa

SEQ ID NO: 57379 - DNA, 75 bp, Homo sapiens
tttccatgttatcagaagttgttaacagcatcgagacggaagtatatgaaatataaggactgaaataaaagtgaa

SEQ ID NO: 57380 - DNA, 74 bp, Homo sapiens
gaagttgttaacagcatcgagacggaagtatatgaaatataaggactgaaataaaagtgaatttgaaagatggc

SEQ ID NO: 57381 - DNA, 76 bp, Homo sapiens
acagcatcgagacggaagtatatgaaatataaggactgaaataaaagtgaatttgaaagatggctaatctactaga

SEQ ID NO: 57382 - DNA, 73 bp, Homo sapiens
cgagacggaagtatatgaaatataaggactgaaataaaagtgaatttgaaagatggctaatctactagattag

SEQ ID NO: 57383 - DNA, 71 bp, Homo sapiens
gtatatgaaatataaggactgaaataaaagtgaatttgaaagatggctaatctactagattaggtaaaggg

SEQ ID NO: 57384 - DNA, 67 bp, Homo sapiens
aggactgaaataaaagtgaatttgaaagatggctaatctactagattaggtaaagggggaacgggta

SEQ ID NO: 57385 - DNA, 66 bp, Homo sapiens
aataaaagtgaatttgaaagatggctaatctactagattaggtaaagggggaacgggtaagtggtg

SEQ ID NO: 57386 - DNA, 66 bp, Homo sapiens
aatttgaaagatggctaatctactagattaggtaaagggggaacgggtaagtggtggggaggagta

SEQ ID NO: 57387 - DNA, 65 bp, Homo sapiens
aagatggctaatctactagattaggtaaagggggaacgggtaagtggtggggaggagtagggaac

SEQ ID NO: 57388 - DNA, 64 bp, Homo sapiens
atctactagattaggtaaagggggaacgggtaagtggtggggaggagtagggaacgatggggtg

SEQ ID NO: 57389 - DNA, 60 bp, Homo sapiens
ttaggtaaagggggaacgggtaagtggtggggaggagtagggaacgatggggtggttttt

SEQ ID NO: 57390 - DNA, 63 bp, Homo sapiens
aacgggtaagtggtggggaggagtagggaacgatggggtggtttttttcccttcatttcagaa

SEQ ID NO: 57391 - DNA, 66 bp, Homo sapiens
tggtggggaggagtagggaacgatggggtggtttttttcccttcatttcagaagtaagttcttcta

SEQ ID NO: 57392 - DNA, 67 bp, Homo sapiens
agtagggaacgatggggtggtttttttcccttcatttcagaagtaagttcttctactgtagtgtatc

SEQ ID NO: 57393 - DNA, 69 bp, Homo sapiens
aacgatggggtggtttttttcccttcatttcagaagtaagttcttctactgtagtgtatctgttacata

SEQ ID NO: 57394 - DNA, 76 bp, Homo sapiens
cttcatttcagaagtaagttcttctactgtagtgtatctgttacatagctctccattttcagtccatttctgaaat

SEQ ID NO: 57395 - DNA, 79 bp, Homo sapiens
agaagtaagttcttctactgtagtgtatctgttacatagctctccattttcagtccatttctgaaattcatatcgcata

SEQ ID NO: 57396 - DNA, 79 bp, Homo sapiens
agttcttctactgtagtgtatctgttacatagctctccattttcagtccatttctgaaattcatatcgcatagccttta

SEQ ID NO: 57397 - DNA, 79 bp, Homo sapiens
tgtagtgtatctgttacatagctctccattttcagtccatttctgaaattcatatcgcatagcctttagcctttttcta

SEQ ID NO: 57398 - DNA, 77 bp, Homo sapiens
tctgttacatagctctccattttcagtccatttctgaaattcatatcgcatagcctttagcctttttctacttactg

SEQ ID NO: 57399 - DNA, 74 bp, Homo sapiens
tctccattttcagtccatttctgaaattcatatcgcatagcctttagcctttttctacttactggtcaacccaa

SEQ ID NO: 57400 - DNA, 73 bp, Homo sapiens
tttcagtccatttctgaaattcatatcgcatagcctttagcctttttctacttactggtcaacccaaccagta

SEQ ID NO: 57401 - DNA, 75 bp, Homo sapiens
tgaaattcatatcgcatagcctttagcctttttctacttactggtcaacccaaccagtactgttgccaagcaaca

SEQ ID NO: 57402 - DNA, 73 bp, Homo sapiens
tatcgcatagcctttagcctttttctacttactggtcaacccaaccagtactgttgccaagcaacaagtgtta

SEQ ID NO: 57403 - DNA, 71 bp, Homo sapiens
tttagcctttttctacttactggtcaacccaaccagtactgttgccaagcaacaagtgttacacgagaatc

SEQ ID NO: 57404 - DNA, 76 bp, Homo sapiens
ttttctacttactggtcaacccaaccagtactgttgccaagcaacaagtgttacacgagaatctgaatgcatcaaa

SEQ ID NO: 57405 - DNA, 76 bp, Homo sapiens
cttactggtcaacccaaccagtactgttgccaagcaacaagtgttacacgagaatctgaatgcatcaaatcttcct

SEQ ID NO: 57406 - DNA, 79 bp, Homo sapiens
gtactgttgccaagcaacaagtgttacacgagaatctgaatgcatcaaatcttccttggctgtgatttcttcgcgaccc

SEQ ID NO: 57407 - DNA, 76 bp, Homo sapiens
aagcaacaagtgttacacgagaatctgaatgcatcaaatcttccttggctgtgatttcttcgcgaccccagttttc

SEQ ID NO: 57408 - DNA, 78 bp, Homo sapiens
gtgttacacgagaatctgaatgcatcaaatcttccttggctgtgatttcttcgcgaccccagttttctctgtttctga

SEQ ID NO: 57409 - DNA, 74 bp, Homo sapiens
aatctgaatgcatcaaatcttccttggctgtgatttcttcgcgaccccagttttctctgtttctgagtggggtt

SEQ ID NO: 57410 - DNA, 69 bp, Homo sapiens
atcaaatcttccttggctgtgatttcttcgcgaccccagttttctctgtttctgagtggggtttgtttt

SEQ ID NO: 57411 - DNA, 68 bp, Homo sapiens
atttcttcgcgaccccagttttctctgtttctgagtggggtttgtttttttcctggattgtacacaca

SEQ ID NO: 57412 - DNA, 67 bp, Homo sapiens
accccagttttctctgtttctgagtggggtttgtttttttcctggattgtacacacagggtcaggtg

SEQ ID NO: 57413 - DNA, 69 bp, Homo sapiens
ttttctctgtttctgagtggggtttgtttttttcctggattgtacacacagggtcaggtggaatggagt

SEQ ID NO: 57414 - DNA, 70 bp, Homo sapiens
tttctgagtggggtttgtttttttcctggattgtacacacagggtcaggtggaatggagttccaaatcac

SEQ ID NO: 57415 - DNA, 75 bp, Homo sapiens
ttgtttttttcctggattgtacacacagggtcaggtggaatggagttccaaatcactctgtgctccgcggcatcc

SEQ ID NO: 57416 - DNA, 77 bp, Homo sapiens
tacacacagggtcaggtggaatggagttccaaatcactctgtgctccgcggcatcccgatttctttccgcagctaac

SEQ ID NO: 57417 - DNA, 76 bp, Homo sapiens
tcaggtggaatggagttccaaatcactctgtgctccgcggcatcccgatttctttccgcagctaacctcccgacac

SEQ ID NO: 57418 - DNA, 78 bp, Homo sapiens
tggagttccaaatcactctgtgctccgcggcatcccgatttctttccgcagctaacctcccgacacgtctgctgctgt

SEQ ID NO: 57419 - DNA, 80 bp, Homo sapiens
tctgtgctccgcggcatcccgatttctttccgcagctaacctcccgacacgtctgctgctgttctgtggcagaaagacaa

SEQ ID NO: 57420 - DNA, 78 bp, Homo sapiens
catcccgatttctttccgcagctaacctcccgacacgtctgctgctgttctgtggcagaaagacaatctccgtgttca

SEQ ID NO: 57421 - DNA, 76 bp, Homo sapiens
atttctttccgcagctaacctcccgacacgtctgctgctgttctgtggcagaaagacaatctccgtgttcaggcgg

SEQ ID NO: 57422 - DNA, 78 bp, Homo sapiens
agctaacctcccgacacgtctgctgctgttctgtggcagaaagacaatctccgtgttcaggcggtgagcttgctttcc

SEQ ID NO: 57423 - DNA, 78 bp, Homo sapiens
cgtctgctgctgttctgtggcagaaagacaatctccgtgttcaggcggtgagcttgctttccttcacccttgaccctg

SEQ ID NO: 57424 - DNA, 73 bp, Homo sapiens
agaaagacaatctccgtgttcaggcggtgagcttgctttccttcacccttgaccctggggttgcaggccatgg

SEQ ID NO: 57425 - DNA, 74 bp, Homo sapiens
tctccgtgttcaggcggtgagcttgctttccttcacccttgaccctggggttgcaggccatggtgttgggcgta

SEQ ID NO: 57426 - DNA, 75 bp, Homo sapiens
aggcggtgagcttgctttccttcacccttgaccctggggttgcaggccatggtgttgggcgtatccctgagtgca

SEQ ID NO: 57427 - DNA, 76 bp, Homo sapiens
ttgctttccttcacccttgaccctggggttgcaggccatggtgttgggcgtatccctgagtgcagctgtcctgcgg

SEQ ID NO: 57428 - DNA, 77 bp, Homo sapiens
ttcacccttgaccctggggttgcaggccatggtgttgggcgtatccctgagtgcagctgtcctgcgggattcacttc

SEQ ID NO: 57429 - DNA, 79 bp, Homo sapiens
ctggggttgcaggccatggtgttgggcgtatccctgagtgcagctgtcctgcgggattcacttcctagtgcaccgagat

SEQ ID NO: 57430 - DNA, 77 bp, Homo sapiens
aggccatggtgttgggcgtatccctgagtgcagctgtcctgcgggattcacttcctagtgcaccgagatttcctagg

SEQ ID NO: 57431 - DNA, 76 bp, Homo sapiens
atggtgttgggcgtatccctgagtgcagctgtcctgcgggattcacttcctagtgcaccgagatttcctaggtttc

SEQ ID NO: 57432 - DNA, 77 bp, Homo sapiens
cagctgtcctgcgggattcacttcctagtgcaccgagatttcctaggtttcctcagagtaagcccccagttgcatca

SEQ ID NO: 57433 - DNA, 75 bp, Homo sapiens
gtcctgcgggattcacttcctagtgcaccgagatttcctaggtttcctcagagtaagcccccagttgcatcacca

SEQ ID NO: 57434 - DNA, 74 bp, Homo sapiens
attcacttcctagtgcaccgagatttcctaggtttcctcagagtaagcccccagttgcatcaccaccgactgtg

SEQ ID NO: 57435 - DNA, 75 bp, Homo sapiens
tagtgcaccgagatttcctaggtttcctcagagtaagcccccagttgcatcaccaccgactgtggtgtggctttg

SEQ ID NO: 57436 - DNA, 75 bp, Homo sapiens
agatttcctaggtttcctcagagtaagcccccagttgcatcaccaccgactgtggtgtggctttggatgcctgag

SEQ ID NO: 57437 - DNA, 79 bp, Homo sapiens
tttcctcagagtaagcccccagttgcatcaccaccgactgtggtgtggctttggatgcctgaggctgagttgattctgg

SEQ ID NO: 57438 - DNA, 81 bp, Homo sapiens
agtaagcccccagttgcatcaccaccgactgtggtgtggctttggatgcctgaggctgagttgattctggtggatgtctga

SEQ ID NO: 57439 - DNA, 81 bp, Homo sapiens
accgactgtggtgtggctttggatgcctgaggctgagttgattctggtggatgtctgacctcgcttaaccagactcatcta

SEQ ID NO: 57440 - DNA, 83 bp, Homo sapiens
tttggatgcctgaggctgagttgattctggtggatgtctgacctcgcttaaccagactcatctactgtcttgccattcacacc

SEQ ID NO: 57441 - DNA, 82 bp, Homo sapiens
aggctgagttgattctggtggatgtctgacctcgcttaaccagactcatctactgtcttgccattcacacccaggctgtcca

SEQ ID NO: 57442 - DNA, 82 bp, Homo sapiens
atgtctgacctcgcttaaccagactcatctactgtcttgccattcacacccaggctgtccaaccttcatacagctgagccaa

SEQ ID NO: 57443 - DNA, 82 bp, Homo sapiens
tcgcttaaccagactcatctactgtcttgccattcacacccaggctgtccaaccttcatacagctgagccaagttatctaga

SEQ ID NO: 57444 - DNA, 81 bp, Homo sapiens
agactcatctactgtcttgccattcacacccaggctgtccaaccttcatacagctgagccaagttatctagattagttgct

SEQ ID NO: 57445 - DNA, 79 bp, Homo sapiens
tactgtcttgccattcacacccaggctgtccaaccttcatacagctgagccaagttatctagattagttgcttccttaa

SEQ ID NO: 57446 - DNA, 77 bp, Homo sapiens
aggctgtccaaccttcatacagctgagccaagttatctagattagttgcttccttaatgacatagtcaacctgtaaa

SEQ ID NO: 57447 - DNA, 77 bp, Homo sapiens
agctgagccaagttatctagattagttgcttccttaatgacatagtcaacctgtaaaaataggcaggatagtatgta

SEQ ID NO: 57448 - DNA, 74 bp, Homo sapiens
gccaagttatctagattagttgcttccttaatgacatagtcaacctgtaaaaataggcaggatagtatgtaaag

SEQ ID NO: 57449 - DNA, 74 bp, Homo sapiens
ttttccagcagcattaaaatgtgtagcccaagtttaaaacacggtcacctgttcagcaactgacatcctcctat

SEQ ID NO: 57450 - DNA, 73 bp, Homo sapiens
attaaaatgtgtagcccaagtttaaaacacggtcacctgttcagcaactgacatcctcctattcggatcaaca

SEQ ID NO: 57451 - DNA, 75 bp, Homo sapiens
aatgtgtagcccaagtttaaaacacggtcacctgttcagcaactgacatcctcctattcggatcaacatctcggc

SEQ ID NO: 57452 - DNA, 72 bp, Homo sapiens
aagtttaaaacacggtcacctgttcagcaactgacatcctcctattcggatcaacatctcggccctctaact

SEQ ID NO: 57453 - DNA, 76 bp, Homo sapiens
aacacggtcacctgttcagcaactgacatcctcctattcggatcaacatctcggccctctaacttggctttcactc

SEQ ID NO: 57454 - DNA, 78 bp, Homo sapiens
cctgttcagcaactgacatcctcctattcggatcaacatctcggccctctaacttggctttcactctcttccacacac

SEQ ID NO: 57455 - DNA, 79 bp, Homo sapiens
aactgacatcctcctattcggatcaacatctcggccctctaacttggctttcactctcttccacacactcactgcatag

SEQ ID NO: 57456 - DNA, 78 bp, Homo sapiens
ctattcggatcaacatctcggccctctaacttggctttcactctcttccacacactcactgcataggagtttctctct

SEQ ID NO: 57457 - DNA, 80 bp, Homo sapiens
atcaacatctcggccctctaacttggctttcactctcttccacacactcactgcataggagtttctctcttgcaccgcta

SEQ ID NO: 57458 - DNA, 79 bp, Homo sapiens
cctctaacttggctttcactctcttccacacactcactgcataggagtttctctcttgcaccgctatgaagcaacaaaa

SEQ ID NO: 57459 - DNA, 79 bp, Homo sapiens
aacttggctttcactctcttccacacactcactgcataggagtttctctcttgcaccgctatgaagcaacaaaaacata

SEQ ID NO: 57460 - DNA, 78 bp, Homo sapiens
actctcttccacacactcactgcataggagtttctctcttgcaccgctatgaagcaacaaaaacatacgtaagtcaaa

SEQ ID NO: 57461 - DNA, 64 bp, Homo sapiens
ccgtcattttatataaaaatttaaggcatctttattctaactaattacctttcccagttttagg

SEQ ID NO: 57462 - DNA, 66 bp, Homo sapiens
ataaaaatttaaggcatctttattctaactaattacctttcccagttttagggtctctgactgcct

SEQ ID NO: 57463 - DNA, 68 bp, Homo sapiens
taaggcatctttattctaactaattacctttcccagttttagggtctctgactgcctttttaggacta

SEQ ID NO: 57464 - DNA, 68 bp, Homo sapiens
tttattctaactaattacctttcccagttttagggtctctgactgcctttttaggactacaagcaaca

SEQ ID NO: 57465 - DNA, 70 bp, Homo sapiens
taactaattacctttcccagttttagggtctctgactgcctttttaggactacaagcaacactcttgcca

SEQ ID NO: 57466 - DNA, 70 bp, Homo sapiens
tttcccagttttagggtctctgactgcctttttaggactacaagcaacactcttgccagttcctggaacg

SEQ ID NO: 57467 - DNA, 72 bp, Homo sapiens
ttttagggtctctgactgcctttttaggactacaagcaacactcttgccagttcctggaacggtgcttggtg

SEQ ID NO: 57468 - DNA, 78 bp, Homo sapiens
ctgcctttttaggactacaagcaacactcttgccagttcctggaacggtgcttggtggagtatcagctgatgtagcaa

SEQ ID NO: 57469 - DNA, 77 bp, Homo sapiens
ttttaggactacaagcaacactcttgccagttcctggaacggtgcttggtggagtatcagctgatgtagcaagattt

SEQ ID NO: 57470 - DNA, 78 bp, Homo sapiens
aagcaacactcttgccagttcctggaacggtgcttggtggagtatcagctgatgtagcaagatttttttggatcagct

SEQ ID NO: 57471 - DNA, 80 bp, Homo sapiens
ttgccagttcctggaacggtgcttggtggagtatcagctgatgtagcaagatttttttggatcagctttctagcattctg

SEQ ID NO: 57472 - DNA, 83 bp, Homo sapiens
ttcctggaacggtgcttggtggagtatcagctgatgtagcaagatttttttggatcagctttctagcattctgtgacatgaca

SEQ ID NO: 57473 - DNA, 86 bp, Homo sapiens
cttggtggagtatcagctgatgtagcaagatttttttggatcagctttctagcattctgtgacatgacatcaggctgagtcttctg

SEQ ID NO: 57474 - DNA, 87 bp, Homo sapiens
gtatcagctgatgtagcaagatttttttggatcagctttctagcattctgtgacatgacatcaggctgagtcttctggccagtgtta

SEQ ID NO: 57475 - DNA, 82 bp, Homo sapiens
atgtagcaagatttttttggatcagctttctagcattctgtgacatgacatcaggctgagtcttctggccagtgttactccg

SEQ ID NO: 57476 - DNA, 84 bp, Homo sapiens
atcagctttctagcattctgtgacatgacatcaggctgagtcttctggccagtgttactccggactgctacagagaaagagttg

SEQ ID NO: 57477 - DNA, 84 bp, Homo sapiens
tagcattctgtgacatgacatcaggctgagtcttctggccagtgttactccggactgctacagagaaagagttggtggctcaat

SEQ ID NO: 57478 - DNA, 83 bp, Homo sapiens
tgacatgacatcaggctgagtcttctggccagtgttactccggactgctacagagaaagagttggtggctcaatttacatgta

SEQ ID NO: 57479 - DNA, 78 bp, Homo sapiens
acatcaggctgagtcttctggccagtgttactccggactgctacagagaaagagttggtggctcaatttacatgtaaa

SEQ ID NO: 57480 - DNA, 84 bp, Homo sapiens
atctatgtgtaacattaacaacagatcaagactcaggactcttctcctacctgcagcgaaggatggctgataagtagcagatga

SEQ ID NO: 57481 - DNA, 82 bp, Homo sapiens
taacattaacaacagatcaagactcaggactcttctcctacctgcagcgaaggatggctgataagtagcagatgacgttgga

SEQ ID NO: 57482 - DNA, 81 bp, Homo sapiens
atcaagactcaggactcttctcctacctgcagcgaaggatggctgataagtagcagatgacgttggactcgaacattcatt

SEQ ID NO: 57483 - DNA, 81 bp, Homo sapiens
aggactcttctcctacctgcagcgaaggatggctgataagtagcagatgacgttggactcgaacattcatttgttgcatcg

SEQ ID NO: 57484 - DNA, 82 bp, Homo sapiens
ttctcctacctgcagcgaaggatggctgataagtagcagatgacgttggactcgaacattcatttgttgcatcggtgactaa

SEQ ID NO: 57485 - DNA, 81 bp, Homo sapiens
agcgaaggatggctgataagtagcagatgacgttggactcgaacattcatttgttgcatcggtgactaagggtgatgcaaa

SEQ ID NO: 57486 - DNA, 81 bp, Homo sapiens
atggctgataagtagcagatgacgttggactcgaacattcatttgttgcatcggtgactaagggtgatgcaaaactcacta

SEQ ID NO: 57487 - DNA, 77 bp, Homo sapiens
ataagtagcagatgacgttggactcgaacattcatttgttgcatcggtgactaagggtgatgcaaaactcactaaat

SEQ ID NO: 57488 - DNA, 77 bp, Homo sapiens
atgacgttggactcgaacattcatttgttgcatcggtgactaagggtgatgcaaaactcactaaattattatagata

SEQ ID NO: 57489 - DNA, 77 bp, Homo sapiens
actcgaacattcatttgttgcatcggtgactaagggtgatgcaaaactcactaaattattatagatactgaaataca

SEQ ID NO: 57490 - DNA, 75 bp, Homo sapiens
ttcatttgttgcatcggtgactaagggtgatgcaaaactcactaaattattatagatactgaaatacaaaataaa

SEQ ID NO: 57491 - DNA, 74 bp, Homo sapiens
gcatcggtgactaagggtgatgcaaaactcactaaattattatagatactgaaatacaaaataaaatggcttat

SEQ ID NO: 57492 - DNA, 71 bp, Homo sapiens
cagtagttttgtacttatgttttataaattctgaccagaaggcattcttacctctgactttgtgttttcag

SEQ ID NO: 57493 - DNA, 72 bp, Homo sapiens
ttataaattctgaccagaaggcattcttacctctgactttgtgttttcagttctttcaaggtgggagtgatt

SEQ ID NO: 57494 - DNA, 74 bp, Homo sapiens
cagaaggcattcttacctctgactttgtgttttcagttctttcaaggtgggagtgatttcctggagcatttcaa

SEQ ID NO: 57495 - DNA, 71 bp, Homo sapiens
attcttacctctgactttgtgttttcagttctttcaaggtgggagtgatttcctggagcatttcaacgtgt

SEQ ID NO: 57496 - DNA, 73 bp, Homo sapiens
tgactttgtgttttcagttctttcaaggtgggagtgatttcctggagcatttcaacgtgttcttgacttcgaa

SEQ ID NO: 57497 - DNA, 73 bp, Homo sapiens
tttcagttctttcaaggtgggagtgatttcctggagcatttcaacgtgttcttgacttcgaacctgacccata

SEQ ID NO: 57498 - DNA, 74 bp, Homo sapiens
ttcaaggtgggagtgatttcctggagcatttcaacgtgttcttgacttcgaacctgacccatagcctggactaa

SEQ ID NO: 57499 - DNA, 75 bp, Homo sapiens
gagtgatttcctggagcatttcaacgtgttcttgacttcgaacctgacccatagcctggactaatgtaaatagaa

SEQ ID NO: 57500 - DNA, 73 bp, Homo sapiens
ttcctggagcatttcaacgtgttcttgacttcgaacctgacccatagcctggactaatgtaaatagaactgtt

SEQ ID NO: 57501 - DNA, 72 bp, Homo sapiens
atttcaacgtgttcttgacttcgaacctgacccatagcctggactaatgtaaatagaactgtttgaatgttg

SEQ ID NO: 57502 - DNA, 77 bp, Homo sapiens
tcttgacttcgaacctgacccatagcctggactaatgtaaatagaactgtttgaatgttgtcttgccatgatttata

SEQ ID NO: 57503 - DNA, 75 bp, Homo sapiens
aacctgacccatagcctggactaatgtaaatagaactgtttgaatgttgtcttgccatgatttatattcacccaa

SEQ ID NO: 57504 - DNA, 75 bp, Homo sapiens
atagcctggactaatgtaaatagaactgtttgaatgttgtcttgccatgatttatattcacccaaaaactgccta

SEQ ID NO: 57505 - DNA, 75 bp, Homo sapiens
tggactaatgtaaatagaactgtttgaatgttgtcttgccatgatttatattcacccaaaaactgcctaacactg

SEQ ID NO: 57506 - DNA, 74 bp, Homo sapiens
aaatagaactgtttgaatgttgtcttgccatgatttatattcacccaaaaactgcctaacactgttctcatagg

SEQ ID NO: 57507 - DNA, 77 bp, Homo sapiens
tttgaatgttgtcttgccatgatttatattcacccaaaaactgcctaacactgttctcatagggaacatcttcacca

SEQ ID NO: 57508 - DNA, 79 bp, Homo sapiens
gttgtcttgccatgatttatattcacccaaaaactgcctaacactgttctcatagggaacatcttcaccatctgccaga

SEQ ID NO: 57509 - DNA, 80 bp, Homo sapiens
atgatttatattcacccaaaaactgcctaacactgttctcatagggaacatcttcaccatctgccagagcagcttcttca

SEQ ID NO: 57510 - DNA, 80 bp, Homo sapiens
cccaaaaactgcctaacactgttctcatagggaacatcttcaccatctgccagagcagcttcttcatcctagaattgata

SEQ ID NO: 57511 - DNA, 80 bp, Homo sapiens
aaactgcctaacactgttctcatagggaacatcttcaccatctgccagagcagcttcttcatcctagaattgataaatta

SEQ ID NO: 57512 - DNA, 80 bp, Homo sapiens
tgttctcatagggaacatcttcaccatctgccagagcagcttcttcatcctagaattgataaattaatgattaagaaaaa

SEQ ID NO: 57513 - DNA, 76 bp, Homo sapiens
agggaacatcttcaccatctgccagagcagcttcttcatcctagaattgataaattaatgattaagaaaaatagtt

SEQ ID NO: 57514 - DNA, 74 bp, Homo sapiens
ttttataacagagggagagtaaatgtgtgttcatggtattagtcttaccttagccatagctttcaagagatgtt

SEQ ID NO: 57515 - DNA, 79 bp, Homo sapiens
aatgtgtgttcatggtattagtcttaccttagccatagctttcaagagatgtttgacatctccaagctgtcggttatga

SEQ ID NO: 57516 - DNA, 80 bp, Homo sapiens
tgttcatggtattagtcttaccttagccatagctttcaagagatgtttgacatctccaagctgtcggttatgaccagtga

SEQ ID NO: 57517 - DNA, 80 bp, Homo sapiens
tcttaccttagccatagctttcaagagatgtttgacatctccaagctgtcggttatgaccagtgagcacagtctttatat

SEQ ID NO: 57518 - DNA, 81 bp, Homo sapiens
ccttagccatagctttcaagagatgtttgacatctccaagctgtcggttatgaccagtgagcacagtctttatattatcaa

SEQ ID NO: 57519 - DNA, 81 bp, Homo sapiens
tttcaagagatgtttgacatctccaagctgtcggttatgaccagtgagcacagtctttatattatcaaccagattctgaat

SEQ ID NO: 57520 - DNA, 81 bp, Homo sapiens
agatgtttgacatctccaagctgtcggttatgaccagtgagcacagtctttatattatcaaccagattctgaattgtttca

SEQ ID NO: 57521 - DNA, 78 bp, Homo sapiens
tctccaagctgtcggttatgaccagtgagcacagtctttatattatcaaccagattctgaattgtttcacagaccgtt

SEQ ID NO: 57522 - DNA, 79 bp, Homo sapiens
ctgtcggttatgaccagtgagcacagtctttatattatcaaccagattctgaattgtttcacagaccgtttctatctgc

SEQ ID NO: 57523 - DNA, 80 bp, Homo sapiens
accagtgagcacagtctttatattatcaaccagattctgaattgtttcacagaccgtttctatctgctgctctttctctg

SEQ ID NO: 57524 - DNA, 80 bp, Homo sapiens
acagtctttatattatcaaccagattctgaattgtttcacagaccgtttctatctgctgctctttctctgtctgaattgc

SEQ ID NO: 57525 - DNA, 82 bp, Homo sapiens
tatattatcaaccagattctgaattgtttcacagaccgtttctatctgctgctctttctctgtctgaattgccctctgagta

SEQ ID NO: 57526 - DNA, 81 bp, Homo sapiens
agattctgaattgtttcacagaccgtttctatctgctgctctttctctgtctgaattgccctctgagtagacatatcctgg

SEQ ID NO: 57527 - DNA, 79 bp, Homo sapiens
aattgtttcacagaccgtttctatctgctgctctttctctgtctgaattgccctctgagtagacatatcctgggtcaac

SEQ ID NO: 57528 - DNA, 82 bp, Homo sapiens
agaccgtttctatctgctgctctttctctgtctgaattgccctctgagtagacatatcctgggtcaactgtttgtgtgctga

SEQ ID NO: 57529 - DNA, 85 bp, Homo sapiens
tatctgctgctctttctctgtctgaattgccctctgagtagacatatcctgggtcaactgtttgtgtgctgacaaaagccattca

SEQ ID NO: 57530 - DNA, 84 bp, Homo sapiens
ttctctgtctgaattgccctctgagtagacatatcctgggtcaactgtttgtgtgctgacaaaagccattcagagctgccaata

SEQ ID NO: 57531 - DNA, 82 bp, Homo sapiens
cctctgagtagacatatcctgggtcaactgtttgtgtgctgacaaaagccattcagagctgccaataggatgttcaagacca

SEQ ID NO: 57532 - DNA, 79 bp, Homo sapiens
atatcctgggtcaactgtttgtgtgctgacaaaagccattcagagctgccaataggatgttcaagaccagtgtcctaaa

SEQ ID NO: 57533 - DNA, 81 bp, Homo sapiens
tcaactgtttgtgtgctgacaaaagccattcagagctgccaataggatgttcaagaccagtgtcctaaatagaacaagcat

SEQ ID NO: 57534 - DNA, 79 bp, Homo sapiens
tttgtgtgctgacaaaagccattcagagctgccaataggatgttcaagaccagtgtcctaaatagaacaagcatttgtt

SEQ ID NO: 57535 - DNA, 77 bp, Homo sapiens
acaaaagccattcagagctgccaataggatgttcaagaccagtgtcctaaatagaacaagcatttgtttgacttcga

SEQ ID NO: 57536 - DNA, 73 bp, Homo sapiens
tataacactagccttatttaatcaagtttctttccaccaagactcaccactctctgtaataaacgaagctcta

SEQ ID NO: 57537 - DNA, 74 bp, Homo sapiens
tcaagtttctttccaccaagactcaccactctctgtaataaacgaagctctaactcagacactgaactgttaaa

SEQ ID NO: 57538 - DNA, 75 bp, Homo sapiens
tttctttccaccaagactcaccactctctgtaataaacgaagctctaactcagacactgaactgttaaactgtga

SEQ ID NO: 57539 - DNA, 77 bp, Homo sapiens
aagactcaccactctctgtaataaacgaagctctaactcagacactgaactgttaaactgtgatgcaaacgaacaca

SEQ ID NO: 57540 - DNA, 83 bp, Homo sapiens
tctctgtaataaacgaagctctaactcagacactgaactgttaaactgtgatgcaaacgaacacatctgctgacatcgcttga

SEQ ID NO: 57541 - DNA, 81 bp, Homo sapiens
taataaacgaagctctaactcagacactgaactgttaaactgtgatgcaaacgaacacatctgctgacatcgcttgattag

SEQ ID NO: 57542 - DNA, 81 bp, Homo sapiens
agctctaactcagacactgaactgttaaactgtgatgcaaacgaacacatctgctgacatcgcttgattagttcaaataac

SEQ ID NO: 57543 - DNA, 79 bp, Homo sapiens
actgaactgttaaactgtgatgcaaacgaacacatctgctgacatcgcttgattagttcaaataacgccgcatccaggt

SEQ ID NO: 57544 - DNA, 78 bp, Homo sapiens
actgttaaactgtgatgcaaacgaacacatctgctgacatcgcttgattagttcaaataacgccgcatccaggtttaa

SEQ ID NO: 57545 - DNA, 79 bp, Homo sapiens
atgcaaacgaacacatctgctgacatcgcttgattagttcaaataacgccgcatccaggtttaaggcttctgcagttct

SEQ ID NO: 57546 - DNA, 78 bp, Homo sapiens
cacatctgctgacatcgcttgattagttcaaataacgccgcatccaggtttaaggcttctgcagttcttgttcgtaaa

SEQ ID NO: 57547 - DNA, 75 bp, Homo sapiens
tgacatcgcttgattagttcaaataacgccgcatccaggtttaaggcttctgcagttcttgttcgtaaactttca

SEQ ID NO: 57548 - DNA, 70 bp, Homo sapiens
cttgattagttcaaataacgccgcatccaggtttaaggcttctgcagttcttgttcgtaaactttcaaaa

SEQ ID NO: 57549 - DNA, 72 bp, Homo sapiens
gttcaaataacgccgcatccaggtttaaggcttctgcagttcttgttcgtaaactttcaaaatgaatgatat

SEQ ID NO: 57550 - DNA, 77 bp, Homo sapiens
catccaggtttaaggcttctgcagttcttgttcgtaaactttcaaaatgaatgatattgctgcagagaaatgtgacc

SEQ ID NO: 57551 - DNA, 77 bp, Homo sapiens
tttaaggcttctgcagttcttgttcgtaaactttcaaaatgaatgatattgctgcagagaaatgtgacctgtaaaga

SEQ ID NO: 57552 - DNA, 78 bp, Homo sapiens
cttctgcagttcttgttcgtaaactttcaaaatgaatgatattgctgcagagaaatgtgacctgtaaagacagaaatg

SEQ ID NO: 57553 - DNA, 77 bp, Homo sapiens
tcttgttcgtaaactttcaaaatgaatgatattgctgcagagaaatgtgacctgtaaagacagaaatggaaccacaa

SEQ ID NO: 57554 - DNA, 77 bp, Homo sapiens
aaactttcaaaatgaatgatattgctgcagagaaatgtgacctgtaaagacagaaatggaaccacaagaggagatgg

SEQ ID NO: 57555 - DNA, 77 bp, Homo sapiens
atctaatcctgtaaaagtgaatacaaagatggtgcatgtaagtcacaatacctgacttgctctttggctctctttaa

SEQ ID NO: 57556 - DNA, 76 bp, Homo sapiens
taaaagtgaatacaaagatggtgcatgtaagtcacaatacctgacttgctctttggctctctttaaggacaagatt

SEQ ID NO: 57557 - DNA, 77 bp, Homo sapiens
atacaaagatggtgcatgtaagtcacaatacctgacttgctctttggctctctttaaggacaagatttcttctttca

SEQ ID NO: 57558 - DNA, 77 bp, Homo sapiens
atgtaagtcacaatacctgacttgctctttggctctctttaaggacaagatttcttctttcagctatcgttgcttca

SEQ ID NO: 57559 - DNA, 74 bp, Homo sapiens
acaatacctgacttgctctttggctctctttaaggacaagatttcttctttcagctatcgttgcttcaaaatct

SEQ ID NO: 57560 - DNA, 74 bp, Homo sapiens
acttgctctttggctctctttaaggacaagatttcttctttcagctatcgttgcttcaaaatcttgtagtacag

SEQ ID NO: 57561 - DNA, 73 bp, Homo sapiens
tttggctctctttaaggacaagatttcttctttcagctatcgttgcttcaaaatcttgtagtacaggggccaa

SEQ ID NO: 57562 - DNA, 73 bp, Homo sapiens
tttaaggacaagatttcttctttcagctatcgttgcttcaaaatcttgtagtacaggggccaatgcagggttg

SEQ ID NO: 57563 - DNA, 75 bp, Homo sapiens
atttcttctttcagctatcgttgcttcaaaatcttgtagtacaggggccaatgcagggttggcaccacctgccca

SEQ ID NO: 57564 - DNA, 77 bp, Homo sapiens
tctttcagctatcgttgcttcaaaatcttgtagtacaggggccaatgcagggttggcaccacctgcccacttgagtc

SEQ ID NO: 57565 - DNA, 78 bp, Homo sapiens
tgcttcaaaatcttgtagtacaggggccaatgcagggttggcaccacctgcccacttgagtcgctgttcaatacttga

SEQ ID NO: 57566 - DNA, 76 bp, Homo sapiens
aaaatcttgtagtacaggggccaatgcagggttggcaccacctgcccacttgagtcgctgttcaatacttgattca

SEQ ID NO: 57567 - DNA, 80 bp, Homo sapiens
tagtacaggggccaatgcagggttggcaccacctgcccacttgagtcgctgttcaatacttgattcaagtgcagctagct

SEQ ID NO: 57568 - DNA, 79 bp, Homo sapiens
aatgcagggttggcaccacctgcccacttgagtcgctgttcaatacttgattcaagtgcagctagcttctcctataaaa

SEQ ID NO: 57569 - DNA, 81 bp, Homo sapiens
gttggcaccacctgcccacttgagtcgctgttcaatacttgattcaagtgcagctagcttctcctataaaagccagcagaa

SEQ ID NO: 57570 - DNA, 81 bp, Homo sapiens
acctgcccacttgagtcgctgttcaatacttgattcaagtgcagctagcttctcctataaaagccagcagaatcttggtga

SEQ ID NO: 57571 - DNA, 81 bp, Homo sapiens
agtcgctgttcaatacttgattcaagtgcagctagcttctcctataaaagccagcagaatcttggtgaaggtatatgacat

SEQ ID NO: 57572 - DNA, 72 bp, Homo sapiens
tttctaaaaagaaaatgccctggaaggaagatctggcaaaacacacctgaactgttgcaatagaagtttcaa

SEQ ID NO: 57573 - DNA, 73 bp, Homo sapiens
aaaaagaaaatgccctggaaggaagatctggcaaaacacacctgaactgttgcaatagaagtttcaatctggc

SEQ ID NO: 57574 - DNA, 78 bp, Homo sapiens
tggaaggaagatctggcaaaacacacctgaactgttgcaatagaagtttcaatctggctcagggtatgcagcttcttt

SEQ ID NO: 57575 - DNA, 80 bp, Homo sapiens
aagatctggcaaaacacacctgaactgttgcaatagaagtttcaatctggctcagggtatgcagcttctttttcatgctg

SEQ ID NO: 57576 - DNA, 78 bp, Homo sapiens
aaacacacctgaactgttgcaatagaagtttcaatctggctcagggtatgcagcttctttttcatgctggttaggata

SEQ ID NO: 57577 - DNA, 78 bp, Homo sapiens
aactgttgcaatagaagtttcaatctggctcagggtatgcagcttctttttcatgctggttaggatagcagaccgtgg

SEQ ID NO: 57578 - DNA, 75 bp, Homo sapiens
aatagaagtttcaatctggctcagggtatgcagcttctttttcatgctggttaggatagcagaccgtgggggagg

SEQ ID NO: 57579 - DNA, 80 bp, Homo sapiens
tttcaatctggctcagggtatgcagcttctttttcatgctggttaggatagcagaccgtgggggaggtgtgactgacatg

SEQ ID NO: 57580 - DNA, 78 bp, Homo sapiens
agggtatgcagcttctttttcatgctggttaggatagcagaccgtgggggaggtgtgactgacatggcttgtggtcta

SEQ ID NO: 57581 - DNA, 78 bp, Homo sapiens
gcttctttttcatgctggttaggatagcagaccgtgggggaggtgtgactgacatggcttgtggtctattgataagta

SEQ ID NO: 57582 - DNA, 78 bp, Homo sapiens
tttttcatgctggttaggatagcagaccgtgggggaggtgtgactgacatggcttgtggtctattgataagtagatct

SEQ ID NO: 57583 - DNA, 80 bp, Homo sapiens
ttaggatagcagaccgtgggggaggtgtgactgacatggcttgtggtctattgataagtagatcttcatgttgccactgt

SEQ ID NO: 57584 - DNA, 78 bp, Homo sapiens
accgtgggggaggtgtgactgacatggcttgtggtctattgataagtagatcttcatgttgccactgttgagagaaaa

SEQ ID NO: 57585 - DNA, 80 bp, Homo sapiens
aggtgtgactgacatggcttgtggtctattgataagtagatcttcatgttgccactgttgagagaaaaagaaatgtatta

SEQ ID NO: 57586 - DNA, 79 bp, Homo sapiens
actgacatggcttgtggtctattgataagtagatcttcatgttgccactgttgagagaaaaagaaatgtattaaaatca

SEQ ID NO: 57587 - DNA, 74 bp, Homo sapiens
tcaagtttcctaccttgaggaaaaacacattataaacaaaaacacttacctgaaacatggcaatatgcagctga

SEQ ID NO: 57588 - DNA, 72 bp, Homo sapiens
cctaccttgaggaaaaacacattataaacaaaaacacttacctgaaacatggcaatatgcagctgaacccgc

SEQ ID NO: 57589 - DNA, 76 bp, Homo sapiens
aaacacattataaacaaaaacacttacctgaaacatggcaatatgcagctgaacccgctgcaggcttgtcttacaa

SEQ ID NO: 57590 - DNA, 76 bp, Homo sapiens
ataaacaaaaacacttacctgaaacatggcaatatgcagctgaacccgctgcaggcttgtcttacaagaagaaata

SEQ ID NO: 57591 - DNA, 75 bp, Homo sapiens
aaaacacttacctgaaacatggcaatatgcagctgaacccgctgcaggcttgtcttacaagaagaaatactggtt

SEQ ID NO: 57592 - DNA, 78 bp, Homo sapiens
aaacatggcaatatgcagctgaacccgctgcaggcttgtcttacaagaagaaatactggtttctagccttcgcaccaa

SEQ ID NO: 57593 - DNA, 77 bp, Homo sapiens
agctgaacccgctgcaggcttgtcttacaagaagaaatactggtttctagccttcgcaccaagtcatgcttcttcca

SEQ ID NO: 57594 - DNA, 75 bp, Homo sapiens
aggcttgtcttacaagaagaaatactggtttctagccttcgcaccaagtcatgcttcttccaggcagtgtcgtaa

SEQ ID NO: 57595 - DNA, 76 bp, Homo sapiens
tacaagaagaaatactggtttctagccttcgcaccaagtcatgcttcttccaggcagtgtcgtaagaacttgctaa

SEQ ID NO: 57596 - DNA, 75 bp, Homo sapiens
agaaatactggtttctagccttcgcaccaagtcatgcttcttccaggcagtgtcgtaagaacttgctaacacagt

SEQ ID NO: 57597 - DNA, 78 bp, Homo sapiens
tttctagccttcgcaccaagtcatgcttcttccaggcagtgtcgtaagaacttgctaacacagttgccctgttcataa

SEQ ID NO: 57598 - DNA, 81 bp, Homo sapiens
ttcgcaccaagtcatgcttcttccaggcagtgtcgtaagaacttgctaacacagttgccctgttcataaccagctgagaga

SEQ ID NO: 57599 - DNA, 77 bp, Homo sapiens
atgcttcttccaggcagtgtcgtaagaacttgctaacacagttgccctgttcataaccagctgagagaacttcccta

SEQ ID NO: 57600 - DNA, 78 bp, Homo sapiens
caggcagtgtcgtaagaacttgctaacacagttgccctgttcataaccagctgagagaacttccctatctggatgtta

SEQ ID NO: 57601 - DNA, 76 bp, Homo sapiens
agtgtcgtaagaacttgctaacacagttgccctgttcataaccagctgagagaacttccctatctggatgttatgt

SEQ ID NO: 57602 - DNA, 77 bp, Homo sapiens
ttgctaacacagttgccctgttcataaccagctgagagaacttccctatctggatgttatgttccaccgctttctta

SEQ ID NO: 57603 - DNA, 79 bp, Homo sapiens
agttgccctgttcataaccagctgagagaacttccctatctggatgttatgttccaccgctttcttacagagatcatca

SEQ ID NO: 57604 - DNA, 78 bp, Homo sapiens
ttcataaccagctgagagaacttccctatctggatgttatgttccaccgctttcttacagagatcatcaacagaaact

SEQ ID NO: 57605 - DNA, 77 bp, Homo sapiens
agctgagagaacttccctatctggatgttatgttccaccgctttcttacagagatcatcaacagaaactttgctttc

SEQ ID NO: 57606 - DNA, 75 bp, Homo sapiens
ttccctatctggatgttatgttccaccgctttcttacagagatcatcaacagaaactttgctttcggcaccaaag

SEQ ID NO: 57607 - DNA, 75 bp, Homo sapiens
tatctggatgttatgttccaccgctttcttacagagatcatcaacagaaactttgctttcggcaccaaagtcctt

SEQ ID NO: 57608 - DNA, 74 bp, Homo sapiens
ttatgttccaccgctttcttacagagatcatcaacagaaactttgctttcggcaccaaagtcctttgcctctac

SEQ ID NO: 57609 - DNA, 79 bp, Homo sapiens
tttcttacagagatcatcaacagaaactttgctttcggcaccaaagtcctttgcctctacttgagcaatgatgtctaca

SEQ ID NO: 57610 - DNA, 79 bp, Homo sapiens
acagagatcatcaacagaaactttgctttcggcaccaaagtcctttgcctctacttgagcaatgatgtctacacccaga

SEQ ID NO: 57611 - DNA, 76 bp, Homo sapiens
agaaactttgctttcggcaccaaagtcctttgcctctacttgagcaatgatgtctacacccagagcactgataaaa

SEQ ID NO: 57612 - DNA, 79 bp, Homo sapiens
ctttgctttcggcaccaaagtcctttgcctctacttgagcaatgatgtctacacccagagcactgataaaactgcacag

SEQ ID NO: 57613 - DNA, 79 bp, Homo sapiens
accaaagtcctttgcctctacttgagcaatgatgtctacacccagagcactgataaaactgcacagtgtgagtccgagg

SEQ ID NO: 57614 - DNA, 81 bp, Homo sapiens
ttgcctctacttgagcaatgatgtctacacccagagcactgataaaactgcacagtgtgagtccgagggcttggttgggta

SEQ ID NO: 57615 - DNA, 81 bp, Homo sapiens
ttgagcaatgatgtctacacccagagcactgataaaactgcacagtgtgagtccgagggcttggttgggtagccctatcaa

SEQ ID NO: 57616 - DNA, 79 bp, Homo sapiens
aatgatgtctacacccagagcactgataaaactgcacagtgtgagtccgagggcttggttgggtagccctatcaagagc

SEQ ID NO: 57617 - DNA, 78 bp, Homo sapiens
acccagagcactgataaaactgcacagtgtgagtccgagggcttggttgggtagccctatcaagagctgcctcacaaa

SEQ ID NO: 57618 - DNA, 80 bp, Homo sapiens
ataaaactgcacagtgtgagtccgagggcttggttgggtagccctatcaagagctgcctcacaaagtcagctgtgaatgc

SEQ ID NO: 57619 - DNA, 82 bp, Homo sapiens
actgcacagtgtgagtccgagggcttggttgggtagccctatcaagagctgcctcacaaagtcagctgtgaatgccttgata

SEQ ID NO: 57620 - DNA, 79 bp, Homo sapiens
ttggttgggtagccctatcaagagctgcctcacaaagtcagctgtgaatgccttgataggtttggccatttggtcttca

SEQ ID NO: 57621 - DNA, 78 bp, Homo sapiens
aagagctgcctcacaaagtcagctgtgaatgccttgataggtttggccatttggtcttcactgaaacaagagtttcta

SEQ ID NO: 57622 - DNA, 72 bp, Homo sapiens
acaaagtcagctgtgaatgccttgataggtttggccatttggtcttcactgaaacaagagtttctaaaaagg

SEQ ID NO: 57623 - DNA, 71 bp, Homo sapiens
agctgtgaatgccttgataggtttggccatttggtcttcactgaaacaagagtttctaaaaagggttttca

SEQ ID NO: 57624 - DNA, 70 bp, Homo sapiens
aggtttggccatttggtcttcactgaaacaagagtttctaaaaagggttttcacattgacaatctgtaca

SEQ ID NO: 57625 - DNA, 72 bp, Homo sapiens
atttggtcttcactgaaacaagagtttctaaaaagggttttcacattgacaatctgtacaggcccattcaca

SEQ ID NO: 57626 - DNA, 74 bp, Homo sapiens
gaaacaagagtttctaaaaagggttttcacattgacaatctgtacaggcccattcacagtattctgatcttcaa

SEQ ID NO: 57627 - DNA, 73 bp, Homo sapiens
agtttctaaaaagggttttcacattgacaatctgtacaggcccattcacagtattctgatcttcaagtgaact

SEQ ID NO: 57628 - DNA, 76 bp, Homo sapiens
agggttttcacattgacaatctgtacaggcccattcacagtattctgatcttcaagtgaacttgatcctacaaaaa

SEQ ID NO: 57629 - DNA, 77 bp, Homo sapiens
ttcacattgacaatctgtacaggcccattcacagtattctgatcttcaagtgaacttgatcctacaaaaaggaaaaa

SEQ ID NO: 57630 - DNA, 74 bp, Homo sapiens
atctgtacaggcccattcacagtattctgatcttcaagtgaacttgatcctacaaaaaggaaaaatttcttgta

SEQ ID NO: 57631 - DNA, 74 bp, Homo sapiens
aggcccattcacagtattctgatcttcaagtgaacttgatcctacaaaaaggaaaaatttcttgtatttcatga

SEQ ID NO: 57632 - DNA, 73 bp, Homo sapiens
ccatagtgctacatagctaaagctagtatgtttacaggtagaatattacctgacaatgttttagaaaaggtac

SEQ ID NO: 57633 - DNA, 73 bp, Homo sapiens
tacatagctaaagctagtatgtttacaggtagaatattacctgacaatgttttagaaaaggtaccacagagcc

SEQ ID NO: 57634 - DNA, 71 bp, Homo sapiens
aaagctagtatgtttacaggtagaatattacctgacaatgttttagaaaaggtaccacagagcctgaagaa

SEQ ID NO: 57635 - DNA, 70 bp, Homo sapiens
tttacaggtagaatattacctgacaatgttttagaaaaggtaccacagagcctgaagaactccttaatag

SEQ ID NO: 57636 - DNA, 70 bp, Homo sapiens
aatattacctgacaatgttttagaaaaggtaccacagagcctgaagaactccttaatagtctgtagtctt

SEQ ID NO: 57637 - DNA, 70 bp, Homo sapiens
ctgacaatgttttagaaaaggtaccacagagcctgaagaactccttaatagtctgtagtctttttagaaa

SEQ ID NO: 57638 - DNA, 70 bp, Homo sapiens
tagaaaaggtaccacagagcctgaagaactccttaatagtctgtagtctttttagaaagaaaatctcttc

SEQ ID NO: 57639 - DNA, 73 bp, Homo sapiens
taccacagagcctgaagaactccttaatagtctgtagtctttttagaaagaaaatctcttctagcacctgccg

SEQ ID NO: 57640 - DNA, 77 bp, Homo sapiens
tgaagaactccttaatagtctgtagtctttttagaaagaaaatctcttctagcacctgccggtgattatcatcatca

SEQ ID NO: 57641 - DNA, 74 bp, Homo sapiens
actccttaatagtctgtagtctttttagaaagaaaatctcttctagcacctgccggtgattatcatcatcaaaa

SEQ ID NO: 57642 - DNA, 72 bp, Homo sapiens
agtctgtagtctttttagaaagaaaatctcttctagcacctgccggtgattatcatcatcaaaaaaattaac

SEQ ID NO: 57643 - DNA, 74 bp, Homo sapiens
ttagaaagaaaatctcttctagcacctgccggtgattatcatcatcaaaaaaattaacttgagtactcctggct

SEQ ID NO: 57644 - DNA, 73 bp, Homo sapiens
aaaatctcttctagcacctgccggtgattatcatcatcaaaaaaattaacttgagtactcctggcttccctta

SEQ ID NO: 57645 - DNA, 77 bp, Homo sapiens
ttctagcacctgccggtgattatcatcatcaaaaaaattaacttgagtactcctggcttcccttatgatgtcaatct

SEQ ID NO: 57646 - DNA, 77 bp, Homo sapiens
gtgattatcatcatcaaaaaaattaacttgagtactcctggcttcccttatgatgtcaatctttcgccaagctatgg

SEQ ID NO: 57647 - DNA, 73 bp, Homo sapiens
atcatcaaaaaaattaacttgagtactcctggcttcccttatgatgtcaatctttcgccaagctatgggaatt

SEQ ID NO: 57648 - DNA, 73 bp, Homo sapiens
aaattaacttgagtactcctggcttcccttatgatgtcaatctttcgccaagctatgggaatttccatcttgt

SEQ ID NO: 57649 - DNA, 75 bp, Homo sapiens
agtactcctggcttcccttatgatgtcaatctttcgccaagctatgggaatttccatcttgttcaactatgtaaa

SEQ ID NO: 57650 - DNA, 76 bp, Homo sapiens
tggcttcccttatgatgtcaatctttcgccaagctatgggaatttccatcttgttcaactatgtaaatgaaagaaa

SEQ ID NO: 57651 - DNA, 74 bp, Homo sapiens
ccttatgatgtcaatctttcgccaagctatgggaatttccatcttgttcaactatgtaaatgaaagaaaacaaa

SEQ ID NO: 57652 - DNA, 72 bp, Homo sapiens
ctttcgccaagctatgggaatttccatcttgttcaactatgtaaatgaaagaaaacaaagttcatttctcca

SEQ ID NO: 57653 - DNA, 72 bp, Homo sapiens
ctactttatggcacttgcattatttttaaatccaagtccacatttaccttttcaactaataagctgaaagca

SEQ ID NO: 57654 - DNA, 71 bp, Homo sapiens
ggcacttgcattatttttaaatccaagtccacatttaccttttcaactaataagctgaaagcagtttcaac

SEQ ID NO: 57655 - DNA, 70 bp, Homo sapiens
atttttaaatccaagtccacatttaccttttcaactaataagctgaaagcagtttcaacttgagcaaaca

SEQ ID NO: 57656 - DNA, 75 bp, Homo sapiens
taaatccaagtccacatttaccttttcaactaataagctgaaagcagtttcaacttgagcaaacatgccatcgaa

SEQ ID NO: 57657 - DNA, 76 bp, Homo sapiens
atttaccttttcaactaataagctgaaagcagtttcaacttgagcaaacatgccatcgaatgctaccaaaagcatc

SEQ ID NO: 57658 - DNA, 82 bp, Homo sapiens
ttcaactaataagctgaaagcagtttcaacttgagcaaacatgccatcgaatgctaccaaaagcatctggccagctgacatt

SEQ ID NO: 57659 - DNA, 81 bp, Homo sapiens
taataagctgaaagcagtttcaacttgagcaaacatgccatcgaatgctaccaaaagcatctggccagctgacattttggg

SEQ ID NO: 57660 - DNA, 81 bp, Homo sapiens
agtttcaacttgagcaaacatgccatcgaatgctaccaaaagcatctggccagctgacattttgggtgtttcatcaactga

SEQ ID NO: 57661 - DNA, 80 bp, Homo sapiens
acttgagcaaacatgccatcgaatgctaccaaaagcatctggccagctgacattttgggtgtttcatcaactgaaccatt

SEQ ID NO: 57662 - DNA, 78 bp, Homo sapiens
aacatgccatcgaatgctaccaaaagcatctggccagctgacattttgggtgtttcatcaactgaaccatttctcggt

SEQ ID NO: 57663 - DNA, 75 bp, Homo sapiens
aatgctaccaaaagcatctggccagctgacattttgggtgtttcatcaactgaaccatttctcggttggattaat

SEQ ID NO: 57664 - DNA, 74 bp, Homo sapiens
aaaagcatctggccagctgacattttgggtgtttcatcaactgaaccatttctcggttggattaattcaccgta

SEQ ID NO: 57665 - DNA, 76 bp, Homo sapiens
cagctgacattttgggtgtttcatcaactgaaccatttctcggttggattaattcaccgtactgagcatgtagtag

SEQ ID NO: 57666 - DNA, 74 bp, Homo sapiens
attttgggtgtttcatcaactgaaccatttctcggttggattaattcaccgtactgagcatgtagtagtctaca

SEQ ID NO: 57667 - DNA, 75 bp, Homo sapiens
gtgtttcatcaactgaaccatttctcggttggattaattcaccgtactgagcatgtagtagtctacagaaaaaca

SEQ ID NO: 57668 - DNA, 71 bp, Homo sapiens
aactgaaccatttctcggttggattaattcaccgtactgagcatgtagtagtctacagaaaaacaaaagga

SEQ ID NO: 57669 - DNA, 69 bp, Homo sapiens
tttctcggttggattaattcaccgtactgagcatgtagtagtctacagaaaaacaaaaggagttaaaac

SEQ ID NO: 57670 - DNA, 82 bp, Homo sapiens
tgtcccatctcttttacaaggaaacggcacagccagcattcacttgcctggcaacatcgatgtaatgagcatgtgtttcttc

SEQ ID NO: 57671 - DNA, 81 bp, Homo sapiens
atctcttttacaaggaaacggcacagccagcattcacttgcctggcaacatcgatgtaatgagcatgtgtttcttcttcca

SEQ ID NO: 57672 - DNA, 82 bp, Homo sapiens
aaacggcacagccagcattcacttgcctggcaacatcgatgtaatgagcatgtgtttcttcttccagtcccatagctgcgtt

SEQ ID NO: 57673 - DNA, 82 bp, Homo sapiens
agccagcattcacttgcctggcaacatcgatgtaatgagcatgtgtttcttcttccagtcccatagctgcgtttcttaagta

SEQ ID NO: 57674 - DNA, 79 bp, Homo sapiens
acttgcctggcaacatcgatgtaatgagcatgtgtttcttcttccagtcccatagctgcgtttcttaagtaggcctgaa

SEQ ID NO: 57675 - DNA, 79 bp, Homo sapiens
caacatcgatgtaatgagcatgtgtttcttcttccagtcccatagctgcgtttcttaagtaggcctgaagagattccac

SEQ ID NO: 57676 - DNA, 78 bp, Homo sapiens
atgtaatgagcatgtgtttcttcttccagtcccatagctgcgtttcttaagtaggcctgaagagattccactagagtc

SEQ ID NO: 57677 - DNA, 77 bp, Homo sapiens
agcatgtgtttcttcttccagtcccatagctgcgtttcttaagtaggcctgaagagattccactagagtctgcaggg

SEQ ID NO: 57678 - DNA, 76 bp, Homo sapiens
ttcttccagtcccatagctgcgtttcttaagtaggcctgaagagattccactagagtctgcaggggaacgccatcg

SEQ ID NO: 57679 - DNA, 79 bp, Homo sapiens
catagctgcgtttcttaagtaggcctgaagagattccactagagtctgcaggggaacgccatcggtggtctgctcaata

SEQ ID NO: 57680 - DNA, 75 bp, Homo sapiens
tttcttaagtaggcctgaagagattccactagagtctgcaggggaacgccatcggtggtctgctcaataagaccg

SEQ ID NO: 57681 - DNA, 76 bp, Homo sapiens
taagtaggcctgaagagattccactagagtctgcaggggaacgccatcggtggtctgctcaataagaccgtccagt

SEQ ID NO: 57682 - DNA, 79 bp, Homo sapiens
aagagattccactagagtctgcaggggaacgccatcggtggtctgctcaataagaccgtccagttcatgcagcatactt

SEQ ID NO: 57683 - DNA, 79 bp, Homo sapiens
tagagtctgcaggggaacgccatcggtggtctgctcaataagaccgtccagttcatgcagcatactttctaacgtgtat

SEQ ID NO: 57684 - DNA, 77 bp, Homo sapiens
ctgcaggggaacgccatcggtggtctgctcaataagaccgtccagttcatgcagcatactttctaacgtgtattccc

SEQ ID NO: 57685 - DNA, 75 bp, Homo sapiens
atcggtggtctgctcaataagaccgtccagttcatgcagcatactttctaacgtgtattcccctttcattaaaca

SEQ ID NO: 57686 - DNA, 77 bp, Homo sapiens
tgctcaataagaccgtccagttcatgcagcatactttctaacgtgtattcccctttcattaaacatcgaagtgcttc

SEQ ID NO: 57687 - DNA, 74 bp, Homo sapiens
aataagaccgtccagttcatgcagcatactttctaacgtgtattcccctttcattaaacatcgaagtgcttctg

SEQ ID NO: 57688 - DNA, 76 bp, Homo sapiens
agttcatgcagcatactttctaacgtgtattcccctttcattaaacatcgaagtgcttctggaaatatgatttgcc

SEQ ID NO: 57689 - DNA, 70 bp, Homo sapiens
atactttctaacgtgtattcccctttcattaaacatcgaagtgcttctggaaatatgatttgccggaaat

SEQ ID NO: 57690 - DNA, 72 bp, Homo sapiens
taacgtgtattcccctttcattaaacatcgaagtgcttctggaaatatgatttgccggaaattcgaattcaa

SEQ ID NO: 57691 - DNA, 72 bp, Homo sapiens
ccctttcattaaacatcgaagtgcttctggaaatatgatttgccggaaattcgaattcaattcctataaata

SEQ ID NO: 57692 - DNA, 75 bp, Homo sapiens
cattaaacatcgaagtgcttctggaaatatgatttgccggaaattcgaattcaattcctataaatatatgagaaa

SEQ ID NO: 57693 - DNA, 70 bp, Homo sapiens
tctggaaatatgatttgccggaaattcgaattcaattcctataaatatatgagaaaaaaacttttaatgt

SEQ ID NO: 57694 - DNA, 71 bp, Homo sapiens
tattcagtatctaaaacaaactaatatttaaaataaaagtgttcacctgaagtgaggtatacactccattg

SEQ ID NO: 57695 - DNA, 73 bp, Homo sapiens
actaatatttaaaataaaagtgttcacctgaagtgaggtatacactccattggctaagtgaactgtctcagac

SEQ ID NO: 57696 - DNA, 74 bp, Homo sapiens
aaaataaaagtgttcacctgaagtgaggtatacactccattggctaagtgaactgtctcagacgcttccatggg

SEQ ID NO: 57697 - DNA, 78 bp, Homo sapiens
tgttcacctgaagtgaggtatacactccattggctaagtgaactgtctcagacgcttccatggggttcgggatatcta

SEQ ID NO: 57698 - DNA, 75 bp, Homo sapiens
aagtgaggtatacactccattggctaagtgaactgtctcagacgcttccatggggttcgggatatctaagtcctg

SEQ ID NO: 57699 - DNA, 77 bp, Homo sapiens
ggtatacactccattggctaagtgaactgtctcagacgcttccatggggttcgggatatctaagtcctgtggcacca

SEQ ID NO: 57700 - DNA, 77 bp, Homo sapiens
attggctaagtgaactgtctcagacgcttccatggggttcgggatatctaagtcctgtggcaccaggtggcactgct

SEQ ID NO: 57701 - DNA, 77 bp, Homo sapiens
aactgtctcagacgcttccatggggttcgggatatctaagtcctgtggcaccaggtggcactgcttcagtaactgaa

SEQ ID NO: 57702 - DNA, 76 bp, Homo sapiens
agacgcttccatggggttcgggatatctaagtcctgtggcaccaggtggcactgcttcagtaactgaaccaagcag

SEQ ID NO: 57703 - DNA, 74 bp, Homo sapiens
atggggttcgggatatctaagtcctgtggcaccaggtggcactgcttcagtaactgaaccaagcaggtgacgtt

SEQ ID NO: 57704 - DNA, 80 bp, Homo sapiens
atatctaagtcctgtggcaccaggtggcactgcttcagtaactgaaccaagcaggtgacgtttccgctcatactgcagag

SEQ ID NO: 57705 - DNA, 79 bp, Homo sapiens
taagtcctgtggcaccaggtggcactgcttcagtaactgaaccaagcaggtgacgtttccgctcatactgcagagttcc

SEQ ID NO: 57706 - DNA, 77 bp, Homo sapiens
accaggtggcactgcttcagtaactgaaccaagcaggtgacgtttccgctcatactgcagagttcctccaagaacca

SEQ ID NO: 57707 - DNA, 77 bp, Homo sapiens
actgcttcagtaactgaaccaagcaggtgacgtttccgctcatactgcagagttcctccaagaaccaggctccatcc

SEQ ID NO: 57708 - DNA, 75 bp, Homo sapiens
agtaactgaaccaagcaggtgacgtttccgctcatactgcagagttcctccaagaaccaggctccatcccgagaa

SEQ ID NO: 57709 - DNA, 77 bp, Homo sapiens
accaagcaggtgacgtttccgctcatactgcagagttcctccaagaaccaggctccatcccgagaagtcagatcaac

SEQ ID NO: 57710 - DNA, 78 bp, Homo sapiens
acgtttccgctcatactgcagagttcctccaagaaccaggctccatcccgagaagtcagatcaaccagctgttctcca

SEQ ID NO: 57711 - DNA, 83 bp, Homo sapiens
ttcctccaagaaccaggctccatcccgagaagtcagatcaaccagctgttctccagcacttgacgctgcaccttccatcatca

SEQ ID NO: 57712 - DNA, 81 bp, Homo sapiens
aagaaccaggctccatcccgagaagtcagatcaaccagctgttctccagcacttgacgctgcaccttccatcatcaggtta

SEQ ID NO: 57713 - DNA, 83 bp, Homo sapiens
catcccgagaagtcagatcaaccagctgttctccagcacttgacgctgcaccttccatcatcaggttacgcctacaagagata

SEQ ID NO: 57714 - DNA, 82 bp, Homo sapiens
agaagtcagatcaaccagctgttctccagcacttgacgctgcaccttccatcatcaggttacgcctacaagagataaatatc

SEQ ID NO: 57715 - DNA, 81 bp, Homo sapiens
aaccagctgttctccagcacttgacgctgcaccttccatcatcaggttacgcctacaagagataaatatctgtacagtgaa

SEQ ID NO: 57716 - DNA, 79 bp, Homo sapiens
ttctccagcacttgacgctgcaccttccatcatcaggttacgcctacaagagataaatatctgtacagtgaaacttaaa

SEQ ID NO: 57717 - DNA, 69 bp, Homo sapiens
aaaataagacacaggaaatggtccaatatgaagttggctaacttaccttgtaagggtacaaagggcaga

SEQ ID NO: 57718 - DNA, 69 bp, Homo sapiens
acacaggaaatggtccaatatgaagttggctaacttaccttgtaagggtacaaagggcagaaataataa

SEQ ID NO: 57719 - DNA, 70 bp, Homo sapiens
aatggtccaatatgaagttggctaacttaccttgtaagggtacaaagggcagaaataataacacttgcta

SEQ ID NO: 57720 - DNA, 71 bp, Homo sapiens
atatgaagttggctaacttaccttgtaagggtacaaagggcagaaataataacacttgctagactcaaaga

SEQ ID NO: 57721 - DNA, 71 bp, Homo sapiens
taacttaccttgtaagggtacaaagggcagaaataataacacttgctagactcaaagatccttcttctcca

SEQ ID NO: 57722 - DNA, 74 bp, Homo sapiens
taagggtacaaagggcagaaataataacacttgctagactcaaagatccttcttctccattctcatgaaggaaa

SEQ ID NO: 57723 - DNA, 72 bp, Homo sapiens
aaagggcagaaataataacacttgctagactcaaagatccttcttctccattctcatgaaggaaaactttaa

SEQ ID NO: 57724 - DNA, 75 bp, Homo sapiens
gaaataataacacttgctagactcaaagatccttcttctccattctcatgaaggaaaactttaatgcaacgttca

SEQ ID NO: 57725 - DNA, 73 bp, Homo sapiens
aacacttgctagactcaaagatccttcttctccattctcatgaaggaaaactttaatgcaacgttcaatttct

SEQ ID NO: 57726 - DNA, 76 bp, Homo sapiens
tcaaagatccttcttctccattctcatgaaggaaaactttaatgcaacgttcaatttctttcaactgatcttcaca

SEQ ID NO: 57727 - DNA, 76 bp, Homo sapiens
ttcttctccattctcatgaaggaaaactttaatgcaacgttcaatttctttcaactgatcttcacaaactggcaca

SEQ ID NO: 57728 - DNA, 76 bp, Homo sapiens
attctcatgaaggaaaactttaatgcaacgttcaatttctttcaactgatcttcacaaactggcacagtgacagct

SEQ ID NO: 57729 - DNA, 75 bp, Homo sapiens
gaaaactttaatgcaacgttcaatttctttcaactgatcttcacaaactggcacagtgacagcttcctgtttcaa

SEQ ID NO: 57730 - DNA, 77 bp, Homo sapiens
tttaatgcaacgttcaatttctttcaactgatcttcacaaactggcacagtgacagcttcctgtttcaagcgttcca

SEQ ID NO: 57731 - DNA, 76 bp, Homo sapiens
caatttctttcaactgatcttcacaaactggcacagtgacagcttcctgtttcaagcgttccacttgtctaataag

SEQ ID NO: 57732 - DNA, 80 bp, Homo sapiens
tttcaactgatcttcacaaactggcacagtgacagcttcctgtttcaagcgttccacttgtctaataagtctgctgttga

SEQ ID NO: 57733 - DNA, 83 bp, Homo sapiens
ttcacaaactggcacagtgacagcttcctgtttcaagcgttccacttgtctaataagtctgctgttgatgtctgctgcgtatc

SEQ ID NO: 57734 - DNA, 85 bp, Homo sapiens
gcacagtgacagcttcctgtttcaagcgttccacttgtctaataagtctgctgttgatgtctgctgcgtatcgctgcagggtcat

SEQ ID NO: 57735 - DNA, 82 bp, Homo sapiens
agcttcctgtttcaagcgttccacttgtctaataagtctgctgttgatgtctgctgcgtatcgctgcagggtcatttcagtg

SEQ ID NO: 57736 - DNA, 86 bp, Homo sapiens
tgtttcaagcgttccacttgtctaataagtctgctgttgatgtctgctgcgtatcgctgcagggtcatttcagtggcagtgatgaa

SEQ ID NO: 57737 - DNA, 87 bp, Homo sapiens
ttccacttgtctaataagtctgctgttgatgtctgctgcgtatcgctgcagggtcatttcagtggcagtgatgaactgacacactgt

SEQ ID NO: 57738 - DNA, 86 bp, Homo sapiens
tgtctaataagtctgctgttgatgtctgctgcgtatcgctgcagggtcatttcagtggcagtgatgaactgacacactgttggggg

SEQ ID NO: 57739 - DNA, 86 bp, Homo sapiens
ctgttgatgtctgctgcgtatcgctgcagggtcatttcagtggcagtgatgaactgacacactgttgggggtggctggggagcata

SEQ ID NO: 57740 - DNA, 87 bp, Homo sapiens
tctgctgcgtatcgctgcagggtcatttcagtggcagtgatgaactgacacactgttgggggtggctggggagcatattgcatttca

SEQ ID NO: 57741 - DNA, 86 bp, Homo sapiens
tatcgctgcagggtcatttcagtggcagtgatgaactgacacactgttgggggtggctggggagcatattgcatttcatatctata

SEQ ID NO: 57742 - DNA, 81 bp, Homo sapiens
gtcatttcagtggcagtgatgaactgacacactgttgggggtggctggggagcatattgcatttcatatctataaaaataa

SEQ ID NO: 57743 - DNA, 80 bp, Homo sapiens
ttcagtggcagtgatgaactgacacactgttgggggtggctggggagcatattgcatttcatatctataaaaataaggaa

SEQ ID NO: 57744 - DNA, 77 bp, Homo sapiens
tgaactgacacactgttgggggtggctggggagcatattgcatttcatatctataaaaataaggaagaggtgcttgt

SEQ ID NO: 57745 - DNA, 74 bp, Homo sapiens
acactgttgggggtggctggggagcatattgcatttcatatctataaaaataaggaagaggtgcttgtttataa

SEQ ID NO: 57746 - DNA, 73 bp, Homo sapiens
tcaaaaataaaagaaaattaagcactatcaacttacttcctatagagctcttgacaacgctctactgtggtgt

SEQ ID NO: 57747 - DNA, 77 bp, Homo sapiens
aagaaaattaagcactatcaacttacttcctatagagctcttgacaacgctctactgtggtgttacagatgagctct

SEQ ID NO: 57748 - DNA, 80 bp, Homo sapiens
aattaagcactatcaacttacttcctatagagctcttgacaacgctctactgtggtgttacagatgagctcttccatcca

SEQ ID NO: 57749 - DNA, 80 bp, Homo sapiens
tatcaacttacttcctatagagctcttgacaacgctctactgtggtgttacagatgagctcttccatccaggtcttccac

SEQ ID NO: 57750 - DNA, 81 bp, Homo sapiens
tatagagctcttgacaacgctctactgtggtgttacagatgagctcttccatccaggtcttccactgttcaattcgatgtt

SEQ ID NO: 57751 - DNA, 80 bp, Homo sapiens
ttgacaacgctctactgtggtgttacagatgagctcttccatccaggtcttccactgttcaattcgatgtttctgaaata

SEQ ID NO: 57752 - DNA, 79 bp, Homo sapiens
aacgctctactgtggtgttacagatgagctcttccatccaggtcttccactgttcaattcgatgtttctgaaatatggc

SEQ ID NO: 57753 - DNA, 79 bp, Homo sapiens
tgtggtgttacagatgagctcttccatccaggtcttccactgttcaattcgatgtttctgaaatatggccttcggatac

SEQ ID NO: 57754 - DNA, 79 bp, Homo sapiens
agatgagctcttccatccaggtcttccactgttcaattcgatgtttctgaaatatggccttcggatactgcagggccac

SEQ ID NO: 57755 - DNA, 78 bp, Homo sapiens
atccaggtcttccactgttcaattcgatgtttctgaaatatggccttcggatactgcagggccacggttgcatagtga

SEQ ID NO: 57756 - DNA, 82 bp, Homo sapiens
ttccactgttcaattcgatgtttctgaaatatggccttcggatactgcagggccacggttgcatagtgatgcagttgctcca

SEQ ID NO: 57757 - DNA, 84 bp, Homo sapiens
tgttcaattcgatgtttctgaaatatggccttcggatactgcagggccacggttgcatagtgatgcagttgctccagacagcca

SEQ ID NO: 57758 - DNA, 82 bp, Homo sapiens
atgtttctgaaatatggccttcggatactgcagggccacggttgcatagtgatgcagttgctccagacagccacggagcacg

SEQ ID NO: 57759 - DNA, 82 bp, Homo sapiens
aaatatggccttcggatactgcagggccacggttgcatagtgatgcagttgctccagacagccacggagcacggagcgcctc

SEQ ID NO: 57760 - DNA, 88 bp, Homo sapiens
ttcggatactgcagggccacggttgcatagtgatgcagttgctccagacagccacggagcacggagcgcctctgctgcaggagagcac

SEQ ID NO: 57761 - DNA, 84 bp, Homo sapiens
agggccacggttgcatagtgatgcagttgctccagacagccacggagcacggagcgcctctgctgcaggagagcaccaacctcc

SEQ ID NO: 57762 - DNA, 85 bp, Homo sapiens
ggttgcatagtgatgcagttgctccagacagccacggagcacggagcgcctctgctgcaggagagcaccaacctccccctccagc

SEQ ID NO: 57763 - DNA, 87 bp, Homo sapiens
tgcagttgctccagacagccacggagcacggagcgcctctgctgcaggagagcaccaacctccccctccagctgctcgcactggcta

SEQ ID NO: 57764 - DNA, 83 bp, Homo sapiens
agacagccacggagcacggagcgcctctgctgcaggagagcaccaacctccccctccagctgctcgcactggctaatcaagtg

SEQ ID NO: 57765 - DNA, 82 bp, Homo sapiens
acggagcacggagcgcctctgctgcaggagagcaccaacctccccctccagctgctcgcactggctaatcaagtgggcctga

SEQ ID NO: 57766 - DNA, 86 bp, Homo sapiens
agcgcctctgctgcaggagagcaccaacctccccctccagctgctcgcactggctaatcaagtgggcctgaccagcattctgcaga

SEQ ID NO: 57767 - DNA, 83 bp, Homo sapiens
tgcaggagagcaccaacctccccctccagctgctcgcactggctaatcaagtgggcctgaccagcattctgcagaaaggctgt

SEQ ID NO: 57768 - DNA, 82 bp, Homo sapiens
agagcaccaacctccccctccagctgctcgcactggctaatcaagtgggcctgaccagcattctgcagaaaggctgttgctg

SEQ ID NO: 57769 - DNA, 82 bp, Homo sapiens
cccctccagctgctcgcactggctaatcaagtgggcctgaccagcattctgcagaaaggctgttgctggcacgtaacttgga

SEQ ID NO: 57770 - DNA, 80 bp, Homo sapiens
tgctcgcactggctaatcaagtgggcctgaccagcattctgcagaaaggctgttgctggcacgtaacttggaggaccttt

SEQ ID NO: 57771 - DNA, 77 bp, Homo sapiens
tggctaatcaagtgggcctgaccagcattctgcagaaaggctgttgctggcacgtaacttggaggaccttttggtaa

SEQ ID NO: 57772 - DNA, 75 bp, Homo sapiens
atcaagtgggcctgaccagcattctgcagaaaggctgttgctggcacgtaacttggaggaccttttggtaaaaga

SEQ ID NO: 57773 - DNA, 71 bp, Homo sapiens
tgcagaaaggctgttgctggcacgtaacttggaggaccttttggtaaaagacattattaaacacagtaaaa

SEQ ID NO: 57774 - DNA, 76 bp, Homo sapiens
taaaactcatagtttcacatgtgaatctaaaataagtcaacccataccaaggtccatttgtgtgcttatctcttga

SEQ ID NO: 57775 - DNA, 76 bp, Homo sapiens
atagtttcacatgtgaatctaaaataagtcaacccataccaaggtccatttgtgtgcttatctcttgaagcaagct

SEQ ID NO: 57776 - DNA, 79 bp, Homo sapiens
tgaatctaaaataagtcaacccataccaaggtccatttgtgtgcttatctcttgaagcaagcttgcaagctgtgttgct

SEQ ID NO: 57777 - DNA, 78 bp, Homo sapiens
ataagtcaacccataccaaggtccatttgtgtgcttatctcttgaagcaagcttgcaagctgtgttgcttctaaatta

SEQ ID NO: 57778 - DNA, 80 bp, Homo sapiens
aacccataccaaggtccatttgtgtgcttatctcttgaagcaagcttgcaagctgtgttgcttctaaattattgaatgca

SEQ ID NO: 57779 - DNA, 85 bp, Homo sapiens
gtccatttgtgtgcttatctcttgaagcaagcttgcaagctgtgttgcttctaaattattgaatgcagcctgataatgtgttatc

SEQ ID NO: 57780 - DNA, 86 bp, Homo sapiens
tgtgcttatctcttgaagcaagcttgcaagctgtgttgcttctaaattattgaatgcagcctgataatgtgttatccattgttcaa

SEQ ID NO: 57781 - DNA, 85 bp, Homo sapiens
tatctcttgaagcaagcttgcaagctgtgttgcttctaaattattgaatgcagcctgataatgtgttatccattgttcaaattca

SEQ ID NO: 57782 - DNA, 83 bp, Homo sapiens
aagcttgcaagctgtgttgcttctaaattattgaatgcagcctgataatgtgttatccattgttcaaattcattcagcttcac

SEQ ID NO: 57783 - DNA, 81 bp, Homo sapiens
aagctgtgttgcttctaaattattgaatgcagcctgataatgtgttatccattgttcaaattcattcagcttcacctggat

SEQ ID NO: 57784 - DNA, 82 bp, Homo sapiens
ttctaaattattgaatgcagcctgataatgtgttatccattgttcaaattcattcagcttcacctggattgcttcctgaaca

SEQ ID NO: 57785 - DNA, 84 bp, Homo sapiens
ttattgaatgcagcctgataatgtgttatccattgttcaaattcattcagcttcacctggattgcttcctgaacagctctttgc

SEQ ID NO: 57786 - DNA, 83 bp, Homo sapiens
tgataatgtgttatccattgttcaaattcattcagcttcacctggattgcttcctgaacagctctttgctgagtctgtagttg

SEQ ID NO: 57787 - DNA, 80 bp, Homo sapiens
atgtgttatccattgttcaaattcattcagcttcacctggattgcttcctgaacagctctttgctgagtctgtagttggg

SEQ ID NO: 57788 - DNA, 82 bp, Homo sapiens
attgttcaaattcattcagcttcacctggattgcttcctgaacagctctttgctgagtctgtagttgggtgtgctcagaata

SEQ ID NO: 57789 - DNA, 82 bp, Homo sapiens
attcattcagcttcacctggattgcttcctgaacagctctttgctgagtctgtagttgggtgtgctcagaatacctaatcag

SEQ ID NO: 57790 - DNA, 78 bp, Homo sapiens
acctggattgcttcctgaacagctctttgctgagtctgtagttgggtgtgctcagaatacctaatcagggggacacaa

SEQ ID NO: 57791 - DNA, 77 bp, Homo sapiens
ttcctgaacagctctttgctgagtctgtagttgggtgtgctcagaatacctaatcagggggacacaaacaaaatcaa

SEQ ID NO: 57792 - DNA, 75 bp, Homo sapiens
gctctttgctgagtctgtagttgggtgtgctcagaatacctaatcagggggacacaaacaaaatcaaaagattta

SEQ ID NO: 57793 - DNA, 78 bp, Homo sapiens
ttctaattaatggcacatatttagaagaattcaacactgttttaaacctgtgttgcagagtatgagaaggatgatcca

SEQ ID NO: 57794 - DNA, 76 bp, Homo sapiens
taatggcacatatttagaagaattcaacactgttttaaacctgtgttgcagagtatgagaaggatgatccacccct

SEQ ID NO: 57795 - DNA, 75 bp, Homo sapiens
tatttagaagaattcaacactgttttaaacctgtgttgcagagtatgagaaggatgatccaccccttcagctcct

SEQ ID NO: 57796 - DNA, 76 bp, Homo sapiens
tcaacactgttttaaacctgtgttgcagagtatgagaaggatgatccaccccttcagctccttctagaaactctat

SEQ ID NO: 57797 - DNA, 74 bp, Homo sapiens
ctgttttaaacctgtgttgcagagtatgagaaggatgatccaccccttcagctccttctagaaactctatttcc

SEQ ID NO: 57798 - DNA, 77 bp, Homo sapiens
tgtgttgcagagtatgagaaggatgatccaccccttcagctccttctagaaactctatttcctccagtagtttgccc

SEQ ID NO: 57799 - DNA, 74 bp, Homo sapiens
tatgagaaggatgatccaccccttcagctccttctagaaactctatttcctccagtagtttgccctgcagtttt

SEQ ID NO: 57800 - DNA, 72 bp, Homo sapiens
aaggatgatccaccccttcagctccttctagaaactctatttcctccagtagtttgccctgcagtttttcca

SEQ ID NO: 57801 - DNA, 78 bp, Homo sapiens
cttcagctccttctagaaactctatttcctccagtagtttgccctgcagtttttccacatctgtcagttgctcttgca

SEQ ID NO: 57802 - DNA, 77 bp, Homo sapiens
tccttctagaaactctatttcctccagtagtttgccctgcagtttttccacatctgtcagttgctcttgcaagctta

SEQ ID NO: 57803 - DNA, 76 bp, Homo sapiens
aaactctatttcctccagtagtttgccctgcagtttttccacatctgtcagttgctcttgcaagcttaggtattca

SEQ ID NO: 57804 - DNA, 78 bp, Homo sapiens
ttcctccagtagtttgccctgcagtttttccacatctgtcagttgctcttgcaagcttaggtattcatctaagctacc

SEQ ID NO: 57805 - DNA, 76 bp, Homo sapiens
agtttgccctgcagtttttccacatctgtcagttgctcttgcaagcttaggtattcatctaagctaccgtccaact

SEQ ID NO: 57806 - DNA, 76 bp, Homo sapiens
agtttttccacatctgtcagttgctcttgcaagcttaggtattcatctaagctaccgtccaacttgggaagcacaa

SEQ ID NO: 57807 - DNA, 82 bp, Homo sapiens
atctgtcagttgctcttgcaagcttaggtattcatctaagctaccgtccaacttgggaagcacaaccagcatctcatctcta

SEQ ID NO: 57808 - DNA, 78 bp, Homo sapiens
ctcttgcaagcttaggtattcatctaagctaccgtccaacttgggaagcacaaccagcatctcatctctattcttaaa

SEQ ID NO: 57809 - DNA, 76 bp, Homo sapiens
cttaggtattcatctaagctaccgtccaacttgggaagcacaaccagcatctcatctctattcttaaaccagttca

SEQ ID NO: 57810 - DNA, 77 bp, Homo sapiens
tattcatctaagctaccgtccaacttgggaagcacaaccagcatctcatctctattcttaaaccagttcacctgtaa

SEQ ID NO: 57811 - DNA, 74 bp, Homo sapiens
taccgtccaacttgggaagcacaaccagcatctcatctctattcttaaaccagttcacctgtaaaaagatatta

SEQ ID NO: 57812 - DNA, 75 bp, Homo sapiens
ttgggaagcacaaccagcatctcatctctattcttaaaccagttcacctgtaaaaagatattacgattaagaaga

SEQ ID NO: 57813 - DNA, 75 bp, Homo sapiens
agcacaaccagcatctcatctctattcttaaaccagttcacctgtaaaaagatattacgattaagaagactctta

SEQ ID NO: 57814 - DNA, 87 bp, Homo sapiens
atctcagctactctagaagaaaacaggctgcgggtgatctctcgctccatctctctcttgctctgcttgctctcggcctgctggcca

SEQ ID NO: 57815 - DNA, 84 bp, Homo sapiens
ctctagaagaaaacaggctgcgggtgatctctcgctccatctctctcttgctctgcttgctctcggcctgctggccacctccac

SEQ ID NO: 57816 - DNA, 84 bp, Homo sapiens
aagaaaacaggctgcgggtgatctctcgctccatctctctcttgctctgcttgctctcggcctgctggccacctccaccataga

SEQ ID NO: 57817 - DNA, 87 bp, Homo sapiens
ctgcgggtgatctctcgctccatctctctcttgctctgcttgctctcggcctgctggccacctccaccatagacagcaccagcaaac

SEQ ID NO: 57818 - DNA, 86 bp, Homo sapiens
atctctcgctccatctctctcttgctctgcttgctctcggcctgctggccacctccaccatagacagcaccagcaaacccagcctc

SEQ ID NO: 57819 - DNA, 85 bp, Homo sapiens
ctctctcttgctctgcttgctctcggcctgctggccacctccaccatagacagcaccagcaaacccagcctcgcctcctgctgtc

SEQ ID NO: 57820 - DNA, 85 bp, Homo sapiens
ttgctctgcttgctctcggcctgctggccacctccaccatagacagcaccagcaaacccagcctcgcctcctgctgtccagtcca

SEQ ID NO: 57821 - DNA, 82 bp, Homo sapiens
cttgctctcggcctgctggccacctccaccatagacagcaccagcaaacccagcctcgcctcctgctgtccagtccaccaga

SEQ ID NO: 57822 - DNA, 79 bp, Homo sapiens
ctggccacctccaccatagacagcaccagcaaacccagcctcgcctcctgctgtccagtccaccagagggtcgtacaca

SEQ ID NO: 57823 - DNA, 76 bp, Homo sapiens
acctccaccatagacagcaccagcaaacccagcctcgcctcctgctgtccagtccaccagagggtcgtacacaaag

SEQ ID NO: 57824 - DNA, 79 bp, Homo sapiens
atagacagcaccagcaaacccagcctcgcctcctgctgtccagtccaccagagggtcgtacacaaaggcctccagcagc

SEQ ID NO: 57825 - DNA, 76 bp, Homo sapiens
aaacccagcctcgcctcctgctgtccagtccaccagagggtcgtacacaaaggcctccagcagcgtcagcagggtc

SEQ ID NO: 57826 - DNA, 80 bp, Homo sapiens
agcctcgcctcctgctgtccagtccaccagagggtcgtacacaaaggcctccagcagcgtcagcagggtctctctgccac

SEQ ID NO: 57827 - DNA, 81 bp, Homo sapiens
ctgtccagtccaccagagggtcgtacacaaaggcctccagcagcgtcagcagggtctctctgccacgccgcataatgtgta

SEQ ID NO: 57828 - DNA, 78 bp, Homo sapiens
agtccaccagagggtcgtacacaaaggcctccagcagcgtcagcagggtctctctgccacgccgcataatgtgtaaaa

SEQ ID NO: 57829 - DNA, 75 bp, Homo sapiens
agggtcgtacacaaaggcctccagcagcgtcagcagggtctctctgccacgccgcataatgtgtaaaacctgttt

SEQ ID NO: 57830 - DNA, 75 bp, Homo sapiens
aaaggcctccagcagcgtcagcagggtctctctgccacgccgcataatgtgtaaaacctgttttcaggagagttt

SEQ ID NO: 57831 - DNA, 74 bp, Homo sapiens
agcagcgtcagcagggtctctctgccacgccgcataatgtgtaaaacctgttttcaggagagtttttaaaataa

SEQ ID NO: 57832 - DNA, 75 bp, Homo sapiens
ttttgctcatttaacaaatacactaaaagggagaagagaaaacagcatacctgctcacatgaaagcctaaataca

SEQ ID NO: 57833 - DNA, 73 bp, Homo sapiens
tttaacaaatacactaaaagggagaagagaaaacagcatacctgctcacatgaaagcctaaatacaccttcta

SEQ ID NO: 57834 - DNA, 74 bp, Homo sapiens
acactaaaagggagaagagaaaacagcatacctgctcacatgaaagcctaaatacaccttctactccagttaca

SEQ ID NO: 57835 - DNA, 76 bp, Homo sapiens
aagagaaaacagcatacctgctcacatgaaagcctaaatacaccttctactccagttacacccagtgctgtttcaa

SEQ ID NO: 57836 - DNA, 75 bp, Homo sapiens
aaacagcatacctgctcacatgaaagcctaaatacaccttctactccagttacacccagtgctgtttcaatgttt

SEQ ID NO: 57837 - DNA, 75 bp, Homo sapiens
tcacatgaaagcctaaatacaccttctactccagttacacccagtgctgtttcaatgttttgtgtcattcgaaaa

SEQ ID NO: 57838 - DNA, 71 bp, Homo sapiens
aagcctaaatacaccttctactccagttacacccagtgctgtttcaatgttttgtgtcattcgaaaaggta

SEQ ID NO: 57839 - DNA, 72 bp, Homo sapiens
ctactccagttacacccagtgctgtttcaatgttttgtgtcattcgaaaaggtactttctcaggaactctaa

SEQ ID NO: 57840 - DNA, 71 bp, Homo sapiens
ccagtgctgtttcaatgttttgtgtcattcgaaaaggtactttctcaggaactctaaggcttttaccttga

SEQ ID NO: 57841 - DNA, 69 bp, Homo sapiens
gctgtttcaatgttttgtgtcattcgaaaaggtactttctcaggaactctaaggcttttaccttgaaaa

SEQ ID NO: 57842 - DNA, 69 bp, Homo sapiens
tgttttgtgtcattcgaaaaggtactttctcaggaactctaaggcttttaccttgaaaagacaaatcat

SEQ ID NO: 57843 - DNA, 67 bp, Homo sapiens
cgaaaaggtactttctcaggaactctaaggcttttaccttgaaaagacaaatcattatatttttgcc

SEQ ID NO: 57844 - DNA, 68 bp, Homo sapiens
ggtactttctcaggaactctaaggcttttaccttgaaaagacaaatcattatatttttgccctttcac

SEQ ID NO: 57845 - DNA, 67 bp, Homo sapiens
caggaactctaaggcttttaccttgaaaagacaaatcattatatttttgccctttcaccaaaaaaca

SEQ ID NO: 57846 - DNA, 67 bp, Homo sapiens
aggcttttaccttgaaaagacaaatcattatatttttgccctttcaccaaaaaacatttggccctca

SEQ ID NO: 57847 - DNA, 69 bp, Homo sapiens
gaaaagacaaatcattatatttttgccctttcaccaaaaaacatttggccctcataaatgtaaagtcta

SEQ ID NO: 57848 - DNA, 67 bp, Homo sapiens
acaaatcattatatttttgccctttcaccaaaaaacatttggccctcataaatgtaaagtctacttt

SEQ ID NO: 57849 - DNA, 65 bp, Homo sapiens
atttttgccctttcaccaaaaaacatttggccctcataaatgtaaagtctacttttatattacct

SEQ ID NO: 57850 - DNA, 67 bp, Homo sapiens
ctttcaccaaaaaacatttggccctcataaatgtaaagtctacttttatattacctttttcaaagca

SEQ ID NO: 57851 - DNA, 72 bp, Homo sapiens
catttggccctcataaatgtaaagtctacttttatattacctttttcaaagcaaacattgtaatctatgtga

SEQ ID NO: 57852 - DNA, 71 bp, Homo sapiens
gccctcataaatgtaaagtctacttttatattacctttttcaaagcaaacattgtaatctatgtgaacaac

SEQ ID NO: 57853 - DNA, 71 bp, Homo sapiens
aaagtctacttttatattacctttttcaaagcaaacattgtaatctatgtgaacaacttctccagtcgtca

SEQ ID NO: 57854 - DNA, 75 bp, Homo sapiens
tttatattacctttttcaaagcaaacattgtaatctatgtgaacaacttctccagtcgtcatatctataagaaca

SEQ ID NO: 57855 - DNA, 78 bp, Homo sapiens
ctttttcaaagcaaacattgtaatctatgtgaacaacttctccagtcgtcatatctataagaacattatccagatgtc

SEQ ID NO: 57856 - DNA, 80 bp, Homo sapiens
aaagcaaacattgtaatctatgtgaacaacttctccagtcgtcatatctataagaacattatccagatgtctgtctccaa

SEQ ID NO: 57857 - DNA, 80 bp, Homo sapiens
attgtaatctatgtgaacaacttctccagtcgtcatatctataagaacattatccagatgtctgtctccaaggccaatta

SEQ ID NO: 57858 - DNA, 81 bp, Homo sapiens
tgaacaacttctccagtcgtcatatctataagaacattatccagatgtctgtctccaaggccaattatgtatccaaccata

SEQ ID NO: 57859 - DNA, 82 bp, Homo sapiens
acttctccagtcgtcatatctataagaacattatccagatgtctgtctccaaggccaattatgtatccaaccatagacatga

SEQ ID NO: 57860 - DNA, 86 bp, Homo sapiens
atatctataagaacattatccagatgtctgtctccaaggccaattatgtatccaaccatagacatgactgcagtagatcttgcata

SEQ ID NO: 57861 - DNA, 85 bp, Homo sapiens
taagaacattatccagatgtctgtctccaaggccaattatgtatccaaccatagacatgactgcagtagatcttgcataagacta

SEQ ID NO: 57862 - DNA, 83 bp, Homo sapiens
ttatccagatgtctgtctccaaggccaattatgtatccaaccatagacatgactgcagtagatcttgcataagactaaaggaa

SEQ ID NO: 57863 - DNA, 79 bp, Homo sapiens
gtctgtctccaaggccaattatgtatccaaccatagacatgactgcagtagatcttgcataagactaaaggaaaggaaa

SEQ ID NO: 57864 - DNA, 79 bp, Homo sapiens
atgtatccaaccatagacatgactgcagtagatcttgcataagactaaaggaaaggaaatgggggcagcaagtgaaaca

SEQ ID NO: 57865 - DNA, 75 bp, Homo sapiens
caaaagaaatactactactgagtatagtctaaaacaaagcacatacctgcgtaactctccaccattcatcaggtg

SEQ ID NO: 57866 - DNA, 77 bp, Homo sapiens
aaatactactactgagtatagtctaaaacaaagcacatacctgcgtaactctccaccattcatcaggtgttgtgcaa

SEQ ID NO: 57867 - DNA, 79 bp, Homo sapiens
agtatagtctaaaacaaagcacatacctgcgtaactctccaccattcatcaggtgttgtgcaagatgaccagagctctt

SEQ ID NO: 57868 - DNA, 80 bp, Homo sapiens
agtctaaaacaaagcacatacctgcgtaactctccaccattcatcaggtgttgtgcaagatgaccagagctctttggcaa

SEQ ID NO: 57869 - DNA, 80 bp, Homo sapiens
aaagcacatacctgcgtaactctccaccattcatcaggtgttgtgcaagatgaccagagctctttggcaaggagattcgg

SEQ ID NO: 57870 - DNA, 79 bp, Homo sapiens
gtaactctccaccattcatcaggtgttgtgcaagatgaccagagctctttggcaaggagattcgggggtgtggcctcca

SEQ ID NO: 57871 - DNA, 77 bp, Homo sapiens
accattcatcaggtgttgtgcaagatgaccagagctctttggcaaggagattcgggggtgtggcctccattaactct

SEQ ID NO: 57872 - DNA, 77 bp, Homo sapiens
atcaggtgttgtgcaagatgaccagagctctttggcaaggagattcgggggtgtggcctccattaactcttccaata

SEQ ID NO: 57873 - DNA, 76 bp, Homo sapiens
caagatgaccagagctctttggcaaggagattcgggggtgtggcctccattaactcttccaatactgccttcatta

SEQ ID NO: 57874 - DNA, 75 bp, Homo sapiens
accagagctctttggcaaggagattcgggggtgtggcctccattaactcttccaatactgccttcattacatgaa

SEQ ID NO: 57875 - DNA, 75 bp, Homo sapiens
tttggcaaggagattcgggggtgtggcctccattaactcttccaatactgccttcattacatgaagaggccaatc

SEQ ID NO: 57876 - DNA, 72 bp, Homo sapiens
attcgggggtgtggcctccattaactcttccaatactgccttcattacatgaagaggccaatcccgacggga

SEQ ID NO: 57877 - DNA, 77 bp, Homo sapiens
tgtggcctccattaactcttccaatactgccttcattacatgaagaggccaatcccgacgggacacatccaggctaa

SEQ ID NO: 57878 - DNA, 75 bp, Homo sapiens
taactcttccaatactgccttcattacatgaagaggccaatcccgacgggacacatccaggctaagcccaactgt

SEQ ID NO: 57879 - DNA, 75 bp, Homo sapiens
ttccaatactgccttcattacatgaagaggccaatcccgacgggacacatccaggctaagcccaactgttttcaa

SEQ ID NO: 57880 - DNA, 74 bp, Homo sapiens
tcattacatgaagaggccaatcccgacgggacacatccaggctaagcccaactgttttcaaagcagggccaatt

SEQ ID NO: 57881 - DNA, 72 bp, Homo sapiens
acatgaagaggccaatcccgacgggacacatccaggctaagcccaactgttttcaaagcagggccaatttta

SEQ ID NO: 57882 - DNA, 69 bp, Homo sapiens
aatcccgacgggacacatccaggctaagcccaactgttttcaaagcagggccaattttactgtaataaa

SEQ ID NO: 57883 - DNA, 70 bp, Homo sapiens
acacatccaggctaagcccaactgttttcaaagcagggccaattttactgtaataaagttcactaggacg

SEQ ID NO: 57884 - DNA, 68 bp, Homo sapiens
gctaagcccaactgttttcaaagcagggccaattttactgtaataaagttcactaggacggggtacaa

SEQ ID NO: 57885 - DNA, 67 bp, Homo sapiens
actgttttcaaagcagggccaattttactgtaataaagttcactaggacggggtacaattccaggat

SEQ ID NO: 57886 - DNA, 70 bp, Homo sapiens
tttcaaagcagggccaattttactgtaataaagttcactaggacggggtacaattccaggattctgagga

SEQ ID NO: 57887 - DNA, 67 bp, Homo sapiens
aattttactgtaataaagttcactaggacggggtacaattccaggattctgaggagtttggtaggaa

SEQ ID NO: 57888 - DNA, 69 bp, Homo sapiens
taataaagttcactaggacggggtacaattccaggattctgaggagtttggtaggaatcttgggcctta

SEQ ID NO: 57889 - DNA, 68 bp, Homo sapiens
ttcactaggacggggtacaattccaggattctgaggagtttggtaggaatcttgggccttaagaaaaa

SEQ ID NO: 57890 - DNA, 65 bp, Homo sapiens
gggtacaattccaggattctgaggagtttggtaggaatcttgggccttaagaaaaaacaattttt

SEQ ID NO: 57891 - DNA, 65 bp, Homo sapiens
caattccaggattctgaggagtttggtaggaatcttgggccttaagaaaaaacaatttttttaaa

SEQ ID NO: 57892 - DNA, 75 bp, Homo sapiens
taataacagagaatagactaatacactgtgtagatgatttaatcaaccttttgtgcttgtaaggcagcttcccgt

SEQ ID NO: 57893 - DNA, 75 bp, Homo sapiens
aatagactaatacactgtgtagatgatttaatcaaccttttgtgcttgtaaggcagcttcccgttgttgccatcg

SEQ ID NO: 57894 - DNA, 75 bp, Homo sapiens
taatacactgtgtagatgatttaatcaaccttttgtgcttgtaaggcagcttcccgttgttgccatcgtttgtaa

SEQ ID NO: 57895 - DNA, 73 bp, Homo sapiens
tagatgatttaatcaaccttttgtgcttgtaaggcagcttcccgttgttgccatcgtttgtaaagaccaaata

SEQ ID NO: 57896 - DNA, 69 bp, Homo sapiens
atttaatcaaccttttgtgcttgtaaggcagcttcccgttgttgccatcgtttgtaaagaccaaataag

SEQ ID NO: 57897 - DNA, 73 bp, Homo sapiens
ttttgtgcttgtaaggcagcttcccgttgttgccatcgtttgtaaagaccaaataagggtgtggctccatcta

SEQ ID NO: 57898 - DNA, 72 bp, Homo sapiens
taaggcagcttcccgttgttgccatcgtttgtaaagaccaaataagggtgtggctccatctacccactggat

SEQ ID NO: 57899 - DNA, 72 bp, Homo sapiens
ttcccgttgttgccatcgtttgtaaagaccaaataagggtgtggctccatctacccactggattagtcctga

SEQ ID NO: 57900 - DNA, 74 bp, Homo sapiens
ttgccatcgtttgtaaagaccaaataagggtgtggctccatctacccactggattagtcctgatcttgttccta

SEQ ID NO: 57901 - DNA, 73 bp, Homo sapiens
aaagaccaaataagggtgtggctccatctacccactggattagtcctgatcttgttcctagtggtgttacaga

SEQ ID NO: 57902 - DNA, 74 bp, Homo sapiens
aaataagggtgtggctccatctacccactggattagtcctgatcttgttcctagtggtgttacagaatagtgtc

SEQ ID NO: 57903 - DNA, 78 bp, Homo sapiens
tgtggctccatctacccactggattagtcctgatcttgttcctagtggtgttacagaatagtgtcgagcatggaaccg

SEQ ID NO: 57904 - DNA, 73 bp, Homo sapiens
tacccactggattagtcctgatcttgttcctagtggtgttacagaatagtgtcgagcatggaaccggggtgtt

SEQ ID NO: 57905 - DNA, 74 bp, Homo sapiens
ttagtcctgatcttgttcctagtggtgttacagaatagtgtcgagcatggaaccggggtgtttcttggcgatta

SEQ ID NO: 57906 - DNA, 74 bp, Homo sapiens
tcttgttcctagtggtgttacagaatagtgtcgagcatggaaccggggtgtttcttggcgattaattgtagcaa

SEQ ID NO: 57907 - DNA, 74 bp, Homo sapiens
tagtggtgttacagaatagtgtcgagcatggaaccggggtgtttcttggcgattaattgtagcaaacatggtat

SEQ ID NO: 57908 - DNA, 75 bp, Homo sapiens
gttacagaatagtgtcgagcatggaaccggggtgtttcttggcgattaattgtagcaaacatggtattcacaata

SEQ ID NO: 57909 - DNA, 74 bp, Homo sapiens
agtgtcgagcatggaaccggggtgtttcttggcgattaattgtagcaaacatggtattcacaatagataggaac

SEQ ID NO: 57910 - DNA, 74 bp, Homo sapiens
atggaaccggggtgtttcttggcgattaattgtagcaaacatggtattcacaatagataggaactgcattattc

SEQ ID NO: 57911 - DNA, 80 bp, Homo sapiens
gtgtttcttggcgattaattgtagcaaacatggtattcacaatagataggaactgcattattctctcatccagatgtaaa

SEQ ID NO: 57912 - DNA, 80 bp, Homo sapiens
attaattgtagcaaacatggtattcacaatagataggaactgcattattctctcatccagatgtaaatcctccagtccta

SEQ ID NO: 57913 - DNA, 79 bp, Homo sapiens
caaacatggtattcacaatagataggaactgcattattctctcatccagatgtaaatcctccagtcctatgaaaacaaa

SEQ ID NO: 57914 - DNA, 78 bp, Homo sapiens
atggtattcacaatagataggaactgcattattctctcatccagatgtaaatcctccagtcctatgaaaacaaaatta

SEQ ID NO: 57915 - DNA, 76 bp, Homo sapiens
agataggaactgcattattctctcatccagatgtaaatcctccagtcctatgaaaacaaaattaaaatagctagga

SEQ ID NO: 57916 - DNA, 76 bp, Homo sapiens
actgcattattctctcatccagatgtaaatcctccagtcctatgaaaacaaaattaaaatagctaggataggtgat

SEQ ID NO: 57917 - DNA, 70 bp, Homo sapiens
gtaagactaatactcttctgaaaaatggaggaagtcttaaatcctacctttgaaaagataaggatagctc

SEQ ID NO: 57918 - DNA, 70 bp, Homo sapiens
aatactcttctgaaaaatggaggaagtcttaaatcctacctttgaaaagataaggatagctcttcccatc

SEQ ID NO: 57919 - DNA, 70 bp, Homo sapiens
aaaaatggaggaagtcttaaatcctacctttgaaaagataaggatagctcttcccatctgatccaagaaa

SEQ ID NO: 57920 - DNA, 70 bp, Homo sapiens
aagtcttaaatcctacctttgaaaagataaggatagctcttcccatctgatccaagaaagagaagtttct

SEQ ID NO: 57921 - DNA, 71 bp, Homo sapiens
ttaaatcctacctttgaaaagataaggatagctcttcccatctgatccaagaaagagaagtttctttggct

SEQ ID NO: 57922 - DNA, 71 bp, Homo sapiens
tttgaaaagataaggatagctcttcccatctgatccaagaaagagaagtttctttggcttggttttagtcg

SEQ ID NO: 57923 - DNA, 71 bp, Homo sapiens
ataaggatagctcttcccatctgatccaagaaagagaagtttctttggcttggttttagtcggtaagattg

SEQ ID NO: 57924 - DNA, 71 bp, Homo sapiens
ctcttcccatctgatccaagaaagagaagtttctttggcttggttttagtcggtaagattgtgatggttcc

SEQ ID NO: 57925 - DNA, 70 bp, Homo sapiens
atccaagaaagagaagtttctttggcttggttttagtcggtaagattgtgatggttccgcccacactatg

SEQ ID NO: 57926 - DNA, 71 bp, Homo sapiens
aaagagaagtttctttggcttggttttagtcggtaagattgtgatggttccgcccacactatggattgtga

SEQ ID NO: 57927 - DNA, 75 bp, Homo sapiens
tttctttggcttggttttagtcggtaagattgtgatggttccgcccacactatggattgtgacagtgtctctggc

SEQ ID NO: 57928 - DNA, 76 bp, Homo sapiens
ttggttttagtcggtaagattgtgatggttccgcccacactatggattgtgacagtgtctctggctgagacttccc

SEQ ID NO: 57929 - DNA, 80 bp, Homo sapiens
gtaagattgtgatggttccgcccacactatggattgtgacagtgtctctggctgagacttccccaggaagagcaatttca

SEQ ID NO: 57930 - DNA, 79 bp, Homo sapiens
atggttccgcccacactatggattgtgacagtgtctctggctgagacttccccaggaagagcaatttcagtgttagtca

SEQ ID NO: 57931 - DNA, 83 bp, Homo sapiens
cacactatggattgtgacagtgtctctggctgagacttccccaggaagagcaatttcagtgttagtcatggcagccaaccatg

SEQ ID NO: 57932 - DNA, 81 bp, Homo sapiens
attgtgacagtgtctctggctgagacttccccaggaagagcaatttcagtgttagtcatggcagccaaccatggactgatt

SEQ ID NO: 57933 - DNA, 80 bp, Homo sapiens
agtgtctctggctgagacttccccaggaagagcaatttcagtgttagtcatggcagccaaccatggactgatttcttcaa

SEQ ID NO: 57934 - DNA, 81 bp, Homo sapiens
tgagacttccccaggaagagcaatttcagtgttagtcatggcagccaaccatggactgatttcttcaagacgcaagatgta

SEQ ID NO: 57935 - DNA, 80 bp, Homo sapiens
ccaggaagagcaatttcagtgttagtcatggcagccaaccatggactgatttcttcaagacgcaagatgtaacttgcacg

SEQ ID NO: 57936 - DNA, 81 bp, Homo sapiens
caatttcagtgttagtcatggcagccaaccatggactgatttcttcaagacgcaagatgtaacttgcacgtttctgtgctc

SEQ ID NO: 57937 - DNA, 82 bp, Homo sapiens
gcagccaaccatggactgatttcttcaagacgcaagatgtaacttgcacgtttctgtgctctctgttgcaaacttagcatta

SEQ ID NO: 57938 - DNA, 82 bp, Homo sapiens
atggactgatttcttcaagacgcaagatgtaacttgcacgtttctgtgctctctgttgcaaacttagcattatctatattca

SEQ ID NO: 57939 - DNA, 81 bp, Homo sapiens
atttcttcaagacgcaagatgtaacttgcacgtttctgtgctctctgttgcaaacttagcattatctatattcataagatg

SEQ ID NO: 57940 - DNA, 80 bp, Homo sapiens
aagacgcaagatgtaacttgcacgtttctgtgctctctgttgcaaacttagcattatctatattcataagatgggagaaa

SEQ ID NO: 57941 - DNA, 78 bp, Homo sapiens
atgtaacttgcacgtttctgtgctctctgttgcaaacttagcattatctatattcataagatgggagaaacaaattta

SEQ ID NO: 57942 - DNA, 80 bp, Homo sapiens
atgggaactgtgatgtgccatttcagtagcatgcttgggattattctgtacctctttaaatggaatccagctgctcccag

SEQ ID NO: 57943 - DNA, 79 bp, Homo sapiens
atgtgccatttcagtagcatgcttgggattattctgtacctctttaaatggaatccagctgctcccaggctttgcaggg

SEQ ID NO: 57944 - DNA, 78 bp, Homo sapiens
tttcagtagcatgcttgggattattctgtacctctttaaatggaatccagctgctcccaggctttgcagggttcaatg

SEQ ID NO: 57945 - DNA, 75 bp, Homo sapiens
tgggattattctgtacctctttaaatggaatccagctgctcccaggctttgcagggttcaatggagtcttcagtt

SEQ ID NO: 57946 - DNA, 74 bp, Homo sapiens
ttattctgtacctctttaaatggaatccagctgctcccaggctttgcagggttcaatggagtcttcagtttttc

SEQ ID NO: 57947 - DNA, 74 bp, Homo sapiens
tttaaatggaatccagctgctcccaggctttgcagggttcaatggagtcttcagtttttctagggcattttcaa

SEQ ID NO: 57948 - DNA, 78 bp, Homo sapiens
aatccagctgctcccaggctttgcagggttcaatggagtcttcagtttttctagggcattttcaatggcatcaccata

SEQ ID NO: 57949 - DNA, 77 bp, Homo sapiens
tcccaggctttgcagggttcaatggagtcttcagtttttctagggcattttcaatggcatcaccatagttatcctga

SEQ ID NO: 57950 - DNA, 75 bp, Homo sapiens
tttgcagggttcaatggagtcttcagtttttctagggcattttcaatggcatcaccatagttatcctgaaaccat

SEQ ID NO: 57951 - DNA, 76 bp, Homo sapiens
gttcaatggagtcttcagtttttctagggcattttcaatggcatcaccatagttatcctgaaaccatttttcatga

SEQ ID NO: 57952 - DNA, 76 bp, Homo sapiens
ttcagtttttctagggcattttcaatggcatcaccatagttatcctgaaaccatttttcatgaggtgtttctgcag

SEQ ID NO: 57953 - DNA, 81 bp, Homo sapiens
tctagggcattttcaatggcatcaccatagttatcctgaaaccatttttcatgaggtgtttctgcaggagccgctgtgata

SEQ ID NO: 57954 - DNA, 80 bp, Homo sapiens
attttcaatggcatcaccatagttatcctgaaaccatttttcatgaggtgtttctgcaggagccgctgtgatactcctca

SEQ ID NO: 57955 - DNA, 80 bp, Homo sapiens
accatagttatcctgaaaccatttttcatgaggtgtttctgcaggagccgctgtgatactcctcacatgctccaaagcaa

SEQ ID NO: 57956 - DNA, 79 bp, Homo sapiens
agttatcctgaaaccatttttcatgaggtgtttctgcaggagccgctgtgatactcctcacatgctccaaagcaaatac

SEQ ID NO: 57957 - DNA, 82 bp, Homo sapiens
atttttcatgaggtgtttctgcaggagccgctgtgatactcctcacatgctccaaagcaaatacgatgggcttcatcaaagc

SEQ ID NO: 57958 - DNA, 85 bp, Homo sapiens
atgaggtgtttctgcaggagccgctgtgatactcctcacatgctccaaagcaaatacgatgggcttcatcaaagctgtgtgcttc

SEQ ID NO: 57959 - DNA, 87 bp, Homo sapiens
tttctgcaggagccgctgtgatactcctcacatgctccaaagcaaatacgatgggcttcatcaaagctgtgtgcttctccctcatga

SEQ ID NO: 57960 - DNA, 85 bp, Homo sapiens
ctgtgatactcctcacatgctccaaagcaaatacgatgggcttcatcaaagctgtgtgcttctccctcatgattgcaattttctc

SEQ ID NO: 57961 - DNA, 83 bp, Homo sapiens
atactcctcacatgctccaaagcaaatacgatgggcttcatcaaagctgtgtgcttctccctcatgattgcaattttctcttc

SEQ ID NO: 57962 - DNA, 82 bp, Homo sapiens
tccaaagcaaatacgatgggcttcatcaaagctgtgtgcttctccctcatgattgcaattttctcttctctgaccaagaaga

SEQ ID NO: 57963 - DNA, 79 bp, Homo sapiens
aaatacgatgggcttcatcaaagctgtgtgcttctccctcatgattgcaattttctcttctctgaccaagaagacattt

SEQ ID NO: 57964 - DNA, 78 bp, Homo sapiens
cttcatcaaagctgtgtgcttctccctcatgattgcaattttctcttctctgaccaagaagacatttttattcaaaaa

SEQ ID NO: 57965 - DNA, 75 bp, Homo sapiens
aaagctgtgtgcttctccctcatgattgcaattttctcttctctgaccaagaagacatttttattcaaaaactta

SEQ ID NO: 57966 - DNA, 75 bp, Homo sapiens
aaacaaagtggcagcttcactgtctcaggacaagtgtatggaaacatacttgcgtaaggtgttgttgttctggac

SEQ ID NO: 57967 - DNA, 78 bp, Homo sapiens
agcttcactgtctcaggacaagtgtatggaaacatacttgcgtaaggtgttgttgttctggactctcttcacctcatc

SEQ ID NO: 57968 - DNA, 77 bp, Homo sapiens
actgtctcaggacaagtgtatggaaacatacttgcgtaaggtgttgttgttctggactctcttcacctcatcttcaa

SEQ ID NO: 57969 - DNA, 78 bp, Homo sapiens
acaagtgtatggaaacatacttgcgtaaggtgttgttgttctggactctcttcacctcatcttcaagctgctgaattc

SEQ ID NO: 57970 - DNA, 79 bp, Homo sapiens
aaacatacttgcgtaaggtgttgttgttctggactctcttcacctcatcttcaagctgctgaattcgtctcaggacata

SEQ ID NO: 57971 - DNA, 81 bp, Homo sapiens
ttgcgtaaggtgttgttgttctggactctcttcacctcatcttcaagctgctgaattcgtctcaggacatacatgtgttgt

SEQ ID NO: 57972 - DNA, 84 bp, Homo sapiens
tgttgttgttctggactctcttcacctcatcttcaagctgctgaattcgtctcaggacatacatgtgttgttgcagcaaaactc

SEQ ID NO: 57973 - DNA, 86 bp, Homo sapiens
tctggactctcttcacctcatcttcaagctgctgaattcgtctcaggacatacatgtgttgttgcagcaaaactcccagccagagc

SEQ ID NO: 57974 - DNA, 86 bp, Homo sapiens
cttcacctcatcttcaagctgctgaattcgtctcaggacatacatgtgttgttgcagcaaaactcccagccagagctcatcccaga

SEQ ID NO: 57975 - DNA, 87 bp, Homo sapiens
tcttcaagctgctgaattcgtctcaggacatacatgtgttgttgcagcaaaactcccagccagagctcatcccagagcacagtgacc

SEQ ID NO: 57976 - DNA, 85 bp, Homo sapiens
aattcgtctcaggacatacatgtgttgttgcagcaaaactcccagccagagctcatcccagagcacagtgaccctgcgcagttca

SEQ ID NO: 57977 - DNA, 89 bp, Homo sapiens
ggacatacatgtgttgttgcagcaaaactcccagccagagctcatcccagagcacagtgaccctgcgcagttcagccacgagcatctga

SEQ ID NO: 57978 - DNA, 87 bp, Homo sapiens
tacatgtgttgttgcagcaaaactcccagccagagctcatcccagagcacagtgaccctgcgcagttcagccacgagcatctgaacc

SEQ ID NO: 57979 - DNA, 91 bp, Homo sapiens
ttgcagcaaaactcccagccagagctcatcccagagcacagtgaccctgcgcagttcagccacgagcatctgaacctgcatacacagcaca

SEQ ID NO: 57980 - DNA, 90 bp, Homo sapiens
ccagccagagctcatcccagagcacagtgaccctgcgcagttcagccacgagcatctgaacctgcatacacagcacacccaaatagctca

SEQ ID NO: 57981 - DNA, 89 bp, Homo sapiens
agctcatcccagagcacagtgaccctgcgcagttcagccacgagcatctgaacctgcatacacagcacacccaaatagctcatctacaa

SEQ ID NO: 57982 - DNA, 69 bp, Homo sapiens
tttttattattctataaaaaattcttctacaacatgtgagtttctttgtacctgtaataccatggtggg

SEQ ID NO: 57983 - DNA, 73 bp, Homo sapiens
tctataaaaaattcttctacaacatgtgagtttctttgtacctgtaataccatggtggggtttgcagaggaca

SEQ ID NO: 57984 - DNA, 74 bp, Homo sapiens
ttctacaacatgtgagtttctttgtacctgtaataccatggtggggtttgcagaggacagcttatctacaattt

SEQ ID NO: 57985 - DNA, 74 bp, Homo sapiens
gtgagtttctttgtacctgtaataccatggtggggtttgcagaggacagcttatctacaattttgctgtaacaa

SEQ ID NO: 57986 - DNA, 76 bp, Homo sapiens
tttctttgtacctgtaataccatggtggggtttgcagaggacagcttatctacaattttgctgtaacaatcctgca

SEQ ID NO: 57987 - DNA, 80 bp, Homo sapiens
taataccatggtggggtttgcagaggacagcttatctacaattttgctgtaacaatcctgcatcatggcttggtcttcat

SEQ ID NO: 57988 - DNA, 79 bp, Homo sapiens
atggtggggtttgcagaggacagcttatctacaattttgctgtaacaatcctgcatcatggcttggtcttcatttaatc

SEQ ID NO: 57989 - DNA, 76 bp, Homo sapiens
agaggacagcttatctacaattttgctgtaacaatcctgcatcatggcttggtcttcatttaatccacttttaggt

SEQ ID NO: 57990 - DNA, 76 bp, Homo sapiens
ttatctacaattttgctgtaacaatcctgcatcatggcttggtcttcatttaatccacttttaggttcatccttat

SEQ ID NO: 57991 - DNA, 78 bp, Homo sapiens
tacaattttgctgtaacaatcctgcatcatggcttggtcttcatttaatccacttttaggttcatccttattgctatc

SEQ ID NO: 57992 - DNA, 81 bp, Homo sapiens
taacaatcctgcatcatggcttggtcttcatttaatccacttttaggttcatccttattgctatcctgagatgcaggagga

SEQ ID NO: 57993 - DNA, 77 bp, Homo sapiens
atcatggcttggtcttcatttaatccacttttaggttcatccttattgctatcctgagatgcaggaggacttcctcc

SEQ ID NO: 57994 - DNA, 76 bp, Homo sapiens
ttggtcttcatttaatccacttttaggttcatccttattgctatcctgagatgcaggaggacttcctccctcacat

SEQ ID NO: 57995 - DNA, 75 bp, Homo sapiens
atttaatccacttttaggttcatccttattgctatcctgagatgcaggaggacttcctccctcacattcagaaac

SEQ ID NO: 57996 - DNA, 76 bp, Homo sapiens
acttttaggttcatccttattgctatcctgagatgcaggaggacttcctccctcacattcagaaaccagcaattct

SEQ ID NO: 57997 - DNA, 80 bp, Homo sapiens
ttcatccttattgctatcctgagatgcaggaggacttcctccctcacattcagaaaccagcaattcttctccttgaatat

SEQ ID NO: 57998 - DNA, 78 bp, Homo sapiens
ctatcctgagatgcaggaggacttcctccctcacattcagaaaccagcaattcttctccttgaatattgccaagtaaa

SEQ ID NO: 57999 - DNA, 75 bp, Homo sapiens
atgcaggaggacttcctccctcacattcagaaaccagcaattcttctccttgaatattgccaagtaaagttggaa

SEQ ID NO: 58000 - DNA, 75 bp, Homo sapiens
ttcctccctcacattcagaaaccagcaattcttctccttgaatattgccaagtaaagttggaattgcagtggaaa

SEQ ID NO: 58001 - DNA, 74 bp, Homo sapiens
ctcacattcagaaaccagcaattcttctccttgaatattgccaagtaaagttggaattgcagtggaaaatttat

SEQ ID NO: 58002 - DNA, 71 bp, Homo sapiens
agaaaccagcaattcttctccttgaatattgccaagtaaagttggaattgcagtggaaaatttatttcctg

SEQ ID NO: 58003 - DNA, 72 bp, Homo sapiens
cttctccttgaatattgccaagtaaagttggaattgcagtggaaaatttatttcctgtaatgaaataggaga

SEQ ID NO: 58004 - DNA, 72 bp, Homo sapiens
tgaatattgccaagtaaagttggaattgcagtggaaaatttatttcctgtaatgaaataggagaacaaggaa

SEQ ID NO: 58005 - DNA, 69 bp, Homo sapiens
gccaagtaaagttggaattgcagtggaaaatttatttcctgtaatgaaataggagaacaaggaatattt

SEQ ID NO: 58006 - DNA, 79 bp, Homo sapiens
ttggcacagtcatttatactcaaagtagcaatatttgaatattccatacctgaagcctgggattcactactaagcgata

SEQ ID NO: 58007 - DNA, 75 bp, Homo sapiens
atttatactcaaagtagcaatatttgaatattccatacctgaagcctgggattcactactaagcgatatggtacc

SEQ ID NO: 58008 - DNA, 76 bp, Homo sapiens
aaagtagcaatatttgaatattccatacctgaagcctgggattcactactaagcgatatggtacccactattgcag

SEQ ID NO: 58009 - DNA, 77 bp, Homo sapiens
aatatttgaatattccatacctgaagcctgggattcactactaagcgatatggtacccactattgcaggatacaata

SEQ ID NO: 58010 - DNA, 79 bp, Homo sapiens
atattccatacctgaagcctgggattcactactaagcgatatggtacccactattgcaggatacaatatgagatgtggg

SEQ ID NO: 58011 - DNA, 80 bp, Homo sapiens
aagcctgggattcactactaagcgatatggtacccactattgcaggatacaatatgagatgtggggaatcttgagccaca

SEQ ID NO: 58012 - DNA, 81 bp, Homo sapiens
attcactactaagcgatatggtacccactattgcaggatacaatatgagatgtggggaatcttgagccacacggcagagaa

SEQ ID NO: 58013 - DNA, 80 bp, Homo sapiens
taagcgatatggtacccactattgcaggatacaatatgagatgtggggaatcttgagccacacggcagagaaggttacaa

SEQ ID NO: 58014 - DNA, 77 bp, Homo sapiens
atggtacccactattgcaggatacaatatgagatgtggggaatcttgagccacacggcagagaaggttacaaatact

SEQ ID NO: 58015 - DNA, 81 bp, Homo sapiens
gcaggatacaatatgagatgtggggaatcttgagccacacggcagagaaggttacaaatactttggcgcacatacacttca

SEQ ID NO: 58016 - DNA, 78 bp, Homo sapiens
atacaatatgagatgtggggaatcttgagccacacggcagagaaggttacaaatactttggcgcacatacacttcagg

SEQ ID NO: 58017 - DNA, 74 bp, Homo sapiens
tgtggggaatcttgagccacacggcagagaaggttacaaatactttggcgcacatacacttcagggtggtttaa

SEQ ID NO: 58018 - DNA, 74 bp, Homo sapiens
ttgagccacacggcagagaaggttacaaatactttggcgcacatacacttcagggtggtttaagcgtgagaaaa

SEQ ID NO: 58019 - DNA, 72 bp, Homo sapiens
ggcagagaaggttacaaatactttggcgcacatacacttcagggtggtttaagcgtgagaaaagttgcggaa

SEQ ID NO: 58020 - DNA, 70 bp, Homo sapiens
gttacaaatactttggcgcacatacacttcagggtggtttaagcgtgagaaaagttgcggaataattcct

SEQ ID NO: 58021 - DNA, 71 bp, Homo sapiens
aaatactttggcgcacatacacttcagggtggtttaagcgtgagaaaagttgcggaataattccttcagga

SEQ ID NO: 58022 - DNA, 71 bp, Homo sapiens
acatacacttcagggtggtttaagcgtgagaaaagttgcggaataattccttcaggacaagaagagagaaa

SEQ ID NO: 58023 - DNA, 69 bp, Homo sapiens
agggtggtttaagcgtgagaaaagttgcggaataattccttcaggacaagaagagagaaagacacttta

SEQ ID NO: 58024 - DNA, 77 bp, Homo sapiens
tatatcctagtgagaaactatttttcctgaaacattttatgcaggtctcacctctccatggtgcagtgggtgttgtc

SEQ ID NO: 58025 - DNA, 74 bp, Homo sapiens
agaaactatttttcctgaaacattttatgcaggtctcacctctccatggtgcagtgggtgttgtctccaagccg

SEQ ID NO: 58026 - DNA, 78 bp, Homo sapiens
tttttcctgaaacattttatgcaggtctcacctctccatggtgcagtgggtgttgtctccaagccgtgctccagatac

SEQ ID NO: 58027 - DNA, 81 bp, Homo sapiens
aacattttatgcaggtctcacctctccatggtgcagtgggtgttgtctccaagccgtgctccagatactgccgaagctcac

SEQ ID NO: 58028 - DNA, 86 bp, Homo sapiens
tctcacctctccatggtgcagtgggtgttgtctccaagccgtgctccagatactgccgaagctcaccagcatgcttcacgagcaac

SEQ ID NO: 58029 - DNA, 87 bp, Homo sapiens
tctccatggtgcagtgggtgttgtctccaagccgtgctccagatactgccgaagctcaccagcatgcttcacgagcaaccgcagcag

SEQ ID NO: 58030 - DNA, 85 bp, Homo sapiens
agtgggtgttgtctccaagccgtgctccagatactgccgaagctcaccagcatgcttcacgagcaaccgcagcaggcgcaatgtg

SEQ ID NO: 58031 - DNA, 90 bp, Homo sapiens
ttgtctccaagccgtgctccagatactgccgaagctcaccagcatgcttcacgagcaaccgcagcaggcgcaatgtggccatcacaatca

SEQ ID NO: 58032 - DNA, 91 bp, Homo sapiens
aagccgtgctccagatactgccgaagctcaccagcatgcttcacgagcaaccgcagcaggcgcaatgtggccatcacaatcatgtcatcag

SEQ ID NO: 58033 - DNA, 92 bp, Homo sapiens
agatactgccgaagctcaccagcatgcttcacgagcaaccgcagcaggcgcaatgtggccatcacaatcatgtcatcagtgctctgttccac

SEQ ID NO: 58034 - DNA, 92 bp, Homo sapiens
aagctcaccagcatgcttcacgagcaaccgcagcaggcgcaatgtggccatcacaatcatgtcatcagtgctctgttccactctgtgactta

SEQ ID NO: 58035 - DNA, 91 bp, Homo sapiens
atgcttcacgagcaaccgcagcaggcgcaatgtggccatcacaatcatgtcatcagtgctctgttccactctgtgacttaaatgcagccta

SEQ ID NO: 58036 - DNA, 89 bp, Homo sapiens
agcaaccgcagcaggcgcaatgtggccatcacaatcatgtcatcagtgctctgttccactctgtgacttaaatgcagcctagggtcatc

SEQ ID NO: 58037 - DNA, 89 bp, Homo sapiens
agcaggcgcaatgtggccatcacaatcatgtcatcagtgctctgttccactctgtgacttaaatgcagcctagggtcatcctcatctaa

SEQ ID NO: 58038 - DNA, 85 bp, Homo sapiens
aatgtggccatcacaatcatgtcatcagtgctctgttccactctgtgacttaaatgcagcctagggtcatcctcatctaaaggaa

SEQ ID NO: 58039 - DNA, 84 bp, Homo sapiens
acaatcatgtcatcagtgctctgttccactctgtgacttaaatgcagcctagggtcatcctcatctaaaggaatctaagagtga

SEQ ID NO: 58040 - DNA, 82 bp, Homo sapiens
atgtcatcagtgctctgttccactctgtgacttaaatgcagcctagggtcatcctcatctaaaggaatctaagagtgaaaga

SEQ ID NO: 58041 - DNA, 79 bp, Homo sapiens
gtgctctgttccactctgtgacttaaatgcagcctagggtcatcctcatctaaaggaatctaagagtgaaagatgaggg

SEQ ID NO: 58042 - DNA, 77 bp, Homo sapiens
tctgtgacttaaatgcagcctagggtcatcctcatctaaaggaatctaagagtgaaagatgaggggaataaataaga

SEQ ID NO: 58043 - DNA, 73 bp, Homo sapiens
acttaaatgcagcctagggtcatcctcatctaaaggaatctaagagtgaaagatgaggggaataaataagaaa

SEQ ID NO: 58044 - DNA, 69 bp, Homo sapiens
gaaaaagtttccaaaataaattttcttagaacactgtgctacatacttgaccagcgttgagtttaagga

SEQ ID NO: 58045 - DNA, 69 bp, Homo sapiens
ccaaaataaattttcttagaacactgtgctacatacttgaccagcgttgagtttaaggaaagtaaagta

SEQ ID NO: 58046 - DNA, 74 bp, Homo sapiens
ataaattttcttagaacactgtgctacatacttgaccagcgttgagtttaaggaaagtaaagtatgcactgcaa

SEQ ID NO: 58047 - DNA, 77 bp, Homo sapiens
ttagaacactgtgctacatacttgaccagcgttgagtttaaggaaagtaaagtatgcactgcaagagagtttgtaca

SEQ ID NO: 58048 - DNA, 77 bp, Homo sapiens
tacatacttgaccagcgttgagtttaaggaaagtaaagtatgcactgcaagagagtttgtacaggctgaatattcta

SEQ ID NO: 58049 - DNA, 77 bp, Homo sapiens
ttgaccagcgttgagtttaaggaaagtaaagtatgcactgcaagagagtttgtacaggctgaatattctatctacaa

SEQ ID NO: 58050 - DNA, 74 bp, Homo sapiens
agtttaaggaaagtaaagtatgcactgcaagagagtttgtacaggctgaatattctatctacaactttcctcca

SEQ ID NO: 58051 - DNA, 75 bp, Homo sapiens
aagtaaagtatgcactgcaagagagtttgtacaggctgaatattctatctacaactttcctccacactttaataa

SEQ ID NO: 58052 - DNA, 77 bp, Homo sapiens
agtatgcactgcaagagagtttgtacaggctgaatattctatctacaactttcctccacactttaataactccttca

SEQ ID NO: 58053 - DNA, 74 bp, Homo sapiens
agagtttgtacaggctgaatattctatctacaactttcctccacactttaataactccttcagttgcactttca

SEQ ID NO: 58054 - DNA, 75 bp, Homo sapiens
ttgtacaggctgaatattctatctacaactttcctccacactttaataactccttcagttgcactttcatcaagt

SEQ ID NO: 58055 - DNA, 74 bp, Homo sapiens
aatattctatctacaactttcctccacactttaataactccttcagttgcactttcatcaagttctgaaagcca

SEQ ID NO: 58056 - DNA, 77 bp, Homo sapiens
tacaactttcctccacactttaataactccttcagttgcactttcatcaagttctgaaagccatgggcagcttgata

SEQ ID NO: 58057 - DNA, 79 bp, Homo sapiens
ttcctccacactttaataactccttcagttgcactttcatcaagttctgaaagccatgggcagcttgatatcaactgac

SEQ ID NO: 58058 - DNA, 82 bp, Homo sapiens
tttaataactccttcagttgcactttcatcaagttctgaaagccatgggcagcttgatatcaactgacgccagataacatca

SEQ ID NO: 58059 - DNA, 85 bp, Homo sapiens
ttcagttgcactttcatcaagttctgaaagccatgggcagcttgatatcaactgacgccagataacatcaaccatgtcatcttct

SEQ ID NO: 58060 - DNA, 83 bp, Homo sapiens
tttcatcaagttctgaaagccatgggcagcttgatatcaactgacgccagataacatcaaccatgtcatcttcttcgttgtct

SEQ ID NO: 58061 - DNA, 82 bp, Homo sapiens
aagttctgaaagccatgggcagcttgatatcaactgacgccagataacatcaaccatgtcatcttcttcgttgtcttcactc

SEQ ID NO: 58062 - DNA, 84 bp, Homo sapiens
atgggcagcttgatatcaactgacgccagataacatcaaccatgtcatcttcttcgttgtcttcactctcagttatctgaagtg

SEQ ID NO: 58063 - DNA, 83 bp, Homo sapiens
ttgatatcaactgacgccagataacatcaaccatgtcatcttcttcgttgtcttcactctcagttatctgaagtgttatatct

SEQ ID NO: 58064 - DNA, 81 bp, Homo sapiens
aactgacgccagataacatcaaccatgtcatcttcttcgttgtcttcactctcagttatctgaagtgttatatcttcatcc

SEQ ID NO: 58065 - DNA, 79 bp, Homo sapiens
ataacatcaaccatgtcatcttcttcgttgtcttcactctcagttatctgaagtgttatatcttcatcctgaagaaaaa

SEQ ID NO: 58066 - DNA, 80 bp, Homo sapiens
catgtcatcttcttcgttgtcttcactctcagttatctgaagtgttatatcttcatcctgaagaaaaattgtgcacaaaa

SEQ ID NO: 58067 - DNA, 78 bp, Homo sapiens
ttcttcgttgtcttcactctcagttatctgaagtgttatatcttcatcctgaagaaaaattgtgcacaaaatgctatt

SEQ ID NO: 58068 - DNA, 77 bp, Homo sapiens
gttgtcttcactctcagttatctgaagtgttatatcttcatcctgaagaaaaattgtgcacaaaatgctattttaaa

SEQ ID NO: 58069 - DNA, 76 bp, Homo sapiens
aatcaatgatttggagtagcaatcttgccccaagcaccatgttttccttgcctgaatccccgccggccgacacaca

SEQ ID NO: 58070 - DNA, 76 bp, Homo sapiens
gtagcaatcttgccccaagcaccatgttttccttgcctgaatccccgccggccgacacacagcctgtccaagaata

SEQ ID NO: 58071 - DNA, 75 bp, Homo sapiens
ttgccccaagcaccatgttttccttgcctgaatccccgccggccgacacacagcctgtccaagaataccatatat

SEQ ID NO: 58072 - DNA, 74 bp, Homo sapiens
accatgttttccttgcctgaatccccgccggccgacacacagcctgtccaagaataccatatattctctctttc

SEQ ID NO: 58073 - DNA, 74 bp, Homo sapiens
gttttccttgcctgaatccccgccggccgacacacagcctgtccaagaataccatatattctctctttctcttc

SEQ ID NO: 58074 - DNA, 75 bp, Homo sapiens
aatccccgccggccgacacacagcctgtccaagaataccatatattctctctttctcttcctcagttatagtgtc

SEQ ID NO: 58075 - DNA, 80 bp, Homo sapiens
gccgacacacagcctgtccaagaataccatatattctctctttctcttcctcagttatagtgtctggaagtagattctga

SEQ ID NO: 58076 - DNA, 78 bp, Homo sapiens
acagcctgtccaagaataccatatattctctctttctcttcctcagttatagtgtctggaagtagattctgaacttca

SEQ ID NO: 58077 - DNA, 76 bp, Homo sapiens
tccaagaataccatatattctctctttctcttcctcagttatagtgtctggaagtagattctgaacttcagatttt

SEQ ID NO: 58078 - DNA, 77 bp, Homo sapiens
accatatattctctctttctcttcctcagttatagtgtctggaagtagattctgaacttcagatttttctctaggca

SEQ ID NO: 58079 - DNA, 76 bp, Homo sapiens
tttctcttcctcagttatagtgtctggaagtagattctgaacttcagatttttctctaggcagcagacgaacacct

SEQ ID NO: 58080 - DNA, 76 bp, Homo sapiens
cttcctcagttatagtgtctggaagtagattctgaacttcagatttttctctaggcagcagacgaacaccttctcc

SEQ ID NO: 58081 - DNA, 76 bp, Homo sapiens
tgtctggaagtagattctgaacttcagatttttctctaggcagcagacgaacaccttctccctgactataaaaata

SEQ ID NO: 58082 - DNA, 73 bp, Homo sapiens
aagtagattctgaacttcagatttttctctaggcagcagacgaacaccttctccctgactataaaaataaaca

SEQ ID NO: 58083 - DNA, 73 bp, Homo sapiens
acttcagatttttctctaggcagcagacgaacaccttctccctgactataaaaataaacaagtcatcagtatt

SEQ ID NO: 58084 - DNA, 75 bp, Homo sapiens
agatttttctctaggcagcagacgaacaccttctccctgactataaaaataaacaagtcatcagtatttcagcta

SEQ ID NO: 58085 - DNA, 75 bp, Homo sapiens
aaatatctatttatgcaatgcataaataaactacacatttaaacatacctggcattgtcaaccacctttctgccc

SEQ ID NO: 58086 - DNA, 76 bp, Homo sapiens
tatttatgcaatgcataaataaactacacatttaaacatacctggcattgtcaaccacctttctgccccacctata

SEQ ID NO: 58087 - DNA, 72 bp, Homo sapiens
ataaataaactacacatttaaacatacctggcattgtcaaccacctttctgccccacctataagcccagctg

SEQ ID NO: 58088 - DNA, 72 bp, Homo sapiens
aaactacacatttaaacatacctggcattgtcaaccacctttctgccccacctataagcccagctggccaac

SEQ ID NO: 58089 - DNA, 74 bp, Homo sapiens
ttaaacatacctggcattgtcaaccacctttctgccccacctataagcccagctggccaacgctgcccaagatt

SEQ ID NO: 58090 - DNA, 76 bp, Homo sapiens
cctggcattgtcaaccacctttctgccccacctataagcccagctggccaacgctgcccaagatttggctacttca

SEQ ID NO: 58091 - DNA, 74 bp, Homo sapiens
aaccacctttctgccccacctataagcccagctggccaacgctgcccaagatttggctacttcaggtgcctgta

SEQ ID NO: 58092 - DNA, 77 bp, Homo sapiens
ccccacctataagcccagctggccaacgctgcccaagatttggctacttcaggtgcctgtactgaagacaggtgata

SEQ ID NO: 58093 - DNA, 79 bp, Homo sapiens
tataagcccagctggccaacgctgcccaagatttggctacttcaggtgcctgtactgaagacaggtgatacaactgtcc

SEQ ID NO: 58094 - DNA, 77 bp, Homo sapiens
ctggccaacgctgcccaagatttggctacttcaggtgcctgtactgaagacaggtgatacaactgtcccaaaatgaa

SEQ ID NO: 58095 - DNA, 77 bp, Homo sapiens
tgcccaagatttggctacttcaggtgcctgtactgaagacaggtgatacaactgtcccaaaatgaagtcaggttctc

SEQ ID NO: 58096 - DNA, 75 bp, Homo sapiens
agatttggctacttcaggtgcctgtactgaagacaggtgatacaactgtcccaaaatgaagtcaggttctccaac

SEQ ID NO: 58097 - DNA, 77 bp, Homo sapiens
acttcaggtgcctgtactgaagacaggtgatacaactgtcccaaaatgaagtcaggttctccaactccaatatgcac

SEQ ID NO: 58098 - DNA, 78 bp, Homo sapiens
tactgaagacaggtgatacaactgtcccaaaatgaagtcaggttctccaactccaatatgcactgccaaaatggacaa

SEQ ID NO: 58099 - DNA, 75 bp, Homo sapiens
agacaggtgatacaactgtcccaaaatgaagtcaggttctccaactccaatatgcactgccaaaatggacaaaaa

SEQ ID NO: 58100 - DNA, 73 bp, Homo sapiens
tacaactgtcccaaaatgaagtcaggttctccaactccaatatgcactgccaaaatggacaaaaaaataatta

SEQ ID NO: 58101 - DNA, 75 bp, Homo sapiens
tatagcttctaaaattaatattctaaagctaataaagcaactctacctgtagattcactctcgatccgaggatac

SEQ ID NO: 58102 - DNA, 73 bp, Homo sapiens
aaaattaatattctaaagctaataaagcaactctacctgtagattcactctcgatccgaggatactcttcttc

SEQ ID NO: 58103 - DNA, 76 bp, Homo sapiens
tattctaaagctaataaagcaactctacctgtagattcactctcgatccgaggatactcttcttccatcgtattaa

SEQ ID NO: 58104 - DNA, 77 bp, Homo sapiens
aactctacctgtagattcactctcgatccgaggatactcttcttccatcgtattaacagatggcagttctattagag

SEQ ID NO: 58105 - DNA, 78 bp, Homo sapiens
tagattcactctcgatccgaggatactcttcttccatcgtattaacagatggcagttctattagagtgagtatgtttt

SEQ ID NO: 58106 - DNA, 77 bp, Homo sapiens
tctcgatccgaggatactcttcttccatcgtattaacagatggcagttctattagagtgagtatgtttttagacaaa

SEQ ID NO: 58107 - DNA, 75 bp, Homo sapiens
gaggatactcttcttccatcgtattaacagatggcagttctattagagtgagtatgtttttagacaaagtagaaa

SEQ ID NO: 58108 - DNA, 75 bp, Homo sapiens
ttcttccatcgtattaacagatggcagttctattagagtgagtatgtttttagacaaagtagaaagacctgtgaa

SEQ ID NO: 58109 - DNA, 74 bp, Homo sapiens
tcgtattaacagatggcagttctattagagtgagtatgtttttagacaaagtagaaagacctgtgaagttctgt

SEQ ID NO: 58110 - DNA, 77 bp, Homo sapiens
gcagttctattagagtgagtatgtttttagacaaagtagaaagacctgtgaagttctgttggtgctgagctctgtaa

SEQ ID NO: 58111 - DNA, 75 bp, Homo sapiens
tctattagagtgagtatgtttttagacaaagtagaaagacctgtgaagttctgttggtgctgagctctgtaaacc

SEQ ID NO: 58112 - DNA, 74 bp, Homo sapiens
agtatgtttttagacaaagtagaaagacctgtgaagttctgttggtgctgagctctgtaaacctgtttcagctg

SEQ ID NO: 58113 - DNA, 75 bp, Homo sapiens
acaaagtagaaagacctgtgaagttctgttggtgctgagctctgtaaacctgtttcagctgtcctgaaatctctt

SEQ ID NO: 58114 - DNA, 77 bp, Homo sapiens
gtagaaagacctgtgaagttctgttggtgctgagctctgtaaacctgtttcagctgtcctgaaatctctttccattc

SEQ ID NO: 58115 - DNA, 78 bp, Homo sapiens
aagttctgttggtgctgagctctgtaaacctgtttcagctgtcctgaaatctctttccattctgcctggatccattta

SEQ ID NO: 58116 - DNA, 82 bp, Homo sapiens
tggtgctgagctctgtaaacctgtttcagctgtcctgaaatctctttccattctgcctggatccatttagccagtgtcagaa

SEQ ID NO: 58117 - DNA, 79 bp, Homo sapiens
tctgtaaacctgtttcagctgtcctgaaatctctttccattctgcctggatccatttagccagtgtcagaattgattta

SEQ ID NO: 58118 - DNA, 78 bp, Homo sapiens
aaacctgtttcagctgtcctgaaatctctttccattctgcctggatccatttagccagtgtcagaattgatttagcaa

SEQ ID NO: 58119 - DNA, 84 bp, Homo sapiens
tgtcctgaaatctctttccattctgcctggatccatttagccagtgtcagaattgatttagcaactgcatattcagctttcaca

SEQ ID NO: 58120 - DNA, 81 bp, Homo sapiens
aaatctctttccattctgcctggatccatttagccagtgtcagaattgatttagcaactgcatattcagctttcacagact

SEQ ID NO: 58121 - DNA, 86 bp, Homo sapiens
attctgcctggatccatttagccagtgtcagaattgatttagcaactgcatattcagctttcacagacttgcagaaagatatggca

SEQ ID NO: 58122 - DNA, 85 bp, Homo sapiens
tccatttagccagtgtcagaattgatttagcaactgcatattcagctttcacagacttgcagaaagatatggcacaagaactcaa

SEQ ID NO: 58123 - DNA, 84 bp, Homo sapiens
ttagccagtgtcagaattgatttagcaactgcatattcagctttcacagacttgcagaaagatatggcacaagaactcaacatt

SEQ ID NO: 58124 - DNA, 84 bp, Homo sapiens
aattgatttagcaactgcatattcagctttcacagacttgcagaaagatatggcacaagaactcaacatttccattgcatgtgt

SEQ ID NO: 58125 - DNA, 86 bp, Homo sapiens
tttagcaactgcatattcagctttcacagacttgcagaaagatatggcacaagaactcaacatttccattgcatgtgttgactggc

SEQ ID NO: 58126 - DNA, 83 bp, Homo sapiens
atattcagctttcacagacttgcagaaagatatggcacaagaactcaacatttccattgcatgtgttgactggcctacagaaa

SEQ ID NO: 58127 - DNA, 81 bp, Homo sapiens
tttcacagacttgcagaaagatatggcacaagaactcaacatttccattgcatgtgttgactggcctacagaaaaccacaa

SEQ ID NO: 58128 - DNA, 77 bp, Homo sapiens
agaaagatatggcacaagaactcaacatttccattgcatgtgttgactggcctacagaaaaccacaaagtcagaact

SEQ ID NO: 58129 - DNA, 77 bp, Homo sapiens
atatggcacaagaactcaacatttccattgcatgtgttgactggcctacagaaaaccacaaagtcagaacttagaac

SEQ ID NO: 58130 - DNA, 71 bp, Homo sapiens
catgatttttattatactcatgtattaaccataattaattttactaacctgctgtataaagcaatttggtt

SEQ ID NO: 58131 - DNA, 72 bp, Homo sapiens
ttatactcatgtattaaccataattaattttactaacctgctgtataaagcaatttggttttttcaatatca

SEQ ID NO: 58132 - DNA, 70 bp, Homo sapiens
catgtattaaccataattaattttactaacctgctgtataaagcaatttggttttttcaatatcaagttc

SEQ ID NO: 58133 - DNA, 67 bp, Homo sapiens
accataattaattttactaacctgctgtataaagcaatttggttttttcaatatcaagttcgggccc

SEQ ID NO: 58134 - DNA, 69 bp, Homo sapiens
tttactaacctgctgtataaagcaatttggttttttcaatatcaagttcgggcccccatttttcatcca

SEQ ID NO: 58135 - DNA, 68 bp, Homo sapiens
tgtataaagcaatttggttttttcaatatcaagttcgggcccccatttttcatccacttgaccttggg

SEQ ID NO: 58136 - DNA, 66 bp, Homo sapiens
aatttggttttttcaatatcaagttcgggcccccatttttcatccacttgaccttgggttgatagt

SEQ ID NO: 58137 - DNA, 66 bp, Homo sapiens
tttttcaatatcaagttcgggcccccatttttcatccacttgaccttgggttgatagttttttaaa

SEQ ID NO: 58138 - DNA, 67 bp, Homo sapiens
atatcaagttcgggcccccatttttcatccacttgaccttgggttgatagttttttaaaatgttgga

SEQ ID NO: 58139 - DNA, 69 bp, Homo sapiens
ccccatttttcatccacttgaccttgggttgatagttttttaaaatgttggactaaatcctgtgcagtg

SEQ ID NO: 58140 - DNA, 70 bp, Homo sapiens
tttcatccacttgaccttgggttgatagttttttaaaatgttggactaaatcctgtgcagtggtggtctt

SEQ ID NO: 58141 - DNA, 71 bp, Homo sapiens
ttgaccttgggttgatagttttttaaaatgttggactaaatcctgtgcagtggtggtctttcccagctgaa

SEQ ID NO: 58142 - DNA, 74 bp, Homo sapiens
gttgatagttttttaaaatgttggactaaatcctgtgcagtggtggtctttcccagctgaacttcactgcactg

SEQ ID NO: 58143 - DNA, 78 bp, Homo sapiens
tttaaaatgttggactaaatcctgtgcagtggtggtctttcccagctgaacttcactgcactgtgccagcagtcttgt

SEQ ID NO: 58144 - DNA, 82 bp, Homo sapiens
tggactaaatcctgtgcagtggtggtctttcccagctgaacttcactgcactgtgccagcagtcttgttgcaagggacacat

SEQ ID NO: 58145 - DNA, 80 bp, Homo sapiens
tgtgcagtggtggtctttcccagctgaacttcactgcactgtgccagcagtcttgttgcaagggacacattccctcgttt

SEQ ID NO: 58146 - DNA, 79 bp, Homo sapiens
tggtctttcccagctgaacttcactgcactgtgccagcagtcttgttgcaagggacacattccctcgttttctagcaaa

SEQ ID NO: 58147 - DNA, 77 bp, Homo sapiens
tttcccagctgaacttcactgcactgtgccagcagtcttgttgcaagggacacattccctcgttttctagcaaattt

SEQ ID NO: 58148 - DNA, 79 bp, Homo sapiens
aacttcactgcactgtgccagcagtcttgttgcaagggacacattccctcgttttctagcaaattttgctgctgttaga

SEQ ID NO: 58149 - DNA, 76 bp, Homo sapiens
actgtgccagcagtcttgttgcaagggacacattccctcgttttctagcaaattttgctgctgttagacctaattc

SEQ ID NO: 58150 - DNA, 77 bp, Homo sapiens
agcagtcttgttgcaagggacacattccctcgttttctagcaaattttgctgctgttagacctaattccatgagatg

SEQ ID NO: 58151 - DNA, 74 bp, Homo sapiens
aagggacacattccctcgttttctagcaaattttgctgctgttagacctaattccatgagatggcttctaattg

SEQ ID NO: 58152 - DNA, 73 bp, Homo sapiens
attccctcgttttctagcaaattttgctgctgttagacctaattccatgagatggcttctaattgggactgtt

SEQ ID NO: 58153 - DNA, 77 bp, Homo sapiens
ttttctagcaaattttgctgctgttagacctaattccatgagatggcttctaattgggactgtttgttctgaagaga

SEQ ID NO: 58154 - DNA, 74 bp, Homo sapiens
aaattttgctgctgttagacctaattccatgagatggcttctaattgggactgtttgttctgaagagaggaaaa

SEQ ID NO: 58155 - DNA, 72 bp, Homo sapiens
tgttagacctaattccatgagatggcttctaattgggactgtttgttctgaagagaggaaaacgttttatta

SEQ ID NO: 58156 - DNA, 70 bp, Homo sapiens
attccatgagatggcttctaattgggactgtttgttctgaagagaggaaaacgttttattagttcctaat

SEQ ID NO: 58157 - DNA, 65 bp, Homo sapiens
acaagaaaaaaaaaccacttacctttaattttctccaacaactgattctggtacatagtatacct

SEQ ID NO: 58158 - DNA, 69 bp, Homo sapiens
aacttcttaacaattgaacttcaatggatttctgaagttccctcggatccggacttaacatgttaggaa

SEQ ID NO: 58159 - DNA, 70 bp, Homo sapiens
ttaacaattgaacttcaatggatttctgaagttccctcggatccggacttaacatgttaggaagcagttt

SEQ ID NO: 58160 - DNA, 71 bp, Homo sapiens
aacttcaatggatttctgaagttccctcggatccggacttaacatgttaggaagcagttttttcatgtcta

SEQ ID NO: 58161 - DNA, 70 bp, Homo sapiens
tctgaagttccctcggatccggacttaacatgttaggaagcagttttttcatgtctaccaaagttaaata

SEQ ID NO: 58162 - DNA, 67 bp, Homo sapiens
agttccctcggatccggacttaacatgttaggaagcagttttttcatgtctaccaaagttaaataaa

SEQ ID NO: 58163 - DNA, 68 bp, Homo sapiens
gatccggacttaacatgttaggaagcagttttttcatgtctaccaaagttaaataaaacgtcattaag

SEQ ID NO: 58164 - DNA, 75 bp, Homo sapiens
tttatttaaaaatactgaacgctcaccattcagagaatgtttcgggctggcactgttacgcccagcattggctaa

SEQ ID NO: 58165 - DNA, 78 bp, Homo sapiens
ttaaaaatactgaacgctcaccattcagagaatgtttcgggctggcactgttacgcccagcattggctaaggtgagca

SEQ ID NO: 58166 - DNA, 78 bp, Homo sapiens
aacgctcaccattcagagaatgtttcgggctggcactgttacgcccagcattggctaaggtgagcaccgatttgtcaa

SEQ ID NO: 58167 - DNA, 79 bp, Homo sapiens
ccattcagagaatgtttcgggctggcactgttacgcccagcattggctaaggtgagcaccgatttgtcaaagctggaga

SEQ ID NO: 58168 - DNA, 74 bp, Homo sapiens
ttcttaataaggctttgaaagtattcacatcacaaagcttgagtgagttaccttcaattgtctggaaggtgtct

SEQ ID NO: 58169 - DNA, 76 bp, Homo sapiens
attgatttcaacagttttccaaatgcttgtcgaatacgagttccactgtgcactagttgaacacggcaaacatcga

SEQ ID NO: 58170 - DNA, 71 bp, Homo sapiens
aaaatttatggaaagacggaagagagaataaaggtgcgtatgtttcagacttcttcattaaaacagctgct

SEQ ID NO: 58171 - DNA, 72 bp, Homo sapiens
aaagacggaagagagaataaaggtgcgtatgtttcagacttcttcattaaaacagctgcttccaaagcccaa

SEQ ID NO: 58172 - DNA, 73 bp, Homo sapiens
agagaataaaggtgcgtatgtttcagacttcttcattaaaacagctgcttccaaagcccaagtcattaacagt

SEQ ID NO: 58173 - DNA, 74 bp, Homo sapiens
taaaggtgcgtatgtttcagacttcttcattaaaacagctgcttccaaagcccaagtcattaacagtttcctga

SEQ ID NO: 58174 - DNA, 70 bp, Homo sapiens
atactatataatatctgttacctcgtgtcctggttaaggttatctttcttaagtaatattcccagaagat

SEQ ID NO: 58175 - DNA, 69 bp, Homo sapiens
atataatatctgttacctcgtgtcctggttaaggttatctttcttaagtaatattcccagaagatttaa

SEQ ID NO: 58176 - DNA, 70 bp, Homo sapiens
ctgtggataaaacaaagtcattacaattaaagactcacccctattagtgagtttttggcatttccaattg

SEQ ID NO: 58177 - DNA, 71 bp, Homo sapiens
aacaaagtcattacaattaaagactcacccctattagtgagtttttggcatttccaattgtagtcagggca

SEQ ID NO: 58178 - DNA, 71 bp, Homo sapiens
attcttaaaagcctcatgttttatttcagaacaggcctcaggaagttgtagactgtgtaggaggttgttta

SEQ ID NO: 58179 - DNA, 73 bp, Homo sapiens
cctcatgttttatttcagaacaggcctcaggaagttgtagactgtgtaggaggttgtttagggcacaagtcat

SEQ ID NO: 58180 - DNA, 72 bp, Homo sapiens
ttttatttcagaacaggcctcaggaagttgtagactgtgtaggaggttgtttagggcacaagtcatttctcc

SEQ ID NO: 58181 - DNA, 75 bp, Homo sapiens
ttttgaatgacacttgaaatgcccaaaagcacttacatctgttacatatgcctcagtaattggaggaccccgaat

SEQ ID NO: 58182 - DNA, 75 bp, Homo sapiens
aatgacacttgaaatgcccaaaagcacttacatctgttacatatgcctcagtaattggaggaccccgaattgggc

SEQ ID NO: 58183 - DNA, 77 bp, Homo sapiens
catctgttacatatgcctcagtaattggaggaccccgaattgggctgaagcgttccccaatgctcctcaccacagta

SEQ ID NO: 58184 - DNA, 74 bp, Homo sapiens
atatgcctcagtaattggaggaccccgaattgggctgaagcgttccccaatgctcctcaccacagtactaaata

SEQ ID NO: 58185 - DNA, 69 bp, Homo sapiens
agtaattggaggaccccgaattgggctgaagcgttccccaatgctcctcaccacagtactaaatacccg

SEQ ID NO: 58186 - DNA, 73 bp, Homo sapiens
tggaggaccccgaattgggctgaagcgttccccaatgctcctcaccacagtactaaatacccggagaagtgca

SEQ ID NO: 58187 - DNA, 80 bp, Homo sapiens
agcatatgcttccatgtcttccagaaactgaccaagaagagtagtagaaaatgcaagatcagctacccaaaatggctcca

SEQ ID NO: 58188 - DNA, 77 bp, Homo sapiens
atgcttccatgtcttccagaaactgaccaagaagagtagtagaaaatgcaagatcagctacccaaaatggctccaaa

SEQ ID NO: 58189 - DNA, 76 bp, Homo sapiens
gtcatttaaactgaaccattattagttacttacctttcattaagcacgtcatgtacagcagccaagatattatcca

SEQ ID NO: 58190 - DNA, 74 bp, Homo sapiens
aactgaaccattattagttacttacctttcattaagcacgtcatgtacagcagccaagatattatccaattgtt

SEQ ID NO: 58191 - DNA, 74 bp, Homo sapiens
ttattagttacttacctttcattaagcacgtcatgtacagcagccaagatattatccaattgtttaactagtac

SEQ ID NO: 58192 - DNA, 74 bp, Homo sapiens
gttgctgaataaattctttcaactgctttacagtagccaatcttcggtctctgtcgtcttcccgggtgatcctc

SEQ ID NO: 58193 - DNA, 71 bp, Homo sapiens
aaattctttcaactgctttacagtagccaatcttcggtctctgtcgtcttcccgggtgatcctccgaagaa

SEQ ID NO: 58194 - DNA, 74 bp, Homo sapiens
tttcaactgctttacagtagccaatcttcggtctctgtcgtcttcccgggtgatcctccgaagaagattcgaca

SEQ ID NO: 58195 - DNA, 75 bp, Homo sapiens
tttacagtagccaatcttcggtctctgtcgtcttcccgggtgatcctccgaagaagattcgacagtcgagactca

SEQ ID NO: 58196 - DNA, 76 bp, Homo sapiens
aatcttcggtctctgtcgtcttcccgggtgatcctccgaagaagattcgacagtcgagactcatcagaataagaca

SEQ ID NO: 58197 - DNA, 81 bp, Homo sapiens
tctgtcgtcttcccgggtgatcctccgaagaagattcgacagtcgagactcatcagaataagacatcgatctctctgtgaa

SEQ ID NO: 58198 - DNA, 80 bp, Homo sapiens
ttcccgggtgatcctccgaagaagattcgacagtcgagactcatcagaataagacatcgatctctctgtgaatatataaa

SEQ ID NO: 58199 - DNA, 80 bp, Homo sapiens
atcctccgaagaagattcgacagtcgagactcatcagaataagacatcgatctctctgtgaatatataaacattttgttg

SEQ ID NO: 58200 - DNA, 82 bp, Homo sapiens
aagattcgacagtcgagactcatcagaataagacatcgatctctctgtgaatatataaacattttgttgtccattgagtata

SEQ ID NO: 58201 - DNA, 69 bp, Homo sapiens
aagtctttggaaggtgtatgtgattggtccccgttttcccagccttaccctgtgatttcctcatgtctt

SEQ ID NO: 58202 - DNA, 70 bp, Homo sapiens
aaggtgtatgtgattggtccccgttttcccagccttaccctgtgatttcctcatgtctttggtggctaaa

SEQ ID NO: 58203 - DNA, 73 bp, Homo sapiens
tcttgccccaacgacttccgaccataagtattttccccagatcctccattgacactgtagccacctacaaaca

SEQ ID NO: 58204 - DNA, 74 bp, Homo sapiens
aacgacttccgaccataagtattttccccagatcctccattgacactgtagccacctacaaacagcaatgtgta

SEQ ID NO: 58205 - DNA, 74 bp, Homo sapiens
cataagtattttccccagatcctccattgacactgtagccacctacaaacagcaatgtgtacgttatttaaata

SEQ ID NO: 58206 - DNA, 76 bp, Homo sapiens
acctctatctctggatgaagaatattttaaattatctgggtcggctgatgcactatcagttctataaaaagagaaa

SEQ ID NO: 58207 - DNA, 74 bp, Homo sapiens
atctctggatgaagaatattttaaattatctgggtcggctgatgcactatcagttctataaaaagagaaaagtt

SEQ ID NO: 58208 - DNA, 65 bp, Homo sapiens
aggcggagcccgggaggtcggggcggggtcccgggccggtcacccacctgggttgccagtcattc

SEQ ID NO: 58209 - DNA, 68 bp, Homo sapiens
gggaggtcggggcggggtcccgggccggtcacccacctgggttgccagtcattccagctccgcggata

SEQ ID NO: 58210 - DNA, 70 bp, Homo sapiens
ggcggggtcccgggccggtcacccacctgggttgccagtcattccagctccgcggatacttggtgccgcc

SEQ ID NO: 58211 - DNA, 71 bp, Homo sapiens
ggtcccgggccggtcacccacctgggttgccagtcattccagctccgcggatacttggtgccgccgccgcc

SEQ ID NO: 58212 - DNA, 76 bp, Homo sapiens
gccgccgccgccgctgctcagccgagaccccggggctctgcggctcattaccttccccgacacgacatggccaagc

SEQ ID NO: 58213 - DNA, 75 bp, Homo sapiens
ccgccgctgctcagccgagaccccggggctctgcggctcattaccttccccgacacgacatggccaagcgccgcc

SEQ ID NO: 58214 - DNA, 72 bp, Homo sapiens
gccgagaccccggggctctgcggctcattaccttccccgacacgacatggccaagcgccgccgcccaaagaa

SEQ ID NO: 58215 - DNA, 74 bp, Homo sapiens
cggggctctgcggctcattaccttccccgacacgacatggccaagcgccgccgcccaaagaagcgcgagtcgcc

SEQ ID NO: 58216 - DNA, 75 bp, Homo sapiens
tctgcggctcattaccttccccgacacgacatggccaagcgccgccgcccaaagaagcgcgagtcgccgcccgaa

SEQ ID NO: 58217 - DNA, 70 bp, Homo sapiens
accttccccgacacgacatggccaagcgccgccgcccaaagaagcgcgagtcgccgcccgaaccggccgc

SEQ ID NO: 58218 - DNA, 71 bp, Homo sapiens
acacgacatggccaagcgccgccgcccaaagaagcgcgagtcgccgcccgaaccggccgccgccgacaccc

SEQ ID NO: 58219 - DNA, 70 bp, Homo sapiens
atggccaagcgccgccgcccaaagaagcgcgagtcgccgcccgaaccggccgccgccgacaccccgctcc

SEQ ID NO: 58220 - DNA, 67 bp, Homo sapiens
cgccgccgcccaaagaagcgcgagtcgccgcccgaaccggccgccgccgacaccccgctccggcccg

SEQ ID NO: 58221 - DNA, 67 bp, Homo sapiens
aaagaagcgcgagtcgccgcccgaaccggccgccgccgacaccccgctccggcccggggctgaggag

SEQ ID NO: 58222 - DNA, 67 bp, Homo sapiens
agtcgccgcccgaaccggccgccgccgacaccccgctccggcccggggctgaggaggaagccgagaa

SEQ ID NO: 58223 - DNA, 67 bp, Homo sapiens
ccgaaccggccgccgccgacaccccgctccggcccggggctgaggaggaagccgagaaggaggagga

SEQ ID NO: 58224 - DNA, 67 bp, Homo sapiens
ggagaaggaggaggcggcggagggcgggggaagaggacggccgttccgggttccgcctgagcccgca

SEQ ID NO: 58225 - DNA, 69 bp, Homo sapiens
gaggcggcggagggcgggggaagaggacggccgttccgggttccgcctgagcccgcagcgcaggacgag

SEQ ID NO: 58226 - DNA, 68 bp, Homo sapiens
agggcgggggaagaggacggccgttccgggttccgcctgagcccgcagcgcaggacgaggaggcggga

SEQ ID NO: 58227 - DNA, 72 bp, Homo sapiens
aagaggacggccgttccgggttccgcctgagcccgcagcgcaggacgaggaggcgggagcggcgcggtgaga

SEQ ID NO: 58228 - DNA, 73 bp, Homo sapiens
acggccgttccgggttccgcctgagcccgcagcgcaggacgaggaggcgggagcggcgcggtgagagagaggc

SEQ ID NO: 58229 - DNA, 74 bp, Homo sapiens
ccgggttccgcctgagcccgcagcgcaggacgaggaggcgggagcggcgcggtgagagagaggcggatgaaggg

SEQ ID NO: 58230 - DNA, 76 bp, Homo sapiens
tgagcccgcagcgcaggacgaggaggcgggagcggcgcggtgagagagaggcggatgaaggggaggcgacgtcttt

SEQ ID NO: 58231 - DNA, 73 bp, Homo sapiens
agcgcaggacgaggaggcgggagcggcgcggtgagagagaggcggatgaaggggaggcgacgtcttttccagg

SEQ ID NO: 58232 - DNA, 72 bp, Homo sapiens
aggaggcgggagcggcgcggtgagagagaggcggatgaaggggaggcgacgtcttttccagggccgtgcgcg

SEQ ID NO: 58233 - DNA, 73 bp, Homo sapiens
agcggcgcggtgagagagaggcggatgaaggggaggcgacgtcttttccagggccgtgcgcggcccacgtcgc

SEQ ID NO: 58234 - DNA, 69 bp, Homo sapiens
agagagaggcggatgaaggggaggcgacgtcttttccagggccgtgcgcggcccacgtcgccggggccc

SEQ ID NO: 58235 - DNA, 68 bp, Homo sapiens
gatgaaggggaggcgacgtcttttccagggccgtgcgcggcccacgtcgccggggccccggaggacga

SEQ ID NO: 58236 - DNA, 67 bp, Homo sapiens
aggcgacgtcttttccagggccgtgcgcggcccacgtcgccggggccccggaggacgaggacgacga

SEQ ID NO: 58237 - DNA, 70 bp, Homo sapiens
agggccgtgcgcggcccacgtcgccggggccccggaggacgaggacgacgaggagcaggcggtggcggca

SEQ ID NO: 58238 - DNA, 73 bp, Homo sapiens
cccacgtcgccggggccccggaggacgaggacgacgaggagcaggcggtggcggcagctcctcacgctcacac

SEQ ID NO: 58239 - DNA, 75 bp, Homo sapiens
cggggccccggaggacgaggacgacgaggagcaggcggtggcggcagctcctcacgctcacacggccactgcttc

SEQ ID NO: 58240 - DNA, 76 bp, Homo sapiens
ccggaggacgaggacgacgaggagcaggcggtggcggcagctcctcacgctcacacggccactgcttccccgcctc

SEQ ID NO: 58241 - DNA, 76 bp, Homo sapiens
aggagcaggcggtggcggcagctcctcacgctcacacggccactgcttccccgcctcccggctccgcccgccgcgc

SEQ ID NO: 58242 - DNA, 76 bp, Homo sapiens
ccgaaattacatccgggctccgcgacacgcccgaaccacaactcccagaatgctctgcatcgacagcgggagacga

SEQ ID NO: 58243 - DNA, 78 bp, Homo sapiens
attacatccgggctccgcgacacgcccgaaccacaactcccagaatgctctgcatcgacagcgggagacgagacgcgc

SEQ ID NO: 58244 - DNA, 78 bp, Homo sapiens
tccgcgacacgcccgaaccacaactcccagaatgctctgcatcgacagcgggagacgagacgcgctcgggcgtcgctt

SEQ ID NO: 58245 - DNA, 79 bp, Homo sapiens
cccgaaccacaactcccagaatgctctgcatcgacagcgggagacgagacgcgctcgggcgtcgctttgctgccgctag

SEQ ID NO: 58246 - DNA, 81 bp, Homo sapiens
aactcccagaatgctctgcatcgacagcgggagacgagacgcgctcgggcgtcgctttgctgccgctaggccctgtgctcc

SEQ ID NO: 58247 - DNA, 82 bp, Homo sapiens
agaatgctctgcatcgacagcgggagacgagacgcgctcgggcgtcgctttgctgccgctaggccctgtgctcctccccgca

SEQ ID NO: 58248 - DNA, 77 bp, Homo sapiens
atcgacagcgggagacgagacgcgctcgggcgtcgctttgctgccgctaggccctgtgctcctccccgcagcggaag

SEQ ID NO: 58249 - DNA, 76 bp, Homo sapiens
agacgagacgcgctcgggcgtcgctttgctgccgctaggccctgtgctcctccccgcagcggaaggcctacgaata

SEQ ID NO: 58250 - DNA, 75 bp, Homo sapiens
cgctcgggcgtcgctttgctgccgctaggccctgtgctcctccccgcagcggaaggcctacgaatacgcggtgtc

SEQ ID NO: 58251 - DNA, 75 bp, Homo sapiens
tcgctttgctgccgctaggccctgtgctcctccccgcagcggaaggcctacgaatacgcggtgtcttacgtcgct

SEQ ID NO: 58252 - DNA, 75 bp, Homo sapiens
ttgctgccgctaggccctgtgctcctccccgcagcggaaggcctacgaatacgcggtgtcttacgtcgcttcctc

SEQ ID NO: 58253 - DNA, 70 bp, Homo sapiens
cctgtgctcctccccgcagcggaaggcctacgaatacgcggtgtcttacgtcgcttcctccgttcttcgt

SEQ ID NO: 58254 - DNA, 72 bp, Homo sapiens
tccccgcagcggaaggcctacgaatacgcggtgtcttacgtcgcttcctccgttcttcgttgcactggccaa

SEQ ID NO: 58255 - DNA, 70 bp, Homo sapiens
agcggaaggcctacgaatacgcggtgtcttacgtcgcttcctccgttcttcgttgcactggccaacggga

SEQ ID NO: 58256 - DNA, 70 bp, Homo sapiens
tacgaatacgcggtgtcttacgtcgcttcctccgttcttcgttgcactggccaacgggacgcttagtctt

SEQ ID NO: 58257 - DNA, 70 bp, Homo sapiens
acgcggtgtcttacgtcgcttcctccgttcttcgttgcactggccaacgggacgcttagtctttcggcaa

SEQ ID NO: 58258 - DNA, 69 bp, Homo sapiens
ttacgtcgcttcctccgttcttcgttgcactggccaacgggacgcttagtctttcggcaacggggtgaa

SEQ ID NO: 58259 - DNA, 67 bp, Homo sapiens
tcctccgttcttcgttgcactggccaacgggacgcttagtctttcggcaacggggtgaaaccttcct

SEQ ID NO: 58260 - DNA, 69 bp, Homo sapiens
ttcgttgcactggccaacgggacgcttagtctttcggcaacggggtgaaaccttccttgtgcctgaaaa

SEQ ID NO: 58261 - DNA, 63 bp, Homo sapiens
aacgggacgcttagtctttcggcaacggggtgaaaccttccttgtgcctgaaaaaacggtact

SEQ ID NO: 58262 - DNA, 66 bp, Homo sapiens
ttagtctttcggcaacggggtgaaaccttccttgtgcctgaaaaaacggtacttcgcggtgtggct

SEQ ID NO: 58263 - DNA, 66 bp, Homo sapiens
ctttcggcaacggggtgaaaccttccttgtgcctgaaaaaacggtacttcgcggtgtggcttcggc

SEQ ID NO: 58264 - DNA, 70 bp, Homo sapiens
tgaaaccttccttgtgcctgaaaaaacggtacttcgcggtgtggcttcggcgcctgcgcaaaaggccgcg

SEQ ID NO: 58265 - DNA, 72 bp, Homo sapiens
cttgtgcctgaaaaaacggtacttcgcggtgtggcttcggcgcctgcgcaaaaggccgcggggcgcactcca

SEQ ID NO: 58266 - DNA, 68 bp, Homo sapiens
aaaaaacggtacttcgcggtgtggcttcggcgcctgcgcaaaaggccgcggggcgcactccagttccc

SEQ ID NO: 58267 - DNA, 74 bp, Homo sapiens
tgtggcttcggcgcctgcgcaaaaggccgcggggcgcactccagttcccggcaggccccgcgacgcgcgtttgc

SEQ ID NO: 58268 - DNA, 75 bp, Homo sapiens
ttcggcgcctgcgcaaaaggccgcggggcgcactccagttcccggcaggccccgcgacgcgcgtttgcgtgctga

SEQ ID NO: 58269 - DNA, 73 bp, Homo sapiens
aaaaggccgcggggcgcactccagttcccggcaggccccgcgacgcgcgtttgcgtgctgacgcacgcagtta

SEQ ID NO: 58270 - DNA, 80 bp, Homo sapiens
gggcgcactccagttcccggcaggccccgcgacgcgcgtttgcgtgctgacgcacgcagttagtcgtgctgacgtgcagc

SEQ ID NO: 58271 - DNA, 79 bp, Homo sapiens
actccagttcccggcaggccccgcgacgcgcgtttgcgtgctgacgcacgcagttagtcgtgctgacgtgcagcgcggc

SEQ ID NO: 58272 - DNA, 78 bp, Homo sapiens
ccggcaggccccgcgacgcgcgtttgcgtgctgacgcacgcagttagtcgtgctgacgtgcagcgcggcccaggcggg

SEQ ID NO: 58273 - DNA, 82 bp, Homo sapiens
gacgcgcgtttgcgtgctgacgcacgcagttagtcgtgctgacgtgcagcgcggcccaggcggggtgcgagtggcgcagttg

SEQ ID NO: 58274 - DNA, 81 bp, Homo sapiens
cgtttgcgtgctgacgcacgcagttagtcgtgctgacgtgcagcgcggcccaggcggggtgcgagtggcgcagttggagcc

SEQ ID NO: 58275 - DNA, 80 bp, Homo sapiens
ctgacgcacgcagttagtcgtgctgacgtgcagcgcggcccaggcggggtgcgagtggcgcagttggagcccgttgcggc

SEQ ID NO: 58276 - DNA, 77 bp, Homo sapiens
ttagtcgtgctgacgtgcagcgcggcccaggcggggtgcgagtggcgcagttggagcccgttgcggcccctgaggaa

SEQ ID NO: 58277 - DNA, 78 bp, Homo sapiens
gtgctgacgtgcagcgcggcccaggcggggtgcgagtggcgcagttggagcccgttgcggcccctgaggaagcgagga

SEQ ID NO: 58278 - DNA, 73 bp, Homo sapiens
agcgcggcccaggcggggtgcgagtggcgcagttggagcccgttgcggcccctgaggaagcgaggaggcgtcg

SEQ ID NO: 58279 - DNA, 74 bp, Homo sapiens
aggcggggtgcgagtggcgcagttggagcccgttgcggcccctgaggaagcgaggaggcgtcggcgtcggctga

SEQ ID NO: 58280 - DNA, 71 bp, Homo sapiens
aggcgggcggaccggcgaggcgaggcggcggccccaggcccgagggactcgggagctcgagcagcggcggc

SEQ ID NO: 58281 - DNA, 72 bp, Homo sapiens
accggcgaggcgaggcggcggccccaggcccgagggactcgggagctcgagcagcggcggcggcaagacctc

SEQ ID NO: 58282 - DNA, 72 bp, Homo sapiens
cgaggcgaggcggcggccccaggcccgagggactcgggagctcgagcagcggcggcggcaagacctctcccc

SEQ ID NO: 58283 - DNA, 71 bp, Homo sapiens
cggccccaggcccgagggactcgggagctcgagcagcggcggcggcaagacctctccccctcggaggcggc

SEQ ID NO: 58284 - DNA, 72 bp, Homo sapiens
actcgggagctcgagcagcggcggcggcaagacctctccccctcggaggcggcgggcggaggcggcgggtga

SEQ ID NO: 58285 - DNA, 71 bp, Homo sapiens
agcagcggcggcggcaagacctctccccctcggaggcggcgggcggaggcggcgggtgagagggtgaggga

SEQ ID NO: 58286 - DNA, 71 bp, Homo sapiens
cggcggcaagacctctccccctcggaggcggcgggcggaggcggcgggtgagagggtgagggagccagcga

SEQ ID NO: 58287 - DNA, 68 bp, Homo sapiens
ccctcggaggcggcgggcggaggcggcgggtgagagggtgagggagccagcgagccgggtgggggagg

SEQ ID NO: 58288 - DNA, 67 bp, Homo sapiens
tggttagtttggggccaggggcctgacccgtgtctccccgctccccctcaggagcggtggtgccccc

SEQ ID NO: 58289 - DNA, 65 bp, Homo sapiens
ccaggggcctgacccgtgtctccccgctccccctcaggagcggtggtgccccccccgggcacggg

SEQ ID NO: 58290 - DNA, 68 bp, Homo sapiens
tgacccgtgtctccccgctccccctcaggagcggtggtgccccccccgggcacggggccatgtacaac

SEQ ID NO: 58291 - DNA, 66 bp, Homo sapiens
ccccgctccccctcaggagcggtggtgccccccccgggcacggggccatgtacaacgggatcgggc

SEQ ID NO: 58292 - DNA, 68 bp, Homo sapiens
ccctcaggagcggtggtgccccccccgggcacggggccatgtacaacgggatcgggctgccgacgccc

SEQ ID NO: 58293 - DNA, 66 bp, Homo sapiens
ggagcggtggtgccccccccgggcacggggccatgtacaacgggatcgggctgccgacgccccggg

SEQ ID NO: 58294 - DNA, 68 bp, Homo sapiens
cccccgggcacggggccatgtacaacgggatcgggctgccgacgccccggggcagcggcaccaacggc

SEQ ID NO: 58295 - DNA, 72 bp, Homo sapiens
acggggccatgtacaacgggatcgggctgccgacgccccggggcagcggcaccaacggctacgtccagcgca

SEQ ID NO: 58296 - DNA, 72 bp, Homo sapiens
atgtacaacgggatcgggctgccgacgccccggggcagcggcaccaacggctacgtccagcgcaacctgtcc

SEQ ID NO: 58297 - DNA, 72 bp, Homo sapiens
cgggatcgggctgccgacgccccggggcagcggcaccaacggctacgtccagcgcaacctgtccctggtgcg

SEQ ID NO: 58298 - DNA, 71 bp, Homo sapiens
ctgccgacgccccggggcagcggcaccaacggctacgtccagcgcaacctgtccctggtgcggggccgccg

SEQ ID NO: 58299 - DNA, 74 bp, Homo sapiens
ggcagcggcaccaacggctacgtccagcgcaacctgtccctggtgcggggccgccggggtgagcggcctgacta

SEQ ID NO: 58300 - DNA, 70 bp, Homo sapiens
accaacggctacgtccagcgcaacctgtccctggtgcggggccgccggggtgagcggcctgactacaagg

SEQ ID NO: 58301 - DNA, 72 bp, Homo sapiens
ctacgtccagcgcaacctgtccctggtgcggggccgccggggtgagcggcctgactacaagggagaggagga

SEQ ID NO: 58302 - DNA, 72 bp, Homo sapiens
agcgcaacctgtccctggtgcggggccgccggggtgagcggcctgactacaagggagaggaggaactgcggc

SEQ ID NO: 58303 - DNA, 72 bp, Homo sapiens
gtccctggtgcggggccgccggggtgagcggcctgactacaagggagaggaggaactgcggcgcctggaggc

SEQ ID NO: 58304 - DNA, 74 bp, Homo sapiens
ccgccggggtgagcggcctgactacaagggagaggaggaactgcggcgcctggaggctgccctggtgaagcggc

SEQ ID NO: 58305 - DNA, 79 bp, Homo sapiens
tgagcggcctgactacaagggagaggaggaactgcggcgcctggaggctgccctggtgaagcggcctaatcctgacatc

SEQ ID NO: 58306 - DNA, 76 bp, Homo sapiens
actacaagggagaggaggaactgcggcgcctggaggctgccctggtgaagcggcctaatcctgacatcctggacca

SEQ ID NO: 58307 - DNA, 78 bp, Homo sapiens
agaggaggaactgcggcgcctggaggctgccctggtgaagcggcctaatcctgacatcctggaccacgagcgcaagcg

SEQ ID NO: 58308 - DNA, 79 bp, Homo sapiens
aactgcggcgcctggaggctgccctggtgaagcggcctaatcctgacatcctggaccacgagcgcaagcggcgcgtcga

SEQ ID NO: 58309 - DNA, 84 bp, Homo sapiens
tggaggctgccctggtgaagcggcctaatcctgacatcctggaccacgagcgcaagcggcgcgtcgagctgcgatgcctcgagc

SEQ ID NO: 58310 - DNA, 83 bp, Homo sapiens
cctggtgaagcggcctaatcctgacatcctggaccacgagcgcaagcggcgcgtcgagctgcgatgcctcgagctggaggaga

SEQ ID NO: 58311 - DNA, 84 bp, Homo sapiens
aagcggcctaatcctgacatcctggaccacgagcgcaagcggcgcgtcgagctgcgatgcctcgagctggaggagatgatggaa

SEQ ID NO: 58312 - DNA, 85 bp, Homo sapiens
taatcctgacatcctggaccacgagcgcaagcggcgcgtcgagctgcgatgcctcgagctggaggagatgatggaagagcagggg

SEQ ID NO: 58313 - DNA, 84 bp, Homo sapiens
atcctggaccacgagcgcaagcggcgcgtcgagctgcgatgcctcgagctggaggagatgatggaagagcaggggtgagggaga

SEQ ID NO: 58314 - DNA, 83 bp, Homo sapiens
acgagcgcaagcggcgcgtcgagctgcgatgcctcgagctggaggagatgatggaagagcaggggtgagggagagctggggga

SEQ ID NO: 58315 - DNA, 86 bp, Homo sapiens
gcgtcgagctgcgatgcctcgagctggaggagatgatggaagagcaggggtgagggagagctgggggagagtcaagcactgaatga

SEQ ID NO: 58316 - DNA, 71 bp, Homo sapiens
ggaaagtgtcctgtcgagcttaaccctgaagggatttgttcttcaggtacgaggaacagcaaattcaggaa

SEQ ID NO: 58317 - DNA, 70 bp, Homo sapiens
gtgtcctgtcgagcttaaccctgaagggatttgttcttcaggtacgaggaacagcaaattcaggaaaaag

SEQ ID NO: 58318 - DNA, 68 bp, Homo sapiens
ttaaccctgaagggatttgttcttcaggtacgaggaacagcaaattcaggaaaaagtggcgacctttc

SEQ ID NO: 58319 - DNA, 71 bp, Homo sapiens
aagggatttgttcttcaggtacgaggaacagcaaattcaggaaaaagtggcgacctttcgactcatgttgc

SEQ ID NO: 58320 - DNA, 74 bp, Homo sapiens
ttgttcttcaggtacgaggaacagcaaattcaggaaaaagtggcgacctttcgactcatgttgctggagaagga

SEQ ID NO: 58321 - DNA, 74 bp, Homo sapiens
gtacgaggaacagcaaattcaggaaaaagtggcgacctttcgactcatgttgctggagaaggatgtgaaccctg

SEQ ID NO: 58322 - DNA, 71 bp, Homo sapiens
aaattcaggaaaaagtggcgacctttcgactcatgttgctggagaaggatgtgaaccctgggggcaaggag

SEQ ID NO: 58323 - DNA, 71 bp, Homo sapiens
aggaaaaagtggcgacctttcgactcatgttgctggagaaggatgtgaaccctgggggcaaggaggagacc

SEQ ID NO: 58324 - DNA, 75 bp, Homo sapiens
tggcgacctttcgactcatgttgctggagaaggatgtgaaccctgggggcaaggaggagaccccagggcagaggc

SEQ ID NO: 58325 - DNA, 77 bp, Homo sapiens
tcgactcatgttgctggagaaggatgtgaaccctgggggcaaggaggagaccccagggcagaggccagcgtgagtgt

SEQ ID NO: 58326 - DNA, 76 bp, Homo sapiens
tggagaaggatgtgaaccctgggggcaaggaggagaccccagggcagaggccagcgtgagtgttgcgctctccctc

SEQ ID NO: 58327 - DNA, 77 bp, Homo sapiens
atgtgaaccctgggggcaaggaggagaccccagggcagaggccagcgtgagtgttgcgctctccctcgatgactctg

SEQ ID NO: 58328 - DNA, 71 bp, Homo sapiens
atggctctgtcctttatatttccttcagacttttgcccttcttttctctagggtcacggagactcaccagt

SEQ ID NO: 58329 - DNA, 71 bp, Homo sapiens
ttatatttccttcagacttttgcccttcttttctctagggtcacggagactcaccagttggcagaattaaa

SEQ ID NO: 58330 - DNA, 73 bp, Homo sapiens
ttcagacttttgcccttcttttctctagggtcacggagactcaccagttggcagaattaaatgagaagaagaa

SEQ ID NO: 58331 - DNA, 73 bp, Homo sapiens
ttttgcccttcttttctctagggtcacggagactcaccagttggcagaattaaatgagaagaagaatgaaaga

SEQ ID NO: 58332 - DNA, 75 bp, Homo sapiens
tttctctagggtcacggagactcaccagttggcagaattaaatgagaagaagaatgaaagactccgtgctgcctt

SEQ ID NO: 58333 - DNA, 78 bp, Homo sapiens
acggagactcaccagttggcagaattaaatgagaagaagaatgaaagactccgtgctgcctttggcatcagtgattct

SEQ ID NO: 58334 - DNA, 78 bp, Homo sapiens
accagttggcagaattaaatgagaagaagaatgaaagactccgtgctgcctttggcatcagtgattcttacgtagatg

SEQ ID NO: 58335 - DNA, 78 bp, Homo sapiens
agaattaaatgagaagaagaatgaaagactccgtgctgcctttggcatcagtgattcttacgtagatggcagctcttt

SEQ ID NO: 58336 - DNA, 82 bp, Homo sapiens
taaatgagaagaagaatgaaagactccgtgctgcctttggcatcagtgattcttacgtagatggcagctcttttgatcctca

SEQ ID NO: 58337 - DNA, 81 bp, Homo sapiens
aagaatgaaagactccgtgctgcctttggcatcagtgattcttacgtagatggcagctcttttgatcctcagcgtcgtgcc

SEQ ID NO: 58338 - DNA, 82 bp, Homo sapiens
tccgtgctgcctttggcatcagtgattcttacgtagatggcagctcttttgatcctcagcgtcgtgcccgagaagctaaaca

SEQ ID NO: 58339 - DNA, 80 bp, Homo sapiens
ctttggcatcagtgattcttacgtagatggcagctcttttgatcctcagcgtcgtgcccgagaagctaaacaaccagctc

SEQ ID NO: 58340 - DNA, 80 bp, Homo sapiens
atcagtgattcttacgtagatggcagctcttttgatcctcagcgtcgtgcccgagaagctaaacaaccagctcctgagcc

SEQ ID NO: 58341 - DNA, 78 bp, Homo sapiens
tcttacgtagatggcagctcttttgatcctcagcgtcgtgcccgagaagctaaacaaccagctcctgagcctcccaaa

SEQ ID NO: 58342 - DNA, 74 bp, Homo sapiens
agctcttttgatcctcagcgtcgtgcccgagaagctaaacaaccagctcctgagcctcccaaaccttacaggta

SEQ ID NO: 58343 - DNA, 74 bp, Homo sapiens
ttttgatcctcagcgtcgtgcccgagaagctaaacaaccagctcctgagcctcccaaaccttacaggtatacaa

SEQ ID NO: 58344 - DNA, 72 bp, Homo sapiens
tcgtgcccgagaagctaaacaaccagctcctgagcctcccaaaccttacaggtatacaaggccaagaaacca

SEQ ID NO: 58345 - DNA, 72 bp, Homo sapiens
agaagctaaacaaccagctcctgagcctcccaaaccttacaggtatacaaggccaagaaaccactgtcagct

SEQ ID NO: 58346 - DNA, 71 bp, Homo sapiens
taaacaaccagctcctgagcctcccaaaccttacaggtatacaaggccaagaaaccactgtcagcttcttt

SEQ ID NO: 58347 - DNA, 69 bp, Homo sapiens
aaaagaaaggaatgtttgttctaccacccatctctgctgcttttcatttttccctagccttgttcggga

SEQ ID NO: 58348 - DNA, 72 bp, Homo sapiens
aaaggaatgtttgttctaccacccatctctgctgcttttcatttttccctagccttgttcgggagtctagca

SEQ ID NO: 58349 - DNA, 76 bp, Homo sapiens
tgttctaccacccatctctgctgcttttcatttttccctagccttgttcgggagtctagcagttctcgctcaccaa

SEQ ID NO: 58350 - DNA, 75 bp, Homo sapiens
tctctgctgcttttcatttttccctagccttgttcgggagtctagcagttctcgctcaccaaccccaaagcagaa

SEQ ID NO: 58351 - DNA, 71 bp, Homo sapiens
ttttcatttttccctagccttgttcgggagtctagcagttctcgctcaccaaccccaaagcagaagaagaa

SEQ ID NO: 58352 - DNA, 70 bp, Homo sapiens
atttttccctagccttgttcgggagtctagcagttctcgctcaccaaccccaaagcagaagaagaagaaa

SEQ ID NO: 58353 - DNA, 71 bp, Homo sapiens
agaaaaagaagaaagatagaggacggtaagttagttggaaagtgactctgatagccagaggaccaatcctg

SEQ ID NO: 58354 - DNA, 78 bp, Homo sapiens
agagattgtaagtgggagggccaggaaagaagccaagcaggatgagcttgcttttgaatccatctttagcaggtcaga

SEQ ID NO: 58355 - DNA, 80 bp, Homo sapiens
aagtgggagggccaggaaagaagccaagcaggatgagcttgcttttgaatccatctttagcaggtcagagagcagctctc

SEQ ID NO: 58356 - DNA, 81 bp, Homo sapiens
gaaagaagccaagcaggatgagcttgcttttgaatccatctttagcaggtcagagagcagctctcctcgacgggagagaaa

SEQ ID NO: 58357 - DNA, 80 bp, Homo sapiens
aagccaagcaggatgagcttgcttttgaatccatctttagcaggtcagagagcagctctcctcgacgggagagaaagaaa

SEQ ID NO: 58358 - DNA, 79 bp, Homo sapiens
atgagcttgcttttgaatccatctttagcaggtcagagagcagctctcctcgacgggagagaaagaaaagctcaaagaa

SEQ ID NO: 58359 - DNA, 76 bp, Homo sapiens
cttttgaatccatctttagcaggtcagagagcagctctcctcgacgggagagaaagaaaagctcaaagaagaagaa

SEQ ID NO: 58360 - DNA, 78 bp, Homo sapiens
atctttagcaggtcagagagcagctctcctcgacgggagagaaagaaaagctcaaagaagaagaagcacaggtatgag

SEQ ID NO: 58361 - DNA, 77 bp, Homo sapiens
tcagagagcagctctcctcgacgggagagaaagaaaagctcaaagaagaagaagcacaggtatgaggtgggaatact

SEQ ID NO: 58362 - DNA, 75 bp, Homo sapiens
agctctcctcgacgggagagaaagaaaagctcaaagaagaagaagcacaggtatgaggtgggaatacttgaatga

SEQ ID NO: 58363 - DNA, 73 bp, Homo sapiens
acgggagagaaagaaaagctcaaagaagaagaagcacaggtatgaggtgggaatacttgaatgactggagaag

SEQ ID NO: 58364 - DNA, 74 bp, Homo sapiens
aagaaaagctcaaagaagaagaagcacaggtatgaggtgggaatacttgaatgactggagaaggtttgctgaat

SEQ ID NO: 58365 - DNA, 76 bp, Homo sapiens
aaagaagaagaagcacaggtatgaggtgggaatacttgaatgactggagaaggtttgctgaattcaggcagaggtg

SEQ ID NO: 58366 - DNA, 76 bp, Homo sapiens
aagaagcacaggtatgaggtgggaatacttgaatgactggagaaggtttgctgaattcaggcagaggtgtttctta

SEQ ID NO: 58367 - DNA, 73 bp, Homo sapiens
aggtatgaggtgggaatacttgaatgactggagaaggtttgctgaattcaggcagaggtgtttcttatgtttt

SEQ ID NO: 58368 - DNA, 73 bp, Homo sapiens
tgggaatacttgaatgactggagaaggtttgctgaattcaggcagaggtgtttcttatgttttttcttctctt

SEQ ID NO: 58369 - DNA, 74 bp, Homo sapiens
ttgctgaattcaggcagaggtgtttcttatgttttttcttctcttttttccaacaggtcagaatctgagtccaa

SEQ ID NO: 58370 - DNA, 70 bp, Homo sapiens
cttatgttttttcttctcttttttccaacaggtcagaatctgagtccaagaaacgtaagcataggtaaga

SEQ ID NO: 58371 - DNA, 74 bp, Homo sapiens
tcttctcttttttccaacaggtcagaatctgagtccaagaaacgtaagcataggtaagagctctttaactcata

SEQ ID NO: 58372 - DNA, 71 bp, Homo sapiens
cttttttccaacaggtcagaatctgagtccaagaaacgtaagcataggtaagagctctttaactcataggg

SEQ ID NO: 58373 - DNA, 76 bp, Homo sapiens
aacaggtcagaatctgagtccaagaaacgtaagcataggtaagagctctttaactcatagggggcgcagtggcatg

SEQ ID NO: 58374 - DNA, 76 bp, Homo sapiens
tgagtccaagaaacgtaagcataggtaagagctctttaactcatagggggcgcagtggcatgtggagtggtgattt

SEQ ID NO: 58375 - DNA, 72 bp, Homo sapiens
aagaaacgtaagcataggtaagagctctttaactcatagggggcgcagtggcatgtggagtggtgatttttt

SEQ ID NO: 58376 - DNA, 75 bp, Homo sapiens
agcataggtaagagctctttaactcatagggggcgcagtggcatgtggagtggtgatttttttttcttggagtga

SEQ ID NO: 58377 - DNA, 59 bp, Homo sapiens
ggttttatttccttttttaaagaagttacttttaacaacctttccttatttcccaggtc

SEQ ID NO: 58378 - DNA, 61 bp, Homo sapiens
ccttttttaaagaagttacttttaacaacctttccttatttcccaggtctcccactccaaa

SEQ ID NO: 58379 - DNA, 64 bp, Homo sapiens
agaagttacttttaacaacctttccttatttcccaggtctcccactccaaagagcaaacgtaaa

SEQ ID NO: 58380 - DNA, 65 bp, Homo sapiens
ttacttttaacaacctttccttatttcccaggtctcccactccaaagagcaaacgtaaatctaag

SEQ ID NO: 58381 - DNA, 66 bp, Homo sapiens
cctttccttatttcccaggtctcccactccaaagagcaaacgtaaatctaaggacaaaaagcgaaa

SEQ ID NO: 58382 - DNA, 69 bp, Homo sapiens
ttcccaggtctcccactccaaagagcaaacgtaaatctaaggacaaaaagcgaaagcggtgagtgaatt

SEQ ID NO: 58383 - DNA, 69 bp, Homo sapiens
ggtctcccactccaaagagcaaacgtaaatctaaggacaaaaagcgaaagcggtgagtgaatttgtggg

SEQ ID NO: 58384 - DNA, 68 bp, Homo sapiens
aaagagcaaacgtaaatctaaggacaaaaagcgaaagcggtgagtgaatttgtggggaatttgcttag

SEQ ID NO: 58385 - DNA, 67 bp, Homo sapiens
aaacgtaaatctaaggacaaaaagcgaaagcggtgagtgaatttgtggggaatttgcttaggaagta

SEQ ID NO: 58386 - DNA, 69 bp, Homo sapiens
gacaaaaagcgaaagcggtgagtgaatttgtggggaatttgcttaggaagtaagtgaacgccaccttag

SEQ ID NO: 58387 - DNA, 69 bp, Homo sapiens
aaagcgaaagcggtgagtgaatttgtggggaatttgcttaggaagtaagtgaacgccaccttagtggga

SEQ ID NO: 58388 - DNA, 76 bp, Homo sapiens
agaatccagggcaggtacagcagtaccctgagctgtggtggtggtcttccttcaggtctcgaagtacaacaccagc

SEQ ID NO: 58389 - DNA, 74 bp, Homo sapiens
aggtacagcagtaccctgagctgtggtggtggtcttccttcaggtctcgaagtacaacaccagcccccaagagc

SEQ ID NO: 58390 - DNA, 71 bp, Homo sapiens
agtaccctgagctgtggtggtggtcttccttcaggtctcgaagtacaacaccagcccccaagagccgccgg

SEQ ID NO: 58391 - DNA, 70 bp, Homo sapiens
tggtggtggtcttccttcaggtctcgaagtacaacaccagcccccaagagccgccgggcccaccgttcaa

SEQ ID NO: 58392 - DNA, 71 bp, Homo sapiens
cttccttcaggtctcgaagtacaacaccagcccccaagagccgccgggcccaccgttcaacttctgctgac

SEQ ID NO: 58393 - DNA, 74 bp, Homo sapiens
ttcaggtctcgaagtacaacaccagcccccaagagccgccgggcccaccgttcaacttctgctgactctgcttc

SEQ ID NO: 58394 - DNA, 73 bp, Homo sapiens
tacaacaccagcccccaagagccgccgggcccaccgttcaacttctgctgactctgcttcctcctccgatact

SEQ ID NO: 58395 - DNA, 71 bp, Homo sapiens
accagcccccaagagccgccgggcccaccgttcaacttctgctgactctgcttcctcctccgatacttccc

SEQ ID NO: 58396 - DNA, 72 bp, Homo sapiens
aagagccgccgggcccaccgttcaacttctgctgactctgcttcctcctccgatacttcccgcagtcggtaa

SEQ ID NO: 58397 - DNA, 72 bp, Homo sapiens
ccaccgttcaacttctgctgactctgcttcctcctccgatacttcccgcagtcggtaaggggtagtccagga

SEQ ID NO: 58398 - DNA, 72 bp, Homo sapiens
ttcaacttctgctgactctgcttcctcctccgatacttcccgcagtcggtaaggggtagtccaggaggaagg

SEQ ID NO: 58399 - DNA, 79 bp, Homo sapiens
tttgagctgatttccttcctctcccacgtcctcaattaactcctgcaggtctcgaagtgctgcagctaaaactcataca

SEQ ID NO: 58400 - DNA, 77 bp, Homo sapiens
ttccttcctctcccacgtcctcaattaactcctgcaggtctcgaagtgctgcagctaaaactcatacaactgccttg

SEQ ID NO: 58401 - DNA, 79 bp, Homo sapiens
tctcccacgtcctcaattaactcctgcaggtctcgaagtgctgcagctaaaactcatacaactgccttggctgggcgaa

SEQ ID NO: 58402 - DNA, 78 bp, Homo sapiens
tcctcaattaactcctgcaggtctcgaagtgctgcagctaaaactcatacaactgccttggctgggcgaagtccttcc

SEQ ID NO: 58403 - DNA, 78 bp, Homo sapiens
aactcctgcaggtctcgaagtgctgcagctaaaactcatacaactgccttggctgggcgaagtccttcccctgcttca

SEQ ID NO: 58404 - DNA, 77 bp, Homo sapiens
tctcgaagtgctgcagctaaaactcatacaactgccttggctgggcgaagtccttcccctgcttcagggcgacgcgg

SEQ ID NO: 58405 - DNA, 73 bp, Homo sapiens
cagctaaaactcatacaactgccttggctgggcgaagtccttcccctgcttcagggcgacgcggggagggaga

SEQ ID NO: 58406 - DNA, 75 bp, Homo sapiens
tcatacaactgccttggctgggcgaagtccttcccctgcttcagggcgacgcggggagggagatgcgcctttcag

SEQ ID NO: 58407 - DNA, 73 bp, Homo sapiens
aactgccttggctgggcgaagtccttcccctgcttcagggcgacgcggggagggagatgcgcctttcagtgaa

SEQ ID NO: 58408 - DNA, 72 bp, Homo sapiens
ctgggcgaagtccttcccctgcttcagggcgacgcggggagggagatgcgcctttcagtgaaccaggtacta

SEQ ID NO: 58409 - DNA, 74 bp, Homo sapiens
ttcccctgcttcagggcgacgcggggagggagatgcgcctttcagtgaaccaggtactaccagcacacaacggc

SEQ ID NO: 58410 - DNA, 75 bp, Homo sapiens
ctgcttcagggcgacgcggggagggagatgcgcctttcagtgaaccaggtactaccagcacacaacggcctagta

SEQ ID NO: 58411 - DNA, 75 bp, Homo sapiens
gcggggagggagatgcgcctttcagtgaaccaggtactaccagcacacaacggcctagtagcccggagactgcta

SEQ ID NO: 58412 - DNA, 74 bp, Homo sapiens
agggagatgcgcctttcagtgaaccaggtactaccagcacacaacggcctagtagcccggagactgctacgaaa

SEQ ID NO: 58413 - DNA, 75 bp, Homo sapiens
tttcagtgaaccaggtactaccagcacacaacggcctagtagcccggagactgctacgaaacagcctagcagccc

SEQ ID NO: 58414 - DNA, 74 bp, Homo sapiens
aaccaggtactaccagcacacaacggcctagtagcccggagactgctacgaaacagcctagcagcccttatgaa

SEQ ID NO: 58415 - DNA, 76 bp, Homo sapiens
actaccagcacacaacggcctagtagcccggagactgctacgaaacagcctagcagcccttatgaagacaaagata

SEQ ID NO: 58416 - DNA, 73 bp, Homo sapiens
aacggcctagtagcccggagactgctacgaaacagcctagcagcccttatgaagacaaagataaagacaagaa

SEQ ID NO: 58417 - DNA, 75 bp, Homo sapiens
tagtagcccggagactgctacgaaacagcctagcagcccttatgaagacaaagataaagacaagaaggaggtatg

SEQ ID NO: 58418 - DNA, 75 bp, Homo sapiens
agactgctacgaaacagcctagcagcccttatgaagacaaagataaagacaagaaggaggtatgttcctgagttg

SEQ ID NO: 58419 - DNA, 75 bp, Homo sapiens
aaacagcctagcagcccttatgaagacaaagataaagacaagaaggaggtatgttcctgagttggtgatgttcat

SEQ ID NO: 58420 - DNA, 73 bp, Homo sapiens
aagttttggcgtttatgaatccctatccctgctctctcttccactcttagaaatctgcaactcgacctagccc

SEQ ID NO: 58421 - DNA, 74 bp, Homo sapiens
tttatgaatccctatccctgctctctcttccactcttagaaatctgcaactcgacctagcccctctccggaaag

SEQ ID NO: 58422 - DNA, 77 bp, Homo sapiens
tccctatccctgctctctcttccactcttagaaatctgcaactcgacctagcccctctccggaaaggagcagcacag

SEQ ID NO: 58423 - DNA, 75 bp, Homo sapiens
tctcttccactcttagaaatctgcaactcgacctagcccctctccggaaaggagcagcacaggcccagaaccacc

SEQ ID NO: 58424 - DNA, 75 bp, Homo sapiens
actcttagaaatctgcaactcgacctagcccctctccggaaaggagcagcacaggcccagaaccacctgctccca

SEQ ID NO: 58425 - DNA, 75 bp, Homo sapiens
aaatctgcaactcgacctagcccctctccggaaaggagcagcacaggcccagaaccacctgctcccactccgctc

SEQ ID NO: 58426 - DNA, 77 bp, Homo sapiens
acctagcccctctccggaaaggagcagcacaggcccagaaccacctgctcccactccgctccttgctgagcgacatg

SEQ ID NO: 58427 - DNA, 78 bp, Homo sapiens
ccctctccggaaaggagcagcacaggcccagaaccacctgctcccactccgctccttgctgagcgacatggcggctcc

SEQ ID NO: 58428 - DNA, 77 bp, Homo sapiens
aaaggagcagcacaggcccagaaccacctgctcccactccgctccttgctgagcgacatggcggctccccacaaccc

SEQ ID NO: 58429 - DNA, 76 bp, Homo sapiens
acaggcccagaaccacctgctcccactccgctccttgctgagcgacatggcggctccccacaaccccttgcaacca

SEQ ID NO: 58430 - DNA, 73 bp, Homo sapiens
ccacctgctcccactccgctccttgctgagcgacatggcggctccccacaaccccttgcaaccacccccttaa

SEQ ID NO: 58431 - DNA, 75 bp, Homo sapiens
tgctcccactccgctccttgctgagcgacatggcggctccccacaaccccttgcaaccacccccttaagccagga

SEQ ID NO: 58432 - DNA, 73 bp, Homo sapiens
ctccttgctgagcgacatggcggctccccacaaccccttgcaaccacccccttaagccaggagccagtgaacc

SEQ ID NO: 58433 - DNA, 71 bp, Homo sapiens
cgacatggcggctccccacaaccccttgcaaccacccccttaagccaggagccagtgaaccccccatctga

SEQ ID NO: 58434 - DNA, 70 bp, Homo sapiens
ggctccccacaaccccttgcaaccacccccttaagccaggagccagtgaaccccccatctgaggcctctc

SEQ ID NO: 58435 - DNA, 69 bp, Homo sapiens
acaaccccttgcaaccacccccttaagccaggagccagtgaaccccccatctgaggcctctccaactcg

SEQ ID NO: 58436 - DNA, 71 bp, Homo sapiens
ttgcaaccacccccttaagccaggagccagtgaaccccccatctgaggcctctccaactcgggaccgttca

SEQ ID NO: 58437 - DNA, 71 bp, Homo sapiens
cttaagccaggagccagtgaaccccccatctgaggcctctccaactcgggaccgttcaccacctaagtctc

SEQ ID NO: 58438 - DNA, 69 bp, Homo sapiens
agccagtgaaccccccatctgaggcctctccaactcgggaccgttcaccacctaagtctcccgagaaac

SEQ ID NO: 58439 - DNA, 66 bp, Homo sapiens
aaccccccatctgaggcctctccaactcgggaccgttcaccacctaagtctcccgagaaacttccc

SEQ ID NO: 58440 - DNA, 68 bp, Homo sapiens
aggcctctccaactcgggaccgttcaccacctaagtctcccgagaaacttccccagtcttcttcctca

SEQ ID NO: 58441 - DNA, 72 bp, Homo sapiens
tctccaactcgggaccgttcaccacctaagtctcccgagaaacttccccagtcttcttcctcagagagcagc

SEQ ID NO: 58442 - DNA, 71 bp, Homo sapiens
gggaccgttcaccacctaagtctcccgagaaacttccccagtcttcttcctcagagagcagcccaccatcc

SEQ ID NO: 58443 - DNA, 71 bp, Homo sapiens
ctaagtctcccgagaaacttccccagtcttcttcctcagagagcagcccaccatcccctcaacctaccaaa

SEQ ID NO: 58444 - DNA, 71 bp, Homo sapiens
tctcccgagaaacttccccagtcttcttcctcagagagcagcccaccatcccctcaacctaccaaagtttc

SEQ ID NO: 58445 - DNA, 76 bp, Homo sapiens
ttccccagtcttcttcctcagagagcagcccaccatcccctcaacctaccaaagtttctcggcatgccagctcttc

SEQ ID NO: 58446 - DNA, 73 bp, Homo sapiens
agagagcagcccaccatcccctcaacctaccaaagtttctcggcatgccagctcttccccagaaagtcctaaa

SEQ ID NO: 58447 - DNA, 71 bp, Homo sapiens
aacctaccaaagtttctcggcatgccagctcttccccagaaagtcctaaacctgctccagctccagggtcc

SEQ ID NO: 58448 - DNA, 73 bp, Homo sapiens
tcttccccagaaagtcctaaacctgctccagctccagggtcccaccgagagatttcttcttctcccacatcta

SEQ ID NO: 58449 - DNA, 74 bp, Homo sapiens
aaagtcctaaacctgctccagctccagggtcccaccgagagatttcttcttctcccacatctaagaatcgctca

SEQ ID NO: 58450 - DNA, 77 bp, Homo sapiens
ctaaacctgctccagctccagggtcccaccgagagatttcttcttctcccacatctaagaatcgctcacatggccga

SEQ ID NO: 58451 - DNA, 77 bp, Homo sapiens
tcccaccgagagatttcttcttctcccacatctaagaatcgctcacatggccgagcaaaacgggataaatcacattc

SEQ ID NO: 58452 - DNA, 77 bp, Homo sapiens
agagatttcttcttctcccacatctaagaatcgctcacatggccgagcaaaacgggataaatcacattctcataccc

SEQ ID NO: 58453 - DNA, 75 bp, Homo sapiens
ttctcccacatctaagaatcgctcacatggccgagcaaaacgggataaatcacattctcataccccctcccgtag

SEQ ID NO: 58454 - DNA, 71 bp, Homo sapiens
ctcacatggccgagcaaaacgggataaatcacattctcataccccctcccgtaggatggggaggtcccgta

SEQ ID NO: 58455 - DNA, 70 bp, Homo sapiens
cgagcaaaacgggataaatcacattctcataccccctcccgtaggatggggaggtcccgtagccctgcca

SEQ ID NO: 58456 - DNA, 71 bp, Homo sapiens
ggataaatcacattctcataccccctcccgtaggatggggaggtcccgtagccctgccaccgctaagagag

SEQ ID NO: 58457 - DNA, 72 bp, Homo sapiens
atcacattctcataccccctcccgtaggatggggaggtcccgtagccctgccaccgctaagagagggcgatc

SEQ ID NO: 58458 - DNA, 69 bp, Homo sapiens
ataccccctcccgtaggatggggaggtcccgtagccctgccaccgctaagagagggcgatctcggtctc

SEQ ID NO: 58459 - DNA, 73 bp, Homo sapiens
agagagggcgatctcggtctcgaacccctaccaagagaggtcattctcgatcccgatctccccagtggcgtag

SEQ ID NO: 58460 - DNA, 72 bp, Homo sapiens
atctcggtctcgaacccctaccaagagaggtcattctcgatcccgatctccccagtggcgtaggtccaggtc

SEQ ID NO: 58461 - DNA, 73 bp, Homo sapiens
aacccctaccaagagaggtcattctcgatcccgatctccccagtggcgtaggtccaggtctgcacagaggtgg

SEQ ID NO: 58462 - DNA, 76 bp, Homo sapiens
aagagaggtcattctcgatcccgatctccccagtggcgtaggtccaggtctgcacagaggtggggaagatctagaa

SEQ ID NO: 58463 - DNA, 77 bp, Homo sapiens
tcattctcgatcccgatctccccagtggcgtaggtccaggtctgcacagaggtggggaagatctagaagcccccagc

SEQ ID NO: 58464 - DNA, 75 bp, Homo sapiens
atctccccagtggcgtaggtccaggtctgcacagaggtggggaagatctagaagcccccagcgacgtggccgctc

SEQ ID NO: 58465 - DNA, 75 bp, Homo sapiens
agtggcgtaggtccaggtctgcacagaggtggggaagatctagaagcccccagcgacgtggccgctctaggtctc

SEQ ID NO: 58466 - DNA, 77 bp, Homo sapiens
taggtccaggtctgcacagaggtggggaagatctagaagcccccagcgacgtggccgctctaggtctcctcagcgac

SEQ ID NO: 58467 - DNA, 79 bp, Homo sapiens
tctgcacagaggtggggaagatctagaagcccccagcgacgtggccgctctaggtctcctcagcgaccaggctggtcta

SEQ ID NO: 58468 - DNA, 77 bp, Homo sapiens
gggaagatctagaagcccccagcgacgtggccgctctaggtctcctcagcgaccaggctggtctaggagcagaaata

SEQ ID NO: 58469 - DNA, 77 bp, Homo sapiens
atctagaagcccccagcgacgtggccgctctaggtctcctcagcgaccaggctggtctaggagcagaaatacccaga

SEQ ID NO: 58470 - DNA, 78 bp, Homo sapiens
agcgacgtggccgctctaggtctcctcagcgaccaggctggtctaggagcagaaatacccagagaagaggcaggtcta

SEQ ID NO: 58471 - DNA, 80 bp, Homo sapiens
tggccgctctaggtctcctcagcgaccaggctggtctaggagcagaaatacccagagaagaggcaggtctaggtcagcaa

SEQ ID NO: 58472 - DNA, 78 bp, Homo sapiens
taggtctcctcagcgaccaggctggtctaggagcagaaatacccagagaagaggcaggtctaggtcagcaaggcgagg

SEQ ID NO: 58473 - DNA, 75 bp, Homo sapiens
accaggctggtctaggagcagaaatacccagagaagaggcaggtctaggtcagcaaggcgagggaggtcccactc

SEQ ID NO: 58474 - DNA, 76 bp, Homo sapiens
ctggtctaggagcagaaatacccagagaagaggcaggtctaggtcagcaaggcgagggaggtcccactctagatcc

SEQ ID NO: 58475 - DNA, 74 bp, Homo sapiens
agaaatacccagagaagaggcaggtctaggtcagcaaggcgagggaggtcccactctagatccccagccactag

SEQ ID NO: 58476 - DNA, 75 bp, Homo sapiens
gagaagaggcaggtctaggtcagcaaggcgagggaggtcccactctagatccccagccactaggggtagatctcg

SEQ ID NO: 58477 - DNA, 75 bp, Homo sapiens
taggtcagcaaggcgagggaggtcccactctagatccccagccactaggggtagatctcgttctagaacaccagc

SEQ ID NO: 58478 - DNA, 71 bp, Homo sapiens
aggcgagggaggtcccactctagatccccagccactaggggtagatctcgttctagaacaccagcccgccg

SEQ ID NO: 58479 - DNA, 73 bp, Homo sapiens
cactctagatccccagccactaggggtagatctcgttctagaacaccagcccgccggggcaggtcccgctcta

SEQ ID NO: 58480 - DNA, 73 bp, Homo sapiens
tagatccccagccactaggggtagatctcgttctagaacaccagcccgccggggcaggtcccgctctagaaca

SEQ ID NO: 58481 - DNA, 71 bp, Homo sapiens
actaggggtagatctcgttctagaacaccagcccgccggggcaggtcccgctctagaacacctgccaggcg

SEQ ID NO: 58482 - DNA, 77 bp, Homo sapiens
tagatctcgttctagaacaccagcccgccggggcaggtcccgctctagaacacctgccaggcggagatcacgatcca

SEQ ID NO: 58483 - DNA, 75 bp, Homo sapiens
ttctagaacaccagcccgccggggcaggtcccgctctagaacacctgccaggcggagatcacgatccagaactcc

SEQ ID NO: 58484 - DNA, 74 bp, Homo sapiens
agcccgccggggcaggtcccgctctagaacacctgccaggcggagatcacgatccagaactcccaccaggcgta

SEQ ID NO: 58485 - DNA, 75 bp, Homo sapiens
aggtcccgctctagaacacctgccaggcggagatcacgatccagaactcccaccaggcgtaggtctcggtctaga

SEQ ID NO: 58486 - DNA, 74 bp, Homo sapiens
acacctgccaggcggagatcacgatccagaactcccaccaggcgtaggtctcggtctagaacaccagcccggag

SEQ ID NO: 58487 - DNA, 72 bp, Homo sapiens
agatcacgatccagaactcccaccaggcgtaggtctcggtctagaacaccagcccggaggggcaggtctcgg

SEQ ID NO: 58488 - DNA, 71 bp, Homo sapiens
atccagaactcccaccaggcgtaggtctcggtctagaacaccagcccggaggggcaggtctcggtctagaa

SEQ ID NO: 58489 - DNA, 71 bp, Homo sapiens
actcccaccaggcgtaggtctcggtctagaacaccagcccggaggggcaggtctcggtctagaacacctgc

SEQ ID NO: 58490 - DNA, 76 bp, Homo sapiens
tctagaacaccagcccggaggggcaggtctcggtctagaacacctgctaggcgcagatctaggacccgatcaccag

SEQ ID NO: 58491 - DNA, 75 bp, Homo sapiens
acaccagcccggaggggcaggtctcggtctagaacacctgctaggcgcagatctaggacccgatcaccagtacga

SEQ ID NO: 58492 - DNA, 78 bp, Homo sapiens
ggcaggtctcggtctagaacacctgctaggcgcagatctaggacccgatcaccagtacgacgcaggtctcgtagtaga

SEQ ID NO: 58493 - DNA, 79 bp, Homo sapiens
gtctcggtctagaacacctgctaggcgcagatctaggacccgatcaccagtacgacgcaggtctcgtagtagatcacca

SEQ ID NO: 58494 - DNA, 79 bp, Homo sapiens
atctaggacccgatcaccagtacgacgcaggtctcgtagtagatcaccagccaggagaagtggcaggtcacgctctaga

SEQ ID NO: 58495 - DNA, 79 bp, Homo sapiens
atcaccagtacgacgcaggtctcgtagtagatcaccagccaggagaagtggcaggtcacgctctagaaccccagctaga

SEQ ID NO: 58496 - DNA, 78 bp, Homo sapiens
tacgacgcaggtctcgtagtagatcaccagccaggagaagtggcaggtcacgctctagaaccccagctagacgtggcc

SEQ ID NO: 58497 - DNA, 80 bp, Homo sapiens
tcgtagtagatcaccagccaggagaagtggcaggtcacgctctagaaccccagctagacgtggccgctcacgctccagaa

SEQ ID NO: 58498 - DNA, 78 bp, Homo sapiens
agatcaccagccaggagaagtggcaggtcacgctctagaaccccagctagacgtggccgctcacgctccagaacccca

SEQ ID NO: 58499 - DNA, 76 bp, Homo sapiens
aggagaagtggcaggtcacgctctagaaccccagctagacgtggccgctcacgctccagaaccccagccagacgtg

SEQ ID NO: 58500 - DNA, 78 bp, Homo sapiens
ggtcacgctctagaaccccagctagacgtggccgctcacgctccagaaccccagccagacgtggccgctcacgctcta

SEQ ID NO: 58501 - DNA, 76 bp, Homo sapiens
tctagaaccccagctagacgtggccgctcacgctccagaaccccagccagacgtggccgctcacgctctagaaccc

SEQ ID NO: 58502 - DNA, 78 bp, Homo sapiens
agctagacgtggccgctcacgctccagaaccccagccagacgtggccgctcacgctctagaaccccagctagacgcag

SEQ ID NO: 58503 - DNA, 77 bp, Homo sapiens
acgtggccgctcacgctccagaaccccagccagacgtggccgctcacgctctagaaccccagctagacgcagtggtc

SEQ ID NO: 58504 - DNA, 80 bp, Homo sapiens
cccagccagacgtggccgctcacgctctagaaccccagctagacgcagtggtcgctcacgctccagaacaccagccagga

SEQ ID NO: 58505 - DNA, 79 bp, Homo sapiens
agacgtggccgctcacgctctagaaccccagctagacgcagtggtcgctcacgctccagaacaccagccaggagaggga

SEQ ID NO: 58506 - DNA, 77 bp, Homo sapiens
acgctctagaaccccagctagacgcagtggtcgctcacgctccagaacaccagccaggagagggaggtctcggtcta

SEQ ID NO: 58507 - DNA, 77 bp, Homo sapiens
tagaaccccagctagacgcagtggtcgctcacgctccagaacaccagccaggagagggaggtctcggtctaggacac

SEQ ID NO: 58508 - DNA, 77 bp, Homo sapiens
tagacgcagtggtcgctcacgctccagaacaccagccaggagagggaggtctcggtctaggacaccaagacgaggaa

SEQ ID NO: 58509 - DNA, 77 bp, Homo sapiens
tcgctcacgctccagaacaccagccaggagagggaggtctcggtctaggacaccaagacgaggaagatcccgcagta

SEQ ID NO: 58510 - DNA, 75 bp, Homo sapiens
tccagaacaccagccaggagagggaggtctcggtctaggacaccaagacgaggaagatcccgcagtagaagctta

SEQ ID NO: 58511 - DNA, 73 bp, Homo sapiens
accagccaggagagggaggtctcggtctaggacaccaagacgaggaagatcccgcagtagaagcttagttaga

SEQ ID NO: 58512 - DNA, 72 bp, Homo sapiens
agggaggtctcggtctaggacaccaagacgaggaagatcccgcagtagaagcttagttagacgtggaagatc

SEQ ID NO: 58513 - DNA, 76 bp, Homo sapiens
tctcggtctaggacaccaagacgaggaagatcccgcagtagaagcttagttagacgtggaagatctcactctagaa

SEQ ID NO: 58514 - DNA, 79 bp, Homo sapiens
atcccgcagtagaagcttagttagacgtggaagatctcactctagaacacctcaaagaagaggcagatctggctcatct

SEQ ID NO: 58515 - DNA, 79 bp, Homo sapiens
gcttagttagacgtggaagatctcactctagaacacctcaaagaagaggcagatctggctcatcttcagagcggaaaaa

SEQ ID NO: 58516 - DNA, 79 bp, Homo sapiens
tctagaacacctcaaagaagaggcagatctggctcatcttcagagcggaaaaacaaatccagaacatctcaaagaagaa

SEQ ID NO: 58517 - DNA, 79 bp, Homo sapiens
aagaagaggcagatctggctcatcttcagagcggaaaaacaaatccagaacatctcaaagaagaagcaggtccaattca

SEQ ID NO: 58518 - DNA, 78 bp, Homo sapiens
agatctggctcatcttcagagcggaaaaacaaatccagaacatctcaaagaagaagcaggtccaattcaagcccagaa

SEQ ID NO: 58519 - DNA, 77 bp, Homo sapiens
tcatcttcagagcggaaaaacaaatccagaacatctcaaagaagaagcaggtccaattcaagcccagaaatgaagaa

SEQ ID NO: 58520 - DNA, 74 bp, Homo sapiens
agagcggaaaaacaaatccagaacatctcaaagaagaagcaggtccaattcaagcccagaaatgaagaaatctc

SEQ ID NO: 58521 - DNA, 76 bp, Homo sapiens
aacaaatccagaacatctcaaagaagaagcaggtccaattcaagcccagaaatgaagaaatctcgcatttcttcaa

SEQ ID NO: 58522 - DNA, 77 bp, Homo sapiens
agaacatctcaaagaagaagcaggtccaattcaagcccagaaatgaagaaatctcgcatttcttcaaggcggagcag

SEQ ID NO: 58523 - DNA, 76 bp, Homo sapiens
aaagaagaagcaggtccaattcaagcccagaaatgaagaaatctcgcatttcttcaaggcggagcaggtctctctc

SEQ ID NO: 58524 - DNA, 77 bp, Homo sapiens
tccaattcaagcccagaaatgaagaaatctcgcatttcttcaaggcggagcaggtctctctcttcaccacggtccaa

SEQ ID NO: 58525 - DNA, 75 bp, Homo sapiens
agcccagaaatgaagaaatctcgcatttcttcaaggcggagcaggtctctctcttcaccacggtccaaagcaaaa

SEQ ID NO: 58526 - DNA, 75 bp, Homo sapiens
aaatgaagaaatctcgcatttcttcaaggcggagcaggtctctctcttcaccacggtccaaagcaaaatctcgct

SEQ ID NO: 58527 - DNA, 76 bp, Homo sapiens
aatctcgcatttcttcaaggcggagcaggtctctctcttcaccacggtccaaagcaaaatctcgcttgtctttgag

SEQ ID NO: 58528 - DNA, 76 bp, Homo sapiens
ttcttcaaggcggagcaggtctctctcttcaccacggtccaaagcaaaatctcgcttgtctttgaggcgcagcctt

SEQ ID NO: 58529 - DNA, 75 bp, Homo sapiens
agcaggtctctctcttcaccacggtccaaagcaaaatctcgcttgtctttgaggcgcagcctttcagggtcttcc

SEQ ID NO: 58530 - DNA, 74 bp, Homo sapiens
tcttcaccacggtccaaagcaaaatctcgcttgtctttgaggcgcagcctttcagggtcttccccatgccctaa

SEQ ID NO: 58531 - DNA, 71 bp, Homo sapiens
acggtccaaagcaaaatctcgcttgtctttgaggcgcagcctttcagggtcttccccatgccctaaacaaa

SEQ ID NO: 58532 - DNA, 73 bp, Homo sapiens
aaagcaaaatctcgcttgtctttgaggcgcagcctttcagggtcttccccatgccctaaacaaaagtcacaga

SEQ ID NO: 58533 - DNA, 73 bp, Homo sapiens
ctcgcttgtctttgaggcgcagcctttcagggtcttccccatgccctaaacaaaagtcacagacaccacccag

SEQ ID NO: 58534 - DNA, 75 bp, Homo sapiens
tttgaggcgcagcctttcagggtcttccccatgccctaaacaaaagtcacagacaccacccaggcgcagtcgctc

SEQ ID NO: 58535 - DNA, 73 bp, Homo sapiens
ctaaacaaaagtcacagacaccacccaggcgcagtcgctctggatcctcccaacctaaagctaaatctagaac

SEQ ID NO: 58536 - DNA, 74 bp, Homo sapiens
aaagtcacagacaccacccaggcgcagtcgctctggatcctcccaacctaaagctaaatctagaacgccaccca

SEQ ID NO: 58537 - DNA, 75 bp, Homo sapiens
agacaccacccaggcgcagtcgctctggatcctcccaacctaaagctaaatctagaacgccacccagacgcagtc

SEQ ID NO: 58538 - DNA, 76 bp, Homo sapiens
cgcagtcgctctggatcctcccaacctaaagctaaatctagaacgccacccagacgcagtcgctccagttcttctc

SEQ ID NO: 58539 - DNA, 74 bp, Homo sapiens
tggatcctcccaacctaaagctaaatctagaacgccacccagacgcagtcgctccagttcttctccgccaccta

SEQ ID NO: 58540 - DNA, 72 bp, Homo sapiens
caacctaaagctaaatctagaacgccacccagacgcagtcgctccagttcttctccgccacctaaacagaaa

SEQ ID NO: 58541 - DNA, 74 bp, Homo sapiens
taaagctaaatctagaacgccacccagacgcagtcgctccagttcttctccgccacctaaacagaaatctaaga

SEQ ID NO: 58542 - DNA, 74 bp, Homo sapiens
aacgccacccagacgcagtcgctccagttcttctccgccacctaaacagaaatctaagacaccatcaagacaaa

SEQ ID NO: 58543 - DNA, 76 bp, Homo sapiens
agtcgctccagttcttctccgccacctaaacagaaatctaagacaccatcaagacaaagtcattccagttcatctc

SEQ ID NO: 58544 - DNA, 76 bp, Homo sapiens
ttcttctccgccacctaaacagaaatctaagacaccatcaagacaaagtcattccagttcatctcctcatcctaaa

SEQ ID NO: 58545 - DNA, 76 bp, Homo sapiens
acctaaacagaaatctaagacaccatcaagacaaagtcattccagttcatctcctcatcctaaagtgaaatctgga

SEQ ID NO: 58546 - DNA, 77 bp, Homo sapiens
acagaaatctaagacaccatcaagacaaagtcattccagttcatctcctcatcctaaagtgaaatctggaacaccac

SEQ ID NO: 58547 - DNA, 73 bp, Homo sapiens
attccagttcatctcctcatcctaaagtgaaatctggaacaccaccgaggcaagggtccataacaagtcccca

SEQ ID NO: 58548 - DNA, 75 bp, Homo sapiens
tcctcatcctaaagtgaaatctggaacaccaccgaggcaagggtccataacaagtccccaggccaatgagcaatc

SEQ ID NO: 58549 - DNA, 75 bp, Homo sapiens
aaatctggaacaccaccgaggcaagggtccataacaagtccccaggccaatgagcaatctgtaacgccacagaga

SEQ ID NO: 58550 - DNA, 75 bp, Homo sapiens
accgaggcaagggtccataacaagtccccaggccaatgagcaatctgtaacgccacagagacggagctgttttga

SEQ ID NO: 58551 - DNA, 76 bp, Homo sapiens
aagggtccataacaagtccccaggccaatgagcaatctgtaacgccacagagacggagctgttttgaatcatcacc

SEQ ID NO: 58552 - DNA, 77 bp, Homo sapiens
aacaagtccccaggccaatgagcaatctgtaacgccacagagacggagctgttttgaatcatcacctgaccctgagt

SEQ ID NO: 58553 - DNA, 76 bp, Homo sapiens
caatctgtaacgccacagagacggagctgttttgaatcatcacctgaccctgagttgaaatctaggaccccttcta

SEQ ID NO: 58554 - DNA, 77 bp, Homo sapiens
tgtaacgccacagagacggagctgttttgaatcatcacctgaccctgagttgaaatctaggaccccttctagacata

SEQ ID NO: 58555 - DNA, 77 bp, Homo sapiens
agagacggagctgttttgaatcatcacctgaccctgagttgaaatctaggaccccttctagacatagctgctcaggg

SEQ ID NO: 58556 - DNA, 77 bp, Homo sapiens
ttttgaatcatcacctgaccctgagttgaaatctaggaccccttctagacatagctgctcagggtcctctcctccta

SEQ ID NO: 58557 - DNA, 76 bp, Homo sapiens
atcacctgaccctgagttgaaatctaggaccccttctagacatagctgctcagggtcctctcctcctagagtgaaa

SEQ ID NO: 58558 - DNA, 77 bp, Homo sapiens
accctgagttgaaatctaggaccccttctagacatagctgctcagggtcctctcctcctagagtgaaatctagcaca

SEQ ID NO: 58559 - DNA, 83 bp, Homo sapiens
cttctagacatagctgctcagggtcctctcctcctagagtgaaatctagcacacctcccagacagagcccatctaggtcatca

SEQ ID NO: 58560 - DNA, 83 bp, Homo sapiens
atagctgctcagggtcctctcctcctagagtgaaatctagcacacctcccagacagagcccatctaggtcatcatctccacaa

SEQ ID NO: 58561 - DNA, 78 bp, Homo sapiens
gggtcctctcctcctagagtgaaatctagcacacctcccagacagagcccatctaggtcatcatctccacaacccaaa

SEQ ID NO: 58562 - DNA, 81 bp, Homo sapiens
agagtgaaatctagcacacctcccagacagagcccatctaggtcatcatctccacaacccaaagtgaaggcaataatatca

SEQ ID NO: 58563 - DNA, 78 bp, Homo sapiens
acacctcccagacagagcccatctaggtcatcatctccacaacccaaagtgaaggcaataatatcaccaagacaaaga

SEQ ID NO: 58564 - DNA, 79 bp, Homo sapiens
agacagagcccatctaggtcatcatctccacaacccaaagtgaaggcaataatatcaccaagacaaagaagccattctg

SEQ ID NO: 58565 - DNA, 77 bp, Homo sapiens
atcatctccacaacccaaagtgaaggcaataatatcaccaagacaaagaagccattctggctcctcttctccaagtc

SEQ ID NO: 58566 - DNA, 74 bp, Homo sapiens
acaacccaaagtgaaggcaataatatcaccaagacaaagaagccattctggctcctcttctccaagtcctagta

SEQ ID NO: 58567 - DNA, 74 bp, Homo sapiens
aaagtgaaggcaataatatcaccaagacaaagaagccattctggctcctcttctccaagtcctagtagggtgac

SEQ ID NO: 58568 - DNA, 74 bp, Homo sapiens
aataatatcaccaagacaaagaagccattctggctcctcttctccaagtcctagtagggtgacgtcgagaacaa

SEQ ID NO: 58569 - DNA, 73 bp, Homo sapiens
agacaaagaagccattctggctcctcttctccaagtcctagtagggtgacgtcgagaacaactccacggcgaa

SEQ ID NO: 58570 - DNA, 76 bp, Homo sapiens
aagccattctggctcctcttctccaagtcctagtagggtgacgtcgagaacaactccacggcgaagcagatcagta

SEQ ID NO: 58571 - DNA, 77 bp, Homo sapiens
tcctcttctccaagtcctagtagggtgacgtcgagaacaactccacggcgaagcagatcagtatctccctgctccaa

SEQ ID NO: 58572 - DNA, 78 bp, Homo sapiens
tccaagtcctagtagggtgacgtcgagaacaactccacggcgaagcagatcagtatctccctgctccaatgtggaatc

SEQ ID NO: 58573 - DNA, 78 bp, Homo sapiens
ctagtagggtgacgtcgagaacaactccacggcgaagcagatcagtatctccctgctccaatgtggaatccagattgt

SEQ ID NO: 58574 - DNA, 83 bp, Homo sapiens
tcgagaacaactccacggcgaagcagatcagtatctccctgctccaatgtggaatccagattgttgccaagatacagtcattc

SEQ ID NO: 58575 - DNA, 81 bp, Homo sapiens
aacaactccacggcgaagcagatcagtatctccctgctccaatgtggaatccagattgttgccaagatacagtcattctgg

SEQ ID NO: 58576 - DNA, 76 bp, Homo sapiens
aatgtggaatccagattgttgccaagatacagtcattctgggtcctcctcaccagataccaaagtgaaacctgaaa

SEQ ID NO: 58577 - DNA, 75 bp, Homo sapiens
ttgttgccaagatacagtcattctgggtcctcctcaccagataccaaagtgaaacctgaaacaccgccaagacaa

SEQ ID NO: 58578 - DNA, 73 bp, Homo sapiens
aagatacagtcattctgggtcctcctcaccagataccaaagtgaaacctgaaacaccgccaagacaaagtcac

SEQ ID NO: 58579 - DNA, 69 bp, Homo sapiens
ataccaaagtgaaacctgaaacaccgccaagacaaagtcactcagggtctatttcaccataccccaaag

SEQ ID NO: 58580 - DNA, 68 bp, Homo sapiens
aaagtgaaacctgaaacaccgccaagacaaagtcactcagggtctatttcaccataccccaaagtaaa

SEQ ID NO: 58581 - DNA, 68 bp, Homo sapiens
aaacaccgccaagacaaagtcactcagggtctatttcaccataccccaaagtaaaggcccaaactcca

SEQ ID NO: 58582 - DNA, 67 bp, Homo sapiens
agacaaagtcactcagggtctatttcaccataccccaaagtaaaggcccaaactccaccggggccaa

SEQ ID NO: 58583 - DNA, 66 bp, Homo sapiens
agtcactcagggtctatttcaccataccccaaagtaaaggcccaaactccaccggggccaagtctt

SEQ ID NO: 58584 - DNA, 67 bp, Homo sapiens
atttcaccataccccaaagtaaaggcccaaactccaccggggccaagtctttctggatcaaagtcac

SEQ ID NO: 58585 - DNA, 68 bp, Homo sapiens
accataccccaaagtaaaggcccaaactccaccggggccaagtctttctggatcaaagtcaccatgtc

SEQ ID NO: 58586 - DNA, 68 bp, Homo sapiens
aaagtaaaggcccaaactccaccggggccaagtctttctggatcaaagtcaccatgtccccaagagaa

SEQ ID NO: 58587 - DNA, 71 bp, Homo sapiens
aaactccaccggggccaagtctttctggatcaaagtcaccatgtccccaagagaagtctaaagactcacta

SEQ ID NO: 58588 - DNA, 73 bp, Homo sapiens
ggccaagtctttctggatcaaagtcaccatgtccccaagagaagtctaaagactcactagttcaaagttgccc

SEQ ID NO: 58589 - DNA, 74 bp, Homo sapiens
agtctttctggatcaaagtcaccatgtccccaagagaagtctaaagactcactagttcaaagttgccctggatc

SEQ ID NO: 58590 - DNA, 75 bp, Homo sapiens
atcaaagtcaccatgtccccaagagaagtctaaagactcactagttcaaagttgccctggatccctctctctctg

SEQ ID NO: 58591 - DNA, 75 bp, Homo sapiens
tgtccccaagagaagtctaaagactcactagttcaaagttgccctggatccctctctctctgtgcaggagtaaaa

SEQ ID NO: 58592 - DNA, 78 bp, Homo sapiens
taaagactcactagttcaaagttgccctggatccctctctctctgtgcaggagtaaaatctagcacaccaccaggcga

SEQ ID NO: 58593 - DNA, 78 bp, Homo sapiens
tagttcaaagttgccctggatccctctctctctgtgcaggagtaaaatctagcacaccaccaggcgagagctattttg

SEQ ID NO: 58594 - DNA, 80 bp, Homo sapiens
agttgccctggatccctctctctctgtgcaggagtaaaatctagcacaccaccaggcgagagctattttggtgtctcatc

SEQ ID NO: 58595 - DNA, 83 bp, Homo sapiens
ctctctctctgtgcaggagtaaaatctagcacaccaccaggcgagagctattttggtgtctcatctctgcaactgaaaggaca

SEQ ID NO: 58596 - DNA, 82 bp, Homo sapiens
tgtgcaggagtaaaatctagcacaccaccaggcgagagctattttggtgtctcatctctgcaactgaaaggacaatctcaaa

SEQ ID NO: 58597 - DNA, 79 bp, Homo sapiens
agtaaaatctagcacaccaccaggcgagagctattttggtgtctcatctctgcaactgaaaggacaatctcaaacttca

SEQ ID NO: 58598 - DNA, 80 bp, Homo sapiens
acaccaccaggcgagagctattttggtgtctcatctctgcaactgaaaggacaatctcaaacttcaccagaccacagatc

SEQ ID NO: 58599 - DNA, 81 bp, Homo sapiens
tattttggtgtctcatctctgcaactgaaaggacaatctcaaacttcaccagaccacagatctgatacttcaagtccagaa

SEQ ID NO: 58600 - DNA, 84 bp, Homo sapiens
tcatctctgcaactgaaaggacaatctcaaacttcaccagaccacagatctgatacttcaagtccagaagtgagacagagtcat

SEQ ID NO: 58601 - DNA, 80 bp, Homo sapiens
aactgaaaggacaatctcaaacttcaccagaccacagatctgatacttcaagtccagaagtgagacagagtcattcagaa

SEQ ID NO: 58602 - DNA, 81 bp, Homo sapiens
aaaggacaatctcaaacttcaccagaccacagatctgatacttcaagtccagaagtgagacagagtcattcagaatcacca

SEQ ID NO: 58603 - DNA, 85 bp, Homo sapiens
aaacttcaccagaccacagatctgatacttcaagtccagaagtgagacagagtcattcagaatcaccatctctgcagagcaaatc

SEQ ID NO: 58604 - DNA, 87 bp, Homo sapiens
accacagatctgatacttcaagtccagaagtgagacagagtcattcagaatcaccatctctgcagagcaaatctcaaacatcaccta

SEQ ID NO: 58605 - DNA, 85 bp, Homo sapiens
atctgatacttcaagtccagaagtgagacagagtcattcagaatcaccatctctgcagagcaaatctcaaacatcacctaaggga

SEQ ID NO: 58606 - DNA, 82 bp, Homo sapiens
ttcaagtccagaagtgagacagagtcattcagaatcaccatctctgcagagcaaatctcaaacatcacctaagggaggtcgg

SEQ ID NO: 58607 - DNA, 80 bp, Homo sapiens
aagtgagacagagtcattcagaatcaccatctctgcagagcaaatctcaaacatcacctaagggaggtcggtccaggtct

SEQ ID NO: 58608 - DNA, 82 bp, Homo sapiens
agtcattcagaatcaccatctctgcagagcaaatctcaaacatcacctaagggaggtcggtccaggtcttcatctccagtca

SEQ ID NO: 58609 - DNA, 82 bp, Homo sapiens
agaatcaccatctctgcagagcaaatctcaaacatcacctaagggaggtcggtccaggtcttcatctccagtcactgagctg

SEQ ID NO: 58610 - DNA, 84 bp, Homo sapiens
tgcagagcaaatctcaaacatcacctaagggaggtcggtccaggtcttcatctccagtcactgagctggcatccagatctccaa

SEQ ID NO: 58611 - DNA, 79 bp, Homo sapiens
aaatctcaaacatcacctaagggaggtcggtccaggtcttcatctccagtcactgagctggcatccagatctccaataa

SEQ ID NO: 58612 - DNA, 80 bp, Homo sapiens
taagggaggtcggtccaggtcttcatctccagtcactgagctggcatccagatctccaataagacaagatagaggtgagt

SEQ ID NO: 58613 - DNA, 86 bp, Homo sapiens
caggtcttcatctccagtcactgagctggcatccagatctccaataagacaagatagaggtgagttctcagcgagtcctatgttga

SEQ ID NO: 58614 - DNA, 86 bp, Homo sapiens
ttcatctccagtcactgagctggcatccagatctccaataagacaagatagaggtgagttctcagcgagtcctatgttgaaatctg

SEQ ID NO: 58615 - DNA, 84 bp, Homo sapiens
agtcactgagctggcatccagatctccaataagacaagatagaggtgagttctcagcgagtcctatgttgaaatctggaatgtc

SEQ ID NO: 58616 - DNA, 84 bp, Homo sapiens
atccagatctccaataagacaagatagaggtgagttctcagcgagtcctatgttgaaatctggaatgtctcctgagcagagcag

SEQ ID NO: 58617 - DNA, 82 bp, Homo sapiens
aagacaagatagaggtgagttctcagcgagtcctatgttgaaatctggaatgtctcctgagcagagcaggttccagtctgac

SEQ ID NO: 58618 - DNA, 85 bp, Homo sapiens
tgagttctcagcgagtcctatgttgaaatctggaatgtctcctgagcagagcaggttccagtctgactcttcttcatatcctaca

SEQ ID NO: 58619 - DNA, 85 bp, Homo sapiens
tctcagcgagtcctatgttgaaatctggaatgtctcctgagcagagcaggttccagtctgactcttcttcatatcctacagtgga

SEQ ID NO: 58620 - DNA, 83 bp, Homo sapiens
tatgttgaaatctggaatgtctcctgagcagagcaggttccagtctgactcttcttcatatcctacagtggactcgaattctc

SEQ ID NO: 58621 - DNA, 81 bp, Homo sapiens
aaatctggaatgtctcctgagcagagcaggttccagtctgactcttcttcatatcctacagtggactcgaattctctcttg

SEQ ID NO: 58622 - DNA, 82 bp, Homo sapiens
tcctgagcagagcaggttccagtctgactcttcttcatatcctacagtggactcgaattctctcttggggcagagtagattg

SEQ ID NO: 58623 - DNA, 79 bp, Homo sapiens
agagcaggttccagtctgactcttcttcatatcctacagtggactcgaattctctcttggggcagagtagattggagac

SEQ ID NO: 58624 - DNA, 82 bp, Homo sapiens
tccagtctgactcttcttcatatcctacagtggactcgaattctctcttggggcagagtagattggagactgctgaatcaaa

SEQ ID NO: 58625 - DNA, 79 bp, Homo sapiens
tcttcttcatatcctacagtggactcgaattctctcttggggcagagtagattggagactgctgaatcaaaagagaaaa

SEQ ID NO: 58626 - DNA, 78 bp, Homo sapiens
tatcctacagtggactcgaattctctcttggggcagagtagattggagactgctgaatcaaaagagaaaatggcctta

SEQ ID NO: 58627 - DNA, 77 bp, Homo sapiens
ttctctcttggggcagagtagattggagactgctgaatcaaaagagaaaatggccttaccccctcaggaggatgcta

SEQ ID NO: 58628 - DNA, 78 bp, Homo sapiens
ttggagactgctgaatcaaaagagaaaatggccttaccccctcaggaggatgctactgcatcacctcctagacagaaa

SEQ ID NO: 58629 - DNA, 75 bp, Homo sapiens
ctgaatcaaaagagaaaatggccttaccccctcaggaggatgctactgcatcacctcctagacagaaagacaaat

SEQ ID NO: 58630 - DNA, 72 bp, Homo sapiens
aaaagagaaaatggccttaccccctcaggaggatgctactgcatcacctcctagacagaaagacaaatttag

SEQ ID NO: 58631 - DNA, 73 bp, Homo sapiens
ccttaccccctcaggaggatgctactgcatcacctcctagacagaaagacaaatttagtccctttccagtaca

SEQ ID NO: 58632 - DNA, 78 bp, Homo sapiens
tcaggaggatgctactgcatcacctcctagacagaaagacaaatttagtccctttccagtacaggataggcctgagtc

SEQ ID NO: 58633 - DNA, 77 bp, Homo sapiens
atgctactgcatcacctcctagacagaaagacaaatttagtccctttccagtacaggataggcctgagtcttcactg

SEQ ID NO: 58634 - DNA, 72 bp, Homo sapiens
acctcctagacagaaagacaaatttagtccctttccagtacaggataggcctgagtcttcactggtattcaa

SEQ ID NO: 58635 - DNA, 73 bp, Homo sapiens
cagaaagacaaatttagtccctttccagtacaggataggcctgagtcttcactggtattcaaagacacactta

SEQ ID NO: 58636 - DNA, 72 bp, Homo sapiens
agacaaatttagtccctttccagtacaggataggcctgagtcttcactggtattcaaagacacacttagaac

SEQ ID NO: 58637 - DNA, 71 bp, Homo sapiens
ctttccagtacaggataggcctgagtcttcactggtattcaaagacacacttagaaccccgccaagggaaa

SEQ ID NO: 58638 - DNA, 74 bp, Homo sapiens
ctgagtcttcactggtattcaaagacacacttagaaccccgccaagggaaagaagtggtgctgggtcatctcca

SEQ ID NO: 58639 - DNA, 71 bp, Homo sapiens
actggtattcaaagacacacttagaaccccgccaagggaaagaagtggtgctgggtcatctccagaaacaa

SEQ ID NO: 58640 - DNA, 73 bp, Homo sapiens
tattcaaagacacacttagaaccccgccaagggaaagaagtggtgctgggtcatctccagaaacaaaagagca

SEQ ID NO: 58641 - DNA, 71 bp, Homo sapiens
acttagaaccccgccaagggaaagaagtggtgctgggtcatctccagaaacaaaagagcaaaatagtgcat

SEQ ID NO: 58642 - DNA, 76 bp, Homo sapiens
gccaagggaaagaagtggtgctgggtcatctccagaaacaaaagagcaaaatagtgcattgcctacgtcaagccaa

SEQ ID NO: 58643 - DNA, 78 bp, Homo sapiens
agaagtggtgctgggtcatctccagaaacaaaagagcaaaatagtgcattgcctacgtcaagccaagatgaagagtta

SEQ ID NO: 58644 - DNA, 76 bp, Homo sapiens
aaaagagcaaaatagtgcattgcctacgtcaagccaagatgaagagttaatggaggtggtagagaagtctgaagaa

SEQ ID NO: 58645 - DNA, 74 bp, Homo sapiens
attgcctacgtcaagccaagatgaagagttaatggaggtggtagagaagtctgaagaacccgcaggccaaatcc

SEQ ID NO: 58646 - DNA, 75 bp, Homo sapiens
agccaagatgaagagttaatggaggtggtagagaagtctgaagaacccgcaggccaaatcctgtctcatttgtct

SEQ ID NO: 58647 - DNA, 73 bp, Homo sapiens
aagagttaatggaggtggtagagaagtctgaagaacccgcaggccaaatcctgtctcatttgtcttcagaact

SEQ ID NO: 58648 - DNA, 74 bp, Homo sapiens
ttaatggaggtggtagagaagtctgaagaacccgcaggccaaatcctgtctcatttgtcttcagaacttaaaga

SEQ ID NO: 58649 - DNA, 75 bp, Homo sapiens
tagagaagtctgaagaacccgcaggccaaatcctgtctcatttgtcttcagaacttaaagaaatgtccacaagta

SEQ ID NO: 58650 - DNA, 71 bp, Homo sapiens
aagaacccgcaggccaaatcctgtctcatttgtcttcagaacttaaagaaatgtccacaagtaactttgaa

SEQ ID NO: 58651 - DNA, 74 bp, Homo sapiens
aggccaaatcctgtctcatttgtcttcagaacttaaagaaatgtccacaagtaactttgaatcatctcctgaag

SEQ ID NO: 58652 - DNA, 75 bp, Homo sapiens
atcctgtctcatttgtcttcagaacttaaagaaatgtccacaagtaactttgaatcatctcctgaagtagaagaa

SEQ ID NO: 58653 - DNA, 73 bp, Homo sapiens
aacttaaagaaatgtccacaagtaactttgaatcatctcctgaagtagaagaaaggcctgctgtgtctttgac

SEQ ID NO: 58654 - DNA, 78 bp, Homo sapiens
aagaaatgtccacaagtaactttgaatcatctcctgaagtagaagaaaggcctgctgtgtctttgactcttgatcaga

SEQ ID NO: 58655 - DNA, 81 bp, Homo sapiens
tttgaatcatctcctgaagtagaagaaaggcctgctgtgtctttgactcttgatcagagccagtcacaggcttctttggaa

SEQ ID NO: 58656 - DNA, 80 bp, Homo sapiens
tgaagtagaagaaaggcctgctgtgtctttgactcttgatcagagccagtcacaggcttctttggaagcagtagaagtcc

SEQ ID NO: 58657 - DNA, 78 bp, Homo sapiens
aagaaaggcctgctgtgtctttgactcttgatcagagccagtcacaggcttctttggaagcagtagaagtcccttcaa

SEQ ID NO: 58658 - DNA, 80 bp, Homo sapiens
ctgtgtctttgactcttgatcagagccagtcacaggcttctttggaagcagtagaagtcccttcaatggcctcatcttgg

SEQ ID NO: 58659 - DNA, 78 bp, Homo sapiens
tttgactcttgatcagagccagtcacaggcttctttggaagcagtagaagtcccttcaatggcctcatcttggggtgg

SEQ ID NO: 58660 - DNA, 74 bp, Homo sapiens
agagccagtcacaggcttctttggaagcagtagaagtcccttcaatggcctcatcttggggtgggccacatttt

SEQ ID NO: 58661 - DNA, 74 bp, Homo sapiens
agtcacaggcttctttggaagcagtagaagtcccttcaatggcctcatcttggggtgggccacatttttctcca

SEQ ID NO: 58662 - DNA, 73 bp, Homo sapiens
ttctttggaagcagtagaagtcccttcaatggcctcatcttggggtgggccacatttttctccagaacataaa

SEQ ID NO: 58663 - DNA, 72 bp, Homo sapiens
agtagaagtcccttcaatggcctcatcttggggtgggccacatttttctccagaacataaagaactgtctaa

SEQ ID NO: 58664 - DNA, 73 bp, Homo sapiens
ttcaatggcctcatcttggggtgggccacatttttctccagaacataaagaactgtctaactccccactcagg

SEQ ID NO: 58665 - DNA, 73 bp, Homo sapiens
tcatcttggggtgggccacatttttctccagaacataaagaactgtctaactccccactcagggagaacagct

SEQ ID NO: 58666 - DNA, 73 bp, Homo sapiens
gtgggccacatttttctccagaacataaagaactgtctaactccccactcagggagaacagctttggatcacc

SEQ ID NO: 58667 - DNA, 71 bp, Homo sapiens
tttttctccagaacataaagaactgtctaactccccactcagggagaacagctttggatcacctttagaat

SEQ ID NO: 58668 - DNA, 71 bp, Homo sapiens
taaagaactgtctaactccccactcagggagaacagctttggatcacctttagaatttagaaactcaggcc

SEQ ID NO: 58669 - DNA, 72 bp, Homo sapiens
taactccccactcagggagaacagctttggatcacctttagaatttagaaactcaggcccacttggtacaga

SEQ ID NO: 58670 - DNA, 72 bp, Homo sapiens
actcagggagaacagctttggatcacctttagaatttagaaactcaggcccacttggtacagaaatgaatac

SEQ ID NO: 58671 - DNA, 71 bp, Homo sapiens
aacagctttggatcacctttagaatttagaaactcaggcccacttggtacagaaatgaatactggattttc

SEQ ID NO: 58672 - DNA, 69 bp, Homo sapiens
acctttagaatttagaaactcaggcccacttggtacagaaatgaatactggattttcttctgaggttaa

SEQ ID NO: 58673 - DNA, 70 bp, Homo sapiens
gaatttagaaactcaggcccacttggtacagaaatgaatactggattttcttctgaggttaaagaagatt

SEQ ID NO: 58674 - DNA, 71 bp, Homo sapiens
aaactcaggcccacttggtacagaaatgaatactggattttcttctgaggttaaagaagatttgaatggac

SEQ ID NO: 58675 - DNA, 72 bp, Homo sapiens
ttggtacagaaatgaatactggattttcttctgaggttaaagaagatttgaatggaccgtttcttaatcagc

SEQ ID NO: 58676 - DNA, 72 bp, Homo sapiens
aatgaatactggattttcttctgaggttaaagaagatttgaatggaccgtttcttaatcagctggaaacaga

SEQ ID NO: 58677 - DNA, 75 bp, Homo sapiens
gattttcttctgaggttaaagaagatttgaatggaccgtttcttaatcagctggaaacagatccatctctagaca

SEQ ID NO: 58678 - DNA, 76 bp, Homo sapiens
ttctgaggttaaagaagatttgaatggaccgtttcttaatcagctggaaacagatccatctctagacatgaaagaa

SEQ ID NO: 58679 - DNA, 76 bp, Homo sapiens
aaagaagatttgaatggaccgtttcttaatcagctggaaacagatccatctctagacatgaaagaacaatcgacaa

SEQ ID NO: 58680 - DNA, 79 bp, Homo sapiens
tttgaatggaccgtttcttaatcagctggaaacagatccatctctagacatgaaagaacaatcgacaagatcctctgga

SEQ ID NO: 58681 - DNA, 83 bp, Homo sapiens
atcagctggaaacagatccatctctagacatgaaagaacaatcgacaagatcctctggacacagcagttctgagttatcccca

SEQ ID NO: 58682 - DNA, 82 bp, Homo sapiens
atccatctctagacatgaaagaacaatcgacaagatcctctggacacagcagttctgagttatccccagatgcagtggaaaa

SEQ ID NO: 58683 - DNA, 78 bp, Homo sapiens
aaagaacaatcgacaagatcctctggacacagcagttctgagttatccccagatgcagtggaaaaggcagggatgtct

SEQ ID NO: 58684 - DNA, 83 bp, Homo sapiens
tcctctggacacagcagttctgagttatccccagatgcagtggaaaaggcagggatgtcttcaaatcagagcatctcttcacc

SEQ ID NO: 58685 - DNA, 84 bp, Homo sapiens
agttctgagttatccccagatgcagtggaaaaggcagggatgtcttcaaatcagagcatctcttcacctgtgcttgatgctgta

SEQ ID NO: 58686 - DNA, 83 bp, Homo sapiens
atgcagtggaaaaggcagggatgtcttcaaatcagagcatctcttcacctgtgcttgatgctgtacccagaacaccctcgaga

SEQ ID NO: 58687 - DNA, 80 bp, Homo sapiens
aaaggcagggatgtcttcaaatcagagcatctcttcacctgtgcttgatgctgtacccagaacaccctcgagagaaagaa

SEQ ID NO: 58688 - DNA, 83 bp, Homo sapiens
tgtcttcaaatcagagcatctcttcacctgtgcttgatgctgtacccagaacaccctcgagagaaagaagtagttctgcatct

SEQ ID NO: 58689 - DNA, 81 bp, Homo sapiens
aaatcagagcatctcttcacctgtgcttgatgctgtacccagaacaccctcgagagaaagaagtagttctgcatcttctcc

SEQ ID NO: 58690 - DNA, 80 bp, Homo sapiens
atctcttcacctgtgcttgatgctgtacccagaacaccctcgagagaaagaagtagttctgcatcttctcctgaaatgaa

SEQ ID NO: 58691 - DNA, 79 bp, Homo sapiens
tgtgcttgatgctgtacccagaacaccctcgagagaaagaagtagttctgcatcttctcctgaaatgaaagatggttta

SEQ ID NO: 58692 - DNA, 74 bp, Homo sapiens
tgtacccagaacaccctcgagagaaagaagtagttctgcatcttctcctgaaatgaaagatggtttacccagaa

SEQ ID NO: 58693 - DNA, 74 bp, Homo sapiens
aacaccctcgagagaaagaagtagttctgcatcttctcctgaaatgaaagatggtttacccagaactccatcaa

SEQ ID NO: 58694 - DNA, 75 bp, Homo sapiens
aagtagttctgcatcttctcctgaaatgaaagatggtttacccagaactccatcaaggagaagcaggtctgggtc

SEQ ID NO: 58695 - DNA, 73 bp, Homo sapiens
aaagatggtttacccagaactccatcaaggagaagcaggtctgggtcttctccaggacttagagatgggtctg

SEQ ID NO: 58696 - DNA, 75 bp, Homo sapiens
tacccagaactccatcaaggagaagcaggtctgggtcttctccaggacttagagatgggtctgggactccctcga

SEQ ID NO: 58697 - DNA, 75 bp, Homo sapiens
aagcaggtctgggtcttctccaggacttagagatgggtctgggactccctcgaggcacagcctgtctgggtcctc

SEQ ID NO: 58698 - DNA, 77 bp, Homo sapiens
tcttctccaggacttagagatgggtctgggactccctcgaggcacagcctgtctgggtcctctcctggaatgaaaga

SEQ ID NO: 58699 - DNA, 77 bp, Homo sapiens
gacttagagatgggtctgggactccctcgaggcacagcctgtctgggtcctctcctggaatgaaagatatacctaga

SEQ ID NO: 58700 - DNA, 76 bp, Homo sapiens
actccctcgaggcacagcctgtctgggtcctctcctggaatgaaagatatacctagaacgccatctagagggagaa

SEQ ID NO: 58701 - DNA, 78 bp, Homo sapiens
aggcacagcctgtctgggtcctctcctggaatgaaagatatacctagaacgccatctagagggagaagcgaatgtgat

SEQ ID NO: 58702 - DNA, 77 bp, Homo sapiens
agcctgtctgggtcctctcctggaatgaaagatatacctagaacgccatctagagggagaagcgaatgtgattcttc

SEQ ID NO: 58703 - DNA, 75 bp, Homo sapiens
tctcctggaatgaaagatatacctagaacgccatctagagggagaagcgaatgtgattcttccccagaaccgaaa

SEQ ID NO: 58704 - DNA, 74 bp, Homo sapiens
aatgaaagatatacctagaacgccatctagagggagaagcgaatgtgattcttccccagaaccgaaagctttgc

SEQ ID NO: 58705 - DNA, 75 bp, Homo sapiens
atatacctagaacgccatctagagggagaagcgaatgtgattcttccccagaaccgaaagctttgcctcagactc

SEQ ID NO: 58706 - DNA, 74 bp, Homo sapiens
aacgccatctagagggagaagcgaatgtgattcttccccagaaccgaaagctttgcctcagactcctaggccga

SEQ ID NO: 58707 - DNA, 75 bp, Homo sapiens
agcgaatgtgattcttccccagaaccgaaagctttgcctcagactcctaggccgaggagtcgttctccatcatcc

SEQ ID NO: 58708 - DNA, 75 bp, Homo sapiens
ttccccagaaccgaaagctttgcctcagactcctaggccgaggagtcgttctccatcatccccagagctcaacaa

SEQ ID NO: 58709 - DNA, 76 bp, Homo sapiens
ccgaaagctttgcctcagactcctaggccgaggagtcgttctccatcatccccagagctcaacaacaagtgtctta

SEQ ID NO: 58710 - DNA, 73 bp, Homo sapiens
actcctaggccgaggagtcgttctccatcatccccagagctcaacaacaagtgtcttaccccccagagagaaa

SEQ ID NO: 58711 - DNA, 74 bp, Homo sapiens
aggagtcgttctccatcatccccagagctcaacaacaagtgtcttaccccccagagagaaagaagcgggtcaga

SEQ ID NO: 58712 - DNA, 80 bp, Homo sapiens
tccatcatccccagagctcaacaacaagtgtcttaccccccagagagaaagaagcgggtcagaatcatcagttgatcaga

SEQ ID NO: 58713 - DNA, 74 bp, Homo sapiens
aagtgtcttaccccccagagagaaagaagcgggtcagaatcatcagttgatcagaaaactgtggctcggactcc

SEQ ID NO: 58714 - DNA, 77 bp, Homo sapiens
cagagagaaagaagcgggtcagaatcatcagttgatcagaaaactgtggctcggactcccctggggcagagaagtcg

SEQ ID NO: 58715 - DNA, 75 bp, Homo sapiens
agaaagaagcgggtcagaatcatcagttgatcagaaaactgtggctcggactcccctggggcagagaagtcgttc

SEQ ID NO: 58716 - DNA, 76 bp, Homo sapiens
agaatcatcagttgatcagaaaactgtggctcggactcccctggggcagagaagtcgttcgggatcctctcaagaa

SEQ ID NO: 58717 - DNA, 75 bp, Homo sapiens
atcagttgatcagaaaactgtggctcggactcccctggggcagagaagtcgttcgggatcctctcaagaacttga

SEQ ID NO: 58718 - DNA, 71 bp, Homo sapiens
aaaactgtggctcggactcccctggggcagagaagtcgttcgggatcctctcaagaacttgatgtgaaacc

SEQ ID NO: 58719 - DNA, 75 bp, Homo sapiens
gtggctcggactcccctggggcagagaagtcgttcgggatcctctcaagaacttgatgtgaaacccagtgcatcc

SEQ ID NO: 58720 - DNA, 74 bp, Homo sapiens
ctggggcagagaagtcgttcgggatcctctcaagaacttgatgtgaaacccagtgcatcccctcaggaaagaag

SEQ ID NO: 58721 - DNA, 76 bp, Homo sapiens
agagaagtcgttcgggatcctctcaagaacttgatgtgaaacccagtgcatcccctcaggaaagaagtgagtcaga

SEQ ID NO: 58722 - DNA, 77 bp, Homo sapiens
gttcgggatcctctcaagaacttgatgtgaaacccagtgcatcccctcaggaaagaagtgagtcagactcttctcca

SEQ ID NO: 58723 - DNA, 77 bp, Homo sapiens
cctctcaagaacttgatgtgaaacccagtgcatcccctcaggaaagaagtgagtcagactcttctccagattctaaa

SEQ ID NO: 58724 - DNA, 77 bp, Homo sapiens
acttgatgtgaaacccagtgcatcccctcaggaaagaagtgagtcagactcttctccagattctaaagccaagacaa

SEQ ID NO: 58725 - DNA, 73 bp, Homo sapiens
aaacccagtgcatcccctcaggaaagaagtgagtcagactcttctccagattctaaagccaagacaagaaccc

SEQ ID NO: 58726 - DNA, 73 bp, Homo sapiens
aaagaagtgagtcagactcttctccagattctaaagccaagacaagaaccccacttcggcagaggagtcggtc

SEQ ID NO: 58727 - DNA, 76 bp, Homo sapiens
agactcttctccagattctaaagccaagacaagaaccccacttcggcagaggagtcggtctggatcatctccagag

SEQ ID NO: 58728 - DNA, 76 bp, Homo sapiens
aagacaagaaccccacttcggcagaggagtcggtctggatcatctccagaggttgacagcaaatctcgactatccc

SEQ ID NO: 58729 - DNA, 78 bp, Homo sapiens
acttcggcagaggagtcggtctggatcatctccagaggttgacagcaaatctcgactatcccctcggcgcagtaggtc

SEQ ID NO: 58730 - DNA, 78 bp, Homo sapiens
tggatcatctccagaggttgacagcaaatctcgactatcccctcggcgcagtaggtctggttcctcccctgaagtgaa

SEQ ID NO: 58731 - DNA, 75 bp, Homo sapiens
tccagaggttgacagcaaatctcgactatcccctcggcgcagtaggtctggttcctcccctgaagtgaaagataa

SEQ ID NO: 58732 - DNA, 74 bp, Homo sapiens
ggttgacagcaaatctcgactatcccctcggcgcagtaggtctggttcctcccctgaagtgaaagataagccaa

SEQ ID NO: 58733 - DNA, 74 bp, Homo sapiens
aaatctcgactatcccctcggcgcagtaggtctggttcctcccctgaagtgaaagataagccaagagcagcacc

SEQ ID NO: 58734 - DNA, 75 bp, Homo sapiens
cctcggcgcagtaggtctggttcctcccctgaagtgaaagataagccaagagcagcacccagggcacagagtggt

SEQ ID NO: 58735 - DNA, 75 bp, Homo sapiens
agtaggtctggttcctcccctgaagtgaaagataagccaagagcagcacccagggcacagagtggttctgattcc

SEQ ID NO: 58736 - DNA, 77 bp, Homo sapiens
ttcctcccctgaagtgaaagataagccaagagcagcacccagggcacagagtggttctgattcctctcctgaaccta

SEQ ID NO: 58737 - DNA, 78 bp, Homo sapiens
cctgaagtgaaagataagccaagagcagcacccagggcacagagtggttctgattcctctcctgaacctaaagctcca

SEQ ID NO: 58738 - DNA, 76 bp, Homo sapiens
aaagataagccaagagcagcacccagggcacagagtggttctgattcctctcctgaacctaaagctccagcccctc

SEQ ID NO: 58739 - DNA, 74 bp, Homo sapiens
aagagcagcacccagggcacagagtggttctgattcctctcctgaacctaaagctccagcccctcgggcccttc

SEQ ID NO: 58740 - DNA, 73 bp, Homo sapiens
agggcacagagtggttctgattcctctcctgaacctaaagctccagcccctcgggcccttcccagacgaagca

SEQ ID NO: 58741 - DNA, 72 bp, Homo sapiens
agtggttctgattcctctcctgaacctaaagctccagcccctcgggcccttcccagacgaagcagatcaggt

SEQ ID NO: 58742 - DNA, 74 bp, Homo sapiens
attcctctcctgaacctaaagctccagcccctcgggcccttcccagacgaagcagatcaggttcatcaagcaaa

SEQ ID NO: 58743 - DNA, 75 bp, Homo sapiens
taaagctccagcccctcgggcccttcccagacgaagcagatcaggttcatcaagcaaaggcagaggcccttctcc

SEQ ID NO: 58744 - DNA, 80 bp, Homo sapiens
tgaaggaagcagcagtaccgagtcctctcctgaacatccgcccaaatccagaactgctcgcagaggttccaggtcatcac

SEQ ID NO: 58745 - DNA, 80 bp, Homo sapiens
aagcagcagtaccgagtcctctcctgaacatccgcccaaatccagaactgctcgcagaggttccaggtcatcaccagagc

SEQ ID NO: 58746 - DNA, 78 bp, Homo sapiens
taccgagtcctctcctgaacatccgcccaaatccagaactgctcgcagaggttccaggtcatcaccagagcccaagac

SEQ ID NO: 58747 - DNA, 79 bp, Homo sapiens
tgaacatccgcccaaatccagaactgctcgcagaggttccaggtcatcaccagagcccaagaccaagtctcgtacacca

SEQ ID NO: 58748 - DNA, 76 bp, Homo sapiens
cccaaatccagaactgctcgcagaggttccaggtcatcaccagagcccaagaccaagtctcgtacaccacctcgac

SEQ ID NO: 58749 - DNA, 79 bp, Homo sapiens
agaactgctcgcagaggttccaggtcatcaccagagcccaagaccaagtctcgtacaccacctcgacgtcgcagctctc

SEQ ID NO: 58750 - DNA, 79 bp, Homo sapiens
cagaggttccaggtcatcaccagagcccaagaccaagtctcgtacaccacctcgacgtcgcagctctcgatcatctccg

SEQ ID NO: 58751 - DNA, 76 bp, Homo sapiens
accagagcccaagaccaagtctcgtacaccacctcgacgtcgcagctctcgatcatctccggagctaacaaggaag

SEQ ID NO: 58752 - DNA, 77 bp, Homo sapiens
aagaccaagtctcgtacaccacctcgacgtcgcagctctcgatcatctccggagctaacaaggaaggccagactgtc

SEQ ID NO: 58753 - DNA, 79 bp, Homo sapiens
acctcgacgtcgcagctctcgatcatctccggagctaacaaggaaggccagactgtcccgtagaagccgctctgcctca

SEQ ID NO: 58754 - DNA, 79 bp, Homo sapiens
tcatctccggagctaacaaggaaggccagactgtcccgtagaagccgctctgcctcatcctcaccagaaactcgctcta

SEQ ID NO: 58755 - DNA, 76 bp, Homo sapiens
agctaacaaggaaggccagactgtcccgtagaagccgctctgcctcatcctcaccagaaactcgctctagaactcc

SEQ ID NO: 58756 - DNA, 74 bp, Homo sapiens
aaggaaggccagactgtcccgtagaagccgctctgcctcatcctcaccagaaactcgctctagaactcccccaa

SEQ ID NO: 58757 - DNA, 76 bp, Homo sapiens
tagaagccgctctgcctcatcctcaccagaaactcgctctagaactcccccaaggcaccggagaagtccctcagtg

SEQ ID NO: 58758 - DNA, 74 bp, Homo sapiens
ctctgcctcatcctcaccagaaactcgctctagaactcccccaaggcaccggagaagtccctcagtgtcttccc

SEQ ID NO: 58759 - DNA, 71 bp, Homo sapiens
atcctcaccagaaactcgctctagaactcccccaaggcaccggagaagtccctcagtgtcttccccggagc

SEQ ID NO: 58760 - DNA, 67 bp, Homo sapiens
aactcccccaaggcaccggagaagtccctcagtgtcttccccggagccagccgaaaaatcgaggtct

SEQ ID NO: 58761 - DNA, 69 bp, Homo sapiens
aaggcaccggagaagtccctcagtgtcttccccggagccagccgaaaaatcgaggtcttcacgccgacg

SEQ ID NO: 58762 - DNA, 74 bp, Homo sapiens
agaagtccctcagtgtcttccccggagccagccgaaaaatcgaggtcttcacgccgacggcgctcagcttcatc

SEQ ID NO: 58763 - DNA, 75 bp, Homo sapiens
agtgtcttccccggagccagccgaaaaatcgaggtcttcacgccgacggcgctcagcttcatctccacgcactaa

SEQ ID NO: 58764 - DNA, 76 bp, Homo sapiens
ccggagccagccgaaaaatcgaggtcttcacgccgacggcgctcagcttcatctccacgcactaagacaacctcaa

SEQ ID NO: 58765 - DNA, 76 bp, Homo sapiens
ccagccgaaaaatcgaggtcttcacgccgacggcgctcagcttcatctccacgcactaagacaacctcaaggagag

SEQ ID NO: 58766 - DNA, 77 bp, Homo sapiens
aaatcgaggtcttcacgccgacggcgctcagcttcatctccacgcactaagacaacctcaaggagaggccgctctcc

SEQ ID NO: 58767 - DNA, 78 bp, Homo sapiens
cttcacgccgacggcgctcagcttcatctccacgcactaagacaacctcaaggagaggccgctctccttcgccaaagc

SEQ ID NO: 58768 - DNA, 79 bp, Homo sapiens
cgctcagcttcatctccacgcactaagacaacctcaaggagaggccgctctccttcgccaaagcctcgtggactccaga

SEQ ID NO: 58769 - DNA, 76 bp, Homo sapiens
cttcatctccacgcactaagacaacctcaaggagaggccgctctccttcgccaaagcctcgtggactccagaggtc

SEQ ID NO: 58770 - DNA, 71 bp, Homo sapiens
aacctcaaggagaggccgctctccttcgccaaagcctcgtggactccagaggtcccgttcccgctcaagga

SEQ ID NO: 58771 - DNA, 72 bp, Homo sapiens
aggagaggccgctctccttcgccaaagcctcgtggactccagaggtcccgttcccgctcaaggagagagaaa

SEQ ID NO: 58772 - DNA, 70 bp, Homo sapiens
actccagaggtcccgttcccgctcaaggagagagaaaacaagaacaacccgacgtcgagataggtctgga

SEQ ID NO: 58773 - DNA, 73 bp, Homo sapiens
tcccgttcccgctcaaggagagagaaaacaagaacaacccgacgtcgagataggtctggatcttctcagtcaa

SEQ ID NO: 58774 - DNA, 74 bp, Homo sapiens
ttcccgctcaaggagagagaaaacaagaacaacccgacgtcgagataggtctggatcttctcagtcaacctctc

SEQ ID NO: 58775 - DNA, 74 bp, Homo sapiens
agagaaaacaagaacaacccgacgtcgagataggtctggatcttctcagtcaacctctcggcgaagacagcgga

SEQ ID NO: 58776 - DNA, 74 bp, Homo sapiens
aagaacaacccgacgtcgagataggtctggatcttctcagtcaacctctcggcgaagacagcggagccggtcaa

SEQ ID NO: 58777 - DNA, 75 bp, Homo sapiens
gacgtcgagataggtctggatcttctcagtcaacctctcggcgaagacagcggagccggtcaaggtcgcgggtta

SEQ ID NO: 58778 - DNA, 74 bp, Homo sapiens
agataggtctggatcttctcagtcaacctctcggcgaagacagcggagccggtcaaggtcgcgggttactcggc

SEQ ID NO: 58779 - DNA, 71 bp, Homo sapiens
atcttctcagtcaacctctcggcgaagacagcggagccggtcaaggtcgcgggttactcggcggcggaggg

SEQ ID NO: 58780 - DNA, 70 bp, Homo sapiens
agtcaacctctcggcgaagacagcggagccggtcaaggtcgcgggttactcggcggcggaggggaggctc

SEQ ID NO: 58781 - DNA, 72 bp, Homo sapiens
ggcgaagacagcggagccggtcaaggtcgcgggttactcggcggcggaggggaggctctggttatcactcaa

SEQ ID NO: 58782 - DNA, 71 bp, Homo sapiens
acagcggagccggtcaaggtcgcgggttactcggcggcggaggggaggctctggttatcactcaaggtcac

SEQ ID NO: 58783 - DNA, 72 bp, Homo sapiens
tcaaggtcgcgggttactcggcggcggaggggaggctctggttatcactcaaggtcacctgcccggcaggaa

SEQ ID NO: 58784 - DNA, 71 bp, Homo sapiens
tcgcgggttactcggcggcggaggggaggctctggttatcactcaaggtcacctgcccggcaggaaagttc

SEQ ID NO: 58785 - DNA, 70 bp, Homo sapiens
cggcggaggggaggctctggttatcactcaaggtcacctgcccggcaggaaagttcccggacctcctctc

SEQ ID NO: 58786 - DNA, 72 bp, Homo sapiens
ttatcactcaaggtcacctgcccggcaggaaagttcccggacctcctctcgacgccgaagaggccgctctcg

SEQ ID NO: 58787 - DNA, 69 bp, Homo sapiens
aaggtcacctgcccggcaggaaagttcccggacctcctctcgacgccgaagaggccgctctcggacacc

SEQ ID NO: 58788 - DNA, 68 bp, Homo sapiens
acctgcccggcaggaaagttcccggacctcctctcgacgccgaagaggccgctctcggacacccccaa

SEQ ID NO: 58789 - DNA, 75 bp, Homo sapiens
acctcctctcgacgccgaagaggccgctctcggacacccccaaccagtcggaagcgttctcgctcacgcacatca

SEQ ID NO: 58790 - DNA, 76 bp, Homo sapiens
ctctcgacgccgaagaggccgctctcggacacccccaaccagtcggaagcgttctcgctcacgcacatcaccagcc

SEQ ID NO: 58791 - DNA, 73 bp, Homo sapiens
aagaggccgctctcggacacccccaaccagtcggaagcgttctcgctcacgcacatcaccagccccgtggaaa

SEQ ID NO: 58792 - DNA, 79 bp, Homo sapiens
agtcggaagcgttctcgctcacgcacatcaccagccccgtggaaacgctctagatctcgagcctctccagccactcacc

SEQ ID NO: 58793 - DNA, 81 bp, Homo sapiens
ttctcgctcacgcacatcaccagccccgtggaaacgctctagatctcgagcctctccagccactcaccggcgatccaggtc

SEQ ID NO: 58794 - DNA, 78 bp, Homo sapiens
acgcacatcaccagccccgtggaaacgctctagatctcgagcctctccagccactcaccggcgatccaggtccagaac

SEQ ID NO: 58795 - DNA, 75 bp, Homo sapiens
aacgctctagatctcgagcctctccagccactcaccggcgatccaggtccagaacccccctgataagccgacgta

SEQ ID NO: 58796 - DNA, 76 bp, Homo sapiens
tagatctcgagcctctccagccactcaccggcgatccaggtccagaacccccctgataagccgacgtaggtccaga

SEQ ID NO: 58797 - DNA, 74 bp, Homo sapiens
tccagccactcaccggcgatccaggtccagaacccccctgataagccgacgtaggtccagatctcgaacttcac

SEQ ID NO: 58798 - DNA, 72 bp, Homo sapiens
atccaggtccagaacccccctgataagccgacgtaggtccagatctcgaacttcaccagtcagccggagacg

SEQ ID NO: 58799 - DNA, 71 bp, Homo sapiens
aacccccctgataagccgacgtaggtccagatctcgaacttcaccagtcagccggagacggtcaaggtcca

SEQ ID NO: 58800 - DNA, 74 bp, Homo sapiens
ccctgataagccgacgtaggtccagatctcgaacttcaccagtcagccggagacggtcaaggtccaggacttca

SEQ ID NO: 58801 - DNA, 74 bp, Homo sapiens
acgtaggtccagatctcgaacttcaccagtcagccggagacggtcaaggtccaggacttcagtgactcgacgaa

SEQ ID NO: 58802 - DNA, 74 bp, Homo sapiens
atctcgaacttcaccagtcagccggagacggtcaaggtccaggacttcagtgactcgacgaagatcccggtcaa

SEQ ID NO: 58803 - DNA, 75 bp, Homo sapiens
aacttcaccagtcagccggagacggtcaaggtccaggacttcagtgactcgacgaagatcccggtcaagagcatc

SEQ ID NO: 58804 - DNA, 77 bp, Homo sapiens
agtcagccggagacggtcaaggtccaggacttcagtgactcgacgaagatcccggtcaagagcatccccagtgagca

SEQ ID NO: 58805 - DNA, 80 bp, Homo sapiens
gtcaaggtccaggacttcagtgactcgacgaagatcccggtcaagagcatccccagtgagcagaaggcgatccagatcca

SEQ ID NO: 58806 - DNA, 79 bp, Homo sapiens
aggacttcagtgactcgacgaagatcccggtcaagagcatccccagtgagcagaaggcgatccagatccagaacgccac

SEQ ID NO: 58807 - DNA, 80 bp, Homo sapiens
ttcagtgactcgacgaagatcccggtcaagagcatccccagtgagcagaaggcgatccagatccagaacgccaccagtaa

SEQ ID NO: 58808 - DNA, 78 bp, Homo sapiens
tcaagagcatccccagtgagcagaaggcgatccagatccagaacgccaccagtaacccgccgtcgttcaaggtctaga

SEQ ID NO: 58809 - DNA, 74 bp, Homo sapiens
atccccagtgagcagaaggcgatccagatccagaacgccaccagtaacccgccgtcgttcaaggtctagaacgc

SEQ ID NO: 58810 - DNA, 73 bp, Homo sapiens
agcagaaggcgatccagatccagaacgccaccagtaacccgccgtcgttcaaggtctagaacgccaacaacac

SEQ ID NO: 58811 - DNA, 72 bp, Homo sapiens
atccagatccagaacgccaccagtaacccgccgtcgttcaaggtctagaacgccaacaacacgccgccgctc

SEQ ID NO: 58812 - DNA, 69 bp, Homo sapiens
gaacgccaccagtaacccgccgtcgttcaaggtctagaacgccaacaacacgccgccgctcccgttcta

SEQ ID NO: 58813 - DNA, 68 bp, Homo sapiens
accagtaacccgccgtcgttcaaggtctagaacgccaacaacacgccgccgctcccgttctagaactc

SEQ ID NO: 58814 - DNA, 73 bp, Homo sapiens
cgtcgttcaaggtctagaacgccaacaacacgccgccgctcccgttctagaactccaccagtgactcgcagaa

SEQ ID NO: 58815 - DNA, 74 bp, Homo sapiens
agaacgccaacaacacgccgccgctcccgttctagaactccaccagtgactcgcagaaggtccagatccaggac

SEQ ID NO: 58816 - DNA, 76 bp, Homo sapiens
tcccgttctagaactccaccagtgactcgcagaaggtccagatccaggactccaccagtaaccaggaggcgatctc

SEQ ID NO: 58817 - DNA, 79 bp, Homo sapiens
tctagaactccaccagtgactcgcagaaggtccagatccaggactccaccagtaaccaggaggcgatctcgaagcagaa

SEQ ID NO: 58818 - DNA, 78 bp, Homo sapiens
agtgactcgcagaaggtccagatccaggactccaccagtaaccaggaggcgatctcgaagcagaacttcgcctatcac

SEQ ID NO: 58819 - DNA, 78 bp, Homo sapiens
agaaggtccagatccaggactccaccagtaaccaggaggcgatctcgaagcagaacttcgcctatcactcgcagaaga

SEQ ID NO: 58820 - DNA, 80 bp, Homo sapiens
atccaggactccaccagtaaccaggaggcgatctcgaagcagaacttcgcctatcactcgcagaagatcaagatccagaa

SEQ ID NO: 58821 - DNA, 80 bp, Homo sapiens
actccaccagtaaccaggaggcgatctcgaagcagaacttcgcctatcactcgcagaagatcaagatccagaacatctcc

SEQ ID NO: 58822 - DNA, 81 bp, Homo sapiens
atctcgaagcagaacttcgcctatcactcgcagaagatcaagatccagaacatctccggtcacccgaaggagatctcgatc

SEQ ID NO: 58823 - DNA, 76 bp, Homo sapiens
aagatccagaacatctccggtcacccgaaggagatctcgatctcgcacatctccagtaactcgaagaaggtcccgc

SEQ ID NO: 58824 - DNA, 76 bp, Homo sapiens
agaacatctccggtcacccgaaggagatctcgatctcgcacatctccagtaactcgaagaaggtcccgctctcgaa

SEQ ID NO: 58825 - DNA, 77 bp, Homo sapiens
ggtcacccgaaggagatctcgatctcgcacatctccagtaactcgaagaaggtcccgctctcgaacctcaccagtga

SEQ ID NO: 58826 - DNA, 77 bp, Homo sapiens
aaggagatctcgatctcgcacatctccagtaactcgaagaaggtcccgctctcgaacctcaccagtgacacgccgcc

SEQ ID NO: 58827 - DNA, 76 bp, Homo sapiens
atctcgcacatctccagtaactcgaagaaggtcccgctctcgaacctcaccagtgacacgccgccgctctaggtcc

SEQ ID NO: 58828 - DNA, 73 bp, Homo sapiens
atctccagtaactcgaagaaggtcccgctctcgaacctcaccagtgacacgccgccgctctaggtcccggaca

SEQ ID NO: 58829 - DNA, 73 bp, Homo sapiens
taactcgaagaaggtcccgctctcgaacctcaccagtgacacgccgccgctctaggtcccggacacctccagc

SEQ ID NO: 58830 - DNA, 73 bp, Homo sapiens
aaggtcccgctctcgaacctcaccagtgacacgccgccgctctaggtcccggacacctccagctattcggcgc

SEQ ID NO: 58831 - DNA, 75 bp, Homo sapiens
aacctcaccagtgacacgccgccgctctaggtcccggacacctccagctattcggcgccgctctagatctcgaac

SEQ ID NO: 58832 - DNA, 76 bp, Homo sapiens
agtgacacgccgccgctctaggtcccggacacctccagctattcggcgccgctctagatctcgaacgccactgtta

SEQ ID NO: 58833 - DNA, 74 bp, Homo sapiens
taggtcccggacacctccagctattcggcgccgctctagatctcgaacgccactgttaccacgcaaacgttctc

SEQ ID NO: 58834 - DNA, 76 bp, Homo sapiens
acctccagctattcggcgccgctctagatctcgaacgccactgttaccacgcaaacgttctcgaagtcgctcacca

SEQ ID NO: 58835 - DNA, 77 bp, Homo sapiens
agctattcggcgccgctctagatctcgaacgccactgttaccacgcaaacgttctcgaagtcgctcaccacttgcta

SEQ ID NO: 58836 - DNA, 76 bp, Homo sapiens
atctcgaacgccactgttaccacgcaaacgttctcgaagtcgctcaccacttgctatccgccgccgctccagatcc

SEQ ID NO: 58837 - DNA, 75 bp, Homo sapiens
tgttaccacgcaaacgttctcgaagtcgctcaccacttgctatccgccgccgctccagatcccgtactccacgaa

SEQ ID NO: 58838 - DNA, 75 bp, Homo sapiens
acgcaaacgttctcgaagtcgctcaccacttgctatccgccgccgctccagatcccgtactccacgaacagctcg

SEQ ID NO: 58839 - DNA, 71 bp, Homo sapiens
cttgctatccgccgccgctccagatcccgtactccacgaacagctcggggtaaacggtccttaacaagatc

SEQ ID NO: 58840 - DNA, 71 bp, Homo sapiens
ccgccgctccagatcccgtactccacgaacagctcggggtaaacggtccttaacaagatctcctccagcca

SEQ ID NO: 58841 - DNA, 70 bp, Homo sapiens
atcccgtactccacgaacagctcggggtaaacggtccttaacaagatctcctccagccatccgcaggcgt

SEQ ID NO: 58842 - DNA, 75 bp, Homo sapiens
actccacgaacagctcggggtaaacggtccttaacaagatctcctccagccatccgcaggcgttctgcatctgga

SEQ ID NO: 58843 - DNA, 75 bp, Homo sapiens
agctcggggtaaacggtccttaacaagatctcctccagccatccgcaggcgttctgcatctggaagtagttctga

SEQ ID NO: 58844 - DNA, 78 bp, Homo sapiens
taaacggtccttaacaagatctcctccagccatccgcaggcgttctgcatctggaagtagttctgatcgttcacgatc

SEQ ID NO: 58845 - DNA, 84 bp, Homo sapiens
ttaacaagatctcctccagccatccgcaggcgttctgcatctggaagtagttctgatcgttcacgatctgctactcctccagca

SEQ ID NO: 58846 - DNA, 82 bp, Homo sapiens
ctcctccagccatccgcaggcgttctgcatctggaagtagttctgatcgttcacgatctgctactcctccagcaacaagaaa

SEQ ID NO: 58847 - DNA, 81 bp, Homo sapiens
atccgcaggcgttctgcatctggaagtagttctgatcgttcacgatctgctactcctccagcaacaagaaatcattctggt

SEQ ID NO: 58848 - DNA, 81 bp, Homo sapiens
ttctgcatctggaagtagttctgatcgttcacgatctgctactcctccagcaacaagaaatcattctggttcacggacacc

SEQ ID NO: 58849 - DNA, 79 bp, Homo sapiens
aagtagttctgatcgttcacgatctgctactcctccagcaacaagaaatcattctggttcacggacacctccagtagca

SEQ ID NO: 58850 - DNA, 79 bp, Homo sapiens
atcgttcacgatctgctactcctccagcaacaagaaatcattctggttcacggacacctccagtagcactcaacagttc

SEQ ID NO: 58851 - DNA, 80 bp, Homo sapiens
acgatctgctactcctccagcaacaagaaatcattctggttcacggacacctccagtagcactcaacagttccagaatga

SEQ ID NO: 58852 - DNA, 81 bp, Homo sapiens
ctactcctccagcaacaagaaatcattctggttcacggacacctccagtagcactcaacagttccagaatgagctgcttca

SEQ ID NO: 58853 - DNA, 80 bp, Homo sapiens
aacaagaaatcattctggttcacggacacctccagtagcactcaacagttccagaatgagctgcttcagtcgtcctagca

SEQ ID NO: 58854 - DNA, 81 bp, Homo sapiens
atcattctggttcacggacacctccagtagcactcaacagttccagaatgagctgcttcagtcgtcctagcatgtccccaa

SEQ ID NO: 58855 - DNA, 81 bp, Homo sapiens
ttcacggacacctccagtagcactcaacagttccagaatgagctgcttcagtcgtcctagcatgtccccaacacctcttga

SEQ ID NO: 58856 - DNA, 85 bp, Homo sapiens
acctccagtagcactcaacagttccagaatgagctgcttcagtcgtcctagcatgtccccaacacctcttgatcgctgcagatca

SEQ ID NO: 58857 - DNA, 84 bp, Homo sapiens
actcaacagttccagaatgagctgcttcagtcgtcctagcatgtccccaacacctcttgatcgctgcagatcacctggaatgct

SEQ ID NO: 58858 - DNA, 84 bp, Homo sapiens
tgcttcagtcgtcctagcatgtccccaacacctcttgatcgctgcagatcacctggaatgcttgaaccccttggcagctctaga

SEQ ID NO: 58859 - DNA, 81 bp, Homo sapiens
agtcgtcctagcatgtccccaacacctcttgatcgctgcagatcacctggaatgcttgaaccccttggcagctctagaaca

SEQ ID NO: 58860 - DNA, 84 bp, Homo sapiens
aacacctcttgatcgctgcagatcacctggaatgcttgaaccccttggcagctctagaacacccatgtctgtcctgcagcaagc

SEQ ID NO: 58861 - DNA, 85 bp, Homo sapiens
ctgcagatcacctggaatgcttgaaccccttggcagctctagaacacccatgtctgtcctgcagcaagccggcggctccatgatg

SEQ ID NO: 58862 - DNA, 81 bp, Homo sapiens
acctggaatgcttgaaccccttggcagctctagaacacccatgtctgtcctgcagcaagccggcggctccatgatggatgg

SEQ ID NO: 58863 - DNA, 81 bp, Homo sapiens
aatgcttgaaccccttggcagctctagaacacccatgtctgtcctgcagcaagccggcggctccatgatggatggtccagg

SEQ ID NO: 58864 - DNA, 82 bp, Homo sapiens
ttggcagctctagaacacccatgtctgtcctgcagcaagccggcggctccatgatggatggtccaggtccccgaatacctga

SEQ ID NO: 58865 - DNA, 80 bp, Homo sapiens
tagaacacccatgtctgtcctgcagcaagccggcggctccatgatggatggtccaggtccccgaatacctgaccaccaga

SEQ ID NO: 58866 - DNA, 79 bp, Homo sapiens
acccatgtctgtcctgcagcaagccggcggctccatgatggatggtccaggtccccgaatacctgaccaccagagaaca

SEQ ID NO: 58867 - DNA, 82 bp, Homo sapiens
tgcagcaagccggcggctccatgatggatggtccaggtccccgaatacctgaccaccagagaacatctgtgccagaaaatca

SEQ ID NO: 58868 - DNA, 82 bp, Homo sapiens
atgatggatggtccaggtccccgaatacctgaccaccagagaacatctgtgccagaaaatcatgctcagtccaggattgcac

SEQ ID NO: 58869 - DNA, 80 bp, Homo sapiens
atggtccaggtccccgaatacctgaccaccagagaacatctgtgccagaaaatcatgctcagtccaggattgcacttgcc

SEQ ID NO: 58870 - DNA, 85 bp, Homo sapiens
cgaatacctgaccaccagagaacatctgtgccagaaaatcatgctcagtccaggattgcacttgccctgacagctatcagtcttg

SEQ ID NO: 58871 - DNA, 85 bp, Homo sapiens
acctgaccaccagagaacatctgtgccagaaaatcatgctcagtccaggattgcacttgccctgacagctatcagtcttggcacc

SEQ ID NO: 58872 - DNA, 85 bp, Homo sapiens
agaacatctgtgccagaaaatcatgctcagtccaggattgcacttgccctgacagctatcagtcttggcaccgctcggcctcctc

SEQ ID NO: 58873 - DNA, 83 bp, Homo sapiens
ccagaaaatcatgctcagtccaggattgcacttgccctgacagctatcagtcttggcaccgctcggcctcctccgtccatgtc

SEQ ID NO: 58874 - DNA, 86 bp, Homo sapiens
aaatcatgctcagtccaggattgcacttgccctgacagctatcagtcttggcaccgctcggcctcctccgtccatgtctgctgctg

SEQ ID NO: 58875 - DNA, 86 bp, Homo sapiens
ttgcacttgccctgacagctatcagtcttggcaccgctcggcctcctccgtccatgtctgctgctggccttgctgcaagaatgtcc

SEQ ID NO: 58876 - DNA, 84 bp, Homo sapiens
ctgacagctatcagtcttggcaccgctcggcctcctccgtccatgtctgctgctggccttgctgcaagaatgtcccaggttcca

SEQ ID NO: 58877 - DNA, 80 bp, Homo sapiens
atcagtcttggcaccgctcggcctcctccgtccatgtctgctgctggccttgctgcaagaatgtcccaggttccagcccc

SEQ ID NO: 58878 - DNA, 82 bp, Homo sapiens
gctcggcctcctccgtccatgtctgctgctggccttgctgcaagaatgtcccaggttccagccccggtgcctctcatgagtc

SEQ ID NO: 58879 - DNA, 82 bp, Homo sapiens
ctcctccgtccatgtctgctgctggccttgctgcaagaatgtcccaggttccagccccggtgcctctcatgagtctcagaac

SEQ ID NO: 58880 - DNA, 85 bp, Homo sapiens
tgtctgctgctggccttgctgcaagaatgtcccaggttccagccccggtgcctctcatgagtctcagaaccgcaccagcagccaa

SEQ ID NO: 58881 - DNA, 79 bp, Homo sapiens
ctggccttgctgcaagaatgtcccaggttccagccccggtgcctctcatgagtctcagaaccgcaccagcagccaacct

SEQ ID NO: 58882 - DNA, 79 bp, Homo sapiens
caagaatgtcccaggttccagccccggtgcctctcatgagtctcagaaccgcaccagcagccaaccttgccagcaggat

SEQ ID NO: 58883 - DNA, 81 bp, Homo sapiens
atgtcccaggttccagccccggtgcctctcatgagtctcagaaccgcaccagcagccaaccttgccagcaggattcctgca

SEQ ID NO: 58884 - DNA, 86 bp, Homo sapiens
gccccggtgcctctcatgagtctcagaaccgcaccagcagccaaccttgccagcaggattcctgcagcctctgcggcagccatgaa

SEQ ID NO: 58885 - DNA, 88 bp, Homo sapiens
gtgcctctcatgagtctcagaaccgcaccagcagccaaccttgccagcaggattcctgcagcctctgcggcagccatgaacctagcca

SEQ ID NO: 58886 - DNA, 86 bp, Homo sapiens
atgagtctcagaaccgcaccagcagccaaccttgccagcaggattcctgcagcctctgcggcagccatgaacctagccagcgccag

SEQ ID NO: 58887 - DNA, 84 bp, Homo sapiens
aaccgcaccagcagccaaccttgccagcaggattcctgcagcctctgcggcagccatgaacctagccagcgccaggacacctgc

SEQ ID NO: 58888 - DNA, 86 bp, Homo sapiens
ttgccagcaggattcctgcagcctctgcggcagccatgaacctagccagcgccaggacacctgccattccaacagcagtgaacctg

SEQ ID NO: 58889 - DNA, 87 bp, Homo sapiens
tctgcggcagccatgaacctagccagcgccaggacacctgccattccaacagcagtgaacctggctgactctcgaacgccagctgca

SEQ ID NO: 58890 - DNA, 83 bp, Homo sapiens
aggacacctgccattccaacagcagtgaacctggctgactctcgaacgccagctgcagcagcggccatgaacttggccagccc

SEQ ID NO: 58891 - DNA, 84 bp, Homo sapiens
cctgccattccaacagcagtgaacctggctgactctcgaacgccagctgcagcagcggccatgaacttggccagccccagaaca

SEQ ID NO: 58892 - DNA, 83 bp, Homo sapiens
aacagcagtgaacctggctgactctcgaacgccagctgcagcagcggccatgaacttggccagccccagaacagcggtggcac

SEQ ID NO: 58893 - DNA, 83 bp, Homo sapiens
ctggctgactctcgaacgccagctgcagcagcggccatgaacttggccagccccagaacagcggtggcaccttcggctgtgaa

SEQ ID NO: 58894 - DNA, 80 bp, Homo sapiens
actctcgaacgccagctgcagcagcggccatgaacttggccagccccagaacagcggtggcaccttcggctgtgaacctg

SEQ ID NO: 58895 - DNA, 81 bp, Homo sapiens
agctgcagcagcggccatgaacttggccagccccagaacagcggtggcaccttcggctgtgaacctggctgaccctcgcac

SEQ ID NO: 58896 - DNA, 77 bp, Homo sapiens
agcggccatgaacttggccagccccagaacagcggtggcaccttcggctgtgaacctggctgaccctcgcactccca

SEQ ID NO: 58897 - DNA, 76 bp, Homo sapiens
atgaacttggccagccccagaacagcggtggcaccttcggctgtgaacctggctgaccctcgcactcccacagccc

SEQ ID NO: 58898 - DNA, 78 bp, Homo sapiens
cccagaacagcggtggcaccttcggctgtgaacctggctgaccctcgcactcccacagccccagctgtgaacctagca

SEQ ID NO: 58899 - DNA, 76 bp, Homo sapiens
aacagcggtggcaccttcggctgtgaacctggctgaccctcgcactcccacagccccagctgtgaacctagcaggg

SEQ ID NO: 58900 - DNA, 77 bp, Homo sapiens
ctgtgaacctggctgaccctcgcactcccacagccccagctgtgaacctagcaggggccagaaccccagctgccttg

SEQ ID NO: 58901 - DNA, 80 bp, Homo sapiens
accctcgcactcccacagccccagctgtgaacctagcaggggccagaaccccagctgccttggcagctctgagtctcaca

SEQ ID NO: 58902 - DNA, 82 bp, Homo sapiens
actcccacagccccagctgtgaacctagcaggggccagaaccccagctgccttggcagctctgagtctcacaggctctggca

SEQ ID NO: 58903 - DNA, 82 bp, Homo sapiens
acctagcaggggccagaaccccagctgccttggcagctctgagtctcacaggctctggcacaccaccaactgctgcaaacta

SEQ ID NO: 58904 - DNA, 84 bp, Homo sapiens
ggccagaaccccagctgccttggcagctctgagtctcacaggctctggcacaccaccaactgctgcaaactatccctccagctc

SEQ ID NO: 58905 - DNA, 85 bp, Homo sapiens
cttggcagctctgagtctcacaggctctggcacaccaccaactgctgcaaactatccctccagctccagaacaccacaggctcca

SEQ ID NO: 58906 - DNA, 85 bp, Homo sapiens
tgagtctcacaggctctggcacaccaccaactgctgcaaactatccctccagctccagaacaccacaggctccagcctctgcaaa

SEQ ID NO: 58907 - DNA, 77 bp, Homo sapiens
acaccaccaactgctgcaaactatccctccagctccagaacaccacaggctccagcctctgcaaacctggtgggtcc

SEQ ID NO: 58908 - DNA, 79 bp, Homo sapiens
aactgctgcaaactatccctccagctccagaacaccacaggctccagcctctgcaaacctggtgggtcctcggtctgca

SEQ ID NO: 58909 - DNA, 79 bp, Homo sapiens
aaactatccctccagctccagaacaccacaggctccagcctctgcaaacctggtgggtcctcggtctgcacatgccaca

SEQ ID NO: 58910 - DNA, 83 bp, Homo sapiens
agctccagaacaccacaggctccagcctctgcaaacctggtgggtcctcggtctgcacatgccacagctcctgtgaatattgc

SEQ ID NO: 58911 - DNA, 82 bp, Homo sapiens
accacaggctccagcctctgcaaacctggtgggtcctcggtctgcacatgccacagctcctgtgaatattgccggctccaga

SEQ ID NO: 58912 - DNA, 82 bp, Homo sapiens
tccagcctctgcaaacctggtgggtcctcggtctgcacatgccacagctcctgtgaatattgccggctccagaaccgccgca

SEQ ID NO: 58913 - DNA, 81 bp, Homo sapiens
tctgcaaacctggtgggtcctcggtctgcacatgccacagctcctgtgaatattgccggctccagaaccgccgcagccttg

SEQ ID NO: 58914 - DNA, 78 bp, Homo sapiens
ctggtgggtcctcggtctgcacatgccacagctcctgtgaatattgccggctccagaaccgccgcagccttggccccc

SEQ ID NO: 58915 - DNA, 83 bp, Homo sapiens
gtctgcacatgccacagctcctgtgaatattgccggctccagaaccgccgcagccttggcccccgcgagcctcaccagtgcta

SEQ ID NO: 58916 - DNA, 81 bp, Homo sapiens
tgtgaatattgccggctccagaaccgccgcagccttggcccccgcgagcctcaccagtgctaggatggctccagcattgtc

SEQ ID NO: 58917 - DNA, 79 bp, Homo sapiens
atattgccggctccagaaccgccgcagccttggcccccgcgagcctcaccagtgctaggatggctccagcattgtctgg

SEQ ID NO: 58918 - DNA, 79 bp, Homo sapiens
agaaccgccgcagccttggcccccgcgagcctcaccagtgctaggatggctccagcattgtctggtgcaaacctcacca

SEQ ID NO: 58919 - DNA, 77 bp, Homo sapiens
agccttggcccccgcgagcctcaccagtgctaggatggctccagcattgtctggtgcaaacctcaccagccccaggg

SEQ ID NO: 58920 - DNA, 78 bp, Homo sapiens
cctcaccagtgctaggatggctccagcattgtctggtgcaaacctcaccagccccagggtgcccctttctgcctacga

SEQ ID NO: 58921 - DNA, 79 bp, Homo sapiens
agtgctaggatggctccagcattgtctggtgcaaacctcaccagccccagggtgcccctttctgcctacgagcgtgtca

SEQ ID NO: 58922 - DNA, 79 bp, Homo sapiens
tccagcattgtctggtgcaaacctcaccagccccagggtgcccctttctgcctacgagcgtgtcagtggcagaacctca

SEQ ID NO: 58923 - DNA, 76 bp, Homo sapiens
attgtctggtgcaaacctcaccagccccagggtgcccctttctgcctacgagcgtgtcagtggcagaacctcacca

SEQ ID NO: 58924 - DNA, 74 bp, Homo sapiens
aacctcaccagccccagggtgcccctttctgcctacgagcgtgtcagtggcagaacctcaccaccgctccttga

SEQ ID NO: 58925 - DNA, 74 bp, Homo sapiens
cccagggtgcccctttctgcctacgagcgtgtcagtggcagaacctcaccaccgctccttgaccgagctaggtc

SEQ ID NO: 58926 - DNA, 75 bp, Homo sapiens
ccctttctgcctacgagcgtgtcagtggcagaacctcaccaccgctccttgaccgagctaggtccagaacaccac

SEQ ID NO: 58927 - DNA, 78 bp, Homo sapiens
tctgcctacgagcgtgtcagtggcagaacctcaccaccgctccttgaccgagctaggtccagaacaccaccgtctgcc

SEQ ID NO: 58928 - DNA, 77 bp, Homo sapiens
tgtcagtggcagaacctcaccaccgctccttgaccgagctaggtccagaacaccaccgtctgccccaagccaatcta

SEQ ID NO: 58929 - DNA, 74 bp, Homo sapiens
agaacctcaccaccgctccttgaccgagctaggtccagaacaccaccgtctgccccaagccaatctaggatgac

SEQ ID NO: 58930 - DNA, 74 bp, Homo sapiens
accaccgctccttgaccgagctaggtccagaacaccaccgtctgccccaagccaatctaggatgacctctgaac

SEQ ID NO: 58931 - DNA, 74 bp, Homo sapiens
tccttgaccgagctaggtccagaacaccaccgtctgccccaagccaatctaggatgacctctgaacgggctccc

SEQ ID NO: 58932 - DNA, 72 bp, Homo sapiens
agctaggtccagaacaccaccgtctgccccaagccaatctaggatgacctctgaacgggctccctccccttc

SEQ ID NO: 58933 - DNA, 72 bp, Homo sapiens
agaacaccaccgtctgccccaagccaatctaggatgacctctgaacgggctccctccccttcctctagaatg

SEQ ID NO: 58934 - DNA, 75 bp, Homo sapiens
tctgccccaagccaatctaggatgacctctgaacgggctccctccccttcctctagaatgggccaggctccttca

SEQ ID NO: 58935 - DNA, 74 bp, Homo sapiens
aatctaggatgacctctgaacgggctccctccccttcctctagaatgggccaggctccttcacagtctcttctc

SEQ ID NO: 58936 - DNA, 76 bp, Homo sapiens
ctgaacgggctccctccccttcctctagaatgggccaggctccttcacagtctcttctccctccagcacaggatca

SEQ ID NO: 58937 - DNA, 79 bp, Homo sapiens
tccccttcctctagaatgggccaggctccttcacagtctcttctccctccagcacaggatcagccgaggtctcctgtgc

SEQ ID NO: 58938 - DNA, 79 bp, Homo sapiens
tagaatgggccaggctccttcacagtctcttctccctccagcacaggatcagccgaggtctcctgtgccttctgctttt

SEQ ID NO: 58939 - DNA, 80 bp, Homo sapiens
caggctccttcacagtctcttctccctccagcacaggatcagccgaggtctcctgtgccttctgctttttcagaccaatc

SEQ ID NO: 58940 - DNA, 78 bp, Homo sapiens
tcacagtctcttctccctccagcacaggatcagccgaggtctcctgtgccttctgctttttcagaccaatcccgttgt

SEQ ID NO: 58941 - DNA, 77 bp, Homo sapiens
ttctccctccagcacaggatcagccgaggtctcctgtgccttctgctttttcagaccaatcccgttgtttgattgcc

SEQ ID NO: 58942 - DNA, 76 bp, Homo sapiens
agcacaggatcagccgaggtctcctgtgccttctgctttttcagaccaatcccgttgtttgattgcccagaccacc

SEQ ID NO: 58943 - DNA, 74 bp, Homo sapiens
atcagccgaggtctcctgtgccttctgctttttcagaccaatcccgttgtttgattgcccagaccacccctgta

SEQ ID NO: 58944 - DNA, 75 bp, Homo sapiens
tcctgtgccttctgctttttcagaccaatcccgttgtttgattgcccagaccacccctgtagcagggtctcagtc

SEQ ID NO: 58945 - DNA, 72 bp, Homo sapiens
ttctgctttttcagaccaatcccgttgtttgattgcccagaccacccctgtagcagggtctcagtccctttc

SEQ ID NO: 58946 - DNA, 71 bp, Homo sapiens
tttttcagaccaatcccgttgtttgattgcccagaccacccctgtagcagggtctcagtccctttcctctg

SEQ ID NO: 58947 - DNA, 72 bp, Homo sapiens
aatcccgttgtttgattgcccagaccacccctgtagcagggtctcagtccctttcctctggggcagtggcaa

SEQ ID NO: 58948 - DNA, 73 bp, Homo sapiens
tttgattgcccagaccacccctgtagcagggtctcagtccctttcctctggggcagtggcaacgaccacgtcc

SEQ ID NO: 58949 - DNA, 76 bp, Homo sapiens
agaccacccctgtagcagggtctcagtccctttcctctggggcagtggcaacgaccacgtcctctgctggtgatca

SEQ ID NO: 58950 - DNA, 83 bp, Homo sapiens
tgtagcagggtctcagtccctttcctctggggcagtggcaacgaccacgtcctctgctggtgatcacaatggcatgctctctg

SEQ ID NO: 58951 - DNA, 82 bp, Homo sapiens
ggtctcagtccctttcctctggggcagtggcaacgaccacgtcctctgctggtgatcacaatggcatgctctctgtccctgc

SEQ ID NO: 58952 - DNA, 79 bp, Homo sapiens
cctttcctctggggcagtggcaacgaccacgtcctctgctggtgatcacaatggcatgctctctgtccctgcccctggg

SEQ ID NO: 58953 - DNA, 82 bp, Homo sapiens
agtggcaacgaccacgtcctctgctggtgatcacaatggcatgctctctgtccctgcccctggggtgccccactctgatgtg

SEQ ID NO: 58954 - DNA, 79 bp, Homo sapiens
aacgaccacgtcctctgctggtgatcacaatggcatgctctctgtccctgcccctggggtgccccactctgatgtgggg

SEQ ID NO: 58955 - DNA, 83 bp, Homo sapiens
tctgctggtgatcacaatggcatgctctctgtccctgcccctggggtgccccactctgatgtgggggagccacctgcctctac

SEQ ID NO: 58956 - DNA, 80 bp, Homo sapiens
ggtgatcacaatggcatgctctctgtccctgcccctggggtgccccactctgatgtgggggagccacctgcctctactgg

SEQ ID NO: 58957 - DNA, 79 bp, Homo sapiens
atggcatgctctctgtccctgcccctggggtgccccactctgatgtgggggagccacctgcctctactggggcccagca

SEQ ID NO: 58958 - DNA, 77 bp, Homo sapiens
tccctgcccctggggtgccccactctgatgtgggggagccacctgcctctactggggcccagcagccttctgcatta

SEQ ID NO: 58959 - DNA, 79 bp, Homo sapiens
ctggggtgccccactctgatgtgggggagccacctgcctctactggggcccagcagccttctgcattagccgccctgca

SEQ ID NO: 58960 - DNA, 81 bp, Homo sapiens
ccactctgatgtgggggagccacctgcctctactggggcccagcagccttctgcattagccgccctgcagccagcaaagga

SEQ ID NO: 58961 - DNA, 81 bp, Homo sapiens
tgatgtgggggagccacctgcctctactggggcccagcagccttctgcattagccgccctgcagccagcaaaggagcggcg

SEQ ID NO: 58962 - DNA, 78 bp, Homo sapiens
acctgcctctactggggcccagcagccttctgcattagccgccctgcagccagcaaaggagcggcggagttcctcctc

SEQ ID NO: 58963 - DNA, 78 bp, Homo sapiens
tctactggggcccagcagccttctgcattagccgccctgcagccagcaaaggagcggcggagttcctcctcgtcgtcg

SEQ ID NO: 58964 - DNA, 77 bp, Homo sapiens
ccttctgcattagccgccctgcagccagcaaaggagcggcggagttcctcctcgtcgtcgtcgtcctctagctcctc

SEQ ID NO: 58965 - DNA, 77 bp, Homo sapiens
tagccgccctgcagccagcaaaggagcggcggagttcctcctcgtcgtcgtcgtcctctagctcctcctcttcttca

SEQ ID NO: 58966 - DNA, 76 bp, Homo sapiens
agccagcaaaggagcggcggagttcctcctcgtcgtcgtcgtcctctagctcctcctcttcttcatcatcgtcgtc

SEQ ID NO: 58967 - DNA, 74 bp, Homo sapiens
aaggagcggcggagttcctcctcgtcgtcgtcgtcctctagctcctcctcttcttcatcatcgtcgtcgtcgtc

SEQ ID NO: 58968 - DNA, 74 bp, Homo sapiens
ggagttcctcctcgtcgtcgtcgtcctctagctcctcctcttcttcatcatcgtcgtcgtcgtcctcctcctcc

SEQ ID NO: 58969 - DNA, 80 bp, Homo sapiens
tagctcctcctcttcttcatcatcgtcgtcgtcgtcctcctcctcctctggctccagttctagtgactcagagggctcta

SEQ ID NO: 58970 - DNA, 79 bp, Homo sapiens
tcttcttcatcatcgtcgtcgtcgtcctcctcctcctctggctccagttctagtgactcagagggctctagccttcctg

SEQ ID NO: 58971 - DNA, 78 bp, Homo sapiens
atcatcgtcgtcgtcgtcctcctcctcctctggctccagttctagtgactcagagggctctagccttcctgtgcaacc

SEQ ID NO: 58972 - DNA, 80 bp, Homo sapiens
tcgtcctcctcctcctctggctccagttctagtgactcagagggctctagccttcctgtgcaacctgaggtggcactgaa

SEQ ID NO: 58973 - DNA, 80 bp, Homo sapiens
ctcctctggctccagttctagtgactcagagggctctagccttcctgtgcaacctgaggtggcactgaagaggtgaggga

SEQ ID NO: 58974 - DNA, 76 bp, Homo sapiens
agagggctctagccttcctgtgcaacctgaggtggcactgaagaggtgagggagcttgacttttagaaatcttcag

SEQ ID NO: 58975 - DNA, 72 bp, Homo sapiens
ggttggggctggggcagcttgtctccttgtgacactcctctcctcccacagggtccccagccccaccccagc

SEQ ID NO: 58976 - DNA, 71 bp, Homo sapiens
agcttgtctccttgtgacactcctctcctcccacagggtccccagccccaccccagccccaaaggaggctg

SEQ ID NO: 58977 - DNA, 72 bp, Homo sapiens
tctccttgtgacactcctctcctcccacagggtccccagccccaccccagccccaaaggaggctgttcgaga

SEQ ID NO: 58978 - DNA, 68 bp, Homo sapiens
actcctctcctcccacagggtccccagccccaccccagccccaaaggaggctgttcgagagggacgtc

SEQ ID NO: 58979 - DNA, 68 bp, Homo sapiens
ccacagggtccccagccccaccccagccccaaaggaggctgttcgagagggacgtcctccggagccaa

SEQ ID NO: 58980 - DNA, 68 bp, Homo sapiens
cccagccccaccccagccccaaaggaggctgttcgagagggacgtcctccggagccaaccccagccaa

SEQ ID NO: 58981 - DNA, 67 bp, Homo sapiens
accccagccccaaaggaggctgttcgagagggacgtcctccggagccaaccccagccaaacggaaga

SEQ ID NO: 58982 - DNA, 70 bp, Homo sapiens
aaaggaggctgttcgagagggacgtcctccggagccaaccccagccaaacggaagaggcgctctagcagt

SEQ ID NO: 58983 - DNA, 71 bp, Homo sapiens
aggctgttcgagagggacgtcctccggagccaaccccagccaaacggaagaggcgctctagcagttccagt

SEQ ID NO: 58984 - DNA, 72 bp, Homo sapiens
agagggacgtcctccggagccaaccccagccaaacggaagaggcgctctagcagttccagttccagctcctc

SEQ ID NO: 58985 - DNA, 74 bp, Homo sapiens
cctccggagccaaccccagccaaacggaagaggcgctctagcagttccagttccagctcctcctcttcatcttc

SEQ ID NO: 58986 - DNA, 73 bp, Homo sapiens
aaccccagccaaacggaagaggcgctctagcagttccagttccagctcctcctcttcatcttcctcctcctcc

SEQ ID NO: 58987 - DNA, 72 bp, Homo sapiens
tcttcttcctcctcatcttcctcctcctcgtcgtcttcctccccttcccctgctaagcctggccctcaggcc

SEQ ID NO: 58988 - DNA, 72 bp, Homo sapiens
tcctcatcttcctcctcctcgtcgtcttcctccccttcccctgctaagcctggccctcaggccttgcccaaa

SEQ ID NO: 58989 - DNA, 71 bp, Homo sapiens
ttcctcctcctcgtcgtcttcctccccttcccctgctaagcctggccctcaggccttgcccaaacctgcaa

SEQ ID NO: 58990 - DNA, 71 bp, Homo sapiens
tcgtcgtcttcctccccttcccctgctaagcctggccctcaggccttgcccaaacctgcaagccccaagaa

SEQ ID NO: 58991 - DNA, 70 bp, Homo sapiens
ttcctccccttcccctgctaagcctggccctcaggccttgcccaaacctgcaagccccaagaagccaccc

SEQ ID NO: 58992 - DNA, 74 bp, Homo sapiens
tgctaagcctggccctcaggccttgcccaaacctgcaagccccaagaagccaccccctggcgagcggaggtgag

SEQ ID NO: 58993 - DNA, 76 bp, Homo sapiens
tggccctcaggccttgcccaaacctgcaagccccaagaagccaccccctggcgagcggaggtgagtgctgtcttgc

SEQ ID NO: 58994 - DNA, 75 bp, Homo sapiens
ccttgcccaaacctgcaagccccaagaagccaccccctggcgagcggaggtgagtgctgtcttgcctgagttgaa

SEQ ID NO: 58995 - DNA, 73 bp, Homo sapiens
aaacctgcaagccccaagaagccaccccctggcgagcggaggtgagtgctgtcttgcctgagttgaaaggtgg

SEQ ID NO: 58996 - DNA, 72 bp, Homo sapiens
tgtgcttgaaagggtgtggtgctattgggtcctactgtgttccccaggtcccgcagcccccggaagccaata

SEQ ID NO: 58997 - DNA, 69 bp, Homo sapiens
aaagggtgtggtgctattgggtcctactgtgttccccaggtcccgcagcccccggaagccaatagactc

SEQ ID NO: 58998 - DNA, 71 bp, Homo sapiens
tggtgctattgggtcctactgtgttccccaggtcccgcagcccccggaagccaatagactccctcagggac

SEQ ID NO: 58999 - DNA, 71 bp, Homo sapiens
tcctactgtgttccccaggtcccgcagcccccggaagccaatagactccctcagggactctcggtccctca

SEQ ID NO: 59000 - DNA, 71 bp, Homo sapiens
gtgttccccaggtcccgcagcccccggaagccaatagactccctcagggactctcggtccctcagctactc

SEQ ID NO: 59001 - DNA, 74 bp, Homo sapiens
gtcccgcagcccccggaagccaatagactccctcagggactctcggtccctcagctactcgcctgtggagcgtc

SEQ ID NO: 59002 - DNA, 73 bp, Homo sapiens
cccggaagccaatagactccctcagggactctcggtccctcagctactcgcctgtggagcgtcgccgtccctc

SEQ ID NO: 59003 - DNA, 74 bp, Homo sapiens
ccaatagactccctcagggactctcggtccctcagctactcgcctgtggagcgtcgccgtccctcgccccagcc

SEQ ID NO: 59004 - DNA, 74 bp, Homo sapiens
ctcagggactctcggtccctcagctactcgcctgtggagcgtcgccgtccctcgccccagccctcaccacggga

SEQ ID NO: 59005 - DNA, 74 bp, Homo sapiens
ggtccctcagctactcgcctgtggagcgtcgccgtccctcgccccagccctcaccacgggaccagcagaggtaa

SEQ ID NO: 59006 - DNA, 75 bp, Homo sapiens
ctcagctactcgcctgtggagcgtcgccgtccctcgccccagccctcaccacgggaccagcagaggtaaggccaa

SEQ ID NO: 59007 - DNA, 75 bp, Homo sapiens
cctgtggagcgtcgccgtccctcgccccagccctcaccacgggaccagcagaggtaaggccaactgcaggtgtca

SEQ ID NO: 59008 - DNA, 76 bp, Homo sapiens
tcgccgtccctcgccccagccctcaccacgggaccagcagaggtaaggccaactgcaggtgtcagcacccagcctg

SEQ ID NO: 59009 - DNA, 83 bp, Homo sapiens
gtgcctgaggtggtgccaccctgtggcctgatgtctgtcctgtgttgcagcagcagcagtgagcggggttcccggagaggcca

SEQ ID NO: 59010 - DNA, 81 bp, Homo sapiens
gtggtgccaccctgtggcctgatgtctgtcctgtgttgcagcagcagcagtgagcggggttcccggagaggccagcgtggg

SEQ ID NO: 59011 - DNA, 82 bp, Homo sapiens
tgtggcctgatgtctgtcctgtgttgcagcagcagcagtgagcggggttcccggagaggccagcgtggggacagccgctccc

SEQ ID NO: 59012 - DNA, 80 bp, Homo sapiens
atgtctgtcctgtgttgcagcagcagcagtgagcggggttcccggagaggccagcgtggggacagccgctcccccagcca

SEQ ID NO: 59013 - DNA, 81 bp, Homo sapiens
tgtgttgcagcagcagcagtgagcggggttcccggagaggccagcgtggggacagccgctcccccagccacaagcgcagga

SEQ ID NO: 59014 - DNA, 75 bp, Homo sapiens
agcagtgagcggggttcccggagaggccagcgtggggacagccgctcccccagccacaagcgcaggagggagaca

SEQ ID NO: 59015 - DNA, 74 bp, Homo sapiens
tgagcggggttcccggagaggccagcgtggggacagccgctcccccagccacaagcgcaggagggagacaccta

SEQ ID NO: 59016 - DNA, 78 bp, Homo sapiens
gagaggccagcgtggggacagccgctcccccagccacaagcgcaggagggagacacctagccctcggcccatgagaca

SEQ ID NO: 59017 - DNA, 76 bp, Homo sapiens
agcgtggggacagccgctcccccagccacaagcgcaggagggagacacctagccctcggcccatgagacaccgctc

SEQ ID NO: 59018 - DNA, 77 bp, Homo sapiens
acagccgctcccccagccacaagcgcaggagggagacacctagccctcggcccatgagacaccgctcctccaggtgc

SEQ ID NO: 59019 - DNA, 77 bp, Homo sapiens
cccagccacaagcgcaggagggagacacctagccctcggcccatgagacaccgctcctccaggtgcgtgtcctggaa

SEQ ID NO: 59020 - DNA, 79 bp, Homo sapiens
acaagcgcaggagggagacacctagccctcggcccatgagacaccgctcctccaggtgcgtgtcctggaaggctgatgc

SEQ ID NO: 59021 - DNA, 75 bp, Homo sapiens
agggagacacctagccctcggcccatgagacaccgctcctccaggtgcgtgtcctggaaggctgatgcccccttc

SEQ ID NO: 59022 - DNA, 72 bp, Homo sapiens
cttgagggctggggtgggaactccctgttgacccatatcttctcttgcaggtctccataaattgtctttggg

SEQ ID NO: 59023 - DNA, 73 bp, Homo sapiens
gtgggaactccctgttgacccatatcttctcttgcaggtctccataaattgtctttgggggattccaccacac

SEQ ID NO: 59024 - DNA, 74 bp, Homo sapiens
actccctgttgacccatatcttctcttgcaggtctccataaattgtctttgggggattccaccacacccaatgc

SEQ ID NO: 59025 - DNA, 76 bp, Homo sapiens
acccatatcttctcttgcaggtctccataaattgtctttgggggattccaccacacccaatgctctggagccacaa

SEQ ID NO: 59026 - DNA, 76 bp, Homo sapiens
ttctcttgcaggtctccataaattgtctttgggggattccaccacacccaatgctctggagccacaaggagtgtcc

SEQ ID NO: 59027 - DNA, 73 bp, Homo sapiens
ggtctccataaattgtctttgggggattccaccacacccaatgctctggagccacaaggagtgtcccttcttc

SEQ ID NO: 59028 - DNA, 74 bp, Homo sapiens
aattgtctttgggggattccaccacacccaatgctctggagccacaaggagtgtcccttcttccccagcagagc

SEQ ID NO: 59029 - DNA, 73 bp, Homo sapiens
attccaccacacccaatgctctggagccacaaggagtgtcccttcttccccagcagagccgtgggagggtcct

SEQ ID NO: 59030 - DNA, 76 bp, Homo sapiens
atgctctggagccacaaggagtgtcccttcttccccagcagagccgtgggagggtccttgtctgctctcctttgaa

SEQ ID NO: 59031 - DNA, 73 bp, Homo sapiens
ccacaaggagtgtcccttcttccccagcagagccgtgggagggtccttgtctgctctcctttgaaccttggca

SEQ ID NO: 59032 - DNA, 73 bp, Homo sapiens
ccttcttccccagcagagccgtgggagggtccttgtctgctctcctttgaaccttggcagcccttggatggag

SEQ ID NO: 59033 - DNA, 74 bp, Homo sapiens
cagcagagccgtgggagggtccttgtctgctctcctttgaaccttggcagcccttggatggagggctccctttc

SEQ ID NO: 59034 - DNA, 70 bp, Homo sapiens
agccgtgggagggtccttgtctgctctcctttgaaccttggcagcccttggatggagggctccctttccc

SEQ ID NO: 59035 - DNA, 68 bp, Homo sapiens
gtccttgtctgctctcctttgaaccttggcagcccttggatggagggctccctttccctccccttttt

SEQ ID NO: 59036 - DNA, 67 bp, Homo sapiens
tctgctctcctttgaaccttggcagcccttggatggagggctccctttccctccccttttttttttc

SEQ ID NO: 59037 - DNA, 68 bp, Homo sapiens
ttttttctttgttcctgtgaaatgttaatctccgtgagttcttcctggttcatgtgttctggggggtt

SEQ ID NO: 59038 - DNA, 70 bp, Homo sapiens
tctttgttcctgtgaaatgttaatctccgtgagttcttcctggttcatgtgttctggggggtttggggtg

SEQ ID NO: 59039 - DNA, 70 bp, Homo sapiens
aaatgttaatctccgtgagttcttcctggttcatgtgttctggggggtttggggtgggagggaatgcaga

SEQ ID NO: 59040 - DNA, 71 bp, Homo sapiens
taatctccgtgagttcttcctggttcatgtgttctggggggtttggggtgggagggaatgcagatgggagt

SEQ ID NO: 59041 - DNA, 68 bp, Homo sapiens
agttcttcctggttcatgtgttctggggggtttggggtgggagggaatgcagatgggagttgggggag

SEQ ID NO: 59042 - DNA, 71 bp, Homo sapiens
tcatgtgttctggggggtttggggtgggagggaatgcagatgggagttgggggaggggaggatacagttca

SEQ ID NO: 59043 - DNA, 69 bp, Homo sapiens
ttctggggggtttggggtgggagggaatgcagatgggagttgggggaggggaggatacagttcaggata

SEQ ID NO: 59044 - DNA, 72 bp, Homo sapiens
gggtgggagggaatgcagatgggagttgggggaggggaggatacagttcaggataccccagcctggagtcag

SEQ ID NO: 59045 - DNA, 73 bp, Homo sapiens
agatgggagttgggggaggggaggatacagttcaggataccccagcctggagtcagggccagggaggcatggc

SEQ ID NO: 59046 - DNA, 75 bp, Homo sapiens
ggaggggaggatacagttcaggataccccagcctggagtcagggccagggaggcatggccccacttgtatccaga

SEQ ID NO: 59047 - DNA, 74 bp, Homo sapiens
aggatacagttcaggataccccagcctggagtcagggccagggaggcatggccccacttgtatccagaagttcc

SEQ ID NO: 59048 - DNA, 72 bp, Homo sapiens
aggataccccagcctggagtcagggccagggaggcatggccccacttgtatccagaagttcccaggggtgat

SEQ ID NO: 59049 - DNA, 74 bp, Homo sapiens
agcctggagtcagggccagggaggcatggccccacttgtatccagaagttcccaggggtgattgtgatggtggt

SEQ ID NO: 59050 - DNA, 73 bp, Homo sapiens
aggcatggccccacttgtatccagaagttcccaggggtgattgtgatggtggttgggactggaggttgtataa

SEQ ID NO: 59051 - DNA, 71 bp, Homo sapiens
ccacttgtatccagaagttcccaggggtgattgtgatggtggttgggactggaggttgtataaggtgttct

SEQ ID NO: 59052 - DNA, 72 bp, Homo sapiens
tgtatccagaagttcccaggggtgattgtgatggtggttgggactggaggttgtataaggtgttcttggaag

SEQ ID NO: 59053 - DNA, 68 bp, Homo sapiens
agttcccaggggtgattgtgatggtggttgggactggaggttgtataaggtgttcttggaaggaaggg

SEQ ID NO: 59054 - DNA, 68 bp, Homo sapiens
atggtggttgggactggaggttgtataaggtgttcttggaaggaaggggcaggagttggaattagttg

SEQ ID NO: 59055 - DNA, 68 bp, Homo sapiens
actggaggttgtataaggtgttcttggaaggaaggggcaggagttggaattagttggtccctactgtc

SEQ ID NO: 59056 - DNA, 69 bp, Homo sapiens
tgttcttggaaggaaggggcaggagttggaattagttggtccctactgtcccccatgaggttgtgaacc

SEQ ID NO: 59057 - DNA, 66 bp, Homo sapiens
aggaaggggcaggagttggaattagttggtccctactgtcccccatgaggttgtgaacccctcccc

SEQ ID NO: 59058 - DNA, 66 bp, Homo sapiens
ttggaattagttggtccctactgtcccccatgaggttgtgaacccctccccccaacttttcatgtt

SEQ ID NO: 59059 - DNA, 66 bp, Homo sapiens
attagttggtccctactgtcccccatgaggttgtgaacccctccccccaacttttcatgtttctta

SEQ ID NO: 59060 - DNA, 63 bp, Homo sapiens
atgaggttgtgaacccctccccccaacttttcatgtttcttaaaggcattttggttttttaaa

SEQ ID NO: 59061 - DNA, 64 bp, Homo sapiens
gtgaacccctccccccaacttttcatgtttcttaaaggcattttggttttttaaaatctgtaca

SEQ ID NO: 59062 - DNA, 66 bp, Homo sapiens
cccaacttttcatgtttcttaaaggcattttggttttttaaaatctgtacagcaagagcaactttt

SEQ ID NO: 59063 - DNA, 69 bp, Homo sapiens
cttttcatgtttcttaaaggcattttggttttttaaaatctgtacagcaagagcaactttttctgtcaa

SEQ ID NO: 59064 - DNA, 71 bp, Homo sapiens
tggttttttaaaatctgtacagcaagagcaactttttctgtcaaataaaaatgagaaatgcaggaactggg

SEQ ID NO: 59065 - DNA, 74 bp, Homo sapiens
tttaaaatctgtacagcaagagcaactttttctgtcaaataaaaatgagaaatgcaggaactgggtctgtagac

SEQ ID NO: 59066 - DNA, 75 bp, Homo sapiens
tgtacagcaagagcaactttttctgtcaaataaaaatgagaaatgcaggaactgggtctgtagactgtttattaa

SEQ ID NO: 59067 - DNA, 73 bp, Homo sapiens
acgagccgttgagctaactgtaagtcattagccaatctgaaccatctttgaatccaagtagttttaccatctt

SEQ ID NO: 59068 - DNA, 73 bp, Homo sapiens
cgttgagctaactgtaagtcattagccaatctgaaccatctttgaatccaagtagttttaccatcttttatta

SEQ ID NO: 59069 - DNA, 74 bp, Homo sapiens
ctgtaagtcattagccaatctgaaccatctttgaatccaagtagttttaccatcttttattataaacaccatca

SEQ ID NO: 59070 - DNA, 72 bp, Homo sapiens
agccaatctgaaccatctttgaatccaagtagttttaccatcttttattataaacaccatcacatttcaagt

SEQ ID NO: 59071 - DNA, 71 bp, Homo sapiens
ctgaaccatctttgaatccaagtagttttaccatcttttattataaacaccatcacatttcaagtttcctc

SEQ ID NO: 59072 - DNA, 71 bp, Homo sapiens
gaatccaagtagttttaccatcttttattataaacaccatcacatttcaagtttcctctttttgatcacaa

SEQ ID NO: 59073 - DNA, 70 bp, Homo sapiens
gttttaccatcttttattataaacaccatcacatttcaagtttcctctttttgatcacaaatataggact

SEQ ID NO: 59074 - DNA, 70 bp, Homo sapiens
ttttattataaacaccatcacatttcaagtttcctctttttgatcacaaatataggactttttcttctcc

SEQ ID NO: 59075 - DNA, 71 bp, Homo sapiens
aacaccatcacatttcaagtttcctctttttgatcacaaatataggactttttcttctcctcttaagtata

SEQ ID NO: 59076 - DNA, 75 bp, Homo sapiens
cacatttcaagtttcctctttttgatcacaaatataggactttttcttctcctcttaagtatacagcatgagaca

SEQ ID NO: 59077 - DNA, 73 bp, Homo sapiens
aagtttcctctttttgatcacaaatataggactttttcttctcctcttaagtatacagcatgagacacagcgt

SEQ ID NO: 59078 - DNA, 75 bp, Homo sapiens
tttttgatcacaaatataggactttttcttctcctcttaagtatacagcatgagacacagcgttggggctttcca

SEQ ID NO: 59079 - DNA, 72 bp, Homo sapiens
aatataggactttttcttctcctcttaagtatacagcatgagacacagcgttggggctttccaggtttctta

SEQ ID NO: 59080 - DNA, 72 bp, Homo sapiens
tttcttctcctcttaagtatacagcatgagacacagcgttggggctttccaggtttcttacagaaatttcct

SEQ ID NO: 59081 - DNA, 72 bp, Homo sapiens
tcttaagtatacagcatgagacacagcgttggggctttccaggtttcttacagaaatttccttacgacaaac

SEQ ID NO: 59082 - DNA, 71 bp, Homo sapiens
agtatacagcatgagacacagcgttggggctttccaggtttcttacagaaatttccttacgacaaacttag

SEQ ID NO: 59083 - DNA, 68 bp, Homo sapiens
gttggggctttccaggtttcttacagaaatttccttacgacaaacttagggttagcatccacagacca

SEQ ID NO: 59084 - DNA, 72 bp, Homo sapiens
tttccaggtttcttacagaaatttccttacgacaaacttagggttagcatccacagaccatgctctcggtca

SEQ ID NO: 59085 - DNA, 76 bp, Homo sapiens
cagaaatttccttacgacaaacttagggttagcatccacagaccatgctctcggtcacatccttcgacatctggat

SEQ ID NO: 59086 - DNA, 77 bp, Homo sapiens
atttccttacgacaaacttagggttagcatccacagaccatgctctcggtcacatccttcgacatctggattgccca

SEQ ID NO: 59087 - DNA, 78 bp, Homo sapiens
aaacttagggttagcatccacagaccatgctctcggtcacatccttcgacatctggattgcccaagacggttgcacag

SEQ ID NO: 59088 - DNA, 84 bp, Homo sapiens
gttagcatccacagaccatgctctcggtcacatccttcgacatctggattgcccaagacggttgcacaggatgcagactccaaa

SEQ ID NO: 59089 - DNA, 83 bp, Homo sapiens
acagaccatgctctcggtcacatccttcgacatctggattgcccaagacggttgcacaggatgcagactccaaagaggatgag

SEQ ID NO: 59090 - DNA, 81 bp, Homo sapiens
tcggtcacatccttcgacatctggattgcccaagacggttgcacaggatgcagactccaaagaggatgaggttggtacata

SEQ ID NO: 59091 - DNA, 77 bp, Homo sapiens
tccttcgacatctggattgcccaagacggttgcacaggatgcagactccaaagaggatgaggttggtacataacgtt

SEQ ID NO: 59092 - DNA, 76 bp, Homo sapiens
atctggattgcccaagacggttgcacaggatgcagactccaaagaggatgaggttggtacataacgttttgaattc

SEQ ID NO: 59093 - DNA, 74 bp, Homo sapiens
cccaagacggttgcacaggatgcagactccaaagaggatgaggttggtacataacgttttgaattccaggataa

SEQ ID NO: 59094 - DNA, 76 bp, Homo sapiens
gttgcacaggatgcagactccaaagaggatgaggttggtacataacgttttgaattccaggataacctgaaacaga

SEQ ID NO: 59095 - DNA, 70 bp, Homo sapiens
aaagaggatgaggttggtacataacgttttgaattccaggataacctgaaacagaggcccctccactgcc

SEQ ID NO: 59096 - DNA, 69 bp, Homo sapiens
aggttggtacataacgttttgaattccaggataacctgaaacagaggcccctccactgcccacattaaa

SEQ ID NO: 59097 - DNA, 73 bp, Homo sapiens
tacataacgttttgaattccaggataacctgaaacagaggcccctccactgcccacattaaaaggctgcacaa

SEQ ID NO: 59098 - DNA, 73 bp, Homo sapiens
ataacctgaaacagaggcccctccactgcccacattaaaaggctgcacaaccaggagggcgccactttctgag

SEQ ID NO: 59099 - DNA, 79 bp, Homo sapiens
ctccactgcccacattaaaaggctgcacaaccaggagggcgccactttctgagtgtgggcttagagctgctgctctcgg

SEQ ID NO: 59100 - DNA, 78 bp, Homo sapiens
acattaaaaggctgcacaaccaggagggcgccactttctgagtgtgggcttagagctgctgctctcgggctctagccc

SEQ ID NO: 59101 - DNA, 76 bp, Homo sapiens
aaccaggagggcgccactttctgagtgtgggcttagagctgctgctctcgggctctagccccacttcttgtttgaa

SEQ ID NO: 59102 - DNA, 78 bp, Homo sapiens
cactttctgagtgtgggcttagagctgctgctctcgggctctagccccacttcttgtttgaacacatggctcaaggtt

SEQ ID NO: 59103 - DNA, 76 bp, Homo sapiens
agtgtgggcttagagctgctgctctcgggctctagccccacttcttgtttgaacacatggctcaaggtttccctac

SEQ ID NO: 59104 - DNA, 75 bp, Homo sapiens
tagagctgctgctctcgggctctagccccacttcttgtttgaacacatggctcaaggtttccctacgggtggaaa

SEQ ID NO: 59105 - DNA, 71 bp, Homo sapiens
ctctcgggctctagccccacttcttgtttgaacacatggctcaaggtttccctacgggtggaaaagatgaa

SEQ ID NO: 59106 - DNA, 72 bp, Homo sapiens
tctagccccacttcttgtttgaacacatggctcaaggtttccctacgggtggaaaagatgaagaggacactg

SEQ ID NO: 59107 - DNA, 71 bp, Homo sapiens
ttcttgtttgaacacatggctcaaggtttccctacgggtggaaaagatgaagaggacactggaggttaaga

SEQ ID NO: 59108 - DNA, 70 bp, Homo sapiens
tttgaacacatggctcaaggtttccctacgggtggaaaagatgaagaggacactggaggttaagaaccca

SEQ ID NO: 59109 - DNA, 73 bp, Homo sapiens
gtttccctacgggtggaaaagatgaagaggacactggaggttaagaacccagcaggccgagcagtggcagcaa

SEQ ID NO: 59110 - DNA, 75 bp, Homo sapiens
gaaaagatgaagaggacactggaggttaagaacccagcaggccgagcagtggcagcaatctccaccggaggcccg

SEQ ID NO: 59111 - DNA, 74 bp, Homo sapiens
actggaggttaagaacccagcaggccgagcagtggcagcaatctccaccggaggcccggcctgtgcttcccctc

SEQ ID NO: 59112 - DNA, 75 bp, Homo sapiens
ttaagaacccagcaggccgagcagtggcagcaatctccaccggaggcccggcctgtgcttcccctcctgggatgg

SEQ ID NO: 59113 - DNA, 75 bp, Homo sapiens
agcaggccgagcagtggcagcaatctccaccggaggcccggcctgtgcttcccctcctgggatggggtgaatggg

SEQ ID NO: 59114 - DNA, 73 bp, Homo sapiens
agtggcagcaatctccaccggaggcccggcctgtgcttcccctcctgggatggggtgaatgggggctggtcag

SEQ ID NO: 59115 - DNA, 71 bp, Homo sapiens
tgtgcttcccctcctgggatggggtgaatgggggctggtcaggggtgccagatggtggtcttatttttact

SEQ ID NO: 59116 - DNA, 71 bp, Homo sapiens
ctcctgggatggggtgaatgggggctggtcaggggtgccagatggtggtcttatttttacttgaattattc

SEQ ID NO: 59117 - DNA, 72 bp, Homo sapiens
gggtgaatgggggctggtcaggggtgccagatggtggtcttatttttacttgaattattctgcattttataa

SEQ ID NO: 59118 - DNA, 73 bp, Homo sapiens
ggctggtcaggggtgccagatggtggtcttatttttacttgaattattctgcattttataactcaaggttcaa

SEQ ID NO: 59119 - DNA, 75 bp, Homo sapiens
gggtgccagatggtggtcttatttttacttgaattattctgcattttataactcaaggttcaaagctctgtgcta

SEQ ID NO: 59120 - DNA, 73 bp, Homo sapiens
cagatggtggtcttatttttacttgaattattctgcattttataactcaaggttcaaagctctgtgctaaaac

SEQ ID NO: 59121 - DNA, 71 bp, Homo sapiens
atttttacttgaattattctgcattttataactcaaggttcaaagctctgtgctaaaactagatcggacct

SEQ ID NO: 59122 - DNA, 73 bp, Homo sapiens
tgaattattctgcattttataactcaaggttcaaagctctgtgctaaaactagatcggacctttccaacttct

SEQ ID NO: 59123 - DNA, 72 bp, Homo sapiens
ttctgcattttataactcaaggttcaaagctctgtgctaaaactagatcggacctttccaacttcttagaaa

SEQ ID NO: 59124 - DNA, 69 bp, Homo sapiens
ttataactcaaggttcaaagctctgtgctaaaactagatcggacctttccaacttcttagaaaggttcc

SEQ ID NO: 59125 - DNA, 71 bp, Homo sapiens
ttcaaagctctgtgctaaaactagatcggacctttccaacttcttagaaaggttcctcgaattcagattcc

SEQ ID NO: 59126 - DNA, 66 bp, Homo sapiens
aaactagatcggacctttccaacttcttagaaaggttcctcgaattcagattcccaaaccaagtat

SEQ ID NO: 59127 - DNA, 68 bp, Homo sapiens
gacctttccaacttcttagaaaggttcctcgaattcagattcccaaaccaagtattcagctatttaaa

SEQ ID NO: 59128 - DNA, 69 bp, Homo sapiens
ttcccaaaccaagtattcagctatttaaaacctatctgtgaatgtaagggcccaaacggaagctatttg

SEQ ID NO: 59129 - DNA, 70 bp, Homo sapiens
ttcagctatttaaaacctatctgtgaatgtaagggcccaaacggaagctatttggggcgtgatttctaaa

SEQ ID NO: 59130 - DNA, 67 bp, Homo sapiens
ctatttaaaacctatctgtgaatgtaagggcccaaacggaagctatttggggcgtgatttctaaaat

SEQ ID NO: 59131 - DNA, 69 bp, Homo sapiens
cctatctgtgaatgtaagggcccaaacggaagctatttggggcgtgatttctaaaattaccatcacccc

SEQ ID NO: 59132 - DNA, 67 bp, Homo sapiens
aatgtaagggcccaaacggaagctatttggggcgtgatttctaaaattaccatcacccccacctaga

SEQ ID NO: 59133 - DNA, 67 bp, Homo sapiens
aaacggaagctatttggggcgtgatttctaaaattaccatcacccccacctagaccagcctttgttg

SEQ ID NO: 59134 - DNA, 68 bp, Homo sapiens
agctatttggggcgtgatttctaaaattaccatcacccccacctagaccagcctttgttgggggacta

SEQ ID NO: 59135 - DNA, 66 bp, Homo sapiens
gatttctaaaattaccatcacccccacctagaccagcctttgttgggggactagggataaagtggg

SEQ ID NO: 59136 - DNA, 67 bp, Homo sapiens
taaaattaccatcacccccacctagaccagcctttgttgggggactagggataaagtgggttctctg

SEQ ID NO: 59137 - DNA, 68 bp, Homo sapiens
tagaccagcctttgttgggggactagggataaagtgggttctctgggtgctgggggtggtagacttag

SEQ ID NO: 59138 - DNA, 67 bp, Homo sapiens
ttgttgggggactagggataaagtgggttctctgggtgctgggggtggtagacttaggggatgaact

SEQ ID NO: 59139 - DNA, 71 bp, Homo sapiens
ataaagtgggttctctgggtgctgggggtggtagacttaggggatgaacttcagctcccctgcccatggtc

SEQ ID NO: 59140 - DNA, 68 bp, Homo sapiens
ggggtggtagacttaggggatgaacttcagctcccctgcccatggtcctcctctcagttttacggttt

SEQ ID NO: 59141 - DNA, 70 bp, Homo sapiens
tagacttaggggatgaacttcagctcccctgcccatggtcctcctctcagttttacggtttttgtgaact

SEQ ID NO: 59142 - DNA, 73 bp, Homo sapiens
atgaacttcagctcccctgcccatggtcctcctctcagttttacggtttttgtgaacttgtctcacccactca

SEQ ID NO: 59143 - DNA, 70 bp, Homo sapiens
ctcccctgcccatggtcctcctctcagttttacggtttttgtgaacttgtctcacccactcagtaaggga

SEQ ID NO: 59144 - DNA, 71 bp, Homo sapiens
catggtcctcctctcagttttacggtttttgtgaacttgtctcacccactcagtaagggagcctggaactg

SEQ ID NO: 59145 - DNA, 68 bp, Homo sapiens
agttttacggtttttgtgaacttgtctcacccactcagtaagggagcctggaactggactccaaggga

SEQ ID NO: 59146 - DNA, 71 bp, Homo sapiens
agggagcctggaactggactccaagggaggcaggaccatgtggctaagtgcaagtatcccccgaagtgggg

SEQ ID NO: 59147 - DNA, 71 bp, Homo sapiens
aactggactccaagggaggcaggaccatgtggctaagtgcaagtatcccccgaagtgggggacctttctca

SEQ ID NO: 59148 - DNA, 70 bp, Homo sapiens
aagggaggcaggaccatgtggctaagtgcaagtatcccccgaagtgggggacctttctcactgtaacagg

SEQ ID NO: 59149 - DNA, 70 bp, Homo sapiens
accatgtggctaagtgcaagtatcccccgaagtgggggacctttctcactgtaacagggaccggagctgg

SEQ ID NO: 59150 - DNA, 72 bp, Homo sapiens
tggctaagtgcaagtatcccccgaagtgggggacctttctcactgtaacagggaccggagctggtgctccaa

SEQ ID NO: 59151 - DNA, 69 bp, Homo sapiens
aagtatcccccgaagtgggggacctttctcactgtaacagggaccggagctggtgctccaaggtgtctg

SEQ ID NO: 59152 - DNA, 72 bp, Homo sapiens
aagtgggggacctttctcactgtaacagggaccggagctggtgctccaaggtgtctgtccctcagcatttcc

SEQ ID NO: 59153 - DNA, 75 bp, Homo sapiens
acctttctcactgtaacagggaccggagctggtgctccaaggtgtctgtccctcagcatttcctcaaacgccaca

SEQ ID NO: 59154 - DNA, 76 bp, Homo sapiens
actgtaacagggaccggagctggtgctccaaggtgtctgtccctcagcatttcctcaaacgccacacgggacatgc

SEQ ID NO: 59155 - DNA, 81 bp, Homo sapiens
cggagctggtgctccaaggtgtctgtccctcagcatttcctcaaacgccacacgggacatgctgcgcggcagcggcaggat

SEQ ID NO: 59156 - DNA, 80 bp, Homo sapiens
tggtgctccaaggtgtctgtccctcagcatttcctcaaacgccacacgggacatgctgcgcggcagcggcaggatttggg

SEQ ID NO: 59157 - DNA, 79 bp, Homo sapiens
tgtctgtccctcagcatttcctcaaacgccacacgggacatgctgcgcggcagcggcaggatttggggggaagtcagaa

SEQ ID NO: 59158 - DNA, 77 bp, Homo sapiens
tttcctcaaacgccacacgggacatgctgcgcggcagcggcaggatttggggggaagtcagaaagcacctcgcgagc

SEQ ID NO: 59159 - DNA, 83 bp, Homo sapiens
acatgctgcgcggcagcggcaggatttggggggaagtcagaaagcacctcgcgagcctggagcactctctgcctcagattctg

SEQ ID NO: 59160 - DNA, 76 bp, Homo sapiens
aggatttggggggaagtcagaaagcacctcgcgagcctggagcactctctgcctcagattctgggagtcgtgtacg

SEQ ID NO: 59161 - DNA, 74 bp, Homo sapiens
gggaagtcagaaagcacctcgcgagcctggagcactctctgcctcagattctgggagtcgtgtacggggggggg

SEQ ID NO: 59162 - DNA, 73 bp, Homo sapiens
gcctggagcactctctgcctcagattctgggagtcgtgtacggggggggggagccgcctgaacacgggaagaa

SEQ ID NO: 59163 - DNA, 71 bp, Homo sapiens
actctctgcctcagattctgggagtcgtgtacggggggggggagccgcctgaacacgggaagaagcgccgc

SEQ ID NO: 59164 - DNA, 69 bp, Homo sapiens
ctcagattctgggagtcgtgtacggggggggggagccgcctgaacacgggaagaagcgccgcctctggg

SEQ ID NO: 59165 - DNA, 69 bp, Homo sapiens
tctgggagtcgtgtacggggggggggagccgcctgaacacgggaagaagcgccgcctctgggggtggca

SEQ ID NO: 59166 - DNA, 69 bp, Homo sapiens
tgtacggggggggggagccgcctgaacacgggaagaagcgccgcctctgggggtggcagctacgacgga

SEQ ID NO: 59167 - DNA, 73 bp, Homo sapiens
gggagccgcctgaacacgggaagaagcgccgcctctgggggtggcagctacgacggacagggaggatggagga

SEQ ID NO: 59168 - DNA, 71 bp, Homo sapiens
aacacgggaagaagcgccgcctctgggggtggcagctacgacggacagggaggatggaggagtgggccaaa

SEQ ID NO: 59169 - DNA, 76 bp, Homo sapiens
tggcagctacgacggacagggaggatggaggagtgggccaaatgcagtttcagaccaactgacgaccctaactgtg

SEQ ID NO: 59170 - DNA, 75 bp, Homo sapiens
acggacagggaggatggaggagtgggccaaatgcagtttcagaccaactgacgaccctaactgtgtgagcgacaa

SEQ ID NO: 59171 - DNA, 78 bp, Homo sapiens
aggatggaggagtgggccaaatgcagtttcagaccaactgacgaccctaactgtgtgagcgacaatcacctgtgagcc

SEQ ID NO: 59172 - DNA, 79 bp, Homo sapiens
agtgggccaaatgcagtttcagaccaactgacgaccctaactgtgtgagcgacaatcacctgtgagcctcgaatgtgtg

SEQ ID NO: 59173 - DNA, 78 bp, Homo sapiens
aaatgcagtttcagaccaactgacgaccctaactgtgtgagcgacaatcacctgtgagcctcgaatgtgtggggccaa

SEQ ID NO: 59174 - DNA, 79 bp, Homo sapiens
tttcagaccaactgacgaccctaactgtgtgagcgacaatcacctgtgagcctcgaatgtgtggggccaacgctgagcc

SEQ ID NO: 59175 - DNA, 77 bp, Homo sapiens
aactgacgaccctaactgtgtgagcgacaatcacctgtgagcctcgaatgtgtggggccaacgctgagccgcccacc

SEQ ID NO: 59176 - DNA, 81 bp, Homo sapiens
taactgtgtgagcgacaatcacctgtgagcctcgaatgtgtggggccaacgctgagccgcccacctcagtcgcccacctca

SEQ ID NO: 59177 - DNA, 80 bp, Homo sapiens
tgagcgacaatcacctgtgagcctcgaatgtgtggggccaacgctgagccgcccacctcagtcgcccacctcagtctccg

SEQ ID NO: 59178 - DNA, 70 bp, Homo sapiens
ccacctcagtctccgggaagaaaagcctccgggcggccgctaagcctgggccacagttcccagccaccac

SEQ ID NO: 59179 - DNA, 69 bp, Homo sapiens
agtctccgggaagaaaagcctccgggcggccgctaagcctgggccacagttcccagccaccacccacgc

SEQ ID NO: 59180 - DNA, 70 bp, Homo sapiens
aaaagcctccgggcggccgctaagcctgggccacagttcccagccaccacccacgccgccacaaccacaa

SEQ ID NO: 59181 - DNA, 72 bp, Homo sapiens
tccgggcggccgctaagcctgggccacagttcccagccaccacccacgccgccacaaccacaaccgcagccc

SEQ ID NO: 59182 - DNA, 76 bp, Homo sapiens
taagcctgggccacagttcccagccaccacccacgccgccacaaccacaaccgcagccccagcctctccgctatga

SEQ ID NO: 59183 - DNA, 75 bp, Homo sapiens
ccacagttcccagccaccacccacgccgccacaaccacaaccgcagccccagcctctccgctatgagcgaacaac

SEQ ID NO: 59184 - DNA, 76 bp, Homo sapiens
ccacgccgccacaaccacaaccgcagccccagcctctccgctatgagcgaacaaccagaaccatgtcttacaaaga

SEQ ID NO: 59185 - DNA, 76 bp, Homo sapiens
acaaccacaaccgcagccccagcctctccgctatgagcgaacaaccagaaccatgtcttacaaagaacagactcaa

SEQ ID NO: 59186 - DNA, 75 bp, Homo sapiens
accgcagccccagcctctccgctatgagcgaacaaccagaaccatgtcttacaaagaacagactcaaaaaatata

SEQ ID NO: 59187 - DNA, 69 bp, Homo sapiens
aaccttaaacattcttacagggatcttaaagaacagaatacatgttaaaaacctcagtaatttatatca

SEQ ID NO: 59188 - DNA, 69 bp, Homo sapiens
ttcttacagggatcttaaagaacagaatacatgttaaaaacctcagtaatttatatcaattttaagcgg

SEQ ID NO: 59189 - DNA, 68 bp, Homo sapiens
cagggatcttaaagaacagaatacatgttaaaaacctcagtaatttatatcaattttaagcggtactt

SEQ ID NO: 59190 - DNA, 69 bp, Homo sapiens
agaacagaatacatgttaaaaacctcagtaatttatatcaattttaagcggtactttatatacaatggg

SEQ ID NO: 59191 - DNA, 67 bp, Homo sapiens
atacatgttaaaaacctcagtaatttatatcaattttaagcggtactttatatacaatggggaaaaa

SEQ ID NO: 59192 - DNA, 73 bp, Homo sapiens
ttatatcaattttaagcggtactttatatacaatggggaaaaaacacatgcatagtccaaatacaatgttgaa

SEQ ID NO: 59193 - DNA, 72 bp, Homo sapiens
attttaagcggtactttatatacaatggggaaaaaacacatgcatagtccaaatacaatgttgaaaacagca

SEQ ID NO: 59194 - DNA, 73 bp, Homo sapiens
cggtactttatatacaatggggaaaaaacacatgcatagtccaaatacaatgttgaaaacagcattttcataa

SEQ ID NO: 59195 - DNA, 70 bp, Homo sapiens
acaatggggaaaaaacacatgcatagtccaaatacaatgttgaaaacagcattttcataacaaaaaaccc

SEQ ID NO: 59196 - DNA, 71 bp, Homo sapiens
aaacacatgcatagtccaaatacaatgttgaaaacagcattttcataacaaaaaaccccgaacactaagtg

SEQ ID NO: 59197 - DNA, 70 bp, Homo sapiens
gcatagtccaaatacaatgttgaaaacagcattttcataacaaaaaaccccgaacactaagtgttaatac

SEQ ID NO: 59198 - DNA, 71 bp, Homo sapiens
tacaatgttgaaaacagcattttcataacaaaaaaccccgaacactaagtgttaataccatgtacatgaat

SEQ ID NO: 59199 - DNA, 70 bp, Homo sapiens
gaaaacagcattttcataacaaaaaaccccgaacactaagtgttaataccatgtacatgaattcaagaag

SEQ ID NO: 59200 - DNA, 68 bp, Homo sapiens
tttcataacaaaaaaccccgaacactaagtgttaataccatgtacatgaattcaagaaggaccaccct

SEQ ID NO: 59201 - DNA, 72 bp, Homo sapiens
aacactaagtgttaataccatgtacatgaattcaagaaggaccaccctttttgtctgttgcacacagtttat

SEQ ID NO: 59202 - DNA, 72 bp, Homo sapiens
aagtgttaataccatgtacatgaattcaagaaggaccaccctttttgtctgttgcacacagtttatttaaca

SEQ ID NO: 59203 - DNA, 73 bp, Homo sapiens
gaattcaagaaggaccaccctttttgtctgttgcacacagtttatttaacaatatgatataagaaatgagttg

SEQ ID NO: 59204 - DNA, 71 bp, Homo sapiens
gaaggaccaccctttttgtctgttgcacacagtttatttaacaatatgatataagaaatgagttggtattt

SEQ ID NO: 59205 - DNA, 78 bp, Homo sapiens
ttgtctgttgcacacagtttatttaacaatatgatataagaaatgagttggtattttaccattctatacagtgattga

SEQ ID NO: 59206 - DNA, 78 bp, Homo sapiens
tgcacacagtttatttaacaatatgatataagaaatgagttggtattttaccattctatacagtgattgaatcttctc

SEQ ID NO: 59207 - DNA, 74 bp, Homo sapiens
atttaacaatatgatataagaaatgagttggtattttaccattctatacagtgattgaatcttctcgagtttcg

SEQ ID NO: 59208 - DNA, 75 bp, Homo sapiens
atgatataagaaatgagttggtattttaccattctatacagtgattgaatcttctcgagtttcgtatttatagga

SEQ ID NO: 59209 - DNA, 74 bp, Homo sapiens
gaaatgagttggtattttaccattctatacagtgattgaatcttctcgagtttcgtatttataggaattagagc

SEQ ID NO: 59210 - DNA, 76 bp, Homo sapiens
ggtattttaccattctatacagtgattgaatcttctcgagtttcgtatttataggaattagagcgcttgcatgatt

SEQ ID NO: 59211 - DNA, 79 bp, Homo sapiens
ttaccattctatacagtgattgaatcttctcgagtttcgtatttataggaattagagcgcttgcatgatttacactaga

SEQ ID NO: 59212 - DNA, 76 bp, Homo sapiens
gagtttcgtatttataggaattagagcgcttgcatgatttacactagaattgcttttcctcatttcaagtttcaca

SEQ ID NO: 59213 - DNA, 77 bp, Homo sapiens
tttataggaattagagcgcttgcatgatttacactagaattgcttttcctcatttcaagtttcacatagaagaaaga

SEQ ID NO: 59214 - DNA, 75 bp, Homo sapiens
attagagcgcttgcatgatttacactagaattgcttttcctcatttcaagtttcacatagaagaaagaaaagaag

SEQ ID NO: 59215 - DNA, 78 bp, Homo sapiens
tcatttcaagtttcacatagaagaaagaaaagaaggcttcttctctagtaacattagcatggtctaagagtgatcatc

SEQ ID NO: 59216 - DNA, 73 bp, Homo sapiens
aagaaagaaaagaaggcttcttctctagtaacattagcatggtctaagagtgatcatccctattttttgtcta

SEQ ID NO: 59217 - DNA, 72 bp, Homo sapiens
aaaagaaggcttcttctctagtaacattagcatggtctaagagtgatcatccctattttttgtctaaaacca

SEQ ID NO: 59218 - DNA, 75 bp, Homo sapiens
gcttcttctctagtaacattagcatggtctaagagtgatcatccctattttttgtctaaaaccagttttatcaga

SEQ ID NO: 59219 - DNA, 75 bp, Homo sapiens
tctctagtaacattagcatggtctaagagtgatcatccctattttttgtctaaaaccagttttatcagagaaaca

SEQ ID NO: 59220 - DNA, 74 bp, Homo sapiens
acattagcatggtctaagagtgatcatccctattttttgtctaaaaccagttttatcagagaaacaaagcaaca

SEQ ID NO: 59221 - DNA, 73 bp, Homo sapiens
gcatggtctaagagtgatcatccctattttttgtctaaaaccagttttatcagagaaacaaagcaacaatttc

SEQ ID NO: 59222 - DNA, 74 bp, Homo sapiens
aagagtgatcatccctattttttgtctaaaaccagttttatcagagaaacaaagcaacaatttctacatctgca

SEQ ID NO: 59223 - DNA, 75 bp, Homo sapiens
gagtgatcatccctattttttgtctaaaaccagttttatcagagaaacaaagcaacaatttctacatctgcaaga

SEQ ID NO: 59224 - DNA, 74 bp, Homo sapiens
ttttgtctaaaaccagttttatcagagaaacaaagcaacaatttctacatctgcaagacaagtttggcttcagc

SEQ ID NO: 59225 - DNA, 76 bp, Homo sapiens
aaaccagttttatcagagaaacaaagcaacaatttctacatctgcaagacaagtttggcttcagccattatgtata

SEQ ID NO: 59226 - DNA, 81 bp, Homo sapiens
ttttatcagagaaacaaagcaacaatttctacatctgcaagacaagtttggcttcagccattatgtatagatagatgtgtg

SEQ ID NO: 59227 - DNA, 80 bp, Homo sapiens
aaacaaagcaacaatttctacatctgcaagacaagtttggcttcagccattatgtatagatagatgtgtgtgggtgtgta

SEQ ID NO: 59228 - DNA, 82 bp, Homo sapiens
atctgcaagacaagtttggcttcagccattatgtatagatagatgtgtgtgggtgtgtacgtgtgtgcacgccggagtcaat

SEQ ID NO: 59229 - DNA, 81 bp, Homo sapiens
acaagtttggcttcagccattatgtatagatagatgtgtgtgggtgtgtacgtgtgtgcacgccggagtcaattcctatca

SEQ ID NO: 59230 - DNA, 82 bp, Homo sapiens
ttcagccattatgtatagatagatgtgtgtgggtgtgtacgtgtgtgcacgccggagtcaattcctatcatccagggtaata

SEQ ID NO: 59231 - DNA, 78 bp, Homo sapiens
atagatgtgtgtgggtgtgtacgtgtgtgcacgccggagtcaattcctatcatccagggtaatactgggagacgccca

SEQ ID NO: 59232 - DNA, 76 bp, Homo sapiens
acgtgtgtgcacgccggagtcaattcctatcatccagggtaatactgggagacgcccacagagttcactatagaaa

SEQ ID NO: 59233 - DNA, 72 bp, Homo sapiens
acgccggagtcaattcctatcatccagggtaatactgggagacgcccacagagttcactatagaaaaaaatc

SEQ ID NO: 59234 - DNA, 70 bp, Homo sapiens
aattcctatcatccagggtaatactgggagacgcccacagagttcactatagaaaaaaatcttcccgaaa

SEQ ID NO: 59235 - DNA, 69 bp, Homo sapiens
agggtaatactgggagacgcccacagagttcactatagaaaaaaatcttcccgaaacatcacaaagtta

SEQ ID NO: 59236 - DNA, 72 bp, Homo sapiens
tgggagacgcccacagagttcactatagaaaaaaatcttcccgaaacatcacaaagttatcgggatacatta

SEQ ID NO: 59237 - DNA, 73 bp, Homo sapiens
ccacagagttcactatagaaaaaaatcttcccgaaacatcacaaagttatcgggatacattataagcttgcat

SEQ ID NO: 59238 - DNA, 73 bp, Homo sapiens
cactatagaaaaaaatcttcccgaaacatcacaaagttatcgggatacattataagcttgcattatttcagga

SEQ ID NO: 59239 - DNA, 74 bp, Homo sapiens
aaaaatcttcccgaaacatcacaaagttatcgggatacattataagcttgcattatttcaggaatcagttctga

SEQ ID NO: 59240 - DNA, 75 bp, Homo sapiens
cttcccgaaacatcacaaagttatcgggatacattataagcttgcattatttcaggaatcagttctgaatattat

SEQ ID NO: 59241 - DNA, 75 bp, Homo sapiens
acatcacaaagttatcgggatacattataagcttgcattatttcaggaatcagttctgaatattatttttcttct

SEQ ID NO: 59242 - DNA, 73 bp, Homo sapiens
gttatcgggatacattataagcttgcattatttcaggaatcagttctgaatattatttttcttcttactttta

SEQ ID NO: 59243 - DNA, 73 bp, Homo sapiens
tacattataagcttgcattatttcaggaatcagttctgaatattatttttcttcttacttttaaacataaatg

SEQ ID NO: 59244 - DNA, 68 bp, Homo sapiens
tttcaggaatcagttctgaatattatttttcttcttacttttaaacataaatgtttaaagtcttgaaa

SEQ ID NO: 59245 - DNA, 67 bp, Homo sapiens
cagttctgaatattatttttcttcttacttttaaacataaatgtttaaagtcttgaaaatacaaata

SEQ ID NO: 59246 - DNA, 70 bp, Homo sapiens
acaaataaaaaatatgaatataatgaacttgtttttcccgttaaaaaaaggcatgagtcaccagcaatga

SEQ ID NO: 59247 - DNA, 71 bp, Homo sapiens
aatatgaatataatgaacttgtttttcccgttaaaaaaaggcatgagtcaccagcaatgacgacaaaaaga

SEQ ID NO: 59248 - DNA, 71 bp, Homo sapiens
gaatataatgaacttgtttttcccgttaaaaaaaggcatgagtcaccagcaatgacgacaaaaagaatcca

SEQ ID NO: 59249 - DNA, 67 bp, Homo sapiens
cttgtttttcccgttaaaaaaaggcatgagtcaccagcaatgacgacaaaaagaatccaaacaaaac

SEQ ID NO: 59250 - DNA, 67 bp, Homo sapiens
tcccgttaaaaaaaggcatgagtcaccagcaatgacgacaaaaagaatccaaacaaaacccccctcc

SEQ ID NO: 59251 - DNA, 68 bp, Homo sapiens
gcatgagtcaccagcaatgacgacaaaaagaatccaaacaaaacccccctccccccaaacaaaaacaa

SEQ ID NO: 59252 - DNA, 66 bp, Homo sapiens
atgagtcaccagcaatgacgacaaaaagaatccaaacaaaacccccctccccccaaacaaaaacaa

SEQ ID NO: 59253 - DNA, 64 bp, Homo sapiens
agtcaccagcaatgacgacaaaaagaatccaaacaaaacccccctccccccaaacaaaaacaaa

SEQ ID NO: 59254 - DNA, 54 bp, Homo sapiens
aacaaaaacaaaacggaaaaaaaagaaccccccccacccccccgccaaaaaaaa

SEQ ID NO: 59255 - DNA, 63 bp, Homo sapiens
ccacccccccgccaaaaaaaaaccaaagagagagaccagatatttaaatcaactggtttttaa

SEQ ID NO: 59256 - DNA, 63 bp, Homo sapiens
cccgccaaaaaaaaaccaaagagagagaccagatatttaaatcaactggtttttaacaaaaaa

SEQ ID NO: 59257 - DNA, 67 bp, Homo sapiens
aaccaaagagagagaccagatatttaaatcaactggtttttaacaaaaaaatatattctttgtattg

SEQ ID NO: 59258 - DNA, 67 bp, Homo sapiens
aagagagagaccagatatttaaatcaactggtttttaacaaaaaaatatattctttgtattgtttct

SEQ ID NO: 59259 - DNA, 67 bp, Homo sapiens
ccagatatttaaatcaactggtttttaacaaaaaaatatattctttgtattgtttctttaaacatca

SEQ ID NO: 59260 - DNA, 67 bp, Homo sapiens
tcaactggtttttaacaaaaaaatatattctttgtattgtttctttaaacatcaatccacccttcca

SEQ ID NO: 59261 - DNA, 71 bp, Homo sapiens
taacaaaaaaatatattctttgtattgtttctttaaacatcaatccacccttccatggctcggaagtcgca

SEQ ID NO: 59262 - DNA, 73 bp, Homo sapiens
aaatatattctttgtattgtttctttaaacatcaatccacccttccatggctcggaagtcgcagttccatcta

SEQ ID NO: 59263 - DNA, 72 bp, Homo sapiens
ttgtattgtttctttaaacatcaatccacccttccatggctcggaagtcgcagttccatctaggaataaaaa

SEQ ID NO: 59264 - DNA, 71 bp, Homo sapiens
tttctttaaacatcaatccacccttccatggctcggaagtcgcagttccatctaggaataaaaagaaccta

SEQ ID NO: 59265 - DNA, 73 bp, Homo sapiens
atcaatccacccttccatggctcggaagtcgcagttccatctaggaataaaaagaacctagatgcctggattt

SEQ ID NO: 59266 - DNA, 73 bp, Homo sapiens
cttccatggctcggaagtcgcagttccatctaggaataaaaagaacctagatgcctggattttcagtacaaaa

SEQ ID NO: 59267 - DNA, 72 bp, Homo sapiens
tcggaagtcgcagttccatctaggaataaaaagaacctagatgcctggattttcagtacaaaaggtccaaga

SEQ ID NO: 59268 - DNA, 71 bp, Homo sapiens
aagtcgcagttccatctaggaataaaaagaacctagatgcctggattttcagtacaaaaggtccaagaaca

SEQ ID NO: 59269 - DNA, 70 bp, Homo sapiens
agttccatctaggaataaaaagaacctagatgcctggattttcagtacaaaaggtccaagaacatgaaag

SEQ ID NO: 59270 - DNA, 67 bp, Homo sapiens
aggaataaaaagaacctagatgcctggattttcagtacaaaaggtccaagaacatgaaagggaaaag

SEQ ID NO: 59271 - DNA, 71 bp, Homo sapiens
taaaaagaacctagatgcctggattttcagtacaaaaggtccaagaacatgaaagggaaaaggtgatgctc

SEQ ID NO: 59272 - DNA, 77 bp, Homo sapiens
tagatgcctggattttcagtacaaaaggtccaagaacatgaaagggaaaaggtgatgctctcacaatgctacaagcc

SEQ ID NO: 59273 - DNA, 76 bp, Homo sapiens
tggattttcagtacaaaaggtccaagaacatgaaagggaaaaggtgatgctctcacaatgctacaagccctccaca

SEQ ID NO: 59274 - DNA, 74 bp, Homo sapiens
ttcagtacaaaaggtccaagaacatgaaagggaaaaggtgatgctctcacaatgctacaagccctccacaaact

SEQ ID NO: 59275 - DNA, 75 bp, Homo sapiens
aaggtccaagaacatgaaagggaaaaggtgatgctctcacaatgctacaagccctccacaaacttctctagcgtg

SEQ ID NO: 59276 - DNA, 73 bp, Homo sapiens
aaaaggtgatgctctcacaatgctacaagccctccacaaacttctctagcgtgtcccccgtggtgtccccgac

SEQ ID NO: 59277 - DNA, 72 bp, Homo sapiens
aacttctctagcgtgtcccccgtggtgtccccgaccagggacagttcgctggacagcgcactcctgctgggg

SEQ ID NO: 59278 - DNA, 73 bp, Homo sapiens
cgtgtcccccgtggtgtccccgaccagggacagttcgctggacagcgcactcctgctgggggtgttcagctgg

SEQ ID NO: 59279 - DNA, 79 bp, Homo sapiens
tgtccccgaccagggacagttcgctggacagcgcactcctgctgggggtgttcagctgggggagcattgcactctgttc

SEQ ID NO: 59280 - DNA, 76 bp, Homo sapiens
acagttcgctggacagcgcactcctgctgggggtgttcagctgggggagcattgcactctgttcggggttccccaa

SEQ ID NO: 59281 - DNA, 76 bp, Homo sapiens
agcgcactcctgctgggggtgttcagctgggggagcattgcactctgttcggggttccccaagtgtccctgatcta

SEQ ID NO: 59282 - DNA, 77 bp, Homo sapiens
tcctgctgggggtgttcagctgggggagcattgcactctgttcggggttccccaagtgtccctgatctatggagctg

SEQ ID NO: 59283 - DNA, 78 bp, Homo sapiens
gggtgttcagctgggggagcattgcactctgttcggggttccccaagtgtccctgatctatggagctggccatggtga

SEQ ID NO: 59284 - DNA, 75 bp, Homo sapiens
attgcactctgttcggggttccccaagtgtccctgatctatggagctggccatggtgactgcgagtccggggtgg

SEQ ID NO: 59285 - DNA, 72 bp, Homo sapiens
gggttccccaagtgtccctgatctatggagctggccatggtgactgcgagtccggggtggggggaaccagtc

SEQ ID NO: 59286 - DNA, 74 bp, Homo sapiens
aagtgtccctgatctatggagctggccatggtgactgcgagtccggggtggggggaaccagtctggggtgagac

SEQ ID NO: 59287 - DNA, 75 bp, Homo sapiens
atctatggagctggccatggtgactgcgagtccggggtggggggaaccagtctggggtgagacgtggtgtggcga

SEQ ID NO: 59288 - DNA, 72 bp, Homo sapiens
tggtgactgcgagtccggggtggggggaaccagtctggggtgagacgtggtgtggcgaaggctggggctgta

SEQ ID NO: 59289 - DNA, 70 bp, Homo sapiens
tccggggtggggggaaccagtctggggtgagacgtggtgtggcgaaggctggggctgtatccgtggtgac

SEQ ID NO: 59290 - DNA, 75 bp, Homo sapiens
ggtgagacgtggtgtggcgaaggctggggctgtatccgtggtgacgggctggaatgtggaggctgggactggggc

SEQ ID NO: 59291 - DNA, 76 bp, Homo sapiens
tggcgaaggctggggctgtatccgtggtgacgggctggaatgtggaggctgggactggggccgtggagactggaca

SEQ ID NO: 59292 - DNA, 73 bp, Homo sapiens
aggctggggctgtatccgtggtgacgggctggaatgtggaggctgggactggggccgtggagactggacaggg

SEQ ID NO: 59293 - DNA, 76 bp, Homo sapiens
tgtatccgtggtgacgggctggaatgtggaggctgggactggggccgtggagactggacaggggctggagaccgca

SEQ ID NO: 59294 - DNA, 74 bp, Homo sapiens
tgggactggggccgtggagactggacaggggctggagaccgcacctggttactaagggacgtggcgatctgctg

SEQ ID NO: 59295 - DNA, 77 bp, Homo sapiens
cgtggagactggacaggggctggagaccgcacctggttactaagggacgtggcgatctgctggccagggagatgcga

SEQ ID NO: 59296 - DNA, 76 bp, Homo sapiens
actggacaggggctggagaccgcacctggttactaagggacgtggcgatctgctggccagggagatgcgaggcctg

SEQ ID NO: 59297 - DNA, 80 bp, Homo sapiens
ggctggagaccgcacctggttactaagggacgtggcgatctgctggccagggagatgcgaggcctgtggctgtcctgaga

SEQ ID NO: 59298 - DNA, 84 bp, Homo sapiens
ttactaagggacgtggcgatctgctggccagggagatgcgaggcctgtggctgtcctgagagcatgtgttgctgggggctcatg

SEQ ID NO: 59299 - DNA, 83 bp, Homo sapiens
acgtggcgatctgctggccagggagatgcgaggcctgtggctgtcctgagagcatgtgttgctgggggctcatggggttcggc

SEQ ID NO: 59300 - DNA, 83 bp, Homo sapiens
tctgctggccagggagatgcgaggcctgtggctgtcctgagagcatgtgttgctgggggctcatggggttcggctggcctggg

SEQ ID NO: 59301 - DNA, 81 bp, Homo sapiens
agatgcgaggcctgtggctgtcctgagagcatgtgttgctgggggctcatggggttcggctggcctggggacccaatctgc

SEQ ID NO: 59302 - DNA, 84 bp, Homo sapiens
ctgtggctgtcctgagagcatgtgttgctgggggctcatggggttcggctggcctggggacccaatctgctgcttcatctgctg

SEQ ID NO: 59303 - DNA, 84 bp, Homo sapiens
atgtgttgctgggggctcatggggttcggctggcctggggacccaatctgctgcttcatctgctgttgctgcagaatccgctgc

SEQ ID NO: 59304 - DNA, 85 bp, Homo sapiens
ggggctcatggggttcggctggcctggggacccaatctgctgcttcatctgctgttgctgcagaatccgctgctgcagggcttgc

SEQ ID NO: 59305 - DNA, 85 bp, Homo sapiens
gggttcggctggcctggggacccaatctgctgcttcatctgctgttgctgcagaatccgctgctgcagggcttgctggatgttgg

SEQ ID NO: 59306 - DNA, 87 bp, Homo sapiens
ctggcctggggacccaatctgctgcttcatctgctgttgctgcagaatccgctgctgcagggcttgctggatgttgggggtgctgtc

SEQ ID NO: 59307 - DNA, 87 bp, Homo sapiens
gggacccaatctgctgcttcatctgctgttgctgcagaatccgctgctgcagggcttgctggatgttgggggtgctgtctgccccca

SEQ ID NO: 59308 - DNA, 89 bp, Homo sapiens
tctgctgcttcatctgctgttgctgcagaatccgctgctgcagggcttgctggatgttgggggtgctgtctgcccccagccccggctgc

SEQ ID NO: 59309 - DNA, 84 bp, Homo sapiens
atctgctgttgctgcagaatccgctgctgcagggcttgctggatgttgggggtgctgtctgcccccagccccggctgccccatc

SEQ ID NO: 59310 - DNA, 83 bp, Homo sapiens
tgcagaatccgctgctgcagggcttgctggatgttgggggtgctgtctgcccccagccccggctgccccatctggccaagctg

SEQ ID NO: 59311 - DNA, 80 bp, Homo sapiens
cttgctggatgttgggggtgctgtctgcccccagccccggctgccccatctggccaagctgtcccatctgagccgccatc

SEQ ID NO: 59312 - DNA, 79 bp, Homo sapiens
atgttgggggtgctgtctgcccccagccccggctgccccatctggccaagctgtcccatctgagccgccatctggccca

SEQ ID NO: 59313 - DNA, 84 bp, Homo sapiens
tgctgtctgcccccagccccggctgccccatctggccaagctgtcccatctgagccgccatctggcccatggagctgccctgga

SEQ ID NO: 59314 - DNA, 80 bp, Homo sapiens
ccagccccggctgccccatctggccaagctgtcccatctgagccgccatctggcccatggagctgccctggagggggaga

SEQ ID NO: 59315 - DNA, 91 bp, Homo sapiens
ctgccccatctggccaagctgtcccatctgagccgccatctggcccatggagctgccctggagggggagatgctgctgcatgcgctgctgc

SEQ ID NO: 59316 - DNA, 95 bp, Homo sapiens
ccatctggccaagctgtcccatctgagccgccatctggcccatggagctgccctggagggggagatgctgctgcatgcgctgctgctgctgcatg

SEQ ID NO: 59317 - DNA, 92 bp, Homo sapiens
tgtcccatctgagccgccatctggcccatggagctgccctggagggggagatgctgctgcatgcgctgctgctgctgcatggccggtgggta

SEQ ID NO: 59318 - DNA, 91 bp, Homo sapiens
atctgagccgccatctggcccatggagctgccctggagggggagatgctgctgcatgcgctgctgctgctgcatggccggtgggtagcctc

SEQ ID NO: 59319 - DNA, 87 bp, Homo sapiens
tggcccatggagctgccctggagggggagatgctgctgcatgcgctgctgctgctgcatggccggtgggtagcctccgggtccttga

SEQ ID NO: 59320 - DNA, 87 bp, Homo sapiens
agctgccctggagggggagatgctgctgcatgcgctgctgctgctgcatggccggtgggtagcctccgggtccttgaggctgctgga

SEQ ID NO: 59321 - DNA, 85 bp, Homo sapiens
cctggagggggagatgctgctgcatgcgctgctgctgctgcatggccggtgggtagcctccgggtccttgaggctgctggaactg

SEQ ID NO: 59322 - DNA, 86 bp, Homo sapiens
atgctgctgcatgcgctgctgctgctgcatggccggtgggtagcctccgggtccttgaggctgctggaactggccgtgccccgcca

SEQ ID NO: 59323 - DNA, 81 bp, Homo sapiens
atgcgctgctgctgctgcatggccggtgggtagcctccgggtccttgaggctgctggaactggccgtgccccgccatgccc

SEQ ID NO: 59324 - DNA, 77 bp, Homo sapiens
ctgctgcatggccggtgggtagcctccgggtccttgaggctgctggaactggccgtgccccgccatgcccccagcca

SEQ ID NO: 59325 - DNA, 74 bp, Homo sapiens
atggccggtgggtagcctccgggtccttgaggctgctggaactggccgtgccccgccatgcccccagccatgcc

SEQ ID NO: 59326 - DNA, 76 bp, Homo sapiens
gtagcctccgggtccttgaggctgctggaactggccgtgccccgccatgcccccagccatgccggcactcccttgc

SEQ ID NO: 59327 - DNA, 80 bp, Homo sapiens
ccgggtccttgaggctgctggaactggccgtgccccgccatgcccccagccatgccggcactcccttgctgctgctgctg

SEQ ID NO: 59328 - DNA, 85 bp, Homo sapiens
aggctgctggaactggccgtgccccgccatgcccccagccatgccggcactcccttgctgctgctgctgttgctgctgttgttgc

SEQ ID NO: 59329 - DNA, 84 bp, Homo sapiens
tgctgctgctgctgcagcagctgcctccgtaacatttctcggtactgtggattcatactcgccatgttggggttgtgtcctggg

SEQ ID NO: 59330 - DNA, 81 bp, Homo sapiens
gctgcagcagctgcctccgtaacatttctcggtactgtggattcatactcgccatgttggggttgtgtcctgggttcatga

SEQ ID NO: 59331 - DNA, 77 bp, Homo sapiens
ctgcctccgtaacatttctcggtactgtggattcatactcgccatgttggggttgtgtcctgggttcatgatgttca

SEQ ID NO: 59332 - DNA, 76 bp, Homo sapiens
tccgtaacatttctcggtactgtggattcatactcgccatgttggggttgtgtcctgggttcatgatgttcaaggc

SEQ ID NO: 59333 - DNA, 76 bp, Homo sapiens
ttctcggtactgtggattcatactcgccatgttggggttgtgtcctgggttcatgatgttcaaggcctggccctgg

SEQ ID NO: 59334 - DNA, 76 bp, Homo sapiens
tgtggattcatactcgccatgttggggttgtgtcctgggttcatgatgttcaaggcctggccctgggggttcaggc

SEQ ID NO: 59335 - DNA, 74 bp, Homo sapiens
tactcgccatgttggggttgtgtcctgggttcatgatgttcaaggcctggccctgggggttcaggcctcccatc

SEQ ID NO: 59336 - DNA, 76 bp, Homo sapiens
gggttgtgtcctgggttcatgatgttcaaggcctggccctgggggttcaggcctcccatcgcctgctgctgtggag

SEQ ID NO: 59337 - DNA, 78 bp, Homo sapiens
tgtcctgggttcatgatgttcaaggcctggccctgggggttcaggcctcccatcgcctgctgctgtggaggcacaccg

SEQ ID NO: 59338 - DNA, 79 bp, Homo sapiens
tcatgatgttcaaggcctggccctgggggttcaggcctcccatcgcctgctgctgtggaggcacaccgggccgcggcac

SEQ ID NO: 59339 - DNA, 80 bp, Homo sapiens
cctggccctgggggttcaggcctcccatcgcctgctgctgtggaggcacaccgggccgcggcacgccagcctgcatggca

SEQ ID NO: 59340 - DNA, 83 bp, Homo sapiens
ggggttcaggcctcccatcgcctgctgctgtggaggcacaccgggccgcggcacgccagcctgcatggcattcaggttctgca

SEQ ID NO: 59341 - DNA, 90 bp, Homo sapiens
atcgcctgctgctgtggaggcacaccgggccgcggcacgccagcctgcatggcattcaggttctgcaggctgggctgctggtgcatgcca

SEQ ID NO: 59342 - DNA, 88 bp, Homo sapiens
tgctgtggaggcacaccgggccgcggcacgccagcctgcatggcattcaggttctgcaggctgggctgctggtgcatgccaggctggg

SEQ ID NO: 59343 - DNA, 86 bp, Homo sapiens
acaccgggccgcggcacgccagcctgcatggcattcaggttctgcaggctgggctgctggtgcatgccaggctggggttgcatgcc

SEQ ID NO: 59344 - DNA, 88 bp, Homo sapiens
ggcacgccagcctgcatggcattcaggttctgcaggctgggctgctggtgcatgccaggctggggttgcatgccgggctgggactgga

SEQ ID NO: 59345 - DNA, 86 bp, Homo sapiens
agcctgcatggcattcaggttctgcaggctgggctgctggtgcatgccaggctggggttgcatgccgggctgggactggaggccag

SEQ ID NO: 59346 - DNA, 84 bp, Homo sapiens
tggcattcaggttctgcaggctgggctgctggtgcatgccaggctggggttgcatgccgggctgggactggaggccaggctggg

SEQ ID NO: 59347 - DNA, 85 bp, Homo sapiens
ttctgcaggctgggctgctggtgcatgccaggctggggttgcatgccgggctgggactggaggccaggctggggctgcatgccgg

SEQ ID NO: 59348 - DNA, 84 bp, Homo sapiens
ctgctggtgcatgccaggctggggttgcatgccgggctgggactggaggccaggctggggctgcatgccgggctgattggccac

SEQ ID NO: 59349 - DNA, 79 bp, Homo sapiens
atgccaggctggggttgcatgccgggctgggactggaggccaggctggggctgcatgccgggctgattggccacgtact

SEQ ID NO: 59350 - DNA, 80 bp, Homo sapiens
ctggggttgcatgccgggctgggactggaggccaggctggggctgcatgccgggctgattggccacgtacttggctgtgc

SEQ ID NO: 59351 - DNA, 82 bp, Homo sapiens
tgccgggctgggactggaggccaggctggggctgcatgccgggctgattggccacgtacttggctgtgcgctgtttgatgaa

SEQ ID NO: 59352 - DNA, 82 bp, Homo sapiens
caggctggggctgcatgccgggctgattggccacgtacttggctgtgcgctgtttgatgaaagctgccattagctgcgggtt

SEQ ID NO: 59353 - DNA, 83 bp, Homo sapiens
ctgcatgccgggctgattggccacgtacttggctgtgcgctgtttgatgaaagctgccattagctgcgggtttgatttgagaa

SEQ ID NO: 59354 - DNA, 79 bp, Homo sapiens
ccgggctgattggccacgtacttggctgtgcgctgtttgatgaaagctgccattagctgcgggtttgatttgagaatgt

SEQ ID NO: 59355 - DNA, 86 bp, Homo sapiens
tacttggctgtgcgctgtttgatgaaagctgccattagctgcgggtttgatttgagaatgttcagcacctgctgttgctgctgagg

SEQ ID NO: 59356 - DNA, 86 bp, Homo sapiens
ttgagaatgttcagcacctgctgttgctgctgaggggagctgggcgacttcagggtccgcagcaggtcttgcagagcgctgggtga

SEQ ID NO: 59357 - DNA, 87 bp, Homo sapiens
ttcagcacctgctgttgctgctgaggggagctgggcgacttcagggtccgcagcaggtcttgcagagcgctgggtgagatgctcctg

SEQ ID NO: 59358 - DNA, 86 bp, Homo sapiens
ctgttgctgctgaggggagctgggcgacttcagggtccgcagcaggtcttgcagagcgctgggtgagatgctcctgggtggctgca

SEQ ID NO: 59359 - DNA, 84 bp, Homo sapiens
gggagctgggcgacttcagggtccgcagcaggtcttgcagagcgctgggtgagatgctcctgggtggctgcacgctgggcatcc

SEQ ID NO: 59360 - DNA, 82 bp, Homo sapiens
ctgggcgacttcagggtccgcagcaggtcttgcagagcgctgggtgagatgctcctgggtggctgcacgctgggcatccggg

SEQ ID NO: 59361 - DNA, 83 bp, Homo sapiens
tcagggtccgcagcaggtcttgcagagcgctgggtgagatgctcctgggtggctgcacgctgggcatccggggcccagccacg

SEQ ID NO: 59362 - DNA, 81 bp, Homo sapiens
agcaggtcttgcagagcgctgggtgagatgctcctgggtggctgcacgctgggcatccggggcccagccacggccgcctgg

SEQ ID NO: 59363 - DNA, 83 bp, Homo sapiens
agcgctgggtgagatgctcctgggtggctgcacgctgggcatccggggcccagccacggccgcctgggcctgcatggatatca

SEQ ID NO: 59364 - DNA, 80 bp, Homo sapiens
ctcctgggtggctgcacgctgggcatccggggcccagccacggccgcctgggcctgcatggatatcacaggcctgggcaa

SEQ ID NO: 59365 - DNA, 83 bp, Homo sapiens
tgggcatccggggcccagccacggccgcctgggcctgcatggatatcacaggcctgggcaagcctggcatgggctgctgctgg

SEQ ID NO: 59366 - DNA, 80 bp, Homo sapiens
gggcccagccacggccgcctgggcctgcatggatatcacaggcctgggcaagcctggcatgggctgctgctggggaaggg

SEQ ID NO: 59367 - DNA, 83 bp, Homo sapiens
acggccgcctgggcctgcatggatatcacaggcctgggcaagcctggcatgggctgctgctggggaaggggcgcctgctgcca

SEQ ID NO: 59368 - DNA, 87 bp, Homo sapiens
tgcatggatatcacaggcctgggcaagcctggcatgggctgctgctggggaaggggcgcctgctgccactgcccgggaggcatgctg

SEQ ID NO: 59369 - DNA, 82 bp, Homo sapiens
tgggcaagcctggcatgggctgctgctggggaaggggcgcctgctgccactgcccgggaggcatgctgggcatgacgggccc

SEQ ID NO: 59370 - DNA, 82 bp, Homo sapiens
tggcatgggctgctgctggggaaggggcgcctgctgccactgcccgggaggcatgctgggcatgacgggcccgctcacctgg

SEQ ID NO: 59371 - DNA, 79 bp, Homo sapiens
tgctgccactgcccgggaggcatgctgggcatgacgggcccgctcacctggttgggtcggggcacattcaggctcacgg

SEQ ID NO: 59372 - DNA, 75 bp, Homo sapiens
ccactgcccgggaggcatgctgggcatgacgggcccgctcacctggttgggtcggggcacattcaggctcacggg

SEQ ID NO: 59373 - DNA, 77 bp, Homo sapiens
aggcatgctgggcatgacgggcccgctcacctggttgggtcggggcacattcaggctcacgggggccatctggctcc

SEQ ID NO: 59374 - DNA, 73 bp, Homo sapiens
tgggcatgacgggcccgctcacctggttgggtcggggcacattcaggctcacgggggccatctggctccccgg

SEQ ID NO: 59375 - DNA, 69 bp, Homo sapiens
gggcccgctcacctggttgggtcggggcacattcaggctcacgggggccatctggctccccggggtccc

SEQ ID NO: 59376 - DNA, 70 bp, Homo sapiens
acctggttgggtcggggcacattcaggctcacgggggccatctggctccccggggtccccatgcccgtgc

SEQ ID NO: 59377 - DNA, 75 bp, Homo sapiens
ggcacattcaggctcacgggggccatctggctccccggggtccccatgcccgtgcgtcctgggggcatgctgttg

SEQ ID NO: 59378 - DNA, 74 bp, Homo sapiens
attcaggctcacgggggccatctggctccccggggtccccatgcccgtgcgtcctgggggcatgctgttgttga

SEQ ID NO: 59379 - DNA, 74 bp, Homo sapiens
ggccatctggctccccggggtccccatgcccgtgcgtcctgggggcatgctgttgttgatgttcacccggtaca

SEQ ID NO: 59380 - DNA, 74 bp, Homo sapiens
tctggctccccggggtccccatgcccgtgcgtcctgggggcatgctgttgttgatgttcacccggtacaggtgc

SEQ ID NO: 59381 - DNA, 80 bp, Homo sapiens
gggtccccatgcccgtgcgtcctgggggcatgctgttgttgatgttcacccggtacaggtgctgctgctgctgggcctca

SEQ ID NO: 59382 - DNA, 84 bp, Homo sapiens
tgggggcatgctgttgttgatgttcacccggtacaggtgctgctgctgctgggcctcacgctcgatctgccgagccgcttccac

SEQ ID NO: 59383 - DNA, 85 bp, Homo sapiens
atgctgttgttgatgttcacccggtacaggtgctgctgctgctgggcctcacgctcgatctgccgagccgcttccaccgctgcag

SEQ ID NO: 59384 - DNA, 82 bp, Homo sapiens
ttgatgttcacccggtacaggtgctgctgctgctgggcctcacgctcgatctgccgagccgcttccaccgctgcaggagggg

SEQ ID NO: 59385 - DNA, 79 bp, Homo sapiens
gtgctgctgctgctgggcctcacgctcgatctgccgagccgcttccaccgctgcaggagggggctgggccgggggtggg

SEQ ID NO: 59386 - DNA, 74 bp, Homo sapiens
tgctgggcctcacgctcgatctgccgagccgcttccaccgctgcaggagggggctgggccgggggtgggggggc

SEQ ID NO: 59387 - DNA, 65 bp, Homo sapiens
aggagggggctgggccgggggtgggggggccggcacctggctggtaggcttccctgtggacaccg

SEQ ID NO: 59388 - DNA, 69 bp, Homo sapiens
tgggggggccggcacctggctggtaggcttccctgtggacaccgtggtggggggctgagtccgggccac

SEQ ID NO: 59389 - DNA, 70 bp, Homo sapiens
gggccggcacctggctggtaggcttccctgtggacaccgtggtggggggctgagtccgggccacgctggg

SEQ ID NO: 59390 - DNA, 73 bp, Homo sapiens
ctggtaggcttccctgtggacaccgtggtggggggctgagtccgggccacgctggggaagccagctggtgaca

SEQ ID NO: 59391 - DNA, 76 bp, Homo sapiens
tccctgtggacaccgtggtggggggctgagtccgggccacgctggggaagccagctggtgacatgctcacgggtga

SEQ ID NO: 59392 - DNA, 73 bp, Homo sapiens
acaccgtggtggggggctgagtccgggccacgctggggaagccagctggtgacatgctcacgggtgagggttg

SEQ ID NO: 59393 - DNA, 74 bp, Homo sapiens
ggggctgagtccgggccacgctggggaagccagctggtgacatgctcacgggtgagggttggggctgggcaggg

SEQ ID NO: 59394 - DNA, 76 bp, Homo sapiens
tgagtccgggccacgctggggaagccagctggtgacatgctcacgggtgagggttggggctgggcagggggctgcg

SEQ ID NO: 59395 - DNA, 75 bp, Homo sapiens
ccacgctggggaagccagctggtgacatgctcacgggtgagggttggggctgggcagggggctgcggcgtctggg

SEQ ID NO: 59396 - DNA, 77 bp, Homo sapiens
ggtgacatgctcacgggtgagggttggggctgggcagggggctgcggcgtctggggtgtgctgggctgctgtgtggg

SEQ ID NO: 59397 - DNA, 73 bp, Homo sapiens
tcacgggtgagggttggggctgggcagggggctgcggcgtctggggtgtgctgggctgctgtgtgggggtccc

SEQ ID NO: 59398 - DNA, 75 bp, Homo sapiens
tggggctgggcagggggctgcggcgtctggggtgtgctgggctgctgtgtgggggtcccgggcggtgctgaggta

SEQ ID NO: 59399 - DNA, 84 bp, Homo sapiens
aggtaggagaaggcagactctgctgaggcacgttgcgggtgttcatggtggccatccgccggcgcatgagctgggcctgctgca

SEQ ID NO: 59400 - DNA, 85 bp, Homo sapiens
aaggcagactctgctgaggcacgttgcgggtgttcatggtggccatccgccggcgcatgagctgggcctgctgcaggcggtgctg

SEQ ID NO: 59401 - DNA, 88 bp, Homo sapiens
actctgctgaggcacgttgcgggtgttcatggtggccatccgccggcgcatgagctgggcctgctgcaggcggtgctggatctgctgc

SEQ ID NO: 59402 - DNA, 87 bp, Homo sapiens
gttgcgggtgttcatggtggccatccgccggcgcatgagctgggcctgctgcaggcggtgctggatctgctgctggcggagcttgtg

SEQ ID NO: 59403 - DNA, 90 bp, Homo sapiens
tgttcatggtggccatccgccggcgcatgagctgggcctgctgcaggcggtgctggatctgctgctggcggagcttgtgtttgatgttga

SEQ ID NO: 59404 - DNA, 89 bp, Homo sapiens
gtggccatccgccggcgcatgagctgggcctgctgcaggcggtgctggatctgctgctggcggagcttgtgtttgatgttgaggcagaa

SEQ ID NO: 59405 - DNA, 86 bp, Homo sapiens
ccggcgcatgagctgggcctgctgcaggcggtgctggatctgctgctggcggagcttgtgtttgatgttgaggcagaagggcacgg

SEQ ID NO: 59406 - DNA, 83 bp, Homo sapiens
tgggcctgctgcaggcggtgctggatctgctgctggcggagcttgtgtttgatgttgaggcagaagggcacggggcatttgtt

SEQ ID NO: 59407 - DNA, 82 bp, Homo sapiens
gtgctggatctgctgctggcggagcttgtgtttgatgttgaggcagaagggcacggggcatttgttttcttggcagtgcttg

SEQ ID NO: 59408 - DNA, 78 bp, Homo sapiens
ctgctggcggagcttgtgtttgatgttgaggcagaagggcacggggcatttgttttcttggcagtgcttggcgtggta

SEQ ID NO: 59409 - DNA, 78 bp, Homo sapiens
agcttgtgtttgatgttgaggcagaagggcacggggcatttgttttcttggcagtgcttggcgtggtagcagcagagg

SEQ ID NO: 59410 - DNA, 81 bp, Homo sapiens
aggcagaagggcacggggcatttgttttcttggcagtgcttggcgtggtagcagcagagggcgatgagctgcttgcacacc

SEQ ID NO: 59411 - DNA, 79 bp, Homo sapiens
ttgttttcttggcagtgcttggcgtggtagcagcagagggcgatgagctgcttgcacaccgggcagcccccgttggtct

SEQ ID NO: 59412 - DNA, 81 bp, Homo sapiens
cagtgcttggcgtggtagcagcagagggcgatgagctgcttgcacaccgggcagcccccgttggtcttgcgtttgcagccc

SEQ ID NO: 59413 - DNA, 79 bp, Homo sapiens
ttggcgtggtagcagcagagggcgatgagctgcttgcacaccgggcagcccccgttggtcttgcgtttgcagcccttgg

SEQ ID NO: 59414 - DNA, 91 bp, Homo sapiens
tgtgctgcaccacccgcttcatcttctggcaggatggcagcgagcagttggcgttgcggcactggcacgcgtgcaccagcgactggatgca

SEQ ID NO: 59415 - DNA, 87 bp, Homo sapiens
accacccgcttcatcttctggcaggatggcagcgagcagttggcgttgcggcactggcacgcgtgcaccagcgactggatgcagcgc

SEQ ID NO: 59416 - DNA, 92 bp, Homo sapiens
ttcatcttctggcaggatggcagcgagcagttggcgttgcggcactggcacgcgtgcaccagcgactggatgcagcgctggatgctcagccg

SEQ ID NO: 59417 - DNA, 89 bp, Homo sapiens
aggatggcagcgagcagttggcgttgcggcactggcacgcgtgcaccagcgactggatgcagcgctggatgctcagccggcgtgactcc

SEQ ID NO: 59418 - DNA, 88 bp, Homo sapiens
ggcagcgagcagttggcgttgcggcactggcacgcgtgcaccagcgactggatgcagcgctggatgctcagccggcgtgactcctggg

SEQ ID NO: 59419 - DNA, 84 bp, Homo sapiens
agttggcgttgcggcactggcacgcgtgcaccagcgactggatgcagcgctggatgctcagccggcgtgactcctgggggctct

SEQ ID NO: 59420 - DNA, 85 bp, Homo sapiens
actggcacgcgtgcaccagcgactggatgcagcgctggatgctcagccggcgtgactcctgggggctctttgactgtggctcgcc

SEQ ID NO: 59421 - DNA, 84 bp, Homo sapiens
acgcgtgcaccagcgactggatgcagcgctggatgctcagccggcgtgactcctgggggctctttgactgtggctcgccctggc

SEQ ID NO: 59422 - DNA, 86 bp, Homo sapiens
gactggatgcagcgctggatgctcagccggcgtgactcctgggggctctttgactgtggctcgccctggctgctgccctcgtcatc

SEQ ID NO: 59423 - DNA, 85 bp, Homo sapiens
atgcagcgctggatgctcagccggcgtgactcctgggggctctttgactgtggctcgccctggctgctgccctcgtcatccaggc

SEQ ID NO: 59424 - DNA, 82 bp, Homo sapiens
tggatgctcagccggcgtgactcctgggggctctttgactgtggctcgccctggctgctgccctcgtcatccaggcccagcc

SEQ ID NO: 59425 - DNA, 77 bp, Homo sapiens
cgtgactcctgggggctctttgactgtggctcgccctggctgctgccctcgtcatccaggcccagcccccacttcac

SEQ ID NO: 59426 - DNA, 78 bp, Homo sapiens
tgggggctctttgactgtggctcgccctggctgctgccctcgtcatccaggcccagcccccacttcaccatcttatgg

SEQ ID NO: 59427 - DNA, 81 bp, Homo sapiens
tttgactgtggctcgccctggctgctgccctcgtcatccaggcccagcccccacttcaccatcttatgggcatggctcttc

SEQ ID NO: 59428 - DNA, 81 bp, Homo sapiens
tcgccctggctgctgccctcgtcatccaggcccagcccccacttcaccatcttatgggcatggctcttcgtgttatagcag

SEQ ID NO: 59429 - DNA, 83 bp, Homo sapiens
ctgctgccctcgtcatccaggcccagcccccacttcaccatcttatgggcatggctcttcgtgttatagcagttgatgcagag

SEQ ID NO: 59430 - DNA, 81 bp, Homo sapiens
gtcatccaggcccagcccccacttcaccatcttatgggcatggctcttcgtgttatagcagttgatgcagaggtcgtagtc

SEQ ID NO: 59431 - DNA, 81 bp, Homo sapiens
cccagcccccacttcaccatcttatgggcatggctcttcgtgttatagcagttgatgcagaggtcgtagtcctgcaagcaa

SEQ ID NO: 59432 - DNA, 79 bp, Homo sapiens
acttcaccatcttatgggcatggctcttcgtgttatagcagttgatgcagaggtcgtagtcctgcaagcaaggaaaggg

SEQ ID NO: 59433 - DNA, 79 bp, Homo sapiens
accatcttatgggcatggctcttcgtgttatagcagttgatgcagaggtcgtagtcctgcaagcaaggaaaggggacag

SEQ ID NO: 59434 - DNA, 80 bp, Homo sapiens
atggctcttcgtgttatagcagttgatgcagaggtcgtagtcctgcaagcaaggaaaggggacaggccggtgtcagcatg

SEQ ID NO: 59435 - DNA, 79 bp, Homo sapiens
gggggtgggggcagggcctacctcgcacacagtgcagtgccagcgcgtctccacgtggtgcttgcactcgttgcaggtg

SEQ ID NO: 59436 - DNA, 83 bp, Homo sapiens
gcagggcctacctcgcacacagtgcagtgccagcgcgtctccacgtggtgcttgcactcgttgcaggtgtagacaaagcggtc

SEQ ID NO: 59437 - DNA, 82 bp, Homo sapiens
ctacctcgcacacagtgcagtgccagcgcgtctccacgtggtgcttgcactcgttgcaggtgtagacaaagcggtcctggcc

SEQ ID NO: 59438 - DNA, 80 bp, Homo sapiens
acacagtgcagtgccagcgcgtctccacgtggtgcttgcactcgttgcaggtgtagacaaagcggtcctggccctgggtg

SEQ ID NO: 59439 - DNA, 81 bp, Homo sapiens
agtgccagcgcgtctccacgtggtgcttgcactcgttgcaggtgtagacaaagcggtcctggccctgggtgtgcagctcca

SEQ ID NO: 59440 - DNA, 83 bp, Homo sapiens
cgtctccacgtggtgcttgcactcgttgcaggtgtagacaaagcggtcctggccctgggtgtgcagctccaccagcatgcaga

SEQ ID NO: 59441 - DNA, 84 bp, Homo sapiens
tgcttgcactcgttgcaggtgtagacaaagcggtcctggccctgggtgtgcagctccaccagcatgcagagcgtggaccacttg

SEQ ID NO: 59442 - DNA, 81 bp, Homo sapiens
actcgttgcaggtgtagacaaagcggtcctggccctgggtgtgcagctccaccagcatgcagagcgtggaccacttggagc

SEQ ID NO: 59443 - DNA, 82 bp, Homo sapiens
tgtagacaaagcggtcctggccctgggtgtgcagctccaccagcatgcagagcgtggaccacttggagcggcgcaaggagga

SEQ ID NO: 59444 - DNA, 80 bp, Homo sapiens
aagcggtcctggccctgggtgtgcagctccaccagcatgcagagcgtggaccacttggagcggcgcaaggaggagaactc

SEQ ID NO: 59445 - DNA, 85 bp, Homo sapiens
tgggtgtgcagctccaccagcatgcagagcgtggaccacttggagcggcgcaaggaggagaactcccagtgcttgtctctggcga

SEQ ID NO: 59446 - DNA, 82 bp, Homo sapiens
agctccaccagcatgcagagcgtggaccacttggagcggcgcaaggaggagaactcccagtgcttgtctctggcgagggtga

SEQ ID NO: 59447 - DNA, 80 bp, Homo sapiens
accagcatgcagagcgtggaccacttggagcggcgcaaggaggagaactcccagtgcttgtctctggcgagggtgaggaa

SEQ ID NO: 59448 - DNA, 76 bp, Homo sapiens
agagcgtggaccacttggagcggcgcaaggaggagaactcccagtgcttgtctctggcgagggtgaggaaggcgtc

SEQ ID NO: 59449 - DNA, 78 bp, Homo sapiens
acttggagcggcgcaaggaggagaactcccagtgcttgtctctggcgagggtgaggaaggcgtcgcgcccatccatga

SEQ ID NO: 59450 - DNA, 81 bp, Homo sapiens
caaggaggagaactcccagtgcttgtctctggcgagggtgaggaaggcgtcgcgcccatccatgaggtcacagctgagcag

SEQ ID NO: 59451 - DNA, 79 bp, Homo sapiens
aggagaactcccagtgcttgtctctggcgagggtgaggaaggcgtcgcgcccatccatgaggtcacagctgagcagggg

SEQ ID NO: 59452 - DNA, 78 bp, Homo sapiens
agtgcttgtctctggcgagggtgaggaaggcgtcgcgcccatccatgaggtcacagctgagcagggggtcggggtcga

SEQ ID NO: 59453 - DNA, 77 bp, Homo sapiens
tctctggcgagggtgaggaaggcgtcgcgcccatccatgaggtcacagctgagcagggggtcggggtcgacgatggg

SEQ ID NO: 59454 - DNA, 75 bp, Homo sapiens
tgaggaaggcgtcgcgcccatccatgaggtcacagctgagcagggggtcggggtcgacgatggggggcagggtgt

SEQ ID NO: 59455 - DNA, 78 bp, Homo sapiens
tcgcgcccatccatgaggtcacagctgagcagggggtcggggtcgacgatggggggcagggtgttgatgacaggccca

SEQ ID NO: 59456 - DNA, 78 bp, Homo sapiens
atccatgaggtcacagctgagcagggggtcggggtcgacgatggggggcagggtgttgatgacaggcccagcgtgcag

SEQ ID NO: 59457 - DNA, 78 bp, Homo sapiens
ggtcacagctgagcagggggtcggggtcgacgatggggggcagggtgttgatgacaggcccagcgtgcaggtggatca

SEQ ID NO: 59458 - DNA, 82 bp, Homo sapiens
tcctcccggccagaggcacggctgcagcaccgcagcccacgcctacctccttgtgcttctccatggtggcatacagcttctg

SEQ ID NO: 59459 - DNA, 83 bp, Homo sapiens
cagaggcacggctgcagcaccgcagcccacgcctacctccttgtgcttctccatggtggcatacagcttctgggacaggtcat

SEQ ID NO: 59460 - DNA, 82 bp, Homo sapiens
gctgcagcaccgcagcccacgcctacctccttgtgcttctccatggtggcatacagcttctgggacaggtcattggacacgt

SEQ ID NO: 59461 - DNA, 77 bp, Homo sapiens
accgcagcccacgcctacctccttgtgcttctccatggtggcatacagcttctgggacaggtcattggacacgttgg

SEQ ID NO: 59462 - DNA, 80 bp, Homo sapiens
ccttgtgcttctccatggtggcatacagcttctgggacaggtcattggacacgttgggcatgctgggcttcttcttgttg

SEQ ID NO: 59463 - DNA, 82 bp, Homo sapiens
ttctccatggtggcatacagcttctgggacaggtcattggacacgttgggcatgctgggcttcttcttgttggcgcggctga

SEQ ID NO: 59464 - DNA, 80 bp, Homo sapiens
atacagcttctgggacaggtcattggacacgttgggcatgctgggcttcttcttgttggcgcggctgatgctgcttttgt

SEQ ID NO: 59465 - DNA, 79 bp, Homo sapiens
ttctgggacaggtcattggacacgttgggcatgctgggcttcttcttgttggcgcggctgatgctgcttttgttcttgt

SEQ ID NO: 59466 - DNA, 78 bp, Homo sapiens
tcattggacacgttgggcatgctgggcttcttcttgttggcgcggctgatgctgcttttgttcttgttggttttcttg

SEQ ID NO: 59467 - DNA, 75 bp, Homo sapiens
acacgttgggcatgctgggcttcttcttgttggcgcggctgatgctgcttttgttcttgttggttttcttgttgt

SEQ ID NO: 59468 - DNA, 75 bp, Homo sapiens
atgctgggcttcttcttgttggcgcggctgatgctgcttttgttcttgttggttttcttgttgttcttcttcttg

SEQ ID NO: 59469 - DNA, 74 bp, Homo sapiens
cttcttcttgttggcgcggctgatgctgcttttgttcttgttggttttcttgttgttcttcttcttggcattct

SEQ ID NO: 59470 - DNA, 78 bp, Homo sapiens
ttggcgcggctgatgctgcttttgttcttgttggttttcttgttgttcttcttcttggcattcttgctgtcgccctga

SEQ ID NO: 59471 - DNA, 77 bp, Homo sapiens
atgctgcttttgttcttgttggttttcttgttgttcttcttcttggcattcttgctgtcgccctgactgccctgcaa

SEQ ID NO: 59472 - DNA, 76 bp, Homo sapiens
ttcttgttggttttcttgttgttcttcttcttggcattcttgctgtcgccctgactgccctgcaacaacacgcaag

SEQ ID NO: 59473 - DNA, 79 bp, Homo sapiens
ttggttttcttgttgttcttcttcttggcattcttgctgtcgccctgactgccctgcaacaacacgcaaggctgtgaga

SEQ ID NO: 59474 - DNA, 81 bp, Homo sapiens
ttgttcttcttcttggcattcttgctgtcgccctgactgccctgcaacaacacgcaaggctgtgagaccaggcaagtgccc

SEQ ID NO: 59475 - DNA, 81 bp, Homo sapiens
agctccagcgggacacgtgggcaatggagctcagagaagggtctgtacctcagtggtttcactggctgcagtgctctcttc

SEQ ID NO: 59476 - DNA, 77 bp, Homo sapiens
gggacacgtgggcaatggagctcagagaagggtctgtacctcagtggtttcactggctgcagtgctctcttcctttt

SEQ ID NO: 59477 - DNA, 77 bp, Homo sapiens
aatggagctcagagaagggtctgtacctcagtggtttcactggctgcagtgctctcttcctttttcctctcctcttc

SEQ ID NO: 59478 - DNA, 74 bp, Homo sapiens
agagaagggtctgtacctcagtggtttcactggctgcagtgctctcttcctttttcctctcctcttcttcttgt

SEQ ID NO: 59479 - DNA, 75 bp, Homo sapiens
tctgtacctcagtggtttcactggctgcagtgctctcttcctttttcctctcctcttcttcttgttctagttcct

SEQ ID NO: 59480 - DNA, 75 bp, Homo sapiens
agtggtttcactggctgcagtgctctcttcctttttcctctcctcttcttcttgttctagttccttaatgctctc

SEQ ID NO: 59481 - DNA, 77 bp, Homo sapiens
tggctgcagtgctctcttcctttttcctctcctcttcttcttgttctagttccttaatgctctcttctaacacattg

SEQ ID NO: 59482 - DNA, 73 bp, Homo sapiens
agtgctctcttcctttttcctctcctcttcttcttgttctagttccttaatgctctcttctaacacattgggc

SEQ ID NO: 59483 - DNA, 72 bp, Homo sapiens
tttttcctctcctcttcttcttgttctagttccttaatgctctcttctaacacattgggccagaaatcacct

SEQ ID NO: 59484 - DNA, 73 bp, Homo sapiens
tcctcttcttcttgttctagttccttaatgctctcttctaacacattgggccagaaatcaccttcaaaatagg

SEQ ID NO: 59485 - DNA, 73 bp, Homo sapiens
ttgttctagttccttaatgctctcttctaacacattgggccagaaatcaccttcaaaatagggcagttccttg

SEQ ID NO: 59486 - DNA, 74 bp, Homo sapiens
ctagttccttaatgctctcttctaacacattgggccagaaatcaccttcaaaatagggcagttccttggcactg

SEQ ID NO: 59487 - DNA, 76 bp, Homo sapiens
aatgctctcttctaacacattgggccagaaatcaccttcaaaatagggcagttccttggcactggtgagcctgtct

SEQ ID NO: 59488 - DNA, 76 bp, Homo sapiens
taacacattgggccagaaatcaccttcaaaatagggcagttccttggcactggtgagcctgtcttcagttgcttgt

SEQ ID NO: 59489 - DNA, 75 bp, Homo sapiens
ccagaaatcaccttcaaaatagggcagttccttggcactggtgagcctgtcttcagttgcttgtttgaaaatatc

SEQ ID NO: 59490 - DNA, 76 bp, Homo sapiens
atcaccttcaaaatagggcagttccttggcactggtgagcctgtcttcagttgcttgtttgaaaatatcctgagtg

SEQ ID NO: 59491 - DNA, 77 bp, Homo sapiens
aaatagggcagttccttggcactggtgagcctgtcttcagttgcttgtttgaaaatatcctgagtgggcaaagcaca

SEQ ID NO: 59492 - DNA, 80 bp, Homo sapiens
gttccttggcactggtgagcctgtcttcagttgcttgtttgaaaatatcctgagtgggcaaagcacaacagtgagatgag

SEQ ID NO: 59493 - DNA, 76 bp, Homo sapiens
ccctcagttgtgacaaaagccaccaccttccttcagcgccgggtaccttgtagtcatggatgatccgctctgcaaa

SEQ ID NO: 59494 - DNA, 77 bp, Homo sapiens
tgacaaaagccaccaccttccttcagcgccgggtaccttgtagtcatggatgatccgctctgcaaacgccttgtcca

SEQ ID NO: 59495 - DNA, 76 bp, Homo sapiens
caccaccttccttcagcgccgggtaccttgtagtcatggatgatccgctctgcaaacgccttgtccagcatctttt

SEQ ID NO: 59496 - DNA, 77 bp, Homo sapiens
cttccttcagcgccgggtaccttgtagtcatggatgatccgctctgcaaacgccttgtccagcatctttttgtacca

SEQ ID NO: 59497 - DNA, 77 bp, Homo sapiens
gggtaccttgtagtcatggatgatccgctctgcaaacgccttgtccagcatctttttgtaccactcctgcagtcgtt

SEQ ID NO: 59498 - DNA, 79 bp, Homo sapiens
tagtcatggatgatccgctctgcaaacgccttgtccagcatctttttgtaccactcctgcagtcgttttggcttgggta

SEQ ID NO: 59499 - DNA, 74 bp, Homo sapiens
atgatccgctctgcaaacgccttgtccagcatctttttgtaccactcctgcagtcgttttggcttgggtatttt

SEQ ID NO: 59500 - DNA, 74 bp, Homo sapiens
ctctgcaaacgccttgtccagcatctttttgtaccactcctgcagtcgttttggcttgggtattttttgatcag

SEQ ID NO: 59501 - DNA, 74 bp, Homo sapiens
ttgtccagcatctttttgtaccactcctgcagtcgttttggcttgggtattttttgatcaggtgggtggcaatg

SEQ ID NO: 59502 - DNA, 73 bp, Homo sapiens
tctttttgtaccactcctgcagtcgttttggcttgggtattttttgatcaggtgggtggcaatggaagatgta

SEQ ID NO: 59503 - DNA, 76 bp, Homo sapiens
ttgtaccactcctgcagtcgttttggcttgggtattttttgatcaggtgggtggcaatggaagatgtaatcatctc

SEQ ID NO: 59504 - DNA, 73 bp, Homo sapiens
agtcgttttggcttgggtattttttgatcaggtgggtggcaatggaagatgtaatcatctccttcacttggag

SEQ ID NO: 59505 - DNA, 75 bp, Homo sapiens
ttttggcttgggtattttttgatcaggtgggtggcaatggaagatgtaatcatctccttcacttggaggacaggc

SEQ ID NO: 59506 - DNA, 81 bp, Homo sapiens
tttttgatcaggtgggtggcaatggaagatgtaatcatctccttcacttggaggacaggcccagatgtgccctgtcacata

SEQ ID NO: 59507 - DNA, 82 bp, Homo sapiens
atcaggtgggtggcaatggaagatgtaatcatctccttcacttggaggacaggcccagatgtgccctgtcacatacctgcag

SEQ ID NO: 59508 - DNA, 82 bp, Homo sapiens
aatggaagatgtaatcatctccttcacttggaggacaggcccagatgtgccctgtcacatacctgcaggacccacgcacaca

SEQ ID NO: 59509 - DNA, 84 bp, Homo sapiens
tgtaatcatctccttcacttggaggacaggcccagatgtgccctgtcacatacctgcaggacccacgcacacacgtcagatgaa

SEQ ID NO: 59510 - DNA, 82 bp, Homo sapiens
atctccttcacttggaggacaggcccagatgtgccctgtcacatacctgcaggacccacgcacacacgtcagatgaacgtgc

SEQ ID NO: 59511 - DNA, 66 bp, Homo sapiens
aaataaagggttcttactagttccaaataatttaatccaaactcaccctaatttcttcacatactc

SEQ ID NO: 59512 - DNA, 69 bp, Homo sapiens
gggttcttactagttccaaataatttaatccaaactcaccctaatttcttcacatactctaaatatcca

SEQ ID NO: 59513 - DNA, 72 bp, Homo sapiens
gttccaaataatttaatccaaactcaccctaatttcttcacatactctaaatatccaataaggatctcatgg

SEQ ID NO: 59514 - DNA, 72 bp, Homo sapiens
atttaatccaaactcaccctaatttcttcacatactctaaatatccaataaggatctcatggtaaacggctg

SEQ ID NO: 59515 - DNA, 74 bp, Homo sapiens
aaactcaccctaatttcttcacatactctaaatatccaataaggatctcatggtaaacggctgtgcggaggcaa

SEQ ID NO: 59516 - DNA, 74 bp, Homo sapiens
aatttcttcacatactctaaatatccaataaggatctcatggtaaacggctgtgcggaggcaacgtggccggaa

SEQ ID NO: 59517 - DNA, 75 bp, Homo sapiens
acatactctaaatatccaataaggatctcatggtaaacggctgtgcggaggcaacgtggccggaagaaatgaata

SEQ ID NO: 59518 - DNA, 76 bp, Homo sapiens
atatccaataaggatctcatggtaaacggctgtgcggaggcaacgtggccggaagaaatgaatactatccagataa

SEQ ID NO: 59519 - DNA, 74 bp, Homo sapiens
aataaggatctcatggtaaacggctgtgcggaggcaacgtggccggaagaaatgaatactatccagataagaaa

SEQ ID NO: 59520 - DNA, 74 bp, Homo sapiens
atggtaaacggctgtgcggaggcaacgtggccggaagaaatgaatactatccagataagaaatgtacacacgcc

SEQ ID NO: 59521 - DNA, 76 bp, Homo sapiens
ggctgtgcggaggcaacgtggccggaagaaatgaatactatccagataagaaatgtacacacgcctgtgggaagga

SEQ ID NO: 59522 - DNA, 74 bp, Homo sapiens
aacgtggccggaagaaatgaatactatccagataagaaatgtacacacgcctgtgggaaggaggcacatgttta

SEQ ID NO: 59523 - DNA, 76 bp, Homo sapiens
gaagaaatgaatactatccagataagaaatgtacacacgcctgtgggaaggaggcacatgtttaactcagggtatc

SEQ ID NO: 59524 - DNA, 74 bp, Homo sapiens
taacacggctcactgaatgacacgccctggaaggagctggaaaactacctcgtgtttggaggggggcaatcaga

SEQ ID NO: 59525 - DNA, 72 bp, Homo sapiens
actgaatgacacgccctggaaggagctggaaaactacctcgtgtttggaggggggcaatcagagccgtattc

SEQ ID NO: 59526 - DNA, 70 bp, Homo sapiens
acacgccctggaaggagctggaaaactacctcgtgtttggaggggggcaatcagagccgtattcttggac

SEQ ID NO: 59527 - DNA, 71 bp, Homo sapiens
ggagctggaaaactacctcgtgtttggaggggggcaatcagagccgtattcttggacgtgcattccaaaaa

SEQ ID NO: 59528 - DNA, 71 bp, Homo sapiens
aaaactacctcgtgtttggaggggggcaatcagagccgtattcttggacgtgcattccaaaaaagcagaca

SEQ ID NO: 59529 - DNA, 74 bp, Homo sapiens
tgtttggaggggggcaatcagagccgtattcttggacgtgcattccaaaaaagcagacatccacgccgtcaatt

SEQ ID NO: 59530 - DNA, 76 bp, Homo sapiens
ggggcaatcagagccgtattcttggacgtgcattccaaaaaagcagacatccacgccgtcaatttcctcaaaagca

SEQ ID NO: 59531 - DNA, 75 bp, Homo sapiens
aatcagagccgtattcttggacgtgcattccaaaaaagcagacatccacgccgtcaatttcctcaaaagcaaaca

SEQ ID NO: 59532 - DNA, 74 bp, Homo sapiens
tattcttggacgtgcattccaaaaaagcagacatccacgccgtcaatttcctcaaaagcaaacagagctttggt

SEQ ID NO: 59533 - DNA, 73 bp, Homo sapiens
cattccaaaaaagcagacatccacgccgtcaatttcctcaaaagcaaacagagctttggttcgatatgggaaa

SEQ ID NO: 59534 - DNA, 74 bp, Homo sapiens
aaaaagcagacatccacgccgtcaatttcctcaaaagcaaacagagctttggttcgatatgggaaagattcaga

SEQ ID NO: 59535 - DNA, 73 bp, Homo sapiens
acatccacgccgtcaatttcctcaaaagcaaacagagctttggttcgatatgggaaagattcagacatttccc

SEQ ID NO: 59536 - DNA, 72 bp, Homo sapiens
aatttcctcaaaagcaaacagagctttggttcgatatgggaaagattcagacatttccccagaatccacaaa

SEQ ID NO: 59537 - DNA, 72 bp, Homo sapiens
aaagcaaacagagctttggttcgatatgggaaagattcagacatttccccagaatccacaaacctgaaacaa

SEQ ID NO: 59538 - DNA, 71 bp, Homo sapiens
aaacagagctttggttcgatatgggaaagattcagacatttccccagaatccacaaacctgaaacaaaagc

SEQ ID NO: 59539 - DNA, 73 bp, Homo sapiens
ttcgatatgggaaagattcagacatttccccagaatccacaaacctgaaacaaaagccagagccggacattta

SEQ ID NO: 59540 - DNA, 71 bp, Homo sapiens
atgggaaagattcagacatttccccagaatccacaaacctgaaacaaaagccagagccggacatttacaaa

SEQ ID NO: 59541 - DNA, 80 bp, Homo sapiens
gcgtggggactgctcgcagagcactgtagagagcaggcacactgaccgtgacttcatcccgggcttgacctccaccgtct

SEQ ID NO: 59542 - DNA, 83 bp, Homo sapiens
actgctcgcagagcactgtagagagcaggcacactgaccgtgacttcatcccgggcttgacctccaccgtcttgtctgagctg

SEQ ID NO: 59543 - DNA, 81 bp, Homo sapiens
agagcactgtagagagcaggcacactgaccgtgacttcatcccgggcttgacctccaccgtcttgtctgagctggccacca

SEQ ID NO: 59544 - DNA, 78 bp, Homo sapiens
gagcaggcacactgaccgtgacttcatcccgggcttgacctccaccgtcttgtctgagctggccaccactcggacaaa

SEQ ID NO: 59545 - DNA, 73 bp, Homo sapiens
acactgaccgtgacttcatcccgggcttgacctccaccgtcttgtctgagctggccaccactcggacaaaaac

SEQ ID NO: 59546 - DNA, 71 bp, Homo sapiens
ccgtgacttcatcccgggcttgacctccaccgtcttgtctgagctggccaccactcggacaaaaacctccc

SEQ ID NO: 59547 - DNA, 70 bp, Homo sapiens
atcccgggcttgacctccaccgtcttgtctgagctggccaccactcggacaaaaacctccccggcttcag

SEQ ID NO: 59548 - DNA, 74 bp, Homo sapiens
tccaccgtcttgtctgagctggccaccactcggacaaaaacctccccggcttcagggtgattctggcgccgcaa

SEQ ID NO: 59549 - DNA, 72 bp, Homo sapiens
tgtctgagctggccaccactcggacaaaaacctccccggcttcagggtgattctggcgccgcaaaaatttgt

SEQ ID NO: 59550 - DNA, 70 bp, Homo sapiens
agctggccaccactcggacaaaaacctccccggcttcagggtgattctggcgccgcaaaaatttgttcac

SEQ ID NO: 59551 - DNA, 69 bp, Homo sapiens
tcggacaaaaacctccccggcttcagggtgattctggcgccgcaaaaatttgttcactcggtcttccaa

SEQ ID NO: 59552 - DNA, 67 bp, Homo sapiens
aaaacctccccggcttcagggtgattctggcgccgcaaaaatttgttcactcggtcttccaagtggt

SEQ ID NO: 59553 - DNA, 71 bp, Homo sapiens
cttcagggtgattctggcgccgcaaaaatttgttcactcggtcttccaagtggtttcccagtcttgtggtc

SEQ ID NO: 59554 - DNA, 72 bp, Homo sapiens
attctggcgccgcaaaaatttgttcactcggtcttccaagtggtttcccagtcttgtggtctgcagccctag

SEQ ID NO: 59555 - DNA, 72 bp, Homo sapiens
gcaaaaatttgttcactcggtcttccaagtggtttcccagtcttgtggtctgcagccctaggaagtccagaa

SEQ ID NO: 59556 - DNA, 73 bp, Homo sapiens
aatttgttcactcggtcttccaagtggtttcccagtcttgtggtctgcagccctaggaagtccagaaggagca

SEQ ID NO: 59557 - DNA, 69 bp, Homo sapiens
gggacaatttctacaagtttctaaaatgtgcagtccaggaaacagaaagcttcccgaaacttactctta

SEQ ID NO: 59558 - DNA, 71 bp, Homo sapiens
tacaagtttctaaaatgtgcagtccaggaaacagaaagcttcccgaaacttactcttagcactgaatttgt

SEQ ID NO: 59559 - DNA, 70 bp, Homo sapiens
tttctaaaatgtgcagtccaggaaacagaaagcttcccgaaacttactcttagcactgaatttgttttct

SEQ ID NO: 59560 - DNA, 69 bp, Homo sapiens
agtccaggaaacagaaagcttcccgaaacttactcttagcactgaatttgttttcttttcgaggtctgc

SEQ ID NO: 59561 - DNA, 67 bp, Homo sapiens
aaacagaaagcttcccgaaacttactcttagcactgaatttgttttcttttcgaggtctgccagttt

SEQ ID NO: 59562 - DNA, 70 bp, Homo sapiens
ttcccgaaacttactcttagcactgaatttgttttcttttcgaggtctgccagttttcttcaagcagttg

SEQ ID NO: 59563 - DNA, 73 bp, Homo sapiens
cttactcttagcactgaatttgttttcttttcgaggtctgccagttttcttcaagcagttgtcgcacacaaaa

SEQ ID NO: 59564 - DNA, 73 bp, Homo sapiens
ctgaatttgttttcttttcgaggtctgccagttttcttcaagcagttgtcgcacacaaaactgcaaaataata

SEQ ID NO: 59565 - DNA, 72 bp, Homo sapiens
tttgttttcttttcgaggtctgccagttttcttcaagcagttgtcgcacacaaaactgcaaaataatagtgg

SEQ ID NO: 59566 - DNA, 80 bp, Homo sapiens
aggtctgccagttttcttcaagcagttgtcgcacacaaaactgcaaaataatagtggtatgatgagactgtatataatga

SEQ ID NO: 59567 - DNA, 79 bp, Homo sapiens
cagttttcttcaagcagttgtcgcacacaaaactgcaaaataatagtggtatgatgagactgtatataatgatgtaaat

SEQ ID NO: 59568 - DNA, 75 bp, Homo sapiens
aactgccccgccactggctctgtgcagaactgccctccaggccaggggaaacaactcaccctgaaggccaaatga

SEQ ID NO: 59569 - DNA, 79 bp, Homo sapiens
actggctctgtgcagaactgccctccaggccaggggaaacaactcaccctgaaggccaaatgatgtcatagtgcagaac

SEQ ID NO: 59570 - DNA, 81 bp, Homo sapiens
tgtgcagaactgccctccaggccaggggaaacaactcaccctgaaggccaaatgatgtcatagtgcagaacgcaaatctga

SEQ ID NO: 59571 - DNA, 79 bp, Homo sapiens
ccctccaggccaggggaaacaactcaccctgaaggccaaatgatgtcatagtgcagaacgcaaatctgatgcatcttcc

SEQ ID NO: 59572 - DNA, 80 bp, Homo sapiens
caggggaaacaactcaccctgaaggccaaatgatgtcatagtgcagaacgcaaatctgatgcatcttccggccacactcc

SEQ ID NO: 59573 - DNA, 83 bp, Homo sapiens
aacaactcaccctgaaggccaaatgatgtcatagtgcagaacgcaaatctgatgcatcttccggccacactccttgcaatcaa

SEQ ID NO: 59574 - DNA, 83 bp, Homo sapiens
tgaaggccaaatgatgtcatagtgcagaacgcaaatctgatgcatcttccggccacactccttgcaatcaacgaaactaggag

SEQ ID NO: 59575 - DNA, 82 bp, Homo sapiens
aatgatgtcatagtgcagaacgcaaatctgatgcatcttccggccacactccttgcaatcaacgaaactaggaggcaaagaa

SEQ ID NO: 59576 - DNA, 80 bp, Homo sapiens
atagtgcagaacgcaaatctgatgcatcttccggccacactccttgcaatcaacgaaactaggaggcaaagaaggcgcac

SEQ ID NO: 59577 - DNA, 77 bp, Homo sapiens
acgcaaatctgatgcatcttccggccacactccttgcaatcaacgaaactaggaggcaaagaaggcgcactgttaaa

SEQ ID NO: 59578 - DNA, 76 bp, Homo sapiens
atgcatcttccggccacactccttgcaatcaacgaaactaggaggcaaagaaggcgcactgttaaagcacacggaa

SEQ ID NO: 59579 - DNA, 66 bp, Homo sapiens
ccactccataaggagtaactttaccgatttcaaaccaaaactgaaagtaaaaaagaaatagctata

SEQ ID NO: 59580 - DNA, 64 bp, Homo sapiens
ggagtaactttaccgatttcaaaccaaaactgaaagtaaaaaagaaatagctatatacttacgg

SEQ ID NO: 59581 - DNA, 64 bp, Homo sapiens
gatttcaaaccaaaactgaaagtaaaaaagaaatagctatatacttacggttcggggtctaagg

SEQ ID NO: 59582 - DNA, 65 bp, Homo sapiens
caaaccaaaactgaaagtaaaaaagaaatagctatatacttacggttcggggtctaaggtatcat

SEQ ID NO: 59583 - DNA, 65 bp, Homo sapiens
ctgaaagtaaaaaagaaatagctatatacttacggttcggggtctaaggtatcatttttcttctt

SEQ ID NO: 59584 - DNA, 69 bp, Homo sapiens
gaaatagctatatacttacggttcggggtctaaggtatcatttttcttcttttcaaactgatcctttga

SEQ ID NO: 59585 - DNA, 66 bp, Homo sapiens
atacttacggttcggggtctaaggtatcatttttcttcttttcaaactgatcctttgaaattgtcc

SEQ ID NO: 59586 - DNA, 65 bp, Homo sapiens
acggttcggggtctaaggtatcatttttcttcttttcaaactgatcctttgaaattgtccttgtt

SEQ ID NO: 59587 - DNA, 67 bp, Homo sapiens
ggtctaaggtatcatttttcttcttttcaaactgatcctttgaaattgtccttgttttaaaataaga

SEQ ID NO: 59588 - DNA, 65 bp, Homo sapiens
ttttcttcttttcaaactgatcctttgaaattgtccttgttttaaaataagaaaacatgttttat

SEQ ID NO: 59589 - DNA, 65 bp, Homo sapiens
cttttcaaactgatcctttgaaattgtccttgttttaaaataagaaaacatgttttattaactaa

SEQ ID NO: 59590 - DNA, 66 bp, Homo sapiens
ctgatcctttgaaattgtccttgttttaaaataagaaaacatgttttattaactaaaatttatctg

SEQ ID NO: 59591 - DNA, 65 bp, Homo sapiens
aaaaacaatttaaggtcaccctccctcaccccagagaaaatgacaggacggtacttacgtctggg

SEQ ID NO: 59592 - DNA, 68 bp, Homo sapiens
atttaaggtcaccctccctcaccccagagaaaatgacaggacggtacttacgtctggggctgtgaagg

SEQ ID NO: 59593 - DNA, 71 bp, Homo sapiens
tccctcaccccagagaaaatgacaggacggtacttacgtctggggctgtgaagggtcgtcacccagggtca

SEQ ID NO: 59594 - DNA, 71 bp, Homo sapiens
agagaaaatgacaggacggtacttacgtctggggctgtgaagggtcgtcacccagggtcacattctcgccc

SEQ ID NO: 59595 - DNA, 72 bp, Homo sapiens
aaatgacaggacggtacttacgtctggggctgtgaagggtcgtcacccagggtcacattctcgccctggatc

SEQ ID NO: 59596 - DNA, 73 bp, Homo sapiens
acggtacttacgtctggggctgtgaagggtcgtcacccagggtcacattctcgccctggatctctgtgaaaca

SEQ ID NO: 59597 - DNA, 79 bp, Homo sapiens
tctggggctgtgaagggtcgtcacccagggtcacattctcgccctggatctctgtgaaacacttctcacagaaatgata

SEQ ID NO: 59598 - DNA, 78 bp, Homo sapiens
aagggtcgtcacccagggtcacattctcgccctggatctctgtgaaacacttctcacagaaatgatacctgtcagcaa

SEQ ID NO: 59599 - DNA, 79 bp, Homo sapiens
acccagggtcacattctcgccctggatctctgtgaaacacttctcacagaaatgatacctgtcagcaagaaggccatac

SEQ ID NO: 59600 - DNA, 79 bp, Homo sapiens
acattctcgccctggatctctgtgaaacacttctcacagaaatgatacctgtcagcaagaaggccatacttgggtgaac

SEQ ID NO: 59601 - DNA, 81 bp, Homo sapiens
ctggatctctgtgaaacacttctcacagaaatgatacctgtcagcaagaaggccatacttgggtgaactggtccatcataa

SEQ ID NO: 59602 - DNA, 82 bp, Homo sapiens
tctctgtgaaacacttctcacagaaatgatacctgtcagcaagaaggccatacttgggtgaactggtccatcataacacaca

SEQ ID NO: 59603 - DNA, 84 bp, Homo sapiens
aaccagatgaacgtgccttgccctaagacataatgcaggatgctgcttgacgcttacctattctgatagctgtagtaggcagca

SEQ ID NO: 59604 - DNA, 84 bp, Homo sapiens
ccttgccctaagacataatgcaggatgctgcttgacgcttacctattctgatagctgtagtaggcagcatcgcgaggaatggta

SEQ ID NO: 59605 - DNA, 88 bp, Homo sapiens
taagacataatgcaggatgctgcttgacgcttacctattctgatagctgtagtaggcagcatcgcgaggaatggtacacagctgcttc

SEQ ID NO: 59606 - DNA, 89 bp, Homo sapiens
taatgcaggatgctgcttgacgcttacctattctgatagctgtagtaggcagcatcgcgaggaatggtacacagctgcttcccatagca

SEQ ID NO: 59607 - DNA, 85 bp, Homo sapiens
ctgcttgacgcttacctattctgatagctgtagtaggcagcatcgcgaggaatggtacacagctgcttcccatagcagcacaaag

SEQ ID NO: 59608 - DNA, 83 bp, Homo sapiens
cttacctattctgatagctgtagtaggcagcatcgcgaggaatggtacacagctgcttcccatagcagcacaaagtctgtggg

SEQ ID NO: 59609 - DNA, 85 bp, Homo sapiens
tctgatagctgtagtaggcagcatcgcgaggaatggtacacagctgcttcccatagcagcacaaagtctgtggggaaaactcata

SEQ ID NO: 59610 - DNA, 82 bp, Homo sapiens
taggcagcatcgcgaggaatggtacacagctgcttcccatagcagcacaaagtctgtggggaaaactcatactgcaaaaata

SEQ ID NO: 59611 - DNA, 77 bp, Homo sapiens
atcgcgaggaatggtacacagctgcttcccatagcagcacaaagtctgtggggaaaactcatactgcaaaaataaag

SEQ ID NO: 59612 - DNA, 76 bp, Homo sapiens
aatggtacacagctgcttcccatagcagcacaaagtctgtggggaaaactcatactgcaaaaataaaggagaaata

SEQ ID NO: 59613 - DNA, 74 bp, Homo sapiens
tgcttcccatagcagcacaaagtctgtggggaaaactcatactgcaaaaataaaggagaaatacttttatataa

SEQ ID NO: 59614 - DNA, 71 bp, Homo sapiens
cccatagcagcacaaagtctgtggggaaaactcatactgcaaaaataaaggagaaatacttttatataaaa

SEQ ID NO: 59615 - DNA, 69 bp, Homo sapiens
tggattaaccaggaaaattcactttccggaaaaacttaaaactgtaccttgcgtccacagcaatatcca

SEQ ID NO: 59616 - DNA, 66 bp, Homo sapiens
aaccaggaaaattcactttccggaaaaacttaaaactgtaccttgcgtccacagcaatatccaagg

SEQ ID NO: 59617 - DNA, 71 bp, Homo sapiens
attcactttccggaaaaacttaaaactgtaccttgcgtccacagcaatatccaagggactgcatgacaggg

SEQ ID NO: 59618 - DNA, 74 bp, Homo sapiens
aaaacttaaaactgtaccttgcgtccacagcaatatccaagggactgcatgacagggtcaatttcctgctcaaa

SEQ ID NO: 59619 - DNA, 79 bp, Homo sapiens
taaaactgtaccttgcgtccacagcaatatccaagggactgcatgacagggtcaatttcctgctcaaagacctctgcaa

SEQ ID NO: 59620 - DNA, 79 bp, Homo sapiens
cgtccacagcaatatccaagggactgcatgacagggtcaatttcctgctcaaagacctctgcaagcttactgcaaaact

SEQ ID NO: 59621 - DNA, 78 bp, Homo sapiens
aatatccaagggactgcatgacagggtcaatttcctgctcaaagacctctgcaagcttactgcaaaacttatagactc

SEQ ID NO: 59622 - DNA, 77 bp, Homo sapiens
aagggactgcatgacagggtcaatttcctgctcaaagacctctgcaagcttactgcaaaacttatagactcgggatg

SEQ ID NO: 59623 - DNA, 77 bp, Homo sapiens
acagggtcaatttcctgctcaaagacctctgcaagcttactgcaaaacttatagactcgggatgtcttgcgattata

SEQ ID NO: 59624 - DNA, 79 bp, Homo sapiens
atttcctgctcaaagacctctgcaagcttactgcaaaacttatagactcgggatgtcttgcgattatagagccaggcat

SEQ ID NO: 59625 - DNA, 80 bp, Homo sapiens
aaagacctctgcaagcttactgcaaaacttatagactcgggatgtcttgcgattatagagccaggcattgttgaacatga

SEQ ID NO: 59626 - DNA, 83 bp, Homo sapiens
tctgcaagcttactgcaaaacttatagactcgggatgtcttgcgattatagagccaggcattgttgaacatgagccagacgtc

SEQ ID NO: 59627 - DNA, 80 bp, Homo sapiens
ttactgcaaaacttatagactcgggatgtcttgcgattatagagccaggcattgttgaacatgagccagacgtcgtccac

SEQ ID NO: 59628 - DNA, 80 bp, Homo sapiens
aacttatagactcgggatgtcttgcgattatagagccaggcattgttgaacatgagccagacgtcgtccacgtactgcca

SEQ ID NO: 59629 - DNA, 80 bp, Homo sapiens
gggatgtcttgcgattatagagccaggcattgttgaacatgagccagacgtcgtccacgtactgccagggctcttggtat

SEQ ID NO: 59630 - DNA, 81 bp, Homo sapiens
ttgcgattatagagccaggcattgttgaacatgagccagacgtcgtccacgtactgccagggctcttggtattgccctgtg

SEQ ID NO: 59631 - DNA, 81 bp, Homo sapiens
tagagccaggcattgttgaacatgagccagacgtcgtccacgtactgccagggctcttggtattgccctgtgtccagcttc

SEQ ID NO: 59632 - DNA, 79 bp, Homo sapiens
attgttgaacatgagccagacgtcgtccacgtactgccagggctcttggtattgccctgtgtccagcttccgcttgatg

SEQ ID NO: 59633 - DNA, 78 bp, Homo sapiens
atgagccagacgtcgtccacgtactgccagggctcttggtattgccctgtgtccagcttccgcttgatggtggagagg

SEQ ID NO: 59634 - DNA, 77 bp, Homo sapiens
gtccacgtactgccagggctcttggtattgccctgtgtccagcttccgcttgatggtggagaggtccatgggattct

SEQ ID NO: 59635 - DNA, 79 bp, Homo sapiens
tgccagggctcttggtattgccctgtgtccagcttccgcttgatggtggagaggtccatgggattctttacgatgtcaa

SEQ ID NO: 59636 - DNA, 77 bp, Homo sapiens
tcttggtattgccctgtgtccagcttccgcttgatggtggagaggtccatgggattctttacgatgtcaaaatagtc

SEQ ID NO: 59637 - DNA, 73 bp, Homo sapiens
ccctgtgtccagcttccgcttgatggtggagaggtccatgggattctttacgatgtcaaaatagtccttaaaa

SEQ ID NO: 59638 - DNA, 72 bp, Homo sapiens
tgtccagcttccgcttgatggtggagaggtccatgggattctttacgatgtcaaaatagtccttaaaaaaaa

SEQ ID NO: 59639 - DNA, 72 bp, Homo sapiens
aagtcacaccagcaaagttataatctatttttatgaattaacttactggaattccgaggagctggggatcta

SEQ ID NO: 59640 - DNA, 72 bp, Homo sapiens
acaccagcaaagttataatctatttttatgaattaacttactggaattccgaggagctggggatctacaggc

SEQ ID NO: 59641 - DNA, 71 bp, Homo sapiens
taatctatttttatgaattaacttactggaattccgaggagctggggatctacaggctgccggaaaggtaa

SEQ ID NO: 59642 - DNA, 72 bp, Homo sapiens
tttttatgaattaacttactggaattccgaggagctggggatctacaggctgccggaaaggtaatgactctg

SEQ ID NO: 59643 - DNA, 71 bp, Homo sapiens
aattaacttactggaattccgaggagctggggatctacaggctgccggaaaggtaatgactctgggtcctg

SEQ ID NO: 59644 - DNA, 75 bp, Homo sapiens
aattccgaggagctggggatctacaggctgccggaaaggtaatgactctgggtcctgtcgatacagtgcttctag

SEQ ID NO: 59645 - DNA, 77 bp, Homo sapiens
agctggggatctacaggctgccggaaaggtaatgactctgggtcctgtcgatacagtgcttctagggttggcatgag

SEQ ID NO: 59646 - DNA, 77 bp, Homo sapiens
ggatctacaggctgccggaaaggtaatgactctgggtcctgtcgatacagtgcttctagggttggcatgagggcctg

SEQ ID NO: 59647 - DNA, 74 bp, Homo sapiens
cggaaaggtaatgactctgggtcctgtcgatacagtgcttctagggttggcatgagggcctggcgtaactcctc

SEQ ID NO: 59648 - DNA, 75 bp, Homo sapiens
taatgactctgggtcctgtcgatacagtgcttctagggttggcatgagggcctggcgtaactcctctggtttaaa

SEQ ID NO: 59649 - DNA, 77 bp, Homo sapiens
tctgggtcctgtcgatacagtgcttctagggttggcatgagggcctggcgtaactcctctggtttaaagactgcaga

SEQ ID NO: 59650 - DNA, 76 bp, Homo sapiens
atacagtgcttctagggttggcatgagggcctggcgtaactcctctggtttaaagactgcagagaaaacatcaaga

SEQ ID NO: 59651 - DNA, 74 bp, Homo sapiens
ttctagggttggcatgagggcctggcgtaactcctctggtttaaagactgcagagaaaacatcaagaaaagaca

SEQ ID NO: 59652 - DNA, 74 bp, Homo sapiens
gtggaaaagcagcatgctttaataaggtaatgaataaatggcctactttttttgcgcggctgcgaaggagatgt

SEQ ID NO: 59653 - DNA, 76 bp, Homo sapiens
aaagcagcatgctttaataaggtaatgaataaatggcctactttttttgcgcggctgcgaaggagatgttgactga

SEQ ID NO: 59654 - DNA, 78 bp, Homo sapiens
taatgaataaatggcctactttttttgcgcggctgcgaaggagatgttgactgagaggctgtgccgttactgctactc

SEQ ID NO: 59655 - DNA, 76 bp, Homo sapiens
aaatggcctactttttttgcgcggctgcgaaggagatgttgactgagaggctgtgccgttactgctactctcttct

SEQ ID NO: 59656 - DNA, 78 bp, Homo sapiens
ttttgcgcggctgcgaaggagatgttgactgagaggctgtgccgttactgctactctcttcttcctctttaacttcta

SEQ ID NO: 59657 - DNA, 78 bp, Homo sapiens
tgcgaaggagatgttgactgagaggctgtgccgttactgctactctcttcttcctctttaacttctactttcacttca

SEQ ID NO: 59658 - DNA, 74 bp, Homo sapiens
agatgttgactgagaggctgtgccgttactgctactctcttcttcctctttaacttctactttcacttcaggtt

SEQ ID NO: 59659 - DNA, 71 bp, Homo sapiens
actgagaggctgtgccgttactgctactctcttcttcctctttaacttctactttcacttcaggtttcttt

SEQ ID NO: 59660 - DNA, 70 bp, Homo sapiens
ccgttactgctactctcttcttcctctttaacttctactttcacttcaggtttcttttcatccacttcca

SEQ ID NO: 59661 - DNA, 71 bp, Homo sapiens
tactctcttcttcctctttaacttctactttcacttcaggtttcttttcatccacttccattggttctgat

SEQ ID NO: 59662 - DNA, 72 bp, Homo sapiens
ttcttcctctttaacttctactttcacttcaggtttcttttcatccacttccattggttctgatttctgctc

SEQ ID NO: 59663 - DNA, 75 bp, Homo sapiens
ttaacttctactttcacttcaggtttcttttcatccacttccattggttctgatttctgctctgctatgtctgtt

SEQ ID NO: 59664 - DNA, 76 bp, Homo sapiens
tactttcacttcaggtttcttttcatccacttccattggttctgatttctgctctgctatgtctgtttcttcttta

SEQ ID NO: 59665 - DNA, 73 bp, Homo sapiens
aggtttcttttcatccacttccattggttctgatttctgctctgctatgtctgtttcttctttaacttgggaa

SEQ ID NO: 59666 - DNA, 77 bp, Homo sapiens
tttcatccacttccattggttctgatttctgctctgctatgtctgtttcttctttaacttgggaagctccttgcaaa

SEQ ID NO: 59667 - DNA, 78 bp, Homo sapiens
attggttctgatttctgctctgctatgtctgtttcttctttaacttgggaagctccttgcaaatcctcctccatcatc

SEQ ID NO: 59668 - DNA, 77 bp, Homo sapiens
atttctgctctgctatgtctgtttcttctttaacttgggaagctccttgcaaatcctcctccatcatcttgagaaaa

SEQ ID NO: 59669 - DNA, 77 bp, Homo sapiens
tctgctatgtctgtttcttctttaacttgggaagctccttgcaaatcctcctccatcatcttgagaaaaacattaca

SEQ ID NO: 59670 - DNA, 76 bp, Homo sapiens
tttcttctttaacttgggaagctccttgcaaatcctcctccatcatcttgagaaaaacattacagataacatatga

SEQ ID NO: 59671 - DNA, 77 bp, Homo sapiens
tttaacttgggaagctccttgcaaatcctcctccatcatcttgagaaaaacattacagataacatatgaatatcaaa

SEQ ID NO: 59672 - DNA, 76 bp, Homo sapiens
gtaaagttgcgatacgcagtcaatgcattcctagggagcggcacccacctcagacctgggctcccctttggattca

SEQ ID NO: 59673 - DNA, 75 bp, Homo sapiens
atacgcagtcaatgcattcctagggagcggcacccacctcagacctgggctcccctttggattcaccaggatcgg

SEQ ID NO: 59674 - DNA, 75 bp, Homo sapiens
aatgcattcctagggagcggcacccacctcagacctgggctcccctttggattcaccaggatcgggctcagtgtc

SEQ ID NO: 59675 - DNA, 75 bp, Homo sapiens
ttcctagggagcggcacccacctcagacctgggctcccctttggattcaccaggatcgggctcagtgtcctctgc

SEQ ID NO: 59676 - DNA, 73 bp, Homo sapiens
acccacctcagacctgggctcccctttggattcaccaggatcgggctcagtgtcctctgcttgggtctccgtc

SEQ ID NO: 59677 - DNA, 74 bp, Homo sapiens
agacctgggctcccctttggattcaccaggatcgggctcagtgtcctctgcttgggtctccgtcttcatttcca

SEQ ID NO: 59678 - DNA, 75 bp, Homo sapiens
tcccctttggattcaccaggatcgggctcagtgtcctctgcttgggtctccgtcttcatttccagcacaggtacg

SEQ ID NO: 59679 - DNA, 77 bp, Homo sapiens
ttggattcaccaggatcgggctcagtgtcctctgcttgggtctccgtcttcatttccagcacaggtacgtcaggtcc

SEQ ID NO: 59680 - DNA, 77 bp, Homo sapiens
atcgggctcagtgtcctctgcttgggtctccgtcttcatttccagcacaggtacgtcaggtcctggctgctgggaat

SEQ ID NO: 59681 - DNA, 75 bp, Homo sapiens
agtgtcctctgcttgggtctccgtcttcatttccagcacaggtacgtcaggtcctggctgctgggaattggtttc

SEQ ID NO: 59682 - DNA, 79 bp, Homo sapiens
tctgcttgggtctccgtcttcatttccagcacaggtacgtcaggtcctggctgctgggaattggtttctgcgctggcca

SEQ ID NO: 59683 - DNA, 77 bp, Homo sapiens
tctccgtcttcatttccagcacaggtacgtcaggtcctggctgctgggaattggtttctgcgctggccaccgaggag

SEQ ID NO: 59684 - DNA, 73 bp, Homo sapiens
atttccagcacaggtacgtcaggtcctggctgctgggaattggtttctgcgctggccaccgaggagggggtag

SEQ ID NO: 59685 - DNA, 74 bp, Homo sapiens
tacgtcaggtcctggctgctgggaattggtttctgcgctggccaccgaggagggggtagggactctgttatcaa

SEQ ID NO: 59686 - DNA, 75 bp, Homo sapiens
aggtcctggctgctgggaattggtttctgcgctggccaccgaggagggggtagggactctgttatcaatgctggc

SEQ ID NO: 59687 - DNA, 76 bp, Homo sapiens
tgggaattggtttctgcgctggccaccgaggagggggtagggactctgttatcaatgctggctgctgcctgggaaa

SEQ ID NO: 59688 - DNA, 77 bp, Homo sapiens
tttctgcgctggccaccgaggagggggtagggactctgttatcaatgctggctgctgcctgggaaagctgtgaaaaa

SEQ ID NO: 59689 - DNA, 73 bp, Homo sapiens
gccaccgaggagggggtagggactctgttatcaatgctggctgctgcctgggaaagctgtgaaaaaaccgaaa

SEQ ID NO: 59690 - DNA, 75 bp, Homo sapiens
agggggtagggactctgttatcaatgctggctgctgcctgggaaagctgtgaaaaaaccgaaagcactgacttca

SEQ ID NO: 59691 - DNA, 77 bp, Homo sapiens
attatcttctaagagtcttggcccaaaaacagcagagacagagaggcttaccggtgtgccaggaggctgggcgtgca

SEQ ID NO: 59692 - DNA, 76 bp, Homo sapiens
aagagtcttggcccaaaaacagcagagacagagaggcttaccggtgtgccaggaggctgggcgtgcacaggcgtcg

SEQ ID NO: 59693 - DNA, 82 bp, Homo sapiens
aaaaacagcagagacagagaggcttaccggtgtgccaggaggctgggcgtgcacaggcgtcggctgttgctgcgatgactga

SEQ ID NO: 59694 - DNA, 81 bp, Homo sapiens
agacagagaggcttaccggtgtgccaggaggctgggcgtgcacaggcgtcggctgttgctgcgatgactgaggggtagcca

SEQ ID NO: 59695 - DNA, 80 bp, Homo sapiens
agaggcttaccggtgtgccaggaggctgggcgtgcacaggcgtcggctgttgctgcgatgactgaggggtagccacagac

SEQ ID NO: 59696 - DNA, 81 bp, Homo sapiens
gtgtgccaggaggctgggcgtgcacaggcgtcggctgttgctgcgatgactgaggggtagccacagacgggggctgaactg

SEQ ID NO: 59697 - DNA, 76 bp, Homo sapiens
aggctgggcgtgcacaggcgtcggctgttgctgcgatgactgaggggtagccacagacgggggctgaactggggtt

SEQ ID NO: 59698 - DNA, 78 bp, Homo sapiens
cgtgcacaggcgtcggctgttgctgcgatgactgaggggtagccacagacgggggctgaactggggtttgaggctgcg

SEQ ID NO: 59699 - DNA, 76 bp, Homo sapiens
tcggctgttgctgcgatgactgaggggtagccacagacgggggctgaactggggtttgaggctgcggggtcacctg

SEQ ID NO: 59700 - DNA, 75 bp, Homo sapiens
ttgctgcgatgactgaggggtagccacagacgggggctgaactggggtttgaggctgcggggtcacctgggcctg

SEQ ID NO: 59701 - DNA, 75 bp, Homo sapiens
tagccacagacgggggctgaactggggtttgaggctgcggggtcacctgggcctgggctgctgcctggactgtag

SEQ ID NO: 59702 - DNA, 74 bp, Homo sapiens
gctgaactggggtttgaggctgcggggtcacctgggcctgggctgctgcctggactgtaggggtgctctgggtt

SEQ ID NO: 59703 - DNA, 74 bp, Homo sapiens
ggtttgaggctgcggggtcacctgggcctgggctgctgcctggactgtaggggtgctctgggtttgggtagcac

SEQ ID NO: 59704 - DNA, 78 bp, Homo sapiens
tgcggggtcacctgggcctgggctgctgcctggactgtaggggtgctctgggtttgggtagcactgggcactgagcca

SEQ ID NO: 59705 - DNA, 76 bp, Homo sapiens
acctgggcctgggctgctgcctggactgtaggggtgctctgggtttgggtagcactgggcactgagccaggagtcg

SEQ ID NO: 59706 - DNA, 76 bp, Homo sapiens
ggctgctgcctggactgtaggggtgctctgggtttgggtagcactgggcactgagccaggagtcggggtgggagtc

SEQ ID NO: 59707 - DNA, 74 bp, Homo sapiens
tggactgtaggggtgctctgggtttgggtagcactgggcactgagccaggagtcggggtgggagtctgcccgga

SEQ ID NO: 59708 - DNA, 74 bp, Homo sapiens
gggtgctctgggtttgggtagcactgggcactgagccaggagtcggggtgggagtctgcccggaagacgacaca

SEQ ID NO: 59709 - DNA, 74 bp, Homo sapiens
tgggtttgggtagcactgggcactgagccaggagtcggggtgggagtctgcccggaagacgacacaggagttga

SEQ ID NO: 59710 - DNA, 78 bp, Homo sapiens
gtagcactgggcactgagccaggagtcggggtgggagtctgcccggaagacgacacaggagttgatggctgagtggga

SEQ ID NO: 59711 - DNA, 78 bp, Homo sapiens
actgagccaggagtcggggtgggagtctgcccggaagacgacacaggagttgatggctgagtgggagctgctggctgg

SEQ ID NO: 59712 - DNA, 76 bp, Homo sapiens
aggagtcggggtgggagtctgcccggaagacgacacaggagttgatggctgagtgggagctgctggctggggagga

SEQ ID NO: 59713 - DNA, 79 bp, Homo sapiens
gtgggagtctgcccggaagacgacacaggagttgatggctgagtgggagctgctggctggggaggagtcatcccaggtg

SEQ ID NO: 59714 - DNA, 81 bp, Homo sapiens
cggaagacgacacaggagttgatggctgagtgggagctgctggctggggaggagtcatcccaggtggtgtcgtgtgctgga

SEQ ID NO: 59715 - DNA, 84 bp, Homo sapiens
acgacacaggagttgatggctgagtgggagctgctggctggggaggagtcatcccaggtggtgtcgtgtgctggagagatggca

SEQ ID NO: 59716 - DNA, 88 bp, Homo sapiens
tgatggctgagtgggagctgctggctggggaggagtcatcccaggtggtgtcgtgtgctggagagatggcatgccagcagccgtggaa

SEQ ID NO: 59717 - DNA, 85 bp, Homo sapiens
agtgggagctgctggctggggaggagtcatcccaggtggtgtcgtgtgctggagagatggcatgccagcagccgtggaagcagga

SEQ ID NO: 59718 - DNA, 83 bp, Homo sapiens
tggctggggaggagtcatcccaggtggtgtcgtgtgctggagagatggcatgccagcagccgtggaagcaggaggcggtgttg

SEQ ID NO: 59719 - DNA, 83 bp, Homo sapiens
aggagtcatcccaggtggtgtcgtgtgctggagagatggcatgccagcagccgtggaagcaggaggcggtgttgggtgcagtg

SEQ ID NO: 59720 - DNA, 83 bp, Homo sapiens
atcccaggtggtgtcgtgtgctggagagatggcatgccagcagccgtggaagcaggaggcggtgttgggtgcagtggtgactg

SEQ ID NO: 59721 - DNA, 86 bp, Homo sapiens
tcgtgtgctggagagatggcatgccagcagccgtggaagcaggaggcggtgttgggtgcagtggtgactgtgtcactggagggcaa

SEQ ID NO: 59722 - DNA, 83 bp, Homo sapiens
agagatggcatgccagcagccgtggaagcaggaggcggtgttgggtgcagtggtgactgtgtcactggagggcaaggtagctg

SEQ ID NO: 59723 - DNA, 83 bp, Homo sapiens
tgccagcagccgtggaagcaggaggcggtgttgggtgcagtggtgactgtgtcactggagggcaaggtagctggctggcctga

SEQ ID NO: 59724 - DNA, 79 bp, Homo sapiens
agccgtggaagcaggaggcggtgttgggtgcagtggtgactgtgtcactggagggcaaggtagctggctggcctgaggc

SEQ ID NO: 59725 - DNA, 80 bp, Homo sapiens
aggaggcggtgttgggtgcagtggtgactgtgtcactggagggcaaggtagctggctggcctgaggccccagcatgttga

SEQ ID NO: 59726 - DNA, 80 bp, Homo sapiens
ttgggtgcagtggtgactgtgtcactggagggcaaggtagctggctggcctgaggccccagcatgttgagagggttagga

SEQ ID NO: 59727 - DNA, 81 bp, Homo sapiens
agtggtgactgtgtcactggagggcaaggtagctggctggcctgaggccccagcatgttgagagggttaggaagagcagca

SEQ ID NO: 59728 - DNA, 81 bp, Homo sapiens
actgtgtcactggagggcaaggtagctggctggcctgaggccccagcatgttgagagggttaggaagagcagcaccaggca

SEQ ID NO: 59729 - DNA, 78 bp, Homo sapiens
agggcaaggtagctggctggcctgaggccccagcatgttgagagggttaggaagagcagcaccaggcacctgtcccta

SEQ ID NO: 59730 - DNA, 80 bp, Homo sapiens
tagctggctggcctgaggccccagcatgttgagagggttaggaagagcagcaccaggcacctgtccctaccagaaatgga

SEQ ID NO: 59731 - DNA, 79 bp, Homo sapiens
tgaggccccagcatgttgagagggttaggaagagcagcaccaggcacctgtccctaccagaaatggacagagtatggta

SEQ ID NO: 59732 - DNA, 76 bp, Homo sapiens
agcatgttgagagggttaggaagagcagcaccaggcacctgtccctaccagaaatggacagagtatggtaaaatta

SEQ ID NO: 59733 - DNA, 74 bp, Homo sapiens
ttgagagggttaggaagagcagcaccaggcacctgtccctaccagaaatggacagagtatggtaaaattatttc

SEQ ID NO: 59734 - DNA, 70 bp, Homo sapiens
aagaattttatttcctagggagccacggtcccagtggggcacagtacctgtgacacgcctgtttgggctg

SEQ ID NO: 59735 - DNA, 73 bp, Homo sapiens
tttatttcctagggagccacggtcccagtggggcacagtacctgtgacacgcctgtttgggctggcggctgcc

SEQ ID NO: 59736 - DNA, 75 bp, Homo sapiens
agggagccacggtcccagtggggcacagtacctgtgacacgcctgtttgggctggcggctgccccatgcccacac

SEQ ID NO: 59737 - DNA, 80 bp, Homo sapiens
cagtggggcacagtacctgtgacacgcctgtttgggctggcggctgccccatgcccacactcatcgccccgctggatgac

SEQ ID NO: 59738 - DNA, 77 bp, Homo sapiens
acagtacctgtgacacgcctgtttgggctggcggctgccccatgcccacactcatcgccccgctggatgacgggaac

SEQ ID NO: 59739 - DNA, 79 bp, Homo sapiens
tgtgacacgcctgtttgggctggcggctgccccatgcccacactcatcgccccgctggatgacgggaactggttctgtg

SEQ ID NO: 59740 - DNA, 77 bp, Homo sapiens
cctgtttgggctggcggctgccccatgcccacactcatcgccccgctggatgacgggaactggttctgtggcagaaa

SEQ ID NO: 59741 - DNA, 80 bp, Homo sapiens
tggcggctgccccatgcccacactcatcgccccgctggatgacgggaactggttctgtggcagaaactggctctgagcgg

SEQ ID NO: 59742 - DNA, 79 bp, Homo sapiens
atgcccacactcatcgccccgctggatgacgggaactggttctgtggcagaaactggctctgagcgggcgcctgggcca

SEQ ID NO: 59743 - DNA, 80 bp, Homo sapiens
tcatcgccccgctggatgacgggaactggttctgtggcagaaactggctctgagcgggcgcctgggccatcatgttgttg

SEQ ID NO: 59744 - DNA, 78 bp, Homo sapiens
cccgctggatgacgggaactggttctgtggcagaaactggctctgagcgggcgcctgggccatcatgttgttggtgtg

SEQ ID NO: 59745 - DNA, 81 bp, Homo sapiens
atgacgggaactggttctgtggcagaaactggctctgagcgggcgcctgggccatcatgttgttggtgtgtgcacccatca

SEQ ID NO: 59746 - DNA, 84 bp, Homo sapiens
tggttctgtggcagaaactggctctgagcgggcgcctgggccatcatgttgttggtgtgtgcacccatcatgttcggaggctga

SEQ ID NO: 59747 - DNA, 81 bp, Homo sapiens
aaactggctctgagcgggcgcctgggccatcatgttgttggtgtgtgcacccatcatgttcggaggctgaggcattcggga

SEQ ID NO: 59748 - DNA, 81 bp, Homo sapiens
tctgagcgggcgcctgggccatcatgttgttggtgtgtgcacccatcatgttcggaggctgaggcattcgggaaggagaaa

SEQ ID NO: 59749 - DNA, 80 bp, Homo sapiens
cctgggccatcatgttgttggtgtgtgcacccatcatgttcggaggctgaggcattcgggaaggagaaatggccatctac

SEQ ID NO: 59750 - DNA, 81 bp, Homo sapiens
tcatgttgttggtgtgtgcacccatcatgttcggaggctgaggcattcgggaaggagaaatggccatctacgagacaacaa

SEQ ID NO: 59751 - DNA, 81 bp, Homo sapiens
tgttggtgtgtgcacccatcatgttcggaggctgaggcattcgggaaggagaaatggccatctacgagacaacaagcacca

SEQ ID NO: 59752 - DNA, 79 bp, Homo sapiens
acccatcatgttcggaggctgaggcattcgggaaggagaaatggccatctacgagacaacaagcaccaccagagctgta

SEQ ID NO: 59753 - DNA, 85 bp, Homo sapiens
ttccatgtgagagggagggctatctgcagcacagcgaaagagaacacttacccctggcactgagcccatgctgttcatctggaca

SEQ ID NO: 59754 - DNA, 83 bp, Homo sapiens
agggctatctgcagcacagcgaaagagaacacttacccctggcactgagcccatgctgttcatctggacagagtggttcattg

SEQ ID NO: 59755 - DNA, 83 bp, Homo sapiens
tatctgcagcacagcgaaagagaacacttacccctggcactgagcccatgctgttcatctggacagagtggttcattggggag

SEQ ID NO: 59756 - DNA, 80 bp, Homo sapiens
acagcgaaagagaacacttacccctggcactgagcccatgctgttcatctggacagagtggttcattggggaggctgcac

SEQ ID NO: 59757 - DNA, 79 bp, Homo sapiens
aacacttacccctggcactgagcccatgctgttcatctggacagagtggttcattggggaggctgcacgaggtcccatg

SEQ ID NO: 59758 - DNA, 84 bp, Homo sapiens
tggcactgagcccatgctgttcatctggacagagtggttcattggggaggctgcacgaggtcccatgggtgcttgtggcaactg

SEQ ID NO: 59759 - DNA, 80 bp, Homo sapiens
ccatgctgttcatctggacagagtggttcattggggaggctgcacgaggtcccatgggtgcttgtggcaactggacgttc

SEQ ID NO: 59760 - DNA, 77 bp, Homo sapiens
ctgttcatctggacagagtggttcattggggaggctgcacgaggtcccatgggtgcttgtggcaactggacgttccc

SEQ ID NO: 59761 - DNA, 75 bp, Homo sapiens
acagagtggttcattggggaggctgcacgaggtcccatgggtgcttgtggcaactggacgttccccaaggacatg

SEQ ID NO: 59762 - DNA, 71 bp, Homo sapiens
attggggaggctgcacgaggtcccatgggtgcttgtggcaactggacgttccccaaggacatggggttaaa

SEQ ID NO: 59763 - DNA, 74 bp, Homo sapiens
aggctgcacgaggtcccatgggtgcttgtggcaactggacgttccccaaggacatggggttaaatgaattcatc

SEQ ID NO: 59764 - DNA, 73 bp, Homo sapiens
tcccatgggtgcttgtggcaactggacgttccccaaggacatggggttaaatgaattcatccctgtaaatgta

SEQ ID NO: 59765 - DNA, 70 bp, Homo sapiens
cttgtggcaactggacgttccccaaggacatggggttaaatgaattcatccctgtaaatgtacccacaac

SEQ ID NO: 59766 - DNA, 69 bp, Homo sapiens
ctggacgttccccaaggacatggggttaaatgaattcatccctgtaaatgtacccacaacggttcatta

SEQ ID NO: 59767 - DNA, 70 bp, Homo sapiens
gggagaggaaaaaacagtgaaagttatggctgttgaatgtaaaactaaaatatgattcaccacaaacagt

SEQ ID NO: 59768 - DNA, 73 bp, Homo sapiens
acagtgaaagttatggctgttgaatgtaaaactaaaatatgattcaccacaaacagttcaataccttgagaaa

SEQ ID NO: 59769 - DNA, 78 bp, Homo sapiens
ttatggctgttgaatgtaaaactaaaatatgattcaccacaaacagttcaataccttgagaaacttgcatgcgattca

SEQ ID NO: 59770 - DNA, 78 bp, Homo sapiens
tgttgaatgtaaaactaaaatatgattcaccacaaacagttcaataccttgagaaacttgcatgcgattcactggcag

SEQ ID NO: 59771 - DNA, 75 bp, Homo sapiens
aaaactaaaatatgattcaccacaaacagttcaataccttgagaaacttgcatgcgattcactggcagggacagg

SEQ ID NO: 59772 - DNA, 79 bp, Homo sapiens
aatatgattcaccacaaacagttcaataccttgagaaacttgcatgcgattcactggcagggacaggggtccatctatg

SEQ ID NO: 59773 - DNA, 76 bp, Homo sapiens
aaacagttcaataccttgagaaacttgcatgcgattcactggcagggacaggggtccatctatggtggcaaaacaa

SEQ ID NO: 59774 - DNA, 76 bp, Homo sapiens
gttcaataccttgagaaacttgcatgcgattcactggcagggacaggggtccatctatggtggcaaaacaaaaaca

SEQ ID NO: 59775 - DNA, 67 bp, Homo sapiens
aaaaccaaggaaacaggctaagggatggcagtaggaaataaaatccttacttggaggtctcacaggt

SEQ ID NO: 59776 - DNA, 73 bp, Homo sapiens
aaacaggctaagggatggcagtaggaaataaaatccttacttggaggtctcacaggttgtgcctgtggaatca

SEQ ID NO: 59777 - DNA, 72 bp, Homo sapiens
aagggatggcagtaggaaataaaatccttacttggaggtctcacaggttgtgcctgtggaatcacagggggc

SEQ ID NO: 59778 - DNA, 71 bp, Homo sapiens
agtaggaaataaaatccttacttggaggtctcacaggttgtgcctgtggaatcacagggggctgagccccc

SEQ ID NO: 59779 - DNA, 71 bp, Homo sapiens
aaatccttacttggaggtctcacaggttgtgcctgtggaatcacagggggctgagcccccggggctggtaa

SEQ ID NO: 59780 - DNA, 74 bp, Homo sapiens
ttggaggtctcacaggttgtgcctgtggaatcacagggggctgagcccccggggctggtaaggctggctggttc

SEQ ID NO: 59781 - DNA, 75 bp, Homo sapiens
tcacaggttgtgcctgtggaatcacagggggctgagcccccggggctggtaaggctggctggttccccaagatgc

SEQ ID NO: 59782 - DNA, 73 bp, Homo sapiens
tgtggaatcacagggggctgagcccccggggctggtaaggctggctggttccccaagatgccttgtttatgta

SEQ ID NO: 59783 - DNA, 70 bp, Homo sapiens
atcacagggggctgagcccccggggctggtaaggctggctggttccccaagatgccttgtttatgtaaac

SEQ ID NO: 59784 - DNA, 67 bp, Homo sapiens
gcccccggggctggtaaggctggctggttccccaagatgccttgtttatgtaaacgcgacctccgtt

SEQ ID NO: 59785 - DNA, 68 bp, Homo sapiens
ctggtaaggctggctggttccccaagatgccttgtttatgtaaacgcgacctccgtttttcttctagt

SEQ ID NO: 59786 - DNA, 68 bp, Homo sapiens
tggctggttccccaagatgccttgtttatgtaaacgcgacctccgtttttcttctagttctttttgta

SEQ ID NO: 59787 - DNA, 68 bp, Homo sapiens
cccaagatgccttgtttatgtaaacgcgacctccgtttttcttctagttctttttgtatcttgtagat

SEQ ID NO: 59788 - DNA, 69 bp, Homo sapiens
gatgccttgtttatgtaaacgcgacctccgtttttcttctagttctttttgtatcttgtagattttctc

SEQ ID NO: 59789 - DNA, 70 bp, Homo sapiens
atgtaaacgcgacctccgtttttcttctagttctttttgtatcttgtagattttctctgctaataagtga

SEQ ID NO: 59790 - DNA, 73 bp, Homo sapiens
gcgacctccgtttttcttctagttctttttgtatcttgtagattttctctgctaataagtgataatattcatc

SEQ ID NO: 59791 - DNA, 74 bp, Homo sapiens
cttctagttctttttgtatcttgtagattttctctgctaataagtgataatattcatcctaaaaagcaataata

SEQ ID NO: 59792 - DNA, 74 bp, Homo sapiens
agttctttttgtatcttgtagattttctctgctaataagtgataatattcatcctaaaaagcaataatattcaa

SEQ ID NO: 59793 - DNA, 77 bp, Homo sapiens
gtatcttgtagattttctctgctaataagtgataatattcatcctaaaaagcaataatattcaatatgaaacagtta

SEQ ID NO: 59794 - DNA, 80 bp, Homo sapiens
ctgtctactacagatgctgtagaggccagagcacggtaaacagcaacctaccctgctgttggcagactcgtacatgtccc

SEQ ID NO: 59795 - DNA, 76 bp, Homo sapiens
atgctgtagaggccagagcacggtaaacagcaacctaccctgctgttggcagactcgtacatgtccccttccactt

SEQ ID NO: 59796 - DNA, 74 bp, Homo sapiens
agaggccagagcacggtaaacagcaacctaccctgctgttggcagactcgtacatgtccccttccactttctta

SEQ ID NO: 59797 - DNA, 73 bp, Homo sapiens
acggtaaacagcaacctaccctgctgttggcagactcgtacatgtccccttccactttcttagcataggctac

SEQ ID NO: 59798 - DNA, 72 bp, Homo sapiens
aacctaccctgctgttggcagactcgtacatgtccccttccactttcttagcataggctaccaggttttcca

SEQ ID NO: 59799 - DNA, 74 bp, Homo sapiens
ctgttggcagactcgtacatgtccccttccactttcttagcataggctaccaggttttccatgcggcgatcctt

SEQ ID NO: 59800 - DNA, 75 bp, Homo sapiens
agactcgtacatgtccccttccactttcttagcataggctaccaggttttccatgcggcgatcctttagagctgc

SEQ ID NO: 59801 - DNA, 76 bp, Homo sapiens
tacatgtccccttccactttcttagcataggctaccaggttttccatgcggcgatcctttagagctgcgggatcag

SEQ ID NO: 59802 - DNA, 75 bp, Homo sapiens
ttccactttcttagcataggctaccaggttttccatgcggcgatcctttagagctgcgggatcaggtgttgggaa

SEQ ID NO: 59803 - DNA, 77 bp, Homo sapiens
cttagcataggctaccaggttttccatgcggcgatcctttagagctgcgggatcaggtgttgggaagatggcttgga

SEQ ID NO: 59804 - DNA, 76 bp, Homo sapiens
caggttttccatgcggcgatcctttagagctgcgggatcaggtgttgggaagatggcttggacgctgaaaggataa

SEQ ID NO: 59805 - DNA, 79 bp, Homo sapiens
atgcggcgatcctttagagctgcgggatcaggtgttgggaagatggcttggacgctgaaaggataacacatctatcaaa

SEQ ID NO: 59806 - DNA, 76 bp, Homo sapiens
atcctttagagctgcgggatcaggtgttgggaagatggcttggacgctgaaaggataacacatctatcaaactact

SEQ ID NO: 59807 - DNA, 74 bp, Homo sapiens
agagctgcgggatcaggtgttgggaagatggcttggacgctgaaaggataacacatctatcaaactactttttt

SEQ ID NO: 59808 - DNA, 76 bp, Homo sapiens
aacacaggaataaaatcaaacatctatgaaactgcaaaactgttacgtacagtttatgcactagatggctccgcag

SEQ ID NO: 59809 - DNA, 78 bp, Homo sapiens
ataaaatcaaacatctatgaaactgcaaaactgttacgtacagtttatgcactagatggctccgcaggtcctgagtga

SEQ ID NO: 59810 - DNA, 81 bp, Homo sapiens
acatctatgaaactgcaaaactgttacgtacagtttatgcactagatggctccgcaggtcctgagtgacatgttcgtgcca

SEQ ID NO: 59811 - DNA, 77 bp, Homo sapiens
caaaactgttacgtacagtttatgcactagatggctccgcaggtcctgagtgacatgttcgtgccagcctttcctta

SEQ ID NO: 59812 - DNA, 77 bp, Homo sapiens
ctgttacgtacagtttatgcactagatggctccgcaggtcctgagtgacatgttcgtgccagcctttccttacaccg

SEQ ID NO: 59813 - DNA, 78 bp, Homo sapiens
agtttatgcactagatggctccgcaggtcctgagtgacatgttcgtgccagcctttccttacaccggtgctagaagga

SEQ ID NO: 59814 - DNA, 79 bp, Homo sapiens
actagatggctccgcaggtcctgagtgacatgttcgtgccagcctttccttacaccggtgctagaaggaggagctgctg

SEQ ID NO: 59815 - DNA, 79 bp, Homo sapiens
aggtcctgagtgacatgttcgtgccagcctttccttacaccggtgctagaaggaggagctgctgttggtatagtgctga

SEQ ID NO: 59816 - DNA, 78 bp, Homo sapiens
tgacatgttcgtgccagcctttccttacaccggtgctagaaggaggagctgctgttggtatagtgctgagggttccaa

SEQ ID NO: 59817 - DNA, 76 bp, Homo sapiens
ttcgtgccagcctttccttacaccggtgctagaaggaggagctgctgttggtatagtgctgagggttccaatgtta

SEQ ID NO: 59818 - DNA, 75 bp, Homo sapiens
tttccttacaccggtgctagaaggaggagctgctgttggtatagtgctgagggttccaatgttaccagagttgga

SEQ ID NO: 59819 - DNA, 77 bp, Homo sapiens
accggtgctagaaggaggagctgctgttggtatagtgctgagggttccaatgttaccagagttggagccatcgttca

SEQ ID NO: 59820 - DNA, 78 bp, Homo sapiens
aaggaggagctgctgttggtatagtgctgagggttccaatgttaccagagttggagccatcgttcatcagtgggctaa

SEQ ID NO: 59821 - DNA, 78 bp, Homo sapiens
tgctgttggtatagtgctgagggttccaatgttaccagagttggagccatcgttcatcagtgggctaaggaggaaata

SEQ ID NO: 59822 - DNA, 76 bp, Homo sapiens
tggtatagtgctgagggttccaatgttaccagagttggagccatcgttcatcagtgggctaaggaggaaataaaga

SEQ ID NO: 59823 - DNA, 76 bp, Homo sapiens
ggttccaatgttaccagagttggagccatcgttcatcagtgggctaaggaggaaataaagacacttcatccatcta

SEQ ID NO: 59824 - DNA, 74 bp, Homo sapiens
agtccatgctcctgttggactgtcactcagatctgaaacagggtcttactttgtggcccccagggaagtcggaa

SEQ ID NO: 59825 - DNA, 76 bp, Homo sapiens
tgttggactgtcactcagatctgaaacagggtcttactttgtggcccccagggaagtcggaagagctgattctgaa

SEQ ID NO: 59826 - DNA, 74 bp, Homo sapiens
tcactcagatctgaaacagggtcttactttgtggcccccagggaagtcggaagagctgattctgaaatcaagtt

SEQ ID NO: 59827 - DNA, 71 bp, Homo sapiens
agatctgaaacagggtcttactttgtggcccccagggaagtcggaagagctgattctgaaatcaagtttgg

SEQ ID NO: 59828 - DNA, 74 bp, Homo sapiens
tcttactttgtggcccccagggaagtcggaagagctgattctgaaatcaagtttgggggctgctgatctgttgt

SEQ ID NO: 59829 - DNA, 74 bp, Homo sapiens
ctttgtggcccccagggaagtcggaagagctgattctgaaatcaagtttgggggctgctgatctgttgttattc

SEQ ID NO: 59830 - DNA, 78 bp, Homo sapiens
ggaagtcggaagagctgattctgaaatcaagtttgggggctgctgatctgttgttattcctcctgctggaatgttcat

SEQ ID NO: 59831 - DNA, 78 bp, Homo sapiens
aagagctgattctgaaatcaagtttgggggctgctgatctgttgttattcctcctgctggaatgttcattggattatt

SEQ ID NO: 59832 - DNA, 75 bp, Homo sapiens
attctgaaatcaagtttgggggctgctgatctgttgttattcctcctgctggaatgttcattggattatttcctt

SEQ ID NO: 59833 - DNA, 75 bp, Homo sapiens
atcaagtttgggggctgctgatctgttgttattcctcctgctggaatgttcattggattatttcctttaaagaca

SEQ ID NO: 59834 - DNA, 77 bp, Homo sapiens
tgctgatctgttgttattcctcctgctggaatgttcattggattatttcctttaaagacagaaaagaaatcaatcaa

SEQ ID NO: 59835 - DNA, 73 bp, Homo sapiens
ctgttgttattcctcctgctggaatgttcattggattatttcctttaaagacagaaaagaaatcaatcaacag

SEQ ID NO: 59836 - DNA, 76 bp, Homo sapiens
tttgctgcatgtggacaagtaagaacgaagttgagagttccttcacctacccagggggttgagagtcctcatctgc

SEQ ID NO: 59837 - DNA, 70 bp, Homo sapiens
acaagtaagaacgaagttgagagttccttcacctacccagggggttgagagtcctcatctgctggtgggt

SEQ ID NO: 59838 - DNA, 71 bp, Homo sapiens
aagaacgaagttgagagttccttcacctacccagggggttgagagtcctcatctgctggtgggtttgaggc

SEQ ID NO: 59839 - DNA, 77 bp, Homo sapiens
ttgagagttccttcacctacccagggggttgagagtcctcatctgctggtgggtttgaggctgtgctggttgctggc

SEQ ID NO: 59840 - DNA, 77 bp, Homo sapiens
ttcacctacccagggggttgagagtcctcatctgctggtgggtttgaggctgtgctggttgctggccaggaacctga

SEQ ID NO: 59841 - DNA, 82 bp, Homo sapiens
gggttgagagtcctcatctgctggtgggtttgaggctgtgctggttgctggccaggaacctgaggctgcagctgcgtctggg

SEQ ID NO: 59842 - DNA, 85 bp, Homo sapiens
tcctcatctgctggtgggtttgaggctgtgctggttgctggccaggaacctgaggctgcagctgcgtctggggctggttcatgta

SEQ ID NO: 59843 - DNA, 82 bp, Homo sapiens
atctgctggtgggtttgaggctgtgctggttgctggccaggaacctgaggctgcagctgcgtctggggctggttcatgtagg

SEQ ID NO: 59844 - DNA, 83 bp, Homo sapiens
tttgaggctgtgctggttgctggccaggaacctgaggctgcagctgcgtctggggctggttcatgtaggggagtccgagagca

SEQ ID NO: 59845 - DNA, 85 bp, Homo sapiens
tgtgctggttgctggccaggaacctgaggctgcagctgcgtctggggctggttcatgtaggggagtccgagagcagcataggctc

SEQ ID NO: 59846 - DNA, 87 bp, Homo sapiens
tggccaggaacctgaggctgcagctgcgtctggggctggttcatgtaggggagtccgagagcagcataggctcgctgcatggagctg

SEQ ID NO: 59847 - DNA, 87 bp, Homo sapiens
tgaggctgcagctgcgtctggggctggttcatgtaggggagtccgagagcagcataggctcgctgcatggagctggggtctatggga

SEQ ID NO: 59848 - DNA, 82 bp, Homo sapiens
agctgcgtctggggctggttcatgtaggggagtccgagagcagcataggctcgctgcatggagctggggtctatgggatttg

SEQ ID NO: 59849 - DNA, 78 bp, Homo sapiens
gggctggttcatgtaggggagtccgagagcagcataggctcgctgcatggagctggggtctatgggatttgggttact

SEQ ID NO: 59850 - DNA, 78 bp, Homo sapiens
ttcatgtaggggagtccgagagcagcataggctcgctgcatggagctggggtctatgggatttgggttacttaaagaa

SEQ ID NO: 59851 - DNA, 78 bp, Homo sapiens
agtccgagagcagcataggctcgctgcatggagctggggtctatgggatttgggttacttaaagaagtggcattctgt

SEQ ID NO: 59852 - DNA, 79 bp, Homo sapiens
agagcagcataggctcgctgcatggagctggggtctatgggatttgggttacttaaagaagtggcattctgttgccctg

SEQ ID NO: 59853 - DNA, 77 bp, Homo sapiens
ctcgctgcatggagctggggtctatgggatttgggttacttaaagaagtggcattctgttgccctgtgccaacagaa

SEQ ID NO: 59854 - DNA, 72 bp, Homo sapiens
agctggggtctatgggatttgggttacttaaagaagtggcattctgttgccctgtgccaacagaaccaattg

SEQ ID NO: 59855 - DNA, 72 bp, Homo sapiens
tatgggatttgggttacttaaagaagtggcattctgttgccctgtgccaacagaaccaattgtgttttgaat

SEQ ID NO: 59856 - DNA, 72 bp, Homo sapiens
tttgggttacttaaagaagtggcattctgttgccctgtgccaacagaaccaattgtgttttgaattccacta

SEQ ID NO: 59857 - DNA, 74 bp, Homo sapiens
acttaaagaagtggcattctgttgccctgtgccaacagaaccaattgtgttttgaattccactagctggagacc

SEQ ID NO: 59858 - DNA, 75 bp, Homo sapiens
attctgttgccctgtgccaacagaaccaattgtgttttgaattccactagctggagaccccaggatggctataac

SEQ ID NO: 59859 - DNA, 75 bp, Homo sapiens
cctgtgccaacagaaccaattgtgttttgaattccactagctggagaccccaggatggctataacgacaaacaga

SEQ ID NO: 59860 - DNA, 75 bp, Homo sapiens
ccaacagaaccaattgtgttttgaattccactagctggagaccccaggatggctataacgacaaacagacagaca

SEQ ID NO: 59861 - DNA, 73 bp, Homo sapiens
aattgtgttttgaattccactagctggagaccccaggatggctataacgacaaacagacagacagacaaaaac

SEQ ID NO: 59862 - DNA, 74 bp, Homo sapiens
tttgaattccactagctggagaccccaggatggctataacgacaaacagacagacagacaaaaacgagaggtaa

SEQ ID NO: 59863 - DNA, 71 bp, Homo sapiens
actagctggagaccccaggatggctataacgacaaacagacagacagacaaaaacgagaggtaagtaaaag

SEQ ID NO: 59864 - DNA, 71 bp, Homo sapiens
caggatggctataacgacaaacagacagacagacaaaaacgagaggtaagtaaaagggagaagcccacgaa

SEQ ID NO: 59865 - DNA, 67 bp, Homo sapiens
aacagacagacagacaaaaacgagaggtaagtaaaagggagaagcccacgaatgatttaaaaactat

SEQ ID NO: 59866 - DNA, 68 bp, Homo sapiens
acagacaaaaacgagaggtaagtaaaagggagaagcccacgaatgatttaaaaactattgagaagcaa

SEQ ID NO: 59867 - DNA, 71 bp, Homo sapiens
acgagaggtaagtaaaagggagaagcccacgaatgatttaaaaactattgagaagcaaatacatttcatca

SEQ ID NO: 59868 - DNA, 72 bp, Homo sapiens
gtaaaagggagaagcccacgaatgatttaaaaactattgagaagcaaatacatttcatcaaaatactacaca

SEQ ID NO: 59869 - DNA, 77 bp, Homo sapiens
gggagaagcccacgaatgatttaaaaactattgagaagcaaatacatttcatcaaaatactacacatgaatatcata

SEQ ID NO: 59870 - DNA, 77 bp, Homo sapiens
atgatttaaaaactattgagaagcaaatacatttcatcaaaatactacacatgaatatcataaagcagtaaacaagc

SEQ ID NO: 59871 - DNA, 77 bp, Homo sapiens
aactattgagaagcaaatacatttcatcaaaatactacacatgaatatcataaagcagtaaacaagcctagggagaa

SEQ ID NO: 59872 - DNA, 76 bp, Homo sapiens
gaagcaaatacatttcatcaaaatactacacatgaatatcataaagcagtaaacaagcctagggagaaaggaactg

SEQ ID NO: 59873 - DNA, 77 bp, Homo sapiens
aatacatttcatcaaaatactacacatgaatatcataaagcagtaaacaagcctagggagaaaggaactgtgctgaa

SEQ ID NO: 59874 - DNA, 75 bp, Homo sapiens
aaatactacacatgaatatcataaagcagtaaacaagcctagggagaaaggaactgtgctgaaggactcatttat

SEQ ID NO: 59875 - DNA, 78 bp, Homo sapiens
atgaatatcataaagcagtaaacaagcctagggagaaaggaactgtgctgaaggactcatttattctgcctagcagta

SEQ ID NO: 59876 - DNA, 78 bp, Homo sapiens
tatcataaagcagtaaacaagcctagggagaaaggaactgtgctgaaggactcatttattctgcctagcagtaagtga

SEQ ID NO: 59877 - DNA, 74 bp, Homo sapiens
taaacaagcctagggagaaaggaactgtgctgaaggactcatttattctgcctagcagtaagtgaggaacaaaa

SEQ ID NO: 59878 - DNA, 72 bp, Homo sapiens
ctagggagaaaggaactgtgctgaaggactcatttattctgcctagcagtaagtgaggaacaaaaagttaaa

SEQ ID NO: 59879 - DNA, 70 bp, Homo sapiens
aaaggaactgtgctgaaggactcatttattctgcctagcagtaagtgaggaacaaaaagttaaagaaaag

SEQ ID NO: 59880 - DNA, 74 bp, Homo sapiens
ttattctgcctagcagtaagtgaggaacaaaaagttaaagaaaagtcaagtttctatcttagcatgcaacagac

SEQ ID NO: 59881 - DNA, 74 bp, Homo sapiens
tgcctagcagtaagtgaggaacaaaaagttaaagaaaagtcaagtttctatcttagcatgcaacagaccataaa

SEQ ID NO: 59882 - DNA, 73 bp, Homo sapiens
gtaagtgaggaacaaaaagttaaagaaaagtcaagtttctatcttagcatgcaacagaccataaaatctcaca

SEQ ID NO: 59883 - DNA, 73 bp, Homo sapiens
aaagttaaagaaaagtcaagtttctatcttagcatgcaacagaccataaaatctcacagataacacttgaaaa

SEQ ID NO: 59884 - DNA, 75 bp, Homo sapiens
caagtttctatcttagcatgcaacagaccataaaatctcacagataacacttgaaaaaaattattatgtcttaaa

SEQ ID NO: 59885 - DNA, 73 bp, Homo sapiens
gcaacagaccataaaatctcacagataacacttgaaaaaaattattatgtcttaaaacctagagactcctcaa

SEQ ID NO: 59886 - DNA, 70 bp, Homo sapiens
gataacacttgaaaaaaattattatgtcttaaaacctagagactcctcaagaagtcagttccagggagtg

SEQ ID NO: 59887 - DNA, 72 bp, Homo sapiens
aaaaaattattatgtcttaaaacctagagactcctcaagaagtcagttccagggagtggcaaatgtatgaca

SEQ ID NO: 59888 - DNA, 73 bp, Homo sapiens
ttattatgtcttaaaacctagagactcctcaagaagtcagttccagggagtggcaaatgtatgacaagggaaa

SEQ ID NO: 59889 - DNA, 73 bp, Homo sapiens
ttaaaacctagagactcctcaagaagtcagttccagggagtggcaaatgtatgacaagggaaacgtctgattc

SEQ ID NO: 59890 - DNA, 75 bp, Homo sapiens
agagactcctcaagaagtcagttccagggagtggcaaatgtatgacaagggaaacgtctgattctctggggacca

SEQ ID NO: 59891 - DNA, 75 bp, Homo sapiens
aagaagtcagttccagggagtggcaaatgtatgacaagggaaacgtctgattctctggggaccagcagacacctc

SEQ ID NO: 59892 - DNA, 79 bp, Homo sapiens
gttccagggagtggcaaatgtatgacaagggaaacgtctgattctctggggaccagcagacacctctgagatgaacaga

SEQ ID NO: 59893 - DNA, 76 bp, Homo sapiens
aaatgtatgacaagggaaacgtctgattctctggggaccagcagacacctctgagatgaacagaggagccccctcc

SEQ ID NO: 59894 - DNA, 78 bp, Homo sapiens
tatgacaagggaaacgtctgattctctggggaccagcagacacctctgagatgaacagaggagccccctcctgttgac

SEQ ID NO: 59895 - DNA, 74 bp, Homo sapiens
aaacgtctgattctctggggaccagcagacacctctgagatgaacagaggagccccctcctgttgaccccaacc

SEQ ID NO: 59896 - DNA, 75 bp, Homo sapiens
attctctggggaccagcagacacctctgagatgaacagaggagccccctcctgttgaccccaaccctgtccttca

SEQ ID NO: 59897 - DNA, 79 bp, Homo sapiens
gcagacacctctgagatgaacagaggagccccctcctgttgaccccaaccctgtccttcactgctcacctgcacaggta

SEQ ID NO: 59898 - DNA, 73 bp, Homo sapiens
aacagaggagccccctcctgttgaccccaaccctgtccttcactgctcacctgcacaggtacagagggcttaa

SEQ ID NO: 59899 - DNA, 76 bp, Homo sapiens
ccctcctgttgaccccaaccctgtccttcactgctcacctgcacaggtacagagggcttaagagaaggagcagaga

SEQ ID NO: 59900 - DNA, 79 bp, Homo sapiens
tgttgaccccaaccctgtccttcactgctcacctgcacaggtacagagggcttaagagaaggagcagagatgatacctg

SEQ ID NO: 59901 - DNA, 80 bp, Homo sapiens
ctgtccttcactgctcacctgcacaggtacagagggcttaagagaaggagcagagatgatacctggtcggtcagttttga

SEQ ID NO: 59902 - DNA, 77 bp, Homo sapiens
ctgcacaggtacagagggcttaagagaaggagcagagatgatacctggtcggtcagttttgattaataaatctataa

SEQ ID NO: 59903 - DNA, 78 bp, Homo sapiens
tacagagggcttaagagaaggagcagagatgatacctggtcggtcagttttgattaataaatctataatgtgctcttc

SEQ ID NO: 59904 - DNA, 78 bp, Homo sapiens
agagaaggagcagagatgatacctggtcggtcagttttgattaataaatctataatgtgctcttccaaatcacataat

SEQ ID NO: 59905 - DNA, 78 bp, Homo sapiens
cagagatgatacctggtcggtcagttttgattaataaatctataatgtgctcttccaaatcacataattgcaagtcct

SEQ ID NO: 59906 - DNA, 77 bp, Homo sapiens
gtcggtcagttttgattaataaatctataatgtgctcttccaaatcacataattgcaagtccttgaaacatacacaa

SEQ ID NO: 59907 - DNA, 81 bp, Homo sapiens
aaatctataatgtgctcttccaaatcacataattgcaagtccttgaaacatacacaaacaatgacagcatggacatatcct

SEQ ID NO: 59908 - DNA, 82 bp, Homo sapiens
tcttccaaatcacataattgcaagtccttgaaacatacacaaacaatgacagcatggacatatccttctgatgggattccta

SEQ ID NO: 59909 - DNA, 85 bp, Homo sapiens
aaatcacataattgcaagtccttgaaacatacacaaacaatgacagcatggacatatccttctgatgggattcctatgcagcaga

SEQ ID NO: 59910 - DNA, 88 bp, Homo sapiens
aattgcaagtccttgaaacatacacaaacaatgacagcatggacatatccttctgatgggattcctatgcagcagagcaccatgctga

SEQ ID NO: 59911 - DNA, 90 bp, Homo sapiens
aaacatacacaaacaatgacagcatggacatatccttctgatgggattcctatgcagcagagcaccatgctgagctctccggctacatga

SEQ ID NO: 59912 - DNA, 90 bp, Homo sapiens
aaacaatgacagcatggacatatccttctgatgggattcctatgcagcagagcaccatgctgagctctccggctacatgaagctgttcaa

SEQ ID NO: 59913 - DNA, 91 bp, Homo sapiens
atgacagcatggacatatccttctgatgggattcctatgcagcagagcaccatgctgagctctccggctacatgaagctgttcaagaaata

SEQ ID NO: 59914 - DNA, 86 bp, Homo sapiens
acatatccttctgatgggattcctatgcagcagagcaccatgctgagctctccggctacatgaagctgttcaagaaatactgtact

SEQ ID NO: 59915 - DNA, 91 bp, Homo sapiens
tatgcagcagagcaccatgctgagctctccggctacatgaagctgttcaagaaatactgtacttgattgattgactgactgagctgtttga

SEQ ID NO: 59916 - DNA, 84 bp, Homo sapiens
agcaccatgctgagctctccggctacatgaagctgttcaagaaatactgtacttgattgattgactgactgagctgtttgaaat

SEQ ID NO: 59917 - DNA, 80 bp, Homo sapiens
tgagctctccggctacatgaagctgttcaagaaatactgtacttgattgattgactgactgagctgtttgaaattaaggt

SEQ ID NO: 59918 - DNA, 79 bp, Homo sapiens
tctccggctacatgaagctgttcaagaaatactgtacttgattgattgactgactgagctgtttgaaattaaggttgga

SEQ ID NO: 59919 - DNA, 78 bp, Homo sapiens
atgaagctgttcaagaaatactgtacttgattgattgactgactgagctgtttgaaattaaggttggagtgaggcttc

SEQ ID NO: 59920 - DNA, 80 bp, Homo sapiens
ttcaagaaatactgtacttgattgattgactgactgagctgtttgaaattaaggttggagtgaggcttcgcaattctgca

SEQ ID NO: 59921 - DNA, 80 bp, Homo sapiens
tacttgattgattgactgactgagctgtttgaaattaaggttggagtgaggcttcgcaattctgcatgggtcttattatc

SEQ ID NO: 59922 - DNA, 78 bp, Homo sapiens
attgattgactgactgagctgtttgaaattaaggttggagtgaggcttcgcaattctgcatgggtcttattatccagg

SEQ ID NO: 59923 - DNA, 76 bp, Homo sapiens
actgagctgtttgaaattaaggttggagtgaggcttcgcaattctgcatgggtcttattatccaggggctacctca

SEQ ID NO: 59924 - DNA, 76 bp, Homo sapiens
aaattaaggttggagtgaggcttcgcaattctgcatgggtcttattatccaggggctacctcagcacctctgatat

SEQ ID NO: 59925 - DNA, 81 bp, Homo sapiens
aggcttcgcaattctgcatgggtcttattatccaggggctacctcagcacctctgatattcaggaggtggctctgcctcac

SEQ ID NO: 59926 - DNA, 80 bp, Homo sapiens
aattctgcatgggtcttattatccaggggctacctcagcacctctgatattcaggaggtggctctgcctcacgtggccaa

SEQ ID NO: 59927 - DNA, 83 bp, Homo sapiens
tatccaggggctacctcagcacctctgatattcaggaggtggctctgcctcacgtggccaaagtcagcttctgctactgaggc

SEQ ID NO: 59928 - DNA, 85 bp, Homo sapiens
tacctcagcacctctgatattcaggaggtggctctgcctcacgtggccaaagtcagcttctgctactgaggcccactgctggctg

SEQ ID NO: 59929 - DNA, 83 bp, Homo sapiens
ttcaggaggtggctctgcctcacgtggccaaagtcagcttctgctactgaggcccactgctggctggcagggaagctgcccca

SEQ ID NO: 59930 - DNA, 80 bp, Homo sapiens
acgtggccaaagtcagcttctgctactgaggcccactgctggctggcagggaagctgccccatccagctagctaacccca

SEQ ID NO: 59931 - DNA, 80 bp, Homo sapiens
agtcagcttctgctactgaggcccactgctggctggcagggaagctgccccatccagctagctaaccccaggagactaaa

SEQ ID NO: 59932 - DNA, 75 bp, Homo sapiens
ctactgaggcccactgctggctggcagggaagctgccccatccagctagctaaccccaggagactaaaggaaaaa

SEQ ID NO: 59933 - DNA, 75 bp, Homo sapiens
actgctggctggcagggaagctgccccatccagctagctaaccccaggagactaaaggaaaaactggtgtcaaca

SEQ ID NO: 59934 - DNA, 73 bp, Homo sapiens
ctggcagggaagctgccccatccagctagctaaccccaggagactaaaggaaaaactggtgtcaacataagga

SEQ ID NO: 59935 - DNA, 73 bp, Homo sapiens
aagctgccccatccagctagctaaccccaggagactaaaggaaaaactggtgtcaacataaggagctccatcc

SEQ ID NO: 59936 - DNA, 69 bp, Homo sapiens
agctaaccccaggagactaaaggaaaaactggtgtcaacataaggagctccatcccaaagggcttccaa

SEQ ID NO: 59937 - DNA, 70 bp, Homo sapiens
aaaactggtgtcaacataaggagctccatcccaaagggcttccaaggtaatggagagacaactccaaact

SEQ ID NO: 59938 - DNA, 76 bp, Homo sapiens
tgtcaacataaggagctccatcccaaagggcttccaaggtaatggagagacaactccaaacttgcatcaacttgga

SEQ ID NO: 59939 - DNA, 75 bp, Homo sapiens
taaggagctccatcccaaagggcttccaaggtaatggagagacaactccaaacttgcatcaacttggacatttca

SEQ ID NO: 59940 - DNA, 75 bp, Homo sapiens
caaagggcttccaaggtaatggagagacaactccaaacttgcatcaacttggacatttcaaggtcaattcatcta

SEQ ID NO: 59941 - DNA, 75 bp, Homo sapiens
ttccaaggtaatggagagacaactccaaacttgcatcaacttggacatttcaaggtcaattcatctacccaccta

SEQ ID NO: 59942 - DNA, 74 bp, Homo sapiens
gtaatggagagacaactccaaacttgcatcaacttggacatttcaaggtcaattcatctacccacctacctacc

SEQ ID NO: 59943 - DNA, 72 bp, Homo sapiens
acaactccaaacttgcatcaacttggacatttcaaggtcaattcatctacccacctacctacccacctgtta

SEQ ID NO: 59944 - DNA, 73 bp, Homo sapiens
tttcaaggtcaattcatctacccacctacctacccacctgttacctgtttgcctgccccctcatctgtcgcaa

SEQ ID NO: 59945 - DNA, 75 bp, Homo sapiens
tacccacctgttacctgtttgcctgccccctcatctgtcgcaacaacccaaatgctgttgtgtgaaaatttatca

SEQ ID NO: 59946 - DNA, 81 bp, Homo sapiens
tgtttgcctgccccctcatctgtcgcaacaacccaaatgctgttgtgtgaaaatttatcatatggcagaagttctatatga

SEQ ID NO: 59947 - DNA, 78 bp, Homo sapiens
ccccctcatctgtcgcaacaacccaaatgctgttgtgtgaaaatttatcatatggcagaagttctatatgataccatt

SEQ ID NO: 59948 - DNA, 78 bp, Homo sapiens
tgtcgcaacaacccaaatgctgttgtgtgaaaatttatcatatggcagaagttctatatgataccatttattcctatt

SEQ ID NO: 59949 - DNA, 76 bp, Homo sapiens
atgctgttgtgtgaaaatttatcatatggcagaagttctatatgataccatttattcctatttttgagttcctttc

SEQ ID NO: 59950 - DNA, 73 bp, Homo sapiens
aaatttatcatatggcagaagttctatatgataccatttattcctatttttgagttcctttctaacttccaca

SEQ ID NO: 59951 - DNA, 73 bp, Homo sapiens
tatcatatggcagaagttctatatgataccatttattcctatttttgagttcctttctaacttccacaaattt

SEQ ID NO: 59952 - DNA, 71 bp, Homo sapiens
cagaagttctatatgataccatttattcctatttttgagttcctttctaacttccacaaattttagagtca

SEQ ID NO: 59953 - DNA, 68 bp, Homo sapiens
atgataccatttattcctatttttgagttcctttctaacttccacaaattttagagtcatgttaaaaa

SEQ ID NO: 59954 - DNA, 70 bp, Homo sapiens
ttcctatttttgagttcctttctaacttccacaaattttagagtcatgttaaaaatagcatcttatagtg

SEQ ID NO: 59955 - DNA, 74 bp, Homo sapiens
tgagttcctttctaacttccacaaattttagagtcatgttaaaaatagcatcttatagtgttgttgctataaca

SEQ ID NO: 59956 - DNA, 73 bp, Homo sapiens
cctttctaacttccacaaattttagagtcatgttaaaaatagcatcttatagtgttgttgctataacacacca

SEQ ID NO: 59957 - DNA, 75 bp, Homo sapiens
cttccacaaattttagagtcatgttaaaaatagcatcttatagtgttgttgctataacacaccatttttgataca

SEQ ID NO: 59958 - DNA, 76 bp, Homo sapiens
gagtcatgttaaaaatagcatcttatagtgttgttgctataacacaccatttttgatacataaaacacgaccacaa

SEQ ID NO: 59959 - DNA, 70 bp, Homo sapiens
aacacaccatttttgatacataaaacacgaccacaaagcctttctttcaaatcccaaccactatgtgtaa

SEQ ID NO: 59960 - DNA, 70 bp, Homo sapiens
accatttttgatacataaaacacgaccacaaagcctttctttcaaatcccaaccactatgtgtaacagta

SEQ ID NO: 59961 - DNA, 72 bp, Homo sapiens
atacataaaacacgaccacaaagcctttctttcaaatcccaaccactatgtgtaacagtaatattctcacat

SEQ ID NO: 59962 - DNA, 76 bp, Homo sapiens
acgaccacaaagcctttctttcaaatcccaaccactatgtgtaacagtaatattctcacattcaaccatcagcaca

SEQ ID NO: 59963 - DNA, 75 bp, Homo sapiens
tttctttcaaatcccaaccactatgtgtaacagtaatattctcacattcaaccatcagcacacctataataaacc

SEQ ID NO: 59964 - DNA, 76 bp, Homo sapiens
ttcaaatcccaaccactatgtgtaacagtaatattctcacattcaaccatcagcacacctataataaacccaatac

SEQ ID NO: 59965 - DNA, 77 bp, Homo sapiens
ctatgtgtaacagtaatattctcacattcaaccatcagcacacctataataaacccaatacctaccagagcaactta

SEQ ID NO: 59966 - DNA, 76 bp, Homo sapiens
tgtaacagtaatattctcacattcaaccatcagcacacctataataaacccaatacctaccagagcaacttaatta

SEQ ID NO: 59967 - DNA, 73 bp, Homo sapiens
atattctcacattcaaccatcagcacacctataataaacccaatacctaccagagcaacttaattaaactaaa

SEQ ID NO: 59968 - DNA, 65 bp, Homo sapiens
taattaaactaaaatgtgtgaaaaaaaattcctggtaattatactttccatactattaacttttc

SEQ ID NO: 59969 - DNA, 67 bp, Homo sapiens
actaaaatgtgtgaaaaaaaattcctggtaattatactttccatactattaacttttctaataatga

SEQ ID NO: 59970 - DNA, 71 bp, Homo sapiens
gaaaaaaaattcctggtaattatactttccatactattaacttttctaataatgatattcagatcaactca

SEQ ID NO: 59971 - DNA, 78 bp, Homo sapiens
tcctggtaattatactttccatactattaacttttctaataatgatattcagatcaactcattaacactcatcagaca

SEQ ID NO: 59972 - DNA, 80 bp, Homo sapiens
tatactttccatactattaacttttctaataatgatattcagatcaactcattaacactcatcagacacaactacataca

SEQ ID NO: 59973 - DNA, 81 bp, Homo sapiens
tccatactattaacttttctaataatgatattcagatcaactcattaacactcatcagacacaactacatacaccaagcac

SEQ ID NO: 59974 - DNA, 83 bp, Homo sapiens
taatgatattcagatcaactcattaacactcatcagacacaactacatacaccaagcactcattaacataaatgaaaagcaac

SEQ ID NO: 59975 - DNA, 81 bp, Homo sapiens
attcagatcaactcattaacactcatcagacacaactacatacaccaagcactcattaacataaatgaaaagcaactccca

SEQ ID NO: 59976 - DNA, 78 bp, Homo sapiens
ttaacactcatcagacacaactacatacaccaagcactcattaacataaatgaaaagcaactcccaaggtgcacttta

SEQ ID NO: 59977 - DNA, 79 bp, Homo sapiens
actcatcagacacaactacatacaccaagcactcattaacataaatgaaaagcaactcccaaggtgcactttatgacaa

SEQ ID NO: 59978 - DNA, 78 bp, Homo sapiens
aactacatacaccaagcactcattaacataaatgaaaagcaactcccaaggtgcactttatgacaagtgtgtagctga

SEQ ID NO: 59979 - DNA, 76 bp, Homo sapiens
attaacataaatgaaaagcaactcccaaggtgcactttatgacaagtgtgtagctgaagtaagtcacgcacaatac

SEQ ID NO: 59980 - DNA, 74 bp, Homo sapiens
aatgaaaagcaactcccaaggtgcactttatgacaagtgtgtagctgaagtaagtcacgcacaatacctttaaa

SEQ ID NO: 59981 - DNA, 73 bp, Homo sapiens
aactcccaaggtgcactttatgacaagtgtgtagctgaagtaagtcacgcacaatacctttaaaagtattcta

SEQ ID NO: 59982 - DNA, 73 bp, Homo sapiens
aaggtgcactttatgacaagtgtgtagctgaagtaagtcacgcacaatacctttaaaagtattctaatactta

SEQ ID NO: 59983 - DNA, 70 bp, Homo sapiens
acaagtgtgtagctgaagtaagtcacgcacaatacctttaaaagtattctaatacttactactccccaaa

SEQ ID NO: 59984 - DNA, 69 bp, Homo sapiens
tgtgtagctgaagtaagtcacgcacaatacctttaaaagtattctaatacttactactccccaaaactt

SEQ ID NO: 59985 - DNA, 68 bp, Homo sapiens
agtcacgcacaatacctttaaaagtattctaatacttactactccccaaaactttaaacatgtgtcca

SEQ ID NO: 59986 - DNA, 68 bp, Homo sapiens
cgcacaatacctttaaaagtattctaatacttactactccccaaaactttaaacatgtgtccaccata

SEQ ID NO: 59987 - DNA, 67 bp, Homo sapiens
cctttaaaagtattctaatacttactactccccaaaactttaaacatgtgtccaccatacttctgaa

SEQ ID NO: 59988 - DNA, 68 bp, Homo sapiens
aaagtattctaatacttactactccccaaaactttaaacatgtgtccaccatacttctgaaaccgaca

SEQ ID NO: 59989 - DNA, 68 bp, Homo sapiens
aatacttactactccccaaaactttaaacatgtgtccaccatacttctgaaaccgacatcctacattt

SEQ ID NO: 59990 - DNA, 71 bp, Homo sapiens
ccaaaactttaaacatgtgtccaccatacttctgaaaccgacatcctacatttttaagaagcactatggta

SEQ ID NO: 59991 - DNA, 74 bp, Homo sapiens
ctttaaacatgtgtccaccatacttctgaaaccgacatcctacatttttaagaagcactatggtatagaaatca

SEQ ID NO: 59992 - DNA, 74 bp, Homo sapiens
tgtgtccaccatacttctgaaaccgacatcctacatttttaagaagcactatggtatagaaatcaaagttaaca

SEQ ID NO: 59993 - DNA, 70 bp, Homo sapiens
aaccgacatcctacatttttaagaagcactatggtatagaaatcaaagttaacagtggtaggatagttta

SEQ ID NO: 59994 - DNA, 68 bp, Homo sapiens
tttttaagaagcactatggtatagaaatcaaagttaacagtggtaggatagtttatttttctacaacc

SEQ ID NO: 59995 - DNA, 71 bp, Homo sapiens
agcactatggtatagaaatcaaagttaacagtggtaggatagtttatttttctacaaccttgcgctgtaag

SEQ ID NO: 59996 - DNA, 69 bp, Homo sapiens
aatcaaagttaacagtggtaggatagtttatttttctacaaccttgcgctgtaaggaagaacagggcta

SEQ ID NO: 59997 - DNA, 70 bp, Homo sapiens
aacagtggtaggatagtttatttttctacaaccttgcgctgtaaggaagaacagggctacactatattta

SEQ ID NO: 59998 - DNA, 76 bp, Homo sapiens
ttttctacaaccttgcgctgtaaggaagaacagggctacactatatttaacacacatggtgatggactgtggagaa

SEQ ID NO: 59999 - DNA, 75 bp, Homo sapiens
cttgcgctgtaaggaagaacagggctacactatatttaacacacatggtgatggactgtggagaagaacttaaaa

SEQ ID NO: 60000 - DNA, 73 bp, Homo sapiens
taaggaagaacagggctacactatatttaacacacatggtgatggactgtggagaagaacttaaaagaaacaa

SEQ ID NO: 60001 - DNA, 75 bp, Homo sapiens
gctacactatatttaacacacatggtgatggactgtggagaagaacttaaaagaaacaaagtatggagccttcca

SEQ ID NO: 60002 - DNA, 72 bp, Homo sapiens
actatatttaacacacatggtgatggactgtggagaagaacttaaaagaaacaaagtatggagccttccatt

SEQ ID NO: 60003 - DNA, 71 bp, Homo sapiens
acacacatggtgatggactgtggagaagaacttaaaagaaacaaagtatggagccttccatttcccgtaaa

SEQ ID NO: 60004 - DNA, 67 bp, Homo sapiens
gactgtggagaagaacttaaaagaaacaaagtatggagccttccatttcccgtaaaccctttattga

SEQ ID NO: 60005 - DNA, 65 bp, Homo sapiens
gaagaacttaaaagaaacaaagtatggagccttccatttcccgtaaaccctttattgacttcttc

SEQ ID NO: 60006 - DNA, 66 bp, Homo sapiens
aagaaacaaagtatggagccttccatttcccgtaaaccctttattgacttcttcctactacatttc

SEQ ID NO: 60007 - DNA, 66 bp, Homo sapiens
acaaagtatggagccttccatttcccgtaaaccctttattgacttcttcctactacatttctcttt

SEQ ID NO: 60008 - DNA, 70 bp, Homo sapiens
tttattgacttcttcctactacatttctcttttatccacacctccccaagtgccatctacttaactaaaa

SEQ ID NO: 60009 - DNA, 70 bp, Homo sapiens
acttcttcctactacatttctcttttatccacacctccccaagtgccatctacttaactaaaatgcccca

SEQ ID NO: 60010 - DNA, 72 bp, Homo sapiens
tactacatttctcttttatccacacctccccaagtgccatctacttaactaaaatgccccaccttacagtga

SEQ ID NO: 60011 - DNA, 72 bp, Homo sapiens
ttttatccacacctccccaagtgccatctacttaactaaaatgccccaccttacagtgaatgccactcctaa

SEQ ID NO: 60012 - DNA, 77 bp, Homo sapiens
aagtgccatctacttaactaaaatgccccaccttacagtgaatgccactcctaagctcacagcacttacagggcagc

SEQ ID NO: 60013 - DNA, 79 bp, Homo sapiens
aaaatgccccaccttacagtgaatgccactcctaagctcacagcacttacagggcagccaacgcctcatactcacatag

SEQ ID NO: 60014 - DNA, 82 bp, Homo sapiens
aatgccactcctaagctcacagcacttacagggcagccaacgcctcatactcacataggcctcccacggaagctgctgacac

SEQ ID NO: 60015 - DNA, 83 bp, Homo sapiens
taagctcacagcacttacagggcagccaacgcctcatactcacataggcctcccacggaagctgctgacacggtcactgcatt

SEQ ID NO: 60016 - DNA, 79 bp, Homo sapiens
acttacagggcagccaacgcctcatactcacataggcctcccacggaagctgctgacacggtcactgcattttgtgtta

SEQ ID NO: 60017 - DNA, 80 bp, Homo sapiens
agccaacgcctcatactcacataggcctcccacggaagctgctgacacggtcactgcattttgtgttagaggcattcatt

SEQ ID NO: 60018 - DNA, 79 bp, Homo sapiens
cctcatactcacataggcctcccacggaagctgctgacacggtcactgcattttgtgttagaggcattcattttctaaa

SEQ ID NO: 60019 - DNA, 75 bp, Homo sapiens
acataggcctcccacggaagctgctgacacggtcactgcattttgtgttagaggcattcattttctaaacgtaaa

SEQ ID NO: 60020 - DNA, 75 bp, Homo sapiens
cacggaagctgctgacacggtcactgcattttgtgttagaggcattcattttctaaacgtaaacattattatatt

SEQ ID NO: 60021 - DNA, 74 bp, Homo sapiens
aagctgctgacacggtcactgcattttgtgttagaggcattcattttctaaacgtaaacattattatattttta

SEQ ID NO: 60022 - DNA, 72 bp, Homo sapiens
tttattttaaaagaaaatatacctatgagaagcatttggaactcatcatttctaaaattcagaagcaaagga

SEQ ID NO: 60023 - DNA, 74 bp, Homo sapiens
aatatacctatgagaagcatttggaactcatcatttctaaaattcagaagcaaaggaaattaattatgaacaaa

SEQ ID NO: 60024 - DNA, 72 bp, Homo sapiens
gaagcatttggaactcatcatttctaaaattcagaagcaaaggaaattaattatgaacaaataaagaaggtc

SEQ ID NO: 60025 - DNA, 72 bp, Homo sapiens
ggaactcatcatttctaaaattcagaagcaaaggaaattaattatgaacaaataaagaaggtctctgccatt

SEQ ID NO: 60026 - DNA, 74 bp, Homo sapiens
tctaaaattcagaagcaaaggaaattaattatgaacaaataaagaaggtctctgccatttaagcatggctgaat

SEQ ID NO: 60027 - DNA, 76 bp, Homo sapiens
ggaaattaattatgaacaaataaagaaggtctctgccatttaagcatggctgaatttgaagtccaaatgatgctat

SEQ ID NO: 60028 - DNA, 81 bp, Homo sapiens
ttatgaacaaataaagaaggtctctgccatttaagcatggctgaatttgaagtccaaatgatgctattacatgaaatgaca

SEQ ID NO: 60029 - DNA, 80 bp, Homo sapiens
caaataaagaaggtctctgccatttaagcatggctgaatttgaagtccaaatgatgctattacatgaaatgacacaaata

SEQ ID NO: 60030 - DNA, 80 bp, Homo sapiens
tctctgccatttaagcatggctgaatttgaagtccaaatgatgctattacatgaaatgacacaaatactgaagggtaagg

SEQ ID NO: 60031 - DNA, 80 bp, Homo sapiens
catttaagcatggctgaatttgaagtccaaatgatgctattacatgaaatgacacaaatactgaagggtaagggtgctca

SEQ ID NO: 60032 - DNA, 79 bp, Homo sapiens
atttaagcatggctgaatttgaagtccaaatgatgctattacatgaaatgacacaaatactgaagggtaagggtgctca

SEQ ID NO: 60033 - DNA, 80 bp, Homo sapiens
atggctgaatttgaagtccaaatgatgctattacatgaaatgacacaaatactgaagggtaagggtgctcaggcattcac

SEQ ID NO: 60034 - DNA, 81 bp, Homo sapiens
tgaatttgaagtccaaatgatgctattacatgaaatgacacaaatactgaagggtaagggtgctcaggcattcactgcagg

SEQ ID NO: 60035 - DNA, 81 bp, Homo sapiens
aagtccaaatgatgctattacatgaaatgacacaaatactgaagggtaagggtgctcaggcattcactgcagggtgatggc

SEQ ID NO: 60036 - DNA, 83 bp, Homo sapiens
aatgatgctattacatgaaatgacacaaatactgaagggtaagggtgctcaggcattcactgcagggtgatggctgactgaaa

SEQ ID NO: 60037 - DNA, 79 bp, Homo sapiens
ctattacatgaaatgacacaaatactgaagggtaagggtgctcaggcattcactgcagggtgatggctgactgaaaggg

SEQ ID NO: 60038 - DNA, 80 bp, Homo sapiens
tgaaatgacacaaatactgaagggtaagggtgctcaggcattcactgcagggtgatggctgactgaaaggggagtcacta

SEQ ID NO: 60039 - DNA, 78 bp, Homo sapiens
aaatactgaagggtaagggtgctcaggcattcactgcagggtgatggctgactgaaaggggagtcactatgtataagc

SEQ ID NO: 60040 - DNA, 81 bp, Homo sapiens
ggtaagggtgctcaggcattcactgcagggtgatggctgactgaaaggggagtcactatgtataagccaccatcaactgta

SEQ ID NO: 60041 - DNA, 81 bp, Homo sapiens
actgcagggtgatggctgactgaaaggggagtcactatgtataagccaccatcaactgtactgcaacctcaaggtgctcca

SEQ ID NO: 60042 - DNA, 81 bp, Homo sapiens
atggctgactgaaaggggagtcactatgtataagccaccatcaactgtactgcaacctcaaggtgctccaagtgctccatg

SEQ ID NO: 60043 - DNA, 79 bp, Homo sapiens
agtcactatgtataagccaccatcaactgtactgcaacctcaaggtgctccaagtgctccatggtggtattcccaatcc

SEQ ID NO: 60044 - DNA, 79 bp, Homo sapiens
atcaactgtactgcaacctcaaggtgctccaagtgctccatggtggtattcccaatccctctctgaaatcccacagtga

SEQ ID NO: 60045 - DNA, 76 bp, Homo sapiens
gtgctccaagtgctccatggtggtattcccaatccctctctgaaatcccacagtgactcctgtacccgcttgtctt

SEQ ID NO: 60046 - DNA, 75 bp, Homo sapiens
aagtgctccatggtggtattcccaatccctctctgaaatcccacagtgactcctgtacccgcttgtctttagaca

SEQ ID NO: 60047 - DNA, 73 bp, Homo sapiens
atggtggtattcccaatccctctctgaaatcccacagtgactcctgtacccgcttgtctttagacactgaccc

SEQ ID NO: 60048 - DNA, 75 bp, Homo sapiens
aatccctctctgaaatcccacagtgactcctgtacccgcttgtctttagacactgacccttcgtgtattcactca

SEQ ID NO: 60049 - DNA, 78 bp, Homo sapiens
tgaaatcccacagtgactcctgtacccgcttgtctttagacactgacccttcgtgtattcactcactcacgtgacaga

SEQ ID NO: 60050 - DNA, 79 bp, Homo sapiens
cagtgactcctgtacccgcttgtctttagacactgacccttcgtgtattcactcactcacgtgacagactcagtgagta

SEQ ID NO: 60051 - DNA, 77 bp, Homo sapiens
actcctgtacccgcttgtctttagacactgacccttcgtgtattcactcactcacgtgacagactcagtgagtacac

SEQ ID NO: 60052 - DNA, 81 bp, Homo sapiens
cttgtctttagacactgacccttcgtgtattcactcactcacgtgacagactcagtgagtacactctgccaggctcccaga

SEQ ID NO: 60053 - DNA, 83 bp, Homo sapiens
ttagacactgacccttcgtgtattcactcactcacgtgacagactcagtgagtacactctgccaggctcccagacatggtgtg

SEQ ID NO: 60054 - DNA, 87 bp, Homo sapiens
ttcgtgtattcactcactcacgtgacagactcagtgagtacactctgccaggctcccagacatggtgtgggcacaatctctgcattc

SEQ ID NO: 60055 - DNA, 87 bp, Homo sapiens
attcactcactcacgtgacagactcagtgagtacactctgccaggctcccagacatggtgtgggcacaatctctgcattccctgagc

SEQ ID NO: 60056 - DNA, 85 bp, Homo sapiens
gtgacagactcagtgagtacactctgccaggctcccagacatggtgtgggcacaatctctgcattccctgagcctagggacaaca

SEQ ID NO: 60057 - DNA, 85 bp, Homo sapiens
tcagtgagtacactctgccaggctcccagacatggtgtgggcacaatctctgcattccctgagcctagggacaacagattatcta

SEQ ID NO: 60058 - DNA, 82 bp, Homo sapiens
aggctcccagacatggtgtgggcacaatctctgcattccctgagcctagggacaacagattatctaataatcacctaatgca

SEQ ID NO: 60059 - DNA, 80 bp, Homo sapiens
agacatggtgtgggcacaatctctgcattccctgagcctagggacaacagattatctaataatcacctaatgcacccaaa

SEQ ID NO: 60060 - DNA, 79 bp, Homo sapiens
cacaatctctgcattccctgagcctagggacaacagattatctaataatcacctaatgcacccaaactgcaccttggaa

SEQ ID NO: 60061 - DNA, 73 bp, Homo sapiens
agcctagggacaacagattatctaataatcacctaatgcacccaaactgcaccttggaaccctgggacaggga

SEQ ID NO: 60062 - DNA, 75 bp, Homo sapiens
attatctaataatcacctaatgcacccaaactgcaccttggaaccctgggacagggaaaatcaggctcatgtcac

SEQ ID NO: 60063 - DNA, 74 bp, Homo sapiens
taatcacctaatgcacccaaactgcaccttggaaccctgggacagggaaaatcaggctcatgtcacgttccctg

SEQ ID NO: 60064 - DNA, 73 bp, Homo sapiens
acccaaactgcaccttggaaccctgggacagggaaaatcaggctcatgtcacgttccctgtgcatccctgaaa

SEQ ID NO: 60065 - DNA, 73 bp, Homo sapiens
aaccctgggacagggaaaatcaggctcatgtcacgttccctgtgcatccctgaaaggtgggattaatgtcaaa

SEQ ID NO: 60066 - DNA, 74 bp, Homo sapiens
ggaaaatcaggctcatgtcacgttccctgtgcatccctgaaaggtgggattaatgtcaaattcggttttgctct

SEQ ID NO: 60067 - DNA, 76 bp, Homo sapiens
atcaggctcatgtcacgttccctgtgcatccctgaaaggtgggattaatgtcaaattcggttttgctcttcaccac

SEQ ID NO: 60068 - DNA, 75 bp, Homo sapiens
tgtgcatccctgaaaggtgggattaatgtcaaattcggttttgctcttcaccacctgccacatgggccacgtaac

SEQ ID NO: 60069 - DNA, 75 bp, Homo sapiens
aaaggtgggattaatgtcaaattcggttttgctcttcaccacctgccacatgggccacgtaacctgctgtgcaga

SEQ ID NO: 60070 - DNA, 76 bp, Homo sapiens
gggattaatgtcaaattcggttttgctcttcaccacctgccacatgggccacgtaacctgctgtgcagagtccagg

SEQ ID NO: 60071 - DNA, 78 bp, Homo sapiens
attcggttttgctcttcaccacctgccacatgggccacgtaacctgctgtgcagagtccaggggacgtgccagctata

SEQ ID NO: 60072 - DNA, 82 bp, Homo sapiens
ttttgctcttcaccacctgccacatgggccacgtaacctgctgtgcagagtccaggggacgtgccagctatagcgcagcggc

SEQ ID NO: 60073 - DNA, 83 bp, Homo sapiens
accacctgccacatgggccacgtaacctgctgtgcagagtccaggggacgtgccagctatagcgcagcggccagcacatcgtg

SEQ ID NO: 60074 - DNA, 83 bp, Homo sapiens
acatgggccacgtaacctgctgtgcagagtccaggggacgtgccagctatagcgcagcggccagcacatcgtgggccctcgca

SEQ ID NO: 60075 - DNA, 86 bp, Homo sapiens
gtaacctgctgtgcagagtccaggggacgtgccagctatagcgcagcggccagcacatcgtgggccctcgcagcgcagcccatgga

SEQ ID NO: 60076 - DNA, 84 bp, Homo sapiens
cagagtccaggggacgtgccagctatagcgcagcggccagcacatcgtgggccctcgcagcgcagcccatggagtgtcttggaa

SEQ ID NO: 60077 - DNA, 84 bp, Homo sapiens
gggacgtgccagctatagcgcagcggccagcacatcgtgggccctcgcagcgcagcccatggagtgtcttggaactgaacagaa

SEQ ID NO: 60078 - DNA, 85 bp, Homo sapiens
agctatagcgcagcggccagcacatcgtgggccctcgcagcgcagcccatggagtgtcttggaactgaacagaaatgcacggaga

SEQ ID NO: 60079 - DNA, 83 bp, Homo sapiens
cagcggccagcacatcgtgggccctcgcagcgcagcccatggagtgtcttggaactgaacagaaatgcacggagattggtcca

SEQ ID NO: 60080 - DNA, 81 bp, Homo sapiens
gccctcgcagcgcagcccatggagtgtcttggaactgaacagaaatgcacggagattggtccatctacctggcatccctaa

SEQ ID NO: 60081 - DNA, 80 bp, Homo sapiens
agcgcagcccatggagtgtcttggaactgaacagaaatgcacggagattggtccatctacctggcatccctaaggatgaa

SEQ ID NO: 60082 - DNA, 78 bp, Homo sapiens
tggagtgtcttggaactgaacagaaatgcacggagattggtccatctacctggcatccctaaggatgaagtttctcta

SEQ ID NO: 60083 - DNA, 76 bp, Homo sapiens
gtcttggaactgaacagaaatgcacggagattggtccatctacctggcatccctaaggatgaagtttctctattta

SEQ ID NO: 60084 - DNA, 75 bp, Homo sapiens
ggagattggtccatctacctggcatccctaaggatgaagtttctctatttatcctttctgtattattgccactta

SEQ ID NO: 60085 - DNA, 74 bp, Homo sapiens
tccatctacctggcatccctaaggatgaagtttctctatttatcctttctgtattattgccacttaacttcttc

SEQ ID NO: 60086 - DNA, 74 bp, Homo sapiens
ctggcatccctaaggatgaagtttctctatttatcctttctgtattattgccacttaacttcttccaatgtcaa

SEQ ID NO: 60087 - DNA, 72 bp, Homo sapiens
ctaaggatgaagtttctctatttatcctttctgtattattgccacttaacttcttccaatgtcaaggccgtg

SEQ ID NO: 60088 - DNA, 73 bp, Homo sapiens
aagtttctctatttatcctttctgtattattgccacttaacttcttccaatgtcaaggccgtgtgctcatttg

SEQ ID NO: 60089 - DNA, 73 bp, Homo sapiens
atttatcctttctgtattattgccacttaacttcttccaatgtcaaggccgtgtgctcatttggccattttta

SEQ ID NO: 60090 - DNA, 74 bp, Homo sapiens
acttaacttcttccaatgtcaaggccgtgtgctcatttggccatttttacatcttttttcctcgctagagcata

SEQ ID NO: 60091 - DNA, 76 bp, Homo sapiens
ttcttccaatgtcaaggccgtgtgctcatttggccatttttacatcttttttcctcgctagagcataaagctctaa

SEQ ID NO: 60092 - DNA, 75 bp, Homo sapiens
tgctcatttggccatttttacatcttttttcctcgctagagcataaagctctaacttttaggaagtcacaacaca

SEQ ID NO: 60093 - DNA, 71 bp, Homo sapiens
tttggccatttttacatcttttttcctcgctagagcataaagctctaacttttaggaagtcacaacacacc

SEQ ID NO: 60094 - DNA, 76 bp, Homo sapiens
tttacatcttttttcctcgctagagcataaagctctaacttttaggaagtcacaacacacctgcaatgcactaaca

SEQ ID NO: 60095 - DNA, 78 bp, Homo sapiens
tagagcataaagctctaacttttaggaagtcacaacacacctgcaatgcactaacacagtggctgggttcttctgggc

SEQ ID NO: 60096 - DNA, 78 bp, Homo sapiens
tctaacttttaggaagtcacaacacacctgcaatgcactaacacagtggctgggttcttctgggcccatcaggcaaca

SEQ ID NO: 60097 - DNA, 79 bp, Homo sapiens
tttaggaagtcacaacacacctgcaatgcactaacacagtggctgggttcttctgggcccatcaggcaacactcctgtc

SEQ ID NO: 60098 - DNA, 77 bp, Homo sapiens
aacacacctgcaatgcactaacacagtggctgggttcttctgggcccatcaggcaacactcctgtcccggatattta

SEQ ID NO: 60099 - DNA, 74 bp, Homo sapiens
aatgcactaacacagtggctgggttcttctgggcccatcaggcaacactcctgtcccggatatttacctcttta

SEQ ID NO: 60100 - DNA, 71 bp, Homo sapiens
acagtggctgggttcttctgggcccatcaggcaacactcctgtcccggatatttacctctttaaagctccc

SEQ ID NO: 60101 - DNA, 71 bp, Homo sapiens
tgggttcttctgggcccatcaggcaacactcctgtcccggatatttacctctttaaagctccccaacatcc

SEQ ID NO: 60102 - DNA, 71 bp, Homo sapiens
ttctgggcccatcaggcaacactcctgtcccggatatttacctctttaaagctccccaacatcccctagtc

SEQ ID NO: 60103 - DNA, 70 bp, Homo sapiens
atcaggcaacactcctgtcccggatatttacctctttaaagctccccaacatcccctagtctcaccaccc

SEQ ID NO: 60104 - DNA, 72 bp, Homo sapiens
tgtcccggatatttacctctttaaagctccccaacatcccctagtctcaccaccccttctgatgttgctgaa

SEQ ID NO: 60105 - DNA, 72 bp, Homo sapiens
atatttacctctttaaagctccccaacatcccctagtctcaccaccccttctgatgttgctgaagaaggagc

SEQ ID NO: 60106 - DNA, 75 bp, Homo sapiens
tttaaagctccccaacatcccctagtctcaccaccccttctgatgttgctgaagaaggagcctatgacctatgaa

SEQ ID NO: 60107 - DNA, 75 bp, Homo sapiens
ccaacatcccctagtctcaccaccccttctgatgttgctgaagaaggagcctatgacctatgaacaaaaggccaa

SEQ ID NO: 60108 - DNA, 74 bp, Homo sapiens
cctagtctcaccaccccttctgatgttgctgaagaaggagcctatgacctatgaacaaaaggccaagttttata

SEQ ID NO: 60109 - DNA, 75 bp, Homo sapiens
caccccttctgatgttgctgaagaaggagcctatgacctatgaacaaaaggccaagttttatagcaggctctttc

SEQ ID NO: 60110 - DNA, 74 bp, Homo sapiens
aagaaggagcctatgacctatgaacaaaaggccaagttttatagcaggctctttctcggactcacctgccactc

SEQ ID NO: 60111 - DNA, 78 bp, Homo sapiens
tatgaacaaaaggccaagttttatagcaggctctttctcggactcacctgccactcttcatgcacaaacaatgttcca

SEQ ID NO: 60112 - DNA, 76 bp, Homo sapiens
ttttatagcaggctctttctcggactcacctgccactcttcatgcacaaacaatgttccactaagaggccgggtac

SEQ ID NO: 60113 - DNA, 75 bp, Homo sapiens
tctttctcggactcacctgccactcttcatgcacaaacaatgttccactaagaggccgggtacggccaagtgtaa

SEQ ID NO: 60114 - DNA, 75 bp, Homo sapiens
actcacctgccactcttcatgcacaaacaatgttccactaagaggccgggtacggccaagtgtaactgggtgcag

SEQ ID NO: 60115 - DNA, 72 bp, Homo sapiens
acaaaagaaaaaaggaatgttccactaagaggttttctgtacagtctatgttgctgatgcaaagaactcagt

SEQ ID NO: 60116 - DNA, 75 bp, Homo sapiens
aaaaaggaatgttccactaagaggttttctgtacagtctatgttgctgatgcaaagaactcagttactcagacaa

SEQ ID NO: 60117 - DNA, 76 bp, Homo sapiens
aatgttccactaagaggttttctgtacagtctatgttgctgatgcaaagaactcagttactcagacaacttaagcc

SEQ ID NO: 60118 - DNA, 78 bp, Homo sapiens
ggttttctgtacagtctatgttgctgatgcaaagaactcagttactcagacaacttaagcccctaatcatcctcaata

SEQ ID NO: 60119 - DNA, 79 bp, Homo sapiens
tgtacagtctatgttgctgatgcaaagaactcagttactcagacaacttaagcccctaatcatcctcaataaaactgaa

SEQ ID NO: 60120 - DNA, 77 bp, Homo sapiens
tatgttgctgatgcaaagaactcagttactcagacaacttaagcccctaatcatcctcaataaaactgaactccatt

SEQ ID NO: 60121 - DNA, 70 bp, Homo sapiens
aaagaactcagttactcagacaacttaagcccctaatcatcctcaataaaactgaactccatttggaaat

SEQ ID NO: 60122 - DNA, 71 bp, Homo sapiens
agttactcagacaacttaagcccctaatcatcctcaataaaactgaactccatttggaaattcagtgaaaa

SEQ ID NO: 60123 - DNA, 71 bp, Homo sapiens
acaacttaagcccctaatcatcctcaataaaactgaactccatttggaaattcagtgaaaacggacatgaa

SEQ ID NO: 60124 - DNA, 73 bp, Homo sapiens
ccctaatcatcctcaataaaactgaactccatttggaaattcagtgaaaacggacatgaatcaaatctccaaa

SEQ ID NO: 60125 - DNA, 75 bp, Homo sapiens
tcatcctcaataaaactgaactccatttggaaattcagtgaaaacggacatgaatcaaatctccaaactttgtga

SEQ ID NO: 60126 - DNA, 71 bp, Homo sapiens
ataaaactgaactccatttggaaattcagtgaaaacggacatgaatcaaatctccaaactttgtgagggta

SEQ ID NO: 60127 - DNA, 71 bp, Homo sapiens
atttggaaattcagtgaaaacggacatgaatcaaatctccaaactttgtgagggtagggggagacagacca

SEQ ID NO: 60128 - DNA, 74 bp, Homo sapiens
aaattcagtgaaaacggacatgaatcaaatctccaaactttgtgagggtagggggagacagaccatgaagcaga

SEQ ID NO: 60129 - DNA, 76 bp, Homo sapiens
aaacggacatgaatcaaatctccaaactttgtgagggtagggggagacagaccatgaagcagagcagtagttgcta

SEQ ID NO: 60130 - DNA, 82 bp, Homo sapiens
aaactttgtgagggtagggggagacagaccatgaagcagagcagtagttgctacagctgatgcttcaccagcacgagagtga

SEQ ID NO: 60131 - DNA, 84 bp, Homo sapiens
ttgtgagggtagggggagacagaccatgaagcagagcagtagttgctacagctgatgcttcaccagcacgagagtgagccacgg

SEQ ID NO: 60132 - DNA, 85 bp, Homo sapiens
ggagacagaccatgaagcagagcagtagttgctacagctgatgcttcaccagcacgagagtgagccacggggtcacccaacgcag

SEQ ID NO: 60133 - DNA, 82 bp, Homo sapiens
agcagtagttgctacagctgatgcttcaccagcacgagagtgagccacggggtcacccaacgcaggccagaaacacagtgct

SEQ ID NO: 60134 - DNA, 81 bp, Homo sapiens
agttgctacagctgatgcttcaccagcacgagagtgagccacggggtcacccaacgcaggccagaaacacagtgcttgcgg

SEQ ID NO: 60135 - DNA, 77 bp, Homo sapiens
tgcttcaccagcacgagagtgagccacggggtcacccaacgcaggccagaaacacagtgcttgcgggaggcgaaact

SEQ ID NO: 60136 - DNA, 76 bp, Homo sapiens
agcacgagagtgagccacggggtcacccaacgcaggccagaaacacagtgcttgcgggaggcgaaacttgtgtatg

SEQ ID NO: 60137 - DNA, 73 bp, Homo sapiens
agtgagccacggggtcacccaacgcaggccagaaacacagtgcttgcgggaggcgaaacttgtgtatggggaa

SEQ ID NO: 60138 - DNA, 74 bp, Homo sapiens
gggtcacccaacgcaggccagaaacacagtgcttgcgggaggcgaaacttgtgtatggggaaggccagctgtag

SEQ ID NO: 60139 - DNA, 75 bp, Homo sapiens
aacgcaggccagaaacacagtgcttgcgggaggcgaaacttgtgtatggggaaggccagctgtagggcttgagtc

SEQ ID NO: 60140 - DNA, 72 bp, Homo sapiens
aacacagtgcttgcgggaggcgaaacttgtgtatggggaaggccagctgtagggcttgagtccacctggttt

SEQ ID NO: 60141 - DNA, 72 bp, Homo sapiens
agtgcttgcgggaggcgaaacttgtgtatggggaaggccagctgtagggcttgagtccacctggttttggta

SEQ ID NO: 60142 - DNA, 70 bp, Homo sapiens
ggaggcgaaacttgtgtatggggaaggccagctgtagggcttgagtccacctggttttggtatacctggg

SEQ ID NO: 60143 - DNA, 71 bp, Homo sapiens
cttgtgtatggggaaggccagctgtagggcttgagtccacctggttttggtatacctggggtgtcctggaa

SEQ ID NO: 60144 - DNA, 69 bp, Homo sapiens
aggccagctgtagggcttgagtccacctggttttggtatacctggggtgtcctggaaccaaattcccaa

SEQ ID NO: 60145 - DNA, 68 bp, Homo sapiens
tagggcttgagtccacctggttttggtatacctggggtgtcctggaaccaaattcccaaggataccaa

SEQ ID NO: 60146 - DNA, 68 bp, Homo sapiens
tccacctggttttggtatacctggggtgtcctggaaccaaattcccaaggataccaagacacttagat

SEQ ID NO: 60147 - DNA, 68 bp, Homo sapiens
ttttggtatacctggggtgtcctggaaccaaattcccaaggataccaagacacttagatttctactaa

SEQ ID NO: 60148 - DNA, 69 bp, Homo sapiens
tatacctggggtgtcctggaaccaaattcccaaggataccaagacacttagatttctactaaaaaagca

SEQ ID NO: 60149 - DNA, 70 bp, Homo sapiens
gtcctggaaccaaattcccaaggataccaagacacttagatttctactaaaaaagcaatgctagaattta

SEQ ID NO: 60150 - DNA, 72 bp, Homo sapiens
aaattcccaaggataccaagacacttagatttctactaaaaaagcaatgctagaatttattcaggtggctca

SEQ ID NO: 60151 - DNA, 73 bp, Homo sapiens
aaaaaaaagaatttattcagacctgcagccatctctacaaagttgctggtggcaccaccgtaccttgcgggca

SEQ ID NO: 60152 - DNA, 76 bp, Homo sapiens
aaagaatttattcagacctgcagccatctctacaaagttgctggtggcaccaccgtaccttgcgggcattgtgtgg

SEQ ID NO: 60153 - DNA, 76 bp, Homo sapiens
acctgcagccatctctacaaagttgctggtggcaccaccgtaccttgcgggcattgtgtgggccaggacctacttc

SEQ ID NO: 60154 - DNA, 73 bp, Homo sapiens
atctctacaaagttgctggtggcaccaccgtaccttgcgggcattgtgtgggccaggacctacttcctacctg

SEQ ID NO: 60155 - DNA, 71 bp, Homo sapiens
aaagttgctggtggcaccaccgtaccttgcgggcattgtgtgggccaggacctacttcctacctggcacct

SEQ ID NO: 60156 - DNA, 74 bp, Homo sapiens
ctggtggcaccaccgtaccttgcgggcattgtgtgggccaggacctacttcctacctggcaccttcctatgcac

SEQ ID NO: 60157 - DNA, 74 bp, Homo sapiens
accgtaccttgcgggcattgtgtgggccaggacctacttcctacctggcaccttcctatgcactgcgtggggca

SEQ ID NO: 60158 - DNA, 77 bp, Homo sapiens
gggcattgtgtgggccaggacctacttcctacctggcaccttcctatgcactgcgtggggcaccacagtgaagagaa

SEQ ID NO: 60159 - DNA, 78 bp, Homo sapiens
gtgtgggccaggacctacttcctacctggcaccttcctatgcactgcgtggggcaccacagtgaagagaagcactgag

SEQ ID NO: 60160 - DNA, 75 bp, Homo sapiens
acctacttcctacctggcaccttcctatgcactgcgtggggcaccacagtgaagagaagcactgaggggaaccca

SEQ ID NO: 60161 - DNA, 78 bp, Homo sapiens
cctacctggcaccttcctatgcactgcgtggggcaccacagtgaagagaagcactgaggggaacccaggcactgccag

SEQ ID NO: 60162 - DNA, 80 bp, Homo sapiens
accttcctatgcactgcgtggggcaccacagtgaagagaagcactgaggggaacccaggcactgccaggctggagactca

SEQ ID NO: 60163 - DNA, 80 bp, Homo sapiens
actgcgtggggcaccacagtgaagagaagcactgaggggaacccaggcactgccaggctggagactcagcctcctatcag

SEQ ID NO: 60164 - DNA, 80 bp, Homo sapiens
accacagtgaagagaagcactgaggggaacccaggcactgccaggctggagactcagcctcctatcaggcacggccacaa

SEQ ID NO: 60165 - DNA, 79 bp, Homo sapiens
aagagaagcactgaggggaacccaggcactgccaggctggagactcagcctcctatcaggcacggccacaagccctcaa

SEQ ID NO: 60166 - DNA, 77 bp, Homo sapiens
actgaggggaacccaggcactgccaggctggagactcagcctcctatcaggcacggccacaagccctcaagcaaaag

SEQ ID NO: 60167 - DNA, 78 bp, Homo sapiens
aacccaggcactgccaggctggagactcagcctcctatcaggcacggccacaagccctcaagcaaaaggctttcttca

SEQ ID NO: 60168 - DNA, 79 bp, Homo sapiens
caggctggagactcagcctcctatcaggcacggccacaagccctcaagcaaaaggctttcttcagaagccaagtgacac

SEQ ID NO: 60169 - DNA, 80 bp, Homo sapiens
actcagcctcctatcaggcacggccacaagccctcaagcaaaaggctttcttcagaagccaagtgacactggcgcagtga

SEQ ID NO: 60170 - DNA, 80 bp, Homo sapiens
ctatcaggcacggccacaagccctcaagcaaaaggctttcttcagaagccaagtgacactggcgcagtgacactgctcct

SEQ ID NO: 60171 - DNA, 80 bp, Homo sapiens
acggccacaagccctcaagcaaaaggctttcttcagaagccaagtgacactggcgcagtgacactgctccttgctagcaa

SEQ ID NO: 60172 - DNA, 79 bp, Homo sapiens
aagccctcaagcaaaaggctttcttcagaagccaagtgacactggcgcagtgacactgctccttgctagcaaggagaaa

SEQ ID NO: 60173 - DNA, 81 bp, Homo sapiens
aaaggctttcttcagaagccaagtgacactggcgcagtgacactgctccttgctagcaaggagaaaagctgttcagatgaa

SEQ ID NO: 60174 - DNA, 84 bp, Homo sapiens
tttcttcagaagccaagtgacactggcgcagtgacactgctccttgctagcaaggagaaaagctgttcagatgaaacacatcac

SEQ ID NO: 60175 - DNA, 80 bp, Homo sapiens
aagtgacactggcgcagtgacactgctccttgctagcaaggagaaaagctgttcagatgaaacacatcacccacgaccct

SEQ ID NO: 60176 - DNA, 81 bp, Homo sapiens
tggcgcagtgacactgctccttgctagcaaggagaaaagctgttcagatgaaacacatcacccacgaccctttggtgctta

SEQ ID NO: 60177 - DNA, 77 bp, Homo sapiens
agtgacactgctccttgctagcaaggagaaaagctgttcagatgaaacacatcacccacgaccctttggtgcttaag

SEQ ID NO: 60178 - DNA, 77 bp, Homo sapiens
ttgctagcaaggagaaaagctgttcagatgaaacacatcacccacgaccctttggtgcttaagtcagggtcaatcaa

SEQ ID NO: 60179 - DNA, 75 bp, Homo sapiens
gagaaaagctgttcagatgaaacacatcacccacgaccctttggtgcttaagtcagggtcaatcaagcccaccat

SEQ ID NO: 60180 - DNA, 76 bp, Homo sapiens
aagctgttcagatgaaacacatcacccacgaccctttggtgcttaagtcagggtcaatcaagcccaccattctctc

SEQ ID NO: 60181 - DNA, 76 bp, Homo sapiens
atgaaacacatcacccacgaccctttggtgcttaagtcagggtcaatcaagcccaccattctctctacagccttca

SEQ ID NO: 60182 - DNA, 77 bp, Homo sapiens
atcacccacgaccctttggtgcttaagtcagggtcaatcaagcccaccattctctctacagccttcagattctgctc

SEQ ID NO: 60183 - DNA, 77 bp, Homo sapiens
accctttggtgcttaagtcagggtcaatcaagcccaccattctctctacagccttcagattctgctccttgctgtcc

SEQ ID NO: 60184 - DNA, 79 bp, Homo sapiens
ttaagtcagggtcaatcaagcccaccattctctctacagccttcagattctgctccttgctgtcccccatcccactaca

SEQ ID NO: 60185 - DNA, 79 bp, Homo sapiens
aatcaagcccaccattctctctacagccttcagattctgctccttgctgtcccccatcccactacagtctgtcaaaaga

SEQ ID NO: 60186 - DNA, 77 bp, Homo sapiens
accattctctctacagccttcagattctgctccttgctgtcccccatcccactacagtctgtcaaaagaggtgaaaa

SEQ ID NO: 60187 - DNA, 80 bp, Homo sapiens
tctctctacagccttcagattctgctccttgctgtcccccatcccactacagtctgtcaaaagaggtgaaaatctctgaa

SEQ ID NO: 60188 - DNA, 77 bp, Homo sapiens
ttcagattctgctccttgctgtcccccatcccactacagtctgtcaaaagaggtgaaaatctctgaagggccctcaa

SEQ ID NO: 60189 - DNA, 74 bp, Homo sapiens
tccttgctgtcccccatcccactacagtctgtcaaaagaggtgaaaatctctgaagggccctcaagtgaacaaa

SEQ ID NO: 60190 - DNA, 72 bp, Homo sapiens
tgtcccccatcccactacagtctgtcaaaagaggtgaaaatctctgaagggccctcaagtgaacaaagggcc

SEQ ID NO: 60191 - DNA, 75 bp, Homo sapiens
atcccactacagtctgtcaaaagaggtgaaaatctctgaagggccctcaagtgaacaaagggcctgctccacaca

SEQ ID NO: 60192 - DNA, 75 bp, Homo sapiens
agtctgtcaaaagaggtgaaaatctctgaagggccctcaagtgaacaaagggcctgctccacacacactcactgg

SEQ ID NO: 60193 - DNA, 78 bp, Homo sapiens
gtgaaaatctctgaagggccctcaagtgaacaaagggcctgctccacacacactcactgggcacctgatgggctattc

SEQ ID NO: 60194 - DNA, 79 bp, Homo sapiens
aatctctgaagggccctcaagtgaacaaagggcctgctccacacacactcactgggcacctgatgggctattcgatgag

SEQ ID NO: 60195 - DNA, 80 bp, Homo sapiens
ctcaagtgaacaaagggcctgctccacacacactcactgggcacctgatgggctattcgatgagtggcagttcaaaggac

SEQ ID NO: 60196 - DNA, 79 bp, Homo sapiens
acaaagggcctgctccacacacactcactgggcacctgatgggctattcgatgagtggcagttcaaaggacggagatct

SEQ ID NO: 60197 - DNA, 83 bp, Homo sapiens
tgctccacacacactcactgggcacctgatgggctattcgatgagtggcagttcaaaggacggagatcttgactccatataaa

SEQ ID NO: 60198 - DNA, 79 bp, Homo sapiens
acacacactcactgggcacctgatgggctattcgatgagtggcagttcaaaggacggagatcttgactccatataaaaa

SEQ ID NO: 60199 - DNA, 74 bp, Homo sapiens
gcacctgatgggctattcgatgagtggcagttcaaaggacggagatcttgactccatataaaaaaaggaggttt

SEQ ID NO: 60200 - DNA, 70 bp, Homo sapiens
atgggctattcgatgagtggcagttcaaaggacggagatcttgactccatataaaaaaaggaggtttttt

SEQ ID NO: 60201 - DNA, 68 bp, Homo sapiens
ttcgatgagtggcagttcaaaggacggagatcttgactccatataaaaaaaggaggtttttttttttg

SEQ ID NO: 60202 - DNA, 71 bp, Homo sapiens
tcccaaagtgcaaggattacagacgttagccactgcgtccggccaaaaggaggtgttttaaacaatctgag

SEQ ID NO: 60203 - DNA, 72 bp, Homo sapiens
caaggattacagacgttagccactgcgtccggccaaaaggaggtgttttaaacaatctgaggcacctacaga

SEQ ID NO: 60204 - DNA, 72 bp, Homo sapiens
attacagacgttagccactgcgtccggccaaaaggaggtgttttaaacaatctgaggcacctacagatggaa

SEQ ID NO: 60205 - DNA, 76 bp, Homo sapiens
cactgcgtccggccaaaaggaggtgttttaaacaatctgaggcacctacagatggaacatgttgccaggtgaagca

SEQ ID NO: 60206 - DNA, 74 bp, Homo sapiens
cgtccggccaaaaggaggtgttttaaacaatctgaggcacctacagatggaacatgttgccaggtgaagcagtg

SEQ ID NO: 60207 - DNA, 77 bp, Homo sapiens
aaaggaggtgttttaaacaatctgaggcacctacagatggaacatgttgccaggtgaagcagtgggagctacactca

SEQ ID NO: 60208 - DNA, 82 bp, Homo sapiens
ttttaaacaatctgaggcacctacagatggaacatgttgccaggtgaagcagtgggagctacactcatggagatgccgggca

SEQ ID NO: 60209 - DNA, 87 bp, Homo sapiens
tctgaggcacctacagatggaacatgttgccaggtgaagcagtgggagctacactcatggagatgccgggcagcagctggggccatg

SEQ ID NO: 60210 - DNA, 88 bp, Homo sapiens
tacagatggaacatgttgccaggtgaagcagtgggagctacactcatggagatgccgggcagcagctggggccatggctgacgcagcc

SEQ ID NO: 60211 - DNA, 85 bp, Homo sapiens
aacatgttgccaggtgaagcagtgggagctacactcatggagatgccgggcagcagctggggccatggctgacgcagccgggaca

SEQ ID NO: 60212 - DNA, 88 bp, Homo sapiens
tgaagcagtgggagctacactcatggagatgccgggcagcagctggggccatggctgacgcagccgggacagtgcgtgcattaggctg

SEQ ID NO: 60213 - DNA, 86 bp, Homo sapiens
aagcagtgggagctacactcatggagatgccgggcagcagctggggccatggctgacgcagccgggacagtgcgtgcattaggctg

SEQ ID NO: 60214 - DNA, 86 bp, Homo sapiens
agtgggagctacactcatggagatgccgggcagcagctggggccatggctgacgcagccgggacagtgcgtgcattaggctggctc

SEQ ID NO: 60215 - DNA, 84 bp, Homo sapiens
agatgccgggcagcagctggggccatggctgacgcagccgggacagtgcgtgcattaggctggctctggggccgaccctgcaca

SEQ ID NO: 60216 - DNA, 84 bp, Homo sapiens
cagcagctggggccatggctgacgcagccgggacagtgcgtgcattaggctggctctggggccgaccctgcacacttgcttcaa

SEQ ID NO: 60217 - DNA, 82 bp, Homo sapiens
agctggggccatggctgacgcagccgggacagtgcgtgcattaggctggctctggggccgaccctgcacacttgcttcaaca

SEQ ID NO: 60218 - DNA, 81 bp, Homo sapiens
gggccatggctgacgcagccgggacagtgcgtgcattaggctggctctggggccgaccctgcacacttgcttcaacagtcc

SEQ ID NO: 60219 - DNA, 80 bp, Homo sapiens
atggctgacgcagccgggacagtgcgtgcattaggctggctctggggccgaccctgcacacttgcttcaacagtccctgg

SEQ ID NO: 60220 - DNA, 80 bp, Homo sapiens
tggctgacgcagccgggacagtgcgtgcattaggctggctctggggccgaccctgcacacttgcttcaacagtccctggg

SEQ ID NO: 60221 - DNA, 76 bp, Homo sapiens
ggacagtgcgtgcattaggctggctctggggccgaccctgcacacttgcttcaacagtccctgggggactctaggt

SEQ ID NO: 60222 - DNA, 74 bp, Homo sapiens
gtgcattaggctggctctggggccgaccctgcacacttgcttcaacagtccctgggggactctaggttggaaaa

SEQ ID NO: 60223 - DNA, 70 bp, Homo sapiens
gggccgaccctgcacacttgcttcaacagtccctgggggactctaggttggaaaacccctggtctctctc

SEQ ID NO: 60224 - DNA, 74 bp, Homo sapiens
cacacttgcttcaacagtccctgggggactctaggttggaaaacccctggtctctctctcagagaatgactcaa

SEQ ID NO: 60225 - DNA, 71 bp, Homo sapiens
agtccctgggggactctaggttggaaaacccctggtctctctctcagagaatgactcaaaccctctcacca

SEQ ID NO: 60226 - DNA, 75 bp, Homo sapiens
actctaggttggaaaacccctggtctctctctcagagaatgactcaaaccctctcaccagcactggcccagatac

SEQ ID NO: 60227 - DNA, 75 bp, Homo sapiens
aaaacccctggtctctctctcagagaatgactcaaaccctctcaccagcactggcccagatacctggtcttccaa

SEQ ID NO: 60228 - DNA, 87 bp, Homo sapiens
tctctctctcagagaatgactcaaaccctctcaccagcactggcccagatacctggtcttccaaggcatccagagcagtgcatctca

SEQ ID NO: 60229 - DNA, 82 bp, Homo sapiens
agagaatgactcaaaccctctcaccagcactggcccagatacctggtcttccaaggcatccagagcagtgcatctcagattt

SEQ ID NO: 60230 - DNA, 86 bp, Homo sapiens
tctcaccagcactggcccagatacctggtcttccaaggcatccagagcagtgcatctcagattttaatgtgcacactaatcaccca

SEQ ID NO: 60231 - DNA, 81 bp, Homo sapiens
tggcccagatacctggtcttccaaggcatccagagcagtgcatctcagattttaatgtgcacactaatcacccaggatttt

SEQ ID NO: 60232 - DNA, 79 bp, Homo sapiens
atacctggtcttccaaggcatccagagcagtgcatctcagattttaatgtgcacactaatcacccaggatttttataaa

SEQ ID NO: 60233 - DNA, 79 bp, Homo sapiens
ttccaaggcatccagagcagtgcatctcagattttaatgtgcacactaatcacccaggatttttataaaaatgcaggtt

SEQ ID NO: 60234 - DNA, 78 bp, Homo sapiens
atccagagcagtgcatctcagattttaatgtgcacactaatcacccaggatttttataaaaatgcaggttttaatata

SEQ ID NO: 60235 - DNA, 75 bp, Homo sapiens
cagtgcatctcagattttaatgtgcacactaatcacccaggatttttataaaaatgcaggttttaatataagagg

SEQ ID NO: 60236 - DNA, 71 bp, Homo sapiens
tttaatgtgcacactaatcacccaggatttttataaaaatgcaggttttaatataagaggtctcaaatggg

SEQ ID NO: 60237 - DNA, 66 bp, Homo sapiens
cacccaggatttttataaaaatgcaggttttaatataagaggtctcaaatgggggcccaatttctt

SEQ ID NO: 60238 - DNA, 68 bp, Homo sapiens
aaaatgcaggttttaatataagaggtctcaaatgggggcccaatttctttattgcttacaacctggga

SEQ ID NO: 60239 - DNA, 71 bp, Homo sapiens
tttaatataagaggtctcaaatgggggcccaatttctttattgcttacaacctgggagcacctctatggct

SEQ ID NO: 60240 - DNA, 80 bp, Homo sapiens
ttacaacctgggagcacctctatggcttccctgaggcctacactttgagcagcaagaacttcacaagtgaggcagcataa

SEQ ID NO: 60241 - DNA, 79 bp, Homo sapiens
acctgggagcacctctatggcttccctgaggcctacactttgagcagcaagaacttcacaagtgaggcagcataagccc

SEQ ID NO: 60242 - DNA, 77 bp, Homo sapiens
acctctatggcttccctgaggcctacactttgagcagcaagaacttcacaagtgaggcagcataagccccaagaggg

SEQ ID NO: 60243 - DNA, 78 bp, Homo sapiens
ttccctgaggcctacactttgagcagcaagaacttcacaagtgaggcagcataagccccaagaggggaacctgctcac

SEQ ID NO: 60244 - DNA, 76 bp, Homo sapiens
tacactttgagcagcaagaacttcacaagtgaggcagcataagccccaagaggggaacctgctcacgggtcccaaa

SEQ ID NO: 60245 - DNA, 74 bp, Homo sapiens
agcaagaacttcacaagtgaggcagcataagccccaagaggggaacctgctcacgggtcccaaagcccagtcaa

SEQ ID NO: 60246 - DNA, 74 bp, Homo sapiens
aacttcacaagtgaggcagcataagccccaagaggggaacctgctcacgggtcccaaagcccagtcaaccatgc

SEQ ID NO: 60247 - DNA, 77 bp, Homo sapiens
aggcagcataagccccaagaggggaacctgctcacgggtcccaaagcccagtcaaccatgccactctgtgcactgaa

SEQ ID NO: 60248 - DNA, 74 bp, Homo sapiens
ataagccccaagaggggaacctgctcacgggtcccaaagcccagtcaaccatgccactctgtgcactgaattta

SEQ ID NO: 60249 - DNA, 78 bp, Homo sapiens
gggaacctgctcacgggtcccaaagcccagtcaaccatgccactctgtgcactgaatttactggaggtcagatgccag

SEQ ID NO: 60250 - DNA, 81 bp, Homo sapiens
tcacgggtcccaaagcccagtcaaccatgccactctgtgcactgaatttactggaggtcagatgccaggactgacataaga

SEQ ID NO: 60251 - DNA, 82 bp, Homo sapiens
caaagcccagtcaaccatgccactctgtgcactgaatttactggaggtcagatgccaggactgacataagatacttatcttg

SEQ ID NO: 60252 - DNA, 83 bp, Homo sapiens
tcaaccatgccactctgtgcactgaatttactggaggtcagatgccaggactgacataagatacttatcttggcaagtcctaa

SEQ ID NO: 60253 - DNA, 81 bp, Homo sapiens
cactctgtgcactgaatttactggaggtcagatgccaggactgacataagatacttatcttggcaagtcctaattattcaa

SEQ ID NO: 60254 - DNA, 79 bp, Homo sapiens
tgtgcactgaatttactggaggtcagatgccaggactgacataagatacttatcttggcaagtcctaattattcaaaaa

SEQ ID NO: 60255 - DNA, 73 bp, Homo sapiens
atttactggaggtcagatgccaggactgacataagatacttatcttggcaagtcctaattattcaaaaaaaat

SEQ ID NO: 60256 - DNA, 77 bp, Homo sapiens
ggtcagatgccaggactgacataagatacttatcttggcaagtcctaattattcaaaaaaaattgaatattgctata

SEQ ID NO: 60257 - DNA, 73 bp, Homo sapiens
ggactgacataagatacttatcttggcaagtcctaattattcaaaaaaaattgaatattgctataagggatgg

SEQ ID NO: 60258 - DNA, 72 bp, Homo sapiens
gatacttatcttggcaagtcctaattattcaaaaaaaattgaatattgctataagggatggttaactcgaga

SEQ ID NO: 60259 - DNA, 75 bp, Homo sapiens
tggcaagtcctaattattcaaaaaaaattgaatattgctataagggatggttaactcgagatcagtgattacaga

SEQ ID NO: 60260 - DNA, 71 bp, Homo sapiens
attcaaaaaaaattgaatattgctataagggatggttaactcgagatcagtgattacagaatctttaaaaa

SEQ ID NO: 60261 - DNA, 73 bp, Homo sapiens
aattgaatattgctataagggatggttaactcgagatcagtgattacagaatctttaaaaaacaattcaagga

SEQ ID NO: 60262 - DNA, 72 bp, Homo sapiens
tgctataagggatggttaactcgagatcagtgattacagaatctttaaaaaacaattcaaggaaaaatcgaa

SEQ ID NO: 60263 - DNA, 72 bp, Homo sapiens
atggttaactcgagatcagtgattacagaatctttaaaaaacaattcaaggaaaaatcgaatgaggccaggc

SEQ ID NO: 60264 - DNA, 69 bp, Homo sapiens
accaaccaaccaaacaaaactcaacacaggccaaaaaggtaatcaatggtctgggcttcatttcaaaga

SEQ ID NO: 60265 - DNA, 71 bp, Homo sapiens
ccaaacaaaactcaacacaggccaaaaaggtaatcaatggtctgggcttcatttcaaagaacctcagatta

SEQ ID NO: 60266 - DNA, 73 bp, Homo sapiens
aaaactcaacacaggccaaaaaggtaatcaatggtctgggcttcatttcaaagaacctcagattagcgccaca

SEQ ID NO: 60267 - DNA, 74 bp, Homo sapiens
aggccaaaaaggtaatcaatggtctgggcttcatttcaaagaacctcagattagcgccacaggtgattctggaa

SEQ ID NO: 60268 - DNA, 76 bp, Homo sapiens
aaggtaatcaatggtctgggcttcatttcaaagaacctcagattagcgccacaggtgattctggaaggttctctca

SEQ ID NO: 60269 - DNA, 80 bp, Homo sapiens
tctgggcttcatttcaaagaacctcagattagcgccacaggtgattctggaaggttctctcagtagagacattaatcaca

SEQ ID NO: 60270 - DNA, 77 bp, Homo sapiens
atttcaaagaacctcagattagcgccacaggtgattctggaaggttctctcagtagagacattaatcacagaagtta

SEQ ID NO: 60271 - DNA, 77 bp, Homo sapiens
aagaacctcagattagcgccacaggtgattctggaaggttctctcagtagagacattaatcacagaagttaagagag

SEQ ID NO: 60272 - DNA, 82 bp, Homo sapiens
attagcgccacaggtgattctggaaggttctctcagtagagacattaatcacagaagttaagagagtggagcatgtgctgac

SEQ ID NO: 60273 - DNA, 80 bp, Homo sapiens
acaggtgattctggaaggttctctcagtagagacattaatcacagaagttaagagagtggagcatgtgctgaccaaggaa

SEQ ID NO: 60274 - DNA, 81 bp, Homo sapiens
aaggttctctcagtagagacattaatcacagaagttaagagagtggagcatgtgctgaccaaggaagtgtgcatcaggtaa

SEQ ID NO: 60275 - DNA, 85 bp, Homo sapiens
tctcagtagagacattaatcacagaagttaagagagtggagcatgtgctgaccaaggaagtgtgcatcaggtaagaccagcgctg

SEQ ID NO: 60276 - DNA, 82 bp, Homo sapiens
attaatcacagaagttaagagagtggagcatgtgctgaccaaggaagtgtgcatcaggtaagaccagcgctggcctgtggga

SEQ ID NO: 60277 - DNA, 80 bp, Homo sapiens
acagaagttaagagagtggagcatgtgctgaccaaggaagtgtgcatcaggtaagaccagcgctggcctgtgggaaacac

SEQ ID NO: 60278 - DNA, 80 bp, Homo sapiens
aagagagtggagcatgtgctgaccaaggaagtgtgcatcaggtaagaccagcgctggcctgtgggaaacactgcctaaaa

SEQ ID NO: 60279 - DNA, 78 bp, Homo sapiens
atgtgctgaccaaggaagtgtgcatcaggtaagaccagcgctggcctgtgggaaacactgcctaaaaagcagagtccc

SEQ ID NO: 60280 - DNA, 73 bp, Homo sapiens
accaaggaagtgtgcatcaggtaagaccagcgctggcctgtgggaaacactgcctaaaaagcagagtcccggg

SEQ ID NO: 60281 - DNA, 72 bp, Homo sapiens
aaacactgcctaaaaagcagagtcccggggcccctaaggcagtctccacagagcgagcacaggtgggtctcg

SEQ ID NO: 60282 - DNA, 75 bp, Homo sapiens
taaaaagcagagtcccggggcccctaaggcagtctccacagagcgagcacaggtgggtctcggcagagtccctga

SEQ ID NO: 60283 - DNA, 76 bp, Homo sapiens
agcagagtcccggggcccctaaggcagtctccacagagcgagcacaggtgggtctcggcagagtccctgaggcttc

SEQ ID NO: 60284 - DNA, 81 bp, Homo sapiens
cccctaaggcagtctccacagagcgagcacaggtgggtctcggcagagtccctgaggcttccaggagctcatcacagtcca

SEQ ID NO: 60285 - DNA, 80 bp, Homo sapiens
agtctccacagagcgagcacaggtgggtctcggcagagtccctgaggcttccaggagctcatcacagtccacctttctgt

SEQ ID NO: 60286 - DNA, 80 bp, Homo sapiens
acagagcgagcacaggtgggtctcggcagagtccctgaggcttccaggagctcatcacagtccacctttctgttcacctc

SEQ ID NO: 60287 - DNA, 78 bp, Homo sapiens
acaggtgggtctcggcagagtccctgaggcttccaggagctcatcacagtccacctttctgttcacctcgtttgcaca

SEQ ID NO: 60288 - DNA, 77 bp, Homo sapiens
ggtctcggcagagtccctgaggcttccaggagctcatcacagtccacctttctgttcacctcgtttgcacaggaacc

SEQ ID NO: 60289 - DNA, 76 bp, Homo sapiens
cctgaggcttccaggagctcatcacagtccacctttctgttcacctcgtttgcacaggaaccccagtccagtcaaa

SEQ ID NO: 60290 - DNA, 80 bp, Homo sapiens
ttccaggagctcatcacagtccacctttctgttcacctcgtttgcacaggaaccccagtccagtcaaatgcatgccctca

SEQ ID NO: 60291 - DNA, 80 bp, Homo sapiens
atcacagtccacctttctgttcacctcgtttgcacaggaaccccagtccagtcaaatgcatgccctcacaagctgtgcac

SEQ ID NO: 60292 - DNA, 81 bp, Homo sapiens
acctttctgttcacctcgtttgcacaggaaccccagtccagtcaaatgcatgccctcacaagctgtgcactgtgcagacac

SEQ ID NO: 60293 - DNA, 84 bp, Homo sapiens
tctgttcacctcgtttgcacaggaaccccagtccagtcaaatgcatgccctcacaagctgtgcactgtgcagacactgtcccca

SEQ ID NO: 60294 - DNA, 84 bp, Homo sapiens
tttgcacaggaaccccagtccagtcaaatgcatgccctcacaagctgtgcactgtgcagacactgtccccactgtctgaaatgt

SEQ ID NO: 60295 - DNA, 82 bp, Homo sapiens
aggaaccccagtccagtcaaatgcatgccctcacaagctgtgcactgtgcagacactgtccccactgtctgaaatgttcttc

SEQ ID NO: 60296 - DNA, 82 bp, Homo sapiens
agtcaaatgcatgccctcacaagctgtgcactgtgcagacactgtccccactgtctgaaatgttcttcctttgttattctgt

SEQ ID NO: 60297 - DNA, 84 bp, Homo sapiens
atgcatgccctcacaagctgtgcactgtgcagacactgtccccactgtctgaaatgttcttcctttgttattctgtttgcactg

SEQ ID NO: 60298 - DNA, 80 bp, Homo sapiens
acaagctgtgcactgtgcagacactgtccccactgtctgaaatgttcttcctttgttattctgtttgcactgggctccac

SEQ ID NO: 60299 - DNA, 71 bp, Homo sapiens
actgtccccactgtctgaaatgttcttcctttgttattctgtttgcactgggctccaccaagtcccacctt

SEQ ID NO: 60300 - DNA, 73 bp, Homo sapiens
tgtctgaaatgttcttcctttgttattctgtttgcactgggctccaccaagtcccacctttctctacaaagta

SEQ ID NO: 60301 - DNA, 71 bp, Homo sapiens
aaatgttcttcctttgttattctgtttgcactgggctccaccaagtcccacctttctctacaaagtagtca

SEQ ID NO: 60302 - DNA, 74 bp, Homo sapiens
tttgttattctgtttgcactgggctccaccaagtcccacctttctctacaaagtagtcaggtgcgctccaattc

SEQ ID NO: 60303 - DNA, 74 bp, Homo sapiens
tttgcactgggctccaccaagtcccacctttctctacaaagtagtcaggtgcgctccaattctcctcgaaaaga

SEQ ID NO: 60304 - DNA, 74 bp, Homo sapiens
gggctccaccaagtcccacctttctctacaaagtagtcaggtgcgctccaattctcctcgaaaagaatgctgat

SEQ ID NO: 60305 - DNA, 76 bp, Homo sapiens
aagtcccacctttctctacaaagtagtcaggtgcgctccaattctcctcgaaaagaatgctgattgcactgacttg

SEQ ID NO: 60306 - DNA, 78 bp, Homo sapiens
tttctctacaaagtagtcaggtgcgctccaattctcctcgaaaagaatgctgattgcactgacttgtctctacctcgg

SEQ ID NO: 60307 - DNA, 77 bp, Homo sapiens
aaagtagtcaggtgcgctccaattctcctcgaaaagaatgctgattgcactgacttgtctctacctcggtcctttga

SEQ ID NO: 60308 - DNA, 77 bp, Homo sapiens
aggtgcgctccaattctcctcgaaaagaatgctgattgcactgacttgtctctacctcggtcctttgagggaggtca

SEQ ID NO: 60309 - DNA, 73 bp, Homo sapiens
aattctcctcgaaaagaatgctgattgcactgacttgtctctacctcggtcctttgagggaggtcacccttac

SEQ ID NO: 60310 - DNA, 71 bp, Homo sapiens
aagaatgctgattgcactgacttgtctctacctcggtcctttgagggaggtcacccttacgttatttttaa

SEQ ID NO: 60311 - DNA, 70 bp, Homo sapiens
attgcactgacttgtctctacctcggtcctttgagggaggtcacccttacgttatttttaacatatatat

SEQ ID NO: 60312 - DNA, 67 bp, Homo sapiens
ctctacctcggtcctttgagggaggtcacccttacgttatttttaacatatatattgtcttcaaaac

SEQ ID NO: 60313 - DNA, 66 bp, Homo sapiens
ctttgagggaggtcacccttacgttatttttaacatatatattgtcttcaaaacccaaccttaagc

SEQ ID NO: 60314 - DNA, 65 bp, Homo sapiens
ggtcacccttacgttatttttaacatatatattgtcttcaaaacccaaccttaagccaacgtagg

SEQ ID NO: 60315 - DNA, 69 bp, Homo sapiens
tacgttatttttaacatatatattgtcttcaaaacccaaccttaagccaacgtagggtcagattcacat

SEQ ID NO: 60316 - DNA, 70 bp, Homo sapiens
ttttaacatatatattgtcttcaaaacccaaccttaagccaacgtagggtcagattcacattttcctctc

SEQ ID NO: 60317 - DNA, 69 bp, Homo sapiens
tattgtcttcaaaacccaaccttaagccaacgtagggtcagattcacattttcctctctgggttcctaa

SEQ ID NO: 60318 - DNA, 67 bp, Homo sapiens
aaaacccaaccttaagccaacgtagggtcagattcacattttcctctctgggttcctaactcaagag

SEQ ID NO: 60319 - DNA, 75 bp, Homo sapiens
gtagggtcagattcacattttcctctctgggttcctaactcaagagttcacacacgataagcataatttgctttg

SEQ ID NO: 60320 - DNA, 75 bp, Homo sapiens
agattcacattttcctctctgggttcctaactcaagagttcacacacgataagcataatttgctttgggagaaga

SEQ ID NO: 60321 - DNA, 72 bp, Homo sapiens
ttttcctctctgggttcctaactcaagagttcacacacgataagcataatttgctttgggagaagagaaaaa

SEQ ID NO: 60322 - DNA, 70 bp, Homo sapiens
gggttcctaactcaagagttcacacacgataagcataatttgctttgggagaagagaaaaaacaataaaa

SEQ ID NO: 60323 - DNA, 70 bp, Homo sapiens
actcaagagttcacacacgataagcataatttgctttgggagaagagaaaaaacaataaaatttacaaaa

SEQ ID NO: 60324 - DNA, 72 bp, Homo sapiens
cacacacgataagcataatttgctttgggagaagagaaaaaacaataaaatttacaaaaaggatattgctga

SEQ ID NO: 60325 - DNA, 69 bp, Homo sapiens
gctttgggagaagagaaaaaacaataaaatttacaaaaaggatattgctgaaaccttgtcaatcatact

SEQ ID NO: 60326 - DNA, 68 bp, Homo sapiens
gaagagaaaaaacaataaaatttacaaaaaggatattgctgaaaccttgtcaatcatacttttgtaaa

SEQ ID NO: 60327 - DNA, 66 bp, Homo sapiens
caataaaatttacaaaaaggatattgctgaaaccttgtcaatcatacttttgtaaaaaaaaactac

SEQ ID NO: 60328 - DNA, 69 bp, Homo sapiens
caaaaaggatattgctgaaaccttgtcaatcatacttttgtaaaaaaaaactaccaaaaccttgcagca

SEQ ID NO: 60329 - DNA, 69 bp, Homo sapiens
ggatattgctgaaaccttgtcaatcatacttttgtaaaaaaaaactaccaaaaccttgcagcaagttaa

SEQ ID NO: 60330 - DNA, 67 bp, Homo sapiens
ccttgtcaatcatacttttgtaaaaaaaaactaccaaaaccttgcagcaagttaatctaaatcttcc

SEQ ID NO: 60331 - DNA, 67 bp, Homo sapiens
gtaaaaaaaaactaccaaaaccttgcagcaagttaatctaaatcttccttgtgactttataaaatca

SEQ ID NO: 60332 - DNA, 72 bp, Homo sapiens
ctaccaaaaccttgcagcaagttaatctaaatcttccttgtgactttataaaatcatcctggtaatatctta

SEQ ID NO: 60333 - DNA, 74 bp, Homo sapiens
agcaagttaatctaaatcttccttgtgactttataaaatcatcctggtaatatcttacattctgactagtagaa

SEQ ID NO: 60334 - DNA, 72 bp, Homo sapiens
ctaaatcttccttgtgactttataaaatcatcctggtaatatcttacattctgactagtagaaaacctgtgg

SEQ ID NO: 60335 - DNA, 74 bp, Homo sapiens
tgactttataaaatcatcctggtaatatcttacattctgactagtagaaaacctgtggtttaccacttgagaga

SEQ ID NO: 60336 - DNA, 78 bp, Homo sapiens
ttataaaatcatcctggtaatatcttacattctgactagtagaaaacctgtggtttaccacttgagagagcatgcaca

SEQ ID NO: 60337 - DNA, 77 bp, Homo sapiens
atcctggtaatatcttacattctgactagtagaaaacctgtggtttaccacttgagagagcatgcacagaatcaatt

SEQ ID NO: 60338 - DNA, 80 bp, Homo sapiens
tatcttacattctgactagtagaaaacctgtggtttaccacttgagagagcatgcacagaatcaattttcacaacactca

SEQ ID NO: 60339 - DNA, 76 bp, Homo sapiens
ctagtagaaaacctgtggtttaccacttgagagagcatgcacagaatcaattttcacaacactcaggccgttataa

SEQ ID NO: 60340 - DNA, 75 bp, Homo sapiens
tggtttaccacttgagagagcatgcacagaatcaattttcacaacactcaggccgttataaggatggtttaaaaa

SEQ ID NO: 60341 - DNA, 66 bp, Homo sapiens
tcttttaaaacaaaaaccacataagtgtttcttaaaaagagaaatcaccaaagtttacaactgtca

SEQ ID NO: 60342 - DNA, 69 bp, Homo sapiens
accacataagtgtttcttaaaaagagaaatcaccaaagtttacaactgtcatggtagtatgtactaaaa

SEQ ID NO: 60343 - DNA, 69 bp, Homo sapiens
cttaaaaagagaaatcaccaaagtttacaactgtcatggtagtatgtactaaaaacaaaagatcctcaa

SEQ ID NO: 60344 - DNA, 70 bp, Homo sapiens
gaaatcaccaaagtttacaactgtcatggtagtatgtactaaaaacaaaagatcctcaaaaagccacacc

SEQ ID NO: 60345 - DNA, 68 bp, Homo sapiens
caaagtttacaactgtcatggtagtatgtactaaaaacaaaagatcctcaaaaagccacacccccaaa

SEQ ID NO: 60346 - DNA, 67 bp, Homo sapiens
acaactgtcatggtagtatgtactaaaaacaaaagatcctcaaaaagccacacccccaaattaaagt

SEQ ID NO: 60347 - DNA, 66 bp, Homo sapiens
ctaaaaacaaaagatcctcaaaaagccacacccccaaattaaagttaagaataaaattctagctca

SEQ ID NO: 60348 - DNA, 70 bp, Homo sapiens
caaaagatcctcaaaaagccacacccccaaattaaagttaagaataaaattctagctcattattcataga

SEQ ID NO: 60349 - DNA, 71 bp, Homo sapiens
aagccacacccccaaattaaagttaagaataaaattctagctcattattcatagaatattgtataactaca

SEQ ID NO: 60350 - DNA, 71 bp, Homo sapiens
cccaaattaaagttaagaataaaattctagctcattattcatagaatattgtataactacaaacttgacaa

SEQ ID NO: 60351 - DNA, 75 bp, Homo sapiens
agttaagaataaaattctagctcattattcatagaatattgtataactacaaacttgacaatgaatattttggca

SEQ ID NO: 60352 - DNA, 75 bp, Homo sapiens
gttaagaataaaattctagctcattattcatagaatattgtataactacaaacttgacaatgaatattttggcac

SEQ ID NO: 60353 - DNA, 75 bp, Homo sapiens
aaaattctagctcattattcatagaatattgtataactacaaacttgacaatgaatattttggcacttaaagagc

SEQ ID NO: 60354 - DNA, 76 bp, Homo sapiens
ctagctcattattcatagaatattgtataactacaaacttgacaatgaatattttggcacttaaagagcctattac

SEQ ID NO: 60355 - DNA, 77 bp, Homo sapiens
tattcatagaatattgtataactacaaacttgacaatgaatattttggcacttaaagagcctattactgaaatgtgc

SEQ ID NO: 60356 - DNA, 75 bp, Homo sapiens
catagaatattgtataactacaaacttgacaatgaatattttggcacttaaagagcctattactgaaatgtgccc

SEQ ID NO: 60357 - DNA, 74 bp, Homo sapiens
gaatattgtataactacaaacttgacaatgaatattttggcacttaaagagcctattactgaaatgtgccctaa

SEQ ID NO: 60358 - DNA, 73 bp, Homo sapiens
gtataactacaaacttgacaatgaatattttggcacttaaagagcctattactgaaatgtgccctaaaacaca

SEQ ID NO: 60359 - DNA, 76 bp, Homo sapiens
tgacaatgaatattttggcacttaaagagcctattactgaaatgtgccctaaaacacaagaaatttagccatcaca

SEQ ID NO: 60360 - DNA, 73 bp, Homo sapiens
atattttggcacttaaagagcctattactgaaatgtgccctaaaacacaagaaatttagccatcacaatatac

SEQ ID NO: 60361 - DNA, 73 bp, Homo sapiens
ggcacttaaagagcctattactgaaatgtgccctaaaacacaagaaatttagccatcacaatatactaaagaa

SEQ ID NO: 60362 - DNA, 70 bp, Homo sapiens
agagcctattactgaaatgtgccctaaaacacaagaaatttagccatcacaatatactaaagaaaaaact

SEQ ID NO: 60363 - DNA, 68 bp, Homo sapiens
gccctaaaacacaagaaatttagccatcacaatatactaaagaaaaaacttttacagtaatgtgggag

SEQ ID NO: 60364 - DNA, 71 bp, Homo sapiens
gccatcacaatatactaaagaaaaaacttttacagtaatgtgggaggaaaaacagactgtattccattaga

SEQ ID NO: 60365 - DNA, 67 bp, Homo sapiens
actaaagaaaaaacttttacagtaatgtgggaggaaaaacagactgtattccattagaactactgtc

SEQ ID NO: 60366 - DNA, 72 bp, Homo sapiens
tttacagtaatgtgggaggaaaaacagactgtattccattagaactactgtcccaaatatctggttctagaa

SEQ ID NO: 60367 - DNA, 73 bp, Homo sapiens
gaggaaaaacagactgtattccattagaactactgtcccaaatatctggttctagaagacccaggattccaga

SEQ ID NO: 60368 - DNA, 74 bp, Homo sapiens
aaaacagactgtattccattagaactactgtcccaaatatctggttctagaagacccaggattccagaatgtca

SEQ ID NO: 60369 - DNA, 74 bp, Homo sapiens
gtattccattagaactactgtcccaaatatctggttctagaagacccaggattccagaatgtcactttatataa

SEQ ID NO: 60370 - DNA, 74 bp, Homo sapiens
agaactactgtcccaaatatctggttctagaagacccaggattccagaatgtcactttatataagaaatgtcca

SEQ ID NO: 60371 - DNA, 71 bp, Homo sapiens
aaatatctggttctagaagacccaggattccagaatgtcactttatataagaaatgtccagggaaattgtt

SEQ ID NO: 60372 - DNA, 71 bp, Homo sapiens
ctggttctagaagacccaggattccagaatgtcactttatataagaaatgtccagggaaattgtttattaa

SEQ ID NO: 60373 - DNA, 69 bp, Homo sapiens
aagacccaggattccagaatgtcactttatataagaaatgtccagggaaattgtttattaattcaaatt

SEQ ID NO: 60374 - DNA, 72 bp, Homo sapiens
tccagaatgtcactttatataagaaatgtccagggaaattgtttattaattcaaattttagtcaatcaaaga

SEQ ID NO: 60375 - DNA, 69 bp, Homo sapiens
gtcactttatataagaaatgtccagggaaattgtttattaattcaaattttagtcaatcaaagaataat

SEQ ID NO: 60376 - DNA, 68 bp, Homo sapiens
taagaaatgtccagggaaattgtttattaattcaaattttagtcaatcaaagaataatttaactgact

SEQ ID NO: 60377 - DNA, 67 bp, Homo sapiens
tccagggaaattgtttattaattcaaattttagtcaatcaaagaataatttaactgacttttaggaa

SEQ ID NO: 60378 - DNA, 65 bp, Homo sapiens
gtttattaattcaaattttagtcaatcaaagaataatttaactgacttttaggaaactggctttt

SEQ ID NO: 60379 - DNA, 72 bp, Homo sapiens
gccattgcgcctggccaggaaactggcttttaaaggaaactcgttgtggttcttctgtagggaggcagataa

SEQ ID NO: 60380 - DNA, 71 bp, Homo sapiens
attgcgcctggccaggaaactggcttttaaaggaaactcgttgtggttcttctgtagggaggcagataaca

SEQ ID NO: 60381 - DNA, 69 bp, Homo sapiens
ctggccaggaaactggcttttaaaggaaactcgttgtggttcttctgtagggaggcagataacaggccc

SEQ ID NO: 60382 - DNA, 67 bp, Homo sapiens
aaactggcttttaaaggaaactcgttgtggttcttctgtagggaggcagataacaggccccattacc

SEQ ID NO: 60383 - DNA, 69 bp, Homo sapiens
gcttttaaaggaaactcgttgtggttcttctgtagggaggcagataacaggccccattaccctggcatt

SEQ ID NO: 60384 - DNA, 69 bp, Homo sapiens
ttttaaaggaaactcgttgtggttcttctgtagggaggcagataacaggccccattaccctggcatttc

SEQ ID NO: 60385 - DNA, 71 bp, Homo sapiens
taaaggaaactcgttgtggttcttctgtagggaggcagataacaggccccattaccctggcatttctcttc

SEQ ID NO: 60386 - DNA, 74 bp, Homo sapiens
aaactcgttgtggttcttctgtagggaggcagataacaggccccattaccctggcatttctcttctctatgaca

SEQ ID NO: 60387 - DNA, 76 bp, Homo sapiens
tcgttgtggttcttctgtagggaggcagataacaggccccattaccctggcatttctcttctctatgacagggaca

SEQ ID NO: 60388 - DNA, 75 bp, Homo sapiens
ttcttctgtagggaggcagataacaggccccattaccctggcatttctcttctctatgacagggacaccctgctt

SEQ ID NO: 60389 - DNA, 74 bp, Homo sapiens
aggcagataacaggccccattaccctggcatttctcttctctatgacagggacaccctgctttaaaggaagcag

SEQ ID NO: 60390 - DNA, 73 bp, Homo sapiens
aacaggccccattaccctggcatttctcttctctatgacagggacaccctgctttaaaggaagcagggtcagc

SEQ ID NO: 60391 - DNA, 78 bp, Homo sapiens
ttaccctggcatttctcttctctatgacagggacaccctgctttaaaggaagcagggtcagcgtcagctcgctgccta

SEQ ID NO: 60392 - DNA, 77 bp, Homo sapiens
atttctcttctctatgacagggacaccctgctttaaaggaagcagggtcagcgtcagctcgctgcctactccctcgc

SEQ ID NO: 60393 - DNA, 78 bp, Homo sapiens
tctatgacagggacaccctgctttaaaggaagcagggtcagcgtcagctcgctgcctactccctcgccgccagaggga

SEQ ID NO: 60394 - DNA, 74 bp, Homo sapiens
gggacaccctgctttaaaggaagcagggtcagcgtcagctcgctgcctactccctcgccgccagagggaggtgg

SEQ ID NO: 60395 - DNA, 75 bp, Homo sapiens
aagcagggtcagcgtcagctcgctgcctactccctcgccgccagagggaggtgggctggactcagtaaaaggaaa

SEQ ID NO: 60396 - DNA, 72 bp, Homo sapiens
agcgtcagctcgctgcctactccctcgccgccagagggaggtgggctggactcagtaaaaggaaaaccacgg

SEQ ID NO: 60397 - DNA, 71 bp, Homo sapiens
tgcctactccctcgccgccagagggaggtgggctggactcagtaaaaggaaaaccacgggggctgtcactg

SEQ ID NO: 60398 - DNA, 71 bp, Homo sapiens
gggaggtgggctggactcagtaaaaggaaaaccacgggggctgtcactggcacgccactccacagtactct

SEQ ID NO: 60399 - DNA, 71 bp, Homo sapiens
ctggactcagtaaaaggaaaaccacgggggctgtcactggcacgccactccacagtactcttaggaacaaa

SEQ ID NO: 60400 - DNA, 69 bp, Homo sapiens
taaaaggaaaaccacgggggctgtcactggcacgccactccacagtactcttaggaacaaagcactttt

SEQ ID NO: 60401 - DNA, 70 bp, Homo sapiens
aaaaccacgggggctgtcactggcacgccactccacagtactcttaggaacaaagcactttttccatctt

SEQ ID NO: 60402 - DNA, 75 bp, Homo sapiens
ctgtcactggcacgccactccacagtactcttaggaacaaagcactttttccatctttccctgggccactcagaa

SEQ ID NO: 60403 - DNA, 70 bp, Homo sapiens
cacagtactcttaggaacaaagcactttttccatctttccctgggccactcagaaacaaccagaaagaaa

SEQ ID NO: 60404 - DNA, 72 bp, Homo sapiens
tactcttaggaacaaagcactttttccatctttccctgggccactcagaaacaaccagaaagaaaagcagca

SEQ ID NO: 60405 - DNA, 73 bp, Homo sapiens
aacaaagcactttttccatctttccctgggccactcagaaacaaccagaaagaaaagcagcacatgttctcca

SEQ ID NO: 60406 - DNA, 75 bp, Homo sapiens
tttttccatctttccctgggccactcagaaacaaccagaaagaaaagcagcacatgttctccaggcagctgcggg

SEQ ID NO: 60407 - DNA, 76 bp, Homo sapiens
tttccctgggccactcagaaacaaccagaaagaaaagcagcacatgttctccaggcagctgcggggtcttgaggaa

SEQ ID NO: 60408 - DNA, 79 bp, Homo sapiens
aaccagaaagaaaagcagcacatgttctccaggcagctgcggggtcttgaggaaggatgatcaagaagaatgagaggaa

SEQ ID NO: 60409 - DNA, 81 bp, Homo sapiens
aaagcagcacatgttctccaggcagctgcggggtcttgaggaaggatgatcaagaagaatgagaggaatgaacacgtaata

SEQ ID NO: 60410 - DNA, 76 bp, Homo sapiens
ccaggcagctgcggggtcttgaggaaggatgatcaagaagaatgagaggaatgaacacgtaatacacaaaacaggg

SEQ ID NO: 60411 - DNA, 76 bp, Homo sapiens
gtcttgaggaaggatgatcaagaagaatgagaggaatgaacacgtaatacacaaaacaggggagggtggcaagatg

SEQ ID NO: 60412 - DNA, 77 bp, Homo sapiens
aaggatgatcaagaagaatgagaggaatgaacacgtaatacacaaaacaggggagggtggcaagatggcacagacga

SEQ ID NO: 60413 - DNA, 76 bp, Homo sapiens
agaagaatgagaggaatgaacacgtaatacacaaaacaggggagggtggcaagatggcacagacgagatggaggaa

SEQ ID NO: 60414 - DNA, 78 bp, Homo sapiens
atgaacacgtaatacacaaaacaggggagggtggcaagatggcacagacgagatggaggaagatgaggaagactgtgc

SEQ ID NO: 60415 - DNA, 79 bp, Homo sapiens
aatacacaaaacaggggagggtggcaagatggcacagacgagatggaggaagatgaggaagactgtgctgtgctggaag

SEQ ID NO: 60416 - DNA, 80 bp, Homo sapiens
ggagggtggcaagatggcacagacgagatggaggaagatgaggaagactgtgctgtgctggaagggtcgctaagggtaca

SEQ ID NO: 60417 - DNA, 82 bp, Homo sapiens
aagatggcacagacgagatggaggaagatgaggaagactgtgctgtgctggaagggtcgctaagggtacagctccagccaga

SEQ ID NO: 60418 - DNA, 80 bp, Homo sapiens
ggcacagacgagatggaggaagatgaggaagactgtgctgtgctggaagggtcgctaagggtacagctccagccagaggg

SEQ ID NO: 60419 - DNA, 79 bp, Homo sapiens
gaggaagatgaggaagactgtgctgtgctggaagggtcgctaagggtacagctccagccagaggggacaggagactgaa

SEQ ID NO: 60420 - DNA, 76 bp, Homo sapiens
aggaagactgtgctgtgctggaagggtcgctaagggtacagctccagccagaggggacaggagactgaagggcact

SEQ ID NO: 60421 - DNA, 79 bp, Homo sapiens
tgtgctgtgctggaagggtcgctaagggtacagctccagccagaggggacaggagactgaagggcacttcctagctgtc

SEQ ID NO: 60422 - DNA, 78 bp, Homo sapiens
tcgctaagggtacagctccagccagaggggacaggagactgaagggcacttcctagctgtccgaaactgaatgacaca

SEQ ID NO: 60423 - DNA, 76 bp, Homo sapiens
agctccagccagaggggacaggagactgaagggcacttcctagctgtccgaaactgaatgacacacccaaagacca

SEQ ID NO: 60424 - DNA, 72 bp, Homo sapiens
gagactgaagggcacttcctagctgtccgaaactgaatgacacacccaaagaccacagttttacctctaaaa

SEQ ID NO: 60425 - DNA, 71 bp, Homo sapiens
aagggcacttcctagctgtccgaaactgaatgacacacccaaagaccacagttttacctctaaaatgacag

SEQ ID NO: 60426 - DNA, 73 bp, Homo sapiens
tagctgtccgaaactgaatgacacacccaaagaccacagttttacctctaaaatgacaggaagatggttgaaa

SEQ ID NO: 60427 - DNA, 68 bp, Homo sapiens
aaactgaatgacacacccaaagaccacagttttacctctaaaatgacaggaagatggttgaaaaacgg

SEQ ID NO: 60428 - DNA, 68 bp, Homo sapiens
aatgacacacccaaagaccacagttttacctctaaaatgacaggaagatggttgaaaaacgggaggga

SEQ ID NO: 60429 - DNA, 69 bp, Homo sapiens
ttttacctctaaaatgacaggaagatggttgaaaaacgggagggaggttcatccttcttactgcctgaa

SEQ ID NO: 60430 - DNA, 71 bp, Homo sapiens
gttgaaaaacgggagggaggttcatccttcttactgcctgaagcctacaaatggcagggagccccagagcc

SEQ ID NO: 60431 - DNA, 73 bp, Homo sapiens
ggaggttcatccttcttactgcctgaagcctacaaatggcagggagccccagagccccaggcggacctcccaa

SEQ ID NO: 60432 - DNA, 75 bp, Homo sapiens
ttcatccttcttactgcctgaagcctacaaatggcagggagccccagagccccaggcggacctcccaacaagcag

SEQ ID NO: 60433 - DNA, 77 bp, Homo sapiens
tactgcctgaagcctacaaatggcagggagccccagagccccaggcggacctcccaacaagcagggatcgctgcgta

SEQ ID NO: 60434 - DNA, 74 bp, Homo sapiens
aagcctacaaatggcagggagccccagagccccaggcggacctcccaacaagcagggatcgctgcgtaaccagc

SEQ ID NO: 60435 - DNA, 73 bp, Homo sapiens
agggagccccagagccccaggcggacctcccaacaagcagggatcgctgcgtaaccagccgtgccgagggcta

SEQ ID NO: 60436 - DNA, 74 bp, Homo sapiens
agagccccaggcggacctcccaacaagcagggatcgctgcgtaaccagccgtgccgagggctacagacaaccta

SEQ ID NO: 60437 - DNA, 75 bp, Homo sapiens
gcggacctcccaacaagcagggatcgctgcgtaaccagccgtgccgagggctacagacaacctagacaacggcaa

SEQ ID NO: 60438 - DNA, 74 bp, Homo sapiens
caacaagcagggatcgctgcgtaaccagccgtgccgagggctacagacaacctagacaacggcaaaacgactgg

SEQ ID NO: 60439 - DNA, 78 bp, Homo sapiens
ctgcgtaaccagccgtgccgagggctacagacaacctagacaacggcaaaacgactggggtgatcaggatgcagcagc

SEQ ID NO: 60440 - DNA, 80 bp, Homo sapiens
ctacagacaacctagacaacggcaaaacgactggggtgatcaggatgcagcagccctagggcagaggctctcactgtgaa

SEQ ID NO: 60441 - DNA, 81 bp, Homo sapiens
aacctagacaacggcaaaacgactggggtgatcaggatgcagcagccctagggcagaggctctcactgtgaagcagagtga

SEQ ID NO: 60442 - DNA, 80 bp, Homo sapiens
ggcaaaacgactggggtgatcaggatgcagcagccctagggcagaggctctcactgtgaagcagagtgaacgtttagtta

SEQ ID NO: 60443 - DNA, 80 bp, Homo sapiens
aacgactggggtgatcaggatgcagcagccctagggcagaggctctcactgtgaagcagagtgaacgtttagttatacaa

SEQ ID NO: 60444 - DNA, 81 bp, Homo sapiens
gtgatcaggatgcagcagccctagggcagaggctctcactgtgaagcagagtgaacgtttagttatacaaagagttctggg

SEQ ID NO: 60445 - DNA, 77 bp, Homo sapiens
cagccctagggcagaggctctcactgtgaagcagagtgaacgtttagttatacaaagagttctggggaccatagctc

SEQ ID NO: 60446 - DNA, 74 bp, Homo sapiens
ctctcactgtgaagcagagtgaacgtttagttatacaaagagttctggggaccatagctccacgtagagggaaa

SEQ ID NO: 60447 - DNA, 69 bp, Homo sapiens
aacgtttagttatacaaagagttctggggaccatagctccacgtagagggaaaccttcataaatgtctg

SEQ ID NO: 60448 - DNA, 72 bp, Homo sapiens
atacaaagagttctggggaccatagctccacgtagagggaaaccttcataaatgtctgtgtgggattttata

SEQ ID NO: 60449 - DNA, 72 bp, Homo sapiens
agttctggggaccatagctccacgtagagggaaaccttcataaatgtctgtgtgggattttatactgaccca

SEQ ID NO: 60450 - DNA, 74 bp, Homo sapiens
gtagagggaaaccttcataaatgtctgtgtgggattttatactgacccagactgactgacagagccttcaaaat

SEQ ID NO: 60451 - DNA, 73 bp, Homo sapiens
tgtgggattttatactgacccagactgactgacagagccttcaaaatttacttcaggataagggctttccaat

SEQ ID NO: 60452 - DNA, 72 bp, Homo sapiens
tttatactgacccagactgactgacagagccttcaaaatttacttcaggataagggctttccaattccaaaa

SEQ ID NO: 60453 - DNA, 71 bp, Homo sapiens
ccagactgactgacagagccttcaaaatttacttcaggataagggctttccaattccaaaagaagtatccc

SEQ ID NO: 60454 - DNA, 68 bp, Homo sapiens
acagagccttcaaaatttacttcaggataagggctttccaattccaaaagaagtatcccctctatccc

SEQ ID NO: 60455 - DNA, 65 bp, Homo sapiens
aaaatttacttcaggataagggctttccaattccaaaagaagtatcccctctatccccctcccta

SEQ ID NO: 60456 - DNA, 68 bp, Homo sapiens
tacttcaggataagggctttccaattccaaaagaagtatcccctctatccccctccctaagacgtcac

SEQ ID NO: 60457 - DNA, 70 bp, Homo sapiens
taagggctttccaattccaaaagaagtatcccctctatccccctccctaagacgtcactgccattatagc

SEQ ID NO: 60458 - DNA, 72 bp, Homo sapiens
aagtatcccctctatccccctccctaagacgtcactgccattatagcgacatggaatttaaattctcacgta

SEQ ID NO: 60459 - DNA, 76 bp, Homo sapiens
tccctaagacgtcactgccattatagcgacatggaatttaaattctcacgtatggagtaactgtcaggaaatacca

SEQ ID NO: 60460 - DNA, 78 bp, Homo sapiens
tcactgccattatagcgacatggaatttaaattctcacgtatggagtaactgtcaggaaataccatgtcttcgtgttg

SEQ ID NO: 60461 - DNA, 76 bp, Homo sapiens
attatagcgacatggaatttaaattctcacgtatggagtaactgtcaggaaataccatgtcttcgtgttggctcag

SEQ ID NO: 60462 - DNA, 78 bp, Homo sapiens
ttaaattctcacgtatggagtaactgtcaggaaataccatgtcttcgtgttggctcagtgaacaaagtgactctgctg

SEQ ID NO: 60463 - DNA, 82 bp, Homo sapiens
gtatggagtaactgtcaggaaataccatgtcttcgtgttggctcagtgaacaaagtgactctgctgttccatgctgcttcaa

SEQ ID NO: 60464 - DNA, 87 bp, Homo sapiens
taactgtcaggaaataccatgtcttcgtgttggctcagtgaacaaagtgactctgctgttccatgctgcttcaagtgcatgtatgca

SEQ ID NO: 60465 - DNA, 84 bp, Homo sapiens
aaataccatgtcttcgtgttggctcagtgaacaaagtgactctgctgttccatgctgcttcaagtgcatgtatgcagggggcag

SEQ ID NO: 60466 - DNA, 84 bp, Homo sapiens
gtcttcgtgttggctcagtgaacaaagtgactctgctgttccatgctgcttcaagtgcatgtatgcagggggcagggagaggga

SEQ ID NO: 60467 - DNA, 85 bp, Homo sapiens
aagtgactctgctgttccatgctgcttcaagtgcatgtatgcagggggcagggagagggagaggcagtgagtgagtcagggtcca

SEQ ID NO: 60468 - DNA, 85 bp, Homo sapiens
ctgttccatgctgcttcaagtgcatgtatgcagggggcagggagagggagaggcagtgagtgagtcagggtccaacattatcaca

SEQ ID NO: 60469 - DNA, 84 bp, Homo sapiens
tgctgcttcaagtgcatgtatgcagggggcagggagagggagaggcagtgagtgagtcagggtccaacattatcacagccgttc

SEQ ID NO: 60470 - DNA, 79 bp, Homo sapiens
ggcagggagagggagaggcagtgagtgagtcagggtccaacattatcacagccgttcctgacacggagagcccgcctgc

SEQ ID NO: 60471 - DNA, 79 bp, Homo sapiens
agagggagaggcagtgagtgagtcagggtccaacattatcacagccgttcctgacacggagagcccgcctgccctctga

SEQ ID NO: 60472 - DNA, 79 bp, Homo sapiens
agtgagtgagtcagggtccaacattatcacagccgttcctgacacggagagcccgcctgccctctgagcttggctgtac

SEQ ID NO: 60473 - DNA, 76 bp, Homo sapiens
agtcagggtccaacattatcacagccgttcctgacacggagagcccgcctgccctctgagcttggctgtaccttgg

SEQ ID NO: 60474 - DNA, 78 bp, Homo sapiens
aacattatcacagccgttcctgacacggagagcccgcctgccctctgagcttggctgtaccttgggctgctgtccgcc

SEQ ID NO: 60475 - DNA, 79 bp, Homo sapiens
tcctgacacggagagcccgcctgccctctgagcttggctgtaccttgggctgctgtccgccctacctcaccctgcactc

SEQ ID NO: 60476 - DNA, 80 bp, Homo sapiens
agagcccgcctgccctctgagcttggctgtaccttgggctgctgtccgccctacctcaccctgcactccatggctcataa

SEQ ID NO: 60477 - DNA, 76 bp, Homo sapiens
cttggctgtaccttgggctgctgtccgccctacctcaccctgcactccatggctcataacccctgcccactcccta

SEQ ID NO: 60478 - DNA, 75 bp, Homo sapiens
taccttgggctgctgtccgccctacctcaccctgcactccatggctcataacccctgcccactccctacctactc

SEQ ID NO: 60479 - DNA, 77 bp, Homo sapiens
ttgggctgctgtccgccctacctcaccctgcactccatggctcataacccctgcccactccctacctactctctgaa

SEQ ID NO: 60480 - DNA, 73 bp, Homo sapiens
tccgccctacctcaccctgcactccatggctcataacccctgcccactccctacctactctctgaattttctt

SEQ ID NO: 60481 - DNA, 73 bp, Homo sapiens
cctacctcaccctgcactccatggctcataacccctgcccactccctacctactctctgaattttctttagaa

SEQ ID NO: 60482 - DNA, 73 bp, Homo sapiens
ctacctcaccctgcactccatggctcataacccctgcccactccctacctactctctgaattttctttagaaa

SEQ ID NO: 60483 - DNA, 73 bp, Homo sapiens
cctgcactccatggctcataacccctgcccactccctacctactctctgaattttctttagaaacaacttcta

SEQ ID NO: 60484 - DNA, 71 bp, Homo sapiens
actccatggctcataacccctgcccactccctacctactctctgaattttctttagaaacaacttctattc

SEQ ID NO: 60485 - DNA, 73 bp, Homo sapiens
atggctcataacccctgcccactccctacctactctctgaattttctttagaaacaacttctattctcatctc

SEQ ID NO: 60486 - DNA, 72 bp, Homo sapiens
ctcataacccctgcccactccctacctactctctgaattttctttagaaacaacttctattctcatctccaa

SEQ ID NO: 60487 - DNA, 71 bp, Homo sapiens
ataacccctgcccactccctacctactctctgaattttctttagaaacaacttctattctcatctccaagc

SEQ ID NO: 60488 - DNA, 72 bp, Homo sapiens
cccactccctacctactctctgaattttctttagaaacaacttctattctcatctccaagcttctctgcccc

SEQ ID NO: 60489 - DNA, 71 bp, Homo sapiens
attttctttagaaacaacttctattctcatctccaagcttctctgcccccgtgctcacttactttgttggt

SEQ ID NO: 60490 - DNA, 73 bp, Homo sapiens
tttagaaacaacttctattctcatctccaagcttctctgcccccgtgctcacttactttgttggtttcgcttg

SEQ ID NO: 60491 - DNA, 77 bp, Homo sapiens
tctattctcatctccaagcttctctgcccccgtgctcacttactttgttggtttcgcttgtcactggcatttttcaa

SEQ ID NO: 60492 - DNA, 73 bp, Homo sapiens
atctccaagcttctctgcccccgtgctcacttactttgttggtttcgcttgtcactggcatttttcaaaggga

SEQ ID NO: 60493 - DNA, 75 bp, Homo sapiens
gtgctcacttactttgttggtttcgcttgtcactggcatttttcaaagggaggcaaacaggacagtcatgtcgtg

SEQ ID NO: 60494 - DNA, 75 bp, Homo sapiens
tactttgttggtttcgcttgtcactggcatttttcaaagggaggcaaacaggacagtcatgtcgtgtgcagttct

SEQ ID NO: 60495 - DNA, 80 bp, Homo sapiens
tttcgcttgtcactggcatttttcaaagggaggcaaacaggacagtcatgtcgtgtgcagttcttccaatgagagatgat

SEQ ID NO: 60496 - DNA, 80 bp, Homo sapiens
cactggcatttttcaaagggaggcaaacaggacagtcatgtcgtgtgcagttcttccaatgagagatgatttgtcgtgaa

SEQ ID NO: 60497 - DNA, 81 bp, Homo sapiens
tttttcaaagggaggcaaacaggacagtcatgtcgtgtgcagttcttccaatgagagatgatttgtcgtgaagatgcacaa

SEQ ID NO: 60498 - DNA, 85 bp, Homo sapiens
aggcaaacaggacagtcatgtcgtgtgcagttcttccaatgagagatgatttgtcgtgaagatgcacaatgggcaactatgacca

SEQ ID NO: 60499 - DNA, 83 bp, Homo sapiens
aggacagtcatgtcgtgtgcagttcttccaatgagagatgatttgtcgtgaagatgcacaatgggcaactatgaccagaaaaa

SEQ ID NO: 60500 - DNA, 82 bp, Homo sapiens
atgtcgtgtgcagttcttccaatgagagatgatttgtcgtgaagatgcacaatgggcaactatgaccagaaaaacaacgaga

SEQ ID NO: 60501 - DNA, 78 bp, Homo sapiens
ttcttccaatgagagatgatttgtcgtgaagatgcacaatgggcaactatgaccagaaaaacaacgagatgttatttt

SEQ ID NO: 60502 - DNA, 79 bp, Homo sapiens
aatgagagatgatttgtcgtgaagatgcacaatgggcaactatgaccagaaaaacaacgagatgttatttttctatcca

SEQ ID NO: 60503 - DNA, 76 bp, Homo sapiens
atgatttgtcgtgaagatgcacaatgggcaactatgaccagaaaaacaacgagatgttatttttctatccaaatcg

SEQ ID NO: 60504 - DNA, 76 bp, Homo sapiens
gatgcacaatgggcaactatgaccagaaaaacaacgagatgttatttttctatccaaatcgtcacactttcaatta

SEQ ID NO: 60505 - DNA, 70 bp, Homo sapiens
actatgaccagaaaaacaacgagatgttatttttctatccaaatcgtcacactttcaattatacctaaat

SEQ ID NO: 60506 - DNA, 73 bp, Homo sapiens
ctatccaaatcgtcacactttcaattatacctaaattataatgccagattccataagaaaatggtaacaagtg

SEQ ID NO: 60507 - DNA, 72 bp, Homo sapiens
aatcgtcacactttcaattatacctaaattataatgccagattccataagaaaatggtaacaagtgtaacca

SEQ ID NO: 60508 - DNA, 74 bp, Homo sapiens
caattatacctaaattataatgccagattccataagaaaatggtaacaagtgtaaccataacacagtataggca

SEQ ID NO: 60509 - DNA, 74 bp, Homo sapiens
ctaaattataatgccagattccataagaaaatggtaacaagtgtaaccataacacagtataggcagtcctcaac

SEQ ID NO: 60510 - DNA, 75 bp, Homo sapiens
tataatgccagattccataagaaaatggtaacaagtgtaaccataacacagtataggcagtcctcaacttacaaa

SEQ ID NO: 60511 - DNA, 72 bp, Homo sapiens
tccataagaaaatggtaacaagtgtaaccataacacagtataggcagtcctcaacttacaaacaggctgttt

SEQ ID NO: 60512 - DNA, 70 bp, Homo sapiens
aaaatggtaacaagtgtaaccataacacagtataggcagtcctcaacttacaaacaggctgttttccaaa

SEQ ID NO: 60513 - DNA, 69 bp, Homo sapiens
aagtgtaaccataacacagtataggcagtcctcaacttacaaacaggctgttttccaaaaagtttgtaa

SEQ ID NO: 60514 - DNA, 71 bp, Homo sapiens
ataacacagtataggcagtcctcaacttacaaacaggctgttttccaaaaagtttgtaagttgactgttga

SEQ ID NO: 60515 - DNA, 71 bp, Homo sapiens
tataggcagtcctcaacttacaaacaggctgttttccaaaaagtttgtaagttgactgttgagaaatccaa

SEQ ID NO: 60516 - DNA, 67 bp, Homo sapiens
cctcaacttacaaacaggctgttttccaaaaagtttgtaagttgactgttgagaaatccaaacaaaa

SEQ ID NO: 60517 - DNA, 66 bp, Homo sapiens
acaggctgttttccaaaaagtttgtaagttgactgttgagaaatccaaacaaaacttcccctagaa

SEQ ID NO: 60518 - DNA, 69 bp, Homo sapiens
tccaaaaagtttgtaagttgactgttgagaaatccaaacaaaacttcccctagaagcaatgttatgaag

SEQ ID NO: 60519 - DNA, 69 bp, Homo sapiens
aaagtttgtaagttgactgttgagaaatccaaacaaaacttcccctagaagcaatgttatgaaggatgg

SEQ ID NO: 60520 - DNA, 72 bp, Homo sapiens
agttgactgttgagaaatccaaacaaaacttcccctagaagcaatgttatgaaggatgggtgataaagggca

SEQ ID NO: 60521 - DNA, 70 bp, Homo sapiens
aatccaaacaaaacttcccctagaagcaatgttatgaaggatgggtgataaagggcagcccacaaaacaa

SEQ ID NO: 60522 - DNA, 69 bp, Homo sapiens
aaacaaaacttcccctagaagcaatgttatgaaggatgggtgataaagggcagcccacaaaacaaaaca

SEQ ID NO: 60523 - DNA, 69 bp, Homo sapiens
aacaaaacaaaaactattcaacctggaatagcgaacaactgcaatgaaaggtagaacaaataatagttc

SEQ ID NO: 60524 - DNA, 75 bp, Homo sapiens
caaaaactattcaacctggaatagcgaacaactgcaatgaaaggtagaacaaataatagttctgtgatgtcacta

SEQ ID NO: 60525 - DNA, 74 bp, Homo sapiens
attcaacctggaatagcgaacaactgcaatgaaaggtagaacaaataatagttctgtgatgtcactatttaaaa

SEQ ID NO: 60526 - DNA, 73 bp, Homo sapiens
gaatagcgaacaactgcaatgaaaggtagaacaaataatagttctgtgatgtcactatttaaaataaaaatgt

SEQ ID NO: 60527 - DNA, 74 bp, Homo sapiens
ctgcaatgaaaggtagaacaaataatagttctgtgatgtcactatttaaaataaaaatgttcaattatgtttca

SEQ ID NO: 60528 - DNA, 72 bp, Homo sapiens
taatagttctgtgatgtcactatttaaaataaaaatgttcaattatgtttcaagatgaaaccacctaaatac

SEQ ID NO: 60529 - DNA, 74 bp, Homo sapiens
tgtgatgtcactatttaaaataaaaatgttcaattatgtttcaagatgaaaccacctaaatactacagtgaaga

SEQ ID NO: 60530 - DNA, 70 bp, Homo sapiens
gtcactatttaaaataaaaatgttcaattatgtttcaagatgaaaccacctaaatactacagtgaagaaa

SEQ ID NO: 60531 - DNA, 77 bp, Homo sapiens
tgttcaattatgtttcaagatgaaaccacctaaatactacagtgaagaaatacagatagagaagcaaatgagaagtc

SEQ ID NO: 60532 - DNA, 76 bp, Homo sapiens
gttcaattatgtttcaagatgaaaccacctaaatactacagtgaagaaatacagatagagaagcaaatgagaagtc

SEQ ID NO: 60533 - DNA, 78 bp, Homo sapiens
tatgtttcaagatgaaaccacctaaatactacagtgaagaaatacagatagagaagcaaatgagaagtctgtagagat

SEQ ID NO: 60534 - DNA, 79 bp, Homo sapiens
tttcaagatgaaaccacctaaatactacagtgaagaaatacagatagagaagcaaatgagaagtctgtagagattctga

SEQ ID NO: 60535 - DNA, 75 bp, Homo sapiens
aaaccacctaaatactacagtgaagaaatacagatagagaagcaaatgagaagtctgtagagattctgaaaggga

SEQ ID NO: 60536 - DNA, 78 bp, Homo sapiens
agtgaagaaatacagatagagaagcaaatgagaagtctgtagagattctgaaagggactctgggcacttggtgaagaa

SEQ ID NO: 60537 - DNA, 75 bp, Homo sapiens
aaatgagaagtctgtagagattctgaaagggactctgggcacttggtgaagaagtactcgagaggctaactgacc

SEQ ID NO: 60538 - DNA, 75 bp, Homo sapiens
tctgtagagattctgaaagggactctgggcacttggtgaagaagtactcgagaggctaactgaccctggttattc

SEQ ID NO: 60539 - DNA, 71 bp, Homo sapiens
aaagggactctgggcacttggtgaagaagtactcgagaggctaactgaccctggttattccgtcttcatct

SEQ ID NO: 60540 - DNA, 73 bp, Homo sapiens
tgggcacttggtgaagaagtactcgagaggctaactgaccctggttattccgtcttcatcttctaaaggtcta

SEQ ID NO: 60541 - DNA, 71 bp, Homo sapiens
tggtgaagaagtactcgagaggctaactgaccctggttattccgtcttcatcttctaaaggtctaacctta

SEQ ID NO: 60542 - DNA, 70 bp, Homo sapiens
actcgagaggctaactgaccctggttattccgtcttcatcttctaaaggtctaaccttacccttctctgc

SEQ ID NO: 60543 - DNA, 70 bp, Homo sapiens
agaggctaactgaccctggttattccgtcttcatcttctaaaggtctaaccttacccttctctgcttctc

SEQ ID NO: 60544 - DNA, 69 bp, Homo sapiens
accctggttattccgtcttcatcttctaaaggtctaaccttacccttctctgcttctctgttacaacag

SEQ ID NO: 60545 - DNA, 70 bp, Homo sapiens
atcttctaaaggtctaaccttacccttctctgcttctctgttacaacagggttactctggggactcacaa

SEQ ID NO: 60546 - DNA, 71 bp, Homo sapiens
aaggtctaaccttacccttctctgcttctctgttacaacagggttactctggggactcacaaatgtcacaa

SEQ ID NO: 60547 - DNA, 71 bp, Homo sapiens
ttacccttctctgcttctctgttacaacagggttactctggggactcacaaatgtcacaacgggagacggg

SEQ ID NO: 60548 - DNA, 72 bp, Homo sapiens
tctgcttctctgttacaacagggttactctggggactcacaaatgtcacaacgggagacggggagaccaggg

SEQ ID NO: 60549 - DNA, 70 bp, Homo sapiens
tgttacaacagggttactctggggactcacaaatgtcacaacgggagacggggagaccagggggagattc

SEQ ID NO: 60550 - DNA, 68 bp, Homo sapiens
ttactctggggactcacaaatgtcacaacgggagacggggagaccagggggagattcccctaagttta

SEQ ID NO: 60551 - DNA, 73 bp, Homo sapiens
actcacaaatgtcacaacgggagacggggagaccagggggagattcccctaagtttatgagcataagcagaga

SEQ ID NO: 60552 - DNA, 71 bp, Homo sapiens
aaatgtcacaacgggagacggggagaccagggggagattcccctaagtttatgagcataagcagagaagga

SEQ ID NO: 60553 - DNA, 70 bp, Homo sapiens
agacggggagaccagggggagattcccctaagtttatgagcataagcagagaaggaaagagaataaagat

SEQ ID NO: 60554 - DNA, 69 bp, Homo sapiens
accagggggagattcccctaagtttatgagcataagcagagaaggaaagagaataaagattaaaggaaa

SEQ ID NO: 60555 - DNA, 72 bp, Homo sapiens
agattcccctaagtttatgagcataagcagagaaggaaagagaataaagattaaaggaaagtacagctgtta

SEQ ID NO: 60556 - DNA, 72 bp, Homo sapiens
ccctaagtttatgagcataagcagagaaggaaagagaataaagattaaaggaaagtacagctgttaataaga

SEQ ID NO: 60557 - DNA, 71 bp, Homo sapiens
gcataagcagagaaggaaagagaataaagattaaaggaaagtacagctgttaataagaaacacttccttcg

SEQ ID NO: 60558 - DNA, 70 bp, Homo sapiens
gcagagaaggaaagagaataaagattaaaggaaagtacagctgttaataagaaacacttccttcggtaga

SEQ ID NO: 60559 - DNA, 70 bp, Homo sapiens
agaataaagattaaaggaaagtacagctgttaataagaaacacttccttcggtagaaatgaggtgtctgc

SEQ ID NO: 60560 - DNA, 69 bp, Homo sapiens
aaagtacagctgttaataagaaacacttccttcggtagaaatgaggtgtctgcggtaaaaggggagaca

SEQ ID NO: 60561 - DNA, 71 bp, Homo sapiens
cttcggtagaaatgaggtgtctgcggtaaaaggggagacagagggcacgtgaagtgcctagttcaccaccc

SEQ ID NO: 60562 - DNA, 71 bp, Homo sapiens
aggtgtctgcggtaaaaggggagacagagggcacgtgaagtgcctagttcaccaccccccctgggatgata

SEQ ID NO: 60563 - DNA, 78 bp, Homo sapiens
agacagagggcacgtgaagtgcctagttcaccaccccccctgggatgatacagtgcatagttccccatgtcactgcca

SEQ ID NO: 60564 - DNA, 77 bp, Homo sapiens
agggcacgtgaagtgcctagttcaccaccccccctgggatgatacagtgcatagttccccatgtcactgccagtcac

SEQ ID NO: 60565 - DNA, 76 bp, Homo sapiens
aagtgcctagttcaccaccccccctgggatgatacagtgcatagttccccatgtcactgccagtcacccaggacaa

SEQ ID NO: 60566 - DNA, 79 bp, Homo sapiens
ttcaccaccccccctgggatgatacagtgcatagttccccatgtcactgccagtcacccaggacaacttcgctgtcatc

SEQ ID NO: 60567 - DNA, 85 bp, Homo sapiens
tgggatgatacagtgcatagttccccatgtcactgccagtcacccaggacaacttcgctgtcatccgcacttgcctcaagacaca

SEQ ID NO: 60568 - DNA, 83 bp, Homo sapiens
atacagtgcatagttccccatgtcactgccagtcacccaggacaacttcgctgtcatccgcacttgcctcaagacacaggaca

SEQ ID NO: 60569 - DNA, 82 bp, Homo sapiens
atagttccccatgtcactgccagtcacccaggacaacttcgctgtcatccgcacttgcctcaagacacaggacagaggagca

SEQ ID NO: 60570 - DNA, 80 bp, Homo sapiens
agtcacccaggacaacttcgctgtcatccgcacttgcctcaagacacaggacagaggagcaaggccgcaggccaccaaga

SEQ ID NO: 60571 - DNA, 82 bp, Homo sapiens
ctgtcatccgcacttgcctcaagacacaggacagaggagcaaggccgcaggccaccaagacagatgttgggatgcaggaagg

SEQ ID NO: 60572 - DNA, 80 bp, Homo sapiens
acttgcctcaagacacaggacagaggagcaaggccgcaggccaccaagacagatgttgggatgcaggaagggcgtgtgcc

SEQ ID NO: 60573 - DNA, 81 bp, Homo sapiens
aagacacaggacagaggagcaaggccgcaggccaccaagacagatgttgggatgcaggaagggcgtgtgcctgcacgtgcc

SEQ ID NO: 60574 - DNA, 79 bp, Homo sapiens
agatgttgggatgcaggaagggcgtgtgcctgcacgtgcctgtgctatgttcattgccccaaaagaaaaccacaatcta

SEQ ID NO: 60575 - DNA, 80 bp, Homo sapiens
atgcaggaagggcgtgtgcctgcacgtgcctgtgctatgttcattgccccaaaagaaaaccacaatctagacattcacaa

SEQ ID NO: 60576 - DNA, 78 bp, Homo sapiens
cacgtgcctgtgctatgttcattgccccaaaagaaaaccacaatctagacattcacaacaaagacagtgctcaagaag

SEQ ID NO: 60577 - DNA, 79 bp, Homo sapiens
tgctatgttcattgccccaaaagaaaaccacaatctagacattcacaacaaagacagtgctcaagaagtgaccaatgtc

SEQ ID NO: 60578 - DNA, 77 bp, Homo sapiens
tgttcattgccccaaaagaaaaccacaatctagacattcacaacaaagacagtgctcaagaagtgaccaatgtcttc

SEQ ID NO: 60579 - DNA, 76 bp, Homo sapiens
aaagaaaaccacaatctagacattcacaacaaagacagtgctcaagaagtgaccaatgtcttccgtgacagaggaa

SEQ ID NO: 60580 - DNA, 77 bp, Homo sapiens
aaccacaatctagacattcacaacaaagacagtgctcaagaagtgaccaatgtcttccgtgacagaggaaggaggaa

SEQ ID NO: 60581 - DNA, 75 bp, Homo sapiens
acattcacaacaaagacagtgctcaagaagtgaccaatgtcttccgtgacagaggaaggaggaaaagaacaaata

SEQ ID NO: 60582 - DNA, 71 bp, Homo sapiens
aacaaagacagtgctcaagaagtgaccaatgtcttccgtgacagaggaaggaggaaaagaacaaatacggg

SEQ ID NO: 60583 - DNA, 74 bp, Homo sapiens
agtgctcaagaagtgaccaatgtcttccgtgacagaggaaggaggaaaagaacaaatacggggcacagcttcaa

SEQ ID NO: 60584 - DNA, 75 bp, Homo sapiens
accaatgtcttccgtgacagaggaaggaggaaaagaacaaatacggggcacagcttcaagcagcagaagttcaca

SEQ ID NO: 60585 - DNA, 77 bp, Homo sapiens
ttccgtgacagaggaaggaggaaaagaacaaatacggggcacagcttcaagcagcagaagttcacagagtatcagaa

SEQ ID NO: 60586 - DNA, 73 bp, Homo sapiens
aggaaggaggaaaagaacaaatacggggcacagcttcaagcagcagaagttcacagagtatcagaaaaccaaa

SEQ ID NO: 60587 - DNA, 74 bp, Homo sapiens
aaaagaacaaatacggggcacagcttcaagcagcagaagttcacagagtatcagaaaaccaaatcgcctttctc

SEQ ID NO: 60588 - DNA, 78 bp, Homo sapiens
aaatacggggcacagcttcaagcagcagaagttcacagagtatcagaaaaccaaatcgcctttctcttcagcagataa

SEQ ID NO: 60589 - DNA, 81 bp, Homo sapiens
acagcttcaagcagcagaagttcacagagtatcagaaaaccaaatcgcctttctcttcagcagataagacttcctggagca

SEQ ID NO: 60590 - DNA, 79 bp, Homo sapiens
aagcagcagaagttcacagagtatcagaaaaccaaatcgcctttctcttcagcagataagacttcctggagcacctgac

SEQ ID NO: 60591 - DNA, 75 bp, Homo sapiens
tcagaaaaccaaatcgcctttctcttcagcagataagacttcctggagcacctgactgtcgtcgcgtggggaacg

SEQ ID NO: 60592 - DNA, 75 bp, Homo sapiens
aaaccaaatcgcctttctcttcagcagataagacttcctggagcacctgactgtcgtcgcgtggggaacgtgagc

SEQ ID NO: 60593 - DNA, 81 bp, Homo sapiens
tttctcttcagcagataagacttcctggagcacctgactgtcgtcgcgtggggaacgtgagcgcaacatgtcttgccacac

SEQ ID NO: 60594 - DNA, 80 bp, Homo sapiens
acctgactgtcgtcgcgtggggaacgtgagcgcaacatgtcttgccacacccaatggaaggcagcactcaggctgccgga

SEQ ID NO: 60595 - DNA, 81 bp, Homo sapiens
tcgtcgcgtggggaacgtgagcgcaacatgtcttgccacacccaatggaaggcagcactcaggctgccggagccttatgaa

SEQ ID NO: 60596 - DNA, 85 bp, Homo sapiens
gaacgtgagcgcaacatgtcttgccacacccaatggaaggcagcactcaggctgccggagccttatgaaccagagagctgctgta

SEQ ID NO: 60597 - DNA, 84 bp, Homo sapiens
gcaacatgtcttgccacacccaatggaaggcagcactcaggctgccggagccttatgaaccagagagctgctgtaagaacaata

SEQ ID NO: 60598 - DNA, 81 bp, Homo sapiens
atgtcttgccacacccaatggaaggcagcactcaggctgccggagccttatgaaccagagagctgctgtaagaacaataaa

SEQ ID NO: 60599 - DNA, 78 bp, Homo sapiens
acacccaatggaaggcagcactcaggctgccggagccttatgaaccagagagctgctgtaagaacaataaaggcaaat

SEQ ID NO: 60600 - DNA, 79 bp, Homo sapiens
cagcactcaggctgccggagccttatgaaccagagagctgctgtaagaacaataaaggcaaattcttcctgacctctac

SEQ ID NO: 60601 - DNA, 76 bp, Homo sapiens
aggctgccggagccttatgaaccagagagctgctgtaagaacaataaaggcaaattcttcctgacctctaccacta

SEQ ID NO: 60602 - DNA, 69 bp, Homo sapiens
ctgtaagaacaataaaggcaaattcttcctgacctctaccactaggagttccaaaaacagcacttacct

SEQ ID NO: 60603 - DNA, 69 bp, Homo sapiens
aataaaggcaaattcttcctgacctctaccactaggagttccaaaaacagcacttaccttggcaggctt

SEQ ID NO: 60604 - DNA, 72 bp, Homo sapiens
agttccaaaaacagcacttaccttggcaggctttcccagcctgacaatgcgtcatgtgattcaaaacgtttt

SEQ ID NO: 60605 - DNA, 76 bp, Homo sapiens
acagcacttaccttggcaggctttcccagcctgacaatgcgtcatgtgattcaaaacgtttttcatggttcgacaa

SEQ ID NO: 60606 - DNA, 77 bp, Homo sapiens
tttcccagcctgacaatgcgtcatgtgattcaaaacgtttttcatggttcgacaatgcgggagcgagcaggcccgaa

SEQ ID NO: 60607 - DNA, 74 bp, Homo sapiens
acaatgcgtcatgtgattcaaaacgtttttcatggttcgacaatgcgggagcgagcaggcccgaacctctccgt

SEQ ID NO: 60608 - DNA, 74 bp, Homo sapiens
atgtgattcaaaacgtttttcatggttcgacaatgcgggagcgagcaggcccgaacctctccgtttgcttgctc

SEQ ID NO: 60609 - DNA, 72 bp, Homo sapiens
aaaacgtttttcatggttcgacaatgcgggagcgagcaggcccgaacctctccgtttgcttgctctcgtctc

SEQ ID NO: 60610 - DNA, 80 bp, Homo sapiens
ttttcatggttcgacaatgcgggagcgagcaggcccgaacctctccgtttgcttgctctcgtctctgacacttatgagca

SEQ ID NO: 60611 - DNA, 83 bp, Homo sapiens
tcgacaatgcgggagcgagcaggcccgaacctctccgtttgcttgctctcgtctctgacacttatgagcatgaagcagtagaa

SEQ ID NO: 60612 - DNA, 85 bp, Homo sapiens
agcgagcaggcccgaacctctccgtttgcttgctctcgtctctgacacttatgagcatgaagcagtagaaccagctgctgctgta

SEQ ID NO: 60613 - DNA, 84 bp, Homo sapiens
cgaacctctccgtttgcttgctctcgtctctgacacttatgagcatgaagcagtagaaccagctgctgctgtatcagtttgcgt

SEQ ID NO: 60614 - DNA, 85 bp, Homo sapiens
ctctccgtttgcttgctctcgtctctgacacttatgagcatgaagcagtagaaccagctgctgctgtatcagtttgcgtttttca

SEQ ID NO: 60615 - DNA, 87 bp, Homo sapiens
cttgctctcgtctctgacacttatgagcatgaagcagtagaaccagctgctgctgtatcagtttgcgtttttcaggatctgcagtgg

SEQ ID NO: 60616 - DNA, 86 bp, Homo sapiens
tgacacttatgagcatgaagcagtagaaccagctgctgctgtatcagtttgcgtttttcaggatctgcagtggggcctgttgcaat

SEQ ID NO: 60617 - DNA, 85 bp, Homo sapiens
cttatgagcatgaagcagtagaaccagctgctgctgtatcagtttgcgtttttcaggatctgcagtggggcctgttgcaattgct

SEQ ID NO: 60618 - DNA, 78 bp, Homo sapiens
tgtatcagtttgcgtttttcaggatctgcagtggggcctgttgcaattgcttgtgtgggtacaattcccactgatgtt

SEQ ID NO: 60619 - DNA, 78 bp, Homo sapiens
agtttgcgtttttcaggatctgcagtggggcctgttgcaattgcttgtgtgggtacaattcccactgatgtttgcatc

SEQ ID NO: 60620 - DNA, 79 bp, Homo sapiens
aggatctgcagtggggcctgttgcaattgcttgtgtgggtacaattcccactgatgtttgcatctgagactaaaataaa

SEQ ID NO: 60621 - DNA, 76 bp, Homo sapiens
agtggggcctgttgcaattgcttgtgtgggtacaattcccactgatgtttgcatctgagactaaaataaagcaaaa

SEQ ID NO: 60622 - DNA, 76 bp, Homo sapiens
ctgttgcaattgcttgtgtgggtacaattcccactgatgtttgcatctgagactaaaataaagcaaaataataaaa

SEQ ID NO: 60623 - DNA, 69 bp, Homo sapiens
caaaataataaaaatactttaacctctcagagttccaagtcatattcattaattatttctcaaacaaaa

SEQ ID NO: 60624 - DNA, 75 bp, Homo sapiens
acctctcagagttccaagtcatattcattaattatttctcaaacaaaagcaaaagctgatggataataccgacca

SEQ ID NO: 60625 - DNA, 76 bp, Homo sapiens
gagttccaagtcatattcattaattatttctcaaacaaaagcaaaagctgatggataataccgaccacagagagaa

SEQ ID NO: 60626 - DNA, 75 bp, Homo sapiens
atattcattaattatttctcaaacaaaagcaaaagctgatggataataccgaccacagagagaaggctggtgtag

SEQ ID NO: 60627 - DNA, 75 bp, Homo sapiens
taattatttctcaaacaaaagcaaaagctgatggataataccgaccacagagagaaggctggtgtagttctctaa

SEQ ID NO: 60628 - DNA, 75 bp, Homo sapiens
aaacaaaagcaaaagctgatggataataccgaccacagagagaaggctggtgtagttctctaacccactgatgac

SEQ ID NO: 60629 - DNA, 75 bp, Homo sapiens
aaaagctgatggataataccgaccacagagagaaggctggtgtagttctctaacccactgatgactttaagaaga

SEQ ID NO: 60630 - DNA, 79 bp, Homo sapiens
ataccgaccacagagagaaggctggtgtagttctctaacccactgatgactttaagaagatccagcagcacagaaatca

SEQ ID NO: 60631 - DNA, 78 bp, Homo sapiens
agagagaaggctggtgtagttctctaacccactgatgactttaagaagatccagcagcacagaaatcaacccaactca

SEQ ID NO: 60632 - DNA, 82 bp, Homo sapiens
gtgtagttctctaacccactgatgactttaagaagatccagcagcacagaaatcaacccaactcagcagcaaggctgattca

SEQ ID NO: 60633 - DNA, 81 bp, Homo sapiens
atgactttaagaagatccagcagcacagaaatcaacccaactcagcagcaaggctgattcaagttcacttgtatacaatta

SEQ ID NO: 60634 - DNA, 83 bp, Homo sapiens
tttaagaagatccagcagcacagaaatcaacccaactcagcagcaaggctgattcaagttcacttgtatacaattatcatcca

SEQ ID NO: 60635 - DNA, 84 bp, Homo sapiens
cagcacagaaatcaacccaactcagcagcaaggctgattcaagttcacttgtatacaattatcatccaagcaagacaatggctg

SEQ ID NO: 60636 - DNA, 81 bp, Homo sapiens
aaatcaacccaactcagcagcaaggctgattcaagttcacttgtatacaattatcatccaagcaagacaatggctggctct

SEQ ID NO: 60637 - DNA, 84 bp, Homo sapiens
aactcagcagcaaggctgattcaagttcacttgtatacaattatcatccaagcaagacaatggctggctcttcactgtagcaac

SEQ ID NO: 60638 - DNA, 80 bp, Homo sapiens
aaggctgattcaagttcacttgtatacaattatcatccaagcaagacaatggctggctcttcactgtagcaaccaaaatc

SEQ ID NO: 60639 - DNA, 80 bp, Homo sapiens
attcaagttcacttgtatacaattatcatccaagcaagacaatggctggctcttcactgtagcaaccaaaatccaactca

SEQ ID NO: 60640 - DNA, 82 bp, Homo sapiens
ttgtatacaattatcatccaagcaagacaatggctggctcttcactgtagcaaccaaaatccaactcactctacaatataca

SEQ ID NO: 60641 - DNA, 80 bp, Homo sapiens
aattatcatccaagcaagacaatggctggctcttcactgtagcaaccaaaatccaactcactctacaatatacacaacta

SEQ ID NO: 60642 - DNA, 77 bp, Homo sapiens
aagcaagacaatggctggctcttcactgtagcaaccaaaatccaactcactctacaatatacacaactacaggaaaa

SEQ ID NO: 60643 - DNA, 78 bp, Homo sapiens
gctggctcttcactgtagcaaccaaaatccaactcactctacaatatacacaactacaggaaaagctgtgtactatac

SEQ ID NO: 60644 - DNA, 78 bp, Homo sapiens
ttcactgtagcaaccaaaatccaactcactctacaatatacacaactacaggaaaagctgtgtactataccagctgga

SEQ ID NO: 60645 - DNA, 76 bp, Homo sapiens
accaaaatccaactcactctacaatatacacaactacaggaaaagctgtgtactataccagctggaccatatgaaa

SEQ ID NO: 60646 - DNA, 78 bp, Homo sapiens
aatccaactcactctacaatatacacaactacaggaaaagctgtgtactataccagctggaccatatgaaactgctgt

SEQ ID NO: 60647 - DNA, 77 bp, Homo sapiens
actctacaatatacacaactacaggaaaagctgtgtactataccagctggaccatatgaaactgctgtttctgtagg

SEQ ID NO: 60648 - DNA, 76 bp, Homo sapiens
atacacaactacaggaaaagctgtgtactataccagctggaccatatgaaactgctgtttctgtaggtcccaaatg

SEQ ID NO: 60649 - DNA, 76 bp, Homo sapiens
aaaagctgtgtactataccagctggaccatatgaaactgctgtttctgtaggtcccaaatggccaaacactggcaa

SEQ ID NO: 60650 - DNA, 78 bp, Homo sapiens
tgtgtactataccagctggaccatatgaaactgctgtttctgtaggtcccaaatggccaaacactggcaatttcatag

SEQ ID NO: 60651 - DNA, 76 bp, Homo sapiens
taccagctggaccatatgaaactgctgtttctgtaggtcccaaatggccaaacactggcaatttcatagggtacaa

SEQ ID NO: 60652 - DNA, 72 bp, Homo sapiens
atatgaaactgctgtttctgtaggtcccaaatggccaaacactggcaatttcatagggtacaacctaattaa

SEQ ID NO: 60653 - DNA, 71 bp, Homo sapiens
tgtttctgtaggtcccaaatggccaaacactggcaatttcatagggtacaacctaattaaaaagattgcca

SEQ ID NO: 60654 - DNA, 71 bp, Homo sapiens
aaatggccaaacactggcaatttcatagggtacaacctaattaaaaagattgccaaggcctggccgagcgc

SEQ ID NO: 60655 - DNA, 72 bp, Homo sapiens
aacactggcaatttcatagggtacaacctaattaaaaagattgccaaggcctggccgagcgcgttggctcac

SEQ ID NO: 60656 - DNA, 75 bp, Homo sapiens
aaaaaaagatttgccaaggcctgaccaattgcaatgtactacaaacatttgatgtagcaaaaagaatcagagcca

SEQ ID NO: 60657 - DNA, 75 bp, Homo sapiens
aagatttgccaaggcctgaccaattgcaatgtactacaaacatttgatgtagcaaaaagaatcagagccaccttt

SEQ ID NO: 60658 - DNA, 75 bp, Homo sapiens
aaggcctgaccaattgcaatgtactacaaacatttgatgtagcaaaaagaatcagagccaccttttggatttcat

SEQ ID NO: 60659 - DNA, 80 bp, Homo sapiens
caattgcaatgtactacaaacatttgatgtagcaaaaagaatcagagccaccttttggatttcattatcacatgactaga

SEQ ID NO: 60660 - DNA, 77 bp, Homo sapiens
gtactacaaacatttgatgtagcaaaaagaatcagagccaccttttggatttcattatcacatgactagaaggacaa

SEQ ID NO: 60661 - DNA, 81 bp, Homo sapiens
tttgatgtagcaaaaagaatcagagccaccttttggatttcattatcacatgactagaaggacaatgcgtgcagcttgatt

SEQ ID NO: 60662 - DNA, 80 bp, Homo sapiens
aaaaagaatcagagccaccttttggatttcattatcacatgactagaaggacaatgcgtgcagcttgatttcacagcaac

SEQ ID NO: 60663 - DNA, 82 bp, Homo sapiens
atcagagccaccttttggatttcattatcacatgactagaaggacaatgcgtgcagcttgatttcacagcaaccattacctc

SEQ ID NO: 60664 - DNA, 81 bp, Homo sapiens
ttggatttcattatcacatgactagaaggacaatgcgtgcagcttgatttcacagcaaccattacctctcctaaaagaata

SEQ ID NO: 60665 - DNA, 81 bp, Homo sapiens
ttatcacatgactagaaggacaatgcgtgcagcttgatttcacagcaaccattacctctcctaaaagaataatgacagtta

SEQ ID NO: 60666 - DNA, 77 bp, Homo sapiens
ctagaaggacaatgcgtgcagcttgatttcacagcaaccattacctctcctaaaagaataatgacagttagccttaa

SEQ ID NO: 60667 - DNA, 77 bp, Homo sapiens
aggacaatgcgtgcagcttgatttcacagcaaccattacctctcctaaaagaataatgacagttagccttaatacaa

SEQ ID NO: 60668 - DNA, 75 bp, Homo sapiens
gcttgatttcacagcaaccattacctctcctaaaagaataatgacagttagccttaatacaaccacccagtgcaa

SEQ ID NO: 60669 - DNA, 72 bp, Homo sapiens
acagcaaccattacctctcctaaaagaataatgacagttagccttaatacaaccacccagtgcaatgggaaa

SEQ ID NO: 60670 - DNA, 72 bp, Homo sapiens
aaccattacctctcctaaaagaataatgacagttagccttaatacaaccacccagtgcaatgggaaatgcat

SEQ ID NO: 60671 - DNA, 75 bp, Homo sapiens
taaaagaataatgacagttagccttaatacaaccacccagtgcaatgggaaatgcattcttgtcctatgctttgt

SEQ ID NO: 60672 - DNA, 75 bp, Homo sapiens
aataatgacagttagccttaatacaaccacccagtgcaatgggaaatgcattcttgtcctatgctttgtttttca

SEQ ID NO: 60673 - DNA, 76 bp, Homo sapiens
aatacaaccacccagtgcaatgggaaatgcattcttgtcctatgctttgtttttcattacaatttccactcagaca

SEQ ID NO: 60674 - DNA, 77 bp, Homo sapiens
tgcaatgggaaatgcattcttgtcctatgctttgtttttcattacaatttccactcagacagctgacaatttttaaa

SEQ ID NO: 60675 - DNA, 76 bp, Homo sapiens
ttcttgtcctatgctttgtttttcattacaatttccactcagacagctgacaatttttaaagatttggtgatctgc

SEQ ID NO: 60676 - DNA, 74 bp, Homo sapiens
atgctttgtttttcattacaatttccactcagacagctgacaatttttaaagatttggtgatctgctaaaaata

SEQ ID NO: 60677 - DNA, 67 bp, Homo sapiens
aaaatacagaaagggtttgctttcagttgcctgaaataacaagccagaccaaacaaaccttttaaca

SEQ ID NO: 60678 - DNA, 68 bp, Homo sapiens
aaagggtttgctttcagttgcctgaaataacaagccagaccaaacaaaccttttaacagcaaggcaaa

SEQ ID NO: 60679 - DNA, 70 bp, Homo sapiens
ttgctttcagttgcctgaaataacaagccagaccaaacaaaccttttaacagcaaggcaaatggaaaagg

SEQ ID NO: 60680 - DNA, 69 bp, Homo sapiens
tgaaataacaagccagaccaaacaaaccttttaacagcaaggcaaatggaaaaggggacccatagagtc

SEQ ID NO: 60681 - DNA, 66 bp, Homo sapiens
aacaaaccttttaacagcaaggcaaatggaaaaggggacccatagagtcttcttctttacaaacta

SEQ ID NO: 60682 - DNA, 71 bp, Homo sapiens
ttttaacagcaaggcaaatggaaaaggggacccatagagtcttcttctttacaaactataagcattcttca

SEQ ID NO: 60683 - DNA, 70 bp, Homo sapiens
aggcaaatggaaaaggggacccatagagtcttcttctttacaaactataagcattcttcagataaactta

SEQ ID NO: 60684 - DNA, 70 bp, Homo sapiens
atggaaaaggggacccatagagtcttcttctttacaaactataagcattcttcagataaacttactgaaa

SEQ ID NO: 60685 - DNA, 72 bp, Homo sapiens
ggacccatagagtcttcttctttacaaactataagcattcttcagataaacttactgaaaaagacttaggca

SEQ ID NO: 60686 - DNA, 72 bp, Homo sapiens
tcttctttacaaactataagcattcttcagataaacttactgaaaaagacttaggcagtaagagaagtgttc

SEQ ID NO: 60687 - DNA, 75 bp, Homo sapiens
tacaaactataagcattcttcagataaacttactgaaaaagacttaggcagtaagagaagtgttcctaatgtgca

SEQ ID NO: 60688 - DNA, 76 bp, Homo sapiens
ttcagataaacttactgaaaaagacttaggcagtaagagaagtgttcctaatgtgcaacagtatcatccacagttc

SEQ ID NO: 60689 - DNA, 74 bp, Homo sapiens
tgaaaaagacttaggcagtaagagaagtgttcctaatgtgcaacagtatcatccacagttccgggatttccaat

SEQ ID NO: 60690 - DNA, 76 bp, Homo sapiens
taagagaagtgttcctaatgtgcaacagtatcatccacagttccgggatttccaattttctctagtactctgatat

SEQ ID NO: 60691 - DNA, 76 bp, Homo sapiens
agtgttcctaatgtgcaacagtatcatccacagttccgggatttccaattttctctagtactctgatatttccagc

SEQ ID NO: 60692 - DNA, 78 bp, Homo sapiens
atgtgcaacagtatcatccacagttccgggatttccaattttctctagtactctgatatttccagcttgcttccacga

SEQ ID NO: 60693 - DNA, 76 bp, Homo sapiens
tatcatccacagttccgggatttccaattttctctagtactctgatatttccagcttgcttccacgaccctcatta

SEQ ID NO: 60694 - DNA, 73 bp, Homo sapiens
atccacagttccgggatttccaattttctctagtactctgatatttccagcttgcttccacgaccctcattac

SEQ ID NO: 60695 - DNA, 71 bp, Homo sapiens
agttccgggatttccaattttctctagtactctgatatttccagcttgcttccacgaccctcattacctcc

SEQ ID NO: 60696 - DNA, 67 bp, Homo sapiens
atatttccagcttgcttccacgaccctcattacctcccctaaagtacgccactcggattttttaaaa

SEQ ID NO: 60697 - DNA, 67 bp, Homo sapiens
ttccacgaccctcattacctcccctaaagtacgccactcggattttttaaaaatgtatgaatcaaaa

SEQ ID NO: 60698 - DNA, 68 bp, Homo sapiens
gaccctcattacctcccctaaagtacgccactcggattttttaaaaatgtatgaatcaaaactgtata

SEQ ID NO: 60699 - DNA, 69 bp, Homo sapiens
ctcccctaaagtacgccactcggattttttaaaaatgtatgaatcaaaactgtatattcacaaagagga

SEQ ID NO: 60700 - DNA, 72 bp, Homo sapiens
tcaaaactgtatattcacaaagaggagagaaaactatacaaataatttttaatgaatcaaagctcactttta

SEQ ID NO: 60701 - DNA, 70 bp, Homo sapiens
tcacaaagaggagagaaaactatacaaataatttttaatgaatcaaagctcacttttaaaagtttataga

SEQ ID NO: 60702 - DNA, 68 bp, Homo sapiens
gagagaaaactatacaaataatttttaatgaatcaaagctcacttttaaaagtttatagagttttctg

SEQ ID NO: 60703 - DNA, 65 bp, Homo sapiens
atttttaatgaatcaaagctcacttttaaaagtttatagagttttctgttttgattttaccttta

SEQ ID NO: 60704 - DNA, 69 bp, Homo sapiens
atgaatcaaagctcacttttaaaagtttatagagttttctgttttgattttacctttatgagaactaga

SEQ ID NO: 60705 - DNA, 66 bp, Homo sapiens
gctcacttttaaaagtttatagagttttctgttttgattttacctttatgagaactagaaaataag

SEQ ID NO: 60706 - DNA, 66 bp, Homo sapiens
agtttatagagttttctgttttgattttacctttatgagaactagaaaataagtacgtagaaaagc

SEQ ID NO: 60707 - DNA, 67 bp, Homo sapiens
gttttctgttttgattttacctttatgagaactagaaaataagtacgtagaaaagctgggtggctgg

SEQ ID NO: 60708 - DNA, 68 bp, Homo sapiens
tttctgttttgattttacctttatgagaactagaaaataagtacgtagaaaagctgggtggctgggct

SEQ ID NO: 60709 - DNA, 69 bp, Homo sapiens
tgttttgattttacctttatgagaactagaaaataagtacgtagaaaagctgggtggctgggcttggga

SEQ ID NO: 60710 - DNA, 68 bp, Homo sapiens
attttacctttatgagaactagaaaataagtacgtagaaaagctgggtggctgggcttgggagcaaaa

SEQ ID NO: 60711 - DNA, 69 bp, Homo sapiens
ttacctttatgagaactagaaaataagtacgtagaaaagctgggtggctgggcttgggagcaaaactct

SEQ ID NO: 60712 - DNA, 70 bp, Homo sapiens
ctttatgagaactagaaaataagtacgtagaaaagctgggtggctgggcttgggagcaaaactcttggaa

SEQ ID NO: 60713 - DNA, 70 bp, Homo sapiens
aactagaaaataagtacgtagaaaagctgggtggctgggcttgggagcaaaactcttggaagtctgagaa

SEQ ID NO: 60714 - DNA, 70 bp, Homo sapiens
actagaaaataagtacgtagaaaagctgggtggctgggcttgggagcaaaactcttggaagtctgagaag

SEQ ID NO: 60715 - DNA, 69 bp, Homo sapiens
aaaataagtacgtagaaaagctgggtggctgggcttgggagcaaaactcttggaagtctgagaaggacc

SEQ ID NO: 60716 - DNA, 72 bp, Homo sapiens
tacgtagaaaagctgggtggctgggcttgggagcaaaactcttggaagtctgagaaggacccaaagcaattc

SEQ ID NO: 60717 - DNA, 72 bp, Homo sapiens
aaaagctgggtggctgggcttgggagcaaaactcttggaagtctgagaaggacccaaagcaattctgagaag

SEQ ID NO: 60718 - DNA, 72 bp, Homo sapiens
tgggcttgggagcaaaactcttggaagtctgagaaggacccaaagcaattctgagaaggacccaaagcaaaa

SEQ ID NO: 60719 - DNA, 75 bp, Homo sapiens
agcaaaactcttggaagtctgagaaggacccaaagcaattctgagaaggacccaaagcaaaatcagcatcctagc

SEQ ID NO: 60720 - DNA, 79 bp, Homo sapiens
tcttggaagtctgagaaggacccaaagcaattctgagaaggacccaaagcaaaatcagcatcctagctgagaagcagaa

SEQ ID NO: 60721 - DNA, 81 bp, Homo sapiens
aattctgagaaggacccaaagcaaaatcagcatcctagctgagaagcagaacaccatgaatgcagggctcaactcctaaga

SEQ ID NO: 60722 - DNA, 80 bp, Homo sapiens
aaatcagcatcctagctgagaagcagaacaccatgaatgcagggctcaactcctaagagaaaatagcctcttatgtttat

SEQ ID NO: 60723 - DNA, 76 bp, Homo sapiens
atcctagctgagaagcagaacaccatgaatgcagggctcaactcctaagagaaaatagcctcttatgtttattttt

SEQ ID NO: 60724 - DNA, 75 bp, Homo sapiens
aagcagaacaccatgaatgcagggctcaactcctaagagaaaatagcctcttatgtttattttttcctgattata

SEQ ID NO: 60725 - DNA, 72 bp, Homo sapiens
acaccatgaatgcagggctcaactcctaagagaaaatagcctcttatgtttattttttcctgattataaaag

SEQ ID NO: 60726 - DNA, 74 bp, Homo sapiens
tgcagggctcaactcctaagagaaaatagcctcttatgtttattttttcctgattataaaagtatatatataca

SEQ ID NO: 60727 - DNA, 73 bp, Homo sapiens
tattttttcctgattataaaagtatatatatacactgcaggaaatttggaaagctagagaactactacagaaa

SEQ ID NO: 60728 - DNA, 75 bp, Homo sapiens
tcctgattataaaagtatatatatacactgcaggaaatttggaaagctagagaactactacagaaataattaaca

SEQ ID NO: 60729 - DNA, 72 bp, Homo sapiens
agtatatatatacactgcaggaaatttggaaagctagagaactactacagaaataattaacaacaattaaaa

SEQ ID NO: 60730 - DNA, 72 bp, Homo sapiens
tacactgcaggaaatttggaaagctagagaactactacagaaataattaacaacaattaaaatcccattatc

SEQ ID NO: 60731 - DNA, 72 bp, Homo sapiens
tgcaggaaatttggaaagctagagaactactacagaaataattaacaacaattaaaatcccattatccagga

SEQ ID NO: 60732 - DNA, 71 bp, Homo sapiens
ggaaagctagagaactactacagaaataattaacaacaattaaaatcccattatccaggagtccactacta

SEQ ID NO: 60733 - DNA, 68 bp, Homo sapiens
cagaaataattaacaacaattaaaatcccattatccaggagtccactactaaagcgttgataggtttt

SEQ ID NO: 60734 - DNA, 66 bp, Homo sapiens
acaacaattaaaatcccattatccaggagtccactactaaagcgttgataggtttttttcccttct

SEQ ID NO: 60735 - DNA, 67 bp, Homo sapiens
cattatccaggagtccactactaaagcgttgataggtttttttcccttcttttttctatataaatgt

SEQ ID NO: 60736 - DNA, 67 bp, Homo sapiens
gagtccactactaaagcgttgataggtttttttcccttcttttttctatataaatgtttacgtatga

SEQ ID NO: 60737 - DNA, 69 bp, Homo sapiens
gcgttgataggtttttttcccttcttttttctatataaatgtttacgtatgaaccataatcaatagagc

SEQ ID NO: 60738 - DNA, 69 bp, Homo sapiens
gtttttttcccttcttttttctatataaatgtttacgtatgaaccataatcaatagagcctcgtatctc

SEQ ID NO: 60739 - DNA, 75 bp, Homo sapiens
cttcttttttctatataaatgtttacgtatgaaccataatcaatagagcctcgtatctcccctgcaacacacatg

SEQ ID NO: 60740 - DNA, 77 bp, Homo sapiens
tttctatataaatgtttacgtatgaaccataatcaatagagcctcgtatctcccctgcaacacacatgttttgctta

SEQ ID NO: 60741 - DNA, 75 bp, Homo sapiens
taaatgtttacgtatgaaccataatcaatagagcctcgtatctcccctgcaacacacatgttttgcttagtgttt

SEQ ID NO: 60742 - DNA, 76 bp, Homo sapiens
cgtatgaaccataatcaatagagcctcgtatctcccctgcaacacacatgttttgcttagtgttttttccatgttc

SEQ ID NO: 60743 - DNA, 76 bp, Homo sapiens
ataatcaatagagcctcgtatctcccctgcaacacacatgttttgcttagtgttttttccatgttctgccccatac

SEQ ID NO: 60744 - DNA, 76 bp, Homo sapiens
tcgtatctcccctgcaacacacatgttttgcttagtgttttttccatgttctgccccataccactaaactgtctca

SEQ ID NO: 60745 - DNA, 77 bp, Homo sapiens
tatctcccctgcaacacacatgttttgcttagtgttttttccatgttctgccccataccactaaactgtctcagata

SEQ ID NO: 60746 - DNA, 75 bp, Homo sapiens
ccctgcaacacacatgttttgcttagtgttttttccatgttctgccccataccactaaactgtctcagatagtgg

SEQ ID NO: 60747 - DNA, 76 bp, Homo sapiens
acacatgttttgcttagtgttttttccatgttctgccccataccactaaactgtctcagatagtgggctggaatga

SEQ ID NO: 60748 - DNA, 75 bp, Homo sapiens
ttttgcttagtgttttttccatgttctgccccataccactaaactgtctcagatagtgggctggaatgacttgta

SEQ ID NO: 60749 - DNA, 75 bp, Homo sapiens
cttagtgttttttccatgttctgccccataccactaaactgtctcagatagtgggctggaatgacttgtaatgaa

SEQ ID NO: 60750 - DNA, 76 bp, Homo sapiens
ttagtgttttttccatgttctgccccataccactaaactgtctcagatagtgggctggaatgacttgtaatgaaca

SEQ ID NO: 60751 - DNA, 78 bp, Homo sapiens
tttttccatgttctgccccataccactaaactgtctcagatagtgggctggaatgacttgtaatgaacagcatgttac

SEQ ID NO: 60752 - DNA, 78 bp, Homo sapiens
atgttctgccccataccactaaactgtctcagatagtgggctggaatgacttgtaatgaacagcatgttactctttta

SEQ ID NO: 60753 - DNA, 76 bp, Homo sapiens
ccataccactaaactgtctcagatagtgggctggaatgacttgtaatgaacagcatgttactcttttaactttata

SEQ ID NO: 60754 - DNA, 76 bp, Homo sapiens
tctcagatagtgggctggaatgacttgtaatgaacagcatgttactcttttaactttatactcatttaactagttc

SEQ ID NO: 60755 - DNA, 73 bp, Homo sapiens
gctggaatgacttgtaatgaacagcatgttactcttttaactttatactcatttaactagttcttgttatggg

SEQ ID NO: 60756 - DNA, 71 bp, Homo sapiens
cttgtaatgaacagcatgttactcttttaactttatactcatttaactagttcttgttatggggcataaac

SEQ ID NO: 60757 - DNA, 71 bp, Homo sapiens
cagcatgttactcttttaactttatactcatttaactagttcttgttatggggcataaactggaatccctg

SEQ ID NO: 60758 - DNA, 68 bp, Homo sapiens
gggcataaactggaatccctggcccctcctttattttttataactgtaaataaagcttcagtaagcaa

SEQ ID NO: 60759 - DNA, 66 bp, Homo sapiens
aaactggaatccctggcccctcctttattttttataactgtaaataaagcttcagtaagcaaacag

SEQ ID NO: 60760 - DNA, 70 bp, Homo sapiens
tccctggcccctcctttattttttataactgtaaataaagcttcagtaagcaaacaggccttgagctgcc

SEQ ID NO: 60761 - DNA, 76 bp, Homo sapiens
tttattttttataactgtaaataaagcttcagtaagcaaacaggccttgagctgcccctgcaagcatgcagtactg

SEQ ID NO: 60762 - DNA, 80 bp, Homo sapiens
taaataaagcttcagtaagcaaacaggccttgagctgcccctgcaagcatgcagtactggtgttaagtccactgctcaac

SEQ ID NO: 60763 - DNA, 81 bp, Homo sapiens
ttcagtaagcaaacaggccttgagctgcccctgcaagcatgcagtactggtgttaagtccactgctcaactggcttatccc

SEQ ID NO: 60764 - DNA, 80 bp, Homo sapiens
aaacaggccttgagctgcccctgcaagcatgcagtactggtgttaagtccactgctcaactggcttatccctgtggattg

SEQ ID NO: 60765 - DNA, 81 bp, Homo sapiens
ctgcccctgcaagcatgcagtactggtgttaagtccactgctcaactggcttatccctgtggattggaaggtccatcgaga

SEQ ID NO: 60766 - DNA, 79 bp, Homo sapiens
aagcatgcagtactggtgttaagtccactgctcaactggcttatccctgtggattggaaggtccatcgagaaatcaaca

SEQ ID NO: 60767 - DNA, 79 bp, Homo sapiens
tgttaagtccactgctcaactggcttatccctgtggattggaaggtccatcgagaaatcaacaggaatggagatatgga

SEQ ID NO: 60768 - DNA, 78 bp, Homo sapiens
actgctcaactggcttatccctgtggattggaaggtccatcgagaaatcaacaggaatggagatatggaggaatggga

SEQ ID NO: 60769 - DNA, 75 bp, Homo sapiens
ttatccctgtggattggaaggtccatcgagaaatcaacaggaatggagatatggaggaatgggagaaacacaaaa

SEQ ID NO: 60770 - DNA, 77 bp, Homo sapiens
tggattggaaggtccatcgagaaatcaacaggaatggagatatggaggaatgggagaaacacaaaatgagcctcatt

SEQ ID NO: 60771 - DNA, 73 bp, Homo sapiens
aaatcaacaggaatggagatatggaggaatgggagaaacacaaaatgagcctcatttaggactctttctttta

SEQ ID NO: 60772 - DNA, 73 bp, Homo sapiens
gaatggagatatggaggaatgggagaaacacaaaatgagcctcatttaggactctttcttttacgtttatgaa

SEQ ID NO: 60773 - DNA, 71 bp, Homo sapiens
gagatatggaggaatgggagaaacacaaaatgagcctcatttaggactctttcttttacgtttatgaaaat

SEQ ID NO: 60774 - DNA, 69 bp, Homo sapiens
ggaatgggagaaacacaaaatgagcctcatttaggactctttcttttacgtttatgaaaatttcaaaca

SEQ ID NO: 60775 - DNA, 70 bp, Homo sapiens
cacaaaatgagcctcatttaggactctttcttttacgtttatgaaaatttcaaacatacagaaaaatgga

SEQ ID NO: 60776 - DNA, 68 bp, Homo sapiens
ggactctttcttttacgtttatgaaaatttcaaacatacagaaaaatggaaaggaaaggatatcatcc

SEQ ID NO: 60777 - DNA, 69 bp, Homo sapiens
ttacgtttatgaaaatttcaaacatacagaaaaatggaaaggaaaggatatcatccttacacctaagaa

SEQ ID NO: 60778 - DNA, 69 bp, Homo sapiens
tgaaaatttcaaacatacagaaaaatggaaaggaaaggatatcatccttacacctaagaaaaagaacca

SEQ ID NO: 60779 - DNA, 68 bp, Homo sapiens
aacatacagaaaaatggaaaggaaaggatatcatccttacacctaagaaaaagaaccatccttcttgg

SEQ ID NO: 60780 - DNA, 71 bp, Homo sapiens
aaaatggaaaggaaaggatatcatccttacacctaagaaaaagaaccatccttcttgggcatcagctaata

SEQ ID NO: 60781 - DNA, 74 bp, Homo sapiens
aaaggaaaggatatcatccttacacctaagaaaaagaaccatccttcttgggcatcagctaatactgagtcata

SEQ ID NO: 60782 - DNA, 76 bp, Homo sapiens
atatcatccttacacctaagaaaaagaaccatccttcttgggcatcagctaatactgagtcatatcccaatttctc

SEQ ID NO: 60783 - DNA, 74 bp, Homo sapiens
acctaagaaaaagaaccatccttcttgggcatcagctaatactgagtcatatcccaatttctctggttgtccaa

SEQ ID NO: 60784 - DNA, 75 bp, Homo sapiens
aaaagaaccatccttcttgggcatcagctaatactgagtcatatcccaatttctctggttgtccaaaacatgtct

SEQ ID NO: 60785 - DNA, 78 bp, Homo sapiens
atcagctaatactgagtcatatcccaatttctctggttgtccaaaacatgtcttttagagctggtgttcacaaatcag

SEQ ID NO: 60786 - DNA, 76 bp, Homo sapiens
ctaatactgagtcatatcccaatttctctggttgtccaaaacatgtcttttagagctggtgttcacaaatcaggac

SEQ ID NO: 60787 - DNA, 72 bp, Homo sapiens
atatcccaatttctctggttgtccaaaacatgtcttttagagctggtgttcacaaatcaggaccccaagaag

SEQ ID NO: 60788 - DNA, 72 bp, Homo sapiens
aatttctctggttgtccaaaacatgtcttttagagctggtgttcacaaatcaggaccccaagaaggcccaca

SEQ ID NO: 60789 - DNA, 71 bp, Homo sapiens
acatgtcttttagagctggtgttcacaaatcaggaccccaagaaggcccacatcctgtatttggttgtttt

SEQ ID NO: 60790 - DNA, 68 bp, Homo sapiens
ctggtgttcacaaatcaggaccccaagaaggcccacatcctgtatttggttgtttttaaggttcttaa

SEQ ID NO: 60791 - DNA, 68 bp, Homo sapiens
acaaatcaggaccccaagaaggcccacatcctgtatttggttgtttttaaggttcttaatctattgta

SEQ ID NO: 60792 - DNA, 66 bp, Homo sapiens
accccaagaaggcccacatcctgtatttggttgtttttaaggttcttaatctattgtatcttccct

SEQ ID NO: 60793 - DNA, 65 bp, Homo sapiens
agaaggcccacatcctgtatttggttgtttttaaggttcttaatctattgtatcttccctttttt

SEQ ID NO: 60794 - DNA, 67 bp, Homo sapiens
catcctgtatttggttgtttttaaggttcttaatctattgtatcttccctttttttactcctgacac

SEQ ID NO: 60795 - DNA, 68 bp, Homo sapiens
tgtttttaaggttcttaatctattgtatcttccctttttttactcctgacactaccttgttgaagaga

SEQ ID NO: 60796 - DNA, 70 bp, Homo sapiens
ttaaggttcttaatctattgtatcttccctttttttactcctgacactaccttgttgaagagaccacaca

SEQ ID NO: 60797 - DNA, 73 bp, Homo sapiens
taatctattgtatcttccctttttttactcctgacactaccttgttgaagagaccacacagttgtcctctcac

SEQ ID NO: 60798 - DNA, 74 bp, Homo sapiens
tttttactcctgacactaccttgttgaagagaccacacagttgtcctctcactgtgtcttaaagtacagaaata

SEQ ID NO: 60799 - DNA, 74 bp, Homo sapiens
actaccttgttgaagagaccacacagttgtcctctcactgtgtcttaaagtacagaaatatcacataccaaaaa

SEQ ID NO: 60800 - DNA, 74 bp, Homo sapiens
cttgttgaagagaccacacagttgtcctctcactgtgtcttaaagtacagaaatatcacataccaaaaaaatta

SEQ ID NO: 60801 - DNA, 72 bp, Homo sapiens
agaccacacagttgtcctctcactgtgtcttaaagtacagaaatatcacataccaaaaaaattatataaaaa

SEQ ID NO: 60802 - DNA, 71 bp, Homo sapiens
gttgtcctctcactgtgtcttaaagtacagaaatatcacataccaaaaaaattatataaaaattaggcaaa

SEQ ID NO: 60803 - DNA, 69 bp, Homo sapiens
tgtgtcttaaagtacagaaatatcacataccaaaaaaattatataaaaattaggcaaaaaatttagctc

SEQ ID NO: 60804 - DNA, 68 bp, Homo sapiens
gtacagaaatatcacataccaaaaaaattatataaaaattaggcaaaaaatttagctctacaagtaaa

SEQ ID NO: 60805 - DNA, 68 bp, Homo sapiens
tcacataccaaaaaaattatataaaaattaggcaaaaaatttagctctacaagtaaattataaccaga

SEQ ID NO: 60806 - DNA, 65 bp, Homo sapiens
aaaaaattatataaaaattaggcaaaaaatttagctctacaagtaaattataaccagactgttct

SEQ ID NO: 60807 - DNA, 68 bp, Homo sapiens
ataaaaattaggcaaaaaatttagctctacaagtaaattataaccagactgttcttaattcaccaaca

SEQ ID NO: 60808 - DNA, 71 bp, Homo sapiens
ggcaaaaaatttagctctacaagtaaattataaccagactgttcttaattcaccaacaattaacacactga

SEQ ID NO: 60809 - DNA, 73 bp, Homo sapiens
ttagctctacaagtaaattataaccagactgttcttaattcaccaacaattaacacactgatttcatttggga

SEQ ID NO: 60810 - DNA, 71 bp, Homo sapiens
ctacaagtaaattataaccagactgttcttaattcaccaacaattaacacactgatttcatttgggactta

SEQ ID NO: 60811 - DNA, 70 bp, Homo sapiens
attataaccagactgttcttaattcaccaacaattaacacactgatttcatttgggacttaaaaatattc

SEQ ID NO: 60812 - DNA, 67 bp, Homo sapiens
agactgttcttaattcaccaacaattaacacactgatttcatttgggacttaaaaatattctttttt

SEQ ID NO: 60813 - DNA, 75 bp, Homo sapiens
accacgcccagcctggcatgtatttttaatagtgtcttttgcactacacctgaccatatgtcaaaacaggatggt

SEQ ID NO: 60814 - DNA, 75 bp, Homo sapiens
agcctggcatgtatttttaatagtgtcttttgcactacacctgaccatatgtcaaaacaggatggttggaaacta

SEQ ID NO: 60815 - DNA, 76 bp, Homo sapiens
gcctggcatgtatttttaatagtgtcttttgcactacacctgaccatatgtcaaaacaggatggttggaaactata

SEQ ID NO: 60816 - DNA, 74 bp, Homo sapiens
tatttttaatagtgtcttttgcactacacctgaccatatgtcaaaacaggatggttggaaactatatggcaaat

SEQ ID NO: 60817 - DNA, 72 bp, Homo sapiens
agtgtcttttgcactacacctgaccatatgtcaaaacaggatggttggaaactatatggcaaatttaaaatt

SEQ ID NO: 60818 - DNA, 72 bp, Homo sapiens
cttttgcactacacctgaccatatgtcaaaacaggatggttggaaactatatggcaaatttaaaatttgttc

SEQ ID NO: 60819 - DNA, 72 bp, Homo sapiens
cacctgaccatatgtcaaaacaggatggttggaaactatatggcaaatttaaaatttgttctgttatttgtc

SEQ ID NO: 60820 - DNA, 71 bp, Homo sapiens
aggatggttggaaactatatggcaaatttaaaatttgttctgttatttgtctacctctggatggaggacaa

SEQ ID NO: 60821 - DNA, 72 bp, Homo sapiens
ggaaactatatggcaaatttaaaatttgttctgttatttgtctacctctggatggaggacaaatgcacagtt

SEQ ID NO: 60822 - DNA, 76 bp, Homo sapiens
gcaaatttaaaatttgttctgttatttgtctacctctggatggaggacaaatgcacagtttaatgagctctacata

SEQ ID NO: 60823 - DNA, 76 bp, Homo sapiens
aatttgttctgttatttgtctacctctggatggaggacaaatgcacagtttaatgagctctacatattgtttacaa

SEQ ID NO: 60824 - DNA, 81 bp, Homo sapiens
tgttatttgtctacctctggatggaggacaaatgcacagtttaatgagctctacatattgtttacaacatgcatctcaaaa

SEQ ID NO: 60825 - DNA, 83 bp, Homo sapiens
gtctacctctggatggaggacaaatgcacagtttaatgagctctacatattgtttacaacatgcatctcaaaagccattctga

SEQ ID NO: 60826 - DNA, 82 bp, Homo sapiens
atggaggacaaatgcacagtttaatgagctctacatattgtttacaacatgcatctcaaaagccattctgagggtgaatcaa

SEQ ID NO: 60827 - DNA, 81 bp, Homo sapiens
aaatgcacagtttaatgagctctacatattgtttacaacatgcatctcaaaagccattctgagggtgaatcaacagtggaa

SEQ ID NO: 60828 - DNA, 79 bp, Homo sapiens
gtttaatgagctctacatattgtttacaacatgcatctcaaaagccattctgagggtgaatcaacagtggaatggaaaa

SEQ ID NO: 60829 - DNA, 80 bp, Homo sapiens
ctctacatattgtttacaacatgcatctcaaaagccattctgagggtgaatcaacagtggaatggaaaatgtcttatgtc

SEQ ID NO: 60830 - DNA, 78 bp, Homo sapiens
atattgtttacaacatgcatctcaaaagccattctgagggtgaatcaacagtggaatggaaaatgtcttatgtccctg

SEQ ID NO: 60831 - DNA, 80 bp, Homo sapiens
tgtttacaacatgcatctcaaaagccattctgagggtgaatcaacagtggaatggaaaatgtcttatgtccctgtctctg

SEQ ID NO: 60832 - DNA, 79 bp, Homo sapiens
acaacatgcatctcaaaagccattctgagggtgaatcaacagtggaatggaaaatgtcttatgtccctgtctctgtctt

SEQ ID NO: 60833 - DNA, 75 bp, Homo sapiens
aaagccattctgagggtgaatcaacagtggaatggaaaatgtcttatgtccctgtctctgtctttccccatggaa

SEQ ID NO: 60834 - DNA, 77 bp, Homo sapiens
cattctgagggtgaatcaacagtggaatggaaaatgtcttatgtccctgtctctgtctttccccatggaattctgta

SEQ ID NO: 60835 - DNA, 76 bp, Homo sapiens
tgagggtgaatcaacagtggaatggaaaatgtcttatgtccctgtctctgtctttccccatggaattctgtatatt

SEQ ID NO: 60836 - DNA, 75 bp, Homo sapiens
aatcaacagtggaatggaaaatgtcttatgtccctgtctctgtctttccccatggaattctgtatatttgtctgg

SEQ ID NO: 60837 - DNA, 75 bp, Homo sapiens
acagtggaatggaaaatgtcttatgtccctgtctctgtctttccccatggaattctgtatatttgtctgggacta

SEQ ID NO: 60838 - DNA, 74 bp, Homo sapiens
aatggaaaatgtcttatgtccctgtctctgtctttccccatggaattctgtatatttgtctgggactagcttag

SEQ ID NO: 60839 - DNA, 72 bp, Homo sapiens
tgtctttccccatggaattctgtatatttgtctgggactagcttagttttgcaaagtacttacaaatacagg

SEQ ID NO: 60840 - DNA, 72 bp, Homo sapiens
tggaattctgtatatttgtctgggactagcttagttttgcaaagtacttacaaatacaggggcacacttaat

SEQ ID NO: 60841 - DNA, 71 bp, Homo sapiens
ttctgtatatttgtctgggactagcttagttttgcaaagtacttacaaatacaggggcacacttaatttcc

SEQ ID NO: 60842 - DNA, 71 bp, Homo sapiens
ttgtctgggactagcttagttttgcaaagtacttacaaatacaggggcacacttaatttcctcctctccca

SEQ ID NO: 60843 - DNA, 72 bp, Homo sapiens
ttagttttgcaaagtacttacaaatacaggggcacacttaatttcctcctctcccaggctggtgttcaatga

SEQ ID NO: 60844 - DNA, 77 bp, Homo sapiens
cttacaaatacaggggcacacttaatttcctcctctcccaggctggtgttcaatgagccatgagagttagatgtgaa

SEQ ID NO: 60845 - DNA, 79 bp, Homo sapiens
acaggggcacacttaatttcctcctctcccaggctggtgttcaatgagccatgagagttagatgtgaactgcaggtggc

SEQ ID NO: 60846 - DNA, 81 bp, Homo sapiens
aggctggtgttcaatgagccatgagagttagatgtgaactgcaggtggcccccaaatctgtcagaagcatccttcagactt

SEQ ID NO: 60847 - DNA, 79 bp, Homo sapiens
aatgagccatgagagttagatgtgaactgcaggtggcccccaaatctgtcagaagcatccttcagactttcccaacctc

SEQ ID NO: 60848 - DNA, 77 bp, Homo sapiens
atgagagttagatgtgaactgcaggtggcccccaaatctgtcagaagcatccttcagactttcccaacctccctgcc

SEQ ID NO: 60849 - DNA, 75 bp, Homo sapiens
atgtgaactgcaggtggcccccaaatctgtcagaagcatccttcagactttcccaacctccctgcccagttccca

SEQ ID NO: 60850 - DNA, 74 bp, Homo sapiens
aggtggcccccaaatctgtcagaagcatccttcagactttcccaacctccctgcccagttcccactggcaggca

SEQ ID NO: 60851 - DNA, 78 bp, Homo sapiens
aaatctgtcagaagcatccttcagactttcccaacctccctgcccagttcccactggcaggcaggcactgaggatgga

SEQ ID NO: 60852 - DNA, 73 bp, Homo sapiens
agactttcccaacctccctgcccagttcccactggcaggcaggcactgaggatggagggagagtacttcggaa

SEQ ID NO: 60853 - DNA, 71 bp, Homo sapiens
aacctccctgcccagttcccactggcaggcaggcactgaggatggagggagagtacttcggaacctccctt

SEQ ID NO: 60854 - DNA, 73 bp, Homo sapiens
cccagttcccactggcaggcaggcactgaggatggagggagagtacttcggaacctccctttaaagcacagaa

SEQ ID NO: 60855 - DNA, 74 bp, Homo sapiens
actggcaggcaggcactgaggatggagggagagtacttcggaacctccctttaaagcacagaacaaagccatcg

SEQ ID NO: 60856 - DNA, 72 bp, Homo sapiens
aggcactgaggatggagggagagtacttcggaacctccctttaaagcacagaacaaagccatcgtggtggaa

SEQ ID NO: 60857 - DNA, 71 bp, Homo sapiens
aggatggagggagagtacttcggaacctccctttaaagcacagaacaaagccatcgtggtggaagctgccc

SEQ ID NO: 60858 - DNA, 69 bp, Homo sapiens
agagtacttcggaacctccctttaaagcacagaacaaagccatcgtggtggaagctgccccaaaagtaa

SEQ ID NO: 60859 - DNA, 69 bp, Homo sapiens
gaacctccctttaaagcacagaacaaagccatcgtggtggaagctgccccaaaagtaatctacgttttg

SEQ ID NO: 60860 - DNA, 69 bp, Homo sapiens
agaacaaagccatcgtggtggaagctgccccaaaagtaatctacgttttgtgtgattttgtttttctaa

SEQ ID NO: 60861 - DNA, 67 bp, Homo sapiens
ggtggaagctgccccaaaagtaatctacgttttgtgtgattttgtttttctaagagccaagaaaatt

SEQ ID NO: 60862 - DNA, 65 bp, Homo sapiens
aatctacgttttgtgtgattttgtttttctaagagccaagaaaattttgaaaaacagtaaaaata

SEQ ID NO: 60863 - DNA, 66 bp, Homo sapiens
gtgtgattttgtttttctaagagccaagaaaattttgaaaaacagtaaaaataaaggggcaatcta

SEQ ID NO: 60864 - DNA, 70 bp, Homo sapiens
ttttctaagagccaagaaaattttgaaaaacagtaaaaataaaggggcaatctatattgccagatactga

SEQ ID NO: 60865 - DNA, 71 bp, Homo sapiens
gagccaagaaaattttgaaaaacagtaaaaataaaggggcaatctatattgccagatactgaaacatacta

SEQ ID NO: 60866 - DNA, 71 bp, Homo sapiens
cagtaaaaataaaggggcaatctatattgccagatactgaaacatactataaagctaatttctttacttaa

SEQ ID NO: 60867 - DNA, 72 bp, Homo sapiens
aaaggggcaatctatattgccagatactgaaacatactataaagctaatttctttacttaagtccagaaaca

SEQ ID NO: 60868 - DNA, 75 bp, Homo sapiens
ggcaatctatattgccagatactgaaacatactataaagctaatttctttacttaagtccagaaacagacatagg

SEQ ID NO: 60869 - DNA, 75 bp, Homo sapiens
attgccagatactgaaacatactataaagctaatttctttacttaagtccagaaacagacataggtgtatatcaa

SEQ ID NO: 60870 - DNA, 75 bp, Homo sapiens
ctgaaacatactataaagctaatttctttacttaagtccagaaacagacataggtgtatatcaaattagcatata

SEQ ID NO: 60871 - DNA, 73 bp, Homo sapiens
ctataaagctaatttctttacttaagtccagaaacagacataggtgtatatcaaattagcatatagaagtccc

SEQ ID NO: 60872 - DNA, 71 bp, Homo sapiens
atttctttacttaagtccagaaacagacataggtgtatatcaaattagcatatagaagtccccccttatcc

SEQ ID NO: 60873 - DNA, 74 bp, Homo sapiens
ttaagtccagaaacagacataggtgtatatcaaattagcatatagaagtccccccttatcctcagagttcaggt

SEQ ID NO: 60874 - DNA, 74 bp, Homo sapiens
agaaacagacataggtgtatatcaaattagcatatagaagtccccccttatcctcagagttcaggttccaactc

SEQ ID NO: 60875 - DNA, 75 bp, Homo sapiens
ataggtgtatatcaaattagcatatagaagtccccccttatcctcagagttcaggttccaactcccagtggatgc

SEQ ID NO: 60876 - DNA, 73 bp, Homo sapiens
atatagaagtccccccttatcctcagagttcaggttccaactcccagtggatgcctgaaacttcagatagtac

SEQ ID NO: 60877 - DNA, 77 bp, Homo sapiens
tgcctgaaacttcagatagtactgaatcctatatatactgtattatttcctatacacacacctatgataaagtttaa

SEQ ID NO: 60878 - DNA, 71 bp, Homo sapiens
taaattaggtatagtaagagattaacattaactaataatgaaatagaaccattactaacaatacactgtaa

SEQ ID NO: 60879 - DNA, 73 bp, Homo sapiens
agtaagagattaacattaactaataatgaaatagaaccattactaacaatacactgtaataaaagctacatga

SEQ ID NO: 60880 - DNA, 74 bp, Homo sapiens
gagattaacattaactaataatgaaatagaaccattactaacaatacactgtaataaaagctacatgaatgtgg

SEQ ID NO: 60881 - DNA, 76 bp, Homo sapiens
ttaactaataatgaaatagaaccattactaacaatacactgtaataaaagctacatgaatgtggtctctctctctc

SEQ ID NO: 60882 - DNA, 75 bp, Homo sapiens
tctctctctctctaaacaccttattgtactgcactcacttattttgtgattgctggtaagtgaaaccccagaaag

SEQ ID NO: 60883 - DNA, 74 bp, Homo sapiens
tctctctaaacaccttattgtactgcactcacttattttgtgattgctggtaagtgaaaccccagaaagtgaaa

SEQ ID NO: 60884 - DNA, 74 bp, Homo sapiens
ttattgtactgcactcacttattttgtgattgctggtaagtgaaaccccagaaagtgaaaccccagataagaga

SEQ ID NO: 60885 - DNA, 74 bp, Homo sapiens
tgcactcacttattttgtgattgctggtaagtgaaaccccagaaagtgaaaccccagataagagaggacgattg

SEQ ID NO: 60886 - DNA, 72 bp, Homo sapiens
cacttattttgtgattgctggtaagtgaaaccccagaaagtgaaaccccagataagagaggacgattgtctc

SEQ ID NO: 60887 - DNA, 72 bp, Homo sapiens
tattttgtgattgctggtaagtgaaaccccagaaagtgaaaccccagataagagaggacgattgtctcctaa

SEQ ID NO: 60888 - DNA, 71 bp, Homo sapiens
ttttgtgattgctggtaagtgaaaccccagaaagtgaaaccccagataagagaggacgattgtctcctaaa

SEQ ID NO: 60889 - DNA, 69 bp, Homo sapiens
attgctggtaagtgaaaccccagaaagtgaaaccccagataagagaggacgattgtctcctaaaggtgg

SEQ ID NO: 60890 - DNA, 69 bp, Homo sapiens
gtaagtgaaaccccagaaagtgaaaccccagataagagaggacgattgtctcctaaaggtggtgcttta

SEQ ID NO: 60891 - DNA, 71 bp, Homo sapiens
tgaaaccccagaaagtgaaaccccagataagagaggacgattgtctcctaaaggtggtgctttacattcaa

SEQ ID NO: 60892 - DNA, 69 bp, Homo sapiens
aaaccccagaaagtgaaaccccagataagagaggacgattgtctcctaaaggtggtgctttacattcaa

SEQ ID NO: 60893 - DNA, 72 bp, Homo sapiens
agaaagtgaaaccccagataagagaggacgattgtctcctaaaggtggtgctttacattcaagagtggtgag

SEQ ID NO: 60894 - DNA, 76 bp, Homo sapiens
tgaaaccccagataagagaggacgattgtctcctaaaggtggtgctttacattcaagagtggtgaggcatctttga

SEQ ID NO: 60895 - DNA, 74 bp, Homo sapiens
aaaccccagataagagaggacgattgtctcctaaaggtggtgctttacattcaagagtggtgaggcatctttga

SEQ ID NO: 60896 - DNA, 76 bp, Homo sapiens
agataagagaggacgattgtctcctaaaggtggtgctttacattcaagagtggtgaggcatctttgatccttatct

SEQ ID NO: 60897 - DNA, 73 bp, Homo sapiens
aggacgattgtctcctaaaggtggtgctttacattcaagagtggtgaggcatctttgatccttatcttccctt

SEQ ID NO: 60898 - DNA, 71 bp, Homo sapiens
tcctaaaggtggtgctttacattcaagagtggtgaggcatctttgatccttatcttcccttttatttaaaa

SEQ ID NO: 60899 - DNA, 69 bp, Homo sapiens
aaggtggtgctttacattcaagagtggtgaggcatctttgatccttatcttcccttttatttaaaaaaa

SEQ ID NO: 60900 - DNA, 68 bp, Homo sapiens
aaatttaaaaacttttaggacatgaggatgagaaagccttcttaacataaacacataatggagtttaa

SEQ ID NO: 60901 - DNA, 70 bp, Homo sapiens
taaaaacttttaggacatgaggatgagaaagccttcttaacataaacacataatggagtttaaaaagtga

SEQ ID NO: 60902 - DNA, 69 bp, Homo sapiens
aaaaacttttaggacatgaggatgagaaagccttcttaacataaacacataatggagtttaaaaagtga

SEQ ID NO: 60903 - DNA, 74 bp, Homo sapiens
taggacatgaggatgagaaagccttcttaacataaacacataatggagtttaaaaagtgaaaaactgcgagcaa

SEQ ID NO: 60904 - DNA, 70 bp, Homo sapiens
gaaagccttcttaacataaacacataatggagtttaaaaagtgaaaaactgcgagcaaattggttgatct

SEQ ID NO: 60905 - DNA, 72 bp, Homo sapiens
cttcttaacataaacacataatggagtttaaaaagtgaaaaactgcgagcaaattggttgatcttttatgca

SEQ ID NO: 60906 - DNA, 75 bp, Homo sapiens
cataaacacataatggagtttaaaaagtgaaaaactgcgagcaaattggttgatcttttatgcaaatgctctcag

SEQ ID NO: 60907 - DNA, 75 bp, Homo sapiens
cacataatggagtttaaaaagtgaaaaactgcgagcaaattggttgatcttttatgcaaatgctctcaggaaaga

SEQ ID NO: 60908 - DNA, 73 bp, Homo sapiens
aaaaactgcgagcaaattggttgatcttttatgcaaatgctctcaggaaagaaaggatactatcccactaaaa

SEQ ID NO: 60909 - DNA, 73 bp, Homo sapiens
agcaaattggttgatcttttatgcaaatgctctcaggaaagaaaggatactatcccactaaaaaattgggcaa

SEQ ID NO: 60910 - DNA, 71 bp, Homo sapiens
ggttgatcttttatgcaaatgctctcaggaaagaaaggatactatcccactaaaaaattgggcaaagaaaa

SEQ ID NO: 60911 - DNA, 73 bp, Homo sapiens
ttttatgcaaatgctctcaggaaagaaaggatactatcccactaaaaaattgggcaaagaaaatgcagacacc

SEQ ID NO: 60912 - DNA, 72 bp, Homo sapiens
tctcaggaaagaaaggatactatcccactaaaaaattgggcaaagaaaatgcagacacctcacaaaacacaa

SEQ ID NO: 60913 - DNA, 70 bp, Homo sapiens
gaaagaaaggatactatcccactaaaaaattgggcaaagaaaatgcagacacctcacaaaacacaaagaa

SEQ ID NO: 60914 - DNA, 70 bp, Homo sapiens
ctatcccactaaaaaattgggcaaagaaaatgcagacacctcacaaaacacaaagaaacgacaaatacaa

SEQ ID NO: 60915 - DNA, 74 bp, Homo sapiens
aaatgcagacacctcacaaaacacaaagaaacgacaaatacaaaaatgttctacaccttggtgctgaggcaaca

SEQ ID NO: 60916 - DNA, 70 bp, Homo sapiens
acaaaacacaaagaaacgacaaatacaaaaatgttctacaccttggtgctgaggcaacacaagggaggga

SEQ ID NO: 60917 - DNA, 69 bp, Homo sapiens
aagaaacgacaaatacaaaaatgttctacaccttggtgctgaggcaacacaagggagggagggatcgtt

SEQ ID NO: 60918 - DNA, 74 bp, Homo sapiens
aaatacaaaaatgttctacaccttggtgctgaggcaacacaagggagggagggatcgtttctcaatgacaatga

SEQ ID NO: 60919 - DNA, 74 bp, Homo sapiens
aaaaatgttctacaccttggtgctgaggcaacacaagggagggagggatcgtttctcaatgacaatgaggagga

SEQ ID NO: 60920 - DNA, 80 bp, Homo sapiens
tacaccttggtgctgaggcaacacaagggagggagggatcgtttctcaatgacaatgaggaggagcacaggcactggaca

SEQ ID NO: 60921 - DNA, 80 bp, Homo sapiens
ctgaggcaacacaagggagggagggatcgtttctcaatgacaatgaggaggagcacaggcactggacagcccaggcagaa

SEQ ID NO: 60922 - DNA, 80 bp, Homo sapiens
aacacaagggagggagggatcgtttctcaatgacaatgaggaggagcacaggcactggacagcccaggcagaaggatgca

SEQ ID NO: 60923 - DNA, 83 bp, Homo sapiens
agggatcgtttctcaatgacaatgaggaggagcacaggcactggacagcccaggcagaaggatgcaggcagcctcctctctac

SEQ ID NO: 60924 - DNA, 85 bp, Homo sapiens
tctcaatgacaatgaggaggagcacaggcactggacagcccaggcagaaggatgcaggcagcctcctctctacctcccactcaaa

SEQ ID NO: 60925 - DNA, 80 bp, Homo sapiens
aggagcacaggcactggacagcccaggcagaaggatgcaggcagcctcctctctacctcccactcaaaaatgaactcaag

SEQ ID NO: 60926 - DNA, 78 bp, Homo sapiens
actggacagcccaggcagaaggatgcaggcagcctcctctctacctcccactcaaaaatgaactcaaggtggagcaaa

SEQ ID NO: 60927 - DNA, 76 bp, Homo sapiens
aggcagaaggatgcaggcagcctcctctctacctcccactcaaaaatgaactcaaggtggagcaaacacttcaacg

SEQ ID NO: 60928 - DNA, 75 bp, Homo sapiens
tacctcccactcaaaaatgaactcaaggtggagcaaacacttcaacgtaagagtgacaatcgtaccattcacaga

SEQ ID NO: 60929 - DNA, 73 bp, Homo sapiens
actcaaaaatgaactcaaggtggagcaaacacttcaacgtaagagtgacaatcgtaccattcacagaagaaaa

SEQ ID NO: 60930 - DNA, 72 bp, Homo sapiens
aactcaaggtggagcaaacacttcaacgtaagagtgacaatcgtaccattcacagaagaaaaccgagaataa

SEQ ID NO: 60931 - DNA, 72 bp, Homo sapiens
agcaaacacttcaacgtaagagtgacaatcgtaccattcacagaagaaaaccgagaataaatcttcacgacc

SEQ ID NO: 60932 - DNA, 72 bp, Homo sapiens
cttcaacgtaagagtgacaatcgtaccattcacagaagaaaaccgagaataaatcttcacgaccttggatta

SEQ ID NO: 60933 - DNA, 72 bp, Homo sapiens
agtgacaatcgtaccattcacagaagaaaaccgagaataaatcttcacgaccttggattaggcagtttctta

SEQ ID NO: 60934 - DNA, 70 bp, Homo sapiens
aatcgtaccattcacagaagaaaaccgagaataaatcttcacgaccttggattaggcagtttcttactac

SEQ ID NO: 60935 - DNA, 70 bp, Homo sapiens
ttcacagaagaaaaccgagaataaatcttcacgaccttggattaggcagtttcttactacgtcaccaaaa

SEQ ID NO: 60936 - DNA, 71 bp, Homo sapiens
aaccgagaataaatcttcacgaccttggattaggcagtttcttactacgtcaccaaaagtgcaagtgataa

SEQ ID NO: 60937 - DNA, 70 bp, Homo sapiens
aataaatcttcacgaccttggattaggcagtttcttactacgtcaccaaaagtgcaagtgataaaagaaa

SEQ ID NO: 60938 - DNA, 69 bp, Homo sapiens
acgaccttggattaggcagtttcttactacgtcaccaaaagtgcaagtgataaaagaaaaataaactga

SEQ ID NO: 60939 - DNA, 70 bp, Homo sapiens
gattaggcagtttcttactacgtcaccaaaagtgcaagtgataaaagaaaaataaactgatttcataaaa

SEQ ID NO: 60940 - DNA, 67 bp, Homo sapiens
ttcttactacgtcaccaaaagtgcaagtgataaaagaaaaataaactgatttcataaaaaattaaac

SEQ ID NO: 60941 - DNA, 66 bp, Homo sapiens
agaaaaataaactgatttcataaaaaattaaacttttatgcttcaaaggataccattacaaaataa

SEQ ID NO: 60942 - DNA, 69 bp, Homo sapiens
actgatttcataaaaaattaaacttttatgcttcaaaggataccattacaaaataatgaactgtgaaag

SEQ ID NO: 60943 - DNA, 70 bp, Homo sapiens
aattaaacttttatgcttcaaaggataccattacaaaataatgaactgtgaaagtggaaagtgaaagaga

SEQ ID NO: 60944 - DNA, 75 bp, Homo sapiens
atttgcaaatcataggtctgataaagcacttgcatctagaacatattttaaaaactcttacaactcagtaataaa

SEQ ID NO: 60945 - DNA, 73 bp, Homo sapiens
aatcataggtctgataaagcacttgcatctagaacatattttaaaaactcttacaactcagtaataaaaagac

SEQ ID NO: 60946 - DNA, 74 bp, Homo sapiens
tctgataaagcacttgcatctagaacatattttaaaaactcttacaactcagtaataaaaagactaatagccca

SEQ ID NO: 60947 - DNA, 66 bp, Homo sapiens
tttaaaaactcttacaactcagtaataaaaagactaatagcccaattaaaaaataagtgaaagctc

SEQ ID NO: 60948 - DNA, 68 bp, Homo sapiens
cttacaactcagtaataaaaagactaatagcccaattaaaaaataagtgaaagctctgaacagttatt

SEQ ID NO: 60949 - DNA, 70 bp, Homo sapiens
cagtaataaaaagactaatagcccaattaaaaaataagtgaaagctctgaacagttatttatgcaaagaa

SEQ ID NO: 60950 - DNA, 72 bp, Homo sapiens
aagactaatagcccaattaaaaaataagtgaaagctctgaacagttatttatgcaaagaagatacacgaatg

SEQ ID NO: 60951 - DNA, 73 bp, Homo sapiens
agactaatagcccaattaaaaaataagtgaaagctctgaacagttatttatgcaaagaagatacacgaatggc

SEQ ID NO: 60952 - DNA, 73 bp, Homo sapiens
atagcccaattaaaaaataagtgaaagctctgaacagttatttatgcaaagaagatacacgaatggccaataa

SEQ ID NO: 60953 - DNA, 75 bp, Homo sapiens
agataccacttcacacccaccacatggctataataaaaagtcaaatgctaaccaatagcaacagggtggccagga

SEQ ID NO: 60954 - DNA, 75 bp, Homo sapiens
ttcacacccaccacatggctataataaaaagtcaaatgctaaccaatagcaacagggtggccaggacgtggagaa

SEQ ID NO: 60955 - DNA, 73 bp, Homo sapiens
acacccaccacatggctataataaaaagtcaaatgctaaccaatagcaacagggtggccaggacgtggagaac

SEQ ID NO: 60956 - DNA, 73 bp, Homo sapiens
accacatggctataataaaaagtcaaatgctaaccaatagcaacagggtggccaggacgtggagaacctggaa

SEQ ID NO: 60957 - DNA, 74 bp, Homo sapiens
ggctataataaaaagtcaaatgctaaccaatagcaacagggtggccaggacgtggagaacctggaatcctcata

SEQ ID NO: 60958 - DNA, 73 bp, Homo sapiens
aataaaaagtcaaatgctaaccaatagcaacagggtggccaggacgtggagaacctggaatcctcatacattg

SEQ ID NO: 60959 - DNA, 74 bp, Homo sapiens
aaaagtcaaatgctaaccaatagcaacagggtggccaggacgtggagaacctggaatcctcatacattggtgtg

SEQ ID NO: 60960 - DNA, 74 bp, Homo sapiens
ctaaccaatagcaacagggtggccaggacgtggagaacctggaatcctcatacattggtgtgggaatgtagaag

SEQ ID NO: 60961 - DNA, 77 bp, Homo sapiens
accaatagcaacagggtggccaggacgtggagaacctggaatcctcatacattggtgtgggaatgtagaaggcagca

SEQ ID NO: 60962 - DNA, 77 bp, Homo sapiens
agggtggccaggacgtggagaacctggaatcctcatacattggtgtgggaatgtagaaggcagcagccactctggaa

SEQ ID NO: 60963 - DNA, 77 bp, Homo sapiens
aggacgtggagaacctggaatcctcatacattggtgtgggaatgtagaaggcagcagccactctggaaaacagtctg

SEQ ID NO: 60964 - DNA, 78 bp, Homo sapiens
aacctggaatcctcatacattggtgtgggaatgtagaaggcagcagccactctggaaaacagtctggcaattcctcaa

SEQ ID NO: 60965 - DNA, 72 bp, Homo sapiens
ggaaaacagtctggcaattcctcaaaaggtcaaacataaaattaccacatgacctctgcaattcctatttta

SEQ ID NO: 60966 - DNA, 73 bp, Homo sapiens
tctggcaattcctcaaaaggtcaaacataaaattaccacatgacctctgcaattcctattttaggtatacaac

SEQ ID NO: 60967 - DNA, 70 bp, Homo sapiens
cctcaaaaggtcaaacataaaattaccacatgacctctgcaattcctattttaggtatacaaccaaaaga

SEQ ID NO: 60968 - DNA, 70 bp, Homo sapiens
aaggtcaaacataaaattaccacatgacctctgcaattcctattttaggtatacaaccaaaagaactgaa

SEQ ID NO: 60969 - DNA, 72 bp, Homo sapiens
aaaattaccacatgacctctgcaattcctattttaggtatacaaccaaaagaactgaaaatgcacgttcaca

SEQ ID NO: 60970 - DNA, 72 bp, Homo sapiens
tgacctctgcaattcctattttaggtatacaaccaaaagaactgaaaatgcacgttcacacgaaaactgtaa

SEQ ID NO: 60971 - DNA, 69 bp, Homo sapiens
ctgcaattcctattttaggtatacaaccaaaagaactgaaaatgcacgttcacacgaaaactgtaaaaa

SEQ ID NO: 60972 - DNA, 70 bp, Homo sapiens
ttaggtatacaaccaaaagaactgaaaatgcacgttcacacgaaaactgtaaaaaatgttcacaacagcc

SEQ ID NO: 60973 - DNA, 69 bp, Homo sapiens
caaccaaaagaactgaaaatgcacgttcacacgaaaactgtaaaaaatgttcacaacagccttttacaa

SEQ ID NO: 60974 - DNA, 70 bp, Homo sapiens
aagaactgaaaatgcacgttcacacgaaaactgtaaaaaatgttcacaacagccttttacaaatagccaa

SEQ ID NO: 60975 - DNA, 70 bp, Homo sapiens
gcacgttcacacgaaaactgtaaaaaatgttcacaacagccttttacaaatagccaaaaagtggatacaa

SEQ ID NO: 60976 - DNA, 69 bp, Homo sapiens
cgaaaactgtaaaaaatgttcacaacagccttttacaaatagccaaaaagtggatacaattcaaatgcc

SEQ ID NO: 60977 - DNA, 73 bp, Homo sapiens
aaaaatgttcacaacagccttttacaaatagccaaaaagtggatacaattcaaatgcccatcaagtgatgaag

SEQ ID NO: 60978 - DNA, 71 bp, Homo sapiens
gccaaaaagtggatacaattcaaatgcccatcaagtgatgaagggaaaaacaaaacacggtgtataaccaa

SEQ ID NO: 60979 - DNA, 69 bp, Homo sapiens
aaagtggatacaattcaaatgcccatcaagtgatgaagggaaaaacaaaacacggtgtataaccaaaac

SEQ ID NO: 60980 - DNA, 67 bp, Homo sapiens
cccatcaagtgatgaagggaaaaacaaaacacggtgtataaccaaaacggaatattattcaaccgta

SEQ ID NO: 60981 - DNA, 62 bp, Homo sapiens
gaagggaaaaacaaaacacggtgtataaccaaaacggaatattattcaaccgtaaaaaggga

SEQ ID NO: 60982 - DNA, 66 bp, Homo sapiens
cacggtgtataaccaaaacggaatattattcaaccgtaaaaagggaagtaaccacacatactacaa

SEQ ID NO: 60983 - DNA, 67 bp, Homo sapiens
accaaaacggaatattattcaaccgtaaaaagggaagtaaccacacatactacaacatgaactccga

SEQ ID NO: 60984 - DNA, 70 bp, Homo sapiens
tattattcaaccgtaaaaagggaagtaaccacacatactacaacatgaactccgaaaacatgcttcgtaa

SEQ ID NO: 60985 - DNA, 67 bp, Homo sapiens
aaccgtaaaaagggaagtaaccacacatactacaacatgaactccgaaaacatgcttcgtaaaagaa

SEQ ID NO: 60986 - DNA, 77 bp, Homo sapiens
cagtcacaaaagaccacatattctgtgattcaatttctaggaaatgcccagaatagatacatccatgggggtagaaa

SEQ ID NO: 60987 - DNA, 76 bp, Homo sapiens
aaagaccacatattctgtgattcaatttctaggaaatgcccagaatagatacatccatgggggtagaaagactagc

SEQ ID NO: 60988 - DNA, 76 bp, Homo sapiens
atattctgtgattcaatttctaggaaatgcccagaatagatacatccatgggggtagaaagactagcggttggctg

SEQ ID NO: 60989 - DNA, 74 bp, Homo sapiens
attcaatttctaggaaatgcccagaatagatacatccatgggggtagaaagactagcggttggctggagatggg

SEQ ID NO: 60990 - DNA, 74 bp, Homo sapiens
tctaggaaatgcccagaatagatacatccatgggggtagaaagactagcggttggctggagatgggggttcagg

SEQ ID NO: 60991 - DNA, 71 bp, Homo sapiens
cccagaatagatacatccatgggggtagaaagactagcggttggctggagatgggggttcaggggaaatgg

SEQ ID NO: 60992 - DNA, 69 bp, Homo sapiens
atacatccatgggggtagaaagactagcggttggctggagatgggggttcaggggaaatggggaataac

SEQ ID NO: 60993 - DNA, 70 bp, Homo sapiens
ggtagaaagactagcggttggctggagatgggggttcaggggaaatggggaataactgctaatggtacta

SEQ ID NO: 60994 - DNA, 69 bp, Homo sapiens
tagcggttggctggagatgggggttcaggggaaatggggaataactgctaatggtactaggtttctctt

SEQ ID NO: 60995 - DNA, 70 bp, Homo sapiens
ctggagatgggggttcaggggaaatggggaataactgctaatggtactaggtttctctttggagtggtga

SEQ ID NO: 60996 - DNA, 73 bp, Homo sapiens
aataactgctaatggtactaggtttctctttggagtggtgaaaatgtttcagaattgactgtggtgatggtta

SEQ ID NO: 60997 - DNA, 74 bp, Homo sapiens
taggtttctctttggagtggtgaaaatgtttcagaattgactgtggtgatggttacacaatatactaaatacca

SEQ ID NO: 60998 - DNA, 76 bp, Homo sapiens
tctttggagtggtgaaaatgtttcagaattgactgtggtgatggttacacaatatactaaataccactcaactgta

SEQ ID NO: 60999 - DNA, 75 bp, Homo sapiens
aaaatgtttcagaattgactgtggtgatggttacacaatatactaaataccactcaactgtacacttgaagcaag

SEQ ID NO: 61000 - DNA, 78 bp, Homo sapiens
tttcagaattgactgtggtgatggttacacaatatactaaataccactcaactgtacacttgaagcaaggactatatg

SEQ ID NO: 61001 - DNA, 78 bp, Homo sapiens
gactgtggtgatggttacacaatatactaaataccactcaactgtacacttgaagcaaggactatatggtacatgaat

SEQ ID NO: 61002 - DNA, 79 bp, Homo sapiens
tggtgatggttacacaatatactaaataccactcaactgtacacttgaagcaaggactatatggtacatgaattatatc

SEQ ID NO: 61003 - DNA, 78 bp, Homo sapiens
gatggttacacaatatactaaataccactcaactgtacacttgaagcaaggactatatggtacatgaattatatctta

SEQ ID NO: 61004 - DNA, 77 bp, Homo sapiens
atggttacacaatatactaaataccactcaactgtacacttgaagcaaggactatatggtacatgaattatatctta

SEQ ID NO: 61005 - DNA, 73 bp, Homo sapiens
actaaataccactcaactgtacacttgaagcaaggactatatggtacatgaattatatcttaaaaagctgttt

SEQ ID NO: 61006 - DNA, 71 bp, Homo sapiens
actcaactgtacacttgaagcaaggactatatggtacatgaattatatcttaaaaagctgtttttaaaaag

SEQ ID NO: 61007 - DNA, 70 bp, Homo sapiens
actgtacacttgaagcaaggactatatggtacatgaattatatcttaaaaagctgtttttaaaaagttct

SEQ ID NO: 61008 - DNA, 72 bp, Homo sapiens
tgaagcaaggactatatggtacatgaattatatcttaaaaagctgtttttaaaaagttcttactaatcacta

SEQ ID NO: 61009 - DNA, 69 bp, Homo sapiens
ggactatatggtacatgaattatatcttaaaaagctgtttttaaaaagttcttactaatcactaaagga

SEQ ID NO: 61010 - DNA, 68 bp, Homo sapiens
agctgtttttaaaaagttcttactaatcactaaaggaatagaaataaaacaatgaggcatgtttaatc

SEQ ID NO: 61011 - DNA, 74 bp, Homo sapiens
gttcttactaatcactaaaggaatagaaataaaacaatgaggcatgtttaatctatctatatggccaagattta

SEQ ID NO: 61012 - DNA, 74 bp, Homo sapiens
atcactaaaggaatagaaataaaacaatgaggcatgtttaatctatctatatggccaagatttaaaaaatgcta

SEQ ID NO: 61013 - DNA, 76 bp, Homo sapiens
gaaataaaacaatgaggcatgtttaatctatctatatggccaagatttaaaaaatgctaattggtattgatgagga

SEQ ID NO: 61014 - DNA, 77 bp, Homo sapiens
aacaatgaggcatgtttaatctatctatatggccaagatttaaaaaatgctaattggtattgatgaggatataaaga

SEQ ID NO: 61015 - DNA, 77 bp, Homo sapiens
ggcatgtttaatctatctatatggccaagatttaaaaaatgctaattggtattgatgaggatataaagaaatggcaa

SEQ ID NO: 61016 - DNA, 77 bp, Homo sapiens
tctatatggccaagatttaaaaaatgctaattggtattgatgaggatataaagaaatggcaattctcaagtactctg

SEQ ID NO: 61017 - DNA, 75 bp, Homo sapiens
ggccaagatttaaaaaatgctaattggtattgatgaggatataaagaaatggcaattctcaagtactctggcaat

SEQ ID NO: 61018 - DNA, 74 bp, Homo sapiens
aaaatgctaattggtattgatgaggatataaagaaatggcaattctcaagtactctggcaattcggtgtaattt

SEQ ID NO: 61019 - DNA, 73 bp, Homo sapiens
ataaagaaatggcaattctcaagtactctggcaattcggtgtaattttggaaagcaacatgtatcaaaaagaa

SEQ ID NO: 61020 - DNA, 75 bp, Homo sapiens
atggcaattctcaagtactctggcaattcggtgtaattttggaaagcaacatgtatcaaaaagaaaaacatgcat

SEQ ID NO: 61021 - DNA, 73 bp, Homo sapiens
gtactctggcaattcggtgtaattttggaaagcaacatgtatcaaaaagaaaaacatgcatttcttttgacag

SEQ ID NO: 61022 - DNA, 73 bp, Homo sapiens
tggcaattcggtgtaattttggaaagcaacatgtatcaaaaagaaaaacatgcatttcttttgacagtaactc

SEQ ID NO: 61023 - DNA, 75 bp, Homo sapiens
gtgtaattttggaaagcaacatgtatcaaaaagaaaaacatgcatttcttttgacagtaactccacttctcatga

SEQ ID NO: 61024 - DNA, 76 bp, Homo sapiens
gcaacatgtatcaaaaagaaaaacatgcatttcttttgacagtaactccacttctcatgattcattgttaaggaag

SEQ ID NO: 61025 - DNA, 74 bp, Homo sapiens
tcaaaaagaaaaacatgcatttcttttgacagtaactccacttctcatgattcattgttaaggaagtaattgga

SEQ ID NO: 61026 - DNA, 75 bp, Homo sapiens
gaaaaacatgcatttcttttgacagtaactccacttctcatgattcattgttaaggaagtaattggacaagtatg

SEQ ID NO: 61027 - DNA, 77 bp, Homo sapiens
ttgacagtaactccacttctcatgattcattgttaaggaagtaattggacaagtatgttaaaatatgtgtgcaaaga

SEQ ID NO: 61028 - DNA, 80 bp, Homo sapiens
ctccacttctcatgattcattgttaaggaagtaattggacaagtatgttaaaatatgtgtgcaaagataatgcatcacat

SEQ ID NO: 61029 - DNA, 80 bp, Homo sapiens
catgattcattgttaaggaagtaattggacaagtatgttaaaatatgtgtgcaaagataatgcatcacattctgattaaa

SEQ ID NO: 61030 - DNA, 77 bp, Homo sapiens
aggaagtaattggacaagtatgttaaaatatgtgtgcaaagataatgcatcacattctgattaaatattgaaaactg

SEQ ID NO: 61031 - DNA, 76 bp, Homo sapiens
gtatgttaaaatatgtgtgcaaagataatgcatcacattctgattaaatattgaaaactggaaaaaattctaaatg

SEQ ID NO: 61032 - DNA, 76 bp, Homo sapiens
tgtgtgcaaagataatgcatcacattctgattaaatattgaaaactggaaaaaattctaaatgtctattaaaggtg

SEQ ID NO: 61033 - DNA, 74 bp, Homo sapiens
gcaaagataatgcatcacattctgattaaatattgaaaactggaaaaaattctaaatgtctattaaaggtggac

SEQ ID NO: 61034 - DNA, 72 bp, Homo sapiens
tgcatcacattctgattaaatattgaaaactggaaaaaattctaaatgtctattaaaggtggactaattaaa

SEQ ID NO: 61035 - DNA, 68 bp, Homo sapiens
ttaaatattgaaaactggaaaaaattctaaatgtctattaaaggtggactaattaaacatcctatggc

SEQ ID NO: 61036 - DNA, 69 bp, Homo sapiens
gaaaactggaaaaaattctaaatgtctattaaaggtggactaattaaacatcctatggctacagactta

SEQ ID NO: 61037 - DNA, 71 bp, Homo sapiens
aaaattctaaatgtctattaaaggtggactaattaaacatcctatggctacagacttataatgaaacaaga

SEQ ID NO: 61038 - DNA, 74 bp, Homo sapiens
atgtctattaaaggtggactaattaaacatcctatggctacagacttataatgaaacaagaggcacccatgaaa

SEQ ID NO: 61039 - DNA, 71 bp, Homo sapiens
aaaggtggactaattaaacatcctatggctacagacttataatgaaacaagaggcacccatgaaaaataag

SEQ ID NO: 61040 - DNA, 75 bp, Homo sapiens
taattaaacatcctatggctacagacttataatgaaacaagaggcacccatgaaaaataaggcagacctcaaata

SEQ ID NO: 61041 - DNA, 73 bp, Homo sapiens
aacatcctatggctacagacttataatgaaacaagaggcacccatgaaaaataaggcagacctcaaataaccc

SEQ ID NO: 61042 - DNA, 75 bp, Homo sapiens
ttataatgaaacaagaggcacccatgaaaaataaggcagacctcaaataacccctgtcaaagccatgtggagcag

SEQ ID NO: 61043 - DNA, 73 bp, Homo sapiens
atgaaaaataaggcagacctcaaataacccctgtcaaagccatgtggagcaggggaatgggccagccaagccc

SEQ ID NO: 61044 - DNA, 78 bp, Homo sapiens
tgtcaaagccatgtggagcaggggaatgggccagccaagccctgtctgaatttgtgggagaaaacatccaatgactgt

SEQ ID NO: 61045 - DNA, 75 bp, Homo sapiens
atgtggagcaggggaatgggccagccaagccctgtctgaatttgtgggagaaaacatccaatgactgttatttaa

SEQ ID NO: 61046 - DNA, 73 bp, Homo sapiens
gggaatgggccagccaagccctgtctgaatttgtgggagaaaacatccaatgactgttatttaaggcaacgaa

SEQ ID NO: 61047 - DNA, 73 bp, Homo sapiens
cagccaagccctgtctgaatttgtgggagaaaacatccaatgactgttatttaaggcaacgaattactaacaa

SEQ ID NO: 61048 - DNA, 71 bp, Homo sapiens
ccctgtctgaatttgtgggagaaaacatccaatgactgttatttaaggcaacgaattactaacaacaataa

SEQ ID NO: 61049 - DNA, 71 bp, Homo sapiens
ttgtgggagaaaacatccaatgactgttatttaaggcaacgaattactaacaacaataaggcagaccttta

SEQ ID NO: 61050 - DNA, 71 bp, Homo sapiens
ggagaaaacatccaatgactgttatttaaggcaacgaattactaacaacaataaggcagacctttatgctt

SEQ ID NO: 61051 - DNA, 69 bp, Homo sapiens
ttaaggcaacgaattactaacaacaataaggcagacctttatgctttaacaaaaagctgtttaagtgac

SEQ ID NO: 61052 - DNA, 70 bp, Homo sapiens
gcaacgaattactaacaacaataaggcagacctttatgctttaacaaaaagctgtttaagtgactactat

SEQ ID NO: 61053 - DNA, 69 bp, Homo sapiens
ctaacaacaataaggcagacctttatgctttaacaaaaagctgtttaagtgactactattttaatacca

SEQ ID NO: 61054 - DNA, 69 bp, Homo sapiens
aggcagacctttatgctttaacaaaaagctgtttaagtgactactattttaataccaaaaagcattcca

SEQ ID NO: 61055 - DNA, 67 bp, Homo sapiens
cctttatgctttaacaaaaagctgtttaagtgactactattttaataccaaaaagcattccattttg

SEQ ID NO: 61056 - DNA, 65 bp, Homo sapiens
caaaaagctgtttaagtgactactattttaataccaaaaagcattccattttggggggaaattcc

SEQ ID NO: 61057 - DNA, 65 bp, Homo sapiens
actattttaataccaaaaagcattccattttggggggaaattcccgagaaaacaaaatcagacga

SEQ ID NO: 61058 - DNA, 67 bp, Homo sapiens
taccaaaaagcattccattttggggggaaattcccgagaaaacaaaatcagacgaatcagtaagaaa

SEQ ID NO: 61059 - DNA, 69 bp, Homo sapiens
tttggggggaaattcccgagaaaacaaaatcagacgaatcagtaagaaaatgatgaggaactaaatata

SEQ ID NO: 61060 - DNA, 68 bp, Homo sapiens
ggaaattcccgagaaaacaaaatcagacgaatcagtaagaaaatgatgaggaactaaatataaaaaat

SEQ ID NO: 61061 - DNA, 61 bp, Homo sapiens
taaaaaattaaattgtaaaagtatgggaaggtaattaaggtgggtactttgttacgtaaag

SEQ ID NO: 61062 - DNA, 63 bp, Homo sapiens
aattgtaaaagtatgggaaggtaattaaggtgggtactttgttacgtaaaggcagtaaaggct

SEQ ID NO: 61063 - DNA, 64 bp, Homo sapiens
aaaagtatgggaaggtaattaaggtgggtactttgttacgtaaaggcagtaaaggctttagtca

SEQ ID NO: 61064 - DNA, 67 bp, Homo sapiens
aaggtaattaaggtgggtactttgttacgtaaaggcagtaaaggctttagtcacagaacataaagca

SEQ ID NO: 61065 - DNA, 68 bp, Homo sapiens
gtaattaaggtgggtactttgttacgtaaaggcagtaaaggctttagtcacagaacataaagcagtgt

SEQ ID NO: 61066 - DNA, 71 bp, Homo sapiens
gtgggtactttgttacgtaaaggcagtaaaggctttagtcacagaacataaagcagtgttcctcactatta

SEQ ID NO: 61067 - DNA, 72 bp, Homo sapiens
tactttgttacgtaaaggcagtaaaggctttagtcacagaacataaagcagtgttcctcactattaccagta

SEQ ID NO: 61068 - DNA, 71 bp, Homo sapiens
tttgttacgtaaaggcagtaaaggctttagtcacagaacataaagcagtgttcctcactattaccagtaaa

SEQ ID NO: 61069 - DNA, 70 bp, Homo sapiens
ttacgtaaaggcagtaaaggctttagtcacagaacataaagcagtgttcctcactattaccagtaaaaat

SEQ ID NO: 61070 - DNA, 70 bp, Homo sapiens
gtaaaggcagtaaaggctttagtcacagaacataaagcagtgttcctcactattaccagtaaaaattctt

SEQ ID NO: 61071 - DNA, 70 bp, Homo sapiens
ggcagtaaaggctttagtcacagaacataaagcagtgttcctcactattaccagtaaaaattctttttat

SEQ ID NO: 61072 - DNA, 67 bp, Homo sapiens
aaaggctttagtcacagaacataaagcagtgttcctcactattaccagtaaaaattctttttatttt

SEQ ID NO: 61073 - DNA, 74 bp, Homo sapiens
gctgggattatagctatgagccattgcacccggccttccagtaaaaattcttaaaatacagatcctctcatttt

SEQ ID NO: 61074 - DNA, 72 bp, Homo sapiens
attatagctatgagccattgcacccggccttccagtaaaaattcttaaaatacagatcctctcatttttccc

SEQ ID NO: 61075 - DNA, 69 bp, Homo sapiens
ccattgcacccggccttccagtaaaaattcttaaaatacagatcctctcatttttcccctaagagacga

SEQ ID NO: 61076 - DNA, 69 bp, Homo sapiens
cggccttccagtaaaaattcttaaaatacagatcctctcatttttcccctaagagacgagcctgctttg

SEQ ID NO: 61077 - DNA, 68 bp, Homo sapiens
ttccagtaaaaattcttaaaatacagatcctctcatttttcccctaagagacgagcctgctttgtttt

SEQ ID NO: 61078 - DNA, 67 bp, Homo sapiens
cttaaaatacagatcctctcatttttcccctaagagacgagcctgctttgtttttttaatttagact

SEQ ID NO: 61079 - DNA, 68 bp, Homo sapiens
atacagatcctctcatttttcccctaagagacgagcctgctttgtttttttaatttagacttttccca

SEQ ID NO: 61080 - DNA, 66 bp, Homo sapiens
gatcctctcatttttcccctaagagacgagcctgctttgtttttttaatttagacttttcccaatt

SEQ ID NO: 61081 - DNA, 64 bp, Homo sapiens
ctcatttttcccctaagagacgagcctgctttgtttttttaatttagacttttcccaatttttc

SEQ ID NO: 61082 - DNA, 63 bp, Homo sapiens
ttttcccctaagagacgagcctgctttgtttttttaatttagacttttcccaatttttccaaa

SEQ ID NO: 61083 - DNA, 63 bp, Homo sapiens
ccctaagagacgagcctgctttgtttttttaatttagacttttcccaatttttccaaaattaa

SEQ ID NO: 61084 - DNA, 67 bp, Homo sapiens
gacgagcctgctttgtttttttaatttagacttttcccaatttttccaaaattaacatatatgtgcc

SEQ ID NO: 61085 - DNA, 66 bp, Homo sapiens
acgagcctgctttgtttttttaatttagacttttcccaatttttccaaaattaacatatatgtgcc

SEQ ID NO: 61086 - DNA, 66 bp, Homo sapiens
ctgctttgtttttttaatttagacttttcccaatttttccaaaattaacatatatgtgcctttaca

SEQ ID NO: 61087 - DNA, 69 bp, Homo sapiens
tttaatttagacttttcccaatttttccaaaattaacatatatgtgcctttacaatgagaataaagaca

SEQ ID NO: 61088 - DNA, 70 bp, Homo sapiens
ttttcccaatttttccaaaattaacatatatgtgcctttacaatgagaataaagacatttaagaagccag

SEQ ID NO: 61089 - DNA, 71 bp, Homo sapiens
ccaatttttccaaaattaacatatatgtgcctttacaatgagaataaagacatttaagaagccaggagtgg

SEQ ID NO: 61090 - DNA, 79 bp, Homo sapiens
aaaggtgggagaactgctggagcccaggagatcaatgctatagtctcccacgactgtgcttgtgaattgccactgtacc

SEQ ID NO: 61091 - DNA, 69 bp, Homo sapiens
aaaagagaaaaaagaacaaaagccccatgggcgactccaatgcaggagaagactgtacaattaaatagg

SEQ ID NO: 61092 - DNA, 74 bp, Homo sapiens
aaagaacaaaagccccatgggcgactccaatgcaggagaagactgtacaattaaataggtgtgagaggctagat

SEQ ID NO: 61093 - DNA, 75 bp, Homo sapiens
aaaagccccatgggcgactccaatgcaggagaagactgtacaattaaataggtgtgagaggctagattacataaa

SEQ ID NO: 61094 - DNA, 79 bp, Homo sapiens
gcgactccaatgcaggagaagactgtacaattaaataggtgtgagaggctagattacataaagactggcattctttcta

SEQ ID NO: 61095 - DNA, 78 bp, Homo sapiens
atgcaggagaagactgtacaattaaataggtgtgagaggctagattacataaagactggcattctttctatgactaaa

SEQ ID NO: 61096 - DNA, 76 bp, Homo sapiens
agaagactgtacaattaaataggtgtgagaggctagattacataaagactggcattctttctatgactaaaatcac

SEQ ID NO: 61097 - DNA, 76 bp, Homo sapiens
ttaaataggtgtgagaggctagattacataaagactggcattctttctatgactaaaatcactaggaacaagtgta

SEQ ID NO: 61098 - DNA, 76 bp, Homo sapiens
tgtgagaggctagattacataaagactggcattctttctatgactaaaatcactaggaacaagtgtaagggccatt

SEQ ID NO: 61099 - DNA, 74 bp, Homo sapiens
ctagattacataaagactggcattctttctatgactaaaatcactaggaacaagtgtaagggccatttatgaac

SEQ ID NO: 61100 - DNA, 74 bp, Homo sapiens
ttacataaagactggcattctttctatgactaaaatcactaggaacaagtgtaagggccatttatgaactagga

SEQ ID NO: 61101 - DNA, 71 bp, Homo sapiens
aaagactggcattctttctatgactaaaatcactaggaacaagtgtaagggccatttatgaactaggaaaa

SEQ ID NO: 61102 - DNA, 71 bp, Homo sapiens
aagactggcattctttctatgactaaaatcactaggaacaagtgtaagggccatttatgaactaggaaaaa

SEQ ID NO: 61103 - DNA, 70 bp, Homo sapiens
ggcattctttctatgactaaaatcactaggaacaagtgtaagggccatttatgaactaggaaaaattaaa

SEQ ID NO: 61104 - DNA, 70 bp, Homo sapiens
aaatcactaggaacaagtgtaagggccatttatgaactaggaaaaattaaatctgaaagacacaagacaa

SEQ ID NO: 61105 - DNA, 69 bp, Homo sapiens
actaggaacaagtgtaagggccatttatgaactaggaaaaattaaatctgaaagacacaagacaaaaca

SEQ ID NO: 61106 - DNA, 73 bp, Homo sapiens
caagtgtaagggccatttatgaactaggaaaaattaaatctgaaagacacaagacaaaacaaatcatgatgga

SEQ ID NO: 61107 - DNA, 73 bp, Homo sapiens
agtgtaagggccatttatgaactaggaaaaattaaatctgaaagacacaagacaaaacaaatcatgatggagc

SEQ ID NO: 61108 - DNA, 73 bp, Homo sapiens
gaaaaattaaatctgaaagacacaagacaaaacaaatcatgatggagctattattttttctcctcccagtcca

SEQ ID NO: 61109 - DNA, 74 bp, Homo sapiens
aatctgaaagacacaagacaaaacaaatcatgatggagctattattttttctcctcccagtccatctttattcc

SEQ ID NO: 61110 - DNA, 74 bp, Homo sapiens
aaagacacaagacaaaacaaatcatgatggagctattattttttctcctcccagtccatctttattcctcactc

SEQ ID NO: 61111 - DNA, 77 bp, Homo sapiens
acaaaacaaatcatgatggagctattattttttctcctcccagtccatctttattcctcactctgtgccaggctctg

SEQ ID NO: 61112 - DNA, 75 bp, Homo sapiens
tattattttttctcctcccagtccatctttattcctcactctgtgccaggctctgtgttcagggtccaaggtaca

SEQ ID NO: 61113 - DNA, 77 bp, Homo sapiens
ttttctcctcccagtccatctttattcctcactctgtgccaggctctgtgttcagggtccaaggtacagcagttcat

SEQ ID NO: 61114 - DNA, 81 bp, Homo sapiens
agtccatctttattcctcactctgtgccaggctctgtgttcagggtccaaggtacagcagttcattgaagacacacacatc

SEQ ID NO: 61115 - DNA, 79 bp, Homo sapiens
tttattcctcactctgtgccaggctctgtgttcagggtccaaggtacagcagttcattgaagacacacacatccccgag

SEQ ID NO: 61116 - DNA, 78 bp, Homo sapiens
gtgccaggctctgtgttcagggtccaaggtacagcagttcattgaagacacacacatccccgagggaagagtactctg

SEQ ID NO: 61117 - DNA, 75 bp, Homo sapiens
aggctctgtgttcagggtccaaggtacagcagttcattgaagacacacacatccccgagggaagagtactctggg

SEQ ID NO: 61118 - DNA, 76 bp, Homo sapiens
ttcagggtccaaggtacagcagttcattgaagacacacacatccccgagggaagagtactctggggactagccaca

SEQ ID NO: 61119 - DNA, 78 bp, Homo sapiens
tacagcagttcattgaagacacacacatccccgagggaagagtactctggggactagccacacacgacaggtgaagta

SEQ ID NO: 61120 - DNA, 74 bp, Homo sapiens
agttcattgaagacacacacatccccgagggaagagtactctggggactagccacacacgacaggtgaagtaac

SEQ ID NO: 61121 - DNA, 73 bp, Homo sapiens
acacacacatccccgagggaagagtactctggggactagccacacacgacaggtgaagtaactgaggccccaa

SEQ ID NO: 61122 - DNA, 69 bp, Homo sapiens
cccgagggaagagtactctggggactagccacacacgacaggtgaagtaactgaggccccaaggaaagg

SEQ ID NO: 61123 - DNA, 71 bp, Homo sapiens
aagagtactctggggactagccacacacgacaggtgaagtaactgaggccccaaggaaagggccttgcctg

SEQ ID NO: 61124 - DNA, 74 bp, Homo sapiens
gactagccacacacgacaggtgaagtaactgaggccccaaggaaagggccttgcctgggtgatgagccaaccaa

SEQ ID NO: 61125 - DNA, 74 bp, Homo sapiens
acacgacaggtgaagtaactgaggccccaaggaaagggccttgcctgggtgatgagccaaccaactagcagcaa

SEQ ID NO: 61126 - DNA, 73 bp, Homo sapiens
acaggtgaagtaactgaggccccaaggaaagggccttgcctgggtgatgagccaaccaactagcagcaaagcc

SEQ ID NO: 61127 - DNA, 77 bp, Homo sapiens
cccaaggaaagggccttgcctgggtgatgagccaaccaactagcagcaaagccccaatcctgcagctctctgtgccc

SEQ ID NO: 61128 - DNA, 82 bp, Homo sapiens
ttgcctgggtgatgagccaaccaactagcagcaaagccccaatcctgcagctctctgtgcccctcctccacagagggctgac

SEQ ID NO: 61129 - DNA, 83 bp, Homo sapiens
tgatgagccaaccaactagcagcaaagccccaatcctgcagctctctgtgcccctcctccacagagggctgaccaccttgcat

SEQ ID NO: 61130 - DNA, 79 bp, Homo sapiens
aaccaactagcagcaaagccccaatcctgcagctctctgtgcccctcctccacagagggctgaccaccttgcattataa

SEQ ID NO: 61131 - DNA, 78 bp, Homo sapiens
agcaaagccccaatcctgcagctctctgtgcccctcctccacagagggctgaccaccttgcattataaagtgttctaa

SEQ ID NO: 61132 - DNA, 77 bp, Homo sapiens
agctctctgtgcccctcctccacagagggctgaccaccttgcattataaagtgttctaagagaatctgacaggaaaa

SEQ ID NO: 61133 - DNA, 75 bp, Homo sapiens
ccctcctccacagagggctgaccaccttgcattataaagtgttctaagagaatctgacaggaaaactggtgaaca

SEQ ID NO: 61134 - DNA, 75 bp, Homo sapiens
cagagggctgaccaccttgcattataaagtgttctaagagaatctgacaggaaaactggtgaacaacaggaccaa

SEQ ID NO: 61135 - DNA, 74 bp, Homo sapiens
accaccttgcattataaagtgttctaagagaatctgacaggaaaactggtgaacaacaggaccaaagcaactca

SEQ ID NO: 61136 - DNA, 74 bp, Homo sapiens
ttgcattataaagtgttctaagagaatctgacaggaaaactggtgaacaacaggaccaaagcaactcaaataaa

SEQ ID NO: 61137 - DNA, 73 bp, Homo sapiens
aaagtgttctaagagaatctgacaggaaaactggtgaacaacaggaccaaagcaactcaaataaatgcctatg

SEQ ID NO: 61138 - DNA, 75 bp, Homo sapiens
aagagaatctgacaggaaaactggtgaacaacaggaccaaagcaactcaaataaatgcctatgtctctaaacata

SEQ ID NO: 61139 - DNA, 73 bp, Homo sapiens
gaaaactggtgaacaacaggaccaaagcaactcaaataaatgcctatgtctctaaacataagcactttaaatc

SEQ ID NO: 61140 - DNA, 78 bp, Homo sapiens
tgaacaacaggaccaaagcaactcaaataaatgcctatgtctctaaacataagcactttaaatcttactcatgagaga

SEQ ID NO: 61141 - DNA, 80 bp, Homo sapiens
gaccaaagcaactcaaataaatgcctatgtctctaaacataagcactttaaatcttactcatgagagaaatgctcatcaa

SEQ ID NO: 61142 - DNA, 81 bp, Homo sapiens
ctcaaataaatgcctatgtctctaaacataagcactttaaatcttactcatgagagaaatgctcatcaaagtaagatgaca

SEQ ID NO: 61143 - DNA, 82 bp, Homo sapiens
atgcctatgtctctaaacataagcactttaaatcttactcatgagagaaatgctcatcaaagtaagatgacatcattttctc

SEQ ID NO: 61144 - DNA, 80 bp, Homo sapiens
atgtctctaaacataagcactttaaatcttactcatgagagaaatgctcatcaaagtaagatgacatcattttctcctat

SEQ ID NO: 61145 - DNA, 78 bp, Homo sapiens
taagcactttaaatcttactcatgagagaaatgctcatcaaagtaagatgacatcattttctcctattaaaggacagg

SEQ ID NO: 61146 - DNA, 77 bp, Homo sapiens
tttaaatcttactcatgagagaaatgctcatcaaagtaagatgacatcattttctcctattaaaggacagggtgggc

SEQ ID NO: 61147 - DNA, 83 bp, Homo sapiens
actcatgagagaaatgctcatcaaagtaagatgacatcattttctcctattaaaggacagggtgggctgggtgcagcagctca

SEQ ID NO: 61148 - DNA, 80 bp, Homo sapiens
aaatgctcatcaaagtaagatgacatcattttctcctattaaaggacagggtgggctgggtgcagcagctcacacctgta

SEQ ID NO: 61149 - DNA, 69 bp, Homo sapiens
tctaaaaaaaaacagaagaacggggtaacagtccctagccttgggaagatggtgtgatgctggtaatcg

SEQ ID NO: 61150 - DNA, 70 bp, Homo sapiens
aaaaacagaagaacggggtaacagtccctagccttgggaagatggtgtgatgctggtaatcgggtacatg

SEQ ID NO: 61151 - DNA, 75 bp, Homo sapiens
gggtaacagtccctagccttgggaagatggtgtgatgctggtaatcgggtacatggcttttgatggaaagcacta

SEQ ID NO: 61152 - DNA, 80 bp, Homo sapiens
tgggaagatggtgtgatgctggtaatcgggtacatggcttttgatggaaagcactataatggtatctgtcagaagcctta

SEQ ID NO: 61153 - DNA, 78 bp, Homo sapiens
atggtgtgatgctggtaatcgggtacatggcttttgatggaaagcactataatggtatctgtcagaagccttaaaata

SEQ ID NO: 61154 - DNA, 78 bp, Homo sapiens
gtaatcgggtacatggcttttgatggaaagcactataatggtatctgtcagaagccttaaaatatatgcaatatgtgt

SEQ ID NO: 61155 - DNA, 78 bp, Homo sapiens
cgggtacatggcttttgatggaaagcactataatggtatctgtcagaagccttaaaatatatgcaatatgtgtttctg

SEQ ID NO: 61156 - DNA, 80 bp, Homo sapiens
ttttgatggaaagcactataatggtatctgtcagaagccttaaaatatatgcaatatgtgtttctggagcgaggatcatt

SEQ ID NO: 61157 - DNA, 82 bp, Homo sapiens
aaagcactataatggtatctgtcagaagccttaaaatatatgcaatatgtgtttctggagcgaggatcatttcacatgcaat

SEQ ID NO: 61158 - DNA, 83 bp, Homo sapiens
taatggtatctgtcagaagccttaaaatatatgcaatatgtgtttctggagcgaggatcatttcacatgcaatttgtaatgtg

SEQ ID NO: 61159 - DNA, 79 bp, Homo sapiens
agaagccttaaaatatatgcaatatgtgtttctggagcgaggatcatttcacatgcaatttgtaatgtggaaggaggag

SEQ ID NO: 61160 - DNA, 81 bp, Homo sapiens
ttaaaatatatgcaatatgtgtttctggagcgaggatcatttcacatgcaatttgtaatgtggaaggaggaggtgagtatg

SEQ ID NO: 61161 - DNA, 82 bp, Homo sapiens
aatatgtgtttctggagcgaggatcatttcacatgcaatttgtaatgtggaaggaggaggtgagtatggtgtgagagccata

SEQ ID NO: 61162 - DNA, 81 bp, Homo sapiens
tctggagcgaggatcatttcacatgcaatttgtaatgtggaaggaggaggtgagtatggtgtgagagccatactggtttaa

SEQ ID NO: 61163 - DNA, 77 bp, Homo sapiens
ggatcatttcacatgcaatttgtaatgtggaaggaggaggtgagtatggtgtgagagccatactggtttaaacctta

SEQ ID NO: 61164 - DNA, 76 bp, Homo sapiens
tttcacatgcaatttgtaatgtggaaggaggaggtgagtatggtgtgagagccatactggtttaaaccttagtctc

SEQ ID NO: 61165 - DNA, 72 bp, Homo sapiens
aatttgtaatgtggaaggaggaggtgagtatggtgtgagagccatactggtttaaaccttagtctcccctgc

SEQ ID NO: 61166 - DNA, 70 bp, Homo sapiens
aaggaggaggtgagtatggtgtgagagccatactggtttaaaccttagtctcccctgcctgttactattt

SEQ ID NO: 61167 - DNA, 75 bp, Homo sapiens
tgagtatggtgtgagagccatactggtttaaaccttagtctcccctgcctgttactattttgagccactgagtaa

SEQ ID NO: 61168 - DNA, 72 bp, Homo sapiens
tggtgtgagagccatactggtttaaaccttagtctcccctgcctgttactattttgagccactgagtaaagg

SEQ ID NO: 61169 - DNA, 68 bp, Homo sapiens
tttaaaccttagtctcccctgcctgttactattttgagccactgagtaaagggaggttaacacaaagc

SEQ ID NO: 61170 - DNA, 74 bp, Homo sapiens
agtctcccctgcctgttactattttgagccactgagtaaagggaggttaacacaaagctcactgagcccactca

SEQ ID NO: 61171 - DNA, 74 bp, Homo sapiens
ttactattttgagccactgagtaaagggaggttaacacaaagctcactgagcccactcaccccacccatcatct

SEQ ID NO: 61172 - DNA, 73 bp, Homo sapiens
agtaaagggaggttaacacaaagctcactgagcccactcaccccacccatcatcttcactcggtttagccaca

SEQ ID NO: 61173 - DNA, 78 bp, Homo sapiens
gttaacacaaagctcactgagcccactcaccccacccatcatcttcactcggtttagccacaggctctttgcatgtgt

SEQ ID NO: 61174 - DNA, 79 bp, Homo sapiens
aaagctcactgagcccactcaccccacccatcatcttcactcggtttagccacaggctctttgcatgtgttgcttatta

SEQ ID NO: 61175 - DNA, 79 bp, Homo sapiens
agcccactcaccccacccatcatcttcactcggtttagccacaggctctttgcatgtgttgcttattacataattggca

SEQ ID NO: 61176 - DNA, 79 bp, Homo sapiens
cccacccatcatcttcactcggtttagccacaggctctttgcatgtgttgcttattacataattggcagcctcaaccac

SEQ ID NO: 61177 - DNA, 81 bp, Homo sapiens
atcatcttcactcggtttagccacaggctctttgcatgtgttgcttattacataattggcagcctcaaccactgtgtatac

SEQ ID NO: 61178 - DNA, 79 bp, Homo sapiens
caggctctttgcatgtgttgcttattacataattggcagcctcaaccactgtgtatactccactgtcaaactaccttta

SEQ ID NO: 61179 - DNA, 77 bp, Homo sapiens
tctttgcatgtgttgcttattacataattggcagcctcaaccactgtgtatactccactgtcaaactacctttaaaa

SEQ ID NO: 61180 - DNA, 72 bp, Homo sapiens
cttattacataattggcagcctcaaccactgtgtatactccactgtcaaactacctttaaaagcaaactctt

SEQ ID NO: 61181 - DNA, 73 bp, Homo sapiens
tacataattggcagcctcaaccactgtgtatactccactgtcaaactacctttaaaagcaaactctttatatt

SEQ ID NO: 61182 - DNA, 70 bp, Homo sapiens
cctcaaccactgtgtatactccactgtcaaactacctttaaaagcaaactctttatatttactctggtat

SEQ ID NO: 61183 - DNA, 70 bp, Homo sapiens
ccactgtgtatactccactgtcaaactacctttaaaagcaaactctttatatttactctggtattcctta

SEQ ID NO: 61184 - DNA, 65 bp, Homo sapiens
actccactgtcaaactacctttaaaagcaaactctttatatttactctggtattccttaattttt

SEQ ID NO: 61185 - DNA, 70 bp, Homo sapiens
accgcgcccagcctattccttaaattttaaaagaatctaacatgcatttttattaggactgttattgcta

SEQ ID NO: 61186 - DNA, 71 bp, Homo sapiens
gcccagcctattccttaaattttaaaagaatctaacatgcatttttattaggactgttattgctacatagg

SEQ ID NO: 61187 - DNA, 68 bp, Homo sapiens
ccttaaattttaaaagaatctaacatgcatttttattaggactgttattgctacataggttttgggta

SEQ ID NO: 61188 - DNA, 69 bp, Homo sapiens
tttaaaagaatctaacatgcatttttattaggactgttattgctacataggttttgggtaatttagccc

SEQ ID NO: 61189 - DNA, 70 bp, Homo sapiens
acatgcatttttattaggactgttattgctacataggttttgggtaatttagccccaatgccatttttcc

SEQ ID NO: 61190 - DNA, 70 bp, Homo sapiens
ttttattaggactgttattgctacataggttttgggtaatttagccccaatgccatttttcctatagtgc

SEQ ID NO: 61191 - DNA, 74 bp, Homo sapiens
tgttattgctacataggttttgggtaatttagccccaatgccatttttcctatagtgcctgtattctatgctaa

SEQ ID NO: 61192 - DNA, 73 bp, Homo sapiens
tacataggttttgggtaatttagccccaatgccatttttcctatagtgcctgtattctatgctaaggacataa

SEQ ID NO: 61193 - DNA, 82 bp, Homo sapiens
tttagccccaatgccatttttcctatagtgcctgtattctatgctaaggacataacagagatgtgcatacagaatgtggata

SEQ ID NO: 61194 - DNA, 81 bp, Homo sapiens
catttttcctatagtgcctgtattctatgctaaggacataacagagatgtgcatacagaatgtggataataacgcttatcc

SEQ ID NO: 61195 - DNA, 84 bp, Homo sapiens
ttcctatagtgcctgtattctatgctaaggacataacagagatgtgcatacagaatgtggataataacgcttatcctcacattc

SEQ ID NO: 61196 - DNA, 80 bp, Homo sapiens
tatgctaaggacataacagagatgtgcatacagaatgtggataataacgcttatcctcacattcctcacaaaaaaataag

SEQ ID NO: 61197 - DNA, 77 bp, Homo sapiens
acataacagagatgtgcatacagaatgtggataataacgcttatcctcacattcctcacaaaaaaataagtcatttt

SEQ ID NO: 61198 - DNA, 73 bp, Homo sapiens
tgtggataataacgcttatcctcacattcctcacaaaaaaataagtcattttttactgtgtgtccaagagtag

SEQ ID NO: 61199 - DNA, 72 bp, Homo sapiens
aacgcttatcctcacattcctcacaaaaaaataagtcattttttactgtgtgtccaagagtaggttatcatg

SEQ ID NO: 61200 - DNA, 72 bp, Homo sapiens
cctcacattcctcacaaaaaaataagtcattttttactgtgtgtccaagagtaggttatcatgtcttcaaag

SEQ ID NO: 61201 - DNA, 71 bp, Homo sapiens
tcacaaaaaaataagtcattttttactgtgtgtccaagagtaggttatcatgtcttcaaaggaccctgtgt

SEQ ID NO: 61202 - DNA, 71 bp, Homo sapiens
aaataagtcattttttactgtgtgtccaagagtaggttatcatgtcttcaaaggaccctgtgttccaaaca

SEQ ID NO: 61203 - DNA, 75 bp, Homo sapiens
ttttactgtgtgtccaagagtaggttatcatgtcttcaaaggaccctgtgttccaaacagcaagagactgaccaa

SEQ ID NO: 61204 - DNA, 75 bp, Homo sapiens
tgtccaagagtaggttatcatgtcttcaaaggaccctgtgttccaaacagcaagagactgaccaagaaagaacaa

SEQ ID NO: 61205 - DNA, 73 bp, Homo sapiens
aagagtaggttatcatgtcttcaaaggaccctgtgttccaaacagcaagagactgaccaagaaagaacaagga

SEQ ID NO: 61206 - DNA, 76 bp, Homo sapiens
tatcatgtcttcaaaggaccctgtgttccaaacagcaagagactgaccaagaaagaacaaggaaggacagtgtcac

SEQ ID NO: 61207 - DNA, 71 bp, Homo sapiens
aaaggaccctgtgttccaaacagcaagagactgaccaagaaagaacaaggaaggacagtgtcacccctctg

SEQ ID NO: 61208 - DNA, 77 bp, Homo sapiens
ctgtgttccaaacagcaagagactgaccaagaaagaacaaggaaggacagtgtcacccctctgtgcagccaatgccc

SEQ ID NO: 61209 - DNA, 77 bp, Homo sapiens
aacagcaagagactgaccaagaaagaacaaggaaggacagtgtcacccctctgtgcagccaatgccccggatccaca

SEQ ID NO: 61210 - DNA, 80 bp, Homo sapiens
gacagtgtcacccctctgtgcagccaatgccccggatccacaccaggctgggattcttgctgctcgtcctcaaccttcca

SEQ ID NO: 61211 - DNA, 79 bp, Homo sapiens
acccctctgtgcagccaatgccccggatccacaccaggctgggattcttgctgctcgtcctcaaccttccacatcgcaa

SEQ ID NO: 61212 - DNA, 78 bp, Homo sapiens
cagccaatgccccggatccacaccaggctgggattcttgctgctcgtcctcaaccttccacatcgcaacagggtccaa

SEQ ID NO: 61213 - DNA, 72 bp, Homo sapiens
tcaaccttccacatcgcaacagggtccaaacctatgctcctcggatactcccccacccacctggaaacctga

SEQ ID NO: 61214 - DNA, 72 bp, Homo sapiens
ttccacatcgcaacagggtccaaacctatgctcctcggatactcccccacccacctggaaacctgactcctc

SEQ ID NO: 61215 - DNA, 68 bp, Homo sapiens
aacagggtccaaacctatgctcctcggatactcccccacccacctggaaacctgactcctccacaacc

SEQ ID NO: 61216 - DNA, 72 bp, Homo sapiens
ctatgctcctcggatactcccccacccacctggaaacctgactcctccacaacctccacctagaatcagaaa

SEQ ID NO: 61217 - DNA, 70 bp, Homo sapiens
ctcggatactcccccacccacctggaaacctgactcctccacaacctccacctagaatcagaaaacgata

SEQ ID NO: 61218 - DNA, 70 bp, Homo sapiens
cccacccacctggaaacctgactcctccacaacctccacctagaatcagaaaacgataccaaagcgaaca

SEQ ID NO: 61219 - DNA, 74 bp, Homo sapiens
ctggaaacctgactcctccacaacctccacctagaatcagaaaacgataccaaagcgaacatcaggcagaacaa

SEQ ID NO: 61220 - DNA, 74 bp, Homo sapiens
acctgactcctccacaacctccacctagaatcagaaaacgataccaaagcgaacatcaggcagaacaagggctg

SEQ ID NO: 61221 - DNA, 76 bp, Homo sapiens
acaacctccacctagaatcagaaaacgataccaaagcgaacatcaggcagaacaagggctggctctgcaataacca

SEQ ID NO: 61222 - DNA, 78 bp, Homo sapiens
tagaatcagaaaacgataccaaagcgaacatcaggcagaacaagggctggctctgcaataaccacttgctcaggttcc

SEQ ID NO: 61223 - DNA, 76 bp, Homo sapiens
aaaacgataccaaagcgaacatcaggcagaacaagggctggctctgcaataaccacttgctcaggttccctcataa

SEQ ID NO: 61224 - DNA, 78 bp, Homo sapiens
acatcaggcagaacaagggctggctctgcaataaccacttgctcaggttccctcataaggacctacaacagctgggta

SEQ ID NO: 61225 - DNA, 77 bp, Homo sapiens
aacaagggctggctctgcaataaccacttgctcaggttccctcataaggacctacaacagctgggtatgcaaagctg

SEQ ID NO: 61226 - DNA, 78 bp, Homo sapiens
ctctgcaataaccacttgctcaggttccctcataaggacctacaacagctgggtatgcaaagctgtggcgccataaaa

SEQ ID NO: 61227 - DNA, 75 bp, Homo sapiens
ataaccacttgctcaggttccctcataaggacctacaacagctgggtatgcaaagctgtggcgccataaaacaaa

SEQ ID NO: 61228 - DNA, 77 bp, Homo sapiens
tcaggttccctcataaggacctacaacagctgggtatgcaaagctgtggcgccataaaacaaagaaaatgctcatta

SEQ ID NO: 61229 - DNA, 78 bp, Homo sapiens
ctcataaggacctacaacagctgggtatgcaaagctgtggcgccataaaacaaagaaaatgctcattaaatgtacaca

SEQ ID NO: 61230 - DNA, 77 bp, Homo sapiens
ctgggtatgcaaagctgtggcgccataaaacaaagaaaatgctcattaaatgtacacagctgccaacctgggaagaa

SEQ ID NO: 61231 - DNA, 77 bp, Homo sapiens
ccataaaacaaagaaaatgctcattaaatgtacacagctgccaacctgggaagaagcgataatcacctcagaggtga

SEQ ID NO: 61232 - DNA, 77 bp, Homo sapiens
aagaaaatgctcattaaatgtacacagctgccaacctgggaagaagcgataatcacctcagaggtgataaactggta

SEQ ID NO: 61233 - DNA, 77 bp, Homo sapiens
tcattaaatgtacacagctgccaacctgggaagaagcgataatcacctcagaggtgataaactggtaagaaacacaa

SEQ ID NO: 61234 - DNA, 76 bp, Homo sapiens
aaatgtacacagctgccaacctgggaagaagcgataatcacctcagaggtgataaactggtaagaaacacaacata

SEQ ID NO: 61235 - DNA, 75 bp, Homo sapiens
ccaacctgggaagaagcgataatcacctcagaggtgataaactggtaagaaacacaacatagctattttcataga

SEQ ID NO: 61236 - DNA, 74 bp, Homo sapiens
aagaagcgataatcacctcagaggtgataaactggtaagaaacacaacatagctattttcatagaggaaatgtt

SEQ ID NO: 61237 - DNA, 75 bp, Homo sapiens
gataatcacctcagaggtgataaactggtaagaaacacaacatagctattttcatagaggaaatgtttcttgtgt

SEQ ID NO: 61238 - DNA, 72 bp, Homo sapiens
cctcagaggtgataaactggtaagaaacacaacatagctattttcatagaggaaatgtttcttgtgttttct

SEQ ID NO: 61239 - DNA, 71 bp, Homo sapiens
gataaactggtaagaaacacaacatagctattttcatagaggaaatgtttcttgtgttttcttctttttgc

SEQ ID NO: 61240 - DNA, 72 bp, Homo sapiens
gaaacacaacatagctattttcatagaggaaatgtttcttgtgttttcttctttttgctttgtgtttattga

SEQ ID NO: 61241 - DNA, 69 bp, Homo sapiens
aacatagctattttcatagaggaaatgtttcttgtgttttcttctttttgctttgtgtttattgatttt

SEQ ID NO: 61242 - DNA, 70 bp, Homo sapiens
aaaacaaaacatctaaattcaatagggaaataatccagaatgatttataagtaatcttaaagctgtgatt

SEQ ID NO: 61243 - DNA, 72 bp, Homo sapiens
aacatctaaattcaatagggaaataatccagaatgatttataagtaatcttaaagctgtgatttaaagtaga

SEQ ID NO: 61244 - DNA, 73 bp, Homo sapiens
caatagggaaataatccagaatgatttataagtaatcttaaagctgtgatttaaagtagaaagcaaatggcta

SEQ ID NO: 61245 - DNA, 71 bp, Homo sapiens
ggaaataatccagaatgatttataagtaatcttaaagctgtgatttaaagtagaaagcaaatggctaaggg

SEQ ID NO: 61246 - DNA, 71 bp, Homo sapiens
aatgatttataagtaatcttaaagctgtgatttaaagtagaaagcaaatggctaaggggagcaggaaagcc

SEQ ID NO: 61247 - DNA, 73 bp, Homo sapiens
tataagtaatcttaaagctgtgatttaaagtagaaagcaaatggctaaggggagcaggaaagcctgagcccaa

SEQ ID NO: 61248 - DNA, 74 bp, Homo sapiens
ttaaagctgtgatttaaagtagaaagcaaatggctaaggggagcaggaaagcctgagcccaaggccaaggctca

SEQ ID NO: 61249 - DNA, 71 bp, Homo sapiens
ttaaagtagaaagcaaatggctaaggggagcaggaaagcctgagcccaaggccaaggctcagggtaagaaa

SEQ ID NO: 61250 - DNA, 74 bp, Homo sapiens
tagaaagcaaatggctaaggggagcaggaaagcctgagcccaaggccaaggctcagggtaagaaatgtggccaa

SEQ ID NO: 61251 - DNA, 71 bp, Homo sapiens
taaggggagcaggaaagcctgagcccaaggccaaggctcagggtaagaaatgtggccaagggcgagggact

SEQ ID NO: 61252 - DNA, 71 bp, Homo sapiens
aggaaagcctgagcccaaggccaaggctcagggtaagaaatgtggccaagggcgagggacttgccactccc

SEQ ID NO: 61253 - DNA, 72 bp, Homo sapiens
agcctgagcccaaggccaaggctcagggtaagaaatgtggccaagggcgagggacttgccactccctcccca

SEQ ID NO: 61254 - DNA, 70 bp, Homo sapiens
cccaaggccaaggctcagggtaagaaatgtggccaagggcgagggacttgccactccctccccactctct

SEQ ID NO: 61255 - DNA, 70 bp, Homo sapiens
aaggccaaggctcagggtaagaaatgtggccaagggcgagggacttgccactccctccccactctcttcc

SEQ ID NO: 61256 - DNA, 70 bp, Homo sapiens
aaggctcagggtaagaaatgtggccaagggcgagggacttgccactccctccccactctcttcctggacc

SEQ ID NO: 61257 - DNA, 71 bp, Homo sapiens
agggtaagaaatgtggccaagggcgagggacttgccactccctccccactctcttcctggacccacagcca

SEQ ID NO: 61258 - DNA, 72 bp, Homo sapiens
gggtaagaaatgtggccaagggcgagggacttgccactccctccccactctcttcctggacccacagccaca

SEQ ID NO: 61259 - DNA, 74 bp, Homo sapiens
agaaatgtggccaagggcgagggacttgccactccctccccactctcttcctggacccacagccacagccttca

SEQ ID NO: 61260 - DNA, 74 bp, Homo sapiens
tgtggccaagggcgagggacttgccactccctccccactctcttcctggacccacagccacagccttcagaacc

SEQ ID NO: 61261 - DNA, 75 bp, Homo sapiens
gggcgagggacttgccactccctccccactctcttcctggacccacagccacagccttcagaacccagcattcta

SEQ ID NO: 61262 - DNA, 74 bp, Homo sapiens
agggacttgccactccctccccactctcttcctggacccacagccacagccttcagaacccagcattctaccta

SEQ ID NO: 61263 - DNA, 74 bp, Homo sapiens
acttgccactccctccccactctcttcctggacccacagccacagccttcagaacccagcattctacctagaag

SEQ ID NO: 61264 - DNA, 74 bp, Homo sapiens
ttgccactccctccccactctcttcctggacccacagccacagccttcagaacccagcattctacctagaaggg

SEQ ID NO: 61265 - DNA, 73 bp, Homo sapiens
cactctcttcctggacccacagccacagccttcagaacccagcattctacctagaaggggtgggagttacttg

SEQ ID NO: 61266 - DNA, 73 bp, Homo sapiens
tcttcctggacccacagccacagccttcagaacccagcattctacctagaaggggtgggagttacttgttaca

SEQ ID NO: 61267 - DNA, 72 bp, Homo sapiens
acagccacagccttcagaacccagcattctacctagaaggggtgggagttacttgttacagcacaaagaaaa

SEQ ID NO: 61268 - DNA, 69 bp, Homo sapiens
ttcagaacccagcattctacctagaaggggtgggagttacttgttacagcacaaagaaaacctataagg

SEQ ID NO: 61269 - DNA, 68 bp, Homo sapiens
aacccagcattctacctagaaggggtgggagttacttgttacagcacaaagaaaacctataaggtggc

SEQ ID NO: 61270 - DNA, 67 bp, Homo sapiens
tctacctagaaggggtgggagttacttgttacagcacaaagaaaacctataaggtggccgggagagg

SEQ ID NO: 61271 - DNA, 68 bp, Homo sapiens
aggggtgggagttacttgttacagcacaaagaaaacctataaggtggccgggagaggtggctcacacc

SEQ ID NO: 61272 - DNA, 67 bp, Homo sapiens
aaaaatcacccgaccaaccaaccaaagaaacaacaaaaaagacaacctgcaagatagaagatagaag

SEQ ID NO: 61273 - DNA, 72 bp, Homo sapiens
cgaccaaccaaccaaagaaacaacaaaaaagacaacctgcaagatagaagatagaaggcaccagatctattc

SEQ ID NO: 61274 - DNA, 71 bp, Homo sapiens
aaccaaccaaagaaacaacaaaaaagacaacctgcaagatagaagatagaaggcaccagatctattcctac

SEQ ID NO: 61275 - DNA, 76 bp, Homo sapiens
caacaaaaaagacaacctgcaagatagaagatagaaggcaccagatctattcctacggtcaaagtgactgctggac

SEQ ID NO: 61276 - DNA, 76 bp, Homo sapiens
aaaaagacaacctgcaagatagaagatagaaggcaccagatctattcctacggtcaaagtgactgctggaccagac

SEQ ID NO: 61277 - DNA, 78 bp, Homo sapiens
aagatagaagatagaaggcaccagatctattcctacggtcaaagtgactgctggaccagaccaggagtcgaatgacca

SEQ ID NO: 61278 - DNA, 77 bp, Homo sapiens
agatagaaggcaccagatctattcctacggtcaaagtgactgctggaccagaccaggagtcgaatgaccaagttcaa

SEQ ID NO: 61279 - DNA, 75 bp, Homo sapiens
accagatctattcctacggtcaaagtgactgctggaccagaccaggagtcgaatgaccaagttcaagagaattac

SEQ ID NO: 61280 - DNA, 74 bp, Homo sapiens
tattcctacggtcaaagtgactgctggaccagaccaggagtcgaatgaccaagttcaagagaattaccaattta

SEQ ID NO: 61281 - DNA, 70 bp, Homo sapiens
aaagtgactgctggaccagaccaggagtcgaatgaccaagttcaagagaattaccaatttactaaaaact

SEQ ID NO: 61282 - DNA, 67 bp, Homo sapiens
ctggaccagaccaggagtcgaatgaccaagttcaagagaattaccaatttactaaaaacttaaagtt

SEQ ID NO: 61283 - DNA, 66 bp, Homo sapiens
ccagaccaggagtcgaatgaccaagttcaagagaattaccaatttactaaaaacttaaagttttta

SEQ ID NO: 61284 - DNA, 66 bp, Homo sapiens
gtcgaatgaccaagttcaagagaattaccaatttactaaaaacttaaagtttttagaatactcttc

SEQ ID NO: 61285 - DNA, 66 bp, Homo sapiens
caagttcaagagaattaccaatttactaaaaacttaaagtttttagaatactcttcttgaatactg

SEQ ID NO: 61286 - DNA, 69 bp, Homo sapiens
gagaattaccaatttactaaaaacttaaagtttttagaatactcttcttgaatactgttgatatataca

SEQ ID NO: 61287 - DNA, 77 bp, Homo sapiens
tagaatactcttcttgaatactgttgatatatacatatgtattcttcaagaatacttacgacatttacaggttctaa

SEQ ID NO: 61288 - DNA, 70 bp, Homo sapiens
tacatatgtattcttcaagaatacttacgacatttacaggttctaaggattagagggaaaaaaaggaaca

SEQ ID NO: 61289 - DNA, 68 bp, Homo sapiens
atgtattcttcaagaatacttacgacatttacaggttctaaggattagagggaaaaaaaggaacataa

SEQ ID NO: 61290 - DNA, 65 bp, Homo sapiens
caagaatacttacgacatttacaggttctaaggattagagggaaaaaaaggaacataaacaaaaa

SEQ ID NO: 61291 - DNA, 65 bp, Homo sapiens
tacgacatttacaggttctaaggattagagggaaaaaaaggaacataaacaaaaatttacacaat

SEQ ID NO: 61292 - DNA, 64 bp, Homo sapiens
acaggttctaaggattagagggaaaaaaaggaacataaacaaaaatttacacaattttttgata

SEQ ID NO: 61293 - DNA, 66 bp, Homo sapiens
aaaaggaacataaacaaaaatttacacaattttttgataacttggcaaattagttactggacagac

SEQ ID NO: 61294 - DNA, 67 bp, Homo sapiens
taaacaaaaatttacacaattttttgataacttggcaaattagttactggacagactgtctttttgg

SEQ ID NO: 61295 - DNA, 71 bp, Homo sapiens
tttacacaattttttgataacttggcaaattagttactggacagactgtctttttggtgacgtgaacctca

SEQ ID NO: 61296 - DNA, 73 bp, Homo sapiens
tttttgataacttggcaaattagttactggacagactgtctttttggtgacgtgaacctcagggccatctcaa

SEQ ID NO: 61297 - DNA, 71 bp, Homo sapiens
taacttggcaaattagttactggacagactgtctttttggtgacgtgaacctcagggccatctcaaagggt

SEQ ID NO: 61298 - DNA, 70 bp, Homo sapiens
aaattagttactggacagactgtctttttggtgacgtgaacctcagggccatctcaaagggttgtggaaa

SEQ ID NO: 61299 - DNA, 69 bp, Homo sapiens
actggacagactgtctttttggtgacgtgaacctcagggccatctcaaagggttgtggaaaaggtaaaa

SEQ ID NO: 61300 - DNA, 67 bp, Homo sapiens
tgtctttttggtgacgtgaacctcagggccatctcaaagggttgtggaaaaggtaaaaggaagttag

SEQ ID NO: 61301 - DNA, 67 bp, Homo sapiens
ggtgacgtgaacctcagggccatctcaaagggttgtggaaaaggtaaaaggaagttagggtgatttg

SEQ ID NO: 61302 - DNA, 71 bp, Homo sapiens
agggccatctcaaagggttgtggaaaaggtaaaaggaagttagggtgatttgggctgtgcagagactgatg

SEQ ID NO: 61303 - DNA, 74 bp, Homo sapiens
atctcaaagggttgtggaaaaggtaaaaggaagttagggtgatttgggctgtgcagagactgatgtagctcaca

SEQ ID NO: 61304 - DNA, 75 bp, Homo sapiens
tggaaaaggtaaaaggaagttagggtgatttgggctgtgcagagactgatgtagctcacaccgctccagaggaag

SEQ ID NO: 61305 - DNA, 78 bp, Homo sapiens
taaaaggaagttagggtgatttgggctgtgcagagactgatgtagctcacaccgctccagaggaagtgaagtattata

SEQ ID NO: 61306 - DNA, 80 bp, Homo sapiens
aagttagggtgatttgggctgtgcagagactgatgtagctcacaccgctccagaggaagtgaagtattatattcgcatta

SEQ ID NO: 61307 - DNA, 83 bp, Homo sapiens
atttgggctgtgcagagactgatgtagctcacaccgctccagaggaagtgaagtattatattcgcattactgctagctacgac

SEQ ID NO: 61308 - DNA, 82 bp, Homo sapiens
agagactgatgtagctcacaccgctccagaggaagtgaagtattatattcgcattactgctagctacgactgacctcaccca

SEQ ID NO: 61309 - DNA, 81 bp, Homo sapiens
ctgatgtagctcacaccgctccagaggaagtgaagtattatattcgcattactgctagctacgactgacctcacccagacc

SEQ ID NO: 61310 - DNA, 78 bp, Homo sapiens
acaccgctccagaggaagtgaagtattatattcgcattactgctagctacgactgacctcacccagacccatgacctg

SEQ ID NO: 61311 - DNA, 79 bp, Homo sapiens
aggaagtgaagtattatattcgcattactgctagctacgactgacctcacccagacccatgacctgtgctgtttactga

SEQ ID NO: 61312 - DNA, 80 bp, Homo sapiens
tattatattcgcattactgctagctacgactgacctcacccagacccatgacctgtgctgtttactgagttgttgcttct

SEQ ID NO: 61313 - DNA, 82 bp, Homo sapiens
tattcgcattactgctagctacgactgacctcacccagacccatgacctgtgctgtttactgagttgttgcttcttgcagga

SEQ ID NO: 61314 - DNA, 80 bp, Homo sapiens
tagctacgactgacctcacccagacccatgacctgtgctgtttactgagttgttgcttcttgcaggactactgcggtgta

SEQ ID NO: 61315 - DNA, 77 bp, Homo sapiens
actgacctcacccagacccatgacctgtgctgtttactgagttgttgcttcttgcaggactactgcggtgtatttac

SEQ ID NO: 61316 - DNA, 77 bp, Homo sapiens
cagacccatgacctgtgctgtttactgagttgttgcttcttgcaggactactgcggtgtatttactcggttcttcta

SEQ ID NO: 61317 - DNA, 74 bp, Homo sapiens
atgacctgtgctgtttactgagttgttgcttcttgcaggactactgcggtgtatttactcggttcttctaaaag

SEQ ID NO: 61318 - DNA, 72 bp, Homo sapiens
gtttactgagttgttgcttcttgcaggactactgcggtgtatttactcggttcttctaaaagtcacttcatt

SEQ ID NO: 61319 - DNA, 73 bp, Homo sapiens
agttgttgcttcttgcaggactactgcggtgtatttactcggttcttctaaaagtcacttcatttctcagaaa

SEQ ID NO: 61320 - DNA, 76 bp, Homo sapiens
actactgcggtgtatttactcggttcttctaaaagtcacttcatttctcagaaatgcctgctatcctcattataca

SEQ ID NO: 61321 - DNA, 77 bp, Homo sapiens
gtgtatttactcggttcttctaaaagtcacttcatttctcagaaatgcctgctatcctcattatacacttccagcag

SEQ ID NO: 61322 - DNA, 83 bp, Homo sapiens
tcggttcttctaaaagtcacttcatttctcagaaatgcctgctatcctcattatacacttccagcaggcaggcagaggctgca

SEQ ID NO: 61323 - DNA, 86 bp, Homo sapiens
taaaagtcacttcatttctcagaaatgcctgctatcctcattatacacttccagcaggcaggcagaggctgcaatgctggctgtta

SEQ ID NO: 61324 - DNA, 90 bp, Homo sapiens
ttcatttctcagaaatgcctgctatcctcattatacacttccagcaggcaggcagaggctgcaatgctggctgttagtaagtatgcagca

SEQ ID NO: 61325 - DNA, 89 bp, Homo sapiens
aaatgcctgctatcctcattatacacttccagcaggcaggcagaggctgcaatgctggctgttagtaagtatgcagcacatcttgtgta

SEQ ID NO: 61326 - DNA, 87 bp, Homo sapiens
tatcctcattatacacttccagcaggcaggcagaggctgcaatgctggctgttagtaagtatgcagcacatcttgtgtagacaaaaa

SEQ ID NO: 61327 - DNA, 84 bp, Homo sapiens
ttatacacttccagcaggcaggcagaggctgcaatgctggctgttagtaagtatgcagcacatcttgtgtagacaaaaaacaaa

SEQ ID NO: 61328 - DNA, 73 bp, Homo sapiens
caaaaaaaaccttctggctaggcctccactttacatgagtatctttgagatgatttatgcttccacctaggag

SEQ ID NO: 61329 - DNA, 72 bp, Homo sapiens
aaaaccttctggctaggcctccactttacatgagtatctttgagatgatttatgcttccacctaggaggttt

SEQ ID NO: 61330 - DNA, 76 bp, Homo sapiens
taggcctccactttacatgagtatctttgagatgatttatgcttccacctaggaggttttgctgaagaaaggatta

SEQ ID NO: 61331 - DNA, 76 bp, Homo sapiens
actttacatgagtatctttgagatgatttatgcttccacctaggaggttttgctgaagaaaggattatactaatca

SEQ ID NO: 61332 - DNA, 76 bp, Homo sapiens
tatctttgagatgatttatgcttccacctaggaggttttgctgaagaaaggattatactaatcagactctagaaaa

SEQ ID NO: 61333 - DNA, 76 bp, Homo sapiens
agatgatttatgcttccacctaggaggttttgctgaagaaaggattatactaatcagactctagaaaagatactgc

SEQ ID NO: 61334 - DNA, 75 bp, Homo sapiens
tatgcttccacctaggaggttttgctgaagaaaggattatactaatcagactctagaaaagatactgctggttaa

SEQ ID NO: 61335 - DNA, 73 bp, Homo sapiens
gaggttttgctgaagaaaggattatactaatcagactctagaaaagatactgctggttaatgggaaacccata

SEQ ID NO: 61336 - DNA, 70 bp, Homo sapiens
aaggattatactaatcagactctagaaaagatactgctggttaatgggaaacccatactggaaagtaagt

SEQ ID NO: 61337 - DNA, 70 bp, Homo sapiens
actaatcagactctagaaaagatactgctggttaatgggaaacccatactggaaagtaagttaaatgacc

SEQ ID NO: 61338 - DNA, 70 bp, Homo sapiens
tagaaaagatactgctggttaatgggaaacccatactggaaagtaagttaaatgaccttgactgaggcct

SEQ ID NO: 61339 - DNA, 70 bp, Homo sapiens
ttaatgggaaacccatactggaaagtaagttaaatgaccttgactgaggccttgtaatatgtggggctac

SEQ ID NO: 61340 - DNA, 71 bp, Homo sapiens
ttgtaatatgtggggctacccctaataccaaaggactcgctactttctctcaatttatagtttcttctcat

SEQ ID NO: 61341 - DNA, 73 bp, Homo sapiens
gggctacccctaataccaaaggactcgctactttctctcaatttatagtttcttctcatttgcaacacatcac

SEQ ID NO: 61342 - DNA, 75 bp, Homo sapiens
cctaataccaaaggactcgctactttctctcaatttatagtttcttctcatttgcaacacatcacgtatcattat

SEQ ID NO: 61343 - DNA, 77 bp, Homo sapiens
caaaggactcgctactttctctcaatttatagtttcttctcatttgcaacacatcacgtatcattattttgtgctta

SEQ ID NO: 61344 - DNA, 76 bp, Homo sapiens
gctactttctctcaatttatagtttcttctcatttgcaacacatcacgtatcattattttgtgcttaaattatgtt

SEQ ID NO: 61345 - DNA, 77 bp, Homo sapiens
caatttatagtttcttctcatttgcaacacatcacgtatcattattttgtgcttaaattatgtttcccagctgatac

SEQ ID NO: 61346 - DNA, 76 bp, Homo sapiens
catttgcaacacatcacgtatcattattttgtgcttaaattatgtttcccagctgatacttattgccaaaaccaac

SEQ ID NO: 61347 - DNA, 70 bp, Homo sapiens
acgtatcattattttgtgcttaaattatgtttcccagctgatacttattgccaaaaccaacggggataag

SEQ ID NO: 61348 - DNA, 70 bp, Homo sapiens
attttgtgcttaaattatgtttcccagctgatacttattgccaaaaccaacggggataagtttgaataga

SEQ ID NO: 61349 - DNA, 70 bp, Homo sapiens
gtgcttaaattatgtttcccagctgatacttattgccaaaaccaacggggataagtttgaatagaagatt

SEQ ID NO: 61350 - DNA, 71 bp, Homo sapiens
tatgtttcccagctgatacttattgccaaaaccaacggggataagtttgaatagaagatttatacttagcg

SEQ ID NO: 61351 - DNA, 71 bp, Homo sapiens
agctgatacttattgccaaaaccaacggggataagtttgaatagaagatttatacttagcggcatttgaag

SEQ ID NO: 61352 - DNA, 72 bp, Homo sapiens
attgccaaaaccaacggggataagtttgaatagaagatttatacttagcggcatttgaaggccctgcataca

SEQ ID NO: 61353 - DNA, 73 bp, Homo sapiens
accaacggggataagtttgaatagaagatttatacttagcggcatttgaaggccctgcatacatgttttctca

SEQ ID NO: 61354 - DNA, 78 bp, Homo sapiens
ataagtttgaatagaagatttatacttagcggcatttgaaggccctgcatacatgttttctcagtgatcttcaagata

SEQ ID NO: 61355 - DNA, 82 bp, Homo sapiens
tatacttagcggcatttgaaggccctgcatacatgttttctcagtgatcttcaagatacagatggagtcaatagatgtaaac

SEQ ID NO: 61356 - DNA, 80 bp, Homo sapiens
atttgaaggccctgcatacatgttttctcagtgatcttcaagatacagatggagtcaatagatgtaaactcttaagaata

SEQ ID NO: 61357 - DNA, 81 bp, Homo sapiens
ctgcatacatgttttctcagtgatcttcaagatacagatggagtcaatagatgtaaactcttaagaatacacaaacactta

SEQ ID NO: 61358 - DNA, 77 bp, Homo sapiens
gttttctcagtgatcttcaagatacagatggagtcaatagatgtaaactcttaagaatacacaaacacttaaatcac

SEQ ID NO: 61359 - DNA, 72 bp, Homo sapiens
ggagtcaatagatgtaaactcttaagaatacacaaacacttaaatcactaataattatagacaagggcttac

SEQ ID NO: 61360 - DNA, 69 bp, Homo sapiens
tgtaaactcttaagaatacacaaacacttaaatcactaataattatagacaagggcttacttccaaacc

SEQ ID NO: 61361 - DNA, 68 bp, Homo sapiens
ctcttaagaatacacaaacacttaaatcactaataattatagacaagggcttacttccaaaccttccc

SEQ ID NO: 61362 - DNA, 68 bp, Homo sapiens
aatcactaataattatagacaagggcttacttccaaaccttccccacgttttccagttcaattagtga

SEQ ID NO: 61363 - DNA, 68 bp, Homo sapiens
ataattatagacaagggcttacttccaaaccttccccacgttttccagttcaattagtgagacacaat

SEQ ID NO: 61364 - DNA, 72 bp, Homo sapiens
tagacaagggcttacttccaaaccttccccacgttttccagttcaattagtgagacacaattcataatcata

SEQ ID NO: 61365 - DNA, 70 bp, Homo sapiens
cttacttccaaaccttccccacgttttccagttcaattagtgagacacaattcataatcatagtgtaatt

SEQ ID NO: 61366 - DNA, 72 bp, Homo sapiens
accttccccacgttttccagttcaattagtgagacacaattcataatcatagtgtaatttttctatagacac

SEQ ID NO: 61367 - DNA, 79 bp, Homo sapiens
ttccagttcaattagtgagacacaattcataatcatagtgtaatttttctatagacactgttatggtaaagagatgaca

SEQ ID NO: 61368 - DNA, 79 bp, Homo sapiens
acacaattcataatcatagtgtaatttttctatagacactgttatggtaaagagatgacatgactattcacctgccgtc

SEQ ID NO: 61369 - DNA, 78 bp, Homo sapiens
ttatggtaaagagatgacatgactattcacctgccgtctccacagaactctgtaaggactctctttagtcctaggata

SEQ ID NO: 61370 - DNA, 78 bp, Homo sapiens
taaagagatgacatgactattcacctgccgtctccacagaactctgtaaggactctctttagtcctaggatagaggga

SEQ ID NO: 61371 - DNA, 73 bp, Homo sapiens
cacagaactctgtaaggactctctttagtcctaggatagagggaggtattagacaagcagtgattttacaatt

SEQ ID NO: 61372 - DNA, 72 bp, Homo sapiens
aactctgtaaggactctctttagtcctaggatagagggaggtattagacaagcagtgattttacaatttcta

SEQ ID NO: 61373 - DNA, 74 bp, Homo sapiens
actctctttagtcctaggatagagggaggtattagacaagcagtgattttacaatttctacttgtgcagtgaaa

SEQ ID NO: 61374 - DNA, 76 bp, Homo sapiens
ctaggatagagggaggtattagacaagcagtgattttacaatttctacttgtgcagtgaaaggagcttgtgtataa

SEQ ID NO: 61375 - DNA, 76 bp, Homo sapiens
atagagggaggtattagacaagcagtgattttacaatttctacttgtgcagtgaaaggagcttgtgtataatgtta

SEQ ID NO: 61376 - DNA, 77 bp, Homo sapiens
tgattttacaatttctacttgtgcagtgaaaggagcttgtgtataatgttagggaacacaggcatttgtgcaaggaa

SEQ ID NO: 61377 - DNA, 74 bp, Homo sapiens
aatttctacttgtgcagtgaaaggagcttgtgtataatgttagggaacacaggcatttgtgcaaggaaaccaaa

SEQ ID NO: 61378 - DNA, 75 bp, Homo sapiens
tacttgtgcagtgaaaggagcttgtgtataatgttagggaacacaggcatttgtgcaaggaaaccaaaactaaga

SEQ ID NO: 61379 - DNA, 74 bp, Homo sapiens
aaaggagcttgtgtataatgttagggaacacaggcatttgtgcaaggaaaccaaaactaagaggagctcatcaa

SEQ ID NO: 61380 - DNA, 75 bp, Homo sapiens
ttgtgtataatgttagggaacacaggcatttgtgcaaggaaaccaaaactaagaggagctcatcaaagacgacaa

SEQ ID NO: 61381 - DNA, 76 bp, Homo sapiens
atgttagggaacacaggcatttgtgcaaggaaaccaaaactaagaggagctcatcaaagacgacaacagagagaga

SEQ ID NO: 61382 - DNA, 78 bp, Homo sapiens
acacaggcatttgtgcaaggaaaccaaaactaagaggagctcatcaaagacgacaacagagagagatcctggcgttca

SEQ ID NO: 61383 - DNA, 74 bp, Homo sapiens
caaggaaaccaaaactaagaggagctcatcaaagacgacaacagagagagatcctggcgttcacgaagcttaac

SEQ ID NO: 61384 - DNA, 73 bp, Homo sapiens
aaaccaaaactaagaggagctcatcaaagacgacaacagagagagatcctggcgttcacgaagcttaacccta

SEQ ID NO: 61385 - DNA, 78 bp, Homo sapiens
taagaggagctcatcaaagacgacaacagagagagatcctggcgttcacgaagcttaaccctatgcagccagtttaag

SEQ ID NO: 61386 - DNA, 79 bp, Homo sapiens
agagatcctggcgttcacgaagcttaaccctatgcagccagtttaagtcttgctccctcaatgatcacaatctagacag

SEQ ID NO: 61387 - DNA, 77 bp, Homo sapiens
ttcacgaagcttaaccctatgcagccagtttaagtcttgctccctcaatgatcacaatctagacaggggacagaaaa

SEQ ID NO: 61388 - DNA, 77 bp, Homo sapiens
aagcttaaccctatgcagccagtttaagtcttgctccctcaatgatcacaatctagacaggggacagaaaattatga

SEQ ID NO: 61389 - DNA, 77 bp, Homo sapiens
cagccagtttaagtcttgctccctcaatgatcacaatctagacaggggacagaaaattatgaaaatatgacaaacaa

SEQ ID NO: 61390 - DNA, 71 bp, Homo sapiens
atcacaatctagacaggggacagaaaattatgaaaatatgacaaacaaggttggggagtgggggaagatta

SEQ ID NO: 61391 - DNA, 70 bp, Homo sapiens
atctagacaggggacagaaaattatgaaaatatgacaaacaaggttggggagtgggggaagattagtgaa

SEQ ID NO: 61392 - DNA, 69 bp, Homo sapiens
agaaaattatgaaaatatgacaaacaaggttggggagtgggggaagattagtgaagccttctgaagtac

SEQ ID NO: 61393 - DNA, 69 bp, Homo sapiens
attatgaaaatatgacaaacaaggttggggagtgggggaagattagtgaagccttctgaagtactaaag

SEQ ID NO: 61394 - DNA, 72 bp, Homo sapiens
tatgacaaacaaggttggggagtgggggaagattagtgaagccttctgaagtactaaagtggacatgaagac

SEQ ID NO: 61395 - DNA, 70 bp, Homo sapiens
ttggggagtgggggaagattagtgaagccttctgaagtactaaagtggacatgaagaccaacaaagtaag

SEQ ID NO: 61396 - DNA, 73 bp, Homo sapiens
gggaagattagtgaagccttctgaagtactaaagtggacatgaagaccaacaaagtaagtccactccacagtg

SEQ ID NO: 61397 - DNA, 74 bp, Homo sapiens
attagtgaagccttctgaagtactaaagtggacatgaagaccaacaaagtaagtccactccacagtgggacagc

SEQ ID NO: 61398 - DNA, 79 bp, Homo sapiens
gtactaaagtggacatgaagaccaacaaagtaagtccactccacagtgggacagctggtcacaatgccaatggctcatg

SEQ ID NO: 61399 - DNA, 81 bp, Homo sapiens
atgaagaccaacaaagtaagtccactccacagtgggacagctggtcacaatgccaatggctcatggtgtcagtggacagtg

SEQ ID NO: 61400 - DNA, 82 bp, Homo sapiens
aacaaagtaagtccactccacagtgggacagctggtcacaatgccaatggctcatggtgtcagtggacagtggctttcatga

SEQ ID NO: 61401 - DNA, 84 bp, Homo sapiens
taagtccactccacagtgggacagctggtcacaatgccaatggctcatggtgtcagtggacagtggctttcatgatctttattc

SEQ ID NO: 61402 - DNA, 89 bp, Homo sapiens
tggtcacaatgccaatggctcatggtgtcagtggacagtggctttcatgatctttattccacatcagaatcactagaccagctcatgta

SEQ ID NO: 61403 - DNA, 85 bp, Homo sapiens
aatgccaatggctcatggtgtcagtggacagtggctttcatgatctttattccacatcagaatcactagaccagctcatgtaaaa

SEQ ID NO: 61404 - DNA, 83 bp, Homo sapiens
tcatggtgtcagtggacagtggctttcatgatctttattccacatcagaatcactagaccagctcatgtaaaaccacgagttc

SEQ ID NO: 61405 - DNA, 81 bp, Homo sapiens
agtggacagtggctttcatgatctttattccacatcagaatcactagaccagctcatgtaaaaccacgagttccagcagaa

SEQ ID NO: 61406 - DNA, 80 bp, Homo sapiens
agtggctttcatgatctttattccacatcagaatcactagaccagctcatgtaaaaccacgagttccagcagaacacaaa

SEQ ID NO: 61407 - DNA, 79 bp, Homo sapiens
atgatctttattccacatcagaatcactagaccagctcatgtaaaaccacgagttccagcagaacacaaagaaccgcaa

SEQ ID NO: 61408 - DNA, 78 bp, Homo sapiens
acatcagaatcactagaccagctcatgtaaaaccacgagttccagcagaacacaaagaaccgcaagcccatgtattta

SEQ ID NO: 61409 - DNA, 75 bp, Homo sapiens
aatcactagaccagctcatgtaaaaccacgagttccagcagaacacaaagaaccgcaagcccatgtatttaagaa

SEQ ID NO: 61410 - DNA, 75 bp, Homo sapiens
agctcatgtaaaaccacgagttccagcagaacacaaagaaccgcaagcccatgtatttaagaattatctgagtta

SEQ ID NO: 61411 - DNA, 73 bp, Homo sapiens
taaaaccacgagttccagcagaacacaaagaaccgcaagcccatgtatttaagaattatctgagttataatta

SEQ ID NO: 61412 - DNA, 73 bp, Homo sapiens
agttccagcagaacacaaagaaccgcaagcccatgtatttaagaattatctgagttataattagagggaatta

SEQ ID NO: 61413 - DNA, 71 bp, Homo sapiens
agaacacaaagaaccgcaagcccatgtatttaagaattatctgagttataattagagggaattaggtggaa

SEQ ID NO: 61414 - DNA, 70 bp, Homo sapiens
agaaccgcaagcccatgtatttaagaattatctgagttataattagagggaattaggtggaattgggaaa

SEQ ID NO: 61415 - DNA, 71 bp, Homo sapiens
gcccatgtatttaagaattatctgagttataattagagggaattaggtggaattgggaaattgagaaagaa

SEQ ID NO: 61416 - DNA, 69 bp, Homo sapiens
agaattatctgagttataattagagggaattaggtggaattgggaaattgagaaagaaaaaagctgaag

SEQ ID NO: 61417 - DNA, 69 bp, Homo sapiens
ctgagttataattagagggaattaggtggaattgggaaattgagaaagaaaaaagctgaagtttcacaa

SEQ ID NO: 61418 - DNA, 71 bp, Homo sapiens
ttaggtggaattgggaaattgagaaagaaaaaagctgaagtttcacaagttaagagtgactacaagacaca

SEQ ID NO: 61419 - DNA, 73 bp, Homo sapiens
aaagaaaaaagctgaagtttcacaagttaagagtgactacaagacacagattctgcaccttcgtcctaagaga

SEQ ID NO: 61420 - DNA, 75 bp, Homo sapiens
agtttcacaagttaagagtgactacaagacacagattctgcaccttcgtcctaagagattgtgaatcgggaggac

SEQ ID NO: 61421 - DNA, 76 bp, Homo sapiens
gttaagagtgactacaagacacagattctgcaccttcgtcctaagagattgtgaatcgggaggactgggtgaggcc

SEQ ID NO: 61422 - DNA, 78 bp, Homo sapiens
attctgcaccttcgtcctaagagattgtgaatcgggaggactgggtgaggcccaggaactgccagtcactcggatgca

SEQ ID NO: 61423 - DNA, 78 bp, Homo sapiens
taagagattgtgaatcgggaggactgggtgaggcccaggaactgccagtcactcggatgcaggtggggccatggacag

SEQ ID NO: 61424 - DNA, 82 bp, Homo sapiens
actgggtgaggcccaggaactgccagtcactcggatgcaggtggggccatggacaggtgctgagacacagcaatggaatgaa

SEQ ID NO: 61425 - DNA, 82 bp, Homo sapiens
ccaggaactgccagtcactcggatgcaggtggggccatggacaggtgctgagacacagcaatggaatgaacccctggacaca

SEQ ID NO: 61426 - DNA, 80 bp, Homo sapiens
aactgccagtcactcggatgcaggtggggccatggacaggtgctgagacacagcaatggaatgaacccctggacacaggg

SEQ ID NO: 61427 - DNA, 78 bp, Homo sapiens
actcggatgcaggtggggccatggacaggtgctgagacacagcaatggaatgaacccctggacacagggggccctgga

SEQ ID NO: 61428 - DNA, 81 bp, Homo sapiens
atggacaggtgctgagacacagcaatggaatgaacccctggacacagggggccctggagggcatcctagcacatggcttgc

SEQ ID NO: 61429 - DNA, 79 bp, Homo sapiens
atggaatgaacccctggacacagggggccctggagggcatcctagcacatggcttgccgctcaggtgctaccagtgtca

SEQ ID NO: 61430 - DNA, 79 bp, Homo sapiens
atgaacccctggacacagggggccctggagggcatcctagcacatggcttgccgctcaggtgctaccagtgtcactgcc

SEQ ID NO: 61431 - DNA, 84 bp, Homo sapiens
acacagggggccctggagggcatcctagcacatggcttgccgctcaggtgctaccagtgtcactgccgcagctgtgatattctg

SEQ ID NO: 61432 - DNA, 87 bp, Homo sapiens
ccctggagggcatcctagcacatggcttgccgctcaggtgctaccagtgtcactgccgcagctgtgatattctggcaggacacagaa

SEQ ID NO: 61433 - DNA, 87 bp, Homo sapiens
atcctagcacatggcttgccgctcaggtgctaccagtgtcactgccgcagctgtgatattctggcaggacacagaagaccactctcc

SEQ ID NO: 61434 - DNA, 86 bp, Homo sapiens
acatggcttgccgctcaggtgctaccagtgtcactgccgcagctgtgatattctggcaggacacagaagaccactctcccatcctc

SEQ ID NO: 61435 - DNA, 84 bp, Homo sapiens
tcaggtgctaccagtgtcactgccgcagctgtgatattctggcaggacacagaagaccactctcccatcctcccgtctacacag

SEQ ID NO: 61436 - DNA, 83 bp, Homo sapiens
taccagtgtcactgccgcagctgtgatattctggcaggacacagaagaccactctcccatcctcccgtctacacagtcttcca

SEQ ID NO: 61437 - DNA, 79 bp, Homo sapiens
tgtgatattctggcaggacacagaagaccactctcccatcctcccgtctacacagtcttccagccacaccacccttcca

SEQ ID NO: 61438 - DNA, 77 bp, Homo sapiens
acagaagaccactctcccatcctcccgtctacacagtcttccagccacaccacccttccattcagagacgtagatca

SEQ ID NO: 61439 - DNA, 78 bp, Homo sapiens
atcctcccgtctacacagtcttccagccacaccacccttccattcagagacgtagatcagcagctgccgtgggccctg

SEQ ID NO: 61440 - DNA, 80 bp, Homo sapiens
tacacagtcttccagccacaccacccttccattcagagacgtagatcagcagctgccgtgggccctgtccacaacctcca

SEQ ID NO: 61441 - DNA, 76 bp, Homo sapiens
agccacaccacccttccattcagagacgtagatcagcagctgccgtgggccctgtccacaacctccactccaaaat

SEQ ID NO: 61442 - DNA, 76 bp, Homo sapiens
accacccttccattcagagacgtagatcagcagctgccgtgggccctgtccacaacctccactccaaaattctgaa

SEQ ID NO: 61443 - DNA, 79 bp, Homo sapiens
attcagagacgtagatcagcagctgccgtgggccctgtccacaacctccactccaaaattctgaaactcagtcacaaca

SEQ ID NO: 61444 - DNA, 77 bp, Homo sapiens
ctgccgtgggccctgtccacaacctccactccaaaattctgaaactcagtcacaacaaatcgtaacatcactcatga

SEQ ID NO: 61445 - DNA, 76 bp, Homo sapiens
cctgtccacaacctccactccaaaattctgaaactcagtcacaacaaatcgtaacatcactcatgagcaattttaa

SEQ ID NO: 61446 - DNA, 81 bp, Homo sapiens
caaaattctgaaactcagtcacaacaaatcgtaacatcactcatgagcaattttaaataagcagcactactgatgaatctc

SEQ ID NO: 61447 - DNA, 83 bp, Homo sapiens
aaactcagtcacaacaaatcgtaacatcactcatgagcaattttaaataagcagcactactgatgaatctcctgcatctcaac

SEQ ID NO: 61448 - DNA, 82 bp, Homo sapiens
agtcacaacaaatcgtaacatcactcatgagcaattttaaataagcagcactactgatgaatctcctgcatctcaactttaa

SEQ ID NO: 61449 - DNA, 81 bp, Homo sapiens
aaatcgtaacatcactcatgagcaattttaaataagcagcactactgatgaatctcctgcatctcaactttaatggtgaag

SEQ ID NO: 61450 - DNA, 83 bp, Homo sapiens
tcatgagcaattttaaataagcagcactactgatgaatctcctgcatctcaactttaatggtgaagtctccataacgcagttc

SEQ ID NO: 61451 - DNA, 78 bp, Homo sapiens
ttttaaataagcagcactactgatgaatctcctgcatctcaactttaatggtgaagtctccataacgcagttcttaaa

SEQ ID NO: 61452 - DNA, 77 bp, Homo sapiens
aataagcagcactactgatgaatctcctgcatctcaactttaatggtgaagtctccataacgcagttcttaaaaaaa

SEQ ID NO: 61453 - DNA, 68 bp, Homo sapiens
aaaaaaaaaatcacacctacgaactccacattagaaataactcttgcaggagaccacgtgggagaacc

SEQ ID NO: 61454 - DNA, 73 bp, Homo sapiens
aaaaatcacacctacgaactccacattagaaataactcttgcaggagaccacgtgggagaacctgaagatgag

SEQ ID NO: 61455 - DNA, 75 bp, Homo sapiens
ctacgaactccacattagaaataactcttgcaggagaccacgtgggagaacctgaagatgaggcccctctggtca

SEQ ID NO: 61456 - DNA, 77 bp, Homo sapiens
acattagaaataactcttgcaggagaccacgtgggagaacctgaagatgaggcccctctggtcactgaatgttctca

SEQ ID NO: 61457 - DNA, 77 bp, Homo sapiens
aataactcttgcaggagaccacgtgggagaacctgaagatgaggcccctctggtcactgaatgttctcagtctaaga

SEQ ID NO: 61458 - DNA, 76 bp, Homo sapiens
ggagaacctgaagatgaggcccctctggtcactgaatgttctcagtctaagacgtatcccacttctacacggcatt

SEQ ID NO: 61459 - DNA, 75 bp, Homo sapiens
aagatgaggcccctctggtcactgaatgttctcagtctaagacgtatcccacttctacacggcattttgtgaaaa

SEQ ID NO: 61460 - DNA, 76 bp, Homo sapiens
ccctctggtcactgaatgttctcagtctaagacgtatcccacttctacacggcattttgtgaaaatgtcagaaagc

SEQ ID NO: 61461 - DNA, 74 bp, Homo sapiens
ttctcagtctaagacgtatcccacttctacacggcattttgtgaaaatgtcagaaagcccaatccaaagcttaa

SEQ ID NO: 61462 - DNA, 74 bp, Homo sapiens
tctaagacgtatcccacttctacacggcattttgtgaaaatgtcagaaagcccaatccaaagcttaagcaagac

SEQ ID NO: 61463 - DNA, 74 bp, Homo sapiens
acttctacacggcattttgtgaaaatgtcagaaagcccaatccaaagcttaagcaagacgtcaccaagaatcag

SEQ ID NO: 61464 - DNA, 72 bp, Homo sapiens
acggcattttgtgaaaatgtcagaaagcccaatccaaagcttaagcaagacgtcaccaagaatcaggtgggt

SEQ ID NO: 61465 - DNA, 73 bp, Homo sapiens
gaaaatgtcagaaagcccaatccaaagcttaagcaagacgtcaccaagaatcaggtgggttccacttccagaa

SEQ ID NO: 61466 - DNA, 72 bp, Homo sapiens
agaaagcccaatccaaagcttaagcaagacgtcaccaagaatcaggtgggttccacttccagaaggatcgcc

SEQ ID NO: 61467 - DNA, 71 bp, Homo sapiens
aatccaaagcttaagcaagacgtcaccaagaatcaggtgggttccacttccagaaggatcgcccttgaact

SEQ ID NO: 61468 - DNA, 72 bp, Homo sapiens
agcttaagcaagacgtcaccaagaatcaggtgggttccacttccagaaggatcgcccttgaacttctcctcc

SEQ ID NO: 61469 - DNA, 73 bp, Homo sapiens
acgtcaccaagaatcaggtgggttccacttccagaaggatcgcccttgaacttctcctcctcactcagctaaa

SEQ ID NO: 61470 - DNA, 74 bp, Homo sapiens
aagaatcaggtgggttccacttccagaaggatcgcccttgaacttctcctcctcactcagctaaagtggcttca

SEQ ID NO: 61471 - DNA, 76 bp, Homo sapiens
ttccagaaggatcgcccttgaacttctcctcctcactcagctaaagtggcttcaacttcctgcatcacaccccacc

SEQ ID NO: 61472 - DNA, 75 bp, Homo sapiens
cccttgaacttctcctcctcactcagctaaagtggcttcaacttcctgcatcacaccccaccctgtaagccgatg

SEQ ID NO: 61473 - DNA, 76 bp, Homo sapiens
acttctcctcctcactcagctaaagtggcttcaacttcctgcatcacaccccaccctgtaagccgatggcccatct

SEQ ID NO: 61474 - DNA, 76 bp, Homo sapiens
cctcactcagctaaagtggcttcaacttcctgcatcacaccccaccctgtaagccgatggcccatcttccctccaa

SEQ ID NO: 61475 - DNA, 72 bp, Homo sapiens
ctaaagtggcttcaacttcctgcatcacaccccaccctgtaagccgatggcccatcttccctccaaggcccc

SEQ ID NO: 61476 - DNA, 72 bp, Homo sapiens
ttcaacttcctgcatcacaccccaccctgtaagccgatggcccatcttccctccaaggccccctgaaatggt

SEQ ID NO: 61477 - DNA, 71 bp, Homo sapiens
atcacaccccaccctgtaagccgatggcccatcttccctccaaggccccctgaaatggttcctgctcaacc

SEQ ID NO: 61478 - DNA, 68 bp, Homo sapiens
accctgtaagccgatggcccatcttccctccaaggccccctgaaatggttcctgctcaacccccaact

SEQ ID NO: 61479 - DNA, 70 bp, Homo sapiens
aagccgatggcccatcttccctccaaggccccctgaaatggttcctgctcaacccccaacttccactcac

SEQ ID NO: 61480 - DNA, 69 bp, Homo sapiens
atcttccctccaaggccccctgaaatggttcctgctcaacccccaacttccactcacgccctgctccct

SEQ ID NO: 61481 - DNA, 70 bp, Homo sapiens
aaggccccctgaaatggttcctgctcaacccccaacttccactcacgccctgctcccttccctcatggtg

SEQ ID NO: 61482 - DNA, 73 bp, Homo sapiens
tgctcaacccccaacttccactcacgccctgctcccttccctcatggtggcctttctggacttctaccagttc

SEQ ID NO: 61483 - DNA, 76 bp, Homo sapiens
ttccactcacgccctgctcccttccctcatggtggcctttctggacttctaccagttcctacgcaagccagtgctg

SEQ ID NO: 61484 - DNA, 75 bp, Homo sapiens
tgctcccttccctcatggtggcctttctggacttctaccagttcctacgcaagccagtgctgtcccaataccctg

SEQ ID NO: 61485 - DNA, 73 bp, Homo sapiens
ttccctcatggtggcctttctggacttctaccagttcctacgcaagccagtgctgtcccaataccctggggtc

SEQ ID NO: 61486 - DNA, 73 bp, Homo sapiens
cctttctggacttctaccagttcctacgcaagccagtgctgtcccaataccctggggtctctgtggcttcttc

SEQ ID NO: 61487 - DNA, 74 bp, Homo sapiens
ttcctacgcaagccagtgctgtcccaataccctggggtctctgtggcttcttctcaactttccaatcttgcctt

SEQ ID NO: 61488 - DNA, 73 bp, Homo sapiens
aagccagtgctgtcccaataccctggggtctctgtggcttcttctcaactttccaatcttgcctttaaatctc

SEQ ID NO: 61489 - DNA, 72 bp, Homo sapiens
tgtcccaataccctggggtctctgtggcttcttctcaactttccaatcttgcctttaaatctccttcctcaa

SEQ ID NO: 61490 - DNA, 72 bp, Homo sapiens
aataccctggggtctctgtggcttcttctcaactttccaatcttgcctttaaatctccttcctcaatgtggc

SEQ ID NO: 61491 - DNA, 78 bp, Homo sapiens
tcttgcctttaaatctccttcctcaatgtggccttctctgatggctccatctaaagaggtccctatgacaatctgaac

SEQ ID NO: 61492 - DNA, 80 bp, Homo sapiens
aaatctccttcctcaatgtggccttctctgatggctccatctaaagaggtccctatgacaatctgaaccgctgagtgcta

SEQ ID NO: 61493 - DNA, 81 bp, Homo sapiens
ctctgatggctccatctaaagaggtccctatgacaatctgaaccgctgagtgctacgcagacctcttggagcagtttgtaa

SEQ ID NO: 61494 - DNA, 78 bp, Homo sapiens
tccatctaaagaggtccctatgacaatctgaaccgctgagtgctacgcagacctcttggagcagtttgtaacgatttg

SEQ ID NO: 61495 - DNA, 78 bp, Homo sapiens
tatgacaatctgaaccgctgagtgctacgcagacctcttggagcagtttgtaacgatttgttttccgtggccactaca

SEQ ID NO: 61496 - DNA, 74 bp, Homo sapiens
atctgaaccgctgagtgctacgcagacctcttggagcagtttgtaacgatttgttttccgtggccactacacct

SEQ ID NO: 61497 - DNA, 73 bp, Homo sapiens
agtgctacgcagacctcttggagcagtttgtaacgatttgttttccgtggccactacaccttccatttcacaa

SEQ ID NO: 61498 - DNA, 70 bp, Homo sapiens
agacctcttggagcagtttgtaacgatttgttttccgtggccactacaccttccatttcacaaaagtgga

SEQ ID NO: 61499 - DNA, 73 bp, Homo sapiens
ttggagcagtttgtaacgatttgttttccgtggccactacaccttccatttcacaaaagtggagtgagctctg

SEQ ID NO: 61500 - DNA, 74 bp, Homo sapiens
ttgtaacgatttgttttccgtggccactacaccttccatttcacaaaagtggagtgagctctgtgtcactccca

SEQ ID NO: 61501 - DNA, 75 bp, Homo sapiens
ttgttttccgtggccactacaccttccatttcacaaaagtggagtgagctctgtgtcactcccagttgccttctg

SEQ ID NO: 61502 - DNA, 77 bp, Homo sapiens
actacaccttccatttcacaaaagtggagtgagctctgtgtcactcccagttgccttctggggagccgactccagca

SEQ ID NO: 61503 - DNA, 77 bp, Homo sapiens
accttccatttcacaaaagtggagtgagctctgtgtcactcccagttgccttctggggagccgactccagcacctga

SEQ ID NO: 61504 - DNA, 81 bp, Homo sapiens
tgagctctgtgtcactcccagttgccttctggggagccgactccagcacctgagcccacaaaaggctttcaacacatgtga

SEQ ID NO: 61505 - DNA, 78 bp, Homo sapiens
gggagccgactccagcacctgagcccacaaaaggctttcaacacatgtgacaaattaattgaatgatcatatccttcc

SEQ ID NO: 61506 - DNA, 77 bp, Homo sapiens
ccgactccagcacctgagcccacaaaaggctttcaacacatgtgacaaattaattgaatgatcatatccttcccttc

SEQ ID NO: 61507 - DNA, 77 bp, Homo sapiens
acctgagcccacaaaaggctttcaacacatgtgacaaattaattgaatgatcatatccttcccttcctcaatgctac

SEQ ID NO: 61508 - DNA, 77 bp, Homo sapiens
aacacatgtgacaaattaattgaatgatcatatccttcccttcctcaatgctacccagtgttggactcctatagaaa

SEQ ID NO: 61509 - DNA, 74 bp, Homo sapiens
acaaattaattgaatgatcatatccttcccttcctcaatgctacccagtgttggactcctatagaaactaggag

SEQ ID NO: 61510 - DNA, 75 bp, Homo sapiens
taattgaatgatcatatccttcccttcctcaatgctacccagtgttggactcctatagaaactaggaggggagag

SEQ ID NO: 61511 - DNA, 73 bp, Homo sapiens
atcatatccttcccttcctcaatgctacccagtgttggactcctatagaaactaggaggggagaggaacaaga

SEQ ID NO: 61512 - DNA, 73 bp, Homo sapiens
ttcctcaatgctacccagtgttggactcctatagaaactaggaggggagaggaacaagagctccctggcccaa

SEQ ID NO: 61513 - DNA, 72 bp, Homo sapiens
aatgctacccagtgttggactcctatagaaactaggaggggagaggaacaagagctccctggcccaagacca

SEQ ID NO: 61514 - DNA, 73 bp, Homo sapiens
tgttggactcctatagaaactaggaggggagaggaacaagagctccctggcccaagaccacgtggctaaatca

SEQ ID NO: 61515 - DNA, 72 bp, Homo sapiens
tatagaaactaggaggggagaggaacaagagctccctggcccaagaccacgtggctaaatcactccaggaaa

SEQ ID NO: 61516 - DNA, 75 bp, Homo sapiens
actaggaggggagaggaacaagagctccctggcccaagaccacgtggctaaatcactccaggaaagagctgcaga

SEQ ID NO: 61517 - DNA, 77 bp, Homo sapiens
gaacaagagctccctggcccaagaccacgtggctaaatcactccaggaaagagctgcagagggcaccaggtgatttg

SEQ ID NO: 61518 - DNA, 78 bp, Homo sapiens
tccctggcccaagaccacgtggctaaatcactccaggaaagagctgcagagggcaccaggtgatttggcactggagtc

SEQ ID NO: 61519 - DNA, 77 bp, Homo sapiens
acgtggctaaatcactccaggaaagagctgcagagggcaccaggtgatttggcactggagtcctgactgggattgtt

SEQ ID NO: 61520 - DNA, 76 bp, Homo sapiens
ctccaggaaagagctgcagagggcaccaggtgatttggcactggagtcctgactgggattgtttgggacaccaaat

SEQ ID NO: 61521 - DNA, 74 bp, Homo sapiens
aaagagctgcagagggcaccaggtgatttggcactggagtcctgactgggattgtttgggacaccaaatttagt

SEQ ID NO: 61522 - DNA, 71 bp, Homo sapiens
agagggcaccaggtgatttggcactggagtcctgactgggattgtttgggacaccaaatttagttgggtac

SEQ ID NO: 61523 - DNA, 68 bp, Homo sapiens
ggtgatttggcactggagtcctgactgggattgtttgggacaccaaatttagttgggtaccccctaaa

SEQ ID NO: 61524 - DNA, 69 bp, Homo sapiens
actggagtcctgactgggattgtttgggacaccaaatttagttgggtaccccctaaagcatgacaataa

SEQ ID NO: 61525 - DNA, 71 bp, Homo sapiens
tcctgactgggattgtttgggacaccaaatttagttgggtaccccctaaagcatgacaataaatgcaaata

SEQ ID NO: 61526 - DNA, 70 bp, Homo sapiens
attgtttgggacaccaaatttagttgggtaccccctaaagcatgacaataaatgcaaatatgtttgacac

SEQ ID NO: 61527 - DNA, 70 bp, Homo sapiens
gacaccaaatttagttgggtaccccctaaagcatgacaataaatgcaaatatgtttgacacctcattttt

SEQ ID NO: 61528 - DNA, 71 bp, Homo sapiens
agttgggtaccccctaaagcatgacaataaatgcaaatatgtttgacacctcattttttcagtaaatagac

SEQ ID NO: 61529 - DNA, 73 bp, Homo sapiens
gacaataaatgcaaatatgtttgacacctcattttttcagtaaatagacctagatttctttgtaagtgtttgc

SEQ ID NO: 61530 - DNA, 71 bp, Homo sapiens
gtttgacacctcattttttcagtaaatagacctagatttctttgtaagtgtttgccctcagtatgcaaaag

SEQ ID NO: 61531 - DNA, 74 bp, Homo sapiens
taaatagacctagatttctttgtaagtgtttgccctcagtatgcaaaagtctgtgggttttgaggccagatata

SEQ ID NO: 61532 - DNA, 73 bp, Homo sapiens
tagatttctttgtaagtgtttgccctcagtatgcaaaagtctgtgggttttgaggccagatataattttcaaa

SEQ ID NO: 61533 - DNA, 73 bp, Homo sapiens
ttctttgtaagtgtttgccctcagtatgcaaaagtctgtgggttttgaggccagatataattttcaaaattca

SEQ ID NO: 61534 - DNA, 72 bp, Homo sapiens
tttgccctcagtatgcaaaagtctgtgggttttgaggccagatataattttcaaaattcaaaaagactacaa

SEQ ID NO: 61535 - DNA, 73 bp, Homo sapiens
tcagtatgcaaaagtctgtgggttttgaggccagatataattttcaaaattcaaaaagactacaaaacacatc

SEQ ID NO: 61536 - DNA, 72 bp, Homo sapiens
ggttttgaggccagatataattttcaaaattcaaaaagactacaaaacacatctgaggaactgcagacaaac

SEQ ID NO: 61537 - DNA, 73 bp, Homo sapiens
atataattttcaaaattcaaaaagactacaaaacacatctgaggaactgcagacaaactgtgtaagcacgggc

SEQ ID NO: 61538 - DNA, 75 bp, Homo sapiens
aaaattcaaaaagactacaaaacacatctgaggaactgcagacaaactgtgtaagcacgggctggtgaagcattc

SEQ ID NO: 61539 - DNA, 75 bp, Homo sapiens
aaaaagactacaaaacacatctgaggaactgcagacaaactgtgtaagcacgggctggtgaagcattcccggcag

SEQ ID NO: 61540 - DNA, 78 bp, Homo sapiens
agacaaactgtgtaagcacgggctggtgaagcattcccggcaggctcagggctgcaaaaacatgacctcagaacataa

SEQ ID NO: 61541 - DNA, 80 bp, Homo sapiens
gctggtgaagcattcccggcaggctcagggctgcaaaaacatgacctcagaacataactgaagagtttcaggctttgcaa

SEQ ID NO: 61542 - DNA, 77 bp, Homo sapiens
aagcattcccggcaggctcagggctgcaaaaacatgacctcagaacataactgaagagtttcaggctttgcaaacag

SEQ ID NO: 61543 - DNA, 78 bp, Homo sapiens
aggctcagggctgcaaaaacatgacctcagaacataactgaagagtttcaggctttgcaaacaggaagctacatagct

SEQ ID NO: 61544 - DNA, 77 bp, Homo sapiens
ctgcaaaaacatgacctcagaacataactgaagagtttcaggctttgcaaacaggaagctacatagctttgaacaac

SEQ ID NO: 61545 - DNA, 74 bp, Homo sapiens
aacataactgaagagtttcaggctttgcaaacaggaagctacatagctttgaacaacccaaactcctcagagtc

SEQ ID NO: 61546 - DNA, 74 bp, Homo sapiens
actgaagagtttcaggctttgcaaacaggaagctacatagctttgaacaacccaaactcctcagagtctcaact

SEQ ID NO: 61547 - DNA, 76 bp, Homo sapiens
aggctttgcaaacaggaagctacatagctttgaacaacccaaactcctcagagtctcaacttgctcagctgtaaaa

SEQ ID NO: 61548 - DNA, 74 bp, Homo sapiens
aaacaggaagctacatagctttgaacaacccaaactcctcagagtctcaacttgctcagctgtaaaatgggacc

SEQ ID NO: 61549 - DNA, 77 bp, Homo sapiens
aagctacatagctttgaacaacccaaactcctcagagtctcaacttgctcagctgtaaaatgggacctggaatgatg

SEQ ID NO: 61550 - DNA, 77 bp, Homo sapiens
ctttgaacaacccaaactcctcagagtctcaacttgctcagctgtaaaatgggacctggaatgatgtctctcaagag

SEQ ID NO: 61551 - DNA, 78 bp, Homo sapiens
agtctcaacttgctcagctgtaaaatgggacctggaatgatgtctctcaagaggctattgcaggaatatgttaaaaat

SEQ ID NO: 61552 - DNA, 75 bp, Homo sapiens
tgtaaaatgggacctggaatgatgtctctcaagaggctattgcaggaatatgttaaaaattacctagaaagatgt

SEQ ID NO: 61553 - DNA, 75 bp, Homo sapiens
acctggaatgatgtctctcaagaggctattgcaggaatatgttaaaaattacctagaaagatgttggggagacca

SEQ ID NO: 61554 - DNA, 78 bp, Homo sapiens
aatgatgtctctcaagaggctattgcaggaatatgttaaaaattacctagaaagatgttggggagaccatgtgtgctg

SEQ ID NO: 61555 - DNA, 74 bp, Homo sapiens
ctcaagaggctattgcaggaatatgttaaaaattacctagaaagatgttggggagaccatgtgtgctggtaccc

SEQ ID NO: 61556 - DNA, 72 bp, Homo sapiens
tattgcaggaatatgttaaaaattacctagaaagatgttggggagaccatgtgtgctggtaccccactttcc

SEQ ID NO: 61557 - DNA, 70 bp, Homo sapiens
aattacctagaaagatgttggggagaccatgtgtgctggtaccccactttcccaccagcccctctggttc

SEQ ID NO: 61558 - DNA, 74 bp, Homo sapiens
accatgtgtgctggtaccccactttcccaccagcccctctggttcctaccactatgtggagcactgaaggctgt

SEQ ID NO: 61559 - DNA, 74 bp, Homo sapiens
gtgtgctggtaccccactttcccaccagcccctctggttcctaccactatgtggagcactgaaggctgttcctg

SEQ ID NO: 61560 - DNA, 76 bp, Homo sapiens
actttcccaccagcccctctggttcctaccactatgtggagcactgaaggctgttcctgggtcaggctgcctcaca

SEQ ID NO: 61561 - DNA, 77 bp, Homo sapiens
accagcccctctggttcctaccactatgtggagcactgaaggctgttcctgggtcaggctgcctcacaaaggcacac

SEQ ID NO: 61562 - DNA, 83 bp, Homo sapiens
taccactatgtggagcactgaaggctgttcctgggtcaggctgcctcacaaaggcacacgtgggcacagccccatctgatctg

SEQ ID NO: 61563 - DNA, 83 bp, Homo sapiens
gtggagcactgaaggctgttcctgggtcaggctgcctcacaaaggcacacgtgggcacagccccatctgatctgtgccctcca

SEQ ID NO: 61564 - DNA, 79 bp, Homo sapiens
aaggctgttcctgggtcaggctgcctcacaaaggcacacgtgggcacagccccatctgatctgtgccctccagggtcag

SEQ ID NO: 61565 - DNA, 82 bp, Homo sapiens
gtcaggctgcctcacaaaggcacacgtgggcacagccccatctgatctgtgccctccagggtcagtggtgtcattcagttta

SEQ ID NO: 61566 - DNA, 79 bp, Homo sapiens
ctgcctcacaaaggcacacgtgggcacagccccatctgatctgtgccctccagggtcagtggtgtcattcagtttaccc

SEQ ID NO: 61567 - DNA, 76 bp, Homo sapiens
aaaggcacacgtgggcacagccccatctgatctgtgccctccagggtcagtggtgtcattcagtttacccccaaca

SEQ ID NO: 61568 - DNA, 79 bp, Homo sapiens
cacagccccatctgatctgtgccctccagggtcagtggtgtcattcagtttacccccaacaggcatttgtggatctgtc

SEQ ID NO: 61569 - DNA, 78 bp, Homo sapiens
atctgatctgtgccctccagggtcagtggtgtcattcagtttacccccaacaggcatttgtggatctgtctcaaagtc

SEQ ID NO: 61570 - DNA, 72 bp, Homo sapiens
agggtcagtggtgtcattcagtttacccccaacaggcatttgtggatctgtctcaaagtccacaggggttct

SEQ ID NO: 61571 - DNA, 76 bp, Homo sapiens
tggtgtcattcagtttacccccaacaggcatttgtggatctgtctcaaagtccacaggggttcttgtgagacagtg

SEQ ID NO: 61572 - DNA, 73 bp, Homo sapiens
agtttacccccaacaggcatttgtggatctgtctcaaagtccacaggggttcttgtgagacagtggccaccag

SEQ ID NO: 61573 - DNA, 78 bp, Homo sapiens
aacaggcatttgtggatctgtctcaaagtccacaggggttcttgtgagacagtggccaccaggcaaccaatgcagttc

SEQ ID NO: 61574 - DNA, 78 bp, Homo sapiens
tggatctgtctcaaagtccacaggggttcttgtgagacagtggccaccaggcaaccaatgcagttcccatggacaaaa

SEQ ID NO: 61575 - DNA, 76 bp, Homo sapiens
tcaaagtccacaggggttcttgtgagacagtggccaccaggcaaccaatgcagttcccatggacaaaaatgctttc

SEQ ID NO: 61576 - DNA, 77 bp, Homo sapiens
ttcttgtgagacagtggccaccaggcaaccaatgcagttcccatggacaaaaatgctttctcagtttaccctgagaa

SEQ ID NO: 61577 - DNA, 78 bp, Homo sapiens
acagtggccaccaggcaaccaatgcagttcccatggacaaaaatgctttctcagtttaccctgagaagatcagagaca

SEQ ID NO: 61578 - DNA, 76 bp, Homo sapiens
aggcaaccaatgcagttcccatggacaaaaatgctttctcagtttaccctgagaagatcagagacagaccaagaaa

SEQ ID NO: 61579 - DNA, 76 bp, Homo sapiens
aatgcagttcccatggacaaaaatgctttctcagtttaccctgagaagatcagagacagaccaagaaacaggaaga

SEQ ID NO: 61580 - DNA, 76 bp, Homo sapiens
ccatggacaaaaatgctttctcagtttaccctgagaagatcagagacagaccaagaaacaggaagagagggagaga

SEQ ID NO: 61581 - DNA, 65 bp, Homo sapiens
agagaaagagagggggtggggagagaaggggagagggagggatgaaagaaggggggggcagcggg

SEQ ID NO: 61582 - DNA, 66 bp, Homo sapiens
agggggtggggagagaaggggagagggagggatgaaagaaggggggggcagcgggggagagagaga

SEQ ID NO: 61583 - DNA, 80 bp, Homo sapiens
gcagagaggaaaagaagtggttctacttttgtcagatgtctggaagacaagcaaaaggatgagatgctgttgctactgct

SEQ ID NO: 61584 - DNA, 78 bp, Homo sapiens
aaagaagtggttctacttttgtcagatgtctggaagacaagcaaaaggatgagatgctgttgctactgcttctcctaa

SEQ ID NO: 61585 - DNA, 80 bp, Homo sapiens
ttctacttttgtcagatgtctggaagacaagcaaaaggatgagatgctgttgctactgcttctcctaattactctccagt

SEQ ID NO: 61586 - DNA, 81 bp, Homo sapiens
cttttgtcagatgtctggaagacaagcaaaaggatgagatgctgttgctactgcttctcctaattactctccagttctcca

SEQ ID NO: 61587 - DNA, 79 bp, Homo sapiens
tggaagacaagcaaaaggatgagatgctgttgctactgcttctcctaattactctccagttctccagagcaggagtttt

SEQ ID NO: 61588 - DNA, 77 bp, Homo sapiens
aagcaaaaggatgagatgctgttgctactgcttctcctaattactctccagttctccagagcaggagtttttaacta

SEQ ID NO: 61589 - DNA, 75 bp, Homo sapiens
aaaaggatgagatgctgttgctactgcttctcctaattactctccagttctccagagcaggagtttttaactagg

SEQ ID NO: 61590 - DNA, 77 bp, Homo sapiens
atgagatgctgttgctactgcttctcctaattactctccagttctccagagcaggagtttttaactaggggcgacta

SEQ ID NO: 61591 - DNA, 77 bp, Homo sapiens
agatgctgttgctactgcttctcctaattactctccagttctccagagcaggagtttttaactaggggcgactatgc

SEQ ID NO: 61592 - DNA, 74 bp, Homo sapiens
tctcctaattactctccagttctccagagcaggagtttttaactaggggcgactatgccctggagaacatatgt

SEQ ID NO: 61593 - DNA, 74 bp, Homo sapiens
tcctaattactctccagttctccagagcaggagtttttaactaggggcgactatgccctggagaacatatgttg

SEQ ID NO: 61594 - DNA, 75 bp, Homo sapiens
taattactctccagttctccagagcaggagtttttaactaggggcgactatgccctggagaacatatgttggtgc

SEQ ID NO: 61595 - DNA, 76 bp, Homo sapiens
tccagttctccagagcaggagtttttaactaggggcgactatgccctggagaacatatgttggtgccttgagccat

SEQ ID NO: 61596 - DNA, 76 bp, Homo sapiens
tttttaactaggggcgactatgccctggagaacatatgttggtgccttgagccatttttgattatcatggcttaga

SEQ ID NO: 61597 - DNA, 77 bp, Homo sapiens
aactaggggcgactatgccctggagaacatatgttggtgccttgagccatttttgattatcatggcttagaggagaa

SEQ ID NO: 61598 - DNA, 79 bp, Homo sapiens
actatgccctggagaacatatgttggtgccttgagccatttttgattatcatggcttagaggagaaggctgtaagcacc

SEQ ID NO: 61599 - DNA, 76 bp, Homo sapiens
atgttggtgccttgagccatttttgattatcatggcttagaggagaaggctgtaagcacccagtgggtagggccag

SEQ ID NO: 61600 - DNA, 78 bp, Homo sapiens
ttttgattatcatggcttagaggagaaggctgtaagcacccagtgggtagggccagggatgctgcccaacatcctctg

SEQ ID NO: 61601 - DNA, 76 bp, Homo sapiens
atggcttagaggagaaggctgtaagcacccagtgggtagggccagggatgctgcccaacatcctctggggcacaac

SEQ ID NO: 61602 - DNA, 78 bp, Homo sapiens
agaaggctgtaagcacccagtgggtagggccagggatgctgcccaacatcctctggggcacaaccggctcacagcaga

SEQ ID NO: 61603 - DNA, 84 bp, Homo sapiens
agggatgctgcccaacatcctctggggcacaaccggctcacagcagagaactgccatcagtgcagaggcagaggggagcctgcc

SEQ ID NO: 61604 - DNA, 82 bp, Homo sapiens
ccaacatcctctggggcacaaccggctcacagcagagaactgccatcagtgcagaggcagaggggagcctgccccagaccaa

SEQ ID NO: 61605 - DNA, 80 bp, Homo sapiens
atcctctggggcacaaccggctcacagcagagaactgccatcagtgcagaggcagaggggagcctgccccagaccaaacg

SEQ ID NO: 61606 - DNA, 81 bp, Homo sapiens
acaaccggctcacagcagagaactgccatcagtgcagaggcagaggggagcctgccccagaccaaacggctccagccctgc

SEQ ID NO: 61607 - DNA, 82 bp, Homo sapiens
acagcagagaactgccatcagtgcagaggcagaggggagcctgccccagaccaaacggctccagccctgctgcaggtgaagg

SEQ ID NO: 61608 - DNA, 81 bp, Homo sapiens
agaactgccatcagtgcagaggcagaggggagcctgccccagaccaaacggctccagccctgctgcaggtgaagggaatga

SEQ ID NO: 61609 - DNA, 81 bp, Homo sapiens
tcagtgcagaggcagaggggagcctgccccagaccaaacggctccagccctgctgcaggtgaagggaatgagcagcctctt

SEQ ID NO: 61610 - DNA, 77 bp, Homo sapiens
agaggggagcctgccccagaccaaacggctccagccctgctgcaggtgaagggaatgagcagcctctttgcagtccc

SEQ ID NO: 61611 - DNA, 77 bp, Homo sapiens
aaacggctccagccctgctgcaggtgaagggaatgagcagcctctttgcagtcccgggcagaaactgcccttgacaa

SEQ ID NO: 61612 - DNA, 80 bp, Homo sapiens
caggtgaagggaatgagcagcctctttgcagtcccgggcagaaactgcccttgacaagcataccacatctgccaagttca

SEQ ID NO: 61613 - DNA, 78 bp, Homo sapiens
aagggaatgagcagcctctttgcagtcccgggcagaaactgcccttgacaagcataccacatctgccaagttcagccc

SEQ ID NO: 61614 - DNA, 85 bp, Homo sapiens
ttgcagtcccgggcagaaactgcccttgacaagcataccacatctgccaagttcagccctctggagcagcagtggaggcagcaga

SEQ ID NO: 61615 - DNA, 81 bp, Homo sapiens
agaaactgcccttgacaagcataccacatctgccaagttcagccctctggagcagcagtggaggcagcagaggggcccgga

SEQ ID NO: 61616 - DNA, 86 bp, Homo sapiens
cttgacaagcataccacatctgccaagttcagccctctggagcagcagtggaggcagcagaggggcccggagcacagattctgtca

SEQ ID NO: 61617 - DNA, 82 bp, Homo sapiens
ataccacatctgccaagttcagccctctggagcagcagtggaggcagcagaggggcccggagcacagattctgtcactaagt

SEQ ID NO: 61618 - DNA, 81 bp, Homo sapiens
gttcagccctctggagcagcagtggaggcagcagaggggcccggagcacagattctgtcactaagttgtagataaaggaga

SEQ ID NO: 61619 - DNA, 79 bp, Homo sapiens
ctggagcagcagtggaggcagcagaggggcccggagcacagattctgtcactaagttgtagataaaggagaggggatgg

SEQ ID NO: 61620 - DNA, 73 bp, Homo sapiens
aggcagcagaggggcccggagcacagattctgtcactaagttgtagataaaggagaggggatggggaagtggg

SEQ ID NO: 61621 - DNA, 72 bp, Homo sapiens
agaggggcccggagcacagattctgtcactaagttgtagataaaggagaggggatggggaagtggggctgga

SEQ ID NO: 61622 - DNA, 72 bp, Homo sapiens
agcacagattctgtcactaagttgtagataaaggagaggggatggggaagtggggctggagaatattttaaa

SEQ ID NO: 61623 - DNA, 70 bp, Homo sapiens
attctgtcactaagttgtagataaaggagaggggatggggaagtggggctggagaatattttaaaagaga

SEQ ID NO: 61624 - DNA, 66 bp, Homo sapiens
ctaagttgtagataaaggagaggggatggggaagtggggctggagaatattttaaaagagaaaagg

SEQ ID NO: 61625 - DNA, 67 bp, Homo sapiens
taaaggagaggggatggggaagtggggctggagaatattttaaaagagaaaagggagcaaaatgtta

SEQ ID NO: 61626 - DNA, 66 bp, Homo sapiens
atggggaagtggggctggagaatattttaaaagagaaaagggagcaaaatgttaggtcagggtttc

SEQ ID NO: 61627 - DNA, 67 bp, Homo sapiens
gaatattttaaaagagaaaagggagcaaaatgttaggtcagggtttccctgactgtaaaacacaaga

SEQ ID NO: 61628 - DNA, 67 bp, Homo sapiens
aagagaaaagggagcaaaatgttaggtcagggtttccctgactgtaaaacacaagaagtcttggaaa

SEQ ID NO: 61629 - DNA, 67 bp, Homo sapiens
aaaagggagcaaaatgttaggtcagggtttccctgactgtaaaacacaagaagtcttggaaaaagca

SEQ ID NO: 61630 - DNA, 69 bp, Homo sapiens
aaatgttaggtcagggtttccctgactgtaaaacacaagaagtcttggaaaaagcaaatgctttcacta

SEQ ID NO: 61631 - DNA, 70 bp, Homo sapiens
agggtttccctgactgtaaaacacaagaagtcttggaaaaagcaaatgctttcactatgaagccaaaatg

SEQ ID NO: 61632 - DNA, 74 bp, Homo sapiens
actgtaaaacacaagaagtcttggaaaaagcaaatgctttcactatgaagccaaaatgtgctcctggttactga

SEQ ID NO: 61633 - DNA, 77 bp, Homo sapiens
aacacaagaagtcttggaaaaagcaaatgctttcactatgaagccaaaatgtgctcctggttactgagcaggcataa

SEQ ID NO: 61634 - DNA, 80 bp, Homo sapiens
aaaagcaaatgctttcactatgaagccaaaatgtgctcctggttactgagcaggcataatcgatgacagctaaccccaga

SEQ ID NO: 61635 - DNA, 81 bp, Homo sapiens
tttcactatgaagccaaaatgtgctcctggttactgagcaggcataatcgatgacagctaaccccagagtccacactactg

SEQ ID NO: 61636 - DNA, 78 bp, Homo sapiens
aagccaaaatgtgctcctggttactgagcaggcataatcgatgacagctaaccccagagtccacactactgtcctttc

SEQ ID NO: 61637 - DNA, 79 bp, Homo sapiens
atgtgctcctggttactgagcaggcataatcgatgacagctaaccccagagtccacactactgtcctttcggtgaggac

SEQ ID NO: 61638 - DNA, 76 bp, Homo sapiens
ggttactgagcaggcataatcgatgacagctaaccccagagtccacactactgtcctttcggtgaggactggaaaa

SEQ ID NO: 61639 - DNA, 75 bp, Homo sapiens
aggcataatcgatgacagctaaccccagagtccacactactgtcctttcggtgaggactggaaaaggaagcacag

SEQ ID NO: 61640 - DNA, 73 bp, Homo sapiens
atgacagctaaccccagagtccacactactgtcctttcggtgaggactggaaaaggaagcacaggagagaacg

SEQ ID NO: 61641 - DNA, 73 bp, Homo sapiens
cccagagtccacactactgtcctttcggtgaggactggaaaaggaagcacaggagagaacgggatctgtgtgg

SEQ ID NO: 61642 - DNA, 75 bp, Homo sapiens
acactactgtcctttcggtgaggactggaaaaggaagcacaggagagaacgggatctgtgtggtgccagagccca

SEQ ID NO: 61643 - DNA, 79 bp, Homo sapiens
ctgtcctttcggtgaggactggaaaaggaagcacaggagagaacgggatctgtgtggtgccagagcccagcattatgca

SEQ ID NO: 61644 - DNA, 77 bp, Homo sapiens
aggactggaaaaggaagcacaggagagaacgggatctgtgtggtgccagagcccagcattatgcaggtcagtaccgt

SEQ ID NO: 61645 - DNA, 79 bp, Homo sapiens
aggaagcacaggagagaacgggatctgtgtggtgccagagcccagcattatgcaggtcagtaccgttccctgaacttga

SEQ ID NO: 61646 - DNA, 78 bp, Homo sapiens
aggagagaacgggatctgtgtggtgccagagcccagcattatgcaggtcagtaccgttccctgaacttgaggggctga

SEQ ID NO: 61647 - DNA, 76 bp, Homo sapiens
aacgggatctgtgtggtgccagagcccagcattatgcaggtcagtaccgttccctgaacttgaggggctgacctag

SEQ ID NO: 61648 - DNA, 77 bp, Homo sapiens
tgtgtggtgccagagcccagcattatgcaggtcagtaccgttccctgaacttgaggggctgacctagggtcctctgg

SEQ ID NO: 61649 - DNA, 74 bp, Homo sapiens
agagcccagcattatgcaggtcagtaccgttccctgaacttgaggggctgacctagggtcctctgggctctgtt

SEQ ID NO: 61650 - DNA, 72 bp, Homo sapiens
attatgcaggtcagtaccgttccctgaacttgaggggctgacctagggtcctctgggctctgtttcaggttc

SEQ ID NO: 61651 - DNA, 74 bp, Homo sapiens
taccgttccctgaacttgaggggctgacctagggtcctctgggctctgtttcaggttctggacctgcactatca

SEQ ID NO: 61652 - DNA, 76 bp, Homo sapiens
tgaacttgaggggctgacctagggtcctctgggctctgtttcaggttctggacctgcactatcaggaacaggacaa

SEQ ID NO: 61653 - DNA, 74 bp, Homo sapiens
tagggtcctctgggctctgtttcaggttctggacctgcactatcaggaacaggacaatcctggcaacaaaaagt

SEQ ID NO: 61654 - DNA, 73 bp, Homo sapiens
ctgtttcaggttctggacctgcactatcaggaacaggacaatcctggcaacaaaaagttattggaaagaaaga

SEQ ID NO: 61655 - DNA, 75 bp, Homo sapiens
tggacctgcactatcaggaacaggacaatcctggcaacaaaaagttattggaaagaaagaagcatatcaaggaaa

SEQ ID NO: 61656 - DNA, 72 bp, Homo sapiens
actatcaggaacaggacaatcctggcaacaaaaagttattggaaagaaagaagcatatcaaggaaagttaca

SEQ ID NO: 61657 - DNA, 69 bp, Homo sapiens
aggacaatcctggcaacaaaaagttattggaaagaaagaagcatatcaaggaaagttacaaggggatta

SEQ ID NO: 61658 - DNA, 70 bp, Homo sapiens
cctggcaacaaaaagttattggaaagaaagaagcatatcaaggaaagttacaaggggattatcagaagaa

SEQ ID NO: 61659 - DNA, 69 bp, Homo sapiens
agttattggaaagaaagaagcatatcaaggaaagttacaaggggattatcagaagaaataaagaagtcc

SEQ ID NO: 61660 - DNA, 69 bp, Homo sapiens
ggaaagaaagaagcatatcaaggaaagttacaaggggattatcagaagaaataaagaagtcctaagaac

SEQ ID NO: 61661 - DNA, 69 bp, Homo sapiens
gaagcatatcaaggaaagttacaaggggattatcagaagaaataaagaagtcctaagaactttaggttg

SEQ ID NO: 61662 - DNA, 66 bp, Homo sapiens
ggaaagttacaaggggattatcagaagaaataaagaagtcctaagaactttaggttgttttcacag

SEQ ID NO: 61663 - DNA, 69 bp, Homo sapiens
acaaggggattatcagaagaaataaagaagtcctaagaactttaggttgttttcacagttttgagagca

SEQ ID NO: 61664 - DNA, 67 bp, Homo sapiens
cagaagaaataaagaagtcctaagaactttaggttgttttcacagttttgagagcaagttttgttac

SEQ ID NO: 61665 - DNA, 67 bp, Homo sapiens
aagaagtcctaagaactttaggttgttttcacagttttgagagcaagttttgttacttgtacatacc

SEQ ID NO: 61666 - DNA, 68 bp, Homo sapiens
tcctaagaactttaggttgttttcacagttttgagagcaagttttgttacttgtacatacccaaccac

SEQ ID NO: 61667 - DNA, 65 bp, Homo sapiens
ctttaggttgttttcacagttttgagagcaagttttgttacttgtacatacccaaccaccttttt

SEQ ID NO: 61668 - DNA, 72 bp, Homo sapiens
ccacgcccggcctcaaccacctttttaaatggaggtaccatacagcagggagccagcacctgacaggacacc

SEQ ID NO: 61669 - DNA, 74 bp, Homo sapiens
cctcaaccacctttttaaatggaggtaccatacagcagggagccagcacctgacaggacacctcattattccca

SEQ ID NO: 61670 - DNA, 73 bp, Homo sapiens
accacctttttaaatggaggtaccatacagcagggagccagcacctgacaggacacctcattattcccatttc

SEQ ID NO: 61671 - DNA, 74 bp, Homo sapiens
ctttttaaatggaggtaccatacagcagggagccagcacctgacaggacacctcattattcccatttcctgatt

SEQ ID NO: 61672 - DNA, 77 bp, Homo sapiens
taaatggaggtaccatacagcagggagccagcacctgacaggacacctcattattcccatttcctgattttatcaaa

SEQ ID NO: 61673 - DNA, 77 bp, Homo sapiens
taccatacagcagggagccagcacctgacaggacacctcattattcccatttcctgattttatcaaacaagtaaata

SEQ ID NO: 61674 - DNA, 74 bp, Homo sapiens
agggagccagcacctgacaggacacctcattattcccatttcctgattttatcaaacaagtaaataaagagatc

SEQ ID NO: 61675 - DNA, 75 bp, Homo sapiens
tattcccatttcctgattttatcaaacaagtaaataaagagatctggctctctctgcttcccagcaacctcaaaa

SEQ ID NO: 61676 - DNA, 77 bp, Homo sapiens
tgattttatcaaacaagtaaataaagagatctggctctctctgcttcccagcaacctcaaaacttctaagcactgta

SEQ ID NO: 61677 - DNA, 76 bp, Homo sapiens
aacaagtaaataaagagatctggctctctctgcttcccagcaacctcaaaacttctaagcactgtaagcaatgtta

SEQ ID NO: 61678 - DNA, 76 bp, Homo sapiens
taaataaagagatctggctctctctgcttcccagcaacctcaaaacttctaagcactgtaagcaatgttaattact

SEQ ID NO: 61679 - DNA, 75 bp, Homo sapiens
tggctctctctgcttcccagcaacctcaaaacttctaagcactgtaagcaatgttaattacttagttttgagaaa

SEQ ID NO: 61680 - DNA, 69 bp, Homo sapiens
ccagcaacctcaaaacttctaagcactgtaagcaatgttaattacttagttttgagaaaagaccaaggt

SEQ ID NO: 61681 - DNA, 74 bp, Homo sapiens
acttctaagcactgtaagcaatgttaattacttagttttgagaaaagaccaaggttatgtaagatgcatcagag

SEQ ID NO: 61682 - DNA, 76 bp, Homo sapiens
taagcactgtaagcaatgttaattacttagttttgagaaaagaccaaggttatgtaagatgcatcagaggaagctg

SEQ ID NO: 61683 - DNA, 74 bp, Homo sapiens
aatgttaattacttagttttgagaaaagaccaaggttatgtaagatgcatcagaggaagctggatgaggtgaaa

SEQ ID NO: 61684 - DNA, 76 bp, Homo sapiens
aattacttagttttgagaaaagaccaaggttatgtaagatgcatcagaggaagctggatgaggtgaaagatatata

SEQ ID NO: 61685 - DNA, 77 bp, Homo sapiens
ttagttttgagaaaagaccaaggttatgtaagatgcatcagaggaagctggatgaggtgaaagatatataggaattc

SEQ ID NO: 61686 - DNA, 79 bp, Homo sapiens
aaaagaccaaggttatgtaagatgcatcagaggaagctggatgaggtgaaagatatataggaattctctgtgctatctt

SEQ ID NO: 61687 - DNA, 80 bp, Homo sapiens
aaggttatgtaagatgcatcagaggaagctggatgaggtgaaagatatataggaattctctgtgctatctttacaacaaa

SEQ ID NO: 61688 - DNA, 83 bp, Homo sapiens
ttatgtaagatgcatcagaggaagctggatgaggtgaaagatatataggaattctctgtgctatctttacaacaaatacttca

SEQ ID NO: 61689 - DNA, 81 bp, Homo sapiens
taagatgcatcagaggaagctggatgaggtgaaagatatataggaattctctgtgctatctttacaacaaatacttcaaaa

SEQ ID NO: 61690 - DNA, 78 bp, Homo sapiens
catcagaggaagctggatgaggtgaaagatatataggaattctctgtgctatctttacaacaaatacttcaaaataaa

SEQ ID NO: 61691 - DNA, 75 bp, Homo sapiens
agaggaagctggatgaggtgaaagatatataggaattctctgtgctatctttacaacaaatacttcaaaataaaa

SEQ ID NO: 61692 - DNA, 74 bp, Homo sapiens
ggatgaggtgaaagatatataggaattctctgtgctatctttacaacaaatacttcaaaataaaaagcataaaa

SEQ ID NO: 61693 - DNA, 71 bp, Homo sapiens
tatataggaattctctgtgctatctttacaacaaatacttcaaaataaaaagcataaaaaaccgaaagaca

SEQ ID NO: 61694 - DNA, 67 bp, Homo sapiens
tgtgctatctttacaacaaatacttcaaaataaaaagcataaaaaaccgaaagacaaaaagcaactt

SEQ ID NO: 61695 - DNA, 66 bp, Homo sapiens
tacaacaaatacttcaaaataaaaagcataaaaaaccgaaagacaaaaagcaactttttctgaaca

SEQ ID NO: 61696 - DNA, 67 bp, Homo sapiens
cttcaaaataaaaagcataaaaaaccgaaagacaaaaagcaactttttctgaacataatcctctcac

SEQ ID NO: 61697 - DNA, 70 bp, Homo sapiens
agcataaaaaaccgaaagacaaaaagcaactttttctgaacataatcctctcactttcttgtgatcttcc

SEQ ID NO: 61698 - DNA, 75 bp, Homo sapiens
acaaaaagcaactttttctgaacataatcctctcactttcttgtgatcttcccaaatcactatggcagctgggaa

SEQ ID NO: 61699 - DNA, 76 bp, Homo sapiens
aactttttctgaacataatcctctcactttcttgtgatcttcccaaatcactatggcagctgggaaggtcaggctc

SEQ ID NO: 61700 - DNA, 81 bp, Homo sapiens
aacataatcctctcactttcttgtgatcttcccaaatcactatggcagctgggaaggtcaggctctcagcaacaagcacag

SEQ ID NO: 61701 - DNA, 84 bp, Homo sapiens
ttcttgtgatcttcccaaatcactatggcagctgggaaggtcaggctctcagcaacaagcacagtggggagagatggctgcttg

SEQ ID NO: 61702 - DNA, 83 bp, Homo sapiens
ttcccaaatcactatggcagctgggaaggtcaggctctcagcaacaagcacagtggggagagatggctgcttgtggtcctcac

SEQ ID NO: 61703 - DNA, 83 bp, Homo sapiens
tatggcagctgggaaggtcaggctctcagcaacaagcacagtggggagagatggctgcttgtggtcctcacccaccaccaaga

SEQ ID NO: 61704 - DNA, 83 bp, Homo sapiens
gaaggtcaggctctcagcaacaagcacagtggggagagatggctgcttgtggtcctcacccaccaccaagagcacaccagaca

SEQ ID NO: 61705 - DNA, 86 bp, Homo sapiens
aggctctcagcaacaagcacagtggggagagatggctgcttgtggtcctcacccaccaccaagagcacaccagacatgcagcactg

SEQ ID NO: 61706 - DNA, 82 bp, Homo sapiens
aacaagcacagtggggagagatggctgcttgtggtcctcacccaccaccaagagcacaccagacatgcagcactgggggtga

SEQ ID NO: 61707 - DNA, 81 bp, Homo sapiens
agtggggagagatggctgcttgtggtcctcacccaccaccaagagcacaccagacatgcagcactgggggtgaacaagaga

SEQ ID NO: 61708 - DNA, 81 bp, Homo sapiens
atggctgcttgtggtcctcacccaccaccaagagcacaccagacatgcagcactgggggtgaacaagagaggctggacaaa

SEQ ID NO: 61709 - DNA, 78 bp, Homo sapiens
cttgtggtcctcacccaccaccaagagcacaccagacatgcagcactgggggtgaacaagagaggctggacaaaagaa

SEQ ID NO: 61710 - DNA, 76 bp, Homo sapiens
acccaccaccaagagcacaccagacatgcagcactgggggtgaacaagagaggctggacaaaagaacgcactaccc

SEQ ID NO: 61711 - DNA, 77 bp, Homo sapiens
agcacaccagacatgcagcactgggggtgaacaagagaggctggacaaaagaacgcactacccctcagtgttttgaa

SEQ ID NO: 61712 - DNA, 74 bp, Homo sapiens
agacatgcagcactgggggtgaacaagagaggctggacaaaagaacgcactacccctcagtgttttgaaataaa

SEQ ID NO: 61713 - DNA, 70 bp, Homo sapiens
aaagaacgcactacccctcagtgttttgaaataaaagagattctattatttggtggtgcaaaaggagata

SEQ ID NO: 61714 - DNA, 74 bp, Homo sapiens
ttttgaaataaaagagattctattatttggtggtgcaaaaggagatattttcccattaatatcttgattcatca

SEQ ID NO: 61715 - DNA, 75 bp, Homo sapiens
tttggtggtgcaaaaggagatattttcccattaatatcttgattcatcaggttgagaagtgataaggataattcc

SEQ ID NO: 61716 - DNA, 75 bp, Homo sapiens
ttttcccattaatatcttgattcatcaggttgagaagtgataaggataattcccattttatagatttcccatcta

SEQ ID NO: 61717 - DNA, 75 bp, Homo sapiens
atcttgattcatcaggttgagaagtgataaggataattcccattttatagatttcccatctataaaatcccttca

SEQ ID NO: 61718 - DNA, 73 bp, Homo sapiens
catcaggttgagaagtgataaggataattcccattttatagatttcccatctataaaatcccttcaaacctca

SEQ ID NO: 61719 - DNA, 70 bp, Homo sapiens
agaagtgataaggataattcccattttatagatttcccatctataaaatcccttcaaacctcagggagga

SEQ ID NO: 61720 - DNA, 71 bp, Homo sapiens
ataaggataattcccattttatagatttcccatctataaaatcccttcaaacctcagggaggatgaagaca

SEQ ID NO: 61721 - DNA, 76 bp, Homo sapiens
tatagatttcccatctataaaatcccttcaaacctcagggaggatgaagacacgtggaatcatctattgtgttgga

SEQ ID NO: 61722 - DNA, 80 bp, Homo sapiens
tataaaatcccttcaaacctcagggaggatgaagacacgtggaatcatctattgtgttggacgtaatatgcatctcatca

SEQ ID NO: 61723 - DNA, 80 bp, Homo sapiens
aacctcagggaggatgaagacacgtggaatcatctattgtgttggacgtaatatgcatctcatcaacagagtattgtctt

SEQ ID NO: 61724 - DNA, 84 bp, Homo sapiens
acgtggaatcatctattgtgttggacgtaatatgcatctcatcaacagagtattgtctttggaagataaatgtccatcatctga

SEQ ID NO: 61725 - DNA, 82 bp, Homo sapiens
tattgtgttggacgtaatatgcatctcatcaacagagtattgtctttggaagataaatgtccatcatctgacggtaatacaa

SEQ ID NO: 61726 - DNA, 81 bp, Homo sapiens
gttggacgtaatatgcatctcatcaacagagtattgtctttggaagataaatgtccatcatctgacggtaatacaaatcaa

SEQ ID NO: 61727 - DNA, 82 bp, Homo sapiens
atatgcatctcatcaacagagtattgtctttggaagataaatgtccatcatctgacggtaatacaaatcaatgggcttctac

SEQ ID NO: 61728 - DNA, 81 bp, Homo sapiens
tattgtctttggaagataaatgtccatcatctgacggtaatacaaatcaatgggcttctactgacatcatcaagccactaa

SEQ ID NO: 61729 - DNA, 79 bp, Homo sapiens
aagataaatgtccatcatctgacggtaatacaaatcaatgggcttctactgacatcatcaagccactaacaaacaggaa

SEQ ID NO: 61730 - DNA, 77 bp, Homo sapiens
tctgacggtaatacaaatcaatgggcttctactgacatcatcaagccactaacaaacaggaagtgtaagaaaagcca

SEQ ID NO: 61731 - DNA, 77 bp, Homo sapiens
atacaaatcaatgggcttctactgacatcatcaagccactaacaaacaggaagtgtaagaaaagccagtgtctctgg

SEQ ID NO: 61732 - DNA, 79 bp, Homo sapiens
atgggcttctactgacatcatcaagccactaacaaacaggaagtgtaagaaaagccagtgtctctggttctcatgattc

SEQ ID NO: 61733 - DNA, 79 bp, Homo sapiens
actgacatcatcaagccactaacaaacaggaagtgtaagaaaagccagtgtctctggttctcatgattctggagagaaa

SEQ ID NO: 61734 - DNA, 73 bp, Homo sapiens
aagccactaacaaacaggaagtgtaagaaaagccagtgtctctggttctcatgattctggagagaaaggtaaa

SEQ ID NO: 61735 - DNA, 73 bp, Homo sapiens
aacaaacaggaagtgtaagaaaagccagtgtctctggttctcatgattctggagagaaaggtaaagtgattcg

SEQ ID NO: 61736 - DNA, 76 bp, Homo sapiens
aagtgtaagaaaagccagtgtctctggttctcatgattctggagagaaaggtaaagtgattcgtgcacgtgaattc

SEQ ID NO: 61737 - DNA, 79 bp, Homo sapiens
aagccagtgtctctggttctcatgattctggagagaaaggtaaagtgattcgtgcacgtgaattctctccatcaacaaa

SEQ ID NO: 61738 - DNA, 79 bp, Homo sapiens
tctctggttctcatgattctggagagaaaggtaaagtgattcgtgcacgtgaattctctccatcaacaaaaggagcctg

SEQ ID NO: 61739 - DNA, 78 bp, Homo sapiens
gaaaggtaaagtgattcgtgcacgtgaattctctccatcaacaaaaggagcctgggaagagcggctgaatcatcctca

SEQ ID NO: 61740 - DNA, 80 bp, Homo sapiens
taaagtgattcgtgcacgtgaattctctccatcaacaaaaggagcctgggaagagcggctgaatcatcctcacctatctc

SEQ ID NO: 61741 - DNA, 82 bp, Homo sapiens
tcgtgcacgtgaattctctccatcaacaaaaggagcctgggaagagcggctgaatcatcctcacctatctctcctgttgcta

SEQ ID NO: 61742 - DNA, 81 bp, Homo sapiens
atcaacaaaaggagcctgggaagagcggctgaatcatcctcacctatctctcctgttgctagctcatcacagaaaatgtta

SEQ ID NO: 61743 - DNA, 81 bp, Homo sapiens
agcctgggaagagcggctgaatcatcctcacctatctctcctgttgctagctcatcacagaaaatgttaaactcatttaga

SEQ ID NO: 61744 - DNA, 83 bp, Homo sapiens
aatcatcctcacctatctctcctgttgctagctcatcacagaaaatgttaaactcatttagagagctactcatgagaaatctg

SEQ ID NO: 61745 - DNA, 81 bp, Homo sapiens
ctatctctcctgttgctagctcatcacagaaaatgttaaactcatttagagagctactcatgagaaatctgggttctcttc

SEQ ID NO: 61746 - DNA, 81 bp, Homo sapiens
tgttgctagctcatcacagaaaatgttaaactcatttagagagctactcatgagaaatctgggttctcttcctatcaccta

SEQ ID NO: 61747 - DNA, 80 bp, Homo sapiens
tcatcacagaaaatgttaaactcatttagagagctactcatgagaaatctgggttctcttcctatcacctactgacacac

SEQ ID NO: 61748 - DNA, 75 bp, Homo sapiens
aaatgttaaactcatttagagagctactcatgagaaatctgggttctcttcctatcacctactgacacactttta

SEQ ID NO: 61749 - DNA, 77 bp, Homo sapiens
taaactcatttagagagctactcatgagaaatctgggttctcttcctatcacctactgacacacttttagttataga

SEQ ID NO: 61750 - DNA, 77 bp, Homo sapiens
agctactcatgagaaatctgggttctcttcctatcacctactgacacacttttagttatagactttcactgtgagaa

SEQ ID NO: 61751 - DNA, 75 bp, Homo sapiens
atgagaaatctgggttctcttcctatcacctactgacacacttttagttatagactttcactgtgagaatggtaa

SEQ ID NO: 61752 - DNA, 73 bp, Homo sapiens
atctgggttctcttcctatcacctactgacacacttttagttatagactttcactgtgagaatggtaaaaatc

SEQ ID NO: 61753 - DNA, 77 bp, Homo sapiens
tcttcctatcacctactgacacacttttagttatagactttcactgtgagaatggtaaaaatccacagaccacagca

SEQ ID NO: 61754 - DNA, 73 bp, Homo sapiens
acctactgacacacttttagttatagactttcactgtgagaatggtaaaaatccacagaccacagcacccacc

SEQ ID NO: 61755 - DNA, 77 bp, Homo sapiens
tatagactttcactgtgagaatggtaaaaatccacagaccacagcacccaccggagagccataacactgagggccaa

SEQ ID NO: 61756 - DNA, 74 bp, Homo sapiens
tgtgagaatggtaaaaatccacagaccacagcacccaccggagagccataacactgagggccaagggtaactta

SEQ ID NO: 61757 - DNA, 72 bp, Homo sapiens
acagaccacagcacccaccggagagccataacactgagggccaagggtaacttaccatatttggcacgttgg

SEQ ID NO: 61758 - DNA, 72 bp, Homo sapiens
cacccaccggagagccataacactgagggccaagggtaacttaccatatttggcacgttggtgactgaagta

SEQ ID NO: 61759 - DNA, 73 bp, Homo sapiens
ataacactgagggccaagggtaacttaccatatttggcacgttggtgactgaagtattcttgatatctgtagg

SEQ ID NO: 61760 - DNA, 72 bp, Homo sapiens
caagggtaacttaccatatttggcacgttggtgactgaagtattcttgatatctgtagggaaggtgggcaaa

SEQ ID NO: 61761 - DNA, 74 bp, Homo sapiens
taacttaccatatttggcacgttggtgactgaagtattcttgatatctgtagggaaggtgggcaaactgttgac

SEQ ID NO: 61762 - DNA, 76 bp, Homo sapiens
atatttggcacgttggtgactgaagtattcttgatatctgtagggaaggtgggcaaactgttgaccatgctctgtt

SEQ ID NO: 61763 - DNA, 78 bp, Homo sapiens
gttggtgactgaagtattcttgatatctgtagggaaggtgggcaaactgttgaccatgctctgtttgctggctaactg

SEQ ID NO: 61764 - DNA, 75 bp, Homo sapiens
aagtattcttgatatctgtagggaaggtgggcaaactgttgaccatgctctgtttgctggctaactgggggttca

SEQ ID NO: 61765 - DNA, 77 bp, Homo sapiens
ttgatatctgtagggaaggtgggcaaactgttgaccatgctctgtttgctggctaactgggggttcactccagtggc

SEQ ID NO: 61766 - DNA, 75 bp, Homo sapiens
tagggaaggtgggcaaactgttgaccatgctctgtttgctggctaactgggggttcactccagtggctcccattg

SEQ ID NO: 61767 - DNA, 78 bp, Homo sapiens
ggcaaactgttgaccatgctctgtttgctggctaactgggggttcactccagtggctcccattggctgccctccagct

SEQ ID NO: 61768 - DNA, 78 bp, Homo sapiens
ttgaccatgctctgtttgctggctaactgggggttcactccagtggctcccattggctgccctccagcttgactaaag

SEQ ID NO: 61769 - DNA, 75 bp, Homo sapiens
tttgctggctaactgggggttcactccagtggctcccattggctgccctccagcttgactaaagggctgtccaaa

SEQ ID NO: 61770 - DNA, 74 bp, Homo sapiens
taactgggggttcactccagtggctcccattggctgccctccagcttgactaaagggctgtccaaatggacttg

SEQ ID NO: 61771 - DNA, 76 bp, Homo sapiens
gctcccattggctgccctccagcttgactaaagggctgtccaaatggacttgtgttcccagttattcccatctgaa

SEQ ID NO: 61772 - DNA, 73 bp, Homo sapiens
gctgccctccagcttgactaaagggctgtccaaatggacttgtgttcccagttattcccatctgaaacaaaaa

SEQ ID NO: 61773 - DNA, 75 bp, Homo sapiens
caaatggacttgtgttcccagttattcccatctgaaacaaaaaagaggtaacatcagctgtggtgacgcagtcaa

SEQ ID NO: 61774 - DNA, 74 bp, Homo sapiens
acttgtgttcccagttattcccatctgaaacaaaaaagaggtaacatcagctgtggtgacgcagtcaatataaa

SEQ ID NO: 61775 - DNA, 73 bp, Homo sapiens
tcccagttattcccatctgaaacaaaaaagaggtaacatcagctgtggtgacgcagtcaatataaaaggaagg

SEQ ID NO: 61776 - DNA, 75 bp, Homo sapiens
atctgaaacaaaaaagaggtaacatcagctgtggtgacgcagtcaatataaaaggaagggcctgggaaatgctca

SEQ ID NO: 61777 - DNA, 74 bp, Homo sapiens
aaaaagaggtaacatcagctgtggtgacgcagtcaatataaaaggaagggcctgggaaatgctcacacagtttc

SEQ ID NO: 61778 - DNA, 79 bp, Homo sapiens
taacatcagctgtggtgacgcagtcaatataaaaggaagggcctgggaaatgctcacacagtttcctatgaaatactca

SEQ ID NO: 61779 - DNA, 79 bp, Homo sapiens
tggtgacgcagtcaatataaaaggaagggcctgggaaatgctcacacagtttcctatgaaatactcattgcaatgataa

SEQ ID NO: 61780 - DNA, 76 bp, Homo sapiens
agtcaatataaaaggaagggcctgggaaatgctcacacagtttcctatgaaatactcattgcaatgataaattcaa

SEQ ID NO: 61781 - DNA, 76 bp, Homo sapiens
tataaaaggaagggcctgggaaatgctcacacagtttcctatgaaatactcattgcaatgataaattcaaggttca

SEQ ID NO: 61782 - DNA, 83 bp, Homo sapiens
aatgctcacacagtttcctatgaaatactcattgcaatgataaattcaaggttcattatcaggttcacatgctccaagcagaa

SEQ ID NO: 61783 - DNA, 82 bp, Homo sapiens
agtttcctatgaaatactcattgcaatgataaattcaaggttcattatcaggttcacatgctccaagcagaaggctcatgaa

SEQ ID NO: 61784 - DNA, 87 bp, Homo sapiens
atgaaatactcattgcaatgataaattcaaggttcattatcaggttcacatgctccaagcagaaggctcatgaagcagctcctagca

SEQ ID NO: 61785 - DNA, 87 bp, Homo sapiens
attgcaatgataaattcaaggttcattatcaggttcacatgctccaagcagaaggctcatgaagcagctcctagcagccactctctc

SEQ ID NO: 61786 - DNA, 83 bp, Homo sapiens
ttcacatgctccaagcagaaggctcatgaagcagctcctagcagccactctctcctcaccctaaaccccatcccgcaagtaga

SEQ ID NO: 61787 - DNA, 80 bp, Homo sapiens
caagcagaaggctcatgaagcagctcctagcagccactctctcctcaccctaaaccccatcccgcaagtagacgagctgt

SEQ ID NO: 61788 - DNA, 78 bp, Homo sapiens
agaaggctcatgaagcagctcctagcagccactctctcctcaccctaaaccccatcccgcaagtagacgagctgtttc

SEQ ID NO: 61789 - DNA, 72 bp, Homo sapiens
cctagcagccactctctcctcaccctaaaccccatcccgcaagtagacgagctgtttccccccaccctcagc

SEQ ID NO: 61790 - DNA, 73 bp, Homo sapiens
tctcctcaccctaaaccccatcccgcaagtagacgagctgtttccccccaccctcagccactctcctcactca

SEQ ID NO: 61791 - DNA, 70 bp, Homo sapiens
accctaaaccccatcccgcaagtagacgagctgtttccccccaccctcagccactctcctcactcaatcc

SEQ ID NO: 61792 - DNA, 73 bp, Homo sapiens
atcccgcaagtagacgagctgtttccccccaccctcagccactctcctcactcaatccctcctgccccaacaa

SEQ ID NO: 61793 - DNA, 72 bp, Homo sapiens
ttccccccaccctcagccactctcctcactcaatccctcctgccccaacaatggcaccaacacccgaagaaa

SEQ ID NO: 61794 - DNA, 74 bp, Homo sapiens
cctcagccactctcctcactcaatccctcctgccccaacaatggcaccaacacccgaagaaagtcatttggaaa

SEQ ID NO: 61795 - DNA, 68 bp, Homo sapiens
actcaatccctcctgccccaacaatggcaccaacacccgaagaaagtcatttggaaaacaaaaccttc

SEQ ID NO: 61796 - DNA, 70 bp, Homo sapiens
tcctgccccaacaatggcaccaacacccgaagaaagtcatttggaaaacaaaaccttccaaagctgctac

SEQ ID NO: 61797 - DNA, 67 bp, Homo sapiens
aacaatggcaccaacacccgaagaaagtcatttggaaaacaaaaccttccaaagctgctacccaagg

SEQ ID NO: 61798 - DNA, 64 bp, Homo sapiens
aacacccgaagaaagtcatttggaaaacaaaaccttccaaagctgctacccaaggggaattctt

SEQ ID NO: 61799 - DNA, 65 bp, Homo sapiens
aagaaagtcatttggaaaacaaaaccttccaaagctgctacccaaggggaattctttcagtttaa

SEQ ID NO: 61800 - DNA, 66 bp, Homo sapiens
gaaaacaaaaccttccaaagctgctacccaaggggaattctttcagtttaatccttaattactcta

SEQ ID NO: 61801 - DNA, 66 bp, Homo sapiens
cccaaggggaattctttcagtttaatccttaattactctataggtatctagtttctgttaggttcc

SEQ ID NO: 61802 - DNA, 70 bp, Homo sapiens
ctttcagtttaatccttaattactctataggtatctagtttctgttaggttccccatcagatttgaacta

SEQ ID NO: 61803 - DNA, 69 bp, Homo sapiens
aatccttaattactctataggtatctagtttctgttaggttccccatcagatttgaactaagtttccat

SEQ ID NO: 61804 - DNA, 70 bp, Homo sapiens
actctataggtatctagtttctgttaggttccccatcagatttgaactaagtttccattagttcaaaaca

SEQ ID NO: 61805 - DNA, 70 bp, Homo sapiens
ataggtatctagtttctgttaggttccccatcagatttgaactaagtttccattagttcaaaacacacag

SEQ ID NO: 61806 - DNA, 75 bp, Homo sapiens
ggttccccatcagatttgaactaagtttccattagttcaaaacacacagtggaaatattgcaatgaaatgataca

SEQ ID NO: 61807 - DNA, 76 bp, Homo sapiens
tcagatttgaactaagtttccattagttcaaaacacacagtggaaatattgcaatgaaatgatacaacacctggga

SEQ ID NO: 61808 - DNA, 74 bp, Homo sapiens
ctaagtttccattagttcaaaacacacagtggaaatattgcaatgaaatgatacaacacctgggatctccttta

SEQ ID NO: 61809 - DNA, 75 bp, Homo sapiens
ttagttcaaaacacacagtggaaatattgcaatgaaatgatacaacacctgggatctcctttaaaatacacctga

SEQ ID NO: 61810 - DNA, 75 bp, Homo sapiens
aaacacacagtggaaatattgcaatgaaatgatacaacacctgggatctcctttaaaatacacctgacccatgac

SEQ ID NO: 61811 - DNA, 73 bp, Homo sapiens
aaatattgcaatgaaatgatacaacacctgggatctcctttaaaatacacctgacccatgaccaacatgggtt

SEQ ID NO: 61812 - DNA, 75 bp, Homo sapiens
aatgaaatgatacaacacctgggatctcctttaaaatacacctgacccatgaccaacatgggtttgaactgcatg

SEQ ID NO: 61813 - DNA, 74 bp, Homo sapiens
aacacctgggatctcctttaaaatacacctgacccatgaccaacatgggtttgaactgcatgggtctacatata

SEQ ID NO: 61814 - DNA, 74 bp, Homo sapiens
atctcctttaaaatacacctgacccatgaccaacatgggtttgaactgcatgggtctacatatatggaaatatt

SEQ ID NO: 61815 - DNA, 74 bp, Homo sapiens
tttaaaatacacctgacccatgaccaacatgggtttgaactgcatgggtctacatatatggaaatatttttcaa

SEQ ID NO: 61816 - DNA, 80 bp, Homo sapiens
tgacccatgaccaacatgggtttgaactgcatgggtctacatatatggaaatatttttcaatctctcctgctcctcttca

SEQ ID NO: 61817 - DNA, 77 bp, Homo sapiens
atgaccaacatgggtttgaactgcatgggtctacatatatggaaatatttttcaatctctcctgctcctcttcaaac

SEQ ID NO: 61818 - DNA, 80 bp, Homo sapiens
tttgaactgcatgggtctacatatatggaaatatttttcaatctctcctgctcctcttcaaactcctcagcctctgccaa

SEQ ID NO: 61819 - DNA, 78 bp, Homo sapiens
atgggtctacatatatggaaatatttttcaatctctcctgctcctcttcaaactcctcagcctctgccaaccaagaga

SEQ ID NO: 61820 - DNA, 79 bp, Homo sapiens
ctacatatatggaaatatttttcaatctctcctgctcctcttcaaactcctcagcctctgccaaccaagagatcaagac

SEQ ID NO: 61821 - DNA, 81 bp, Homo sapiens
gatcaagaccagcacctcctcatcctcctcaacgtgaagacaatgaggatgaagaccttgatgatgacccactttcactta

SEQ ID NO: 61822 - DNA, 79 bp, Homo sapiens
accagcacctcctcatcctcctcaacgtgaagacaatgaggatgaagaccttgatgatgacccactttcacttaatgaa

SEQ ID NO: 61823 - DNA, 71 bp, Homo sapiens
gaagaccttgatgatgacccactttcacttaatgaatggtacatatattttcttttccttatggttttatt

SEQ ID NO: 61824 - DNA, 70 bp, Homo sapiens
ccttgatgatgacccactttcacttaatgaatggtacatatattttcttttccttatggttttatttatt

SEQ ID NO: 61825 - DNA, 79 bp, Homo sapiens
tctctagcttacttcactgtaaagatacagtatataacacataaaacatgaaatttgtgttaagcaaatgtgtatgcta

SEQ ID NO: 61826 - DNA, 77 bp, Homo sapiens
gcttacttcactgtaaagatacagtatataacacataaaacatgaaatttgtgttaagcaaatgtgtatgctattgg

SEQ ID NO: 61827 - DNA, 77 bp, Homo sapiens
ttcactgtaaagatacagtatataacacataaaacatgaaatttgtgttaagcaaatgtgtatgctattggtaaggc

SEQ ID NO: 61828 - DNA, 76 bp, Homo sapiens
ctgtaaagatacagtatataacacataaaacatgaaatttgtgttaagcaaatgtgtatgctattggtaaggcttc

SEQ ID NO: 61829 - DNA, 78 bp, Homo sapiens
agtatataacacataaaacatgaaatttgtgttaagcaaatgtgtatgctattggtaaggcttctgatcaacagcagg

SEQ ID NO: 61830 - DNA, 78 bp, Homo sapiens
taacacataaaacatgaaatttgtgttaagcaaatgtgtatgctattggtaaggcttctgatcaacagcaggggatta

SEQ ID NO: 61831 - DNA, 77 bp, Homo sapiens
acatgaaatttgtgttaagcaaatgtgtatgctattggtaaggcttctgatcaacagcaggggattagtagtagtta

SEQ ID NO: 61832 - DNA, 74 bp, Homo sapiens
aaatttgtgttaagcaaatgtgtatgctattggtaaggcttctgatcaacagcaggggattagtagtagttaaa

SEQ ID NO: 61833 - DNA, 75 bp, Homo sapiens
tgtgttaagcaaatgtgtatgctattggtaaggcttctgatcaacagcaggggattagtagtagttaaactttta

SEQ ID NO: 61834 - DNA, 74 bp, Homo sapiens
aaatgtgtatgctattggtaaggcttctgatcaacagcaggggattagtagtagttaaacttttatggagtcaa

SEQ ID NO: 61835 - DNA, 72 bp, Homo sapiens
tgctattggtaaggcttctgatcaacagcaggggattagtagtagttaaacttttatggagtcaaaaggtta

SEQ ID NO: 61836 - DNA, 71 bp, Homo sapiens
aggcttctgatcaacagcaggggattagtagtagttaaacttttatggagtcaaaaggttacaagcagatt

SEQ ID NO: 61837 - DNA, 70 bp, Homo sapiens
atcaacagcaggggattagtagtagttaaacttttatggagtcaaaaggttacaagcagattttcgactg

SEQ ID NO: 61838 - DNA, 71 bp, Homo sapiens
gggattagtagtagttaaacttttatggagtcaaaaggttacaagcagattttcgactggcagggtcagca

SEQ ID NO: 61839 - DNA, 70 bp, Homo sapiens
taaacttttatggagtcaaaaggttacaagcagattttcgactggcagggtcagcacccttaacccctga

SEQ ID NO: 61840 - DNA, 69 bp, Homo sapiens
agtcaaaaggttacaagcagattttcgactggcagggtcagcacccttaacccctgagttgcttaaggg

SEQ ID NO: 61841 - DNA, 73 bp, Homo sapiens
ttacaagcagattttcgactggcagggtcagcacccttaacccctgagttgcttaagggtcacctctaatcca

SEQ ID NO: 61842 - DNA, 72 bp, Homo sapiens
agattttcgactggcagggtcagcacccttaacccctgagttgcttaagggtcacctctaatccactgggca

SEQ ID NO: 61843 - DNA, 71 bp, Homo sapiens
actggcagggtcagcacccttaacccctgagttgcttaagggtcacctctaatccactgggcaggaggagg

SEQ ID NO: 61844 - DNA, 68 bp, Homo sapiens
acccttaacccctgagttgcttaagggtcacctctaatccactgggcaggaggaggtggcaggaaaag

SEQ ID NO: 61845 - DNA, 75 bp, Homo sapiens
ccctgagttgcttaagggtcacctctaatccactgggcaggaggaggtggcaggaaaagggcatagatggagaga

SEQ ID NO: 61846 - DNA, 74 bp, Homo sapiens
cttaagggtcacctctaatccactgggcaggaggaggtggcaggaaaagggcatagatggagagagcctggtaa

SEQ ID NO: 61847 - DNA, 75 bp, Homo sapiens
acctctaatccactgggcaggaggaggtggcaggaaaagggcatagatggagagagcctggtaaggtactgataa

SEQ ID NO: 61848 - DNA, 76 bp, Homo sapiens
aatccactgggcaggaggaggtggcaggaaaagggcatagatggagagagcctggtaaggtactgataatcactaa

SEQ ID NO: 61849 - DNA, 76 bp, Homo sapiens
aggaggtggcaggaaaagggcatagatggagagagcctggtaaggtactgataatcactaaccaagcagtaggcga

SEQ ID NO: 61850 - DNA, 76 bp, Homo sapiens
aggaaaagggcatagatggagagagcctggtaaggtactgataatcactaaccaagcagtaggcgatgggtacaga

SEQ ID NO: 61851 - DNA, 78 bp, Homo sapiens
catagatggagagagcctggtaaggtactgataatcactaaccaagcagtaggcgatgggtacagagaggttatagta

SEQ ID NO: 61852 - DNA, 77 bp, Homo sapiens
gagagcctggtaaggtactgataatcactaaccaagcagtaggcgatgggtacagagaggttatagtatcctctcta

SEQ ID NO: 61853 - DNA, 77 bp, Homo sapiens
taaggtactgataatcactaaccaagcagtaggcgatgggtacagagaggttatagtatcctctctaccactgtaca

SEQ ID NO: 61854 - DNA, 75 bp, Homo sapiens
ataatcactaaccaagcagtaggcgatgggtacagagaggttatagtatcctctctaccactgtacaggtgtaaa

SEQ ID NO: 61855 - DNA, 74 bp, Homo sapiens
taaccaagcagtaggcgatgggtacagagaggttatagtatcctctctaccactgtacaggtgtaaaatttatg

SEQ ID NO: 61856 - DNA, 72 bp, Homo sapiens
agtaggcgatgggtacagagaggttatagtatcctctctaccactgtacaggtgtaaaatttatgtatttat

SEQ ID NO: 61857 - DNA, 67 bp, Homo sapiens
ctgcgcccggcctaaaattttccataataaagttttttataaaattaaagtgcactgaaatcaaata

SEQ ID NO: 61858 - DNA, 68 bp, Homo sapiens
ggcctaaaattttccataataaagttttttataaaattaaagtgcactgaaatcaaatatatactaga

SEQ ID NO: 61859 - DNA, 70 bp, Homo sapiens
ccataataaagttttttataaaattaaagtgcactgaaatcaaatatatactagataaaggcaggaatgg

SEQ ID NO: 61860 - DNA, 70 bp, Homo sapiens
ttttttataaaattaaagtgcactgaaatcaaatatatactagataaaggcaggaatgggaaagaggaac

SEQ ID NO: 61861 - DNA, 73 bp, Homo sapiens
ataaaattaaagtgcactgaaatcaaatatatactagataaaggcaggaatgggaaagaggaaccctcagcta

SEQ ID NO: 61862 - DNA, 76 bp, Homo sapiens
aagtgcactgaaatcaaatatatactagataaaggcaggaatgggaaagaggaaccctcagctatgcttccgtgag

SEQ ID NO: 61863 - DNA, 75 bp, Homo sapiens
aaatcaaatatatactagataaaggcaggaatgggaaagaggaaccctcagctatgcttccgtgagggcctgcaa

SEQ ID NO: 61864 - DNA, 75 bp, Homo sapiens
tatactagataaaggcaggaatgggaaagaggaaccctcagctatgcttccgtgagggcctgcaaccaactggaa

SEQ ID NO: 61865 - DNA, 75 bp, Homo sapiens
caggaatgggaaagaggaaccctcagctatgcttccgtgagggcctgcaaccaactggaattccttccatcaaca

SEQ ID NO: 61866 - DNA, 76 bp, Homo sapiens
atgggaaagaggaaccctcagctatgcttccgtgagggcctgcaaccaactggaattccttccatcaacagatgtg

SEQ ID NO: 61867 - DNA, 75 bp, Homo sapiens
aaccctcagctatgcttccgtgagggcctgcaaccaactggaattccttccatcaacagatgtgggccaagttcc

SEQ ID NO: 61868 - DNA, 76 bp, Homo sapiens
ctatgcttccgtgagggcctgcaaccaactggaattccttccatcaacagatgtgggccaagttccctgatgaccc

SEQ ID NO: 61869 - DNA, 76 bp, Homo sapiens
cgtgagggcctgcaaccaactggaattccttccatcaacagatgtgggccaagttccctgatgacccccagctcca

SEQ ID NO: 61870 - DNA, 74 bp, Homo sapiens
aaccaactggaattccttccatcaacagatgtgggccaagttccctgatgacccccagctccagcctccacagg

SEQ ID NO: 61871 - DNA, 76 bp, Homo sapiens
attccttccatcaacagatgtgggccaagttccctgatgacccccagctccagcctccacaggtcaattcaggaat

SEQ ID NO: 61872 - DNA, 80 bp, Homo sapiens
atcaacagatgtgggccaagttccctgatgacccccagctccagcctccacaggtcaattcaggaattgccatggcaata

SEQ ID NO: 61873 - DNA, 78 bp, Homo sapiens
atgtgggccaagttccctgatgacccccagctccagcctccacaggtcaattcaggaattgccatggcaatatcccag

SEQ ID NO: 61874 - DNA, 78 bp, Homo sapiens
agttccctgatgacccccagctccagcctccacaggtcaattcaggaattgccatggcaatatcccagtgcttatctt

SEQ ID NO: 61875 - DNA, 79 bp, Homo sapiens
ccccagctccagcctccacaggtcaattcaggaattgccatggcaatatcccagtgcttatctttctccctgtggagaa

SEQ ID NO: 61876 - DNA, 77 bp, Homo sapiens
agcctccacaggtcaattcaggaattgccatggcaatatcccagtgcttatctttctccctgtggagaaacaacgac

SEQ ID NO: 61877 - DNA, 74 bp, Homo sapiens
attcaggaattgccatggcaatatcccagtgcttatctttctccctgtggagaaacaacgactaattaagaaac

SEQ ID NO: 61878 - DNA, 76 bp, Homo sapiens
atggcaatatcccagtgcttatctttctccctgtggagaaacaacgactaattaagaaactggatgcttgggctgc

SEQ ID NO: 61879 - DNA, 75 bp, Homo sapiens
atatcccagtgcttatctttctccctgtggagaaacaacgactaattaagaaactggatgcttgggctgcctgtc

SEQ ID NO: 61880 - DNA, 72 bp, Homo sapiens
ttatctttctccctgtggagaaacaacgactaattaagaaactggatgcttgggctgcctgtctttgctttt

SEQ ID NO: 61881 - DNA, 75 bp, Homo sapiens
tgtggagaaacaacgactaattaagaaactggatgcttgggctgcctgtctttgcttttttgcaaagctctaata

SEQ ID NO: 61882 - DNA, 75 bp, Homo sapiens
taattaagaaactggatgcttgggctgcctgtctttgcttttttgcaaagctctaatattccaccttctgtctat

SEQ ID NO: 61883 - DNA, 78 bp, Homo sapiens
tggatgcttgggctgcctgtctttgcttttttgcaaagctctaatattccaccttctgtctattgtgtgttctgtatt

SEQ ID NO: 61884 - DNA, 77 bp, Homo sapiens
gctgcctgtctttgcttttttgcaaagctctaatattccaccttctgtctattgtgtgttctgtatttctggagtag

SEQ ID NO: 61885 - DNA, 75 bp, Homo sapiens
tttgcttttttgcaaagctctaatattccaccttctgtctattgtgtgttctgtatttctggagtagtggtcagt

SEQ ID NO: 61886 - DNA, 77 bp, Homo sapiens
tttttgcaaagctctaatattccaccttctgtctattgtgtgttctgtatttctggagtagtggtcagtttgatgga

SEQ ID NO: 61887 - DNA, 74 bp, Homo sapiens
tgtctattgtgtgttctgtatttctggagtagtggtcagtttgatggactgggaaggtccccgcatagggaaaa

SEQ ID NO: 61888 - DNA, 70 bp, Homo sapiens
ttctgtatttctggagtagtggtcagtttgatggactgggaaggtccccgcatagggaaaacctcccagg

SEQ ID NO: 61889 - DNA, 69 bp, Homo sapiens
tctggagtagtggtcagtttgatggactgggaaggtccccgcatagggaaaacctcccaggggtgagtt

SEQ ID NO: 61890 - DNA, 68 bp, Homo sapiens
tcagtttgatggactgggaaggtccccgcatagggaaaacctcccaggggtgagtttccagttaagaa

SEQ ID NO: 61891 - DNA, 69 bp, Homo sapiens
ttgatggactgggaaggtccccgcatagggaaaacctcccaggggtgagtttccagttaagaaatcata

SEQ ID NO: 61892 - DNA, 69 bp, Homo sapiens
aaggtccccgcatagggaaaacctcccaggggtgagtttccagttaagaaatcatagctcagttctctc

SEQ ID NO: 61893 - DNA, 73 bp, Homo sapiens
atagggaaaacctcccaggggtgagtttccagttaagaaatcatagctcagttctctccatcagcctcacctg

SEQ ID NO: 61894 - DNA, 83 bp, Homo sapiens
tgagtttccagttaagaaatcatagctcagttctctccatcagcctcacctggtgactgccacgccagcatgtccactctggg

SEQ ID NO: 61895 - DNA, 81 bp, Homo sapiens
gttaagaaatcatagctcagttctctccatcagcctcacctggtgactgccacgccagcatgtccactctgggtaacttaa

SEQ ID NO: 61896 - DNA, 81 bp, Homo sapiens
aaatcatagctcagttctctccatcagcctcacctggtgactgccacgccagcatgtccactctgggtaacttaacattcc

SEQ ID NO: 61897 - DNA, 78 bp, Homo sapiens
atcagcctcacctggtgactgccacgccagcatgtccactctgggtaacttaacattccttctatggacttcaaactc

SEQ ID NO: 61898 - DNA, 74 bp, Homo sapiens
actctgggtaacttaacattccttctatggacttcaaactcctcgcctgtaagatgagtgtcttgaacaagatg

SEQ ID NO: 61899 - DNA, 76 bp, Homo sapiens
taacattccttctatggacttcaaactcctcgcctgtaagatgagtgtcttgaacaagatggatcgtattatttct

SEQ ID NO: 61900 - DNA, 76 bp, Homo sapiens
cttcaaactcctcgcctgtaagatgagtgtcttgaacaagatggatcgtattatttctttcagctctaaaagtcta

SEQ ID NO: 61901 - DNA, 76 bp, Homo sapiens
aagatgagtgtcttgaacaagatggatcgtattatttctttcagctctaaaagtctaggctacaaacaaatcaaca

SEQ ID NO: 61902 - DNA, 76 bp, Homo sapiens
tcttgaacaagatggatcgtattatttctttcagctctaaaagtctaggctacaaacaaatcaacactcaacacaa

SEQ ID NO: 61903 - DNA, 72 bp, Homo sapiens
atcgtattatttctttcagctctaaaagtctaggctacaaacaaatcaacactcaacacaactggccctttc

SEQ ID NO: 61904 - DNA, 74 bp, Homo sapiens
ttatttctttcagctctaaaagtctaggctacaaacaaatcaacactcaacacaactggccctttctgctgaaa

SEQ ID NO: 61905 - DNA, 76 bp, Homo sapiens
tctaaaagtctaggctacaaacaaatcaacactcaacacaactggccctttctgctgaaatgcctgtacagaaaca

SEQ ID NO: 61906 - DNA, 72 bp, Homo sapiens
aaacaaatcaacactcaacacaactggccctttctgctgaaatgcctgtacagaaacacaaataaaaaccaa

SEQ ID NO: 61907 - DNA, 72 bp, Homo sapiens
aacactcaacacaactggccctttctgctgaaatgcctgtacagaaacacaaataaaaaccaaaggagtata

SEQ ID NO: 61908 - DNA, 70 bp, Homo sapiens
acaactggccctttctgctgaaatgcctgtacagaaacacaaataaaaaccaaaggagtataaccagaaa

SEQ ID NO: 61909 - DNA, 75 bp, Homo sapiens
tgaaatgcctgtacagaaacacaaataaaaaccaaaggagtataaccagaaagttctagctctgtgcatttcata

SEQ ID NO: 61910 - DNA, 73 bp, Homo sapiens
gaaacacaaataaaaaccaaaggagtataaccagaaagttctagctctgtgcatttcatacgcaggtgatttc

SEQ ID NO: 61911 - DNA, 75 bp, Homo sapiens
aaggagtataaccagaaagttctagctctgtgcatttcatacgcaggtgatttccttccccatgtagtcctccta

SEQ ID NO: 61912 - DNA, 77 bp, Homo sapiens
tataaccagaaagttctagctctgtgcatttcatacgcaggtgatttccttccccatgtagtcctcctaggtgacat

SEQ ID NO: 61913 - DNA, 76 bp, Homo sapiens
agttctagctctgtgcatttcatacgcaggtgatttccttccccatgtagtcctcctaggtgacatttctcacctt

SEQ ID NO: 61914 - DNA, 76 bp, Homo sapiens
tgtgcatttcatacgcaggtgatttccttccccatgtagtcctcctaggtgacatttctcaccttttggaaagcaa

SEQ ID NO: 61915 - DNA, 74 bp, Homo sapiens
tttccttccccatgtagtcctcctaggtgacatttctcaccttttggaaagcaatcacattcttgtcaccacta

SEQ ID NO: 61916 - DNA, 76 bp, Homo sapiens
atgtagtcctcctaggtgacatttctcaccttttggaaagcaatcacattcttgtcaccactaggtgctctactta

SEQ ID NO: 61917 - DNA, 77 bp, Homo sapiens
tcctaggtgacatttctcaccttttggaaagcaatcacattcttgtcaccactaggtgctctacttaagtgaactga

SEQ ID NO: 61918 - DNA, 75 bp, Homo sapiens
atttctcaccttttggaaagcaatcacattcttgtcaccactaggtgctctacttaagtgaactgagacactaat

SEQ ID NO: 61919 - DNA, 78 bp, Homo sapiens
ttttggaaagcaatcacattcttgtcaccactaggtgctctacttaagtgaactgagacactaattcttctgcaagtc

SEQ ID NO: 61920 - DNA, 78 bp, Homo sapiens
aaagcaatcacattcttgtcaccactaggtgctctacttaagtgaactgagacactaattcttctgcaagtccacaaa

SEQ ID NO: 61921 - DNA, 77 bp, Homo sapiens
tcttgtcaccactaggtgctctacttaagtgaactgagacactaattcttctgcaagtccacaaaccagactcaatt

SEQ ID NO: 61922 - DNA, 76 bp, Homo sapiens
ctaggtgctctacttaagtgaactgagacactaattcttctgcaagtccacaaaccagactcaatttcgagttcaa

SEQ ID NO: 61923 - DNA, 75 bp, Homo sapiens
tacttaagtgaactgagacactaattcttctgcaagtccacaaaccagactcaatttcgagttcaaatgacttaa

SEQ ID NO: 61924 - DNA, 75 bp, Homo sapiens
aagtgaactgagacactaattcttctgcaagtccacaaaccagactcaatttcgagttcaaatgacttaatctag

SEQ ID NO: 61925 - DNA, 76 bp, Homo sapiens
agacactaattcttctgcaagtccacaaaccagactcaatttcgagttcaaatgacttaatctaggcaagatggta

SEQ ID NO: 61926 - DNA, 77 bp, Homo sapiens
tgcaagtccacaaaccagactcaatttcgagttcaaatgacttaatctaggcaagatggtagctcgataaatattaa

SEQ ID NO: 61927 - DNA, 75 bp, Homo sapiens
acaaaccagactcaatttcgagttcaaatgacttaatctaggcaagatggtagctcgataaatattaagcacatt

SEQ ID NO: 61928 - DNA, 77 bp, Homo sapiens
agttcaaatgacttaatctaggcaagatggtagctcgataaatattaagcacatttctgatttgcaagaagcttcct

SEQ ID NO: 61929 - DNA, 78 bp, Homo sapiens
aatgacttaatctaggcaagatggtagctcgataaatattaagcacatttctgatttgcaagaagcttccttcaactg

SEQ ID NO: 61930 - DNA, 79 bp, Homo sapiens
gcaagatggtagctcgataaatattaagcacatttctgatttgcaagaagcttccttcaactgtcatctgaaacttaat

SEQ ID NO: 61931 - DNA, 78 bp, Homo sapiens
atggtagctcgataaatattaagcacatttctgatttgcaagaagcttccttcaactgtcatctgaaacttaattgaa

SEQ ID NO: 61932 - DNA, 78 bp, Homo sapiens
agcacatttctgatttgcaagaagcttccttcaactgtcatctgaaacttaattgaagcaggaatttatattttcaga

SEQ ID NO: 61933 - DNA, 75 bp, Homo sapiens
ctgatttgcaagaagcttccttcaactgtcatctgaaacttaattgaagcaggaatttatattttcagaaaccac

SEQ ID NO: 61934 - DNA, 73 bp, Homo sapiens
gaagcttccttcaactgtcatctgaaacttaattgaagcaggaatttatattttcagaaaccactatactaaa

SEQ ID NO: 61935 - DNA, 73 bp, Homo sapiens
caactgtcatctgaaacttaattgaagcaggaatttatattttcagaaaccactatactaaattaattccatg

SEQ ID NO: 61936 - DNA, 71 bp, Homo sapiens
tctgaaacttaattgaagcaggaatttatattttcagaaaccactatactaaattaattccatggaacact

SEQ ID NO: 61937 - DNA, 72 bp, Homo sapiens
gaagcaggaatttatattttcagaaaccactatactaaattaattccatggaacacttactactctcagaat

SEQ ID NO: 61938 - DNA, 71 bp, Homo sapiens
ggaatttatattttcagaaaccactatactaaattaattccatggaacacttactactctcagaatttgtc

SEQ ID NO: 61939 - DNA, 73 bp, Homo sapiens
ttaattccatggaacacttactactctcagaatttgtcttattacatataaccaaaccgctgaaacattgttc

SEQ ID NO: 61940 - DNA, 73 bp, Homo sapiens
tggaacacttactactctcagaatttgtcttattacatataaccaaaccgctgaaacattgttcttagaagcc

SEQ ID NO: 61941 - DNA, 72 bp, Homo sapiens
cttactactctcagaatttgtcttattacatataaccaaaccgctgaaacattgttcttagaagcctagaat

SEQ ID NO: 61942 - DNA, 73 bp, Homo sapiens
cagaatttgtcttattacatataaccaaaccgctgaaacattgttcttagaagcctagaatttgaatacaaca

SEQ ID NO: 61943 - DNA, 72 bp, Homo sapiens
ttacatataaccaaaccgctgaaacattgttcttagaagcctagaatttgaatacaacaacacgaacaacaa

SEQ ID NO: 61944 - DNA, 70 bp, Homo sapiens
ataaccaaaccgctgaaacattgttcttagaagcctagaatttgaatacaacaacacgaacaacaacaaa

SEQ ID NO: 61945 - DNA, 66 bp, Homo sapiens
caacaaaaaatatagttttttttcccccagttcctaaatttctgacttcggacaaaatatgacaga

SEQ ID NO: 61946 - DNA, 67 bp, Homo sapiens
atatagttttttttcccccagttcctaaatttctgacttcggacaaaatatgacagaacacccacac

SEQ ID NO: 61947 - DNA, 68 bp, Homo sapiens
tttttcccccagttcctaaatttctgacttcggacaaaatatgacagaacacccacactcattttccc

SEQ ID NO: 61948 - DNA, 75 bp, Homo sapiens
tcctaaatttctgacttcggacaaaatatgacagaacacccacactcattttccctcgatcaattcatcctcgaa

SEQ ID NO: 61949 - DNA, 75 bp, Homo sapiens
aatttctgacttcggacaaaatatgacagaacacccacactcattttccctcgatcaattcatcctcgaagtcaa

SEQ ID NO: 61950 - DNA, 75 bp, Homo sapiens
acaaaatatgacagaacacccacactcattttccctcgatcaattcatcctcgaagtcaactggtattcaccaag

SEQ ID NO: 61951 - DNA, 78 bp, Homo sapiens
tatgacagaacacccacactcattttccctcgatcaattcatcctcgaagtcaactggtattcaccaagtgcctggta

SEQ ID NO: 61952 - DNA, 77 bp, Homo sapiens
acacccacactcattttccctcgatcaattcatcctcgaagtcaactggtattcaccaagtgcctggtatgagccaa

SEQ ID NO: 61953 - DNA, 77 bp, Homo sapiens
attttccctcgatcaattcatcctcgaagtcaactggtattcaccaagtgcctggtatgagccaagcccagttctga

SEQ ID NO: 61954 - DNA, 82 bp, Homo sapiens
atcaattcatcctcgaagtcaactggtattcaccaagtgcctggtatgagccaagcccagttctgaggctgcgtagatgcat

SEQ ID NO: 61955 - DNA, 80 bp, Homo sapiens
atcctcgaagtcaactggtattcaccaagtgcctggtatgagccaagcccagttctgaggctgcgtagatgcatttccca

SEQ ID NO: 61956 - DNA, 79 bp, Homo sapiens
aactggtattcaccaagtgcctggtatgagccaagcccagttctgaggctgcgtagatgcatttcccacttgtcacgga

SEQ ID NO: 61957 - DNA, 81 bp, Homo sapiens
tggtatgagccaagcccagttctgaggctgcgtagatgcatttcccacttgtcacggagctcacaccttatgtcaaccaat

SEQ ID NO: 61958 - DNA, 78 bp, Homo sapiens
aagcccagttctgaggctgcgtagatgcatttcccacttgtcacggagctcacaccttatgtcaaccaatttgacaaa

SEQ ID NO: 61959 - DNA, 78 bp, Homo sapiens
agttctgaggctgcgtagatgcatttcccacttgtcacggagctcacaccttatgtcaaccaatttgacaaacaaaca

SEQ ID NO: 61960 - DNA, 66 bp, Homo sapiens
aacaaacaaaaaatcaacgtcttttggaagtttctaattaattaggcccagcattgacaaaccaaa

SEQ ID NO: 61961 - DNA, 68 bp, Homo sapiens
aaaaatcaacgtcttttggaagtttctaattaattaggcccagcattgacaaaccaaagtgggtgaca

SEQ ID NO: 61962 - DNA, 69 bp, Homo sapiens
aacgtcttttggaagtttctaattaattaggcccagcattgacaaaccaaagtgggtgacagctgaagg

SEQ ID NO: 61963 - DNA, 68 bp, Homo sapiens
aagtttctaattaattaggcccagcattgacaaaccaaagtgggtgacagctgaaggggtggggaagg

SEQ ID NO: 61964 - DNA, 69 bp, Homo sapiens
aattaattaggcccagcattgacaaaccaaagtgggtgacagctgaaggggtggggaagggaacaggta

SEQ ID NO: 61965 - DNA, 70 bp, Homo sapiens
agcattgacaaaccaaagtgggtgacagctgaaggggtggggaagggaacaggtaaccatcttccttcca

SEQ ID NO: 61966 - DNA, 67 bp, Homo sapiens
aaaccaaagtgggtgacagctgaaggggtggggaagggaacaggtaaccatcttccttccacaccaa

SEQ ID NO: 61967 - DNA, 71 bp, Homo sapiens
agtgggtgacagctgaaggggtggggaagggaacaggtaaccatcttccttccacaccaaatgcccaggca

SEQ ID NO: 61968 - DNA, 69 bp, Homo sapiens
aaggggtggggaagggaacaggtaaccatcttccttccacaccaaatgcccaggcaccctggctccaga

SEQ ID NO: 61969 - DNA, 71 bp, Homo sapiens
gggaagggaacaggtaaccatcttccttccacaccaaatgcccaggcaccctggctccagagaagagggga

SEQ ID NO: 61970 - DNA, 71 bp, Homo sapiens
aacaggtaaccatcttccttccacaccaaatgcccaggcaccctggctccagagaagaggggacctaagta

SEQ ID NO: 61971 - DNA, 72 bp, Homo sapiens
atcttccttccacaccaaatgcccaggcaccctggctccagagaagaggggacctaagtaccaagaggccag

SEQ ID NO: 61972 - DNA, 75 bp, Homo sapiens
acaccaaatgcccaggcaccctggctccagagaagaggggacctaagtaccaagaggccagtgtgctctgtggac

SEQ ID NO: 61973 - DNA, 75 bp, Homo sapiens
caggcaccctggctccagagaagaggggacctaagtaccaagaggccagtgtgctctgtggacctcaaagttcac

SEQ ID NO: 61974 - DNA, 76 bp, Homo sapiens
tggctccagagaagaggggacctaagtaccaagaggccagtgtgctctgtggacctcaaagttcacctgacttgct

SEQ ID NO: 61975 - DNA, 74 bp, Homo sapiens
agaagaggggacctaagtaccaagaggccagtgtgctctgtggacctcaaagttcacctgacttgcttcagaaa

SEQ ID NO: 61976 - DNA, 73 bp, Homo sapiens
ggacctaagtaccaagaggccagtgtgctctgtggacctcaaagttcacctgacttgcttcagaaagtttatt

SEQ ID NO: 61977 - DNA, 74 bp, Homo sapiens
tgtgctctgtggacctcaaagttcacctgacttgcttcagaaagtttatttccaaaacttcccagatattttga

SEQ ID NO: 61978 - DNA, 70 bp, Homo sapiens
tggacctcaaagttcacctgacttgcttcagaaagtttatttccaaaacttcccagatattttgacaatt

SEQ ID NO: 61979 - DNA, 71 bp, Homo sapiens
ttcacctgacttgcttcagaaagtttatttccaaaacttcccagatattttgacaattttcctaagatagc

SEQ ID NO: 61980 - DNA, 70 bp, Homo sapiens
acttgcttcagaaagtttatttccaaaacttcccagatattttgacaattttcctaagatagccctgcca

SEQ ID NO: 61981 - DNA, 68 bp, Homo sapiens
aaagtttatttccaaaacttcccagatattttgacaattttcctaagatagccctgccagggtgagta

SEQ ID NO: 61982 - DNA, 76 bp, Homo sapiens
tatttccaaaacttcccagatattttgacaattttcctaagatagccctgccagggtgagtatgagtgtgtgatca

SEQ ID NO: 61983 - DNA, 77 bp, Homo sapiens
ttcccagatattttgacaattttcctaagatagccctgccagggtgagtatgagtgtgtgatcagatgggtaatact

SEQ ID NO: 61984 - DNA, 77 bp, Homo sapiens
attttgacaattttcctaagatagccctgccagggtgagtatgagtgtgtgatcagatgggtaatacttgcctggcc

SEQ ID NO: 61985 - DNA, 76 bp, Homo sapiens
attttcctaagatagccctgccagggtgagtatgagtgtgtgatcagatgggtaatacttgcctggcctggggccc

SEQ ID NO: 61986 - DNA, 76 bp, Homo sapiens
atagccctgccagggtgagtatgagtgtgtgatcagatgggtaatacttgcctggcctggggcccttttctaactg

SEQ ID NO: 61987 - DNA, 76 bp, Homo sapiens
gtgagtatgagtgtgtgatcagatgggtaatacttgcctggcctggggcccttttctaactggtcaatgttgttta

SEQ ID NO: 61988 - DNA, 76 bp, Homo sapiens
tatgagtgtgtgatcagatgggtaatacttgcctggcctggggcccttttctaactggtcaatgttgtttagtgtg

SEQ ID NO: 61989 - DNA, 74 bp, Homo sapiens
accacgcctggccataactggtcaatttcaaagggtaacccagtgtttggaagcgctctgacagatttcatcaa

SEQ ID NO: 61990 - DNA, 72 bp, Homo sapiens
gccataactggtcaatttcaaagggtaacccagtgtttggaagcgctctgacagatttcatcaaaaacgtgt

SEQ ID NO: 61991 - DNA, 70 bp, Homo sapiens
gtcaatttcaaagggtaacccagtgtttggaagcgctctgacagatttcatcaaaaacgtgtttgtacct

SEQ ID NO: 61992 - DNA, 69 bp, Homo sapiens
tttcaaagggtaacccagtgtttggaagcgctctgacagatttcatcaaaaacgtgtttgtaccttttc

SEQ ID NO: 61993 - DNA, 76 bp, Homo sapiens
cagtgtttggaagcgctctgacagatttcatcaaaaacgtgtttgtaccttttcttcttggccatcagataagaga

SEQ ID NO: 61994 - DNA, 76 bp, Homo sapiens
tttggaagcgctctgacagatttcatcaaaaacgtgtttgtaccttttcttcttggccatcagataagagagtgaa

SEQ ID NO: 61995 - DNA, 74 bp, Homo sapiens
acagatttcatcaaaaacgtgtttgtaccttttcttcttggccatcagataagagagtgaaggaaacagtctca

SEQ ID NO: 61996 - DNA, 73 bp, Homo sapiens
tttcatcaaaaacgtgtttgtaccttttcttcttggccatcagataagagagtgaaggaaacagtctcaacaa

SEQ ID NO: 61997 - DNA, 70 bp, Homo sapiens
aacgtgtttgtaccttttcttcttggccatcagataagagagtgaaggaaacagtctcaacaagttttta

SEQ ID NO: 61998 - DNA, 74 bp, Homo sapiens
tttcttcttggccatcagataagagagtgaaggaaacagtctcaacaagtttttaccttgattctcacaaggta

SEQ ID NO: 61999 - DNA, 73 bp, Homo sapiens
tcttggccatcagataagagagtgaaggaaacagtctcaacaagtttttaccttgattctcacaaggtaaaaa

SEQ ID NO: 62000 - DNA, 73 bp, Homo sapiens
atcagataagagagtgaaggaaacagtctcaacaagtttttaccttgattctcacaaggtaaaaaagatggca

SEQ ID NO: 62001 - DNA, 70 bp, Homo sapiens
ataagagagtgaaggaaacagtctcaacaagtttttaccttgattctcacaaggtaaaaaagatggcaag

SEQ ID NO: 62002 - DNA, 70 bp, Homo sapiens
agtgaaggaaacagtctcaacaagtttttaccttgattctcacaaggtaaaaaagatggcaagtcaaaga

SEQ ID NO: 62003 - DNA, 71 bp, Homo sapiens
aaacagtctcaacaagtttttaccttgattctcacaaggtaaaaaagatggcaagtcaaagatcatgaacg

SEQ ID NO: 62004 - DNA, 72 bp, Homo sapiens
ctcaacaagtttttaccttgattctcacaaggtaaaaaagatggcaagtcaaagatcatgaacggtatgtaa

SEQ ID NO: 62005 - DNA, 71 bp, Homo sapiens
caagtttttaccttgattctcacaaggtaaaaaagatggcaagtcaaagatcatgaacggtatgtaaggaa

SEQ ID NO: 62006 - DNA, 70 bp, Homo sapiens
agtttttaccttgattctcacaaggtaaaaaagatggcaagtcaaagatcatgaacggtatgtaaggaac

SEQ ID NO: 62007 - DNA, 72 bp, Homo sapiens
ttttaccttgattctcacaaggtaaaaaagatggcaagtcaaagatcatgaacggtatgtaaggaacgtcca

SEQ ID NO: 62008 - DNA, 76 bp, Homo sapiens
ttctcacaaggtaaaaaagatggcaagtcaaagatcatgaacggtatgtaaggaacgtccagctcatagggatcta

SEQ ID NO: 62009 - DNA, 76 bp, Homo sapiens
aaaaagatggcaagtcaaagatcatgaacggtatgtaaggaacgtccagctcatagggatctacacaattctcaaa

SEQ ID NO: 62010 - DNA, 76 bp, Homo sapiens
atggcaagtcaaagatcatgaacggtatgtaaggaacgtccagctcatagggatctacacaattctcaaaaatagg

SEQ ID NO: 62011 - DNA, 72 bp, Homo sapiens
aaagatcatgaacggtatgtaaggaacgtccagctcatagggatctacacaattctcaaaaataggggaaaa

SEQ ID NO: 62012 - DNA, 71 bp, Homo sapiens
acgtccagctcatagggatctacacaattctcaaaaataggggaaaaaattcccgtctttagcctatgata

SEQ ID NO: 62013 - DNA, 70 bp, Homo sapiens
cagctcatagggatctacacaattctcaaaaataggggaaaaaattcccgtctttagcctatgataaaaa

SEQ ID NO: 62014 - DNA, 66 bp, Homo sapiens
ggatctacacaattctcaaaaataggggaaaaaattcccgtctttagcctatgataaaaacaaaac

SEQ ID NO: 62015 - DNA, 68 bp, Homo sapiens
ttctcaaaaataggggaaaaaattcccgtctttagcctatgataaaaacaaaacccaggctacatgca

SEQ ID NO: 62016 - DNA, 66 bp, Homo sapiens
gggaaaaaattcccgtctttagcctatgataaaaacaaaacccaggctacatgcaggaggttaggg

SEQ ID NO: 62017 - DNA, 67 bp, Homo sapiens
aaaattcccgtctttagcctatgataaaaacaaaacccaggctacatgcaggaggttagggttcaaa

SEQ ID NO: 62018 - DNA, 73 bp, Homo sapiens
tctttagcctatgataaaaacaaaacccaggctacatgcaggaggttagggttcaaatctctggcaccagggc

SEQ ID NO: 62019 - DNA, 71 bp, Homo sapiens
ataaaaacaaaacccaggctacatgcaggaggttagggttcaaatctctggcaccagggccagccccagcc

SEQ ID NO: 62020 - DNA, 74 bp, Homo sapiens
aaaacccaggctacatgcaggaggttagggttcaaatctctggcaccagggccagccccagcctctccttatca

SEQ ID NO: 62021 - DNA, 74 bp, Homo sapiens
atgcaggaggttagggttcaaatctctggcaccagggccagccccagcctctccttatcagagaaagttaataa

SEQ ID NO: 62022 - DNA, 73 bp, Homo sapiens
ttagggttcaaatctctggcaccagggccagccccagcctctccttatcagagaaagttaataaccaggctaa

SEQ ID NO: 62023 - DNA, 75 bp, Homo sapiens
ttcaaatctctggcaccagggccagccccagcctctccttatcagagaaagttaataaccaggctaaagaggtca

SEQ ID NO: 62024 - DNA, 74 bp, Homo sapiens
accagggccagccccagcctctccttatcagagaaagttaataaccaggctaaagaggtcagctctctcacagg

SEQ ID NO: 62025 - DNA, 78 bp, Homo sapiens
gccccagcctctccttatcagagaaagttaataaccaggctaaagaggtcagctctctcacagggtatcactgctcat

SEQ ID NO: 62026 - DNA, 79 bp, Homo sapiens
agcctctccttatcagagaaagttaataaccaggctaaagaggtcagctctctcacagggtatcactgctcattgccca

SEQ ID NO: 62027 - DNA, 80 bp, Homo sapiens
tatcagagaaagttaataaccaggctaaagaggtcagctctctcacagggtatcactgctcattgcccaggcaaggctac

SEQ ID NO: 62028 - DNA, 77 bp, Homo sapiens
agttaataaccaggctaaagaggtcagctctctcacagggtatcactgctcattgcccaggcaaggctacctcctgg

SEQ ID NO: 62029 - DNA, 79 bp, Homo sapiens
taaagaggtcagctctctcacagggtatcactgctcattgcccaggcaaggctacctcctggtgccaaaccacctcctg

SEQ ID NO: 62030 - DNA, 80 bp, Homo sapiens
agctctctcacagggtatcactgctcattgcccaggcaaggctacctcctggtgccaaaccacctcctggcagaactcaa

SEQ ID NO: 62031 - DNA, 81 bp, Homo sapiens
acagggtatcactgctcattgcccaggcaaggctacctcctggtgccaaaccacctcctggcagaactcaagagccatgca

SEQ ID NO: 62032 - DNA, 77 bp, Homo sapiens
ctggtgccaaaccacctcctggcagaactcaagagccatgcactggtcctagcctgcagttatgaataaaaaccatt

SEQ ID NO: 62033 - DNA, 77 bp, Homo sapiens
aaaccacctcctggcagaactcaagagccatgcactggtcctagcctgcagttatgaataaaaaccatttgcttcta

SEQ ID NO: 62034 - DNA, 81 bp, Homo sapiens
cagaactcaagagccatgcactggtcctagcctgcagttatgaataaaaaccatttgcttctagagattctagatttctga

SEQ ID NO: 62035 - DNA, 78 bp, Homo sapiens
aagagccatgcactggtcctagcctgcagttatgaataaaaaccatttgcttctagagattctagatttctgaattcc

SEQ ID NO: 62036 - DNA, 76 bp, Homo sapiens
actggtcctagcctgcagttatgaataaaaaccatttgcttctagagattctagatttctgaattcctagtatata

SEQ ID NO: 62037 - DNA, 77 bp, Homo sapiens
cctagcctgcagttatgaataaaaaccatttgcttctagagattctagatttctgaattcctagtatatatctattc

SEQ ID NO: 62038 - DNA, 76 bp, Homo sapiens
tgaataaaaaccatttgcttctagagattctagatttctgaattcctagtatatatctattctccattaatcaaac

SEQ ID NO: 62039 - DNA, 79 bp, Homo sapiens
aaccatttgcttctagagattctagatttctgaattcctagtatatatctattctccattaatcaaactgagcactgtg

SEQ ID NO: 62040 - DNA, 78 bp, Homo sapiens
ttctagagattctagatttctgaattcctagtatatatctattctccattaatcaaactgagcactgtggtcccccac

SEQ ID NO: 62041 - DNA, 75 bp, Homo sapiens
attctagatttctgaattcctagtatatatctattctccattaatcaaactgagcactgtggtcccccaccctag

SEQ ID NO: 62042 - DNA, 74 bp, Homo sapiens
aattcctagtatatatctattctccattaatcaaactgagcactgtggtcccccaccctaggctaacatatact

SEQ ID NO: 62043 - DNA, 76 bp, Homo sapiens
tagtatatatctattctccattaatcaaactgagcactgtggtcccccaccctaggctaacatatacttcttagga

SEQ ID NO: 62044 - DNA, 74 bp, Homo sapiens
tctccattaatcaaactgagcactgtggtcccccaccctaggctaacatatacttcttaggaccaatgcccaaa

SEQ ID NO: 62045 - DNA, 73 bp, Homo sapiens
attaatcaaactgagcactgtggtcccccaccctaggctaacatatacttcttaggaccaatgcccaaaatga

SEQ ID NO: 62046 - DNA, 70 bp, Homo sapiens
agcactgtggtcccccaccctaggctaacatatacttcttaggaccaatgcccaaaatgaaatactaaaa

SEQ ID NO: 62047 - DNA, 71 bp, Homo sapiens
ccccaccctaggctaacatatacttcttaggaccaatgcccaaaatgaaatactaaaatcaagatgtctaa

SEQ ID NO: 62048 - DNA, 72 bp, Homo sapiens
cctaggctaacatatacttcttaggaccaatgcccaaaatgaaatactaaaatcaagatgtctaacgctaat

SEQ ID NO: 62049 - DNA, 72 bp, Homo sapiens
cttaggaccaatgcccaaaatgaaatactaaaatcaagatgtctaacgctaattaatgaaaatctacatttc

SEQ ID NO: 62050 - DNA, 71 bp, Homo sapiens
tgcccaaaatgaaatactaaaatcaagatgtctaacgctaattaatgaaaatctacatttctttaaacgtc

SEQ ID NO: 62051 - DNA, 69 bp, Homo sapiens
tactaaaatcaagatgtctaacgctaattaatgaaaatctacatttctttaaacgtcccaacaggtact

SEQ ID NO: 62052 - DNA, 69 bp, Homo sapiens
attaatgaaaatctacatttctttaaacgtcccaacaggtacttgataatagtttggtaggctgggtgc

SEQ ID NO: 62053 - DNA, 72 bp, Homo sapiens
aatctacatttctttaaacgtcccaacaggtacttgataatagtttggtaggctgggtgctcatgcctgtaa

SEQ ID NO: 62054 - DNA, 72 bp, Homo sapiens
tttttttgtaaagctggctttattttcaatggaggttcatcaggatttggtttaatgctgctagagaacctc

SEQ ID NO: 62055 - DNA, 75 bp, Homo sapiens
taaagctggctttattttcaatggaggttcatcaggatttggtttaatgctgctagagaacctctatataatctt

SEQ ID NO: 62056 - DNA, 73 bp, Homo sapiens
ggctttattttcaatggaggttcatcaggatttggtttaatgctgctagagaacctctatataatcttttaaa

SEQ ID NO: 62057 - DNA, 71 bp, Homo sapiens
tcaatggaggttcatcaggatttggtttaatgctgctagagaacctctatataatcttttaaaaagttttt

SEQ ID NO: 62058 - DNA, 70 bp, Homo sapiens
ttcatcaggatttggtttaatgctgctagagaacctctatataatcttttaaaaagttttttcattttta

SEQ ID NO: 62059 - DNA, 72 bp, Homo sapiens
atatatttatgggttacatgagttttttttacaggcatgcactgtgtaataatcacacccaggttaaatggg

SEQ ID NO: 62060 - DNA, 72 bp, Homo sapiens
tttatgggttacatgagttttttttacaggcatgcactgtgtaataatcacacccaggttaaatggggtgtc

SEQ ID NO: 62061 - DNA, 73 bp, Homo sapiens
acatgagttttttttacaggcatgcactgtgtaataatcacacccaggttaaatggggtgtccgtcacctcaa

SEQ ID NO: 62062 - DNA, 69 bp, Homo sapiens
ataaaattaaaaaagcagaacagagaataggcaactgttcagttaatagtaaaatttatatattaacaa

SEQ ID NO: 62063 - DNA, 68 bp, Homo sapiens
aaaagcagaacagagaataggcaactgttcagttaatagtaaaatttatatattaacaaattaaaacc

SEQ ID NO: 62064 - DNA, 69 bp, Homo sapiens
cagaacagagaataggcaactgttcagttaatagtaaaatttatatattaacaaattaaaacccataaa

SEQ ID NO: 62065 - DNA, 69 bp, Homo sapiens
gcaactgttcagttaatagtaaaatttatatattaacaaattaaaacccataaagtatttatattctgc

SEQ ID NO: 62066 - DNA, 70 bp, Homo sapiens
tcagttaatagtaaaatttatatattaacaaattaaaacccataaagtatttatattctgcctcattcaa

SEQ ID NO: 62067 - DNA, 70 bp, Homo sapiens
gtaaaatttatatattaacaaattaaaacccataaagtatttatattctgcctcattcaacaacagccca

SEQ ID NO: 62068 - DNA, 72 bp, Homo sapiens
tattaacaaattaaaacccataaagtatttatattctgcctcattcaacaacagcccatacatattagaagt

SEQ ID NO: 62069 - DNA, 71 bp, Homo sapiens
caaattaaaacccataaagtatttatattctgcctcattcaacaacagcccatacatattagaagtttctt

SEQ ID NO: 62070 - DNA, 73 bp, Homo sapiens
acccataaagtatttatattctgcctcattcaacaacagcccatacatattagaagtttcttttactctgttc

SEQ ID NO: 62071 - DNA, 75 bp, Homo sapiens
ttatattctgcctcattcaacaacagcccatacatattagaagtttcttttactctgttcttcctaacagaactc

SEQ ID NO: 62072 - DNA, 71 bp, Homo sapiens
cctcattcaacaacagcccatacatattagaagtttcttttactctgttcttcctaacagaactcctttaa

SEQ ID NO: 62073 - DNA, 71 bp, Homo sapiens
caacaacagcccatacatattagaagtttcttttactctgttcttcctaacagaactcctttaagcattta

SEQ ID NO: 62074 - DNA, 69 bp, Homo sapiens
ccatacatattagaagtttcttttactctgttcttcctaacagaactcctttaagcatttaattcaagt

SEQ ID NO: 62075 - DNA, 69 bp, Homo sapiens
tactctgttcttcctaacagaactcctttaagcatttaattcaagtttaatctcagaaaataggaaaag

SEQ ID NO: 62076 - DNA, 67 bp, Homo sapiens
cttcctaacagaactcctttaagcatttaattcaagtttaatctcagaaaataggaaaagttaacta

SEQ ID NO: 62077 - DNA, 67 bp, Homo sapiens
ctcctttaagcatttaattcaagtttaatctcagaaaataggaaaagttaactatagtaagtaccca

SEQ ID NO: 62078 - DNA, 66 bp, Homo sapiens
ttaagcatttaattcaagtttaatctcagaaaataggaaaagttaactatagtaagtacccaaaaa

SEQ ID NO: 62079 - DNA, 67 bp, Homo sapiens
tcagaaaataggaaaagttaactatagtaagtacccaaaaaaagaacaagagcttccataatgaaac

SEQ ID NO: 62080 - DNA, 65 bp, Homo sapiens
aataggaaaagttaactatagtaagtacccaaaaaaagaacaagagcttccataatgaaactaaa

SEQ ID NO: 62081 - DNA, 70 bp, Homo sapiens
actatagtaagtacccaaaaaaagaacaagagcttccataatgaaactaaattaaacaatgcctcacagc

SEQ ID NO: 62082 - DNA, 70 bp, Homo sapiens
agtaagtacccaaaaaaagaacaagagcttccataatgaaactaaattaaacaatgcctcacagctctcc

SEQ ID NO: 62083 - DNA, 71 bp, Homo sapiens
aaagaacaagagcttccataatgaaactaaattaaacaatgcctcacagctctcccaggtttcccattaaa

SEQ ID NO: 62084 - DNA, 73 bp, Homo sapiens
taatgaaactaaattaaacaatgcctcacagctctcccaggtttcccattaaaaagcattgtgaccaagcgta

SEQ ID NO: 62085 - DNA, 74 bp, Homo sapiens
aattaaacaatgcctcacagctctcccaggtttcccattaaaaagcattgtgaccaagcgtatcaatcaattaa

SEQ ID NO: 62086 - DNA, 72 bp, Homo sapiens
tctcccaggtttcccattaaaaagcattgtgaccaagcgtatcaatcaattaactgtttgagaacctacttc

SEQ ID NO: 62087 - DNA, 70 bp, Homo sapiens
aggtttcccattaaaaagcattgtgaccaagcgtatcaatcaattaactgtttgagaacctacttctgtt

SEQ ID NO: 62088 - DNA, 75 bp, Homo sapiens
tgaccaagcgtatcaatcaattaactgtttgagaacctacttctgttttctatcacttcactcagagagtaaaaa

SEQ ID NO: 62089 - DNA, 75 bp, Homo sapiens
agcgtatcaatcaattaactgtttgagaacctacttctgttttctatcacttcactcagagagtaaaaatatgta

SEQ ID NO: 62090 - DNA, 75 bp, Homo sapiens
ttaactgtttgagaacctacttctgttttctatcacttcactcagagagtaaaaatatgtaatgcatagtccctg

SEQ ID NO: 62091 - DNA, 77 bp, Homo sapiens
ctacttctgttttctatcacttcactcagagagtaaaaatatgtaatgcatagtccctgtgtatgataagaaaaata

SEQ ID NO: 62092 - DNA, 80 bp, Homo sapiens
ttctatcacttcactcagagagtaaaaatatgtaatgcatagtccctgtgtatgataagaaaaatattgaagccagatcc

SEQ ID NO: 62093 - DNA, 74 bp, Homo sapiens
agtaaaaatatgtaatgcatagtccctgtgtatgataagaaaaatattgaagccagatcctgaggtttccccaa

SEQ ID NO: 62094 - DNA, 72 bp, Homo sapiens
cctgtgtatgataagaaaaatattgaagccagatcctgaggtttccccaactccaaccactgcccccaagaa

SEQ ID NO: 62095 - DNA, 69 bp, Homo sapiens
ataagaaaaatattgaagccagatcctgaggtttccccaactccaaccactgcccccaagaaagaatgg

SEQ ID NO: 62096 - DNA, 67 bp, Homo sapiens
aaaaatattgaagccagatcctgaggtttccccaactccaaccactgcccccaagaaagaatggggg

SEQ ID NO: 62097 - DNA, 69 bp, Homo sapiens
agccagatcctgaggtttccccaactccaaccactgcccccaagaaagaatgggggtgaaactggatta

SEQ ID NO: 62098 - DNA, 76 bp, Homo sapiens
agaaagaatgggggtgaaactggattagccttaacatgactgcagtgtgagctctgatgaggaaattcctctttaa

SEQ ID NO: 62099 - DNA, 78 bp, Homo sapiens
gggtgaaactggattagccttaacatgactgcagtgtgagctctgatgaggaaattcctctttaagttcagctcaaaa

SEQ ID NO: 62100 - DNA, 77 bp, Homo sapiens
aactggattagccttaacatgactgcagtgtgagctctgatgaggaaattcctctttaagttcagctcaaaacccaa

SEQ ID NO: 62101 - DNA, 77 bp, Homo sapiens
cttaacatgactgcagtgtgagctctgatgaggaaattcctctttaagttcagctcaaaacccaagaacaatacaaa

SEQ ID NO: 62102 - DNA, 76 bp, Homo sapiens
actgcagtgtgagctctgatgaggaaattcctctttaagttcagctcaaaacccaagaacaatacaaagaggcacc

SEQ ID NO: 62103 - DNA, 76 bp, Homo sapiens
tctgatgaggaaattcctctttaagttcagctcaaaacccaagaacaatacaaagaggcacctgcagcaaatcctg

SEQ ID NO: 62104 - DNA, 73 bp, Homo sapiens
aggaaattcctctttaagttcagctcaaaacccaagaacaatacaaagaggcacctgcagcaaatcctggtgc

SEQ ID NO: 62105 - DNA, 78 bp, Homo sapiens
ttaagttcagctcaaaacccaagaacaatacaaagaggcacctgcagcaaatcctggtgctgagcctagcccatccat

SEQ ID NO: 62106 - DNA, 79 bp, Homo sapiens
ttcagctcaaaacccaagaacaatacaaagaggcacctgcagcaaatcctggtgctgagcctagcccatccattaaatc

SEQ ID NO: 62107 - DNA, 79 bp, Homo sapiens
aagaacaatacaaagaggcacctgcagcaaatcctggtgctgagcctagcccatccattaaatcctgtggctgcgggtc

SEQ ID NO: 62108 - DNA, 80 bp, Homo sapiens
ctagcccatccattaaatcctgtggctgcgggtctgaactgtctggcaagtaggtgagtgaccatgatcaacaaagagga

SEQ ID NO: 62109 - DNA, 79 bp, Homo sapiens
ctgcgggtctgaactgtctggcaagtaggtgagtgaccatgatcaacaaagaggagggaaaaggcagactgtgactgtc

SEQ ID NO: 62110 - DNA, 81 bp, Homo sapiens
tctgaactgtctggcaagtaggtgagtgaccatgatcaacaaagaggagggaaaaggcagactgtgactgtccatctactc

SEQ ID NO: 62111 - DNA, 83 bp, Homo sapiens
tctggcaagtaggtgagtgaccatgatcaacaaagaggagggaaaaggcagactgtgactgtccatctactccagcagacatg

SEQ ID NO: 62112 - DNA, 77 bp, Homo sapiens
atgatcaacaaagaggagggaaaaggcagactgtgactgtccatctactccagcagacatgggtaccacggaaagta

SEQ ID NO: 62113 - DNA, 74 bp, Homo sapiens
aagaggagggaaaaggcagactgtgactgtccatctactccagcagacatgggtaccacggaaagtacaaagta

SEQ ID NO: 62114 - DNA, 76 bp, Homo sapiens
aaaggcagactgtgactgtccatctactccagcagacatgggtaccacggaaagtacaaagtaccacacggctcta

SEQ ID NO: 62115 - DNA, 76 bp, Homo sapiens
actgtgactgtccatctactccagcagacatgggtaccacggaaagtacaaagtaccacacggctctagaggatta

SEQ ID NO: 62116 - DNA, 76 bp, Homo sapiens
atctactccagcagacatgggtaccacggaaagtacaaagtaccacacggctctagaggattatctgtcacataaa

SEQ ID NO: 62117 - DNA, 75 bp, Homo sapiens
agcagacatgggtaccacggaaagtacaaagtaccacacggctctagaggattatctgtcacataaatgtttgta

SEQ ID NO: 62118 - DNA, 74 bp, Homo sapiens
aagtacaaagtaccacacggctctagaggattatctgtcacataaatgtttgtaataatctatcctgaacctgt

SEQ ID NO: 62119 - DNA, 73 bp, Homo sapiens
aaagtaccacacggctctagaggattatctgtcacataaatgtttgtaataatctatcctgaacctgttttgg

SEQ ID NO: 62120 - DNA, 76 bp, Homo sapiens
gctctagaggattatctgtcacataaatgtttgtaataatctatcctgaacctgttttggtcacaaaactaggata

SEQ ID NO: 62121 - DNA, 71 bp, Homo sapiens
gtcacataaatgtttgtaataatctatcctgaacctgttttggtcacaaaactaggataaaacttctcacc

SEQ ID NO: 62122 - DNA, 74 bp, Homo sapiens
taatctatcctgaacctgttttggtcacaaaactaggataaaacttctcaccttcctggaacattctctgcatc

SEQ ID NO: 62123 - DNA, 73 bp, Homo sapiens
acctgttttggtcacaaaactaggataaaacttctcaccttcctggaacattctctgcatcccctgcaacata

SEQ ID NO: 62124 - DNA, 77 bp, Homo sapiens
ttggtcacaaaactaggataaaacttctcaccttcctggaacattctctgcatcccctgcaacataccagggatgca

SEQ ID NO: 62125 - DNA, 76 bp, Homo sapiens
aactaggataaaacttctcaccttcctggaacattctctgcatcccctgcaacataccagggatgcagcggaagga

SEQ ID NO: 62126 - DNA, 79 bp, Homo sapiens
cctgcaacataccagggatgcagcggaaggacccaaatgaatgaacacgccaaagcaccaccatgccacgcagccccta

SEQ ID NO: 62127 - DNA, 78 bp, Homo sapiens
taccagggatgcagcggaaggacccaaatgaatgaacacgccaaagcaccaccatgccacgcagcccctaggaataga

SEQ ID NO: 62128 - DNA, 78 bp, Homo sapiens
atgcagcggaaggacccaaatgaatgaacacgccaaagcaccaccatgccacgcagcccctaggaatagagccaggaa

SEQ ID NO: 62129 - DNA, 74 bp, Homo sapiens
aaggacccaaatgaatgaacacgccaaagcaccaccatgccacgcagcccctaggaatagagccaggaaggagg

SEQ ID NO: 62130 - DNA, 76 bp, Homo sapiens
aatgaatgaacacgccaaagcaccaccatgccacgcagcccctaggaatagagccaggaaggaggtggtcaaagaa

SEQ ID NO: 62131 - DNA, 75 bp, Homo sapiens
caaagcaccaccatgccacgcagcccctaggaatagagccaggaaggaggtggtcaaagaaccacgaacaagtga

SEQ ID NO: 62132 - DNA, 72 bp, Homo sapiens
accatgccacgcagcccctaggaatagagccaggaaggaggtggtcaaagaaccacgaacaagtgaccaaag

SEQ ID NO: 62133 - DNA, 72 bp, Homo sapiens
cagcccctaggaatagagccaggaaggaggtggtcaaagaaccacgaacaagtgaccaaagtcaaggcacaa

SEQ ID NO: 62134 - DNA, 71 bp, Homo sapiens
cctaggaatagagccaggaaggaggtggtcaaagaaccacgaacaagtgaccaaagtcaaggcacaaagag

SEQ ID NO: 62135 - DNA, 73 bp, Homo sapiens
aggaaggaggtggtcaaagaaccacgaacaagtgaccaaagtcaaggcacaaagagggtcagcaatggctgga

SEQ ID NO: 62136 - DNA, 72 bp, Homo sapiens
ggaggtggtcaaagaaccacgaacaagtgaccaaagtcaaggcacaaagagggtcagcaatggctggagggg

SEQ ID NO: 62137 - DNA, 76 bp, Homo sapiens
aacaagtgaccaaagtcaaggcacaaagagggtcagcaatggctggagggggcatcggaagaggcagcaggaacag

SEQ ID NO: 62138 - DNA, 76 bp, Homo sapiens
aaagtcaaggcacaaagagggtcagcaatggctggagggggcatcggaagaggcagcaggaacagtgccctttcta

SEQ ID NO: 62139 - DNA, 74 bp, Homo sapiens
aaagagggtcagcaatggctggagggggcatcggaagaggcagcaggaacagtgccctttctatcttcaaaact

SEQ ID NO: 62140 - DNA, 76 bp, Homo sapiens
tggagggggcatcggaagaggcagcaggaacagtgccctttctatcttcaaaacttccaaacaaggatctcagcta

SEQ ID NO: 62141 - DNA, 75 bp, Homo sapiens
atcggaagaggcagcaggaacagtgccctttctatcttcaaaacttccaaacaaggatctcagctaccagttgga

SEQ ID NO: 62142 - DNA, 74 bp, Homo sapiens
aacagtgccctttctatcttcaaaacttccaaacaaggatctcagctaccagttggagtggacaggagtggaca

SEQ ID NO: 62143 - DNA, 74 bp, Homo sapiens
tttctatcttcaaaacttccaaacaaggatctcagctaccagttggagtggacaggagtggacagctactttcc

SEQ ID NO: 62144 - DNA, 74 bp, Homo sapiens
aaaacttccaaacaaggatctcagctaccagttggagtggacaggagtggacagctactttcccatgctgaaaa

SEQ ID NO: 62145 - DNA, 77 bp, Homo sapiens
atctcagctaccagttggagtggacaggagtggacagctactttcccatgctgaaaagtcgggcagaacgagaacag

SEQ ID NO: 62146 - DNA, 74 bp, Homo sapiens
ttggagtggacaggagtggacagctactttcccatgctgaaaagtcgggcagaacgagaacaggccttcggagt

SEQ ID NO: 62147 - DNA, 72 bp, Homo sapiens
aggagtggacagctactttcccatgctgaaaagtcgggcagaacgagaacaggccttcggagttggttttca

SEQ ID NO: 62148 - DNA, 73 bp, Homo sapiens
tggacagctactttcccatgctgaaaagtcgggcagaacgagaacaggccttcggagttggttttcagaatgg

SEQ ID NO: 62149 - DNA, 70 bp, Homo sapiens
tttcccatgctgaaaagtcgggcagaacgagaacaggccttcggagttggttttcagaatggtgaaacgg

SEQ ID NO: 62150 - DNA, 71 bp, Homo sapiens
aaaagtcgggcagaacgagaacaggccttcggagttggttttcagaatggtgaaacgggtgtgtgtgatca

SEQ ID NO: 62151 - DNA, 77 bp, Homo sapiens
ttcggagttggttttcagaatggtgaaacgggtgtgtgtgatcacagcagatacacaagtccagtctggctataaaa

SEQ ID NO: 62152 - DNA, 81 bp, Homo sapiens
tttcagaatggtgaaacgggtgtgtgtgatcacagcagatacacaagtccagtctggctataaaatgggtcctctgtgcta

SEQ ID NO: 62153 - DNA, 81 bp, Homo sapiens
tggtgaaacgggtgtgtgtgatcacagcagatacacaagtccagtctggctataaaatgggtcctctgtgctacatctttg

SEQ ID NO: 62154 - DNA, 80 bp, Homo sapiens
tgtgtgatcacagcagatacacaagtccagtctggctataaaatgggtcctctgtgctacatctttgggccaggaaaacc

SEQ ID NO: 62155 - DNA, 73 bp, Homo sapiens
atacacaagtccagtctggctataaaatgggtcctctgtgctacatctttgggccaggaaaaccctgactttg

SEQ ID NO: 62156 - DNA, 71 bp, Homo sapiens
agtctggctataaaatgggtcctctgtgctacatctttgggccaggaaaaccctgactttggtacaaggcc

SEQ ID NO: 62157 - DNA, 73 bp, Homo sapiens
tataaaatgggtcctctgtgctacatctttgggccaggaaaaccctgactttggtacaaggccccactcatgc

SEQ ID NO: 62158 - DNA, 71 bp, Homo sapiens
aggaaaaccctgactttggtacaaggccccactcatgcccttacccagagctttccacttgcacacagaat

SEQ ID NO: 62159 - DNA, 73 bp, Homo sapiens
aaccctgactttggtacaaggccccactcatgcccttacccagagctttccacttgcacacagaattactgac

SEQ ID NO: 62160 - DNA, 78 bp, Homo sapiens
ttggtacaaggccccactcatgcccttacccagagctttccacttgcacacagaattactgacccatcagcctccatg

SEQ ID NO: 62161 - DNA, 81 bp, Homo sapiens
actcatgcccttacccagagctttccacttgcacacagaattactgacccatcagcctccatggtcacttctggctgccaa

SEQ ID NO: 62162 - DNA, 80 bp, Homo sapiens
ccttacccagagctttccacttgcacacagaattactgacccatcagcctccatggtcacttctggctgccaacagcctc

SEQ ID NO: 62163 - DNA, 81 bp, Homo sapiens
agagctttccacttgcacacagaattactgacccatcagcctccatggtcacttctggctgccaacagcctcctctgttta

SEQ ID NO: 62164 - DNA, 79 bp, Homo sapiens
attactgacccatcagcctccatggtcacttctggctgccaacagcctcctctgtttacctcagtgtgtgggacaaata

SEQ ID NO: 62165 - DNA, 79 bp, Homo sapiens
atcagcctccatggtcacttctggctgccaacagcctcctctgtttacctcagtgtgtgggacaaatactatcattttc

SEQ ID NO: 62166 - DNA, 78 bp, Homo sapiens
acagcctcctctgtttacctcagtgtgtgggacaaatactatcattttctacttgtaatgatatgacagctatcaaaa

SEQ ID NO: 62167 - DNA, 78 bp, Homo sapiens
ctctgtttacctcagtgtgtgggacaaatactatcattttctacttgtaatgatatgacagctatcaaaacattagta

SEQ ID NO: 62168 - DNA, 77 bp, Homo sapiens
cctcagtgtgtgggacaaatactatcattttctacttgtaatgatatgacagctatcaaaacattagtaagaaaaca

SEQ ID NO: 62169 - DNA, 77 bp, Homo sapiens
actatcattttctacttgtaatgatatgacagctatcaaaacattagtaagaaaacaagctccaggctcagaaagac

SEQ ID NO: 62170 - DNA, 77 bp, Homo sapiens
tttctacttgtaatgatatgacagctatcaaaacattagtaagaaaacaagctccaggctcagaaagaccagaaaga

SEQ ID NO: 62171 - DNA, 80 bp, Homo sapiens
taatgatatgacagctatcaaaacattagtaagaaaacaagctccaggctcagaaagaccagaaagattctctccactca

SEQ ID NO: 62172 - DNA, 75 bp, Homo sapiens
tatcaaaacattagtaagaaaacaagctccaggctcagaaagaccagaaagattctctccactcactaaccagga

SEQ ID NO: 62173 - DNA, 75 bp, Homo sapiens
aagaaaacaagctccaggctcagaaagaccagaaagattctctccactcactaaccaggagaatctctctactac

SEQ ID NO: 62174 - DNA, 76 bp, Homo sapiens
tccaggctcagaaagaccagaaagattctctccactcactaaccaggagaatctctctactactcacctaactccc

SEQ ID NO: 62175 - DNA, 72 bp, Homo sapiens
aaagaccagaaagattctctccactcactaaccaggagaatctctctactactcacctaactcccccttctc

SEQ ID NO: 62176 - DNA, 76 bp, Homo sapiens
aagattctctccactcactaaccaggagaatctctctactactcacctaactcccccttctctcaagtgagatcta

SEQ ID NO: 62177 - DNA, 70 bp, Homo sapiens
aatctctctactactcacctaactcccccttctctcaagtgagatctagtctcgtaaaaaagttagtaaa

SEQ ID NO: 62178 - DNA, 69 bp, Homo sapiens
actactcacctaactcccccttctctcaagtgagatctagtctcgtaaaaaagttagtaaatggaaatc

SEQ ID NO: 62179 - DNA, 67 bp, Homo sapiens
ctcccccttctctcaagtgagatctagtctcgtaaaaaagttagtaaatggaaatccaaaaactaat

SEQ ID NO: 62180 - DNA, 65 bp, Homo sapiens
gagatctagtctcgtaaaaaagttagtaaatggaaatccaaaaactaattaagggtttaaggaga

SEQ ID NO: 62181 - DNA, 63 bp, Homo sapiens
tctcgtaaaaaagttagtaaatggaaatccaaaaactaattaagggtttaaggagagagaaaa

SEQ ID NO: 62182 - DNA, 65 bp, Homo sapiens
gttagtaaatggaaatccaaaaactaattaagggtttaaggagagagaaaagtcaagtcaagtcc

SEQ ID NO: 62183 - DNA, 70 bp, Homo sapiens
ggaaatccaaaaactaattaagggtttaaggagagagaaaagtcaagtcaagtccttcaatatcatcaga

SEQ ID NO: 62184 - DNA, 71 bp, Homo sapiens
agggtttaaggagagagaaaagtcaagtcaagtccttcaatatcatcagaaaaactcctgatattgaaaag

SEQ ID NO: 62185 - DNA, 70 bp, Homo sapiens
aagtcaagtcaagtccttcaatatcatcagaaaaactcctgatattgaaaaggggtttagactgaaaggt

SEQ ID NO: 62186 - DNA, 71 bp, Homo sapiens
caagtccttcaatatcatcagaaaaactcctgatattgaaaaggggtttagactgaaaggttatagaagaa

SEQ ID NO: 62187 - DNA, 71 bp, Homo sapiens
catcagaaaaactcctgatattgaaaaggggtttagactgaaaggttatagaagaaatcatcaaaatagaa

SEQ ID NO: 62188 - DNA, 68 bp, Homo sapiens
ttgaaaaggggtttagactgaaaggttatagaagaaatcatcaaaatagaagtatttccccagaacag

SEQ ID NO: 62189 - DNA, 69 bp, Homo sapiens
gggtttagactgaaaggttatagaagaaatcatcaaaatagaagtatttccccagaacaggtttctaca

SEQ ID NO: 62190 - DNA, 72 bp, Homo sapiens
gaaaggttatagaagaaatcatcaaaatagaagtatttccccagaacaggtttctacaatagtagcaagcca

SEQ ID NO: 62191 - DNA, 75 bp, Homo sapiens
tatagaagaaatcatcaaaatagaagtatttccccagaacaggtttctacaatagtagcaagccaagcatccatt

SEQ ID NO: 62192 - DNA, 73 bp, Homo sapiens
aagtatttccccagaacaggtttctacaatagtagcaagccaagcatccattttctggctcttctgtcgaaaa

SEQ ID NO: 62193 - DNA, 75 bp, Homo sapiens
cccagaacaggtttctacaatagtagcaagccaagcatccattttctggctcttctgtcgaaaaggtcagagaaa

SEQ ID NO: 62194 - DNA, 76 bp, Homo sapiens
aatagtagcaagccaagcatccattttctggctcttctgtcgaaaaggtcagagaaacacgttctttgcaggccaa

SEQ ID NO: 62195 - DNA, 73 bp, Homo sapiens
aagcatccattttctggctcttctgtcgaaaaggtcagagaaacacgttctttgcaggccaaactccactggg

SEQ ID NO: 62196 - DNA, 70 bp, Homo sapiens
attttctggctcttctgtcgaaaaggtcagagaaacacgttctttgcaggccaaactccactggggggag

SEQ ID NO: 62197 - DNA, 72 bp, Homo sapiens
aaaaggtcagagaaacacgttctttgcaggccaaactccactggggggaggcaatgggccaggcagtccatg

SEQ ID NO: 62198 - DNA, 72 bp, Homo sapiens
agagaaacacgttctttgcaggccaaactccactggggggaggcaatgggccaggcagtccatgggggcagg

SEQ ID NO: 62199 - DNA, 73 bp, Homo sapiens
ttctttgcaggccaaactccactggggggaggcaatgggccaggcagtccatgggggcaggggagggagcatt

SEQ ID NO: 62200 - DNA, 71 bp, Homo sapiens
aaactccactggggggaggcaatgggccaggcagtccatgggggcaggggagggagcatttgggtgggcac

SEQ ID NO: 62201 - DNA, 73 bp, Homo sapiens
tggggggaggcaatgggccaggcagtccatgggggcaggggagggagcatttgggtgggcaccagttcacaat

SEQ ID NO: 62202 - DNA, 74 bp, Homo sapiens
aatgggccaggcagtccatgggggcaggggagggagcatttgggtgggcaccagttcacaattttgtgtgatgt

SEQ ID NO: 62203 - DNA, 76 bp, Homo sapiens
aggcagtccatgggggcaggggagggagcatttgggtgggcaccagttcacaattttgtgtgatgttcatttctga

SEQ ID NO: 62204 - DNA, 75 bp, Homo sapiens
ggggcaggggagggagcatttgggtgggcaccagttcacaattttgtgtgatgttcatttctgagggtcactcta

SEQ ID NO: 62205 - DNA, 76 bp, Homo sapiens
agggagcatttgggtgggcaccagttcacaattttgtgtgatgttcatttctgagggtcactctaagatctcctaa

SEQ ID NO: 62206 - DNA, 75 bp, Homo sapiens
tttgggtgggcaccagttcacaattttgtgtgatgttcatttctgagggtcactctaagatctcctaaagattaa

SEQ ID NO: 62207 - DNA, 75 bp, Homo sapiens
accagttcacaattttgtgtgatgttcatttctgagggtcactctaagatctcctaaagattaagaatacctgtc

SEQ ID NO: 62208 - DNA, 74 bp, Homo sapiens
attttgtgtgatgttcatttctgagggtcactctaagatctcctaaagattaagaatacctgtccttggaggaa

SEQ ID NO: 62209 - DNA, 70 bp, Homo sapiens
atttctgagggtcactctaagatctcctaaagattaagaatacctgtccttggaggaaggaaacttcctc

SEQ ID NO: 62210 - DNA, 70 bp, Homo sapiens
actctaagatctcctaaagattaagaatacctgtccttggaggaaggaaacttcctccatgcccctcatt

SEQ ID NO: 62211 - DNA, 70 bp, Homo sapiens
agatctcctaaagattaagaatacctgtccttggaggaaggaaacttcctccatgcccctcattttcagg

SEQ ID NO: 62212 - DNA, 69 bp, Homo sapiens
aagattaagaatacctgtccttggaggaaggaaacttcctccatgcccctcattttcagggaagggcaa

SEQ ID NO: 62213 - DNA, 71 bp, Homo sapiens
atacctgtccttggaggaaggaaacttcctccatgcccctcattttcagggaagggcaagctggttcctca

SEQ ID NO: 62214 - DNA, 73 bp, Homo sapiens
aggaaggaaacttcctccatgcccctcattttcagggaagggcaagctggttcctcatctcacacaaccctga

SEQ ID NO: 62215 - DNA, 76 bp, Homo sapiens
cccctcattttcagggaagggcaagctggttcctcatctcacacaaccctgagccatgtatgggagcctttgcaaa

SEQ ID NO: 62216 - DNA, 77 bp, Homo sapiens
attttcagggaagggcaagctggttcctcatctcacacaaccctgagccatgtatgggagcctttgcaaatagtcca

SEQ ID NO: 62217 - DNA, 79 bp, Homo sapiens
aagggcaagctggttcctcatctcacacaaccctgagccatgtatgggagcctttgcaaatagtccacttccagagaca

SEQ ID NO: 62218 - DNA, 82 bp, Homo sapiens
tcctcatctcacacaaccctgagccatgtatgggagcctttgcaaatagtccacttccagagacatcaaccactcataagaa

SEQ ID NO: 62219 - DNA, 80 bp, Homo sapiens
atctcacacaaccctgagccatgtatgggagcctttgcaaatagtccacttccagagacatcaaccactcataagaacaa

SEQ ID NO: 62220 - DNA, 72 bp, Homo sapiens
cctttgcaaatagtccacttccagagacatcaaccactcataagaacaaccactccgacaaacaaactcccc

SEQ ID NO: 62221 - DNA, 72 bp, Homo sapiens
atagtccacttccagagacatcaaccactcataagaacaaccactccgacaaacaaactcccccagttttca

SEQ ID NO: 62222 - DNA, 71 bp, Homo sapiens
agacatcaaccactcataagaacaaccactccgacaaacaaactcccccagttttcatctccaaacgtcat

SEQ ID NO: 62223 - DNA, 69 bp, Homo sapiens
accactcataagaacaaccactccgacaaacaaactcccccagttttcatctccaaacgtcattttgaa

SEQ ID NO: 62224 - DNA, 70 bp, Homo sapiens
ataagaacaaccactccgacaaacaaactcccccagttttcatctccaaacgtcattttgaagtgcacac

SEQ ID NO: 62225 - DNA, 70 bp, Homo sapiens
actccgacaaacaaactcccccagttttcatctccaaacgtcattttgaagtgcacactcacaagaaggg

SEQ ID NO: 62226 - DNA, 71 bp, Homo sapiens
acaaactcccccagttttcatctccaaacgtcattttgaagtgcacactcacaagaaggggttgaccataa

SEQ ID NO: 62227 - DNA, 76 bp, Homo sapiens
agttttcatctccaaacgtcattttgaagtgcacactcacaagaaggggttgaccataaccacttatgagtatgca

SEQ ID NO: 62228 - DNA, 77 bp, Homo sapiens
ttttgaagtgcacactcacaagaaggggttgaccataaccacttatgagtatgcacctgagggggccaccatgtgac

SEQ ID NO: 62229 - DNA, 77 bp, Homo sapiens
aagtgcacactcacaagaaggggttgaccataaccacttatgagtatgcacctgagggggccaccatgtgaccaatg

SEQ ID NO: 62230 - DNA, 72 bp, Homo sapiens
acaagaaggggttgaccataaccacttatgagtatgcacctgagggggccaccatgtgaccaatggggggcc

SEQ ID NO: 62231 - DNA, 72 bp, Homo sapiens
acttatgagtatgcacctgagggggccaccatgtgaccaatggggggccggggaggaggacggccagaaatg

SEQ ID NO: 62232 - DNA, 73 bp, Homo sapiens
gggggccaccatgtgaccaatggggggccggggaggaggacggccagaaatggcactgcgacgcagaacttga

SEQ ID NO: 62233 - DNA, 73 bp, Homo sapiens
atgtgaccaatggggggccggggaggaggacggccagaaatggcactgcgacgcagaacttgacctagagtcg

SEQ ID NO: 62234 - DNA, 72 bp, Homo sapiens
accaatggggggccggggaggaggacggccagaaatggcactgcgacgcagaacttgacctagagtcggcca

SEQ ID NO: 62235 - DNA, 80 bp, Homo sapiens
gggaggaggacggccagaaatggcactgcgacgcagaacttgacctagagtcggccaggccatcagaaactctcagtgca

SEQ ID NO: 62236 - DNA, 79 bp, Homo sapiens
aggacggccagaaatggcactgcgacgcagaacttgacctagagtcggccaggccatcagaaactctcagtgcaacaag

SEQ ID NO: 62237 - DNA, 80 bp, Homo sapiens
aaatggcactgcgacgcagaacttgacctagagtcggccaggccatcagaaactctcagtgcaacaagtgccgagtttga

SEQ ID NO: 62238 - DNA, 76 bp, Homo sapiens
acgcagaacttgacctagagtcggccaggccatcagaaactctcagtgcaacaagtgccgagtttgatgtttaggt

SEQ ID NO: 62239 - DNA, 74 bp, Homo sapiens
aacttgacctagagtcggccaggccatcagaaactctcagtgcaacaagtgccgagtttgatgtttaggttttc

SEQ ID NO: 62240 - DNA, 73 bp, Homo sapiens
tagagtcggccaggccatcagaaactctcagtgcaacaagtgccgagtttgatgtttaggttttcttttcttt

SEQ ID NO: 62241 - DNA, 75 bp, Homo sapiens
gcacctggccttaaggtggttccgaggagcccactaagtccatttttgcagcagctgactacttcagcagttttc

SEQ ID NO: 62242 - DNA, 74 bp, Homo sapiens
ccttaaggtggttccgaggagcccactaagtccatttttgcagcagctgactacttcagcagttttcctcacac

SEQ ID NO: 62243 - DNA, 77 bp, Homo sapiens
gtggttccgaggagcccactaagtccatttttgcagcagctgactacttcagcagttttcctcacacctcaagacac

SEQ ID NO: 62244 - DNA, 79 bp, Homo sapiens
aggagcccactaagtccatttttgcagcagctgactacttcagcagttttcctcacacctcaagacacgcctcaagcca

SEQ ID NO: 62245 - DNA, 80 bp, Homo sapiens
ccactaagtccatttttgcagcagctgactacttcagcagttttcctcacacctcaagacacgcctcaagccacaataca

SEQ ID NO: 62246 - DNA, 80 bp, Homo sapiens
actaagtccatttttgcagcagctgactacttcagcagttttcctcacacctcaagacacgcctcaagccacaatacaca

SEQ ID NO: 62247 - DNA, 82 bp, Homo sapiens
aagtccatttttgcagcagctgactacttcagcagttttcctcacacctcaagacacgcctcaagccacaatacacagcaga

SEQ ID NO: 62248 - DNA, 83 bp, Homo sapiens
atttttgcagcagctgactacttcagcagttttcctcacacctcaagacacgcctcaagccacaatacacagcagaccactca

SEQ ID NO: 62249 - DNA, 79 bp, Homo sapiens
tacttcagcagttttcctcacacctcaagacacgcctcaagccacaatacacagcagaccactcagaggaagtgggctt

SEQ ID NO: 62250 - DNA, 75 bp, Homo sapiens
ttttcctcacacctcaagacacgcctcaagccacaatacacagcagaccactcagaggaagtgggctttgggggg

SEQ ID NO: 62251 - DNA, 79 bp, Homo sapiens
aagacacgcctcaagccacaatacacagcagaccactcagaggaagtgggctttggggggtgtcactgatgctggtcaa

SEQ ID NO: 62252 - DNA, 79 bp, Homo sapiens
tcaagccacaatacacagcagaccactcagaggaagtgggctttggggggtgtcactgatgctggtcaaaaacacacaa

SEQ ID NO: 62253 - DNA, 76 bp, Homo sapiens
ccacaatacacagcagaccactcagaggaagtgggctttggggggtgtcactgatgctggtcaaaaacacacaaaa

SEQ ID NO: 62254 - DNA, 71 bp, Homo sapiens
agaccactcagaggaagtgggctttggggggtgtcactgatgctggtcaaaaacacacaaaaaggaaccaa

SEQ ID NO: 62255 - DNA, 72 bp, Homo sapiens
ggctttggggggtgtcactgatgctggtcaaaaacacacaaaaaggaaccaaaatatgatgttcagtaataa

SEQ ID NO: 62256 - DNA, 76 bp, Homo sapiens
gtgtcactgatgctggtcaaaaacacacaaaaaggaaccaaaatatgatgttcagtaataagctttgcaaagacaa

SEQ ID NO: 62257 - DNA, 74 bp, Homo sapiens
atgctggtcaaaaacacacaaaaaggaaccaaaatatgatgttcagtaataagctttgcaaagacaagtggaga

SEQ ID NO: 62258 - DNA, 72 bp, Homo sapiens
aacacacaaaaaggaaccaaaatatgatgttcagtaataagctttgcaaagacaagtggagaaataagacta

SEQ ID NO: 62259 - DNA, 71 bp, Homo sapiens
aaggaaccaaaatatgatgttcagtaataagctttgcaaagacaagtggagaaataagactagctaaaacc

SEQ ID NO: 62260 - DNA, 72 bp, Homo sapiens
ccaaaatatgatgttcagtaataagctttgcaaagacaagtggagaaataagactagctaaaacctaccact

SEQ ID NO: 62261 - DNA, 72 bp, Homo sapiens
atgttcagtaataagctttgcaaagacaagtggagaaataagactagctaaaacctaccactttataggtga

SEQ ID NO: 62262 - DNA, 65 bp, Homo sapiens
aaagacaagtggagaaataagactagctaaaacctaccactttataggtgaggaaggggcccccc

SEQ ID NO: 62263 - DNA, 64 bp, Homo sapiens
agaaataagactagctaaaacctaccactttataggtgaggaaggggccccccggaaagggcag

SEQ ID NO: 62264 - DNA, 65 bp, Homo sapiens
tagctaaaacctaccactttataggtgaggaaggggccccccggaaagggcagggacacactaaa

SEQ ID NO: 62265 - DNA, 65 bp, Homo sapiens
aaaacctaccactttataggtgaggaaggggccccccggaaagggcagggacacactaaatcagc

SEQ ID NO: 62266 - DNA, 73 bp, Homo sapiens
ttataggtgaggaaggggccccccggaaagggcagggacacactaaatcagcctgagaactcagcagacgctc

SEQ ID NO: 62267 - DNA, 72 bp, Homo sapiens
aggaaggggccccccggaaagggcagggacacactaaatcagcctgagaactcagcagacgctccccacagc

SEQ ID NO: 62268 - DNA, 76 bp, Homo sapiens
ccggaaagggcagggacacactaaatcagcctgagaactcagcagacgctccccacagcccccactagaggcttca

SEQ ID NO: 62269 - DNA, 75 bp, Homo sapiens
aagggcagggacacactaaatcagcctgagaactcagcagacgctccccacagcccccactagaggcttcaccct

SEQ ID NO: 62270 - DNA, 78 bp, Homo sapiens
actaaatcagcctgagaactcagcagacgctccccacagcccccactagaggcttcacccttgcacgggggctcatca

SEQ ID NO: 62271 - DNA, 72 bp, Homo sapiens
ccccacagcccccactagaggcttcacccttgcacgggggctcatcacctccccgcttaacgcaactctgtc

SEQ ID NO: 62272 - DNA, 72 bp, Homo sapiens
cccactagaggcttcacccttgcacgggggctcatcacctccccgcttaacgcaactctgtctccttcaagt

SEQ ID NO: 62273 - DNA, 73 bp, Homo sapiens
tagaggcttcacccttgcacgggggctcatcacctccccgcttaacgcaactctgtctccttcaagttcaccg

SEQ ID NO: 62274 - DNA, 74 bp, Homo sapiens
cttgcacgggggctcatcacctccccgcttaacgcaactctgtctccttcaagttcaccggcctcacgccagta

SEQ ID NO: 62275 - DNA, 75 bp, Homo sapiens
ctcatcacctccccgcttaacgcaactctgtctccttcaagttcaccggcctcacgccagtagccgggacagaga

SEQ ID NO: 62276 - DNA, 76 bp, Homo sapiens
tctccttcaagttcaccggcctcacgccagtagccgggacagagacaggatctgtctatgaaaacagggtggcaaa

SEQ ID NO: 62277 - DNA, 76 bp, Homo sapiens
ttcaagttcaccggcctcacgccagtagccgggacagagacaggatctgtctatgaaaacagggtggcaaagtgcg

SEQ ID NO: 62278 - DNA, 76 bp, Homo sapiens
cctcacgccagtagccgggacagagacaggatctgtctatgaaaacagggtggcaaagtgcggcctgtgggccaaa

SEQ ID NO: 62279 - DNA, 76 bp, Homo sapiens
agtagccgggacagagacaggatctgtctatgaaaacagggtggcaaagtgcggcctgtgggccaaaggcagccca

SEQ ID NO: 62280 - DNA, 78 bp, Homo sapiens
agagacaggatctgtctatgaaaacagggtggcaaagtgcggcctgtgggccaaaggcagcccaatgcctctttctga

SEQ ID NO: 62281 - DNA, 75 bp, Homo sapiens
aggatctgtctatgaaaacagggtggcaaagtgcggcctgtgggccaaaggcagcccaatgcctctttctgaaaa

SEQ ID NO: 62282 - DNA, 69 bp, Homo sapiens
aaaacagggtggcaaagtgcggcctgtgggccaaaggcagcccaatgcctctttctgaaaaaaccaaat

SEQ ID NO: 62283 - DNA, 70 bp, Homo sapiens
gtggcaaagtgcggcctgtgggccaaaggcagcccaatgcctctttctgaaaaaaccaaatttttcttat

SEQ ID NO: 62284 - DNA, 70 bp, Homo sapiens
agtgcggcctgtgggccaaaggcagcccaatgcctctttctgaaaaaaccaaatttttcttattggaaca

SEQ ID NO: 62285 - DNA, 73 bp, Homo sapiens
ctttctgaaaaaaccaaatttttcttattggaacacagccacaaatacaatttcatccatagaggcaacatgc

SEQ ID NO: 62286 - DNA, 73 bp, Homo sapiens
aaaaaccaaatttttcttattggaacacagccacaaatacaatttcatccatagaggcaacatgccattgcgg

SEQ ID NO: 62287 - DNA, 77 bp, Homo sapiens
aaatttttcttattggaacacagccacaaatacaatttcatccatagaggcaacatgccattgcggtcaactatgtg

SEQ ID NO: 62288 - DNA, 83 bp, Homo sapiens
gaacacagccacaaatacaatttcatccatagaggcaacatgccattgcggtcaactatgtgggctctggggatatctgaatg

SEQ ID NO: 62289 - DNA, 77 bp, Homo sapiens
atgccattgcggtcaactatgtgggctctggggatatctgaatggcgactccaccacttgctagggatttacttaaa

SEQ ID NO: 62290 - DNA, 75 bp, Homo sapiens
ttgcggtcaactatgtgggctctggggatatctgaatggcgactccaccacttgctagggatttacttaaacctc

SEQ ID NO: 62291 - DNA, 74 bp, Homo sapiens
tgggctctggggatatctgaatggcgactccaccacttgctagggatttacttaaacctctctgcaccttggtt

SEQ ID NO: 62292 - DNA, 76 bp, Homo sapiens
ggatatctgaatggcgactccaccacttgctagggatttacttaaacctctctgcaccttggttttatcatctgta

SEQ ID NO: 62293 - DNA, 74 bp, Homo sapiens
tctgaatggcgactccaccacttgctagggatttacttaaacctctctgcaccttggttttatcatctgtaaaa

SEQ ID NO: 62294 - DNA, 77 bp, Homo sapiens
tctgtaaaatggagatcacagcacctcctctaagggttgcgtgagaactaaacaagttcctatatgcgaagcactaa

SEQ ID NO: 62295 - DNA, 77 bp, Homo sapiens
aaaatggagatcacagcacctcctctaagggttgcgtgagaactaaacaagttcctatatgcgaagcactaagatga

SEQ ID NO: 62296 - DNA, 81 bp, Homo sapiens
gcacctcctctaagggttgcgtgagaactaaacaagttcctatatgcgaagcactaagatgagcagctgcgacagtgagta

SEQ ID NO: 62297 - DNA, 80 bp, Homo sapiens
tcctctaagggttgcgtgagaactaaacaagttcctatatgcgaagcactaagatgagcagctgcgacagtgagtactag

SEQ ID NO: 62298 - DNA, 80 bp, Homo sapiens
gttgcgtgagaactaaacaagttcctatatgcgaagcactaagatgagcagctgcgacagtgagtactaggggtgaggag

SEQ ID NO: 62299 - DNA, 86 bp, Homo sapiens
tatatgcgaagcactaagatgagcagctgcgacagtgagtactaggggtgaggaggtgagagacagctttgggagcaatcattcta

SEQ ID NO: 62300 - DNA, 83 bp, Homo sapiens
aagcactaagatgagcagctgcgacagtgagtactaggggtgaggaggtgagagacagctttgggagcaatcattctacacta

SEQ ID NO: 62301 - DNA, 80 bp, Homo sapiens
tactaggggtgaggaggtgagagacagctttgggagcaatcattctacactacatatgatttctttcctgaccatgctta

SEQ ID NO: 62302 - DNA, 80 bp, Homo sapiens
aggaggtgagagacagctttgggagcaatcattctacactacatatgatttctttcctgaccatgcttaaacagtaatga

SEQ ID NO: 62303 - DNA, 78 bp, Homo sapiens
agagacagctttgggagcaatcattctacactacatatgatttctttcctgaccatgcttaaacagtaatgaaataaa

SEQ ID NO: 62304 - DNA, 76 bp, Homo sapiens
cattctacactacatatgatttctttcctgaccatgcttaaacagtaatgaaataaaggaatgctttacagagaac

SEQ ID NO: 62305 - DNA, 74 bp, Homo sapiens
acatatgatttctttcctgaccatgcttaaacagtaatgaaataaaggaatgctttacagagaacgtgtaatgg

SEQ ID NO: 62306 - DNA, 73 bp, Homo sapiens
atttctttcctgaccatgcttaaacagtaatgaaataaaggaatgctttacagagaacgtgtaatggtggaga

SEQ ID NO: 62307 - DNA, 73 bp, Homo sapiens
accatgcttaaacagtaatgaaataaaggaatgctttacagagaacgtgtaatggtggagagtggttccaaca

SEQ ID NO: 62308 - DNA, 73 bp, Homo sapiens
ttaaacagtaatgaaataaaggaatgctttacagagaacgtgtaatggtggagagtggttccaacatgtagga

SEQ ID NO: 62309 - DNA, 72 bp, Homo sapiens
aaataaaggaatgctttacagagaacgtgtaatggtggagagtggttccaacatgtaggacgatagggagag

SEQ ID NO: 62310 - DNA, 75 bp, Homo sapiens
tgctttacagagaacgtgtaatggtggagagtggttccaacatgtaggacgatagggagaggccggctgggatta

SEQ ID NO: 62311 - DNA, 76 bp, Homo sapiens
tacagagaacgtgtaatggtggagagtggttccaacatgtaggacgatagggagaggccggctgggattactggca

SEQ ID NO: 62312 - DNA, 76 bp, Homo sapiens
tgtaatggtggagagtggttccaacatgtaggacgatagggagaggccggctgggattactggcatttggattatg

SEQ ID NO: 62313 - DNA, 75 bp, Homo sapiens
gagtggttccaacatgtaggacgatagggagaggccggctgggattactggcatttggattatgggacattttca

SEQ ID NO: 62314 - DNA, 75 bp, Homo sapiens
atgggacattttcagaaaaacactgtgacaacaacaatcttgtgcatttgctatttgtagaaatactctgaaaag

SEQ ID NO: 62315 - DNA, 76 bp, Homo sapiens
tcagaaaaacactgtgacaacaacaatcttgtgcatttgctatttgtagaaatactctgaaaaggccattattttc

SEQ ID NO: 62316 - DNA, 76 bp, Homo sapiens
cactgtgacaacaacaatcttgtgcatttgctatttgtagaaatactctgaaaaggccattattttctaattgtcc

SEQ ID NO: 62317 - DNA, 75 bp, Homo sapiens
gacaacaacaatcttgtgcatttgctatttgtagaaatactctgaaaaggccattattttctaattgtcctggta

SEQ ID NO: 62318 - DNA, 74 bp, Homo sapiens
cttgtgcatttgctatttgtagaaatactctgaaaaggccattattttctaattgtcctggtaaatcataagcg

SEQ ID NO: 62319 - DNA, 71 bp, Homo sapiens
gctatttgtagaaatactctgaaaaggccattattttctaattgtcctggtaaatcataagcgtttccagt

SEQ ID NO: 62320 - DNA, 70 bp, Homo sapiens
gtagaaatactctgaaaaggccattattttctaattgtcctggtaaatcataagcgtttccagttttcat

SEQ ID NO: 62321 - DNA, 70 bp, Homo sapiens
ctgaaaaggccattattttctaattgtcctggtaaatcataagcgtttccagttttcattctacattgtt

SEQ ID NO: 62322 - DNA, 69 bp, Homo sapiens
ctaattgtcctggtaaatcataagcgtttccagttttcattctacattgttttttagctttaagaacaa

SEQ ID NO: 62323 - DNA, 69 bp, Homo sapiens
tggtaaatcataagcgtttccagttttcattctacattgttttttagctttaagaacaataaactcagg

SEQ ID NO: 62324 - DNA, 68 bp, Homo sapiens
gcgtttccagttttcattctacattgttttttagctttaagaacaataaactcagggtgtttatttca

SEQ ID NO: 62325 - DNA, 67 bp, Homo sapiens
cagttttcattctacattgttttttagctttaagaacaataaactcagggtgtttatttcaaactta

SEQ ID NO: 62326 - DNA, 73 bp, Homo sapiens
tagctttaagaacaataaactcagggtgtttatttcaaacttaaatcataagcaataatgacatatgattaaa

SEQ ID NO: 62327 - DNA, 72 bp, Homo sapiens
acaataaactcagggtgtttatttcaaacttaaatcataagcaataatgacatatgattaaaataccctagc

SEQ ID NO: 62328 - DNA, 73 bp, Homo sapiens
ctcagggtgtttatttcaaacttaaatcataagcaataatgacatatgattaaaataccctagcctaacattc

SEQ ID NO: 62329 - DNA, 71 bp, Homo sapiens
gtttatttcaaacttaaatcataagcaataatgacatatgattaaaataccctagcctaacattcttgggt

SEQ ID NO: 62330 - DNA, 71 bp, Homo sapiens
taaatcataagcaataatgacatatgattaaaataccctagcctaacattcttgggttaaaatttaaacca

SEQ ID NO: 62331 - DNA, 70 bp, Homo sapiens
gcaataatgacatatgattaaaataccctagcctaacattcttgggttaaaatttaaaccaaaacataga

SEQ ID NO: 62332 - DNA, 67 bp, Homo sapiens
gacatatgattaaaataccctagcctaacattcttgggttaaaatttaaaccaaaacatagaagaac

SEQ ID NO: 62333 - DNA, 66 bp, Homo sapiens
gattaaaataccctagcctaacattcttgggttaaaatttaaaccaaaacatagaagaactgaaca

SEQ ID NO: 62334 - DNA, 68 bp, Homo sapiens
gcctaacattcttgggttaaaatttaaaccaaaacatagaagaactgaacatgaaagaacactcccac

SEQ ID NO: 62335 - DNA, 69 bp, Homo sapiens
aatttaaaccaaaacatagaagaactgaacatgaaagaacactcccacgaaaaaagaaatggatgcaac

SEQ ID NO: 62336 - DNA, 73 bp, Homo sapiens
aaaacatagaagaactgaacatgaaagaacactcccacgaaaaaagaaatggatgcaactaccactcataagc

SEQ ID NO: 62337 - DNA, 75 bp, Homo sapiens
atagaagaactgaacatgaaagaacactcccacgaaaaaagaaatggatgcaactaccactcataagccagccac

SEQ ID NO: 62338 - DNA, 76 bp, Homo sapiens
acatgaaagaacactcccacgaaaaaagaaatggatgcaactaccactcataagccagccacgacacagcaacaaa

SEQ ID NO: 62339 - DNA, 74 bp, Homo sapiens
aacactcccacgaaaaaagaaatggatgcaactaccactcataagccagccacgacacagcaacaaacttccat

SEQ ID NO: 62340 - DNA, 78 bp, Homo sapiens
aaaaagaaatggatgcaactaccactcataagccagccacgacacagcaacaaacttccatttgatgtggcttcagcc

SEQ ID NO: 62341 - DNA, 80 bp, Homo sapiens
aaatggatgcaactaccactcataagccagccacgacacagcaacaaacttccatttgatgtggcttcagcctaacctga

SEQ ID NO: 62342 - DNA, 77 bp, Homo sapiens
aactaccactcataagccagccacgacacagcaacaaacttccatttgatgtggcttcagcctaacctgacatattt

SEQ ID NO: 62343 - DNA, 78 bp, Homo sapiens
ataagccagccacgacacagcaacaaacttccatttgatgtggcttcagcctaacctgacatatttttcaagctggag

SEQ ID NO: 62344 - DNA, 72 bp, Homo sapiens
aacaaacttccatttgatgtggcttcagcctaacctgacatatttttcaagctggagtttttttagcatctt

SEQ ID NO: 62345 - DNA, 74 bp, Homo sapiens
atttgatgtggcttcagcctaacctgacatatttttcaagctggagtttttttagcatctttctccacaagttg

SEQ ID NO: 62346 - DNA, 74 bp, Homo sapiens
cttcagcctaacctgacatatttttcaagctggagtttttttagcatctttctccacaagttggtatacatgta

SEQ ID NO: 62347 - DNA, 72 bp, Homo sapiens
gcctaacctgacatatttttcaagctggagtttttttagcatctttctccacaagttggtatacatgtaaaa

SEQ ID NO: 62348 - DNA, 72 bp, Homo sapiens
catatttttcaagctggagtttttttagcatctttctccacaagttggtatacatgtaaaaccacaaattca

SEQ ID NO: 62349 - DNA, 72 bp, Homo sapiens
caagctggagtttttttagcatctttctccacaagttggtatacatgtaaaaccacaaattcatataaggtg

SEQ ID NO: 62350 - DNA, 73 bp, Homo sapiens
gttggtatacatgtaaaaccacaaattcatataaggtgtaaaaaaacaacacagttcagtacatcaagagcaa

SEQ ID NO: 62351 - DNA, 71 bp, Homo sapiens
aaccacaaattcatataaggtgtaaaaaaacaacacagttcagtacatcaagagcaaaagtttgctaaata

SEQ ID NO: 62352 - DNA, 74 bp, Homo sapiens
catataaggtgtaaaaaaacaacacagttcagtacatcaagagcaaaagtttgctaaataattgaatagccaga

SEQ ID NO: 62353 - DNA, 73 bp, Homo sapiens
aaaaacaacacagttcagtacatcaagagcaaaagtttgctaaataattgaatagccagaaatatttatcatt

SEQ ID NO: 62354 - DNA, 78 bp, Homo sapiens
caacacagttcagtacatcaagagcaaaagtttgctaaataattgaatagccagaaatatttatcattttcaatgaca

SEQ ID NO: 62355 - DNA, 77 bp, Homo sapiens
tacatcaagagcaaaagtttgctaaataattgaatagccagaaatatttatcattttcaatgacataaagaaccaga

SEQ ID NO: 62356 - DNA, 74 bp, Homo sapiens
gagcaaaagtttgctaaataattgaatagccagaaatatttatcattttcaatgacataaagaaccagaaccac

SEQ ID NO: 62357 - DNA, 73 bp, Homo sapiens
taaataattgaatagccagaaatatttatcattttcaatgacataaagaaccagaaccaccccagactacggc

SEQ ID NO: 62358 - DNA, 75 bp, Homo sapiens
ttgaatagccagaaatatttatcattttcaatgacataaagaaccagaaccaccccagactacggccagatcatt

SEQ ID NO: 62359 - DNA, 73 bp, Homo sapiens
aatatttatcattttcaatgacataaagaaccagaaccaccccagactacggccagatcatttgtaaagccaa

SEQ ID NO: 62360 - DNA, 71 bp, Homo sapiens
attttcaatgacataaagaaccagaaccaccccagactacggccagatcatttgtaaagccaaaagcattt

SEQ ID NO: 62361 - DNA, 72 bp, Homo sapiens
aatgacataaagaaccagaaccaccccagactacggccagatcatttgtaaagccaaaagcattttctcttg

SEQ ID NO: 62362 - DNA, 72 bp, Homo sapiens
cccagactacggccagatcatttgtaaagccaaaagcattttctcttggcaacctaccattgttggaagaaa

SEQ ID NO: 62363 - DNA, 69 bp, Homo sapiens
atttgtaaagccaaaagcattttctcttggcaacctaccattgttggaagaaagccaagaaaagcagtt

SEQ ID NO: 62364 - DNA, 78 bp, Homo sapiens
aacctaccattgttggaagaaagccaagaaaagcagttttcatggaaagacatgactgcattcagttgtctgctatca

SEQ ID NO: 62365 - DNA, 80 bp, Homo sapiens
aaagccaagaaaagcagttttcatggaaagacatgactgcattcagttgtctgctatcactcgcttgctcttggaatcct

SEQ ID NO: 62366 - DNA, 83 bp, Homo sapiens
aaagcagttttcatggaaagacatgactgcattcagttgtctgctatcactcgcttgctcttggaatccttccagtatatcaa

SEQ ID NO: 62367 - DNA, 84 bp, Homo sapiens
tcatggaaagacatgactgcattcagttgtctgctatcactcgcttgctcttggaatccttccagtatatcaacttggtaaata

SEQ ID NO: 62368 - DNA, 82 bp, Homo sapiens
acatgactgcattcagttgtctgctatcactcgcttgctcttggaatccttccagtatatcaacttggtaaatatagagtaa

SEQ ID NO: 62369 - DNA, 78 bp, Homo sapiens
attcagttgtctgctatcactcgcttgctcttggaatccttccagtatatcaacttggtaaatatagagtaaggagaa

SEQ ID NO: 62370 - DNA, 78 bp, Homo sapiens
ttgtctgctatcactcgcttgctcttggaatccttccagtatatcaacttggtaaatatagagtaaggagaaatacgc

SEQ ID NO: 62371 - DNA, 75 bp, Homo sapiens
actcgcttgctcttggaatccttccagtatatcaacttggtaaatatagagtaaggagaaatacgccactgatta

SEQ ID NO: 62372 - DNA, 77 bp, Homo sapiens
tcttggaatccttccagtatatcaacttggtaaatatagagtaaggagaaatacgccactgattacagtgccacaga

SEQ ID NO: 62373 - DNA, 78 bp, Homo sapiens
tccttccagtatatcaacttggtaaatatagagtaaggagaaatacgccactgattacagtgccacagacagcacttg

SEQ ID NO: 62374 - DNA, 78 bp, Homo sapiens
atatcaacttggtaaatatagagtaaggagaaatacgccactgattacagtgccacagacagcacttggctgtccagg

SEQ ID NO: 62375 - DNA, 78 bp, Homo sapiens
ggtaaatatagagtaaggagaaatacgccactgattacagtgccacagacagcacttggctgtccagggtgcacctgg

SEQ ID NO: 62376 - DNA, 78 bp, Homo sapiens
agtaaggagaaatacgccactgattacagtgccacagacagcacttggctgtccagggtgcacctggggcaggagagt

SEQ ID NO: 62377 - DNA, 78 bp, Homo sapiens
attacagtgccacagacagcacttggctgtccagggtgcacctggggcaggagagttgggctaaagcacctgggcagg

SEQ ID NO: 62378 - DNA, 74 bp, Homo sapiens
acttggctgtccagggtgcacctggggcaggagagttgggctaaagcacctgggcaggtgaacagcccaccttc

SEQ ID NO: 62379 - DNA, 71 bp, Homo sapiens
agggtgcacctggggcaggagagttgggctaaagcacctgggcaggtgaacagcccaccttccccctcaat

SEQ ID NO: 62380 - DNA, 74 bp, Homo sapiens
agagttgggctaaagcacctgggcaggtgaacagcccaccttccccctcaattgaagtcttatgtgctgccaac

SEQ ID NO: 62381 - DNA, 78 bp, Homo sapiens
taaagcacctgggcaggtgaacagcccaccttccccctcaattgaagtcttatgtgctgccaacctggaatgcattca

SEQ ID NO: 62382 - DNA, 76 bp, Homo sapiens
ctgggcaggtgaacagcccaccttccccctcaattgaagtcttatgtgctgccaacctggaatgcattcaggaaaa

SEQ ID NO: 62383 - DNA, 75 bp, Homo sapiens
aacagcccaccttccccctcaattgaagtcttatgtgctgccaacctggaatgcattcaggaaaatgtgcggccc

SEQ ID NO: 62384 - DNA, 77 bp, Homo sapiens
tccccctcaattgaagtcttatgtgctgccaacctggaatgcattcaggaaaatgtgcggcccccaggtctgaacat

SEQ ID NO: 62385 - DNA, 77 bp, Homo sapiens
aattgaagtcttatgtgctgccaacctggaatgcattcaggaaaatgtgcggcccccaggtctgaacatttgccctg

SEQ ID NO: 62386 - DNA, 78 bp, Homo sapiens
tcttatgtgctgccaacctggaatgcattcaggaaaatgtgcggcccccaggtctgaacatttgccctggaaggataa

SEQ ID NO: 62387 - DNA, 72 bp, Homo sapiens
aacctggaatgcattcaggaaaatgtgcggcccccaggtctgaacatttgccctggaaggataagtcctaac

SEQ ID NO: 62388 - DNA, 74 bp, Homo sapiens
atgcattcaggaaaatgtgcggcccccaggtctgaacatttgccctggaaggataagtcctaactggaagacta

SEQ ID NO: 62389 - DNA, 70 bp, Homo sapiens
aaaatgtgcggcccccaggtctgaacatttgccctggaaggataagtcctaactggaagactagtaacaa

SEQ ID NO: 62390 - DNA, 73 bp, Homo sapiens
tgaacatttgccctggaaggataagtcctaactggaagactagtaacaaagtatttagcaactctcactgtat

SEQ ID NO: 62391 - DNA, 72 bp, Homo sapiens
atttgccctggaaggataagtcctaactggaagactagtaacaaagtatttagcaactctcactgtatttca

SEQ ID NO: 62392 - DNA, 73 bp, Homo sapiens
gaaggataagtcctaactggaagactagtaacaaagtatttagcaactctcactgtatttcatttggataatg

SEQ ID NO: 62393 - DNA, 75 bp, Homo sapiens
gactagtaacaaagtatttagcaactctcactgtatttcatttggataatgtctttcaagaagcattccttgtct

SEQ ID NO: 62394 - DNA, 75 bp, Homo sapiens
gtatttagcaactctcactgtatttcatttggataatgtctttcaagaagcattccttgtcttcttgggttaaga

SEQ ID NO: 62395 - DNA, 74 bp, Homo sapiens
tatttcatttggataatgtctttcaagaagcattccttgtcttcttgggttaagatcctcccaggcacgaggat

SEQ ID NO: 62396 - DNA, 75 bp, Homo sapiens
atttggataatgtctttcaagaagcattccttgtcttcttgggttaagatcctcccaggcacgaggattgcttga

SEQ ID NO: 62397 - DNA, 80 bp, Homo sapiens
acacacacacagccacgaccagaatgtgacttagaagaagagtggaaatgcaggcctgtatcctcactgttagtcaccca

SEQ ID NO: 62398 - DNA, 79 bp, Homo sapiens
acacagccacgaccagaatgtgacttagaagaagagtggaaatgcaggcctgtatcctcactgttagtcacccaactgc

SEQ ID NO: 62399 - DNA, 77 bp, Homo sapiens
agaatgtgacttagaagaagagtggaaatgcaggcctgtatcctcactgttagtcacccaactgctccagaaacttc

SEQ ID NO: 62400 - DNA, 78 bp, Homo sapiens
ttagaagaagagtggaaatgcaggcctgtatcctcactgttagtcacccaactgctccagaaacttctagcagtgaaa

SEQ ID NO: 62401 - DNA, 77 bp, Homo sapiens
aagagtggaaatgcaggcctgtatcctcactgttagtcacccaactgctccagaaacttctagcagtgaaaccggca

SEQ ID NO: 62402 - DNA, 76 bp, Homo sapiens
aatgcaggcctgtatcctcactgttagtcacccaactgctccagaaacttctagcagtgaaaccggcaccctaata

SEQ ID NO: 62403 - DNA, 75 bp, Homo sapiens
tatcctcactgttagtcacccaactgctccagaaacttctagcagtgaaaccggcaccctaatactattggtaca

SEQ ID NO: 62404 - DNA, 71 bp, Homo sapiens
actgttagtcacccaactgctccagaaacttctagcagtgaaaccggcaccctaatactattggtacacct

SEQ ID NO: 62405 - DNA, 71 bp, Homo sapiens
agaaacttctagcagtgaaaccggcaccctaatactattggtacaccttggcaggtccctacagttagaga

SEQ ID NO: 62406 - DNA, 72 bp, Homo sapiens
tagcagtgaaaccggcaccctaatactattggtacaccttggcaggtccctacagttagagacgctggttcc

SEQ ID NO: 62407 - DNA, 68 bp, Homo sapiens
aaaccggcaccctaatactattggtacaccttggcaggtccctacagttagagacgctggttccccaa

SEQ ID NO: 62408 - DNA, 74 bp, Homo sapiens
ctaatactattggtacaccttggcaggtccctacagttagagacgctggttccccaaggtgcagtctgcattaa

SEQ ID NO: 62409 - DNA, 77 bp, Homo sapiens
ttggtacaccttggcaggtccctacagttagagacgctggttccccaaggtgcagtctgcattaatgcataagcaaa

SEQ ID NO: 62410 - DNA, 74 bp, Homo sapiens
aggtccctacagttagagacgctggttccccaaggtgcagtctgcattaatgcataagcaaaaacgacgggtca

SEQ ID NO: 62411 - DNA, 76 bp, Homo sapiens
tacagttagagacgctggttccccaaggtgcagtctgcattaatgcataagcaaaaacgacgggtcaaggtcactg

SEQ ID NO: 62412 - DNA, 75 bp, Homo sapiens
caaggtgcagtctgcattaatgcataagcaaaaacgacgggtcaaggtcactggagaaactatttctaatcctgt

SEQ ID NO: 62413 - DNA, 74 bp, Homo sapiens
agtctgcattaatgcataagcaaaaacgacgggtcaaggtcactggagaaactatttctaatcctgtttctgcc

SEQ ID NO: 62414 - DNA, 72 bp, Homo sapiens
attaatgcataagcaaaaacgacgggtcaaggtcactggagaaactatttctaatcctgtttctgcccctca

SEQ ID NO: 62415 - DNA, 71 bp, Homo sapiens
aaaaacgacgggtcaaggtcactggagaaactatttctaatcctgtttctgcccctcatcagccatgtaac

SEQ ID NO: 62416 - DNA, 74 bp, Homo sapiens
gtcaaggtcactggagaaactatttctaatcctgtttctgcccctcatcagccatgtaactgggacaaacctct

SEQ ID NO: 62417 - DNA, 72 bp, Homo sapiens
actggagaaactatttctaatcctgtttctgcccctcatcagccatgtaactgggacaaacctcttggtccc

SEQ ID NO: 62418 - DNA, 71 bp, Homo sapiens
aactatttctaatcctgtttctgcccctcatcagccatgtaactgggacaaacctcttggtccctcagttt

SEQ ID NO: 62419 - DNA, 74 bp, Homo sapiens
taatcctgtttctgcccctcatcagccatgtaactgggacaaacctcttggtccctcagttttccttatctata

SEQ ID NO: 62420 - DNA, 73 bp, Homo sapiens
ttctgcccctcatcagccatgtaactgggacaaacctcttggtccctcagttttccttatctataaaatagga

SEQ ID NO: 62421 - DNA, 71 bp, Homo sapiens
gccatgtaactgggacaaacctcttggtccctcagttttccttatctataaaataggaagcatttagatta

SEQ ID NO: 62422 - DNA, 70 bp, Homo sapiens
gtaactgggacaaacctcttggtccctcagttttccttatctataaaataggaagcatttagattatcat

SEQ ID NO: 62423 - DNA, 71 bp, Homo sapiens
caaacctcttggtccctcagttttccttatctataaaataggaagcatttagattatcattaggtgatctt

SEQ ID NO: 62424 - DNA, 75 bp, Homo sapiens
ctataaaataggaagcatttagattatcattaggtgatctttaaagttctttctgattctaaaaatctgatgaca

SEQ ID NO: 62425 - DNA, 75 bp, Homo sapiens
tatcattaggtgatctttaaagttctttctgattctaaaaatctgatgacattttttatttcaaaccatcagtgc

SEQ ID NO: 62426 - DNA, 76 bp, Homo sapiens
gtgatctttaaagttctttctgattctaaaaatctgatgacattttttatttcaaaccatcagtgcttgattcaca

SEQ ID NO: 62427 - DNA, 76 bp, Homo sapiens
gttctttctgattctaaaaatctgatgacattttttatttcaaaccatcagtgcttgattcacataaaggctacac

SEQ ID NO: 62428 - DNA, 76 bp, Homo sapiens
attctaaaaatctgatgacattttttatttcaaaccatcagtgcttgattcacataaaggctacactcctgggaga

SEQ ID NO: 62429 - DNA, 80 bp, Homo sapiens
ttttttatttcaaaccatcagtgcttgattcacataaaggctacactcctgggagatgttgctactcgcagtgagtgaca

SEQ ID NO: 62430 - DNA, 81 bp, Homo sapiens
atttcaaaccatcagtgcttgattcacataaaggctacactcctgggagatgttgctactcgcagtgagtgacaactgagg

SEQ ID NO: 62431 - DNA, 85 bp, Homo sapiens
atcagtgcttgattcacataaaggctacactcctgggagatgttgctactcgcagtgagtgacaactgagggttctgagtctgca

SEQ ID NO: 62432 - DNA, 81 bp, Homo sapiens
attcacataaaggctacactcctgggagatgttgctactcgcagtgagtgacaactgagggttctgagtctgcagacttaa

SEQ ID NO: 62433 - DNA, 80 bp, Homo sapiens
aaaggctacactcctgggagatgttgctactcgcagtgagtgacaactgagggttctgagtctgcagacttaactgtcaa

SEQ ID NO: 62434 - DNA, 80 bp, Homo sapiens
tgggagatgttgctactcgcagtgagtgacaactgagggttctgagtctgcagacttaactgtcaacccctggactggga

SEQ ID NO: 62435 - DNA, 78 bp, Homo sapiens
atgttgctactcgcagtgagtgacaactgagggttctgagtctgcagacttaactgtcaacccctggactgggaggcc

SEQ ID NO: 62436 - DNA, 77 bp, Homo sapiens
agtgagtgacaactgagggttctgagtctgcagacttaactgtcaacccctggactgggaggccctcaccatggcaa

SEQ ID NO: 62437 - DNA, 73 bp, Homo sapiens
agacttaactgtcaacccctggactgggaggccctcaccatggcaatcctccctgtggggcccagagtggatg

SEQ ID NO: 62438 - DNA, 77 bp, Homo sapiens
taactgtcaacccctggactgggaggccctcaccatggcaatcctccctgtggggcccagagtggatggccagcagc

SEQ ID NO: 62439 - DNA, 78 bp, Homo sapiens
tggactgggaggccctcaccatggcaatcctccctgtggggcccagagtggatggccagcagcctttccaggagactg

SEQ ID NO: 62440 - DNA, 76 bp, Homo sapiens
atggcaatcctccctgtggggcccagagtggatggccagcagcctttccaggagactggggagttcgtggagcaag

SEQ ID NO: 62441 - DNA, 76 bp, Homo sapiens
atggccagcagcctttccaggagactggggagttcgtggagcaaggtcttccatccccactgcccagtgactggga

SEQ ID NO: 62442 - DNA, 74 bp, Homo sapiens
agcctttccaggagactggggagttcgtggagcaaggtcttccatccccactgcccagtgactgggattccata

SEQ ID NO: 62443 - DNA, 74 bp, Homo sapiens
aggagactggggagttcgtggagcaaggtcttccatccccactgcccagtgactgggattccatagccccgcac

SEQ ID NO: 62444 - DNA, 74 bp, Homo sapiens
agttcgtggagcaaggtcttccatccccactgcccagtgactgggattccatagccccgcaccctggacaccac

SEQ ID NO: 62445 - DNA, 75 bp, Homo sapiens
gcaaggtcttccatccccactgcccagtgactgggattccatagccccgcaccctggacaccacttcccagagta

SEQ ID NO: 62446 - DNA, 74 bp, Homo sapiens
ttccatccccactgcccagtgactgggattccatagccccgcaccctggacaccacttcccagagtattttaca

SEQ ID NO: 62447 - DNA, 73 bp, Homo sapiens
actgcccagtgactgggattccatagccccgcaccctggacaccacttcccagagtattttacacaaagaaca

SEQ ID NO: 62448 - DNA, 73 bp, Homo sapiens
agtgactgggattccatagccccgcaccctggacaccacttcccagagtattttacacaaagaacagctaatc

SEQ ID NO: 62449 - DNA, 73 bp, Homo sapiens
attccatagccccgcaccctggacaccacttcccagagtattttacacaaagaacagctaatctgaggcaaaa

SEQ ID NO: 62450 - DNA, 72 bp, Homo sapiens
accctggacaccacttcccagagtattttacacaaagaacagctaatctgaggcaaaatgatccaagaaaag

SEQ ID NO: 62451 - DNA, 72 bp, Homo sapiens
accacttcccagagtattttacacaaagaacagctaatctgaggcaaaatgatccaagaaaagggagataaa

SEQ ID NO: 62452 - DNA, 72 bp, Homo sapiens
cccagagtattttacacaaagaacagctaatctgaggcaaaatgatccaagaaaagggagataaaatttgaa

SEQ ID NO: 62453 - DNA, 72 bp, Homo sapiens
ttttacacaaagaacagctaatctgaggcaaaatgatccaagaaaagggagataaaatttgaaggcactgtt

SEQ ID NO: 62454 - DNA, 71 bp, Homo sapiens
agctaatctgaggcaaaatgatccaagaaaagggagataaaatttgaaggcactgtttctcctaattcttt

SEQ ID NO: 62455 - DNA, 70 bp, Homo sapiens
tgaggcaaaatgatccaagaaaagggagataaaatttgaaggcactgtttctcctaattcttttaagtcc

SEQ ID NO: 62456 - DNA, 67 bp, Homo sapiens
gatccaagaaaagggagataaaatttgaaggcactgtttctcctaattcttttaagtcctaatattt

SEQ ID NO: 62457 - DNA, 64 bp, Homo sapiens
agaaaagggagataaaatttgaaggcactgtttctcctaattcttttaagtcctaatatttttt

SEQ ID NO: 62458 - DNA, 64 bp, Homo sapiens
aaatttgaaggcactgtttctcctaattcttttaagtcctaatatttttttttaggtagaagag

SEQ ID NO: 62459 - DNA, 68 bp, Homo sapiens
gcactgtttctcctaattcttttaagtcctaatatttttttttaggtagaagagtagactctcttcag

SEQ ID NO: 62460 - DNA, 67 bp, Homo sapiens
cctaattcttttaagtcctaatatttttttttaggtagaagagtagactctcttcaggattaagtgc

SEQ ID NO: 62461 - DNA, 70 bp, Homo sapiens
ttaagtcctaatatttttttttaggtagaagagtagactctcttcaggattaagtgcccctttcatgcca

SEQ ID NO: 62462 - DNA, 71 bp, Homo sapiens
atatttttttttaggtagaagagtagactctcttcaggattaagtgcccctttcatgccaatccaagccaa

SEQ ID NO: 62463 - DNA, 73 bp, Homo sapiens
tttttaggtagaagagtagactctcttcaggattaagtgcccctttcatgccaatccaagccaacttcacacg

SEQ ID NO: 62464 - DNA, 74 bp, Homo sapiens
agagtagactctcttcaggattaagtgcccctttcatgccaatccaagccaacttcacacgggcaatggaaaaa

SEQ ID NO: 62465 - DNA, 73 bp, Homo sapiens
actctcttcaggattaagtgcccctttcatgccaatccaagccaacttcacacgggcaatggaaaaagaggaa

SEQ ID NO: 62466 - DNA, 70 bp, Homo sapiens
aggattaagtgcccctttcatgccaatccaagccaacttcacacgggcaatggaaaaagaggaaaaaaga

SEQ ID NO: 62467 - DNA, 68 bp, Homo sapiens
aaagaagaaaaggtgataaaaaatgtgagaaaaattttattctataaagactgaatcttggctgggcg

SEQ ID NO: 62468 - DNA, 73 bp, Homo sapiens
acacacaaaagagtgaatctttgtaaagacgaaattaatttacactgcaatccaactatggcccagcgggaca

SEQ ID NO: 62469 - DNA, 71 bp, Homo sapiens
aaaagagtgaatctttgtaaagacgaaattaatttacactgcaatccaactatggcccagcgggacagagg

SEQ ID NO: 62470 - DNA, 72 bp, Homo sapiens
aatctttgtaaagacgaaattaatttacactgcaatccaactatggcccagcgggacagagggcctcaataa

SEQ ID NO: 62471 - DNA, 74 bp, Homo sapiens
aagacgaaattaatttacactgcaatccaactatggcccagcgggacagagggcctcaataagtcacctgacaa

SEQ ID NO: 62472 - DNA, 75 bp, Homo sapiens
ttacactgcaatccaactatggcccagcgggacagagggcctcaataagtcacctgacaaagccacccgatgttt

SEQ ID NO: 62473 - DNA, 72 bp, Homo sapiens
aatccaactatggcccagcgggacagagggcctcaataagtcacctgacaaagccacccgatgttttcccca

SEQ ID NO: 62474 - DNA, 72 bp, Homo sapiens
ctatggcccagcgggacagagggcctcaataagtcacctgacaaagccacccgatgttttccccagaccttc

SEQ ID NO: 62475 - DNA, 77 bp, Homo sapiens
acagagggcctcaataagtcacctgacaaagccacccgatgttttccccagaccttccacatagagcgctcatgcaa

SEQ ID NO: 62476 - DNA, 78 bp, Homo sapiens
cctcaataagtcacctgacaaagccacccgatgttttccccagaccttccacatagagcgctcatgcaaggcagagaa

SEQ ID NO: 62477 - DNA, 75 bp, Homo sapiens
acctgacaaagccacccgatgttttccccagaccttccacatagagcgctcatgcaaggcagagaagcacctttt

SEQ ID NO: 62478 - DNA, 75 bp, Homo sapiens
acaaagccacccgatgttttccccagaccttccacatagagcgctcatgcaaggcagagaagcacctttttccac

SEQ ID NO: 62479 - DNA, 77 bp, Homo sapiens
atgttttccccagaccttccacatagagcgctcatgcaaggcagagaagcacctttttccacggatctacactccac

SEQ ID NO: 62480 - DNA, 79 bp, Homo sapiens
agaccttccacatagagcgctcatgcaaggcagagaagcacctttttccacggatctacactccactcactcataaaaa

SEQ ID NO: 62481 - DNA, 78 bp, Homo sapiens
atagagcgctcatgcaaggcagagaagcacctttttccacggatctacactccactcactcataaaaagggacgtcaa

SEQ ID NO: 62482 - DNA, 78 bp, Homo sapiens
tcatgcaaggcagagaagcacctttttccacggatctacactccactcactcataaaaagggacgtcaagaacgcaca

SEQ ID NO: 62483 - DNA, 72 bp, Homo sapiens
agagaagcacctttttccacggatctacactccactcactcataaaaagggacgtcaagaacgcacagtaaa

SEQ ID NO: 62484 - DNA, 71 bp, Homo sapiens
agcacctttttccacggatctacactccactcactcataaaaagggacgtcaagaacgcacagtaaaggag

SEQ ID NO: 62485 - DNA, 71 bp, Homo sapiens
actccactcactcataaaaagggacgtcaagaacgcacagtaaaggaggcggcaataaaggaaggcgtgaa

SEQ ID NO: 62486 - DNA, 71 bp, Homo sapiens
actcataaaaagggacgtcaagaacgcacagtaaaggaggcggcaataaaggaaggcgtgaatgtgtatag

SEQ ID NO: 62487 - DNA, 71 bp, Homo sapiens
aagggacgtcaagaacgcacagtaaaggaggcggcaataaaggaaggcgtgaatgtgtataggtaacgcaa

SEQ ID NO: 62488 - DNA, 71 bp, Homo sapiens
aacgcacagtaaaggaggcggcaataaaggaaggcgtgaatgtgtataggtaacgcaacggttcagagaaa

SEQ ID NO: 62489 - DNA, 70 bp, Homo sapiens
agtaaaggaggcggcaataaaggaaggcgtgaatgtgtataggtaacgcaacggttcagagaaaaggaga

SEQ ID NO: 62490 - DNA, 71 bp, Homo sapiens
caataaaggaaggcgtgaatgtgtataggtaacgcaacggttcagagaaaaggagaaataaagatcggaca

SEQ ID NO: 62491 - DNA, 72 bp, Homo sapiens
aaggcgtgaatgtgtataggtaacgcaacggttcagagaaaaggagaaataaagatcggacagaactcacaa

SEQ ID NO: 62492 - DNA, 72 bp, Homo sapiens
taggtaacgcaacggttcagagaaaaggagaaataaagatcggacagaactcacaaggctttaagacagaca

SEQ ID NO: 62493 - DNA, 75 bp, Homo sapiens
ttcagagaaaaggagaaataaagatcggacagaactcacaaggctttaagacagacagccactgactatttctag

SEQ ID NO: 62494 - DNA, 72 bp, Homo sapiens
aggagaaataaagatcggacagaactcacaaggctttaagacagacagccactgactatttctagtaaaatt

SEQ ID NO: 62495 - DNA, 71 bp, Homo sapiens
aataaagatcggacagaactcacaaggctttaagacagacagccactgactatttctagtaaaatttaaag

SEQ ID NO: 62496 - DNA, 71 bp, Homo sapiens
ggacagaactcacaaggctttaagacagacagccactgactatttctagtaaaatttaaaggagaaagaaa

SEQ ID NO: 62497 - DNA, 71 bp, Homo sapiens
actgactatttctagtaaaatttaaaggagaaagaaagatgacatttcagaggactgtgttcctcctctac

SEQ ID NO: 62498 - DNA, 69 bp, Homo sapiens
tttctagtaaaatttaaaggagaaagaaagatgacatttcagaggactgtgttcctcctctactttggg

SEQ ID NO: 62499 - DNA, 70 bp, Homo sapiens
taaaatttaaaggagaaagaaagatgacatttcagaggactgtgttcctcctctactttggggcaggaaa

SEQ ID NO: 62500 - DNA, 72 bp, Homo sapiens
aagatgacatttcagaggactgtgttcctcctctactttggggcaggaaaacagaactaattcttgaactgg

SEQ ID NO: 62501 - DNA, 73 bp, Homo sapiens
ttcagaggactgtgttcctcctctactttggggcaggaaaacagaactaattcttgaactgggcaggccgtca

SEQ ID NO: 62502 - DNA, 74 bp, Homo sapiens
tgtgttcctcctctactttggggcaggaaaacagaactaattcttgaactgggcaggccgtcagctctactgtg

SEQ ID NO: 62503 - DNA, 74 bp, Homo sapiens
tactttggggcaggaaaacagaactaattcttgaactgggcaggccgtcagctctactgtgggagcaggaagaa

SEQ ID NO: 62504 - DNA, 77 bp, Homo sapiens
ggaaaacagaactaattcttgaactgggcaggccgtcagctctactgtgggagcaggaagaacagctcgtgggatga

SEQ ID NO: 62505 - DNA, 78 bp, Homo sapiens
acagaactaattcttgaactgggcaggccgtcagctctactgtgggagcaggaagaacagctcgtgggatgagccctg

SEQ ID NO: 62506 - DNA, 78 bp, Homo sapiens
ttcttgaactgggcaggccgtcagctctactgtgggagcaggaagaacagctcgtgggatgagccctgggaggtgacg

SEQ ID NO: 62507 - DNA, 81 bp, Homo sapiens
tctactgtgggagcaggaagaacagctcgtgggatgagccctgggaggtgacgtgaggctgcctgagggttctgtgtcatc

SEQ ID NO: 62508 - DNA, 81 bp, Homo sapiens
aagaacagctcgtgggatgagccctgggaggtgacgtgaggctgcctgagggttctgtgtcatctcctcatggcgaatctc

SEQ ID NO: 62509 - DNA, 82 bp, Homo sapiens
tcgtgggatgagccctgggaggtgacgtgaggctgcctgagggttctgtgtcatctcctcatggcgaatctcctggacctca

SEQ ID NO: 62510 - DNA, 83 bp, Homo sapiens
aggtgacgtgaggctgcctgagggttctgtgtcatctcctcatggcgaatctcctggacctcagtggcaagaggaggactgca

SEQ ID NO: 62511 - DNA, 85 bp, Homo sapiens
tgcctgagggttctgtgtcatctcctcatggcgaatctcctggacctcagtggcaagaggaggactgcagcagccaaagaagatc

SEQ ID NO: 62512 - DNA, 86 bp, Homo sapiens
tctgtgtcatctcctcatggcgaatctcctggacctcagtggcaagaggaggactgcagcagccaaagaagatcttgcccagctta

SEQ ID NO: 62513 - DNA, 82 bp, Homo sapiens
atctcctcatggcgaatctcctggacctcagtggcaagaggaggactgcagcagccaaagaagatcttgcccagcttattaa

SEQ ID NO: 62514 - DNA, 80 bp, Homo sapiens
cgaatctcctggacctcagtggcaagaggaggactgcagcagccaaagaagatcttgcccagcttattaaatgccataaa

SEQ ID NO: 62515 - DNA, 79 bp, Homo sapiens
tggacctcagtggcaagaggaggactgcagcagccaaagaagatcttgcccagcttattaaatgccataaatctaaaag

SEQ ID NO: 62516 - DNA, 77 bp, Homo sapiens
agtggcaagaggaggactgcagcagccaaagaagatcttgcccagcttattaaatgccataaatctaaaagtgtaaa

SEQ ID NO: 62517 - DNA, 79 bp, Homo sapiens
ggactgcagcagccaaagaagatcttgcccagcttattaaatgccataaatctaaaagtgtaaagcacactcaaagata

SEQ ID NO: 62518 - DNA, 76 bp, Homo sapiens
cagccaaagaagatcttgcccagcttattaaatgccataaatctaaaagtgtaaagcacactcaaagatatattgt

SEQ ID NO: 62519 - DNA, 76 bp, Homo sapiens
aagaagatcttgcccagcttattaaatgccataaatctaaaagtgtaaagcacactcaaagatatattgttatcaa

SEQ ID NO: 62520 - DNA, 76 bp, Homo sapiens
atgccataaatctaaaagtgtaaagcacactcaaagatatattgttatcaaaaatatgtggctctacctcttaaca

SEQ ID NO: 62521 - DNA, 75 bp, Homo sapiens
tctaaaagtgtaaagcacactcaaagatatattgttatcaaaaatatgtggctctacctcttaacaaaagctgag

SEQ ID NO: 62522 - DNA, 76 bp, Homo sapiens
agtgtaaagcacactcaaagatatattgttatcaaaaatatgtggctctacctcttaacaaaagctgaggtgtaca

SEQ ID NO: 62523 - DNA, 74 bp, Homo sapiens
gatatattgttatcaaaaatatgtggctctacctcttaacaaaagctgaggtgtacagagtcctaacaaaaaca

SEQ ID NO: 62524 - DNA, 71 bp, Homo sapiens
aaaatatgtggctctacctcttaacaaaagctgaggtgtacagagtcctaacaaaaacataattagcaaag

SEQ ID NO: 62525 - DNA, 71 bp, Homo sapiens
atgtggctctacctcttaacaaaagctgaggtgtacagagtcctaacaaaaacataattagcaaagtaaag

SEQ ID NO: 62526 - DNA, 70 bp, Homo sapiens
acctcttaacaaaagctgaggtgtacagagtcctaacaaaaacataattagcaaagtaaagtgctcttaa

SEQ ID NO: 62527 - DNA, 71 bp, Homo sapiens
aaaagctgaggtgtacagagtcctaacaaaaacataattagcaaagtaaagtgctcttaaatacagtcgtc

SEQ ID NO: 62528 - DNA, 75 bp, Homo sapiens
acaaaaacataattagcaaagtaaagtgctcttaaatacagtcgtccctcctgactggtgatgtcagcgaggaga

SEQ ID NO: 62529 - DNA, 72 bp, Homo sapiens
aaagtaaagtgctcttaaatacagtcgtccctcctgactggtgatgtcagcgaggagacaaaacagggaagg

SEQ ID NO: 62530 - DNA, 76 bp, Homo sapiens
ctcttaaatacagtcgtccctcctgactggtgatgtcagcgaggagacaaaacagggaagggtgctgagggagcca

SEQ ID NO: 62531 - DNA, 78 bp, Homo sapiens
atacagtcgtccctcctgactggtgatgtcagcgaggagacaaaacagggaagggtgctgagggagccaggagctggc

SEQ ID NO: 62532 - DNA, 83 bp, Homo sapiens
ctgactggtgatgtcagcgaggagacaaaacagggaagggtgctgagggagccaggagctggctcagtccgctgcagtctctg

SEQ ID NO: 62533 - DNA, 81 bp, Homo sapiens
atgtcagcgaggagacaaaacagggaagggtgctgagggagccaggagctggctcagtccgctgcagtctctgtgccttgt

SEQ ID NO: 62534 - DNA, 79 bp, Homo sapiens
aggagacaaaacagggaagggtgctgagggagccaggagctggctcagtccgctgcagtctctgtgccttgtttcgaga

SEQ ID NO: 62535 - DNA, 79 bp, Homo sapiens
aaaacagggaagggtgctgagggagccaggagctggctcagtccgctgcagtctctgtgccttgtttcgagagaataca

SEQ ID NO: 62536 - DNA, 83 bp, Homo sapiens
tgctgagggagccaggagctggctcagtccgctgcagtctctgtgccttgtttcgagagaatacacaggaagcgcctagaaaa

SEQ ID NO: 62537 - DNA, 80 bp, Homo sapiens
agccaggagctggctcagtccgctgcagtctctgtgccttgtttcgagagaatacacaggaagcgcctagaaaagggaga

SEQ ID NO: 62538 - DNA, 77 bp, Homo sapiens
gctgcagtctctgtgccttgtttcgagagaatacacaggaagcgcctagaaaagggagaggggtgaggtcaacataa

SEQ ID NO: 62539 - DNA, 73 bp, Homo sapiens
tctgtgccttgtttcgagagaatacacaggaagcgcctagaaaagggagaggggtgaggtcaacataaggaac

SEQ ID NO: 62540 - DNA, 72 bp, Homo sapiens
tgtttcgagagaatacacaggaagcgcctagaaaagggagaggggtgaggtcaacataaggaaccgctggta

SEQ ID NO: 62541 - DNA, 70 bp, Homo sapiens
agaatacacaggaagcgcctagaaaagggagaggggtgaggtcaacataaggaaccgctggtaccacaaa

SEQ ID NO: 62542 - DNA, 71 bp, Homo sapiens
agcgcctagaaaagggagaggggtgaggtcaacataaggaaccgctggtaccacaaaggtgactctgatta

SEQ ID NO: 62543 - DNA, 72 bp, Homo sapiens
aaagggagaggggtgaggtcaacataaggaaccgctggtaccacaaaggtgactctgattactgacagagaa

SEQ ID NO: 62544 - DNA, 71 bp, Homo sapiens
gggtgaggtcaacataaggaaccgctggtaccacaaaggtgactctgattactgacagagaaaacgttcct

SEQ ID NO: 62545 - DNA, 70 bp, Homo sapiens
aacataaggaaccgctggtaccacaaaggtgactctgattactgacagagaaaacgttccttctaagtta

SEQ ID NO: 62546 - DNA, 69 bp, Homo sapiens
aaccgctggtaccacaaaggtgactctgattactgacagagaaaacgttccttctaagttacaaaatta

SEQ ID NO: 62547 - DNA, 71 bp, Homo sapiens
aaagaaaaaaaggacacaaatgtataatccccataaaacacacacctatacacagcaaggaggacagaaca

SEQ ID NO: 62548 - DNA, 72 bp, Homo sapiens
aaggacacaaatgtataatccccataaaacacacacctatacacagcaaggaggacagaacaccaaaatatt

SEQ ID NO: 62549 - DNA, 74 bp, Homo sapiens
aaatgtataatccccataaaacacacacctatacacagcaaggaggacagaacaccaaaatatttcatagtgat

SEQ ID NO: 62550 - DNA, 78 bp, Homo sapiens
cataaaacacacacctatacacagcaaggaggacagaacaccaaaatatttcatagtgatttctctggatggcttgta

SEQ ID NO: 62551 - DNA, 77 bp, Homo sapiens
acacctatacacagcaaggaggacagaacaccaaaatatttcatagtgatttctctggatggcttgtaagcaaatgt

SEQ ID NO: 62552 - DNA, 76 bp, Homo sapiens
acagcaaggaggacagaacaccaaaatatttcatagtgatttctctggatggcttgtaagcaaatgttctttctta

SEQ ID NO: 62553 - DNA, 74 bp, Homo sapiens
aggaggacagaacaccaaaatatttcatagtgatttctctggatggcttgtaagcaaatgttctttcttaatac

SEQ ID NO: 62554 - DNA, 76 bp, Homo sapiens
ccaaaatatttcatagtgatttctctggatggcttgtaagcaaatgttctttcttaatactttctattatgactca

SEQ ID NO: 62555 - DNA, 80 bp, Homo sapiens
tcatagtgatttctctggatggcttgtaagcaaatgttctttcttaatactttctattatgactcatattctctatacaa

SEQ ID NO: 62556 - DNA, 74 bp, Homo sapiens
gtaagcaaatgttctttcttaatactttctattatgactcatattctctatacaaagcattattttaaggagga

SEQ ID NO: 62557 - DNA, 71 bp, Homo sapiens
gttctttcttaatactttctattatgactcatattctctatacaaagcattattttaaggaggaaaagttg

SEQ ID NO: 62558 - DNA, 71 bp, Homo sapiens
tctctatacaaagcattattttaaggaggaaaagttgtttcttaaagtcgttctctactcaaacattctga

SEQ ID NO: 62559 - DNA, 69 bp, Homo sapiens
agcattattttaaggaggaaaagttgtttcttaaagtcgttctctactcaaacattctgagtgcccaaa

SEQ ID NO: 62560 - DNA, 69 bp, Homo sapiens
ttttaaggaggaaaagttgtttcttaaagtcgttctctactcaaacattctgagtgcccaaaatggcaa

SEQ ID NO: 62561 - DNA, 74 bp, Homo sapiens
tttcttaaagtcgttctctactcaaacattctgagtgcccaaaatggcaagacgaccctgttaggctgcacaac

SEQ ID NO: 62562 - DNA, 75 bp, Homo sapiens
tcgttctctactcaaacattctgagtgcccaaaatggcaagacgaccctgttaggctgcacaactctacttaaaa

SEQ ID NO: 62563 - DNA, 73 bp, Homo sapiens
actcaaacattctgagtgcccaaaatggcaagacgaccctgttaggctgcacaactctacttaaaacattaaa

SEQ ID NO: 62564 - DNA, 72 bp, Homo sapiens
agtgcccaaaatggcaagacgaccctgttaggctgcacaactctacttaaaacattaaactgtcattaaaca

SEQ ID NO: 62565 - DNA, 72 bp, Homo sapiens
aaaatggcaagacgaccctgttaggctgcacaactctacttaaaacattaaactgtcattaaacactgaata

SEQ ID NO: 62566 - DNA, 70 bp, Homo sapiens
agacgaccctgttaggctgcacaactctacttaaaacattaaactgtcattaaacactgaataaaactag

SEQ ID NO: 62567 - DNA, 72 bp, Homo sapiens
gctgcacaactctacttaaaacattaaactgtcattaaacactgaataaaactaggtagatcaaactgttgg

SEQ ID NO: 62568 - DNA, 75 bp, Homo sapiens
taaaacattaaactgtcattaaacactgaataaaactaggtagatcaaactgttggtgacagagattgccgctga

SEQ ID NO: 62569 - DNA, 74 bp, Homo sapiens
aacactgaataaaactaggtagatcaaactgttggtgacagagattgccgctgagtggtaactgaaatcaaatt

SEQ ID NO: 62570 - DNA, 74 bp, Homo sapiens
ataaaactaggtagatcaaactgttggtgacagagattgccgctgagtggtaactgaaatcaaatttgccctgg

SEQ ID NO: 62571 - DNA, 77 bp, Homo sapiens
tggtgacagagattgccgctgagtggtaactgaaatcaaatttgccctggtcacaacgtggccgcgtaacctgtcaa

SEQ ID NO: 62572 - DNA, 74 bp, Homo sapiens
agagattgccgctgagtggtaactgaaatcaaatttgccctggtcacaacgtggccgcgtaacctgtcaagctt

SEQ ID NO: 62573 - DNA, 73 bp, Homo sapiens
agtggtaactgaaatcaaatttgccctggtcacaacgtggccgcgtaacctgtcaagctttgctcgaatgcct

SEQ ID NO: 62574 - DNA, 73 bp, Homo sapiens
aactgaaatcaaatttgccctggtcacaacgtggccgcgtaacctgtcaagctttgctcgaatgccttatacc

SEQ ID NO: 62575 - DNA, 74 bp, Homo sapiens
aaatttgccctggtcacaacgtggccgcgtaacctgtcaagctttgctcgaatgccttatacctgtggctagaa

SEQ ID NO: 62576 - DNA, 76 bp, Homo sapiens
ctggtcacaacgtggccgcgtaacctgtcaagctttgctcgaatgccttatacctgtggctagaagacatttcaag

SEQ ID NO: 62577 - DNA, 79 bp, Homo sapiens
cgtggccgcgtaacctgtcaagctttgctcgaatgccttatacctgtggctagaagacatttcaaggagcctcagcaca

SEQ ID NO: 62578 - DNA, 79 bp, Homo sapiens
taacctgtcaagctttgctcgaatgccttatacctgtggctagaagacatttcaaggagcctcagcacaggcccaccac

SEQ ID NO: 62579 - DNA, 81 bp, Homo sapiens
agctttgctcgaatgccttatacctgtggctagaagacatttcaaggagcctcagcacaggcccaccactctctgcaggga

SEQ ID NO: 62580 - DNA, 78 bp, Homo sapiens
aatgccttatacctgtggctagaagacatttcaaggagcctcagcacaggcccaccactctctgcagggagggcggga

SEQ ID NO: 62581 - DNA, 77 bp, Homo sapiens
tgtggctagaagacatttcaaggagcctcagcacaggcccaccactctctgcagggagggcgggaggaaagaaaata

SEQ ID NO: 62582 - DNA, 75 bp, Homo sapiens
tagaagacatttcaaggagcctcagcacaggcccaccactctctgcagggagggcgggaggaaagaaaatagaaa

SEQ ID NO: 62583 - DNA, 73 bp, Homo sapiens
ttcaaggagcctcagcacaggcccaccactctctgcagggagggcgggaggaaagaaaatagaaacaaacaag

SEQ ID NO: 62584 - DNA, 71 bp, Homo sapiens
accactctctgcagggagggcgggaggaaagaaaatagaaacaaacaaggtcgacacctactcaggacaca

SEQ ID NO: 62585 - DNA, 69 bp, Homo sapiens
ctctgcagggagggcgggaggaaagaaaatagaaacaaacaaggtcgacacctactcaggacacaaaaa

SEQ ID NO: 62586 - DNA, 72 bp, Homo sapiens
agaaacaaacaaggtcgacacctactcaggacacaaaaagccaggcgtggctctaacagcttctgctttttc

SEQ ID NO: 62587 - DNA, 75 bp, Homo sapiens
aaggtcgacacctactcaggacacaaaaagccaggcgtggctctaacagcttctgctttttctcctcagacatcc

SEQ ID NO: 62588 - DNA, 76 bp, Homo sapiens
tactcaggacacaaaaagccaggcgtggctctaacagcttctgctttttctcctcagacatcccacgtttggctct

SEQ ID NO: 62589 - DNA, 74 bp, Homo sapiens
aaaagccaggcgtggctctaacagcttctgctttttctcctcagacatcccacgtttggctcttggtaccacaa

SEQ ID NO: 62590 - DNA, 74 bp, Homo sapiens
ctctaacagcttctgctttttctcctcagacatcccacgtttggctcttggtaccacaaaggtacaatgatccc

SEQ ID NO: 62591 - DNA, 73 bp, Homo sapiens
ctttttctcctcagacatcccacgtttggctcttggtaccacaaaggtacaatgatccctgctgtttgaactc

SEQ ID NO: 62592 - DNA, 74 bp, Homo sapiens
tcagacatcccacgtttggctcttggtaccacaaaggtacaatgatccctgctgtttgaactctggttcaaagt

SEQ ID NO: 62593 - DNA, 71 bp, Homo sapiens
atcccacgtttggctcttggtaccacaaaggtacaatgatccctgctgtttgaactctggttcaaagttta

SEQ ID NO: 62594 - DNA, 74 bp, Homo sapiens
ttggctcttggtaccacaaaggtacaatgatccctgctgtttgaactctggttcaaagtttaggcagcaaggga

SEQ ID NO: 62595 - DNA, 75 bp, Homo sapiens
taccacaaaggtacaatgatccctgctgtttgaactctggttcaaagtttaggcagcaagggatgccccttcatc

SEQ ID NO: 62596 - DNA, 78 bp, Homo sapiens
ggtacaatgatccctgctgtttgaactctggttcaaagtttaggcagcaagggatgccccttcatcctgatctatctg

SEQ ID NO: 62597 - DNA, 80 bp, Homo sapiens
tccctgctgtttgaactctggttcaaagtttaggcagcaagggatgccccttcatcctgatctatctggcctgagcttca

SEQ ID NO: 62598 - DNA, 81 bp, Homo sapiens
ttgaactctggttcaaagtttaggcagcaagggatgccccttcatcctgatctatctggcctgagcttcagggagcagcaa

SEQ ID NO: 62599 - DNA, 83 bp, Homo sapiens
ttcaaagtttaggcagcaagggatgccccttcatcctgatctatctggcctgagcttcagggagcagcaagcaagagactgga

SEQ ID NO: 62600 - DNA, 87 bp, Homo sapiens
ttcatcctgatctatctggcctgagcttcagggagcagcaagcaagagactggagcatgagggatggacctgaatgcatttagttcc

SEQ ID NO: 62601 - DNA, 81 bp, Homo sapiens
agcttcagggagcagcaagcaagagactggagcatgagggatggacctgaatgcatttagttcccaagtttccatggcaag

SEQ ID NO: 62602 - DNA, 81 bp, Homo sapiens
cagcaagcaagagactggagcatgagggatggacctgaatgcatttagttcccaagtttccatggcaaggcacacttctag

SEQ ID NO: 62603 - DNA, 80 bp, Homo sapiens
aagagactggagcatgagggatggacctgaatgcatttagttcccaagtttccatggcaaggcacacttctagtcagaca

SEQ ID NO: 62604 - DNA, 79 bp, Homo sapiens
catgagggatggacctgaatgcatttagttcccaagtttccatggcaaggcacacttctagtcagacagttcctatcga

SEQ ID NO: 62605 - DNA, 78 bp, Homo sapiens
aatgcatttagttcccaagtttccatggcaaggcacacttctagtcagacagttcctatcgagcagcagaccttccca

SEQ ID NO: 62606 - DNA, 79 bp, Homo sapiens
tagttcccaagtttccatggcaaggcacacttctagtcagacagttcctatcgagcagcagaccttcccagcaaggaga

SEQ ID NO: 62607 - DNA, 82 bp, Homo sapiens
tttccatggcaaggcacacttctagtcagacagttcctatcgagcagcagaccttcccagcaaggagaccactaggcagcta

SEQ ID NO: 62608 - DNA, 81 bp, Homo sapiens
aaggcacacttctagtcagacagttcctatcgagcagcagaccttcccagcaaggagaccactaggcagctatcacgttgc

SEQ ID NO: 62609 - DNA, 80 bp, Homo sapiens
ttctagtcagacagttcctatcgagcagcagaccttcccagcaaggagaccactaggcagctatcacgttgccacccgcc

SEQ ID NO: 62610 - DNA, 80 bp, Homo sapiens
ttcctatcgagcagcagaccttcccagcaaggagaccactaggcagctatcacgttgccacccgcccctagctctcttca

SEQ ID NO: 62611 - DNA, 82 bp, Homo sapiens
cagcagaccttcccagcaaggagaccactaggcagctatcacgttgccacccgcccctagctctcttcagcagtgatgctct

SEQ ID NO: 62612 - DNA, 81 bp, Homo sapiens
ttcccagcaaggagaccactaggcagctatcacgttgccacccgcccctagctctcttcagcagtgatgctcttatcttta

SEQ ID NO: 62613 - DNA, 79 bp, Homo sapiens
aaggagaccactaggcagctatcacgttgccacccgcccctagctctcttcagcagtgatgctcttatctttaggacac

SEQ ID NO: 62614 - DNA, 80 bp, Homo sapiens
taggcagctatcacgttgccacccgcccctagctctcttcagcagtgatgctcttatctttaggacactggaagttgaaa

SEQ ID NO: 62615 - DNA, 78 bp, Homo sapiens
tatcacgttgccacccgcccctagctctcttcagcagtgatgctcttatctttaggacactggaagttgaaaaggctg

SEQ ID NO: 62616 - DNA, 78 bp, Homo sapiens
acccgcccctagctctcttcagcagtgatgctcttatctttaggacactggaagttgaaaaggctgtggcaacacaca

SEQ ID NO: 62617 - DNA, 79 bp, Homo sapiens
acacacacactcatctaggaacatgaagtgtgttaaagtctttcaggagggaggtactgtgcagtggtgacacacacag

SEQ ID NO: 62618 - DNA, 76 bp, Homo sapiens
taggaacatgaagtgtgttaaagtctttcaggagggaggtactgtgcagtggtgacacacacagggccacgttctc

SEQ ID NO: 62619 - DNA, 74 bp, Homo sapiens
tgtgttaaagtctttcaggagggaggtactgtgcagtggtgacacacacagggccacgttctcccaagccaaag

SEQ ID NO: 62620 - DNA, 73 bp, Homo sapiens
aagtctttcaggagggaggtactgtgcagtggtgacacacacagggccacgttctcccaagccaaaggtaaga

SEQ ID NO: 62621 - DNA, 76 bp, Homo sapiens
gaggtactgtgcagtggtgacacacacagggccacgttctcccaagccaaaggtaagagacacaagccacaaggaa

SEQ ID NO: 62622 - DNA, 78 bp, Homo sapiens
tactgtgcagtggtgacacacacagggccacgttctcccaagccaaaggtaagagacacaagccacaaggaaatcaga

SEQ ID NO: 62623 - DNA, 77 bp, Homo sapiens
actgtgcagtggtgacacacacagggccacgttctcccaagccaaaggtaagagacacaagccacaaggaaatcaga

SEQ ID NO: 62624 - DNA, 75 bp, Homo sapiens
cacacacagggccacgttctcccaagccaaaggtaagagacacaagccacaaggaaatcagacatgtgcggttaa

SEQ ID NO: 62625 - DNA, 73 bp, Homo sapiens
acagggccacgttctcccaagccaaaggtaagagacacaagccacaaggaaatcagacatgtgcggttaacag

SEQ ID NO: 62626 - DNA, 76 bp, Homo sapiens
aaaggtaagagacacaagccacaaggaaatcagacatgtgcggttaacaggtgccaccaacatcgactgctaaatg

SEQ ID NO: 62627 - DNA, 79 bp, Homo sapiens
taagagacacaagccacaaggaaatcagacatgtgcggttaacaggtgccaccaacatcgactgctaaatggagtttca

SEQ ID NO: 62628 - DNA, 75 bp, Homo sapiens
acaagccacaaggaaatcagacatgtgcggttaacaggtgccaccaacatcgactgctaaatggagtttcaaaag

SEQ ID NO: 62629 - DNA, 73 bp, Homo sapiens
aaggaaatcagacatgtgcggttaacaggtgccaccaacatcgactgctaaatggagtttcaaaagggagagg

SEQ ID NO: 62630 - DNA, 73 bp, Homo sapiens
acatgtgcggttaacaggtgccaccaacatcgactgctaaatggagtttcaaaagggagaggggtcctgactg

SEQ ID NO: 62631 - DNA, 72 bp, Homo sapiens
ttaacaggtgccaccaacatcgactgctaaatggagtttcaaaagggagaggggtcctgactgggaggcaaa

SEQ ID NO: 62632 - DNA, 69 bp, Homo sapiens
ccaccaacatcgactgctaaatggagtttcaaaagggagaggggtcctgactgggaggcaaacaagggg

SEQ ID NO: 62633 - DNA, 69 bp, Homo sapiens
actgctaaatggagtttcaaaagggagaggggtcctgactgggaggcaaacaagggggtcaagagctgg

SEQ ID NO: 62634 - DNA, 70 bp, Homo sapiens
aaagggagaggggtcctgactgggaggcaaacaagggggtcaagagctgggcctgcaaaggcgagctaaa

SEQ ID NO: 62635 - DNA, 76 bp, Homo sapiens
tcctgactgggaggcaaacaagggggtcaagagctgggcctgcaaaggcgagctaaatggtaacagacacagttga

SEQ ID NO: 62636 - DNA, 75 bp, Homo sapiens
gaggcaaacaagggggtcaagagctgggcctgcaaaggcgagctaaatggtaacagacacagttgaccgaggcta

SEQ ID NO: 62637 - DNA, 73 bp, Homo sapiens
aaacaagggggtcaagagctgggcctgcaaaggcgagctaaatggtaacagacacagttgaccgaggctacgc

SEQ ID NO: 62638 - DNA, 79 bp, Homo sapiens
agagctgggcctgcaaaggcgagctaaatggtaacagacacagttgaccgaggctacgcctctgcaacctcatcataaa

SEQ ID NO: 62639 - DNA, 73 bp, Homo sapiens
aatggtaacagacacagttgaccgaggctacgcctctgcaacctcatcataaacaggaatggggaaaaacacc

SEQ ID NO: 62640 - DNA, 74 bp, Homo sapiens
acacagttgaccgaggctacgcctctgcaacctcatcataaacaggaatggggaaaaacacctctgggatgggc

SEQ ID NO: 62641 - DNA, 76 bp, Homo sapiens
aggctacgcctctgcaacctcatcataaacaggaatggggaaaaacacctctgggatgggcctggatagccatgaa

SEQ ID NO: 62642 - DNA, 78 bp, Homo sapiens
ctgcaacctcatcataaacaggaatggggaaaaacacctctgggatgggcctggatagccatgaatcttgcagtttca

SEQ ID NO: 62643 - DNA, 75 bp, Homo sapiens
atcataaacaggaatggggaaaaacacctctgggatgggcctggatagccatgaatcttgcagtttcaaagtcta

SEQ ID NO: 62644 - DNA, 76 bp, Homo sapiens
ggaatggggaaaaacacctctgggatgggcctggatagccatgaatcttgcagtttcaaagtctatctctaatcaa

SEQ ID NO: 62645 - DNA, 76 bp, Homo sapiens
aaaaacacctctgggatgggcctggatagccatgaatcttgcagtttcaaagtctatctctaatcaaataatctaa

SEQ ID NO: 62646 - DNA, 78 bp, Homo sapiens
tgggatgggcctggatagccatgaatcttgcagtttcaaagtctatctctaatcaaataatctaaatgtccacaaaaa

SEQ ID NO: 62647 - DNA, 76 bp, Homo sapiens
cctggatagccatgaatcttgcagtttcaaagtctatctctaatcaaataatctaaatgtccacaaaaaagtggta

SEQ ID NO: 62648 - DNA, 79 bp, Homo sapiens
tagccatgaatcttgcagtttcaaagtctatctctaatcaaataatctaaatgtccacaaaaaagtggtaggatgtgca

SEQ ID NO: 62649 - DNA, 75 bp, Homo sapiens
tctaatcaaataatctaaatgtccacaaaaaagtggtaggatgtgcagccacctggctgggggttaactgacaga

SEQ ID NO: 62650 - DNA, 71 bp, Homo sapiens
cacaaaaaagtggtaggatgtgcagccacctggctgggggttaactgacagagctaaagtgttaattaaaa

SEQ ID NO: 62651 - DNA, 69 bp, Homo sapiens
acctggctgggggttaactgacagagctaaagtgttaattaaaatgaacacggaaactggaaagctcag

SEQ ID NO: 62652 - DNA, 75 bp, Homo sapiens
acagagctaaagtgttaattaaaatgaacacggaaactggaaagctcaggagagagctggttattcatactgatg

SEQ ID NO: 62653 - DNA, 76 bp, Homo sapiens
tgttaattaaaatgaacacggaaactggaaagctcaggagagagctggttattcatactgatggttagtcacagaa

SEQ ID NO: 62654 - DNA, 78 bp, Homo sapiens
ttaaaatgaacacggaaactggaaagctcaggagagagctggttattcatactgatggttagtcacagaaggcaagca

SEQ ID NO: 62655 - DNA, 83 bp, Homo sapiens
aaactggaaagctcaggagagagctggttattcatactgatggttagtcacagaaggcaagcactgtctcagaagagcatcac

SEQ ID NO: 62656 - DNA, 86 bp, Homo sapiens
aaagctcaggagagagctggttattcatactgatggttagtcacagaaggcaagcactgtctcagaagagcatcactcataacatc

SEQ ID NO: 62657 - DNA, 86 bp, Homo sapiens
agagctggttattcatactgatggttagtcacagaaggcaagcactgtctcagaagagcatcactcataacatcgacagacaggaa

SEQ ID NO: 62658 - DNA, 84 bp, Homo sapiens
ggttattcatactgatggttagtcacagaaggcaagcactgtctcagaagagcatcactcataacatcgacagacaggaacaaa

SEQ ID NO: 62659 - DNA, 87 bp, Homo sapiens
actgatggttagtcacagaaggcaagcactgtctcagaagagcatcactcataacatcgacagacaggaacaaacgctgctctgatc

SEQ ID NO: 62660 - DNA, 89 bp, Homo sapiens
agtcacagaaggcaagcactgtctcagaagagcatcactcataacatcgacagacaggaacaaacgctgctctgatctctgcattcaaa

SEQ ID NO: 62661 - DNA, 87 bp, Homo sapiens
agaagagcatcactcataacatcgacagacaggaacaaacgctgctctgatctctgcattcaaatcctgatggactcaagtcaagag

SEQ ID NO: 62662 - DNA, 87 bp, Homo sapiens
atcactcataacatcgacagacaggaacaaacgctgctctgatctctgcattcaaatcctgatggactcaagtcaagagtgatggcc

SEQ ID NO: 62663 - DNA, 84 bp, Homo sapiens
agacaggaacaaacgctgctctgatctctgcattcaaatcctgatggactcaagtcaagagtgatggcctcccacctctggcca

SEQ ID NO: 62664 - DNA, 83 bp, Homo sapiens
aaacgctgctctgatctctgcattcaaatcctgatggactcaagtcaagagtgatggcctcccacctctggccactcccatcc

SEQ ID NO: 62665 - DNA, 79 bp, Homo sapiens
ttcaaatcctgatggactcaagtcaagagtgatggcctcccacctctggccactcccatccccacacgcctttgcctca

SEQ ID NO: 62666 - DNA, 77 bp, Homo sapiens
atggactcaagtcaagagtgatggcctcccacctctggccactcccatccccacacgcctttgcctcaccgagccca

SEQ ID NO: 62667 - DNA, 75 bp, Homo sapiens
aagtcaagagtgatggcctcccacctctggccactcccatccccacacgcctttgcctcaccgagcccacacgcg

SEQ ID NO: 62668 - DNA, 78 bp, Homo sapiens
acctctggccactcccatccccacacgcctttgcctcaccgagcccacacgcggcggcagcagcacgcctaggctgaa

SEQ ID NO: 62669 - DNA, 76 bp, Homo sapiens
actcccatccccacacgcctttgcctcaccgagcccacacgcggcggcagcagcacgcctaggctgaaccataccc

SEQ ID NO: 62670 - DNA, 77 bp, Homo sapiens
cacacgcctttgcctcaccgagcccacacgcggcggcagcagcacgcctaggctgaaccatacccggtcaacttgga

SEQ ID NO: 62671 - DNA, 77 bp, Homo sapiens
tttgcctcaccgagcccacacgcggcggcagcagcacgcctaggctgaaccatacccggtcaacttggagactacaa

SEQ ID NO: 62672 - DNA, 76 bp, Homo sapiens
accgagcccacacgcggcggcagcagcacgcctaggctgaaccatacccggtcaacttggagactacaactgccaa

SEQ ID NO: 62673 - DNA, 77 bp, Homo sapiens
cggcggcagcagcacgcctaggctgaaccatacccggtcaacttggagactacaactgccaagcaggccggtgcttc

SEQ ID NO: 62674 - DNA, 73 bp, Homo sapiens
agcacgcctaggctgaaccatacccggtcaacttggagactacaactgccaagcaggccggtgcttcccgttc

SEQ ID NO: 62675 - DNA, 73 bp, Homo sapiens
taggctgaaccatacccggtcaacttggagactacaactgccaagcaggccggtgcttcccgttctactgtaa

SEQ ID NO: 62676 - DNA, 73 bp, Homo sapiens
atacccggtcaacttggagactacaactgccaagcaggccggtgcttcccgttctactgtaactctctaagca

SEQ ID NO: 62677 - DNA, 72 bp, Homo sapiens
actacaactgccaagcaggccggtgcttcccgttctactgtaactctctaagcaaaatgtgccaggttttta

SEQ ID NO: 62678 - DNA, 69 bp, Homo sapiens
aagcaggccggtgcttcccgttctactgtaactctctaagcaaaatgtgccaggtttttaggggagaaa

SEQ ID NO: 62679 - DNA, 71 bp, Homo sapiens
gtgcttcccgttctactgtaactctctaagcaaaatgtgccaggtttttaggggagaaaacacactcagtc

SEQ ID NO: 62680 - DNA, 69 bp, Homo sapiens
gttctactgtaactctctaagcaaaatgtgccaggtttttaggggagaaaacacactcagtcccctcct

SEQ ID NO: 62681 - DNA, 72 bp, Homo sapiens
taagcaaaatgtgccaggtttttaggggagaaaacacactcagtcccctccttgcactgtccccaatctcta

SEQ ID NO: 62682 - DNA, 72 bp, Homo sapiens
caggtttttaggggagaaaacacactcagtcccctccttgcactgtccccaatctctacgcctcaatcactc

SEQ ID NO: 62683 - DNA, 83 bp, Homo sapiens
tcccctccttgcactgtccccaatctctacgcctcaatcactccctgtgcctcaacagtgtgcccactcatcgctgatatata

SEQ ID NO: 62684 - DNA, 82 bp, Homo sapiens
cactgtccccaatctctacgcctcaatcactccctgtgcctcaacagtgtgcccactcatcgctgatatatacactcctgtt

SEQ ID NO: 62685 - DNA, 85 bp, Homo sapiens
aatctctacgcctcaatcactccctgtgcctcaacagtgtgcccactcatcgctgatatatacactcctgtttgccattcacgca

SEQ ID NO: 62686 - DNA, 84 bp, Homo sapiens
ctacgcctcaatcactccctgtgcctcaacagtgtgcccactcatcgctgatatatacactcctgtttgccattcacgcagggc

SEQ ID NO: 62687 - DNA, 83 bp, Homo sapiens
tccctgtgcctcaacagtgtgcccactcatcgctgatatatacactcctgtttgccattcacgcagggccgctctaacttgtg

SEQ ID NO: 62688 - DNA, 78 bp, Homo sapiens
tgcccactcatcgctgatatatacactcctgtttgccattcacgcagggccgctctaacttgtggtttctggtttaaa

SEQ ID NO: 62689 - DNA, 76 bp, Homo sapiens
atcgctgatatatacactcctgtttgccattcacgcagggccgctctaacttgtggtttctggtttaaatgggata

SEQ ID NO: 62690 - DNA, 76 bp, Homo sapiens
atatatacactcctgtttgccattcacgcagggccgctctaacttgtggtttctggtttaaatgggatagcacatg

SEQ ID NO: 62691 - DNA, 74 bp, Homo sapiens
aacttgtggtttctggtttaaatgggatagcacatgggaaaatgctctgaaaactacaaagcactgtgcaatct

SEQ ID NO: 62692 - DNA, 78 bp, Homo sapiens
ttctggtttaaatgggatagcacatgggaaaatgctctgaaaactacaaagcactgtgcaatcttgaggtggctctaa

SEQ ID NO: 62693 - DNA, 81 bp, Homo sapiens
gatagcacatgggaaaatgctctgaaaactacaaagcactgtgcaatcttgaggtggctctaagatctctttgcaaaaata

SEQ ID NO: 62694 - DNA, 80 bp, Homo sapiens
atgggaaaatgctctgaaaactacaaagcactgtgcaatcttgaggtggctctaagatctctttgcaaaaatagagcaca

SEQ ID NO: 62695 - DNA, 80 bp, Homo sapiens
tctgaaaactacaaagcactgtgcaatcttgaggtggctctaagatctctttgcaaaaatagagcacagaaaatctctaa

SEQ ID NO: 62696 - DNA, 82 bp, Homo sapiens
actacaaagcactgtgcaatcttgaggtggctctaagatctctttgcaaaaatagagcacagaaaatctctaacatgagaca

SEQ ID NO: 62697 - DNA, 82 bp, Homo sapiens
tgtgcaatcttgaggtggctctaagatctctttgcaaaaatagagcacagaaaatctctaacatgagacaggattctataaa

SEQ ID NO: 62698 - DNA, 80 bp, Homo sapiens
atcttgaggtggctctaagatctctttgcaaaaatagagcacagaaaatctctaacatgagacaggattctataaaatga

SEQ ID NO: 62699 - DNA, 78 bp, Homo sapiens
ctctaagatctctttgcaaaaatagagcacagaaaatctctaacatgagacaggattctataaaatgaacagactttc

SEQ ID NO: 62700 - DNA, 77 bp, Homo sapiens
ctctttgcaaaaatagagcacagaaaatctctaacatgagacaggattctataaaatgaacagactttctacagtac

SEQ ID NO: 62701 - DNA, 77 bp, Homo sapiens
atagagcacagaaaatctctaacatgagacaggattctataaaatgaacagactttctacagtacttaaaacaggca

SEQ ID NO: 62702 - DNA, 76 bp, Homo sapiens
aaatctctaacatgagacaggattctataaaatgaacagactttctacagtacttaaaacaggcatgcatccttac

SEQ ID NO: 62703 - DNA, 78 bp, Homo sapiens
tctaacatgagacaggattctataaaatgaacagactttctacagtacttaaaacaggcatgcatccttactacaata

SEQ ID NO: 62704 - DNA, 74 bp, Homo sapiens
gacaggattctataaaatgaacagactttctacagtacttaaaacaggcatgcatccttactacaataatttaa

SEQ ID NO: 62705 - DNA, 75 bp, Homo sapiens
gtacttaaaacaggcatgcatccttactacaataatttaaagtcaataactgcaagacaatgtctaaagttggca

SEQ ID NO: 62706 - DNA, 76 bp, Homo sapiens
aaacaggcatgcatccttactacaataatttaaagtcaataactgcaagacaatgtctaaagttggcatttctcag

SEQ ID NO: 62707 - DNA, 77 bp, Homo sapiens
gcatccttactacaataatttaaagtcaataactgcaagacaatgtctaaagttggcatttctcagtattatctatc

SEQ ID NO: 62708 - DNA, 78 bp, Homo sapiens
taaagtcaataactgcaagacaatgtctaaagttggcatttctcagtattatctatctcttgctttgttctaggaaga

SEQ ID NO: 62709 - DNA, 77 bp, Homo sapiens
taactgcaagacaatgtctaaagttggcatttctcagtattatctatctcttgctttgttctaggaagagtttcagg

SEQ ID NO: 62710 - DNA, 74 bp, Homo sapiens
aatgtctaaagttggcatttctcagtattatctatctcttgctttgttctaggaagagtttcaggtggcttgtt

SEQ ID NO: 62711 - DNA, 73 bp, Homo sapiens
aagttggcatttctcagtattatctatctcttgctttgttctaggaagagtttcaggtggcttgttttccagt

SEQ ID NO: 62712 - DNA, 73 bp, Homo sapiens
tatctcttgctttgttctaggaagagtttcaggtggcttgttttccagttcattcttcattacttggtagaaa

SEQ ID NO: 62713 - DNA, 71 bp, Homo sapiens
tttgttctaggaagagtttcaggtggcttgttttccagttcattcttcattacttggtagaaaaacatgaa

SEQ ID NO: 62714 - DNA, 76 bp, Homo sapiens
caggtggcttgttttccagttcattcttcattacttggtagaaaaacatgaaatgaataatatgactcactgctaa

SEQ ID NO: 62715 - DNA, 75 bp, Homo sapiens
cttgttttccagttcattcttcattacttggtagaaaaacatgaaatgaataatatgactcactgctaagggcat

SEQ ID NO: 62716 - DNA, 73 bp, Homo sapiens
cattcttcattacttggtagaaaaacatgaaatgaataatatgactcactgctaagggcattaagtttttact

SEQ ID NO: 62717 - DNA, 73 bp, Homo sapiens
tcattacttggtagaaaaacatgaaatgaataatatgactcactgctaagggcattaagtttttacttagtaa

SEQ ID NO: 62718 - DNA, 72 bp, Homo sapiens
agaaaaacatgaaatgaataatatgactcactgctaagggcattaagtttttacttagtaaataaaaatgca

SEQ ID NO: 62719 - DNA, 75 bp, Homo sapiens
atgaataatatgactcactgctaagggcattaagtttttacttagtaaataaaaatgcaatccctgcaatcacac

SEQ ID NO: 62720 - DNA, 74 bp, Homo sapiens
actgctaagggcattaagtttttacttagtaaataaaaatgcaatccctgcaatcacactacttcagaccatgc

SEQ ID NO: 62721 - DNA, 73 bp, Homo sapiens
gcattaagtttttacttagtaaataaaaatgcaatccctgcaatcacactacttcagaccatgcgccattttt

SEQ ID NO: 62722 - DNA, 75 bp, Homo sapiens
ttacttagtaaataaaaatgcaatccctgcaatcacactacttcagaccatgcgccattttttgaaagccacaaa

SEQ ID NO: 62723 - DNA, 78 bp, Homo sapiens
ataaaaatgcaatccctgcaatcacactacttcagaccatgcgccattttttgaaagccacaaaccacagtgccacat

SEQ ID NO: 62724 - DNA, 78 bp, Homo sapiens
aatccctgcaatcacactacttcagaccatgcgccattttttgaaagccacaaaccacagtgccacattcttatccaa

SEQ ID NO: 62725 - DNA, 75 bp, Homo sapiens
tacttcagaccatgcgccattttttgaaagccacaaaccacagtgccacattcttatccaaaaatatgtaataat

SEQ ID NO: 62726 - DNA, 76 bp, Homo sapiens
atgcgccattttttgaaagccacaaaccacagtgccacattcttatccaaaaatatgtaataattacacagatgta

SEQ ID NO: 62727 - DNA, 78 bp, Homo sapiens
gaaagccacaaaccacagtgccacattcttatccaaaaatatgtaataattacacagatgtatatctatggaagtatg

SEQ ID NO: 62728 - DNA, 77 bp, Homo sapiens
aaaccacagtgccacattcttatccaaaaatatgtaataattacacagatgtatatctatggaagtatggccttgga

SEQ ID NO: 62729 - DNA, 79 bp, Homo sapiens
cagtgccacattcttatccaaaaatatgtaataattacacagatgtatatctatggaagtatggccttggaattgcaat

SEQ ID NO: 62730 - DNA, 78 bp, Homo sapiens
atccaaaaatatgtaataattacacagatgtatatctatggaagtatggccttggaattgcaattagttgataagcat

SEQ ID NO: 62731 - DNA, 80 bp, Homo sapiens
attacacagatgtatatctatggaagtatggccttggaattgcaattagttgataagcatttatacttgctggcaagaaa

SEQ ID NO: 62732 - DNA, 80 bp, Homo sapiens
agatgtatatctatggaagtatggccttggaattgcaattagttgataagcatttatacttgctggcaagaaaatgtcac

SEQ ID NO: 62733 - DNA, 80 bp, Homo sapiens
tatggaagtatggccttggaattgcaattagttgataagcatttatacttgctggcaagaaaatgtcactgacattcagt

SEQ ID NO: 62734 - DNA, 79 bp, Homo sapiens
ccttggaattgcaattagttgataagcatttatacttgctggcaagaaaatgtcactgacattcagttcccagctctaa

SEQ ID NO: 62735 - DNA, 79 bp, Homo sapiens
aattgcaattagttgataagcatttatacttgctggcaagaaaatgtcactgacattcagttcccagctctaagtggag

SEQ ID NO: 62736 - DNA, 78 bp, Homo sapiens
ataagcatttatacttgctggcaagaaaatgtcactgacattcagttcccagctctaagtggagggctctggacactt

SEQ ID NO: 62737 - DNA, 79 bp, Homo sapiens
atttatacttgctggcaagaaaatgtcactgacattcagttcccagctctaagtggagggctctggacactttgcctca

SEQ ID NO: 62738 - DNA, 81 bp, Homo sapiens
gcaagaaaatgtcactgacattcagttcccagctctaagtggagggctctggacactttgcctcagtagagcactcagaaa

SEQ ID NO: 62739 - DNA, 78 bp, Homo sapiens
aaaatgtcactgacattcagttcccagctctaagtggagggctctggacactttgcctcagtagagcactcagaaaag

SEQ ID NO: 62740 - DNA, 75 bp, Homo sapiens
attcagttcccagctctaagtggagggctctggacactttgcctcagtagagcactcagaaaaggggttcagtcc

SEQ ID NO: 62741 - DNA, 74 bp, Homo sapiens
taagtggagggctctggacactttgcctcagtagagcactcagaaaaggggttcagtcctcttctgacaaaaaa

SEQ ID NO: 62742 - DNA, 75 bp, Homo sapiens
aaaagaaaatgagatctacatcacagttagaaggcattttttatcaagtaatcaaagatgattaaagatgctggg

SEQ ID NO: 62743 - DNA, 72 bp, Homo sapiens
catcacagttagaaggcattttttatcaagtaatcaaagatgattaaagatgctggggggaaacctaatttg

SEQ ID NO: 62744 - DNA, 70 bp, Homo sapiens
gaaggcattttttatcaagtaatcaaagatgattaaagatgctggggggaaacctaatttgtgagtaact

SEQ ID NO: 62745 - DNA, 69 bp, Homo sapiens
tttttatcaagtaatcaaagatgattaaagatgctggggggaaacctaatttgtgagtaactttgcctt

SEQ ID NO: 62746 - DNA, 68 bp, Homo sapiens
agtaatcaaagatgattaaagatgctggggggaaacctaatttgtgagtaactttgcctttattttaa

SEQ ID NO: 62747 - DNA, 67 bp, Homo sapiens
gatgattaaagatgctggggggaaacctaatttgtgagtaactttgcctttattttaaaaattacta

SEQ ID NO: 62748 - DNA, 72 bp, Homo sapiens
attactaagacaaaatctcttgtttctgagattcagccacaccatttgaacctcttataagagacaaagttt

SEQ ID NO: 62749 - DNA, 73 bp, Homo sapiens
aagacaaaatctcttgtttctgagattcagccacaccatttgaacctcttataagagacaaagttttcattaa

SEQ ID NO: 62750 - DNA, 76 bp, Homo sapiens
tctcttgtttctgagattcagccacaccatttgaacctcttataagagacaaagttttcattaaaatgtcattgtg

SEQ ID NO: 62751 - DNA, 76 bp, Homo sapiens
gattcagccacaccatttgaacctcttataagagacaaagttttcattaaaatgtcattgtgtatcttcaaaagca

SEQ ID NO: 62752 - DNA, 76 bp, Homo sapiens
gccacaccatttgaacctcttataagagacaaagttttcattaaaatgtcattgtgtatcttcaaaagcatagaga

SEQ ID NO: 62753 - DNA, 72 bp, Homo sapiens
tataagagacaaagttttcattaaaatgtcattgtgtatcttcaaaagcatagagaaaactgtaacggaaaa

SEQ ID NO: 62754 - DNA, 71 bp, Homo sapiens
tttcattaaaatgtcattgtgtatcttcaaaagcatagagaaaactgtaacggaaaaaaatacaaggaaga

SEQ ID NO: 62755 - DNA, 73 bp, Homo sapiens
aatgtcattgtgtatcttcaaaagcatagagaaaactgtaacggaaaaaaatacaaggaagaattcataatca

SEQ ID NO: 62756 - DNA, 72 bp, Homo sapiens
gtatcttcaaaagcatagagaaaactgtaacggaaaaaaatacaaggaagaattcataatcatatgaacagg

SEQ ID NO: 62757 - DNA, 71 bp, Homo sapiens
caaaagcatagagaaaactgtaacggaaaaaaatacaaggaagaattcataatcatatgaacaggttagaa

SEQ ID NO: 62758 - DNA, 72 bp, Homo sapiens
gagaaaactgtaacggaaaaaaatacaaggaagaattcataatcatatgaacaggttagaataaatgaatca

SEQ ID NO: 62759 - DNA, 74 bp, Homo sapiens
cggaaaaaaatacaaggaagaattcataatcatatgaacaggttagaataaatgaatcaaatctttatgtatga

SEQ ID NO: 62760 - DNA, 73 bp, Homo sapiens
aaaaatacaaggaagaattcataatcatatgaacaggttagaataaatgaatcaaatctttatgtatgaattt

SEQ ID NO: 62761 - DNA, 76 bp, Homo sapiens
tacaaggaagaattcataatcatatgaacaggttagaataaatgaatcaaatctttatgtatgaattttaatactg

SEQ ID NO: 62762 - DNA, 75 bp, Homo sapiens
caaggaagaattcataatcatatgaacaggttagaataaatgaatcaaatctttatgtatgaattttaatactgt

SEQ ID NO: 62763 - DNA, 75 bp, Homo sapiens
ggaagaattcataatcatatgaacaggttagaataaatgaatcaaatctttatgtatgaattttaatactgttct

SEQ ID NO: 62764 - DNA, 74 bp, Homo sapiens
attcataatcatatgaacaggttagaataaatgaatcaaatctttatgtatgaattttaatactgttcttaaaa

SEQ ID NO: 62765 - DNA, 74 bp, Homo sapiens
tcatatgaacaggttagaataaatgaatcaaatctttatgtatgaattttaatactgttcttaaaaaagcaaga

SEQ ID NO: 62766 - DNA, 73 bp, Homo sapiens
tgaacaggttagaataaatgaatcaaatctttatgtatgaattttaatactgttcttaaaaaagcaagatgag

SEQ ID NO: 62767 - DNA, 72 bp, Homo sapiens
ggttagaataaatgaatcaaatctttatgtatgaattttaatactgttcttaaaaaagcaagatgaggccag

SEQ ID NO: 62768 - DNA, 74 bp, Homo sapiens
gttagaataaatgaatcaaatctttatgtatgaattttaatactgttcttaaaaaagcaagatgaggccaggca

SEQ ID NO: 62769 - DNA, 77 bp, Homo sapiens
cagagccagacccagtctcggcgggcggggagcaagatgaatacatatcatgtaaaagacactttcatttatcctgt

SEQ ID NO: 62770 - DNA, 73 bp, Homo sapiens
acccagtctcggcgggcggggagcaagatgaatacatatcatgtaaaagacactttcatttatcctgttaaaa

SEQ ID NO: 62771 - DNA, 75 bp, Homo sapiens
gcgggcggggagcaagatgaatacatatcatgtaaaagacactttcatttatcctgttaaaattgatttcattta

SEQ ID NO: 62772 - DNA, 74 bp, Homo sapiens
gggagcaagatgaatacatatcatgtaaaagacactttcatttatcctgttaaaattgatttcatttagtaaaa

SEQ ID NO: 62773 - DNA, 74 bp, Homo sapiens
gatgaatacatatcatgtaaaagacactttcatttatcctgttaaaattgatttcatttagtaaaaaactatga

SEQ ID NO: 62774 - DNA, 73 bp, Homo sapiens
catatcatgtaaaagacactttcatttatcctgttaaaattgatttcatttagtaaaaaactatgaagagaca

SEQ ID NO: 62775 - DNA, 72 bp, Homo sapiens
catgtaaaagacactttcatttatcctgttaaaattgatttcatttagtaaaaaactatgaagagacagatc

SEQ ID NO: 62776 - DNA, 72 bp, Homo sapiens
aagacactttcatttatcctgttaaaattgatttcatttagtaaaaaactatgaagagacagatctcccaca

SEQ ID NO: 62777 - DNA, 74 bp, Homo sapiens
gacactttcatttatcctgttaaaattgatttcatttagtaaaaaactatgaagagacagatctcccacactga

SEQ ID NO: 62778 - DNA, 73 bp, Homo sapiens
catttatcctgttaaaattgatttcatttagtaaaaaactatgaagagacagatctcccacactgaagaagtc

SEQ ID NO: 62779 - DNA, 72 bp, Homo sapiens
atcctgttaaaattgatttcatttagtaaaaaactatgaagagacagatctcccacactgaagaagtctaaa

SEQ ID NO: 62780 - DNA, 71 bp, Homo sapiens
gttaaaattgatttcatttagtaaaaaactatgaagagacagatctcccacactgaagaagtctaaataaa

SEQ ID NO: 62781 - DNA, 74 bp, Homo sapiens
gatttcatttagtaaaaaactatgaagagacagatctcccacactgaagaagtctaaataaattatgtagacac

SEQ ID NO: 62782 - DNA, 73 bp, Homo sapiens
gtaaaaaactatgaagagacagatctcccacactgaagaagtctaaataaattatgtagacactttgcctaaa

SEQ ID NO: 62783 - DNA, 72 bp, Homo sapiens
cagatctcccacactgaagaagtctaaataaattatgtagacactttgcctaaagaaggtagaatataaacc

SEQ ID NO: 62784 - DNA, 69 bp, Homo sapiens
tcccacactgaagaagtctaaataaattatgtagacactttgcctaaagaaggtagaatataaaccccc

SEQ ID NO: 62785 - DNA, 69 bp, Homo sapiens
attatgtagacactttgcctaaagaaggtagaatataaaccccctatccttaaacatagtgagtccttc

SEQ ID NO: 62786 - DNA, 69 bp, Homo sapiens
tagacactttgcctaaagaaggtagaatataaaccccctatccttaaacatagtgagtccttccaaaga

SEQ ID NO: 62787 - DNA, 70 bp, Homo sapiens
cctaaagaaggtagaatataaaccccctatccttaaacatagtgagtccttccaaagaggatggcatgga

SEQ ID NO: 62788 - DNA, 75 bp, Homo sapiens
cccctatccttaaacatagtgagtccttccaaagaggatggcatggaggagggaagcggagcattacagtggaga

SEQ ID NO: 62789 - DNA, 74 bp, Homo sapiens
atccttaaacatagtgagtccttccaaagaggatggcatggaggagggaagcggagcattacagtggagaaacc

SEQ ID NO: 62790 - DNA, 77 bp, Homo sapiens
atagtgagtccttccaaagaggatggcatggaggagggaagcggagcattacagtggagaaacctgagaggcacgac

SEQ ID NO: 62791 - DNA, 76 bp, Homo sapiens
ttccaaagaggatggcatggaggagggaagcggagcattacagtggagaaacctgagaggcacgacctcaaccagg

SEQ ID NO: 62792 - DNA, 81 bp, Homo sapiens
gcatggaggagggaagcggagcattacagtggagaaacctgagaggcacgacctcaaccaggtggctgtgggcagcatcaa

SEQ ID NO: 62793 - DNA, 78 bp, Homo sapiens
agggaagcggagcattacagtggagaaacctgagaggcacgacctcaaccaggtggctgtgggcagcatcaaccatag

SEQ ID NO: 62794 - DNA, 79 bp, Homo sapiens
agcattacagtggagaaacctgagaggcacgacctcaaccaggtggctgtgggcagcatcaaccatagtggtaaagtca

SEQ ID NO: 62795 - DNA, 80 bp, Homo sapiens
tggagaaacctgagaggcacgacctcaaccaggtggctgtgggcagcatcaaccatagtggtaaagtcaccatgacacaa

SEQ ID NO: 62796 - DNA, 79 bp, Homo sapiens
aacctgagaggcacgacctcaaccaggtggctgtgggcagcatcaaccatagtggtaaagtcaccatgacacaacgcac

SEQ ID NO: 62797 - DNA, 78 bp, Homo sapiens
acgacctcaaccaggtggctgtgggcagcatcaaccatagtggtaaagtcaccatgacacaacgcaccctcaaagtga

SEQ ID NO: 62798 - DNA, 76 bp, Homo sapiens
ggtggctgtgggcagcatcaaccatagtggtaaagtcaccatgacacaacgcaccctcaaagtgacgtggtaaaaa

SEQ ID NO: 62799 - DNA, 76 bp, Homo sapiens
taaagtcaccatgacacaacgcaccctcaaagtgacgtggtaaaaatggcccttggctgctgagatcttcctttca

SEQ ID NO: 62800 - DNA, 74 bp, Homo sapiens
accatgacacaacgcaccctcaaagtgacgtggtaaaaatggcccttggctgctgagatcttcctttcaaaagc

SEQ ID NO: 62801 - DNA, 72 bp, Homo sapiens
acaacgcaccctcaaagtgacgtggtaaaaatggcccttggctgctgagatcttcctttcaaaagcccataa

SEQ ID NO: 62802 - DNA, 71 bp, Homo sapiens
aaagtgacgtggtaaaaatggcccttggctgctgagatcttcctttcaaaagcccataagcccagtcttac

SEQ ID NO: 62803 - DNA, 77 bp, Homo sapiens
ccttggctgctgagatcttcctttcaaaagcccataagcccagtcttaccatgagaaaaacatcagacaaatctgta

SEQ ID NO: 62804 - DNA, 75 bp, Homo sapiens
ctgagatcttcctttcaaaagcccataagcccagtcttaccatgagaaaaacatcagacaaatctgtacagaggg

SEQ ID NO: 62805 - DNA, 75 bp, Homo sapiens
ctttcaaaagcccataagcccagtcttaccatgagaaaaacatcagacaaatctgtacagaggggcatcctataa

SEQ ID NO: 62806 - DNA, 78 bp, Homo sapiens
cagtcttaccatgagaaaaacatcagacaaatctgtacagaggggcatcctataatacacctgactcgttctcctcaa

SEQ ID NO: 62807 - DNA, 76 bp, Homo sapiens
ttaccatgagaaaaacatcagacaaatctgtacagaggggcatcctataatacacctgactcgttctcctcaaaac

SEQ ID NO: 62808 - DNA, 74 bp, Homo sapiens
aaaaacatcagacaaatctgtacagaggggcatcctataatacacctgactcgttctcctcaaaactgtcaagg

SEQ ID NO: 62809 - DNA, 73 bp, Homo sapiens
acaaatctgtacagaggggcatcctataatacacctgactcgttctcctcaaaactgtcaaggtcattaaaaa

SEQ ID NO: 62810 - DNA, 70 bp, Homo sapiens
agaggggcatcctataatacacctgactcgttctcctcaaaactgtcaaggtcattaaaaaccaaggaaa

SEQ ID NO: 62811 - DNA, 70 bp, Homo sapiens
ctataatacacctgactcgttctcctcaaaactgtcaaggtcattaaaaaccaaggaaaggctgagaaaa

SEQ ID NO: 62812 - DNA, 71 bp, Homo sapiens
ctgactcgttctcctcaaaactgtcaaggtcattaaaaaccaaggaaaggctgagaaaacgtcacaatcaa

SEQ ID NO: 62813 - DNA, 71 bp, Homo sapiens
tcgttctcctcaaaactgtcaaggtcattaaaaaccaaggaaaggctgagaaaacgtcacaatcaagaggc

SEQ ID NO: 62814 - DNA, 71 bp, Homo sapiens
actgtcaaggtcattaaaaaccaaggaaaggctgagaaaacgtcacaatcaagaggcgcctaaggagacag

SEQ ID NO: 62815 - DNA, 71 bp, Homo sapiens
tcattaaaaaccaaggaaaggctgagaaaacgtcacaatcaagaggcgcctaaggagacaggacgattaaa

SEQ ID NO: 62816 - DNA, 69 bp, Homo sapiens
aaaccaaggaaaggctgagaaaacgtcacaatcaagaggcgcctaaggagacaggacgattaaaagtaa

SEQ ID NO: 62817 - DNA, 72 bp, Homo sapiens
aaaggctgagaaaacgtcacaatcaagaggcgcctaaggagacaggacgattaaaagtaatggggtatcatg

SEQ ID NO: 62818 - DNA, 72 bp, Homo sapiens
aaaacgtcacaatcaagaggcgcctaaggagacaggacgattaaaagtaatggggtatcatggatggtattc

SEQ ID NO: 62819 - DNA, 73 bp, Homo sapiens
aatcaagaggcgcctaaggagacaggacgattaaaagtaatggggtatcatggatggtattccacaacagaag

SEQ ID NO: 62820 - DNA, 69 bp, Homo sapiens
aggacgattaaaagtaatggggtatcatggatggtattccacaacagaaggacattagggaaaattaaa

SEQ ID NO: 62821 - DNA, 68 bp, Homo sapiens
ttaaaagtaatggggtatcatggatggtattccacaacagaaggacattagggaaaattaaaggaaat

SEQ ID NO: 62822 - DNA, 70 bp, Homo sapiens
gggtatcatggatggtattccacaacagaaggacattagggaaaattaaaggaaatttgattaaagtatg

SEQ ID NO: 62823 - DNA, 69 bp, Homo sapiens
ggatggtattccacaacagaaggacattagggaaaattaaaggaaatttgattaaagtatggacttcag

SEQ ID NO: 62824 - DNA, 69 bp, Homo sapiens
cacaacagaaggacattagggaaaattaaaggaaatttgattaaagtatggacttcagttaatcacaag

SEQ ID NO: 62825 - DNA, 72 bp, Homo sapiens
aattaaaggaaatttgattaaagtatggacttcagttaatcacaagtatcagtattggttcattacttatga

SEQ ID NO: 62826 - DNA, 74 bp, Homo sapiens
ggaaatttgattaaagtatggacttcagttaatcacaagtatcagtattggttcattacttatgacaaacacaa

SEQ ID NO: 62827 - DNA, 74 bp, Homo sapiens
aagtatggacttcagttaatcacaagtatcagtattggttcattacttatgacaaacacaacacaggaaaggta

SEQ ID NO: 62828 - DNA, 75 bp, Homo sapiens
ttcagttaatcacaagtatcagtattggttcattacttatgacaaacacaacacaggaaaggtaagaggctaaca

SEQ ID NO: 62829 - DNA, 75 bp, Homo sapiens
taatcacaagtatcagtattggttcattacttatgacaaacacaacacaggaaaggtaagaggctaacaatagga

SEQ ID NO: 62830 - DNA, 73 bp, Homo sapiens
agtattggttcattacttatgacaaacacaacacaggaaaggtaagaggctaacaataggaagtgcgtggatg

SEQ ID NO: 62831 - DNA, 73 bp, Homo sapiens
tggttcattacttatgacaaacacaacacaggaaaggtaagaggctaacaataggaagtgcgtggatggtggg

SEQ ID NO: 62832 - DNA, 73 bp, Homo sapiens
ttatgacaaacacaacacaggaaaggtaagaggctaacaataggaagtgcgtggatggtggggaggagataaa

SEQ ID NO: 62833 - DNA, 69 bp, Homo sapiens
aacacaggaaaggtaagaggctaacaataggaagtgcgtggatggtggggaggagataaagaaccctgt

SEQ ID NO: 62834 - DNA, 70 bp, Homo sapiens
ggaaaggtaagaggctaacaataggaagtgcgtggatggtggggaggagataaagaaccctgttgtacta

SEQ ID NO: 62835 - DNA, 68 bp, Homo sapiens
ctaacaataggaagtgcgtggatggtggggaggagataaagaaccctgttgtactatcttttaatttt

SEQ ID NO: 62836 - DNA, 69 bp, Homo sapiens
ataggaagtgcgtggatggtggggaggagataaagaaccctgttgtactatcttttaatttttctgtaa

SEQ ID NO: 62837 - DNA, 78 bp, Homo sapiens
tttctgtaaatctaaaactgttctcaacatagagtctactcagtcagttgcaccgcctgtagtttcatctactgagaa

SEQ ID NO: 62838 - DNA, 78 bp, Homo sapiens
tctaaaactgttctcaacatagagtctactcagtcagttgcaccgcctgtagtttcatctactgagaaagttgaggct

SEQ ID NO: 62839 - DNA, 79 bp, Homo sapiens
aactgttctcaacatagagtctactcagtcagttgcaccgcctgtagtttcatctactgagaaagttgaggcttgagga

SEQ ID NO: 62840 - DNA, 78 bp, Homo sapiens
aacatagagtctactcagtcagttgcaccgcctgtagtttcatctactgagaaagttgaggcttgaggatcgcttaaa

SEQ ID NO: 62841 - DNA, 76 bp, Homo sapiens
tactcagtcagttgcaccgcctgtagtttcatctactgagaaagttgaggcttgaggatcgcttaaacccaggaat

SEQ ID NO: 62842 - DNA, 75 bp, Homo sapiens
cttaaacccaggaattcaaggctgtagtacactataattgagcctgtgaacggccactgcttgggcaacataata

SEQ ID NO: 62843 - DNA, 81 bp, Homo sapiens
aattcaaggctgtagtacactataattgagcctgtgaacggccactgcttgggcaacataatagcaagatctatctctcta

SEQ ID NO: 62844 - DNA, 81 bp, Homo sapiens
attcaaggctgtagtacactataattgagcctgtgaacggccactgcttgggcaacataatagcaagatctatctctctaa

SEQ ID NO: 62845 - DNA, 75 bp, Homo sapiens
actataattgagcctgtgaacggccactgcttgggcaacataatagcaagatctatctctctaaaaaaaatttaa

SEQ ID NO: 62846 - DNA, 73 bp, Homo sapiens
ctgtgaacggccactgcttgggcaacataatagcaagatctatctctctaaaaaaaatttaagtctacttaaa

SEQ ID NO: 62847 - DNA, 70 bp, Homo sapiens
aacggccactgcttgggcaacataatagcaagatctatctctctaaaaaaaatttaagtctacttaaaaa

SEQ ID NO: 62848 - DNA, 71 bp, Homo sapiens
aaaaaaaaactatgaaggaaatgtgataagtatcaacaggcattaattctaatgaaaacacagatgttggt

SEQ ID NO: 62849 - DNA, 76 bp, Homo sapiens
ctatgaaggaaatgtgataagtatcaacaggcattaattctaatgaaaacacagatgttggttatactatcctttg

SEQ ID NO: 62850 - DNA, 75 bp, Homo sapiens
ggaaatgtgataagtatcaacaggcattaattctaatgaaaacacagatgttggttatactatcctttgttcttg

SEQ ID NO: 62851 - DNA, 74 bp, Homo sapiens
ataagtatcaacaggcattaattctaatgaaaacacagatgttggttatactatcctttgttcttgtgttgaaa

SEQ ID NO: 62852 - DNA, 71 bp, Homo sapiens
acaggcattaattctaatgaaaacacagatgttggttatactatcctttgttcttgtgttgaaaatttaaa

SEQ ID NO: 62853 - DNA, 71 bp, Homo sapiens
tctaatgaaaacacagatgttggttatactatcctttgttcttgtgttgaaaatttaaaaaactcagaaca

SEQ ID NO: 62854 - DNA, 70 bp, Homo sapiens
acacagatgttggttatactatcctttgttcttgtgttgaaaatttaaaaaactcagaacataaaaatca

SEQ ID NO: 62855 - DNA, 66 bp, Homo sapiens
gttggttatactatcctttgttcttgtgttgaaaatttaaaaaactcagaacataaaaatcaaacc

SEQ ID NO: 62856 - DNA, 67 bp, Homo sapiens
tcctttgttcttgtgttgaaaatttaaaaaactcagaacataaaaatcaaacctttccttgctacca

SEQ ID NO: 62857 - DNA, 69 bp, Homo sapiens
tcttgtgttgaaaatttaaaaaactcagaacataaaaatcaaacctttccttgctaccataatgtaaga

SEQ ID NO: 62858 - DNA, 65 bp, Homo sapiens
aaatttaaaaaactcagaacataaaaatcaaacctttccttgctaccataatgtaagaaaaatat

SEQ ID NO: 62859 - DNA, 66 bp, Homo sapiens
aaaactcagaacataaaaatcaaacctttccttgctaccataatgtaagaaaaatatttttcaaaa

SEQ ID NO: 62860 - DNA, 67 bp, Homo sapiens
aaaatcaaacctttccttgctaccataatgtaagaaaaatatttttcaaaaagtgatcttgcttact

SEQ ID NO: 62861 - DNA, 67 bp, Homo sapiens
caaacctttccttgctaccataatgtaagaaaaatatttttcaaaaagtgatcttgcttacttttta

SEQ ID NO: 62862 - DNA, 72 bp, Homo sapiens
acctggccaagatcactttaaaaaataatgtttaagaaaattaattatgctggcctcttgcacataggccaa

SEQ ID NO: 62863 - DNA, 74 bp, Homo sapiens
gccaagatcactttaaaaaataatgtttaagaaaattaattatgctggcctcttgcacataggccaaggcacat

SEQ ID NO: 62864 - DNA, 73 bp, Homo sapiens
aaaaataatgtttaagaaaattaattatgctggcctcttgcacataggccaaggcacatttttctagccagaa

SEQ ID NO: 62865 - DNA, 75 bp, Homo sapiens
tttaagaaaattaattatgctggcctcttgcacataggccaaggcacatttttctagccagaaaagctgacttct

SEQ ID NO: 62866 - DNA, 73 bp, Homo sapiens
aaaattaattatgctggcctcttgcacataggccaaggcacatttttctagccagaaaagctgacttcttttt

SEQ ID NO: 62867 - DNA, 73 bp, Homo sapiens
accatgcccgtcgaaagctgacttctttatgggtcttacaaaaattgcttggctgaattagtatttcagatta

SEQ ID NO: 62868 - DNA, 74 bp, Homo sapiens
gtcgaaagctgacttctttatgggtcttacaaaaattgcttggctgaattagtatttcagattaagagccataa

SEQ ID NO: 62869 - DNA, 75 bp, Homo sapiens
tgacttctttatgggtcttacaaaaattgcttggctgaattagtatttcagattaagagccataacccaatcaga

SEQ ID NO: 62870 - DNA, 74 bp, Homo sapiens
tttatgggtcttacaaaaattgcttggctgaattagtatttcagattaagagccataacccaatcagaccacag

SEQ ID NO: 62871 - DNA, 76 bp, Homo sapiens
ttacaaaaattgcttggctgaattagtatttcagattaagagccataacccaatcagaccacaggcaaagcttaca

SEQ ID NO: 62872 - DNA, 78 bp, Homo sapiens
tggctgaattagtatttcagattaagagccataacccaatcagaccacaggcaaagcttacagcatacaagggtatgt

SEQ ID NO: 62873 - DNA, 76 bp, Homo sapiens
tagtatttcagattaagagccataacccaatcagaccacaggcaaagcttacagcatacaagggtatgtttctaaa

SEQ ID NO: 62874 - DNA, 73 bp, Homo sapiens
attaagagccataacccaatcagaccacaggcaaagcttacagcatacaagggtatgtttctaaaaaggaata

SEQ ID NO: 62875 - DNA, 72 bp, Homo sapiens
taacccaatcagaccacaggcaaagcttacagcatacaagggtatgtttctaaaaaggaataagcagtaaat

SEQ ID NO: 62876 - DNA, 71 bp, Homo sapiens
agaccacaggcaaagcttacagcatacaagggtatgtttctaaaaaggaataagcagtaaattctttcatt

SEQ ID NO: 62877 - DNA, 72 bp, Homo sapiens
acaggcaaagcttacagcatacaagggtatgtttctaaaaaggaataagcagtaaattctttcatttgacaa

SEQ ID NO: 62878 - DNA, 67 bp, Homo sapiens
acaagggtatgtttctaaaaaggaataagcagtaaattctttcatttgacaaaaatactcctgggaa

SEQ ID NO: 62879 - DNA, 70 bp, Homo sapiens
ataagcagtaaattctttcatttgacaaaaatactcctgggaaattagactcactctccaggttacctgt

SEQ ID NO: 62880 - DNA, 69 bp, Homo sapiens
attctttcatttgacaaaaatactcctgggaaattagactcactctccaggttacctgttctataaatt

SEQ ID NO: 62881 - DNA, 69 bp, Homo sapiens
aaaatactcctgggaaattagactcactctccaggttacctgttctataaatttcgtgcatgggggaaa

SEQ ID NO: 62882 - DNA, 71 bp, Homo sapiens
aaattagactcactctccaggttacctgttctataaatttcgtgcatgggggaaaacctgacccacacaca

SEQ ID NO: 62883 - DNA, 71 bp, Homo sapiens
agactcactctccaggttacctgttctataaatttcgtgcatgggggaaaacctgacccacacacagaaaa

SEQ ID NO: 62884 - DNA, 74 bp, Homo sapiens
tctataaatttcgtgcatgggggaaaacctgacccacacacagaaaataaggtcttatgtatttcaccatcata

SEQ ID NO: 62885 - DNA, 71 bp, Homo sapiens
aatttcgtgcatgggggaaaacctgacccacacacagaaaataaggtcttatgtatttcaccatcatagtt

SEQ ID NO: 62886 - DNA, 75 bp, Homo sapiens
ggaaaacctgacccacacacagaaaataaggtcttatgtatttcaccatcatagtttgaatacagctgtattaca

SEQ ID NO: 62887 - DNA, 79 bp, Homo sapiens
cacagaaaataaggtcttatgtatttcaccatcatagtttgaatacagctgtattacagacaaaatgatgcagtcgaaa

SEQ ID NO: 62888 - DNA, 78 bp, Homo sapiens
gtcttatgtatttcaccatcatagtttgaatacagctgtattacagacaaaatgatgcagtcgaaaaaaatacaggct

SEQ ID NO: 62889 - DNA, 79 bp, Homo sapiens
tatttcaccatcatagtttgaatacagctgtattacagacaaaatgatgcagtcgaaaaaaatacaggcttggagtcaa

SEQ ID NO: 62890 - DNA, 78 bp, Homo sapiens
atagtttgaatacagctgtattacagacaaaatgatgcagtcgaaaaaaatacaggcttggagtcaatcacaggtgga

SEQ ID NO: 62891 - DNA, 74 bp, Homo sapiens
ctgtattacagacaaaatgatgcagtcgaaaaaaatacaggcttggagtcaatcacaggtggattttaagtaaa

SEQ ID NO: 62892 - DNA, 71 bp, Homo sapiens
aaaatgatgcagtcgaaaaaaatacaggcttggagtcaatcacaggtggattttaagtaaaattctaccac

SEQ ID NO: 62893 - DNA, 70 bp, Homo sapiens
gcagtcgaaaaaaatacaggcttggagtcaatcacaggtggattttaagtaaaattctaccactttcaaa

SEQ ID NO: 62894 - DNA, 70 bp, Homo sapiens
aaaaatacaggcttggagtcaatcacaggtggattttaagtaaaattctaccactttcaaacatgtgtcg

SEQ ID NO: 62895 - DNA, 74 bp, Homo sapiens
tcacaggtggattttaagtaaaattctaccactttcaaacatgtgtcgtcttgaataattttctgcataggcag

SEQ ID NO: 62896 - DNA, 73 bp, Homo sapiens
aattctaccactttcaaacatgtgtcgtcttgaataattttctgcataggcaggaaagtggttcagaatattt

SEQ ID NO: 62897 - DNA, 73 bp, Homo sapiens
actttcaaacatgtgtcgtcttgaataattttctgcataggcaggaaagtggttcagaatattttactccttg

SEQ ID NO: 62898 - DNA, 75 bp, Homo sapiens
tgaataattttctgcataggcaggaaagtggttcagaatattttactccttgttataaaagacatatggcaccca

SEQ ID NO: 62899 - DNA, 75 bp, Homo sapiens
ttttctgcataggcaggaaagtggttcagaatattttactccttgttataaaagacatatggcacccacctcaca

SEQ ID NO: 62900 - DNA, 71 bp, Homo sapiens
aggaaagtggttcagaatattttactccttgttataaaagacatatggcacccacctcacaggattattaa

SEQ ID NO: 62901 - DNA, 73 bp, Homo sapiens
gtggttcagaatattttactccttgttataaaagacatatggcacccacctcacaggattattaaaaatgaga

SEQ ID NO: 62902 - DNA, 74 bp, Homo sapiens
tttactccttgttataaaagacatatggcacccacctcacaggattattaaaaatgagaaaaagcaagatcatg

SEQ ID NO: 62903 - DNA, 77 bp, Homo sapiens
ttgttataaaagacatatggcacccacctcacaggattattaaaaatgagaaaaagcaagatcatgtttgcaaagca

SEQ ID NO: 62904 - DNA, 78 bp, Homo sapiens
aaagacatatggcacccacctcacaggattattaaaaatgagaaaaagcaagatcatgtttgcaaagcacccagcaca

SEQ ID NO: 62905 - DNA, 78 bp, Homo sapiens
ccacctcacaggattattaaaaatgagaaaaagcaagatcatgtttgcaaagcacccagcacagtgcccagtacaata

SEQ ID NO: 62906 - DNA, 79 bp, Homo sapiens
acaggattattaaaaatgagaaaaagcaagatcatgtttgcaaagcacccagcacagtgcccagtacaataggcatgtc

SEQ ID NO: 62907 - DNA, 79 bp, Homo sapiens
aaaatgagaaaaagcaagatcatgtttgcaaagcacccagcacagtgcccagtacaataggcatgtccttttctgctct

SEQ ID NO: 62908 - DNA, 79 bp, Homo sapiens
aaaaagcaagatcatgtttgcaaagcacccagcacagtgcccagtacaataggcatgtccttttctgctcttcctctta

SEQ ID NO: 62909 - DNA, 81 bp, Homo sapiens
agatcatgtttgcaaagcacccagcacagtgcccagtacaataggcatgtccttttctgctcttcctcttactgttattca

SEQ ID NO: 62910 - DNA, 77 bp, Homo sapiens
agcacccagcacagtgcccagtacaataggcatgtccttttctgctcttcctcttactgttattcaggaagaataaa

SEQ ID NO: 62911 - DNA, 75 bp, Homo sapiens
acagtgcccagtacaataggcatgtccttttctgctcttcctcttactgttattcaggaagaataaatatagtaa

SEQ ID NO: 62912 - DNA, 76 bp, Homo sapiens
aggcatgtccttttctgctcttcctcttactgttattcaggaagaataaatatagtaattgttatccttgctcata

SEQ ID NO: 62913 - DNA, 77 bp, Homo sapiens
ttttctgctcttcctcttactgttattcaggaagaataaatatagtaattgttatccttgctcatacctggatcaca

SEQ ID NO: 62914 - DNA, 77 bp, Homo sapiens
ctgttattcaggaagaataaatatagtaattgttatccttgctcatacctggatcacactgaaattttatgctatag

SEQ ID NO: 62915 - DNA, 79 bp, Homo sapiens
ggaagaataaatatagtaattgttatccttgctcatacctggatcacactgaaattttatgctatagtcatatacataa

SEQ ID NO: 62916 - DNA, 78 bp, Homo sapiens
aatatagtaattgttatccttgctcatacctggatcacactgaaattttatgctatagtcatatacataattttgaaa

SEQ ID NO: 62917 - DNA, 78 bp, Homo sapiens
ttgttatccttgctcatacctggatcacactgaaattttatgctatagtcatatacataattttgaaaaatgcaaaaa

SEQ ID NO: 62918 - DNA, 69 bp, Homo sapiens
aaaaaattacatggtaatcaacataaaaacccttagatattttaacttggtgacagatggacagcaaat

SEQ ID NO: 62919 - DNA, 73 bp, Homo sapiens
acatggtaatcaacataaaaacccttagatattttaacttggtgacagatggacagcaaattactgtctatgg

SEQ ID NO: 62920 - DNA, 72 bp, Homo sapiens
atcaacataaaaacccttagatattttaacttggtgacagatggacagcaaattactgtctatggtaatttg

SEQ ID NO: 62921 - DNA, 73 bp, Homo sapiens
gatattttaacttggtgacagatggacagcaaattactgtctatggtaatttgtataaatataactcttttta

SEQ ID NO: 62922 - DNA, 74 bp, Homo sapiens
cttggtgacagatggacagcaaattactgtctatggtaatttgtataaatataactctttttaaaatatagcaa

SEQ ID NO: 62923 - DNA, 71 bp, Homo sapiens
gatggacagcaaattactgtctatggtaatttgtataaatataactctttttaaaatatagcaaaaatatt

SEQ ID NO: 62924 - DNA, 67 bp, Homo sapiens
ttactgtctatggtaatttgtataaatataactctttttaaaatatagcaaaaatattttggaaaag

SEQ ID NO: 62925 - DNA, 66 bp, Homo sapiens
gtaatttgtataaatataactctttttaaaatatagcaaaaatattttggaaaagttggtccttga

SEQ ID NO: 62926 - DNA, 68 bp, Homo sapiens
tgtataaatataactctttttaaaatatagcaaaaatattttggaaaagttggtccttgaagttatga

SEQ ID NO: 62927 - DNA, 69 bp, Homo sapiens
atatagcaaaaatattttggaaaagttggtccttgaagttatgatttggacccatttacattaagaatg

SEQ ID NO: 62928 - DNA, 71 bp, Homo sapiens
aatattttggaaaagttggtccttgaagttatgatttggacccatttacattaagaatgttagatgtggca

SEQ ID NO: 62929 - DNA, 71 bp, Homo sapiens
tttggaaaagttggtccttgaagttatgatttggacccatttacattaagaatgttagatgtggcacttcc

SEQ ID NO: 62930 - DNA, 73 bp, Homo sapiens
ttggtccttgaagttatgatttggacccatttacattaagaatgttagatgtggcacttcccaagtttctaca

SEQ ID NO: 62931 - DNA, 72 bp, Homo sapiens
aagttatgatttggacccatttacattaagaatgttagatgtggcacttcccaagtttctacagtgaactta

SEQ ID NO: 62932 - DNA, 74 bp, Homo sapiens
acccatttacattaagaatgttagatgtggcacttcccaagtttctacagtgaacttaatcctcagacgattca

SEQ ID NO: 62933 - DNA, 78 bp, Homo sapiens
ttacattaagaatgttagatgtggcacttcccaagtttctacagtgaacttaatcctcagacgattcagaagatgaga

SEQ ID NO: 62934 - DNA, 78 bp, Homo sapiens
ttaagaatgttagatgtggcacttcccaagtttctacagtgaacttaatcctcagacgattcagaagatgagagataa

SEQ ID NO: 62935 - DNA, 76 bp, Homo sapiens
tagatgtggcacttcccaagtttctacagtgaacttaatcctcagacgattcagaagatgagagataacgtttaaa

SEQ ID NO: 62936 - DNA, 74 bp, Homo sapiens
aagtttctacagtgaacttaatcctcagacgattcagaagatgagagataacgtttaaagtgtgaaatacacag

SEQ ID NO: 62937 - DNA, 76 bp, Homo sapiens
tgaacttaatcctcagacgattcagaagatgagagataacgtttaaagtgtgaaatacacagtcactacgggacaa

SEQ ID NO: 62938 - DNA, 74 bp, Homo sapiens
aacttaatcctcagacgattcagaagatgagagataacgtttaaagtgtgaaatacacagtcactacgggacaa

SEQ ID NO: 62939 - DNA, 75 bp, Homo sapiens
gaagatgagagataacgtttaaagtgtgaaatacacagtcactacgggacaaccattatatatcataatgttacg

SEQ ID NO: 62940 - DNA, 74 bp, Homo sapiens
gataacgtttaaagtgtgaaatacacagtcactacgggacaaccattatatatcataatgttacgttcacacca

SEQ ID NO: 62941 - DNA, 75 bp, Homo sapiens
aagtgtgaaatacacagtcactacgggacaaccattatatatcataatgttacgttcacaccattaaaatggaga

SEQ ID NO: 62942 - DNA, 75 bp, Homo sapiens
aaatacacagtcactacgggacaaccattatatatcataatgttacgttcacaccattaaaatggagagtatctc

SEQ ID NO: 62943 - DNA, 75 bp, Homo sapiens
actacgggacaaccattatatatcataatgttacgttcacaccattaaaatggagagtatctcccagtgcgacca

SEQ ID NO: 62944 - DNA, 78 bp, Homo sapiens
aaccattatatatcataatgttacgttcacaccattaaaatggagagtatctcccagtgcgaccacacacaacaatca

SEQ ID NO: 62945 - DNA, 78 bp, Homo sapiens
tgttacgttcacaccattaaaatggagagtatctcccagtgcgaccacacacaacaatcacatcaccaacacctccta

SEQ ID NO: 62946 - DNA, 76 bp, Homo sapiens
accattaaaatggagagtatctcccagtgcgaccacacacaacaatcacatcaccaacacctcctagggcttactg

SEQ ID NO: 62947 - DNA, 78 bp, Homo sapiens
aaatggagagtatctcccagtgcgaccacacacaacaatcacatcaccaacacctcctagggcttactggagctgtaa

SEQ ID NO: 62948 - DNA, 80 bp, Homo sapiens
tatctcccagtgcgaccacacacaacaatcacatcaccaacacctcctagggcttactggagctgtaactaagtgtgcag

SEQ ID NO: 62949 - DNA, 76 bp, Homo sapiens
accacacacaacaatcacatcaccaacacctcctagggcttactggagctgtaactaagtgtgcaggactacgaag

SEQ ID NO: 62950 - DNA, 76 bp, Homo sapiens
acaatcacatcaccaacacctcctagggcttactggagctgtaactaagtgtgcaggactacgaaggaattgtgaa

SEQ ID NO: 62951 - DNA, 75 bp, Homo sapiens
acatcaccaacacctcctagggcttactggagctgtaactaagtgtgcaggactacgaaggaattgtgaattgaa

SEQ ID NO: 62952 - DNA, 75 bp, Homo sapiens
acctcctagggcttactggagctgtaactaagtgtgcaggactacgaaggaattgtgaattgaacagattccaga

SEQ ID NO: 62953 - DNA, 80 bp, Homo sapiens
ttactggagctgtaactaagtgtgcaggactacgaaggaattgtgaattgaacagattccagaggtggcacagtgctaga

SEQ ID NO: 62954 - DNA, 79 bp, Homo sapiens
taactaagtgtgcaggactacgaaggaattgtgaattgaacagattccagaggtggcacagtgctagagacatagaagt

SEQ ID NO: 62955 - DNA, 82 bp, Homo sapiens
aagtgtgcaggactacgaaggaattgtgaattgaacagattccagaggtggcacagtgctagagacatagaagttctgatca

SEQ ID NO: 62956 - DNA, 81 bp, Homo sapiens
tacgaaggaattgtgaattgaacagattccagaggtggcacagtgctagagacatagaagttctgatcagtcggagtttca

SEQ ID NO: 62957 - DNA, 82 bp, Homo sapiens
aattgtgaattgaacagattccagaggtggcacagtgctagagacatagaagttctgatcagtcggagtttcaagatcttgc

SEQ ID NO: 62958 - DNA, 84 bp, Homo sapiens
ttgaacagattccagaggtggcacagtgctagagacatagaagttctgatcagtcggagtttcaagatcttgctgaacatccca

SEQ ID NO: 62959 - DNA, 80 bp, Homo sapiens
agaggtggcacagtgctagagacatagaagttctgatcagtcggagtttcaagatcttgctgaacatcccaggaattaaa

SEQ ID NO: 62960 - DNA, 79 bp, Homo sapiens
acagtgctagagacatagaagttctgatcagtcggagtttcaagatcttgctgaacatcccaggaattaaactgagacc

SEQ ID NO: 62961 - DNA, 76 bp, Homo sapiens
aagttctgatcagtcggagtttcaagatcttgctgaacatcccaggaattaaactgagaccccaaggccatgtcta

SEQ ID NO: 62962 - DNA, 73 bp, Homo sapiens
agtcggagtttcaagatcttgctgaacatcccaggaattaaactgagaccccaaggccatgtctaaggaacag

SEQ ID NO: 62963 - DNA, 75 bp, Homo sapiens
ttcaagatcttgctgaacatcccaggaattaaactgagaccccaaggccatgtctaaggaacagggcttcaagac

SEQ ID NO: 62964 - DNA, 69 bp, Homo sapiens
gaattaaactgagaccccaaggccatgtctaaggaacagggcttcaagacctgccctaagttaagttta

SEQ ID NO: 62965 - DNA, 67 bp, Homo sapiens
aactgagaccccaaggccatgtctaaggaacagggcttcaagacctgccctaagttaagtttaaaaa

SEQ ID NO: 62966 - DNA, 69 bp, Homo sapiens
aaggccatgtctaaggaacagggcttcaagacctgccctaagttaagtttaaaaacaagctttgagaga

SEQ ID NO: 62967 - DNA, 70 bp, Homo sapiens
tctaaggaacagggcttcaagacctgccctaagttaagtttaaaaacaagctttgagagaatcaaactga

SEQ ID NO: 62968 - DNA, 71 bp, Homo sapiens
ggcttcaagacctgccctaagttaagtttaaaaacaagctttgagagaatcaaactgatctgagtaattaa

SEQ ID NO: 62969 - DNA, 70 bp, Homo sapiens
aagacctgccctaagttaagtttaaaaacaagctttgagagaatcaaactgatctgagtaattaagagcc

SEQ ID NO: 62970 - DNA, 72 bp, Homo sapiens
gttaagtttaaaaacaagctttgagagaatcaaactgatctgagtaattaagagcctgccagaacaaaacaa

SEQ ID NO: 62971 - DNA, 73 bp, Homo sapiens
aaacaagctttgagagaatcaaactgatctgagtaattaagagcctgccagaacaaaacaaactaataaagga

SEQ ID NO: 62972 - DNA, 74 bp, Homo sapiens
agctttgagagaatcaaactgatctgagtaattaagagcctgccagaacaaaacaaactaataaaggacaataa

SEQ ID NO: 62973 - DNA, 73 bp, Homo sapiens
tcaaactgatctgagtaattaagagcctgccagaacaaaacaaactaataaaggacaataaaacccatattca

SEQ ID NO: 62974 - DNA, 72 bp, Homo sapiens
gatctgagtaattaagagcctgccagaacaaaacaaactaataaaggacaataaaacccatattcaacaaca

SEQ ID NO: 62975 - DNA, 71 bp, Homo sapiens
gccagaacaaaacaaactaataaaggacaataaaacccatattcaacaacattatcatccaccatttccac

SEQ ID NO: 62976 - DNA, 72 bp, Homo sapiens
caaactaataaaggacaataaaacccatattcaacaacattatcatccaccatttccactacacagtctaaa

SEQ ID NO: 62977 - DNA, 73 bp, Homo sapiens
aaggacaataaaacccatattcaacaacattatcatccaccatttccactacacagtctaaaagtactggaca

SEQ ID NO: 62978 - DNA, 75 bp, Homo sapiens
ataaaacccatattcaacaacattatcatccaccatttccactacacagtctaaaagtactggacatgccaagga

SEQ ID NO: 62979 - DNA, 80 bp, Homo sapiens
tattcaacaacattatcatccaccatttccactacacagtctaaaagtactggacatgccaaggagcaggaagatgtgac

SEQ ID NO: 62980 - DNA, 78 bp, Homo sapiens
attatcatccaccatttccactacacagtctaaaagtactggacatgccaaggagcaggaagatgtgacccataacca

SEQ ID NO: 62981 - DNA, 76 bp, Homo sapiens
atttccactacacagtctaaaagtactggacatgccaaggagcaggaagatgtgacccataaccaggaattctata

SEQ ID NO: 62982 - DNA, 73 bp, Homo sapiens
ctaaaagtactggacatgccaaggagcaggaagatgtgacccataaccaggaattctatatttaaacaaacaa

SEQ ID NO: 62983 - DNA, 74 bp, Homo sapiens
acatgccaaggagcaggaagatgtgacccataaccaggaattctatatttaaacaaacaagactgtaaatgaaa

SEQ ID NO: 62984 - DNA, 74 bp, Homo sapiens
aggagcaggaagatgtgacccataaccaggaattctatatttaaacaaacaagactgtaaatgaaacagataca

SEQ ID NO: 62985 - DNA, 77 bp, Homo sapiens
agatgtgacccataaccaggaattctatatttaaacaaacaagactgtaaatgaaacagatacagagatgacagaga

SEQ ID NO: 62986 - DNA, 76 bp, Homo sapiens
ccataaccaggaattctatatttaaacaaacaagactgtaaatgaaacagatacagagatgacagagatgttggaa

SEQ ID NO: 62987 - DNA, 77 bp, Homo sapiens
ctatatttaaacaaacaagactgtaaatgaaacagatacagagatgacagagatgttggaatttgcctctacaagaa

SEQ ID NO: 62988 - DNA, 78 bp, Homo sapiens
tttaaacaaacaagactgtaaatgaaacagatacagagatgacagagatgttggaatttgcctctacaagaagagcag

SEQ ID NO: 62989 - DNA, 78 bp, Homo sapiens
aagactgtaaatgaaacagatacagagatgacagagatgttggaatttgcctctacaagaagagcaggaagggagaaa

SEQ ID NO: 62990 - DNA, 76 bp, Homo sapiens
aatgaaacagatacagagatgacagagatgttggaatttgcctctacaagaagagcaggaagggagaaaaaaagga

SEQ ID NO: 62991 - DNA, 74 bp, Homo sapiens
atacagagatgacagagatgttggaatttgcctctacaagaagagcaggaagggagaaaaaaaggaacaaaaca

SEQ ID NO: 62992 - DNA, 72 bp, Homo sapiens
agatgttggaatttgcctctacaagaagagcaggaagggagaaaaaaaggaacaaaacacagaagcagcaaa

SEQ ID NO: 62993 - DNA, 68 bp, Homo sapiens
gaaaaaaaggaacaaaacacagaagcagcaaacagaaaacaaataagatgagaaacctaaacccaaca

SEQ ID NO: 62994 - DNA, 71 bp, Homo sapiens
aggaacaaaacacagaagcagcaaacagaaaacaaataagatgagaaacctaaacccaacaattatcaaca

SEQ ID NO: 62995 - DNA, 72 bp, Homo sapiens
aacacagaagcagcaaacagaaaacaaataagatgagaaacctaaacccaacaattatcaacattaaatata

SEQ ID NO: 62996 - DNA, 69 bp, Homo sapiens
cagcaaacagaaaacaaataagatgagaaacctaaacccaacaattatcaacattaaatataaataaac

SEQ ID NO: 62997 - DNA, 68 bp, Homo sapiens
caaataagatgagaaacctaaacccaacaattatcaacattaaatataaataaactaaacactacaat

SEQ ID NO: 62998 - DNA, 68 bp, Homo sapiens
acccaacaattatcaacattaaatataaataaactaaacactacaattaaaagactaaggttatcaga

SEQ ID NO: 62999 - DNA, 68 bp, Homo sapiens
caattatcaacattaaatataaataaactaaacactacaattaaaagactaaggttatcagaataaat

SEQ ID NO: 63000 - DNA, 67 bp, Homo sapiens
aaatataaataaactaaacactacaattaaaagactaaggttatcagaataaattaaataagatcta

SEQ ID NO: 63001 - DNA, 70 bp, Homo sapiens
aaactaaacactacaattaaaagactaaggttatcagaataaattaaataagatctaatgctacgctgct

SEQ ID NO: 63002 - DNA, 74 bp, Homo sapiens
ctacaattaaaagactaaggttatcagaataaattaaataagatctaatgctacgctgcttacaagagacatac

SEQ ID NO: 63003 - DNA, 75 bp, Homo sapiens
aaagactaaggttatcagaataaattaaataagatctaatgctacgctgcttacaagagacatacttaagagaca

SEQ ID NO: 63004 - DNA, 75 bp, Homo sapiens
ggttatcagaataaattaaataagatctaatgctacgctgcttacaagagacatacttaagagacaaagttaaga

SEQ ID NO: 63005 - DNA, 74 bp, Homo sapiens
ataaattaaataagatctaatgctacgctgcttacaagagacatacttaagagacaaagttaagagtgggctgg

SEQ ID NO: 63006 - DNA, 76 bp, Homo sapiens
aaataagatctaatgctacgctgcttacaagagacatacttaagagacaaagttaagagtgggctgggtgtggtga

SEQ ID NO: 63007 - DNA, 70 bp, Homo sapiens
caaaacaaaaagagtgaaaaaaaaatgtgaatgctaatcataaggagtctacattaaatatgagaaaaag

SEQ ID NO: 63008 - DNA, 73 bp, Homo sapiens
agagtgaaaaaaaaatgtgaatgctaatcataaggagtctacattaaatatgagaaaaaggagataaagacaa

SEQ ID NO: 63009 - DNA, 73 bp, Homo sapiens
aaaaatgtgaatgctaatcataaggagtctacattaaatatgagaaaaaggagataaagacaaagaatattaa

SEQ ID NO: 63010 - DNA, 74 bp, Homo sapiens
tgtgaatgctaatcataaggagtctacattaaatatgagaaaaaggagataaagacaaagaatattaacaaaaa

SEQ ID NO: 63011 - DNA, 70 bp, Homo sapiens
aatcataaggagtctacattaaatatgagaaaaaggagataaagacaaagaatattaacaaaaacaaata

SEQ ID NO: 63012 - DNA, 71 bp, Homo sapiens
agtctacattaaatatgagaaaaaggagataaagacaaagaatattaacaaaaacaaatatttcataatga

SEQ ID NO: 63013 - DNA, 71 bp, Homo sapiens
gagataaagacaaagaatattaacaaaaacaaatatttcataatgataaaaggctaaatttaccagaggca

SEQ ID NO: 63014 - DNA, 71 bp, Homo sapiens
caaagaatattaacaaaaacaaatatttcataatgataaaaggctaaatttaccagaggcattacaatcca

SEQ ID NO: 63015 - DNA, 71 bp, Homo sapiens
taacaaaaacaaatatttcataatgataaaaggctaaatttaccagaggcattacaatccaaaatacatat

SEQ ID NO: 63016 - DNA, 72 bp, Homo sapiens
caaatatttcataatgataaaaggctaaatttaccagaggcattacaatccaaaatacatattaacctaata

SEQ ID NO: 63017 - DNA, 71 bp, Homo sapiens
gaggcattacaatccaaaatacatattaacctaataaaacagtttcaaaacacatgaaacaagtacttaca

SEQ ID NO: 63018 - DNA, 69 bp, Homo sapiens
caaaatacatattaacctaataaaacagtttcaaaacacatgaaacaagtacttacattttgttctgac

SEQ ID NO: 63019 - DNA, 70 bp, Homo sapiens
acatattaacctaataaaacagtttcaaaacacatgaaacaagtacttacattttgttctgactaaatga

SEQ ID NO: 63020 - DNA, 68 bp, Homo sapiens
aaaacagtttcaaaacacatgaaacaagtacttacattttgttctgactaaatgaaaaaccagacaaa

SEQ ID NO: 63021 - DNA, 66 bp, Homo sapiens
aagtacttacattttgttctgactaaatgaaaaaccagacaaacctaaaattgtaattgtagattt

SEQ ID NO: 63022 - DNA, 69 bp, Homo sapiens
tgttctgactaaatgaaaaaccagacaaacctaaaattgtaattgtagattttaataatcctctcttag

SEQ ID NO: 63023 - DNA, 67 bp, Homo sapiens
ctaaatgaaaaaccagacaaacctaaaattgtaattgtagattttaataatcctctcttagtaacca

SEQ ID NO: 63024 - DNA, 67 bp, Homo sapiens
aaaccagacaaacctaaaattgtaattgtagattttaataatcctctcttagtaaccaatagaacaa

SEQ ID NO: 63025 - DNA, 67 bp, Homo sapiens
cctaaaattgtaattgtagattttaataatcctctcttagtaaccaatagaacaaaaaaatcataag

SEQ ID NO: 63026 - DNA, 71 bp, Homo sapiens
attgtagattttaataatcctctcttagtaaccaatagaacaaaaaaatcataaggatttgaacaccatca

SEQ ID NO: 63027 - DNA, 70 bp, Homo sapiens
agattttaataatcctctcttagtaaccaatagaacaaaaaaatcataaggatttgaacaccatcaacca

SEQ ID NO: 63028 - DNA, 71 bp, Homo sapiens
ctctcttagtaaccaatagaacaaaaaaatcataaggatttgaacaccatcaaccaacttattctaataga

SEQ ID NO: 63029 - DNA, 72 bp, Homo sapiens
gtaaccaatagaacaaaaaaatcataaggatttgaacaccatcaaccaacttattctaatagacaattatga

SEQ ID NO: 63030 - DNA, 78 bp, Homo sapiens
tcataaggatttgaacaccatcaaccaacttattctaatagacaattatgaaacatcacatcccacaactgtaggata

SEQ ID NO: 63031 - DNA, 77 bp, Homo sapiens
atttgaacaccatcaaccaacttattctaatagacaattatgaaacatcacatcccacaactgtaggatacacattc

SEQ ID NO: 63032 - DNA, 76 bp, Homo sapiens
ccatcaaccaacttattctaatagacaattatgaaacatcacatcccacaactgtaggatacacattctattttta

SEQ ID NO: 63033 - DNA, 78 bp, Homo sapiens
acttattctaatagacaattatgaaacatcacatcccacaactgtaggatacacattctatttttatgagacagagtc

SEQ ID NO: 63034 - DNA, 78 bp, Homo sapiens
ctctacctcctggggtgaagcgatttttgtatctcagccccctcaagcagctgcaactacagaagcgcaccaccaagc

SEQ ID NO: 63035 - DNA, 78 bp, Homo sapiens
cctcctggggtgaagcgatttttgtatctcagccccctcaagcagctgcaactacagaagcgcaccaccaagcctggc

SEQ ID NO: 63036 - DNA, 79 bp, Homo sapiens
acaggcatgagacactgcgcctgatcattcttttcaagtatagatagaatatttgtcaagaaaaaccatttgctgggcc

SEQ ID NO: 63037 - DNA, 76 bp, Homo sapiens
agacactgcgcctgatcattcttttcaagtatagatagaatatttgtcaagaaaaaccatttgctgggccgtaaga

SEQ ID NO: 63038 - DNA, 75 bp, Homo sapiens
ctgatcattcttttcaagtatagatagaatatttgtcaagaaaaaccatttgctgggccgtaagacaagtcttca

SEQ ID NO: 63039 - DNA, 72 bp, Homo sapiens
cttttcaagtatagatagaatatttgtcaagaaaaaccatttgctgggccgtaagacaagtcttcaatttca

SEQ ID NO: 63040 - DNA, 71 bp, Homo sapiens
atagatagaatatttgtcaagaaaaaccatttgctgggccgtaagacaagtcttcaatttcaaaggacaac

SEQ ID NO: 63041 - DNA, 69 bp, Homo sapiens
aaaaaccatttgctgggccgtaagacaagtcttcaatttcaaaggacaaccaccatacaaagcatgttt

SEQ ID NO: 63042 - DNA, 73 bp, Homo sapiens
atttgctgggccgtaagacaagtcttcaatttcaaaggacaaccaccatacaaagcatgttttctgaacacag

SEQ ID NO: 63043 - DNA, 72 bp, Homo sapiens
taagacaagtcttcaatttcaaaggacaaccaccatacaaagcatgttttctgaacacagtggagttaaaaa

SEQ ID NO: 63044 - DNA, 70 bp, Homo sapiens
aagtcttcaatttcaaaggacaaccaccatacaaagcatgttttctgaacacagtggagttaaaaaccaa

SEQ ID NO: 63045 - DNA, 71 bp, Homo sapiens
accaccatacaaagcatgttttctgaacacagtggagttaaaaaccaacaataaaatatctgcaaaattcc

SEQ ID NO: 63046 - DNA, 71 bp, Homo sapiens
tacaaagcatgttttctgaacacagtggagttaaaaaccaacaataaaatatctgcaaaattcctaaatat

SEQ ID NO: 63047 - DNA, 68 bp, Homo sapiens
ttttctgaacacagtggagttaaaaaccaacaataaaatatctgcaaaattcctaaatatttaaaagc

SEQ ID NO: 63048 - DNA, 70 bp, Homo sapiens
tggagttaaaaaccaacaataaaatatctgcaaaattcctaaatatttaaaagctaaacacacttcagca

SEQ ID NO: 63049 - DNA, 71 bp, Homo sapiens
aaccaacaataaaatatctgcaaaattcctaaatatttaaaagctaaacacacttcagcataatccatggg

SEQ ID NO: 63050 - DNA, 73 bp, Homo sapiens
acaataaaatatctgcaaaattcctaaatatttaaaagctaaacacacttcagcataatccatgggtcaaaga

SEQ ID NO: 63051 - DNA, 73 bp, Homo sapiens
cctaaatatttaaaagctaaacacacttcagcataatccatgggtcaaagaataaatcacatgtaaaatataa

SEQ ID NO: 63052 - DNA, 73 bp, Homo sapiens
aaatatttaaaagctaaacacacttcagcataatccatgggtcaaagaataaatcacatgtaaaatataaaca

SEQ ID NO: 63053 - DNA, 73 bp, Homo sapiens
tttaaaagctaaacacacttcagcataatccatgggtcaaagaataaatcacatgtaaaatataaacatattt

SEQ ID NO: 63054 - DNA, 73 bp, Homo sapiens
aagctaaacacacttcagcataatccatgggtcaaagaataaatcacatgtaaaatataaacatattttaaac

SEQ ID NO: 63055 - DNA, 72 bp, Homo sapiens
cacttcagcataatccatgggtcaaagaataaatcacatgtaaaatataaacatattttaaactaatttaaa

SEQ ID NO: 63056 - DNA, 64 bp, Homo sapiens
aactaatttaaaaaatgtattaaaatttgagatgcaattaacaacagtatttggggtacttttt

SEQ ID NO: 63057 - DNA, 67 bp, Homo sapiens
aaaaatgtattaaaatttgagatgcaattaacaacagtatttggggtacttttttatgtttatggat

SEQ ID NO: 63058 - DNA, 69 bp, Homo sapiens
taaaatttgagatgcaattaacaacagtatttggggtacttttttatgtttatggatttaaaggattca

SEQ ID NO: 63059 - DNA, 69 bp, Homo sapiens
gagatgcaattaacaacagtatttggggtacttttttatgtttatggatttaaaggattcaaagaaatg

SEQ ID NO: 63060 - DNA, 64 bp, Homo sapiens
aattaacaacagtatttggggtacttttttatgtttatggatttaaaggattcaaagaaatggg

SEQ ID NO: 63061 - DNA, 63 bp, Homo sapiens
agtatttggggtacttttttatgtttatggatttaaaggattcaaagaaatggggaaataaaa

SEQ ID NO: 63062 - DNA, 66 bp, Homo sapiens
tttttatgtttatggatttaaaggattcaaagaaatggggaaataaaaaagatgcatagggtttaa

SEQ ID NO: 63063 - DNA, 67 bp, Homo sapiens
tgtttatggatttaaaggattcaaagaaatggggaaataaaaaagatgcatagggtttaaggagaaa

SEQ ID NO: 63064 - DNA, 66 bp, Homo sapiens
aaggattcaaagaaatggggaaataaaaaagatgcatagggtttaaggagaaatttattgcccaaa

SEQ ID NO: 63065 - DNA, 67 bp, Homo sapiens
agaaatggggaaataaaaaagatgcatagggtttaaggagaaatttattgcccaaatgttaatattg

SEQ ID NO: 63066 - DNA, 67 bp, Homo sapiens
ggaaataaaaaagatgcatagggtttaaggagaaatttattgcccaaatgttaatattggaaaagtc

SEQ ID NO: 63067 - DNA, 68 bp, Homo sapiens
aggagaaatttattgcccaaatgttaatattggaaaagtctaaataaccagtgatacaaacttctacc

SEQ ID NO: 63068 - DNA, 68 bp, Homo sapiens
ggagaaatttattgcccaaatgttaatattggaaaagtctaaataaccagtgatacaaacttctaccc

SEQ ID NO: 63069 - DNA, 68 bp, Homo sapiens
tttattgcccaaatgttaatattggaaaagtctaaataaccagtgatacaaacttctaccccaaagaa

SEQ ID NO: 63070 - DNA, 69 bp, Homo sapiens
tgcccaaatgttaatattggaaaagtctaaataaccagtgatacaaacttctaccccaaagaaaagcca

SEQ ID NO: 63071 - DNA, 69 bp, Homo sapiens
aatattggaaaagtctaaataaccagtgatacaaacttctaccccaaagaaaagccaacataagcagaa

SEQ ID NO: 63072 - DNA, 69 bp, Homo sapiens
attggaaaagtctaaataaccagtgatacaaacttctaccccaaagaaaagccaacataagcagaagaa

SEQ ID NO: 63073 - DNA, 69 bp, Homo sapiens
tggaaaagtctaaataaccagtgatacaaacttctaccccaaagaaaagccaacataagcagaagaaaa

SEQ ID NO: 63074 - DNA, 69 bp, Homo sapiens
aaataaccagtgatacaaacttctaccccaaagaaaagccaacataagcagaagaaaataaagacagaa

SEQ ID NO: 63075 - DNA, 69 bp, Homo sapiens
aaccagtgatacaaacttctaccccaaagaaaagccaacataagcagaagaaaataaagacagaaataa

SEQ ID NO: 63076 - DNA, 70 bp, Homo sapiens
acaaacttctaccccaaagaaaagccaacataagcagaagaaaataaagacagaaataaatgacatagaa

SEQ ID NO: 63077 - DNA, 71 bp, Homo sapiens
gaaaataaagacagaaataaatgacatagaaaacaaacaagaaaaggctgacaacaacaaaagctggctgt

SEQ ID NO: 63078 - DNA, 72 bp, Homo sapiens
gacagaaataaatgacatagaaaacaaacaagaaaaggctgacaacaacaaaagctggctgtttgaaaatat

SEQ ID NO: 63079 - DNA, 69 bp, Homo sapiens
gaaaaggctgacaacaacaaaagctggctgtttgaaaatattaataaaatggacaaaccccaacctaga

SEQ ID NO: 63080 - DNA, 72 bp, Homo sapiens
gacaacaacaaaagctggctgtttgaaaatattaataaaatggacaaaccccaacctagatcaatgagagaa

SEQ ID NO: 63081 - DNA, 73 bp, Homo sapiens
agctggctgtttgaaaatattaataaaatggacaaaccccaacctagatcaatgagagaaaaacaagagagca

SEQ ID NO: 63082 - DNA, 73 bp, Homo sapiens
ttgaaaatattaataaaatggacaaaccccaacctagatcaatgagagaaaaacaagagagcacaccagacat

SEQ ID NO: 63083 - DNA, 73 bp, Homo sapiens
taataaaatggacaaaccccaacctagatcaatgagagaaaaacaagagagcacaccagacattattataaat

SEQ ID NO: 63084 - DNA, 74 bp, Homo sapiens
aaatggacaaaccccaacctagatcaatgagagaaaaacaagagagcacaccagacattattataaattctatc

SEQ ID NO: 63085 - DNA, 74 bp, Homo sapiens
cccaacctagatcaatgagagaaaaacaagagagcacaccagacattattataaattctatccaaattaagaaa

SEQ ID NO: 63086 - DNA, 74 bp, Homo sapiens
acctagatcaatgagagaaaaacaagagagcacaccagacattattataaattctatccaaattaagaaaagag

SEQ ID NO: 63087 - DNA, 75 bp, Homo sapiens
caatgagagaaaaacaagagagcacaccagacattattataaattctatccaaattaagaaaagagtacagaggc

SEQ ID NO: 63088 - DNA, 72 bp, Homo sapiens
agagaaaaacaagagagcacaccagacattattataaattctatccaaattaagaaaagagtacagaggccg

SEQ ID NO: 63089 - DNA, 72 bp, Homo sapiens
aaaaacaagagagcacaccagacattattataaattctatccaaattaagaaaagagtacagaggccgggca

SEQ ID NO: 63090 - DNA, 73 bp, Homo sapiens
aaacaagagagcacaccagacattattataaattctatccaaattaagaaaagagtacagaggccgggcatgg

SEQ ID NO: 63091 - DNA, 72 bp, Homo sapiens
aaaaagaaaagagtagagaaatgttatgaacaccttcatgccaaatcaattcaagaacttaaaatggatata

SEQ ID NO: 63092 - DNA, 75 bp, Homo sapiens
gaaaagagtagagaaatgttatgaacaccttcatgccaaatcaattcaagaacttaaaatggatatattactcaa

SEQ ID NO: 63093 - DNA, 74 bp, Homo sapiens
gagaaatgttatgaacaccttcatgccaaatcaattcaagaacttaaaatggatatattactcaaaaatacaaa

SEQ ID NO: 63094 - DNA, 72 bp, Homo sapiens
atgaacaccttcatgccaaatcaattcaagaacttaaaatggatatattactcaaaaatacaaattaccaaa

SEQ ID NO: 63095 - DNA, 74 bp, Homo sapiens
tcatgccaaatcaattcaagaacttaaaatggatatattactcaaaaatacaaattaccaaaattagcacaaga

SEQ ID NO: 63096 - DNA, 72 bp, Homo sapiens
tcaattcaagaacttaaaatggatatattactcaaaaatacaaattaccaaaattagcacaagaagcagaaa

SEQ ID NO: 63097 - DNA, 71 bp, Homo sapiens
cttaaaatggatatattactcaaaaatacaaattaccaaaattagcacaagaagcagaaaatttgaatagc

SEQ ID NO: 63098 - DNA, 72 bp, Homo sapiens
tattactcaaaaatacaaattaccaaaattagcacaagaagcagaaaatttgaatagctaatacctattagc

SEQ ID NO: 63099 - DNA, 73 bp, Homo sapiens
ctcaaaaatacaaattaccaaaattagcacaagaagcagaaaatttgaatagctaatacctattagctattca

SEQ ID NO: 63100 - DNA, 71 bp, Homo sapiens
taccaaaattagcacaagaagcagaaaatttgaatagctaatacctattagctattcaaatttaaagtaac

SEQ ID NO: 63101 - DNA, 73 bp, Homo sapiens
agcacaagaagcagaaaatttgaatagctaatacctattagctattcaaatttaaagtaactgaatcataatt

SEQ ID NO: 63102 - DNA, 71 bp, Homo sapiens
agaagcagaaaatttgaatagctaatacctattagctattcaaatttaaagtaactgaatcataattttaa

SEQ ID NO: 63103 - DNA, 70 bp, Homo sapiens
ttgaatagctaatacctattagctattcaaatttaaagtaactgaatcataattttaaaaccttcccaca

SEQ ID NO: 63104 - DNA, 67 bp, Homo sapiens
gctattcaaatttaaagtaactgaatcataattttaaaaccttcccacaaggaaaactccagacctg

SEQ ID NO: 63105 - DNA, 68 bp, Homo sapiens
tttaaagtaactgaatcataattttaaaaccttcccacaaggaaaactccagacctggatcgcttcac

SEQ ID NO: 63106 - DNA, 72 bp, Homo sapiens
cttcccacaaggaaaactccagacctggatcgcttcactggtgaattttatcaaacatttaatgaataaata

SEQ ID NO: 63107 - DNA, 73 bp, Homo sapiens
cacaaggaaaactccagacctggatcgcttcactggtgaattttatcaaacatttaatgaataaataatacta

SEQ ID NO: 63108 - DNA, 74 bp, Homo sapiens
actccagacctggatcgcttcactggtgaattttatcaaacatttaatgaataaataatactaatcttaaatga

SEQ ID NO: 63109 - DNA, 74 bp, Homo sapiens
tggatcgcttcactggtgaattttatcaaacatttaatgaataaataatactaatcttaaatgaactttcagaa

SEQ ID NO: 63110 - DNA, 70 bp, Homo sapiens
ctggtgaattttatcaaacatttaatgaataaataatactaatcttaaatgaactttcagaacaaaggga

SEQ ID NO: 63111 - DNA, 69 bp, Homo sapiens
tcaaacatttaatgaataaataatactaatcttaaatgaactttcagaacaaagggaacaattcccagg

SEQ ID NO: 63112 - DNA, 70 bp, Homo sapiens
aatgaataaataatactaatcttaaatgaactttcagaacaaagggaacaattcccaggtaacttcatga

SEQ ID NO: 63113 - DNA, 69 bp, Homo sapiens
aaataatactaatcttaaatgaactttcagaacaaagggaacaattcccaggtaacttcatgaagccag

SEQ ID NO: 63114 - DNA, 71 bp, Homo sapiens
ctaatcttaaatgaactttcagaacaaagggaacaattcccaggtaacttcatgaagccagtatattattg

SEQ ID NO: 63115 - DNA, 71 bp, Homo sapiens
gaactttcagaacaaagggaacaattcccaggtaacttcatgaagccagtatattattgttatcaaaaaca

SEQ ID NO: 63116 - DNA, 70 bp, Homo sapiens
agaacaaagggaacaattcccaggtaacttcatgaagccagtatattattgttatcaaaaacaaataaga

SEQ ID NO: 63117 - DNA, 71 bp, Homo sapiens
gaacaattcccaggtaacttcatgaagccagtatattattgttatcaaaaacaaataagaacactccaaaa

SEQ ID NO: 63118 - DNA, 70 bp, Homo sapiens
caggtaacttcatgaagccagtatattattgttatcaaaaacaaataagaacactccaaaaaaacagaaa

SEQ ID NO: 63119 - DNA, 74 bp, Homo sapiens
caaaaacaaataagaacactccaaaaaaacagaaagttatagacccatatcactcatgaatataccaatcatgc

SEQ ID NO: 63120 - DNA, 75 bp, Homo sapiens
ataagaacactccaaaaaaacagaaagttatagacccatatcactcatgaatataccaatcatgcttcgcccaaa

SEQ ID NO: 63121 - DNA, 75 bp, Homo sapiens
actccaaaaaaacagaaagttatagacccatatcactcatgaatataccaatcatgcttcgcccaaagacaagga

SEQ ID NO: 63122 - DNA, 79 bp, Homo sapiens
aacagaaagttatagacccatatcactcatgaatataccaatcatgcttcgcccaaagacaaggacatcttctgagaaa

SEQ ID NO: 63123 - DNA, 81 bp, Homo sapiens
atatcactcatgaatataccaatcatgcttcgcccaaagacaaggacatcttctgagaaaagtgtcattaggtgattctgg

SEQ ID NO: 63124 - DNA, 80 bp, Homo sapiens
atgaatataccaatcatgcttcgcccaaagacaaggacatcttctgagaaaagtgtcattaggtgattctggtcactgtg

SEQ ID NO: 63125 - DNA, 77 bp, Homo sapiens
aatcatgcttcgcccaaagacaaggacatcttctgagaaaagtgtcattaggtgattctggtcactgtgggaactta

SEQ ID NO: 63126 - DNA, 74 bp, Homo sapiens
caaagacaaggacatcttctgagaaaagtgtcattaggtgattctggtcactgtgggaacttacactttgggtg

SEQ ID NO: 63127 - DNA, 74 bp, Homo sapiens
gacatcttctgagaaaagtgtcattaggtgattctggtcactgtgggaacttacactttgggtgtacttaaaca

SEQ ID NO: 63128 - DNA, 71 bp, Homo sapiens
cttctgagaaaagtgtcattaggtgattctggtcactgtgggaacttacactttgggtgtacttaaacaaa

SEQ ID NO: 63129 - DNA, 70 bp, Homo sapiens
aagtgtcattaggtgattctggtcactgtgggaacttacactttgggtgtacttaaacaaacctagatgg

SEQ ID NO: 63130 - DNA, 70 bp, Homo sapiens
aggtgattctggtcactgtgggaacttacactttgggtgtacttaaacaaacctagatggtgtagcctac

SEQ ID NO: 63131 - DNA, 76 bp, Homo sapiens
taaacatagaaaaggcacagtaaaaatatattatagtcttaaggggccactgttgtatatgtagtctgctgctgac

SEQ ID NO: 63132 - DNA, 73 bp, Homo sapiens
aaaaggcacagtaaaaatatattatagtcttaaggggccactgttgtatatgtagtctgctgctgaccaaaat

SEQ ID NO: 63133 - DNA, 77 bp, Homo sapiens
taaaaatatattatagtcttaaggggccactgttgtatatgtagtctgctgctgaccaaaattcgttatgtagcaca

SEQ ID NO: 63134 - DNA, 78 bp, Homo sapiens
atatattatagtcttaaggggccactgttgtatatgtagtctgctgctgaccaaaattcgttatgtagcacattactg

SEQ ID NO: 63135 - DNA, 79 bp, Homo sapiens
tcttaaggggccactgttgtatatgtagtctgctgctgaccaaaattcgttatgtagcacattactgtggaagcataaa

SEQ ID NO: 63136 - DNA, 80 bp, Homo sapiens
tgttgtatatgtagtctgctgctgaccaaaattcgttatgtagcacattactgtggaagcataaatcctgaacaatattt

SEQ ID NO: 63137 - DNA, 79 bp, Homo sapiens
atatgtagtctgctgctgaccaaaattcgttatgtagcacattactgtggaagcataaatcctgaacaatattttaata

SEQ ID NO: 63138 - DNA, 78 bp, Homo sapiens
tgctgaccaaaattcgttatgtagcacattactgtggaagcataaatcctgaacaatattttaataaatctgatccag

SEQ ID NO: 63139 - DNA, 77 bp, Homo sapiens
tatgtagcacattactgtggaagcataaatcctgaacaatattttaataaatctgatccagtaacatataaaaaaga

SEQ ID NO: 63140 - DNA, 75 bp, Homo sapiens
ctgtggaagcataaatcctgaacaatattttaataaatctgatccagtaacatataaaaaagataacactccaca

SEQ ID NO: 63141 - DNA, 75 bp, Homo sapiens
gcataaatcctgaacaatattttaataaatctgatccagtaacatataaaaaagataacactccacaatcaagtg

SEQ ID NO: 63142 - DNA, 71 bp, Homo sapiens
cctgaacaatattttaataaatctgatccagtaacatataaaaaagataacactccacaatcaagtggggt

SEQ ID NO: 63143 - DNA, 76 bp, Homo sapiens
taataaatctgatccagtaacatataaaaaagataacactccacaatcaagtggggttatctcacaggaatgcaag

SEQ ID NO: 63144 - DNA, 73 bp, Homo sapiens
gaaaaaaaaaacaccctatgattcatctcaataaatgaaaaaagatgtggcaaaattcagtaatcgcttatga

SEQ ID NO: 63145 - DNA, 79 bp, Homo sapiens
aacaccctatgattcatctcaataaatgaaaaaagatgtggcaaaattcagtaatcgcttatgatcaaaagactcagca

SEQ ID NO: 63146 - DNA, 80 bp, Homo sapiens
ctatgattcatctcaataaatgaaaaaagatgtggcaaaattcagtaatcgcttatgatcaaaagactcagcaaactaga

SEQ ID NO: 63147 - DNA, 75 bp, Homo sapiens
ataaatgaaaaaagatgtggcaaaattcagtaatcgcttatgatcaaaagactcagcaaactagaaacagaattc

SEQ ID NO: 63148 - DNA, 76 bp, Homo sapiens
aaaagatgtggcaaaattcagtaatcgcttatgatcaaaagactcagcaaactagaaacagaattcctcatcctaa

SEQ ID NO: 63149 - DNA, 78 bp, Homo sapiens
caaaattcagtaatcgcttatgatcaaaagactcagcaaactagaaacagaattcctcatcctaatgaatgataccta

SEQ ID NO: 63150 - DNA, 78 bp, Homo sapiens
taatcgcttatgatcaaaagactcagcaaactagaaacagaattcctcatcctaatgaatgatacctaaagcctacaa

SEQ ID NO: 63151 - DNA, 76 bp, Homo sapiens
cttatgatcaaaagactcagcaaactagaaacagaattcctcatcctaatgaatgatacctaaagcctacaactaa

SEQ ID NO: 63152 - DNA, 74 bp, Homo sapiens
aaagactcagcaaactagaaacagaattcctcatcctaatgaatgatacctaaagcctacaactaacattatac

SEQ ID NO: 63153 - DNA, 72 bp, Homo sapiens
ctagaaacagaattcctcatcctaatgaatgatacctaaagcctacaactaacattatacttaacgaaaggc

SEQ ID NO: 63154 - DNA, 74 bp, Homo sapiens
aacagaattcctcatcctaatgaatgatacctaaagcctacaactaacattatacttaacgaaaggctgaatgc

SEQ ID NO: 63155 - DNA, 72 bp, Homo sapiens
ctcatcctaatgaatgatacctaaagcctacaactaacattatacttaacgaaaggctgaatgcttttttcc

SEQ ID NO: 63156 - DNA, 75 bp, Homo sapiens
tgaatgatacctaaagcctacaactaacattatacttaacgaaaggctgaatgcttttttcccacagatcatgaa

SEQ ID NO: 63157 - DNA, 72 bp, Homo sapiens
aaagcctacaactaacattatacttaacgaaaggctgaatgcttttttcccacagatcatgaataagacaag

SEQ ID NO: 63158 - DNA, 74 bp, Homo sapiens
aacattatacttaacgaaaggctgaatgcttttttcccacagatcatgaataagacaagggaagaacactgtca

SEQ ID NO: 63159 - DNA, 74 bp, Homo sapiens
acattatacttaacgaaaggctgaatgcttttttcccacagatcatgaataagacaagggaagaacactgtcat

SEQ ID NO: 63160 - DNA, 73 bp, Homo sapiens
ttaacgaaaggctgaatgcttttttcccacagatcatgaataagacaagggaagaacactgtcattggtttta

SEQ ID NO: 63161 - DNA, 73 bp, Homo sapiens
gaaaggctgaatgcttttttcccacagatcatgaataagacaagggaagaacactgtcattggttttattaaa

SEQ ID NO: 63162 - DNA, 72 bp, Homo sapiens
aaaggctgaatgcttttttcccacagatcatgaataagacaagggaagaacactgtcattggttttattaaa

SEQ ID NO: 63163 - DNA, 74 bp, Homo sapiens
aatgcttttttcccacagatcatgaataagacaagggaagaacactgtcattggttttattaaacattgtgctg

SEQ ID NO: 63164 - DNA, 76 bp, Homo sapiens
tttttcccacagatcatgaataagacaagggaagaacactgtcattggttttattaaacattgtgctggccaggca

SEQ ID NO: 63165 - DNA, 73 bp, Homo sapiens
aacaaacaaaacattgtactagaggtcctaggcagaacattaaagccagaaaaatgaataaaatgcatacaga

SEQ ID NO: 63166 - DNA, 74 bp, Homo sapiens
acattgtactagaggtcctaggcagaacattaaagccagaaaaatgaataaaatgcatacagatgaaaaaggaa

SEQ ID NO: 63167 - DNA, 75 bp, Homo sapiens
tactagaggtcctaggcagaacattaaagccagaaaaatgaataaaatgcatacagatgaaaaaggaagaagcaa

SEQ ID NO: 63168 - DNA, 73 bp, Homo sapiens
cctaggcagaacattaaagccagaaaaatgaataaaatgcatacagatgaaaaaggaagaagcaagctatttt

SEQ ID NO: 63169 - DNA, 76 bp, Homo sapiens
taaagccagaaaaatgaataaaatgcatacagatgaaaaaggaagaagcaagctatttttattctcagacaacatg

SEQ ID NO: 63170 - DNA, 75 bp, Homo sapiens
aaaatgaataaaatgcatacagatgaaaaaggaagaagcaagctatttttattctcagacaacatgtcccagaaa

SEQ ID NO: 63171 - DNA, 76 bp, Homo sapiens
aaatgcatacagatgaaaaaggaagaagcaagctatttttattctcagacaacatgtcccagaaaattctaagaca

SEQ ID NO: 63172 - DNA, 76 bp, Homo sapiens
cagatgaaaaaggaagaagcaagctatttttattctcagacaacatgtcccagaaaattctaagacatcttataga

SEQ ID NO: 63173 - DNA, 74 bp, Homo sapiens
ggaagaagcaagctatttttattctcagacaacatgtcccagaaaattctaagacatcttatagaattaataag

SEQ ID NO: 63174 - DNA, 74 bp, Homo sapiens
aagcaagctatttttattctcagacaacatgtcccagaaaattctaagacatcttatagaattaataagtgagt

SEQ ID NO: 63175 - DNA, 75 bp, Homo sapiens
cagacaacatgtcccagaaaattctaagacatcttatagaattaataagtgagtttagcagggttacaagataca

SEQ ID NO: 63176 - DNA, 72 bp, Homo sapiens
gtcccagaaaattctaagacatcttatagaattaataagtgagtttagcagggttacaagatacaacattaa

SEQ ID NO: 63177 - DNA, 73 bp, Homo sapiens
attctaagacatcttatagaattaataagtgagtttagcagggttacaagatacaacattaatacagaaacat

SEQ ID NO: 63178 - DNA, 75 bp, Homo sapiens
taagtgagtttagcagggttacaagatacaacattaatacagaaacatttattatacttctccatactagcaaca

SEQ ID NO: 63179 - DNA, 75 bp, Homo sapiens
tagcagggttacaagatacaacattaatacagaaacatttattatacttctccatactagcaacaaataatggtg

SEQ ID NO: 63180 - DNA, 72 bp, Homo sapiens
atacaacattaatacagaaacatttattatacttctccatactagcaacaaataatggtgtaaaacctagga

SEQ ID NO: 63181 - DNA, 70 bp, Homo sapiens
cagaaacatttattatacttctccatactagcaacaaataatggtgtaaaacctaggaattaaacagaaa

SEQ ID NO: 63182 - DNA, 71 bp, Homo sapiens
tattatacttctccatactagcaacaaataatggtgtaaaacctaggaattaaacagaaatgaaaacgaga

SEQ ID NO: 63183 - DNA, 70 bp, Homo sapiens
ctccatactagcaacaaataatggtgtaaaacctaggaattaaacagaaatgaaaacgagaaactaagca

SEQ ID NO: 63184 - DNA, 68 bp, Homo sapiens
gcaacaaataatggtgtaaaacctaggaattaaacagaaatgaaaacgagaaactaagcaacctgact

SEQ ID NO: 63185 - DNA, 66 bp, Homo sapiens
atggtgtaaaacctaggaattaaacagaaatgaaaacgagaaactaagcaacctgactttaatact

SEQ ID NO: 63186 - DNA, 67 bp, Homo sapiens
acctaggaattaaacagaaatgaaaacgagaaactaagcaacctgactttaatacttactgtaaagc

SEQ ID NO: 63187 - DNA, 67 bp, Homo sapiens
aaacagaaatgaaaacgagaaactaagcaacctgactttaatacttactgtaaagctaaagtacaac

SEQ ID NO: 63188 - DNA, 67 bp, Homo sapiens
gaaaacgagaaactaagcaacctgactttaatacttactgtaaagctaaagtacaactatgaaagtt

SEQ ID NO: 63189 - DNA, 72 bp, Homo sapiens
cgagaaactaagcaacctgactttaatacttactgtaaagctaaagtacaactatgaaagtttcatctatga

SEQ ID NO: 63190 - DNA, 72 bp, Homo sapiens
gcaacctgactttaatacttactgtaaagctaaagtacaactatgaaagtttcatctatgaaacttttgtga

SEQ ID NO: 63191 - DNA, 72 bp, Homo sapiens
atacttactgtaaagctaaagtacaactatgaaagtttcatctatgaaacttttgtgattgataaaattgac

SEQ ID NO: 63192 - DNA, 71 bp, Homo sapiens
ctaaagtacaactatgaaagtttcatctatgaaacttttgtgattgataaaattgacttcattaaaattaa

SEQ ID NO: 63193 - DNA, 70 bp, Homo sapiens
gaaagtttcatctatgaaacttttgtgattgataaaattgacttcattaaaattaaaactgccccttcaa

SEQ ID NO: 63194 - DNA, 74 bp, Homo sapiens
tcatctatgaaacttttgtgattgataaaattgacttcattaaaattaaaactgccccttcaaagataatgtca

SEQ ID NO: 63195 - DNA, 73 bp, Homo sapiens
cttttgtgattgataaaattgacttcattaaaattaaaactgccccttcaaagataatgtcaagagaatgaga

SEQ ID NO: 63196 - DNA, 69 bp, Homo sapiens
ctctcaaaactcaacaataacaacctgtttaaaaaatgggccaaagaccttaacatacacctcatcaaa

SEQ ID NO: 63197 - DNA, 67 bp, Homo sapiens
aaaactcaacaataacaacctgtttaaaaaatgggccaaagaccttaacatacacctcatcaaagaa

SEQ ID NO: 63198 - DNA, 72 bp, Homo sapiens
aataacaacctgtttaaaaaatgggccaaagaccttaacatacacctcatcaaagaagacacacagatggca

SEQ ID NO: 63199 - DNA, 81 bp, Homo sapiens
caaagaagacacacagatggcaaataagcgtatgaaaagatgacccacatcttatcacagaaatgcaaatgacaacaatgg

SEQ ID NO: 63200 - DNA, 81 bp, Homo sapiens
acacagatggcaaataagcgtatgaaaagatgacccacatcttatcacagaaatgcaaatgacaacaatgggataccacta

SEQ ID NO: 63201 - DNA, 79 bp, Homo sapiens
caaataagcgtatgaaaagatgacccacatcttatcacagaaatgcaaatgacaacaatgggataccactatttgccta

SEQ ID NO: 63202 - DNA, 79 bp, Homo sapiens
cgtatgaaaagatgacccacatcttatcacagaaatgcaaatgacaacaatgggataccactatttgcctattagaaca

SEQ ID NO: 63203 - DNA, 78 bp, Homo sapiens
aaagatgacccacatcttatcacagaaatgcaaatgacaacaatgggataccactatttgcctattagaacagccaaa

SEQ ID NO: 63204 - DNA, 80 bp, Homo sapiens
atcttatcacagaaatgcaaatgacaacaatgggataccactatttgcctattagaacagccaaatccagaacactgtca

SEQ ID NO: 63205 - DNA, 76 bp, Homo sapiens
aaatgcaaatgacaacaatgggataccactatttgcctattagaacagccaaatccagaacactgtcaacacgaaa

SEQ ID NO: 63206 - DNA, 77 bp, Homo sapiens
aaatgacaacaatgggataccactatttgcctattagaacagccaaatccagaacactgtcaacacgaaatgctggc

SEQ ID NO: 63207 - DNA, 77 bp, Homo sapiens
acaacaatgggataccactatttgcctattagaacagccaaatccagaacactgtcaacacgaaatgctggcgagga

SEQ ID NO: 63208 - DNA, 79 bp, Homo sapiens
ataccactatttgcctattagaacagccaaatccagaacactgtcaacacgaaatgctggcgaggatgtagtgcaacag

SEQ ID NO: 63209 - DNA, 78 bp, Homo sapiens
actatttgcctattagaacagccaaatccagaacactgtcaacacgaaatgctggcgaggatgtagtgcaacaggaac

SEQ ID NO: 63210 - DNA, 80 bp, Homo sapiens
atttgcctattagaacagccaaatccagaacactgtcaacacgaaatgctggcgaggatgtagtgcaacaggaactctca

SEQ ID NO: 63211 - DNA, 83 bp, Homo sapiens
tattagaacagccaaatccagaacactgtcaacacgaaatgctggcgaggatgtagtgcaacaggaactctcattcatcactg

SEQ ID NO: 63212 - DNA, 83 bp, Homo sapiens
tagaacagccaaatccagaacactgtcaacacgaaatgctggcgaggatgtagtgcaacaggaactctcattcatcactggtg

SEQ ID NO: 63213 - DNA, 74 bp, Homo sapiens
gggaatgtaaaatgatatagacactttggaagacatttttgcagtttctcacaaaactaagcatactcttacca

SEQ ID NO: 63214 - DNA, 77 bp, Homo sapiens
atgatccagcaattgtgctcactggtatttacccaaaacaggtaaaaacttaaacctgcacatggatgtatatggca

SEQ ID NO: 63215 - DNA, 73 bp, Homo sapiens
aattgtgctcactggtatttacccaaaacaggtaaaaacttaaacctgcacatggatgtatatggcagcttta

SEQ ID NO: 63216 - DNA, 71 bp, Homo sapiens
ccaaaacttggaagcaaccatgaagtctttcagtaggtaaagggataattgccatgaaaagacccagagga

SEQ ID NO: 63217 - DNA, 71 bp, Homo sapiens
gaagcaaccatgaagtctttcagtaggtaaagggataattgccatgaaaagacccagaggaaccttaaata

SEQ ID NO: 63218 - DNA, 70 bp, Homo sapiens
aaccatgaagtctttcagtaggtaaagggataattgccatgaaaagacccagaggaaccttaaatacata

SEQ ID NO: 63219 - DNA, 70 bp, Homo sapiens
ctttcagtaggtaaagggataattgccatgaaaagacccagaggaaccttaaatacatattattaaatga

SEQ ID NO: 63220 - DNA, 71 bp, Homo sapiens
ggtaaagggataattgccatgaaaagacccagaggaaccttaaatacatattattaaatgaatgaggccaa

SEQ ID NO: 63221 - DNA, 74 bp, Homo sapiens
attgccatgaaaagacccagaggaaccttaaatacatattattaaatgaatgaggccaatgagaaaaggctaca

SEQ ID NO: 63222 - DNA, 72 bp, Homo sapiens
aaaagacccagaggaaccttaaatacatattattaaatgaatgaggccaatgagaaaaggctacacactgtg

SEQ ID NO: 63223 - DNA, 74 bp, Homo sapiens
gaggaaccttaaatacatattattaaatgaatgaggccaatgagaaaaggctacacactgtgtgactgtaactt

SEQ ID NO: 63224 - DNA, 74 bp, Homo sapiens
acatattattaaatgaatgaggccaatgagaaaaggctacacactgtgtgactgtaactttacaaaaaggcaaa

SEQ ID NO: 63225 - DNA, 73 bp, Homo sapiens
ttattaaatgaatgaggccaatgagaaaaggctacacactgtgtgactgtaactttacaaaaaggcaaaacta

SEQ ID NO: 63226 - DNA, 73 bp, Homo sapiens
ctatggagacaatcagtggttgccagggttttgggaaggagagagggatgaagaggtgaaacacagacggctt

SEQ ID NO: 63227 - DNA, 71 bp, Homo sapiens
agacaatcagtggttgccagggttttgggaaggagagagggatgaagaggtgaaacacagacggcttttag

SEQ ID NO: 63228 - DNA, 71 bp, Homo sapiens
ttgccagggttttgggaaggagagagggatgaagaggtgaaacacagacggcttttagggcagtgaaaata

SEQ ID NO: 63229 - DNA, 75 bp, Homo sapiens
gttttgggaaggagagagggatgaagaggtgaaacacagacggcttttagggcagtgaaaatactctgcatgaca

SEQ ID NO: 63230 - DNA, 83 bp, Homo sapiens
gagagggatgaagaggtgaaacacagacggcttttagggcagtgaaaatactctgcatgacactacaatgatgcacatcatta

SEQ ID NO: 63231 - DNA, 82 bp, Homo sapiens
atgaagaggtgaaacacagacggcttttagggcagtgaaaatactctgcatgacactacaatgatgcacatcattatacatt

SEQ ID NO: 63232 - DNA, 83 bp, Homo sapiens
tgaaacacagacggcttttagggcagtgaaaatactctgcatgacactacaatgatgcacatcattatacatttgtccaagtc

SEQ ID NO: 63233 - DNA, 83 bp, Homo sapiens
gacggcttttagggcagtgaaaatactctgcatgacactacaatgatgcacatcattatacatttgtccaagtccacagaatg

SEQ ID NO: 63234 - DNA, 76 bp, Homo sapiens
caacaccaagagtgaaccctagtgtaaactacagacttcggattatgatgtatcaatataggtttattgattgtga

SEQ ID NO: 63235 - DNA, 76 bp, Homo sapiens
gagtgaaccctagtgtaaactacagacttcggattatgatgtatcaatataggtttattgattgtgacaaactgta

SEQ ID NO: 63236 - DNA, 75 bp, Homo sapiens
ccctagtgtaaactacagacttcggattatgatgtatcaatataggtttattgattgtgacaaactgtaccattc

SEQ ID NO: 63237 - DNA, 77 bp, Homo sapiens
aaactacagacttcggattatgatgtatcaatataggtttattgattgtgacaaactgtaccattctagacagcgga

SEQ ID NO: 63238 - DNA, 75 bp, Homo sapiens
atgtatcaatataggtttattgattgtgacaaactgtaccattctagacagcggagttggggaggatgttgaaaa

SEQ ID NO: 63239 - DNA, 76 bp, Homo sapiens
attgattgtgacaaactgtaccattctagacagcggagttggggaggatgttgaaaatggaggagactatgaacta

SEQ ID NO: 63240 - DNA, 75 bp, Homo sapiens
attctagacagcggagttggggaggatgttgaaaatggaggagactatgaactaggagaacagggaatagatgga

SEQ ID NO: 63241 - DNA, 74 bp, Homo sapiens
ggagttggggaggatgttgaaaatggaggagactatgaactaggagaacagggaatagatggaaaatctctgta

SEQ ID NO: 63242 - DNA, 75 bp, Homo sapiens
ggatgttgaaaatggaggagactatgaactaggagaacagggaatagatggaaaatctctgtaccttcatttcat

SEQ ID NO: 63243 - DNA, 76 bp, Homo sapiens
ttgaaaatggaggagactatgaactaggagaacagggaatagatggaaaatctctgtaccttcatttcattgtgaa

SEQ ID NO: 63244 - DNA, 76 bp, Homo sapiens
actatgaactaggagaacagggaatagatggaaaatctctgtaccttcatttcattgtgaagctcaaactactcta

SEQ ID NO: 63245 - DNA, 71 bp, Homo sapiens
aacagggaatagatggaaaatctctgtaccttcatttcattgtgaagctcaaactactctaaaaaaaccca

SEQ ID NO: 63246 - DNA, 70 bp, Homo sapiens
gatggaaaatctctgtaccttcatttcattgtgaagctcaaactactctaaaaaaacccaaaatctttaa

SEQ ID NO: 63247 - DNA, 67 bp, Homo sapiens
ctctgtaccttcatttcattgtgaagctcaaactactctaaaaaaacccaaaatctttaaaagcttt

SEQ ID NO: 63248 - DNA, 67 bp, Homo sapiens
tttcattgtgaagctcaaactactctaaaaaaacccaaaatctttaaaagcttttcttgggccaggc

SEQ ID NO: 63249 - DNA, 67 bp, Homo sapiens
aaaaagcttttcttaaaaaacaaactaaatgaatagaaaaatagatcaatagaacagactagaacaa

SEQ ID NO: 63250 - DNA, 69 bp, Homo sapiens
tcttaaaaaacaaactaaatgaatagaaaaatagatcaatagaacagactagaacaaaggtacagggat

SEQ ID NO: 63251 - DNA, 67 bp, Homo sapiens
aaaacaaactaaatgaatagaaaaatagatcaatagaacagactagaacaaaggtacagggattttt

SEQ ID NO: 63252 - DNA, 71 bp, Homo sapiens
ttttttttctatgaagggccagttaataaataatttagtctttgcagatgacctgcggtttccatcccaga

SEQ ID NO: 63253 - DNA, 72 bp, Homo sapiens
tttctatgaagggccagttaataaataatttagtctttgcagatgacctgcggtttccatcccagattgttt

SEQ ID NO: 63254 - DNA, 70 bp, Homo sapiens
gggccagttaataaataatttagtctttgcagatgacctgcggtttccatcccagattgttttcttttta

SEQ ID NO: 63255 - DNA, 69 bp, Homo sapiens
ataatttagtctttgcagatgacctgcggtttccatcccagattgttttctttttaaacaatccttaaa

SEQ ID NO: 63256 - DNA, 69 bp, Homo sapiens
agtctttgcagatgacctgcggtttccatcccagattgttttctttttaaacaatccttaaaaaatata

SEQ ID NO: 63257 - DNA, 66 bp, Homo sapiens
gatgacctgcggtttccatcccagattgttttctttttaaacaatccttaaaaaatataaaaccca

SEQ ID NO: 63258 - DNA, 66 bp, Homo sapiens
ttccatcccagattgttttctttttaaacaatccttaaaaaatataaaacccatccttacgtggca

SEQ ID NO: 63259 - DNA, 65 bp, Homo sapiens
cccagattgttttctttttaaacaatccttaaaaaatataaaacccatccttacgtggcaagcca

SEQ ID NO: 63260 - DNA, 67 bp, Homo sapiens
ttttaaacaatccttaaaaaatataaaacccatccttacgtggcaagccatataaaaacaggtcatg

SEQ ID NO: 63261 - DNA, 68 bp, Homo sapiens
aacaatccttaaaaaatataaaacccatccttacgtggcaagccatataaaaacaggtcatggggctg

SEQ ID NO: 63262 - DNA, 74 bp, Homo sapiens
aatataaaacccatccttacgtggcaagccatataaaaacaggtcatggggctggatgtggttcatgggctata

SEQ ID NO: 63263 - DNA, 74 bp, Homo sapiens
aaacccatccttacgtggcaagccatataaaaacaggtcatggggctggatgtggttcatgggctatagtttgc

SEQ ID NO: 63264 - DNA, 76 bp, Homo sapiens
ttacgtggcaagccatataaaaacaggtcatggggctggatgtggttcatgggctatagtttgcccttagactaca

SEQ ID NO: 63265 - DNA, 75 bp, Homo sapiens
atataaaaacaggtcatggggctggatgtggttcatgggctatagtttgcccttagactacagagtccagaaaca

SEQ ID NO: 63266 - DNA, 75 bp, Homo sapiens
aaacaggtcatggggctggatgtggttcatgggctatagtttgcccttagactacagagtccagaaacagacacc

SEQ ID NO: 63267 - DNA, 76 bp, Homo sapiens
ctggatgtggttcatgggctatagtttgcccttagactacagagtccagaaacagacacctccttgtacagtgaat

SEQ ID NO: 63268 - DNA, 76 bp, Homo sapiens
ttcatgggctatagtttgcccttagactacagagtccagaaacagacacctccttgtacagtgaatttcgttgcta

SEQ ID NO: 63269 - DNA, 73 bp, Homo sapiens
tatagtttgcccttagactacagagtccagaaacagacacctccttgtacagtgaatttcgttgctagttatt

SEQ ID NO: 63270 - DNA, 73 bp, Homo sapiens
tagtttgcccttagactacagagtccagaaacagacacctccttgtacagtgaatttcgttgctagttattta

SEQ ID NO: 63271 - DNA, 74 bp, Homo sapiens
cttagactacagagtccagaaacagacacctccttgtacagtgaatttcgttgctagttatttatctaagagaa

SEQ ID NO: 63272 - DNA, 74 bp, Homo sapiens
ttagactacagagtccagaaacagacacctccttgtacagtgaatttcgttgctagttatttatctaagagaaa

SEQ ID NO: 63273 - DNA, 74 bp, Homo sapiens
actacagagtccagaaacagacacctccttgtacagtgaatttcgttgctagttatttatctaagagaaatgaa

SEQ ID NO: 63274 - DNA, 72 bp, Homo sapiens
agagtccagaaacagacacctccttgtacagtgaatttcgttgctagttatttatctaagagaaatgaaaac

SEQ ID NO: 63275 - DNA, 74 bp, Homo sapiens
cagaaacagacacctccttgtacagtgaatttcgttgctagttatttatctaagagaaatgaaaacttctatgc

SEQ ID NO: 63276 - DNA, 72 bp, Homo sapiens
acacctccttgtacagtgaatttcgttgctagttatttatctaagagaaatgaaaacttctatgcccacaaa

SEQ ID NO: 63277 - DNA, 72 bp, Homo sapiens
ttgtacagtgaatttcgttgctagttatttatctaagagaaatgaaaacttctatgcccacaaaaaaagctg

SEQ ID NO: 63278 - DNA, 72 bp, Homo sapiens
gtacagtgaatttcgttgctagttatttatctaagagaaatgaaaacttctatgcccacaaaaaaagctgta

SEQ ID NO: 63279 - DNA, 71 bp, Homo sapiens
gtgaatttcgttgctagttatttatctaagagaaatgaaaacttctatgcccacaaaaaaagctgtacaaa

SEQ ID NO: 63280 - DNA, 74 bp, Homo sapiens
gctagttatttatctaagagaaatgaaaacttctatgcccacaaaaaaagctgtacaaaaatgctcacagaaga

SEQ ID NO: 63281 - DNA, 71 bp, Homo sapiens
ctaagagaaatgaaaacttctatgcccacaaaaaaagctgtacaaaaatgctcacagaagatttcttcttt

SEQ ID NO: 63282 - DNA, 69 bp, Homo sapiens
agaaatgaaaacttctatgcccacaaaaaaagctgtacaaaaatgctcacagaagatttcttctttttt

SEQ ID NO: 63283 - DNA, 71 bp, Homo sapiens
cgcgcccggcagaagatttattcttaatagcttcaaactggaaacaaccccaatgtccattaatgggagaa

SEQ ID NO: 63284 - DNA, 71 bp, Homo sapiens
agaagatttattcttaatagcttcaaactggaaacaaccccaatgtccattaatgggagaacggacaagca

SEQ ID NO: 63285 - DNA, 70 bp, Homo sapiens
tttattcttaatagcttcaaactggaaacaaccccaatgtccattaatgggagaacggacaagcaaatta

SEQ ID NO: 63286 - DNA, 72 bp, Homo sapiens
cttcaaactggaaacaaccccaatgtccattaatgggagaacggacaagcaaattatgctctagtcacaaaa

SEQ ID NO: 63287 - DNA, 73 bp, Homo sapiens
gaaacaaccccaatgtccattaatgggagaacggacaagcaaattatgctctagtcacaaaacagaataccat

SEQ ID NO: 63288 - DNA, 75 bp, Homo sapiens
caatgtccattaatgggagaacggacaagcaaattatgctctagtcacaaaacagaataccatttagcaataaaa

SEQ ID NO: 63289 - DNA, 73 bp, Homo sapiens
ccattaatgggagaacggacaagcaaattatgctctagtcacaaaacagaataccatttagcaataaaaaaga

SEQ ID NO: 63290 - DNA, 75 bp, Homo sapiens
gagaacggacaagcaaattatgctctagtcacaaaacagaataccatttagcaataaaaaagaactagttcatgc

SEQ ID NO: 63291 - DNA, 75 bp, Homo sapiens
gcaaattatgctctagtcacaaaacagaataccatttagcaataaaaaagaactagttcatgccaacaacgtgga

SEQ ID NO: 63292 - DNA, 76 bp, Homo sapiens
tctagtcacaaaacagaataccatttagcaataaaaaagaactagttcatgccaacaacgtggatgaatctcagaa

SEQ ID NO: 63293 - DNA, 74 bp, Homo sapiens
cacaaaacagaataccatttagcaataaaaaagaactagttcatgccaacaacgtggatgaatctcagaaaaca

SEQ ID NO: 63294 - DNA, 75 bp, Homo sapiens
catttagcaataaaaaagaactagttcatgccaacaacgtggatgaatctcagaaaacaagttgtgagcaaaaga

SEQ ID NO: 63295 - DNA, 73 bp, Homo sapiens
aagaactagttcatgccaacaacgtggatgaatctcagaaaacaagttgtgagcaaaagaagccttataaaaa

SEQ ID NO: 63296 - DNA, 75 bp, Homo sapiens
atgccaacaacgtggatgaatctcagaaaacaagttgtgagcaaaagaagccttataaaaaagcacatactataa

SEQ ID NO: 63297 - DNA, 79 bp, Homo sapiens
ggatgaatctcagaaaacaagttgtgagcaaaagaagccttataaaaaagcacatactataagtcatcacactacatga

SEQ ID NO: 63298 - DNA, 78 bp, Homo sapiens
atctcagaaaacaagttgtgagcaaaagaagccttataaaaaagcacatactataagtcatcacactacatgattcca

SEQ ID NO: 63299 - DNA, 77 bp, Homo sapiens
aacaagttgtgagcaaaagaagccttataaaaaagcacatactataagtcatcacactacatgattccattacgtga

SEQ ID NO: 63300 - DNA, 76 bp, Homo sapiens
aaaagaagccttataaaaaagcacatactataagtcatcacactacatgattccattacgtgaggtctgagaacag

SEQ ID NO: 63301 - DNA, 81 bp, Homo sapiens
ttataaaaaagcacatactataagtcatcacactacatgattccattacgtgaggtctgagaacaggcaaagcaattcatg

SEQ ID NO: 63302 - DNA, 81 bp, Homo sapiens
cacatactataagtcatcacactacatgattccattacgtgaggtctgagaacaggcaaagcaattcatggttacagaaat

SEQ ID NO: 63303 - DNA, 81 bp, Homo sapiens
actataagtcatcacactacatgattccattacgtgaggtctgagaacaggcaaagcaattcatggttacagaaattagca

SEQ ID NO: 63304 - DNA, 81 bp, Homo sapiens
atcacactacatgattccattacgtgaggtctgagaacaggcaaagcaattcatggttacagaaattagcagctgggcgcg

SEQ ID NO: 63305 - DNA, 67 bp, Homo sapiens
gaaaaaaaagaaattagcagtaattgtcgggggatgagtggggacagaaaaagggaggcatacaaag

SEQ ID NO: 63306 - DNA, 67 bp, Homo sapiens
aaagaaattagcagtaattgtcgggggatgagtggggacagaaaaagggaggcatacaaaggaactt

SEQ ID NO: 63307 - DNA, 69 bp, Homo sapiens
taattgtcgggggatgagtggggacagaaaaagggaggcatacaaaggaactttctgggctaagagaaa

SEQ ID NO: 63308 - DNA, 71 bp, Homo sapiens
gggatgagtggggacagaaaaagggaggcatacaaaggaactttctgggctaagagaaatgtcctgaatct

SEQ ID NO: 63309 - DNA, 71 bp, Homo sapiens
agtggggacagaaaaagggaggcatacaaaggaactttctgggctaagagaaatgtcctgaatcttgatag

SEQ ID NO: 63310 - DNA, 70 bp, Homo sapiens
aaagggaggcatacaaaggaactttctgggctaagagaaatgtcctgaatcttgataggggtgtgggtta

SEQ ID NO: 63311 - DNA, 70 bp, Homo sapiens
atacaaaggaactttctgggctaagagaaatgtcctgaatcttgataggggtgtgggttacatgggtaaa

SEQ ID NO: 63312 - DNA, 67 bp, Homo sapiens
aactttctgggctaagagaaatgtcctgaatcttgataggggtgtgggttacatgggtaaagggttt

SEQ ID NO: 63313 - DNA, 71 bp, Homo sapiens
taagagaaatgtcctgaatcttgataggggtgtgggttacatgggtaaagggttttgacaaatataagatc

SEQ ID NO: 63314 - DNA, 72 bp, Homo sapiens
aaatgtcctgaatcttgataggggtgtgggttacatgggtaaagggttttgacaaatataagatctgtgcat

SEQ ID NO: 63315 - DNA, 74 bp, Homo sapiens
ttgataggggtgtgggttacatgggtaaagggttttgacaaatataagatctgtgcatttcatgctatataaat

SEQ ID NO: 63316 - DNA, 75 bp, Homo sapiens
gtgtgggttacatgggtaaagggttttgacaaatataagatctgtgcatttcatgctatataaattacaactcca

SEQ ID NO: 63317 - DNA, 73 bp, Homo sapiens
gttacatgggtaaagggttttgacaaatataagatctgtgcatttcatgctatataaattacaactccaaaaa

SEQ ID NO: 63318 - DNA, 74 bp, Homo sapiens
taaagggttttgacaaatataagatctgtgcatttcatgctatataaattacaactccaaaaataatcaaagta

SEQ ID NO: 63319 - DNA, 74 bp, Homo sapiens
gacaaatataagatctgtgcatttcatgctatataaattacaactccaaaaataatcaaagtaaaataataaaa

SEQ ID NO: 63320 - DNA, 67 bp, Homo sapiens
atattttaaaaatataggtaggtctttaactccaaatcttaatagctacctttagttgataaagcaa

SEQ ID NO: 63321 - DNA, 67 bp, Homo sapiens
aggtaggtctttaactccaaatcttaatagctacctttagttgataaagcaacgaagataatggttt

SEQ ID NO: 63322 - DNA, 71 bp, Homo sapiens
ctccaaatcttaatagctacctttagttgataaagcaacgaagataatggtttttcgtacaagaacagtca

SEQ ID NO: 63323 - DNA, 74 bp, Homo sapiens
atcttaatagctacctttagttgataaagcaacgaagataatggtttttcgtacaagaacagtcatgtgttgca

SEQ ID NO: 63324 - DNA, 73 bp, Homo sapiens
ctacctttagttgataaagcaacgaagataatggtttttcgtacaagaacagtcatgtgttgcataacaacat

SEQ ID NO: 63325 - DNA, 75 bp, Homo sapiens
gataaagcaacgaagataatggtttttcgtacaagaacagtcatgtgttgcataacaacatttcagtaaactaca

SEQ ID NO: 63326 - DNA, 76 bp, Homo sapiens
aagataatggtttttcgtacaagaacagtcatgtgttgcataacaacatttcagtaaactacagacctcatacaca

SEQ ID NO: 63327 - DNA, 76 bp, Homo sapiens
atggtttttcgtacaagaacagtcatgtgttgcataacaacatttcagtaaactacagacctcatacacagtggtc

SEQ ID NO: 63328 - DNA, 79 bp, Homo sapiens
tacaagaacagtcatgtgttgcataacaacatttcagtaaactacagacctcatacacagtggtcccagaagattacca

SEQ ID NO: 63329 - DNA, 77 bp, Homo sapiens
atgtgttgcataacaacatttcagtaaactacagacctcatacacagtggtcccagaagattaccatggaactgaaa

SEQ ID NO: 63330 - DNA, 73 bp, Homo sapiens
ataacaacatttcagtaaactacagacctcatacacagtggtcccagaagattaccatggaactgaaaaattc

SEQ ID NO: 63331 - DNA, 74 bp, Homo sapiens
tttcagtaaactacagacctcatacacagtggtcccagaagattaccatggaactgaaaaattccaatggccta

SEQ ID NO: 63332 - DNA, 74 bp, Homo sapiens
aactacagacctcatacacagtggtcccagaagattaccatggaactgaaaaattccaatggcctagtgacgta

SEQ ID NO: 63333 - DNA, 74 bp, Homo sapiens
atacacagtggtcccagaagattaccatggaactgaaaaattccaatggcctagtgacgtagtagctgttgaaa

SEQ ID NO: 63334 - DNA, 77 bp, Homo sapiens
tcccagaagattaccatggaactgaaaaattccaatggcctagtgacgtagtagctgttgaaactgtcatagcataa

SEQ ID NO: 63335 - DNA, 77 bp, Homo sapiens
agattaccatggaactgaaaaattccaatggcctagtgacgtagtagctgttgaaactgtcatagcataaggcatta

SEQ ID NO: 63336 - DNA, 77 bp, Homo sapiens
aactgaaaaattccaatggcctagtgacgtagtagctgttgaaactgtcatagcataaggcattactcaggtgtctg

SEQ ID NO: 63337 - DNA, 82 bp, Homo sapiens
aaattccaatggcctagtgacgtagtagctgttgaaactgtcatagcataaggcattactcaggtgtctgtgatgctgctgg

SEQ ID NO: 63338 - DNA, 83 bp, Homo sapiens
ctagtgacgtagtagctgttgaaactgtcatagcataaggcattactcaggtgtctgtgatgctgctggtgtaaacaaatcaa

SEQ ID NO: 63339 - DNA, 85 bp, Homo sapiens
gtagtagctgttgaaactgtcatagcataaggcattactcaggtgtctgtgatgctgctggtgtaaacaaatcaatgcactacca

SEQ ID NO: 63340 - DNA, 85 bp, Homo sapiens
ttgaaactgtcatagcataaggcattactcaggtgtctgtgatgctgctggtgtaaacaaatcaatgcactaccagctgtataaa

SEQ ID NO: 63341 - DNA, 86 bp, Homo sapiens
atagcataaggcattactcaggtgtctgtgatgctgctggtgtaaacaaatcaatgcactaccagctgtataaaagcatggctcaa

SEQ ID NO: 63342 - DNA, 84 bp, Homo sapiens
attactcaggtgtctgtgatgctgctggtgtaaacaaatcaatgcactaccagctgtataaaagcatggctcaattatgtatag

SEQ ID NO: 63343 - DNA, 84 bp, Homo sapiens
aggtgtctgtgatgctgctggtgtaaacaaatcaatgcactaccagctgtataaaagcatggctcaattatgtatagtacataa

SEQ ID NO: 63344 - DNA, 83 bp, Homo sapiens
ctgctggtgtaaacaaatcaatgcactaccagctgtataaaagcatggctcaattatgtatagtacataatagccgataatga

SEQ ID NO: 63345 - DNA, 81 bp, Homo sapiens
ggtgtaaacaaatcaatgcactaccagctgtataaaagcatggctcaattatgtatagtacataatagccgataatgataa

SEQ ID NO: 63346 - DNA, 67 bp, Homo sapiens
actggtttatgtatttactacacttattagagtataatccttctactttttcttaagttaactgtaa

SEQ ID NO: 63347 - DNA, 68 bp, Homo sapiens
ttatgtatttactacacttattagagtataatccttctactttttcttaagttaactgtaaaacagcc

SEQ ID NO: 63348 - DNA, 69 bp, Homo sapiens
ctacacttattagagtataatccttctactttttcttaagttaactgtaaaacagcctcaaggcaggtc

SEQ ID NO: 63349 - DNA, 81 bp, Homo sapiens
agcctcaaggcaggtccttcaggcggtattccagaaggcagcattgtcattataggagatgacagtctcccatacatgtta

SEQ ID NO: 63350 - DNA, 82 bp, Homo sapiens
caggtccttcaggcggtattccagaaggcagcattgtcattataggagatgacagtctcccatacatgttactgcttctgaa

SEQ ID NO: 63351 - DNA, 81 bp, Homo sapiens
ttcaggcggtattccagaaggcagcattgtcattataggagatgacagtctcccatacatgttactgcttctgaagacctt

SEQ ID NO: 63352 - DNA, 83 bp, Homo sapiens
tccagaaggcagcattgtcattataggagatgacagtctcccatacatgttactgcttctgaagacctttcagtgggacaaga

SEQ ID NO: 63353 - DNA, 83 bp, Homo sapiens
aggcagcattgtcattataggagatgacagtctcccatacatgttactgcttctgaagacctttcagtgggacaagatgtgga

SEQ ID NO: 63354 - DNA, 78 bp, Homo sapiens
attataggagatgacagtctcccatacatgttactgcttctgaagacctttcagtgggacaagatgtggaggagaaaa

SEQ ID NO: 63355 - DNA, 78 bp, Homo sapiens
atgacagtctcccatacatgttactgcttctgaagacctttcagtgggacaagatgtggaggagaaaaacagtgatat

SEQ ID NO: 63356 - DNA, 81 bp, Homo sapiens
tcccatacatgttactgcttctgaagacctttcagtgggacaagatgtggaggagaaaaacagtgatattcatgatcctga

SEQ ID NO: 63357 - DNA, 67 bp, Homo sapiens
aattttaaaatagaaaaagcttatagaataagtacaaatacgtttgtacacctgtacaatgtgttta

SEQ ID NO: 63358 - DNA, 69 bp, Homo sapiens
atagaaaaagcttatagaataagtacaaatacgtttgtacacctgtacaatgtgtttagtgttttaagc

SEQ ID NO: 63359 - DNA, 69 bp, Homo sapiens
aaagcttatagaataagtacaaatacgtttgtacacctgtacaatgtgtttagtgttttaagctaagtg

SEQ ID NO: 63360 - DNA, 69 bp, Homo sapiens
gaataagtacaaatacgtttgtacacctgtacaatgtgtttagtgttttaagctaagtgttaatacaaa

SEQ ID NO: 63361 - DNA, 67 bp, Homo sapiens
aaatacgtttgtacacctgtacaatgtgtttagtgttttaagctaagtgttaatacaaaagaataaa

SEQ ID NO: 63362 - DNA, 74 bp, Homo sapiens
aaaataaataaatttagcatggcctaagtatatagtgtttataaagtctatagcagtgtacagcaacgttctca

SEQ ID NO: 63363 - DNA, 80 bp, Homo sapiens
taaatttagcatggcctaagtatatagtgtttataaagtctatagcagtgtacagcaacgttctcagctgtcacattcac

SEQ ID NO: 63364 - DNA, 81 bp, Homo sapiens
aatttagcatggcctaagtatatagtgtttataaagtctatagcagtgtacagcaacgttctcagctgtcacattcactca

SEQ ID NO: 63365 - DNA, 85 bp, Homo sapiens
tttataaagtctatagcagtgtacagcaacgttctcagctgtcacattcactcaccactcattcactcatccacagcaacttcca

SEQ ID NO: 63366 - DNA, 78 bp, Homo sapiens
accactcattcactcatccacagcaacttccagtcctgcaaacaccattcatagtaaatgccttatacaggtgtgttt

SEQ ID NO: 63367 - DNA, 79 bp, Homo sapiens
cactcatccacagcaacttccagtcctgcaaacaccattcatagtaaatgccttatacaggtgtgttttacacacacac

SEQ ID NO: 63368 - DNA, 76 bp, Homo sapiens
atccacagcaacttccagtcctgcaaacaccattcatagtaaatgccttatacaggtgtgttttacacacacaccc

SEQ ID NO: 63369 - DNA, 73 bp, Homo sapiens
cttccagtcctgcaaacaccattcatagtaaatgccttatacaggtgtgttttacacacacacccgcccaccc

SEQ ID NO: 63370 - DNA, 73 bp, Homo sapiens
aaacaccattcatagtaaatgccttatacaggtgtgttttacacacacacccgcccacccctgccacacacac

SEQ ID NO: 63371 - DNA, 75 bp, Homo sapiens
attcatagtaaatgccttatacaggtgtgttttacacacacacccgcccacccctgccacacacaccaggatcta

SEQ ID NO: 63372 - DNA, 76 bp, Homo sapiens
aaatgccttatacaggtgtgttttacacacacacccgcccacccctgccacacacaccaggatctatgctgcccag

SEQ ID NO: 63373 - DNA, 76 bp, Homo sapiens
gattgcaggcatgggactgagtgtctggtcaggtgtactattttaaatcttttatacagtattttctactatacca

SEQ ID NO: 63374 - DNA, 74 bp, Homo sapiens
ctgagtgtctggtcaggtgtactattttaaatcttttatacagtattttctactataccatttctatgtataga

SEQ ID NO: 63375 - DNA, 70 bp, Homo sapiens
ggtcaggtgtactattttaaatcttttatacagtattttctactataccatttctatgtatagaaatgtt

SEQ ID NO: 63376 - DNA, 69 bp, Homo sapiens
ctattttaaatcttttatacagtattttctactataccatttctatgtatagaaatgtttaggtttata

SEQ ID NO: 63377 - DNA, 72 bp, Homo sapiens
tttatacagtattttctactataccatttctatgtatagaaatgtttaggtttataaacacttagcattgtg

SEQ ID NO: 63378 - DNA, 72 bp, Homo sapiens
gtattttctactataccatttctatgtatagaaatgtttaggtttataaacacttagcattgtggcaccgtg

SEQ ID NO: 63379 - DNA, 74 bp, Homo sapiens
tataccatttctatgtatagaaatgtttaggtttataaacacttagcattgtggcaccgtgttacaactgccca

SEQ ID NO: 63380 - DNA, 76 bp, Homo sapiens
tatgtatagaaatgtttaggtttataaacacttagcattgtggcaccgtgttacaactgcccaagtatgcattaca

SEQ ID NO: 63381 - DNA, 73 bp, Homo sapiens
aaatgtttaggtttataaacacttagcattgtggcaccgtgttacaactgcccaagtatgcattacagtaaca

SEQ ID NO: 63382 - DNA, 79 bp, Homo sapiens
tttataaacacttagcattgtggcaccgtgttacaactgcccaagtatgcattacagtaacatgatgtacagatttata

SEQ ID NO: 63383 - DNA, 79 bp, Homo sapiens
aaacacttagcattgtggcaccgtgttacaactgcccaagtatgcattacagtaacatgatgtacagatttatagtcca

SEQ ID NO: 63384 - DNA, 79 bp, Homo sapiens
attgtggcaccgtgttacaactgcccaagtatgcattacagtaacatgatgtacagatttatagtccaggagcaacagg

SEQ ID NO: 63385 - DNA, 80 bp, Homo sapiens
gtgttacaactgcccaagtatgcattacagtaacatgatgtacagatttatagtccaggagcaacagggtacactatata

SEQ ID NO: 63386 - DNA, 81 bp, Homo sapiens
tacaactgcccaagtatgcattacagtaacatgatgtacagatttatagtccaggagcaacagggtacactatatagccta

SEQ ID NO: 63387 - DNA, 79 bp, Homo sapiens
actgcccaagtatgcattacagtaacatgatgtacagatttatagtccaggagcaacagggtacactatatagcctagg

SEQ ID NO: 63388 - DNA, 78 bp, Homo sapiens
attacagtaacatgatgtacagatttatagtccaggagcaacagggtacactatatagcctaggtgtgtaacaggcta

SEQ ID NO: 63389 - DNA, 81 bp, Homo sapiens
gtaacatgatgtacagatttatagtccaggagcaacagggtacactatatagcctaggtgtgtaacaggctatgccatcta

SEQ ID NO: 63390 - DNA, 81 bp, Homo sapiens
tagcctaggtgtgtaacaggctatgccatctaggtttgcataactactctatgatgttcctagcataacataatcacttaa

SEQ ID NO: 63391 - DNA, 82 bp, Homo sapiens
acaggctatgccatctaggtttgcataactactctatgatgttcctagcataacataatcacttaatgatgcatttcacccc

SEQ ID NO: 63392 - DNA, 82 bp, Homo sapiens
atctaggtttgcataactactctatgatgttcctagcataacataatcacttaatgatgcatttcacccccatcaagtgaca

SEQ ID NO: 63393 - DNA, 83 bp, Homo sapiens
tatgatgttcctagcataacataatcacttaatgatgcatttcacccccatcaagtgacacatgcctaagttactcttcaaga

SEQ ID NO: 63394 - DNA, 81 bp, Homo sapiens
ttcctagcataacataatcacttaatgatgcatttcacccccatcaagtgacacatgcctaagttactcttcaagatggtc

SEQ ID NO: 63395 - DNA, 78 bp, Homo sapiens
taacataatcacttaatgatgcatttcacccccatcaagtgacacatgcctaagttactcttcaagatggtcccctgg

SEQ ID NO: 63396 - DNA, 80 bp, Homo sapiens
atgatgcatttcacccccatcaagtgacacatgcctaagttactcttcaagatggtcccctgggagacatgtcaaatgaa

SEQ ID NO: 63397 - DNA, 75 bp, Homo sapiens
atttcacccccatcaagtgacacatgcctaagttactcttcaagatggtcccctgggagacatgtcaaatgaaaa

SEQ ID NO: 63398 - DNA, 76 bp, Homo sapiens
atgcctaagttactcttcaagatggtcccctgggagacatgtcaaatgaaaatcttcattgttgttattatgctaa

SEQ ID NO: 63399 - DNA, 75 bp, Homo sapiens
taagttactcttcaagatggtcccctgggagacatgtcaaatgaaaatcttcattgttgttattatgctaaacat

SEQ ID NO: 63400 - DNA, 75 bp, Homo sapiens
ttcaagatggtcccctgggagacatgtcaaatgaaaatcttcattgttgttattatgctaaacattcattccgtt

SEQ ID NO: 63401 - DNA, 75 bp, Homo sapiens
ccctgggagacatgtcaaatgaaaatcttcattgttgttattatgctaaacattcattccgtttgtgttacagaa

SEQ ID NO: 63402 - DNA, 73 bp, Homo sapiens
tgaaaatcttcattgttgttattatgctaaacattcattccgtttgtgttacagaaaataatcagccaaaaag

SEQ ID NO: 63403 - DNA, 72 bp, Homo sapiens
cattgttgttattatgctaaacattcattccgtttgtgttacagaaaataatcagccaaaaagttaactgga

SEQ ID NO: 63404 - DNA, 69 bp, Homo sapiens
ttcattccgtttgtgttacagaaaataatcagccaaaaagttaactggaaatactactccaactttgac

SEQ ID NO: 63405 - DNA, 67 bp, Homo sapiens
ccgtttgtgttacagaaaataatcagccaaaaagttaactggaaatactactccaactttgacttta

SEQ ID NO: 63406 - DNA, 67 bp, Homo sapiens
acagaaaataatcagccaaaaagttaactggaaatactactccaactttgactttaaaaaagataca

SEQ ID NO: 63407 - DNA, 70 bp, Homo sapiens
taactggaaatactactccaactttgactttaaaaaagatacataattatagataaaagactggtagaga

SEQ ID NO: 63408 - DNA, 71 bp, Homo sapiens
tactactccaactttgactttaaaaaagatacataattatagataaaagactggtagagaaaacatcagga

SEQ ID NO: 63409 - DNA, 72 bp, Homo sapiens
taaaaaagatacataattatagataaaagactggtagagaaaacatcaggagtatgttttctttagcgctaa

SEQ ID NO: 63410 - DNA, 76 bp, Homo sapiens
acataattatagataaaagactggtagagaaaacatcaggagtatgttttctttagcgctaagtatgactggatga

SEQ ID NO: 63411 - DNA, 77 bp, Homo sapiens
tatagataaaagactggtagagaaaacatcaggagtatgttttctttagcgctaagtatgactggatgataggctta

SEQ ID NO: 63412 - DNA, 76 bp, Homo sapiens
ctggtagagaaaacatcaggagtatgttttctttagcgctaagtatgactggatgataggcttacaggcaagattt

SEQ ID NO: 63413 - DNA, 74 bp, Homo sapiens
agaaaacatcaggagtatgttttctttagcgctaagtatgactggatgataggcttacaggcaagattttcttt

SEQ ID NO: 63414 - DNA, 74 bp, Homo sapiens
aggagtatgttttctttagcgctaagtatgactggatgataggcttacaggcaagattttcttttctagacatt

SEQ ID NO: 63415 - DNA, 76 bp, Homo sapiens
ttttctttagcgctaagtatgactggatgataggcttacaggcaagattttcttttctagacatttctgtgctaat

SEQ ID NO: 63416 - DNA, 77 bp, Homo sapiens
gctaagtatgactggatgataggcttacaggcaagattttcttttctagacatttctgtgctaattttgtataacaa

SEQ ID NO: 63417 - DNA, 76 bp, Homo sapiens
gactggatgataggcttacaggcaagattttcttttctagacatttctgtgctaattttgtataacaaacatcaac

SEQ ID NO: 63418 - DNA, 71 bp, Homo sapiens
ataggcttacaggcaagattttcttttctagacatttctgtgctaattttgtataacaaacatcaactttt

SEQ ID NO: 63419 - DNA, 70 bp, Homo sapiens
ggcaagattttcttttctagacatttctgtgctaattttgtataacaaacatcaactttttaaaagttga

SEQ ID NO: 63420 - DNA, 73 bp, Homo sapiens
ttctagacatttctgtgctaattttgtataacaaacatcaactttttaaaagttgatataggattttgatctg

SEQ ID NO: 63421 - DNA, 71 bp, Homo sapiens
ttctgtgctaattttgtataacaaacatcaactttttaaaagttgatataggattttgatctgttgcccgg

SEQ ID NO: 63422 - DNA, 74 bp, Homo sapiens
gctgggatcacaagaatgagccaccaagctcaacagctactttcactaccaaaaaatgttttcggaaaacatta

SEQ ID NO: 63423 - DNA, 70 bp, Homo sapiens
acaagaatgagccaccaagctcaacagctactttcactaccaaaaaatgttttcggaaaacattagaaaa

SEQ ID NO: 63424 - DNA, 71 bp, Homo sapiens
ccaccaagctcaacagctactttcactaccaaaaaatgttttcggaaaacattagaaaagcagtctcatta

SEQ ID NO: 63425 - DNA, 72 bp, Homo sapiens
accaagctcaacagctactttcactaccaaaaaatgttttcggaaaacattagaaaagcagtctcattatca

SEQ ID NO: 63426 - DNA, 73 bp, Homo sapiens
agctcaacagctactttcactaccaaaaaatgttttcggaaaacattagaaaagcagtctcattatcacttca

SEQ ID NO: 63427 - DNA, 71 bp, Homo sapiens
caacagctactttcactaccaaaaaatgttttcggaaaacattagaaaagcagtctcattatcacttcaaa

SEQ ID NO: 63428 - DNA, 74 bp, Homo sapiens
ctaccaaaaaatgttttcggaaaacattagaaaagcagtctcattatcacttcaaatgttgtgtggctatctca

SEQ ID NO: 63429 - DNA, 73 bp, Homo sapiens
ccaaaaaatgttttcggaaaacattagaaaagcagtctcattatcacttcaaatgttgtgtggctatctcaaa

SEQ ID NO: 63430 - DNA, 73 bp, Homo sapiens
aaaaatgttttcggaaaacattagaaaagcagtctcattatcacttcaaatgttgtgtggctatctcaaatat

SEQ ID NO: 63431 - DNA, 79 bp, Homo sapiens
aaaacattagaaaagcagtctcattatcacttcaaatgttgtgtggctatctcaaatattttatgtggcacagcacctc

SEQ ID NO: 63432 - DNA, 80 bp, Homo sapiens
attagaaaagcagtctcattatcacttcaaatgttgtgtggctatctcaaatattttatgtggcacagcacctcgctagt

SEQ ID NO: 63433 - DNA, 83 bp, Homo sapiens
tcattatcacttcaaatgttgtgtggctatctcaaatattttatgtggcacagcacctcgctagttcactactcaatattctc

SEQ ID NO: 63434 - DNA, 78 bp, Homo sapiens
atgttgtgtggctatctcaaatattttatgtggcacagcacctcgctagttcactactcaatattctctggaaggttt

SEQ ID NO: 63435 - DNA, 75 bp, Homo sapiens
ctcaaatattttatgtggcacagcacctcgctagttcactactcaatattctctggaaggttttcagtaaaccta

SEQ ID NO: 63436 - DNA, 76 bp, Homo sapiens
acagcacctcgctagttcactactcaatattctctggaaggttttcagtaaacctatgcatatactaagaatgtta

SEQ ID NO: 63437 - DNA, 76 bp, Homo sapiens
ctagttcactactcaatattctctggaaggttttcagtaaacctatgcatatactaagaatgttacatacaccatc

SEQ ID NO: 63438 - DNA, 78 bp, Homo sapiens
atattctctggaaggttttcagtaaacctatgcatatactaagaatgttacatacaccatctcatttaattggcatgc

SEQ ID NO: 63439 - DNA, 78 bp, Homo sapiens
aggttttcagtaaacctatgcatatactaagaatgttacatacaccatctcatttaattggcatgcgattctgtaaga

SEQ ID NO: 63440 - DNA, 82 bp, Homo sapiens
acctatgcatatactaagaatgttacatacaccatctcatttaattggcatgcgattctgtaagatagagattattatccat

SEQ ID NO: 63441 - DNA, 82 bp, Homo sapiens
tgcatatactaagaatgttacatacaccatctcatttaattggcatgcgattctgtaagatagagattattatccattttta

SEQ ID NO: 63442 - DNA, 80 bp, Homo sapiens
agaatgttacatacaccatctcatttaattggcatgcgattctgtaagatagagattattatccatttttaattgataga

SEQ ID NO: 63443 - DNA, 80 bp, Homo sapiens
caccatctcatttaattggcatgcgattctgtaagatagagattattatccatttttaattgatagaacaattctcaatg

SEQ ID NO: 63444 - DNA, 80 bp, Homo sapiens
catttaattggcatgcgattctgtaagatagagattattatccatttttaattgatagaacaattctcaatggcagctac

SEQ ID NO: 63445 - DNA, 83 bp, Homo sapiens
tggcatgcgattctgtaagatagagattattatccatttttaattgatagaacaattctcaatggcagctactattatcctca

SEQ ID NO: 63446 - DNA, 77 bp, Homo sapiens
ctgtaagatagagattattatccatttttaattgatagaacaattctcaatggcagctactattatcctcatttaaa

SEQ ID NO: 63447 - DNA, 75 bp, Homo sapiens
agagattattatccatttttaattgatagaacaattctcaatggcagctactattatcctcatttaaaagccaaa

SEQ ID NO: 63448 - DNA, 71 bp, Homo sapiens
ccatttttaattgatagaacaattctcaatggcagctactattatcctcatttaaaagccaaaaaaactaa

SEQ ID NO: 63449 - DNA, 73 bp, Homo sapiens
ttgatagaacaattctcaatggcagctactattatcctcatttaaaagccaaaaaaactaaaacccagagaga

SEQ ID NO: 63450 - DNA, 70 bp, Homo sapiens
aacaattctcaatggcagctactattatcctcatttaaaagccaaaaaaactaaaacccagagagattaa

SEQ ID NO: 63451 - DNA, 67 bp, Homo sapiens
ggcagctactattatcctcatttaaaagccaaaaaaactaaaacccagagagattaaataagtttcc

SEQ ID NO: 63452 - DNA, 67 bp, Homo sapiens
ctattatcctcatttaaaagccaaaaaaactaaaacccagagagattaaataagtttcccatagcta

SEQ ID NO: 63453 - DNA, 68 bp, Homo sapiens
aaaaactaaaacccagagagattaaataagtttcccatagctaataattagtgaaccctggatgtgaa

SEQ ID NO: 63454 - DNA, 73 bp, Homo sapiens
aacccagagagattaaataagtttcccatagctaataattagtgaaccctggatgtgaactgagtcagcttat

SEQ ID NO: 63455 - DNA, 78 bp, Homo sapiens
atagctaataattagtgaaccctggatgtgaactgagtcagcttattccagagcccacgccaggcttgaaagcaatta

SEQ ID NO: 63456 - DNA, 78 bp, Homo sapiens
aattagtgaaccctggatgtgaactgagtcagcttattccagagcccacgccaggcttgaaagcaattagccactaca

SEQ ID NO: 63457 - DNA, 85 bp, Homo sapiens
ctggatgtgaactgagtcagcttattccagagcccacgccaggcttgaaagcaattagccactacatctgcagaaggcagtctga

SEQ ID NO: 63458 - DNA, 86 bp, Homo sapiens
tgagtcagcttattccagagcccacgccaggcttgaaagcaattagccactacatctgcagaaggcagtctgagctgccgctatta

SEQ ID NO: 63459 - DNA, 83 bp, Homo sapiens
agcttattccagagcccacgccaggcttgaaagcaattagccactacatctgcagaaggcagtctgagctgccgctattacta

SEQ ID NO: 63460 - DNA, 86 bp, Homo sapiens
ccacgccaggcttgaaagcaattagccactacatctgcagaaggcagtctgagctgccgctattactactgctgctgcagtaagta

SEQ ID NO: 63461 - DNA, 85 bp, Homo sapiens
cttgaaagcaattagccactacatctgcagaaggcagtctgagctgccgctattactactgctgctgcagtaagtacactaacta

SEQ ID NO: 63462 - DNA, 85 bp, Homo sapiens
aagcaattagccactacatctgcagaaggcagtctgagctgccgctattactactgctgctgcagtaagtacactaactactatg

SEQ ID NO: 63463 - DNA, 87 bp, Homo sapiens
tacatctgcagaaggcagtctgagctgccgctattactactgctgctgcagtaagtacactaactactatgtgcgtgtcaatccatt

SEQ ID NO: 63464 - DNA, 83 bp, Homo sapiens
aaggcagtctgagctgccgctattactactgctgctgcagtaagtacactaactactatgtgcgtgtcaatccatttaatata

SEQ ID NO: 63465 - DNA, 86 bp, Homo sapiens
agtctgagctgccgctattactactgctgctgcagtaagtacactaactactatgtgcgtgtcaatccatttaatatacatatgca

SEQ ID NO: 63466 - DNA, 83 bp, Homo sapiens
tattactactgctgctgcagtaagtacactaactactatgtgcgtgtcaatccatttaatatacatatgcaatctcattaaat

SEQ ID NO: 63467 - DNA, 82 bp, Homo sapiens
ctactgctgctgcagtaagtacactaactactatgtgcgtgtcaatccatttaatatacatatgcaatctcattaaattaaa

SEQ ID NO: 63468 - DNA, 76 bp, Homo sapiens
gcagtaagtacactaactactatgtgcgtgtcaatccatttaatatacatatgcaatctcattaaattaaaaagtt

SEQ ID NO: 63469 - DNA, 73 bp, Homo sapiens
acactaactactatgtgcgtgtcaatccatttaatatacatatgcaatctcattaaattaaaaagtttaaaaa

SEQ ID NO: 63470 - DNA, 74 bp, Homo sapiens
aaagaaaaaagaaattcatgattaattatcatgggaaggtaggtacatcctgaatcatacattctataggacac

SEQ ID NO: 63471 - DNA, 74 bp, Homo sapiens
aagaaaaaagaaattcatgattaattatcatgggaaggtaggtacatcctgaatcatacattctataggacacc

SEQ ID NO: 63472 - DNA, 82 bp, Homo sapiens
aaattcatgattaattatcatgggaaggtaggtacatcctgaatcatacattctataggacacctatgatcatctctcatta

SEQ ID NO: 63473 - DNA, 83 bp, Homo sapiens
ttaattatcatgggaaggtaggtacatcctgaatcatacattctataggacacctatgatcatctctcattagagtcataata

SEQ ID NO: 63474 - DNA, 84 bp, Homo sapiens
tatcatgggaaggtaggtacatcctgaatcatacattctataggacacctatgatcatctctcattagagtcataataagatcc

SEQ ID NO: 63475 - DNA, 83 bp, Homo sapiens
aggtaggtacatcctgaatcatacattctataggacacctatgatcatctctcattagagtcataataagatccctgagccag

SEQ ID NO: 63476 - DNA, 84 bp, Homo sapiens
tgaatcatacattctataggacacctatgatcatctctcattagagtcataataagatccctgagccagtcctaggctacttaa

SEQ ID NO: 63477 - DNA, 82 bp, Homo sapiens
attctataggacacctatgatcatctctcattagagtcataataagatccctgagccagtcctaggctacttaacatgtcta

SEQ ID NO: 63478 - DNA, 81 bp, Homo sapiens
taggacacctatgatcatctctcattagagtcataataagatccctgagccagtcctaggctacttaacatgtctactaaa

SEQ ID NO: 63479 - DNA, 83 bp, Homo sapiens
atgatcatctctcattagagtcataataagatccctgagccagtcctaggctacttaacatgtctactaaacagctgtgccca

SEQ ID NO: 63480 - DNA, 79 bp, Homo sapiens
tagagtcataataagatccctgagccagtcctaggctacttaacatgtctactaaacagctgtgcccacaggaattata

SEQ ID NO: 63481 - DNA, 78 bp, Homo sapiens
ataataagatccctgagccagtcctaggctacttaacatgtctactaaacagctgtgcccacaggaattatatacatc

SEQ ID NO: 63482 - DNA, 78 bp, Homo sapiens
atccctgagccagtcctaggctacttaacatgtctactaaacagctgtgcccacaggaattatatacatcccacatta

SEQ ID NO: 63483 - DNA, 75 bp, Homo sapiens
ctaggctacttaacatgtctactaaacagctgtgcccacaggaattatatacatcccacattaccctgtattaat

SEQ ID NO: 63484 - DNA, 80 bp, Homo sapiens
taacatgtctactaaacagctgtgcccacaggaattatatacatcccacattaccctgtattaattcatggcactacata

SEQ ID NO: 63485 - DNA, 78 bp, Homo sapiens
tactaaacagctgtgcccacaggaattatatacatcccacattaccctgtattaattcatggcactacatagtttcat

SEQ ID NO: 63486 - DNA, 78 bp, Homo sapiens
tgtgcccacaggaattatatacatcccacattaccctgtattaattcatggcactacatagtttcattctacaaacta

SEQ ID NO: 63487 - DNA, 75 bp, Homo sapiens
cccacaggaattatatacatcccacattaccctgtattaattcatggcactacatagtttcattctacaaactat

SEQ ID NO: 63488 - DNA, 75 bp, Homo sapiens
ccacaggaattatatacatcccacattaccctgtattaattcatggcactacatagtttcattctacaaactatt

SEQ ID NO: 63489 - DNA, 74 bp, Homo sapiens
ggaattatatacatcccacattaccctgtattaattcatggcactacatagtttcattctacaaactatttttg

SEQ ID NO: 63490 - DNA, 75 bp, Homo sapiens
atacatcccacattaccctgtattaattcatggcactacatagtttcattctacaaactatttttgttgtgatct

SEQ ID NO: 63491 - DNA, 74 bp, Homo sapiens
acatcccacattaccctgtattaattcatggcactacatagtttcattctacaaactatttttgttgtgatctt

SEQ ID NO: 63492 - DNA, 73 bp, Homo sapiens
ttaccctgtattaattcatggcactacatagtttcattctacaaactatttttgttgtgatcttttaagaggc

SEQ ID NO: 63493 - DNA, 73 bp, Homo sapiens
accctgtattaattcatggcactacatagtttcattctacaaactatttttgttgtgatcttttaagaggcca

SEQ ID NO: 63494 - DNA, 73 bp, Homo sapiens
ctgtattaattcatggcactacatagtttcattctacaaactatttttgttgtgatcttttaagaggccaaat

SEQ ID NO: 63495 - DNA, 75 bp, Homo sapiens
attcatggcactacatagtttcattctacaaactatttttgttgtgatcttttaagaggccaaattaagatatgc

SEQ ID NO: 63496 - DNA, 75 bp, Homo sapiens
catggcactacatagtttcattctacaaactatttttgttgtgatcttttaagaggccaaattaagatatgctta

SEQ ID NO: 63497 - DNA, 74 bp, Homo sapiens
gcactacatagtttcattctacaaactatttttgttgtgatcttttaagaggccaaattaagatatgcttaata

SEQ ID NO: 63498 - DNA, 68 bp, Homo sapiens
actatttttgttgtgatcttttaagaggccaaattaagatatgcttaatataaaattcccttatttct

SEQ ID NO: 63499 - DNA, 70 bp, Homo sapiens
gttgtgatcttttaagaggccaaattaagatatgcttaatataaaattcccttatttctttgtgttaaga

SEQ ID NO: 63500 - DNA, 73 bp, Homo sapiens
taagaggccaaattaagatatgcttaatataaaattcccttatttctttgtgttaagaatcagatgacttcac

SEQ ID NO: 63501 - DNA, 73 bp, Homo sapiens
ggccaaattaagatatgcttaatataaaattcccttatttctttgtgttaagaatcagatgacttcacgtgaa

SEQ ID NO: 63502 - DNA, 72 bp, Homo sapiens
atgcttaatataaaattcccttatttctttgtgttaagaatcagatgacttcacgtgaaaaagtgaaaagca

SEQ ID NO: 63503 - DNA, 71 bp, Homo sapiens
ataaaattcccttatttctttgtgttaagaatcagatgacttcacgtgaaaaagtgaaaagcaacagacaa

SEQ ID NO: 63504 - DNA, 73 bp, Homo sapiens
cccttatttctttgtgttaagaatcagatgacttcacgtgaaaaagtgaaaagcaacagacaaatgtacagta

SEQ ID NO: 63505 - DNA, 76 bp, Homo sapiens
tttgtgttaagaatcagatgacttcacgtgaaaaagtgaaaagcaacagacaaatgtacagtattatttctcttgc

SEQ ID NO: 63506 - DNA, 77 bp, Homo sapiens
agtgaaaagcaacagacaaatgtacagtattatttctcttgctattaaatattagaaattccagccaggcatgatag

SEQ ID NO: 63507 - DNA, 78 bp, Homo sapiens
agcaacagacaaatgtacagtattatttctcttgctattaaatattagaaattccagccaggcatgatagtttcacac

SEQ ID NO: 63508 - DNA, 76 bp, Homo sapiens
acaaatgtacagtattatttctcttgctattaaatattagaaattccagccaggcatgatagtttcacacttgtaa

SEQ ID NO: 63509 - DNA, 66 bp, Homo sapiens
aaaaggaaagaaaaagatggttggagttcgggttttcaggctctttctggtctaccttgtggcaat

SEQ ID NO: 63510 - DNA, 69 bp, Homo sapiens
aaagaaaaagatggttggagttcgggttttcaggctctttctggtctaccttgtggcaatttgagagtc

SEQ ID NO: 63511 - DNA, 72 bp, Homo sapiens
atggttggagttcgggttttcaggctctttctggtctaccttgtggcaatttgagagtccagcaacagtttc

SEQ ID NO: 63512 - DNA, 72 bp, Homo sapiens
gttcgggttttcaggctctttctggtctaccttgtggcaatttgagagtccagcaacagtttctgctgggtt

SEQ ID NO: 63513 - DNA, 76 bp, Homo sapiens
aggctctttctggtctaccttgtggcaatttgagagtccagcaacagtttctgctgggtttcaaagatccaggaga

SEQ ID NO: 63514 - DNA, 78 bp, Homo sapiens
tctaccttgtggcaatttgagagtccagcaacagtttctgctgggtttcaaagatccaggagaagctcagtgttgtgt

SEQ ID NO: 63515 - DNA, 81 bp, Homo sapiens
tggcaatttgagagtccagcaacagtttctgctgggtttcaaagatccaggagaagctcagtgttgtgttgagacacaatg

SEQ ID NO: 63516 - DNA, 79 bp, Homo sapiens
tttgagagtccagcaacagtttctgctgggtttcaaagatccaggagaagctcagtgttgtgttgagacacaatggacc

SEQ ID NO: 63517 - DNA, 76 bp, Homo sapiens
aacagtttctgctgggtttcaaagatccaggagaagctcagtgttgtgttgagacacaatggacccatcacaaaag

SEQ ID NO: 63518 - DNA, 75 bp, Homo sapiens
ctgggtttcaaagatccaggagaagctcagtgttgtgttgagacacaatggacccatcacaaaagtttaatccaa

SEQ ID NO: 63519 - DNA, 75 bp, Homo sapiens
tttcaaagatccaggagaagctcagtgttgtgttgagacacaatggacccatcacaaaagtttaatccaaccctg

SEQ ID NO: 63520 - DNA, 74 bp, Homo sapiens
agaagctcagtgttgtgttgagacacaatggacccatcacaaaagtttaatccaaccctggtcccagtcttcaa

SEQ ID NO: 63521 - DNA, 72 bp, Homo sapiens
ctcagtgttgtgttgagacacaatggacccatcacaaaagtttaatccaaccctggtcccagtcttcaaaaa

SEQ ID NO: 63522 - DNA, 69 bp, Homo sapiens
aaaagtttaatccaaccctggtcccagtcttcaaaaatgctcactgaagaaaattcccaggacgattca

SEQ ID NO: 63523 - DNA, 75 bp, Homo sapiens
tcactgaagaaaattcccaggacgattcaggggcctctcaaaacttctgctctgagatgttgataaagaacctta

SEQ ID NO: 63524 - DNA, 72 bp, Homo sapiens
aaacttctgctctgagatgttgataaagaaccttagtaacttgactatcaaccctagtaccaaattctcttc

SEQ ID NO: 63525 - DNA, 72 bp, Homo sapiens
tctgagatgttgataaagaaccttagtaacttgactatcaaccctagtaccaaattctcttcccctctacca

SEQ ID NO: 63526 - DNA, 69 bp, Homo sapiens
atgttgataaagaaccttagtaacttgactatcaaccctagtaccaaattctcttcccctctaccagaa

SEQ ID NO: 63527 - DNA, 68 bp, Homo sapiens
aagaaccttagtaacttgactatcaaccctagtaccaaattctcttcccctctaccagaaggctcacc

SEQ ID NO: 63528 - DNA, 71 bp, Homo sapiens
taacttgactatcaaccctagtaccaaattctcttcccctctaccagaaggctcaccccaacaacagtata

SEQ ID NO: 63529 - DNA, 71 bp, Homo sapiens
tatcaaccctagtaccaaattctcttcccctctaccagaaggctcaccccaacaacagtatacgggagcaa

SEQ ID NO: 63530 - DNA, 74 bp, Homo sapiens
caaattctcttcccctctaccagaaggctcaccccaacaacagtatacgggagcaatgatcctcagggaaatca

SEQ ID NO: 63531 - DNA, 78 bp, Homo sapiens
tctaccagaaggctcaccccaacaacagtatacgggagcaatgatcctcagggaaatcagagatgacttgctttacag

SEQ ID NO: 63532 - DNA, 76 bp, Homo sapiens
aacaacagtatacgggagcaatgatcctcagggaaatcagagatgacttgctttacaggagaagatttaagaacac

SEQ ID NO: 63533 - DNA, 81 bp, Homo sapiens
gagcaatgatcctcagggaaatcagagatgacttgctttacaggagaagatttaagaacactcctgtctatgcagaaagaa

SEQ ID NO: 63534 - DNA, 76 bp, Homo sapiens
aaatcagagatgacttgctttacaggagaagatttaagaacactcctgtctatgcagaaagaaaggatggcaaaat

SEQ ID NO: 63535 - DNA, 77 bp, Homo sapiens
agatgacttgctttacaggagaagatttaagaacactcctgtctatgcagaaagaaaggatggcaaaattgagatac

SEQ ID NO: 63536 - DNA, 76 bp, Homo sapiens
aacactcctgtctatgcagaaagaaaggatggcaaaattgagatacctgttactcggcagagttcctagacttgaa

SEQ ID NO: 63537 - DNA, 75 bp, Homo sapiens
tgcagaaagaaaggatggcaaaattgagatacctgttactcggcagagttcctagacttgaacgagaactaacaa

SEQ ID NO: 63538 - DNA, 71 bp, Homo sapiens
aaagaaaggatggcaaaattgagatacctgttactcggcagagttcctagacttgaacgagaactaacaaa

SEQ ID NO: 63539 - DNA, 70 bp, Homo sapiens
aaaattgagatacctgttactcggcagagttcctagacttgaacgagaactaacaaacactgggcttaag

SEQ ID NO: 63540 - DNA, 71 bp, Homo sapiens
agatacctgttactcggcagagttcctagacttgaacgagaactaacaaacactgggcttaagggagttca

SEQ ID NO: 63541 - DNA, 73 bp, Homo sapiens
ttactcggcagagttcctagacttgaacgagaactaacaaacactgggcttaagggagttcagaatgaatcaa

SEQ ID NO: 63542 - DNA, 72 bp, Homo sapiens
ttcctagacttgaacgagaactaacaaacactgggcttaagggagttcagaatgaatcaagaagtggacatt

SEQ ID NO: 63543 - DNA, 76 bp, Homo sapiens
acttgaacgagaactaacaaacactgggcttaagggagttcagaatgaatcaagaagtggacatttcagatgctgc

SEQ ID NO: 63544 - DNA, 80 bp, Homo sapiens
aactaacaaacactgggcttaagggagttcagaatgaatcaagaagtggacatttcagatgctgctgcagtttctgcatg

SEQ ID NO: 63545 - DNA, 83 bp, Homo sapiens
acactgggcttaagggagttcagaatgaatcaagaagtggacatttcagatgctgctgcagtttctgcatgtgtaacagatgg

SEQ ID NO: 63546 - DNA, 84 bp, Homo sapiens
aatgaatcaagaagtggacatttcagatgctgctgcagtttctgcatgtgtaacagatggggtacttttgagagtgctagaata

SEQ ID NO: 63547 - DNA, 80 bp, Homo sapiens
ctgcagtttctgcatgtgtaacagatggggtacttttgagagtgctagaatagggaattacaacactgagccacttcagc

SEQ ID NO: 63548 - DNA, 79 bp, Homo sapiens
ttctgcatgtgtaacagatggggtacttttgagagtgctagaatagggaattacaacactgagccacttcagccataaa

SEQ ID NO: 63549 - DNA, 74 bp, Homo sapiens
taacagatggggtacttttgagagtgctagaatagggaattacaacactgagccacttcagccataaaccttat

SEQ ID NO: 63550 - DNA, 71 bp, Homo sapiens
tagaatagggaattacaacactgagccacttcagccataaaccttattcttgtacttttttttcttgctgg

SEQ ID NO: 63551 - DNA, 72 bp, Homo sapiens
attcttgtacttttttttcttgctggtaattttatgtagcaggttgagaaagctaccttatgctacaataga

SEQ ID NO: 63552 - DNA, 74 bp, Homo sapiens
cttttttttcttgctggtaattttatgtagcaggttgagaaagctaccttatgctacaatagactatatatcaa

SEQ ID NO: 63553 - DNA, 76 bp, Homo sapiens
cttgctggtaattttatgtagcaggttgagaaagctaccttatgctacaatagactatatatcaaaaattttgata

SEQ ID NO: 63554 - DNA, 77 bp, Homo sapiens
tttatgtagcaggttgagaaagctaccttatgctacaatagactatatatcaaaaattttgataatgagttctagga

SEQ ID NO: 63555 - DNA, 77 bp, Homo sapiens
gtagcaggttgagaaagctaccttatgctacaatagactatatatcaaaaattttgataatgagttctaggatgtat

SEQ ID NO: 63556 - DNA, 75 bp, Homo sapiens
gagaaagctaccttatgctacaatagactatatatcaaaaattttgataatgagttctaggatgtatttttcttg

SEQ ID NO: 63557 - DNA, 74 bp, Homo sapiens
ccttatgctacaatagactatatatcaaaaattttgataatgagttctaggatgtatttttcttgtatcttttc

SEQ ID NO: 63558 - DNA, 74 bp, Homo sapiens
tagactatatatcaaaaattttgataatgagttctaggatgtatttttcttgtatcttttcctttctaccatga

SEQ ID NO: 63559 - DNA, 73 bp, Homo sapiens
caaaaattttgataatgagttctaggatgtatttttcttgtatcttttcctttctaccatgatactagtgatg

SEQ ID NO: 63560 - DNA, 74 bp, Homo sapiens
tttgataatgagttctaggatgtatttttcttgtatcttttcctttctaccatgatactagtgatgtataaggg

SEQ ID NO: 63561 - DNA, 78 bp, Homo sapiens
atgatactagtgatgtataaggggtctgtgtagtttgaacgtatctgaataacttcagtatacttcagctctactgct

SEQ ID NO: 63562 - DNA, 76 bp, Homo sapiens
tagtgatgtataaggggtctgtgtagtttgaacgtatctgaataacttcagtatacttcagctctactgcttaatt

SEQ ID NO: 63563 - DNA, 77 bp, Homo sapiens
ggtctgtgtagtttgaacgtatctgaataacttcagtatacttcagctctactgcttaatttgactcgaagccaaga

SEQ ID NO: 63564 - DNA, 77 bp, Homo sapiens
aacgtatctgaataacttcagtatacttcagctctactgcttaatttgactcgaagccaagaggacataagcatccc

SEQ ID NO: 63565 - DNA, 77 bp, Homo sapiens
ataacttcagtatacttcagctctactgcttaatttgactcgaagccaagaggacataagcatccccatgtgtttta

SEQ ID NO: 63566 - DNA, 77 bp, Homo sapiens
tatacttcagctctactgcttaatttgactcgaagccaagaggacataagcatccccatgtgttttagaagcccaaa

SEQ ID NO: 63567 - DNA, 78 bp, Homo sapiens
tactgcttaatttgactcgaagccaagaggacataagcatccccatgtgttttagaagcccaaagccagtgagatgaa

SEQ ID NO: 63568 - DNA, 75 bp, Homo sapiens
ttaatttgactcgaagccaagaggacataagcatccccatgtgttttagaagcccaaagccagtgagatgaaacc

SEQ ID NO: 63569 - DNA, 74 bp, Homo sapiens
gccaagaggacataagcatccccatgtgttttagaagcccaaagccagtgagatgaaacccaacaccgagaatt

SEQ ID NO: 63570 - DNA, 74 bp, Homo sapiens
acataagcatccccatgtgttttagaagcccaaagccagtgagatgaaacccaacaccgagaatttgaagcaaa

SEQ ID NO: 63571 - DNA, 73 bp, Homo sapiens
cccatgtgttttagaagcccaaagccagtgagatgaaacccaacaccgagaatttgaagcaaagtcacttgtg

SEQ ID NO: 63572 - DNA, 71 bp, Homo sapiens
ttttagaagcccaaagccagtgagatgaaacccaacaccgagaatttgaagcaaagtcacttgtgggtaaa

SEQ ID NO: 63573 - DNA, 71 bp, Homo sapiens
aaagccagtgagatgaaacccaacaccgagaatttgaagcaaagtcacttgtgggtaaagaaagcattggg

SEQ ID NO: 63574 - DNA, 70 bp, Homo sapiens
agtgagatgaaacccaacaccgagaatttgaagcaaagtcacttgtgggtaaagaaagcattgggtagtt

SEQ ID NO: 63575 - DNA, 69 bp, Homo sapiens
gaagcaaagtcacttgtgggtaaagaaagcattgggtagtttggctacagcgtaataataagaaaaatt

SEQ ID NO: 63576 - DNA, 68 bp, Homo sapiens
aagaaagcattgggtagtttggctacagcgtaataataagaaaaatttgggttgcaataagaggaaac

SEQ ID NO: 63577 - DNA, 69 bp, Homo sapiens
attgggtagtttggctacagcgtaataataagaaaaatttgggttgcaataagaggaaactttgtgctc

SEQ ID NO: 63578 - DNA, 66 bp, Homo sapiens
taataagaaaaatttgggttgcaataagaggaaactttgtgctctttttacaatttttagtacaaa

SEQ ID NO: 63579 - DNA, 65 bp, Homo sapiens
aaatttgggttgcaataagaggaaactttgtgctctttttacaatttttagtacaaataaaggtg

SEQ ID NO: 63580 - DNA, 69 bp, Homo sapiens
ggttgcaataagaggaaactttgtgctctttttacaatttttagtacaaataaaggtgtatataagaga

SEQ ID NO: 63581 - DNA, 67 bp, Homo sapiens
aagaggaaactttgtgctctttttacaatttttagtacaaataaaggtgtatataagagaatcaatt

SEQ ID NO: 63582 - DNA, 66 bp, Homo sapiens
tttgtgctctttttacaatttttagtacaaataaaggtgtatataagagaatcaattttttaaaaa

SEQ ID NO: 63583 - DNA, 71 bp, Homo sapiens
ataaataaataatattagagatttccaataatctacccaaaatagagaaggtagattagtcatttcttagc

SEQ ID NO: 63584 - DNA, 70 bp, Homo sapiens
aatattagagatttccaataatctacccaaaatagagaaggtagattagtcatttcttagccaacttggt

SEQ ID NO: 63585 - DNA, 71 bp, Homo sapiens
gagatttccaataatctacccaaaatagagaaggtagattagtcatttcttagccaacttggttctattaa

SEQ ID NO: 63586 - DNA, 70 bp, Homo sapiens
atctacccaaaatagagaaggtagattagtcatttcttagccaacttggttctattaattctttactgac

SEQ ID NO: 63587 - DNA, 73 bp, Homo sapiens
aggtagattagtcatttcttagccaacttggttctattaattctttactgactatattctgctaatccattcc

SEQ ID NO: 63588 - DNA, 76 bp, Homo sapiens
gtcatttcttagccaacttggttctattaattctttactgactatattctgctaatccattcctttagagcacaga

SEQ ID NO: 63589 - DNA, 77 bp, Homo sapiens
cttagccaacttggttctattaattctttactgactatattctgctaatccattcctttagagcacagattctcaga

SEQ ID NO: 63590 - DNA, 77 bp, Homo sapiens
ttggttctattaattctttactgactatattctgctaatccattcctttagagcacagattctcagagtgtggtccc

SEQ ID NO: 63591 - DNA, 79 bp, Homo sapiens
ttctttactgactatattctgctaatccattcctttagagcacagattctcagagtgtggtccctgaccaccacaatta

SEQ ID NO: 63592 - DNA, 77 bp, Homo sapiens
actatattctgctaatccattcctttagagcacagattctcagagtgtggtccctgaccaccacaattacggtcacc

SEQ ID NO: 63593 - DNA, 76 bp, Homo sapiens
taatccattcctttagagcacagattctcagagtgtggtccctgaccaccacaattacggtcaccggtgagctggt

SEQ ID NO: 63594 - DNA, 75 bp, Homo sapiens
attcctttagagcacagattctcagagtgtggtccctgaccaccacaattacggtcaccggtgagctggttagaa

SEQ ID NO: 63595 - DNA, 75 bp, Homo sapiens
agcacagattctcagagtgtggtccctgaccaccacaattacggtcaccggtgagctggttagaaatgtaaattc

SEQ ID NO: 63596 - DNA, 73 bp, Homo sapiens
acaattacggtcaccggtgagctggttagaaatgtaaattctcaggtcccaaccaaaatctgctgaatcagaa

SEQ ID NO: 63597 - DNA, 73 bp, Homo sapiens
gtcaccggtgagctggttagaaatgtaaattctcaggtcccaaccaaaatctgctgaatcagaaacttggtaa

SEQ ID NO: 63598 - DNA, 73 bp, Homo sapiens
aatgtaaattctcaggtcccaaccaaaatctgctgaatcagaaacttggtaagttggaggcagaaatctgtct

SEQ ID NO: 63599 - DNA, 74 bp, Homo sapiens
aaattctcaggtcccaaccaaaatctgctgaatcagaaacttggtaagttggaggcagaaatctgtcttgacaa

SEQ ID NO: 63600 - DNA, 77 bp, Homo sapiens
aggtcccaaccaaaatctgctgaatcagaaacttggtaagttggaggcagaaatctgtcttgacaagcctgcagtga

SEQ ID NO: 63601 - DNA, 80 bp, Homo sapiens
aaccaaaatctgctgaatcagaaacttggtaagttggaggcagaaatctgtcttgacaagcctgcagtgactctgctgaa

SEQ ID NO: 63602 - DNA, 82 bp, Homo sapiens
aaaatctgctgaatcagaaacttggtaagttggaggcagaaatctgtcttgacaagcctgcagtgactctgctgaatattca

SEQ ID NO: 63603 - DNA, 82 bp, Homo sapiens
tgctgaatcagaaacttggtaagttggaggcagaaatctgtcttgacaagcctgcagtgactctgctgaatattcaagtttg

SEQ ID NO: 63604 - DNA, 78 bp, Homo sapiens
aatcagaaacttggtaagttggaggcagaaatctgtcttgacaagcctgcagtgactctgctgaatattcaagtttgg

SEQ ID NO: 63605 - DNA, 81 bp, Homo sapiens
gtaagttggaggcagaaatctgtcttgacaagcctgcagtgactctgctgaatattcaagtttgggaatcactgctttata

SEQ ID NO: 63606 - DNA, 80 bp, Homo sapiens
aaatctgtcttgacaagcctgcagtgactctgctgaatattcaagtttgggaatcactgctttatagtatctgaccaaaa

SEQ ID NO: 63607 - DNA, 85 bp, Homo sapiens
ttgacaagcctgcagtgactctgctgaatattcaagtttgggaatcactgctttatagtatctgaccaaaatgatggctgactga

SEQ ID NO: 63608 - DNA, 81 bp, Homo sapiens
agtgactctgctgaatattcaagtttgggaatcactgctttatagtatctgaccaaaatgatggctgactgagtactggga

SEQ ID NO: 63609 - DNA, 81 bp, Homo sapiens
ctgaatattcaagtttgggaatcactgctttatagtatctgaccaaaatgatggctgactgagtactgggagctgatctaa

SEQ ID NO: 63610 - DNA, 77 bp, Homo sapiens
tgggaatcactgctttatagtatctgaccaaaatgatggctgactgagtactgggagctgatctaatttaaaacttt

SEQ ID NO: 63611 - DNA, 75 bp, Homo sapiens
tttatagtatctgaccaaaatgatggctgactgagtactgggagctgatctaatttaaaacttttactccaggaa

SEQ ID NO: 63612 - DNA, 76 bp, Homo sapiens
tatctgaccaaaatgatggctgactgagtactgggagctgatctaatttaaaacttttactccaggaacacctcca

SEQ ID NO: 63613 - DNA, 73 bp, Homo sapiens
aatgatggctgactgagtactgggagctgatctaatttaaaacttttactccaggaacacctccagtcaaaaa

SEQ ID NO: 63614 - DNA, 69 bp, Homo sapiens
actgagtactgggagctgatctaatttaaaacttttactccaggaacacctccagtcaaaaatcaaccc

SEQ ID NO: 63615 - DNA, 63 bp, Homo sapiens
atttaaaacttttactccaggaacacctccagtcaaaaatcaaccccggggttttctgaccac

SEQ ID NO: 63616 - DNA, 65 bp, Homo sapiens
gaacacctccagtcaaaaatcaaccccggggttttctgaccactttctaaaaaagacgaatattc

SEQ ID NO: 63617 - DNA, 63 bp, Homo sapiens
ccagtcaaaaatcaaccccggggttttctgaccactttctaaaaaagacgaatattccaaaaa

SEQ ID NO: 63618 - DNA, 63 bp, Homo sapiens
aatcaaccccggggttttctgaccactttctaaaaaagacgaatattccaaaaactttattca

SEQ ID NO: 63619 - DNA, 63 bp, Homo sapiens
gggttttctgaccactttctaaaaaagacgaatattccaaaaactttattcaaaaaataagcc

SEQ ID NO: 63620 - DNA, 64 bp, Homo sapiens
ccactttctaaaaaagacgaatattccaaaaactttattcaaaaaataagccctaatctgaccc

SEQ ID NO: 63621 - DNA, 67 bp, Homo sapiens
aaaagacgaatattccaaaaactttattcaaaaaataagccctaatctgaccccctatgaagatgga

SEQ ID NO: 63622 - DNA, 70 bp, Homo sapiens
aaaaataagccctaatctgaccccctatgaagatggattaccatacaaactattttggtcacgtttcaga

SEQ ID NO: 63623 - DNA, 71 bp, Homo sapiens
cctaatctgaccccctatgaagatggattaccatacaaactattttggtcacgtttcagatttgttagtta

SEQ ID NO: 63624 - DNA, 70 bp, Homo sapiens
ctgaccccctatgaagatggattaccatacaaactattttggtcacgtttcagatttgttagttaaaaga

SEQ ID NO: 63625 - DNA, 69 bp, Homo sapiens
atgaagatggattaccatacaaactattttggtcacgtttcagatttgttagttaaaagaaagtactta

SEQ ID NO: 63626 - DNA, 65 bp, Homo sapiens
ggtcacgtttcagatttgttagttaaaagaaagtacttaaaagatttctaaggtcacaaaaacaa

SEQ ID NO: 63627 - DNA, 65 bp, Homo sapiens
aaaagaaagtacttaaaagatttctaaggtcacaaaaacaaattcttatcaaccttaaaatcaga

SEQ ID NO: 63628 - DNA, 67 bp, Homo sapiens
acttaaaagatttctaaggtcacaaaaacaaattcttatcaaccttaaaatcagaatgcctccggac

SEQ ID NO: 63629 - DNA, 68 bp, Homo sapiens
tcacaaaaacaaattcttatcaaccttaaaatcagaatgcctccggaccccttgacccgaaattacac

SEQ ID NO: 63630 - DNA, 66 bp, Homo sapiens
aaacaaattcttatcaaccttaaaatcagaatgcctccggaccccttgacccgaaattacaccttc

SEQ ID NO: 63631 - DNA, 68 bp, Homo sapiens
ttatcaaccttaaaatcagaatgcctccggaccccttgacccgaaattacaccttcctctttctacca

SEQ ID NO: 63632 - DNA, 70 bp, Homo sapiens
taaaatcagaatgcctccggaccccttgacccgaaattacaccttcctctttctaccagcttctggcttc

SEQ ID NO: 63633 - DNA, 71 bp, Homo sapiens
atgcctccggaccccttgacccgaaattacaccttcctctttctaccagcttctggcttccttctgtcatc

SEQ ID NO: 63634 - DNA, 77 bp, Homo sapiens
aaattacaccttcctctttctaccagcttctggcttccttctgtcatctctgtgtcaagcaacatctctcaacaccc

SEQ ID NO: 63635 - DNA, 79 bp, Homo sapiens
ttcctctttctaccagcttctggcttccttctgtcatctctgtgtcaagcaacatctctcaacacccgtagccaggaaa

SEQ ID NO: 63636 - DNA, 80 bp, Homo sapiens
gcttccttctgtcatctctgtgtcaagcaacatctctcaacacccgtagccaggaaagagagtgtctgtacggcttctaa

SEQ ID NO: 63637 - DNA, 79 bp, Homo sapiens
tgtcatctctgtgtcaagcaacatctctcaacacccgtagccaggaaagagagtgtctgtacggcttctaaatcctacc

SEQ ID NO: 63638 - DNA, 75 bp, Homo sapiens
tgtgtcaagcaacatctctcaacacccgtagccaggaaagagagtgtctgtacggcttctaaatcctacctaaat

SEQ ID NO: 63639 - DNA, 71 bp, Homo sapiens
acatctctcaacacccgtagccaggaaagagagtgtctgtacggcttctaaatcctacctaaattggtctt

SEQ ID NO: 63640 - DNA, 68 bp, Homo sapiens
ctcaacacccgtagccaggaaagagagtgtctgtacggcttctaaatcctacctaaattggtcttttt

SEQ ID NO: 63641 - DNA, 69 bp, Homo sapiens
gtagccaggaaagagagtgtctgtacggcttctaaatcctacctaaattggtcttttttgctttctttc

SEQ ID NO: 63642 - DNA, 69 bp, Homo sapiens
aagagagtgtctgtacggcttctaaatcctacctaaattggtcttttttgctttctttctagaggacaa

SEQ ID NO: 63643 - DNA, 70 bp, Homo sapiens
tgtacggcttctaaatcctacctaaattggtcttttttgctttctttctagaggacaagtgtatgagtta

SEQ ID NO: 63644 - DNA, 69 bp, Homo sapiens
ctaaatcctacctaaattggtcttttttgctttctttctagaggacaagtgtatgagttattttcagta

SEQ ID NO: 63645 - DNA, 71 bp, Homo sapiens
aattggtcttttttgctttctttctagaggacaagtgtatgagttattttcagtagaaaacaagaacatgc

SEQ ID NO: 63646 - DNA, 74 bp, Homo sapiens
ttttgctttctttctagaggacaagtgtatgagttattttcagtagaaaacaagaacatgctcccctcataaga

SEQ ID NO: 63647 - DNA, 74 bp, Homo sapiens
tttctagaggacaagtgtatgagttattttcagtagaaaacaagaacatgctcccctcataagacgaaatgtta

SEQ ID NO: 63648 - DNA, 71 bp, Homo sapiens
ggacaagtgtatgagttattttcagtagaaaacaagaacatgctcccctcataagacgaaatgttaagttt

SEQ ID NO: 63649 - DNA, 72 bp, Homo sapiens
gagttattttcagtagaaaacaagaacatgctcccctcataagacgaaatgttaagttttgctactgttgaa

SEQ ID NO: 63650 - DNA, 72 bp, Homo sapiens
tttcagtagaaaacaagaacatgctcccctcataagacgaaatgttaagttttgctactgttgaaataaaga

SEQ ID NO: 63651 - DNA, 70 bp, Homo sapiens
gaaaacaagaacatgctcccctcataagacgaaatgttaagttttgctactgttgaaataaagaaattgt

SEQ ID NO: 63652 - DNA, 68 bp, Homo sapiens
acatgctcccctcataagacgaaatgttaagttttgctactgttgaaataaagaaattgttttttctt

SEQ ID NO: 63653 - DNA, 73 bp, Homo sapiens
aaaatagtaatatcatgtattgttaatattgccatgttgtcaacaagggtcatgtttttcctactgtaaatat

SEQ ID NO: 63654 - DNA, 77 bp, Homo sapiens
atatcatgtattgttaatattgccatgttgtcaacaagggtcatgtttttcctactgtaaatattttcagagtcaca

SEQ ID NO: 63655 - DNA, 74 bp, Homo sapiens
gtattgttaatattgccatgttgtcaacaagggtcatgtttttcctactgtaaatattttcagagtcacataaa

SEQ ID NO: 63656 - DNA, 75 bp, Homo sapiens
gccatgttgtcaacaagggtcatgtttttcctactgtaaatattttcagagtcacataaaattagaaatgagatg

SEQ ID NO: 63657 - DNA, 77 bp, Homo sapiens
ttgtcaacaagggtcatgtttttcctactgtaaatattttcagagtcacataaaattagaaatgagatggcagtgca

SEQ ID NO: 63658 - DNA, 75 bp, Homo sapiens
agggtcatgtttttcctactgtaaatattttcagagtcacataaaattagaaatgagatggcagtgcacggtggc

SEQ ID NO: 63659 - DNA, 74 bp, Homo sapiens
aaaaaaattaggaatgagaagagaaataatcacaaacatcaaaaatgacaaagaactgcacacatttttgcaca

SEQ ID NO: 63660 - DNA, 76 bp, Homo sapiens
ggaatgagaagagaaataatcacaaacatcaaaaatgacaaagaactgcacacatttttgcacagctttaagttaa

SEQ ID NO: 63661 - DNA, 75 bp, Homo sapiens
gagaagagaaataatcacaaacatcaaaaatgacaaagaactgcacacatttttgcacagctttaagttaacaaa

SEQ ID NO: 63662 - DNA, 72 bp, Homo sapiens
aatcacaaacatcaaaaatgacaaagaactgcacacatttttgcacagctttaagttaacaaattttaaaga

SEQ ID NO: 63663 - DNA, 73 bp, Homo sapiens
acatcaaaaatgacaaagaactgcacacatttttgcacagctttaagttaacaaattttaaagattagatgaa

SEQ ID NO: 63664 - DNA, 70 bp, Homo sapiens
gacaaagaactgcacacatttttgcacagctttaagttaacaaattttaaagattagatgaaaagaattt

SEQ ID NO: 63665 - DNA, 70 bp, Homo sapiens
ctgcacacatttttgcacagctttaagttaacaaattttaaagattagatgaaaagaattttctactaaa

SEQ ID NO: 63666 - DNA, 68 bp, Homo sapiens
ttgcacagctttaagttaacaaattttaaagattagatgaaaagaattttctactaaaacagaaactg

SEQ ID NO: 63667 - DNA, 64 bp, Homo sapiens
ctttaagttaacaaattttaaagattagatgaaaagaattttctactaaaacagaaactgtaaa

SEQ ID NO: 63668 - DNA, 65 bp, Homo sapiens
ttttaaagattagatgaaaagaattttctactaaaacagaaactgtaaaacttacgaaagaacag

SEQ ID NO: 63669 - DNA, 73 bp, Homo sapiens
ttctactaaaacagaaactgtaaaacttacgaaagaacaggctgcattgcattagtgttaacaggcctctggc

SEQ ID NO: 63670 - DNA, 76 bp, Homo sapiens
aactgtaaaacttacgaaagaacaggctgcattgcattagtgttaacaggcctctggccagaccgtgtggatgcaa

SEQ ID NO: 63671 - DNA, 81 bp, Homo sapiens
aaagaacaggctgcattgcattagtgttaacaggcctctggccagaccgtgtggatgcaagcctggttctgccactcactg

SEQ ID NO: 63672 - DNA, 81 bp, Homo sapiens
attgcattagtgttaacaggcctctggccagaccgtgtggatgcaagcctggttctgccactcactggcagcctccacttc

SEQ ID NO: 63673 - DNA, 79 bp, Homo sapiens
attagtgttaacaggcctctggccagaccgtgtggatgcaagcctggttctgccactcactggcagcctccacttctta

SEQ ID NO: 63674 - DNA, 81 bp, Homo sapiens
cctctggccagaccgtgtggatgcaagcctggttctgccactcactggcagcctccacttcttaatctgtaacatgtgact

SEQ ID NO: 63675 - DNA, 80 bp, Homo sapiens
agaccgtgtggatgcaagcctggttctgccactcactggcagcctccacttcttaatctgtaacatgtgacttgcctacc

SEQ ID NO: 63676 - DNA, 79 bp, Homo sapiens
atgcaagcctggttctgccactcactggcagcctccacttcttaatctgtaacatgtgacttgcctacctcctatcctt

SEQ ID NO: 63677 - DNA, 75 bp, Homo sapiens
cctggttctgccactcactggcagcctccacttcttaatctgtaacatgtgacttgcctacctcctatccttttt

SEQ ID NO: 63678 - DNA, 72 bp, Homo sapiens
actcactggcagcctccacttcttaatctgtaacatgtgacttgcctacctcctatcctttttttaaacaaa

SEQ ID NO: 63679 - DNA, 70 bp, Homo sapiens
cagcctccacttcttaatctgtaacatgtgacttgcctacctcctatcctttttttaaacaaagattaaa

SEQ ID NO: 63680 - DNA, 68 bp, Homo sapiens
cacttcttaatctgtaacatgtgacttgcctacctcctatcctttttttaaacaaagattaaaagtta

SEQ ID NO: 63681 - DNA, 67 bp, Homo sapiens
tctgtaacatgtgacttgcctacctcctatcctttttttaaacaaagattaaaagttaagtatcttt

SEQ ID NO: 63682 - DNA, 63 bp, Homo sapiens
gtgacttgcctacctcctatcctttttttaaacaaagattaaaagttaagtatcttttagttt

SEQ ID NO: 63683 - DNA, 63 bp, Homo sapiens
cctcctatcctttttttaaacaaagattaaaagttaagtatcttttagtttttctcaaaatca

SEQ ID NO: 63684 - DNA, 64 bp, Homo sapiens
ttttaaacaaagattaaaagttaagtatcttttagtttttctcaaaatcaaagcaaatttagac

SEQ ID NO: 63685 - DNA, 65 bp, Homo sapiens
caaagattaaaagttaagtatcttttagtttttctcaaaatcaaagcaaatttagactttactaa

SEQ ID NO: 63686 - DNA, 65 bp, Homo sapiens
ttaagtatcttttagtttttctcaaaatcaaagcaaatttagactttactaaataaaaacgatac

SEQ ID NO: 63687 - DNA, 67 bp, Homo sapiens
tttagtttttctcaaaatcaaagcaaatttagactttactaaataaaaacgatactgacctaagaga

SEQ ID NO: 63688 - DNA, 69 bp, Homo sapiens
tctcaaaatcaaagcaaatttagactttactaaataaaaacgatactgacctaagagactactaaaagc

SEQ ID NO: 63689 - DNA, 66 bp, Homo sapiens
aagcaaatttagactttactaaataaaaacgatactgacctaagagactactaaaagcctaaaaga

SEQ ID NO: 63690 - DNA, 67 bp, Homo sapiens
atttagactttactaaataaaaacgatactgacctaagagactactaaaagcctaaaagagccaata

SEQ ID NO: 63691 - DNA, 68 bp, Homo sapiens
ttactaaataaaaacgatactgacctaagagactactaaaagcctaaaagagccaatatttatagaaa

SEQ ID NO: 63692 - DNA, 72 bp, Homo sapiens
cgatactgacctaagagactactaaaagcctaaaagagccaatatttatagaaaatagcaataaagttgtca

SEQ ID NO: 63693 - DNA, 71 bp, Homo sapiens
tgacctaagagactactaaaagcctaaaagagccaatatttatagaaaatagcaataaagttgtcaaagat

SEQ ID NO: 63694 - DNA, 67 bp, Homo sapiens
gactactaaaagcctaaaagagccaatatttatagaaaatagcaataaagttgtcaaagattttttt

SEQ ID NO: 63695 - DNA, 74 bp, Homo sapiens
cacgcccggcactattgtcaaagatcttcagtcacttcctagggaaaaaaaggcttcaggcccacatcactgta

SEQ ID NO: 63696 - DNA, 72 bp, Homo sapiens
actattgtcaaagatcttcagtcacttcctagggaaaaaaaggcttcaggcccacatcactgtaagggtgaa

SEQ ID NO: 63697 - DNA, 72 bp, Homo sapiens
aagatcttcagtcacttcctagggaaaaaaaggcttcaggcccacatcactgtaagggtgaagtctctcaat

SEQ ID NO: 63698 - DNA, 73 bp, Homo sapiens
agtcacttcctagggaaaaaaaggcttcaggcccacatcactgtaagggtgaagtctctcaattcttcatgta

SEQ ID NO: 63699 - DNA, 74 bp, Homo sapiens
tagggaaaaaaaggcttcaggcccacatcactgtaagggtgaagtctctcaattcttcatgtaatagataattc

SEQ ID NO: 63700 - DNA, 76 bp, Homo sapiens
aggcttcaggcccacatcactgtaagggtgaagtctctcaattcttcatgtaatagataattccaaatcgatttaa

SEQ ID NO: 63701 - DNA, 75 bp, Homo sapiens
cccacatcactgtaagggtgaagtctctcaattcttcatgtaatagataattccaaatcgatttaaactgtttca

SEQ ID NO: 63702 - DNA, 75 bp, Homo sapiens
atcactgtaagggtgaagtctctcaattcttcatgtaatagataattccaaatcgatttaaactgtttcacagaa

SEQ ID NO: 63703 - DNA, 75 bp, Homo sapiens
gggtgaagtctctcaattcttcatgtaatagataattccaaatcgatttaaactgtttcacagaataaatatgaa

SEQ ID NO: 63704 - DNA, 72 bp, Homo sapiens
attcttcatgtaatagataattccaaatcgatttaaactgtttcacagaataaatatgaaagactttcggcc

SEQ ID NO: 63705 - DNA, 71 bp, Homo sapiens
atgtaatagataattccaaatcgatttaaactgtttcacagaataaatatgaaagactttcggccgggcgc

SEQ ID NO: 63706 - DNA, 67 bp, Homo sapiens
aaaaagactttcaaactctttttgaccaagttaacgtaacactgatataaaaattgacaaagcacaa

SEQ ID NO: 63707 - DNA, 73 bp, Homo sapiens
tcaaactctttttgaccaagttaacgtaacactgatataaaaattgacaaagcacaaaaagagctatggatca

SEQ ID NO: 63708 - DNA, 76 bp, Homo sapiens
tttgaccaagttaacgtaacactgatataaaaattgacaaagcacaaaaagagctatggatcaatttcatcactga

SEQ ID NO: 63709 - DNA, 75 bp, Homo sapiens
ccaagttaacgtaacactgatataaaaattgacaaagcacaaaaagagctatggatcaatttcatcactgataaa

SEQ ID NO: 63710 - DNA, 77 bp, Homo sapiens
gtaacactgatataaaaattgacaaagcacaaaaagagctatggatcaatttcatcactgataaatgagaaacaaaa

SEQ ID NO: 63711 - DNA, 77 bp, Homo sapiens
aaattgacaaagcacaaaaagagctatggatcaatttcatcactgataaatgagaaacaaaattctaaatgaagcac

SEQ ID NO: 63712 - DNA, 79 bp, Homo sapiens
gacaaagcacaaaaagagctatggatcaatttcatcactgataaatgagaaacaaaattctaaatgaagcactagcaat

SEQ ID NO: 63713 - DNA, 79 bp, Homo sapiens
aaagagctatggatcaatttcatcactgataaatgagaaacaaaattctaaatgaagcactagcaattaaaactcagca

SEQ ID NO: 63714 - DNA, 76 bp, Homo sapiens
ggatcaatttcatcactgataaatgagaaacaaaattctaaatgaagcactagcaattaaaactcagcattaactt

SEQ ID NO: 63715 - DNA, 75 bp, Homo sapiens
ttcatcactgataaatgagaaacaaaattctaaatgaagcactagcaattaaaactcagcattaacttttgattt

SEQ ID NO: 63716 - DNA, 74 bp, Homo sapiens
tgagaaacaaaattctaaatgaagcactagcaattaaaactcagcattaacttttgattttacaattacagaga

SEQ ID NO: 63717 - DNA, 74 bp, Homo sapiens
caaaattctaaatgaagcactagcaattaaaactcagcattaacttttgattttacaattacagagatggttca

SEQ ID NO: 63718 - DNA, 74 bp, Homo sapiens
aaatgaagcactagcaattaaaactcagcattaacttttgattttacaattacagagatggttcaatttgatat

SEQ ID NO: 63719 - DNA, 72 bp, Homo sapiens
ctagcaattaaaactcagcattaacttttgattttacaattacagagatggttcaatttgatattataaaac

SEQ ID NO: 63720 - DNA, 75 bp, Homo sapiens
ctcagcattaacttttgattttacaattacagagatggttcaatttgatattataaaacctacacagataatctg

SEQ ID NO: 63721 - DNA, 75 bp, Homo sapiens
cttttgattttacaattacagagatggttcaatttgatattataaaacctacacagataatctgtcacataaata

SEQ ID NO: 63722 - DNA, 76 bp, Homo sapiens
gattttacaattacagagatggttcaatttgatattataaaacctacacagataatctgtcacataaataaatgga

SEQ ID NO: 63723 - DNA, 76 bp, Homo sapiens
cagagatggttcaatttgatattataaaacctacacagataatctgtcacataaataaatggaaagtgaaaaatca

SEQ ID NO: 63724 - DNA, 73 bp, Homo sapiens
ggttcaatttgatattataaaacctacacagataatctgtcacataaataaatggaaagtgaaaaatcacagg

SEQ ID NO: 63725 - DNA, 73 bp, Homo sapiens
ttataaaacctacacagataatctgtcacataaataaatggaaagtgaaaaatcacaggttaatcaacatagg

SEQ ID NO: 63726 - DNA, 75 bp, Homo sapiens
cctacacagataatctgtcacataaataaatggaaagtgaaaaatcacaggttaatcaacataggtaggtatcaa

SEQ ID NO: 63727 - DNA, 73 bp, Homo sapiens
gataatctgtcacataaataaatggaaagtgaaaaatcacaggttaatcaacataggtaggtatcaaaaagaa

SEQ ID NO: 63728 - DNA, 68 bp, Homo sapiens
aaataaatggaaagtgaaaaatcacaggttaatcaacataggtaggtatcaaaaagaaatttgataaa

SEQ ID NO: 63729 - DNA, 69 bp, Homo sapiens
gaaaaatcacaggttaatcaacataggtaggtatcaaaaagaaatttgataaaacctaacatttagata

SEQ ID NO: 63730 - DNA, 69 bp, Homo sapiens
aggttaatcaacataggtaggtatcaaaaagaaatttgataaaacctaacatttagatattatcattta

SEQ ID NO: 63731 - DNA, 70 bp, Homo sapiens
ggtaggtatcaaaaagaaatttgataaaacctaacatttagatattatcatttattttatgacgaacaga

SEQ ID NO: 63732 - DNA, 71 bp, Homo sapiens
atcaaaaagaaatttgataaaacctaacatttagatattatcatttattttatgacgaacagattatgccc

SEQ ID NO: 63733 - DNA, 71 bp, Homo sapiens
gaaatttgataaaacctaacatttagatattatcatttattttatgacgaacagattatgccccaatttta

SEQ ID NO: 63734 - DNA, 68 bp, Homo sapiens
aaaacctaacatttagatattatcatttattttatgacgaacagattatgccccaattttaaaagaaa

SEQ ID NO: 63735 - DNA, 72 bp, Homo sapiens
gatattatcatttattttatgacgaacagattatgccccaattttaaaagaaatatactactgactacaaac

SEQ ID NO: 63736 - DNA, 71 bp, Homo sapiens
tttattttatgacgaacagattatgccccaattttaaaagaaatatactactgactacaaaccaaagctca

SEQ ID NO: 63737 - DNA, 72 bp, Homo sapiens
atgacgaacagattatgccccaattttaaaagaaatatactactgactacaaaccaaagctcacattattct

SEQ ID NO: 63738 - DNA, 72 bp, Homo sapiens
cagattatgccccaattttaaaagaaatatactactgactacaaaccaaagctcacattattcttaataaca

SEQ ID NO: 63739 - DNA, 70 bp, Homo sapiens
cccaattttaaaagaaatatactactgactacaaaccaaagctcacattattcttaataacagaacacta

SEQ ID NO: 63740 - DNA, 72 bp, Homo sapiens
aagaaatatactactgactacaaaccaaagctcacattattcttaataacagaacactaaatacacttccat

SEQ ID NO: 63741 - DNA, 72 bp, Homo sapiens
ctgactacaaaccaaagctcacattattcttaataacagaacactaaatacacttccatttaagtaggatac

SEQ ID NO: 63742 - DNA, 72 bp, Homo sapiens
accaaagctcacattattcttaataacagaacactaaatacacttccatttaagtaggatacgagacaggga

SEQ ID NO: 63743 - DNA, 74 bp, Homo sapiens
acattattcttaataacagaacactaaatacacttccatttaagtaggatacgagacagggatgcctaagagca

SEQ ID NO: 63744 - DNA, 74 bp, Homo sapiens
aaatacacttccatttaagtaggatacgagacagggatgcctaagagcataaacactggcaaaaaatattggca

SEQ ID NO: 63745 - DNA, 74 bp, Homo sapiens
atacgagacagggatgcctaagagcataaacactggcaaaaaatattggcaaggagaaaataaaagtatcaata

SEQ ID NO: 63746 - DNA, 72 bp, Homo sapiens
ctggcaaaaaatattggcaaggagaaaataaaagtatcaataatgcaaaagatgactatctccttggaaaac

SEQ ID NO: 63747 - DNA, 75 bp, Homo sapiens
atattggcaaggagaaaataaaagtatcaataatgcaaaagatgactatctccttggaaaactcaagagaatctc

SEQ ID NO: 63748 - DNA, 73 bp, Homo sapiens
ggagaaaataaaagtatcaataatgcaaaagatgactatctccttggaaaactcaagagaatctcctgaaaac

SEQ ID NO: 63749 - DNA, 74 bp, Homo sapiens
aaagtatcaataatgcaaaagatgactatctccttggaaaactcaagagaatctcctgaaaacgtattagaata

SEQ ID NO: 63750 - DNA, 70 bp, Homo sapiens
aaagatgactatctccttggaaaactcaagagaatctcctgaaaacgtattagaataattaagataaccc

SEQ ID NO: 63751 - DNA, 71 bp, Homo sapiens
atctccttggaaaactcaagagaatctcctgaaaacgtattagaataattaagataaccccataaagcagc

SEQ ID NO: 63752 - DNA, 73 bp, Homo sapiens
actcaagagaatctcctgaaaacgtattagaataattaagataaccccataaagcagccagattaccagagta

SEQ ID NO: 63753 - DNA, 74 bp, Homo sapiens
atctcctgaaaacgtattagaataattaagataaccccataaagcagccagattaccagagtagcgtatacata

SEQ ID NO: 63754 - DNA, 74 bp, Homo sapiens
gaataattaagataaccccataaagcagccagattaccagagtagcgtatacataacatctttcctatattaaa

SEQ ID NO: 63755 - DNA, 77 bp, Homo sapiens
gccagattaccagagtagcgtatacataacatctttcctatattaaaatagccagttagataatgaaatataactca

SEQ ID NO: 63756 - DNA, 79 bp, Homo sapiens
cagagtagcgtatacataacatctttcctatattaaaatagccagttagataatgaaatataactcatcaccaacagca

SEQ ID NO: 63757 - DNA, 76 bp, Homo sapiens
gtatacataacatctttcctatattaaaatagccagttagataatgaaatataactcatcaccaacagcaacaaaa

SEQ ID NO: 63758 - DNA, 74 bp, Homo sapiens
catctttcctatattaaaatagccagttagataatgaaatataactcatcaccaacagcaacaaaaaccacgta

SEQ ID NO: 63759 - DNA, 73 bp, Homo sapiens
taaaatagccagttagataatgaaatataactcatcaccaacagcaacaaaaaccacgtaatacctccagaaa

SEQ ID NO: 63760 - DNA, 72 bp, Homo sapiens
agccagttagataatgaaatataactcatcaccaacagcaacaaaaaccacgtaatacctccagaaataaac

SEQ ID NO: 63761 - DNA, 70 bp, Homo sapiens
gaaatataactcatcaccaacagcaacaaaaaccacgtaatacctccagaaataaacttagtaagaaaga

SEQ ID NO: 63762 - DNA, 70 bp, Homo sapiens
ctcatcaccaacagcaacaaaaaccacgtaatacctccagaaataaacttagtaagaaagatttattaca

SEQ ID NO: 63763 - DNA, 69 bp, Homo sapiens
cagcaacaaaaaccacgtaatacctccagaaataaacttagtaagaaagatttattacacagataaaga

SEQ ID NO: 63764 - DNA, 66 bp, Homo sapiens
aaaccacgtaatacctccagaaataaacttagtaagaaagatttattacacagataaagaaaacca

SEQ ID NO: 63765 - DNA, 72 bp, Homo sapiens
tacctccagaaataaacttagtaagaaagatttattacacagataaagaaaaccatactatgcttccaagca

SEQ ID NO: 63766 - DNA, 72 bp, Homo sapiens
ccagaaataaacttagtaagaaagatttattacacagataaagaaaaccatactatgcttccaagcaacata

SEQ ID NO: 63767 - DNA, 72 bp, Homo sapiens
cttagtaagaaagatttattacacagataaagaaaaccatactatgcttccaagcaacataagacccccaga

SEQ ID NO: 63768 - DNA, 71 bp, Homo sapiens
aaagatttattacacagataaagaaaaccatactatgcttccaagcaacataagacccccagaaaagataa

SEQ ID NO: 63769 - DNA, 74 bp, Homo sapiens
cacagataaagaaaaccatactatgcttccaagcaacataagacccccagaaaagataatttatatgtataaga

SEQ ID NO: 63770 - DNA, 74 bp, Homo sapiens
gaaaaccatactatgcttccaagcaacataagacccccagaaaagataatttatatgtataagaagactcagga

SEQ ID NO: 63771 - DNA, 75 bp, Homo sapiens
tactatgcttccaagcaacataagacccccagaaaagataatttatatgtataagaagactcaggaagtcacaaa

SEQ ID NO: 63772 - DNA, 72 bp, Homo sapiens
ccaagcaacataagacccccagaaaagataatttatatgtataagaagactcaggaagtcacaaaactgtta

SEQ ID NO: 63773 - DNA, 72 bp, Homo sapiens
gaagactcaggaagtcacaaaactgttaaaatgtcacatccctcctaaaatgacttataaagttgtagtgaa

SEQ ID NO: 63774 - DNA, 70 bp, Homo sapiens
actgttaaaatgtcacatccctcctaaaatgacttataaagttgtagtgaatcttataaatccaaaatcc

SEQ ID NO: 63775 - DNA, 68 bp, Homo sapiens
catccctcctaaaatgacttataaagttgtagtgaatcttataaatccaaaatcccaaagattttttg

SEQ ID NO: 63776 - DNA, 64 bp, Homo sapiens
ttgtttttaaaatttgaaaaaaagtcctaaatttatctaacacagtggggttctcaaccctggc

SEQ ID NO: 63777 - DNA, 69 bp, Homo sapiens
aaatttgaaaaaaagtcctaaatttatctaacacagtggggttctcaaccctggctgccatgaaagtca

SEQ ID NO: 63778 - DNA, 72 bp, Homo sapiens
aaaaagtcctaaatttatctaacacagtggggttctcaaccctggctgccatgaaagtcatctgaggaacta

SEQ ID NO: 63779 - DNA, 76 bp, Homo sapiens
taaatttatctaacacagtggggttctcaaccctggctgccatgaaagtcatctgaggaactacacactatacgaa

SEQ ID NO: 63780 - DNA, 77 bp, Homo sapiens
taacacagtggggttctcaaccctggctgccatgaaagtcatctgaggaactacacactatacgaatgtttctacca

SEQ ID NO: 63781 - DNA, 78 bp, Homo sapiens
ttctcaaccctggctgccatgaaagtcatctgaggaactacacactatacgaatgtttctaccatatcccccagattc

SEQ ID NO: 63782 - DNA, 78 bp, Homo sapiens
ctggctgccatgaaagtcatctgaggaactacacactatacgaatgtttctaccatatcccccagattctaactcaat

SEQ ID NO: 63783 - DNA, 78 bp, Homo sapiens
atgaaagtcatctgaggaactacacactatacgaatgtttctaccatatcccccagattctaactcaattgctctgta

SEQ ID NO: 63784 - DNA, 76 bp, Homo sapiens
tgaggaactacacactatacgaatgtttctaccatatcccccagattctaactcaattgctctgtagtggggttca

SEQ ID NO: 63785 - DNA, 78 bp, Homo sapiens
tacacactatacgaatgtttctaccatatcccccagattctaactcaattgctctgtagtggggttcaggcatcatat

SEQ ID NO: 63786 - DNA, 76 bp, Homo sapiens
tatacgaatgtttctaccatatcccccagattctaactcaattgctctgtagtggggttcaggcatcatattttta

SEQ ID NO: 63787 - DNA, 73 bp, Homo sapiens
tttctaccatatcccccagattctaactcaattgctctgtagtggggttcaggcatcatatttttaaaaattc

SEQ ID NO: 63788 - DNA, 73 bp, Homo sapiens
tttttaaaaattctccagataaatctgataaagtgtagacagagttgagaaccacctgtgtgagaaataacta

SEQ ID NO: 63789 - DNA, 75 bp, Homo sapiens
ttaaaaattctccagataaatctgataaagtgtagacagagttgagaaccacctgtgtgagaaataactagtgag

SEQ ID NO: 63790 - DNA, 77 bp, Homo sapiens
cagataaatctgataaagtgtagacagagttgagaaccacctgtgtgagaaataactagtgaggtcatatactaaaa

SEQ ID NO: 63791 - DNA, 75 bp, Homo sapiens
ataaatctgataaagtgtagacagagttgagaaccacctgtgtgagaaataactagtgaggtcatatactaaaag

SEQ ID NO: 63792 - DNA, 76 bp, Homo sapiens
aaatctgataaagtgtagacagagttgagaaccacctgtgtgagaaataactagtgaggtcatatactaaaagtca

SEQ ID NO: 63793 - DNA, 79 bp, Homo sapiens
taaagtgtagacagagttgagaaccacctgtgtgagaaataactagtgaggtcatatactaaaagtcatcacacagcta

SEQ ID NO: 63794 - DNA, 76 bp, Homo sapiens
agagttgagaaccacctgtgtgagaaataactagtgaggtcatatactaaaagtcatcacacagctaggttaatag

SEQ ID NO: 63795 - DNA, 75 bp, Homo sapiens
ttgagaaccacctgtgtgagaaataactagtgaggtcatatactaaaagtcatcacacagctaggttaataggtt

SEQ ID NO: 63796 - DNA, 76 bp, Homo sapiens
accacctgtgtgagaaataactagtgaggtcatatactaaaagtcatcacacagctaggttaataggtttctggca

SEQ ID NO: 63797 - DNA, 75 bp, Homo sapiens
aaataactagtgaggtcatatactaaaagtcatcacacagctaggttaataggtttctggcacaggaacaagcaa

SEQ ID NO: 63798 - DNA, 73 bp, Homo sapiens
atactaaaagtcatcacacagctaggttaataggtttctggcacaggaacaagcaaaggtcaatggaactaaa

SEQ ID NO: 63799 - DNA, 72 bp, Homo sapiens
aagtcatcacacagctaggttaataggtttctggcacaggaacaagcaaaggtcaatggaactaaagaaaaa

SEQ ID NO: 63800 - DNA, 69 bp, Homo sapiens
taggttaataggtttctggcacaggaacaagcaaaggtcaatggaactaaagaaaaagagttcagaaat

SEQ ID NO: 63801 - DNA, 70 bp, Homo sapiens
taataggtttctggcacaggaacaagcaaaggtcaatggaactaaagaaaaagagttcagaaattagacc

SEQ ID NO: 63802 - DNA, 70 bp, Homo sapiens
cacaggaacaagcaaaggtcaatggaactaaagaaaaagagttcagaaattagacccaaatcctatatgt

SEQ ID NO: 63803 - DNA, 70 bp, Homo sapiens
gcaaaggtcaatggaactaaagaaaaagagttcagaaattagacccaaatcctatatgtttgaaaagaga

SEQ ID NO: 63804 - DNA, 69 bp, Homo sapiens
ctaaagaaaaagagttcagaaattagacccaaatcctatatgtttgaaaagagaataaagtgtatacca

SEQ ID NO: 63805 - DNA, 73 bp, Homo sapiens
agacccaaatcctatatgtttgaaaagagaataaagtgtataccaaaaacagcatatcgtatcagtgggagaa

SEQ ID NO: 63806 - DNA, 74 bp, Homo sapiens
caaatcctatatgtttgaaaagagaataaagtgtataccaaaaacagcatatcgtatcagtgggagaaaagatg

SEQ ID NO: 63807 - DNA, 74 bp, Homo sapiens
tgaaaagagaataaagtgtataccaaaaacagcatatcgtatcagtgggagaaaagatggattaccaatactaa

SEQ ID NO: 63808 - DNA, 73 bp, Homo sapiens
gagaataaagtgtataccaaaaacagcatatcgtatcagtgggagaaaagatggattaccaatactaaataaa

SEQ ID NO: 63809 - DNA, 74 bp, Homo sapiens
taccaaaaacagcatatcgtatcagtgggagaaaagatggattaccaatactaaataaatggtactaagatgat

SEQ ID NO: 63810 - DNA, 76 bp, Homo sapiens
acagcatatcgtatcagtgggagaaaagatggattaccaatactaaataaatggtactaagatgattataacaaga

SEQ ID NO: 63811 - DNA, 72 bp, Homo sapiens
atcgtatcagtgggagaaaagatggattaccaatactaaataaatggtactaagatgattataacaagaaaa

SEQ ID NO: 63812 - DNA, 72 bp, Homo sapiens
ggagaaaagatggattaccaatactaaataaatggtactaagatgattataacaagaaaaaatatatactgc

SEQ ID NO: 63813 - DNA, 76 bp, Homo sapiens
gatggattaccaatactaaataaatggtactaagatgattataacaagaaaaaatatatactgctggatctctgtg

SEQ ID NO: 63814 - DNA, 78 bp, Homo sapiens
ctaaataaatggtactaagatgattataacaagaaaaaatatatactgctggatctctgtgtctcactccttatgcca

SEQ ID NO: 63815 - DNA, 77 bp, Homo sapiens
aaatggtactaagatgattataacaagaaaaaatatatactgctggatctctgtgtctcactccttatgccaaaata

SEQ ID NO: 63816 - DNA, 77 bp, Homo sapiens
aagatgattataacaagaaaaaatatatactgctggatctctgtgtctcactccttatgccaaaataaattgagtta

SEQ ID NO: 63817 - DNA, 76 bp, Homo sapiens
caagaaaaaatatatactgctggatctctgtgtctcactccttatgccaaaataaattgagttaaagattcaagga

SEQ ID NO: 63818 - DNA, 77 bp, Homo sapiens
aaaatatatactgctggatctctgtgtctcactccttatgccaaaataaattgagttaaagattcaaggaggccaga

SEQ ID NO: 63819 - DNA, 79 bp, Homo sapiens
ctgctggatctctgtgtctcactccttatgccaaaataaattgagttaaagattcaaggaggccagacacggtggctca

SEQ ID NO: 63820 - DNA, 66 bp, Homo sapiens
atacaggaaaatatttcttaattttttaataggaaaagcacttctaaaatgtgacataaaacctaa

SEQ ID NO: 63821 - DNA, 66 bp, Homo sapiens
atatttcttaattttttaataggaaaagcacttctaaaatgtgacataaaacctaaaagccataaa

SEQ ID NO: 63822 - DNA, 65 bp, Homo sapiens
cttaattttttaataggaaaagcacttctaaaatgtgacataaaacctaaaagccataaaggaaa

SEQ ID NO: 63823 - DNA, 69 bp, Homo sapiens
ataggaaaagcacttctaaaatgtgacataaaacctaaaagccataaaggaaataaatggataaatgtg

SEQ ID NO: 63824 - DNA, 71 bp, Homo sapiens
agcacttctaaaatgtgacataaaacctaaaagccataaaggaaataaatggataaatgtgtttctataca

SEQ ID NO: 63825 - DNA, 70 bp, Homo sapiens
atgtgacataaaacctaaaagccataaaggaaataaatggataaatgtgtttctatacaaactgaaaaca

SEQ ID NO: 63826 - DNA, 69 bp, Homo sapiens
acctaaaagccataaaggaaataaatggataaatgtgtttctatacaaactgaaaacatatacttggta

SEQ ID NO: 63827 - DNA, 70 bp, Homo sapiens
gccataaaggaaataaatggataaatgtgtttctatacaaactgaaaacatatacttggtaaaaacatat

SEQ ID NO: 63828 - DNA, 70 bp, Homo sapiens
ataaatggataaatgtgtttctatacaaactgaaaacatatacttggtaaaaacatattgtaaacctatg

SEQ ID NO: 63829 - DNA, 72 bp, Homo sapiens
ggataaatgtgtttctatacaaactgaaaacatatacttggtaaaaacatattgtaaacctatgtgaccata

SEQ ID NO: 63830 - DNA, 72 bp, Homo sapiens
ctatacaaactgaaaacatatacttggtaaaaacatattgtaaacctatgtgaccatattcctggtgaaaca

SEQ ID NO: 63831 - DNA, 74 bp, Homo sapiens
ctgaaaacatatacttggtaaaaacatattgtaaacctatgtgaccatattcctggtgaaacagactatggcaa

SEQ ID NO: 63832 - DNA, 72 bp, Homo sapiens
tacttggtaaaaacatattgtaaacctatgtgaccatattcctggtgaaacagactatggcaaataacaaag

SEQ ID NO: 63833 - DNA, 71 bp, Homo sapiens
gtaaaaacatattgtaaacctatgtgaccatattcctggtgaaacagactatggcaaataacaaaggggaa

SEQ ID NO: 63834 - DNA, 70 bp, Homo sapiens
attgtaaacctatgtgaccatattcctggtgaaacagactatggcaaataacaaaggggaaaaacatgtt

SEQ ID NO: 63835 - DNA, 71 bp, Homo sapiens
atgtgaccatattcctggtgaaacagactatggcaaataacaaaggggaaaaacatgttttaagagactta

SEQ ID NO: 63836 - DNA, 69 bp, Homo sapiens
atattcctggtgaaacagactatggcaaataacaaaggggaaaaacatgttttaagagacttaagaata

SEQ ID NO: 63837 - DNA, 67 bp, Homo sapiens
aggggaaaaacatgttttaagagacttaagaatataaattaatgagaaaaaatgacaaacaattcaa

SEQ ID NO: 63838 - DNA, 74 bp, Homo sapiens
gagacttaagaatataaattaatgagaaaaaatgacaaacaattcaagagacaaatggacaaagattatgaaca

SEQ ID NO: 63839 - DNA, 74 bp, Homo sapiens
gaatataaattaatgagaaaaaatgacaaacaattcaagagacaaatggacaaagattatgaacaatcagtaaa

SEQ ID NO: 63840 - DNA, 74 bp, Homo sapiens
aatgagaaaaaatgacaaacaattcaagagacaaatggacaaagattatgaacaatcagtaaaatacaactgcc

SEQ ID NO: 63841 - DNA, 77 bp, Homo sapiens
aatgacaaacaattcaagagacaaatggacaaagattatgaacaatcagtaaaatacaactgcctatgaccttatga

SEQ ID NO: 63842 - DNA, 77 bp, Homo sapiens
caattcaagagacaaatggacaaagattatgaacaatcagtaaaatacaactgcctatgaccttatgaaaagacaca

SEQ ID NO: 63843 - DNA, 73 bp, Homo sapiens
gaacaatcagtaaaatacaactgcctatgaccttatgaaaagacacacttaacaaagaagacaacttgcttaa

SEQ ID NO: 63844 - DNA, 73 bp, Homo sapiens
cagtaaaatacaactgcctatgaccttatgaaaagacacacttaacaaagaagacaacttgcttaacagaatg

SEQ ID NO: 63845 - DNA, 74 bp, Homo sapiens
caactgcctatgaccttatgaaaagacacacttaacaaagaagacaacttgcttaacagaatgtcaagtaagta

SEQ ID NO: 63846 - DNA, 70 bp, Homo sapiens
ccttatgaaaagacacacttaacaaagaagacaacttgcttaacagaatgtcaagtaagtaaaaggatgg

SEQ ID NO: 63847 - DNA, 72 bp, Homo sapiens
agacacacttaacaaagaagacaacttgcttaacagaatgtcaagtaagtaaaaggatggtaatattcagtg

SEQ ID NO: 63848 - DNA, 72 bp, Homo sapiens
acaaagaagacaacttgcttaacagaatgtcaagtaagtaaaaggatggtaatattcagtgttggtcaagat

SEQ ID NO: 63849 - DNA, 74 bp, Homo sapiens
agacaacttgcttaacagaatgtcaagtaagtaaaaggatggtaatattcagtgttggtcaagatttggacaga

SEQ ID NO: 63850 - DNA, 76 bp, Homo sapiens
taacagaatgtcaagtaagtaaaaggatggtaatattcagtgttggtcaagatttggacagaggctcaatcactct

SEQ ID NO: 63851 - DNA, 77 bp, Homo sapiens
aatgtcaagtaagtaaaaggatggtaatattcagtgttggtcaagatttggacagaggctcaatcactcttgatgaa

SEQ ID NO: 63852 - DNA, 79 bp, Homo sapiens
atggtaatattcagtgttggtcaagatttggacagaggctcaatcactcttgatgaaggtgtaatttgcacaatatttc

SEQ ID NO: 63853 - DNA, 82 bp, Homo sapiens
tgttggtcaagatttggacagaggctcaatcactcttgatgaaggtgtaatttgcacaatatttctgaagagtatctgagat

SEQ ID NO: 63854 - DNA, 84 bp, Homo sapiens
atttggacagaggctcaatcactcttgatgaaggtgtaatttgcacaatatttctgaagagtatctgagattatctatgctgat

SEQ ID NO: 63855 - DNA, 82 bp, Homo sapiens
agaggctcaatcactcttgatgaaggtgtaatttgcacaatatttctgaagagtatctgagattatctatgctgatttaaaa

SEQ ID NO: 63856 - DNA, 83 bp, Homo sapiens
caatcactcttgatgaaggtgtaatttgcacaatatttctgaagagtatctgagattatctatgctgatttaaaatctcagta

SEQ ID NO: 63857 - DNA, 80 bp, Homo sapiens
gatgaaggtgtaatttgcacaatatttctgaagagtatctgagattatctatgctgatttaaaatctcagtatcttttaa

SEQ ID NO: 63858 - DNA, 81 bp, Homo sapiens
caatatttctgaagagtatctgagattatctatgctgatttaaaatctcagtatcttttaattcagaaattgcatgtccaa

SEQ ID NO: 63859 - DNA, 82 bp, Homo sapiens
gtatctgagattatctatgctgatttaaaatctcagtatcttttaattcagaaattgcatgtccaataaattatctagcaga

SEQ ID NO: 63860 - DNA, 82 bp, Homo sapiens
gattatctatgctgatttaaaatctcagtatcttttaattcagaaattgcatgtccaataaattatctagcagatatggtca

SEQ ID NO: 63861 - DNA, 82 bp, Homo sapiens
gctgatttaaaatctcagtatcttttaattcagaaattgcatgtccaataaattatctagcagatatggtcactcagctgta

SEQ ID NO: 63862 - DNA, 83 bp, Homo sapiens
atctcagtatcttttaattcagaaattgcatgtccaataaattatctagcagatatggtcactcagctgtacaaagatatatg

SEQ ID NO: 63863 - DNA, 82 bp, Homo sapiens
cttttaattcagaaattgcatgtccaataaattatctagcagatatggtcactcagctgtacaaagatatatgtacaatgtg

SEQ ID NO: 63864 - DNA, 83 bp, Homo sapiens
agaaattgcatgtccaataaattatctagcagatatggtcactcagctgtacaaagatatatgtacaatgtgttcaaagcaaa

SEQ ID NO: 63865 - DNA, 82 bp, Homo sapiens
atgtccaataaattatctagcagatatggtcactcagctgtacaaagatatatgtacaatgtgttcaaagcaaaactgtgaa

SEQ ID NO: 63866 - DNA, 82 bp, Homo sapiens
ataaattatctagcagatatggtcactcagctgtacaaagatatatgtacaatgtgttcaaagcaaaactgtgaaaacagca

SEQ ID NO: 63867 - DNA, 79 bp, Homo sapiens
agatatggtcactcagctgtacaaagatatatgtacaatgtgttcaaagcaaaactgtgaaaacagcaaaatactggga

SEQ ID NO: 63868 - DNA, 76 bp, Homo sapiens
ctcagctgtacaaagatatatgtacaatgtgttcaaagcaaaactgtgaaaacagcaaaatactgggaataaccta

SEQ ID NO: 63869 - DNA, 76 bp, Homo sapiens
caaagatatatgtacaatgtgttcaaagcaaaactgtgaaaacagcaaaatactgggaataacctaaatgctcagc

SEQ ID NO: 63870 - DNA, 72 bp, Homo sapiens
aaaactgtgaaaacagcaaaatactgggaataacctaaatgctcagcctacatggcacaagtccttaaatta

SEQ ID NO: 63871 - DNA, 73 bp, Homo sapiens
aacagcaaaatactgggaataacctaaatgctcagcctacatggcacaagtccttaaattacgatatacccaa

SEQ ID NO: 63872 - DNA, 72 bp, Homo sapiens
aaaatactgggaataacctaaatgctcagcctacatggcacaagtccttaaattacgatatacccaaatcag

SEQ ID NO: 63873 - DNA, 75 bp, Homo sapiens
cctacatggcacaagtccttaaattacgatatacccaaatcaggaattcctattgtacctatgaagaatgactga

SEQ ID NO: 63874 - DNA, 74 bp, Homo sapiens
acaagtccttaaattacgatatacccaaatcaggaattcctattgtacctatgaagaatgactgacagctacgc

SEQ ID NO: 63875 - DNA, 77 bp, Homo sapiens
aaattacgatatacccaaatcaggaattcctattgtacctatgaagaatgactgacagctacgcggagcatggaaga

SEQ ID NO: 63876 - DNA, 77 bp, Homo sapiens
caaatcaggaattcctattgtacctatgaagaatgactgacagctacgcggagcatggaagaatttccaacttgtat

SEQ ID NO: 63877 - DNA, 75 bp, Homo sapiens
aattcctattgtacctatgaagaatgactgacagctacgcggagcatggaagaatttccaacttgtattgttaag

SEQ ID NO: 63878 - DNA, 76 bp, Homo sapiens
tattgtacctatgaagaatgactgacagctacgcggagcatggaagaatttccaacttgtattgttaagtggtggg

SEQ ID NO: 63879 - DNA, 74 bp, Homo sapiens
atgaagaatgactgacagctacgcggagcatggaagaatttccaacttgtattgttaagtggtgggtggggagg

SEQ ID NO: 63880 - DNA, 72 bp, Homo sapiens
acagctacgcggagcatggaagaatttccaacttgtattgttaagtggtgggtggggaggggaacatctaca

SEQ ID NO: 63881 - DNA, 72 bp, Homo sapiens
gagcatggaagaatttccaacttgtattgttaagtggtgggtggggaggggaacatctacactcacaagaaa

SEQ ID NO: 63882 - DNA, 71 bp, Homo sapiens
aacttgtattgttaagtggtgggtggggaggggaacatctacactcacaagaaaacgctgtgtaatgctac

SEQ ID NO: 63883 - DNA, 72 bp, Homo sapiens
attgttaagtggtgggtggggaggggaacatctacactcacaagaaaacgctgtgtaatgctactctttatg

SEQ ID NO: 63884 - DNA, 79 bp, Homo sapiens
gggaacatctacactcacaagaaaacgctgtgtaatgctactctttatgtctggggagatagcacacacatacccacac

SEQ ID NO: 63885 - DNA, 78 bp, Homo sapiens
actcacaagaaaacgctgtgtaatgctactctttatgtctggggagatagcacacacatacccacacccctctctcta

SEQ ID NO: 63886 - DNA, 78 bp, Homo sapiens
aaacgctgtgtaatgctactctttatgtctggggagatagcacacacatacccacacccctctctctacgcctctata

SEQ ID NO: 63887 - DNA, 84 bp, Homo sapiens
tgtaatgctactctttatgtctggggagatagcacacacatacccacacccctctctctacgcctctatacgcatacatcatca

SEQ ID NO: 63888 - DNA, 83 bp, Homo sapiens
ctactctttatgtctggggagatagcacacacatacccacacccctctctctacgcctctatacgcatacatcatcactggca

SEQ ID NO: 63889 - DNA, 83 bp, Homo sapiens
tggggagatagcacacacatacccacacccctctctctacgcctctatacgcatacatcatcactggcaggacagataagaaa

SEQ ID NO: 63890 - DNA, 82 bp, Homo sapiens
atagcacacacatacccacacccctctctctacgcctctatacgcatacatcatcactggcaggacagataagaaataatag

SEQ ID NO: 63891 - DNA, 78 bp, Homo sapiens
atacccacacccctctctctacgcctctatacgcatacatcatcactggcaggacagataagaaataatagttgcctt

SEQ ID NO: 63892 - DNA, 79 bp, Homo sapiens
ccctctctctacgcctctatacgcatacatcatcactggcaggacagataagaaataatagttgcctttggtgagaatt

SEQ ID NO: 63893 - DNA, 78 bp, Homo sapiens
cctctatacgcatacatcatcactggcaggacagataagaaataatagttgcctttggtgagaatttgggagaaccaa

SEQ ID NO: 63894 - DNA, 71 bp, Homo sapiens
gcaggacagataagaaataatagttgcctttggtgagaatttgggagaaccaaaattcaagaattaagaat

SEQ ID NO: 63895 - DNA, 69 bp, Homo sapiens
gaaataatagttgcctttggtgagaatttgggagaaccaaaattcaagaattaagaattaactctctgg

SEQ ID NO: 63896 - DNA, 69 bp, Homo sapiens
gttgcctttggtgagaatttgggagaaccaaaattcaagaattaagaattaactctctggttcttactc

SEQ ID NO: 63897 - DNA, 69 bp, Homo sapiens
ggtgagaatttgggagaaccaaaattcaagaattaagaattaactctctggttcttactcttaagagta

SEQ ID NO: 63898 - DNA, 67 bp, Homo sapiens
gggagaaccaaaattcaagaattaagaattaactctctggttcttactcttaagagtatttttatgg

SEQ ID NO: 63899 - DNA, 68 bp, Homo sapiens
ttcaagaattaagaattaactctctggttcttactcttaagagtatttttatggttgtttgtcgttaa

SEQ ID NO: 63900 - DNA, 70 bp, Homo sapiens
aagaattaactctctggttcttactcttaagagtatttttatggttgtttgtcgttaaaccatgtgcatg

SEQ ID NO: 63901 - DNA, 70 bp, Homo sapiens
ctctctggttcttactcttaagagtatttttatggttgtttgtcgttaaaccatgtgcatgtttactttc

SEQ ID NO: 63902 - DNA, 68 bp, Homo sapiens
ggttcttactcttaagagtatttttatggttgtttgtcgttaaaccatgtgcatgtttactttctaaa

SEQ ID NO: 63903 - DNA, 69 bp, Homo sapiens
tatggttgtttgtcgttaaaccatgtgcatgtttactttctaaaaacaaactttaaacaagtctgtgac

SEQ ID NO: 63904 - DNA, 69 bp, Homo sapiens
tgtttgtcgttaaaccatgtgcatgtttactttctaaaaacaaactttaaacaagtctgtgacccatta

SEQ ID NO: 63905 - DNA, 70 bp, Homo sapiens
ccatgtgcatgtttactttctaaaaacaaactttaaacaagtctgtgacccattaattctccttttcaga

SEQ ID NO: 63906 - DNA, 69 bp, Homo sapiens
gcatgtttactttctaaaaacaaactttaaacaagtctgtgacccattaattctccttttcagaatcta

SEQ ID NO: 63907 - DNA, 81 bp, Homo sapiens
acaagtctgtgacccattaattctccttttcagaatctaatccatgacacatgtgtacaggcattgctgcactagcaaaaa

SEQ ID NO: 63908 - DNA, 81 bp, Homo sapiens
attaattctccttttcagaatctaatccatgacacatgtgtacaggcattgctgcactagcaaaaagtcagaaacaatcca

SEQ ID NO: 63909 - DNA, 81 bp, Homo sapiens
ttctccttttcagaatctaatccatgacacatgtgtacaggcattgctgcactagcaaaaagtcagaaacaatccaaatgt

SEQ ID NO: 63910 - DNA, 85 bp, Homo sapiens
aatctaatccatgacacatgtgtacaggcattgctgcactagcaaaaagtcagaaacaatccaaatgttcatcctcagaggatga

SEQ ID NO: 63911 - DNA, 85 bp, Homo sapiens
tgacacatgtgtacaggcattgctgcactagcaaaaagtcagaaacaatccaaatgttcatcctcagaggatgagatcaataaat

SEQ ID NO: 63912 - DNA, 86 bp, Homo sapiens
tacaggcattgctgcactagcaaaaagtcagaaacaatccaaatgttcatcctcagaggatgagatcaataaattatgatgtatca

SEQ ID NO: 63913 - DNA, 84 bp, Homo sapiens
attgctgcactagcaaaaagtcagaaacaatccaaatgttcatcctcagaggatgagatcaataaattatgatgtatcatataa

SEQ ID NO: 63914 - DNA, 81 bp, Homo sapiens
actagcaaaaagtcagaaacaatccaaatgttcatcctcagaggatgagatcaataaattatgatgtatcatataatggaa

SEQ ID NO: 63915 - DNA, 84 bp, Homo sapiens
gtcagaaacaatccaaatgttcatcctcagaggatgagatcaataaattatgatgtatcatataatggaatactttgctatcag

SEQ ID NO: 63916 - DNA, 82 bp, Homo sapiens
tccaaatgttcatcctcagaggatgagatcaataaattatgatgtatcatataatggaatactttgctatcagtaagaaaaa

SEQ ID NO: 63917 - DNA, 80 bp, Homo sapiens
ttcatcctcagaggatgagatcaataaattatgatgtatcatataatggaatactttgctatcagtaagaaaaaaaaatc

SEQ ID NO: 63918 - DNA, 79 bp, Homo sapiens
tataatggaatactttgctatcagtaagaaaaaaaaatctctgtgcagtgtcacagaggccatctaaggtacactgcca

SEQ ID NO: 63919 - DNA, 77 bp, Homo sapiens
ttgctatcagtaagaaaaaaaaatctctgtgcagtgtcacagaggccatctaaggtacactgccaagtaaaacagta

SEQ ID NO: 63920 - DNA, 74 bp, Homo sapiens
taagaaaaaaaaatctctgtgcagtgtcacagaggccatctaaggtacactgccaagtaaaacagtaaggtgct

SEQ ID NO: 63921 - DNA, 77 bp, Homo sapiens
aaaaatctctgtgcagtgtcacagaggccatctaaggtacactgccaagtaaaacagtaaggtgcttatgtagtctg

SEQ ID NO: 63922 - DNA, 79 bp, Homo sapiens
tgcagtgtcacagaggccatctaaggtacactgccaagtaaaacagtaaggtgcttatgtagtctggtttcattatgta

SEQ ID NO: 63923 - DNA, 72 bp, Homo sapiens
ccatctaaggtacactgccaagtaaaacagtaaggtgcttatgtagtctggtttcattatgtattttaaatc

SEQ ID NO: 63924 - DNA, 73 bp, Homo sapiens
ggtgcttatgtagtctggtttcattatgtattttaaatctttatctgtaaggaggatgttgctcttttcctac

SEQ ID NO: 63925 - DNA, 71 bp, Homo sapiens
atgtagtctggtttcattatgtattttaaatctttatctgtaaggaggatgttgctcttttcctactattt

SEQ ID NO: 63926 - DNA, 69 bp, Homo sapiens
gtttcattatgtattttaaatctttatctgtaaggaggatgttgctcttttcctactattttaattatt

SEQ ID NO: 63927 - DNA, 71 bp, Homo sapiens
ttaaatctttatctgtaaggaggatgttgctcttttcctactattttaattatttcataggatatacttcc

SEQ ID NO: 63928 - DNA, 72 bp, Homo sapiens
atctgtaaggaggatgttgctcttttcctactattttaattatttcataggatatacttcctgtgtaatcgt

SEQ ID NO: 63929 - DNA, 71 bp, Homo sapiens
ggaggatgttgctcttttcctactattttaattatttcataggatatacttcctgtgtaatcgttcttaaa

SEQ ID NO: 63930 - DNA, 69 bp, Homo sapiens
gttgctcttttcctactattttaattatttcataggatatacttcctgtgtaatcgttcttaaaacaaa

SEQ ID NO: 63931 - DNA, 67 bp, Homo sapiens
tatttcataggatatacttcctgtgtaatcgttcttaaaacaaaattatcttaaaaaaagcgccttt

SEQ ID NO: 63932 - DNA, 67 bp, Homo sapiens
cttcctgtgtaatcgttcttaaaacaaaattatcttaaaaaaagcgccttttccctgtgcatcttaa

SEQ ID NO: 63933 - DNA, 66 bp, Homo sapiens
cgttcttaaaacaaaattatcttaaaaaaagcgccttttccctgtgcatcttaaaatctagttggc

SEQ ID NO: 63934 - DNA, 70 bp, Homo sapiens
acaaaattatcttaaaaaaagcgccttttccctgtgcatcttaaaatctagttggctctgctatcgtaag

SEQ ID NO: 63935 - DNA, 72 bp, Homo sapiens
ttatcttaaaaaaagcgccttttccctgtgcatcttaaaatctagttggctctgctatcgtaaggttctaga

SEQ ID NO: 63936 - DNA, 73 bp, Homo sapiens
tttccctgtgcatcttaaaatctagttggctctgctatcgtaaggttctagagagggaatggtttaaaatgga

SEQ ID NO: 63937 - DNA, 71 bp, Homo sapiens
tagttggctctgctatcgtaaggttctagagagggaatggtttaaaatggacttgtctctccctcttactt

SEQ ID NO: 63938 - DNA, 70 bp, Homo sapiens
ctatcgtaaggttctagagagggaatggtttaaaatggacttgtctctccctcttactttctgcccacca

SEQ ID NO: 63939 - DNA, 69 bp, Homo sapiens
taaggttctagagagggaatggtttaaaatggacttgtctctccctcttactttctgcccaccactact

SEQ ID NO: 63940 - DNA, 69 bp, Homo sapiens
agagggaatggtttaaaatggacttgtctctccctcttactttctgcccaccactacttggtctttcat

SEQ ID NO: 63941 - DNA, 69 bp, Homo sapiens
tttaaaatggacttgtctctccctcttactttctgcccaccactacttggtctttcattccacccaaag

SEQ ID NO: 63942 - DNA, 73 bp, Homo sapiens
tgtctctccctcttactttctgcccaccactacttggtctttcattccacccaaaggcaacgacacatcttta

SEQ ID NO: 63943 - DNA, 69 bp, Homo sapiens
cctcttactttctgcccaccactacttggtctttcattccacccaaaggcaacgacacatctttaaaaa

SEQ ID NO: 63944 - DNA, 72 bp, Homo sapiens
tttctgcccaccactacttggtctttcattccacccaaaggcaacgacacatctttaaaaaaatgcactcta

SEQ ID NO: 63945 - DNA, 71 bp, Homo sapiens
actacttggtctttcattccacccaaaggcaacgacacatctttaaaaaaatgcactctatccacctctag

SEQ ID NO: 63946 - DNA, 76 bp, Homo sapiens
ttcattccacccaaaggcaacgacacatctttaaaaaaatgcactctatccacctctagtgggctgctttgagata

SEQ ID NO: 63947 - DNA, 74 bp, Homo sapiens
acccaaaggcaacgacacatctttaaaaaaatgcactctatccacctctagtgggctgctttgagatacctata

SEQ ID NO: 63948 - DNA, 74 bp, Homo sapiens
aacgacacatctttaaaaaaatgcactctatccacctctagtgggctgctttgagatacctataggaaacaaga

SEQ ID NO: 63949 - DNA, 74 bp, Homo sapiens
tttaaaaaaatgcactctatccacctctagtgggctgctttgagatacctataggaaacaagagacaactgtcc

SEQ ID NO: 63950 - DNA, 78 bp, Homo sapiens
aatgcactctatccacctctagtgggctgctttgagatacctataggaaacaagagacaactgtccccagcacgctaa

SEQ ID NO: 63951 - DNA, 78 bp, Homo sapiens
tatccacctctagtgggctgctttgagatacctataggaaacaagagacaactgtccccagcacgctaacgaggctca

SEQ ID NO: 63952 - DNA, 76 bp, Homo sapiens
ctagtgggctgctttgagatacctataggaaacaagagacaactgtccccagcacgctaacgaggctcactttcca

SEQ ID NO: 63953 - DNA, 77 bp, Homo sapiens
tttgagatacctataggaaacaagagacaactgtccccagcacgctaacgaggctcactttccagtgacatccacga

SEQ ID NO: 63954 - DNA, 78 bp, Homo sapiens
tataggaaacaagagacaactgtccccagcacgctaacgaggctcactttccagtgacatccacgagttgctgttgga

SEQ ID NO: 63955 - DNA, 77 bp, Homo sapiens
tccccagcacgctaacgaggctcactttccagtgacatccacgagttgctgttggaaagaaagaccactctgtataa

SEQ ID NO: 63956 - DNA, 74 bp, Homo sapiens
acgctaacgaggctcactttccagtgacatccacgagttgctgttggaaagaaagaccactctgtataaaggaa

SEQ ID NO: 63957 - DNA, 74 bp, Homo sapiens
ctcactttccagtgacatccacgagttgctgttggaaagaaagaccactctgtataaaggaaccccaggatgga

SEQ ID NO: 63958 - DNA, 74 bp, Homo sapiens
tttccagtgacatccacgagttgctgttggaaagaaagaccactctgtataaaggaaccccaggatggaatgaa

SEQ ID NO: 63959 - DNA, 71 bp, Homo sapiens
atccacgagttgctgttggaaagaaagaccactctgtataaaggaaccccaggatggaatgaaaagcctgg

SEQ ID NO: 63960 - DNA, 71 bp, Homo sapiens
ctgttggaaagaaagaccactctgtataaaggaaccccaggatggaatgaaaagcctgggtggacagagaa

SEQ ID NO: 63961 - DNA, 73 bp, Homo sapiens
aaagaccactctgtataaaggaaccccaggatggaatgaaaagcctgggtggacagagaagcatgaagtgtta

SEQ ID NO: 63962 - DNA, 76 bp, Homo sapiens
tctgtataaaggaaccccaggatggaatgaaaagcctgggtggacagagaagcatgaagtgttacaggtgtaatca

SEQ ID NO: 63963 - DNA, 74 bp, Homo sapiens
aaaggaaccccaggatggaatgaaaagcctgggtggacagagaagcatgaagtgttacaggtgtaatcagcaaa

SEQ ID NO: 63964 - DNA, 77 bp, Homo sapiens
atggaatgaaaagcctgggtggacagagaagcatgaagtgttacaggtgtaatcagcaaagtccaacttctggaaga

SEQ ID NO: 63965 - DNA, 76 bp, Homo sapiens
aaaagcctgggtggacagagaagcatgaagtgttacaggtgtaatcagcaaagtccaacttctggaagacactctc

SEQ ID NO: 63966 - DNA, 81 bp, Homo sapiens
gacagagaagcatgaagtgttacaggtgtaatcagcaaagtccaacttctggaagacactctccaggataaatagcagaca

SEQ ID NO: 63967 - DNA, 78 bp, Homo sapiens
aagcatgaagtgttacaggtgtaatcagcaaagtccaacttctggaagacactctccaggataaatagcagacaacaa

SEQ ID NO: 63968 - DNA, 75 bp, Homo sapiens
gtgtaatcagcaaagtccaacttctggaagacactctccaggataaatagcagacaacaaccaaaacatgtttct

SEQ ID NO: 63969 - DNA, 72 bp, Homo sapiens
aaagtccaacttctggaagacactctccaggataaatagcagacaacaaccaaaacatgtttcttcagtaaa

SEQ ID NO: 63970 - DNA, 74 bp, Homo sapiens
ttctggaagacactctccaggataaatagcagacaacaaccaaaacatgtttcttcagtaaattgtaaggatcc

SEQ ID NO: 63971 - DNA, 73 bp, Homo sapiens
actctccaggataaatagcagacaacaaccaaaacatgtttcttcagtaaattgtaaggatcccacagaccaa

SEQ ID NO: 63972 - DNA, 74 bp, Homo sapiens
taaatagcagacaacaaccaaaacatgtttcttcagtaaattgtaaggatcccacagaccaacagagaacagat

SEQ ID NO: 63973 - DNA, 72 bp, Homo sapiens
acaacaaccaaaacatgtttcttcagtaaattgtaaggatcccacagaccaacagagaacagattcttaaga

SEQ ID NO: 63974 - DNA, 75 bp, Homo sapiens
aacatgtttcttcagtaaattgtaaggatcccacagaccaacagagaacagattcttaagaggcatatcaactaa

SEQ ID NO: 63975 - DNA, 75 bp, Homo sapiens
tttcttcagtaaattgtaaggatcccacagaccaacagagaacagattcttaagaggcatatcaactaactgaaa

SEQ ID NO: 63976 - DNA, 76 bp, Homo sapiens
tcccacagaccaacagagaacagattcttaagaggcatatcaactaactgaaatgtagattttgagtaaaaatcta

SEQ ID NO: 63977 - DNA, 73 bp, Homo sapiens
accaacagagaacagattcttaagaggcatatcaactaactgaaatgtagattttgagtaaaaatctataaaa

SEQ ID NO: 63978 - DNA, 72 bp, Homo sapiens
gattcttaagaggcatatcaactaactgaaatgtagattttgagtaaaaatctataaaaactacttataggc

SEQ ID NO: 63979 - DNA, 71 bp, Homo sapiens
gaggcatatcaactaactgaaatgtagattttgagtaaaaatctataaaaactacttataggccgggcgtg

SEQ ID NO: 63980 - DNA, 74 bp, Homo sapiens
aaaaaaaaattacaacatatgagaccactggaaacgtgactattctgtggatactggctgacatgaagttactg

SEQ ID NO: 63981 - DNA, 78 bp, Homo sapiens
attacaacatatgagaccactggaaacgtgactattctgtggatactggctgacatgaagttactgttaaatctgtta

SEQ ID NO: 63982 - DNA, 80 bp, Homo sapiens
atatgagaccactggaaacgtgactattctgtggatactggctgacatgaagttactgttaaatctgttaacatgtgata

SEQ ID NO: 63983 - DNA, 77 bp, Homo sapiens
actggaaacgtgactattctgtggatactggctgacatgaagttactgttaaatctgttaacatgtgataatggctt

SEQ ID NO: 63984 - DNA, 79 bp, Homo sapiens
tattctgtggatactggctgacatgaagttactgttaaatctgttaacatgtgataatggctttgtgtttaggtgtaca

SEQ ID NO: 63985 - DNA, 76 bp, Homo sapiens
atactggctgacatgaagttactgttaaatctgttaacatgtgataatggctttgtgtttaggtgtacaaagtcta

SEQ ID NO: 63986 - DNA, 75 bp, Homo sapiens
gctgacatgaagttactgttaaatctgttaacatgtgataatggctttgtgtttaggtgtacaaagtctaacttc

SEQ ID NO: 63987 - DNA, 74 bp, Homo sapiens
gttactgttaaatctgttaacatgtgataatggctttgtgtttaggtgtacaaagtctaacttctacatacatg

SEQ ID NO: 63988 - DNA, 75 bp, Homo sapiens
ctgttaacatgtgataatggctttgtgtttaggtgtacaaagtctaacttctacatacatgttatcaaaagctct

SEQ ID NO: 63989 - DNA, 78 bp, Homo sapiens
acatgtgataatggctttgtgtttaggtgtacaaagtctaacttctacatacatgttatcaaaagctcttgaagtgca

SEQ ID NO: 63990 - DNA, 75 bp, Homo sapiens
aatggctttgtgtttaggtgtacaaagtctaacttctacatacatgttatcaaaagctcttgaagtgcagtccag

SEQ ID NO: 63991 - DNA, 75 bp, Homo sapiens
tgtttaggtgtacaaagtctaacttctacatacatgttatcaaaagctcttgaagtgcagtccagggtcccagac

SEQ ID NO: 63992 - DNA, 77 bp, Homo sapiens
tctacatacatgttatcaaaagctcttgaagtgcagtccagggtcccagacctttcagggggaccatgatgtcaaaa

SEQ ID NO: 63993 - DNA, 72 bp, Homo sapiens
aaaagctcttgaagtgcagtccagggtcccagacctttcagggggaccatgatgtcaaaactatttccataa

SEQ ID NO: 63994 - DNA, 74 bp, Homo sapiens
tgcagtccagggtcccagacctttcagggggaccatgatgtcaaaactatttccataaaatcctaagatatgat

SEQ ID NO: 63995 - DNA, 71 bp, Homo sapiens
ggtcccagacctttcagggggaccatgatgtcaaaactatttccataaaatcctaagatatgatttgcctt

SEQ ID NO: 63996 - DNA, 70 bp, Homo sapiens
agacctttcagggggaccatgatgtcaaaactatttccataaaatcctaagatatgatttgccttttccc

SEQ ID NO: 63997 - DNA, 74 bp, Homo sapiens
tcaaaactatttccataaaatcctaagatatgatttgccttttccctctgattctctcccaagaacacagtaga

SEQ ID NO: 63998 - DNA, 74 bp, Homo sapiens
tatttccataaaatcctaagatatgatttgccttttccctctgattctctcccaagaacacagtagatctagtt

SEQ ID NO: 63999 - DNA, 75 bp, Homo sapiens
agatatgatttgccttttccctctgattctctcccaagaacacagtagatctagttttctagttactttgtgatg

SEQ ID NO: 64000 - DNA, 74 bp, Homo sapiens
ccttttccctctgattctctcccaagaacacagtagatctagttttctagttactttgtgatgtgtgattccac

SEQ ID NO: 64001 - DNA, 80 bp, Homo sapiens
attctctcccaagaacacagtagatctagttttctagttactttgtgatgtgtgattccactgcactggacggatgatga

SEQ ID NO: 64002 - DNA, 78 bp, Homo sapiens
aagaacacagtagatctagttttctagttactttgtgatgtgtgattccactgcactggacggatgatgaaatgtgtt

SEQ ID NO: 64003 - DNA, 80 bp, Homo sapiens
tagatctagttttctagttactttgtgatgtgtgattccactgcactggacggatgatgaaatgtgtttcaatattctgt

SEQ ID NO: 64004 - DNA, 79 bp, Homo sapiens
ctttgtgatgtgtgattccactgcactggacggatgatgaaatgtgtttcaatattctgttttactatttaatatagta

SEQ ID NO: 64005 - DNA, 79 bp, Homo sapiens
tgatgtgtgattccactgcactggacggatgatgaaatgtgtttcaatattctgttttactatttaatatagtaaatat

SEQ ID NO: 64006 - DNA, 77 bp, Homo sapiens
tccactgcactggacggatgatgaaatgtgtttcaatattctgttttactatttaatatagtaaatattgagaggta

SEQ ID NO: 64007 - DNA, 77 bp, Homo sapiens
ctggacggatgatgaaatgtgtttcaatattctgttttactatttaatatagtaaatattgagaggtatactgcaca

SEQ ID NO: 64008 - DNA, 76 bp, Homo sapiens
gatgaaatgtgtttcaatattctgttttactatttaatatagtaaatattgagaggtatactgcacatgttaaaga

SEQ ID NO: 64009 - DNA, 73 bp, Homo sapiens
caatattctgttttactatttaatatagtaaatattgagaggtatactgcacatgttaaagaaatctctttgg

SEQ ID NO: 64010 - DNA, 71 bp, Homo sapiens
ctgttttactatttaatatagtaaatattgagaggtatactgcacatgttaaagaaatctctttggggtcc

SEQ ID NO: 64011 - DNA, 74 bp, Homo sapiens
atattgagaggtatactgcacatgttaaagaaatctctttggggtcctcagtaattgttaagattattcaggag

SEQ ID NO: 64012 - DNA, 75 bp, Homo sapiens
gtatactgcacatgttaaagaaatctctttggggtcctcagtaattgttaagattattcaggagtcttgagatta

SEQ ID NO: 64013 - DNA, 73 bp, Homo sapiens
ctgcacatgttaaagaaatctctttggggtcctcagtaattgttaagattattcaggagtcttgagattaaaa

SEQ ID NO: 64014 - DNA, 67 bp, Homo sapiens
aaagaaatctctttggggtcctcagtaattgttaagattattcaggagtcttgagattaaaaaaaag

SEQ ID NO: 64015 - DNA, 69 bp, Homo sapiens
ggggtcctcagtaattgttaagattattcaggagtcttgagattaaaaaaaagtttgggaatcattgct

SEQ ID NO: 64016 - DNA, 70 bp, Homo sapiens
cctcagtaattgttaagattattcaggagtcttgagattaaaaaaaagtttgggaatcattgctttatac

SEQ ID NO: 64017 - DNA, 73 bp, Homo sapiens
agattattcaggagtcttgagattaaaaaaaagtttgggaatcattgctttatactattatgtcgacttcata

SEQ ID NO: 64018 - DNA, 73 bp, Homo sapiens
attcaggagtcttgagattaaaaaaaagtttgggaatcattgctttatactattatgtcgacttcatatgatt

SEQ ID NO: 64019 - DNA, 73 bp, Homo sapiens
gagattaaaaaaaagtttgggaatcattgctttatactattatgtcgacttcatatgatttaaactctccaga

SEQ ID NO: 64020 - DNA, 74 bp, Homo sapiens
aagtttgggaatcattgctttatactattatgtcgacttcatatgatttaaactctccagaatagacagagttt

SEQ ID NO: 64021 - DNA, 74 bp, Homo sapiens
gggaatcattgctttatactattatgtcgacttcatatgatttaaactctccagaatagacagagttttaaaag

SEQ ID NO: 64022 - DNA, 76 bp, Homo sapiens
tgtcgacttcatatgatttaaactctccagaatagacagagttttaaaagtaaggagtagagtgatgaatgaactg

SEQ ID NO: 64023 - DNA, 74 bp, Homo sapiens
cttcatatgatttaaactctccagaatagacagagttttaaaagtaaggagtagagtgatgaatgaactgggaa

SEQ ID NO: 64024 - DNA, 70 bp, Homo sapiens
aaactctccagaatagacagagttttaaaagtaaggagtagagtgatgaatgaactgggaaaaggaacaa

SEQ ID NO: 64025 - DNA, 72 bp, Homo sapiens
aatagacagagttttaaaagtaaggagtagagtgatgaatgaactgggaaaaggaacaaggatcaatctctc

SEQ ID NO: 64026 - DNA, 70 bp, Homo sapiens
agttttaaaagtaaggagtagagtgatgaatgaactgggaaaaggaacaaggatcaatctctccaggaac

SEQ ID NO: 64027 - DNA, 71 bp, Homo sapiens
aaaagtaaggagtagagtgatgaatgaactgggaaaaggaacaaggatcaatctctccaggaaccataaac

SEQ ID NO: 64028 - DNA, 74 bp, Homo sapiens
agtagagtgatgaatgaactgggaaaaggaacaaggatcaatctctccaggaaccataaacccatgagaaattc

SEQ ID NO: 64029 - DNA, 77 bp, Homo sapiens
gatcaatctctccaggaaccataaacccatgagaaattccttctcaattgacacactcatacagactcttcttaaaa

SEQ ID NO: 64030 - DNA, 77 bp, Homo sapiens
atctctccaggaaccataaacccatgagaaattccttctcaattgacacactcatacagactcttcttaaaatgcca

SEQ ID NO: 64031 - DNA, 74 bp, Homo sapiens
ataaacccatgagaaattccttctcaattgacacactcatacagactcttcttaaaatgccaggtacaagtaaa

SEQ ID NO: 64032 - DNA, 72 bp, Homo sapiens
gagaaattccttctcaattgacacactcatacagactcttcttaaaatgccaggtacaagtaaaacttaagt

SEQ ID NO: 64033 - DNA, 72 bp, Homo sapiens
ttccttctcaattgacacactcatacagactcttcttaaaatgccaggtacaagtaaaacttaagttcacgt

SEQ ID NO: 64034 - DNA, 72 bp, Homo sapiens
aattgacacactcatacagactcttcttaaaatgccaggtacaagtaaaacttaagttcacgttcctctcta

SEQ ID NO: 64035 - DNA, 70 bp, Homo sapiens
ctcatacagactcttcttaaaatgccaggtacaagtaaaacttaagttcacgttcctctctactaacatt

SEQ ID NO: 64036 - DNA, 67 bp, Homo sapiens
ctcttcttaaaatgccaggtacaagtaaaacttaagttcacgttcctctctactaacatttcaaaaa

SEQ ID NO: 64037 - DNA, 69 bp, Homo sapiens
aatgccaggtacaagtaaaacttaagttcacgttcctctctactaacatttcaaaaaagacaaatgcaa

SEQ ID NO: 64038 - DNA, 70 bp, Homo sapiens
gtaaaacttaagttcacgttcctctctactaacatttcaaaaaagacaaatgcaatttaaacattgagca

SEQ ID NO: 64039 - DNA, 74 bp, Homo sapiens
agttcacgttcctctctactaacatttcaaaaaagacaaatgcaatttaaacattgagcattacttcatcttca

SEQ ID NO: 64040 - DNA, 73 bp, Homo sapiens
cgttcctctctactaacatttcaaaaaagacaaatgcaatttaaacattgagcattacttcatcttcatttct

SEQ ID NO: 64041 - DNA, 71 bp, Homo sapiens
actaacatttcaaaaaagacaaatgcaatttaaacattgagcattacttcatcttcatttcttaagttaaa

SEQ ID NO: 64042 - DNA, 71 bp, Homo sapiens
tgcaatttaaacattgagcattacttcatcttcatttcttaagttaaaaaaaaatcctctcgtttccgaca

SEQ ID NO: 64043 - DNA, 70 bp, Homo sapiens
cattgagcattacttcatcttcatttcttaagttaaaaaaaaatcctctcgtttccgacattcacagggt

SEQ ID NO: 64044 - DNA, 69 bp, Homo sapiens
tacttcatcttcatttcttaagttaaaaaaaaatcctctcgtttccgacattcacagggttttgcatcc

SEQ ID NO: 64045 - DNA, 70 bp, Homo sapiens
agttaaaaaaaaatcctctcgtttccgacattcacagggttttgcatccgtcacccaacgctctcatcaa

SEQ ID NO: 64046 - DNA, 71 bp, Homo sapiens
aaaaatcctctcgtttccgacattcacagggttttgcatccgtcacccaacgctctcatcaaccttctggg

SEQ ID NO: 64047 - DNA, 73 bp, Homo sapiens
gtttccgacattcacagggttttgcatccgtcacccaacgctctcatcaaccttctggggaaactgtgttcta

SEQ ID NO: 64048 - DNA, 73 bp, Homo sapiens
attcacagggttttgcatccgtcacccaacgctctcatcaaccttctggggaaactgtgttctactcttattc

SEQ ID NO: 64049 - DNA, 71 bp, Homo sapiens
atccgtcacccaacgctctcatcaaccttctggggaaactgtgttctactcttattctccctcacccctac

SEQ ID NO: 64050 - DNA, 70 bp, Homo sapiens
ctctcatcaaccttctggggaaactgtgttctactcttattctccctcacccctacttgggactaaacaa

SEQ ID NO: 64051 - DNA, 68 bp, Homo sapiens
atcaaccttctggggaaactgtgttctactcttattctccctcacccctacttgggactaaacaaatc

SEQ ID NO: 64052 - DNA, 68 bp, Homo sapiens
aaactgtgttctactcttattctccctcacccctacttgggactaaacaaatccaaagaacagcccaa

SEQ ID NO: 64053 - DNA, 68 bp, Homo sapiens
ttctactcttattctccctcacccctacttgggactaaacaaatccaaagaacagcccaaactgattt

SEQ ID NO: 64054 - DNA, 68 bp, Homo sapiens
cttattctccctcacccctacttgggactaaacaaatccaaagaacagcccaaactgattttctgttc

SEQ ID NO: 64055 - DNA, 75 bp, Homo sapiens
ttgggactaaacaaatccaaagaacagcccaaactgattttctgttctgggatgtgctgaattccactgcctgaa

SEQ ID NO: 64056 - DNA, 76 bp, Homo sapiens
aacaaatccaaagaacagcccaaactgattttctgttctgggatgtgctgaattccactgcctgaagacgtgcctg

SEQ ID NO: 64057 - DNA, 80 bp, Homo sapiens
aagaacagcccaaactgattttctgttctgggatgtgctgaattccactgcctgaagacgtgcctggtggctgctgttga

SEQ ID NO: 64058 - DNA, 87 bp, Homo sapiens
ttctgttctgggatgtgctgaattccactgcctgaagacgtgcctggtggctgctgttgagaagcctctggccgcagagcatccaca

SEQ ID NO: 64059 - DNA, 87 bp, Homo sapiens
tgctgaattccactgcctgaagacgtgcctggtggctgctgttgagaagcctctggccgcagagcatccacagtgtttgtcacttca

SEQ ID NO: 64060 - DNA, 83 bp, Homo sapiens
aattccactgcctgaagacgtgcctggtggctgctgttgagaagcctctggccgcagagcatccacagtgtttgtcacttcag

SEQ ID NO: 64061 - DNA, 82 bp, Homo sapiens
cctgaagacgtgcctggtggctgctgttgagaagcctctggccgcagagcatccacagtgtttgtcacttcagtgggaatag

SEQ ID NO: 64062 - DNA, 82 bp, Homo sapiens
tggtggctgctgttgagaagcctctggccgcagagcatccacagtgtttgtcacttcagtgggaataggctgcccttccttc

SEQ ID NO: 64063 - DNA, 83 bp, Homo sapiens
ctgctgttgagaagcctctggccgcagagcatccacagtgtttgtcacttcagtgggaataggctgcccttccttctctgtgc

SEQ ID NO: 64064 - DNA, 81 bp, Homo sapiens
aagcctctggccgcagagcatccacagtgtttgtcacttcagtgggaataggctgcccttccttctctgtgctcctgtcag

SEQ ID NO: 64065 - DNA, 78 bp, Homo sapiens
agagcatccacagtgtttgtcacttcagtgggaataggctgcccttccttctctgtgctcctgtcagtcctgggcttt

SEQ ID NO: 64066 - DNA, 77 bp, Homo sapiens
atccacagtgtttgtcacttcagtgggaataggctgcccttccttctctgtgctcctgtcagtcctgggcttttcca

SEQ ID NO: 64067 - DNA, 81 bp, Homo sapiens
ttgtcacttcagtgggaataggctgcccttccttctctgtgctcctgtcagtcctgggcttttccagctgtctcacatcta

SEQ ID NO: 64068 - DNA, 81 bp, Homo sapiens
aggctgcccttccttctctgtgctcctgtcagtcctgggcttttccagctgtctcacatctatccaggcatctgccttccc

SEQ ID NO: 64069 - DNA, 81 bp, Homo sapiens
ttctctgtgctcctgtcagtcctgggcttttccagctgtctcacatctatccaggcatctgccttcccccttctccaagtc

SEQ ID NO: 64070 - DNA, 78 bp, Homo sapiens
ctgtcagtcctgggcttttccagctgtctcacatctatccaggcatctgccttcccccttctccaagtccagttccta

SEQ ID NO: 64071 - DNA, 77 bp, Homo sapiens
tgggcttttccagctgtctcacatctatccaggcatctgccttcccccttctccaagtccagttcctactctagaag

SEQ ID NO: 64072 - DNA, 81 bp, Homo sapiens
ttttccagctgtctcacatctatccaggcatctgccttcccccttctccaagtccagttcctactctagaaggcagctgca

SEQ ID NO: 64073 - DNA, 80 bp, Homo sapiens
gtctcacatctatccaggcatctgccttcccccttctccaagtccagttcctactctagaaggcagctgcaaggctggtg

SEQ ID NO: 64074 - DNA, 80 bp, Homo sapiens
tatccaggcatctgccttcccccttctccaagtccagttcctactctagaaggcagctgcaaggctggtggctgcaaatc

SEQ ID NO: 64075 - DNA, 76 bp, Homo sapiens
cttcccccttctccaagtccagttcctactctagaaggcagctgcaaggctggtggctgcaaatcccagtccaggc

SEQ ID NO: 64076 - DNA, 77 bp, Homo sapiens
ttctccaagtccagttcctactctagaaggcagctgcaaggctggtggctgcaaatcccagtccaggcctttcccta

SEQ ID NO: 64077 - DNA, 80 bp, Homo sapiens
tccagttcctactctagaaggcagctgcaaggctggtggctgcaaatcccagtccaggcctttccctagcagagctcttg

SEQ ID NO: 64078 - DNA, 81 bp, Homo sapiens
tactctagaaggcagctgcaaggctggtggctgcaaatcccagtccaggcctttccctagcagagctcttggccgtgtgtg

SEQ ID NO: 64079 - DNA, 78 bp, Homo sapiens
gcgtgagtcactgtgtccagcacccatctggaggcttcttaaagcccaggccccacgccgagcttctgagtcaataaa

SEQ ID NO: 64080 - DNA, 75 bp, Homo sapiens
actgtgtccagcacccatctggaggcttcttaaagcccaggccccacgccgagcttctgagtcaataaagaagtc

SEQ ID NO: 64081 - DNA, 76 bp, Homo sapiens
agcacccatctggaggcttcttaaagcccaggccccacgccgagcttctgagtcaataaagaagtctgcatttcta

SEQ ID NO: 64082 - DNA, 75 bp, Homo sapiens
atctggaggcttcttaaagcccaggccccacgccgagcttctgagtcaataaagaagtctgcatttctaacaagc

SEQ ID NO: 64083 - DNA, 77 bp, Homo sapiens
ctgctgctgctggtccaggggaccccacttgaagaaccactgcactggtgtttcctctgggacccgaatgcctgtgc

SEQ ID NO: 64084 - DNA, 73 bp, Homo sapiens
ctggtccaggggaccccacttgaagaaccactgcactggtgtttcctctgggacccgaatgcctgtgcttctc

SEQ ID NO: 64085 - DNA, 75 bp, Homo sapiens
gaccccacttgaagaaccactgcactggtgtttcctctgggacccgaatgcctgtgcttctccccggctctgcca

SEQ ID NO: 64086 - DNA, 74 bp, Homo sapiens
acttgaagaaccactgcactggtgtttcctctgggacccgaatgcctgtgcttctccccggctctgccacctct

SEQ ID NO: 64087 - DNA, 77 bp, Homo sapiens
tgcactggtgtttcctctgggacccgaatgcctgtgcttctccccggctctgccacctcttccttgttaacatagca

SEQ ID NO: 64088 - DNA, 75 bp, Homo sapiens
tttcctctgggacccgaatgcctgtgcttctccccggctctgccacctcttccttgttaacatagcagggagtga

SEQ ID NO: 64089 - DNA, 78 bp, Homo sapiens
tctgggacccgaatgcctgtgcttctccccggctctgccacctcttccttgttaacatagcagggagtgagctgacaa

SEQ ID NO: 64090 - DNA, 77 bp, Homo sapiens
aatgcctgtgcttctccccggctctgccacctcttccttgttaacatagcagggagtgagctgacaaccctggaaca

SEQ ID NO: 64091 - DNA, 77 bp, Homo sapiens
tgtgcttctccccggctctgccacctcttccttgttaacatagcagggagtgagctgacaaccctggaacacagctt

SEQ ID NO: 64092 - DNA, 77 bp, Homo sapiens
ttctccccggctctgccacctcttccttgttaacatagcagggagtgagctgacaaccctggaacacagctttctca

SEQ ID NO: 64093 - DNA, 79 bp, Homo sapiens
ggctctgccacctcttccttgttaacatagcagggagtgagctgacaaccctggaacacagctttctcattcagtgaaa

SEQ ID NO: 64094 - DNA, 80 bp, Homo sapiens
tgccacctcttccttgttaacatagcagggagtgagctgacaaccctggaacacagctttctcattcagtgaaatggata

SEQ ID NO: 64095 - DNA, 82 bp, Homo sapiens
ttgttaacatagcagggagtgagctgacaaccctggaacacagctttctcattcagtgaaatggatactgtgccaacagata

SEQ ID NO: 64096 - DNA, 81 bp, Homo sapiens
ttaacatagcagggagtgagctgacaaccctggaacacagctttctcattcagtgaaatggatactgtgccaacagatact

SEQ ID NO: 64097 - DNA, 81 bp, Homo sapiens
agggagtgagctgacaaccctggaacacagctttctcattcagtgaaatggatactgtgccaacagatacttcactggatg

SEQ ID NO: 64098 - DNA, 82 bp, Homo sapiens
aaccctggaacacagctttctcattcagtgaaatggatactgtgccaacagatacttcactggatggccacagaggagcata

SEQ ID NO: 64099 - DNA, 86 bp, Homo sapiens
acagctttctcattcagtgaaatggatactgtgccaacagatacttcactggatggccacagaggagcatacagaccagtgatcac

SEQ ID NO: 64100 - DNA, 85 bp, Homo sapiens
attcagtgaaatggatactgtgccaacagatacttcactggatggccacagaggagcatacagaccagtgatcacctcctcagtg

SEQ ID NO: 64101 - DNA, 84 bp, Homo sapiens
aaatggatactgtgccaacagatacttcactggatggccacagaggagcatacagaccagtgatcacctcctcagtgggcagta

SEQ ID NO: 64102 - DNA, 86 bp, Homo sapiens
tgtgccaacagatacttcactggatggccacagaggagcatacagaccagtgatcacctcctcagtgggcagtacacaggcagaaa

SEQ ID NO: 64103 - DNA, 84 bp, Homo sapiens
tacttcactggatggccacagaggagcatacagaccagtgatcacctcctcagtgggcagtacacaggcagaaagcaacctcta

SEQ ID NO: 64104 - DNA, 82 bp, Homo sapiens
atggccacagaggagcatacagaccagtgatcacctcctcagtgggcagtacacaggcagaaagcaacctctaccaggttca

SEQ ID NO: 64105 - DNA, 80 bp, Homo sapiens
ggagcatacagaccagtgatcacctcctcagtgggcagtacacaggcagaaagcaacctctaccaggttcacggacacat

SEQ ID NO: 64106 - DNA, 78 bp, Homo sapiens
atacagaccagtgatcacctcctcagtgggcagtacacaggcagaaagcaacctctaccaggttcacggacacattag

SEQ ID NO: 64107 - DNA, 75 bp, Homo sapiens
tcacctcctcagtgggcagtacacaggcagaaagcaacctctaccaggttcacggacacattaggccctgtactt

SEQ ID NO: 64108 - DNA, 74 bp, Homo sapiens
cctcagtgggcagtacacaggcagaaagcaacctctaccaggttcacggacacattaggccctgtactttccaa

SEQ ID NO: 64109 - DNA, 74 bp, Homo sapiens
aaagcaacctctaccaggttcacggacacattaggccctgtactttccaactgcctgacctgcaagctgtccta

SEQ ID NO: 64110 - DNA, 74 bp, Homo sapiens
tctaccaggttcacggacacattaggccctgtactttccaactgcctgacctgcaagctgtcctacttctttaa

SEQ ID NO: 64111 - DNA, 75 bp, Homo sapiens
ttcacggacacattaggccctgtactttccaactgcctgacctgcaagctgtcctacttctttaagaattctcat

SEQ ID NO: 64112 - DNA, 72 bp, Homo sapiens
acattaggccctgtactttccaactgcctgacctgcaagctgtcctacttctttaagaattctcattttaaa

SEQ ID NO: 64113 - DNA, 73 bp, Homo sapiens
cctgtactttccaactgcctgacctgcaagctgtcctacttctttaagaattctcattttaaagacagaaatg

SEQ ID NO: 64114 - DNA, 75 bp, Homo sapiens
actgcctgacctgcaagctgtcctacttctttaagaattctcattttaaagacagaaatggggcagagatcttta

SEQ ID NO: 64115 - DNA, 75 bp, Homo sapiens
tgcaagctgtcctacttctttaagaattctcattttaaagacagaaatggggcagagatctttatcctagaaaga

SEQ ID NO: 64116 - DNA, 71 bp, Homo sapiens
ctgtcctacttctttaagaattctcattttaaagacagaaatggggcagagatctttatcctagaaagaaa

SEQ ID NO: 64117 - DNA, 75 bp, Homo sapiens
ttaagaattctcattttaaagacagaaatggggcagagatctttatcctagaaagaaatctgtctcttccaagca

SEQ ID NO: 64118 - DNA, 78 bp, Homo sapiens
aaagacagaaatggggcagagatctttatcctagaaagaaatctgtctcttccaagcatgagtggcacgtggagagcc

SEQ ID NO: 64119 - DNA, 78 bp, Homo sapiens
ggcagagatctttatcctagaaagaaatctgtctcttccaagcatgagtggcacgtggagagcccaagaggaaaaaca

SEQ ID NO: 64120 - DNA, 75 bp, Homo sapiens
atctttatcctagaaagaaatctgtctcttccaagcatgagtggcacgtggagagcccaagaggaaaaacaggag

SEQ ID NO: 64121 - DNA, 76 bp, Homo sapiens
tagaaagaaatctgtctcttccaagcatgagtggcacgtggagagcccaagaggaaaaacaggagtgggccacgtg

SEQ ID NO: 64122 - DNA, 75 bp, Homo sapiens
tgtctcttccaagcatgagtggcacgtggagagcccaagaggaaaaacaggagtgggccacgtggtcccatttta

SEQ ID NO: 64123 - DNA, 73 bp, Homo sapiens
aagcatgagtggcacgtggagagcccaagaggaaaaacaggagtgggccacgtggtcccattttacgcattac

SEQ ID NO: 64124 - DNA, 71 bp, Homo sapiens
agtggcacgtggagagcccaagaggaaaaacaggagtgggccacgtggtcccattttacgcattactcgga

SEQ ID NO: 64125 - DNA, 66 bp, Homo sapiens
agtgggccacgtggtcccattttacgcattactcggagggaaagcccgcggttaggtaggaagtat

SEQ ID NO: 64126 - DNA, 68 bp, Homo sapiens
attactcggagggaaagcccgcggttaggtaggaagtattgaaagtgcttcagttcacttaccttggc

SEQ ID NO: 64127 - DNA, 71 bp, Homo sapiens
agggaaagcccgcggttaggtaggaagtattgaaagtgcttcagttcacttaccttggccatgcctcctgc

SEQ ID NO: 64128 - DNA, 75 bp, Homo sapiens
ttaggtaggaagtattgaaagtgcttcagttcacttaccttggccatgcctcctgcctgtgcggtgttcagtccc

SEQ ID NO: 64129 - DNA, 76 bp, Homo sapiens
aagtattgaaagtgcttcagttcacttaccttggccatgcctcctgcctgtgcggtgttcagtcccgcgtgaccag

SEQ ID NO: 64130 - DNA, 77 bp, Homo sapiens
aaagtgcttcagttcacttaccttggccatgcctcctgcctgtgcggtgttcagtcccgcgtgaccagtcatttgcg

SEQ ID NO: 64131 - DNA, 75 bp, Homo sapiens
taccttggccatgcctcctgcctgtgcggtgttcagtcccgcgtgaccagtcatttgcggggaaacctgcgttag

SEQ ID NO: 64132 - DNA, 76 bp, Homo sapiens
cctcctgcctgtgcggtgttcagtcccgcgtgaccagtcatttgcggggaaacctgcgttagggtctcagccagca

SEQ ID NO: 64133 - DNA, 78 bp, Homo sapiens
ctgtgcggtgttcagtcccgcgtgaccagtcatttgcggggaaacctgcgttagggtctcagccagcacgctgctcga

SEQ ID NO: 64134 - DNA, 79 bp, Homo sapiens
ttcagtcccgcgtgaccagtcatttgcggggaaacctgcgttagggtctcagccagcacgctgctcgaggcgccctgca

SEQ ID NO: 64135 - DNA, 76 bp, Homo sapiens
atttgcggggaaacctgcgttagggtctcagccagcacgctgctcgaggcgccctgcatggctggagtagggtacg

SEQ ID NO: 64136 - DNA, 79 bp, Homo sapiens
aaacctgcgttagggtctcagccagcacgctgctcgaggcgccctgcatggctggagtagggtacggcattccagctcc

SEQ ID NO: 64137 - DNA, 79 bp, Homo sapiens
gttagggtctcagccagcacgctgctcgaggcgccctgcatggctggagtagggtacggcattccagctccccttcctc

SEQ ID NO: 64138 - DNA, 81 bp, Homo sapiens
agcacgctgctcgaggcgccctgcatggctggagtagggtacggcattccagctccccttcctctgccagcagccccaaga

SEQ ID NO: 64139 - DNA, 81 bp, Homo sapiens
ccctgcatggctggagtagggtacggcattccagctccccttcctctgccagcagccccaagagatccattcatgacttgc

SEQ ID NO: 64140 - DNA, 79 bp, Homo sapiens
tggagtagggtacggcattccagctccccttcctctgccagcagccccaagagatccattcatgacttgcgcctgccct

SEQ ID NO: 64141 - DNA, 79 bp, Homo sapiens
agggtacggcattccagctccccttcctctgccagcagccccaagagatccattcatgacttgcgcctgcccttgtgaa

SEQ ID NO: 64142 - DNA, 80 bp, Homo sapiens
agctccccttcctctgccagcagccccaagagatccattcatgacttgcgcctgcccttgtgaagcctgattaattaagc

SEQ ID NO: 64143 - DNA, 83 bp, Homo sapiens
tcctctgccagcagccccaagagatccattcatgacttgcgcctgcccttgtgaagcctgattaattaagctatggccagagt

SEQ ID NO: 64144 - DNA, 81 bp, Homo sapiens
cagccccaagagatccattcatgacttgcgcctgcccttgtgaagcctgattaattaagctatggccagagttactattga

SEQ ID NO: 64145 - DNA, 80 bp, Homo sapiens
aagagatccattcatgacttgcgcctgcccttgtgaagcctgattaattaagctatggccagagttactattgaggaggc

SEQ ID NO: 64146 - DNA, 78 bp, Homo sapiens
attcatgacttgcgcctgcccttgtgaagcctgattaattaagctatggccagagttactattgaggaggcctgggtg

SEQ ID NO: 64147 - DNA, 74 bp, Homo sapiens
cctgcccttgtgaagcctgattaattaagctatggccagagttactattgaggaggcctgggtgggtctggtta

SEQ ID NO: 64148 - DNA, 73 bp, Homo sapiens
ttgtgaagcctgattaattaagctatggccagagttactattgaggaggcctgggtgggtctggttaaagtta

SEQ ID NO: 64149 - DNA, 76 bp, Homo sapiens
attaattaagctatggccagagttactattgaggaggcctgggtgggtctggttaaagttagcattcatgcagata

SEQ ID NO: 64150 - DNA, 77 bp, Homo sapiens
taagctatggccagagttactattgaggaggcctgggtgggtctggttaaagttagcattcatgcagataccaggtc

SEQ ID NO: 64151 - DNA, 76 bp, Homo sapiens
agagttactattgaggaggcctgggtgggtctggttaaagttagcattcatgcagataccaggtccagtctgtgac

SEQ ID NO: 64152 - DNA, 78 bp, Homo sapiens
tattgaggaggcctgggtgggtctggttaaagttagcattcatgcagataccaggtccagtctgtgacgtggcagggc

SEQ ID NO: 64153 - DNA, 80 bp, Homo sapiens
tgggtgggtctggttaaagttagcattcatgcagataccaggtccagtctgtgacgtggcagggctgctagtcgccagcc

SEQ ID NO: 64154 - DNA, 83 bp, Homo sapiens
agttagcattcatgcagataccaggtccagtctgtgacgtggcagggctgctagtcgccagccccacttgcttttgtgcttgc

SEQ ID NO: 64155 - DNA, 80 bp, Homo sapiens
agataccaggtccagtctgtgacgtggcagggctgctagtcgccagccccacttgcttttgtgcttgcggattcagtgct

SEQ ID NO: 64156 - DNA, 79 bp, Homo sapiens
aggtccagtctgtgacgtggcagggctgctagtcgccagccccacttgcttttgtgcttgcggattcagtgcttgggag

SEQ ID NO: 64157 - DNA, 80 bp, Homo sapiens
tctgtgacgtggcagggctgctagtcgccagccccacttgcttttgtgcttgcggattcagtgcttgggaggcagcgggg

SEQ ID NO: 64158 - DNA, 76 bp, Homo sapiens
agggctgctagtcgccagccccacttgcttttgtgcttgcggattcagtgcttgggaggcagcgggggtgggccca

SEQ ID NO: 64159 - DNA, 77 bp, Homo sapiens
tagtcgccagccccacttgcttttgtgcttgcggattcagtgcttgggaggcagcgggggtgggcccagaggtgctg

SEQ ID NO: 64160 - DNA, 76 bp, Homo sapiens
acttgcttttgtgcttgcggattcagtgcttgggaggcagcgggggtgggcccagaggtgctggctgcctgtttag

SEQ ID NO: 64161 - DNA, 78 bp, Homo sapiens
ttttgtgcttgcggattcagtgcttgggaggcagcgggggtgggcccagaggtgctggctgcctgtttaggcaggctg

SEQ ID NO: 64162 - DNA, 76 bp, Homo sapiens
attcagtgcttgggaggcagcgggggtgggcccagaggtgctggctgcctgtttaggcaggctgggggctgaagaa

SEQ ID NO: 64163 - DNA, 75 bp, Homo sapiens
ttgggaggcagcgggggtgggcccagaggtgctggctgcctgtttaggcaggctgggggctgaagaatctccctg

SEQ ID NO: 64164 - DNA, 75 bp, Homo sapiens
agcgggggtgggcccagaggtgctggctgcctgtttaggcaggctgggggctgaagaatctccctggctcagagg

SEQ ID NO: 64165 - DNA, 80 bp, Homo sapiens
cccagaggtgctggctgcctgtttaggcaggctgggggctgaagaatctccctggctcagagggctcttgcccatggcac

SEQ ID NO: 64166 - DNA, 80 bp, Homo sapiens
cctgtttaggcaggctgggggctgaagaatctccctggctcagagggctcttgcccatggcactgaggctggccatgtta

SEQ ID NO: 64167 - DNA, 81 bp, Homo sapiens
aggctgggggctgaagaatctccctggctcagagggctcttgcccatggcactgaggctggccatgttagcactgttcggc

SEQ ID NO: 64168 - DNA, 81 bp, Homo sapiens
ctcagagggctcttgcccatggcactgaggctggccatgttagcactgttcggctgcccttgagcctggccacccaggccc

SEQ ID NO: 64169 - DNA, 82 bp, Homo sapiens
tcttgcccatggcactgaggctggccatgttagcactgttcggctgcccttgagcctggccacccaggccctgctgcacggg

SEQ ID NO: 64170 - DNA, 84 bp, Homo sapiens
tgaggctggccatgttagcactgttcggctgcccttgagcctggccacccaggccctgctgcacggggctgctggcgctcacat

SEQ ID NO: 64171 - DNA, 81 bp, Homo sapiens
catgttagcactgttcggctgcccttgagcctggccacccaggccctgctgcacggggctgctggcgctcacatttcctat

SEQ ID NO: 64172 - DNA, 81 bp, Homo sapiens
tagcactgttcggctgcccttgagcctggccacccaggccctgctgcacggggctgctggcgctcacatttcctattcctg

SEQ ID NO: 64173 - DNA, 80 bp, Homo sapiens
ctggccacccaggccctgctgcacggggctgctggcgctcacatttcctattcctgggttgatactagagccgctgcctc

SEQ ID NO: 64174 - DNA, 80 bp, Homo sapiens
tgcacggggctgctggcgctcacatttcctattcctgggttgatactagagccgctgcctcctcgtagaagctccgacag

SEQ ID NO: 64175 - DNA, 79 bp, Homo sapiens
tgctggcgctcacatttcctattcctgggttgatactagagccgctgcctcctcgtagaagctccgacagttgtttatg

SEQ ID NO: 64176 - DNA, 74 bp, Homo sapiens
acatttcctattcctgggttgatactagagccgctgcctcctcgtagaagctccgacagttgtttatgtttgga

SEQ ID NO: 64177 - DNA, 78 bp, Homo sapiens
tcctattcctgggttgatactagagccgctgcctcctcgtagaagctccgacagttgtttatgtttggaagcagcatc

SEQ ID NO: 64178 - DNA, 78 bp, Homo sapiens
ttgatactagagccgctgcctcctcgtagaagctccgacagttgtttatgtttggaagcagcatctggaacaaggttc

SEQ ID NO: 64179 - DNA, 72 bp, Homo sapiens
ctcctcgtagaagctccgacagttgtttatgtttggaagcagcatctggaacaaggttcccactgtttaaaa

SEQ ID NO: 64180 - DNA, 70 bp, Homo sapiens
aagctccgacagttgtttatgtttggaagcagcatctggaacaaggttcccactgtttaaaaggcctaat

SEQ ID NO: 64181 - DNA, 70 bp, Homo sapiens
agttgtttatgtttggaagcagcatctggaacaaggttcccactgtttaaaaggcctaattctcctccat

SEQ ID NO: 64182 - DNA, 76 bp, Homo sapiens
tttggaagcagcatctggaacaaggttcccactgtttaaaaggcctaattctcctccattgggtatcagctcatca

SEQ ID NO: 64183 - DNA, 74 bp, Homo sapiens
atctggaacaaggttcccactgtttaaaaggcctaattctcctccattgggtatcagctcatcaggaagatcat

SEQ ID NO: 64184 - DNA, 72 bp, Homo sapiens
aacaaggttcccactgtttaaaaggcctaattctcctccattgggtatcagctcatcaggaagatcattttc

SEQ ID NO: 64185 - DNA, 75 bp, Homo sapiens
actgtttaaaaggcctaattctcctccattgggtatcagctcatcaggaagatcattttccaagtcaaacaatga

SEQ ID NO: 64186 - DNA, 75 bp, Homo sapiens
aaaaggcctaattctcctccattgggtatcagctcatcaggaagatcattttccaagtcaaacaatgatccaaaa

SEQ ID NO: 64187 - DNA, 77 bp, Homo sapiens
attctcctccattgggtatcagctcatcaggaagatcattttccaagtcaaacaatgatccaaaatctagaaattaa

SEQ ID NO: 64188 - DNA, 77 bp, Homo sapiens
ttgggtatcagctcatcaggaagatcattttccaagtcaaacaatgatccaaaatctagaaattaaacagaaatgga

SEQ ID NO: 64189 - DNA, 76 bp, Homo sapiens
agctcatcaggaagatcattttccaagtcaaacaatgatccaaaatctagaaattaaacagaaatggaaatgagaa

SEQ ID NO: 64190 - DNA, 67 bp, Homo sapiens
gccccgggcccccgccgccccggaccccctcctcacctgtgctgtcattcgccgagaaaccgggcga

SEQ ID NO: 64191 - DNA, 71 bp, Homo sapiens
cccgccgccccggaccccctcctcacctgtgctgtcattcgccgagaaaccgggcgagctgagtttggctc

SEQ ID NO: 64192 - DNA, 70 bp, Homo sapiens
cccggaccccctcctcacctgtgctgtcattcgccgagaaaccgggcgagctgagtttggctcttttggg

SEQ ID NO: 64193 - DNA, 72 bp, Homo sapiens
tcctcacctgtgctgtcattcgccgagaaaccgggcgagctgagtttggctcttttggggttgggcggtccg

SEQ ID NO: 64194 - DNA, 72 bp, Homo sapiens
tgctgtcattcgccgagaaaccgggcgagctgagtttggctcttttggggttgggcggtccgtccagcaagt

SEQ ID NO: 64195 - DNA, 70 bp, Homo sapiens
attcgccgagaaaccgggcgagctgagtttggctcttttggggttgggcggtccgtccagcaagttctca

SEQ ID NO: 64196 - DNA, 70 bp, Homo sapiens
aaaccgggcgagctgagtttggctcttttggggttgggcggtccgtccagcaagttctcagccattttca

SEQ ID NO: 64197 - DNA, 73 bp, Homo sapiens
tgagtttggctcttttggggttgggcggtccgtccagcaagttctcagccattttcacctgctcgcgaaaaca

SEQ ID NO: 64198 - DNA, 70 bp, Homo sapiens
tcttttggggttgggcggtccgtccagcaagttctcagccattttcacctgctcgcgaaaacagccccgg

SEQ ID NO: 64199 - DNA, 71 bp, Homo sapiens
gggttgggcggtccgtccagcaagttctcagccattttcacctgctcgcgaaaacagccccgggcacgggc

SEQ ID NO: 64200 - DNA, 71 bp, Homo sapiens
ggtccgtccagcaagttctcagccattttcacctgctcgcgaaaacagccccgggcacgggcggccgggcc

SEQ ID NO: 64201 - DNA, 69 bp, Homo sapiens
aagttctcagccattttcacctgctcgcgaaaacagccccgggcacgggcggccgggccggcgagggcc

SEQ ID NO: 64202 - DNA, 65 bp, Homo sapiens
attttcacctgctcgcgaaaacagccccgggcacgggcggccgggccggcgagggcccggacggg

SEQ ID NO: 64203 - DNA, 64 bp, Homo sapiens
acctgctcgcgaaaacagccccgggcacgggcggccgggccggcgagggcccggacgggggtcg

SEQ ID NO: 64204 - DNA, 60 bp, Homo sapiens
aaaacagccccgggcacgggcggccgggccggcgagggcccggacgggggtcgggggccc

SEQ ID NO: 64205 - DNA, 65 bp, Homo sapiens
cacgggcggccgggccggcgagggcccggacgggggtcgggggccctgccggctgcgagggagag

SEQ ID NO: 64206 - DNA, 67 bp, Homo sapiens
cggccgggccggcgagggcccggacgggggtcgggggccctgccggctgcgagggagaggagcgagc

SEQ ID NO: 64207 - DNA, 68 bp, Homo sapiens
agggcccggacgggggtcgggggccctgccggctgcgagggagaggagcgagcgcgggccgcgagcgg

SEQ ID NO: 64208 - DNA, 69 bp, Homo sapiens
ccggacgggggtcgggggccctgccggctgcgagggagaggagcgagcgcgggccgcgagcgggcgggc

SEQ ID NO: 64209 - DNA, 73 bp, Homo sapiens
gggccctgccggctgcgagggagaggagcgagcgcgggccgcgagcgggcgggcgggcgccgagggagaggga

SEQ ID NO: 64210 - DNA, 75 bp, Homo sapiens
ctgccggctgcgagggagaggagcgagcgcgggccgcgagcgggcgggcgggcgccgagggagagggagggcgca

SEQ ID NO: 64211 - DNA, 70 bp, Homo sapiens
agggagaggagcgagcgcgggccgcgagcgggcgggcgggcgccgagggagagggagggcgcaggccggg

SEQ ID NO: 64212 - DNA, 69 bp, Homo sapiens
agcgagcgcgggccgcgagcgggcgggcgggcgccgagggagagggagggcgcaggccgggtgggggag

SEQ ID NO: 64213 - DNA, 69 bp, Homo sapiens
gcgagcgggcgggcgggcgccgagggagagggagggcgcaggccgggtgggggaggcggcggccaaatc

SEQ ID NO: 64214 - DNA, 72 bp, Homo sapiens
gggcgggcgccgagggagagggagggcgcaggccgggtgggggaggcggcggccaaatctcagccacagcaa

SEQ ID NO: 64215 - DNA, 76 bp, Homo sapiens
agagggagggcgcaggccgggtgggggaggcggcggccaaatctcagccacagcaacagcgccccgcagcgctcac

SEQ ID NO: 64216 - DNA, 75 bp, Homo sapiens
cgcaggccgggtgggggaggcggcggccaaatctcagccacagcaacagcgccccgcagcgctcaccgcccgccc

SEQ ID NO: 64217 - DNA, 75 bp, Homo sapiens
gggaggcggcggccaaatctcagccacagcaacagcgccccgcagcgctcaccgcccgcccccggccgccgccgc

SEQ ID NO: 64218 - DNA, 69 bp, Homo sapiens
ttggctagcgcggcggctgccccctccgcccccgctccctccctcttccctgtgcggttcggaggcggg

SEQ ID NO: 64219 - DNA, 67 bp, Homo sapiens
cggcggctgccccctccgcccccgctccctccctcttccctgtgcggttcggaggcggggcaggtgg

SEQ ID NO: 64220 - DNA, 66 bp, Homo sapiens
cctccgcccccgctccctccctcttccctgtgcggttcggaggcggggcaggtgggggcgggccca

SEQ ID NO: 64221 - DNA, 68 bp, Homo sapiens
tccctccctcttccctgtgcggttcggaggcggggcaggtgggggcgggcccaggtagcaggtttggc

SEQ ID NO: 64222 - DNA, 69 bp, Homo sapiens
ctcttccctgtgcggttcggaggcggggcaggtgggggcgggcccaggtagcaggtttggctgcgcggg

SEQ ID NO: 64223 - DNA, 70 bp, Homo sapiens
tgtgcggttcggaggcggggcaggtgggggcgggcccaggtagcaggtttggctgcgcgggggccgcgcg

SEQ ID NO: 64224 - DNA, 68 bp, Homo sapiens
cggggcaggtgggggcgggcccaggtagcaggtttggctgcgcgggggccgcgcgtcggaggtaaata

SEQ ID NO: 64225 - DNA, 67 bp, Homo sapiens
aggtgggggcgggcccaggtagcaggtttggctgcgcgggggccgcgcgtcggaggtaaatactagg

SEQ ID NO: 64226 - DNA, 68 bp, Homo sapiens
cccaggtagcaggtttggctgcgcgggggccgcgcgtcggaggtaaatactagggcggtgggtgtggg

SEQ ID NO: 64227 - DNA, 69 bp, Homo sapiens
tagcaggtttggctgcgcgggggccgcgcgtcggaggtaaatactagggcggtgggtgtggggagccgg

SEQ ID NO: 64228 - DNA, 66 bp, Homo sapiens
ctgcgcgggggccgcgcgtcggaggtaaatactagggcggtgggtgtggggagccggggccggccc

SEQ ID NO: 64229 - DNA, 66 bp, Homo sapiens
gcgcgtcggaggtaaatactagggcggtgggtgtggggagccggggccggcccgggacgcgggctg

SEQ ID NO: 64230 - DNA, 65 bp, Homo sapiens
tcggaggtaaatactagggcggtgggtgtggggagccggggccggcccgggacgcgggctgggga

SEQ ID NO: 64231 - DNA, 65 bp, Homo sapiens
atactagggcggtgggtgtggggagccggggccggcccgggacgcgggctggggagccggggcga

SEQ ID NO: 64232 - DNA, 65 bp, Homo sapiens
tgggtgtggggagccggggccggcccgggacgcgggctggggagccggggcgaggggcgacgccc

SEQ ID NO: 64233 - DNA, 64 bp, Homo sapiens
agccggggccggcccgggacgcgggctggggagccggggcgaggggcgacgccccgccgcccga

SEQ ID NO: 64234 - DNA, 67 bp, Homo sapiens
ggcccgggacgcgggctggggagccggggcgaggggcgacgccccgccgcccgaggttagtgaatga

SEQ ID NO: 64235 - DNA, 68 bp, Homo sapiens
acgcgggctggggagccggggcgaggggcgacgccccgccgcccgaggttagtgaatgagcgggcggc

SEQ ID NO: 64236 - DNA, 68 bp, Homo sapiens
agccggggcgaggggcgacgccccgccgcccgaggttagtgaatgagcgggcggctggcggccggcgg

SEQ ID NO: 64237 - DNA, 67 bp, Homo sapiens
aggaatggcagtcggggttctggccttgttaatggcgtgttctgctttttctttcagtttccccctt

SEQ ID NO: 64238 - DNA, 65 bp, Homo sapiens
agtcggggttctggccttgttaatggcgtgttctgctttttctttcagtttccccctttctaggg

SEQ ID NO: 64239 - DNA, 70 bp, Homo sapiens
tctggccttgttaatggcgtgttctgctttttctttcagtttccccctttctagggtgaggatggttcta

SEQ ID NO: 64240 - DNA, 71 bp, Homo sapiens
tgttaatggcgtgttctgctttttctttcagtttccccctttctagggtgaggatggttctacacagccac

SEQ ID NO: 64241 - DNA, 67 bp, Homo sapiens
ctgctttttctttcagtttccccctttctagggtgaggatggttctacacagccacccggagttcct

SEQ ID NO: 64242 - DNA, 67 bp, Homo sapiens
tttcagtttccccctttctagggtgaggatggttctacacagccacccggagttccttagttgaaag

SEQ ID NO: 64243 - DNA, 70 bp, Homo sapiens
cccctttctagggtgaggatggttctacacagccacccggagttccttagttgaaaggtgcgccctgctg

SEQ ID NO: 64244 - DNA, 73 bp, Homo sapiens
gggtgaggatggttctacacagccacccggagttccttagttgaaaggtgcgccctgctgtgacaggtattct

SEQ ID NO: 64245 - DNA, 72 bp, Homo sapiens
atggttctacacagccacccggagttccttagttgaaaggtgcgccctgctgtgacaggtattctttcttta

SEQ ID NO: 64246 - DNA, 71 bp, Homo sapiens
tacacagccacccggagttccttagttgaaaggtgcgccctgctgtgacaggtattctttctttatgtttt

SEQ ID NO: 64247 - DNA, 71 bp, Homo sapiens
agttccttagttgaaaggtgcgccctgctgtgacaggtattctttctttatgtttttctttcatgttaaca

SEQ ID NO: 64248 - DNA, 72 bp, Homo sapiens
ttagttgaaaggtgcgccctgctgtgacaggtattctttctttatgtttttctttcatgttaacaatcgagg

SEQ ID NO: 64249 - DNA, 75 bp, Homo sapiens
agttttctgtagctactgatgttcatttgtactatatgttgcctttcagaatgtggtaattgtaatctttaacat

SEQ ID NO: 64250 - DNA, 77 bp, Homo sapiens
gtagctactgatgttcatttgtactatatgttgcctttcagaatgtggtaattgtaatctttaacattttcatgtaa

SEQ ID NO: 64251 - DNA, 74 bp, Homo sapiens
tcatttgtactatatgttgcctttcagaatgtggtaattgtaatctttaacattttcatgtaaaacatatttcc

SEQ ID NO: 64252 - DNA, 76 bp, Homo sapiens
gtactatatgttgcctttcagaatgtggtaattgtaatctttaacattttcatgtaaaacatatttcctgatcatc

SEQ ID NO: 64253 - DNA, 75 bp, Homo sapiens
gcctttcagaatgtggtaattgtaatctttaacattttcatgtaaaacatatttcctgatcatctttccattgtc

SEQ ID NO: 64254 - DNA, 76 bp, Homo sapiens
gaatgtggtaattgtaatctttaacattttcatgtaaaacatatttcctgatcatctttccattgtcttcatggaa

SEQ ID NO: 64255 - DNA, 75 bp, Homo sapiens
attgtaatctttaacattttcatgtaaaacatatttcctgatcatctttccattgtcttcatggaaaattgataa

SEQ ID NO: 64256 - DNA, 77 bp, Homo sapiens
cattttcatgtaaaacatatttcctgatcatctttccattgtcttcatggaaaattgataaatatttgtgccttcca

SEQ ID NO: 64257 - DNA, 75 bp, Homo sapiens
aaaacatatttcctgatcatctttccattgtcttcatggaaaattgataaatatttgtgccttccaactctcgtc

SEQ ID NO: 64258 - DNA, 75 bp, Homo sapiens
atatttcctgatcatctttccattgtcttcatggaaaattgataaatatttgtgccttccaactctcgtcttggt

SEQ ID NO: 64259 - DNA, 77 bp, Homo sapiens
atcatctttccattgtcttcatggaaaattgataaatatttgtgccttccaactctcgtcttggttgaatgacttca

SEQ ID NO: 64260 - DNA, 76 bp, Homo sapiens
tgtcttcatggaaaattgataaatatttgtgccttccaactctcgtcttggttgaatgacttcatcttaatacaag

SEQ ID NO: 64261 - DNA, 72 bp, Homo sapiens
aaattgataaatatttgtgccttccaactctcgtcttggttgaatgacttcatcttaatacaagtaagttcc

SEQ ID NO: 64262 - DNA, 70 bp, Homo sapiens
aaatatttgtgccttccaactctcgtcttggttgaatgacttcatcttaatacaagtaagttccccttta

SEQ ID NO: 64263 - DNA, 72 bp, Homo sapiens
ccttccaactctcgtcttggttgaatgacttcatcttaatacaagtaagttcccctttactcagaatccaga

SEQ ID NO: 64264 - DNA, 73 bp, Homo sapiens
aactctcgtcttggttgaatgacttcatcttaatacaagtaagttcccctttactcagaatccagaccatcaa

SEQ ID NO: 64265 - DNA, 70 bp, Homo sapiens
ttttcagtcatgtagaatgaagtctaaagtttatttttgctttttcactaggcattttgatttcctttct

SEQ ID NO: 64266 - DNA, 73 bp, Homo sapiens
tttcctttctttttacagcatggacaccacgttgctgaaaacatgctttgggactgccactgaatttatcttt

SEQ ID NO: 64267 - DNA, 74 bp, Homo sapiens
tttttacagcatggacaccacgttgctgaaaacatgctttgggactgccactgaatttatcttttgcggtttta

SEQ ID NO: 64268 - DNA, 73 bp, Homo sapiens
atggacaccacgttgctgaaaacatgctttgggactgccactgaatttatcttttgcggttttatgacaaagt

SEQ ID NO: 64269 - DNA, 72 bp, Homo sapiens
acgttgctgaaaacatgctttgggactgccactgaatttatcttttgcggttttatgacaaagttattagta

SEQ ID NO: 64270 - DNA, 69 bp, Homo sapiens
acatgctttgggactgccactgaatttatcttttgcggttttatgacaaagttattagtagtttccctt

SEQ ID NO: 64271 - DNA, 66 bp, Homo sapiens
ctttgggactgccactgaatttatcttttgcggttttatgacaaagttattagtagtttccctttt

SEQ ID NO: 64272 - DNA, 67 bp, Homo sapiens
gccactgaatttatcttttgcggttttatgacaaagttattagtagtttcccttttttgaattagta

SEQ ID NO: 64273 - DNA, 65 bp, Homo sapiens
ttatcttttgcggttttatgacaaagttattagtagtttcccttttttgaattagtattttgaag

SEQ ID NO: 64274 - DNA, 70 bp, Homo sapiens
ttatgacaaagttattagtagtttcccttttttgaattagtattttgaagttaatatcacaatgagttca

SEQ ID NO: 64275 - DNA, 70 bp, Homo sapiens
gttattagtagtttcccttttttgaattagtattttgaagttaatatcacaatgagttcaggcttatgga

SEQ ID NO: 64276 - DNA, 72 bp, Homo sapiens
tagtagtttcccttttttgaattagtattttgaagttaatatcacaatgagttcaggcttatggagccaaga

SEQ ID NO: 64277 - DNA, 73 bp, Homo sapiens
tttgaattagtattttgaagttaatatcacaatgagttcaggcttatggagccaagaaaaagtcacttcaccc

SEQ ID NO: 64278 - DNA, 73 bp, Homo sapiens
attagtattttgaagttaatatcacaatgagttcaggcttatggagccaagaaaaagtcacttcaccctactg

SEQ ID NO: 64279 - DNA, 73 bp, Homo sapiens
ttaatatcacaatgagttcaggcttatggagccaagaaaaagtcacttcaccctactgggaagagcggatttt

SEQ ID NO: 64280 - DNA, 70 bp, Homo sapiens
acaatgagttcaggcttatggagccaagaaaaagtcacttcaccctactgggaagagcggattttttact

SEQ ID NO: 64281 - DNA, 71 bp, Homo sapiens
aatgagttcaggcttatggagccaagaaaaagtcacttcaccctactgggaagagcggattttttacttgc

SEQ ID NO: 64282 - DNA, 70 bp, Homo sapiens
aggcttatggagccaagaaaaagtcacttcaccctactgggaagagcggattttttacttgcttcttcaa

SEQ ID NO: 64283 - DNA, 70 bp, Homo sapiens
cttatggagccaagaaaaagtcacttcaccctactgggaagagcggattttttacttgcttcttcaagaa

SEQ ID NO: 64284 - DNA, 71 bp, Homo sapiens
aagaaaaagtcacttcaccctactgggaagagcggattttttacttgcttcttcaagaatgcagcgttaca

SEQ ID NO: 64285 - DNA, 72 bp, Homo sapiens
aaagtcacttcaccctactgggaagagcggattttttacttgcttcttcaagaatgcagcgttacagacaaa

SEQ ID NO: 64286 - DNA, 73 bp, Homo sapiens
agtcacttcaccctactgggaagagcggattttttacttgcttcttcaagaatgcagcgttacagacaaacaa

SEQ ID NO: 64287 - DNA, 73 bp, Homo sapiens
ttcaccctactgggaagagcggattttttacttgcttcttcaagaatgcagcgttacagacaaacaaacacaa

SEQ ID NO: 64288 - DNA, 72 bp, Homo sapiens
gaagagcggattttttacttgcttcttcaagaatgcagcgttacagacaaacaaacacaaaagctccttaaa

SEQ ID NO: 64289 - DNA, 71 bp, Homo sapiens
aagagcggattttttacttgcttcttcaagaatgcagcgttacagacaaacaaacacaaaagctccttaaa

SEQ ID NO: 64290 - DNA, 71 bp, Homo sapiens
ttcttcaagaatgcagcgttacagacaaacaaacacaaaagctccttaaagtaccgaagggaagtatagga

SEQ ID NO: 64291 - DNA, 69 bp, Homo sapiens
agcgttacagacaaacaaacacaaaagctccttaaagtaccgaagggaagtataggacagtatattcaa

SEQ ID NO: 64292 - DNA, 71 bp, Homo sapiens
acaaaagctccttaaagtaccgaagggaagtataggacagtatattcaagatcgttctgtggggcattcaa

SEQ ID NO: 64293 - DNA, 71 bp, Homo sapiens
tccttaaagtaccgaagggaagtataggacagtatattcaagatcgttctgtggggcattcaaggattcct

SEQ ID NO: 64294 - DNA, 73 bp, Homo sapiens
agtaccgaagggaagtataggacagtatattcaagatcgttctgtggggcattcaaggattccttctgcaaaa

SEQ ID NO: 64295 - DNA, 73 bp, Homo sapiens
agatcgttctgtggggcattcaaggattccttctgcaaaaggcaagaaaaatcagattggattaaaaattcta

SEQ ID NO: 64296 - DNA, 75 bp, Homo sapiens
tgtggggcattcaaggattccttctgcaaaaggcaagaaaaatcagattggattaaaaattctagagcaacctca

SEQ ID NO: 64297 - DNA, 75 bp, Homo sapiens
attcaaggattccttctgcaaaaggcaagaaaaatcagattggattaaaaattctagagcaacctcatgcagttc

SEQ ID NO: 64298 - DNA, 76 bp, Homo sapiens
ctgcaaaaggcaagaaaaatcagattggattaaaaattctagagcaacctcatgcagttctctttgttgatgaaaa

SEQ ID NO: 64299 - DNA, 77 bp, Homo sapiens
gcaagaaaaatcagattggattaaaaattctagagcaacctcatgcagttctctttgttgatgaaaaggatgttgta

SEQ ID NO: 64300 - DNA, 78 bp, Homo sapiens
cagattggattaaaaattctagagcaacctcatgcagttctctttgttgatgaaaaggatgttgtagagataaatgaa

SEQ ID NO: 64301 - DNA, 75 bp, Homo sapiens
ggattaaaaattctagagcaacctcatgcagttctctttgttgatgaaaaggatgttgtagagataaatgaaaag

SEQ ID NO: 64302 - DNA, 78 bp, Homo sapiens
attctagagcaacctcatgcagttctctttgttgatgaaaaggatgttgtagagataaatgaaaagttcacagagtta

SEQ ID NO: 64303 - DNA, 76 bp, Homo sapiens
ctcatgcagttctctttgttgatgaaaaggatgttgtagagataaatgaaaagttcacagagttacttttggcaat

SEQ ID NO: 64304 - DNA, 73 bp, Homo sapiens
gttctctttgttgatgaaaaggatgttgtagagataaatgaaaagttcacagagttacttttggcaattacca

SEQ ID NO: 64305 - DNA, 75 bp, Homo sapiens
tgatgaaaaggatgttgtagagataaatgaaaagttcacagagttacttttggcaattaccaattgtgaggagag

SEQ ID NO: 64306 - DNA, 74 bp, Homo sapiens
tgttgtagagataaatgaaaagttcacagagttacttttggcaattaccaattgtgaggagaggttcagcctgt

SEQ ID NO: 64307 - DNA, 71 bp, Homo sapiens
gataaatgaaaagttcacagagttacttttggcaattaccaattgtgaggagaggttcagcctgtttaaaa

SEQ ID NO: 64308 - DNA, 69 bp, Homo sapiens
aaaagttcacagagttacttttggcaattaccaattgtgaggagaggttcagcctgtttaaaaacagaa

SEQ ID NO: 64309 - DNA, 69 bp, Homo sapiens
agttacttttggcaattaccaattgtgaggagaggttcagcctgtttaaaaacagaaacagactaagta

SEQ ID NO: 64310 - DNA, 69 bp, Homo sapiens
caattaccaattgtgaggagaggttcagcctgtttaaaaacagaaacagactaagtaaaggcctccaaa

SEQ ID NO: 64311 - DNA, 69 bp, Homo sapiens
aattgtgaggagaggttcagcctgtttaaaaacagaaacagactaagtaaaggcctccaaatagacgtg

SEQ ID NO: 64312 - DNA, 70 bp, Homo sapiens
aggttcagcctgtttaaaaacagaaacagactaagtaaaggcctccaaatagacgtgggctgtcctgtga

SEQ ID NO: 64313 - DNA, 69 bp, Homo sapiens
cctgtttaaaaacagaaacagactaagtaaaggcctccaaatagacgtgggctgtcctgtgaaagtaca

SEQ ID NO: 64314 - DNA, 73 bp, Homo sapiens
aaaacagaaacagactaagtaaaggcctccaaatagacgtgggctgtcctgtgaaagtacagctgagatctgg

SEQ ID NO: 64315 - DNA, 71 bp, Homo sapiens
actaagtaaaggcctccaaatagacgtgggctgtcctgtgaaagtacagctgagatctggggaagaaaaat

SEQ ID NO: 64316 - DNA, 73 bp, Homo sapiens
taaaggcctccaaatagacgtgggctgtcctgtgaaagtacagctgagatctggggaagaaaaatttcctgga

SEQ ID NO: 64317 - DNA, 72 bp, Homo sapiens
aaatagacgtgggctgtcctgtgaaagtacagctgagatctggggaagaaaaatttcctggagttgtacgct

SEQ ID NO: 64318 - DNA, 74 bp, Homo sapiens
tgggctgtcctgtgaaagtacagctgagatctggggaagaaaaatttcctggagttgtacgcttcagaggaccc

SEQ ID NO: 64319 - DNA, 74 bp, Homo sapiens
tgagatctggggaagaaaaatttcctggagttgtacgcttcagaggacccctgttagcagagaggacagtctcc

SEQ ID NO: 64320 - DNA, 72 bp, Homo sapiens
gaagaaaaatttcctggagttgtacgcttcagaggacccctgttagcagagaggacagtctccggaatattc

SEQ ID NO: 64321 - DNA, 71 bp, Homo sapiens
aaaatttcctggagttgtacgcttcagaggacccctgttagcagagaggacagtctccggaatattctttg

SEQ ID NO: 64322 - DNA, 75 bp, Homo sapiens
ttgtacgcttcagaggacccctgttagcagagaggacagtctccggaatattctttggagttgaattgctggtaa

SEQ ID NO: 64323 - DNA, 73 bp, Homo sapiens
agaggacccctgttagcagagaggacagtctccggaatattctttggagttgaattgctggtaagtttgataa

SEQ ID NO: 64324 - DNA, 73 bp, Homo sapiens
ctgttagcagagaggacagtctccggaatattctttggagttgaattgctggtaagtttgataaaccatttta

SEQ ID NO: 64325 - DNA, 70 bp, Homo sapiens
cagtctccggaatattctttggagttgaattgctggtaagtttgataaaccattttagtagtgtgtttgt

SEQ ID NO: 64326 - DNA, 67 bp, Homo sapiens
atcgtctttctatatctatttctttcccttctctcttaaaaactaggaagaaggtcgtggtcaaggt

SEQ ID NO: 64327 - DNA, 69 bp, Homo sapiens
tttctatatctatttctttcccttctctcttaaaaactaggaagaaggtcgtggtcaaggtttcactga

SEQ ID NO: 64328 - DNA, 66 bp, Homo sapiens
tttctttcccttctctcttaaaaactaggaagaaggtcgtggtcaaggtttcactgacggggtgta

SEQ ID NO: 64329 - DNA, 66 bp, Homo sapiens
ttctctcttaaaaactaggaagaaggtcgtggtcaaggtttcactgacggggtgtaccaagggaaa

SEQ ID NO: 64330 - DNA, 66 bp, Homo sapiens
aaactaggaagaaggtcgtggtcaaggtttcactgacggggtgtaccaagggaaacagctttttca

SEQ ID NO: 64331 - DNA, 70 bp, Homo sapiens
aagaaggtcgtggtcaaggtttcactgacggggtgtaccaagggaaacagctttttcagtgtgatgaaga

SEQ ID NO: 64332 - DNA, 72 bp, Homo sapiens
tcaaggtttcactgacggggtgtaccaagggaaacagctttttcagtgtgatgaagattgtggcgtgtttgt

SEQ ID NO: 64333 - DNA, 75 bp, Homo sapiens
tttcactgacggggtgtaccaagggaaacagctttttcagtgtgatgaagattgtggcgtgtttgttgcattgga

SEQ ID NO: 64334 - DNA, 79 bp, Homo sapiens
tgtaccaagggaaacagctttttcagtgtgatgaagattgtggcgtgtttgttgcattggacaagctagaactcataga

SEQ ID NO: 64335 - DNA, 79 bp, Homo sapiens
aagggaaacagctttttcagtgtgatgaagattgtggcgtgtttgttgcattggacaagctagaactcatagaagatga

SEQ ID NO: 64336 - DNA, 84 bp, Homo sapiens
tttttcagtgtgatgaagattgtggcgtgtttgttgcattggacaagctagaactcatagaagatgatgacactgcattggaaa

SEQ ID NO: 64337 - DNA, 84 bp, Homo sapiens
atgaagattgtggcgtgtttgttgcattggacaagctagaactcatagaagatgatgacactgcattggaaagtgattacgcag

SEQ ID NO: 64338 - DNA, 82 bp, Homo sapiens
attgtggcgtgtttgttgcattggacaagctagaactcatagaagatgatgacactgcattggaaagtgattacgcaggtcc

SEQ ID NO: 64339 - DNA, 82 bp, Homo sapiens
tttgttgcattggacaagctagaactcatagaagatgatgacactgcattggaaagtgattacgcaggtcctggggacacaa

SEQ ID NO: 64340 - DNA, 82 bp, Homo sapiens
attggacaagctagaactcatagaagatgatgacactgcattggaaagtgattacgcaggtcctggggacacaatgcaggtc

SEQ ID NO: 64341 - DNA, 81 bp, Homo sapiens
tagaactcatagaagatgatgacactgcattggaaagtgattacgcaggtcctggggacacaatgcaggtcgaacttcctc

SEQ ID NO: 64342 - DNA, 78 bp, Homo sapiens
gatgatgacactgcattggaaagtgattacgcaggtcctggggacacaatgcaggtcgaacttcctcctttggaaata

SEQ ID NO: 64343 - DNA, 73 bp, Homo sapiens
acactgcattggaaagtgattacgcaggtcctggggacacaatgcaggtcgaacttcctcctttggaaataaa

SEQ ID NO: 64344 - DNA, 70 bp, Homo sapiens
aaagtgattacgcaggtcctggggacacaatgcaggtcgaacttcctcctttggaaataaactccagagt

SEQ ID NO: 64345 - DNA, 69 bp, Homo sapiens
attacgcaggtcctggggacacaatgcaggtcgaacttcctcctttggaaataaactccagagtttctt

SEQ ID NO: 64346 - DNA, 69 bp, Homo sapiens
gggacacaatgcaggtcgaacttcctcctttggaaataaactccagagtttctttgaaggttggagaaa

SEQ ID NO: 64347 - DNA, 69 bp, Homo sapiens
acaatgcaggtcgaacttcctcctttggaaataaactccagagtttctttgaaggttggagaaacaata

SEQ ID NO: 64348 - DNA, 68 bp, Homo sapiens
aacttcctcctttggaaataaactccagagtttctttgaaggttggagaaacaatagaatctggaaca

SEQ ID NO: 64349 - DNA, 73 bp, Homo sapiens
ttggaaataaactccagagtttctttgaaggttggagaaacaatagaatctggaacagttatattctgtgatg

SEQ ID NO: 64350 - DNA, 74 bp, Homo sapiens
taaactccagagtttctttgaaggttggagaaacaatagaatctggaacagttatattctgtgatgttttgcca

SEQ ID NO: 64351 - DNA, 72 bp, Homo sapiens
agtttctttgaaggttggagaaacaatagaatctggaacagttatattctgtgatgttttgccaggaaaaga

SEQ ID NO: 64352 - DNA, 73 bp, Homo sapiens
gttggagaaacaatagaatctggaacagttatattctgtgatgttttgccaggaaaagaaagcttaggatatt

SEQ ID NO: 64353 - DNA, 74 bp, Homo sapiens
caatagaatctggaacagttatattctgtgatgttttgccaggaaaagaaagcttaggatattttgttggtgtg

SEQ ID NO: 64354 - DNA, 74 bp, Homo sapiens
aatctggaacagttatattctgtgatgttttgccaggaaaagaaagcttaggatattttgttggtgtggacatg

SEQ ID NO: 64355 - DNA, 69 bp, Homo sapiens
gccaggaaaagaaagcttaggatattttgttggtgtggacatggtaagaaaattttggattaaatatct

SEQ ID NO: 64356 - DNA, 71 bp, Homo sapiens
tacatttcattgaggaggattttaatgtttattatttaatttctaggataaccctattggcaactgggatg

SEQ ID NO: 64357 - DNA, 70 bp, Homo sapiens
cattgaggaggattttaatgtttattatttaatttctaggataaccctattggcaactgggatggaagat

SEQ ID NO: 64358 - DNA, 73 bp, Homo sapiens
tttaatgtttattatttaatttctaggataaccctattggcaactgggatggaagatttgatggagtgcagct

SEQ ID NO: 64359 - DNA, 72 bp, Homo sapiens
attatttaatttctaggataaccctattggcaactgggatggaagatttgatggagtgcagctttgtagttt

SEQ ID NO: 64360 - DNA, 75 bp, Homo sapiens
taatttctaggataaccctattggcaactgggatggaagatttgatggagtgcagctttgtagttttgcgtgtgt

SEQ ID NO: 64361 - DNA, 75 bp, Homo sapiens
ataaccctattggcaactgggatggaagatttgatggagtgcagctttgtagttttgcgtgtgttgaaagtacaa

SEQ ID NO: 64362 - DNA, 81 bp, Homo sapiens
caactgggatggaagatttgatggagtgcagctttgtagttttgcgtgtgttgaaagtacaattctattgcacatcaatga

SEQ ID NO: 64363 - DNA, 83 bp, Homo sapiens
atggaagatttgatggagtgcagctttgtagttttgcgtgtgttgaaagtacaattctattgcacatcaatgatatcatccca

SEQ ID NO: 64364 - DNA, 80 bp, Homo sapiens
atggagtgcagctttgtagttttgcgtgtgttgaaagtacaattctattgcacatcaatgatatcatcccaggtatgttt

SEQ ID NO: 64365 - DNA, 77 bp, Homo sapiens
agctttgtagttttgcgtgtgttgaaagtacaattctattgcacatcaatgatatcatcccaggtatgttttctttg

SEQ ID NO: 64366 - DNA, 76 bp, Homo sapiens
gtagttttgcgtgtgttgaaagtacaattctattgcacatcaatgatatcatcccaggtatgttttctttgtttta

SEQ ID NO: 64367 - DNA, 77 bp, Homo sapiens
gttgaaagtacaattctattgcacatcaatgatatcatcccaggtatgttttctttgttttatacatttataaggca

SEQ ID NO: 64368 - DNA, 75 bp, Homo sapiens
attttcctatttctttctttctgtcctcaaatccactgtgggtgatatcgtttttgctgacacacagctttatca

SEQ ID NO: 64369 - DNA, 78 bp, Homo sapiens
ttctttctttctgtcctcaaatccactgtgggtgatatcgtttttgctgacacacagctttatcaggtatgactccta

SEQ ID NO: 64370 - DNA, 79 bp, Homo sapiens
tctgtcctcaaatccactgtgggtgatatcgtttttgctgacacacagctttatcaggtatgactcctaagtgtcgtgt

SEQ ID NO: 64371 - DNA, 77 bp, Homo sapiens
aaatccactgtgggtgatatcgtttttgctgacacacagctttatcaggtatgactcctaagtgtcgtgttggactc

SEQ ID NO: 64372 - DNA, 78 bp, Homo sapiens
ggtgatatcgtttttgctgacacacagctttatcaggtatgactcctaagtgtcgtgttggactccacggatgtattg

SEQ ID NO: 64373 - DNA, 78 bp, Homo sapiens
tatcgtttttgctgacacacagctttatcaggtatgactcctaagtgtcgtgttggactccacggatgtattgttgaa

SEQ ID NO: 64374 - DNA, 74 bp, Homo sapiens
acacacagctttatcaggtatgactcctaagtgtcgtgttggactccacggatgtattgttgaatttttcaaag

SEQ ID NO: 64375 - DNA, 72 bp, Homo sapiens
ctttatcaggtatgactcctaagtgtcgtgttggactccacggatgtattgttgaatttttcaaaggaagaa

SEQ ID NO: 64376 - DNA, 72 bp, Homo sapiens
gtatgactcctaagtgtcgtgttggactccacggatgtattgttgaatttttcaaaggaagaacttttcaca

SEQ ID NO: 64377 - DNA, 73 bp, Homo sapiens
tcttctataagaatttgcctttatctttaaaaaacatgcttactgtttcagagagtgtgacgcaggaaaggag

SEQ ID NO: 64378 - DNA, 71 bp, Homo sapiens
atttgcctttatctttaaaaaacatgcttactgtttcagagagtgtgacgcaggaaaggaggcctcccaaa

SEQ ID NO: 64379 - DNA, 73 bp, Homo sapiens
tttaaaaaacatgcttactgtttcagagagtgtgacgcaggaaaggaggcctcccaaacttgcctttatgtca

SEQ ID NO: 64380 - DNA, 73 bp, Homo sapiens
aaaacatgcttactgtttcagagagtgtgacgcaggaaaggaggcctcccaaacttgcctttatgtcaagagg

SEQ ID NO: 64381 - DNA, 73 bp, Homo sapiens
tgtttcagagagtgtgacgcaggaaaggaggcctcccaaacttgcctttatgtcaagaggtgttggggacaaa

SEQ ID NO: 64382 - DNA, 71 bp, Homo sapiens
agtgtgacgcaggaaaggaggcctcccaaacttgcctttatgtcaagaggtgttggggacaaaggttcatc

SEQ ID NO: 64383 - DNA, 71 bp, Homo sapiens
gaaaggaggcctcccaaacttgcctttatgtcaagaggtgttggggacaaaggttcatccagtcataataa

SEQ ID NO: 64384 - DNA, 69 bp, Homo sapiens
cctcccaaacttgcctttatgtcaagaggtgttggggacaaaggttcatccagtcataataaaccaaag

SEQ ID NO: 64385 - DNA, 70 bp, Homo sapiens
aaacttgcctttatgtcaagaggtgttggggacaaaggttcatccagtcataataaaccaaaggctacag

SEQ ID NO: 64386 - DNA, 73 bp, Homo sapiens
ttatgtcaagaggtgttggggacaaaggttcatccagtcataataaaccaaaggctacaggtatggattaata

SEQ ID NO: 64387 - DNA, 72 bp, Homo sapiens
ttggggacaaaggttcatccagtcataataaaccaaaggctacaggtatggattaatagcatataaccttta

SEQ ID NO: 64388 - DNA, 72 bp, Homo sapiens
gacaaaggttcatccagtcataataaaccaaaggctacaggtatggattaatagcatataacctttagtaat

SEQ ID NO: 64389 - DNA, 72 bp, Homo sapiens
ttgatgctatattgactttatttttaaatgaaacttttcttgttcctataggatctacctcagaccctggaa

SEQ ID NO: 64390 - DNA, 68 bp, Homo sapiens
ctttatttttaaatgaaacttttcttgttcctataggatctacctcagaccctggaaatagaaacaga

SEQ ID NO: 64391 - DNA, 70 bp, Homo sapiens
aaatgaaacttttcttgttcctataggatctacctcagaccctggaaatagaaacagatctgaattattt

SEQ ID NO: 64392 - DNA, 70 bp, Homo sapiens
aacttttcttgttcctataggatctacctcagaccctggaaatagaaacagatctgaattattttatacc

SEQ ID NO: 64393 - DNA, 71 bp, Homo sapiens
ttcctataggatctacctcagaccctggaaatagaaacagatctgaattattttataccttaaatgggtct

SEQ ID NO: 64394 - DNA, 73 bp, Homo sapiens
atctacctcagaccctggaaatagaaacagatctgaattattttataccttaaatgggtcttctgttgactca

SEQ ID NO: 64395 - DNA, 71 bp, Homo sapiens
accctggaaatagaaacagatctgaattattttataccttaaatgggtcttctgttgactcacaaccacaa

SEQ ID NO: 64396 - DNA, 72 bp, Homo sapiens
agaaacagatctgaattattttataccttaaatgggtcttctgttgactcacaaccacaatccaaatcaaaa

SEQ ID NO: 64397 - DNA, 71 bp, Homo sapiens
ctgaattattttataccttaaatgggtcttctgttgactcacaaccacaatccaaatcaaaaaatacatgg

SEQ ID NO: 64398 - DNA, 74 bp, Homo sapiens
tataccttaaatgggtcttctgttgactcacaaccacaatccaaatcaaaaaatacatggtacattgatgaagg

SEQ ID NO: 64399 - DNA, 76 bp, Homo sapiens
taaatgggtcttctgttgactcacaaccacaatccaaatcaaaaaatacatggtacattgatgaaggtaatcagta

SEQ ID NO: 64400 - DNA, 74 bp, Homo sapiens
cttctgttgactcacaaccacaatccaaatcaaaaaatacatggtacattgatgaaggtaatcagtaattttag

SEQ ID NO: 64401 - DNA, 72 bp, Homo sapiens
actcacaaccacaatccaaatcaaaaaatacatggtacattgatgaaggtaatcagtaattttagtgttctt

SEQ ID NO: 64402 - DNA, 74 bp, Homo sapiens
cagagtcaatatccttgaatacatttctgtaattaggaataattttttagttgcagaagaccctgcaaaatctc

SEQ ID NO: 64403 - DNA, 73 bp, Homo sapiens
ccttgaatacatttctgtaattaggaataattttttagttgcagaagaccctgcaaaatctcttacagagata

SEQ ID NO: 64404 - DNA, 72 bp, Homo sapiens
aggaataattttttagttgcagaagaccctgcaaaatctcttacagagatatctacagactttgaccgttct

SEQ ID NO: 64405 - DNA, 75 bp, Homo sapiens
tttttagttgcagaagaccctgcaaaatctcttacagagatatctacagactttgaccgttcttcaccaccactc

SEQ ID NO: 64406 - DNA, 77 bp, Homo sapiens
gttgcagaagaccctgcaaaatctcttacagagatatctacagactttgaccgttcttcaccaccactccagcctcc

SEQ ID NO: 64407 - DNA, 80 bp, Homo sapiens
tgcaaaatctcttacagagatatctacagactttgaccgttcttcaccaccactccagcctcctcctgtgaactcactga

SEQ ID NO: 64408 - DNA, 78 bp, Homo sapiens
atctcttacagagatatctacagactttgaccgttcttcaccaccactccagcctcctcctgtgaactcactgaccac

SEQ ID NO: 64409 - DNA, 76 bp, Homo sapiens
atatctacagactttgaccgttcttcaccaccactccagcctcctcctgtgaactcactgaccaccgagaacagat

SEQ ID NO: 64410 - DNA, 75 bp, Homo sapiens
tttgaccgttcttcaccaccactccagcctcctcctgtgaactcactgaccaccgagaacagattccactcttta

SEQ ID NO: 64411 - DNA, 77 bp, Homo sapiens
ttcttcaccaccactccagcctcctcctgtgaactcactgaccaccgagaacagattccactctttaccattcagtc

SEQ ID NO: 64412 - DNA, 78 bp, Homo sapiens
actccagcctcctcctgtgaactcactgaccaccgagaacagattccactctttaccattcagtctcaccaagatgcc

SEQ ID NO: 64413 - DNA, 78 bp, Homo sapiens
tcctcctgtgaactcactgaccaccgagaacagattccactctttaccattcagtctcaccaagatgcccaataccaa

SEQ ID NO: 64414 - DNA, 76 bp, Homo sapiens
actcactgaccaccgagaacagattccactctttaccattcagtctcaccaagatgcccaataccaatggaagtat

SEQ ID NO: 64415 - DNA, 76 bp, Homo sapiens
accaccgagaacagattccactctttaccattcagtctcaccaagatgcccaataccaatggaagtattggccaca

SEQ ID NO: 64416 - DNA, 75 bp, Homo sapiens
aacagattccactctttaccattcagtctcaccaagatgcccaataccaatggaagtattggccacagtccactt

SEQ ID NO: 64417 - DNA, 77 bp, Homo sapiens
actctttaccattcagtctcaccaagatgcccaataccaatggaagtattggccacagtccactttctctgtcagcc

SEQ ID NO: 64418 - DNA, 79 bp, Homo sapiens
attcagtctcaccaagatgcccaataccaatggaagtattggccacagtccactttctctgtcagcccagtctgtaatg

SEQ ID NO: 64419 - DNA, 77 bp, Homo sapiens
aagatgcccaataccaatggaagtattggccacagtccactttctctgtcagcccagtctgtaatggaagagctaaa

SEQ ID NO: 64420 - DNA, 77 bp, Homo sapiens
aataccaatggaagtattggccacagtccactttctctgtcagcccagtctgtaatggaagagctaaacactgcacc

SEQ ID NO: 64421 - DNA, 77 bp, Homo sapiens
aagtattggccacagtccactttctctgtcagcccagtctgtaatggaagagctaaacactgcacccgtccaagaga

SEQ ID NO: 64422 - DNA, 76 bp, Homo sapiens
cacagtccactttctctgtcagcccagtctgtaatggaagagctaaacactgcacccgtccaagagagtccaccct

SEQ ID NO: 64423 - DNA, 77 bp, Homo sapiens
actttctctgtcagcccagtctgtaatggaagagctaaacactgcacccgtccaagagagtccacccttggccatgc

SEQ ID NO: 64424 - DNA, 75 bp, Homo sapiens
agcccagtctgtaatggaagagctaaacactgcacccgtccaagagagtccacccttggccatgcctcctgggaa

SEQ ID NO: 64425 - DNA, 76 bp, Homo sapiens
agtctgtaatggaagagctaaacactgcacccgtccaagagagtccacccttggccatgcctcctgggaactcaca

SEQ ID NO: 64426 - DNA, 75 bp, Homo sapiens
aagagctaaacactgcacccgtccaagagagtccacccttggccatgcctcctgggaactcacatggtctagaag

SEQ ID NO: 64427 - DNA, 76 bp, Homo sapiens
aacactgcacccgtccaagagagtccacccttggccatgcctcctgggaactcacatggtctagaagtgggctcat

SEQ ID NO: 64428 - DNA, 77 bp, Homo sapiens
gtccaagagagtccacccttggccatgcctcctgggaactcacatggtctagaagtgggctcattggctgaagttaa

SEQ ID NO: 64429 - DNA, 75 bp, Homo sapiens
agtccacccttggccatgcctcctgggaactcacatggtctagaagtgggctcattggctgaagttaaggagaac

SEQ ID NO: 64430 - DNA, 75 bp, Homo sapiens
catgcctcctgggaactcacatggtctagaagtgggctcattggctgaagttaaggagaaccctcctttctatgg

SEQ ID NO: 64431 - DNA, 71 bp, Homo sapiens
atggtctagaagtgggctcattggctgaagttaaggagaaccctcctttctatggggtaatccgttggatc

SEQ ID NO: 64432 - DNA, 71 bp, Homo sapiens
ctagaagtgggctcattggctgaagttaaggagaaccctcctttctatggggtaatccgttggatcggtca

SEQ ID NO: 64433 - DNA, 71 bp, Homo sapiens
ttggctgaagttaaggagaaccctcctttctatggggtaatccgttggatcggtcagccaccaggactgaa

SEQ ID NO: 64434 - DNA, 69 bp, Homo sapiens
aagttaaggagaaccctcctttctatggggtaatccgttggatcggtcagccaccaggactgaatgaag

SEQ ID NO: 64435 - DNA, 74 bp, Homo sapiens
accctcctttctatggggtaatccgttggatcggtcagccaccaggactgaatgaagtgctcgctggactggaa

SEQ ID NO: 64436 - DNA, 75 bp, Homo sapiens
tatggggtaatccgttggatcggtcagccaccaggactgaatgaagtgctcgctggactggaactggtaatttaa

SEQ ID NO: 64437 - DNA, 75 bp, Homo sapiens
ggtaatccgttggatcggtcagccaccaggactgaatgaagtgctcgctggactggaactggtaatttaacttga

SEQ ID NO: 64438 - DNA, 72 bp, Homo sapiens
atcggtcagccaccaggactgaatgaagtgctcgctggactggaactggtaatttaacttgacccaaaaatt

SEQ ID NO: 64439 - DNA, 69 bp, Homo sapiens
accaggactgaatgaagtgctcgctggactggaactggtaatttaacttgacccaaaaatttcaatttt

SEQ ID NO: 64440 - DNA, 81 bp, Homo sapiens
tatctctgtaaggcacggtataatgcatattgaagcatttctttttcaggaagatgagtgtgcaggctgtacggatggaac

SEQ ID NO: 64441 - DNA, 80 bp, Homo sapiens
taaggcacggtataatgcatattgaagcatttctttttcaggaagatgagtgtgcaggctgtacggatggaaccttcaga

SEQ ID NO: 64442 - DNA, 81 bp, Homo sapiens
tataatgcatattgaagcatttctttttcaggaagatgagtgtgcaggctgtacggatggaaccttcagaggcactcggta

SEQ ID NO: 64443 - DNA, 78 bp, Homo sapiens
agcatttctttttcaggaagatgagtgtgcaggctgtacggatggaaccttcagaggcactcggtatttcacctgtgc

SEQ ID NO: 64444 - DNA, 78 bp, Homo sapiens
ttttcaggaagatgagtgtgcaggctgtacggatggaaccttcagaggcactcggtatttcacctgtgccctgaagaa

SEQ ID NO: 64445 - DNA, 78 bp, Homo sapiens
atgagtgtgcaggctgtacggatggaaccttcagaggcactcggtatttcacctgtgccctgaagaaggcgctgtttg

SEQ ID NO: 64446 - DNA, 74 bp, Homo sapiens
aggctgtacggatggaaccttcagaggcactcggtatttcacctgtgccctgaagaaggcgctgtttgtgaaac

SEQ ID NO: 64447 - DNA, 75 bp, Homo sapiens
gtacggatggaaccttcagaggcactcggtatttcacctgtgccctgaagaaggcgctgtttgtgaaactgaaga

SEQ ID NO: 64448 - DNA, 78 bp, Homo sapiens
aaccttcagaggcactcggtatttcacctgtgccctgaagaaggcgctgtttgtgaaactgaagagctgcaggcctga

SEQ ID NO: 64449 - DNA, 80 bp, Homo sapiens
tcggtatttcacctgtgccctgaagaaggcgctgtttgtgaaactgaagagctgcaggcctgactctaggtttgcatcat

SEQ ID NO: 64450 - DNA, 82 bp, Homo sapiens
atttcacctgtgccctgaagaaggcgctgtttgtgaaactgaagagctgcaggcctgactctaggtttgcatcattgcagcc

SEQ ID NO: 64451 - DNA, 82 bp, Homo sapiens
tgaagaaggcgctgtttgtgaaactgaagagctgcaggcctgactctaggtttgcatcattgcagccggtttccaatcagat

SEQ ID NO: 64452 - DNA, 84 bp, Homo sapiens
gctgtttgtgaaactgaagagctgcaggcctgactctaggtttgcatcattgcagccggtttccaatcagattgagcgctgtaa

SEQ ID NO: 64453 - DNA, 81 bp, Homo sapiens
aaactgaagagctgcaggcctgactctaggtttgcatcattgcagccggtttccaatcagattgagcgctgtaactcttta

SEQ ID NO: 64454 - DNA, 80 bp, Homo sapiens
agctgcaggcctgactctaggtttgcatcattgcagccggtttccaatcagattgagcgctgtaactctttaggtatttg

SEQ ID NO: 64455 - DNA, 78 bp, Homo sapiens
ctgactctaggtttgcatcattgcagccggtttccaatcagattgagcgctgtaactctttaggtatttggatgcttt

SEQ ID NO: 64456 - DNA, 76 bp, Homo sapiens
tttgcatcattgcagccggtttccaatcagattgagcgctgtaactctttaggtatttggatgctttttgtttact

SEQ ID NO: 64457 - DNA, 74 bp, Homo sapiens
atcattgcagccggtttccaatcagattgagcgctgtaactctttaggtatttggatgctttttgtttacttaa

SEQ ID NO: 64458 - DNA, 68 bp, Homo sapiens
tttttaaaaaaatcttttcagcatttggaggctacttaagtgaagtagtagaagaaaatactccacca

SEQ ID NO: 64459 - DNA, 69 bp, Homo sapiens
aaaatcttttcagcatttggaggctacttaagtgaagtagtagaagaaaatactccaccaaaaatggaa

SEQ ID NO: 64460 - DNA, 68 bp, Homo sapiens
agcatttggaggctacttaagtgaagtagtagaagaaaatactccaccaaaaatggaaaaagaaggct

SEQ ID NO: 64461 - DNA, 70 bp, Homo sapiens
ggctacttaagtgaagtagtagaagaaaatactccaccaaaaatggaaaaagaaggcttggagataatga

SEQ ID NO: 64462 - DNA, 70 bp, Homo sapiens
agtgaagtagtagaagaaaatactccaccaaaaatggaaaaagaaggcttggagataatgattgggaaga

SEQ ID NO: 64463 - DNA, 68 bp, Homo sapiens
agtagaagaaaatactccaccaaaaatggaaaaagaaggcttggagataatgattgggaagaagaaag

SEQ ID NO: 64464 - DNA, 72 bp, Homo sapiens
tactccaccaaaaatggaaaaagaaggcttggagataatgattgggaagaagaaaggcatccagggtcatta

SEQ ID NO: 64465 - DNA, 72 bp, Homo sapiens
aatggaaaaagaaggcttggagataatgattgggaagaagaaaggcatccagggtcattacaattcttgtta

SEQ ID NO: 64466 - DNA, 71 bp, Homo sapiens
aaaaagaaggcttggagataatgattgggaagaagaaaggcatccagggtcattacaattcttgttactta

SEQ ID NO: 64467 - DNA, 73 bp, Homo sapiens
agataatgattgggaagaagaaaggcatccagggtcattacaattcttgttacttagactcaaccttattctg

SEQ ID NO: 64468 - DNA, 70 bp, Homo sapiens
tgggaagaagaaaggcatccagggtcattacaattcttgttacttagactcaaccttattctggtaagtt

SEQ ID NO: 64469 - DNA, 69 bp, Homo sapiens
agaagaaaggcatccagggtcattacaattcttgttacttagactcaaccttattctggtaagtttaaa

SEQ ID NO: 64470 - DNA, 71 bp, Homo sapiens
catccagggtcattacaattcttgttacttagactcaaccttattctggtaagtttaaaaagaatgcaata

SEQ ID NO: 64471 - DNA, 71 bp, Homo sapiens
aaaatatgtttacagcatgaagaaaattatcctttttcttttgcagcttatttgcttttagttctgttctg

SEQ ID NO: 64472 - DNA, 73 bp, Homo sapiens
gtttacagcatgaagaaaattatcctttttcttttgcagcttatttgcttttagttctgttctggacactgtg

SEQ ID NO: 64473 - DNA, 70 bp, Homo sapiens
agaaaattatcctttttcttttgcagcttatttgcttttagttctgttctggacactgtgttacttagac

SEQ ID NO: 64474 - DNA, 69 bp, Homo sapiens
cctttttcttttgcagcttatttgcttttagttctgttctggacactgtgttacttagacccaaagaaa

SEQ ID NO: 64475 - DNA, 71 bp, Homo sapiens
gcttatttgcttttagttctgttctggacactgtgttacttagacccaaagaaaagaacgatgtagaatat

SEQ ID NO: 64476 - DNA, 71 bp, Homo sapiens
ttagttctgttctggacactgtgttacttagacccaaagaaaagaacgatgtagaatattatagtgaaacc

SEQ ID NO: 64477 - DNA, 72 bp, Homo sapiens
ttctggacactgtgttacttagacccaaagaaaagaacgatgtagaatattatagtgaaacccaagagctac

SEQ ID NO: 64478 - DNA, 71 bp, Homo sapiens
ttacttagacccaaagaaaagaacgatgtagaatattatagtgaaacccaagagctactgaggacagaaat

SEQ ID NO: 64479 - DNA, 72 bp, Homo sapiens
ccaaagaaaagaacgatgtagaatattatagtgaaacccaagagctactgaggacagaaattgttaatcctc

SEQ ID NO: 64480 - DNA, 75 bp, Homo sapiens
aaagaacgatgtagaatattatagtgaaacccaagagctactgaggacagaaattgttaatcctctgagaatgta

SEQ ID NO: 64481 - DNA, 75 bp, Homo sapiens
atgtagaatattatagtgaaacccaagagctactgaggacagaaattgttaatcctctgagaatgtaagtagaaa

SEQ ID NO: 64482 - DNA, 74 bp, Homo sapiens
ttatagtgaaacccaagagctactgaggacagaaattgttaatcctctgagaatgtaagtagaaaacaaattgc

SEQ ID NO: 64483 - DNA, 73 bp, Homo sapiens
ccaagagctactgaggacagaaattgttaatcctctgagaatgtaagtagaaaacaaattgctattttgcctt

SEQ ID NO: 64484 - DNA, 73 bp, Homo sapiens
gaggacagaaattgttaatcctctgagaatgtaagtagaaaacaaattgctattttgcctttacatggtgttc

SEQ ID NO: 64485 - DNA, 73 bp, Homo sapiens
gaaattgttaatcctctgagaatgtaagtagaaaacaaattgctattttgcctttacatggtgttctatttgc

SEQ ID NO: 64486 - DNA, 73 bp, Homo sapiens
atcctctgagaatgtaagtagaaaacaaattgctattttgcctttacatggtgttctatttgctgttttctgg

SEQ ID NO: 64487 - DNA, 72 bp, Homo sapiens
gaatgtaagtagaaaacaaattgctattttgcctttacatggtgttctatttgctgttttctggtatagtaa

SEQ ID NO: 64488 - DNA, 70 bp, Homo sapiens
aacaaattgctattttgcctttacatggtgttctatttgctgttttctggtatagtaattaatttatacc

SEQ ID NO: 64489 - DNA, 73 bp, Homo sapiens
gctattttgcctttacatggtgttctatttgctgttttctggtatagtaattaatttataccttgtcttcatg

SEQ ID NO: 64490 - DNA, 74 bp, Homo sapiens
tacatggtgttctatttgctgttttctggtatagtaattaatttataccttgtcttcatgtaataagagatggg

SEQ ID NO: 64491 - DNA, 73 bp, Homo sapiens
ggtgttctatttgctgttttctggtatagtaattaatttataccttgtcttcatgtaataagagatgggtgaa

SEQ ID NO: 64492 - DNA, 71 bp, Homo sapiens
gctgttttctggtatagtaattaatttataccttgtcttcatgtaataagagatgggtgaaaattagttct

SEQ ID NO: 64493 - DNA, 71 bp, Homo sapiens
ctggtatagtaattaatttataccttgtcttcatgtaataagagatgggtgaaaattagttcttatggtaa

SEQ ID NO: 64494 - DNA, 68 bp, Homo sapiens
atttataccttgtcttcatgtaataagagatgggtgaaaattagttcttatggtaaaatattacgttt

SEQ ID NO: 64495 - DNA, 67 bp, Homo sapiens
cttgtcttcatgtaataagagatgggtgaaaattagttcttatggtaaaatattacgtttttaaacc

SEQ ID NO: 64496 - DNA, 65 bp, Homo sapiens
tgtaataagagatgggtgaaaattagttcttatggtaaaatattacgtttttaaacctttggtcc

SEQ ID NO: 64497 - DNA, 64 bp, Homo sapiens
gagatgggtgaaaattagttcttatggtaaaatattacgtttttaaacctttggtccttgtact

SEQ ID NO: 64498 - DNA, 62 bp, Homo sapiens
gaaaattagttcttatggtaaaatattacgtttttaaacctttggtccttgtacttttttgc

SEQ ID NO: 64499 - DNA, 61 bp, Homo sapiens
cttatggtaaaatattacgtttttaaacctttggtccttgtacttttttgcttatttaatt

SEQ ID NO: 64500 - DNA, 66 bp, Homo sapiens
ttaaacctttggtccttgtacttttttgcttatttaatttcttaaatgtggccaaggtgtagaaca

SEQ ID NO: 64501 - DNA, 73 bp, Homo sapiens
ttggtccttgtacttttttgcttatttaatttcttaaatgtggccaaggtgtagaacatagcatattccatga

SEQ ID NO: 64502 - DNA, 73 bp, Homo sapiens
tttttgcttatttaatttcttaaatgtggccaaggtgtagaacatagcatattccatgaaatgatttaaccta

SEQ ID NO: 64503 - DNA, 74 bp, Homo sapiens
tttaatttcttaaatgtggccaaggtgtagaacatagcatattccatgaaatgatttaacctattttgctagag

SEQ ID NO: 64504 - DNA, 75 bp, Homo sapiens
cttaaatgtggccaaggtgtagaacatagcatattccatgaaatgatttaacctattttgctagagtaaactata

SEQ ID NO: 64505 - DNA, 76 bp, Homo sapiens
gtggccaaggtgtagaacatagcatattccatgaaatgatttaacctattttgctagagtaaactataatttagca

SEQ ID NO: 64506 - DNA, 78 bp, Homo sapiens
tgtagaacatagcatattccatgaaatgatttaacctattttgctagagtaaactataatttagcaattgcagtatgt

SEQ ID NO: 64507 - DNA, 73 bp, Homo sapiens
attccatgaaatgatttaacctattttgctagagtaaactataatttagcaattgcagtatgtttaggaaagc

SEQ ID NO: 64508 - DNA, 74 bp, Homo sapiens
tgaaatgatttaacctattttgctagagtaaactataatttagcaattgcagtatgtttaggaaagctaataca

SEQ ID NO: 64509 - DNA, 73 bp, Homo sapiens
cctattttgctagagtaaactataatttagcaattgcagtatgtttaggaaagctaatacataatacttagga

SEQ ID NO: 64510 - DNA, 75 bp, Homo sapiens
ttgctagagtaaactataatttagcaattgcagtatgtttaggaaagctaatacataatacttaggattcttatc

SEQ ID NO: 64511 - DNA, 72 bp, Homo sapiens
aaactataatttagcaattgcagtatgtttaggaaagctaatacataatacttaggattcttatcttttgaa

SEQ ID NO: 64512 - DNA, 74 bp, Homo sapiens
tagcaattgcagtatgtttaggaaagctaatacataatacttaggattcttatcttttgaaatagtttattcca

SEQ ID NO: 64513 - DNA, 72 bp, Homo sapiens
tgtttaggaaagctaatacataatacttaggattcttatcttttgaaatagtttattccaacacttctgcta

SEQ ID NO: 64514 - DNA, 75 bp, Homo sapiens
agctaatacataatacttaggattcttatcttttgaaatagtttattccaacacttctgctacaagtaatcatgc

SEQ ID NO: 64515 - DNA, 74 bp, Homo sapiens
cataatacttaggattcttatcttttgaaatagtttattccaacacttctgctacaagtaatcatgcttattag

SEQ ID NO: 64516 - DNA, 73 bp, Homo sapiens
gattcttatcttttgaaatagtttattccaacacttctgctacaagtaatcatgcttattagttaaattggtg

SEQ ID NO: 64517 - DNA, 75 bp, Homo sapiens
ttccaacacttctgctacaagtaatcatgcttattagttaaattggtgtagtctagcttcttaaatctgaaagaa

SEQ ID NO: 64518 - DNA, 73 bp, Homo sapiens
ctgctacaagtaatcatgcttattagttaaattggtgtagtctagcttcttaaatctgaaagaaaaggagaaa

SEQ ID NO: 64519 - DNA, 70 bp, Homo sapiens
gtaatcatgcttattagttaaattggtgtagtctagcttcttaaatctgaaagaaaaggagaaagggaaa

SEQ ID NO: 64520 - DNA, 69 bp, Homo sapiens
gtctagcttcttaaatctgaaagaaaaggagaaagggaaattctttatagaatagctagtgtttaatac

SEQ ID NO: 64521 - DNA, 71 bp, Homo sapiens
tctgaaagaaaaggagaaagggaaattctttatagaatagctagtgtttaatactttggactagcaacaga

SEQ ID NO: 64522 - DNA, 72 bp, Homo sapiens
aaggagaaagggaaattctttatagaatagctagtgtttaatactttggactagcaacagatgagatgtatt

SEQ ID NO: 64523 - DNA, 73 bp, Homo sapiens
agggaaattctttatagaatagctagtgtttaatactttggactagcaacagatgagatgtattttagtacca

SEQ ID NO: 64524 - DNA, 73 bp, Homo sapiens
ttctttatagaatagctagtgtttaatactttggactagcaacagatgagatgtattttagtaccatattttt

SEQ ID NO: 64525 - DNA, 71 bp, Homo sapiens
agctagtgtttaatactttggactagcaacagatgagatgtattttagtaccatattttttggttaaagga

SEQ ID NO: 64526 - DNA, 71 bp, Homo sapiens
atactttggactagcaacagatgagatgtattttagtaccatattttttggttaaaggaatatatttggcc

SEQ ID NO: 64527 - DNA, 73 bp, Homo sapiens
tggactagcaacagatgagatgtattttagtaccatattttttggttaaaggaatatatttggcctctttcca

SEQ ID NO: 64528 - DNA, 70 bp, Homo sapiens
aacagatgagatgtattttagtaccatattttttggttaaaggaatatatttggcctctttccacctgcc

SEQ ID NO: 64529 - DNA, 64 bp, Homo sapiens
ttttagtaccatattttttggttaaaggaatatatttggcctctttccacctgccttaaaaagg

SEQ ID NO: 64530 - DNA, 66 bp, Homo sapiens
gtaccatattttttggttaaaggaatatatttggcctctttccacctgccttaaaaaggtgattct

SEQ ID NO: 64531 - DNA, 66 bp, Homo sapiens
ttggcctctttccacctgccttaaaaaggtgattctttttccatttcctactttaggaattataaa

SEQ ID NO: 64532 - DNA, 65 bp, Homo sapiens
ccacctgccttaaaaaggtgattctttttccatttcctactttaggaattataaatatgtctttt

SEQ ID NO: 64533 - DNA, 69 bp, Homo sapiens
aaggtgattctttttccatttcctactttaggaattataaatatgtctttttatggccacaggaagcaa

SEQ ID NO: 64534 - DNA, 69 bp, Homo sapiens
tttttccatttcctactttaggaattataaatatgtctttttatggccacaggaagcaatttgtaatgg

SEQ ID NO: 64535 - DNA, 74 bp, Homo sapiens
tcctactttaggaattataaatatgtctttttatggccacaggaagcaatttgtaatggtacaagcacaagtga

SEQ ID NO: 64536 - DNA, 76 bp, Homo sapiens
ttaggaattataaatatgtctttttatggccacaggaagcaatttgtaatggtacaagcacaagtgacaggagata

SEQ ID NO: 64537 - DNA, 76 bp, Homo sapiens
ataaatatgtctttttatggccacaggaagcaatttgtaatggtacaagcacaagtgacaggagatatctagtaaa

SEQ ID NO: 64538 - DNA, 76 bp, Homo sapiens
ttttatggccacaggaagcaatttgtaatggtacaagcacaagtgacaggagatatctagtaaagactttgaataa

SEQ ID NO: 64539 - DNA, 74 bp, Homo sapiens
aggaagcaatttgtaatggtacaagcacaagtgacaggagatatctagtaaagactttgaataagtggtagtag

SEQ ID NO: 64540 - DNA, 78 bp, Homo sapiens
tttgtaatggtacaagcacaagtgacaggagatatctagtaaagactttgaataagtggtagtagtgatatgtgataa

SEQ ID NO: 64541 - DNA, 81 bp, Homo sapiens
gtacaagcacaagtgacaggagatatctagtaaagactttgaataagtggtagtagtgatatgtgataatgtcacattata

SEQ ID NO: 64542 - DNA, 78 bp, Homo sapiens
cacaagtgacaggagatatctagtaaagactttgaataagtggtagtagtgatatgtgataatgtcacattataaaat

SEQ ID NO: 64543 - DNA, 74 bp, Homo sapiens
aggagatatctagtaaagactttgaataagtggtagtagtgatatgtgataatgtcacattataaaatttaaac

SEQ ID NO: 64544 - DNA, 74 bp, Homo sapiens
aagactttgaataagtggtagtagtgatatgtgataatgtcacattataaaatttaaactatgaagaattagga

SEQ ID NO: 64545 - DNA, 79 bp, Homo sapiens
tgaataagtggtagtagtgatatgtgataatgtcacattataaaatttaaactatgaagaattaggaccatagatcata

SEQ ID NO: 64546 - DNA, 77 bp, Homo sapiens
tggtagtagtgatatgtgataatgtcacattataaaatttaaactatgaagaattaggaccatagatcataaaacaa

SEQ ID NO: 64547 - DNA, 76 bp, Homo sapiens
gatatgtgataatgtcacattataaaatttaaactatgaagaattaggaccatagatcataaaacaaatttgttca

SEQ ID NO: 64548 - DNA, 74 bp, Homo sapiens
tgtcacattataaaatttaaactatgaagaattaggaccatagatcataaaacaaatttgttcattcaggaata

SEQ ID NO: 64549 - DNA, 72 bp, Homo sapiens
aatttaaactatgaagaattaggaccatagatcataaaacaaatttgttcattcaggaatatagagagaaag

SEQ ID NO: 64550 - DNA, 73 bp, Homo sapiens
gaattaggaccatagatcataaaacaaatttgttcattcaggaatatagagagaaagtgatttatttaaagtc

SEQ ID NO: 64551 - DNA, 72 bp, Homo sapiens
caaatttgttcattcaggaatatagagagaaagtgatttatttaaagtccatattaagataaatttgaatcc

SEQ ID NO: 64552 - DNA, 71 bp, Homo sapiens
ggaatatagagagaaagtgatttatttaaagtccatattaagataaatttgaatccttttatatactgttc

SEQ ID NO: 64553 - DNA, 71 bp, Homo sapiens
gagaaagtgatttatttaaagtccatattaagataaatttgaatccttttatatactgttcttatttatca

SEQ ID NO: 64554 - DNA, 68 bp, Homo sapiens
gtccatattaagataaatttgaatccttttatatactgttcttatttatcaattaaagtaaaaaatag

SEQ ID NO: 64555 - DNA, 69 bp, Homo sapiens
gaatccttttatatactgttcttatttatcaattaaagtaaaaaatagtttgatatcaaatttgaacca

SEQ ID NO: 64556 - DNA, 68 bp, Homo sapiens
ctgttcttatttatcaattaaagtaaaaaatagtttgatatcaaatttgaaccaaaaaagcagaatac

SEQ ID NO: 64557 - DNA, 71 bp, Homo sapiens
ttatcaattaaagtaaaaaatagtttgatatcaaatttgaaccaaaaaagcagaatactcaaatacaatga

SEQ ID NO: 64558 - DNA, 70 bp, Homo sapiens
aagtaaaaaatagtttgatatcaaatttgaaccaaaaaagcagaatactcaaatacaatgaggattccaa

SEQ ID NO: 64559 - DNA, 78 bp, Homo sapiens
tagtttgatatcaaatttgaaccaaaaaagcagaatactcaaatacaatgaggattccaaattatctgctatatcaca

SEQ ID NO: 64560 - DNA, 79 bp, Homo sapiens
tatcaaatttgaaccaaaaaagcagaatactcaaatacaatgaggattccaaattatctgctatatcacatgactagga

SEQ ID NO: 64561 - DNA, 76 bp, Homo sapiens
gaaccaaaaaagcagaatactcaaatacaatgaggattccaaattatctgctatatcacatgactaggaaagtaaa

SEQ ID NO: 64562 - DNA, 78 bp, Homo sapiens
aaagcagaatactcaaatacaatgaggattccaaattatctgctatatcacatgactaggaaagtaaattataagaga

SEQ ID NO: 64563 - DNA, 76 bp, Homo sapiens
caatgaggattccaaattatctgctatatcacatgactaggaaagtaaattataagagaataaatttcctcactta

SEQ ID NO: 64564 - DNA, 75 bp, Homo sapiens
ccaaattatctgctatatcacatgactaggaaagtaaattataagagaataaatttcctcacttatatcttttgc

SEQ ID NO: 64565 - DNA, 74 bp, Homo sapiens
ctgctatatcacatgactaggaaagtaaattataagagaataaatttcctcacttatatcttttgctttcttta

SEQ ID NO: 64566 - DNA, 70 bp, Homo sapiens
catgactaggaaagtaaattataagagaataaatttcctcacttatatcttttgctttctttaaattctg

SEQ ID NO: 64567 - DNA, 71 bp, Homo sapiens
gtaaattataagagaataaatttcctcacttatatcttttgctttctttaaattctgtaatgatttctcta

SEQ ID NO: 64568 - DNA, 73 bp, Homo sapiens
gagaataaatttcctcacttatatcttttgctttctttaaattctgtaatgatttctctaatgatcttactct

SEQ ID NO: 64569 - DNA, 73 bp, Homo sapiens
ttcctcacttatatcttttgctttctttaaattctgtaatgatttctctaatgatcttactctttaagataat

SEQ ID NO: 64570 - DNA, 76 bp, Homo sapiens
tatatcttttgctttctttaaattctgtaatgatttctctaatgatcttactctttaagataattgtgaatcttga

SEQ ID NO: 64571 - DNA, 77 bp, Homo sapiens
gctttctttaaattctgtaatgatttctctaatgatcttactctttaagataattgtgaatcttgattttcacatca

SEQ ID NO: 64572 - DNA, 77 bp, Homo sapiens
attctgtaatgatttctctaatgatcttactctttaagataattgtgaatcttgattttcacatcaactattttgtc

SEQ ID NO: 64573 - DNA, 79 bp, Homo sapiens
gtaatgatttctctaatgatcttactctttaagataattgtgaatcttgattttcacatcaactattttgtcttatgca

SEQ ID NO: 64574 - DNA, 75 bp, Homo sapiens
ctctaatgatcttactctttaagataattgtgaatcttgattttcacatcaactattttgtcttatgcaaatttt

SEQ ID NO: 64575 - DNA, 74 bp, Homo sapiens
tactctttaagataattgtgaatcttgattttcacatcaactattttgtcttatgcaaatttttaaacatacga

SEQ ID NO: 64576 - DNA, 71 bp, Homo sapiens
aagataattgtgaatcttgattttcacatcaactattttgtcttatgcaaatttttaaacatacgattttt

SEQ ID NO: 64577 - DNA, 70 bp, Homo sapiens
tgaatcttgattttcacatcaactattttgtcttatgcaaatttttaaacatacgatttttttcccccaa

SEQ ID NO: 64578 - DNA, 69 bp, Homo sapiens
cacatcaactattttgtcttatgcaaatttttaaacatacgatttttttcccccaagtaattgatactg

SEQ ID NO: 64579 - DNA, 68 bp, Homo sapiens
ttttgtcttatgcaaatttttaaacatacgatttttttcccccaagtaattgatactggaacaagaca

SEQ ID NO: 64580 - DNA, 67 bp, Homo sapiens
tgcaaatttttaaacatacgatttttttcccccaagtaattgatactggaacaagacaggtcaaacc

SEQ ID NO: 64581 - DNA, 67 bp, Homo sapiens
taaacatacgatttttttcccccaagtaattgatactggaacaagacaggtcaaacccgaaactcta

SEQ ID NO: 64582 - DNA, 69 bp, Homo sapiens
cccaagtaattgatactggaacaagacaggtcaaacccgaaactctaaggcatgttaacacctccttcc

SEQ ID NO: 64583 - DNA, 68 bp, Homo sapiens
aggtcaaacccgaaactctaaggcatgttaacacctccttcctagaagagaggaagaataaacattct

SEQ ID NO: 64584 - DNA, 70 bp, Homo sapiens
aaactctaaggcatgttaacacctccttcctagaagagaggaagaataaacattctttggatcctattgt

SEQ ID NO: 64585 - DNA, 73 bp, Homo sapiens
catgttaacacctccttcctagaagagaggaagaataaacattctttggatcctattgttcagccagttaaga

SEQ ID NO: 64586 - DNA, 74 bp, Homo sapiens
taacacctccttcctagaagagaggaagaataaacattctttggatcctattgttcagccagttaagaatcata

SEQ ID NO: 64587 - DNA, 75 bp, Homo sapiens
tcctagaagagaggaagaataaacattctttggatcctattgttcagccagttaagaatcatagttaatcacact

SEQ ID NO: 64588 - DNA, 73 bp, Homo sapiens
gaagaataaacattctttggatcctattgttcagccagttaagaatcatagttaatcacactttcttaccctg

SEQ ID NO: 64589 - DNA, 72 bp, Homo sapiens
attctttggatcctattgttcagccagttaagaatcatagttaatcacactttcttaccctgtccacggtaa

SEQ ID NO: 64590 - DNA, 72 bp, Homo sapiens
ttggatcctattgttcagccagttaagaatcatagttaatcacactttcttaccctgtccacggtaagaaac

SEQ ID NO: 64591 - DNA, 74 bp, Homo sapiens
ttgttcagccagttaagaatcatagttaatcacactttcttaccctgtccacggtaagaaactggtcagatgcc

SEQ ID NO: 64592 - DNA, 73 bp, Homo sapiens
agttaagaatcatagttaatcacactttcttaccctgtccacggtaagaaactggtcagatgccctgttgtga

SEQ ID NO: 64593 - DNA, 73 bp, Homo sapiens
atagttaatcacactttcttaccctgtccacggtaagaaactggtcagatgccctgttgtgatcaggattccc

SEQ ID NO: 64594 - DNA, 78 bp, Homo sapiens
tttcttaccctgtccacggtaagaaactggtcagatgccctgttgtgatcaggattccctgtgtctgtagcattcata

SEQ ID NO: 64595 - DNA, 81 bp, Homo sapiens
taccctgtccacggtaagaaactggtcagatgccctgttgtgatcaggattccctgtgtctgtagcattcatatctgtata

SEQ ID NO: 64596 - DNA, 83 bp, Homo sapiens
taagaaactggtcagatgccctgttgtgatcaggattccctgtgtctgtagcattcatatctgtatatagctgactggtttta

SEQ ID NO: 64597 - DNA, 82 bp, Homo sapiens
actggtcagatgccctgttgtgatcaggattccctgtgtctgtagcattcatatctgtatatagctgactggttttatttgg

SEQ ID NO: 64598 - DNA, 84 bp, Homo sapiens
tgttgtgatcaggattccctgtgtctgtagcattcatatctgtatatagctgactggttttatttggtgctgaaatctctgctt

SEQ ID NO: 64599 - DNA, 83 bp, Homo sapiens
tgtgtctgtagcattcatatctgtatatagctgactggttttatttggtgctgaaatctctgcttttcttcagagaccctgtc

SEQ ID NO: 64600 - DNA, 78 bp, Homo sapiens
cattcatatctgtatatagctgactggttttatttggtgctgaaatctctgcttttcttcagagaccctgtcttttta

SEQ ID NO: 64601 - DNA, 75 bp, Homo sapiens
atatctgtatatagctgactggttttatttggtgctgaaatctctgcttttcttcagagaccctgtctttttaac

SEQ ID NO: 64602 - DNA, 71 bp, Homo sapiens
tgactggttttatttggtgctgaaatctctgcttttcttcagagaccctgtctttttaaccttactcattt

SEQ ID NO: 64603 - DNA, 70 bp, Homo sapiens
ggttttatttggtgctgaaatctctgcttttcttcagagaccctgtctttttaaccttactcattttgta

SEQ ID NO: 64604 - DNA, 73 bp, Homo sapiens
tgaaatctctgcttttcttcagagaccctgtctttttaaccttactcattttgtattcccagtggctgacagg

SEQ ID NO: 64605 - DNA, 69 bp, Homo sapiens
agagaccctgtctttttaaccttactcattttgtattcccagtggctgacaggttacgttactatgtaa

SEQ ID NO: 64606 - DNA, 70 bp, Homo sapiens
tctttttaaccttactcattttgtattcccagtggctgacaggttacgttactatgtaagtggtagattc

SEQ ID NO: 64607 - DNA, 74 bp, Homo sapiens
taaccttactcattttgtattcccagtggctgacaggttacgttactatgtaagtggtagattctcagtctgta

SEQ ID NO: 64608 - DNA, 75 bp, Homo sapiens
tttgtattcccagtggctgacaggttacgttactatgtaagtggtagattctcagtctgtattggttgcaggaaa

SEQ ID NO: 64609 - DNA, 76 bp, Homo sapiens
agtggctgacaggttacgttactatgtaagtggtagattctcagtctgtattggttgcaggaaactaatgagtgaa

SEQ ID NO: 64610 - DNA, 75 bp, Homo sapiens
aggttacgttactatgtaagtggtagattctcagtctgtattggttgcaggaaactaatgagtgaatgaatagta

SEQ ID NO: 64611 - DNA, 76 bp, Homo sapiens
actatgtaagtggtagattctcagtctgtattggttgcaggaaactaatgagtgaatgaatagtataaaaagtgga

SEQ ID NO: 64612 - DNA, 76 bp, Homo sapiens
gtaagtggtagattctcagtctgtattggttgcaggaaactaatgagtgaatgaatagtataaaaagtggatataa

SEQ ID NO: 64613 - DNA, 77 bp, Homo sapiens
tcagtctgtattggttgcaggaaactaatgagtgaatgaatagtataaaaagtggatataaaattagctagttctga

SEQ ID NO: 64614 - DNA, 75 bp, Homo sapiens
tgcaggaaactaatgagtgaatgaatagtataaaaagtggatataaaattagctagttctgacttgtccttagta

SEQ ID NO: 64615 - DNA, 72 bp, Homo sapiens
gagtgaatgaatagtataaaaagtggatataaaattagctagttctgacttgtccttagtaaacttatggta

SEQ ID NO: 64616 - DNA, 70 bp, Homo sapiens
taaaaagtggatataaaattagctagttctgacttgtccttagtaaacttatggtagccgccaagttctc

SEQ ID NO: 64617 - DNA, 71 bp, Homo sapiens
ataaaattagctagttctgacttgtccttagtaaacttatggtagccgccaagttctcctctgaagccatt

SEQ ID NO: 64618 - DNA, 71 bp, Homo sapiens
ctagttctgacttgtccttagtaaacttatggtagccgccaagttctcctctgaagccatttttagaatta

SEQ ID NO: 64619 - DNA, 69 bp, Homo sapiens
agtaaacttatggtagccgccaagttctcctctgaagccatttttagaattacaaatttaaagtgatat

SEQ ID NO: 64620 - DNA, 77 bp, Homo sapiens
ttctcctctgaagccatttttagaattacaaatttaaagtgatattaaactgattgaatgtgtcttgcattcagaca

SEQ ID NO: 64621 - DNA, 74 bp, Homo sapiens
atttttagaattacaaatttaaagtgatattaaactgattgaatgtgtcttgcattcagacaaagaagagagaa

SEQ ID NO: 64622 - DNA, 80 bp, Homo sapiens
caaatttaaagtgatattaaactgattgaatgtgtcttgcattcagacaaagaagagagaaaatgtcatcattatgccaa

SEQ ID NO: 64623 - DNA, 85 bp, Homo sapiens
tgatattaaactgattgaatgtgtcttgcattcagacaaagaagagagaaaatgtcatcattatgccaattggtttgattgcaga

SEQ ID NO: 64624 - DNA, 83 bp, Homo sapiens
tgattgaatgtgtcttgcattcagacaaagaagagagaaaatgtcatcattatgccaattggtttgattgcagattttagatt

SEQ ID NO: 64625 - DNA, 82 bp, Homo sapiens
gaatgtgtcttgcattcagacaaagaagagagaaaatgtcatcattatgccaattggtttgattgcagattttagattttca

SEQ ID NO: 64626 - DNA, 79 bp, Homo sapiens
gcattcagacaaagaagagagaaaatgtcatcattatgccaattggtttgattgcagattttagattttcagtttctta

SEQ ID NO: 64627 - DNA, 75 bp, Homo sapiens
gaagagagaaaatgtcatcattatgccaattggtttgattgcagattttagattttcagtttcttataaattccc

SEQ ID NO: 64628 - DNA, 73 bp, Homo sapiens
aatgtcatcattatgccaattggtttgattgcagattttagattttcagtttcttataaattccctttcccat

SEQ ID NO: 64629 - DNA, 70 bp, Homo sapiens
cattatgccaattggtttgattgcagattttagattttcagtttcttataaattccctttcccatttccc

SEQ ID NO: 64630 - DNA, 69 bp, Homo sapiens
ttggtttgattgcagattttagattttcagtttcttataaattccctttcccatttcccttggtggctg

SEQ ID NO: 64631 - DNA, 69 bp, Homo sapiens
cagattttagattttcagtttcttataaattccctttcccatttcccttggtggctgtttcacacttca

SEQ ID NO: 64632 - DNA, 68 bp, Homo sapiens
gattttcagtttcttataaattccctttcccatttcccttggtggctgtttcacacttcagtattaaa

SEQ ID NO: 64633 - DNA, 69 bp, Homo sapiens
ttcttataaattccctttcccatttcccttggtggctgtttcacacttcagtattaaaaggatattctc

SEQ ID NO: 64634 - DNA, 70 bp, Homo sapiens
taaattccctttcccatttcccttggtggctgtttcacacttcagtattaaaaggatattctctctcaaa

SEQ ID NO: 64635 - DNA, 73 bp, Homo sapiens
ccatttcccttggtggctgtttcacacttcagtattaaaaggatattctctctcaaaattgtatattctgctt

SEQ ID NO: 64636 - DNA, 73 bp, Homo sapiens
ccttggtggctgtttcacacttcagtattaaaaggatattctctctcaaaattgtatattctgctttataaag

SEQ ID NO: 64637 - DNA, 74 bp, Homo sapiens
tgtttcacacttcagtattaaaaggatattctctctcaaaattgtatattctgctttataaagtaaatgcttta

SEQ ID NO: 64638 - DNA, 72 bp, Homo sapiens
aaggatattctctctcaaaattgtatattctgctttataaagtaaatgctttaatttcccaagcaaatatta

SEQ ID NO: 64639 - DNA, 70 bp, Homo sapiens
ctctctcaaaattgtatattctgctttataaagtaaatgctttaatttcccaagcaaatattatttaaaa

SEQ ID NO: 64640 - DNA, 70 bp, Homo sapiens
ctgctttataaagtaaatgctttaatttcccaagcaaatattatttaaaaaatcagtcacagcaaaccta

SEQ ID NO: 64641 - DNA, 66 bp, Homo sapiens
agtaaatgctttaatttcccaagcaaatattatttaaaaaatcagtcacagcaaacctaaaaattt

SEQ ID NO: 64642 - DNA, 69 bp, Homo sapiens
tttcccaagcaaatattatttaaaaaatcagtcacagcaaacctaaaaattttttatcttagtgtatga

SEQ ID NO: 64643 - DNA, 69 bp, Homo sapiens
gcaaatattatttaaaaaatcagtcacagcaaacctaaaaattttttatcttagtgtatgacagttact

SEQ ID NO: 64644 - DNA, 73 bp, Homo sapiens
taaaaaatcagtcacagcaaacctaaaaattttttatcttagtgtatgacagttacttgtagagcatataata

SEQ ID NO: 64645 - DNA, 75 bp, Homo sapiens
cagtcacagcaaacctaaaaattttttatcttagtgtatgacagttacttgtagagcatataatagtgtctagga

SEQ ID NO: 64646 - DNA, 72 bp, Homo sapiens
acctaaaaattttttatcttagtgtatgacagttacttgtagagcatataatagtgtctaggataattctgg

SEQ ID NO: 64647 - DNA, 74 bp, Homo sapiens
aaaattttttatcttagtgtatgacagttacttgtagagcatataatagtgtctaggataattctggttctaga

SEQ ID NO: 64648 - DNA, 71 bp, Homo sapiens
ggttctagatctttaattttgcaaacttcaagaagaagcttatcattgttttcttcaaaaataattgtcta

SEQ ID NO: 64649 - DNA, 70 bp, Homo sapiens
ctttaattttgcaaacttcaagaagaagcttatcattgttttcttcaaaaataattgtctaacctattga

SEQ ID NO: 64650 - DNA, 75 bp, Homo sapiens
tgcaaacttcaagaagaagcttatcattgttttcttcaaaaataattgtctaacctattgatttatgacatactg

SEQ ID NO: 64651 - DNA, 75 bp, Homo sapiens
tcaagaagaagcttatcattgttttcttcaaaaataattgtctaacctattgatttatgacatactggagttgta

SEQ ID NO: 64652 - DNA, 74 bp, Homo sapiens
gcttatcattgttttcttcaaaaataattgtctaacctattgatttatgacatactggagttgtataagaaatg

SEQ ID NO: 64653 - DNA, 74 bp, Homo sapiens
ttcttcaaaaataattgtctaacctattgatttatgacatactggagttgtataagaaatgtgttggccaggtg

SEQ ID NO: 64654 - DNA, 73 bp, Homo sapiens
aatttaatacatgccaatatcaattaatagttttttactaacttagatatggatatgtgtgtgccacaaaaat

SEQ ID NO: 64655 - DNA, 76 bp, Homo sapiens
catgccaatatcaattaatagttttttactaacttagatatggatatgtgtgtgccacaaaaattatgaaactgag

SEQ ID NO: 64656 - DNA, 72 bp, Homo sapiens
atcaattaatagttttttactaacttagatatggatatgtgtgtgccacaaaaattatgaaactgaggaaaa

SEQ ID NO: 64657 - DNA, 72 bp, Homo sapiens
aatagttttttactaacttagatatggatatgtgtgtgccacaaaaattatgaaactgaggaaaatacttga

SEQ ID NO: 64658 - DNA, 74 bp, Homo sapiens
tactaacttagatatggatatgtgtgtgccacaaaaattatgaaactgaggaaaatacttgaaaaggtggaggc

SEQ ID NO: 64659 - DNA, 77 bp, Homo sapiens
atatggatatgtgtgtgccacaaaaattatgaaactgaggaaaatacttgaaaaggtggaggctgcatcaggattta

SEQ ID NO: 64660 - DNA, 75 bp, Homo sapiens
tgtgccacaaaaattatgaaactgaggaaaatacttgaaaaggtggaggctgcatcaggatttacctctgaagaa

SEQ ID NO: 64661 - DNA, 70 bp, Homo sapiens
aaaattatgaaactgaggaaaatacttgaaaaggtggaggctgcatcaggatttacctctgaagaaaaag

SEQ ID NO: 64662 - DNA, 72 bp, Homo sapiens
aactgaggaaaatacttgaaaaggtggaggctgcatcaggatttacctctgaagaaaaaggtgaccatctta

SEQ ID NO: 64663 - DNA, 71 bp, Homo sapiens
aaaatacttgaaaaggtggaggctgcatcaggatttacctctgaagaaaaaggtgaccatcttaacttata

SEQ ID NO: 64664 - DNA, 72 bp, Homo sapiens
aggtggaggctgcatcaggatttacctctgaagaaaaaggtgaccatcttaacttatatgcgttaaaaataa

SEQ ID NO: 64665 - DNA, 75 bp, Homo sapiens
ctgcatcaggatttacctctgaagaaaaaggtgaccatcttaacttatatgcgttaaaaataactgaagagcata

SEQ ID NO: 64666 - DNA, 73 bp, Homo sapiens
ggatttacctctgaagaaaaaggtgaccatcttaacttatatgcgttaaaaataactgaagagcatattcaca

SEQ ID NO: 64667 - DNA, 74 bp, Homo sapiens
agaaaaaggtgaccatcttaacttatatgcgttaaaaataactgaagagcatattcacatgtcaaagtattagc

SEQ ID NO: 64668 - DNA, 78 bp, Homo sapiens
acttatatgcgttaaaaataactgaagagcatattcacatgtcaaagtattagctgaaatgtgtgtctgtgtagttgg

SEQ ID NO: 64669 - DNA, 74 bp, Homo sapiens
gttaaaaataactgaagagcatattcacatgtcaaagtattagctgaaatgtgtgtctgtgtagttggggggtt

SEQ ID NO: 64670 - DNA, 74 bp, Homo sapiens
aaataactgaagagcatattcacatgtcaaagtattagctgaaatgtgtgtctgtgtagttggggggttttctt

SEQ ID NO: 64671 - DNA, 74 bp, Homo sapiens
agagcatattcacatgtcaaagtattagctgaaatgtgtgtctgtgtagttggggggttttcttttaaattaga

SEQ ID NO: 64672 - DNA, 70 bp, Homo sapiens
cacatgtcaaagtattagctgaaatgtgtgtctgtgtagttggggggttttcttttaaattagaaatttc

SEQ ID NO: 64673 - DNA, 67 bp, Homo sapiens
gtattagctgaaatgtgtgtctgtgtagttggggggttttcttttaaattagaaatttctttttatg

SEQ ID NO: 64674 - DNA, 68 bp, Homo sapiens
gtgtgtctgtgtagttggggggttttcttttaaattagaaatttctttttatgtgatatatggttagc

SEQ ID NO: 64675 - DNA, 67 bp, Homo sapiens
ctgtgtagttggggggttttcttttaaattagaaatttctttttatgtgatatatggttagctcctc

SEQ ID NO: 64676 - DNA, 65 bp, Homo sapiens
gggttttcttttaaattagaaatttctttttatgtgatatatggttagctcctctttttgtaaat

SEQ ID NO: 64677 - DNA, 70 bp, Homo sapiens
taaattagaaatttctttttatgtgatatatggttagctcctctttttgtaaattcttcctctcttctaa

SEQ ID NO: 64678 - DNA, 77 bp, Homo sapiens
atgtgatatatggttagctcctctttttgtaaattcttcctctcttctaaaagtgattgatgatgtggaataatgaa

SEQ ID NO: 64679 - DNA, 75 bp, Homo sapiens
tatatggttagctcctctttttgtaaattcttcctctcttctaaaagtgattgatgatgtggaataatgaactcc

SEQ ID NO: 64680 - DNA, 74 bp, Homo sapiens
tttgtaaattcttcctctcttctaaaagtgattgatgatgtggaataatgaactcctttaagaagctggctggt

SEQ ID NO: 64681 - DNA, 76 bp, Homo sapiens
tcctctcttctaaaagtgattgatgatgtggaataatgaactcctttaagaagctggctggttctagtatattaaa

SEQ ID NO: 64682 - DNA, 75 bp, Homo sapiens
ctaaaagtgattgatgatgtggaataatgaactcctttaagaagctggctggttctagtatattaaatgcttaaa

SEQ ID NO: 64683 - DNA, 73 bp, Homo sapiens
gatgatgtggaataatgaactcctttaagaagctggctggttctagtatattaaatgcttaaataaaaagtcc

SEQ ID NO: 64684 - DNA, 67 bp, Homo sapiens
ctcctttaagaagctggctggttctagtatattaaatgcttaaataaaaagtcctttcctttccacc

SEQ ID NO: 64685 - DNA, 72 bp, Homo sapiens
gaagctggctggttctagtatattaaatgcttaaataaaaagtcctttcctttccacctagcaatgatattc

SEQ ID NO: 64686 - DNA, 71 bp, Homo sapiens
tggttctagtatattaaatgcttaaataaaaagtcctttcctttccacctagcaatgatattctcagttgt

SEQ ID NO: 64687 - DNA, 73 bp, Homo sapiens
aaatgcttaaataaaaagtcctttcctttccacctagcaatgatattctcagttgtttctctcttgtggtgca

SEQ ID NO: 64688 - DNA, 72 bp, Homo sapiens
cttaaataaaaagtcctttcctttccacctagcaatgatattctcagttgtttctctcttgtggtgcagagt

SEQ ID NO: 64689 - DNA, 76 bp, Homo sapiens
ctttcctttccacctagcaatgatattctcagttgtttctctcttgtggtgcagagttgcattgggttttctacat

SEQ ID NO: 64690 - DNA, 76 bp, Homo sapiens
ctttccacctagcaatgatattctcagttgtttctctcttgtggtgcagagttgcattgggttttctacattttcc

SEQ ID NO: 64691 - DNA, 76 bp, Homo sapiens
aatgatattctcagttgtttctctcttgtggtgcagagttgcattgggttttctacattttcccactgagtcttcc

SEQ ID NO: 64692 - DNA, 73 bp, Homo sapiens
agttgtttctctcttgtggtgcagagttgcattgggttttctacattttcccactgagtcttccctgttgtaa

SEQ ID NO: 64693 - DNA, 72 bp, Homo sapiens
tttctctcttgtggtgcagagttgcattgggttttctacattttcccactgagtcttccctgttgtaaaagg

SEQ ID NO: 64694 - DNA, 71 bp, Homo sapiens
tggtgcagagttgcattgggttttctacattttcccactgagtcttccctgttgtaaaagggagttagaaa

SEQ ID NO: 64695 - DNA, 68 bp, Homo sapiens
attgggttttctacattttcccactgagtcttccctgttgtaaaagggagttagaaagctgctaacta

SEQ ID NO: 64696 - DNA, 69 bp, Homo sapiens
tctacattttcccactgagtcttccctgttgtaaaagggagttagaaagctgctaactaggattaagtt

SEQ ID NO: 64697 - DNA, 68 bp, Homo sapiens
ttttcccactgagtcttccctgttgtaaaagggagttagaaagctgctaactaggattaagtttatag

SEQ ID NO: 64698 - DNA, 69 bp, Homo sapiens
ttccctgttgtaaaagggagttagaaagctgctaactaggattaagtttatagtcagggaacagtgtta

SEQ ID NO: 64699 - DNA, 70 bp, Homo sapiens
taaaagggagttagaaagctgctaactaggattaagtttatagtcagggaacagtgttataatctcttcc

SEQ ID NO: 64700 - DNA, 72 bp, Homo sapiens
agttagaaagctgctaactaggattaagtttatagtcagggaacagtgttataatctcttcctagctaatgg

SEQ ID NO: 64701 - DNA, 75 bp, Homo sapiens
ttatagtcagggaacagtgttataatctcttcctagctaatgggcttactcaaagattcaccacctgactttgaa

SEQ ID NO: 64702 - DNA, 78 bp, Homo sapiens
ttataatctcttcctagctaatgggcttactcaaagattcaccacctgactttgaatttgtcagcagcatactgtaaa

SEQ ID NO: 64703 - DNA, 81 bp, Homo sapiens
tagctaatgggcttactcaaagattcaccacctgactttgaatttgtcagcagcatactgtaaacagctgtaatgttcaga

SEQ ID NO: 64704 - DNA, 79 bp, Homo sapiens
aatgggcttactcaaagattcaccacctgactttgaatttgtcagcagcatactgtaaacagctgtaatgttcagaggc

SEQ ID NO: 64705 - DNA, 78 bp, Homo sapiens
aaagattcaccacctgactttgaatttgtcagcagcatactgtaaacagctgtaatgttcagaggcttgcaggaaaaa

SEQ ID NO: 64706 - DNA, 79 bp, Homo sapiens
acctgactttgaatttgtcagcagcatactgtaaacagctgtaatgttcagaggcttgcaggaaaaaacagagcatact

SEQ ID NO: 64707 - DNA, 82 bp, Homo sapiens
tttgaatttgtcagcagcatactgtaaacagctgtaatgttcagaggcttgcaggaaaaaacagagcatacttcagattgta

SEQ ID NO: 64708 - DNA, 80 bp, Homo sapiens
agcagcatactgtaaacagctgtaatgttcagaggcttgcaggaaaaaacagagcatacttcagattgtactccatttac

SEQ ID NO: 64709 - DNA, 77 bp, Homo sapiens
tactgtaaacagctgtaatgttcagaggcttgcaggaaaaaacagagcatacttcagattgtactccatttacctta

SEQ ID NO: 64710 - DNA, 73 bp, Homo sapiens
taatgttcagaggcttgcaggaaaaaacagagcatacttcagattgtactccatttaccttaacccctccaaa

SEQ ID NO: 64711 - DNA, 69 bp, Homo sapiens
gaaaaaacagagcatacttcagattgtactccatttaccttaacccctccaaaggaaataacagctatt

SEQ ID NO: 64712 - DNA, 72 bp, Homo sapiens
aacagagcatacttcagattgtactccatttaccttaacccctccaaaggaaataacagctatttcattatg

SEQ ID NO: 64713 - DNA, 74 bp, Homo sapiens
ttcagattgtactccatttaccttaacccctccaaaggaaataacagctatttcattatgtgcaatgtgttaca

SEQ ID NO: 64714 - DNA, 71 bp, Homo sapiens
tccatttaccttaacccctccaaaggaaataacagctatttcattatgtgcaatgtgttacaccctttcaa

SEQ ID NO: 64715 - DNA, 70 bp, Homo sapiens
accttaacccctccaaaggaaataacagctatttcattatgtgcaatgtgttacaccctttcaaatgtaa

SEQ ID NO: 64716 - DNA, 74 bp, Homo sapiens
cctccaaaggaaataacagctatttcattatgtgcaatgtgttacaccctttcaaatgtaataaactcacaaca

SEQ ID NO: 64717 - DNA, 74 bp, Homo sapiens
aataacagctatttcattatgtgcaatgtgttacaccctttcaaatgtaataaactcacaacaaaattgaaaca

SEQ ID NO: 64718 - DNA, 74 bp, Homo sapiens
atttcattatgtgcaatgtgttacaccctttcaaatgtaataaactcacaacaaaattgaaacataatacttga

SEQ ID NO: 64719 - DNA, 72 bp, Homo sapiens
gtgcaatgtgttacaccctttcaaatgtaataaactcacaacaaaattgaaacataatacttgattataact

SEQ ID NO: 64720 - DNA, 70 bp, Homo sapiens
caccctttcaaatgtaataaactcacaacaaaattgaaacataatacttgattataacttattaaatgtc

SEQ ID NO: 64721 - DNA, 71 bp, Homo sapiens
tcaaatgtaataaactcacaacaaaattgaaacataatacttgattataacttattaaatgtcttttatgt

SEQ ID NO: 64722 - DNA, 70 bp, Homo sapiens
ctcacaacaaaattgaaacataatacttgattataacttattaaatgtcttttatgtttttcctttgtca

SEQ ID NO: 64723 - DNA, 67 bp, Homo sapiens
aattgaaacataatacttgattataacttattaaatgtcttttatgtttttcctttgtcaggaaaac

SEQ ID NO: 64724 - DNA, 67 bp, Homo sapiens
cttgattataacttattaaatgtcttttatgtttttcctttgtcaggaaaacttgaaaactgtgctt

SEQ ID NO: 64725 - DNA, 66 bp, Homo sapiens
acttattaaatgtcttttatgtttttcctttgtcaggaaaacttgaaaactgtgcttttaattgaa

SEQ ID NO: 64726 - DNA, 69 bp, Homo sapiens
gtcttttatgtttttcctttgtcaggaaaacttgaaaactgtgcttttaattgaaataatattggatga

SEQ ID NO: 64727 - DNA, 72 bp, Homo sapiens
ttcctttgtcaggaaaacttgaaaactgtgcttttaattgaaataatattggatgaatgaaactgaattcag

SEQ ID NO: 64728 - DNA, 71 bp, Homo sapiens
attgaaataatattggatgaatgaaactgaattcagtattaaaatttgactgttagaaatgaaaaataaaa

SEQ ID NO: 64729 - DNA, 72 bp, Homo sapiens
ttgatttttaaattttctcctagatcctgaggaattcttgaatattctgtttcatcatattttaagggtaga

SEQ ID NO: 64730 - DNA, 72 bp, Homo sapiens
aattttctcctagatcctgaggaattcttgaatattctgtttcatcatattttaagggtagaacctttgcta

SEQ ID NO: 64731 - DNA, 72 bp, Homo sapiens
ctcctagatcctgaggaattcttgaatattctgtttcatcatattttaagggtagaacctttgctaaaaata

SEQ ID NO: 64732 - DNA, 69 bp, Homo sapiens
cctgaggaattcttgaatattctgtttcatcatattttaagggtagaacctttgctaaaaataaggtaa

SEQ ID NO: 64733 - DNA, 66 bp, Homo sapiens
gaatattctgtttcatcatattttaagggtagaacctttgctaaaaataaggtaacctttaaattg

SEQ ID NO: 64734 - DNA, 67 bp, Homo sapiens
ttcatcatattttaagggtagaacctttgctaaaaataaggtaacctttaaattgttctagaagcat

SEQ ID NO: 64735 - DNA, 66 bp, Homo sapiens
catattttaagggtagaacctttgctaaaaataaggtaacctttaaattgttctagaagcattgga

SEQ ID NO: 64736 - DNA, 66 bp, Homo sapiens
gggtagaacctttgctaaaaataaggtaacctttaaattgttctagaagcattggaaaaatagaca

SEQ ID NO: 64737 - DNA, 73 bp, Homo sapiens
gcatttgataaataggttgtatgtatttttttctctgcgtgtttttagatcagcaggtcaaaaggtacaagat

SEQ ID NO: 64738 - DNA, 71 bp, Homo sapiens
ataggttgtatgtatttttttctctgcgtgtttttagatcagcaggtcaaaaggtacaagattgttacttc

SEQ ID NO: 64739 - DNA, 70 bp, Homo sapiens
gtatttttttctctgcgtgtttttagatcagcaggtcaaaaggtacaagattgttacttctatcaaattt

SEQ ID NO: 64740 - DNA, 72 bp, Homo sapiens
tttttctctgcgtgtttttagatcagcaggtcaaaaggtacaagattgttacttctatcaaatttttatgga

SEQ ID NO: 64741 - DNA, 68 bp, Homo sapiens
cgtgtttttagatcagcaggtcaaaaggtacaagattgttacttctatcaaatttttatggaaaaaaa

SEQ ID NO: 64742 - DNA, 69 bp, Homo sapiens
cagcaggtcaaaaggtacaagattgttacttctatcaaatttttatggaaaaaaatgagaaagttggcg

SEQ ID NO: 64743 - DNA, 67 bp, Homo sapiens
aggtacaagattgttacttctatcaaatttttatggaaaaaaatgagaaagttggcgttcccacaat

SEQ ID NO: 64744 - DNA, 70 bp, Homo sapiens
caagattgttacttctatcaaatttttatggaaaaaaatgagaaagttggcgttcccacaattcagcagt

SEQ ID NO: 64745 - DNA, 70 bp, Homo sapiens
ctatcaaatttttatggaaaaaaatgagaaagttggcgttcccacaattcagcagttgttagaatggtct

SEQ ID NO: 64746 - DNA, 72 bp, Homo sapiens
ttatggaaaaaaatgagaaagttggcgttcccacaattcagcagttgttagaatggtcttttatcaacagta

SEQ ID NO: 64747 - DNA, 71 bp, Homo sapiens
aaatgagaaagttggcgttcccacaattcagcagttgttagaatggtcttttatcaacagtaacctgaaat

SEQ ID NO: 64748 - DNA, 73 bp, Homo sapiens
agaaagttggcgttcccacaattcagcagttgttagaatggtcttttatcaacagtaacctgaaatttgcaga

SEQ ID NO: 64749 - DNA, 76 bp, Homo sapiens
ttcccacaattcagcagttgttagaatggtcttttatcaacagtaacctgaaatttgcagaggttagtgatactca

SEQ ID NO: 64750 - DNA, 74 bp, Homo sapiens
gcagttgttagaatggtcttttatcaacagtaacctgaaatttgcagaggttagtgatactcacctgtggtatt

SEQ ID NO: 64751 - DNA, 75 bp, Homo sapiens
tagaatggtcttttatcaacagtaacctgaaatttgcagaggttagtgatactcacctgtggtattttatgtgaa

SEQ ID NO: 64752 - DNA, 75 bp, Homo sapiens
tgttttttttaacactttgattctaaaaatatctgtcttttttataggcaccatcatgtctgattattcagatgc

SEQ ID NO: 64753 - DNA, 77 bp, Homo sapiens
acactttgattctaaaaatatctgtcttttttataggcaccatcatgtctgattattcagatgcctcgatttggaaa

SEQ ID NO: 64754 - DNA, 76 bp, Homo sapiens
gattctaaaaatatctgtcttttttataggcaccatcatgtctgattattcagatgcctcgatttggaaaagactt

SEQ ID NO: 64755 - DNA, 75 bp, Homo sapiens
tctgtcttttttataggcaccatcatgtctgattattcagatgcctcgatttggaaaagactttaaactatttaa

SEQ ID NO: 64756 - DNA, 72 bp, Homo sapiens
cttttttataggcaccatcatgtctgattattcagatgcctcgatttggaaaagactttaaactatttaaaa

SEQ ID NO: 64757 - DNA, 67 bp, Homo sapiens
aaaaatttttccttctctggaattaaatataacagatttacttgaagacagtaagtatgagattttt

SEQ ID NO: 64758 - DNA, 69 bp, Homo sapiens
ttttccttctctggaattaaatataacagatttacttgaagacagtaagtatgagatttttttagtttg

SEQ ID NO: 64759 - DNA, 69 bp, Homo sapiens
tctggaattaaatataacagatttacttgaagacagtaagtatgagatttttttagtttgttttgttgg

SEQ ID NO: 64760 - DNA, 70 bp, Homo sapiens
tttttttaaagtcctcttaacttcccttccccttctcacatttcagctcccagacagtgccggatatgtg

SEQ ID NO: 64761 - DNA, 72 bp, Homo sapiens
ttaaagtcctcttaacttcccttccccttctcacatttcagctcccagacagtgccggatatgtggagggct

SEQ ID NO: 64762 - DNA, 78 bp, Homo sapiens
ttaacttcccttccccttctcacatttcagctcccagacagtgccggatatgtggagggcttgcaatgtatgagtgta

SEQ ID NO: 64763 - DNA, 83 bp, Homo sapiens
ccttctcacatttcagctcccagacagtgccggatatgtggagggcttgcaatgtatgagtgtagagaatgctacgacgatcc

SEQ ID NO: 64764 - DNA, 84 bp, Homo sapiens
atttcagctcccagacagtgccggatatgtggagggcttgcaatgtatgagtgtagagaatgctacgacgatccggacatctca

SEQ ID NO: 64765 - DNA, 83 bp, Homo sapiens
cagacagtgccggatatgtggagggcttgcaatgtatgagtgtagagaatgctacgacgatccggacatctcagctggaaaaa

SEQ ID NO: 64766 - DNA, 82 bp, Homo sapiens
agtgccggatatgtggagggcttgcaatgtatgagtgtagagaatgctacgacgatccggacatctcagctggaaaaatcaa

SEQ ID NO: 64767 - DNA, 80 bp, Homo sapiens
gagggcttgcaatgtatgagtgtagagaatgctacgacgatccggacatctcagctggaaaaatcaagcagttttgtaaa

SEQ ID NO: 64768 - DNA, 78 bp, Homo sapiens
aatgtatgagtgtagagaatgctacgacgatccggacatctcagctggaaaaatcaagcagttttgtaaaacctgcaa

SEQ ID NO: 64769 - DNA, 77 bp, Homo sapiens
agtgtagagaatgctacgacgatccggacatctcagctggaaaaatcaagcagttttgtaaaacctgcaacactcaa

SEQ ID NO: 64770 - DNA, 77 bp, Homo sapiens
agaatgctacgacgatccggacatctcagctggaaaaatcaagcagttttgtaaaacctgcaacactcaagtgagct

SEQ ID NO: 64771 - DNA, 75 bp, Homo sapiens
atccggacatctcagctggaaaaatcaagcagttttgtaaaacctgcaacactcaagtgagcttcccttcactta

SEQ ID NO: 64772 - DNA, 75 bp, Homo sapiens
tctcagctggaaaaatcaagcagttttgtaaaacctgcaacactcaagtgagcttcccttcacttaatggataaa

SEQ ID NO: 64773 - DNA, 70 bp, Homo sapiens
aaatcaagcagttttgtaaaacctgcaacactcaagtgagcttcccttcacttaatggataaacttttgt

SEQ ID NO: 64774 - DNA, 77 bp, Homo sapiens
tccaccagcctcggcctaatgacattcttttcatggtccattttaggtccaccttcatccgaagaggctgaatcata

SEQ ID NO: 64775 - DNA, 75 bp, Homo sapiens
ctcggcctaatgacattcttttcatggtccattttaggtccaccttcatccgaagaggctgaatcataaatataa

SEQ ID NO: 64776 - DNA, 74 bp, Homo sapiens
aatgacattcttttcatggtccattttaggtccaccttcatccgaagaggctgaatcataaatataacccagtg

SEQ ID NO: 64777 - DNA, 74 bp, Homo sapiens
ttcatggtccattttaggtccaccttcatccgaagaggctgaatcataaatataacccagtgtcacttcccaaa

SEQ ID NO: 64778 - DNA, 71 bp, Homo sapiens
attttaggtccaccttcatccgaagaggctgaatcataaatataacccagtgtcacttcccaaagacttac

SEQ ID NO: 64779 - DNA, 71 bp, Homo sapiens
accttcatccgaagaggctgaatcataaatataacccagtgtcacttcccaaagacttacccgactgggac

SEQ ID NO: 64780 - DNA, 73 bp, Homo sapiens
atccgaagaggctgaatcataaatataacccagtgtcacttcccaaagacttacccgactgggactggagaca

SEQ ID NO: 64781 - DNA, 72 bp, Homo sapiens
aatcataaatataacccagtgtcacttcccaaagacttacccgactgggactggagacacggctgcatccct

SEQ ID NO: 64782 - DNA, 74 bp, Homo sapiens
atataacccagtgtcacttcccaaagacttacccgactgggactggagacacggctgcatcccttgccagaata

SEQ ID NO: 64783 - DNA, 74 bp, Homo sapiens
agtgtcacttcccaaagacttacccgactgggactggagacacggctgcatcccttgccagaatatggagttat

SEQ ID NO: 64784 - DNA, 75 bp, Homo sapiens
ttcccaaagacttacccgactgggactggagacacggctgcatcccttgccagaatatggagttatttgctgttc

SEQ ID NO: 64785 - DNA, 79 bp, Homo sapiens
ttacccgactgggactggagacacggctgcatcccttgccagaatatggagttatttgctgttctctgcatagaaacaa

SEQ ID NO: 64786 - DNA, 81 bp, Homo sapiens
actggagacacggctgcatcccttgccagaatatggagttatttgctgttctctgcatagaaacaagccactatgttgctt

SEQ ID NO: 64787 - DNA, 81 bp, Homo sapiens
acacggctgcatcccttgccagaatatggagttatttgctgttctctgcatagaaacaagccactatgttgcttttgtgaa

SEQ ID NO: 64788 - DNA, 79 bp, Homo sapiens
atcccttgccagaatatggagttatttgctgttctctgcatagaaacaagccactatgttgcttttgtgaagtatggga

SEQ ID NO: 64789 - DNA, 77 bp, Homo sapiens
aatatggagttatttgctgttctctgcatagaaacaagccactatgttgcttttgtgaagtatgggaaggacgattc

SEQ ID NO: 64790 - DNA, 79 bp, Homo sapiens
ttatttgctgttctctgcatagaaacaagccactatgttgcttttgtgaagtatgggaaggacgattctgcctggctct

SEQ ID NO: 64791 - DNA, 80 bp, Homo sapiens
tgttctctgcatagaaacaagccactatgttgcttttgtgaagtatgggaaggacgattctgcctggctcttctttgaca

SEQ ID NO: 64792 - DNA, 78 bp, Homo sapiens
atagaaacaagccactatgttgcttttgtgaagtatgggaaggacgattctgcctggctcttctttgacagcatggcc

SEQ ID NO: 64793 - DNA, 80 bp, Homo sapiens
tatgttgcttttgtgaagtatgggaaggacgattctgcctggctcttctttgacagcatggccgatcgggatggtactga

SEQ ID NO: 64794 - DNA, 76 bp, Homo sapiens
ttttgtgaagtatgggaaggacgattctgcctggctcttctttgacagcatggccgatcgggatggtactgaaaac

SEQ ID NO: 64795 - DNA, 74 bp, Homo sapiens
aagtatgggaaggacgattctgcctggctcttctttgacagcatggccgatcgggatggtactgaaaacgcctt

SEQ ID NO: 64796 - DNA, 80 bp, Homo sapiens
aggacgattctgcctggctcttctttgacagcatggccgatcgggatggtactgaaaacgcctttcttctgcatgtggca

SEQ ID NO: 64797 - DNA, 75 bp, Homo sapiens
aggtgtgactctcatgttcctccattcttataccctatttttcctttagctgctctctcagatccagcccccacg

SEQ ID NO: 64798 - DNA, 73 bp, Homo sapiens
atgttcctccattcttataccctatttttcctttagctgctctctcagatccagcccccacggccttctggtg

SEQ ID NO: 64799 - DNA, 73 bp, Homo sapiens
attcttataccctatttttcctttagctgctctctcagatccagcccccacggccttctggtgtggccctcca

SEQ ID NO: 64800 - DNA, 74 bp, Homo sapiens
cctatttttcctttagctgctctctcagatccagcccccacggccttctggtgtggccctccagtagcctaaga

SEQ ID NO: 64801 - DNA, 75 bp, Homo sapiens
ttttcctttagctgctctctcagatccagcccccacggccttctggtgtggccctccagtagcctaagacattcc

SEQ ID NO: 64802 - DNA, 78 bp, Homo sapiens
tctctcagatccagcccccacggccttctggtgtggccctccagtagcctaagacattccctgtggcagcctcttgaa

SEQ ID NO: 64803 - DNA, 76 bp, Homo sapiens
agatccagcccccacggccttctggtgtggccctccagtagcctaagacattccctgtggcagcctcttgaacaga

SEQ ID NO: 64804 - DNA, 75 bp, Homo sapiens
cggccttctggtgtggccctccagtagcctaagacattccctgtggcagcctcttgaacagaggcccaggcccta

SEQ ID NO: 64805 - DNA, 78 bp, Homo sapiens
ttctggtgtggccctccagtagcctaagacattccctgtggcagcctcttgaacagaggcccaggccctagatcaaga

SEQ ID NO: 64806 - DNA, 76 bp, Homo sapiens
tccagtagcctaagacattccctgtggcagcctcttgaacagaggcccaggccctagatcaagagttctccacctt

SEQ ID NO: 64807 - DNA, 76 bp, Homo sapiens
taagacattccctgtggcagcctcttgaacagaggcccaggccctagatcaagagttctccaccttttctcagttc

SEQ ID NO: 64808 - DNA, 78 bp, Homo sapiens
attccctgtggcagcctcttgaacagaggcccaggccctagatcaagagttctccaccttttctcagttctctgatgc

SEQ ID NO: 64809 - DNA, 78 bp, Homo sapiens
cctcttgaacagaggcccaggccctagatcaagagttctccaccttttctcagttctctgatgcttgagggatacatc

SEQ ID NO: 64810 - DNA, 77 bp, Homo sapiens
aacagaggcccaggccctagatcaagagttctccaccttttctcagttctctgatgcttgagggatacatcccagcc

SEQ ID NO: 64811 - DNA, 79 bp, Homo sapiens
aggccctagatcaagagttctccaccttttctcagttctctgatgcttgagggatacatcccagccccatctgtagatg

SEQ ID NO: 64812 - DNA, 79 bp, Homo sapiens
atcaagagttctccaccttttctcagttctctgatgcttgagggatacatcccagccccatctgtagatgtgcccccaa

SEQ ID NO: 64813 - DNA, 76 bp, Homo sapiens
accttttctcagttctctgatgcttgagggatacatcccagccccatctgtagatgtgcccccaacccagttaaca

SEQ ID NO: 64814 - DNA, 77 bp, Homo sapiens
agttctctgatgcttgagggatacatcccagccccatctgtagatgtgcccccaacccagttaacatttgcactaaa

SEQ ID NO: 64815 - DNA, 76 bp, Homo sapiens
atgcttgagggatacatcccagccccatctgtagatgtgcccccaacccagttaacatttgcactaaacagcgtaa

SEQ ID NO: 64816 - DNA, 73 bp, Homo sapiens
aagggtttagaacttgactgccctataaagagttcttcctctgtgccataggtggtcagaatggcttcaacat

SEQ ID NO: 64817 - DNA, 76 bp, Homo sapiens
aacttgactgccctataaagagttcttcctctgtgccataggtggtcagaatggcttcaacattcctcaagtcacc

SEQ ID NO: 64818 - DNA, 78 bp, Homo sapiens
tataaagagttcttcctctgtgccataggtggtcagaatggcttcaacattcctcaagtcaccccatgcccagaagta

SEQ ID NO: 64819 - DNA, 79 bp, Homo sapiens
ttcctctgtgccataggtggtcagaatggcttcaacattcctcaagtcaccccatgcccagaagtaggagagtacttga

SEQ ID NO: 64820 - DNA, 78 bp, Homo sapiens
ccataggtggtcagaatggcttcaacattcctcaagtcaccccatgcccagaagtaggagagtacttgaagatgtctc

SEQ ID NO: 64821 - DNA, 79 bp, Homo sapiens
tggtcagaatggcttcaacattcctcaagtcaccccatgcccagaagtaggagagtacttgaagatgtctctggaagac

SEQ ID NO: 64822 - DNA, 78 bp, Homo sapiens
ttcaacattcctcaagtcaccccatgcccagaagtaggagagtacttgaagatgtctctggaagacctgcattccttg

SEQ ID NO: 64823 - DNA, 77 bp, Homo sapiens
attcctcaagtcaccccatgcccagaagtaggagagtacttgaagatgtctctggaagacctgcattccttggactc

SEQ ID NO: 64824 - DNA, 79 bp, Homo sapiens
gaagtaggagagtacttgaagatgtctctggaagacctgcattccttggactccaggagaatccaaggctgtgcacgaa

SEQ ID NO: 64825 - DNA, 85 bp, Homo sapiens
ttgaagatgtctctggaagacctgcattccttggactccaggagaatccaaggctgtgcacgaagactgctttgtgatgcatata

SEQ ID NO: 64826 - DNA, 87 bp, Homo sapiens
tctggaagacctgcattccttggactccaggagaatccaaggctgtgcacgaagactgctttgtgatgcatatatgtgcatgtacca

SEQ ID NO: 64827 - DNA, 84 bp, Homo sapiens
attccttggactccaggagaatccaaggctgtgcacgaagactgctttgtgatgcatatatgtgcatgtaccagagtccaacaa

SEQ ID NO: 64828 - DNA, 85 bp, Homo sapiens
actccaggagaatccaaggctgtgcacgaagactgctttgtgatgcatatatgtgcatgtaccagagtccaacaatgagtttgta

SEQ ID NO: 64829 - DNA, 84 bp, Homo sapiens
agaatccaaggctgtgcacgaagactgctttgtgatgcatatatgtgcatgtaccagagtccaacaatgagtttgtacaaataa

SEQ ID NO: 64830 - DNA, 84 bp, Homo sapiens
ctgtgcacgaagactgctttgtgatgcatatatgtgcatgtaccagagtccaacaatgagtttgtacaaataactggggtcatc

SEQ ID NO: 64831 - DNA, 79 bp, Homo sapiens
actgctttgtgatgcatatatgtgcatgtaccagagtccaacaatgagtttgtacaaataactggggtcatcgggaaag

SEQ ID NO: 64832 - DNA, 79 bp, Homo sapiens
tttgtgatgcatatatgtgcatgtaccagagtccaacaatgagtttgtacaaataactggggtcatcgggaaaggcaaa

SEQ ID NO: 64833 - DNA, 75 bp, Homo sapiens
atatgtgcatgtaccagagtccaacaatgagtttgtacaaataactggggtcatcgggaaaggcaaagaaactga

SEQ ID NO: 64834 - DNA, 72 bp, Homo sapiens
atgtaccagagtccaacaatgagtttgtacaaataactggggtcatcgggaaaggcaaagaaactgaaggca

SEQ ID NO: 64835 - DNA, 69 bp, Homo sapiens
acaatgagtttgtacaaataactggggtcatcgggaaaggcaaagaaactgaaggcagagtcctaacgt

SEQ ID NO: 64836 - DNA, 71 bp, Homo sapiens
tttgtacaaataactggggtcatcgggaaaggcaaagaaactgaaggcagagtcctaacgttgcatcttat

SEQ ID NO: 64837 - DNA, 72 bp, Homo sapiens
aaataactggggtcatcgggaaaggcaaagaaactgaaggcagagtcctaacgttgcatcttattcgagctg

SEQ ID NO: 64838 - DNA, 75 bp, Homo sapiens
atcgggaaaggcaaagaaactgaaggcagagtcctaacgttgcatcttattcgagctggcagttctgttcacgtc

SEQ ID NO: 64839 - DNA, 78 bp, Homo sapiens
caaagaaactgaaggcagagtcctaacgttgcatcttattcgagctggcagttctgttcacgtccattgccggcaatg

SEQ ID NO: 64840 - DNA, 80 bp, Homo sapiens
gaaggcagagtcctaacgttgcatcttattcgagctggcagttctgttcacgtccattgccggcaatggatgtctttgtg

SEQ ID NO: 64841 - DNA, 81 bp, Homo sapiens
agagtcctaacgttgcatcttattcgagctggcagttctgttcacgtccattgccggcaatggatgtctttgtggtgatga

SEQ ID NO: 64842 - DNA, 81 bp, Homo sapiens
ttattcgagctggcagttctgttcacgtccattgccggcaatggatgtctttgtggtgatgatccttcagaaaaggatgcc

SEQ ID NO: 64843 - DNA, 77 bp, Homo sapiens
agttctgttcacgtccattgccggcaatggatgtctttgtggtgatgatccttcagaaaaggatgcctctgtttaaa

SEQ ID NO: 64844 - DNA, 73 bp, Homo sapiens
ttgtggtgatgatccttcagaaaaggatgcctctgtttaaaaacaaattgcttttgtgtccctgaagtattta

SEQ ID NO: 64845 - DNA, 70 bp, Homo sapiens
ccttcagaaaaggatgcctctgtttaaaaacaaattgcttttgtgtccctgaagtatttaataagaagca

SEQ ID NO: 64846 - DNA, 70 bp, Homo sapiens
gtttaaaaacaaattgcttttgtgtccctgaagtatttaataagaagcattttgcactctagaaagtatg

SEQ ID NO: 64847 - DNA, 72 bp, Homo sapiens
caaattgcttttgtgtccctgaagtatttaataagaagcattttgcactctagaaagtatgtttgtgttggt

SEQ ID NO: 64848 - DNA, 69 bp, Homo sapiens
cttttgtgtccctgaagtatttaataagaagcattttgcactctagaaagtatgtttgtgttggttttt

SEQ ID NO: 64849 - DNA, 70 bp, Homo sapiens
cctgaagtatttaataagaagcattttgcactctagaaagtatgtttgtgttggttttttaagaagtcta

SEQ ID NO: 64850 - DNA, 70 bp, Homo sapiens
ataagaagcattttgcactctagaaagtatgtttgtgttggttttttaagaagtctaaatgaagttatta

SEQ ID NO: 64851 - DNA, 71 bp, Homo sapiens
gcattttgcactctagaaagtatgtttgtgttggttttttaagaagtctaaatgaagttattaatacctga

SEQ ID NO: 64852 - DNA, 68 bp, Homo sapiens
ctctagaaagtatgtttgtgttggttttttaagaagtctaaatgaagttattaatacctgaagcttta

SEQ ID NO: 64853 - DNA, 71 bp, Homo sapiens
ttgtgttggttttttaagaagtctaaatgaagttattaatacctgaagctttaagttaagtgcattgatca

SEQ ID NO: 64854 - DNA, 77 bp, Homo sapiens
gaagtctaaatgaagttattaatacctgaagctttaagttaagtgcattgatcatatgatatttttggaagcataca

SEQ ID NO: 64855 - DNA, 74 bp, Homo sapiens
gctttaagttaagtgcattgatcatatgatatttttggaagcatacaattttaattgtggaagtttaaagcctc

SEQ ID NO: 64856 - DNA, 76 bp, Homo sapiens
gtgcattgatcatatgatatttttggaagcatacaattttaattgtggaagtttaaagcctcttttagtccattga

SEQ ID NO: 64857 - DNA, 70 bp, Homo sapiens
tttggaagcatacaattttaattgtggaagtttaaagcctcttttagtccattgagaatgtaaataaatg

SEQ ID NO: 64858 - DNA, 70 bp, Homo sapiens
attgtggaagtttaaagcctcttttagtccattgagaatgtaaataaatgtgtcttctttatggaccaag

SEQ ID NO: 64859 - DNA, 73 bp, Homo sapiens
agcctcttttagtccattgagaatgtaaataaatgtgtcttctttatggaccaaggatatgaaatcatttttc

SEQ ID NO: 64860 - DNA, 74 bp, Homo sapiens
agtccattgagaatgtaaataaatgtgtcttctttatggaccaaggatatgaaatcatttttcttttgtagcta

SEQ ID NO: 64861 - DNA, 72 bp, Homo sapiens
taaataaatgtgtcttctttatggaccaaggatatgaaatcatttttcttttgtagctaacggttgccttga

SEQ ID NO: 64862 - DNA, 71 bp, Homo sapiens
aaatgtgtcttctttatggaccaaggatatgaaatcatttttcttttgtagctaacggttgccttgaggaa

SEQ ID NO: 64863 - DNA, 70 bp, Homo sapiens
ttatggaccaaggatatgaaatcatttttcttttgtagctaacggttgccttgaggaagaaataatttgg

SEQ ID NO: 64864 - DNA, 68 bp, Homo sapiens
ccaaggatatgaaatcatttttcttttgtagctaacggttgccttgaggaagaaataatttggtttta

SEQ ID NO: 64865 - DNA, 67 bp, Homo sapiens
catttttcttttgtagctaacggttgccttgaggaagaaataatttggttttattaagagtctactc

SEQ ID NO: 64866 - DNA, 70 bp, Homo sapiens
tcttttgtagctaacggttgccttgaggaagaaataatttggttttattaagagtctactctcaatccag

SEQ ID NO: 64867 - DNA, 71 bp, Homo sapiens
gctaacggttgccttgaggaagaaataatttggttttattaagagtctactctcaatccagttattagaga

SEQ ID NO: 64868 - DNA, 72 bp, Homo sapiens
gccttgaggaagaaataatttggttttattaagagtctactctcaatccagttattagagatgtactgagtt

SEQ ID NO: 64869 - DNA, 78 bp, Homo sapiens
ttattaagagtctactctcaatccagttattagagatgtactgagtttgatttgttaatcctttctatatactgctga

SEQ ID NO: 64870 - DNA, 80 bp, Homo sapiens
aagagtctactctcaatccagttattagagatgtactgagtttgatttgttaatcctttctatatactgctgatcttgca

SEQ ID NO: 64871 - DNA, 81 bp, Homo sapiens
gttattagagatgtactgagtttgatttgttaatcctttctatatactgctgatcttgcatgtctacaatctgctcagttt

SEQ ID NO: 64872 - DNA, 80 bp, Homo sapiens
atgtactgagtttgatttgttaatcctttctatatactgctgatcttgcatgtctacaatctgctcagtttttctgtgtt

SEQ ID NO: 64873 - DNA, 82 bp, Homo sapiens
tttgatttgttaatcctttctatatactgctgatcttgcatgtctacaatctgctcagtttttctgtgtttctgcaatagtg

SEQ ID NO: 64874 - DNA, 82 bp, Homo sapiens
taatcctttctatatactgctgatcttgcatgtctacaatctgctcagtttttctgtgtttctgcaatagtggtcagaaaaa

SEQ ID NO: 64875 - DNA, 81 bp, Homo sapiens
tatatactgctgatcttgcatgtctacaatctgctcagtttttctgtgtttctgcaatagtggtcagaaaaatacttaaat

SEQ ID NO: 64876 - DNA, 76 bp, Homo sapiens
atcttgcatgtctacaatctgctcagtttttctgtgtttctgcaatagtggtcagaaaaatacttaaattccctta

SEQ ID NO: 64877 - DNA, 74 bp, Homo sapiens
tgtctacaatctgctcagtttttctgtgtttctgcaatagtggtcagaaaaatacttaaattcccttaatggtg

SEQ ID NO: 64878 - DNA, 70 bp, Homo sapiens
gctcagtttttctgtgtttctgcaatagtggtcagaaaaatacttaaattcccttaatggtgttgttttc

SEQ ID NO: 64879 - DNA, 69 bp, Homo sapiens
gtgtttctgcaatagtggtcagaaaaatacttaaattcccttaatggtgttgttttctatttgttctgg

SEQ ID NO: 64880 - DNA, 69 bp, Homo sapiens
ctgcaatagtggtcagaaaaatacttaaattcccttaatggtgttgttttctatttgttctggttttga

SEQ ID NO: 64881 - DNA, 69 bp, Homo sapiens
cagaaaaatacttaaattcccttaatggtgttgttttctatttgttctggttttgagataaatgagtga

SEQ ID NO: 64882 - DNA, 69 bp, Homo sapiens
acttaaattcccttaatggtgttgttttctatttgttctggttttgagataaatgagtgattctgtccc

SEQ ID NO: 64883 - DNA, 71 bp, Homo sapiens
ccttaatggtgttgttttctatttgttctggttttgagataaatgagtgattctgtccccaaatgtccatt

SEQ ID NO: 64884 - DNA, 71 bp, Homo sapiens
ggtgttgttttctatttgttctggttttgagataaatgagtgattctgtccccaaatgtccatttttgaag

SEQ ID NO: 64885 - DNA, 74 bp, Homo sapiens
tctatttgttctggttttgagataaatgagtgattctgtccccaaatgtccatttttgaagtgattttcctgga

SEQ ID NO: 64886 - DNA, 72 bp, Homo sapiens
tttgagataaatgagtgattctgtccccaaatgtccatttttgaagtgattttcctggaggattagggtatt

SEQ ID NO: 64887 - DNA, 72 bp, Homo sapiens
taaatgagtgattctgtccccaaatgtccatttttgaagtgattttcctggaggattagggtatttagcagt

SEQ ID NO: 64888 - DNA, 71 bp, Homo sapiens
attctgtccccaaatgtccatttttgaagtgattttcctggaggattagggtatttagcagttgaagctct

SEQ ID NO: 64889 - DNA, 74 bp, Homo sapiens
atgtccatttttgaagtgattttcctggaggattagggtatttagcagttgaagctcttcattcatagtagtta

SEQ ID NO: 64890 - DNA, 73 bp, Homo sapiens
tttcctggaggattagggtatttagcagttgaagctcttcattcatagtagttactgtcagctaacaggtttt

SEQ ID NO: 64891 - DNA, 72 bp, Homo sapiens
gattagggtatttagcagttgaagctcttcattcatagtagttactgtcagctaacaggttttttaaggctt

SEQ ID NO: 64892 - DNA, 71 bp, Homo sapiens
cagttgaagctcttcattcatagtagttactgtcagctaacaggttttttaaggcttttaactattaatat

SEQ ID NO: 64893 - DNA, 69 bp, Homo sapiens
cattcatagtagttactgtcagctaacaggttttttaaggcttttaactattaatattttatggaatgg

SEQ ID NO: 64894 - DNA, 66 bp, Homo sapiens
agttactgtcagctaacaggttttttaaggcttttaactattaatattttatggaatggggcaaag

SEQ ID NO: 64895 - DNA, 67 bp, Homo sapiens
gtcagctaacaggttttttaaggcttttaactattaatattttatggaatggggcaaagtaaattga

SEQ ID NO: 64896 - DNA, 67 bp, Homo sapiens
tttttaaggcttttaactattaatattttatggaatggggcaaagtaaattgatgaaagaattggag

SEQ ID NO: 64897 - DNA, 71 bp, Homo sapiens
gcttttaactattaatattttatggaatggggcaaagtaaattgatgaaagaattggagtgataatagtcc

SEQ ID NO: 64898 - DNA, 75 bp, Homo sapiens
tatggaatggggcaaagtaaattgatgaaagaattggagtgataatagtcctttacaaacatacagtccataaga

SEQ ID NO: 64899 - DNA, 73 bp, Homo sapiens
gcaaagtaaattgatgaaagaattggagtgataatagtcctttacaaacatacagtccataagaaaatgaatt

SEQ ID NO: 64900 - DNA, 76 bp, Homo sapiens
ttgatgaaagaattggagtgataatagtcctttacaaacatacagtccataagaaaatgaatttggcatatagaat

SEQ ID NO: 64901 - DNA, 75 bp, Homo sapiens
agaattggagtgataatagtcctttacaaacatacagtccataagaaaatgaatttggcatatagaattattaca

SEQ ID NO: 64902 - DNA, 74 bp, Homo sapiens
gtcctttacaaacatacagtccataagaaaatgaatttggcatatagaattattacaatttcctgggagagatg

SEQ ID NO: 64903 - DNA, 73 bp, Homo sapiens
acagtccataagaaaatgaatttggcatatagaattattacaatttcctgggagagatggatatttaaacctc

SEQ ID NO: 64904 - DNA, 73 bp, Homo sapiens
tttggcatatagaattattacaatttcctgggagagatggatatttaaacctctattattttagacaagactg

SEQ ID NO: 64905 - DNA, 71 bp, Homo sapiens
agaattattacaatttcctgggagagatggatatttaaacctctattattttagacaagactgtctagaac

SEQ ID NO: 64906 - DNA, 71 bp, Homo sapiens
caatttcctgggagagatggatatttaaacctctattattttagacaagactgtctagaacttaagtttga

SEQ ID NO: 64907 - DNA, 75 bp, Homo sapiens
ggagagatggatatttaaacctctattattttagacaagactgtctagaacttaagtttgatctgtcagccagta

SEQ ID NO: 64908 - DNA, 75 bp, Homo sapiens
ctctattattttagacaagactgtctagaacttaagtttgatctgtcagccagtactcccattaaattcagtgta

SEQ ID NO: 64909 - DNA, 75 bp, Homo sapiens
aagactgtctagaacttaagtttgatctgtcagccagtactcccattaaattcagtgtagtttcacttgatagaa

SEQ ID NO: 64910 - DNA, 77 bp, Homo sapiens
agaacttaagtttgatctgtcagccagtactcccattaaattcagtgtagtttcacttgatagaatcagatatgtta

SEQ ID NO: 64911 - DNA, 79 bp, Homo sapiens
gtttgatctgtcagccagtactcccattaaattcagtgtagtttcacttgatagaatcagatatgttatcgaaatgtta

SEQ ID NO: 64912 - DNA, 81 bp, Homo sapiens
agccagtactcccattaaattcagtgtagtttcacttgatagaatcagatatgttatcgaaatgttagcagcagcttcatc

SEQ ID NO: 64913 - DNA, 81 bp, Homo sapiens
attaaattcagtgtagtttcacttgatagaatcagatatgttatcgaaatgttagcagcagcttcatcctccttctgatta

SEQ ID NO: 64914 - DNA, 80 bp, Homo sapiens
gtgtagtttcacttgatagaatcagatatgttatcgaaatgttagcagcagcttcatcctccttctgattaaagtaagta

SEQ ID NO: 64915 - DNA, 79 bp, Homo sapiens
gtttcacttgatagaatcagatatgttatcgaaatgttagcagcagcttcatcctccttctgattaaagtaagtagaaa

SEQ ID NO: 64916 - DNA, 78 bp, Homo sapiens
tagaatcagatatgttatcgaaatgttagcagcagcttcatcctccttctgattaaagtaagtagaaatgggatgttt

SEQ ID NO: 64917 - DNA, 75 bp, Homo sapiens
atatgttatcgaaatgttagcagcagcttcatcctccttctgattaaagtaagtagaaatgggatgttttgttta

SEQ ID NO: 64918 - DNA, 74 bp, Homo sapiens
aaatgttagcagcagcttcatcctccttctgattaaagtaagtagaaatgggatgttttgtttaataacagcca

SEQ ID NO: 64919 - DNA, 72 bp, Homo sapiens
agcttcatcctccttctgattaaagtaagtagaaatgggatgttttgtttaataacagccatagtgtgtgtt

SEQ ID NO: 64920 - DNA, 71 bp, Homo sapiens
cctccttctgattaaagtaagtagaaatgggatgttttgtttaataacagccatagtgtgtgtttagacca

SEQ ID NO: 64921 - DNA, 73 bp, Homo sapiens
aagtagaaatgggatgttttgtttaataacagccatagtgtgtgtttagaccacagcggatgttgtagaccag

SEQ ID NO: 64922 - DNA, 79 bp, Homo sapiens
gttttgtttaataacagccatagtgtgtgtttagaccacagcggatgttgtagaccaggaccatagatgatacatgtca

SEQ ID NO: 64923 - DNA, 83 bp, Homo sapiens
ttaataacagccatagtgtgtgtttagaccacagcggatgttgtagaccaggaccatagatgatacatgtcagtgctgtggaa

SEQ ID NO: 64924 - DNA, 84 bp, Homo sapiens
tttagaccacagcggatgttgtagaccaggaccatagatgatacatgtcagtgctgtggaatgtgcattctctgagtgttgttt

SEQ ID NO: 64925 - DNA, 85 bp, Homo sapiens
tgttgtagaccaggaccatagatgatacatgtcagtgctgtggaatgtgcattctctgagtgttgttttgtggtatcattgtctt

SEQ ID NO: 64926 - DNA, 84 bp, Homo sapiens
accatagatgatacatgtcagtgctgtggaatgtgcattctctgagtgttgttttgtggtatcattgtctttcctgaatgactt

SEQ ID NO: 64927 - DNA, 83 bp, Homo sapiens
atgatacatgtcagtgctgtggaatgtgcattctctgagtgttgttttgtggtatcattgtctttcctgaatgactttctaac

SEQ ID NO: 64928 - DNA, 81 bp, Homo sapiens
agtgctgtggaatgtgcattctctgagtgttgttttgtggtatcattgtctttcctgaatgactttctaactgtgcagaaa

SEQ ID NO: 64929 - DNA, 79 bp, Homo sapiens
aatgtgcattctctgagtgttgttttgtggtatcattgtctttcctgaatgactttctaactgtgcagaaaggcagaaa

SEQ ID NO: 64930 - DNA, 77 bp, Homo sapiens
attctctgagtgttgttttgtggtatcattgtctttcctgaatgactttctaactgtgcagaaaggcagaaaagtca

SEQ ID NO: 64931 - DNA, 80 bp, Homo sapiens
tgttgttttgtggtatcattgtctttcctgaatgactttctaactgtgcagaaaggcagaaaagtcatcatatgtatatg

SEQ ID NO: 64932 - DNA, 83 bp, Homo sapiens
gtatcattgtctttcctgaatgactttctaactgtgcagaaaggcagaaaagtcatcatatgtatatgtcatatgactttata

SEQ ID NO: 64933 - DNA, 80 bp, Homo sapiens
gtctttcctgaatgactttctaactgtgcagaaaggcagaaaagtcatcatatgtatatgtcatatgactttataaaata

SEQ ID NO: 64934 - DNA, 80 bp, Homo sapiens
gactttctaactgtgcagaaaggcagaaaagtcatcatatgtatatgtcatatgactttataaaatatttaatgtgacaa

SEQ ID NO: 64935 - DNA, 79 bp, Homo sapiens
actgtgcagaaaggcagaaaagtcatcatatgtatatgtcatatgactttataaaatatttaatgtgacaaaaagtgga

SEQ ID NO: 64936 - DNA, 75 bp, Homo sapiens
gtcatcatatgtatatgtcatatgactttataaaatatttaatgtgacaaaaagtggaaagaatctttacaaacc

SEQ ID NO: 64937 - DNA, 72 bp, Homo sapiens
gtatatgtcatatgactttataaaatatttaatgtgacaaaaagtggaaagaatctttacaaaccctgcaat

SEQ ID NO: 64938 - DNA, 66 bp, Homo sapiens
aaatatttaatgtgacaaaaagtggaaagaatctttacaaaccctgcaattacttttttaaaggca

SEQ ID NO: 64939 - DNA, 66 bp, Homo sapiens
tgtgacaaaaagtggaaagaatctttacaaaccctgcaattacttttttaaaggcacttttactct

SEQ ID NO: 64940 - DNA, 63 bp, Homo sapiens
aaagtggaaagaatctttacaaaccctgcaattacttttttaaaggcacttttactctttggt

SEQ ID NO: 64941 - DNA, 66 bp, Homo sapiens
agaatctttacaaaccctgcaattacttttttaaaggcacttttactctttggttttatcattcca

SEQ ID NO: 64942 - DNA, 68 bp, Homo sapiens
gcaattacttttttaaaggcacttttactctttggttttatcattccattttgctaatatttactagc

SEQ ID NO: 64943 - DNA, 69 bp, Homo sapiens
taaaggcacttttactctttggttttatcattccattttgctaatatttactagctttataaattacag

SEQ ID NO: 64944 - DNA, 69 bp, Homo sapiens
tactctttggttttatcattccattttgctaatatttactagctttataaattacagtaaggtacaaaa

SEQ ID NO: 64945 - DNA, 71 bp, Homo sapiens
tcattccattttgctaatatttactagctttataaattacagtaaggtacaaaaactcatcttgtaatatt

SEQ ID NO: 64946 - DNA, 69 bp, Homo sapiens
ttgctaatatttactagctttataaattacagtaaggtacaaaaactcatcttgtaatattttcatttt

SEQ ID NO: 64947 - DNA, 69 bp, Homo sapiens
ttactagctttataaattacagtaaggtacaaaaactcatcttgtaatattttcatttttgaagtgaaa

SEQ ID NO: 64948 - DNA, 70 bp, Homo sapiens
tataaattacagtaaggtacaaaaactcatcttgtaatattttcatttttgaagtgaaaaagtacatata

SEQ ID NO: 64949 - DNA, 70 bp, Homo sapiens
gtaaggtacaaaaactcatcttgtaatattttcatttttgaagtgaaaaagtacatatattttgcacaag

SEQ ID NO: 64950 - DNA, 72 bp, Homo sapiens
ctcatcttgtaatattttcatttttgaagtgaaaaagtacatatattttgcacaaggttttatactgctaag

SEQ ID NO: 64951 - DNA, 70 bp, Homo sapiens
aatattttcatttttgaagtgaaaaagtacatatattttgcacaaggttttatactgctaagtgcttggt

SEQ ID NO: 64952 - DNA, 75 bp, Homo sapiens
agtgaaaaagtacatatattttgcacaaggttttatactgctaagtgcttggttggggtggtgagatgatgatta

SEQ ID NO: 64953 - DNA, 76 bp, Homo sapiens
agtacatatattttgcacaaggttttatactgctaagtgcttggttggggtggtgagatgatgattagatcagggg

SEQ ID NO: 64954 - DNA, 79 bp, Homo sapiens
ttttgcacaaggttttatactgctaagtgcttggttggggtggtgagatgatgattagatcaggggtgaggctgagaga

SEQ ID NO: 64955 - DNA, 78 bp, Homo sapiens
ttttatactgctaagtgcttggttggggtggtgagatgatgattagatcaggggtgaggctgagagactctgggttta

SEQ ID NO: 64956 - DNA, 77 bp, Homo sapiens
taagtgcttggttggggtggtgagatgatgattagatcaggggtgaggctgagagactctgggtttagggctagccc

SEQ ID NO: 64957 - DNA, 78 bp, Homo sapiens
ttggttggggtggtgagatgatgattagatcaggggtgaggctgagagactctgggtttagggctagccctgcctcca

SEQ ID NO: 64958 - DNA, 77 bp, Homo sapiens
agatgatgattagatcaggggtgaggctgagagactctgggtttagggctagccctgcctccatctcccttgggtaa

SEQ ID NO: 64959 - DNA, 74 bp, Homo sapiens
attagatcaggggtgaggctgagagactctgggtttagggctagccctgcctccatctcccttgggtaaaatga

SEQ ID NO: 64960 - DNA, 72 bp, Homo sapiens
gtgaggctgagagactctgggtttagggctagccctgcctccatctcccttgggtaaaatgaagggtgtggg

SEQ ID NO: 64961 - DNA, 68 bp, Homo sapiens
gagactctgggtttagggctagccctgcctccatctcccttgggtaaaatgaagggtgtggggtaaaa

SEQ ID NO: 64962 - DNA, 70 bp, Homo sapiens
tgggtttagggctagccctgcctccatctcccttgggtaaaatgaagggtgtggggtaaaagatgcataa

SEQ ID NO: 64963 - DNA, 70 bp, Homo sapiens
ctagccctgcctccatctcccttgggtaaaatgaagggtgtggggtaaaagatgcataaggccttttcta

SEQ ID NO: 64964 - DNA, 73 bp, Homo sapiens
tccatctcccttgggtaaaatgaagggtgtggggtaaaagatgcataaggccttttctagctctgacagccta

SEQ ID NO: 64965 - DNA, 72 bp, Homo sapiens
ttgggtaaaatgaagggtgtggggtaaaagatgcataaggccttttctagctctgacagcctagaagtccaa

SEQ ID NO: 64966 - DNA, 75 bp, Homo sapiens
tgaagggtgtggggtaaaagatgcataaggccttttctagctctgacagcctagaagtccaatcaccctgtaata

SEQ ID NO: 64967 - DNA, 76 bp, Homo sapiens
gggtaaaagatgcataaggccttttctagctctgacagcctagaagtccaatcaccctgtaataaatatgtgttga

SEQ ID NO: 64968 - DNA, 78 bp, Homo sapiens
aaagatgcataaggccttttctagctctgacagcctagaagtccaatcaccctgtaataaatatgtgttgaatgaaga

SEQ ID NO: 64969 - DNA, 77 bp, Homo sapiens
ccttttctagctctgacagcctagaagtccaatcaccctgtaataaatatgtgttgaatgaagaaatgggtgaatga

SEQ ID NO: 64970 - DNA, 81 bp, Homo sapiens
tctgacagcctagaagtccaatcaccctgtaataaatatgtgttgaatgaagaaatgggtgaatgagcttgtcaatgtgat

SEQ ID NO: 64971 - DNA, 75 bp, Homo sapiens
gtccaatcaccctgtaataaatatgtgttgaatgaagaaatgggtgaatgagcttgtcaatgtgattttaaaaaa

SEQ ID NO: 64972 - DNA, 74 bp, Homo sapiens
aataaatatgtgttgaatgaagaaatgggtgaatgagcttgtcaatgtgattttaaaaaattgactacctggag

SEQ ID NO: 64973 - DNA, 76 bp, Homo sapiens
tgttgaatgaagaaatgggtgaatgagcttgtcaatgtgattttaaaaaattgactacctggaggaatgattagga

SEQ ID NO: 64974 - DNA, 75 bp, Homo sapiens
tgaagaaatgggtgaatgagcttgtcaatgtgattttaaaaaattgactacctggaggaatgattaggaatctaa

SEQ ID NO: 64975 - DNA, 76 bp, Homo sapiens
tgggtgaatgagcttgtcaatgtgattttaaaaaattgactacctggaggaatgattaggaatctaaatgaagcca

SEQ ID NO: 64976 - DNA, 73 bp, Homo sapiens
ttgtcaatgtgattttaaaaaattgactacctggaggaatgattaggaatctaaatgaagccagccctcggta

SEQ ID NO: 64977 - DNA, 75 bp, Homo sapiens
aaaaattgactacctggaggaatgattaggaatctaaatgaagccagccctcggtatctgcaggtttctcatcca

SEQ ID NO: 64978 - DNA, 78 bp, Homo sapiens
tacctggaggaatgattaggaatctaaatgaagccagccctcggtatctgcaggtttctcatccatggattcaaccaa

SEQ ID NO: 64979 - DNA, 77 bp, Homo sapiens
attaggaatctaaatgaagccagccctcggtatctgcaggtttctcatccatggattcaaccaactgcaaatggaaa

SEQ ID NO: 64980 - DNA, 76 bp, Homo sapiens
taaatgaagccagccctcggtatctgcaggtttctcatccatggattcaaccaactgcaaatggaaaatacgattt

SEQ ID NO: 64981 - DNA, 73 bp, Homo sapiens
aagccagccctcggtatctgcaggtttctcatccatggattcaaccaactgcaaatggaaaatacgatttttt

SEQ ID NO: 64982 - DNA, 73 bp, Homo sapiens
cagacttttttcttgtcattattctctgaacaatacaagaactctttatgtagcatttacatttattaggtat

SEQ ID NO: 64983 - DNA, 80 bp, Homo sapiens
aaaatatacaggaggatgtgtgtcagttatatgcaaattctgtaccattttgtatcagggaattgagcatcttcagatgt

SEQ ID NO: 64984 - DNA, 83 bp, Homo sapiens
aggaggatgtgtgtcagttatatgcaaattctgtaccattttgtatcagggaattgagcatcttcagatgttggtatctgcag

SEQ ID NO: 64985 - DNA, 83 bp, Homo sapiens
atgtgtgtcagttatatgcaaattctgtaccattttgtatcagggaattgagcatcttcagatgttggtatctgcagggatcc

SEQ ID NO: 64986 - DNA, 80 bp, Homo sapiens
agttatatgcaaattctgtaccattttgtatcagggaattgagcatcttcagatgttggtatctgcagggatcctggaac

SEQ ID NO: 64987 - DNA, 81 bp, Homo sapiens
gttatatgcaaattctgtaccattttgtatcagggaattgagcatcttcagatgttggtatctgcagggatcctggaacca

SEQ ID NO: 64988 - DNA, 79 bp, Homo sapiens
atgcaaattctgtaccattttgtatcagggaattgagcatcttcagatgttggtatctgcagggatcctggaaccaaac

SEQ ID NO: 64989 - DNA, 76 bp, Homo sapiens
aattctgtaccattttgtatcagggaattgagcatcttcagatgttggtatctgcagggatcctggaaccaaaccc

SEQ ID NO: 64990 - DNA, 79 bp, Homo sapiens
cattttgtatcagggaattgagcatcttcagatgttggtatctgcagggatcctggaaccaaacccctgcagatactaa

SEQ ID NO: 64991 - DNA, 78 bp, Homo sapiens
attttgtatcagggaattgagcatcttcagatgttggtatctgcagggatcctggaaccaaacccctgcagatactaa

SEQ ID NO: 64992 - DNA, 79 bp, Homo sapiens
aattgagcatcttcagatgttggtatctgcagggatcctggaaccaaacccctgcagatactaagggctgacgatctag

SEQ ID NO: 64993 - DNA, 78 bp, Homo sapiens
agcatcttcagatgttggtatctgcagggatcctggaaccaaacccctgcagatactaagggctgacgatctaggtaa

SEQ ID NO: 64994 - DNA, 77 bp, Homo sapiens
atcttcagatgttggtatctgcagggatcctggaaccaaacccctgcagatactaagggctgacgatctaggtaaga

SEQ ID NO: 64995 - DNA, 77 bp, Homo sapiens
ttcagatgttggtatctgcagggatcctggaaccaaacccctgcagatactaagggctgacgatctaggtaagactg

SEQ ID NO: 64996 - DNA, 71 bp, Homo sapiens
atcctggaaccaaacccctgcagatactaagggctgacgatctaggtaagactggatttaacagttggaaa

SEQ ID NO: 64997 - DNA, 68 bp, Homo sapiens
aaccaaacccctgcagatactaagggctgacgatctaggtaagactggatttaacagttggaaaaaaa

SEQ ID NO: 64998 - DNA, 70 bp, Homo sapiens
aaaggagagagaagacagttcctttcctgtagaaattaaaacaaaatacaaattgaggaagctctgctac

SEQ ID NO: 64999 - DNA, 71 bp, Homo sapiens
agagagaagacagttcctttcctgtagaaattaaaacaaaatacaaattgaggaagctctgctacccaggc

SEQ ID NO: 65000 - DNA, 73 bp, Homo sapiens
ttcctttcctgtagaaattaaaacaaaatacaaattgaggaagctctgctacccaggctgtcatggtagagaa

SEQ ID NO: 65001 - DNA, 75 bp, Homo sapiens
tgtagaaattaaaacaaaatacaaattgaggaagctctgctacccaggctgtcatggtagagaacttgaagaaga

SEQ ID NO: 65002 - DNA, 74 bp, Homo sapiens
aaacaaaatacaaattgaggaagctctgctacccaggctgtcatggtagagaacttgaagaagacctgtttgga

SEQ ID NO: 65003 - DNA, 77 bp, Homo sapiens
atacaaattgaggaagctctgctacccaggctgtcatggtagagaacttgaagaagacctgtttggatggacacctg

SEQ ID NO: 65004 - DNA, 74 bp, Homo sapiens
aagctctgctacccaggctgtcatggtagagaacttgaagaagacctgtttggatggacacctggtttcaaaag

SEQ ID NO: 65005 - DNA, 74 bp, Homo sapiens
tacccaggctgtcatggtagagaacttgaagaagacctgtttggatggacacctggtttcaaaagtcaggtgtg

SEQ ID NO: 65006 - DNA, 72 bp, Homo sapiens
atggtagagaacttgaagaagacctgtttggatggacacctggtttcaaaagtcaggtgtggagactgttaa

SEQ ID NO: 65007 - DNA, 71 bp, Homo sapiens
agaacttgaagaagacctgtttggatggacacctggtttcaaaagtcaggtgtggagactgttaaatggga

SEQ ID NO: 65008 - DNA, 71 bp, Homo sapiens
aagaagacctgtttggatggacacctggtttcaaaagtcaggtgtggagactgttaaatgggagggcctca

SEQ ID NO: 65009 - DNA, 73 bp, Homo sapiens
tttggatggacacctggtttcaaaagtcaggtgtggagactgttaaatgggagggcctcatccataaatgatt

SEQ ID NO: 65010 - DNA, 74 bp, Homo sapiens
tggtttcaaaagtcaggtgtggagactgttaaatgggagggcctcatccataaatgatttctggcaacgtcttc

SEQ ID NO: 65011 - DNA, 76 bp, Homo sapiens
tggagactgttaaatgggagggcctcatccataaatgatttctggcaacgtcttcttcaggtggagcttgacgtct

SEQ ID NO: 65012 - DNA, 73 bp, Homo sapiens
agggcctcatccataaatgatttctggcaacgtcttcttcaggtggagcttgacgtctttttaatgttacttg

SEQ ID NO: 65013 - DNA, 71 bp, Homo sapiens
aacgtcttcttcaggtggagcttgacgtctttttaatgttacttggggagggagtgctcattaagggatgc

SEQ ID NO: 65014 - DNA, 73 bp, Homo sapiens
aggtggagcttgacgtctttttaatgttacttggggagggagtgctcattaagggatgccagggccagctctg

SEQ ID NO: 65015 - DNA, 72 bp, Homo sapiens
cttgacgtctttttaatgttacttggggagggagtgctcattaagggatgccagggccagctctggtggttc

SEQ ID NO: 65016 - DNA, 75 bp, Homo sapiens
gggagggagtgctcattaagggatgccagggccagctctggtggttcctggggaggctgcgtccttccctgcttc

SEQ ID NO: 65017 - DNA, 81 bp, Homo sapiens
agtgctcattaagggatgccagggccagctctggtggttcctggggaggctgcgtccttccctgcttctgcatgtcatgag

SEQ ID NO: 65018 - DNA, 82 bp, Homo sapiens
ttaagggatgccagggccagctctggtggttcctggggaggctgcgtccttccctgcttctgcatgtcatgaggcagcagga

SEQ ID NO: 65019 - DNA, 78 bp, Homo sapiens
agggccagctctggtggttcctggggaggctgcgtccttccctgcttctgcatgtcatgaggcagcaggaaggtttcc

SEQ ID NO: 65020 - DNA, 79 bp, Homo sapiens
gtggttcctggggaggctgcgtccttccctgcttctgcatgtcatgaggcagcaggaaggtttcccctgcacctgtctg

SEQ ID NO: 65021 - DNA, 80 bp, Homo sapiens
gggaggctgcgtccttccctgcttctgcatgtcatgaggcagcaggaaggtttcccctgcacctgtctgtcctggctccc

SEQ ID NO: 65022 - DNA, 79 bp, Homo sapiens
cgtccttccctgcttctgcatgtcatgaggcagcaggaaggtttcccctgcacctgtctgtcctggctccctctgggta

SEQ ID NO: 65023 - DNA, 76 bp, Homo sapiens
atgtcatgaggcagcaggaaggtttcccctgcacctgtctgtcctggctccctctgggtagccccctactgttctg

SEQ ID NO: 65024 - DNA, 76 bp, Homo sapiens
agcaggaaggtttcccctgcacctgtctgtcctggctccctctgggtagccccctactgttctgtgcttcagcaca

SEQ ID NO: 65025 - DNA, 76 bp, Homo sapiens
tttcccctgcacctgtctgtcctggctccctctgggtagccccctactgttctgtgcttcagcacagcctggtttg

SEQ ID NO: 65026 - DNA, 78 bp, Homo sapiens
acctgtctgtcctggctccctctgggtagccccctactgttctgtgcttcagcacagcctggtttgtcaagaggcaca

SEQ ID NO: 65027 - DNA, 79 bp, Homo sapiens
tctgtcctggctccctctgggtagccccctactgttctgtgcttcagcacagcctggtttgtcaagaggcacatagttg

SEQ ID NO: 65028 - DNA, 76 bp, Homo sapiens
ctccctctgggtagccccctactgttctgtgcttcagcacagcctggtttgtcaagaggcacatagttggggctgg

SEQ ID NO: 65029 - DNA, 81 bp, Homo sapiens
gtagccccctactgttctgtgcttcagcacagcctggtttgtcaagaggcacatagttggggctgggctgcatggcacagg

SEQ ID NO: 65030 - DNA, 83 bp, Homo sapiens
actgttctgtgcttcagcacagcctggtttgtcaagaggcacatagttggggctgggctgcatggcacaggggcttatgtgcc

SEQ ID NO: 65031 - DNA, 81 bp, Homo sapiens
agcacagcctggtttgtcaagaggcacatagttggggctgggctgcatggcacaggggcttatgtgcctgctggttattta

SEQ ID NO: 65032 - DNA, 77 bp, Homo sapiens
ctggtttgtcaagaggcacatagttggggctgggctgcatggcacaggggcttatgtgcctgctggttatttaattt

SEQ ID NO: 65033 - DNA, 77 bp, Homo sapiens
aagaggcacatagttggggctgggctgcatggcacaggggcttatgtgcctgctggttatttaattttcagccttaa

SEQ ID NO: 65034 - DNA, 74 bp, Homo sapiens
acatagttggggctgggctgcatggcacaggggcttatgtgcctgctggttatttaattttcagccttaagttt

SEQ ID NO: 65035 - DNA, 73 bp, Homo sapiens
ctgggctgcatggcacaggggcttatgtgcctgctggttatttaattttcagccttaagttttctttaatatt

SEQ ID NO: 65036 - DNA, 69 bp, Homo sapiens
cacaggggcttatgtgcctgctggttatttaattttcagccttaagttttctttaatattttcctgttg

SEQ ID NO: 65037 - DNA, 69 bp, Homo sapiens
gggcttatgtgcctgctggttatttaattttcagccttaagttttctttaatattttcctgttggctat

SEQ ID NO: 65038 - DNA, 66 bp, Homo sapiens
gcctgctggttatttaattttcagccttaagttttctttaatattttcctgttggctatttaaagg

SEQ ID NO: 65039 - DNA, 64 bp, Homo sapiens
taattttcagccttaagttttctttaatattttcctgttggctatttaaaggttttggttatct

SEQ ID NO: 65040 - DNA, 64 bp, Homo sapiens
cagccttaagttttctttaatattttcctgttggctatttaaaggttttggttatcttttattc

SEQ ID NO: 65041 - DNA, 67 bp, Homo sapiens
ctttaatattttcctgttggctatttaaaggttttggttatcttttattccttatctacaatcaaga

SEQ ID NO: 65042 - DNA, 72 bp, Homo sapiens
ttcctgttggctatttaaaggttttggttatcttttattccttatctacaatcaagatgacaatgtaattga

SEQ ID NO: 65043 - DNA, 71 bp, Homo sapiens
gttggctatttaaaggttttggttatcttttattccttatctacaatcaagatgacaatgtaattgaatta

SEQ ID NO: 65044 - DNA, 77 bp, Homo sapiens
tcttttattccttatctacaatcaagatgacaatgtaattgaattatcttatttataacacggttcgtgattcatga

SEQ ID NO: 65045 - DNA, 80 bp, Homo sapiens
gatgacaatgtaattgaattatcttatttataacacggttcgtgattcatgattcatgattacaagtagaaaatatgtca

SEQ ID NO: 65046 - DNA, 78 bp, Homo sapiens
gaattatcttatttataacacggttcgtgattcatgattcatgattacaagtagaaaatatgtcatgttcctcacctc

SEQ ID NO: 65047 - DNA, 77 bp, Homo sapiens
atcttatttataacacggttcgtgattcatgattcatgattacaagtagaaaatatgtcatgttcctcacctccaaa

SEQ ID NO: 65048 - DNA, 79 bp, Homo sapiens
taacacggttcgtgattcatgattcatgattacaagtagaaaatatgtcatgttcctcacctccaaataaatatgtgtg

SEQ ID NO: 65049 - DNA, 81 bp, Homo sapiens
gtgtatatatgtatgtggcggagagggagagagtggggaaggagagcagtgttatcatacatagagaggctaaatgtgtcc

SEQ ID NO: 65050 - DNA, 81 bp, Homo sapiens
tatatgtatgtggcggagagggagagagtggggaaggagagcagtgttatcatacatagagaggctaaatgtgtcccatcc

SEQ ID NO: 65051 - DNA, 80 bp, Homo sapiens
ggagagggagagagtggggaaggagagcagtgttatcatacatagagaggctaaatgtgtcccatccctcactgtcagct

SEQ ID NO: 65052 - DNA, 80 bp, Homo sapiens
gagagggagagagtggggaaggagagcagtgttatcatacatagagaggctaaatgtgtcccatccctcactgtcagctt

SEQ ID NO: 65053 - DNA, 78 bp, Homo sapiens
agagtggggaaggagagcagtgttatcatacatagagaggctaaatgtgtcccatccctcactgtcagctttataaag

SEQ ID NO: 65054 - DNA, 78 bp, Homo sapiens
aaggagagcagtgttatcatacatagagaggctaaatgtgtcccatccctcactgtcagctttataaaggagtttgac

SEQ ID NO: 65055 - DNA, 80 bp, Homo sapiens
tgttatcatacatagagaggctaaatgtgtcccatccctcactgtcagctttataaaggagtttgactccatccacagaa

SEQ ID NO: 65056 - DNA, 76 bp, Homo sapiens
atagagaggctaaatgtgtcccatccctcactgtcagctttataaaggagtttgactccatccacagaagaatgtt

SEQ ID NO: 65057 - DNA, 75 bp, Homo sapiens
ctaaatgtgtcccatccctcactgtcagctttataaaggagtttgactccatccacagaagaatgttttataaga

SEQ ID NO: 65058 - DNA, 73 bp, Homo sapiens
ccatccctcactgtcagctttataaaggagtttgactccatccacagaagaatgttttataagactaggaaaa

SEQ ID NO: 65059 - DNA, 72 bp, Homo sapiens
ctgtcagctttataaaggagtttgactccatccacagaagaatgttttataagactaggaaaacacgttgaa

SEQ ID NO: 65060 - DNA, 70 bp, Homo sapiens
tataaaggagtttgactccatccacagaagaatgttttataagactaggaaaacacgttgaaaactagga

SEQ ID NO: 65061 - DNA, 70 bp, Homo sapiens
ggagtttgactccatccacagaagaatgttttataagactaggaaaacacgttgaaaactaggataaaca

SEQ ID NO: 65062 - DNA, 70 bp, Homo sapiens
ctccatccacagaagaatgttttataagactaggaaaacacgttgaaaactaggataaacagcaacaaaa

SEQ ID NO: 65063 - DNA, 68 bp, Homo sapiens
agaagaatgttttataagactaggaaaacacgttgaaaactaggataaacagcaacaaaaatcaacta

SEQ ID NO: 65064 - DNA, 69 bp, Homo sapiens
taagactaggaaaacacgttgaaaactaggataaacagcaacaaaaatcaactaaatatgttgttactg

SEQ ID NO: 65065 - DNA, 69 bp, Homo sapiens
ggaaaacacgttgaaaactaggataaacagcaacaaaaatcaactaaatatgttgttactgttgctaag

SEQ ID NO: 65066 - DNA, 70 bp, Homo sapiens
cgttgaaaactaggataaacagcaacaaaaatcaactaaatatgttgttactgttgctaaggattttctc

SEQ ID NO: 65067 - DNA, 71 bp, Homo sapiens
taggataaacagcaacaaaaatcaactaaatatgttgttactgttgctaaggattttctccttagaataat

SEQ ID NO: 65068 - DNA, 70 bp, Homo sapiens
cagcaacaaaaatcaactaaatatgttgttactgttgctaaggattttctccttagaataatttaggatt

SEQ ID NO: 65069 - DNA, 69 bp, Homo sapiens
agcaacaaaaatcaactaaatatgttgttactgttgctaaggattttctccttagaataatttaggatt

SEQ ID NO: 65070 - DNA, 67 bp, Homo sapiens
atcaactaaatatgttgttactgttgctaaggattttctccttagaataatttaggatttttaaaaa

SEQ ID NO: 65071 - DNA, 71 bp, Homo sapiens
gatttttaaaaatttctgtttgccaaatgctgtagataaatggccagattcttcctatccctaggattcct

SEQ ID NO: 65072 - DNA, 71 bp, Homo sapiens
aaaatttctgtttgccaaatgctgtagataaatggccagattcttcctatccctaggattcctttattatt

SEQ ID NO: 65073 - DNA, 72 bp, Homo sapiens
ctgtttgccaaatgctgtagataaatggccagattcttcctatccctaggattcctttattattttttttca

SEQ ID NO: 65074 - DNA, 70 bp, Homo sapiens
ctttattattttttttcacagattttgagaacaagggggagagatagtatggaagattaagattccatta

SEQ ID NO: 65075 - DNA, 75 bp, Homo sapiens
acagattttgagaacaagggggagagatagtatggaagattaagattccattaatcttatagaactgtgttgtca

SEQ ID NO: 65076 - DNA, 72 bp, Homo sapiens
aacaagggggagagatagtatggaagattaagattccattaatcttatagaactgtgttgtcacccaaattc

SEQ ID NO: 65077 - DNA, 76 bp, Homo sapiens
gagagatagtatggaagattaagattccattaatcttatagaactgtgttgtcacccaaattcctgcttgtttgaa

SEQ ID NO: 65078 - DNA, 78 bp, Homo sapiens
gaagattaagattccattaatcttatagaactgtgttgtcacccaaattcctgcttgtttgaacatggcatcttcata

SEQ ID NO: 65079 - DNA, 79 bp, Homo sapiens
ttaagattccattaatcttatagaactgtgttgtcacccaaattcctgcttgtttgaacatggcatcttcatagattca

SEQ ID NO: 65080 - DNA, 79 bp, Homo sapiens
attaatcttatagaactgtgttgtcacccaaattcctgcttgtttgaacatggcatcttcatagattcaggattcacta

SEQ ID NO: 65081 - DNA, 80 bp, Homo sapiens
tatagaactgtgttgtcacccaaattcctgcttgtttgaacatggcatcttcatagattcaggattcactaccctctata

SEQ ID NO: 65082 - DNA, 79 bp, Homo sapiens
aactgtgttgtcacccaaattcctgcttgtttgaacatggcatcttcatagattcaggattcactaccctctatagctg

SEQ ID NO: 65083 - DNA, 81 bp, Homo sapiens
ttgtcacccaaattcctgcttgtttgaacatggcatcttcatagattcaggattcactaccctctatagctggatcttgaa

SEQ ID NO: 65084 - DNA, 79 bp, Homo sapiens
aaattcctgcttgtttgaacatggcatcttcatagattcaggattcactaccctctatagctggatcttgaaaattatc

SEQ ID NO: 65085 - DNA, 81 bp, Homo sapiens
ttgtttgaacatggcatcttcatagattcaggattcactaccctctatagctggatcttgaaaattatctggccagataat

SEQ ID NO: 65086 - DNA, 80 bp, Homo sapiens
tttgaacatggcatcttcatagattcaggattcactaccctctatagctggatcttgaaaattatctggccagataattt

SEQ ID NO: 65087 - DNA, 82 bp, Homo sapiens
aacatggcatcttcatagattcaggattcactaccctctatagctggatcttgaaaattatctggccagataattttgcatc

SEQ ID NO: 65088 - DNA, 83 bp, Homo sapiens
ttcatagattcaggattcactaccctctatagctggatcttgaaaattatctggccagataattttgcatctgcttggatgat

SEQ ID NO: 65089 - DNA, 83 bp, Homo sapiens
tggatcttgaaaattatctggccagataattttgcatctgcttggatgattgtagactgagatgtgagtggaggataaagtat

SEQ ID NO: 65090 - DNA, 80 bp, Homo sapiens
aaattatctggccagataattttgcatctgcttggatgattgtagactgagatgtgagtggaggataaagtattagactt

SEQ ID NO: 65091 - DNA, 82 bp, Homo sapiens
ggccagataattttgcatctgcttggatgattgtagactgagatgtgagtggaggataaagtattagacttttgctgagtaa

SEQ ID NO: 65092 - DNA, 82 bp, Homo sapiens
taattttgcatctgcttggatgattgtagactgagatgtgagtggaggataaagtattagacttttgctgagtaactgccaa

SEQ ID NO: 65093 - DNA, 78 bp, Homo sapiens
cttggatgattgtagactgagatgtgagtggaggataaagtattagacttttgctgagtaactgccaaccaagaagta

SEQ ID NO: 65094 - DNA, 77 bp, Homo sapiens
atgattgtagactgagatgtgagtggaggataaagtattagacttttgctgagtaactgccaaccaagaagtattta

SEQ ID NO: 65095 - DNA, 74 bp, Homo sapiens
agatgtgagtggaggataaagtattagacttttgctgagtaactgccaaccaagaagtatttatcggacactta

SEQ ID NO: 65096 - DNA, 71 bp, Homo sapiens
agtggaggataaagtattagacttttgctgagtaactgccaaccaagaagtatttatcggacacttactag

SEQ ID NO: 65097 - DNA, 75 bp, Homo sapiens
tattagacttttgctgagtaactgccaaccaagaagtatttatcggacacttactaggtgcctaggattgtatca

SEQ ID NO: 65098 - DNA, 75 bp, Homo sapiens
tttgctgagtaactgccaaccaagaagtatttatcggacacttactaggtgcctaggattgtatcagagggaata

SEQ ID NO: 65099 - DNA, 73 bp, Homo sapiens
agtaactgccaaccaagaagtatttatcggacacttactaggtgcctaggattgtatcagagggaatatgaaa

SEQ ID NO: 65100 - DNA, 74 bp, Homo sapiens
aagaagtatttatcggacacttactaggtgcctaggattgtatcagagggaatatgaaatgtgtccctgcccta

SEQ ID NO: 65101 - DNA, 74 bp, Homo sapiens
tatttatcggacacttactaggtgcctaggattgtatcagagggaatatgaaatgtgtccctgccctacctagt

SEQ ID NO: 65102 - DNA, 73 bp, Homo sapiens
ttactaggtgcctaggattgtatcagagggaatatgaaatgtgtccctgccctacctagttttaacgacagaa

SEQ ID NO: 65103 - DNA, 73 bp, Homo sapiens
cctaggattgtatcagagggaatatgaaatgtgtccctgccctacctagttttaacgacagaatatctattaa

SEQ ID NO: 65104 - DNA, 73 bp, Homo sapiens
tatcagagggaatatgaaatgtgtccctgccctacctagttttaacgacagaatatctattaaaggctactta

SEQ ID NO: 65105 - DNA, 71 bp, Homo sapiens
aatatgaaatgtgtccctgccctacctagttttaacgacagaatatctattaaaggctacttagctgaagg

SEQ ID NO: 65106 - DNA, 69 bp, Homo sapiens
aaatgtgtccctgccctacctagttttaacgacagaatatctattaaaggctacttagctgaagggtaa

SEQ ID NO: 65107 - DNA, 69 bp, Homo sapiens
cctacctagttttaacgacagaatatctattaaaggctacttagctgaagggtaagggtgacaggtcta

SEQ ID NO: 65108 - DNA, 69 bp, Homo sapiens
tagttttaacgacagaatatctattaaaggctacttagctgaagggtaagggtgacaggtctaggggaa

SEQ ID NO: 65109 - DNA, 72 bp, Homo sapiens
tattaaaggctacttagctgaagggtaagggtgacaggtctaggggaagctttgggaggtggtgtgctgtga

SEQ ID NO: 65110 - DNA, 71 bp, Homo sapiens
ctacttagctgaagggtaagggtgacaggtctaggggaagctttgggaggtggtgtgctgtgacagaaaaa

SEQ ID NO: 65111 - DNA, 71 bp, Homo sapiens
aagggtaagggtgacaggtctaggggaagctttgggaggtggtgtgctgtgacagaaaaagtggcagagta

SEQ ID NO: 65112 - DNA, 75 bp, Homo sapiens
acaggtctaggggaagctttgggaggtggtgtgctgtgacagaaaaagtggcagagtagggacgagagacctgca

SEQ ID NO: 65113 - DNA, 78 bp, Homo sapiens
tttgggaggtggtgtgctgtgacagaaaaagtggcagagtagggacgagagacctgcattctagccctgtttctgtca

SEQ ID NO: 65114 - DNA, 81 bp, Homo sapiens
tgtgctgtgacagaaaaagtggcagagtagggacgagagacctgcattctagccctgtttctgtcacttgctctgtacact

SEQ ID NO: 65115 - DNA, 77 bp, Homo sapiens
agaaaaagtggcagagtagggacgagagacctgcattctagccctgtttctgtcacttgctctgtacacttagacaa

SEQ ID NO: 65116 - DNA, 80 bp, Homo sapiens
aagtggcagagtagggacgagagacctgcattctagccctgtttctgtcacttgctctgtacacttagacaacagcttga

SEQ ID NO: 65117 - DNA, 80 bp, Homo sapiens
ggacgagagacctgcattctagccctgtttctgtcacttgctctgtacacttagacaacagcttgacctcttgagcttta

SEQ ID NO: 65118 - DNA, 78 bp, Homo sapiens
agacctgcattctagccctgtttctgtcacttgctctgtacacttagacaacagcttgacctcttgagctttagtttc

SEQ ID NO: 65119 - DNA, 80 bp, Homo sapiens
tgtcacttgctctgtacacttagacaacagcttgacctcttgagctttagtttcctcctctgcataatgagagggttaga

SEQ ID NO: 65120 - DNA, 78 bp, Homo sapiens
tctgtacacttagacaacagcttgacctcttgagctttagtttcctcctctgcataatgagagggttagactactgaa

SEQ ID NO: 65121 - DNA, 76 bp, Homo sapiens
acttagacaacagcttgacctcttgagctttagtttcctcctctgcataatgagagggttagactactgaattgta

SEQ ID NO: 65122 - DNA, 74 bp, Homo sapiens
agcttgacctcttgagctttagtttcctcctctgcataatgagagggttagactactgaattgtatgggaaaaa

SEQ ID NO: 65123 - DNA, 73 bp, Homo sapiens
tcttgagctttagtttcctcctctgcataatgagagggttagactactgaattgtatgggaaaaaaatacaaa

SEQ ID NO: 65124 - DNA, 71 bp, Homo sapiens
tttagtttcctcctctgcataatgagagggttagactactgaattgtatgggaaaaaaatacaaattcctg

SEQ ID NO: 65125 - DNA, 73 bp, Homo sapiens
tcctctgcataatgagagggttagactactgaattgtatgggaaaaaaatacaaattcctgggtcctaggcca

SEQ ID NO: 65126 - DNA, 73 bp, Homo sapiens
atgagagggttagactactgaattgtatgggaaaaaaatacaaattcctgggtcctaggccatgcctgctgaa

SEQ ID NO: 65127 - DNA, 72 bp, Homo sapiens
aattgtatgggaaaaaaatacaaattcctgggtcctaggccatgcctgctgaatccgactgttcaggaagag

SEQ ID NO: 65128 - DNA, 75 bp, Homo sapiens
aaaatacaaattcctgggtcctaggccatgcctgctgaatccgactgttcaggaagaggcctaggaaatctgtga

SEQ ID NO: 65129 - DNA, 75 bp, Homo sapiens
aaattcctgggtcctaggccatgcctgctgaatccgactgttcaggaagaggcctaggaaatctgtgagggaatc

SEQ ID NO: 65130 - DNA, 74 bp, Homo sapiens
gggtcctaggccatgcctgctgaatccgactgttcaggaagaggcctaggaaatctgtgagggaatccccaggg

SEQ ID NO: 65131 - DNA, 76 bp, Homo sapiens
atgcctgctgaatccgactgttcaggaagaggcctaggaaatctgtgagggaatccccaggggaatctcgtgacca

SEQ ID NO: 65132 - DNA, 72 bp, Homo sapiens
aatccgactgttcaggaagaggcctaggaaatctgtgagggaatccccaggggaatctcgtgaccagccagg

SEQ ID NO: 65133 - DNA, 74 bp, Homo sapiens
aggaagaggcctaggaaatctgtgagggaatccccaggggaatctcgtgaccagccaggtgtgaaatctgctaa

SEQ ID NO: 65134 - DNA, 76 bp, Homo sapiens
aatctgtgagggaatccccaggggaatctcgtgaccagccaggtgtgaaatctgctaactggaagatctcaaagct

SEQ ID NO: 65135 - DNA, 74 bp, Homo sapiens
aatccccaggggaatctcgtgaccagccaggtgtgaaatctgctaactggaagatctcaaagcttccttcactt

SEQ ID NO: 65136 - DNA, 75 bp, Homo sapiens
gggaatctcgtgaccagccaggtgtgaaatctgctaactggaagatctcaaagcttccttcactttttgtgattt

SEQ ID NO: 65137 - DNA, 76 bp, Homo sapiens
accagccaggtgtgaaatctgctaactggaagatctcaaagcttccttcactttttgtgattttgtggtcatgtaa

SEQ ID NO: 65138 - DNA, 76 bp, Homo sapiens
tgtgaaatctgctaactggaagatctcaaagcttccttcactttttgtgattttgtggtcatgtaacgttactgta

SEQ ID NO: 65139 - DNA, 74 bp, Homo sapiens
atctgctaactggaagatctcaaagcttccttcactttttgtgattttgtggtcatgtaacgttactgtattat

SEQ ID NO: 65140 - DNA, 73 bp, Homo sapiens
gatctcaaagcttccttcactttttgtgattttgtggtcatgtaacgttactgtattattctacgtaaatgtg

SEQ ID NO: 65141 - DNA, 70 bp, Homo sapiens
cactttttgtgattttgtggtcatgtaacgttactgtattattctacgtaaatgtgggtacttggatgtt

SEQ ID NO: 65142 - DNA, 73 bp, Homo sapiens
gtgattttgtggtcatgtaacgttactgtattattctacgtaaatgtgggtacttggatgtttatcatactgt

SEQ ID NO: 65143 - DNA, 73 bp, Homo sapiens
cgttactgtattattctacgtaaatgtgggtacttggatgtttatcatactgtttctctgtgtttacatacta

SEQ ID NO: 65144 - DNA, 77 bp, Homo sapiens
tggatgtttatcatactgtttctctgtgtttacatactaatttgtgtaagaaatgcattttagtctgtgtacctcaa

SEQ ID NO: 65145 - DNA, 76 bp, Homo sapiens
tcatactgtttctctgtgtttacatactaatttgtgtaagaaatgcattttagtctgtgtacctcaacctgctgtt

SEQ ID NO: 65146 - DNA, 74 bp, Homo sapiens
tacatactaatttgtgtaagaaatgcattttagtctgtgtacctcaacctgctgtttgtttcctagaggtgtta

SEQ ID NO: 65147 - DNA, 73 bp, Homo sapiens
ttgtgtaagaaatgcattttagtctgtgtacctcaacctgctgtttgtttcctagaggtgttagtagtcttta

SEQ ID NO: 65148 - DNA, 71 bp, Homo sapiens
aaatgcattttagtctgtgtacctcaacctgctgtttgtttcctagaggtgttagtagtctttaaatacaa

SEQ ID NO: 65149 - DNA, 70 bp, Homo sapiens
ttttagtctgtgtacctcaacctgctgtttgtttcctagaggtgttagtagtctttaaatacaagtaaga

SEQ ID NO: 65150 - DNA, 70 bp, Homo sapiens
tacctcaacctgctgtttgtttcctagaggtgttagtagtctttaaatacaagtaagacttaagaggata

SEQ ID NO: 65151 - DNA, 70 bp, Homo sapiens
cctgctgtttgtttcctagaggtgttagtagtctttaaatacaagtaagacttaagaggatatttgatgt

SEQ ID NO: 65152 - DNA, 70 bp, Homo sapiens
ttcctagaggtgttagtagtctttaaatacaagtaagacttaagaggatatttgatgttatttacctgga

SEQ ID NO: 65153 - DNA, 69 bp, Homo sapiens
ggtgttagtagtctttaaatacaagtaagacttaagaggatatttgatgttatttacctggatattttc

SEQ ID NO: 65154 - DNA, 67 bp, Homo sapiens
agtctttaaatacaagtaagacttaagaggatatttgatgttatttacctggatattttcttcccct

SEQ ID NO: 65155 - DNA, 67 bp, Homo sapiens
tacaagtaagacttaagaggatatttgatgttatttacctggatattttcttccccttttatttatt

SEQ ID NO: 65156 - DNA, 67 bp, Homo sapiens
atttaaaaattatatgggaagatttttctctgggataacaaatccttgtcataaagtaagaggtctt

SEQ ID NO: 65157 - DNA, 68 bp, Homo sapiens
tatatgggaagatttttctctgggataacaaatccttgtcataaagtaagaggtctttttaaagtagg

SEQ ID NO: 65158 - DNA, 67 bp, Homo sapiens
ggaagatttttctctgggataacaaatccttgtcataaagtaagaggtctttttaaagtaggtaggc

SEQ ID NO: 65159 - DNA, 69 bp, Homo sapiens
tctgggataacaaatccttgtcataaagtaagaggtctttttaaagtaggtaggctataaggcctgtaa

SEQ ID NO: 65160 - DNA, 66 bp, Homo sapiens
aacaaatccttgtcataaagtaagaggtctttttaaagtaggtaggctataaggcctgtaatttaa

SEQ ID NO: 65161 - DNA, 65 bp, Homo sapiens
gaggtctttttaaagtaggtaggctataaggcctgtaatttaaaataatactcctttctctaggg

SEQ ID NO: 65162 - DNA, 67 bp, Homo sapiens
aaagtaggtaggctataaggcctgtaatttaaaataatactcctttctctagggtttggtgcaattc

SEQ ID NO: 65163 - DNA, 70 bp, Homo sapiens
aaggcctgtaatttaaaataatactcctttctctagggtttggtgcaattctccattaatgaagataaca

SEQ ID NO: 65164 - DNA, 70 bp, Homo sapiens
tttaaaataatactcctttctctagggtttggtgcaattctccattaatgaagataacatttgaattccc

SEQ ID NO: 65165 - DNA, 71 bp, Homo sapiens
aatactcctttctctagggtttggtgcaattctccattaatgaagataacatttgaattccccaaagcagg

SEQ ID NO: 65166 - DNA, 73 bp, Homo sapiens
tctctagggtttggtgcaattctccattaatgaagataacatttgaattccccaaagcaggtgaggagtcggg

SEQ ID NO: 65167 - DNA, 75 bp, Homo sapiens
tgcaattctccattaatgaagataacatttgaattccccaaagcaggtgaggagtcggggaggagaaagcgatgt

SEQ ID NO: 65168 - DNA, 72 bp, Homo sapiens
attaatgaagataacatttgaattccccaaagcaggtgaggagtcggggaggagaaagcgatgttaaaatga

SEQ ID NO: 65169 - DNA, 69 bp, Homo sapiens
aagataacatttgaattccccaaagcaggtgaggagtcggggaggagaaagcgatgttaaaatgaaaac

SEQ ID NO: 65170 - DNA, 71 bp, Homo sapiens
atttgaattccccaaagcaggtgaggagtcggggaggagaaagcgatgttaaaatgaaaactcactgcaaa

SEQ ID NO: 65171 - DNA, 73 bp, Homo sapiens
cccaaagcaggtgaggagtcggggaggagaaagcgatgttaaaatgaaaactcactgcaaaagaggaggcaga

SEQ ID NO: 65172 - DNA, 73 bp, Homo sapiens
gagtcggggaggagaaagcgatgttaaaatgaaaactcactgcaaaagaggaggcagaggaagaaggaatgta

SEQ ID NO: 65173 - DNA, 71 bp, Homo sapiens
gggaggagaaagcgatgttaaaatgaaaactcactgcaaaagaggaggcagaggaagaaggaatgtaaacc

SEQ ID NO: 65174 - DNA, 69 bp, Homo sapiens
aagcgatgttaaaatgaaaactcactgcaaaagaggaggcagaggaagaaggaatgtaaaccccttaaa

SEQ ID NO: 65175 - DNA, 72 bp, Homo sapiens
aaaatgaaaactcactgcaaaagaggaggcagaggaagaaggaatgtaaaccccttaaagcagatgtgtgtg

SEQ ID NO: 65176 - DNA, 72 bp, Homo sapiens
aggaggcagaggaagaaggaatgtaaaccccttaaagcagatgtgtgtggggccttatgaagaccaggattc

SEQ ID NO: 65177 - DNA, 72 bp, Homo sapiens
aagaaggaatgtaaaccccttaaagcagatgtgtgtggggccttatgaagaccaggattctgcgggtgtcag

SEQ ID NO: 65178 - DNA, 73 bp, Homo sapiens
aatgtaaaccccttaaagcagatgtgtgtggggccttatgaagaccaggattctgcgggtgtcaggggattgc

SEQ ID NO: 65179 - DNA, 73 bp, Homo sapiens
ccttatgaagaccaggattctgcgggtgtcaggggattgcccctcttgacagagactagggttttagactgag

SEQ ID NO: 65180 - DNA, 72 bp, Homo sapiens
aagaccaggattctgcgggtgtcaggggattgcccctcttgacagagactagggttttagactgaggcttcc

SEQ ID NO: 65181 - DNA, 72 bp, Homo sapiens
ccctcttgacagagactagggttttagactgaggcttcctgcagggtgttcgcattgcccttctccgttccc

SEQ ID NO: 65182 - DNA, 71 bp, Homo sapiens
tagggttttagactgaggcttcctgcagggtgttcgcattgcccttctccgttccccttcagacctttctg

SEQ ID NO: 65183 - DNA, 71 bp, Homo sapiens
ttcctgcagggtgttcgcattgcccttctccgttccccttcagacctttctggggagaagaggtgggagga

SEQ ID NO: 65184 - DNA, 69 bp, Homo sapiens
tgttcgcattgcccttctccgttccccttcagacctttctggggagaagaggtgggaggaggggagaaa

SEQ ID NO: 65185 - DNA, 69 bp, Homo sapiens
ttctccgttccccttcagacctttctggggagaagaggtgggaggaggggagaaagactgttcatctta

SEQ ID NO: 65186 - DNA, 71 bp, Homo sapiens
cccttcagacctttctggggagaagaggtgggaggaggggagaaagactgttcatcttattctgaatcctg

SEQ ID NO: 65187 - DNA, 74 bp, Homo sapiens
acctttctggggagaagaggtgggaggaggggagaaagactgttcatcttattctgaatcctggagcagctgaa

SEQ ID NO: 65188 - DNA, 75 bp, Homo sapiens
agaagaggtgggaggaggggagaaagactgttcatcttattctgaatcctggagcagctgaaggttttctcttga

SEQ ID NO: 65189 - DNA, 79 bp, Homo sapiens
ggaggaggggagaaagactgttcatcttattctgaatcctggagcagctgaaggttttctcttgagtcaggatgcagtg

SEQ ID NO: 65190 - DNA, 82 bp, Homo sapiens
ttattctgaatcctggagcagctgaaggttttctcttgagtcaggatgcagtggtaatgcattaaccagcaagtgtggccaa

SEQ ID NO: 65191 - DNA, 81 bp, Homo sapiens
tggagcagctgaaggttttctcttgagtcaggatgcagtggtaatgcattaaccagcaagtgtggccaaggataatgaaaa

SEQ ID NO: 65192 - DNA, 75 bp, Homo sapiens
aaggttttctcttgagtcaggatgcagtggtaatgcattaaccagcaagtgtggccaaggataatgaaaaagtgg

SEQ ID NO: 65193 - DNA, 77 bp, Homo sapiens
tttctcttgagtcaggatgcagtggtaatgcattaaccagcaagtgtggccaaggataatgaaaaagtgggaaagga

SEQ ID NO: 65194 - DNA, 73 bp, Homo sapiens
aggatgcagtggtaatgcattaaccagcaagtgtggccaaggataatgaaaaagtgggaaaggaaggtcctcc

SEQ ID NO: 65195 - DNA, 71 bp, Homo sapiens
agtggtaatgcattaaccagcaagtgtggccaaggataatgaaaaagtgggaaaggaaggtcctcctcctc

SEQ ID NO: 65196 - DNA, 70 bp, Homo sapiens
attaaccagcaagtgtggccaaggataatgaaaaagtgggaaaggaaggtcctcctcctccctgattgta

SEQ ID NO: 65197 - DNA, 73 bp, Homo sapiens
aagtgtggccaaggataatgaaaaagtgggaaaggaaggtcctcctcctccctgattgtagcatccagcagtc

SEQ ID NO: 65198 - DNA, 74 bp, Homo sapiens
ataatgaaaaagtgggaaaggaaggtcctcctcctccctgattgtagcatccagcagtctctgtagccaggtta

SEQ ID NO: 65199 - DNA, 73 bp, Homo sapiens
aaaaagtgggaaaggaaggtcctcctcctccctgattgtagcatccagcagtctctgtagccaggttactcaa

SEQ ID NO: 65200 - DNA, 76 bp, Homo sapiens
aggaaggtcctcctcctccctgattgtagcatccagcagtctctgtagccaggttactcaagaaccacatttgatt

SEQ ID NO: 65201 - DNA, 77 bp, Homo sapiens
tcctcctccctgattgtagcatccagcagtctctgtagccaggttactcaagaaccacatttgatttcctggccctt

SEQ ID NO: 65202 - DNA, 79 bp, Homo sapiens
attgtagcatccagcagtctctgtagccaggttactcaagaaccacatttgatttcctggccctttgccttggcagtga

SEQ ID NO: 65203 - DNA, 75 bp, Homo sapiens
tctctgtagccaggttactcaagaaccacatttgatttcctggccctttgccttggcagtgatggcatttttatt

SEQ ID NO: 65204 - DNA, 71 bp, Homo sapiens
aagaaccacatttgatttcctggccctttgccttggcagtgatggcatttttatttcactgtgttttaaag

SEQ ID NO: 65205 - DNA, 72 bp, Homo sapiens
atttgatttcctggccctttgccttggcagtgatggcatttttatttcactgtgttttaaagtcttcattta

SEQ ID NO: 65206 - DNA, 71 bp, Homo sapiens
cctggccctttgccttggcagtgatggcatttttatttcactgtgttttaaagtcttcatttatttttata

SEQ ID NO: 65207 - DNA, 72 bp, Homo sapiens
tggcagtgatggcatttttatttcactgtgttttaaagtcttcatttatttttataacatgggttagggaga

SEQ ID NO: 65208 - DNA, 67 bp, Homo sapiens
ggcatttttatttcactgtgttttaaagtcttcatttatttttataacatgggttagggagaagggc

SEQ ID NO: 65209 - DNA, 68 bp, Homo sapiens
tttcactgtgttttaaagtcttcatttatttttataacatgggttagggagaagggccacaaatggag

SEQ ID NO: 65210 - DNA, 68 bp, Homo sapiens
tgttttaaagtcttcatttatttttataacatgggttagggagaagggccacaaatggagggattgtc

SEQ ID NO: 65211 - DNA, 73 bp, Homo sapiens
tttttataacatgggttagggagaagggccacaaatggagggattgtcctttcaagcaccacagcttcagata

SEQ ID NO: 65212 - DNA, 72 bp, Homo sapiens
agaagggccacaaatggagggattgtcctttcaagcaccacagcttcagataaaattagtactttcaaatat

SEQ ID NO: 65213 - DNA, 72 bp, Homo sapiens
aaatggagggattgtcctttcaagcaccacagcttcagataaaattagtactttcaaatattgtccacttta

SEQ ID NO: 65214 - DNA, 72 bp, Homo sapiens
gagggattgtcctttcaagcaccacagcttcagataaaattagtactttcaaatattgtccactttaactta

SEQ ID NO: 65215 - DNA, 68 bp, Homo sapiens
cctttcaagcaccacagcttcagataaaattagtactttcaaatattgtccactttaacttaaaaaat

SEQ ID NO: 65216 - DNA, 68 bp, Homo sapiens
accacagcttcagataaaattagtactttcaaatattgtccactttaacttaaaaaattctagaggga

SEQ ID NO: 65217 - DNA, 66 bp, Homo sapiens
aaaattagtactttcaaatattgtccactttaacttaaaaaattctagagggattatattggagac

SEQ ID NO: 65218 - DNA, 69 bp, Homo sapiens
ctttcaaatattgtccactttaacttaaaaaattctagagggattatattggagactcaactgcccttg

SEQ ID NO: 65219 - DNA, 67 bp, Homo sapiens
attgtccactttaacttaaaaaattctagagggattatattggagactcaactgcccttggttttag

SEQ ID NO: 65220 - DNA, 67 bp, Homo sapiens
taacttaaaaaattctagagggattatattggagactcaactgcccttggttttagtttataaaatg

SEQ ID NO: 65221 - DNA, 69 bp, Homo sapiens
aaattctagagggattatattggagactcaactgcccttggttttagtttataaaatggcctagtactg

SEQ ID NO: 65222 - DNA, 69 bp, Homo sapiens
gggattatattggagactcaactgcccttggttttagtttataaaatggcctagtactgtggaatttta

SEQ ID NO: 65223 - DNA, 67 bp, Homo sapiens
atattggagactcaactgcccttggttttagtttataaaatggcctagtactgtggaattttaattt

SEQ ID NO: 65224 - DNA, 66 bp, Homo sapiens
ctcaactgcccttggttttagtttataaaatggcctagtactgtggaattttaattttagaaagtc

SEQ ID NO: 65225 - DNA, 70 bp, Homo sapiens
cttggttttagtttataaaatggcctagtactgtggaattttaattttagaaagtcttagcatcagatca

SEQ ID NO: 65226 - DNA, 76 bp, Homo sapiens
ctgtggaattttaattttagaaagtcttagcatcagatcataaacattcattaaaagaactcacatcccatctgaa

SEQ ID NO: 65227 - DNA, 74 bp, Homo sapiens
attttagaaagtcttagcatcagatcataaacattcattaaaagaactcacatcccatctgaaacttcccaggg

SEQ ID NO: 65228 - DNA, 74 bp, Homo sapiens
aaagtcttagcatcagatcataaacattcattaaaagaactcacatcccatctgaaacttcccaggggagttgg

SEQ ID NO: 65229 - DNA, 74 bp, Homo sapiens
atcagatcataaacattcattaaaagaactcacatcccatctgaaacttcccaggggagttgggattcttagta

SEQ ID NO: 65230 - DNA, 71 bp, Homo sapiens
attcattaaaagaactcacatcccatctgaaacttcccaggggagttgggattcttagtagattggtagaa

SEQ ID NO: 65231 - DNA, 69 bp, Homo sapiens
ttaaaagaactcacatcccatctgaaacttcccaggggagttgggattcttagtagattggtagaaagg

SEQ ID NO: 65232 - DNA, 68 bp, Homo sapiens
aaacttcccaggggagttgggattcttagtagattggtagaaaggggctcattttctactgcatttcc

SEQ ID NO: 65233 - DNA, 70 bp, Homo sapiens
gggagttgggattcttagtagattggtagaaaggggctcattttctactgcatttcccatttttggtatc

SEQ ID NO: 65234 - DNA, 73 bp, Homo sapiens
attcttagtagattggtagaaaggggctcattttctactgcatttcccatttttggtatcttgttcagcatgt

SEQ ID NO: 65235 - DNA, 73 bp, Homo sapiens
tagtagattggtagaaaggggctcattttctactgcatttcccatttttggtatcttgttcagcatgttttat

SEQ ID NO: 65236 - DNA, 70 bp, Homo sapiens
gtagaaaggggctcattttctactgcatttcccatttttggtatcttgttcagcatgttttatttttatt

SEQ ID NO: 65237 - DNA, 75 bp, Homo sapiens
tatttttatttcttgtctgcagaacatcctatatttatgagaacattctttaagaagaccaccacatagaatacc

SEQ ID NO: 65238 - DNA, 75 bp, Homo sapiens
ttatttcttgtctgcagaacatcctatatttatgagaacattctttaagaagaccaccacatagaataccccttc

SEQ ID NO: 65239 - DNA, 77 bp, Homo sapiens
agaacatcctatatttatgagaacattctttaagaagaccaccacatagaataccccttcctatcagctcgctctga

SEQ ID NO: 65240 - DNA, 76 bp, Homo sapiens
atcctatatttatgagaacattctttaagaagaccaccacatagaataccccttcctatcagctcgctctgattta

SEQ ID NO: 65241 - DNA, 72 bp, Homo sapiens
agaacattctttaagaagaccaccacatagaataccccttcctatcagctcgctctgatttagccttaattt

SEQ ID NO: 65242 - DNA, 72 bp, Homo sapiens
ttctttaagaagaccaccacatagaataccccttcctatcagctcgctctgatttagccttaattttgttaa

SEQ ID NO: 65243 - DNA, 70 bp, Homo sapiens
agaccaccacatagaataccccttcctatcagctcgctctgatttagccttaattttgttaaatttttta

SEQ ID NO: 65244 - DNA, 72 bp, Homo sapiens
aataccccttcctatcagctcgctctgatttagccttaattttgttaaattttttagagatgaatgaagtgc

SEQ ID NO: 65245 - DNA, 76 bp, Homo sapiens
ctatcagctcgctctgatttagccttaattttgttaaattttttagagatgaatgaagtgctgctgtggaaagaaa

SEQ ID NO: 65246 - DNA, 76 bp, Homo sapiens
gctcgctctgatttagccttaattttgttaaattttttagagatgaatgaagtgctgctgtggaaagaaatgtaca

SEQ ID NO: 65247 - DNA, 73 bp, Homo sapiens
agccttaattttgttaaattttttagagatgaatgaagtgctgctgtggaaagaaatgtacatatactatttc

SEQ ID NO: 65248 - DNA, 76 bp, Homo sapiens
ttgttaaattttttagagatgaatgaagtgctgctgtggaaagaaatgtacatatactatttctgtatcattaaaa

SEQ ID NO: 65249 - DNA, 76 bp, Homo sapiens
tttttagagatgaatgaagtgctgctgtggaaagaaatgtacatatactatttctgtatcattaaaattacatttt

SEQ ID NO: 65250 - DNA, 77 bp, Homo sapiens
gatgaatgaagtgctgctgtggaaagaaatgtacatatactatttctgtatcattaaaattacatttttatggttcc

SEQ ID NO: 65251 - DNA, 73 bp, Homo sapiens
gtgctgctgtggaaagaaatgtacatatactatttctgtatcattaaaattacatttttatggttccttttcc

SEQ ID NO: 65252 - DNA, 69 bp, Homo sapiens
catatactatttctgtatcattaaaattacatttttatggttccttttcctggatttctttgagggaag

SEQ ID NO: 65253 - DNA, 66 bp, Homo sapiens
ttctgtatcattaaaattacatttttatggttccttttcctggatttctttgagggaagggttttg

SEQ ID NO: 65254 - DNA, 74 bp, Homo sapiens
gcaaattgtttgaaatgctttgaaaatgaaatcttaatattaaaaggcatatgcatgtaaagtctttagtatat

SEQ ID NO: 65255 - DNA, 74 bp, Homo sapiens
gaaatgctttgaaaatgaaatcttaatattaaaaggcatatgcatgtaaagtctttagtatatttatttgtata

SEQ ID NO: 65256 - DNA, 72 bp, Homo sapiens
aatgaaatcttaatattaaaaggcatatgcatgtaaagtctttagtatatttatttgtataaagagtaaaca

SEQ ID NO: 65257 - DNA, 75 bp, Homo sapiens
taatattaaaaggcatatgcatgtaaagtctttagtatatttatttgtataaagagtaaacaaagtgcatataga

SEQ ID NO: 65258 - DNA, 76 bp, Homo sapiens
aggcatatgcatgtaaagtctttagtatatttatttgtataaagagtaaacaaagtgcatatagagtggccacagg

SEQ ID NO: 65259 - DNA, 75 bp, Homo sapiens
gcatgtaaagtctttagtatatttatttgtataaagagtaaacaaagtgcatatagagtggccacaggtttgaca

SEQ ID NO: 65260 - DNA, 74 bp, Homo sapiens
ttagtatatttatttgtataaagagtaaacaaagtgcatatagagtggccacaggtttgacacagagaccttgg

SEQ ID NO: 65261 - DNA, 77 bp, Homo sapiens
taaacaaagtgcatatagagtggccacaggtttgacacagagaccttggtgatgtaggctatgaacaaatttaaatg

SEQ ID NO: 65262 - DNA, 78 bp, Homo sapiens
atatagagtggccacaggtttgacacagagaccttggtgatgtaggctatgaacaaatttaaatggcaacttcattgc

SEQ ID NO: 65263 - DNA, 78 bp, Homo sapiens
acaggtttgacacagagaccttggtgatgtaggctatgaacaaatttaaatggcaacttcattgctgccactgaacca

SEQ ID NO: 65264 - DNA, 78 bp, Homo sapiens
cacagagaccttggtgatgtaggctatgaacaaatttaaatggcaacttcattgctgccactgaaccaatcctgaatt

SEQ ID NO: 65265 - DNA, 76 bp, Homo sapiens
agaccttggtgatgtaggctatgaacaaatttaaatggcaacttcattgctgccactgaaccaatcctgaatttgg

SEQ ID NO: 65266 - DNA, 77 bp, Homo sapiens
taggctatgaacaaatttaaatggcaacttcattgctgccactgaaccaatcctgaatttgggctcaacaggtgaaa

SEQ ID NO: 65267 - DNA, 73 bp, Homo sapiens
aacaaatttaaatggcaacttcattgctgccactgaaccaatcctgaatttgggctcaacaggtgaaaagtaa

SEQ ID NO: 65268 - DNA, 76 bp, Homo sapiens
ttaaatggcaacttcattgctgccactgaaccaatcctgaatttgggctcaacaggtgaaaagtaacaatatcaaa

SEQ ID NO: 65269 - DNA, 74 bp, Homo sapiens
attgctgccactgaaccaatcctgaatttgggctcaacaggtgaaaagtaacaatatcaaacgaatactaaaca

SEQ ID NO: 65270 - DNA, 73 bp, Homo sapiens
actgaaccaatcctgaatttgggctcaacaggtgaaaagtaacaatatcaaacgaatactaaacagcataaca

SEQ ID NO: 65271 - DNA, 71 bp, Homo sapiens
ccaatcctgaatttgggctcaacaggtgaaaagtaacaatatcaaacgaatactaaacagcataacaaaaa

SEQ ID NO: 65272 - DNA, 71 bp, Homo sapiens
gggctcaacaggtgaaaagtaacaatatcaaacgaatactaaacagcataacaaaaagattttcagactct

SEQ ID NO: 65273 - DNA, 72 bp, Homo sapiens
caggtgaaaagtaacaatatcaaacgaatactaaacagcataacaaaaagattttcagactcttggtcataa

SEQ ID NO: 65274 - DNA, 71 bp, Homo sapiens
acaatatcaaacgaatactaaacagcataacaaaaagattttcagactcttggtcataaagaccgtaatcg

SEQ ID NO: 65275 - DNA, 71 bp, Homo sapiens
caaacgaatactaaacagcataacaaaaagattttcagactcttggtcataaagaccgtaatcgttcacat

SEQ ID NO: 65276 - DNA, 75 bp, Homo sapiens
tactaaacagcataacaaaaagattttcagactcttggtcataaagaccgtaatcgttcacattgaatcaatgac

SEQ ID NO: 65277 - DNA, 73 bp, Homo sapiens
caaaaagattttcagactcttggtcataaagaccgtaatcgttcacattgaatcaatgactaaacatttttga

SEQ ID NO: 65278 - DNA, 75 bp, Homo sapiens
tttcagactcttggtcataaagaccgtaatcgttcacattgaatcaatgactaaacatttttgattacccagcta

SEQ ID NO: 65279 - DNA, 74 bp, Homo sapiens
tcttggtcataaagaccgtaatcgttcacattgaatcaatgactaaacatttttgattacccagctacctccaa

SEQ ID NO: 65280 - DNA, 72 bp, Homo sapiens
ataaagaccgtaatcgttcacattgaatcaatgactaaacatttttgattacccagctacctccaagcaaac

SEQ ID NO: 65281 - DNA, 75 bp, Homo sapiens
taatcgttcacattgaatcaatgactaaacatttttgattacccagctacctccaagcaaactgaaaactgtcta

SEQ ID NO: 65282 - DNA, 75 bp, Homo sapiens
atttttgattacccagctacctccaagcaaactgaaaactgtctagtggatcctgaagtccatagtgcctctagc

SEQ ID NO: 65283 - DNA, 74 bp, Homo sapiens
agctacctccaagcaaactgaaaactgtctagtggatcctgaagtccatagtgcctctagccgggtctttcaag

SEQ ID NO: 65284 - DNA, 76 bp, Homo sapiens
aagcaaactgaaaactgtctagtggatcctgaagtccatagtgcctctagccgggtctttcaagtgttgcaccaca

SEQ ID NO: 65285 - DNA, 78 bp, Homo sapiens
tagtggatcctgaagtccatagtgcctctagccgggtctttcaagtgttgcaccacagggtgatgattgatggtaaaa

SEQ ID NO: 65286 - DNA, 76 bp, Homo sapiens
aagtccatagtgcctctagccgggtctttcaagtgttgcaccacagggtgatgattgatggtaaaaacagggatca

SEQ ID NO: 65287 - DNA, 75 bp, Homo sapiens
tgcctctagccgggtctttcaagtgttgcaccacagggtgatgattgatggtaaaaacagggatcaacccttgta

SEQ ID NO: 65288 - DNA, 74 bp, Homo sapiens
ctagccgggtctttcaagtgttgcaccacagggtgatgattgatggtaaaaacagggatcaacccttgtagatc

SEQ ID NO: 65289 - DNA, 74 bp, Homo sapiens
tttcaagtgttgcaccacagggtgatgattgatggtaaaaacagggatcaacccttgtagatcggtggtaagta

SEQ ID NO: 65290 - DNA, 70 bp, Homo sapiens
accacagggtgatgattgatggtaaaaacagggatcaacccttgtagatcggtggtaagtatggaaaccc

SEQ ID NO: 65291 - DNA, 70 bp, Homo sapiens
atgattgatggtaaaaacagggatcaacccttgtagatcggtggtaagtatggaaaccctctaagaacag

SEQ ID NO: 65292 - DNA, 71 bp, Homo sapiens
gtaaaaacagggatcaacccttgtagatcggtggtaagtatggaaaccctctaagaacagtgcagcgtatg

SEQ ID NO: 65293 - DNA, 72 bp, Homo sapiens
aacagggatcaacccttgtagatcggtggtaagtatggaaaccctctaagaacagtgcagcgtatgtggtat

SEQ ID NO: 65294 - DNA, 72 bp, Homo sapiens
aacccttgtagatcggtggtaagtatggaaaccctctaagaacagtgcagcgtatgtggtattcagactggt

SEQ ID NO: 65295 - DNA, 78 bp, Homo sapiens
atcggtggtaagtatggaaaccctctaagaacagtgcagcgtatgtggtattcagactggttgcatacagcattcaaa

SEQ ID NO: 65296 - DNA, 81 bp, Homo sapiens
tatggaaaccctctaagaacagtgcagcgtatgtggtattcagactggttgcatacagcattcaaaaccagtgctggaata

SEQ ID NO: 65297 - DNA, 81 bp, Homo sapiens
accctctaagaacagtgcagcgtatgtggtattcagactggttgcatacagcattcaaaaccagtgctggaatagcttgcc

SEQ ID NO: 65298 - DNA, 81 bp, Homo sapiens
acagtgcagcgtatgtggtattcagactggttgcatacagcattcaaaaccagtgctggaatagcttgccccaaagtggta

SEQ ID NO: 65299 - DNA, 76 bp, Homo sapiens
agactggttgcatacagcattcaaaaccagtgctggaatagcttgccccaaagtggtagagttataaaaggatata

SEQ ID NO: 65300 - DNA, 74 bp, Homo sapiens
atacagcattcaaaaccagtgctggaatagcttgccccaaagtggtagagttataaaaggatatacattgacgt

SEQ ID NO: 65301 - DNA, 72 bp, Homo sapiens
tcaaaaccagtgctggaatagcttgccccaaagtggtagagttataaaaggatatacattgacgtttcttaa

SEQ ID NO: 65302 - DNA, 74 bp, Homo sapiens
tgctggaatagcttgccccaaagtggtagagttataaaaggatatacattgacgtttcttaaaagcatgtgtaa

SEQ ID NO: 65303 - DNA, 72 bp, Homo sapiens
aaagtggtagagttataaaaggatatacattgacgtttcttaaaagcatgtgtaatagcatccaggttctgg

SEQ ID NO: 65304 - DNA, 75 bp, Homo sapiens
gttataaaaggatatacattgacgtttcttaaaagcatgtgtaatagcatccaggttctgggaatgagttctgat

SEQ ID NO: 65305 - DNA, 75 bp, Homo sapiens
atatacattgacgtttcttaaaagcatgtgtaatagcatccaggttctgggaatgagttctgattaaaggtatac

SEQ ID NO: 65306 - DNA, 75 bp, Homo sapiens
attgacgtttcttaaaagcatgtgtaatagcatccaggttctgggaatgagttctgattaaaggtatactgctta

SEQ ID NO: 65307 - DNA, 77 bp, Homo sapiens
tcttaaaagcatgtgtaatagcatccaggttctgggaatgagttctgattaaaggtatactgcttaggaaagcactg

SEQ ID NO: 65308 - DNA, 78 bp, Homo sapiens
atgtgtaatagcatccaggttctgggaatgagttctgattaaaggtatactgcttaggaaagcactggcacaggctta

SEQ ID NO: 65309 - DNA, 75 bp, Homo sapiens
caggttctgggaatgagttctgattaaaggtatactgcttaggaaagcactggcacaggcttagttcttgagaat

SEQ ID NO: 65310 - DNA, 79 bp, Homo sapiens
gaatgagttctgattaaaggtatactgcttaggaaagcactggcacaggcttagttcttgagaattaacatgcagcaaa

SEQ ID NO: 65311 - DNA, 78 bp, Homo sapiens
aaaggtatactgcttaggaaagcactggcacaggcttagttcttgagaattaacatgcagcaaattatctattccaca

SEQ ID NO: 65312 - DNA, 80 bp, Homo sapiens
taggaaagcactggcacaggcttagttcttgagaattaacatgcagcaaattatctattccacagctatccccccatgta

SEQ ID NO: 65313 - DNA, 79 bp, Homo sapiens
tggcacaggcttagttcttgagaattaacatgcagcaaattatctattccacagctatccccccatgtagaaccagctt

SEQ ID NO: 65314 - DNA, 77 bp, Homo sapiens
ttagttcttgagaattaacatgcagcaaattatctattccacagctatccccccatgtagaaccagctttctcaaaa

SEQ ID NO: 65315 - DNA, 77 bp, Homo sapiens
agaattaacatgcagcaaattatctattccacagctatccccccatgtagaaccagctttctcaaaaatgggtgcta

SEQ ID NO: 65316 - DNA, 80 bp, Homo sapiens
taacatgcagcaaattatctattccacagctatccccccatgtagaaccagctttctcaaaaatgggtgctagtgatcac

SEQ ID NO: 65317 - DNA, 74 bp, Homo sapiens
attccacagctatccccccatgtagaaccagctttctcaaaaatgggtgctagtgatcacccaaaggaacagga

SEQ ID NO: 65318 - DNA, 75 bp, Homo sapiens
ccccatgtagaaccagctttctcaaaaatgggtgctagtgatcacccaaaggaacaggagctaagccactggaga

SEQ ID NO: 65319 - DNA, 71 bp, Homo sapiens
aaatgggtgctagtgatcacccaaaggaacaggagctaagccactggagaaacaaagtttaagtcctactg

SEQ ID NO: 65320 - DNA, 74 bp, Homo sapiens
tagtgatcacccaaaggaacaggagctaagccactggagaaacaaagtttaagtcctactggtgagagaataca

SEQ ID NO: 65321 - DNA, 70 bp, Homo sapiens
aaaggaacaggagctaagccactggagaaacaaagtttaagtcctactggtgagagaatacagtcatttt

SEQ ID NO: 65322 - DNA, 72 bp, Homo sapiens
ctaagccactggagaaacaaagtttaagtcctactggtgagagaatacagtcatttttgtacagaaacaata

SEQ ID NO: 65323 - DNA, 72 bp, Homo sapiens
ccactggagaaacaaagtttaagtcctactggtgagagaatacagtcatttttgtacagaaacaatatatac

SEQ ID NO: 65324 - DNA, 73 bp, Homo sapiens
caaagtttaagtcctactggtgagagaatacagtcatttttgtacagaaacaatatatactacctggtatcta

SEQ ID NO: 65325 - DNA, 74 bp, Homo sapiens
gtcctactggtgagagaatacagtcatttttgtacagaaacaatatatactacctggtatctaatattttaaga

SEQ ID NO: 65326 - DNA, 76 bp, Homo sapiens
ggtgagagaatacagtcatttttgtacagaaacaatatatactacctggtatctaatattttaagaatgcatggtc

SEQ ID NO: 65327 - DNA, 76 bp, Homo sapiens
gtcatttttgtacagaaacaatatatactacctggtatctaatattttaagaatgcatggtctagtactgtataga

SEQ ID NO: 65328 - DNA, 76 bp, Homo sapiens
acctggtatctaatattttaagaatgcatggtctagtactgtatagatactgaaatttgagggctaagtccatcaa

SEQ ID NO: 65329 - DNA, 76 bp, Homo sapiens
atattttaagaatgcatggtctagtactgtatagatactgaaatttgagggctaagtccatcaatctttctttatc

SEQ ID NO: 65330 - DNA, 78 bp, Homo sapiens
ctagtactgtatagatactgaaatttgagggctaagtccatcaatctttctttatctatgattaatgtgccagcaaaa

SEQ ID NO: 65331 - DNA, 79 bp, Homo sapiens
ctgtatagatactgaaatttgagggctaagtccatcaatctttctttatctatgattaatgtgccagcaaaacatttca

SEQ ID NO: 65332 - DNA, 82 bp, Homo sapiens
tactgaaatttgagggctaagtccatcaatctttctttatctatgattaatgtgccagcaaaacatttcagatcagctggca

SEQ ID NO: 65333 - DNA, 80 bp, Homo sapiens
agggctaagtccatcaatctttctttatctatgattaatgtgccagcaaaacatttcagatcagctggcagcagggaaaa

SEQ ID NO: 65334 - DNA, 85 bp, Homo sapiens
tcaatctttctttatctatgattaatgtgccagcaaaacatttcagatcagctggcagcagggaaaagcaatcatcttcagatat

SEQ ID NO: 65335 - DNA, 83 bp, Homo sapiens
ttctttatctatgattaatgtgccagcaaaacatttcagatcagctggcagcagggaaaagcaatcatcttcagatattattt

SEQ ID NO: 65336 - DNA, 84 bp, Homo sapiens
tatgattaatgtgccagcaaaacatttcagatcagctggcagcagggaaaagcaatcatcttcagatattattttggtcaactc

SEQ ID NO: 65337 - DNA, 80 bp, Homo sapiens
cagcaaaacatttcagatcagctggcagcagggaaaagcaatcatcttcagatattattttggtcaactcctcgttttca

SEQ ID NO: 65338 - DNA, 77 bp, Homo sapiens
atttcagatcagctggcagcagggaaaagcaatcatcttcagatattattttggtcaactcctcgttttcaaaaatc

SEQ ID NO: 65339 - DNA, 72 bp, Homo sapiens
gctggcagcagggaaaagcaatcatcttcagatattattttggtcaactcctcgttttcaaaaatccccttt

SEQ ID NO: 65340 - DNA, 69 bp, Homo sapiens
cagggaaaagcaatcatcttcagatattattttggtcaactcctcgttttcaaaaatccccttttggta

SEQ ID NO: 65341 - DNA, 71 bp, Homo sapiens
aagcaatcatcttcagatattattttggtcaactcctcgttttcaaaaatccccttttggtaatgcagttg

SEQ ID NO: 65342 - DNA, 70 bp, Homo sapiens
agatattattttggtcaactcctcgttttcaaaaatccccttttggtaatgcagttgtgatggtgaacta

SEQ ID NO: 65343 - DNA, 73 bp, Homo sapiens
tattttggtcaactcctcgttttcaaaaatccccttttggtaatgcagttgtgatggtgaactagccagatga

SEQ ID NO: 65344 - DNA, 73 bp, Homo sapiens
tcctcgttttcaaaaatccccttttggtaatgcagttgtgatggtgaactagccagatgaaatggtggtatat

SEQ ID NO: 65345 - DNA, 74 bp, Homo sapiens
tttcaaaaatccccttttggtaatgcagttgtgatggtgaactagccagatgaaatggtggtatattctttcca

SEQ ID NO: 65346 - DNA, 77 bp, Homo sapiens
ttttggtaatgcagttgtgatggtgaactagccagatgaaatggtggtatattctttccacaaggaggagtgcttaa

SEQ ID NO: 65347 - DNA, 77 bp, Homo sapiens
cagttgtgatggtgaactagccagatgaaatggtggtatattctttccacaaggaggagtgcttaagtgctttcaaa

SEQ ID NO: 65348 - DNA, 74 bp, Homo sapiens
ccagatgaaatggtggtatattctttccacaaggaggagtgcttaagtgctttcaaatattttggttgtcatta

SEQ ID NO: 65349 - DNA, 74 bp, Homo sapiens
tattctttccacaaggaggagtgcttaagtgctttcaaatattttggttgtcattatgtgtcactaagttactg

SEQ ID NO: 65350 - DNA, 71 bp, Homo sapiens
aaggaggagtgcttaagtgctttcaaatattttggttgtcattatgtgtcactaagttactggtaccaaat

SEQ ID NO: 65351 - DNA, 72 bp, Homo sapiens
gagtgcttaagtgctttcaaatattttggttgtcattatgtgtcactaagttactggtaccaaatttaaaga

SEQ ID NO: 65352 - DNA, 70 bp, Homo sapiens
gtgctttcaaatattttggttgtcattatgtgtcactaagttactggtaccaaatttaaagaggaagtcc

SEQ ID NO: 65353 - DNA, 72 bp, Homo sapiens
tttggttgtcattatgtgtcactaagttactggtaccaaatttaaagaggaagtccttacacatattaagca

SEQ ID NO: 65354 - DNA, 74 bp, Homo sapiens
tgtcattatgtgtcactaagttactggtaccaaatttaaagaggaagtccttacacatattaagcactacagtg

SEQ ID NO: 65355 - DNA, 71 bp, Homo sapiens
actaagttactggtaccaaatttaaagaggaagtccttacacatattaagcactacagtgtgccttataca

SEQ ID NO: 65356 - DNA, 74 bp, Homo sapiens
gttactggtaccaaatttaaagaggaagtccttacacatattaagcactacagtgtgccttatacatgtatatg

SEQ ID NO: 65357 - DNA, 78 bp, Homo sapiens
atttaaagaggaagtccttacacatattaagcactacagtgtgccttatacatgtatatgtactgaagtatgagttca

SEQ ID NO: 65358 - DNA, 78 bp, Homo sapiens
aagtccttacacatattaagcactacagtgtgccttatacatgtatatgtactgaagtatgagttcagtgactttttg

SEQ ID NO: 65359 - DNA, 80 bp, Homo sapiens
acatattaagcactacagtgtgccttatacatgtatatgtactgaagtatgagttcagtgactttttggacagaacacaa

SEQ ID NO: 65360 - DNA, 78 bp, Homo sapiens
ttaagcactacagtgtgccttatacatgtatatgtactgaagtatgagttcagtgactttttggacagaacacaaact

SEQ ID NO: 65361 - DNA, 77 bp, Homo sapiens
agtgtgccttatacatgtatatgtactgaagtatgagttcagtgactttttggacagaacacaaacttctttcatta

SEQ ID NO: 65362 - DNA, 73 bp, Homo sapiens
acatgtatatgtactgaagtatgagttcagtgactttttggacagaacacaaacttctttcattagaaatttt

SEQ ID NO: 65363 - DNA, 71 bp, Homo sapiens
tatgtactgaagtatgagttcagtgactttttggacagaacacaaacttctttcattagaaatttttaaaa

SEQ ID NO: 65364 - DNA, 70 bp, Homo sapiens
aatttttaaaaaatgacttgggcatttgttgcaggagaaggacttgataatctgtggaatttaaatgtta

SEQ ID NO: 65365 - DNA, 75 bp, Homo sapiens
aaaaatgacttgggcatttgttgcaggagaaggacttgataatctgtggaatttaaatgttattcatgcttctta

SEQ ID NO: 65366 - DNA, 74 bp, Homo sapiens
acttgggcatttgttgcaggagaaggacttgataatctgtggaatttaaatgttattcatgcttcttattttaa

SEQ ID NO: 65367 - DNA, 74 bp, Homo sapiens
gcaggagaaggacttgataatctgtggaatttaaatgttattcatgcttcttattttaaaagtgcttcaaatcc

SEQ ID NO: 65368 - DNA, 73 bp, Homo sapiens
agaaggacttgataatctgtggaatttaaatgttattcatgcttcttattttaaaagtgcttcaaatccttca

SEQ ID NO: 65369 - DNA, 72 bp, Homo sapiens
atctgtggaatttaaatgttattcatgcttcttattttaaaagtgcttcaaatccttcaataaggttctgaa

SEQ ID NO: 65370 - DNA, 72 bp, Homo sapiens
ttaaatgttattcatgcttcttattttaaaagtgcttcaaatccttcaataaggttctgaaagcttgtccga

SEQ ID NO: 65371 - DNA, 72 bp, Homo sapiens
attcatgcttcttattttaaaagtgcttcaaatccttcaataaggttctgaaagcttgtccgattggatggt

SEQ ID NO: 65372 - DNA, 70 bp, Homo sapiens
ttattttaaaagtgcttcaaatccttcaataaggttctgaaagcttgtccgattggatggttggaattcc

SEQ ID NO: 65373 - DNA, 72 bp, Homo sapiens
ttaaaagtgcttcaaatccttcaataaggttctgaaagcttgtccgattggatggttggaattcccagcatt

SEQ ID NO: 65374 - DNA, 74 bp, Homo sapiens
aatccttcaataaggttctgaaagcttgtccgattggatggttggaattcccagcatttcctcataagttgata

SEQ ID NO: 65375 - DNA, 73 bp, Homo sapiens
ataaggttctgaaagcttgtccgattggatggttggaattcccagcatttcctcataagttgataaacctgta

SEQ ID NO: 65376 - DNA, 70 bp, Homo sapiens
aaagcttgtccgattggatggttggaattcccagcatttcctcataagttgataaacctgtaaaaagaaa

SEQ ID NO: 65377 - DNA, 70 bp, Homo sapiens
cgattggatggttggaattcccagcatttcctcataagttgataaacctgtaaaaagaaagaagtaacaa

SEQ ID NO: 65378 - DNA, 70 bp, Homo sapiens
gatggttggaattcccagcatttcctcataagttgataaacctgtaaaaagaaagaagtaacaacagtaa

SEQ ID NO: 65379 - DNA, 75 bp, Homo sapiens
aaacataatagaaatggagtgttattactgtgacgtggcccatagatacctcatctggacagttaggtgggcacg

SEQ ID NO: 65380 - DNA, 74 bp, Homo sapiens
aaatggagtgttattactgtgacgtggcccatagatacctcatctggacagttaggtgggcacggcaggcgttt

SEQ ID NO: 65381 - DNA, 73 bp, Homo sapiens
ttattactgtgacgtggcccatagatacctcatctggacagttaggtgggcacggcaggcgttttccttcttt

SEQ ID NO: 65382 - DNA, 70 bp, Homo sapiens
acgtggcccatagatacctcatctggacagttaggtgggcacggcaggcgttttccttcttttaacgtat

SEQ ID NO: 65383 - DNA, 71 bp, Homo sapiens
atagatacctcatctggacagttaggtgggcacggcaggcgttttccttcttttaacgtattcacaagtct

SEQ ID NO: 65384 - DNA, 73 bp, Homo sapiens
atctggacagttaggtgggcacggcaggcgttttccttcttttaacgtattcacaagtcttgtgactgtcatc

SEQ ID NO: 65385 - DNA, 73 bp, Homo sapiens
acagttaggtgggcacggcaggcgttttccttcttttaacgtattcacaagtcttgtgactgtcatctggcca

SEQ ID NO: 65386 - DNA, 72 bp, Homo sapiens
acggcaggcgttttccttcttttaacgtattcacaagtcttgtgactgtcatctggccatgggttgggccta

SEQ ID NO: 65387 - DNA, 74 bp, Homo sapiens
tttccttcttttaacgtattcacaagtcttgtgactgtcatctggccatgggttgggcctatcattttcaggaa

SEQ ID NO: 65388 - DNA, 76 bp, Homo sapiens
ttttaacgtattcacaagtcttgtgactgtcatctggccatgggttgggcctatcattttcaggaacaactatata

SEQ ID NO: 65389 - DNA, 76 bp, Homo sapiens
tattcacaagtcttgtgactgtcatctggccatgggttgggcctatcattttcaggaacaactatataaaataaaa

SEQ ID NO: 65390 - DNA, 74 bp, Homo sapiens
ttgtgactgtcatctggccatgggttgggcctatcattttcaggaacaactatataaaataaaatcaaacaaaa

SEQ ID NO: 65391 - DNA, 70 bp, Homo sapiens
gtcatctggccatgggttgggcctatcattttcaggaacaactatataaaataaaatcaaacaaaacgtt

SEQ ID NO: 65392 - DNA, 74 bp, Homo sapiens
attttaaatgggtactggattcaaatgaagagaaaagtaggacttacagccatgggactagaatctgaatcaca

SEQ ID NO: 65393 - DNA, 76 bp, Homo sapiens
aatgggtactggattcaaatgaagagaaaagtaggacttacagccatgggactagaatctgaatcacagtaagtca

SEQ ID NO: 65394 - DNA, 83 bp, Homo sapiens
attcaaatgaagagaaaagtaggacttacagccatgggactagaatctgaatcacagtaagtcagcagctcatgcagagtgac

SEQ ID NO: 65395 - DNA, 81 bp, Homo sapiens
aagagaaaagtaggacttacagccatgggactagaatctgaatcacagtaagtcagcagctcatgcagagtgactccaaaa

SEQ ID NO: 65396 - DNA, 85 bp, Homo sapiens
taggacttacagccatgggactagaatctgaatcacagtaagtcagcagctcatgcagagtgactccaaaagaccagacgtcaga

SEQ ID NO: 65397 - DNA, 83 bp, Homo sapiens
atgggactagaatctgaatcacagtaagtcagcagctcatgcagagtgactccaaaagaccagacgtcagaggcaatataaaa

SEQ ID NO: 65398 - DNA, 82 bp, Homo sapiens
actagaatctgaatcacagtaagtcagcagctcatgcagagtgactccaaaagaccagacgtcagaggcaatataaaattta

SEQ ID NO: 65399 - DNA, 82 bp, Homo sapiens
aatcacagtaagtcagcagctcatgcagagtgactccaaaagaccagacgtcagaggcaatataaaatttagattgcattaa

SEQ ID NO: 65400 - DNA, 81 bp, Homo sapiens
aagtcagcagctcatgcagagtgactccaaaagaccagacgtcagaggcaatataaaatttagattgcattaaacattctg

SEQ ID NO: 65401 - DNA, 78 bp, Homo sapiens
atgcagagtgactccaaaagaccagacgtcagaggcaatataaaatttagattgcattaaacattctggagcatacct

SEQ ID NO: 65402 - DNA, 75 bp, Homo sapiens
tccaaaagaccagacgtcagaggcaatataaaatttagattgcattaaacattctggagcataccttgaaaggaa

SEQ ID NO: 65403 - DNA, 76 bp, Homo sapiens
aagaccagacgtcagaggcaatataaaatttagattgcattaaacattctggagcataccttgaaaggaagcagaa

SEQ ID NO: 65404 - DNA, 76 bp, Homo sapiens
cagaggcaatataaaatttagattgcattaaacattctggagcataccttgaaaggaagcagaacacaaaacttca

SEQ ID NO: 65405 - DNA, 73 bp, Homo sapiens
taaactctatgaagcattgataaaacctagtggtttgattcagttaccaaaacacagggctgtcccggtcatc

SEQ ID NO: 65406 - DNA, 73 bp, Homo sapiens
tatgaagcattgataaaacctagtggtttgattcagttaccaaaacacagggctgtcccggtcatccttgacg

SEQ ID NO: 65407 - DNA, 69 bp, Homo sapiens
ataaaacctagtggtttgattcagttaccaaaacacagggctgtcccggtcatccttgacggtgtaata

SEQ ID NO: 65408 - DNA, 71 bp, Homo sapiens
tagtggtttgattcagttaccaaaacacagggctgtcccggtcatccttgacggtgtaatactccttatcg

SEQ ID NO: 65409 - DNA, 69 bp, Homo sapiens
agttaccaaaacacagggctgtcccggtcatccttgacggtgtaatactccttatcggtttcaattgct

SEQ ID NO: 65410 - DNA, 69 bp, Homo sapiens
aaaacacagggctgtcccggtcatccttgacggtgtaatactccttatcggtttcaattgctttggtta

SEQ ID NO: 65411 - DNA, 69 bp, Homo sapiens
tgtcccggtcatccttgacggtgtaatactccttatcggtttcaattgctttggttaaaccgaagtctc

SEQ ID NO: 65412 - DNA, 68 bp, Homo sapiens
atccttgacggtgtaatactccttatcggtttcaattgctttggttaaaccgaagtctccaattttca

SEQ ID NO: 65413 - DNA, 66 bp, Homo sapiens
acggtgtaatactccttatcggtttcaattgctttggttaaaccgaagtctccaattttcacttgg

SEQ ID NO: 65414 - DNA, 70 bp, Homo sapiens
tactccttatcggtttcaattgctttggttaaaccgaagtctccaattttcacttggtgttcactctcaa

SEQ ID NO: 65415 - DNA, 70 bp, Homo sapiens
tttcaattgctttggttaaaccgaagtctccaattttcacttggtgttcactctcaacaaggacatttct

SEQ ID NO: 65416 - DNA, 72 bp, Homo sapiens
tttggttaaaccgaagtctccaattttcacttggtgttcactctcaacaaggacatttcttgctgccaagtc

SEQ ID NO: 65417 - DNA, 73 bp, Homo sapiens
gaagtctccaattttcacttggtgttcactctcaacaaggacatttcttgctgccaagtcccggtgaacgtat

SEQ ID NO: 65418 - DNA, 73 bp, Homo sapiens
aattttcacttggtgttcactctcaacaaggacatttcttgctgccaagtcccggtgaacgtattgccgagaa

SEQ ID NO: 65419 - DNA, 73 bp, Homo sapiens
ttggtgttcactctcaacaaggacatttcttgctgccaagtcccggtgaacgtattgccgagaacccaaatag

SEQ ID NO: 65420 - DNA, 72 bp, Homo sapiens
actctcaacaaggacatttcttgctgccaagtcccggtgaacgtattgccgagaacccaaatagtccatccc

SEQ ID NO: 65421 - DNA, 73 bp, Homo sapiens
aaggacatttcttgctgccaagtcccggtgaacgtattgccgagaacccaaatagtccatcccctgagagaga

SEQ ID NO: 65422 - DNA, 73 bp, Homo sapiens
tcttgctgccaagtcccggtgaacgtattgccgagaacccaaatagtccatcccctgagagagagaagtaaaa

SEQ ID NO: 65423 - DNA, 71 bp, Homo sapiens
aagtcccggtgaacgtattgccgagaacccaaatagtccatcccctgagagagagaagtaaaagtcaagca

SEQ ID NO: 65424 - DNA, 76 bp, Homo sapiens
cagagtgcctgatgtcttaatctgtaacatgatgtctttattttttaccttacaaatctgaacggcatattttagc

SEQ ID NO: 65425 - DNA, 75 bp, Homo sapiens
cctgatgtcttaatctgtaacatgatgtctttattttttaccttacaaatctgaacggcatattttagctgctgt

SEQ ID NO: 65426 - DNA, 72 bp, Homo sapiens
ctgtaacatgatgtctttattttttaccttacaaatctgaacggcatattttagctgctgtttgaggtttat

SEQ ID NO: 65427 - DNA, 70 bp, Homo sapiens
gatgtctttattttttaccttacaaatctgaacggcatattttagctgctgtttgaggtttattttgttc

SEQ ID NO: 65428 - DNA, 70 bp, Homo sapiens
ttttaccttacaaatctgaacggcatattttagctgctgtttgaggtttattttgttcttattctttgga

SEQ ID NO: 65429 - DNA, 72 bp, Homo sapiens
cttacaaatctgaacggcatattttagctgctgtttgaggtttattttgttcttattctttggaagatattc

SEQ ID NO: 65430 - DNA, 71 bp, Homo sapiens
ctgaacggcatattttagctgctgtttgaggtttattttgttcttattctttggaagatattccttaaggc

SEQ ID NO: 65431 - DNA, 70 bp, Homo sapiens
tttagctgctgtttgaggtttattttgttcttattctttggaagatattccttaaggcttcccgaaggca

SEQ ID NO: 65432 - DNA, 70 bp, Homo sapiens
ttgaggtttattttgttcttattctttggaagatattccttaaggcttcccgaaggcagaaattccatga

SEQ ID NO: 65433 - DNA, 72 bp, Homo sapiens
ttttgttcttattctttggaagatattccttaaggcttcccgaaggcagaaattccatgatgagcttaatac

SEQ ID NO: 65434 - DNA, 73 bp, Homo sapiens
ttcttattctttggaagatattccttaaggcttcccgaaggcagaaattccatgatgagcttaataccatttc

SEQ ID NO: 65435 - DNA, 72 bp, Homo sapiens
agatattccttaaggcttcccgaaggcagaaattccatgatgagcttaataccatttcctcctgtttagaaa

SEQ ID NO: 65436 - DNA, 70 bp, Homo sapiens
ttccttaaggcttcccgaaggcagaaattccatgatgagcttaataccatttcctcctgtttagaaaaaa

SEQ ID NO: 65437 - DNA, 75 bp, Homo sapiens
cttcccgaaggcagaaattccatgatgagcttaataccatttcctcctgtttagaaaaaacatccatcagtctga

SEQ ID NO: 65438 - DNA, 74 bp, Homo sapiens
tagacagtcaccaaatctttaaaccggaccccagccttgcataacataccgtcttctgtgcagattcctttgta

SEQ ID NO: 65439 - DNA, 72 bp, Homo sapiens
aaatctttaaaccggaccccagccttgcataacataccgtcttctgtgcagattcctttgtacttcacaatg

SEQ ID NO: 65440 - DNA, 77 bp, Homo sapiens
ttaaaccggaccccagccttgcataacataccgtcttctgtgcagattcctttgtacttcacaatgttctcatgata

SEQ ID NO: 65441 - DNA, 79 bp, Homo sapiens
agccttgcataacataccgtcttctgtgcagattcctttgtacttcacaatgttctcatgatagaggttccttaagatc

SEQ ID NO: 65442 - DNA, 77 bp, Homo sapiens
ataacataccgtcttctgtgcagattcctttgtacttcacaatgttctcatgatagaggttccttaagatctcgatt

SEQ ID NO: 65443 - DNA, 77 bp, Homo sapiens
gtcttctgtgcagattcctttgtacttcacaatgttctcatgatagaggttccttaagatctcgatttcctttttca

SEQ ID NO: 65444 - DNA, 77 bp, Homo sapiens
attcctttgtacttcacaatgttctcatgatagaggttccttaagatctcgatttcctttttcagatcagctatgtg

SEQ ID NO: 65445 - DNA, 77 bp, Homo sapiens
tttgtacttcacaatgttctcatgatagaggttccttaagatctcgatttcctttttcagatcagctatgtggttac

SEQ ID NO: 65446 - DNA, 78 bp, Homo sapiens
acaatgttctcatgatagaggttccttaagatctcgatttcctttttcagatcagctatgtggttacctccactctca

SEQ ID NO: 65447 - DNA, 76 bp, Homo sapiens
tagaggttccttaagatctcgatttcctttttcagatcagctatgtggttacctccactctcaggcttcagagatt

SEQ ID NO: 65448 - DNA, 76 bp, Homo sapiens
gttccttaagatctcgatttcctttttcagatcagctatgtggttacctccactctcaggcttcagagatttaaca

SEQ ID NO: 65449 - DNA, 78 bp, Homo sapiens
atctcgatttcctttttcagatcagctatgtggttacctccactctcaggcttcagagatttaacagccacctgctcc

SEQ ID NO: 65450 - DNA, 78 bp, Homo sapiens
tttttcagatcagctatgtggttacctccactctcaggcttcagagatttaacagccacctgctcccctgtattgtcc

SEQ ID NO: 65451 - DNA, 76 bp, Homo sapiens
atcagctatgtggttacctccactctcaggcttcagagatttaacagccacctgctcccctgtattgtccccttcg

SEQ ID NO: 65452 - DNA, 74 bp, Homo sapiens
tggttacctccactctcaggcttcagagatttaacagccacctgctcccctgtattgtccccttcggggtcata

SEQ ID NO: 65453 - DNA, 76 bp, Homo sapiens
tcaggcttcagagatttaacagccacctgctcccctgtattgtccccttcggggtcatacctgcagagctcaacct

SEQ ID NO: 65454 - DNA, 73 bp, Homo sapiens
agagatttaacagccacctgctcccctgtattgtccccttcggggtcatacctgcagagctcaaccttcccaa

SEQ ID NO: 65455 - DNA, 70 bp, Homo sapiens
tcccctgtattgtccccttcggggtcatacctgcagagctcaaccttcccaaagtggccctggagggaaa

SEQ ID NO: 65456 - DNA, 76 bp, Homo sapiens
tgtattgtccccttcggggtcatacctgcagagctcaaccttcccaaagtggccctggagggaaagatgcatgtgc

SEQ ID NO: 65457 - DNA, 77 bp, Homo sapiens
ttcggggtcatacctgcagagctcaaccttcccaaagtggccctggagggaaagatgcatgtgctgttatcagggaa

SEQ ID NO: 65458 - DNA, 78 bp, Homo sapiens
atggcggagggctctgccatcagcagcaagcagcacgggtgtaacttacctctcccaagtcacggatcctctttagga

SEQ ID NO: 65459 - DNA, 79 bp, Homo sapiens
gctctgccatcagcagcaagcagcacgggtgtaacttacctctcccaagtcacggatcctctttaggaagcgcttttca

SEQ ID NO: 65460 - DNA, 74 bp, Homo sapiens
atcagcagcaagcagcacgggtgtaacttacctctcccaagtcacggatcctctttaggaagcgcttttcaaaa

SEQ ID NO: 65461 - DNA, 71 bp, Homo sapiens
aagcagcacgggtgtaacttacctctcccaagtcacggatcctctttaggaagcgcttttcaaaatgtgtg

SEQ ID NO: 65462 - DNA, 71 bp, Homo sapiens
tgtaacttacctctcccaagtcacggatcctctttaggaagcgcttttcaaaatgtgtggggtccacttca

SEQ ID NO: 65463 - DNA, 71 bp, Homo sapiens
tctcccaagtcacggatcctctttaggaagcgcttttcaaaatgtgtggggtccacttcagttgctggttt

SEQ ID NO: 65464 - DNA, 68 bp, Homo sapiens
aagtcacggatcctctttaggaagcgcttttcaaaatgtgtggggtccacttcagttgctggtttttt

SEQ ID NO: 65465 - DNA, 70 bp, Homo sapiens
tctttaggaagcgcttttcaaaatgtgtggggtccacttcagttgctggttttttttctgaaacaatatc

SEQ ID NO: 65466 - DNA, 71 bp, Homo sapiens
aagcgcttttcaaaatgtgtggggtccacttcagttgctggttttttttctgaaacaatatctggatctaa

SEQ ID NO: 65467 - DNA, 71 bp, Homo sapiens
aaaatgtgtggggtccacttcagttgctggttttttttctgaaacaatatctggatctaacagaagagaaa

SEQ ID NO: 65468 - DNA, 73 bp, Homo sapiens
gtccacttcagttgctggttttttttctgaaacaatatctggatctaacagaagagaaaagaaaacagagtga

SEQ ID NO: 65469 - DNA, 73 bp, Homo sapiens
ttcagttgctggttttttttctgaaacaatatctggatctaacagaagagaaaagaaaacagagtgaaaggca

SEQ ID NO: 65470 - DNA, 81 bp, Homo sapiens
ctgtttctccccaagctgggttaaagcagcacatggcaggtcttactctgctcttcaagcttattaatgtctctcatgatg

SEQ ID NO: 65471 - DNA, 82 bp, Homo sapiens
ccaagctgggttaaagcagcacatggcaggtcttactctgctcttcaagcttattaatgtctctcatgatggctcggaagaa

SEQ ID NO: 65472 - DNA, 83 bp, Homo sapiens
ttaaagcagcacatggcaggtcttactctgctcttcaagcttattaatgtctctcatgatggctcggaagaaaggcctctgat

SEQ ID NO: 65473 - DNA, 81 bp, Homo sapiens
acatggcaggtcttactctgctcttcaagcttattaatgtctctcatgatggctcggaagaaaggcctctgattggggtca

SEQ ID NO: 65474 - DNA, 78 bp, Homo sapiens
aggtcttactctgctcttcaagcttattaatgtctctcatgatggctcggaagaaaggcctctgattggggtcatagt

SEQ ID NO: 65475 - DNA, 83 bp, Homo sapiens
ctcttcaagcttattaatgtctctcatgatggctcggaagaaaggcctctgattggggtcatagttcatgcagcgggtcatga

SEQ ID NO: 65476 - DNA, 82 bp, Homo sapiens
aagcttattaatgtctctcatgatggctcggaagaaaggcctctgattggggtcatagttcatgcagcgggtcatgaggtca

SEQ ID NO: 65477 - DNA, 84 bp, Homo sapiens
atgtctctcatgatggctcggaagaaaggcctctgattggggtcatagttcatgcagcgggtcatgaggtcagccagctcctta

SEQ ID NO: 65478 - DNA, 83 bp, Homo sapiens
atgatggctcggaagaaaggcctctgattggggtcatagttcatgcagcgggtcatgaggtcagccagctccttacatgatgg

SEQ ID NO: 65479 - DNA, 82 bp, Homo sapiens
aagaaaggcctctgattggggtcatagttcatgcagcgggtcatgaggtcagccagctccttacatgatggtgtcactggcc

SEQ ID NO: 65480 - DNA, 86 bp, Homo sapiens
tgattggggtcatagttcatgcagcgggtcatgaggtcagccagctccttacatgatggtgtcactggcctgcaccggctttcata

SEQ ID NO: 65481 - DNA, 85 bp, Homo sapiens
atagttcatgcagcgggtcatgaggtcagccagctccttacatgatggtgtcactggcctgcaccggctttcatagaatctctct

SEQ ID NO: 65482 - DNA, 85 bp, Homo sapiens
atgcagcgggtcatgaggtcagccagctccttacatgatggtgtcactggcctgcaccggctttcatagaatctctctttctgta

SEQ ID NO: 65483 - DNA, 81 bp, Homo sapiens
atgaggtcagccagctccttacatgatggtgtcactggcctgcaccggctttcatagaatctctctttctgtaaacaagag

SEQ ID NO: 65484 - DNA, 81 bp, Homo sapiens
cagctccttacatgatggtgtcactggcctgcaccggctttcatagaatctctctttctgtaaacaagaggggcacatgga

SEQ ID NO: 65485 - DNA, 79 bp, Homo sapiens
ttacatgatggtgtcactggcctgcaccggctttcatagaatctctctttctgtaaacaagaggggcacatggaagaaa

SEQ ID NO: 65486 - DNA, 76 bp, Homo sapiens
tggtgtcactggcctgcaccggctttcatagaatctctctttctgtaaacaagaggggcacatggaagaaaccaaa

SEQ ID NO: 65487 - DNA, 73 bp, Homo sapiens
acctgaaagccctcacttgcctcacgccccgggaaacacctgctcacctcaatcagcgtcttgtctttcaagg

SEQ ID NO: 65488 - DNA, 76 bp, Homo sapiens
ctcacttgcctcacgccccgggaaacacctgctcacctcaatcagcgtcttgtctttcaaggggatctcgccattg

SEQ ID NO: 65489 - DNA, 77 bp, Homo sapiens
tcacgccccgggaaacacctgctcacctcaatcagcgtcttgtctttcaaggggatctcgccattgtagcagatttc

SEQ ID NO: 65490 - DNA, 76 bp, Homo sapiens
cccgggaaacacctgctcacctcaatcagcgtcttgtctttcaaggggatctcgccattgtagcagatttcccaga

SEQ ID NO: 65491 - DNA, 78 bp, Homo sapiens
cctgctcacctcaatcagcgtcttgtctttcaaggggatctcgccattgtagcagatttcccagagcgtggttccaaa

SEQ ID NO: 65492 - DNA, 76 bp, Homo sapiens
aatcagcgtcttgtctttcaaggggatctcgccattgtagcagatttcccagagcgtggttccaaagctccacttg

SEQ ID NO: 65493 - DNA, 80 bp, Homo sapiens
tcttgtctttcaaggggatctcgccattgtagcagatttcccagagcgtggttccaaagctccacttgtcagcagccaca

SEQ ID NO: 65494 - DNA, 79 bp, Homo sapiens
ttcaaggggatctcgccattgtagcagatttcccagagcgtggttccaaagctccacttgtcagcagccacactcaggt

SEQ ID NO: 65495 - DNA, 79 bp, Homo sapiens
ccattgtagcagatttcccagagcgtggttccaaagctccacttgtcagcagccacactcaggttcttggagtcctcaa

SEQ ID NO: 65496 - DNA, 78 bp, Homo sapiens
agatttcccagagcgtggttccaaagctccacttgtcagcagccacactcaggttcttggagtcctcaacacactcag

SEQ ID NO: 65497 - DNA, 81 bp, Homo sapiens
agagcgtggttccaaagctccacttgtcagcagccacactcaggttcttggagtcctcaacacactcaggagcaatccatg

SEQ ID NO: 65498 - DNA, 80 bp, Homo sapiens
ttccaaagctccacttgtcagcagccacactcaggttcttggagtcctcaacacactcaggagcaatccatgggattcgt

SEQ ID NO: 65499 - DNA, 83 bp, Homo sapiens
acttgtcagcagccacactcaggttcttggagtcctcaacacactcaggagcaatccatgggattcgttcaatgcattctgga

SEQ ID NO: 65500 - DNA, 81 bp, Homo sapiens
agccacactcaggttcttggagtcctcaacacactcaggagcaatccatgggattcgttcaatgcattctggaagacaaca

SEQ ID NO: 65501 - DNA, 81 bp, Homo sapiens
actcaggttcttggagtcctcaacacactcaggagcaatccatgggattcgttcaatgcattctggaagacaacagacaca

SEQ ID NO: 65502 - DNA, 84 bp, Homo sapiens
tggagtcctcaacacactcaggagcaatccatgggattcgttcaatgcattctggaagacaacagacacactgatggagcagtt

SEQ ID NO: 65503 - DNA, 71 bp, Homo sapiens
acttgcccctgactcggggtggggccagagggaagagaggggagacacaccttgcctagacagcaccgtaa

SEQ ID NO: 65504 - DNA, 71 bp, Homo sapiens
actcggggtggggccagagggaagagaggggagacacaccttgcctagacagcaccgtaatggggatgccg

SEQ ID NO: 65505 - DNA, 77 bp, Homo sapiens
ccagagggaagagaggggagacacaccttgcctagacagcaccgtaatggggatgccggggtcactgagcttgatga

SEQ ID NO: 65506 - DNA, 77 bp, Homo sapiens
aagagaggggagacacaccttgcctagacagcaccgtaatggggatgccggggtcactgagcttgatgaatgggcca

SEQ ID NO: 65507 - DNA, 80 bp, Homo sapiens
agacacaccttgcctagacagcaccgtaatggggatgccggggtcactgagcttgatgaatgggccacactcactgtcga

SEQ ID NO: 65508 - DNA, 81 bp, Homo sapiens
ttgcctagacagcaccgtaatggggatgccggggtcactgagcttgatgaatgggccacactcactgtcgatgccctcacg

SEQ ID NO: 65509 - DNA, 79 bp, Homo sapiens
acagcaccgtaatggggatgccggggtcactgagcttgatgaatgggccacactcactgtcgatgccctcacgggccag

SEQ ID NO: 65510 - DNA, 77 bp, Homo sapiens
ggatgccggggtcactgagcttgatgaatgggccacactcactgtcgatgccctcacgggccaggaggaggttttta

SEQ ID NO: 65511 - DNA, 78 bp, Homo sapiens
gtcactgagcttgatgaatgggccacactcactgtcgatgccctcacgggccaggaggaggtttttagtacacacatt

SEQ ID NO: 65512 - DNA, 77 bp, Homo sapiens
agcttgatgaatgggccacactcactgtcgatgccctcacgggccaggaggaggtttttagtacacacatttccatg

SEQ ID NO: 65513 - DNA, 74 bp, Homo sapiens
aatgggccacactcactgtcgatgccctcacgggccaggaggaggtttttagtacacacatttccatggaccag

SEQ ID NO: 65514 - DNA, 73 bp, Homo sapiens
actcactgtcgatgccctcacgggccaggaggaggtttttagtacacacatttccatggaccaggtctttatc

SEQ ID NO: 65515 - DNA, 72 bp, Homo sapiens
ccctcacgggccaggaggaggtttttagtacacacatttccatggaccaggtctttatcctcctgcagagta

SEQ ID NO: 65516 - DNA, 71 bp, Homo sapiens
ccaggaggaggtttttagtacacacatttccatggaccaggtctttatcctcctgcagagtaaaaaggtca

SEQ ID NO: 65517 - DNA, 69 bp, Homo sapiens
aggtttttagtacacacatttccatggaccaggtctttatcctcctgcagagtaaaaaggtcaagttta

SEQ ID NO: 65518 - DNA, 79 bp, Homo sapiens
acactctggtttctggtgggaccattatggacatcaggacattctcaccaagtagctcagggcactggccagctgtttg

SEQ ID NO: 65519 - DNA, 80 bp, Homo sapiens
tttctggtgggaccattatggacatcaggacattctcaccaagtagctcagggcactggccagctgtttggcaactttga

SEQ ID NO: 65520 - DNA, 79 bp, Homo sapiens
accattatggacatcaggacattctcaccaagtagctcagggcactggccagctgtttggcaactttgaatttccatgg

SEQ ID NO: 65521 - DNA, 78 bp, Homo sapiens
atcaggacattctcaccaagtagctcagggcactggccagctgtttggcaactttgaatttccatggtgtggtaagga

SEQ ID NO: 65522 - DNA, 77 bp, Homo sapiens
tctcaccaagtagctcagggcactggccagctgtttggcaactttgaatttccatggtgtggtaaggacatcgcttt

SEQ ID NO: 65523 - DNA, 74 bp, Homo sapiens
aagtagctcagggcactggccagctgtttggcaactttgaatttccatggtgtggtaaggacatcgcttttccg

SEQ ID NO: 65524 - DNA, 78 bp, Homo sapiens
cactggccagctgtttggcaactttgaatttccatggtgtggtaaggacatcgcttttccggtgcatgaagagatcca

SEQ ID NO: 65525 - DNA, 76 bp, Homo sapiens
agctgtttggcaactttgaatttccatggtgtggtaaggacatcgcttttccggtgcatgaagagatccagaggac

SEQ ID NO: 65526 - DNA, 72 bp, Homo sapiens
aactttgaatttccatggtgtggtaaggacatcgcttttccggtgcatgaagagatccagaggacccccttc

SEQ ID NO: 65527 - DNA, 72 bp, Homo sapiens
aatttccatggtgtggtaaggacatcgcttttccggtgcatgaagagatccagaggacccccttccacaaac

SEQ ID NO: 65528 - DNA, 75 bp, Homo sapiens
gtgtggtaaggacatcgcttttccggtgcatgaagagatccagaggacccccttccacaaactcttccaccatga

SEQ ID NO: 65529 - DNA, 77 bp, Homo sapiens
atcgcttttccggtgcatgaagagatccagaggacccccttccacaaactcttccaccatgatatctgtaggcataa

SEQ ID NO: 65530 - DNA, 76 bp, Homo sapiens
tttccggtgcatgaagagatccagaggacccccttccacaaactcttccaccatgatatctgtaggcataaaaata

SEQ ID NO: 65531 - DNA, 76 bp, Homo sapiens
aagagatccagaggacccccttccacaaactcttccaccatgatatctgtaggcataaaaatagccatgtctggaa

SEQ ID NO: 65532 - DNA, 74 bp, Homo sapiens
agaggacccccttccacaaactcttccaccatgatatctgtaggcataaaaatagccatgtctggaacctggtc

SEQ ID NO: 65533 - DNA, 71 bp, Homo sapiens
acccaagctccccagccaggccacccacccctttgaaagagaacacacttactctccacgtcgcggacaca

SEQ ID NO: 65534 - DNA, 73 bp, Homo sapiens
cccagccaggccacccacccctttgaaagagaacacacttactctccacgtcgcggacacagacgccatagag

SEQ ID NO: 65535 - DNA, 73 bp, Homo sapiens
ccacccacccctttgaaagagaacacacttactctccacgtcgcggacacagacgccatagaggtacacgatg

SEQ ID NO: 65536 - DNA, 75 bp, Homo sapiens
cctttgaaagagaacacacttactctccacgtcgcggacacagacgccatagaggtacacgatgtgtttgtggga

SEQ ID NO: 65537 - DNA, 75 bp, Homo sapiens
aaagagaacacacttactctccacgtcgcggacacagacgccatagaggtacacgatgtgtttgtgggagacctg

SEQ ID NO: 65538 - DNA, 82 bp, Homo sapiens
acttactctccacgtcgcggacacagacgccatagaggtacacgatgtgtttgtgggagacctgtctcatcatgctggctgc

SEQ ID NO: 65539 - DNA, 81 bp, Homo sapiens
acgtcgcggacacagacgccatagaggtacacgatgtgtttgtgggagacctgtctcatcatgctggctgcctcgaagaag

SEQ ID NO: 65540 - DNA, 82 bp, Homo sapiens
acacagacgccatagaggtacacgatgtgtttgtgggagacctgtctcatcatgctggctgcctcgaagaaggcctgtgggc

SEQ ID NO: 65541 - DNA, 83 bp, Homo sapiens
atagaggtacacgatgtgtttgtgggagacctgtctcatcatgctggctgcctcgaagaaggcctgtgggcgagcaggacata

SEQ ID NO: 65542 - DNA, 84 bp, Homo sapiens
acgatgtgtttgtgggagacctgtctcatcatgctggctgcctcgaagaaggcctgtgggcgagcaggacataggaatgtctca

SEQ ID NO: 65543 - DNA, 84 bp, Homo sapiens
tttgtgggagacctgtctcatcatgctggctgcctcgaagaaggcctgtgggcgagcaggacataggaatgtctcaggccagcc

SEQ ID NO: 65544 - DNA, 82 bp, Homo sapiens
acctgtctcatcatgctggctgcctcgaagaaggcctgtgggcgagcaggacataggaatgtctcaggccagcctccagggg

SEQ ID NO: 65545 - DNA, 70 bp, Homo sapiens
agaggggaggggaggagttcagaggaagacacttgccagggaaatatccctgtggctggggtctaagact

SEQ ID NO: 65546 - DNA, 73 bp, Homo sapiens
ggaggagttcagaggaagacacttgccagggaaatatccctgtggctggggtctaagactttgaggatcactt

SEQ ID NO: 65547 - DNA, 72 bp, Homo sapiens
agaggaagacacttgccagggaaatatccctgtggctggggtctaagactttgaggatcacttttatcttct

SEQ ID NO: 65548 - DNA, 72 bp, Homo sapiens
aagacacttgccagggaaatatccctgtggctggggtctaagactttgaggatcacttttatcttcttctct

SEQ ID NO: 65549 - DNA, 72 bp, Homo sapiens
gaaatatccctgtggctggggtctaagactttgaggatcacttttatcttcttctcttcagaagttccttcg

SEQ ID NO: 65550 - DNA, 74 bp, Homo sapiens
tgtggctggggtctaagactttgaggatcacttttatcttcttctcttcagaagttccttcgtcatccttgtaa

SEQ ID NO: 65551 - DNA, 74 bp, Homo sapiens
gggtctaagactttgaggatcacttttatcttcttctcttcagaagttccttcgtcatccttgtaatccatcag

SEQ ID NO: 65552 - DNA, 75 bp, Homo sapiens
tttgaggatcacttttatcttcttctcttcagaagttccttcgtcatccttgtaatccatcagggtcccagaata

SEQ ID NO: 65553 - DNA, 74 bp, Homo sapiens
acttttatcttcttctcttcagaagttccttcgtcatccttgtaatccatcagggtcccagaatagatgtgtgt

SEQ ID NO: 65554 - DNA, 78 bp, Homo sapiens
ttcttctcttcagaagttccttcgtcatccttgtaatccatcagggtcccagaatagatgtgtgttctcgtgcctctc

SEQ ID NO: 65555 - DNA, 76 bp, Homo sapiens
ttcagaagttccttcgtcatccttgtaatccatcagggtcccagaatagatgtgtgttctcgtgcctctcccaagg

SEQ ID NO: 65556 - DNA, 79 bp, Homo sapiens
tccttcgtcatccttgtaatccatcagggtcccagaatagatgtgtgttctcgtgcctctcccaaggtgctcgccctga

SEQ ID NO: 65557 - DNA, 77 bp, Homo sapiens
tccttgtaatccatcagggtcccagaatagatgtgtgttctcgtgcctctcccaaggtgctcgccctgagggaagaa

SEQ ID NO: 65558 - DNA, 77 bp, Homo sapiens
atcagggtcccagaatagatgtgtgttctcgtgcctctcccaaggtgctcgccctgagggaagaagcagaaggctgg

SEQ ID NO: 65559 - DNA, 78 bp, Homo sapiens
agaatagatgtgtgttctcgtgcctctcccaaggtgctcgccctgagggaagaagcagaaggctgggtgacctctctg

SEQ ID NO: 65560 - DNA, 80 bp, Homo sapiens
gggaggcaggaccacagctggcccacaccctgcagccgtgactcacctgcaccagatccttcttgaggatccgatcgaaa

SEQ ID NO: 65561 - DNA, 81 bp, Homo sapiens
aggaccacagctggcccacaccctgcagccgtgactcacctgcaccagatccttcttgaggatccgatcgaaactcagctg

SEQ ID NO: 65562 - DNA, 82 bp, Homo sapiens
agctggcccacaccctgcagccgtgactcacctgcaccagatccttcttgaggatccgatcgaaactcagctggctcatggg

SEQ ID NO: 65563 - DNA, 79 bp, Homo sapiens
accctgcagccgtgactcacctgcaccagatccttcttgaggatccgatcgaaactcagctggctcatggggtagacgg

SEQ ID NO: 65564 - DNA, 79 bp, Homo sapiens
actcacctgcaccagatccttcttgaggatccgatcgaaactcagctggctcatggggtagacgggctgccactcctgg

SEQ ID NO: 65565 - DNA, 76 bp, Homo sapiens
accagatccttcttgaggatccgatcgaaactcagctggctcatggggtagacgggctgccactcctgggctttct

SEQ ID NO: 65566 - DNA, 76 bp, Homo sapiens
atccttcttgaggatccgatcgaaactcagctggctcatggggtagacgggctgccactcctgggctttcttagta

SEQ ID NO: 65567 - DNA, 76 bp, Homo sapiens
atccgatcgaaactcagctggctcatggggtagacgggctgccactcctgggctttcttagtagccaccagcaggt

SEQ ID NO: 65568 - DNA, 75 bp, Homo sapiens
aaactcagctggctcatggggtagacgggctgccactcctgggctttcttagtagccaccagcaggttggagatt

SEQ ID NO: 65569 - DNA, 76 bp, Homo sapiens
tcatggggtagacgggctgccactcctgggctttcttagtagccaccagcaggttggagatttctgtggaagagat

SEQ ID NO: 65570 - DNA, 74 bp, Homo sapiens
gggtagacgggctgccactcctgggctttcttagtagccaccagcaggttggagatttctgtggaagagattgg

SEQ ID NO: 65571 - DNA, 78 bp, Homo sapiens
cactcctgggctttcttagtagccaccagcaggttggagatttctgtggaagagattgggggagtctgagcacagcac

SEQ ID NO: 65572 - DNA, 79 bp, Homo sapiens
acattactgatgggatacagcctggctctggcacagggagacgaacctcggggcttgggctggcagcagcgttttagca

SEQ ID NO: 65573 - DNA, 81 bp, Homo sapiens
tgggatacagcctggctctggcacagggagacgaacctcggggcttgggctggcagcagcgttttagcatgaagctgatgt

SEQ ID NO: 65574 - DNA, 80 bp, Homo sapiens
cctggctctggcacagggagacgaacctcggggcttgggctggcagcagcgttttagcatgaagctgatgttatccgtgc

SEQ ID NO: 65575 - DNA, 82 bp, Homo sapiens
gcacagggagacgaacctcggggcttgggctggcagcagcgttttagcatgaagctgatgttatccgtgcgcaggatctgct

SEQ ID NO: 65576 - DNA, 81 bp, Homo sapiens
agacgaacctcggggcttgggctggcagcagcgttttagcatgaagctgatgttatccgtgcgcaggatctgcttcttgag

SEQ ID NO: 65577 - DNA, 86 bp, Homo sapiens
gggcttgggctggcagcagcgttttagcatgaagctgatgttatccgtgcgcaggatctgcttcttgaggtggctcatgaggtctc

SEQ ID NO: 65578 - DNA, 86 bp, Homo sapiens
ctggcagcagcgttttagcatgaagctgatgttatccgtgcgcaggatctgcttcttgaggtggctcatgaggtctcccaagctgg

SEQ ID NO: 65579 - DNA, 82 bp, Homo sapiens
agcgttttagcatgaagctgatgttatccgtgcgcaggatctgcttcttgaggtggctcatgaggtctcccaagctggggaa

SEQ ID NO: 65580 - DNA, 83 bp, Homo sapiens
tgaagctgatgttatccgtgcgcaggatctgcttcttgaggtggctcatgaggtctcccaagctggggaagctgcggtccgaa

SEQ ID NO: 65581 - DNA, 78 bp, Homo sapiens
atgttatccgtgcgcaggatctgcttcttgaggtggctcatgaggtctcccaagctggggaagctgcggtccgaaccg

SEQ ID NO: 65582 - DNA, 81 bp, Homo sapiens
cgtgcgcaggatctgcttcttgaggtggctcatgaggtctcccaagctggggaagctgcggtccgaaccgtgcagactgta

SEQ ID NO: 65583 - DNA, 78 bp, Homo sapiens
tgcttcttgaggtggctcatgaggtctcccaagctggggaagctgcggtccgaaccgtgcagactgtagcggcccttc

SEQ ID NO: 65584 - DNA, 81 bp, Homo sapiens
tggctcatgaggtctcccaagctggggaagctgcggtccgaaccgtgcagactgtagcggcccttctgcacctcgatctga

SEQ ID NO: 65585 - DNA, 77 bp, Homo sapiens
atgaggtctcccaagctggggaagctgcggtccgaaccgtgcagactgtagcggcccttctgcacctcgatctgaaa

SEQ ID NO: 65586 - DNA, 75 bp, Homo sapiens
aagctggggaagctgcggtccgaaccgtgcagactgtagcggcccttctgcacctcgatctgaaagttcttgaac

SEQ ID NO: 65587 - DNA, 77 bp, Homo sapiens
ggaagctgcggtccgaaccgtgcagactgtagcggcccttctgcacctcgatctgaaagttcttgaactgcttctgg

SEQ ID NO: 65588 - DNA, 79 bp, Homo sapiens
aaccgtgcagactgtagcggcccttctgcacctcgatctgaaagttcttgaactgcttctgggcaccctgcacctgcta

SEQ ID NO: 65589 - DNA, 77 bp, Homo sapiens
actgtagcggcccttctgcacctcgatctgaaagttcttgaactgcttctgggcaccctgcacctgctattcgggaa

SEQ ID NO: 65590 - DNA, 77 bp, Homo sapiens
cccttctgcacctcgatctgaaagttcttgaactgcttctgggcaccctgcacctgctattcgggaaatgaccagaa

SEQ ID NO: 65591 - DNA, 76 bp, Homo sapiens
acctcgatctgaaagttcttgaactgcttctgggcaccctgcacctgctattcgggaaatgaccagaaattacatg

SEQ ID NO: 65592 - DNA, 72 bp, Homo sapiens
aaagttcttgaactgcttctgggcaccctgcacctgctattcgggaaatgaccagaaattacatgtttaaaa

SEQ ID NO: 65593 - DNA, 82 bp, Homo sapiens
acacctcatggctgtatggcctggtccaagccagtgtcctgactgacctcagacttctcaaagcaggtgacggtcatgagga

SEQ ID NO: 65594 - DNA, 81 bp, Homo sapiens
ctgtatggcctggtccaagccagtgtcctgactgacctcagacttctcaaagcaggtgacggtcatgaggatgttgtcaaa

SEQ ID NO: 65595 - DNA, 81 bp, Homo sapiens
ctggtccaagccagtgtcctgactgacctcagacttctcaaagcaggtgacggtcatgaggatgttgtcaaagtcggtgca

SEQ ID NO: 65596 - DNA, 81 bp, Homo sapiens
aagccagtgtcctgactgacctcagacttctcaaagcaggtgacggtcatgaggatgttgtcaaagtcggtgcagctccac

SEQ ID NO: 65597 - DNA, 82 bp, Homo sapiens
actgacctcagacttctcaaagcaggtgacggtcatgaggatgttgtcaaagtcggtgcagctccacctcagcacgtacatc

SEQ ID NO: 65598 - DNA, 79 bp, Homo sapiens
agacttctcaaagcaggtgacggtcatgaggatgttgtcaaagtcggtgcagctccacctcagcacgtacatcccctcc

SEQ ID NO: 65599 - DNA, 78 bp, Homo sapiens
aaagcaggtgacggtcatgaggatgttgtcaaagtcggtgcagctccacctcagcacgtacatcccctcctcgcttcc

SEQ ID NO: 65600 - DNA, 79 bp, Homo sapiens
ggtcatgaggatgttgtcaaagtcggtgcagctccacctcagcacgtacatcccctcctcgcttccttcttgccgcaat

SEQ ID NO: 65601 - DNA, 78 bp, Homo sapiens
atgttgtcaaagtcggtgcagctccacctcagcacgtacatcccctcctcgcttccttcttgccgcaatttattgatg

SEQ ID NO: 65602 - DNA, 76 bp, Homo sapiens
aaagtcggtgcagctccacctcagcacgtacatcccctcctcgcttccttcttgccgcaatttattgatggcgtat

SEQ ID NO: 65603 - DNA, 77 bp, Homo sapiens
agctccacctcagcacgtacatcccctcctcgcttccttcttgccgcaatttattgatggcgtattctgtactagag

SEQ ID NO: 65604 - DNA, 75 bp, Homo sapiens
agcacgtacatcccctcctcgcttccttcttgccgcaatttattgatggcgtattctgtactagagggagaagta

SEQ ID NO: 65605 - DNA, 75 bp, Homo sapiens
tacatcccctcctcgcttccttcttgccgcaatttattgatggcgtattctgtactagagggagaagtaggcaaa

SEQ ID NO: 65606 - DNA, 74 bp, Homo sapiens
tcctcgcttccttcttgccgcaatttattgatggcgtattctgtactagagggagaagtaggcaaagggagaaa

SEQ ID NO: 65607 - DNA, 78 bp, Homo sapiens
acacgggctctctgcacaccaaaggcaactgataaggttctaggaccaaccagattggaccatgacagccattctgta

SEQ ID NO: 65608 - DNA, 79 bp, Homo sapiens
cacaccaaaggcaactgataaggttctaggaccaaccagattggaccatgacagccattctgtatgttgtggacgatca

SEQ ID NO: 65609 - DNA, 76 bp, Homo sapiens
aaaggcaactgataaggttctaggaccaaccagattggaccatgacagccattctgtatgttgtggacgatcaacg

SEQ ID NO: 65610 - DNA, 74 bp, Homo sapiens
ataaggttctaggaccaaccagattggaccatgacagccattctgtatgttgtggacgatcaacgggggggcca

SEQ ID NO: 65611 - DNA, 77 bp, Homo sapiens
taggaccaaccagattggaccatgacagccattctgtatgttgtggacgatcaacgggggggccacgtcggtgcaga

SEQ ID NO: 65612 - DNA, 77 bp, Homo sapiens
agattggaccatgacagccattctgtatgttgtggacgatcaacgggggggccacgtcggtgcagaggtaatgatgg

SEQ ID NO: 65613 - DNA, 82 bp, Homo sapiens
ccatgacagccattctgtatgttgtggacgatcaacgggggggccacgtcggtgcagaggtaatgatgggcatctgctgtga

SEQ ID NO: 65614 - DNA, 78 bp, Homo sapiens
attctgtatgttgtggacgatcaacgggggggccacgtcggtgcagaggtaatgatgggcatctgctgtgagccggaa

SEQ ID NO: 65615 - DNA, 79 bp, Homo sapiens
ttgtggacgatcaacgggggggccacgtcggtgcagaggtaatgatgggcatctgctgtgagccggaagtagccatcta

SEQ ID NO: 65616 - DNA, 77 bp, Homo sapiens
atcaacgggggggccacgtcggtgcagaggtaatgatgggcatctgctgtgagccggaagtagccatctaccaggga

SEQ ID NO: 65617 - DNA, 78 bp, Homo sapiens
acgtcggtgcagaggtaatgatgggcatctgctgtgagccggaagtagccatctaccagggacacaaaggacaaggcc

SEQ ID NO: 65618 - DNA, 77 bp, Homo sapiens
agaggtaatgatgggcatctgctgtgagccggaagtagccatctaccagggacacaaaggacaaggcctcctcgtgg

SEQ ID NO: 65619 - DNA, 79 bp, Homo sapiens
taatgatgggcatctgctgtgagccggaagtagccatctaccagggacacaaaggacaaggcctcctcgtgggaagaga

SEQ ID NO: 65620 - DNA, 76 bp, Homo sapiens
atctgctgtgagccggaagtagccatctaccagggacacaaaggacaaggcctcctcgtgggaagagagcttcagt

SEQ ID NO: 65621 - DNA, 75 bp, Homo sapiens
ggaagtagccatctaccagggacacaaaggacaaggcctcctcgtgggaagagagcttcagttcctgttgagaga

SEQ ID NO: 65622 - DNA, 73 bp, Homo sapiens
atctaccagggacacaaaggacaaggcctcctcgtgggaagagagcttcagttcctgttgagagagaagaaat

SEQ ID NO: 65623 - DNA, 72 bp, Homo sapiens
gacacaaaggacaaggcctcctcgtgggaagagagcttcagttcctgttgagagagaagaaattcccacggt

SEQ ID NO: 65624 - DNA, 71 bp, Homo sapiens
aaaggacaaggcctcctcgtgggaagagagcttcagttcctgttgagagagaagaaattcccacggttaca

SEQ ID NO: 65625 - DNA, 75 bp, Homo sapiens
tccctctcatcaccagatccagacttaagagcttctgggacaaacttaccattttcttgttgtcctgcttgttaa

SEQ ID NO: 65626 - DNA, 76 bp, Homo sapiens
atcaccagatccagacttaagagcttctgggacaaacttaccattttcttgttgtcctgcttgttaatgctgacca

SEQ ID NO: 65627 - DNA, 73 bp, Homo sapiens
cttaagagcttctgggacaaacttaccattttcttgttgtcctgcttgttaatgctgaccacagactccttta

SEQ ID NO: 65628 - DNA, 75 bp, Homo sapiens
ttctgggacaaacttaccattttcttgttgtcctgcttgttaatgctgaccacagactcctttattacaatgtga

SEQ ID NO: 65629 - DNA, 75 bp, Homo sapiens
aaacttaccattttcttgttgtcctgcttgttaatgctgaccacagactcctttattacaatgtgagtgatttca

SEQ ID NO: 65630 - DNA, 75 bp, Homo sapiens
attttcttgttgtcctgcttgttaatgctgaccacagactcctttattacaatgtgagtgatttcagggaagtaa

SEQ ID NO: 65631 - DNA, 74 bp, Homo sapiens
gttgtcctgcttgttaatgctgaccacagactcctttattacaatgtgagtgatttcagggaagtaagaaaaat

SEQ ID NO: 65632 - DNA, 74 bp, Homo sapiens
ttgttaatgctgaccacagactcctttattacaatgtgagtgatttcagggaagtaagaaaaattgttccactc

SEQ ID NO: 65633 - DNA, 70 bp, Homo sapiens
acagactcctttattacaatgtgagtgatttcagggaagtaagaaaaattgttccactcttcccggatct

SEQ ID NO: 65634 - DNA, 69 bp, Homo sapiens
tcctttattacaatgtgagtgatttcagggaagtaagaaaaattgttccactcttcccggatcttgttt

SEQ ID NO: 65635 - DNA, 71 bp, Homo sapiens
acaatgtgagtgatttcagggaagtaagaaaaattgttccactcttcccggatcttgtttttctcctcatc

SEQ ID NO: 65636 - DNA, 69 bp, Homo sapiens
tcagggaagtaagaaaaattgttccactcttcccggatcttgtttttctcctcatccttcttgtgttta

SEQ ID NO: 65637 - DNA, 67 bp, Homo sapiens
gaagtaagaaaaattgttccactcttcccggatcttgtttttctcctcatccttcttgtgtttattt

SEQ ID NO: 65638 - DNA, 66 bp, Homo sapiens
aaattgttccactcttcccggatcttgtttttctcctcatccttcttgtgtttattttccagtttt

SEQ ID NO: 65639 - DNA, 67 bp, Homo sapiens
tcccggatcttgtttttctcctcatccttcttgtgtttattttccagttttttccgcttcagtttat

SEQ ID NO: 65640 - DNA, 66 bp, Homo sapiens
gatcttgtttttctcctcatccttcttgtgtttattttccagttttttccgcttcagtttattttt

SEQ ID NO: 65641 - DNA, 65 bp, Homo sapiens
cagtttatttttttccttttcaacagaaacaacctgataagatacataaaagggacagggttaag

SEQ ID NO: 65642 - DNA, 78 bp, Homo sapiens
tatgtgacacgggaatgttctctttgatcgactgccaacagccacttacatttggtttatgcctccactggattccaa

SEQ ID NO: 65643 - DNA, 78 bp, Homo sapiens
tctttgatcgactgccaacagccacttacatttggtttatgcctccactggattccaagattcccagtcaccatcact

SEQ ID NO: 65644 - DNA, 78 bp, Homo sapiens
tgccaacagccacttacatttggtttatgcctccactggattccaagattcccagtcaccatcacttcgtagtagaga

SEQ ID NO: 65645 - DNA, 72 bp, Homo sapiens
acttacatttggtttatgcctccactggattccaagattcccagtcaccatcacttcgtagtagagaacgtt

SEQ ID NO: 65646 - DNA, 72 bp, Homo sapiens
atttggtttatgcctccactggattccaagattcccagtcaccatcacttcgtagtagagaacgtttccacc

SEQ ID NO: 65647 - DNA, 74 bp, Homo sapiens
tccactggattccaagattcccagtcaccatcacttcgtagtagagaacgtttccaccgtcattcgaatgaaac

SEQ ID NO: 65648 - DNA, 73 bp, Homo sapiens
attccaagattcccagtcaccatcacttcgtagtagagaacgtttccaccgtcattcgaatgaaaccaattca

SEQ ID NO: 65649 - DNA, 73 bp, Homo sapiens
attcccagtcaccatcacttcgtagtagagaacgtttccaccgtcattcgaatgaaaccaattcatctcattt

SEQ ID NO: 65650 - DNA, 76 bp, Homo sapiens
atcacttcgtagtagagaacgtttccaccgtcattcgaatgaaaccaattcatctcattttctgatgaaatcagta

SEQ ID NO: 65651 - DNA, 76 bp, Homo sapiens
gtagtagagaacgtttccaccgtcattcgaatgaaaccaattcatctcattttctgatgaaatcagtaacatggaa

SEQ ID NO: 65652 - DNA, 76 bp, Homo sapiens
gtttccaccgtcattcgaatgaaaccaattcatctcattttctgatgaaatcagtaacatggaagtctcaaatatt

SEQ ID NO: 65653 - DNA, 80 bp, Homo sapiens
tcattcgaatgaaaccaattcatctcattttctgatgaaatcagtaacatggaagtctcaaatatttcagcaccgtaatg

SEQ ID NO: 65654 - DNA, 78 bp, Homo sapiens
gaaaccaattcatctcattttctgatgaaatcagtaacatggaagtctcaaatatttcagcaccgtaatgttttgtca

SEQ ID NO: 65655 - DNA, 77 bp, Homo sapiens
catctcattttctgatgaaatcagtaacatggaagtctcaaatatttcagcaccgtaatgttttgtcaaagtttcca

SEQ ID NO: 65656 - DNA, 74 bp, Homo sapiens
tttctgatgaaatcagtaacatggaagtctcaaatatttcagcaccgtaatgttttgtcaaagtttccaaggta

SEQ ID NO: 65657 - DNA, 72 bp, Homo sapiens
tcagtaacatggaagtctcaaatatttcagcaccgtaatgttttgtcaaagtttccaaggtagccaagtatt

SEQ ID NO: 65658 - DNA, 70 bp, Homo sapiens
atggaagtctcaaatatttcagcaccgtaatgttttgtcaaagtttccaaggtagccaagtatttcacct

SEQ ID NO: 65659 - DNA, 71 bp, Homo sapiens
aaatatttcagcaccgtaatgttttgtcaaagtttccaaggtagccaagtatttcaccttcaggtcatgcg

SEQ ID NO: 65660 - DNA, 73 bp, Homo sapiens
accgtaatgttttgtcaaagtttccaaggtagccaagtatttcaccttcaggtcatgcgtggacacgctgctg

SEQ ID NO: 65661 - DNA, 75 bp, Homo sapiens
aatgttttgtcaaagtttccaaggtagccaagtatttcaccttcaggtcatgcgtggacacgctgctgtcacaaa

SEQ ID NO: 65662 - DNA, 76 bp, Homo sapiens
tttccaaggtagccaagtatttcaccttcaggtcatgcgtggacacgctgctgtcacaaatggtcttgttgttaaa

SEQ ID NO: 65663 - DNA, 76 bp, Homo sapiens
gtagccaagtatttcaccttcaggtcatgcgtggacacgctgctgtcacaaatggtcttgttgttaaattccttta

SEQ ID NO: 65664 - DNA, 74 bp, Homo sapiens
agtatttcaccttcaggtcatgcgtggacacgctgctgtcacaaatggtcttgttgttaaattcctttaggaaa

SEQ ID NO: 65665 - DNA, 74 bp, Homo sapiens
cttcaggtcatgcgtggacacgctgctgtcacaaatggtcttgttgttaaattcctttaggaaatccttgaaaa

SEQ ID NO: 65666 - DNA, 71 bp, Homo sapiens
cgtggacacgctgctgtcacaaatggtcttgttgttaaattcctttaggaaatccttgaaaacattattta

SEQ ID NO: 65667 - DNA, 70 bp, Homo sapiens
ctgtcacaaatggtcttgttgttaaattcctttaggaaatccttgaaaacattatttatccgcatcctgg

SEQ ID NO: 65668 - DNA, 69 bp, Homo sapiens
atggtcttgttgttaaattcctttaggaaatccttgaaaacattatttatccgcatcctggtgagaagg

SEQ ID NO: 65669 - DNA, 69 bp, Homo sapiens
ttgttgttaaattcctttaggaaatccttgaaaacattatttatccgcatcctggtgagaaggttcctc

SEQ ID NO: 65670 - DNA, 74 bp, Homo sapiens
aaatccttgaaaacattatttatccgcatcctggtgagaaggttcctctgtctgatggacttattcaatgtttc

SEQ ID NO: 65671 - DNA, 76 bp, Homo sapiens
aaaacattatttatccgcatcctggtgagaaggttcctctgtctgatggacttattcaatgtttctggaatatatc

SEQ ID NO: 65672 - DNA, 77 bp, Homo sapiens
tgagaaggttcctctgtctgatggacttattcaatgtttctggaatatatcgcttgtagctaaaagacagtagaaaa

SEQ ID NO: 65673 - DNA, 75 bp, Homo sapiens
aggttcctctgtctgatggacttattcaatgtttctggaatatatcgcttgtagctaaaagacagtagaaaagta

SEQ ID NO: 65674 - DNA, 77 bp, Homo sapiens
agaaacaccaccatcctcacaatcaattcttcagccagtgggaagctttacctgatgtccttgggcagttctggcaa

SEQ ID NO: 65675 - DNA, 82 bp, Homo sapiens
atcctcacaatcaattcttcagccagtgggaagctttacctgatgtccttgggcagttctggcaactgcatcttcttcatca

SEQ ID NO: 65676 - DNA, 82 bp, Homo sapiens
aatcaattcttcagccagtgggaagctttacctgatgtccttgggcagttctggcaactgcatcttcttcatcatggcatag

SEQ ID NO: 65677 - DNA, 85 bp, Homo sapiens
cagtgggaagctttacctgatgtccttgggcagttctggcaactgcatcttcttcatcatggcatagtgtgagatggccaggaca

SEQ ID NO: 65678 - DNA, 85 bp, Homo sapiens
aagctttacctgatgtccttgggcagttctggcaactgcatcttcttcatcatggcatagtgtgagatggccaggacagccatcc

SEQ ID NO: 65679 - DNA, 85 bp, Homo sapiens
atgtccttgggcagttctggcaactgcatcttcttcatcatggcatagtgtgagatggccaggacagccatccctagacactcgt

SEQ ID NO: 65680 - DNA, 89 bp, Homo sapiens
cagttctggcaactgcatcttcttcatcatggcatagtgtgagatggccaggacagccatccctagacactcgttctcaatatcatgtc

SEQ ID NO: 65681 - DNA, 89 bp, Homo sapiens
aactgcatcttcttcatcatggcatagtgtgagatggccaggacagccatccctagacactcgttctcaatatcatgtccatcctgctc

SEQ ID NO: 65682 - DNA, 87 bp, Homo sapiens
ttcttcatcatggcatagtgtgagatggccaggacagccatccctagacactcgttctcaatatcatgtccatcctgctcggtcttg

SEQ ID NO: 65683 - DNA, 84 bp, Homo sapiens
atcatggcatagtgtgagatggccaggacagccatccctagacactcgttctcaatatcatgtccatcctgctcggtcttgggg

SEQ ID NO: 65684 - DNA, 82 bp, Homo sapiens
tgagatggccaggacagccatccctagacactcgttctcaatatcatgtccatcctgctcggtcttggggtctcgaatagga

SEQ ID NO: 65685 - DNA, 80 bp, Homo sapiens
ggacagccatccctagacactcgttctcaatatcatgtccatcctgctcggtcttggggtctcgaataggagccaggcat

SEQ ID NO: 65686 - DNA, 79 bp, Homo sapiens
atccctagacactcgttctcaatatcatgtccatcctgctcggtcttggggtctcgaataggagccaggcatttcacca

SEQ ID NO: 65687 - DNA, 78 bp, Homo sapiens
aatatcatgtccatcctgctcggtcttggggtctcgaataggagccaggcatttcaccaaatcatactgtccctagga

SEQ ID NO: 65688 - DNA, 77 bp, Homo sapiens
tgtccatcctgctcggtcttggggtctcgaataggagccaggcatttcaccaaatcatactgtccctaggagcaagg

SEQ ID NO: 65689 - DNA, 73 bp, Homo sapiens
tcggtcttggggtctcgaataggagccaggcatttcaccaaatcatactgtccctaggagcaagggggagaaa

SEQ ID NO: 65690 - DNA, 76 bp, Homo sapiens
ggtctcgaataggagccaggcatttcaccaaatcatactgtccctaggagcaagggggagaaaccatgagagccca

SEQ ID NO: 65691 - DNA, 76 bp, Homo sapiens
ctctcccatcccacaaactccagcttctcctgggcccaaacttcctacctgagcaaacagatactccagtgagctg

SEQ ID NO: 65692 - DNA, 77 bp, Homo sapiens
acaaactccagcttctcctgggcccaaacttcctacctgagcaaacagatactccagtgagctggcatcaaggagag

SEQ ID NO: 65693 - DNA, 78 bp, Homo sapiens
agcttctcctgggcccaaacttcctacctgagcaaacagatactccagtgagctggcatcaaggagaggggttgcatc

SEQ ID NO: 65694 - DNA, 77 bp, Homo sapiens
ggcccaaacttcctacctgagcaaacagatactccagtgagctggcatcaaggagaggggttgcatctggaatcttt

SEQ ID NO: 65695 - DNA, 75 bp, Homo sapiens
aaacttcctacctgagcaaacagatactccagtgagctggcatcaaggagaggggttgcatctggaatctttttt

SEQ ID NO: 65696 - DNA, 76 bp, Homo sapiens
gcaaacagatactccagtgagctggcatcaaggagaggggttgcatctggaatcttttttttctcgtagccatttt

SEQ ID NO: 65697 - DNA, 76 bp, Homo sapiens
agatactccagtgagctggcatcaaggagaggggttgcatctggaatcttttttttctcgtagccatttttctgct

SEQ ID NO: 65698 - DNA, 74 bp, Homo sapiens
agctggcatcaaggagaggggttgcatctggaatcttttttttctcgtagccatttttctgcttctttggagaa

SEQ ID NO: 65699 - DNA, 73 bp, Homo sapiens
atcaaggagaggggttgcatctggaatcttttttttctcgtagccatttttctgcttctttggagaatgacgc

SEQ ID NO: 65700 - DNA, 79 bp, Homo sapiens
ttgcatctggaatcttttttttctcgtagccatttttctgcttctttggagaatgacgccacactgactgctcattgtc

SEQ ID NO: 65701 - DNA, 74 bp, Homo sapiens
aatcttttttttctcgtagccatttttctgcttctttggagaatgacgccacactgactgctcattgtcgttgg

SEQ ID NO: 65702 - DNA, 78 bp, Homo sapiens
tttttctcgtagccatttttctgcttctttggagaatgacgccacactgactgctcattgtcgttggttccatgccaa

SEQ ID NO: 65703 - DNA, 79 bp, Homo sapiens
catttttctgcttctttggagaatgacgccacactgactgctcattgtcgttggttccatgccaattggtgaaatagaa

SEQ ID NO: 65704 - DNA, 77 bp, Homo sapiens
cttctttggagaatgacgccacactgactgctcattgtcgttggttccatgccaattggtgaaatagaacctggaag

SEQ ID NO: 65705 - DNA, 77 bp, Homo sapiens
agaatgacgccacactgactgctcattgtcgttggttccatgccaattggtgaaatagaacctggaaggcaggaaaa

SEQ ID NO: 65706 - DNA, 77 bp, Homo sapiens
acactgactgctcattgtcgttggttccatgccaattggtgaaatagaacctggaaggcaggaaaatgaatgccaat

SEQ ID NO: 65707 - DNA, 76 bp, Homo sapiens
ctcattgtcgttggttccatgccaattggtgaaatagaacctggaaggcaggaaaatgaatgccaattgtggcaaa

SEQ ID NO: 65708 - DNA, 77 bp, Homo sapiens
tcagtgcagagggagccaggcaggtaccaggtcagtacttcccatacctcatccggtagtggagccggagggacatc

SEQ ID NO: 65709 - DNA, 76 bp, Homo sapiens
ggagccaggcaggtaccaggtcagtacttcccatacctcatccggtagtggagccggagggacatcttgtcatcaa

SEQ ID NO: 65710 - DNA, 74 bp, Homo sapiens
aggtaccaggtcagtacttcccatacctcatccggtagtggagccggagggacatcttgtcatcaacggtgatg

SEQ ID NO: 65711 - DNA, 77 bp, Homo sapiens
gtcagtacttcccatacctcatccggtagtggagccggagggacatcttgtcatcaacggtgatggtgcgatttgga

SEQ ID NO: 65712 - DNA, 77 bp, Homo sapiens
acttcccatacctcatccggtagtggagccggagggacatcttgtcatcaacggtgatggtgcgatttggagcatac

SEQ ID NO: 65713 - DNA, 79 bp, Homo sapiens
ctcatccggtagtggagccggagggacatcttgtcatcaacggtgatggtgcgatttggagcataccagagcttggtgt

SEQ ID NO: 65714 - DNA, 82 bp, Homo sapiens
tagtggagccggagggacatcttgtcatcaacggtgatggtgcgatttggagcataccagagcttggtgttctcgtcataca

SEQ ID NO: 65715 - DNA, 81 bp, Homo sapiens
gacatcttgtcatcaacggtgatggtgcgatttggagcataccagagcttggtgttctcgtcatacagggcaaagaggttg

SEQ ID NO: 65716 - DNA, 81 bp, Homo sapiens
ttgtcatcaacggtgatggtgcgatttggagcataccagagcttggtgttctcgtcatacagggcaaagaggttgtgacaa

SEQ ID NO: 65717 - DNA, 78 bp, Homo sapiens
acggtgatggtgcgatttggagcataccagagcttggtgttctcgtcatacagggcaaagaggttgtgacaaagagga

SEQ ID NO: 65718 - DNA, 78 bp, Homo sapiens
atttggagcataccagagcttggtgttctcgtcatacagggcaaagaggttgtgacaaagaggagagatacctgagga

SEQ ID NO: 65719 - DNA, 75 bp, Homo sapiens
ataccagagcttggtgttctcgtcatacagggcaaagaggttgtgacaaagaggagagatacctgaggaaaagta

SEQ ID NO: 65720 - DNA, 72 bp, Homo sapiens
agcttggtgttctcgtcatacagggcaaagaggttgtgacaaagaggagagatacctgaggaaaagtaaaaa

SEQ ID NO: 65721 - DNA, 74 bp, Homo sapiens
tcatacagggcaaagaggttgtgacaaagaggagagatacctgaggaaaagtaaaaaaacacatcagaaaatca

SEQ ID NO: 65722 - DNA, 81 bp, Homo sapiens
aactagtgtgttggtgaaacccccagccctgggcagctgccagtactcacggcatgcctgtgcagccctgatgcacagttc

SEQ ID NO: 65723 - DNA, 86 bp, Homo sapiens
tgaaacccccagccctgggcagctgccagtactcacggcatgcctgtgcagccctgatgcacagttcctctgctgtgtactctcca

SEQ ID NO: 65724 - DNA, 87 bp, Homo sapiens
agccctgggcagctgccagtactcacggcatgcctgtgcagccctgatgcacagttcctctgctgtgtactctccactgcccagccg

SEQ ID NO: 65725 - DNA, 87 bp, Homo sapiens
tgggcagctgccagtactcacggcatgcctgtgcagccctgatgcacagttcctctgctgtgtactctccactgcccagccggaggg

SEQ ID NO: 65726 - DNA, 83 bp, Homo sapiens
agtactcacggcatgcctgtgcagccctgatgcacagttcctctgctgtgtactctccactgcccagccggaggggctccctg

SEQ ID NO: 65727 - DNA, 84 bp, Homo sapiens
tgcctgtgcagccctgatgcacagttcctctgctgtgtactctccactgcccagccggaggggctccctgtccgacagatagaa

SEQ ID NO: 65728 - DNA, 81 bp, Homo sapiens
gccctgatgcacagttcctctgctgtgtactctccactgcccagccggaggggctccctgtccgacagatagaagatcact

SEQ ID NO: 65729 - DNA, 77 bp, Homo sapiens
acagttcctctgctgtgtactctccactgcccagccggaggggctccctgtccgacagatagaagatcacttccacc

SEQ ID NO: 65730 - DNA, 78 bp, Homo sapiens
tcctctgctgtgtactctccactgcccagccggaggggctccctgtccgacagatagaagatcacttccacccctggc

SEQ ID NO: 65731 - DNA, 76 bp, Homo sapiens
tgtactctccactgcccagccggaggggctccctgtccgacagatagaagatcacttccacccctggctcaggggc

SEQ ID NO: 65732 - DNA, 75 bp, Homo sapiens
tgcccagccggaggggctccctgtccgacagatagaagatcacttccacccctggctcaggggcctccaggttca

SEQ ID NO: 65733 - DNA, 74 bp, Homo sapiens
gggctccctgtccgacagatagaagatcacttccacccctggctcaggggcctccaggttcacctcagtcttct

SEQ ID NO: 65734 - DNA, 77 bp, Homo sapiens
tccgacagatagaagatcacttccacccctggctcaggggcctccaggttcacctcagtcttcttggagctcctcat

SEQ ID NO: 65735 - DNA, 75 bp, Homo sapiens
agatagaagatcacttccacccctggctcaggggcctccaggttcacctcagtcttcttggagctcctcatttta

SEQ ID NO: 65736 - DNA, 75 bp, Homo sapiens
atcacttccacccctggctcaggggcctccaggttcacctcagtcttcttggagctcctcattttagcacagaaa

SEQ ID NO: 65737 - DNA, 81 bp, Homo sapiens
tggctcaggggcctccaggttcacctcagtcttcttggagctcctcattttagcacagaaagccatggcattgcagtcctc

SEQ ID NO: 65738 - DNA, 78 bp, Homo sapiens
cctccaggttcacctcagtcttcttggagctcctcattttagcacagaaagccatggcattgcagtcctcttttatat

SEQ ID NO: 65739 - DNA, 78 bp, Homo sapiens
aggttcacctcagtcttcttggagctcctcattttagcacagaaagccatggcattgcagtcctcttttatatttaga

SEQ ID NO: 65740 - DNA, 79 bp, Homo sapiens
ttcttggagctcctcattttagcacagaaagccatggcattgcagtcctcttttatatttagatactgttgtggaagga

SEQ ID NO: 65741 - DNA, 76 bp, Homo sapiens
ctcctcattttagcacagaaagccatggcattgcagtcctcttttatatttagatactgttgtggaaggaaaacaa

SEQ ID NO: 65742 - DNA, 75 bp, Homo sapiens
attttagcacagaaagccatggcattgcagtcctcttttatatttagatactgttgtggaaggaaaacaagacta

SEQ ID NO: 65743 - DNA, 76 bp, Homo sapiens
aaagccatggcattgcagtcctcttttatatttagatactgttgtggaaggaaaacaagactatgtggtcactcta

SEQ ID NO: 65744 - DNA, 75 bp, Homo sapiens
ccttttttaaaaatatgcaaatctacatacctgcatttattcagctgtccagtgttctccaagaagcaaactgga

SEQ ID NO: 65745 - DNA, 77 bp, Homo sapiens
aaaaatatgcaaatctacatacctgcatttattcagctgtccagtgttctccaagaagcaaactggattttcttctc

SEQ ID NO: 65746 - DNA, 76 bp, Homo sapiens
aaatctacatacctgcatttattcagctgtccagtgttctccaagaagcaaactggattttcttctctactttcca

SEQ ID NO: 65747 - DNA, 75 bp, Homo sapiens
atacctgcatttattcagctgtccagtgttctccaagaagcaaactggattttcttctctactttccaaagctac

SEQ ID NO: 65748 - DNA, 75 bp, Homo sapiens
tttattcagctgtccagtgttctccaagaagcaaactggattttcttctctactttccaaagctacttcagagaa

SEQ ID NO: 65749 - DNA, 73 bp, Homo sapiens
agtgttctccaagaagcaaactggattttcttctctactttccaaagctacttcagagaagcgctaaagacaa

SEQ ID NO: 65750 - DNA, 73 bp, Homo sapiens
tctccaagaagcaaactggattttcttctctactttccaaagctacttcagagaagcgctaaagacaaaaata

SEQ ID NO: 65751 - DNA, 76 bp, Homo sapiens
agagaaagagacgatactcaaaaagagaacagagacatacagagaaaggaagtccttactgtgtctcagaagccag

SEQ ID NO: 65752 - DNA, 76 bp, Homo sapiens
acgatactcaaaaagagaacagagacatacagagaaaggaagtccttactgtgtctcagaagccaggcaccagtag

SEQ ID NO: 65753 - DNA, 74 bp, Homo sapiens
aaaagagaacagagacatacagagaaaggaagtccttactgtgtctcagaagccaggcaccagtagggttgagg

SEQ ID NO: 65754 - DNA, 76 bp, Homo sapiens
acatacagagaaaggaagtccttactgtgtctcagaagccaggcaccagtagggttgagggacatctgccaggaag

SEQ ID NO: 65755 - DNA, 72 bp, Homo sapiens
aaaggaagtccttactgtgtctcagaagccaggcaccagtagggttgagggacatctgccaggaaggaggtt

SEQ ID NO: 65756 - DNA, 79 bp, Homo sapiens
ttactgtgtctcagaagccaggcaccagtagggttgagggacatctgccaggaaggaggttttcagcagcatgaactgt

SEQ ID NO: 65757 - DNA, 78 bp, Homo sapiens
tcagaagccaggcaccagtagggttgagggacatctgccaggaaggaggttttcagcagcatgaactgttttagataa

SEQ ID NO: 65758 - DNA, 74 bp, Homo sapiens
aggcaccagtagggttgagggacatctgccaggaaggaggttttcagcagcatgaactgttttagataactagg

SEQ ID NO: 65759 - DNA, 74 bp, Homo sapiens
tagggttgagggacatctgccaggaaggaggttttcagcagcatgaactgttttagataactagggcagaaaaa

SEQ ID NO: 65760 - DNA, 72 bp, Homo sapiens
acatctgccaggaaggaggttttcagcagcatgaactgttttagataactagggcagaaaaaaggtgttaaa

SEQ ID NO: 65761 - DNA, 71 bp, Homo sapiens
aggaaggaggttttcagcagcatgaactgttttagataactagggcagaaaaaaggtgttaaaatgtgaca

SEQ ID NO: 65762 - DNA, 72 bp, Homo sapiens
aggttttcagcagcatgaactgttttagataactagggcagaaaaaaggtgttaaaatgtgacagcaagaag

SEQ ID NO: 65763 - DNA, 72 bp, Homo sapiens
tgccgaccgcggccgccccggctcctccacctcccccggtgacactcaccacttccgtgtgcgcctgggcca

SEQ ID NO: 65764 - DNA, 72 bp, Homo sapiens
ggccgccccggctcctccacctcccccggtgacactcaccacttccgtgtgcgcctgggccaggcagcgccc

SEQ ID NO: 65765 - DNA, 76 bp, Homo sapiens
cctccacctcccccggtgacactcaccacttccgtgtgcgcctgggccaggcagcgccccgtcgctgcgctggctg

SEQ ID NO: 65766 - DNA, 75 bp, Homo sapiens
ccccggtgacactcaccacttccgtgtgcgcctgggccaggcagcgccccgtcgctgcgctggctggggtcgacc

SEQ ID NO: 65767 - DNA, 78 bp, Homo sapiens
actcaccacttccgtgtgcgcctgggccaggcagcgccccgtcgctgcgctggctggggtcgaccggcaggctcgcta

SEQ ID NO: 65768 - DNA, 77 bp, Homo sapiens
ccacttccgtgtgcgcctgggccaggcagcgccccgtcgctgcgctggctggggtcgaccggcaggctcgctaggcg

SEQ ID NO: 65769 - DNA, 75 bp, Homo sapiens
cctgggccaggcagcgccccgtcgctgcgctggctggggtcgaccggcaggctcgctaggcggccagccccgcgg

SEQ ID NO: 65770 - DNA, 74 bp, Homo sapiens
ccaggcagcgccccgtcgctgcgctggctggggtcgaccggcaggctcgctaggcggccagccccgcggggccc

SEQ ID NO: 65771 - DNA, 77 bp, Homo sapiens
gtcgctgcgctggctggggtcgaccggcaggctcgctaggcggccagccccgcggggccccagcgtgcgcgcgccca

SEQ ID NO: 65772 - DNA, 75 bp, Homo sapiens
ctggctggggtcgaccggcaggctcgctaggcggccagccccgcggggccccagcgtgcgcgcgcccagggctga

SEQ ID NO: 65773 - DNA, 73 bp, Homo sapiens
gggtcgaccggcaggctcgctaggcggccagccccgcggggccccagcgtgcgcgcgcccagggctgaggagg

SEQ ID NO: 65774 - DNA, 75 bp, Homo sapiens
gctcgctaggcggccagccccgcggggccccagcgtgcgcgcgcccagggctgaggaggggtcgcggcgaggaca

SEQ ID NO: 65775 - DNA, 73 bp, Homo sapiens
taggcggccagccccgcggggccccagcgtgcgcgcgcccagggctgaggaggggtcgcggcgaggacagccg

SEQ ID NO: 65776 - DNA, 73 bp, Homo sapiens
ccgcggggccccagcgtgcgcgcgcccagggctgaggaggggtcgcggcgaggacagccgggactgggcgcag

SEQ ID NO: 65777 - DNA, 79 bp, Homo sapiens
ccagcgtgcgcgcgcccagggctgaggaggggtcgcggcgaggacagccgggactgggcgcaggcccgcactgtctgca

SEQ ID NO: 65778 - DNA, 79 bp, Homo sapiens
gcgcccagggctgaggaggggtcgcggcgaggacagccgggactgggcgcaggcccgcactgtctgcagctccaggata

SEQ ID NO: 65779 - DNA, 78 bp, Homo sapiens
ctgaggaggggtcgcggcgaggacagccgggactgggcgcaggcccgcactgtctgcagctccaggatactccgcggc

SEQ ID NO: 65780 - DNA, 77 bp, Homo sapiens
gggtcgcggcgaggacagccgggactgggcgcaggcccgcactgtctgcagctccaggatactccgcggccgccgcg

SEQ ID NO: 65781 - DNA, 70 bp, Homo sapiens
gggagtaaaattgccaggattcgcccgtagattgacccctcccagctctggagccccctccgccacacct

SEQ ID NO: 65782 - DNA, 73 bp, Homo sapiens
taaaattgccaggattcgcccgtagattgacccctcccagctctggagccccctccgccacacctttgtgcgc

SEQ ID NO: 65783 - DNA, 78 bp, Homo sapiens
attcgcccgtagattgacccctcccagctctggagccccctccgccacacctttgtgcgctcgatgcagaaatgcatc

SEQ ID NO: 65784 - DNA, 79 bp, Homo sapiens
tagattgacccctcccagctctggagccccctccgccacacctttgtgcgctcgatgcagaaatgcatcccgcctcctc

SEQ ID NO: 65785 - DNA, 78 bp, Homo sapiens
cccagctctggagccccctccgccacacctttgtgcgctcgatgcagaaatgcatcccgcctcctccgtatacgctcc

SEQ ID NO: 65786 - DNA, 78 bp, Homo sapiens
tggagccccctccgccacacctttgtgcgctcgatgcagaaatgcatcccgcctcctccgtatacgctccgcttctta

SEQ ID NO: 65787 - DNA, 79 bp, Homo sapiens
cgccacacctttgtgcgctcgatgcagaaatgcatcccgcctcctccgtatacgctccgcttcttaccccagctcagta

SEQ ID NO: 65788 - DNA, 78 bp, Homo sapiens
acctttgtgcgctcgatgcagaaatgcatcccgcctcctccgtatacgctccgcttcttaccccagctcagtaggaga

SEQ ID NO: 65789 - DNA, 79 bp, Homo sapiens
ctcgatgcagaaatgcatcccgcctcctccgtatacgctccgcttcttaccccagctcagtaggagaggagctagtgga

SEQ ID NO: 65790 - DNA, 77 bp, Homo sapiens
agaaatgcatcccgcctcctccgtatacgctccgcttcttaccccagctcagtaggagaggagctagtggagcacta

SEQ ID NO: 65791 - DNA, 74 bp, Homo sapiens
ctcctccgtatacgctccgcttcttaccccagctcagtaggagaggagctagtggagcactagactaaaaagaa

SEQ ID NO: 65792 - DNA, 73 bp, Homo sapiens
ccgtatacgctccgcttcttaccccagctcagtaggagaggagctagtggagcactagactaaaaagaattta

SEQ ID NO: 65793 - DNA, 73 bp, Homo sapiens
cggcggcggcggccgggggcggtgagcgctggggctgcgcgggcggcaggcaacggctgaggcggcggcggcg

SEQ ID NO: 65794 - DNA, 70 bp, Homo sapiens
ggcggcggcggcgtgggttgggctcgagcgggcggcggcgcctcagactccccggaacgggagcccacgc

SEQ ID NO: 65795 - DNA, 68 bp, Homo sapiens
cggcgtgggttgggctcgagcgggcggcggcgcctcagactccccggaacgggagcccacgcgggcgg

SEQ ID NO: 65796 - DNA, 70 bp, Homo sapiens
ggctcgagcgggcggcggcgcctcagactccccggaacgggagcccacgcgggcgggcgcctgaaacaaa

SEQ ID NO: 65797 - DNA, 67 bp, Homo sapiens
cgggcggcggcgcctcagactccccggaacgggagcccacgcgggcgggcgcctgaaacaaagggaa

SEQ ID NO: 65798 - DNA, 66 bp, Homo sapiens
cctcagactccccggaacgggagcccacgcgggcgggcgcctgaaacaaagggaagcgggcgtccg

SEQ ID NO: 65799 - DNA, 65 bp, Homo sapiens
cccggaacgggagcccacgcgggcgggcgcctgaaacaaagggaagcgggcgtccgggcgccgcg

SEQ ID NO: 65800 - DNA, 65 bp, Homo sapiens
aacgggagcccacgcgggcgggcgcctgaaacaaagggaagcgggcgtccgggcgccgcgggtgg

SEQ ID NO: 65801 - DNA, 68 bp, Homo sapiens
cgggcgggcgcctgaaacaaagggaagcgggcgtccgggcgccgcgggtgggcggtcagtcggtcagc

SEQ ID NO: 65802 - DNA, 71 bp, Homo sapiens
cctgaaacaaagggaagcgggcgtccgggcgccgcgggtgggcggtcagtcggtcagcgcggagccagcca

SEQ ID NO: 65803 - DNA, 70 bp, Homo sapiens
acaaagggaagcgggcgtccgggcgccgcgggtgggcggtcagtcggtcagcgcggagccagccagcggg

SEQ ID NO: 65804 - DNA, 73 bp, Homo sapiens
gggcgtccgggcgccgcgggtgggcggtcagtcggtcagcgcggagccagccagcgggtgcccgcgcaagccc

SEQ ID NO: 65805 - DNA, 74 bp, Homo sapiens
ccgcgggtgggcggtcagtcggtcagcgcggagccagccagcgggtgcccgcgcaagccccgagcgcggccggc

SEQ ID NO: 65806 - DNA, 75 bp, Homo sapiens
ggtgggcggtcagtcggtcagcgcggagccagccagcgggtgcccgcgcaagccccgagcgcggccggccggcgc

SEQ ID NO: 65807 - DNA, 75 bp, Homo sapiens
agtcggtcagcgcggagccagccagcgggtgcccgcgcaagccccgagcgcggccggccggcgcggcctcagggc

SEQ ID NO: 65808 - DNA, 74 bp, Homo sapiens
cggagccagccagcgggtgcccgcgcaagccccgagcgcggccggccggcgcggcctcagggcgggaagatgcc

SEQ ID NO: 65809 - DNA, 74 bp, Homo sapiens
agcgggtgcccgcgcaagccccgagcgcggccggccggcgcggcctcagggcgggaagatgccgcgcgtcgtgc

SEQ ID NO: 65810 - DNA, 75 bp, Homo sapiens
gcgcaagccccgagcgcggccggccggcgcggcctcagggcgggaagatgccgcgcgtcgtgcccgaccagagaa

SEQ ID NO: 65811 - DNA, 75 bp, Homo sapiens
cgagcgcggccggccggcgcggcctcagggcgggaagatgccgcgcgtcgtgcccgaccagagaagcaagttcga

SEQ ID NO: 65812 - DNA, 74 bp, Homo sapiens
cggccggcgcggcctcagggcgggaagatgccgcgcgtcgtgcccgaccagagaagcaagttcgagaacgagga

SEQ ID NO: 65813 - DNA, 71 bp, Homo sapiens
cggcctcagggcgggaagatgccgcgcgtcgtgcccgaccagagaagcaagttcgagaacgaggagttttt

SEQ ID NO: 65814 - DNA, 70 bp, Homo sapiens
agggcgggaagatgccgcgcgtcgtgcccgaccagagaagcaagttcgagaacgaggagttttttaggaa

SEQ ID NO: 65815 - DNA, 74 bp, Homo sapiens
agatgccgcgcgtcgtgcccgaccagagaagcaagttcgagaacgaggagttttttaggaagctgagccgcgag

SEQ ID NO: 65816 - DNA, 74 bp, Homo sapiens
cgtcgtgcccgaccagagaagcaagttcgagaacgaggagttttttaggaagctgagccgcgagtgtgaggtga

SEQ ID NO: 65817 - DNA, 74 bp, Homo sapiens
accagagaagcaagttcgagaacgaggagttttttaggaagctgagccgcgagtgtgaggtgaggcaggcgggc

SEQ ID NO: 65818 - DNA, 73 bp, Homo sapiens
aacgaggagttttttaggaagctgagccgcgagtgtgaggtgaggcaggcgggcgggcggctaggaggccgca

SEQ ID NO: 65819 - DNA, 73 bp, Homo sapiens
cgcgggcggcgccgcggatttggctcctgatttcgggccgtcttgccttgcagattaagtacacgggcttcag

SEQ ID NO: 65820 - DNA, 72 bp, Homo sapiens
cggcgccgcggatttggctcctgatttcgggccgtcttgccttgcagattaagtacacgggcttcagggacc

SEQ ID NO: 65821 - DNA, 72 bp, Homo sapiens
tggctcctgatttcgggccgtcttgccttgcagattaagtacacgggcttcagggaccggccccacgaggaa

SEQ ID NO: 65822 - DNA, 69 bp, Homo sapiens
atttcgggccgtcttgccttgcagattaagtacacgggcttcagggaccggccccacgaggaacgccag

SEQ ID NO: 65823 - DNA, 73 bp, Homo sapiens
tcttgccttgcagattaagtacacgggcttcagggaccggccccacgaggaacgccaggcacgcttccagaac

SEQ ID NO: 65824 - DNA, 71 bp, Homo sapiens
ccttgcagattaagtacacgggcttcagggaccggccccacgaggaacgccaggcacgcttccagaacgcc

SEQ ID NO: 65825 - DNA, 71 bp, Homo sapiens
taagtacacgggcttcagggaccggccccacgaggaacgccaggcacgcttccagaacgcctgccgcgacg

SEQ ID NO: 65826 - DNA, 72 bp, Homo sapiens
ttcagggaccggccccacgaggaacgccaggcacgcttccagaacgcctgccgcgacggccgctcggaaatc

SEQ ID NO: 65827 - DNA, 72 bp, Homo sapiens
ccccacgaggaacgccaggcacgcttccagaacgcctgccgcgacggccgctcggaaatcgtaagtcggctg

SEQ ID NO: 65828 - DNA, 71 bp, Homo sapiens
aggaacgccaggcacgcttccagaacgcctgccgcgacggccgctcggaaatcgtaagtcggctggcccgg

SEQ ID NO: 65829 - DNA, 72 bp, Homo sapiens
aggcacgcttccagaacgcctgccgcgacggccgctcggaaatcgtaagtcggctggcccggggcgcgcgcg

SEQ ID NO: 65830 - DNA, 70 bp, Homo sapiens
agaacgcctgccgcgacggccgctcggaaatcgtaagtcggctggcccggggcgcgcgcgggtcacttgt

SEQ ID NO: 65831 - DNA, 73 bp, Homo sapiens
atttatgtaatgtcctgctcctgatcctgtttgtattgatttttctaaaaggcttttgtggccacaggaacca

SEQ ID NO: 65832 - DNA, 74 bp, Homo sapiens
tgctcctgatcctgtttgtattgatttttctaaaaggcttttgtggccacaggaaccaatctgtctctccagtt

SEQ ID NO: 65833 - DNA, 69 bp, Homo sapiens
atcctgtttgtattgatttttctaaaaggcttttgtggccacaggaaccaatctgtctctccagttttt

SEQ ID NO: 65834 - DNA, 70 bp, Homo sapiens
ttgtattgatttttctaaaaggcttttgtggccacaggaaccaatctgtctctccagttttttccggcca

SEQ ID NO: 65835 - DNA, 71 bp, Homo sapiens
ttttctaaaaggcttttgtggccacaggaaccaatctgtctctccagttttttccggccagctggcaggga

SEQ ID NO: 65836 - DNA, 74 bp, Homo sapiens
ttttgtggccacaggaaccaatctgtctctccagttttttccggccagctggcagggagaacagcgacaaacac

SEQ ID NO: 65837 - DNA, 74 bp, Homo sapiens
acaggaaccaatctgtctctccagttttttccggccagctggcagggagaacagcgacaaacacctagccgaga

SEQ ID NO: 65838 - DNA, 75 bp, Homo sapiens
ctgtctctccagttttttccggccagctggcagggagaacagcgacaaacacctagccgagagtatgtcgactta

SEQ ID NO: 65839 - DNA, 73 bp, Homo sapiens
agttttttccggccagctggcagggagaacagcgacaaacacctagccgagagtatgtcgacttagaaagaga

SEQ ID NO: 65840 - DNA, 77 bp, Homo sapiens
tttccggccagctggcagggagaacagcgacaaacacctagccgagagtatgtcgacttagaaagagaagcaggcaa

SEQ ID NO: 65841 - DNA, 74 bp, Homo sapiens
cagggagaacagcgacaaacacctagccgagagtatgtcgacttagaaagagaagcaggcaaggtaggaaacat

SEQ ID NO: 65842 - DNA, 72 bp, Homo sapiens
aacagcgacaaacacctagccgagagtatgtcgacttagaaagagaagcaggcaaggtaggaaacatttctt

SEQ ID NO: 65843 - DNA, 71 bp, Homo sapiens
acctagccgagagtatgtcgacttagaaagagaagcaggcaaggtaggaaacatttctttgcaatttaaaa

SEQ ID NO: 65844 - DNA, 76 bp, Homo sapiens
atgtgtctgatggttttcaattattttcatccttttctgtgtcttaggtatatttgaaggctcccatgattctgaa

SEQ ID NO: 65845 - DNA, 74 bp, Homo sapiens
atggttttcaattattttcatccttttctgtgtcttaggtatatttgaaggctcccatgattctgaatggagtc

SEQ ID NO: 65846 - DNA, 77 bp, Homo sapiens
tattttcatccttttctgtgtcttaggtatatttgaaggctcccatgattctgaatggagtctgtgttatctggaaa

SEQ ID NO: 65847 - DNA, 78 bp, Homo sapiens
cttttctgtgtcttaggtatatttgaaggctcccatgattctgaatggagtctgtgttatctggaaaggctggattga

SEQ ID NO: 65848 - DNA, 80 bp, Homo sapiens
tgtgtcttaggtatatttgaaggctcccatgattctgaatggagtctgtgttatctggaaaggctggattgatctccaaa

SEQ ID NO: 65849 - DNA, 81 bp, Homo sapiens
tatatttgaaggctcccatgattctgaatggagtctgtgttatctggaaaggctggattgatctccaaagactggatggta

SEQ ID NO: 65850 - DNA, 82 bp, Homo sapiens
tcccatgattctgaatggagtctgtgttatctggaaaggctggattgatctccaaagactggatggtatgggctgtctggag

SEQ ID NO: 65851 - DNA, 80 bp, Homo sapiens
attctgaatggagtctgtgttatctggaaaggctggattgatctccaaagactggatggtatgggctgtctggagtttga

SEQ ID NO: 65852 - DNA, 81 bp, Homo sapiens
agtctgtgttatctggaaaggctggattgatctccaaagactggatggtatgggctgtctggagtttgatgaggagcgagc

SEQ ID NO: 65853 - DNA, 80 bp, Homo sapiens
ttatctggaaaggctggattgatctccaaagactggatggtatgggctgtctggagtttgatgaggagcgagcccaggta

SEQ ID NO: 65854 - DNA, 77 bp, Homo sapiens
aaggctggattgatctccaaagactggatggtatgggctgtctggagtttgatgaggagcgagcccaggtagggtaa

SEQ ID NO: 65855 - DNA, 78 bp, Homo sapiens
tccaaagactggatggtatgggctgtctggagtttgatgaggagcgagcccaggtagggtaacatcaggctttattga

SEQ ID NO: 65856 - DNA, 79 bp, Homo sapiens
agactggatggtatgggctgtctggagtttgatgaggagcgagcccaggtagggtaacatcaggctttattgagcatgg

SEQ ID NO: 65857 - DNA, 77 bp, Homo sapiens
ttttataaatcaaaattaaaataggtatttcatgtattctgacagcaggaggatgcattagcacaacaggcctttga

SEQ ID NO: 65858 - DNA, 78 bp, Homo sapiens
caaaattaaaataggtatttcatgtattctgacagcaggaggatgcattagcacaacaggcctttgaagaggctcgga

SEQ ID NO: 65859 - DNA, 79 bp, Homo sapiens
ttaaaataggtatttcatgtattctgacagcaggaggatgcattagcacaacaggcctttgaagaggctcggagaagga

SEQ ID NO: 65860 - DNA, 81 bp, Homo sapiens
attctgacagcaggaggatgcattagcacaacaggcctttgaagaggctcggagaaggacacgcgaatttgaagatagaga

SEQ ID NO: 65861 - DNA, 79 bp, Homo sapiens
aggaggatgcattagcacaacaggcctttgaagaggctcggagaaggacacgcgaatttgaagatagagacaggtctca

SEQ ID NO: 65862 - DNA, 76 bp, Homo sapiens
attagcacaacaggcctttgaagaggctcggagaaggacacgcgaatttgaagatagagacaggtctcatcgggag

SEQ ID NO: 65863 - DNA, 75 bp, Homo sapiens
acaggcctttgaagaggctcggagaaggacacgcgaatttgaagatagagacaggtctcatcgggaggaaatgga

SEQ ID NO: 65864 - DNA, 74 bp, Homo sapiens
aagaggctcggagaaggacacgcgaatttgaagatagagacaggtctcatcgggaggaaatggaggtgagagtt

SEQ ID NO: 65865 - DNA, 79 bp, Homo sapiens
aaggacacgcgaatttgaagatagagacaggtctcatcgggaggaaatggaggtgagagtttcacagctgctggcagta

SEQ ID NO: 65866 - DNA, 77 bp, Homo sapiens
aatttgaagatagagacaggtctcatcgggaggaaatggaggtgagagtttcacagctgctggcagtaactggttag

SEQ ID NO: 65867 - DNA, 76 bp, Homo sapiens
aagatagagacaggtctcatcgggaggaaatggaggtgagagtttcacagctgctggcagtaactggttagtactt

SEQ ID NO: 65868 - DNA, 73 bp, Homo sapiens
aggtctcatcgggaggaaatggaggtgagagtttcacagctgctggcagtaactggttagtactttcccccaa

SEQ ID NO: 65869 - DNA, 73 bp, Homo sapiens
tcgggaggaaatggaggtgagagtttcacagctgctggcagtaactggttagtactttcccccaaactctcag

SEQ ID NO: 65870 - DNA, 75 bp, Homo sapiens
aggtgagagtttcacagctgctggcagtaactggttagtactttcccccaaactctcaggctgtgtttgtgatgt

SEQ ID NO: 65871 - DNA, 77 bp, Homo sapiens
gtttcacagctgctggcagtaactggttagtactttcccccaaactctcaggctgtgtttgtgatgtttgtgcataa

SEQ ID NO: 65872 - DNA, 74 bp, Homo sapiens
tggcagtaactggttagtactttcccccaaactctcaggctgtgtttgtgatgtttgtgcataatgctttttaa

SEQ ID NO: 65873 - DNA, 72 bp, Homo sapiens
taactggttagtactttcccccaaactctcaggctgtgtttgtgatgtttgtgcataatgctttttaatagt

SEQ ID NO: 65874 - DNA, 71 bp, Homo sapiens
actttcccccaaactctcaggctgtgtttgtgatgtttgtgcataatgctttttaatagtttaattttgtc

SEQ ID NO: 65875 - DNA, 72 bp, Homo sapiens
cccaaactctcaggctgtgtttgtgatgtttgtgcataatgctttttaatagtttaattttgtctttcattt

SEQ ID NO: 65876 - DNA, 70 bp, Homo sapiens
caggctgtgtttgtgatgtttgtgcataatgctttttaatagtttaattttgtctttcatttttaaaaag

SEQ ID NO: 65877 - DNA, 71 bp, Homo sapiens
tattttaattttaaagttgtacatcaattcctcattcattggtcttcataaaaatcatttactataataag

SEQ ID NO: 65878 - DNA, 73 bp, Homo sapiens
ttaaagttgtacatcaattcctcattcattggtcttcataaaaatcatttactataataaggtatattttctc

SEQ ID NO: 65879 - DNA, 73 bp, Homo sapiens
gttgtacatcaattcctcattcattggtcttcataaaaatcatttactataataaggtatattttctcttaat

SEQ ID NO: 65880 - DNA, 73 bp, Homo sapiens
attcctcattcattggtcttcataaaaatcatttactataataaggtatattttctcttaattcatttactca

SEQ ID NO: 65881 - DNA, 72 bp, Homo sapiens
tggtcttcataaaaatcatttactataataaggtatattttctcttaattcatttactcaaaatctcacctc

SEQ ID NO: 65882 - DNA, 69 bp, Homo sapiens
cataaaaatcatttactataataaggtatattttctcttaattcatttactcaaaatctcacctctttt

SEQ ID NO: 65883 - DNA, 68 bp, Homo sapiens
catttactataataaggtatattttctcttaattcatttactcaaaatctcacctctttttttcttat

SEQ ID NO: 65884 - DNA, 71 bp, Homo sapiens
tttcttatttttcaaattatttgtaaaaatcagcttatgttaacagattgcatatttttagaacattatta

SEQ ID NO: 65885 - DNA, 72 bp, Homo sapiens
ttcaaattatttgtaaaaatcagcttatgttaacagattgcatatttttagaacattattaaaactcgagta

SEQ ID NO: 65886 - DNA, 71 bp, Homo sapiens
ttgtaaaaatcagcttatgttaacagattgcatatttttagaacattattaaaactcgagtaatactactt

SEQ ID NO: 65887 - DNA, 72 bp, Homo sapiens
tcagcttatgttaacagattgcatatttttagaacattattaaaactcgagtaatactactttccatttttc

SEQ ID NO: 65888 - DNA, 71 bp, Homo sapiens
atgttaacagattgcatatttttagaacattattaaaactcgagtaatactactttccatttttctatgaa

SEQ ID NO: 65889 - DNA, 68 bp, Homo sapiens
gaacattattaaaactcgagtaatactactttccatttttctatgaatatttgtcttggttttataac

SEQ ID NO: 65890 - DNA, 70 bp, Homo sapiens
taaaactcgagtaatactactttccatttttctatgaatatttgtcttggttttataactataattgtca

SEQ ID NO: 65891 - DNA, 72 bp, Homo sapiens
tcgagtaatactactttccatttttctatgaatatttgtcttggttttataactataattgtcagtcatttg

SEQ ID NO: 65892 - DNA, 71 bp, Homo sapiens
ctttccatttttctatgaatatttgtcttggttttataactataattgtcagtcatttgtgtgattttaac

SEQ ID NO: 65893 - DNA, 70 bp, Homo sapiens
ctatgaatatttgtcttggttttataactataattgtcagtcatttgtgtgattttaactaaaggaaaat

SEQ ID NO: 65894 - DNA, 68 bp, Homo sapiens
aatatttgtcttggttttataactataattgtcagtcatttgtgtgattttaactaaaggaaaattta

SEQ ID NO: 65895 - DNA, 68 bp, Homo sapiens
ttggttttataactataattgtcagtcatttgtgtgattttaactaaaggaaaatttaatattcaaac

SEQ ID NO: 65896 - DNA, 70 bp, Homo sapiens
tataattgtcagtcatttgtgtgattttaactaaaggaaaatttaatattcaaactattcaaagaacgga

SEQ ID NO: 65897 - DNA, 68 bp, Homo sapiens
gtcagtcatttgtgtgattttaactaaaggaaaatttaatattcaaactattcaaagaacggaattaa

SEQ ID NO: 65898 - DNA, 64 bp, Homo sapiens
tgtgtgattttaactaaaggaaaatttaatattcaaactattcaaagaacggaattaaactttt

SEQ ID NO: 65899 - DNA, 61 bp, Homo sapiens
ctaaaggaaaatttaatattcaaactattcaaagaacggaattaaactttttcttttaacc

SEQ ID NO: 65900 - DNA, 63 bp, Homo sapiens
ttaatattcaaactattcaaagaacggaattaaactttttcttttaacctttctattgtaaaa

SEQ ID NO: 65901 - DNA, 64 bp, Homo sapiens
attcaaactattcaaagaacggaattaaactttttcttttaacctttctattgtaaaatacaga

SEQ ID NO: 65902 - DNA, 65 bp, Homo sapiens
ttcaaagaacggaattaaactttttcttttaacctttctattgtaaaatacagaaacagaaatca

SEQ ID NO: 65903 - DNA, 67 bp, Homo sapiens
taaactttttcttttaacctttctattgtaaaatacagaaacagaaatcaacattaacaaatctgta

SEQ ID NO: 65904 - DNA, 70 bp, Homo sapiens
cttttaacctttctattgtaaaatacagaaacagaaatcaacattaacaaatctgtagcttcctttgctg

SEQ ID NO: 65905 - DNA, 72 bp, Homo sapiens
ttctattgtaaaatacagaaacagaaatcaacattaacaaatctgtagcttcctttgctggtttacttagga

SEQ ID NO: 65906 - DNA, 71 bp, Homo sapiens
gtaaaatacagaaacagaaatcaacattaacaaatctgtagcttcctttgctggtttacttaggatacatt

SEQ ID NO: 65907 - DNA, 70 bp, Homo sapiens
cagaaacagaaatcaacattaacaaatctgtagcttcctttgctggtttacttaggatacattttttaaa

SEQ ID NO: 65908 - DNA, 66 bp, Homo sapiens
aataaataaaaaaatctatagcccaatgaattactgtaaggttaacatccttacaaccacggtttg

SEQ ID NO: 65909 - DNA, 66 bp, Homo sapiens
aaaaatctatagcccaatgaattactgtaaggttaacatccttacaaccacggtttggtcaaaaaa

SEQ ID NO: 65910 - DNA, 66 bp, Homo sapiens
ctatagcccaatgaattactgtaaggttaacatccttacaaccacggtttggtcaaaaaataaaac

SEQ ID NO: 65911 - DNA, 69 bp, Homo sapiens
tgaattactgtaaggttaacatccttacaaccacggtttggtcaaaaaataaaactttgagcctgagca

SEQ ID NO: 65912 - DNA, 69 bp, Homo sapiens
taaggttaacatccttacaaccacggtttggtcaaaaaataaaactttgagcctgagcaactctgtctc

SEQ ID NO: 65913 - DNA, 74 bp, Homo sapiens
aataaataatacataaataaacctttgacagctaccccagcagccccttccatatatacatctaatcatgactt

SEQ ID NO: 65914 - DNA, 77 bp, Homo sapiens
aatacataaataaacctttgacagctaccccagcagccccttccatatatacatctaatcatgactttctcatgatt

SEQ ID NO: 65915 - DNA, 79 bp, Homo sapiens
ataaacctttgacagctaccccagcagccccttccatatatacatctaatcatgactttctcatgatttctgctcaaaa

SEQ ID NO: 65916 - DNA, 79 bp, Homo sapiens
agctaccccagcagccccttccatatatacatctaatcatgactttctcatgatttctgctcaaaagtaatcattattt

SEQ ID NO: 65917 - DNA, 79 bp, Homo sapiens
cccagcagccccttccatatatacatctaatcatgactttctcatgatttctgctcaaaagtaatcattattttgattt

SEQ ID NO: 65918 - DNA, 70 bp, Homo sapiens
ccactgcgtctggcccattatttcagtttttatagttaatttatgtcttgtgtttctttagttttagcac

SEQ ID NO: 65919 - DNA, 69 bp, Homo sapiens
gcgtctggcccattatttcagtttttatagttaatttatgtcttgtgtttctttagttttagcacccat

SEQ ID NO: 65920 - DNA, 67 bp, Homo sapiens
tttcagtttttatagttaatttatgtcttgtgtttctttagttttagcacccattgaagtttagtct

SEQ ID NO: 65921 - DNA, 68 bp, Homo sapiens
ttatagttaatttatgtcttgtgtttctttagttttagcacccattgaagtttagtcttgcccagttt

SEQ ID NO: 65922 - DNA, 69 bp, Homo sapiens
tatagttaatttatgtcttgtgtttctttagttttagcacccattgaagtttagtcttgcccagtttta

SEQ ID NO: 65923 - DNA, 69 bp, Homo sapiens
ttatgtcttgtgtttctttagttttagcacccattgaagtttagtcttgcccagttttaaaatttgagc

SEQ ID NO: 65924 - DNA, 66 bp, Homo sapiens
cttgtgtttctttagttttagcacccattgaagtttagtcttgcccagttttaaaatttgagcttt

SEQ ID NO: 65925 - DNA, 64 bp, Homo sapiens
ctttagttttagcacccattgaagtttagtcttgcccagttttaaaatttgagcttttttcccc

SEQ ID NO: 65926 - DNA, 63 bp, Homo sapiens
agcacccattgaagtttagtcttgcccagttttaaaatttgagcttttttccccccacttttt

SEQ ID NO: 65927 - DNA, 63 bp, Homo sapiens
gtttagtcttgcccagttttaaaatttgagcttttttccccccacttttttaaatctaccatg

SEQ ID NO: 65928 - DNA, 64 bp, Homo sapiens
gcccagttttaaaatttgagcttttttccccccacttttttaaatctaccatgttggtttctga

SEQ ID NO: 65929 - DNA, 66 bp, Homo sapiens
aatttgagcttttttccccccacttttttaaatctaccatgttggtttctgaattttgatgtgtct

SEQ ID NO: 65930 - DNA, 66 bp, Homo sapiens
gagcttttttccccccacttttttaaatctaccatgttggtttctgaattttgatgtgtcttttaa

SEQ ID NO: 65931 - DNA, 69 bp, Homo sapiens
tgtcttttaattgacaatggaattttaatttttttacacaaaattgtactctgctttaaacagacctca

SEQ ID NO: 65932 - DNA, 68 bp, Homo sapiens
attgacaatggaattttaatttttttacacaaaattgtactctgctttaaacagacctcaattataaa

SEQ ID NO: 65933 - DNA, 67 bp, Homo sapiens
ttaatttttttacacaaaattgtactctgctttaaacagacctcaattataaaaattaatattcaaa

SEQ ID NO: 65934 - DNA, 71 bp, Homo sapiens
tacacaaaattgtactctgctttaaacagacctcaattataaaaattaatattcaaagtatatacaaattg

SEQ ID NO: 65935 - DNA, 73 bp, Homo sapiens
tgtactctgctttaaacagacctcaattataaaaattaatattcaaagtatatacaaattgttcagaaataca

SEQ ID NO: 65936 - DNA, 72 bp, Homo sapiens
tctgctttaaacagacctcaattataaaaattaatattcaaagtatatacaaattgttcagaaatacagatt

SEQ ID NO: 65937 - DNA, 70 bp, Homo sapiens
acagacctcaattataaaaattaatattcaaagtatatacaaattgttcagaaatacagattttctttaa

SEQ ID NO: 65938 - DNA, 75 bp, Homo sapiens
aagtatatacaaattgttcagaaatacagattttctttaaaaattatattctagggccagatgctatggctcaca

SEQ ID NO: 65939 - DNA, 69 bp, Homo sapiens
aaaaaaagtatattctagcaaaaataatcaagataagaactaatgtgtttgaaaaagagtgttgtcaaa

SEQ ID NO: 65940 - DNA, 77 bp, Homo sapiens
tattctagcaaaaataatcaagataagaactaatgtgtttgaaaaagagtgttgtcaaatgttactgtatatcatgc

SEQ ID NO: 65941 - DNA, 76 bp, Homo sapiens
gcaaaaataatcaagataagaactaatgtgtttgaaaaagagtgttgtcaaatgttactgtatatcatgcttcaag

SEQ ID NO: 65942 - DNA, 75 bp, Homo sapiens
tcaagataagaactaatgtgtttgaaaaagagtgttgtcaaatgttactgtatatcatgcttcaagtttataaac

SEQ ID NO: 65943 - DNA, 75 bp, Homo sapiens
gtttgaaaaagagtgttgtcaaatgttactgtatatcatgcttcaagtttataaactttgtatcaacatgaacat

SEQ ID NO: 65944 - DNA, 79 bp, Homo sapiens
gagtgttgtcaaatgttactgtatatcatgcttcaagtttataaactttgtatcaacatgaacatttcatacaagaaga

SEQ ID NO: 65945 - DNA, 77 bp, Homo sapiens
caaatgttactgtatatcatgcttcaagtttataaactttgtatcaacatgaacatttcatacaagaagaaatagaa

SEQ ID NO: 65946 - DNA, 78 bp, Homo sapiens
atcatgcttcaagtttataaactttgtatcaacatgaacatttcatacaagaagaaatagaaaaagcacacattcatc

SEQ ID NO: 65947 - DNA, 75 bp, Homo sapiens
gcttcaagtttataaactttgtatcaacatgaacatttcatacaagaagaaatagaaaaagcacacattcatctt

SEQ ID NO: 65948 - DNA, 77 bp, Homo sapiens
aactttgtatcaacatgaacatttcatacaagaagaaatagaaaaagcacacattcatctttgataatcaaaacaca

SEQ ID NO: 65949 - DNA, 77 bp, Homo sapiens
gtatcaacatgaacatttcatacaagaagaaatagaaaaagcacacattcatctttgataatcaaaacacattaaaa

SEQ ID NO: 65950 - DNA, 75 bp, Homo sapiens
gaacatttcatacaagaagaaatagaaaaagcacacattcatctttgataatcaaaacacattaaaatataatta

SEQ ID NO: 65951 - DNA, 76 bp, Homo sapiens
gcacacattcatctttgataatcaaaacacattaaaatataattataatatatcaactaaacagaaccatttccag

SEQ ID NO: 65952 - DNA, 72 bp, Homo sapiens
atctttgataatcaaaacacattaaaatataattataatatatcaactaaacagaaccatttccaggtgtta

SEQ ID NO: 65953 - DNA, 71 bp, Homo sapiens
tcaaaacacattaaaatataattataatatatcaactaaacagaaccatttccaggtgttaaaaatcagta

SEQ ID NO: 65954 - DNA, 69 bp, Homo sapiens
aatataattataatatatcaactaaacagaaccatttccaggtgttaaaaatcagtattaggtacctaa

SEQ ID NO: 65955 - DNA, 69 bp, Homo sapiens
aattataatatatcaactaaacagaaccatttccaggtgttaaaaatcagtattaggtacctaagattg

SEQ ID NO: 65956 - DNA, 69 bp, Homo sapiens
taatatatcaactaaacagaaccatttccaggtgttaaaaatcagtattaggtacctaagattgttaaa

SEQ ID NO: 65957 - DNA, 70 bp, Homo sapiens
tatcaactaaacagaaccatttccaggtgttaaaaatcagtattaggtacctaagattgttaaattcatg

SEQ ID NO: 65958 - DNA, 68 bp, Homo sapiens
actaaacagaaccatttccaggtgttaaaaatcagtattaggtacctaagattgttaaattcatgtcc

SEQ ID NO: 65959 - DNA, 70 bp, Homo sapiens
acagaaccatttccaggtgttaaaaatcagtattaggtacctaagattgttaaattcatgtcctatatac

SEQ ID NO: 65960 - DNA, 70 bp, Homo sapiens
cagaaccatttccaggtgttaaaaatcagtattaggtacctaagattgttaaattcatgtcctatatact

SEQ ID NO: 65961 - DNA, 69 bp, Homo sapiens
ccatttccaggtgttaaaaatcagtattaggtacctaagattgttaaattcatgtcctatatacttttg

SEQ ID NO: 65962 - DNA, 71 bp, Homo sapiens
ggtgttaaaaatcagtattaggtacctaagattgttaaattcatgtcctatatacttttggaatctacaga

SEQ ID NO: 65963 - DNA, 73 bp, Homo sapiens
taaaaatcagtattaggtacctaagattgttaaattcatgtcctatatacttttggaatctacagacagtaga

SEQ ID NO: 65964 - DNA, 73 bp, Homo sapiens
aatcagtattaggtacctaagattgttaaattcatgtcctatatacttttggaatctacagacagtagaatag

SEQ ID NO: 65965 - DNA, 71 bp, Homo sapiens
attgttaaattcatgtcctatatacttttggaatctacagacagtagaatagtggttgccggggaaatggg

SEQ ID NO: 65966 - DNA, 69 bp, Homo sapiens
tcctatatacttttggaatctacagacagtagaatagtggttgccggggaaatgggggttagttattta

SEQ ID NO: 65967 - DNA, 68 bp, Homo sapiens
tatacttttggaatctacagacagtagaatagtggttgccggggaaatgggggttagttatttaaaga

SEQ ID NO: 65968 - DNA, 67 bp, Homo sapiens
aatctacagacagtagaatagtggttgccggggaaatgggggttagttatttaaagagtatagagtt

SEQ ID NO: 65969 - DNA, 65 bp, Homo sapiens
acagtagaatagtggttgccggggaaatgggggttagttatttaaagagtatagagtttcagttt

SEQ ID NO: 65970 - DNA, 76 bp, Homo sapiens
cagtgtgaatgtacttaacactactgagtgtatgctttaaaaatggctaagatggtaagttttatgatatgtgtat

SEQ ID NO: 65971 - DNA, 74 bp, Homo sapiens
gtacttaacactactgagtgtatgctttaaaaatggctaagatggtaagttttatgatatgtgtatttcaccac

SEQ ID NO: 65972 - DNA, 72 bp, Homo sapiens
aacactactgagtgtatgctttaaaaatggctaagatggtaagttttatgatatgtgtatttcaccactttt

SEQ ID NO: 65973 - DNA, 69 bp, Homo sapiens
agtgtatgctttaaaaatggctaagatggtaagttttatgatatgtgtatttcaccactttttttaagt

SEQ ID NO: 65974 - DNA, 68 bp, Homo sapiens
aatggctaagatggtaagttttatgatatgtgtatttcaccactttttttaagtttttaagtcaatgt

SEQ ID NO: 65975 - DNA, 70 bp, Homo sapiens
gatggtaagttttatgatatgtgtatttcaccactttttttaagtttttaagtcaatgttacataatgaa

SEQ ID NO: 65976 - DNA, 65 bp, Homo sapiens
gtgtatttcaccactttttttaagtttttaagtcaatgttacataatgaagaaaatttgtggttt

SEQ ID NO: 65977 - DNA, 65 bp, Homo sapiens
tcaccactttttttaagtttttaagtcaatgttacataatgaagaaaatttgtggtttttttcca

SEQ ID NO: 65978 - DNA, 68 bp, Homo sapiens
taagtttttaagtcaatgttacataatgaagaaaatttgtggtttttttccaagcacaaaattatatg

SEQ ID NO: 65979 - DNA, 70 bp, Homo sapiens
aagtcaatgttacataatgaagaaaatttgtggtttttttccaagcacaaaattatatgtacactattgt

SEQ ID NO: 65980 - DNA, 69 bp, Homo sapiens
tgttacataatgaagaaaatttgtggtttttttccaagcacaaaattatatgtacactattgtttaaat

SEQ ID NO: 65981 - DNA, 70 bp, Homo sapiens
gaaaatttgtggtttttttccaagcacaaaattatatgtacactattgtttaaattaaggtgtgtgtgca

SEQ ID NO: 65982 - DNA, 86 bp, Homo sapiens
gtgtgtgcgtgcatgggtgcagacagtggctaagagcccagactctacagccagacagaagtctgaatctggctctgtcatttact

SEQ ID NO: 65983 - DNA, 86 bp, Homo sapiens
tgcatgggtgcagacagtggctaagagcccagactctacagccagacagaagtctgaatctggctctgtcatttactttgtcagct

SEQ ID NO: 65984 - DNA, 83 bp, Homo sapiens
agacagtggctaagagcccagactctacagccagacagaagtctgaatctggctctgtcatttactttgtcagcttggacagc

SEQ ID NO: 65985 - DNA, 82 bp, Homo sapiens
taagagcccagactctacagccagacagaagtctgaatctggctctgtcatttactttgtcagcttggacagcttacttcac

SEQ ID NO: 65986 - DNA, 80 bp, Homo sapiens
agactctacagccagacagaagtctgaatctggctctgtcatttactttgtcagcttggacagcttacttcacttttcta

SEQ ID NO: 65987 - DNA, 79 bp, Homo sapiens
ccagacagaagtctgaatctggctctgtcatttactttgtcagcttggacagcttacttcacttttctatgactgagtt

SEQ ID NO: 65988 - DNA, 79 bp, Homo sapiens
agaagtctgaatctggctctgtcatttactttgtcagcttggacagcttacttcacttttctatgactgagtttcctca

SEQ ID NO: 65989 - DNA, 78 bp, Homo sapiens
aatctggctctgtcatttactttgtcagcttggacagcttacttcacttttctatgactgagtttcctcatctacaaa

SEQ ID NO: 65990 - DNA, 75 bp, Homo sapiens
tttactttgtcagcttggacagcttacttcacttttctatgactgagtttcctcatctacaaaataggagtaata

SEQ ID NO: 65991 - DNA, 77 bp, Homo sapiens
tttgtcagcttggacagcttacttcacttttctatgactgagtttcctcatctacaaaataggagtaataatcctgc

SEQ ID NO: 65992 - DNA, 78 bp, Homo sapiens
agcttacttcacttttctatgactgagtttcctcatctacaaaataggagtaataatcctgcctgtctcatatggtca

SEQ ID NO: 65993 - DNA, 79 bp, Homo sapiens
acttcacttttctatgactgagtttcctcatctacaaaataggagtaataatcctgcctgtctcatatggtcattgtga

SEQ ID NO: 65994 - DNA, 76 bp, Homo sapiens
aggattaaatgagtaaatacatgtgaaaccacttttagcgtatgtgccactgactaggtgtcaggtgctattatta

SEQ ID NO: 65995 - DNA, 75 bp, Homo sapiens
agtaaatacatgtgaaaccacttttagcgtatgtgccactgactaggtgtcaggtgctattattattgttaatat

SEQ ID NO: 65996 - DNA, 75 bp, Homo sapiens
acatgtgaaaccacttttagcgtatgtgccactgactaggtgtcaggtgctattattattgttaatattatttaa

SEQ ID NO: 65997 - DNA, 74 bp, Homo sapiens
ccacttttagcgtatgtgccactgactaggtgtcaggtgctattattattgttaatattatttaaagtattaca

SEQ ID NO: 65998 - DNA, 74 bp, Homo sapiens
gcgtatgtgccactgactaggtgtcaggtgctattattattgttaatattatttaaagtattacataaaatttc

SEQ ID NO: 65999 - DNA, 72 bp, Homo sapiens
cactgactaggtgtcaggtgctattattattgttaatattatttaaagtattacataaaatttctagttgtg

SEQ ID NO: 66000 - DNA, 70 bp, Homo sapiens
gtgtcaggtgctattattattgttaatattatttaaagtattacataaaatttctagttgtgttaaaata

SEQ ID NO: 66001 - DNA, 68 bp, Homo sapiens
tattattgttaatattatttaaagtattacataaaatttctagttgtgttaaaatatatttacttaga

SEQ ID NO: 66002 - DNA, 67 bp, Homo sapiens
gttaatattatttaaagtattacataaaatttctagttgtgttaaaatatatttacttagaatacat

SEQ ID NO: 66003 - DNA, 67 bp, Homo sapiens
aagtattacataaaatttctagttgtgttaaaatatatttacttagaatacatttaaaaatcaagcc

SEQ ID NO: 66004 - DNA, 68 bp, Homo sapiens
cataaaatttctagttgtgttaaaatatatttacttagaatacatttaaaaatcaagcctatttggtg

SEQ ID NO: 66005 - DNA, 70 bp, Homo sapiens
ctagttgtgttaaaatatatttacttagaatacatttaaaaatcaagcctatttggtggttagtgtatga

SEQ ID NO: 66006 - DNA, 69 bp, Homo sapiens
aaatatatttacttagaatacatttaaaaatcaagcctatttggtggttagtgtatgaaataaattgtg

SEQ ID NO: 66007 - DNA, 74 bp, Homo sapiens
ccactgtgcccggcttaaaatttagtatcttttagtgattgctagatctctttgtcagtgagttaattaatcta

SEQ ID NO: 66008 - DNA, 73 bp, Homo sapiens
gtgcccggcttaaaatttagtatcttttagtgattgctagatctctttgtcagtgagttaattaatctaatgg

SEQ ID NO: 66009 - DNA, 74 bp, Homo sapiens
tgcccggcttaaaatttagtatcttttagtgattgctagatctctttgtcagtgagttaattaatctaatgggc

SEQ ID NO: 66010 - DNA, 79 bp, Homo sapiens
taaaatttagtatcttttagtgattgctagatctctttgtcagtgagttaattaatctaatgggctgatagcagctgag

SEQ ID NO: 66011 - DNA, 79 bp, Homo sapiens
aaatttagtatcttttagtgattgctagatctctttgtcagtgagttaattaatctaatgggctgatagcagctgagga

SEQ ID NO: 66012 - DNA, 81 bp, Homo sapiens
tttagtatcttttagtgattgctagatctctttgtcagtgagttaattaatctaatgggctgatagcagctgaggatgtcc

SEQ ID NO: 66013 - DNA, 81 bp, Homo sapiens
ttttagtgattgctagatctctttgtcagtgagttaattaatctaatgggctgatagcagctgaggatgtccccaagaata

SEQ ID NO: 66014 - DNA, 81 bp, Homo sapiens
ttagtgattgctagatctctttgtcagtgagttaattaatctaatgggctgatagcagctgaggatgtccccaagaatact

SEQ ID NO: 66015 - DNA, 80 bp, Homo sapiens
attgctagatctctttgtcagtgagttaattaatctaatgggctgatagcagctgaggatgtccccaagaatacttgtta

SEQ ID NO: 66016 - DNA, 80 bp, Homo sapiens
tagatctctttgtcagtgagttaattaatctaatgggctgatagcagctgaggatgtccccaagaatacttgttagctaa

SEQ ID NO: 66017 - DNA, 79 bp, Homo sapiens
tctttgtcagtgagttaattaatctaatgggctgatagcagctgaggatgtccccaagaatacttgttagctaagagaa

SEQ ID NO: 66018 - DNA, 79 bp, Homo sapiens
tttgtcagtgagttaattaatctaatgggctgatagcagctgaggatgtccccaagaatacttgttagctaagagaaga

SEQ ID NO: 66019 - DNA, 76 bp, Homo sapiens
agttaattaatctaatgggctgatagcagctgaggatgtccccaagaatacttgttagctaagagaagaaaatgga

SEQ ID NO: 66020 - DNA, 81 bp, Homo sapiens
tctaatgggctgatagcagctgaggatgtccccaagaatacttgttagctaagagaagaaaatggagggatatatgtgata

SEQ ID NO: 66021 - DNA, 76 bp, Homo sapiens
atagcagctgaggatgtccccaagaatacttgttagctaagagaagaaaatggagggatatatgtgatacttgttt

SEQ ID NO: 66022 - DNA, 73 bp, Homo sapiens
aggatgtccccaagaatacttgttagctaagagaagaaaatggagggatatatgtgatacttgttttctttga

SEQ ID NO: 66023 - DNA, 75 bp, Homo sapiens
cccaagaatacttgttagctaagagaagaaaatggagggatatatgtgatacttgttttctttgatgctgttgta

SEQ ID NO: 66024 - DNA, 76 bp, Homo sapiens
cttgttagctaagagaagaaaatggagggatatatgtgatacttgttttctttgatgctgttgtaattcttgtgat

SEQ ID NO: 66025 - DNA, 79 bp, Homo sapiens
gagaagaaaatggagggatatatgtgatacttgttttctttgatgctgttgtaattcttgtgattttcatatatgtgaa

SEQ ID NO: 66026 - DNA, 79 bp, Homo sapiens
ggagggatatatgtgatacttgttttctttgatgctgttgtaattcttgtgattttcatatatgtgaatacaagacttc

SEQ ID NO: 66027 - DNA, 81 bp, Homo sapiens
tatgtgatacttgttttctttgatgctgttgtaattcttgtgattttcatatatgtgaatacaagacttccacaccatgcc

SEQ ID NO: 66028 - DNA, 76 bp, Homo sapiens
gttttctttgatgctgttgtaattcttgtgattttcatatatgtgaatacaagacttccacaccatgccctttctt

SEQ ID NO: 66029 - DNA, 78 bp, Homo sapiens
tgctgttgtaattcttgtgattttcatatatgtgaatacaagacttccacaccatgccctttctttcggtatctgtaa

SEQ ID NO: 66030 - DNA, 73 bp, Homo sapiens
gattttcatatatgtgaatacaagacttccacaccatgccctttctttcggtatctgtaaaatttagaagctt

SEQ ID NO: 66031 - DNA, 71 bp, Homo sapiens
atatgtgaatacaagacttccacaccatgccctttctttcggtatctgtaaaatttagaagctttaaaatg

SEQ ID NO: 66032 - DNA, 71 bp, Homo sapiens
caagacttccacaccatgccctttctttcggtatctgtaaaatttagaagctttaaaatgtataatgtaca

SEQ ID NO: 66033 - DNA, 70 bp, Homo sapiens
ccacaccatgccctttctttcggtatctgtaaaatttagaagctttaaaatgtataatgtacatttgtta

SEQ ID NO: 66034 - DNA, 70 bp, Homo sapiens
gccctttctttcggtatctgtaaaatttagaagctttaaaatgtataatgtacatttgttacatttctga

SEQ ID NO: 66035 - DNA, 73 bp, Homo sapiens
atctgtaaaatttagaagctttaaaatgtataatgtacatttgttacatttctgaacctttttgctcatgctc

SEQ ID NO: 66036 - DNA, 72 bp, Homo sapiens
tttagaagctttaaaatgtataatgtacatttgttacatttctgaacctttttgctcatgctctttgttccc

SEQ ID NO: 66037 - DNA, 75 bp, Homo sapiens
ttaaaatgtataatgtacatttgttacatttctgaacctttttgctcatgctctttgttccctgatgtagaatgt

SEQ ID NO: 66038 - DNA, 76 bp, Homo sapiens
taatgtacatttgttacatttctgaacctttttgctcatgctctttgttccctgatgtagaatgttcttttctgtc

SEQ ID NO: 66039 - DNA, 74 bp, Homo sapiens
atttgttacatttctgaacctttttgctcatgctctttgttccctgatgtagaatgttcttttctgtccgtcaa

SEQ ID NO: 66040 - DNA, 74 bp, Homo sapiens
acatttctgaacctttttgctcatgctctttgttccctgatgtagaatgttcttttctgtccgtcaaggcccaa

SEQ ID NO: 66041 - DNA, 76 bp, Homo sapiens
atgctctttgttccctgatgtagaatgttcttttctgtccgtcaaggcccaacctgaatgttgtcattaaatgtca

SEQ ID NO: 66042 - DNA, 74 bp, Homo sapiens
tgttccctgatgtagaatgttcttttctgtccgtcaaggcccaacctgaatgttgtcattaaatgtcaggcctt

SEQ ID NO: 66043 - DNA, 72 bp, Homo sapiens
aatgttcttttctgtccgtcaaggcccaacctgaatgttgtcattaaatgtcaggcctttcctcagtcttct

SEQ ID NO: 66044 - DNA, 74 bp, Homo sapiens
ttttctgtccgtcaaggcccaacctgaatgttgtcattaaatgtcaggcctttcctcagtcttcttagtcataa

SEQ ID NO: 66045 - DNA, 73 bp, Homo sapiens
aaggcccaacctgaatgttgtcattaaatgtcaggcctttcctcagtcttcttagtcataatcataaagccct

SEQ ID NO: 66046 - DNA, 75 bp, Homo sapiens
tcattaaatgtcaggcctttcctcagtcttcttagtcataatcataaagcccttccattctgtagcactttttat

SEQ ID NO: 66047 - DNA, 73 bp, Homo sapiens
aaatgtcaggcctttcctcagtcttcttagtcataatcataaagcccttccattctgtagcactttttatttc

SEQ ID NO: 66048 - DNA, 73 bp, Homo sapiens
cctcagtcttcttagtcataatcataaagcccttccattctgtagcactttttatttctactagtgttcttat

SEQ ID NO: 66049 - DNA, 75 bp, Homo sapiens
tcataatcataaagcccttccattctgtagcactttttatttctactagtgttcttattgaacaacatgttgaaa

SEQ ID NO: 66050 - DNA, 71 bp, Homo sapiens
aaagcccttccattctgtagcactttttatttctactagtgttcttattgaacaacatgttgaaacaatta

SEQ ID NO: 66051 - DNA, 72 bp, Homo sapiens
ctgtagcactttttatttctactagtgttcttattgaacaacatgttgaaacaattataaacatttgtgccc

SEQ ID NO: 66052 - DNA, 71 bp, Homo sapiens
cactttttatttctactagtgttcttattgaacaacatgttgaaacaattataaacatttgtgccctccac

SEQ ID NO: 66053 - DNA, 76 bp, Homo sapiens
tactagtgttcttattgaacaacatgttgaaacaattataaacatttgtgccctccactttatggcaatcccatga

SEQ ID NO: 66054 - DNA, 77 bp, Homo sapiens
gttcttattgaacaacatgttgaaacaattataaacatttgtgccctccactttatggcaatcccatgagatggagc

SEQ ID NO: 66055 - DNA, 74 bp, Homo sapiens
aacatgttgaaacaattataaacatttgtgccctccactttatggcaatcccatgagatggagcccctgatttt

SEQ ID NO: 66056 - DNA, 76 bp, Homo sapiens
taaacatttgtgccctccactttatggcaatcccatgagatggagcccctgatttttgtgtcttccacattaccta

SEQ ID NO: 66057 - DNA, 75 bp, Homo sapiens
ctccactttatggcaatcccatgagatggagcccctgatttttgtgtcttccacattacctaccacaatcctttg

SEQ ID NO: 66058 - DNA, 75 bp, Homo sapiens
atgagatggagcccctgatttttgtgtcttccacattacctaccacaatcctttgtacactgcttagttgttcat

SEQ ID NO: 66059 - DNA, 74 bp, Homo sapiens
gcccctgatttttgtgtcttccacattacctaccacaatcctttgtacactgcttagttgttcattggatatct

SEQ ID NO: 66060 - DNA, 73 bp, Homo sapiens
tttttgtgtcttccacattacctaccacaatcctttgtacactgcttagttgttcattggatatcttcaaaaa

SEQ ID NO: 66061 - DNA, 73 bp, Homo sapiens
gtcttccacattacctaccacaatcctttgtacactgcttagttgttcattggatatcttcaaaaaacagccc

SEQ ID NO: 66062 - DNA, 73 bp, Homo sapiens
ttacctaccacaatcctttgtacactgcttagttgttcattggatatcttcaaaaaacagcccctatcctgcc

SEQ ID NO: 66063 - DNA, 74 bp, Homo sapiens
ctttgtacactgcttagttgttcattggatatcttcaaaaaacagcccctatcctgcctgtctgaaaactagaa

SEQ ID NO: 66064 - DNA, 75 bp, Homo sapiens
tacactgcttagttgttcattggatatcttcaaaaaacagcccctatcctgcctgtctgaaaactagaattatag

SEQ ID NO: 66065 - DNA, 79 bp, Homo sapiens
tgttcattggatatcttcaaaaaacagcccctatcctgcctgtctgaaaactagaattataggagagcctgctatgata

SEQ ID NO: 66066 - DNA, 79 bp, Homo sapiens
aaaacagcccctatcctgcctgtctgaaaactagaattataggagagcctgctatgatagttcatgtagataatacata

SEQ ID NO: 66067 - DNA, 83 bp, Homo sapiens
tatcctgcctgtctgaaaactagaattataggagagcctgctatgatagttcatgtagataatacatattaatggtctctgga

SEQ ID NO: 66068 - DNA, 80 bp, Homo sapiens
ctgtctgaaaactagaattataggagagcctgctatgatagttcatgtagataatacatattaatggtctctggaaagat

SEQ ID NO: 66069 - DNA, 78 bp, Homo sapiens
aaactagaattataggagagcctgctatgatagttcatgtagataatacatattaatggtctctggaaagattctaaa

SEQ ID NO: 66070 - DNA, 80 bp, Homo sapiens
ggagagcctgctatgatagttcatgtagataatacatattaatggtctctggaaagattctaaatatttataatgtgttg

SEQ ID NO: 66071 - DNA, 74 bp, Homo sapiens
catgtagataatacatattaatggtctctggaaagattctaaatatttataatgtgttggtttatattaactag

SEQ ID NO: 66072 - DNA, 71 bp, Homo sapiens
atacatattaatggtctctggaaagattctaaatatttataatgtgttggtttatattaactagttaagta

SEQ ID NO: 66073 - DNA, 69 bp, Homo sapiens
tattaatggtctctggaaagattctaaatatttataatgtgttggtttatattaactagttaagtaaag

SEQ ID NO: 66074 - DNA, 69 bp, Homo sapiens
aatgtgttggtttatattaactagttaagtaaagtaataaaccccaagtgtgttggtctgtattctgca

SEQ ID NO: 66075 - DNA, 68 bp, Homo sapiens
gtttatattaactagttaagtaaagtaataaaccccaagtgtgttggtctgtattctgcattagggac

SEQ ID NO: 66076 - DNA, 76 bp, Homo sapiens
aataaaccccaagtgtgttggtctgtattctgcattagggactgagaaatatatagatgaaaatgcattgtttctg

SEQ ID NO: 66077 - DNA, 83 bp, Homo sapiens
aagtgtgttggtctgtattctgcattagggactgagaaatatatagatgaaaatgcattgtttctgtctttgatcagctgtca

SEQ ID NO: 66078 - DNA, 82 bp, Homo sapiens
tattctgcattagggactgagaaatatatagatgaaaatgcattgtttctgtctttgatcagctgtcagtcttgtgggaaaa

SEQ ID NO: 66079 - DNA, 82 bp, Homo sapiens
ttagggactgagaaatatatagatgaaaatgcattgtttctgtctttgatcagctgtcagtcttgtgggaaaatgatggata

SEQ ID NO: 66080 - DNA, 82 bp, Homo sapiens
agaaatatatagatgaaaatgcattgtttctgtctttgatcagctgtcagtcttgtgggaaaatgatggataaacagatcat

SEQ ID NO: 66081 - DNA, 85 bp, Homo sapiens
atatagatgaaaatgcattgtttctgtctttgatcagctgtcagtcttgtgggaaaatgatggataaacagatcattgcagtgta

SEQ ID NO: 66082 - DNA, 83 bp, Homo sapiens
aatgcattgtttctgtctttgatcagctgtcagtcttgtgggaaaatgatggataaacagatcattgcagtgtactttagcaa

SEQ ID NO: 66083 - DNA, 83 bp, Homo sapiens
tgtctttgatcagctgtcagtcttgtgggaaaatgatggataaacagatcattgcagtgtactttagcaaccaccatacataa

SEQ ID NO: 66084 - DNA, 79 bp, Homo sapiens
agctgtcagtcttgtgggaaaatgatggataaacagatcattgcagtgtactttagcaaccaccatacataatggaggt

SEQ ID NO: 66085 - DNA, 77 bp, Homo sapiens
tcttgtgggaaaatgatggataaacagatcattgcagtgtactttagcaaccaccatacataatggaggttcaaaag

SEQ ID NO: 66086 - DNA, 79 bp, Homo sapiens
aaaatgatggataaacagatcattgcagtgtactttagcaaccaccatacataatggaggttcaaaagggacagcagca

SEQ ID NO: 66087 - DNA, 79 bp, Homo sapiens
ataaacagatcattgcagtgtactttagcaaccaccatacataatggaggttcaaaagggacagcagcagtgtagagga

SEQ ID NO: 66088 - DNA, 78 bp, Homo sapiens
atcattgcagtgtactttagcaaccaccatacataatggaggttcaaaagggacagcagcagtgtagaggaagcttaa

SEQ ID NO: 66089 - DNA, 76 bp, Homo sapiens
aaccaccatacataatggaggttcaaaagggacagcagcagtgtagaggaagcttaagtctgcctctgcttgggaa

SEQ ID NO: 66090 - DNA, 77 bp, Homo sapiens
tacataatggaggttcaaaagggacagcagcagtgtagaggaagcttaagtctgcctctgcttgggaaattcacagg

SEQ ID NO: 66091 - DNA, 76 bp, Homo sapiens
agcagcagtgtagaggaagcttaagtctgcctctgcttgggaaattcacagggtagtatacttagagggatttgaa

SEQ ID NO: 66092 - DNA, 73 bp, Homo sapiens
agtgtagaggaagcttaagtctgcctctgcttgggaaattcacagggtagtatacttagagggatttgaagga

SEQ ID NO: 66093 - DNA, 71 bp, Homo sapiens
cttaagtctgcctctgcttgggaaattcacagggtagtatacttagagggatttgaaggaagagtgtgttt

SEQ ID NO: 66094 - DNA, 74 bp, Homo sapiens
ctctgcttgggaaattcacagggtagtatacttagagggatttgaaggaagagtgtgttttgccagctgttcaa

SEQ ID NO: 66095 - DNA, 73 bp, Homo sapiens
gaaattcacagggtagtatacttagagggatttgaaggaagagtgtgttttgccagctgttcaagttggagaa

SEQ ID NO: 66096 - DNA, 73 bp, Homo sapiens
acagggtagtatacttagagggatttgaaggaagagtgtgttttgccagctgttcaagttggagaaagcattc

SEQ ID NO: 66097 - DNA, 76 bp, Homo sapiens
tatacttagagggatttgaaggaagagtgtgttttgccagctgttcaagttggagaaagcattctgggcaggacaa

SEQ ID NO: 66098 - DNA, 79 bp, Homo sapiens
aggaagagtgtgttttgccagctgttcaagttggagaaagcattctgggcaggacaaacagtgtatgcaaaggcatgga

SEQ ID NO: 66099 - DNA, 79 bp, Homo sapiens
tgttttgccagctgttcaagttggagaaagcattctgggcaggacaaacagtgtatgcaaaggcatggaggagtaagga

SEQ ID NO: 66100 - DNA, 78 bp, Homo sapiens
tgttcaagttggagaaagcattctgggcaggacaaacagtgtatgcaaaggcatggaggagtaaggaggagtaagaga

SEQ ID NO: 66101 - DNA, 79 bp, Homo sapiens
gaaagcattctgggcaggacaaacagtgtatgcaaaggcatggaggagtaaggaggagtaagagagcctgccaagtcaa

SEQ ID NO: 66102 - DNA, 78 bp, Homo sapiens
attctgggcaggacaaacagtgtatgcaaaggcatggaggagtaaggaggagtaagagagcctgccaagtcaagagag

SEQ ID NO: 66103 - DNA, 79 bp, Homo sapiens
aaacagtgtatgcaaaggcatggaggagtaaggaggagtaagagagcctgccaagtcaagagagtgtgattggtcagta

SEQ ID NO: 66104 - DNA, 81 bp, Homo sapiens
tgtatgcaaaggcatggaggagtaaggaggagtaagagagcctgccaagtcaagagagtgtgattggtcagtatttctgga

SEQ ID NO: 66105 - DNA, 79 bp, Homo sapiens
atggaggagtaaggaggagtaagagagcctgccaagtcaagagagtgtgattggtcagtatttctggagcaagctaaca

SEQ ID NO: 66106 - DNA, 79 bp, Homo sapiens
taaggaggagtaagagagcctgccaagtcaagagagtgtgattggtcagtatttctggagcaagctaacatggctttaa

SEQ ID NO: 66107 - DNA, 80 bp, Homo sapiens
agtaagagagcctgccaagtcaagagagtgtgattggtcagtatttctggagcaagctaacatggctttaaatgaatata

SEQ ID NO: 66108 - DNA, 77 bp, Homo sapiens
caagagagtgtgattggtcagtatttctggagcaagctaacatggctttaaatgaatataggaatcattttctaaaa

SEQ ID NO: 66109 - DNA, 76 bp, Homo sapiens
gtgattggtcagtatttctggagcaagctaacatggctttaaatgaatataggaatcattttctaaaaagtgctct

SEQ ID NO: 66110 - DNA, 76 bp, Homo sapiens
agtatttctggagcaagctaacatggctttaaatgaatataggaatcattttctaaaaagtgctcttcagctacat

SEQ ID NO: 66111 - DNA, 78 bp, Homo sapiens
gagcaagctaacatggctttaaatgaatataggaatcattttctaaaaagtgctcttcagctacattatatttggaga

SEQ ID NO: 66112 - DNA, 75 bp, Homo sapiens
catggctttaaatgaatataggaatcattttctaaaaagtgctcttcagctacattatatttggagattaactat

SEQ ID NO: 66113 - DNA, 76 bp, Homo sapiens
tgaatataggaatcattttctaaaaagtgctcttcagctacattatatttggagattaactatttgacaattaatg

SEQ ID NO: 66114 - DNA, 74 bp, Homo sapiens
tcattttctaaaaagtgctcttcagctacattatatttggagattaactatttgacaattaatggaacaactgt

SEQ ID NO: 66115 - DNA, 75 bp, Homo sapiens
tctaaaaagtgctcttcagctacattatatttggagattaactatttgacaattaatggaacaactgttgaaagc

SEQ ID NO: 66116 - DNA, 77 bp, Homo sapiens
tgctcttcagctacattatatttggagattaactatttgacaattaatggaacaactgttgaaagcttttgtatgta

SEQ ID NO: 66117 - DNA, 73 bp, Homo sapiens
ctacattatatttggagattaactatttgacaattaatggaacaactgttgaaagcttttgtatgtattttgc

SEQ ID NO: 66118 - DNA, 72 bp, Homo sapiens
tttggagattaactatttgacaattaatggaacaactgttgaaagcttttgtatgtattttgctttacataa

SEQ ID NO: 66119 - DNA, 72 bp, Homo sapiens
ctatttgacaattaatggaacaactgttgaaagcttttgtatgtattttgctttacataaaactctagatta

SEQ ID NO: 66120 - DNA, 72 bp, Homo sapiens
ttaatggaacaactgttgaaagcttttgtatgtattttgctttacataaaactctagattaattgactaaga

SEQ ID NO: 66121 - DNA, 70 bp, Homo sapiens
acaactgttgaaagcttttgtatgtattttgctttacataaaactctagattaattgactaagaattttc

SEQ ID NO: 66122 - DNA, 71 bp, Homo sapiens
gcttttgtatgtattttgctttacataaaactctagattaattgactaagaattttctattctaaattgtg

SEQ ID NO: 66123 - DNA, 73 bp, Homo sapiens
gtatgtattttgctttacataaaactctagattaattgactaagaattttctattctaaattgtggtggctca

SEQ ID NO: 66124 - DNA, 66 bp, Homo sapiens
aagaccctgtctccctgaccccacaaaaagaaataaatacattgttaatttgatttttctaattta

SEQ ID NO: 66125 - DNA, 66 bp, Homo sapiens
aaagaaataaatacattgttaatttgatttttctaatttaaaatgttggaagaatattttggtatg

SEQ ID NO: 66126 - DNA, 70 bp, Homo sapiens
atacattgttaatttgatttttctaatttaaaatgttggaagaatattttggtatgtgagtttatatgta

SEQ ID NO: 66127 - DNA, 74 bp, Homo sapiens
ttctaatttaaaatgttggaagaatattttggtatgtgagtttatatgtatatatgaacagaaatatagtctgt

SEQ ID NO: 66128 - DNA, 78 bp, Homo sapiens
aaatgttggaagaatattttggtatgtgagtttatatgtatatatgaacagaaatatagtctgttgatagaagtgtca

SEQ ID NO: 66129 - DNA, 79 bp, Homo sapiens
gaagaatattttggtatgtgagtttatatgtatatatgaacagaaatatagtctgttgatagaagtgtcacataatttg

SEQ ID NO: 66130 - DNA, 84 bp, Homo sapiens
tggtatgtgagtttatatgtatatatgaacagaaatatagtctgttgatagaagtgtcacataatttgttgctcagatagattg

SEQ ID NO: 66131 - DNA, 82 bp, Homo sapiens
gtgagtttatatgtatatatgaacagaaatatagtctgttgatagaagtgtcacataatttgttgctcagatagattgtttc

SEQ ID NO: 66132 - DNA, 79 bp, Homo sapiens
gtatatatgaacagaaatatagtctgttgatagaagtgtcacataatttgttgctcagatagattgtttctacttgttt

SEQ ID NO: 66133 - DNA, 77 bp, Homo sapiens
cagaaatatagtctgttgatagaagtgtcacataatttgttgctcagatagattgtttctacttgtttttttgtcag

SEQ ID NO: 66134 - DNA, 81 bp, Homo sapiens
tagtctgttgatagaagtgtcacataatttgttgctcagatagattgtttctacttgtttttttgtcagtgattgagagca

SEQ ID NO: 66135 - DNA, 78 bp, Homo sapiens
taatttgttgctcagatagattgtttctacttgtttttttgtcagtgattgagagcatgggctttgtagtcaggccta

SEQ ID NO: 66136 - DNA, 79 bp, Homo sapiens
ttgctcagatagattgtttctacttgtttttttgtcagtgattgagagcatgggctttgtagtcaggcctagttgagat

SEQ ID NO: 66137 - DNA, 77 bp, Homo sapiens
atagattgtttctacttgtttttttgtcagtgattgagagcatgggctttgtagtcaggcctagttgagattcctgc

SEQ ID NO: 66138 - DNA, 79 bp, Homo sapiens
ttgtttttttgtcagtgattgagagcatgggctttgtagtcaggcctagttgagattcctgctccgtcacttgcctcaa

SEQ ID NO: 66139 - DNA, 81 bp, Homo sapiens
tgtcagtgattgagagcatgggctttgtagtcaggcctagttgagattcctgctccgtcacttgcctcaagagccctaatt

SEQ ID NO: 66140 - DNA, 79 bp, Homo sapiens
attgagagcatgggctttgtagtcaggcctagttgagattcctgctccgtcacttgcctcaagagccctaattttctca

SEQ ID NO: 66141 - DNA, 76 bp, Homo sapiens
atgggctttgtagtcaggcctagttgagattcctgctccgtcacttgcctcaagagccctaattttctcacagaat

SEQ ID NO: 66142 - DNA, 75 bp, Homo sapiens
tagttgagattcctgctccgtcacttgcctcaagagccctaattttctcacagaatttgagtattaaatgggaaa

SEQ ID NO: 66143 - DNA, 74 bp, Homo sapiens
ctgctccgtcacttgcctcaagagccctaattttctcacagaatttgagtattaaatgggaaaatgcttgtaaa

SEQ ID NO: 66144 - DNA, 74 bp, Homo sapiens
gtcacttgcctcaagagccctaattttctcacagaatttgagtattaaatgggaaaatgcttgtaaagcactta

SEQ ID NO: 66145 - DNA, 76 bp, Homo sapiens
tcaagagccctaattttctcacagaatttgagtattaaatgggaaaatgcttgtaaagcacttagtatgatgcttg

SEQ ID NO: 66146 - DNA, 77 bp, Homo sapiens
cagaatttgagtattaaatgggaaaatgcttgtaaagcacttagtatgatgcttggtatgtgtatgcctacagtaaa

SEQ ID NO: 66147 - DNA, 77 bp, Homo sapiens
aaagcacttagtatgatgcttggtatgtgtatgcctacagtaaataatagctctgaagtacttctttttagcactaa

SEQ ID NO: 66148 - DNA, 78 bp, Homo sapiens
ttagtatgatgcttggtatgtgtatgcctacagtaaataatagctctgaagtacttctttttagcactaaaagctcca

SEQ ID NO: 66149 - DNA, 77 bp, Homo sapiens
ttggtatgtgtatgcctacagtaaataatagctctgaagtacttctttttagcactaaaagctccaccataatgctg

SEQ ID NO: 66150 - DNA, 75 bp, Homo sapiens
tgcctacagtaaataatagctctgaagtacttctttttagcactaaaagctccaccataatgctggttccagtta

SEQ ID NO: 66151 - DNA, 74 bp, Homo sapiens
cagtaaataatagctctgaagtacttctttttagcactaaaagctccaccataatgctggttccagttaattga

SEQ ID NO: 66152 - DNA, 73 bp, Homo sapiens
ttctttttagcactaaaagctccaccataatgctggttccagttaattgaattatttggctaacaagaacatc

SEQ ID NO: 66153 - DNA, 72 bp, Homo sapiens
tttagcactaaaagctccaccataatgctggttccagttaattgaattatttggctaacaagaacatccttt

SEQ ID NO: 66154 - DNA, 73 bp, Homo sapiens
aaagctccaccataatgctggttccagttaattgaattatttggctaacaagaacatccttttagttctctga

SEQ ID NO: 66155 - DNA, 75 bp, Homo sapiens
taatgctggttccagttaattgaattatttggctaacaagaacatccttttagttctctgaagtgtatcaaggca

SEQ ID NO: 66156 - DNA, 72 bp, Homo sapiens
cagttaattgaattatttggctaacaagaacatccttttagttctctgaagtgtatcaaggcactttcccta

SEQ ID NO: 66157 - DNA, 73 bp, Homo sapiens
attatttggctaacaagaacatccttttagttctctgaagtgtatcaaggcactttccctacattatgaccta

SEQ ID NO: 66158 - DNA, 76 bp, Homo sapiens
taacaagaacatccttttagttctctgaagtgtatcaaggcactttccctacattatgacctagagcatagagaaa

SEQ ID NO: 66159 - DNA, 75 bp, Homo sapiens
atccttttagttctctgaagtgtatcaaggcactttccctacattatgacctagagcatagagaaaagagttata

SEQ ID NO: 66160 - DNA, 76 bp, Homo sapiens
tttagttctctgaagtgtatcaaggcactttccctacattatgacctagagcatagagaaaagagttatattttca

SEQ ID NO: 66161 - DNA, 78 bp, Homo sapiens
gtgtatcaaggcactttccctacattatgacctagagcatagagaaaagagttatattttcatcaatgatttaagatc

SEQ ID NO: 66162 - DNA, 76 bp, Homo sapiens
cactttccctacattatgacctagagcatagagaaaagagttatattttcatcaatgatttaagatcctgtagtcc

SEQ ID NO: 66163 - DNA, 78 bp, Homo sapiens
acattatgacctagagcatagagaaaagagttatattttcatcaatgatttaagatcctgtagtcccttatggcagta

SEQ ID NO: 66164 - DNA, 76 bp, Homo sapiens
atgacctagagcatagagaaaagagttatattttcatcaatgatttaagatcctgtagtcccttatggcagtaatt

SEQ ID NO: 66165 - DNA, 76 bp, Homo sapiens
gcatagagaaaagagttatattttcatcaatgatttaagatcctgtagtcccttatggcagtaatttaaaacatca

SEQ ID NO: 66166 - DNA, 77 bp, Homo sapiens
tttcatcaatgatttaagatcctgtagtcccttatggcagtaatttaaaacatcagttcttgtagagaactgtcatc

SEQ ID NO: 66167 - DNA, 75 bp, Homo sapiens
tgatttaagatcctgtagtcccttatggcagtaatttaaaacatcagttcttgtagagaactgtcatctggaaaa

SEQ ID NO: 66168 - DNA, 76 bp, Homo sapiens
tagtcccttatggcagtaatttaaaacatcagttcttgtagagaactgtcatctggaaaattgggctggaatctga

SEQ ID NO: 66169 - DNA, 80 bp, Homo sapiens
aatttaaaacatcagttcttgtagagaactgtcatctggaaaattgggctggaatctgactccagcacatgcactggcaa

SEQ ID NO: 66170 - DNA, 81 bp, Homo sapiens
agttcttgtagagaactgtcatctggaaaattgggctggaatctgactccagcacatgcactggcaatcacataggggagt

SEQ ID NO: 66171 - DNA, 81 bp, Homo sapiens
ttgtagagaactgtcatctggaaaattgggctggaatctgactccagcacatgcactggcaatcacataggggagtttggg

SEQ ID NO: 66172 - DNA, 78 bp, Homo sapiens
atctggaaaattgggctggaatctgactccagcacatgcactggcaatcacataggggagtttggggtttgtgtgtct

SEQ ID NO: 66173 - DNA, 76 bp, Homo sapiens
aaaattgggctggaatctgactccagcacatgcactggcaatcacataggggagtttggggtttgtgtgtcttttg

SEQ ID NO: 66174 - DNA, 77 bp, Homo sapiens
agcacatgcactggcaatcacataggggagtttggggtttgtgtgtcttttggcacttagcgtgtatatattttgct

SEQ ID NO: 66175 - DNA, 72 bp, Homo sapiens
actggcaatcacataggggagtttggggtttgtgtgtcttttggcacttagcgtgtatatattttgcttctt

SEQ ID NO: 66176 - DNA, 69 bp, Homo sapiens
acataggggagtttggggtttgtgtgtcttttggcacttagcgtgtatatattttgcttctttgtcttt

SEQ ID NO: 66177 - DNA, 66 bp, Homo sapiens
ttgtcttttttttccatccataaaaaattcctaatgtcaccttattttcttgcagtttaccttctt

SEQ ID NO: 66178 - DNA, 66 bp, Homo sapiens
tttttccatccataaaaaattcctaatgtcaccttattttcttgcagtttaccttctttttcctaa

SEQ ID NO: 66179 - DNA, 65 bp, Homo sapiens
ccataaaaaattcctaatgtcaccttattttcttgcagtttaccttctttttcctaaaaagagaa

SEQ ID NO: 66180 - DNA, 67 bp, Homo sapiens
aattcctaatgtcaccttattttcttgcagtttaccttctttttcctaaaaagagaatattggagaa

SEQ ID NO: 66181 - DNA, 66 bp, Homo sapiens
gtcaccttattttcttgcagtttaccttctttttcctaaaaagagaatattggagaaaaatgttgt

SEQ ID NO: 66182 - DNA, 70 bp, Homo sapiens
tgcagtttaccttctttttcctaaaaagagaatattggagaaaaatgttgtttcccctctgtgattcaga

SEQ ID NO: 66183 - DNA, 72 bp, Homo sapiens
cctaaaaagagaatattggagaaaaatgttgtttcccctctgtgattcagattatctttagagattcaaaca

SEQ ID NO: 66184 - DNA, 76 bp, Homo sapiens
gaaaaatgttgtttcccctctgtgattcagattatctttagagattcaaacatcatctaatctaacattattacag

SEQ ID NO: 66185 - DNA, 77 bp, Homo sapiens
gttgtttcccctctgtgattcagattatctttagagattcaaacatcatctaatctaacattattacagttgataaa

SEQ ID NO: 66186 - DNA, 80 bp, Homo sapiens
cctctgtgattcagattatctttagagattcaaacatcatctaatctaacattattacagttgataaaactgagagtctc

SEQ ID NO: 66187 - DNA, 77 bp, Homo sapiens
tcagattatctttagagattcaaacatcatctaatctaacattattacagttgataaaactgagagtctccaaaaaa

SEQ ID NO: 66188 - DNA, 76 bp, Homo sapiens
gagattcaaacatcatctaatctaacattattacagttgataaaactgagagtctccaaaaaattaattgacttgc

SEQ ID NO: 66189 - DNA, 76 bp, Homo sapiens
acatcatctaatctaacattattacagttgataaaactgagagtctccaaaaaattaattgacttgctctccctca

SEQ ID NO: 66190 - DNA, 73 bp, Homo sapiens
ctaatctaacattattacagttgataaaactgagagtctccaaaaaattaattgacttgctctccctcaaata

SEQ ID NO: 66191 - DNA, 72 bp, Homo sapiens
tacagttgataaaactgagagtctccaaaaaattaattgacttgctctccctcaaatatttggttaatggaa

SEQ ID NO: 66192 - DNA, 71 bp, Homo sapiens
gagagtctccaaaaaattaattgacttgctctccctcaaatatttggttaatggaagaaacagtgagtatt

SEQ ID NO: 66193 - DNA, 69 bp, Homo sapiens
aattaattgacttgctctccctcaaatatttggttaatggaagaaacagtgagtatttaaaccagtttc

SEQ ID NO: 66194 - DNA, 70 bp, Homo sapiens
ttgacttgctctccctcaaatatttggttaatggaagaaacagtgagtatttaaaccagtttcctaacca

SEQ ID NO: 66195 - DNA, 70 bp, Homo sapiens
ctcaaatatttggttaatggaagaaacagtgagtatttaaaccagtttcctaaccaggaggcctgcacaa

SEQ ID NO: 66196 - DNA, 70 bp, Homo sapiens
agtgagtatttaaaccagtttcctaaccaggaggcctgcacaaatacagcttagcgctgggaaattaatt

SEQ ID NO: 66197 - DNA, 71 bp, Homo sapiens
tttaaaccagtttcctaaccaggaggcctgcacaaatacagcttagcgctgggaaattaatttccacacca

SEQ ID NO: 66198 - DNA, 73 bp, Homo sapiens
taaccaggaggcctgcacaaatacagcttagcgctgggaaattaatttccacaccacccgtaaagatgcttaa

SEQ ID NO: 66199 - DNA, 74 bp, Homo sapiens
gcctgcacaaatacagcttagcgctgggaaattaatttccacaccacccgtaaagatgcttaagctgaaaaata

SEQ ID NO: 66200 - DNA, 70 bp, Homo sapiens
acaaatacagcttagcgctgggaaattaatttccacaccacccgtaaagatgcttaagctgaaaaataaa

SEQ ID NO: 66201 - DNA, 72 bp, Homo sapiens
ttagcgctgggaaattaatttccacaccacccgtaaagatgcttaagctgaaaaataaaatctgccaggaga

SEQ ID NO: 66202 - DNA, 70 bp, Homo sapiens
aattaatttccacaccacccgtaaagatgcttaagctgaaaaataaaatctgccaggagagattaagaac

SEQ ID NO: 66203 - DNA, 69 bp, Homo sapiens
tttccacaccacccgtaaagatgcttaagctgaaaaataaaatctgccaggagagattaagaaccgttt

SEQ ID NO: 66204 - DNA, 71 bp, Homo sapiens
gtaaagatgcttaagctgaaaaataaaatctgccaggagagattaagaaccgttttgcctggaatagaaaa

SEQ ID NO: 66205 - DNA, 72 bp, Homo sapiens
atgcttaagctgaaaaataaaatctgccaggagagattaagaaccgttttgcctggaatagaaaaggctgag

SEQ ID NO: 66206 - DNA, 70 bp, Homo sapiens
aaaataaaatctgccaggagagattaagaaccgttttgcctggaatagaaaaggctgaggcagaaaagaa

SEQ ID NO: 66207 - DNA, 76 bp, Homo sapiens
ggctgaggcagaaaagaaaaataatggttctagtgggtggtcctgatgcctgactggagaggagggccagagaaca

SEQ ID NO: 66208 - DNA, 73 bp, Homo sapiens
gaaaagaaaaataatggttctagtgggtggtcctgatgcctgactggagaggagggccagagaacagtggtaa

SEQ ID NO: 66209 - DNA, 74 bp, Homo sapiens
aaaaataatggttctagtgggtggtcctgatgcctgactggagaggagggccagagaacagtggtaactcatgg

SEQ ID NO: 66210 - DNA, 79 bp, Homo sapiens
tagtgggtggtcctgatgcctgactggagaggagggccagagaacagtggtaactcatgggtggcagcaagtcagtaaa

SEQ ID NO: 66211 - DNA, 80 bp, Homo sapiens
tcctgatgcctgactggagaggagggccagagaacagtggtaactcatgggtggcagcaagtcagtaaacggcctgtgga

SEQ ID NO: 66212 - DNA, 78 bp, Homo sapiens
aggagggccagagaacagtggtaactcatgggtggcagcaagtcagtaaacggcctgtggaagcttgagatcctagca

SEQ ID NO: 66213 - DNA, 78 bp, Homo sapiens
agaacagtggtaactcatgggtggcagcaagtcagtaaacggcctgtggaagcttgagatcctagcagcacagaggtt

SEQ ID NO: 66214 - DNA, 77 bp, Homo sapiens
taaacggcctgtggaagcttgagatcctagcagcacagaggtttagggatgtcctccactgtttggataacttctga

SEQ ID NO: 66215 - DNA, 78 bp, Homo sapiens
gtggaagcttgagatcctagcagcacagaggtttagggatgtcctccactgtttggataacttctgaggcctccagcc

SEQ ID NO: 66216 - DNA, 78 bp, Homo sapiens
atcctagcagcacagaggtttagggatgtcctccactgtttggataacttctgaggcctccagccctgccatgctaaa

SEQ ID NO: 66217 - DNA, 74 bp, Homo sapiens
acagaggtttagggatgtcctccactgtttggataacttctgaggcctccagccctgccatgctaaacttgtaa

SEQ ID NO: 66218 - DNA, 74 bp, Homo sapiens
gtttagggatgtcctccactgtttggataacttctgaggcctccagccctgccatgctaaacttgtaacagtgg

SEQ ID NO: 66219 - DNA, 77 bp, Homo sapiens
tccactgtttggataacttctgaggcctccagccctgccatgctaaacttgtaacagtggtgctcgtgagtatttaa

SEQ ID NO: 66220 - DNA, 79 bp, Homo sapiens
ttggataacttctgaggcctccagccctgccatgctaaacttgtaacagtggtgctcgtgagtatttaatctatgtgta

SEQ ID NO: 66221 - DNA, 77 bp, Homo sapiens
tgaggcctccagccctgccatgctaaacttgtaacagtggtgctcgtgagtatttaatctatgtgtaaggttaagat

SEQ ID NO: 66222 - DNA, 74 bp, Homo sapiens
agccctgccatgctaaacttgtaacagtggtgctcgtgagtatttaatctatgtgtaaggttaagattactaag

SEQ ID NO: 66223 - DNA, 71 bp, Homo sapiens
ccatgctaaacttgtaacagtggtgctcgtgagtatttaatctatgtgtaaggttaagattactaaggggg

SEQ ID NO: 66224 - DNA, 71 bp, Homo sapiens
acttgtaacagtggtgctcgtgagtatttaatctatgtgtaaggttaagattactaaggggggaagcagaa

SEQ ID NO: 66225 - DNA, 71 bp, Homo sapiens
tggtgctcgtgagtatttaatctatgtgtaaggttaagattactaaggggggaagcagaactccaagtggt

SEQ ID NO: 66226 - DNA, 69 bp, Homo sapiens
tatttaatctatgtgtaaggttaagattactaaggggggaagcagaactccaagtggttggtggcccaa

SEQ ID NO: 66227 - DNA, 66 bp, Homo sapiens
ttaagattactaaggggggaagcagaactccaagtggttggtggcccaaggggttttgattttcaa

SEQ ID NO: 66228 - DNA, 67 bp, Homo sapiens
ttactaaggggggaagcagaactccaagtggttggtggcccaaggggttttgattttcaacagtgtc

SEQ ID NO: 66229 - DNA, 67 bp, Homo sapiens
aagcagaactccaagtggttggtggcccaaggggttttgattttcaacagtgtcttttaacctgaaa

SEQ ID NO: 66230 - DNA, 65 bp, Homo sapiens
gttggtggcccaaggggttttgattttcaacagtgtcttttaacctgaaactagttataaaattc

SEQ ID NO: 66231 - DNA, 68 bp, Homo sapiens
gggttttgattttcaacagtgtcttttaacctgaaactagttataaaattccttgagcattcttccat

SEQ ID NO: 66232 - DNA, 73 bp, Homo sapiens
tgattttcaacagtgtcttttaacctgaaactagttataaaattccttgagcattcttccatttcaccatgtg

SEQ ID NO: 66233 - DNA, 70 bp, Homo sapiens
cagtgtcttttaacctgaaactagttataaaattccttgagcattcttccatttcaccatgtgtaaaatt

SEQ ID NO: 66234 - DNA, 69 bp, Homo sapiens
taacctgaaactagttataaaattccttgagcattcttccatttcaccatgtgtaaaatttagaaagtt

SEQ ID NO: 66235 - DNA, 74 bp, Homo sapiens
tataaaattccttgagcattcttccatttcaccatgtgtaaaatttagaaagttttcgatccttcatgatagga

SEQ ID NO: 66236 - DNA, 73 bp, Homo sapiens
ccttgagcattcttccatttcaccatgtgtaaaatttagaaagttttcgatccttcatgataggatttagtgt

SEQ ID NO: 66237 - DNA, 72 bp, Homo sapiens
gcattcttccatttcaccatgtgtaaaatttagaaagttttcgatccttcatgataggatttagtgttttct

SEQ ID NO: 66238 - DNA, 70 bp, Homo sapiens
atttcaccatgtgtaaaatttagaaagttttcgatccttcatgataggatttagtgttttctttttctca

SEQ ID NO: 66239 - DNA, 68 bp, Homo sapiens
aaatttagaaagttttcgatccttcatgataggatttagtgttttctttttctcatttttctggaaca

SEQ ID NO: 66240 - DNA, 70 bp, Homo sapiens
aagttttcgatccttcatgataggatttagtgttttctttttctcatttttctggaacagcctatttcag

SEQ ID NO: 66241 - DNA, 73 bp, Homo sapiens
cgatccttcatgataggatttagtgttttctttttctcatttttctggaacagcctatttcagtagtacaata

SEQ ID NO: 66242 - DNA, 70 bp, Homo sapiens
atgataggatttagtgttttctttttctcatttttctggaacagcctatttcagtagtacaatattttct

SEQ ID NO: 66243 - DNA, 68 bp, Homo sapiens
gttttctttttctcatttttctggaacagcctatttcagtagtacaatattttctttacctttcagag

SEQ ID NO: 66244 - DNA, 75 bp, Homo sapiens
tctcatttttctggaacagcctatttcagtagtacaatattttctttacctttcagaggtaatggcagattatca

SEQ ID NO: 66245 - DNA, 75 bp, Homo sapiens
cagcctatttcagtagtacaatattttctttacctttcagaggtaatggcagattatcattaacttgaaatgaga

SEQ ID NO: 66246 - DNA, 75 bp, Homo sapiens
tttctttacctttcagaggtaatggcagattatcattaacttgaaatgagaaactatagtgaaatgaagaagcat

SEQ ID NO: 66247 - DNA, 77 bp, Homo sapiens
tacctttcagaggtaatggcagattatcattaacttgaaatgagaaactatagtgaaatgaagaagcattgtttatg

SEQ ID NO: 66248 - DNA, 75 bp, Homo sapiens
ggtaatggcagattatcattaacttgaaatgagaaactatagtgaaatgaagaagcattgtttatgttagtaacc

SEQ ID NO: 66249 - DNA, 74 bp, Homo sapiens
cagattatcattaacttgaaatgagaaactatagtgaaatgaagaagcattgtttatgttagtaacctttacca

SEQ ID NO: 66250 - DNA, 73 bp, Homo sapiens
cttgaaatgagaaactatagtgaaatgaagaagcattgtttatgttagtaacctttaccaaatactcttgtca

SEQ ID NO: 66251 - DNA, 73 bp, Homo sapiens
atagtgaaatgaagaagcattgtttatgttagtaacctttaccaaatactcttgtcattgatatacattaaaa

SEQ ID NO: 66252 - DNA, 74 bp, Homo sapiens
gaagcattgtttatgttagtaacctttaccaaatactcttgtcattgatatacattaaaatgatatacataagg

SEQ ID NO: 66253 - DNA, 75 bp, Homo sapiens
tatgttagtaacctttaccaaatactcttgtcattgatatacattaaaatgatatacataaggtacacagtactg

SEQ ID NO: 66254 - DNA, 75 bp, Homo sapiens
agtaacctttaccaaatactcttgtcattgatatacattaaaatgatatacataaggtacacagtactgtgtata

SEQ ID NO: 66255 - DNA, 78 bp, Homo sapiens
aatactcttgtcattgatatacattaaaatgatatacataaggtacacagtactgtgtataatatcttactctctggg

SEQ ID NO: 66256 - DNA, 77 bp, Homo sapiens
cttgtcattgatatacattaaaatgatatacataaggtacacagtactgtgtataatatcttactctctgggtattt

SEQ ID NO: 66257 - DNA, 75 bp, Homo sapiens
cattaaaatgatatacataaggtacacagtactgtgtataatatcttactctctgggtatttttcctactctgtg

SEQ ID NO: 66258 - DNA, 73 bp, Homo sapiens
gatatacataaggtacacagtactgtgtataatatcttactctctgggtatttttcctactctgtgggtaatt

SEQ ID NO: 66259 - DNA, 71 bp, Homo sapiens
cataaggtacacagtactgtgtataatatcttactctctgggtatttttcctactctgtgggtaatttttg

SEQ ID NO: 66260 - DNA, 72 bp, Homo sapiens
cagtactgtgtataatatcttactctctgggtatttttcctactctgtgggtaatttttgtttaaatgtgca

SEQ ID NO: 66261 - DNA, 73 bp, Homo sapiens
ctctctgggtatttttcctactctgtgggtaatttttgtttaaatgtgcatagtcattctctagtagaatatc

SEQ ID NO: 66262 - DNA, 73 bp, Homo sapiens
ttttcctactctgtgggtaatttttgtttaaatgtgcatagtcattctctagtagaatatctaagaaactgga

SEQ ID NO: 66263 - DNA, 74 bp, Homo sapiens
ctactctgtgggtaatttttgtttaaatgtgcatagtcattctctagtagaatatctaagaaactggaactaga

SEQ ID NO: 66264 - DNA, 72 bp, Homo sapiens
gtaatttttgtttaaatgtgcatagtcattctctagtagaatatctaagaaactggaactagaaactatggg

SEQ ID NO: 66265 - DNA, 68 bp, Homo sapiens
tagtagaatatctaagaaactggaactagaaactatgggggagaaccaggtacctgggggacaaaata

SEQ ID NO: 66266 - DNA, 67 bp, Homo sapiens
aatatctaagaaactggaactagaaactatgggggagaaccaggtacctgggggacaaaataagcaa

SEQ ID NO: 66267 - DNA, 65 bp, Homo sapiens
aaactggaactagaaactatgggggagaaccaggtacctgggggacaaaataagcaaattattat

SEQ ID NO: 66268 - DNA, 68 bp, Homo sapiens
tagaaactatgggggagaaccaggtacctgggggacaaaataagcaaattattatttttcactgtgta

SEQ ID NO: 66269 - DNA, 70 bp, Homo sapiens
agaaccaggtacctgggggacaaaataagcaaattattatttttcactgtgtatcttctgtaccttatga

SEQ ID NO: 66270 - DNA, 69 bp, Homo sapiens
caggtacctgggggacaaaataagcaaattattatttttcactgtgtatcttctgtaccttatgaattt

SEQ ID NO: 66271 - DNA, 72 bp, Homo sapiens
gggacaaaataagcaaattattatttttcactgtgtatcttctgtaccttatgaattttgtatcattaatta

SEQ ID NO: 66272 - DNA, 72 bp, Homo sapiens
taagcaaattattatttttcactgtgtatcttctgtaccttatgaattttgtatcattaattatttagaaaa

SEQ ID NO: 66273 - DNA, 69 bp, Homo sapiens
attatttttcactgtgtatcttctgtaccttatgaattttgtatcattaattatttagaaaaaaataaa

SEQ ID NO: 66274 - DNA, 73 bp, Homo sapiens
aaaaataaaatttgctttcagtattacacagaataatgaaaacagaagattctagaccttgctatctctattc

SEQ ID NO: 66275 - DNA, 78 bp, Homo sapiens
tttcagtattacacagaataatgaaaacagaagattctagaccttgctatctctattctctggcatataggctgtttt

SEQ ID NO: 66276 - DNA, 76 bp, Homo sapiens
agaataatgaaaacagaagattctagaccttgctatctctattctctggcatataggctgttttttatgtgaaacc

SEQ ID NO: 66277 - DNA, 74 bp, Homo sapiens
aaaacagaagattctagaccttgctatctctattctctggcatataggctgttttttatgtgaaacccttcctc

SEQ ID NO: 66278 - DNA, 74 bp, Homo sapiens
attctagaccttgctatctctattctctggcatataggctgttttttatgtgaaacccttcctccatttgaaat

SEQ ID NO: 66279 - DNA, 75 bp, Homo sapiens
accttgctatctctattctctggcatataggctgttttttatgtgaaacccttcctccatttgaaattgtataca

SEQ ID NO: 66280 - DNA, 75 bp, Homo sapiens
ttctctggcatataggctgttttttatgtgaaacccttcctccatttgaaattgtatacagagccccactgtata

SEQ ID NO: 66281 - DNA, 71 bp, Homo sapiens
atataggctgttttttatgtgaaacccttcctccatttgaaattgtatacagagccccactgtataaaaca

SEQ ID NO: 66282 - DNA, 69 bp, Homo sapiens
gctgttttttatgtgaaacccttcctccatttgaaattgtatacagagccccactgtataaaacagttt

SEQ ID NO: 66283 - DNA, 66 bp, Homo sapiens
gtgaaacccttcctccatttgaaattgtatacagagccccactgtataaaacagtttttttaaaag

SEQ ID NO: 66284 - DNA, 66 bp, Homo sapiens
aacccttcctccatttgaaattgtatacagagccccactgtataaaacagtttttttaaaaggcac

SEQ ID NO: 66285 - DNA, 71 bp, Homo sapiens
ctccatttgaaattgtatacagagccccactgtataaaacagtttttttaaaaggcactgctctgggcaaa

SEQ ID NO: 66286 - DNA, 71 bp, Homo sapiens
ttgaaattgtatacagagccccactgtataaaacagtttttttaaaaggcactgctctgggcaaagccagg

SEQ ID NO: 66287 - DNA, 69 bp, Homo sapiens
atacagagccccactgtataaaacagtttttttaaaaggcactgctctgggcaaagccagggtagggat

SEQ ID NO: 66288 - DNA, 69 bp, Homo sapiens
ccactgtataaaacagtttttttaaaaggcactgctctgggcaaagccagggtagggattgttctggtc

SEQ ID NO: 66289 - DNA, 69 bp, Homo sapiens
actgtataaaacagtttttttaaaaggcactgctctgggcaaagccagggtagggattgttctggtctc

SEQ ID NO: 66290 - DNA, 69 bp, Homo sapiens
tataaaacagtttttttaaaaggcactgctctgggcaaagccagggtagggattgttctggtctccctc

SEQ ID NO: 66291 - DNA, 70 bp, Homo sapiens
tttttaaaaggcactgctctgggcaaagccagggtagggattgttctggtctccctctggtgtccctggg

SEQ ID NO: 66292 - DNA, 69 bp, Homo sapiens
actgctctgggcaaagccagggtagggattgttctggtctccctctggtgtccctgggggtgtttttac

SEQ ID NO: 66293 - DNA, 67 bp, Homo sapiens
gcaaagccagggtagggattgttctggtctccctctggtgtccctgggggtgtttttacggaaccca

SEQ ID NO: 66294 - DNA, 64 bp, Homo sapiens
agggtagggattgttctggtctccctctggtgtccctgggggtgtttttacggaacccagtggg

SEQ ID NO: 66295 - DNA, 68 bp, Homo sapiens
attgttctggtctccctctggtgtccctgggggtgtttttacggaacccagtgggtggcagaacataa

SEQ ID NO: 66296 - DNA, 71 bp, Homo sapiens
tccctctggtgtccctgggggtgtttttacggaacccagtgggtggcagaacataatgaggactctggatg

SEQ ID NO: 66297 - DNA, 73 bp, Homo sapiens
tgtccctgggggtgtttttacggaacccagtgggtggcagaacataatgaggactctggatgtagtggaatga

SEQ ID NO: 66298 - DNA, 73 bp, Homo sapiens
gtgtttttacggaacccagtgggtggcagaacataatgaggactctggatgtagtggaatgagcacaaggttt

SEQ ID NO: 66299 - DNA, 76 bp, Homo sapiens
ttacggaacccagtgggtggcagaacataatgaggactctggatgtagtggaatgagcacaaggttttgcatcccg

SEQ ID NO: 66300 - DNA, 80 bp, Homo sapiens
ggtggcagaacataatgaggactctggatgtagtggaatgagcacaaggttttgcatcccggctccactacttgttgcca

SEQ ID NO: 66301 - DNA, 80 bp, Homo sapiens
aacataatgaggactctggatgtagtggaatgagcacaaggttttgcatcccggctccactacttgttgccatatagcat

SEQ ID NO: 66302 - DNA, 79 bp, Homo sapiens
aggactctggatgtagtggaatgagcacaaggttttgcatcccggctccactacttgttgccatatagcattgagaaag

SEQ ID NO: 66303 - DNA, 79 bp, Homo sapiens
atgtagtggaatgagcacaaggttttgcatcccggctccactacttgttgccatatagcattgagaaagttgcttattc

SEQ ID NO: 66304 - DNA, 80 bp, Homo sapiens
aatgagcacaaggttttgcatcccggctccactacttgttgccatatagcattgagaaagttgcttattctcattgagcc

SEQ ID NO: 66305 - DNA, 80 bp, Homo sapiens
ttttgcatcccggctccactacttgttgccatatagcattgagaaagttgcttattctcattgagcctcatcagtaaaaa

SEQ ID NO: 66306 - DNA, 78 bp, Homo sapiens
atcccggctccactacttgttgccatatagcattgagaaagttgcttattctcattgagcctcatcagtaaaaactcc

SEQ ID NO: 66307 - DNA, 76 bp, Homo sapiens
actacttgttgccatatagcattgagaaagttgcttattctcattgagcctcatcagtaaaaactccctcccaggt

SEQ ID NO: 66308 - DNA, 80 bp, Homo sapiens
atatagcattgagaaagttgcttattctcattgagcctcatcagtaaaaactccctcccaggttgttgcagagctcagta

SEQ ID NO: 66309 - DNA, 79 bp, Homo sapiens
attgagaaagttgcttattctcattgagcctcatcagtaaaaactccctcccaggttgttgcagagctcagtatctgag

SEQ ID NO: 66310 - DNA, 80 bp, Homo sapiens
gttgcttattctcattgagcctcatcagtaaaaactccctcccaggttgttgcagagctcagtatctgaggcttagaatg

SEQ ID NO: 66311 - DNA, 78 bp, Homo sapiens
attgagcctcatcagtaaaaactccctcccaggttgttgcagagctcagtatctgaggcttagaatggggactcagtg

SEQ ID NO: 66312 - DNA, 76 bp, Homo sapiens
atcagtaaaaactccctcccaggttgttgcagagctcagtatctgaggcttagaatggggactcagtggaagccag

SEQ ID NO: 66313 - DNA, 75 bp, Homo sapiens
aactccctcccaggttgttgcagagctcagtatctgaggcttagaatggggactcagtggaagccagtttcttta

SEQ ID NO: 66314 - DNA, 73 bp, Homo sapiens
agagctcagtatctgaggcttagaatggggactcagtggaagccagtttctttaccccttctttctgtgtact

SEQ ID NO: 66315 - DNA, 74 bp, Homo sapiens
ttagaatggggactcagtggaagccagtttctttaccccttctttctgtgtacttggctcacaatatatctgga

SEQ ID NO: 66316 - DNA, 75 bp, Homo sapiens
tcagtggaagccagtttctttaccccttctttctgtgtacttggctcacaatatatctggagtggcaggaaaaca

SEQ ID NO: 66317 - DNA, 72 bp, Homo sapiens
aagccagtttctttaccccttctttctgtgtacttggctcacaatatatctggagtggcaggaaaacagtaa

SEQ ID NO: 66318 - DNA, 75 bp, Homo sapiens
ttctttctgtgtacttggctcacaatatatctggagtggcaggaaaacagtaaaagtagtcatatcctaacttta

SEQ ID NO: 66319 - DNA, 76 bp, Homo sapiens
tgtacttggctcacaatatatctggagtggcaggaaaacagtaaaagtagtcatatcctaactttagactatgaaa

SEQ ID NO: 66320 - DNA, 76 bp, Homo sapiens
tcacaatatatctggagtggcaggaaaacagtaaaagtagtcatatcctaactttagactatgaaagtcgaagata

SEQ ID NO: 66321 - DNA, 72 bp, Homo sapiens
agtggcaggaaaacagtaaaagtagtcatatcctaactttagactatgaaagtcgaagatactattttgcca

SEQ ID NO: 66322 - DNA, 71 bp, Homo sapiens
ggaaaacagtaaaagtagtcatatcctaactttagactatgaaagtcgaagatactattttgccaagccat

SEQ ID NO: 66323 - DNA, 73 bp, Homo sapiens
aagtagtcatatcctaactttagactatgaaagtcgaagatactattttgccaagccattttagattctggtg

SEQ ID NO: 66324 - DNA, 72 bp, Homo sapiens
tcatatcctaactttagactatgaaagtcgaagatactattttgccaagccattttagattctggtgttttt

SEQ ID NO: 66325 - DNA, 69 bp, Homo sapiens
actttagactatgaaagtcgaagatactattttgccaagccattttagattctggtgttttttgtttgg

SEQ ID NO: 66326 - DNA, 65 bp, Homo sapiens
tggtttggttttttaaaacaaccagtaaaggattttggacttttcttggctctgttggaggctac

SEQ ID NO: 66327 - DNA, 70 bp, Homo sapiens
acaaccagtaaaggattttggacttttcttggctctgttggaggctaccagttactgtggggattgagta

SEQ ID NO: 66328 - DNA, 71 bp, Homo sapiens
aaaggattttggacttttcttggctctgttggaggctaccagttactgtggggattgagtagtgactagaa

SEQ ID NO: 66329 - DNA, 74 bp, Homo sapiens
tttcttggctctgttggaggctaccagttactgtggggattgagtagtgactagaagtgggtatgaagagaact

SEQ ID NO: 66330 - DNA, 73 bp, Homo sapiens
ctaccagttactgtggggattgagtagtgactagaagtgggtatgaagagaacttcccatgttctggtaatgt

SEQ ID NO: 66331 - DNA, 73 bp, Homo sapiens
ttactgtggggattgagtagtgactagaagtgggtatgaagagaacttcccatgttctggtaatgttagttct

SEQ ID NO: 66332 - DNA, 73 bp, Homo sapiens
gggattgagtagtgactagaagtgggtatgaagagaacttcccatgttctggtaatgttagttcttgacctgg

SEQ ID NO: 66333 - DNA, 73 bp, Homo sapiens
agtgactagaagtgggtatgaagagaacttcccatgttctggtaatgttagttcttgacctgggtgctagtta

SEQ ID NO: 66334 - DNA, 72 bp, Homo sapiens
tgggtatgaagagaacttcccatgttctggtaatgttagttcttgacctgggtgctagttaggtgggtgtgt

SEQ ID NO: 66335 - DNA, 71 bp, Homo sapiens
aacttcccatgttctggtaatgttagttcttgacctgggtgctagttaggtgggtgtgttcgctttgtgaa

SEQ ID NO: 66336 - DNA, 71 bp, Homo sapiens
ccatgttctggtaatgttagttcttgacctgggtgctagttaggtgggtgtgttcgctttgtgaaaattct

SEQ ID NO: 66337 - DNA, 72 bp, Homo sapiens
taatgttagttcttgacctgggtgctagttaggtgggtgtgttcgctttgtgaaaattcttcattacatact

SEQ ID NO: 66338 - DNA, 71 bp, Homo sapiens
ttcttgacctgggtgctagttaggtgggtgtgttcgctttgtgaaaattcttcattacatacttaacaatt

SEQ ID NO: 66339 - DNA, 73 bp, Homo sapiens
taggtgggtgtgttcgctttgtgaaaattcttcattacatacttaacaatttgggcactattctgtacttgta

SEQ ID NO: 66340 - DNA, 72 bp, Homo sapiens
tcgctttgtgaaaattcttcattacatacttaacaatttgggcactattctgtacttgtataaaaagaaggc

SEQ ID NO: 66341 - DNA, 70 bp, Homo sapiens
gtgaaaattcttcattacatacttaacaatttgggcactattctgtacttgtataaaaagaaggctttta

SEQ ID NO: 66342 - DNA, 68 bp, Homo sapiens
cttcattacatacttaacaatttgggcactattctgtacttgtataaaaagaaggcttttaaaaataa

SEQ ID NO: 66343 - DNA, 79 bp, Homo sapiens
taaaaaataatcacagacgttacttttgtgaaatgctctccattggcatctgttgctatatagaagcatcctagcacct

SEQ ID NO: 66344 - DNA, 81 bp, Homo sapiens
tacttttgtgaaatgctctccattggcatctgttgctatatagaagcatcctagcaccttttctgtctgagaatccttcct

SEQ ID NO: 66345 - DNA, 82 bp, Homo sapiens
aaatgctctccattggcatctgttgctatatagaagcatcctagcaccttttctgtctgagaatccttccttgatctgaaaa

SEQ ID NO: 66346 - DNA, 83 bp, Homo sapiens
cattggcatctgttgctatatagaagcatcctagcaccttttctgtctgagaatccttccttgatctgaaaatgttgacatgt

SEQ ID NO: 66347 - DNA, 79 bp, Homo sapiens
tatatagaagcatcctagcaccttttctgtctgagaatccttccttgatctgaaaatgttgacatgtttcccatgacct

SEQ ID NO: 66348 - DNA, 74 bp, Homo sapiens
atcctagcaccttttctgtctgagaatccttccttgatctgaaaatgttgacatgtttcccatgacctttcttt

SEQ ID NO: 66349 - DNA, 71 bp, Homo sapiens
accttttctgtctgagaatccttccttgatctgaaaatgttgacatgtttcccatgacctttctttttggg

SEQ ID NO: 66350 - DNA, 73 bp, Homo sapiens
gaatccttccttgatctgaaaatgttgacatgtttcccatgacctttctttttggggtatatatgtctataac

SEQ ID NO: 66351 - DNA, 73 bp, Homo sapiens
tgacatgtttcccatgacctttctttttggggtatatatgtctataactaattcaaatgtcttttgtgaagga

SEQ ID NO: 66352 - DNA, 71 bp, Homo sapiens
cccatgacctttctttttggggtatatatgtctataactaattcaaatgtcttttgtgaaggaagatggag

SEQ ID NO: 66353 - DNA, 72 bp, Homo sapiens
tttggggtatatatgtctataactaattcaaatgtcttttgtgaaggaagatggaggttaataaaggacaga

SEQ ID NO: 66354 - DNA, 76 bp, Homo sapiens
aactaattcaaatgtcttttgtgaaggaagatggaggttaataaaggacagatttcatgctctgatcatagttgag

SEQ ID NO: 66355 - DNA, 77 bp, Homo sapiens
ttttgtgaaggaagatggaggttaataaaggacagatttcatgctctgatcatagttgagttagaaagatagcaact

SEQ ID NO: 66356 - DNA, 78 bp, Homo sapiens
aagatggaggttaataaaggacagatttcatgctctgatcatagttgagttagaaagatagcaacttgtacactagtc

SEQ ID NO: 66357 - DNA, 82 bp, Homo sapiens
acagatttcatgctctgatcatagttgagttagaaagatagcaacttgtacactagtctctgtttccagagactgccttcaa

SEQ ID NO: 66358 - DNA, 81 bp, Homo sapiens
atgctctgatcatagttgagttagaaagatagcaacttgtacactagtctctgtttccagagactgccttcaacttgattg

SEQ ID NO: 66359 - DNA, 75 bp, Homo sapiens
atagttgagttagaaagatagcaacttgtacactagtctctgtttccagagactgccttcaacttgattggcctt

SEQ ID NO: 66360 - DNA, 73 bp, Homo sapiens
aaagatagcaacttgtacactagtctctgtttccagagactgccttcaacttgattggccttttgacctaaaa

SEQ ID NO: 66361 - DNA, 72 bp, Homo sapiens
aacttgtacactagtctctgtttccagagactgccttcaacttgattggccttttgacctaaaactgtaata

SEQ ID NO: 66362 - DNA, 75 bp, Homo sapiens
tacactagtctctgtttccagagactgccttcaacttgattggccttttgacctaaaactgtaatatagcactct

SEQ ID NO: 66363 - DNA, 73 bp, Homo sapiens
tgtttccagagactgccttcaacttgattggccttttgacctaaaactgtaatatagcactcttggcttttaa

SEQ ID NO: 66364 - DNA, 73 bp, Homo sapiens
actgccttcaacttgattggccttttgacctaaaactgtaatatagcactcttggcttttaactcagctccaa

SEQ ID NO: 66365 - DNA, 72 bp, Homo sapiens
aacttgattggccttttgacctaaaactgtaatatagcactcttggcttttaactcagctccaaggtgacag

SEQ ID NO: 66366 - DNA, 73 bp, Homo sapiens
ttttgacctaaaactgtaatatagcactcttggcttttaactcagctccaaggtgacagggtgcttaaagata

SEQ ID NO: 66367 - DNA, 71 bp, Homo sapiens
acctaaaactgtaatatagcactcttggcttttaactcagctccaaggtgacagggtgcttaaagatattt

SEQ ID NO: 66368 - DNA, 75 bp, Homo sapiens
taatatagcactcttggcttttaactcagctccaaggtgacagggtgcttaaagatattttctctattatcttaa

SEQ ID NO: 66369 - DNA, 73 bp, Homo sapiens
tcttggcttttaactcagctccaaggtgacagggtgcttaaagatattttctctattatcttaaaaatgccta

SEQ ID NO: 66370 - DNA, 72 bp, Homo sapiens
ctccaaggtgacagggtgcttaaagatattttctctattatcttaaaaatgcctacatttggttagattata

SEQ ID NO: 66371 - DNA, 73 bp, Homo sapiens
ctattatcttaaaaatgcctacatttggttagattataaagtggcagcaaataaatggttgtctttaatgtca

SEQ ID NO: 66372 - DNA, 73 bp, Homo sapiens
aaaatgcctacatttggttagattataaagtggcagcaaataaatggttgtctttaatgtcagagaatgggta

SEQ ID NO: 66373 - DNA, 73 bp, Homo sapiens
gcctacatttggttagattataaagtggcagcaaataaatggttgtctttaatgtcagagaatgggtaaatta

SEQ ID NO: 66374 - DNA, 74 bp, Homo sapiens
aagtggcagcaaataaatggttgtctttaatgtcagagaatgggtaaattattgtttatcctactatgagcaat

SEQ ID NO: 66375 - DNA, 73 bp, Homo sapiens
gcaaataaatggttgtctttaatgtcagagaatgggtaaattattgtttatcctactatgagcaattttaata

SEQ ID NO: 66376 - DNA, 72 bp, Homo sapiens
ggttgtctttaatgtcagagaatgggtaaattattgtttatcctactatgagcaattttaatacaattcaaa

SEQ ID NO: 66377 - DNA, 75 bp, Homo sapiens
tgtcagagaatgggtaaattattgtttatcctactatgagcaattttaatacaattcaaatcatagaattttatg

SEQ ID NO: 66378 - DNA, 72 bp, Homo sapiens
tgggtaaattattgtttatcctactatgagcaattttaatacaattcaaatcatagaattttatgtggaaac

SEQ ID NO: 66379 - DNA, 73 bp, Homo sapiens
ttattgtttatcctactatgagcaattttaatacaattcaaatcatagaattttatgtggaaactatttggaa

SEQ ID NO: 66380 - DNA, 73 bp, Homo sapiens
tactatgagcaattttaatacaattcaaatcatagaattttatgtggaaactatttggaaataaaaacaggca

SEQ ID NO: 66381 - DNA, 68 bp, Homo sapiens
caattcaaatcatagaattttatgtggaaactatttggaaataaaaacaggcaaaaagttttatgtgg

SEQ ID NO: 66382 - DNA, 65 bp, Homo sapiens
ttttatgtggaaactatttggaaataaaaacaggcaaaaagttttatgtggtttttgtatttgta

SEQ ID NO: 66383 - DNA, 65 bp, Homo sapiens
aaaaacaggcaaaaagttttatgtggtttttgtatttgtattttgcatagttttggggccttcaa

SEQ ID NO: 66384 - DNA, 69 bp, Homo sapiens
gcaaaaagttttatgtggtttttgtatttgtattttgcatagttttggggccttcaattctgtgtggtc

SEQ ID NO: 66385 - DNA, 69 bp, Homo sapiens
gttttatgtggtttttgtatttgtattttgcatagttttggggccttcaattctgtgtggtccaagaaa

SEQ ID NO: 66386 - DNA, 70 bp, Homo sapiens
gtattttgcatagttttggggccttcaattctgtgtggtccaagaaaaaaatctcagcctctatttattt

SEQ ID NO: 66387 - DNA, 70 bp, Homo sapiens
gccttcaattctgtgtggtccaagaaaaaaatctcagcctctatttattttaaatttccgaagacttcag

SEQ ID NO: 66388 - DNA, 69 bp, Homo sapiens
ttctgtgtggtccaagaaaaaaatctcagcctctatttattttaaatttccgaagacttcagttttcaa

SEQ ID NO: 66389 - DNA, 66 bp, Homo sapiens
gaaaaaaatctcagcctctatttattttaaatttccgaagacttcagttttcaaattatttaactc

SEQ ID NO: 66390 - DNA, 69 bp, Homo sapiens
tctcagcctctatttattttaaatttccgaagacttcagttttcaaattatttaactctaccaatattc

SEQ ID NO: 66391 - DNA, 66 bp, Homo sapiens
tttattttaaatttccgaagacttcagttttcaaattatttaactctaccaatattctttcttgtg

SEQ ID NO: 66392 - DNA, 72 bp, Homo sapiens
atttccgaagacttcagttttcaaattatttaactctaccaatattctttcttgtgtatggataaatcagca

SEQ ID NO: 66393 - DNA, 77 bp, Homo sapiens
gacttcagttttcaaattatttaactctaccaatattctttcttgtgtatggataaatcagcatgagaatatgtctg

SEQ ID NO: 66394 - DNA, 79 bp, Homo sapiens
ttcaaattatttaactctaccaatattctttcttgtgtatggataaatcagcatgagaatatgtctgtgctaggccttc

SEQ ID NO: 66395 - DNA, 78 bp, Homo sapiens
tatttaactctaccaatattctttcttgtgtatggataaatcagcatgagaatatgtctgtgctaggccttcctgggt

SEQ ID NO: 66396 - DNA, 77 bp, Homo sapiens
aatattctttcttgtgtatggataaatcagcatgagaatatgtctgtgctaggccttcctgggttgtgttttgggta

SEQ ID NO: 66397 - DNA, 79 bp, Homo sapiens
tttcttgtgtatggataaatcagcatgagaatatgtctgtgctaggccttcctgggttgtgttttgggtaatggcagta

SEQ ID NO: 66398 - DNA, 76 bp, Homo sapiens
aatatgtctgtgctaggccttcctgggttgtgttttgggtaatggcagtagatgagaatgaactgggagtatgaac

SEQ ID NO: 66399 - DNA, 78 bp, Homo sapiens
taggccttcctgggttgtgttttgggtaatggcagtagatgagaatgaactgggagtatgaactcagactgagaatga

SEQ ID NO: 66400 - DNA, 80 bp, Homo sapiens
ttttgggtaatggcagtagatgagaatgaactgggagtatgaactcagactgagaatgagaatcggaagaagattaatga

SEQ ID NO: 66401 - DNA, 81 bp, Homo sapiens
taatggcagtagatgagaatgaactgggagtatgaactcagactgagaatgagaatcggaagaagattaatgaaggaggaa

SEQ ID NO: 66402 - DNA, 78 bp, Homo sapiens
agatgagaatgaactgggagtatgaactcagactgagaatgagaatcggaagaagattaatgaaggaggaaaaggata

SEQ ID NO: 66403 - DNA, 74 bp, Homo sapiens
aactgggagtatgaactcagactgagaatgagaatcggaagaagattaatgaaggaggaaaaggatacgaaatc

SEQ ID NO: 66404 - DNA, 75 bp, Homo sapiens
tatgaactcagactgagaatgagaatcggaagaagattaatgaaggaggaaaaggatacgaaatctgacttcccc

SEQ ID NO: 66405 - DNA, 72 bp, Homo sapiens
actgagaatgagaatcggaagaagattaatgaaggaggaaaaggatacgaaatctgacttcccccactacca

SEQ ID NO: 66406 - DNA, 69 bp, Homo sapiens
aagattaatgaaggaggaaaaggatacgaaatctgacttcccccactaccagaggaagagagtcttggt

SEQ ID NO: 66407 - DNA, 71 bp, Homo sapiens
aaggaggaaaaggatacgaaatctgacttcccccactaccagaggaagagagtcttggttctctatcagag

SEQ ID NO: 66408 - DNA, 74 bp, Homo sapiens
atacgaaatctgacttcccccactaccagaggaagagagtcttggttctctatcagaggagcaatagactttat

SEQ ID NO: 66409 - DNA, 74 bp, Homo sapiens
tgacttcccccactaccagaggaagagagtcttggttctctatcagaggagcaatagactttattaagatttat

SEQ ID NO: 66410 - DNA, 72 bp, Homo sapiens
ccactaccagaggaagagagtcttggttctctatcagaggagcaatagactttattaagatttatttttgtt

SEQ ID NO: 66411 - DNA, 72 bp, Homo sapiens
cagaggaagagagtcttggttctctatcagaggagcaatagactttattaagatttatttttgttttagcct

SEQ ID NO: 66412 - DNA, 70 bp, Homo sapiens
gagtcttggttctctatcagaggagcaatagactttattaagatttatttttgttttagccttgttttag

SEQ ID NO: 66413 - DNA, 69 bp, Homo sapiens
ttctctatcagaggagcaatagactttattaagatttatttttgttttagccttgttttagtttctaaa

SEQ ID NO: 66414 - DNA, 69 bp, Homo sapiens
ttattaagatttatttttgttttagccttgttttagtttctaaaaattattctatctgcaggatatgga

SEQ ID NO: 66415 - DNA, 69 bp, Homo sapiens
ttatttttgttttagccttgttttagtttctaaaaattattctatctgcaggatatggatttttcaaca

SEQ ID NO: 66416 - DNA, 70 bp, Homo sapiens
gttttagccttgttttagtttctaaaaattattctatctgcaggatatggatttttcaacatttgaatag

SEQ ID NO: 66417 - DNA, 71 bp, Homo sapiens
ccttgttttagtttctaaaaattattctatctgcaggatatggatttttcaacatttgaatagttatttga

SEQ ID NO: 66418 - DNA, 73 bp, Homo sapiens
ctaaaaattattctatctgcaggatatggatttttcaacatttgaatagttatttgaaaagttcataaatgga

SEQ ID NO: 66419 - DNA, 77 bp, Homo sapiens
tctatctgcaggatatggatttttcaacatttgaatagttatttgaaaagttcataaatggaaatgggaagtgatga

SEQ ID NO: 66420 - DNA, 71 bp, Homo sapiens
ggatttttcaacatttgaatagttatttgaaaagttcataaatggaaatgggaagtgatgaacagctttgt

SEQ ID NO: 66421 - DNA, 80 bp, Homo sapiens
ttatttgaaaagttcataaatggaaatgggaagtgatgaacagctttgttataataacagcatcatgagtgcatcctatg

SEQ ID NO: 66422 - DNA, 82 bp, Homo sapiens
aaaagttcataaatggaaatgggaagtgatgaacagctttgttataataacagcatcatgagtgcatcctatgtgccaggca

SEQ ID NO: 66423 - DNA, 83 bp, Homo sapiens
gaaatgggaagtgatgaacagctttgttataataacagcatcatgagtgcatcctatgtgccaggcagtgtacattataattt

SEQ ID NO: 66424 - DNA, 84 bp, Homo sapiens
agtgatgaacagctttgttataataacagcatcatgagtgcatcctatgtgccaggcagtgtacattataattttggctttata

SEQ ID NO: 66425 - DNA, 82 bp, Homo sapiens
agctttgttataataacagcatcatgagtgcatcctatgtgccaggcagtgtacattataattttggctttatatttgatct

SEQ ID NO: 66426 - DNA, 83 bp, Homo sapiens
ttataataacagcatcatgagtgcatcctatgtgccaggcagtgtacattataattttggctttatatttgatctttaaatgc

SEQ ID NO: 66427 - DNA, 81 bp, Homo sapiens
tcatgagtgcatcctatgtgccaggcagtgtacattataattttggctttatatttgatctttaaatgctcttgtaagtta

SEQ ID NO: 66428 - DNA, 76 bp, Homo sapiens
catcctatgtgccaggcagtgtacattataattttggctttatatttgatctttaaatgctcttgtaagttacctc

SEQ ID NO: 66429 - DNA, 74 bp, Homo sapiens
gtgccaggcagtgtacattataattttggctttatatttgatctttaaatgctcttgtaagttacctcttcatt

SEQ ID NO: 66430 - DNA, 73 bp, Homo sapiens
cagtgtacattataattttggctttatatttgatctttaaatgctcttgtaagttacctcttcattttgagga

SEQ ID NO: 66431 - DNA, 71 bp, Homo sapiens
ttttggctttatatttgatctttaaatgctcttgtaagttacctcttcattttgaggaaccgaggctaaga

SEQ ID NO: 66432 - DNA, 72 bp, Homo sapiens
atatttgatctttaaatgctcttgtaagttacctcttcattttgaggaaccgaggctaagagaggataagaa

SEQ ID NO: 66433 - DNA, 71 bp, Homo sapiens
atctttaaatgctcttgtaagttacctcttcattttgaggaaccgaggctaagagaggataagaaacttgc

SEQ ID NO: 66434 - DNA, 72 bp, Homo sapiens
aagttacctcttcattttgaggaaccgaggctaagagaggataagaaacttgcctaaggtgacatagctgaa

SEQ ID NO: 66435 - DNA, 78 bp, Homo sapiens
agaggataagaaacttgcctaaggtgacatagctgaagtggtagggccatcatggtccaagcccagaaatgcagatta

SEQ ID NO: 66436 - DNA, 77 bp, Homo sapiens
aaacttgcctaaggtgacatagctgaagtggtagggccatcatggtccaagcccagaaatgcagattattcccacta

SEQ ID NO: 66437 - DNA, 77 bp, Homo sapiens
ctaaggtgacatagctgaagtggtagggccatcatggtccaagcccagaaatgcagattattcccactatttcattt

SEQ ID NO: 66438 - DNA, 75 bp, Homo sapiens
atagctgaagtggtagggccatcatggtccaagcccagaaatgcagattattcccactatttcattttaaaatgt

SEQ ID NO: 66439 - DNA, 73 bp, Homo sapiens
gtagggccatcatggtccaagcccagaaatgcagattattcccactatttcattttaaaatgttactttatat

SEQ ID NO: 66440 - DNA, 74 bp, Homo sapiens
gccatcatggtccaagcccagaaatgcagattattcccactatttcattttaaaatgttactttatatttgaag

SEQ ID NO: 66441 - DNA, 69 bp, Homo sapiens
ccaagcccagaaatgcagattattcccactatttcattttaaaatgttactttatatttgaagttttcc

SEQ ID NO: 66442 - DNA, 70 bp, Homo sapiens
tgcagattattcccactatttcattttaaaatgttactttatatttgaagttttccttaggttgcatact

SEQ ID NO: 66443 - DNA, 67 bp, Homo sapiens
cccactatttcattttaaaatgttactttatatttgaagttttccttaggttgcatactttgtaaga

SEQ ID NO: 66444 - DNA, 66 bp, Homo sapiens
cattttaaaatgttactttatatttgaagttttccttaggttgcatactttgtaagaactatattt

SEQ ID NO: 66445 - DNA, 70 bp, Homo sapiens
tgttactttatatttgaagttttccttaggttgcatactttgtaagaactatattttttgacatgcctgt

SEQ ID NO: 66446 - DNA, 73 bp, Homo sapiens
tatttgaagttttccttaggttgcatactttgtaagaactatattttttgacatgcctgttggaacagctctc

SEQ ID NO: 66447 - DNA, 76 bp, Homo sapiens
ttttccttaggttgcatactttgtaagaactatattttttgacatgcctgttggaacagctctcgcagtctgctta

SEQ ID NO: 66448 - DNA, 82 bp, Homo sapiens
ttgcatactttgtaagaactatattttttgacatgcctgttggaacagctctcgcagtctgcttatctgacagatgtttata

SEQ ID NO: 66449 - DNA, 79 bp, Homo sapiens
tactttgtaagaactatattttttgacatgcctgttggaacagctctcgcagtctgcttatctgacagatgtttataat

SEQ ID NO: 66450 - DNA, 80 bp, Homo sapiens
atattttttgacatgcctgttggaacagctctcgcagtctgcttatctgacagatgtttataattgtctgctgacttttt

SEQ ID NO: 66451 - DNA, 80 bp, Homo sapiens
ttttgacatgcctgttggaacagctctcgcagtctgcttatctgacagatgtttataattgtctgctgacttttttttac

SEQ ID NO: 66452 - DNA, 75 bp, Homo sapiens
ttggaacagctctcgcagtctgcttatctgacagatgtttataattgtctgctgacttttttttaccctttttaa

SEQ ID NO: 66453 - DNA, 73 bp, Homo sapiens
cagctctcgcagtctgcttatctgacagatgtttataattgtctgctgacttttttttaccctttttaaaatt

SEQ ID NO: 66454 - DNA, 70 bp, Homo sapiens
ctctccctccccttcccccctaccccttgacaggcccctgtgtgtgacattcccttccctgtgtgtgatg

SEQ ID NO: 66455 - DNA, 70 bp, Homo sapiens
tttttatggctgctttttaacctttttaatgagtttggggaaagtgcattcctttctctcatgttgagac

SEQ ID NO: 66456 - DNA, 70 bp, Homo sapiens
tggctgctttttaacctttttaatgagtttggggaaagtgcattcctttctctcatgttgagacttaaaa

SEQ ID NO: 66457 - DNA, 70 bp, Homo sapiens
acctttttaatgagtttggggaaagtgcattcctttctctcatgttgagacttaaaatttgtgctttgtg

SEQ ID NO: 66458 - DNA, 75 bp, Homo sapiens
ttaatgagtttggggaaagtgcattcctttctctcatgttgagacttaaaatttgtgctttgtgtctcctccaga

SEQ ID NO: 66459 - DNA, 76 bp, Homo sapiens
aaagtgcattcctttctctcatgttgagacttaaaatttgtgctttgtgtctcctccagacttagcaatagggaga

SEQ ID NO: 66460 - DNA, 76 bp, Homo sapiens
attcctttctctcatgttgagacttaaaatttgtgctttgtgtctcctccagacttagcaatagggagaactagca

SEQ ID NO: 66461 - DNA, 75 bp, Homo sapiens
atgttgagacttaaaatttgtgctttgtgtctcctccagacttagcaatagggagaactagcagtgactaaggag

SEQ ID NO: 66462 - DNA, 76 bp, Homo sapiens
ttaaaatttgtgctttgtgtctcctccagacttagcaatagggagaactagcagtgactaaggaggctgacattaa

SEQ ID NO: 66463 - DNA, 80 bp, Homo sapiens
tgtgctttgtgtctcctccagacttagcaatagggagaactagcagtgactaaggaggctgacattaatgccaattgtaa

SEQ ID NO: 66464 - DNA, 77 bp, Homo sapiens
tgtctcctccagacttagcaatagggagaactagcagtgactaaggaggctgacattaatgccaattgtaagttaaa

SEQ ID NO: 66465 - DNA, 75 bp, Homo sapiens
acttagcaatagggagaactagcagtgactaaggaggctgacattaatgccaattgtaagttaaaggctcatctt

SEQ ID NO: 66466 - DNA, 75 bp, Homo sapiens
aatagggagaactagcagtgactaaggaggctgacattaatgccaattgtaagttaaaggctcatcttttccata

SEQ ID NO: 66467 - DNA, 76 bp, Homo sapiens
aactagcagtgactaaggaggctgacattaatgccaattgtaagttaaaggctcatcttttccataggtctgattc

SEQ ID NO: 66468 - DNA, 76 bp, Homo sapiens
actaaggaggctgacattaatgccaattgtaagttaaaggctcatcttttccataggtctgattctgtgttctgac

SEQ ID NO: 66469 - DNA, 77 bp, Homo sapiens
acattaatgccaattgtaagttaaaggctcatcttttccataggtctgattctgtgttctgactctgcctccaacta

SEQ ID NO: 66470 - DNA, 75 bp, Homo sapiens
aattgtaagttaaaggctcatcttttccataggtctgattctgtgttctgactctgcctccaactatgttacttg

SEQ ID NO: 66471 - DNA, 75 bp, Homo sapiens
taaaggctcatcttttccataggtctgattctgtgttctgactctgcctccaactatgttacttgggggaaatta

SEQ ID NO: 66472 - DNA, 72 bp, Homo sapiens
atcttttccataggtctgattctgtgttctgactctgcctccaactatgttacttgggggaaattacttaac

SEQ ID NO: 66473 - DNA, 72 bp, Homo sapiens
taggtctgattctgtgttctgactctgcctccaactatgttacttgggggaaattacttaaccttagtctta

SEQ ID NO: 66474 - DNA, 72 bp, Homo sapiens
attctgtgttctgactctgcctccaactatgttacttgggggaaattacttaaccttagtcttaggctgtca

SEQ ID NO: 66475 - DNA, 76 bp, Homo sapiens
ttctgactctgcctccaactatgttacttgggggaaattacttaaccttagtcttaggctgtcatctgcacaatga

SEQ ID NO: 66476 - DNA, 76 bp, Homo sapiens
caactatgttacttgggggaaattacttaaccttagtcttaggctgtcatctgcacaatgagagttgaatcagatc

SEQ ID NO: 66477 - DNA, 79 bp, Homo sapiens
aattacttaaccttagtcttaggctgtcatctgcacaatgagagttgaatcagatctctcaagtactttgccactctaa

SEQ ID NO: 66478 - DNA, 84 bp, Homo sapiens
tcttaggctgtcatctgcacaatgagagttgaatcagatctctcaagtactttgccactctaaaattctataattctgtattca

SEQ ID NO: 66479 - DNA, 81 bp, Homo sapiens
gtcatctgcacaatgagagttgaatcagatctctcaagtactttgccactctaaaattctataattctgtattcagaattt

SEQ ID NO: 66480 - DNA, 76 bp, Homo sapiens
caatgagagttgaatcagatctctcaagtactttgccactctaaaattctataattctgtattcagaattttattt

SEQ ID NO: 66481 - DNA, 72 bp, Homo sapiens
cagatctctcaagtactttgccactctaaaattctataattctgtattcagaattttatttttctcccttcc

SEQ ID NO: 66482 - DNA, 70 bp, Homo sapiens
ctctcaagtactttgccactctaaaattctataattctgtattcagaattttatttttctcccttccttc

SEQ ID NO: 66483 - DNA, 78 bp, Homo sapiens
caccatgcccagctgttcttttagccaagtatcaaacaaaaagtgaatactacagtatctggacatagtacacactca

SEQ ID NO: 66484 - DNA, 75 bp, Homo sapiens
ccagctgttcttttagccaagtatcaaacaaaaagtgaatactacagtatctggacatagtacacactcaataaa

SEQ ID NO: 66485 - DNA, 74 bp, Homo sapiens
ttcttttagccaagtatcaaacaaaaagtgaatactacagtatctggacatagtacacactcaataaaatatag

SEQ ID NO: 66486 - DNA, 73 bp, Homo sapiens
caagtatcaaacaaaaagtgaatactacagtatctggacatagtacacactcaataaaatatagttgttttta

SEQ ID NO: 66487 - DNA, 71 bp, Homo sapiens
aagtgaatactacagtatctggacatagtacacactcaataaaatatagttgtttttaattgttagggaat

SEQ ID NO: 66488 - DNA, 72 bp, Homo sapiens
ctacagtatctggacatagtacacactcaataaaatatagttgtttttaattgttagggaattttcccatga

SEQ ID NO: 66489 - DNA, 71 bp, Homo sapiens
tatctggacatagtacacactcaataaaatatagttgtttttaattgttagggaattttcccatgaagagt

SEQ ID NO: 66490 - DNA, 69 bp, Homo sapiens
gtacacactcaataaaatatagttgtttttaattgttagggaattttcccatgaagagttttcagcagg

SEQ ID NO: 66491 - DNA, 65 bp, Homo sapiens
caataaaatatagttgtttttaattgttagggaattttcccatgaagagttttcagcaggttttt

SEQ ID NO: 66492 - DNA, 62 bp, Homo sapiens
atagttgtttttaattgttagggaattttcccatgaagagttttcagcaggttttttttttt

SEQ ID NO: 66493 - DNA, 70 bp, Homo sapiens
ttttttttttgagctctcaatattaaaagaatggagatcaaccaggaaattttcttcattctggataccc

SEQ ID NO: 66494 - DNA, 72 bp, Homo sapiens
ctctcaatattaaaagaatggagatcaaccaggaaattttcttcattctggataccccctcctcgtggctgt

SEQ ID NO: 66495 - DNA, 70 bp, Homo sapiens
aatattaaaagaatggagatcaaccaggaaattttcttcattctggataccccctcctcgtggctgtttc

SEQ ID NO: 66496 - DNA, 77 bp, Homo sapiens
atggagatcaaccaggaaattttcttcattctggataccccctcctcgtggctgtttctgcatagctctgaccagta

SEQ ID NO: 66497 - DNA, 72 bp, Homo sapiens
aggaaattttcttcattctggataccccctcctcgtggctgtttctgcatagctctgaccagtagggaaaac

SEQ ID NO: 66498 - DNA, 77 bp, Homo sapiens
tggataccccctcctcgtggctgtttctgcatagctctgaccagtagggaaaactcaagctgctggtgtgtgttctt

SEQ ID NO: 66499 - DNA, 80 bp, Homo sapiens
tcctcgtggctgtttctgcatagctctgaccagtagggaaaactcaagctgctggtgtgtgttctttcgtctcatttgga

SEQ ID NO: 66500 - DNA, 83 bp, Homo sapiens
tgtttctgcatagctctgaccagtagggaaaactcaagctgctggtgtgtgttctttcgtctcatttggagtcatctcatgac

SEQ ID NO: 66501 - DNA, 82 bp, Homo sapiens
tagctctgaccagtagggaaaactcaagctgctggtgtgtgttctttcgtctcatttggagtcatctcatgactgcctccta

SEQ ID NO: 66502 - DNA, 80 bp, Homo sapiens
agtagggaaaactcaagctgctggtgtgtgttctttcgtctcatttggagtcatctcatgactgcctcctagcaactcta

SEQ ID NO: 66503 - DNA, 80 bp, Homo sapiens
aaaactcaagctgctggtgtgtgttctttcgtctcatttggagtcatctcatgactgcctcctagcaactctatttgcct

SEQ ID NO: 66504 - DNA, 80 bp, Homo sapiens
ctggtgtgtgttctttcgtctcatttggagtcatctcatgactgcctcctagcaactctatttgccttgttcctgggaga

SEQ ID NO: 66505 - DNA, 83 bp, Homo sapiens
tgttctttcgtctcatttggagtcatctcatgactgcctcctagcaactctatttgccttgttcctgggagatgatatactga

SEQ ID NO: 66506 - DNA, 83 bp, Homo sapiens
tcgtctcatttggagtcatctcatgactgcctcctagcaactctatttgccttgttcctgggagatgatatactgagagaaaa

SEQ ID NO: 66507 - DNA, 82 bp, Homo sapiens
agtcatctcatgactgcctcctagcaactctatttgccttgttcctgggagatgatatactgagagaaaacaggagagcaac

SEQ ID NO: 66508 - DNA, 78 bp, Homo sapiens
actgcctcctagcaactctatttgccttgttcctgggagatgatatactgagagaaaacaggagagcaactggtagta

SEQ ID NO: 66509 - DNA, 78 bp, Homo sapiens
tagcaactctatttgccttgttcctgggagatgatatactgagagaaaacaggagagcaactggtagtaagaggtctg

SEQ ID NO: 66510 - DNA, 79 bp, Homo sapiens
tctatttgccttgttcctgggagatgatatactgagagaaaacaggagagcaactggtagtaagaggtctgtagcacaa

SEQ ID NO: 66511 - DNA, 78 bp, Homo sapiens
tcctgggagatgatatactgagagaaaacaggagagcaactggtagtaagaggtctgtagcacaaggttgagattaat

SEQ ID NO: 66512 - DNA, 74 bp, Homo sapiens
agagaaaacaggagagcaactggtagtaagaggtctgtagcacaaggttgagattaattcttcataaatactaa

SEQ ID NO: 66513 - DNA, 74 bp, Homo sapiens
aaacaggagagcaactggtagtaagaggtctgtagcacaaggttgagattaattcttcataaatactaagaaca

SEQ ID NO: 66514 - DNA, 76 bp, Homo sapiens
aactggtagtaagaggtctgtagcacaaggttgagattaattcttcataaatactaagaacagatttgtgctctga

SEQ ID NO: 66515 - DNA, 80 bp, Homo sapiens
taagaggtctgtagcacaaggttgagattaattcttcataaatactaagaacagatttgtgctctgaaatcagactcatg

SEQ ID NO: 66516 - DNA, 80 bp, Homo sapiens
ggttgagattaattcttcataaatactaagaacagatttgtgctctgaaatcagactcatggatgtgtgctttatattaa

SEQ ID NO: 66517 - DNA, 77 bp, Homo sapiens
cttcataaatactaagaacagatttgtgctctgaaatcagactcatggatgtgtgctttatattaaaaccccaattc

SEQ ID NO: 66518 - DNA, 76 bp, Homo sapiens
aacagatttgtgctctgaaatcagactcatggatgtgtgctttatattaaaaccccaattctgaaataactgttac

SEQ ID NO: 66519 - DNA, 71 bp, Homo sapiens
ctcatggatgtgtgctttatattaaaaccccaattctgaaataactgttactaaaaggttagaatcaaggc

SEQ ID NO: 66520 - DNA, 68 bp, Homo sapiens
attaaaaccccaattctgaaataactgttactaaaaggttagaatcaaggccctatggctgaggagaa

SEQ ID NO: 66521 - DNA, 70 bp, Homo sapiens
tgaaataactgttactaaaaggttagaatcaaggccctatggctgaggagaaggaaactagaaattacaa

SEQ ID NO: 66522 - DNA, 69 bp, Homo sapiens
ttactaaaaggttagaatcaaggccctatggctgaggagaaggaaactagaaattacaaactttgtgct

SEQ ID NO: 66523 - DNA, 71 bp, Homo sapiens
aggttagaatcaaggccctatggctgaggagaaggaaactagaaattacaaactttgtgcttttaggatga

SEQ ID NO: 66524 - DNA, 72 bp, Homo sapiens
ccctatggctgaggagaaggaaactagaaattacaaactttgtgcttttaggatgatggagttcagagtttc

SEQ ID NO: 66525 - DNA, 75 bp, Homo sapiens
tgaggagaaggaaactagaaattacaaactttgtgcttttaggatgatggagttcagagtttctttgccatcatg

SEQ ID NO: 66526 - DNA, 74 bp, Homo sapiens
ggaaactagaaattacaaactttgtgcttttaggatgatggagttcagagtttctttgccatcatgtagtatag

SEQ ID NO: 66527 - DNA, 75 bp, Homo sapiens
attacaaactttgtgcttttaggatgatggagttcagagtttctttgccatcatgtagtatagtttacccataga

SEQ ID NO: 66528 - DNA, 72 bp, Homo sapiens
gttcagagtttctttgccatcatgtagtatagtttacccatagaggaaatccttcaaaaaccttcattagaa

SEQ ID NO: 66529 - DNA, 70 bp, Homo sapiens
catgtagtatagtttacccatagaggaaatccttcaaaaaccttcattagaaaactgccacagtaagaag

SEQ ID NO: 66530 - DNA, 69 bp, Homo sapiens
acccatagaggaaatccttcaaaaaccttcattagaaaactgccacagtaagaagtcctgcttcttaaa

SEQ ID NO: 66531 - DNA, 73 bp, Homo sapiens
aaaaaccttcattagaaaactgccacagtaagaagtcctgcttcttaaagcagctgcttattcagctgttaag

SEQ ID NO: 66532 - DNA, 76 bp, Homo sapiens
attagaaaactgccacagtaagaagtcctgcttcttaaagcagctgcttattcagctgttaagttctactcctatg

SEQ ID NO: 66533 - DNA, 75 bp, Homo sapiens
acagtaagaagtcctgcttcttaaagcagctgcttattcagctgttaagttctactcctatggaagctattttac

SEQ ID NO: 66534 - DNA, 76 bp, Homo sapiens
tcctgcttcttaaagcagctgcttattcagctgttaagttctactcctatggaagctattttactgaacctaaatc

SEQ ID NO: 66535 - DNA, 74 bp, Homo sapiens
ttcttaaagcagctgcttattcagctgttaagttctactcctatggaagctattttactgaacctaaatctgtt

SEQ ID NO: 66536 - DNA, 74 bp, Homo sapiens
agctgcttattcagctgttaagttctactcctatggaagctattttactgaacctaaatctgtttctgtatttg

SEQ ID NO: 66537 - DNA, 72 bp, Homo sapiens
cagctgttaagttctactcctatggaagctattttactgaacctaaatctgtttctgtatttgtttccttca

SEQ ID NO: 66538 - DNA, 71 bp, Homo sapiens
agttctactcctatggaagctattttactgaacctaaatctgtttctgtatttgtttccttcatatgacgg

SEQ ID NO: 66539 - DNA, 73 bp, Homo sapiens
tggaagctattttactgaacctaaatctgtttctgtatttgtttccttcatatgacggtcaatacatcttccc

SEQ ID NO: 66540 - DNA, 73 bp, Homo sapiens
attttactgaacctaaatctgtttctgtatttgtttccttcatatgacggtcaatacatcttcccttctagca

SEQ ID NO: 66541 - DNA, 74 bp, Homo sapiens
gaacctaaatctgtttctgtatttgtttccttcatatgacggtcaatacatcttcccttctagcattaaatgtc

SEQ ID NO: 66542 - DNA, 78 bp, Homo sapiens
tctgtatttgtttccttcatatgacggtcaatacatcttcccttctagcattaaatgtcctcccagatctctcattct

SEQ ID NO: 66543 - DNA, 76 bp, Homo sapiens
atttgtttccttcatatgacggtcaatacatcttcccttctagcattaaatgtcctcccagatctctcattcttcc

SEQ ID NO: 66544 - DNA, 79 bp, Homo sapiens
atatgacggtcaatacatcttcccttctagcattaaatgtcctcccagatctctcattcttccctcttctgctctcatt

SEQ ID NO: 66545 - DNA, 78 bp, Homo sapiens
aatacatcttcccttctagcattaaatgtcctcccagatctctcattcttccctcttctgctctcatttgtactgtta

SEQ ID NO: 66546 - DNA, 78 bp, Homo sapiens
tcttcccttctagcattaaatgtcctcccagatctctcattcttccctcttctgctctcatttgtactgttagacttc

SEQ ID NO: 66547 - DNA, 74 bp, Homo sapiens
attaaatgtcctcccagatctctcattcttccctcttctgctctcatttgtactgttagacttcctccctcttt

SEQ ID NO: 66548 - DNA, 73 bp, Homo sapiens
tgtcctcccagatctctcattcttccctcttctgctctcatttgtactgttagacttcctccctctttttttt

SEQ ID NO: 66549 - DNA, 74 bp, Homo sapiens
gtgagccaccgtgtccgggcccctcatttttgttcctactcttgactcttcatcacagtgtctttccttacatc

SEQ ID NO: 66550 - DNA, 71 bp, Homo sapiens
accgtgtccgggcccctcatttttgttcctactcttgactcttcatcacagtgtctttccttacatcttcc

SEQ ID NO: 66551 - DNA, 77 bp, Homo sapiens
ccctcatttttgttcctactcttgactcttcatcacagtgtctttccttacatcttcctcagtgccttcacaatgta

SEQ ID NO: 66552 - DNA, 76 bp, Homo sapiens
atttttgttcctactcttgactcttcatcacagtgtctttccttacatcttcctcagtgccttcacaatgtaaata

SEQ ID NO: 66553 - DNA, 77 bp, Homo sapiens
cttgactcttcatcacagtgtctttccttacatcttcctcagtgccttcacaatgtaaatagaaatgaaacccacaa

SEQ ID NO: 66554 - DNA, 77 bp, Homo sapiens
tcttcatcacagtgtctttccttacatcttcctcagtgccttcacaatgtaaatagaaatgaaacccacaaataata

SEQ ID NO: 66555 - DNA, 74 bp, Homo sapiens
tctttccttacatcttcctcagtgccttcacaatgtaaatagaaatgaaacccacaaataatagcaagacaact

SEQ ID NO: 66556 - DNA, 73 bp, Homo sapiens
ccttacatcttcctcagtgccttcacaatgtaaatagaaatgaaacccacaaataatagcaagacaacttttc

SEQ ID NO: 66557 - DNA, 72 bp, Homo sapiens
ctcagtgccttcacaatgtaaatagaaatgaaacccacaaataatagcaagacaacttttctttactcctgt

SEQ ID NO: 66558 - DNA, 73 bp, Homo sapiens
cttcacaatgtaaatagaaatgaaacccacaaataatagcaagacaacttttctttactcctgttctctgtgc

SEQ ID NO: 66559 - DNA, 71 bp, Homo sapiens
atagaaatgaaacccacaaataatagcaagacaacttttctttactcctgttctctgtgcttttatcaaaa

SEQ ID NO: 66560 - DNA, 71 bp, Homo sapiens
gaaacccacaaataatagcaagacaacttttctttactcctgttctctgtgcttttatcaaaaatgtaata

SEQ ID NO: 66561 - DNA, 70 bp, Homo sapiens
aataatagcaagacaacttttctttactcctgttctctgtgcttttatcaaaaatgtaatattttaaaca

SEQ ID NO: 66562 - DNA, 71 bp, Homo sapiens
gacaacttttctttactcctgttctctgtgcttttatcaaaaatgtaatattttaaacaaatccatggcta

SEQ ID NO: 66563 - DNA, 77 bp, Homo sapiens
ttactcctgttctctgtgcttttatcaaaaatgtaatattttaaacaaatccatggctatttctgtgcagctgtgac

SEQ ID NO: 66564 - DNA, 77 bp, Homo sapiens
tctctgtgcttttatcaaaaatgtaatattttaaacaaatccatggctatttctgtgcagctgtgaccagtagggaa

SEQ ID NO: 66565 - DNA, 74 bp, Homo sapiens
tttatcaaaaatgtaatattttaaacaaatccatggctatttctgtgcagctgtgaccagtagggaaaactcca

SEQ ID NO: 66566 - DNA, 76 bp, Homo sapiens
aaaaatgtaatattttaaacaaatccatggctatttctgtgcagctgtgaccagtagggaaaactccagctgctga

SEQ ID NO: 66567 - DNA, 84 bp, Homo sapiens
aatccatggctatttctgtgcagctgtgaccagtagggaaaactccagctgctgatgactgtgctttgtcatatatttggagta

SEQ ID NO: 66568 - DNA, 78 bp, Homo sapiens
tgtgaccagtagggaaaactccagctgctgatgactgtgctttgtcatatatttggagtaatcccattattattaaaa

SEQ ID NO: 66569 - DNA, 76 bp, Homo sapiens
cagtagggaaaactccagctgctgatgactgtgctttgtcatatatttggagtaatcccattattattaaaataat

SEQ ID NO: 66570 - DNA, 75 bp, Homo sapiens
aaactccagctgctgatgactgtgctttgtcatatatttggagtaatcccattattattaaaataatttgaaaat

SEQ ID NO: 66571 - DNA, 68 bp, Homo sapiens
atttgaaaattatttttgccccaagacacaaaagctgaaatactcttttcacaaagtattattggtag

SEQ ID NO: 66572 - DNA, 70 bp, Homo sapiens
tatttttgccccaagacacaaaagctgaaatactcttttcacaaagtattattggtaggttagtagtgat

SEQ ID NO: 66573 - DNA, 70 bp, Homo sapiens
cccaagacacaaaagctgaaatactcttttcacaaagtattattggtaggttagtagtgatttataaata

SEQ ID NO: 66574 - DNA, 70 bp, Homo sapiens
acacaaaagctgaaatactcttttcacaaagtattattggtaggttagtagtgatttataaatatataat

SEQ ID NO: 66575 - DNA, 70 bp, Homo sapiens
tgaaatactcttttcacaaagtattattggtaggttagtagtgatttataaatatataattaggatttat

SEQ ID NO: 66576 - DNA, 70 bp, Homo sapiens
tttcacaaagtattattggtaggttagtagtgatttataaatatataattaggatttatttttctcagtg

SEQ ID NO: 66577 - DNA, 70 bp, Homo sapiens
ttataaatatataattaggatttatttttctcagtgtttcttcattgcttggcccctttctaaccttcat

SEQ ID NO: 66578 - DNA, 78 bp, Homo sapiens
tcagtgtttcttcattgcttggcccctttctaaccttcattgactgaaagcagatgtttatatcaccatctctgattt

SEQ ID NO: 66579 - DNA, 79 bp, Homo sapiens
ttcttcattgcttggcccctttctaaccttcattgactgaaagcagatgtttatatcaccatctctgattttgcagaat

SEQ ID NO: 66580 - DNA, 80 bp, Homo sapiens
tggcccctttctaaccttcattgactgaaagcagatgtttatatcaccatctctgattttgcagaattgatctgtcctta

SEQ ID NO: 66581 - DNA, 83 bp, Homo sapiens
ttctaaccttcattgactgaaagcagatgtttatatcaccatctctgattttgcagaattgatctgtccttacactgcattta

SEQ ID NO: 66582 - DNA, 86 bp, Homo sapiens
attgactgaaagcagatgtttatatcaccatctctgattttgcagaattgatctgtccttacactgcatttagcattgattgtgta

SEQ ID NO: 66583 - DNA, 85 bp, Homo sapiens
cagatgtttatatcaccatctctgattttgcagaattgatctgtccttacactgcatttagcattgattgtgtatggaacataaa

SEQ ID NO: 66584 - DNA, 84 bp, Homo sapiens
ttatatcaccatctctgattttgcagaattgatctgtccttacactgcatttagcattgattgtgtatggaacataaattgctt

SEQ ID NO: 66585 - DNA, 87 bp, Homo sapiens
tctgattttgcagaattgatctgtccttacactgcatttagcattgattgtgtatggaacataaattgcttttctgatgcatatgta

SEQ ID NO: 66586 - DNA, 85 bp, Homo sapiens
ttgatctgtccttacactgcatttagcattgattgtgtatggaacataaattgcttttctgatgcatatgtattccatagctctt

SEQ ID NO: 66587 - DNA, 83 bp, Homo sapiens
cttacactgcatttagcattgattgtgtatggaacataaattgcttttctgatgcatatgtattccatagctctttgaatttg

SEQ ID NO: 66588 - DNA, 83 bp, Homo sapiens
tttagcattgattgtgtatggaacataaattgcttttctgatgcatatgtattccatagctctttgaatttgtgactgtgtac

SEQ ID NO: 66589 - DNA, 81 bp, Homo sapiens
gattgtgtatggaacataaattgcttttctgatgcatatgtattccatagctctttgaatttgtgactgtgtactataacc

SEQ ID NO: 66590 - DNA, 78 bp, Homo sapiens
ggaacataaattgcttttctgatgcatatgtattccatagctctttgaatttgtgactgtgtactataacctatttaa

SEQ ID NO: 66591 - DNA, 78 bp, Homo sapiens
gcttttctgatgcatatgtattccatagctctttgaatttgtgactgtgtactataacctatttaattgaaaagaatg

SEQ ID NO: 66592 - DNA, 78 bp, Homo sapiens
gatgcatatgtattccatagctctttgaatttgtgactgtgtactataacctatttaattgaaaagaatgtgctaaaa

SEQ ID NO: 66593 - DNA, 73 bp, Homo sapiens
ccatagctctttgaatttgtgactgtgtactataacctatttaattgaaaagaatgtgctaaaatttagtcat

SEQ ID NO: 66594 - DNA, 75 bp, Homo sapiens
ttgaatttgtgactgtgtactataacctatttaattgaaaagaatgtgctaaaatttagtcattgtccattctgc

SEQ ID NO: 66595 - DNA, 74 bp, Homo sapiens
gtgactgtgtactataacctatttaattgaaaagaatgtgctaaaatttagtcattgtccattctgctaacaaa

SEQ ID NO: 66596 - DNA, 72 bp, Homo sapiens
gtactataacctatttaattgaaaagaatgtgctaaaatttagtcattgtccattctgctaacaaaagcagt

SEQ ID NO: 66597 - DNA, 75 bp, Homo sapiens
taattgaaaagaatgtgctaaaatttagtcattgtccattctgctaacaaaagcagttaaaacatgctagagaaa

SEQ ID NO: 66598 - DNA, 77 bp, Homo sapiens
aaagaatgtgctaaaatttagtcattgtccattctgctaacaaaagcagttaaaacatgctagagaaatatatcaga

SEQ ID NO: 66599 - DNA, 73 bp, Homo sapiens
ttctgctaacaaaagcagttaaaacatgctagagaaatatatcagaattttaagaaagaggccggatttggtg

SEQ ID NO: 66600 - DNA, 74 bp, Homo sapiens
aacaaaagcagttaaaacatgctagagaaatatatcagaattttaagaaagaggccggatttggtggctcatgc

SEQ ID NO: 66601 - DNA, 73 bp, Homo sapiens
ggcgacagagcaaagctttttgctcaaacaactggtaaaatggagttgcagttatctaacataggaaaactgt

SEQ ID NO: 66602 - DNA, 71 bp, Homo sapiens
aaagctttttgctcaaacaactggtaaaatggagttgcagttatctaacataggaaaactgttgctacttg

SEQ ID NO: 66603 - DNA, 71 bp, Homo sapiens
tttttgctcaaacaactggtaaaatggagttgcagttatctaacataggaaaactgttgctacttgggaag

SEQ ID NO: 66604 - DNA, 72 bp, Homo sapiens
aacaactggtaaaatggagttgcagttatctaacataggaaaactgttgctacttgggaaggtgaggcagga

SEQ ID NO: 66605 - DNA, 75 bp, Homo sapiens
taataataattagttaattcatggaaagtacttagtaccacattctggatacaaacagatatttgtgcttggcca

SEQ ID NO: 66606 - DNA, 75 bp, Homo sapiens
ttagttaattcatggaaagtacttagtaccacattctggatacaaacagatatttgtgcttggccaacatttgga

SEQ ID NO: 66607 - DNA, 76 bp, Homo sapiens
attcatggaaagtacttagtaccacattctggatacaaacagatatttgtgcttggccaacatttggaggcagtaa

SEQ ID NO: 66608 - DNA, 76 bp, Homo sapiens
tacttagtaccacattctggatacaaacagatatttgtgcttggccaacatttggaggcagtaaagaaagcttata

SEQ ID NO: 66609 - DNA, 77 bp, Homo sapiens
cattctggatacaaacagatatttgtgcttggccaacatttggaggcagtaaagaaagcttatagaataaccacata

SEQ ID NO: 66610 - DNA, 77 bp, Homo sapiens
tggatacaaacagatatttgtgcttggccaacatttggaggcagtaaagaaagcttatagaataaccacatattaga

SEQ ID NO: 66611 - DNA, 76 bp, Homo sapiens
gatacaaacagatatttgtgcttggccaacatttggaggcagtaaagaaagcttatagaataaccacatattagaa

SEQ ID NO: 66612 - DNA, 74 bp, Homo sapiens
aacagatatttgtgcttggccaacatttggaggcagtaaagaaagcttatagaataaccacatattagaacttg

SEQ ID NO: 66613 - DNA, 75 bp, Homo sapiens
agatatttgtgcttggccaacatttggaggcagtaaagaaagcttatagaataaccacatattagaacttgtgaa

SEQ ID NO: 66614 - DNA, 74 bp, Homo sapiens
atttgtgcttggccaacatttggaggcagtaaagaaagcttatagaataaccacatattagaacttgtgaagga

SEQ ID NO: 66615 - DNA, 72 bp, Homo sapiens
cttggccaacatttggaggcagtaaagaaagcttatagaataaccacatattagaacttgtgaaggagaaaa

SEQ ID NO: 66616 - DNA, 73 bp, Homo sapiens
ggccaacatttggaggcagtaaagaaagcttatagaataaccacatattagaacttgtgaaggagaaaatata

SEQ ID NO: 66617 - DNA, 74 bp, Homo sapiens
acatttggaggcagtaaagaaagcttatagaataaccacatattagaacttgtgaaggagaaaatatacatata

SEQ ID NO: 66618 - DNA, 72 bp, Homo sapiens
tgtatatatatagtctctctattaagtaatttaccataaggggtttaaataggaatgttgactccaaagtga

SEQ ID NO: 66619 - DNA, 70 bp, Homo sapiens
atagtctctctattaagtaatttaccataaggggtttaaataggaatgttgactccaaagtgaatcttga

SEQ ID NO: 66620 - DNA, 67 bp, Homo sapiens
attaagtaatttaccataaggggtttaaataggaatgttgactccaaagtgaatcttgaaatcttgg

SEQ ID NO: 66621 - DNA, 68 bp, Homo sapiens
gtaatttaccataaggggtttaaataggaatgttgactccaaagtgaatcttgaaatcttggtgttta

SEQ ID NO: 66622 - DNA, 70 bp, Homo sapiens
gggtttaaataggaatgttgactccaaagtgaatcttgaaatcttggtgtttataattgtcaagcctctt

SEQ ID NO: 66623 - DNA, 71 bp, Homo sapiens
taaataggaatgttgactccaaagtgaatcttgaaatcttggtgtttataattgtcaagcctcttttttta

SEQ ID NO: 66624 - DNA, 69 bp, Homo sapiens
gactccaaagtgaatcttgaaatcttggtgtttataattgtcaagcctctttttttaaaatagatttgg

SEQ ID NO: 66625 - DNA, 70 bp, Homo sapiens
agtgaatcttgaaatcttggtgtttataattgtcaagcctctttttttaaaatagatttggtcaacagga

SEQ ID NO: 66626 - DNA, 67 bp, Homo sapiens
gaaatcttggtgtttataattgtcaagcctctttttttaaaatagatttggtcaacaggaagtattt

SEQ ID NO: 66627 - DNA, 66 bp, Homo sapiens
ggtgtttataattgtcaagcctctttttttaaaatagatttggtcaacaggaagtatttttttcta

SEQ ID NO: 66628 - DNA, 69 bp, Homo sapiens
aatttttattttatagacctagtcaagcttcttaattgttaaatattgttataacaatacatctgggcc

SEQ ID NO: 66629 - DNA, 71 bp, Homo sapiens
ttattttatagacctagtcaagcttcttaattgttaaatattgttataacaatacatctgggccgggcgcg

SEQ ID NO: 66630 - DNA, 72 bp, Homo sapiens
aaaaaagcatctgggaatataagtgcacccaggactctaattttatatttctatttttaacatatgagacaa

SEQ ID NO: 66631 - DNA, 75 bp, Homo sapiens
gcatctgggaatataagtgcacccaggactctaattttatatttctatttttaacatatgagacaatactttatc

SEQ ID NO: 66632 - DNA, 72 bp, Homo sapiens
taagtgcacccaggactctaattttatatttctatttttaacatatgagacaatactttatccataataaag

SEQ ID NO: 66633 - DNA, 73 bp, Homo sapiens
cacccaggactctaattttatatttctatttttaacatatgagacaatactttatccataataaagtgctaca

SEQ ID NO: 66634 - DNA, 73 bp, Homo sapiens
ctaattttatatttctatttttaacatatgagacaatactttatccataataaagtgctacatttttcagtca

SEQ ID NO: 66635 - DNA, 75 bp, Homo sapiens
ctatttttaacatatgagacaatactttatccataataaagtgctacatttttcagtcatataattagtagaaca

SEQ ID NO: 66636 - DNA, 80 bp, Homo sapiens
catatgagacaatactttatccataataaagtgctacatttttcagtcatataattagtagaacatatacttctctgtga

SEQ ID NO: 66637 - DNA, 79 bp, Homo sapiens
gagacaatactttatccataataaagtgctacatttttcagtcatataattagtagaacatatacttctctgtgattca

SEQ ID NO: 66638 - DNA, 75 bp, Homo sapiens
tttatccataataaagtgctacatttttcagtcatataattagtagaacatatacttctctgtgattcagttttt

SEQ ID NO: 66639 - DNA, 74 bp, Homo sapiens
ataaagtgctacatttttcagtcatataattagtagaacatatacttctctgtgattcagtttttttatttgta

SEQ ID NO: 66640 - DNA, 73 bp, Homo sapiens
acatttttcagtcatataattagtagaacatatacttctctgtgattcagtttttttatttgtaaaatagaga

SEQ ID NO: 66641 - DNA, 75 bp, Homo sapiens
tcatataattagtagaacatatacttctctgtgattcagtttttttatttgtaaaatagagataaataatagcac

SEQ ID NO: 66642 - DNA, 75 bp, Homo sapiens
tagaacatatacttctctgtgattcagtttttttatttgtaaaatagagataaataatagcacttatgtcatagg

SEQ ID NO: 66643 - DNA, 73 bp, Homo sapiens
ttctctgtgattcagtttttttatttgtaaaatagagataaataatagcacttatgtcataggttgttgggag

SEQ ID NO: 66644 - DNA, 71 bp, Homo sapiens
gtgattcagtttttttatttgtaaaatagagataaataatagcacttatgtcataggttgttgggagggat

SEQ ID NO: 66645 - DNA, 72 bp, Homo sapiens
ttatttgtaaaatagagataaataatagcacttatgtcataggttgttgggagggattaaattagttctagc

SEQ ID NO: 66646 - DNA, 73 bp, Homo sapiens
aatagagataaataatagcacttatgtcataggttgttgggagggattaaattagttctagccaggtcctatg

SEQ ID NO: 66647 - DNA, 76 bp, Homo sapiens
agataaataatagcacttatgtcataggttgttgggagggattaaattagttctagccaggtcctatggcatgtgc

SEQ ID NO: 66648 - DNA, 74 bp, Homo sapiens
acttatgtcataggttgttgggagggattaaattagttctagccaggtcctatggcatgtgcccatagttctag

SEQ ID NO: 66649 - DNA, 72 bp, Homo sapiens
ataggttgttgggagggattaaattagttctagccaggtcctatggcatgtgcccatagttctagttacttg

SEQ ID NO: 66650 - DNA, 78 bp, Homo sapiens
aggcaggaggattggtttagtccaggaatttgaggctgtaatgtgctatgttcgtacctgtgaatagccgctgcagtc

SEQ ID NO: 66651 - DNA, 76 bp, Homo sapiens
attggtttagtccaggaatttgaggctgtaatgtgctatgttcgtacctgtgaatagccgctgcagtccagcccgg

SEQ ID NO: 66652 - DNA, 75 bp, Homo sapiens
gaccccatctctctaaaaaattatttaattcatggaaagtacttacaacagtgcccgcagacagctgatactcaa

SEQ ID NO: 66653 - DNA, 76 bp, Homo sapiens
catctctctaaaaaattatttaattcatggaaagtacttacaacagtgcccgcagacagctgatactcaataaatg

SEQ ID NO: 66654 - DNA, 77 bp, Homo sapiens
ttatttaattcatggaaagtacttacaacagtgcccgcagacagctgatactcaataaatgtcagctattactaaaa

SEQ ID NO: 66655 - DNA, 78 bp, Homo sapiens
taattcatggaaagtacttacaacagtgcccgcagacagctgatactcaataaatgtcagctattactaaaaggaaga

SEQ ID NO: 66656 - DNA, 75 bp, Homo sapiens
aaagtacttacaacagtgcccgcagacagctgatactcaataaatgtcagctattactaaaaggaagagtttgct

SEQ ID NO: 66657 - DNA, 77 bp, Homo sapiens
aacagtgcccgcagacagctgatactcaataaatgtcagctattactaaaaggaagagtttgcttctaaggcacttg

SEQ ID NO: 66658 - DNA, 76 bp, Homo sapiens
acagctgatactcaataaatgtcagctattactaaaaggaagagtttgcttctaaggcacttggctaatgtgttaa

SEQ ID NO: 66659 - DNA, 72 bp, Homo sapiens
ctcaataaatgtcagctattactaaaaggaagagtttgcttctaaggcacttggctaatgtgttaaagttaa

SEQ ID NO: 66660 - DNA, 70 bp, Homo sapiens
gtcagctattactaaaaggaagagtttgcttctaaggcacttggctaatgtgttaaagttaaatcctctt

SEQ ID NO: 66661 - DNA, 67 bp, Homo sapiens
actaaaaggaagagtttgcttctaaggcacttggctaatgtgttaaagttaaatcctctttttccaa

SEQ ID NO: 66662 - DNA, 67 bp, Homo sapiens
aaggaagagtttgcttctaaggcacttggctaatgtgttaaagttaaatcctctttttccaaaactg

SEQ ID NO: 66663 - DNA, 69 bp, Homo sapiens
gcttctaaggcacttggctaatgtgttaaagttaaatcctctttttccaaaactgtaaatatagatttg

SEQ ID NO: 66664 - DNA, 68 bp, Homo sapiens
ggcacttggctaatgtgttaaagttaaatcctctttttccaaaactgtaaatatagatttgttgtggg

SEQ ID NO: 66665 - DNA, 64 bp, Homo sapiens
taatgtgttaaagttaaatcctctttttccaaaactgtaaatatagatttgttgtggggttttt

SEQ ID NO: 66666 - DNA, 74 bp, Homo sapiens
ccactgcgcccagtgctagatttgttgttatttcttatgtagtacatatttatggtgattttcttttgaataaa

SEQ ID NO: 66667 - DNA, 73 bp, Homo sapiens
cgcccagtgctagatttgttgttatttcttatgtagtacatatttatggtgattttcttttgaataaaaatga

SEQ ID NO: 66668 - DNA, 70 bp, Homo sapiens
gatttgttgttatttcttatgtagtacatatttatggtgattttcttttgaataaaaatgatttttattc

SEQ ID NO: 66669 - DNA, 69 bp, Homo sapiens
gttatttcttatgtagtacatatttatggtgattttcttttgaataaaaatgatttttattcttgattt

SEQ ID NO: 66670 - DNA, 68 bp, Homo sapiens
tgtagtacatatttatggtgattttcttttgaataaaaatgatttttattcttgatttttaaggaaac

SEQ ID NO: 66671 - DNA, 66 bp, Homo sapiens
tatttatggtgattttcttttgaataaaaatgatttttattcttgatttttaaggaaactttagta

SEQ ID NO: 66672 - DNA, 68 bp, Homo sapiens
tcttttgaataaaaatgatttttattcttgatttttaaggaaactttagtaaaatatgtcagacataa

SEQ ID NO: 66673 - DNA, 65 bp, Homo sapiens
aaaaatgatttttattcttgatttttaaggaaactttagtaaaatatgtcagacataattttaat

SEQ ID NO: 66674 - DNA, 65 bp, Homo sapiens
gatttttattcttgatttttaaggaaactttagtaaaatatgtcagacataattttaattggttt

SEQ ID NO: 66675 - DNA, 65 bp, Homo sapiens
ttgatttttaaggaaactttagtaaaatatgtcagacataattttaattggtttttttttgcctg

SEQ ID NO: 66676 - DNA, 69 bp, Homo sapiens
ggaaactttagtaaaatatgtcagacataattttaattggtttttttttgcctgttacatgtgactata

SEQ ID NO: 66677 - DNA, 71 bp, Homo sapiens
gtaaaatatgtcagacataattttaattggtttttttttgcctgttacatgtgactatattggctgaaaac

SEQ ID NO: 66678 - DNA, 69 bp, Homo sapiens
gtcagacataattttaattggtttttttttgcctgttacatgtgactatattggctgaaaactttttag

SEQ ID NO: 66679 - DNA, 67 bp, Homo sapiens
attttaattggtttttttttgcctgttacatgtgactatattggctgaaaactttttagttatgaag

SEQ ID NO: 66680 - DNA, 72 bp, Homo sapiens
tttttttgcctgttacatgtgactatattggctgaaaactttttagttatgaagtttttctgtgtgctactg

SEQ ID NO: 66681 - DNA, 75 bp, Homo sapiens
ttgcctgttacatgtgactatattggctgaaaactttttagttatgaagtttttctgtgtgctactgtcttgtat

SEQ ID NO: 66682 - DNA, 75 bp, Homo sapiens
tgcctgttacatgtgactatattggctgaaaactttttagttatgaagtttttctgtgtgctactgtcttgtatt

SEQ ID NO: 66683 - DNA, 73 bp, Homo sapiens
gttacatgtgactatattggctgaaaactttttagttatgaagtttttctgtgtgctactgtcttgtattttg

SEQ ID NO: 66684 - DNA, 73 bp, Homo sapiens
gactatattggctgaaaactttttagttatgaagtttttctgtgtgctactgtcttgtattttgtatatctag

SEQ ID NO: 66685 - DNA, 72 bp, Homo sapiens
gctgaaaactttttagttatgaagtttttctgtgtgctactgtcttgtattttgtatatctagtattttgat

SEQ ID NO: 66686 - DNA, 73 bp, Homo sapiens
tgaagtttttctgtgtgctactgtcttgtattttgtatatctagtattttgattgtcaaaacactttttgacc

SEQ ID NO: 66687 - DNA, 71 bp, Homo sapiens
agtttttctgtgtgctactgtcttgtattttgtatatctagtattttgattgtcaaaacactttttgaccc

SEQ ID NO: 66688 - DNA, 74 bp, Homo sapiens
tgtgtgctactgtcttgtattttgtatatctagtattttgattgtcaaaacactttttgaccccaaattatgat

SEQ ID NO: 66689 - DNA, 75 bp, Homo sapiens
tgtattttgtatatctagtattttgattgtcaaaacactttttgaccccaaattatgattttgtcattgcaggca

SEQ ID NO: 66690 - DNA, 75 bp, Homo sapiens
gtatatctagtattttgattgtcaaaacactttttgaccccaaattatgattttgtcattgcaggcaagaagaca

SEQ ID NO: 66691 - DNA, 72 bp, Homo sapiens
attttgattgtcaaaacactttttgaccccaaattatgattttgtcattgcaggcaagaagacaacaagacc

SEQ ID NO: 66692 - DNA, 72 bp, Homo sapiens
attgtcaaaacactttttgaccccaaattatgattttgtcattgcaggcaagaagacaacaagaccctagtc

SEQ ID NO: 66693 - DNA, 73 bp, Homo sapiens
aaattatgattttgtcattgcaggcaagaagacaacaagaccctagtcctggttccaatttaggtggtggtga

SEQ ID NO: 66694 - DNA, 74 bp, Homo sapiens
ttttgtcattgcaggcaagaagacaacaagaccctagtcctggttccaatttaggtggtggtgatgacctcaaa

SEQ ID NO: 66695 - DNA, 70 bp, Homo sapiens
aggcaagaagacaacaagaccctagtcctggttccaatttaggtggtggtgatgacctcaaacttcgtta

SEQ ID NO: 66696 - DNA, 72 bp, Homo sapiens
aagaccctagtcctggttccaatttaggtggtggtgatgacctcaaacttcgttaattaatagcacagcaga

SEQ ID NO: 66697 - DNA, 78 bp, Homo sapiens
tggttccaatttaggtggtggtgatgacctcaaacttcgttaattaatagcacagcagatgtgtgctgcccatcttta

SEQ ID NO: 66698 - DNA, 79 bp, Homo sapiens
aatttaggtggtggtgatgacctcaaacttcgttaattaatagcacagcagatgtgtgctgcccatctttacatacaca

SEQ ID NO: 66699 - DNA, 84 bp, Homo sapiens
tgatgacctcaaacttcgttaattaatagcacagcagatgtgtgctgcccatctttacatacacattgcttctagttggcagaa

SEQ ID NO: 66700 - DNA, 79 bp, Homo sapiens
aaacttcgttaattaatagcacagcagatgtgtgctgcccatctttacatacacattgcttctagttggcagaaataat

SEQ ID NO: 66701 - DNA, 81 bp, Homo sapiens
gttaattaatagcacagcagatgtgtgctgcccatctttacatacacattgcttctagttggcagaaataattgattaaaa

SEQ ID NO: 66702 - DNA, 80 bp, Homo sapiens
acagcagatgtgtgctgcccatctttacatacacattgcttctagttggcagaaataattgattaaaagaccagaaactg

SEQ ID NO: 66703 - DNA, 79 bp, Homo sapiens
atgtgtgctgcccatctttacatacacattgcttctagttggcagaaataattgattaaaagaccagaaactgtgataa

SEQ ID NO: 66704 - DNA, 76 bp, Homo sapiens
catctttacatacacattgcttctagttggcagaaataattgattaaaagaccagaaactgtgataactggaggta

SEQ ID NO: 66705 - DNA, 74 bp, Homo sapiens
acatacacattgcttctagttggcagaaataattgattaaaagaccagaaactgtgataactggaggtactacg

SEQ ID NO: 66706 - DNA, 71 bp, Homo sapiens
cttctagttggcagaaataattgattaaaagaccagaaactgtgataactggaggtactacggtctatttc

SEQ ID NO: 66707 - DNA, 71 bp, Homo sapiens
attgattaaaagaccagaaactgtgataactggaggtactacggtctatttctcaaccttaggcagtaata

SEQ ID NO: 66708 - DNA, 73 bp, Homo sapiens
aagaccagaaactgtgataactggaggtactacggtctatttctcaaccttaggcagtaatagacatcacaaa

SEQ ID NO: 66709 - DNA, 74 bp, Homo sapiens
actgtgataactggaggtactacggtctatttctcaaccttaggcagtaatagacatcacaaactgccatggtt

SEQ ID NO: 66710 - DNA, 76 bp, Homo sapiens
aggtactacggtctatttctcaaccttaggcagtaatagacatcacaaactgccatggttttgcactatgattata

SEQ ID NO: 66711 - DNA, 80 bp, Homo sapiens
tctatttctcaaccttaggcagtaatagacatcacaaactgccatggttttgcactatgattataatacctgcatttcta

SEQ ID NO: 66712 - DNA, 78 bp, Homo sapiens
ttctcaaccttaggcagtaatagacatcacaaactgccatggttttgcactatgattataatacctgcatttctaatt

SEQ ID NO: 66713 - DNA, 78 bp, Homo sapiens
aggcagtaatagacatcacaaactgccatggttttgcactatgattataatacctgcatttctaattttttaagcatg

SEQ ID NO: 66714 - DNA, 72 bp, Homo sapiens
ggttttgcactatgattataatacctgcatttctaattttttaagcatgtagccagtaataatttgaagttt

SEQ ID NO: 66715 - DNA, 72 bp, Homo sapiens
ttataatacctgcatttctaattttttaagcatgtagccagtaataatttgaagttttttttctatgcaagc

SEQ ID NO: 66716 - DNA, 71 bp, Homo sapiens
ctgcatttctaattttttaagcatgtagccagtaataatttgaagttttttttctatgcaagcttaccttg

SEQ ID NO: 66717 - DNA, 70 bp, Homo sapiens
ctaattttttaagcatgtagccagtaataatttgaagttttttttctatgcaagcttaccttgttggcat

SEQ ID NO: 66718 - DNA, 71 bp, Homo sapiens
agcatgtagccagtaataatttgaagttttttttctatgcaagcttaccttgttggcattattttagggag

SEQ ID NO: 66719 - DNA, 69 bp, Homo sapiens
gccagtaataatttgaagttttttttctatgcaagcttaccttgttggcattattttagggagttgaaa

SEQ ID NO: 66720 - DNA, 69 bp, Homo sapiens
gaagttttttttctatgcaagcttaccttgttggcattattttagggagttgaaactatcaactgtaaa

SEQ ID NO: 66721 - DNA, 71 bp, Homo sapiens
ttttctatgcaagcttaccttgttggcattattttagggagttgaaactatcaactgtaaagctccttttc

SEQ ID NO: 66722 - DNA, 68 bp, Homo sapiens
aagcttaccttgttggcattattttagggagttgaaactatcaactgtaaagctccttttcttccact

SEQ ID NO: 66723 - DNA, 67 bp, Homo sapiens
ccttgttggcattattttagggagttgaaactatcaactgtaaagctccttttcttccactttaatt

SEQ ID NO: 66724 - DNA, 68 bp, Homo sapiens
ttttagggagttgaaactatcaactgtaaagctccttttcttccactttaatttaaaagttcatgtca

SEQ ID NO: 66725 - DNA, 68 bp, Homo sapiens
ggagttgaaactatcaactgtaaagctccttttcttccactttaatttaaaagttcatgtcatttaaa

SEQ ID NO: 66726 - DNA, 68 bp, Homo sapiens
ctatcaactgtaaagctccttttcttccactttaatttaaaagttcatgtcatttaaaaacaagtcaa

SEQ ID NO: 66727 - DNA, 65 bp, Homo sapiens
aagctccttttcttccactttaatttaaaagttcatgtcatttaaaaacaagtcaagaaattaaa

SEQ ID NO: 66728 - DNA, 69 bp, Homo sapiens
tttaaaagttcatgtcatttaaaaacaagtcaagaaattaaaattgtatcagagggttttctctaatca

SEQ ID NO: 66729 - DNA, 66 bp, Homo sapiens
catttaaaaacaagtcaagaaattaaaattgtatcagagggttttctctaatcattttttctattt

SEQ ID NO: 66730 - DNA, 69 bp, Homo sapiens
tttttttttgtacttctagatgttttggttatacagcttcattttagatgagcattcttattttttgtt

SEQ ID NO: 66731 - DNA, 72 bp, Homo sapiens
tgttttgtttgccccatttccttttgtgtttttatagtctatagcattttaaaactgctgatgttgtttgca

SEQ ID NO: 66732 - DNA, 72 bp, Homo sapiens
gccccatttccttttgtgtttttatagtctatagcattttaaaactgctgatgttgtttgcattatttacag

SEQ ID NO: 66733 - DNA, 71 bp, Homo sapiens
cttttgtgtttttatagtctatagcattttaaaactgctgatgttgtttgcattatttacaggctaaaaac

SEQ ID NO: 66734 - DNA, 76 bp, Homo sapiens
tttatagtctatagcattttaaaactgctgatgttgtttgcattatttacaggctaaaaacttagtagcatagagc

SEQ ID NO: 66735 - DNA, 78 bp, Homo sapiens
agtctatagcattttaaaactgctgatgttgtttgcattatttacaggctaaaaacttagtagcatagagctgtctgc

SEQ ID NO: 66736 - DNA, 76 bp, Homo sapiens
attttaaaactgctgatgttgtttgcattatttacaggctaaaaacttagtagcatagagctgtctgccacagcct

SEQ ID NO: 66737 - DNA, 77 bp, Homo sapiens
atgttgtttgcattatttacaggctaaaaacttagtagcatagagctgtctgccacagccttctgacaaagtttaca

SEQ ID NO: 66738 - DNA, 75 bp, Homo sapiens
cattatttacaggctaaaaacttagtagcatagagctgtctgccacagccttctgacaaagtttacagttattaa

SEQ ID NO: 66739 - DNA, 73 bp, Homo sapiens
tttacaggctaaaaacttagtagcatagagctgtctgccacagccttctgacaaagtttacagttattaaagt

SEQ ID NO: 66740 - DNA, 75 bp, Homo sapiens
atagagctgtctgccacagccttctgacaaagtttacagttattaaagttgcagtatccttttaaatgctagtaa

SEQ ID NO: 66741 - DNA, 75 bp, Homo sapiens
tgccacagccttctgacaaagtttacagttattaaagttgcagtatccttttaaatgctagtaatcagcactctt

SEQ ID NO: 66742 - DNA, 73 bp, Homo sapiens
cagccttctgacaaagtttacagttattaaagttgcagtatccttttaaatgctagtaatcagcactctttct

SEQ ID NO: 66743 - DNA, 68 bp, Homo sapiens
acaaagtttacagttattaaagttgcagtatccttttaaatgctagtaatcagcactctttctttttt

SEQ ID NO: 66744 - DNA, 66 bp, Homo sapiens
gggattacaggctctttctttttaaacataaaagttttaaattggtattaactctgtactctgccc

SEQ ID NO: 66745 - DNA, 67 bp, Homo sapiens
caggctctttctttttaaacataaaagttttaaattggtattaactctgtactctgccctagattgt

SEQ ID NO: 66746 - DNA, 69 bp, Homo sapiens
ttaaacataaaagttttaaattggtattaactctgtactctgccctagattgttttagcttctgttctg

SEQ ID NO: 66747 - DNA, 71 bp, Homo sapiens
aagttttaaattggtattaactctgtactctgccctagattgttttagcttctgttctgtaatcatgagtt

SEQ ID NO: 66748 - DNA, 74 bp, Homo sapiens
ttaaattggtattaactctgtactctgccctagattgttttagcttctgttctgtaatcatgagtttggttgga

SEQ ID NO: 66749 - DNA, 78 bp, Homo sapiens
tattaactctgtactctgccctagattgttttagcttctgttctgtaatcatgagtttggttggagatattctccata

SEQ ID NO: 66750 - DNA, 77 bp, Homo sapiens
attaactctgtactctgccctagattgttttagcttctgttctgtaatcatgagtttggttggagatattctccata

SEQ ID NO: 66751 - DNA, 81 bp, Homo sapiens
tgtactctgccctagattgttttagcttctgttctgtaatcatgagtttggttggagatattctccatagatgatcttcta

SEQ ID NO: 66752 - DNA, 79 bp, Homo sapiens
ttgttttagcttctgttctgtaatcatgagtttggttggagatattctccatagatgatcttctactgaaatgcctaaa

SEQ ID NO: 66753 - DNA, 79 bp, Homo sapiens
ttttagcttctgttctgtaatcatgagtttggttggagatattctccatagatgatcttctactgaaatgcctaaagaa

SEQ ID NO: 66754 - DNA, 82 bp, Homo sapiens
tctgttctgtaatcatgagtttggttggagatattctccatagatgatcttctactgaaatgcctaaagaagtcacaggctg

SEQ ID NO: 66755 - DNA, 81 bp, Homo sapiens
taatcatgagtttggttggagatattctccatagatgatcttctactgaaatgcctaaagaagtcacaggctggcttctgt

SEQ ID NO: 66756 - DNA, 78 bp, Homo sapiens
atgagtttggttggagatattctccatagatgatcttctactgaaatgcctaaagaagtcacaggctggcttctgttt

SEQ ID NO: 66757 - DNA, 79 bp, Homo sapiens
ttggttggagatattctccatagatgatcttctactgaaatgcctaaagaagtcacaggctggcttctgttttattcag

SEQ ID NO: 66758 - DNA, 76 bp, Homo sapiens
atattctccatagatgatcttctactgaaatgcctaaagaagtcacaggctggcttctgttttattcagggatttt

SEQ ID NO: 66759 - DNA, 72 bp, Homo sapiens
agatgatcttctactgaaatgcctaaagaagtcacaggctggcttctgttttattcagggatttttttaaaa

SEQ ID NO: 66760 - DNA, 73 bp, Homo sapiens
gatttttttaaaaagtcaatcagaaaagggatactggagcttcttcatgtatgtaacagcatattaaactgga

SEQ ID NO: 66761 - DNA, 80 bp, Homo sapiens
aatcagaaaagggatactggagcttcttcatgtatgtaacagcatattaaactggagacagtgatgaatcagctacaaag

SEQ ID NO: 66762 - DNA, 81 bp, Homo sapiens
atactggagcttcttcatgtatgtaacagcatattaaactggagacagtgatgaatcagctacaaaggtaatattgtatta

SEQ ID NO: 66763 - DNA, 79 bp, Homo sapiens
ggagcttcttcatgtatgtaacagcatattaaactggagacagtgatgaatcagctacaaaggtaatattgtattaaaa

SEQ ID NO: 66764 - DNA, 79 bp, Homo sapiens
catgtatgtaacagcatattaaactggagacagtgatgaatcagctacaaaggtaatattgtattaaaatcatgtttaa

SEQ ID NO: 66765 - DNA, 79 bp, Homo sapiens
cagcatattaaactggagacagtgatgaatcagctacaaaggtaatattgtattaaaatcatgtttaagatagctgctt

SEQ ID NO: 66766 - DNA, 77 bp, Homo sapiens
aaactggagacagtgatgaatcagctacaaaggtaatattgtattaaaatcatgtttaagatagctgcttttatgtg

SEQ ID NO: 66767 - DNA, 77 bp, Homo sapiens
ggagacagtgatgaatcagctacaaaggtaatattgtattaaaatcatgtttaagatagctgcttttatgtgtattt

SEQ ID NO: 66768 - DNA, 80 bp, Homo sapiens
gatgaatcagctacaaaggtaatattgtattaaaatcatgtttaagatagctgcttttatgtgtattttatattgcatgc

SEQ ID NO: 66769 - DNA, 79 bp, Homo sapiens
atgaatcagctacaaaggtaatattgtattaaaatcatgtttaagatagctgcttttatgtgtattttatattgcatgc

SEQ ID NO: 66770 - DNA, 77 bp, Homo sapiens
tcagctacaaaggtaatattgtattaaaatcatgtttaagatagctgcttttatgtgtattttatattgcatgcttt

SEQ ID NO: 66771 - DNA, 77 bp, Homo sapiens
atattgtattaaaatcatgtttaagatagctgcttttatgtgtattttatattgcatgcttttgtaaaaacatgctg

SEQ ID NO: 66772 - DNA, 78 bp, Homo sapiens
tgtattaaaatcatgtttaagatagctgcttttatgtgtattttatattgcatgcttttgtaaaaacatgctgggtga

SEQ ID NO: 66773 - DNA, 79 bp, Homo sapiens
tcatgtttaagatagctgcttttatgtgtattttatattgcatgcttttgtaaaaacatgctgggtgatgaaagattag

SEQ ID NO: 66774 - DNA, 78 bp, Homo sapiens
gatagctgcttttatgtgtattttatattgcatgcttttgtaaaaacatgctgggtgatgaaagattagttttagaga

SEQ ID NO: 66775 - DNA, 79 bp, Homo sapiens
tttatattgcatgcttttgtaaaaacatgctgggtgatgaaagattagttttagagagaaaatgttcatctgtgcagag

SEQ ID NO: 66776 - DNA, 78 bp, Homo sapiens
tgggtgatgaaagattagttttagagagaaaatgttcatctgtgcagaggatgcattttcttccattaattctggaaa

SEQ ID NO: 66777 - DNA, 77 bp, Homo sapiens
gagaaaatgttcatctgtgcagaggatgcattttcttccattaattctggaaaaaacgttcacagttatatatatgg

SEQ ID NO: 66778 - DNA, 77 bp, Homo sapiens
catctgtgcagaggatgcattttcttccattaattctggaaaaaacgttcacagttatatatatggtattttgcaaa

SEQ ID NO: 66779 - DNA, 72 bp, Homo sapiens
gaggatgcattttcttccattaattctggaaaaaacgttcacagttatatatatggtattttgcaaaaggac

SEQ ID NO: 66780 - DNA, 70 bp, Homo sapiens
ttccattaattctggaaaaaacgttcacagttatatatatggtattttgcaaaaggactattaatagaac

SEQ ID NO: 66781 - DNA, 72 bp, Homo sapiens
tctggaaaaaacgttcacagttatatatatggtattttgcaaaaggactattaatagaaccttttgagatga

SEQ ID NO: 66782 - DNA, 71 bp, Homo sapiens
aaacgttcacagttatatatatggtattttgcaaaaggactattaatagaaccttttgagatgaattaatg

SEQ ID NO: 66783 - DNA, 73 bp, Homo sapiens
cacagttatatatatggtattttgcaaaaggactattaatagaaccttttgagatgaattaatgtaagaatat

SEQ ID NO: 66784 - DNA, 70 bp, Homo sapiens
tatatggtattttgcaaaaggactattaatagaaccttttgagatgaattaatgtaagaatattttttaa

SEQ ID NO: 66785 - DNA, 70 bp, Homo sapiens
tgcaaaaggactattaatagaaccttttgagatgaattaatgtaagaatattttttaaataggcttactg

SEQ ID NO: 66786 - DNA, 72 bp, Homo sapiens
gactattaatagaaccttttgagatgaattaatgtaagaatattttttaaataggcttactgtcaaattgca

SEQ ID NO: 66787 - DNA, 68 bp, Homo sapiens
agaaccttttgagatgaattaatgtaagaatattttttaaataggcttactgtcaaattgcaactttt

SEQ ID NO: 66788 - DNA, 67 bp, Homo sapiens
aagaatattttttaaataggcttactgtcaaattgcaactttttttttagatacagagtggaaaaca

SEQ ID NO: 66789 - DNA, 70 bp, Homo sapiens
tttaaataggcttactgtcaaattgcaactttttttttagatacagagtggaaaacagtgctaagtcatt

SEQ ID NO: 66790 - DNA, 72 bp, Homo sapiens
ataggcttactgtcaaattgcaactttttttttagatacagagtggaaaacagtgctaagtcatttggcacc

SEQ ID NO: 66791 - DNA, 72 bp, Homo sapiens
ttttttttagatacagagtggaaaacagtgctaagtcatttggcacctccttacaaatatttttcatggtca

SEQ ID NO: 66792 - DNA, 73 bp, Homo sapiens
gagtggaaaacagtgctaagtcatttggcacctccttacaaatatttttcatggtcacatttattaaatgtta

SEQ ID NO: 66793 - DNA, 75 bp, Homo sapiens
cagtgctaagtcatttggcacctccttacaaatatttttcatggtcacatttattaaatgttactacatttctga

SEQ ID NO: 66794 - DNA, 72 bp, Homo sapiens
catttggcacctccttacaaatatttttcatggtcacatttattaaatgttactacatttctgaatttttga

SEQ ID NO: 66795 - DNA, 69 bp, Homo sapiens
cctccttacaaatatttttcatggtcacatttattaaatgttactacatttctgaatttttgaaaaatg

SEQ ID NO: 66796 - DNA, 71 bp, Homo sapiens
ttttcatggtcacatttattaaatgttactacatttctgaatttttgaaaaatgtattttatcattaaatg

SEQ ID NO: 66797 - DNA, 72 bp, Homo sapiens
atggtcacatttattaaatgttactacatttctgaatttttgaaaaatgtattttatcattaaatggcatta

SEQ ID NO: 66798 - DNA, 68 bp, Homo sapiens
taaatgttactacatttctgaatttttgaaaaatgtattttatcattaaatggcattattttaaaggg

SEQ ID NO: 66799 - DNA, 69 bp, Homo sapiens
tacatttctgaatttttgaaaaatgtattttatcattaaatggcattattttaaagggtgaaaaactga

SEQ ID NO: 66800 - DNA, 70 bp, Homo sapiens
ctgaatttttgaaaaatgtattttatcattaaatggcattattttaaagggtgaaaaactgacacagtca

SEQ ID NO: 66801 - DNA, 71 bp, Homo sapiens
aatgtattttatcattaaatggcattattttaaagggtgaaaaactgacacagtcaattcagaaaatggac

SEQ ID NO: 66802 - DNA, 75 bp, Homo sapiens
tatcattaaatggcattattttaaagggtgaaaaactgacacagtcaattcagaaaatggactgaagtctgaata

SEQ ID NO: 66803 - DNA, 73 bp, Homo sapiens
atggcattattttaaagggtgaaaaactgacacagtcaattcagaaaatggactgaagtctgaataaggtcat

SEQ ID NO: 66804 - DNA, 73 bp, Homo sapiens
tttaaagggtgaaaaactgacacagtcaattcagaaaatggactgaagtctgaataaggtcattgcatttaaa

SEQ ID NO: 66805 - DNA, 76 bp, Homo sapiens
ggtgaaaaactgacacagtcaattcagaaaatggactgaagtctgaataaggtcattgcatttaaaaagcatataa

SEQ ID NO: 66806 - DNA, 80 bp, Homo sapiens
cacagtcaattcagaaaatggactgaagtctgaataaggtcattgcatttaaaaagcatataactgtacttgactgatga

SEQ ID NO: 66807 - DNA, 77 bp, Homo sapiens
aattcagaaaatggactgaagtctgaataaggtcattgcatttaaaaagcatataactgtacttgactgatgaggga

SEQ ID NO: 66808 - DNA, 76 bp, Homo sapiens
ctgaagtctgaataaggtcattgcatttaaaaagcatataactgtacttgactgatgagggaggtgttactttcat

SEQ ID NO: 66809 - DNA, 77 bp, Homo sapiens
gtctgaataaggtcattgcatttaaaaagcatataactgtacttgactgatgagggaggtgttactttcattgtata

SEQ ID NO: 66810 - DNA, 77 bp, Homo sapiens
tatataggtcttatttcataaacagatatcctgtatcaaataaaagtatttgttatatatttgaagttatgcatgga

SEQ ID NO: 66811 - DNA, 75 bp, Homo sapiens
atttcataaacagatatcctgtatcaaataaaagtatttgttatatatttgaagttatgcatggaaaggagtgtg

SEQ ID NO: 66812 - DNA, 74 bp, Homo sapiens
cagatatcctgtatcaaataaaagtatttgttatatatttgaagttatgcatggaaaggagtgtgtttaaattg

SEQ ID NO: 66813 - DNA, 72 bp, Homo sapiens
cctgtatcaaataaaagtatttgttatatatttgaagttatgcatggaaaggagtgtgtttaaattgttaca

SEQ ID NO: 66814 - DNA, 71 bp, Homo sapiens
aaagtatttgttatatatttgaagttatgcatggaaaggagtgtgtttaaattgttacaaacaataatgcg

SEQ ID NO: 66815 - DNA, 74 bp, Homo sapiens
ttatatatttgaagttatgcatggaaaggagtgtgtttaaattgttacaaacaataatgcgtcattaaaggcca

SEQ ID NO: 66816 - DNA, 76 bp, Homo sapiens
atttgaagttatgcatggaaaggagtgtgtttaaattgttacaaacaataatgcgtcattaaaggccatgctgatc

SEQ ID NO: 66817 - DNA, 77 bp, Homo sapiens
catggaaaggagtgtgtttaaattgttacaaacaataatgcgtcattaaaggccatgctgatcttgcataactataa

SEQ ID NO: 66818 - DNA, 78 bp, Homo sapiens
ggagtgtgtttaaattgttacaaacaataatgcgtcattaaaggccatgctgatcttgcataactataagtactatga

SEQ ID NO: 66819 - DNA, 78 bp, Homo sapiens
attgttacaaacaataatgcgtcattaaaggccatgctgatcttgcataactataagtactatgaatgaatttggttg

SEQ ID NO: 66820 - DNA, 77 bp, Homo sapiens
caaacaataatgcgtcattaaaggccatgctgatcttgcataactataagtactatgaatgaatttggttggttttg

SEQ ID NO: 66821 - DNA, 78 bp, Homo sapiens
aaggccatgctgatcttgcataactataagtactatgaatgaatttggttggttttggtgttgtacagctcacatgtt

SEQ ID NO: 66822 - DNA, 77 bp, Homo sapiens
atcttgcataactataagtactatgaatgaatttggttggttttggtgttgtacagctcacatgtttacacactcag

SEQ ID NO: 66823 - DNA, 76 bp, Homo sapiens
taactataagtactatgaatgaatttggttggttttggtgttgtacagctcacatgtttacacactcagtgcccta

SEQ ID NO: 66824 - DNA, 74 bp, Homo sapiens
agtactatgaatgaatttggttggttttggtgttgtacagctcacatgtttacacactcagtgccctaatttcc

SEQ ID NO: 66825 - DNA, 71 bp, Homo sapiens
aatttggttggttttggtgttgtacagctcacatgtttacacactcagtgccctaatttcccctgagggaa

SEQ ID NO: 66826 - DNA, 75 bp, Homo sapiens
tgttgtacagctcacatgtttacacactcagtgccctaatttcccctgagggaatcgctttttaagtgatcctta

SEQ ID NO: 66827 - DNA, 66 bp, Homo sapiens
ccctaatttcccctgagggaatcgctttttaagtgatccttacagtggtgttttatgttactttat

SEQ ID NO: 66828 - DNA, 70 bp, Homo sapiens
ctgagggaatcgctttttaagtgatccttacagtggtgttttatgttactttattacagagctccttggt

SEQ ID NO: 66829 - DNA, 68 bp, Homo sapiens
ggaatcgctttttaagtgatccttacagtggtgttttatgttactttattacagagctccttggtttt

SEQ ID NO: 66830 - DNA, 70 bp, Homo sapiens
tttaagtgatccttacagtggtgttttatgttactttattacagagctccttggttttttacttctgcac

SEQ ID NO: 66831 - DNA, 67 bp, Homo sapiens
ccttacagtggtgttttatgttactttattacagagctccttggttttttacttctgcacttaaatt

SEQ ID NO: 66832 - DNA, 65 bp, Homo sapiens
gtgttttatgttactttattacagagctccttggttttttacttctgcacttaaatttttttaaa

SEQ ID NO: 66833 - DNA, 72 bp, Homo sapiens
tgcacttaaatttttttaaataacatgatgatggtacattttcctctattgtctagctaagggctttcggtc

SEQ ID NO: 66834 - DNA, 71 bp, Homo sapiens
tttttttaaataacatgatgatggtacattttcctctattgtctagctaagggctttcggtccaccagtaa

SEQ ID NO: 66835 - DNA, 74 bp, Homo sapiens
aataacatgatgatggtacattttcctctattgtctagctaagggctttcggtccaccagtaaataagatcaaa

SEQ ID NO: 66836 - DNA, 72 bp, Homo sapiens
atggtacattttcctctattgtctagctaagggctttcggtccaccagtaaataagatcaaatgctcttaaa

SEQ ID NO: 66837 - DNA, 71 bp, Homo sapiens
attttcctctattgtctagctaagggctttcggtccaccagtaaataagatcaaatgctcttaaatgttcc

SEQ ID NO: 66838 - DNA, 73 bp, Homo sapiens
tgtctagctaagggctttcggtccaccagtaaataagatcaaatgctcttaaatgttcctgttaccatcctaa

SEQ ID NO: 66839 - DNA, 71 bp, Homo sapiens
taagggctttcggtccaccagtaaataagatcaaatgctcttaaatgttcctgttaccatcctaatgtaaa

SEQ ID NO: 66840 - DNA, 72 bp, Homo sapiens
ttcggtccaccagtaaataagatcaaatgctcttaaatgttcctgttaccatcctaatgtaaatactggatt

SEQ ID NO: 66841 - DNA, 73 bp, Homo sapiens
cagtaaataagatcaaatgctcttaaatgttcctgttaccatcctaatgtaaatactggatttttctgtcatt

SEQ ID NO: 66842 - DNA, 77 bp, Homo sapiens
atcaaatgctcttaaatgttcctgttaccatcctaatgtaaatactggatttttctgtcatttagcaccatgctgct

SEQ ID NO: 66843 - DNA, 78 bp, Homo sapiens
taaatgttcctgttaccatcctaatgtaaatactggatttttctgtcatttagcaccatgctgcttctgtctgtctta

SEQ ID NO: 66844 - DNA, 81 bp, Homo sapiens
ttaccatcctaatgtaaatactggatttttctgtcatttagcaccatgctgcttctgtctgtcttaatgctggcattaaga

SEQ ID NO: 66845 - DNA, 84 bp, Homo sapiens
atcctaatgtaaatactggatttttctgtcatttagcaccatgctgcttctgtctgtcttaatgctggcattaagatcatgagc

SEQ ID NO: 66846 - DNA, 80 bp, Homo sapiens
aaatactggatttttctgtcatttagcaccatgctgcttctgtctgtcttaatgctggcattaagatcatgagccctttt

SEQ ID NO: 66847 - DNA, 82 bp, Homo sapiens
tttttctgtcatttagcaccatgctgcttctgtctgtcttaatgctggcattaagatcatgagccctttttctccagtagta

SEQ ID NO: 66848 - DNA, 82 bp, Homo sapiens
ttagcaccatgctgcttctgtctgtcttaatgctggcattaagatcatgagccctttttctccagtagtacaggctttgaaa

SEQ ID NO: 66849 - DNA, 77 bp, Homo sapiens
gcttctgtctgtcttaatgctggcattaagatcatgagccctttttctccagtagtacaggctttgaaaactacttc

SEQ ID NO: 66850 - DNA, 76 bp, Homo sapiens
tctgtcttaatgctggcattaagatcatgagccctttttctccagtagtacaggctttgaaaactacttctattaa

SEQ ID NO: 66851 - DNA, 73 bp, Homo sapiens
aatgctggcattaagatcatgagccctttttctccagtagtacaggctttgaaaactacttctattaagttat

SEQ ID NO: 66852 - DNA, 75 bp, Homo sapiens
taagatcatgagccctttttctccagtagtacaggctttgaaaactacttctattaagttattgatgcaatttga

SEQ ID NO: 66853 - DNA, 71 bp, Homo sapiens
gagccctttttctccagtagtacaggctttgaaaactacttctattaagttattgatgcaatttgatattt

SEQ ID NO: 66854 - DNA, 74 bp, Homo sapiens
ctccagtagtacaggctttgaaaactacttctattaagttattgatgcaatttgatattttttcataatctata

SEQ ID NO: 66855 - DNA, 73 bp, Homo sapiens
tacaggctttgaaaactacttctattaagttattgatgcaatttgatattttttcataatctatatttaaaca

SEQ ID NO: 66856 - DNA, 77 bp, Homo sapiens
ctacttctattaagttattgatgcaatttgatattttttcataatctatatttaaacaaaattacatcattgcatca

SEQ ID NO: 66857 - DNA, 77 bp, Homo sapiens
tctattaagttattgatgcaatttgatattttttcataatctatatttaaacaaaattacatcattgcatcatcttt

SEQ ID NO: 66858 - DNA, 80 bp, Homo sapiens
tgatgcaatttgatattttttcataatctatatttaaacaaaattacatcattgcatcatcttttctaaattcatctcca

SEQ ID NO: 66859 - DNA, 75 bp, Homo sapiens
gatattttttcataatctatatttaaacaaaattacatcattgcatcatcttttctaaattcatctccattaaaa

SEQ ID NO: 66860 - DNA, 76 bp, Homo sapiens
tcataatctatatttaaacaaaattacatcattgcatcatcttttctaaattcatctccattaaaacttgccttaa

SEQ ID NO: 66861 - DNA, 74 bp, Homo sapiens
tttaaacaaaattacatcattgcatcatcttttctaaattcatctccattaaaacttgccttaagctaccagat

SEQ ID NO: 66862 - DNA, 78 bp, Homo sapiens
ttgcatcatcttttctaaattcatctccattaaaacttgccttaagctaccagattgcttttgccaccattggccata

SEQ ID NO: 66863 - DNA, 75 bp, Homo sapiens
tttctaaattcatctccattaaaacttgccttaagctaccagattgcttttgccaccattggccatactgtgtgt

SEQ ID NO: 66864 - DNA, 71 bp, Homo sapiens
attaaaacttgccttaagctaccagattgcttttgccaccattggccatactgtgtgtttgtttgtttaat

SEQ ID NO: 66865 - DNA, 68 bp, Homo sapiens
ttgtttgtttaatttactttcacaataaacttctgtgtagtaaaaacagggtcttggctctttcttga

SEQ ID NO: 66866 - DNA, 68 bp, Homo sapiens
cccaacggactaaaaagacgaaataattagtctgtgcaggaaattttccaaactccatgtaatatttg

SEQ ID NO: 66867 - DNA, 68 bp, Homo sapiens
ggactaaaaagacgaaataattagtctgtgcaggaaattttccaaactccatgtaatatttgttttat

SEQ ID NO: 66868 - DNA, 70 bp, Homo sapiens
gacgaaataattagtctgtgcaggaaattttccaaactccatgtaatatttgttttatttataataagag

SEQ ID NO: 66869 - DNA, 72 bp, Homo sapiens
tagtctgtgcaggaaattttccaaactccatgtaatatttgttttatttataataagaggaaatacatttga

SEQ ID NO: 66870 - DNA, 68 bp, Homo sapiens
aattttccaaactccatgtaatatttgttttatttataataagaggaaatacatttgaacaaagaagc

SEQ ID NO: 66871 - DNA, 74 bp, Homo sapiens
actccatgtaatatttgttttatttataataagaggaaatacatttgaacaaagaagctctcatagtattggca

SEQ ID NO: 66872 - DNA, 72 bp, Homo sapiens
atatttgttttatttataataagaggaaatacatttgaacaaagaagctctcatagtattggcaattttaca

SEQ ID NO: 66873 - DNA, 76 bp, Homo sapiens
tatttataataagaggaaatacatttgaacaaagaagctctcatagtattggcaattttacatatatctctgttat

SEQ ID NO: 66874 - DNA, 74 bp, Homo sapiens
aagaggaaatacatttgaacaaagaagctctcatagtattggcaattttacatatatctctgttattgtaattt

SEQ ID NO: 66875 - DNA, 73 bp, Homo sapiens
gaaatacatttgaacaaagaagctctcatagtattggcaattttacatatatctctgttattgtaattttttt

SEQ ID NO: 66876 - DNA, 75 bp, Homo sapiens
tgaacaaagaagctctcatagtattggcaattttacatatatctctgttattgtaattttttttacttgctgggc

SEQ ID NO: 66877 - DNA, 74 bp, Homo sapiens
gctctcatagtattggcaattttacatatatctctgttattgtaattttttttacttgctgggcttggtaattc

SEQ ID NO: 66878 - DNA, 75 bp, Homo sapiens
tggcaattttacatatatctctgttattgtaattttttttacttgctgggcttggtaattcttcaatggacatga

SEQ ID NO: 66879 - DNA, 75 bp, Homo sapiens
catatatctctgttattgtaattttttttacttgctgggcttggtaattcttcaatggacatgaaagctatgacc

SEQ ID NO: 66880 - DNA, 75 bp, Homo sapiens
tctgttattgtaattttttttacttgctgggcttggtaattcttcaatggacatgaaagctatgacctagagaga

SEQ ID NO: 66881 - DNA, 74 bp, Homo sapiens
aattttttttacttgctgggcttggtaattcttcaatggacatgaaagctatgacctagagagactatagagtc

SEQ ID NO: 66882 - DNA, 78 bp, Homo sapiens
ttttacttgctgggcttggtaattcttcaatggacatgaaagctatgacctagagagactatagagtcgctggtaagc

SEQ ID NO: 66883 - DNA, 77 bp, Homo sapiens
ttggtaattcttcaatggacatgaaagctatgacctagagagactatagagtcgctggtaagcgtacgcccgaggcc

SEQ ID NO: 66884 - DNA, 76 bp, Homo sapiens
aattcttcaatggacatgaaagctatgacctagagagactatagagtcgctggtaagcgtacgcccgaggccctgg

SEQ ID NO: 66885 - DNA, 74 bp, Homo sapiens
atgaaagctatgacctagagagactatagagtcgctggtaagcgtacgcccgaggccctgggcgtccccactgg

SEQ ID NO: 66886 - DNA, 75 bp, Homo sapiens
tatgacctagagagactatagagtcgctggtaagcgtacgcccgaggccctgggcgtccccactggtagatggtg

SEQ ID NO: 66887 - DNA, 75 bp, Homo sapiens
tagagagactatagagtcgctggtaagcgtacgcccgaggccctgggcgtccccactggtagatggtggcgtgtg

SEQ ID NO: 66888 - DNA, 73 bp, Homo sapiens
atagagtcgctggtaagcgtacgcccgaggccctgggcgtccccactggtagatggtggcgtgtggacgaaca

SEQ ID NO: 66889 - DNA, 72 bp, Homo sapiens
taagcgtacgcccgaggccctgggcgtccccactggtagatggtggcgtgtggacgaacagcttagtccttg

SEQ ID NO: 66890 - DNA, 71 bp, Homo sapiens
acgcccgaggccctgggcgtccccactggtagatggtggcgtgtggacgaacagcttagtccttgggcaaa

SEQ ID NO: 66891 - DNA, 76 bp, Homo sapiens
ggcgtccccactggtagatggtggcgtgtggacgaacagcttagtccttgggcaaagcttgtgctggtcgagagtg

SEQ ID NO: 66892 - DNA, 77 bp, Homo sapiens
actggtagatggtggcgtgtggacgaacagcttagtccttgggcaaagcttgtgctggtcgagagtggcgagtctgg

SEQ ID NO: 66893 - DNA, 79 bp, Homo sapiens
agatggtggcgtgtggacgaacagcttagtccttgggcaaagcttgtgctggtcgagagtggcgagtctgggacagaga

SEQ ID NO: 66894 - DNA, 80 bp, Homo sapiens
tgtggacgaacagcttagtccttgggcaaagcttgtgctggtcgagagtggcgagtctgggacagagacccaggctgctc

SEQ ID NO: 66895 - DNA, 80 bp, Homo sapiens
acagcttagtccttgggcaaagcttgtgctggtcgagagtggcgagtctgggacagagacccaggctgctccctgctgct

SEQ ID NO: 66896 - DNA, 82 bp, Homo sapiens
ttgggcaaagcttgtgctggtcgagagtggcgagtctgggacagagacccaggctgctccctgctgcttccaggctcctctc

SEQ ID NO: 66897 - DNA, 82 bp, Homo sapiens
ttgtgctggtcgagagtggcgagtctgggacagagacccaggctgctccctgctgcttccaggctcctctctcttagactta

SEQ ID NO: 66898 - DNA, 80 bp, Homo sapiens
agagtggcgagtctgggacagagacccaggctgctccctgctgcttccaggctcctctctcttagacttaatgcccagga

SEQ ID NO: 66899 - DNA, 79 bp, Homo sapiens
gtctgggacagagacccaggctgctccctgctgcttccaggctcctctctcttagacttaatgcccaggaaactgagta

SEQ ID NO: 66900 - DNA, 79 bp, Homo sapiens
agagacccaggctgctccctgctgcttccaggctcctctctcttagacttaatgcccaggaaactgagtattttcatca

SEQ ID NO: 66901 - DNA, 81 bp, Homo sapiens
ctgctccctgctgcttccaggctcctctctcttagacttaatgcccaggaaactgagtattttcatcagcagcaaatctac

SEQ ID NO: 66902 - DNA, 79 bp, Homo sapiens
ctgcttccaggctcctctctcttagacttaatgcccaggaaactgagtattttcatcagcagcaaatctacgatctccc

SEQ ID NO: 66903 - DNA, 76 bp, Homo sapiens
aggctcctctctcttagacttaatgcccaggaaactgagtattttcatcagcagcaaatctacgatctccccttcc

SEQ ID NO: 66904 - DNA, 79 bp, Homo sapiens
tcttagacttaatgcccaggaaactgagtattttcatcagcagcaaatctacgatctccccttcctccgacagctgcaa

SEQ ID NO: 66905 - DNA, 79 bp, Homo sapiens
aaactgagtattttcatcagcagcaaatctacgatctccccttcctccgacagctgcaagagaaagaaccaggcaatgc

SEQ ID NO: 66906 - DNA, 80 bp, Homo sapiens
tattttcatcagcagcaaatctacgatctccccttcctccgacagctgcaagagaaagaaccaggcaatgcccatagaac

SEQ ID NO: 66907 - DNA, 80 bp, Homo sapiens
agcctcttcatagttcaatgactgatgaggaataggccaaagcgactcacctgatagtatttttgctcctcactgaaggc

SEQ ID NO: 66908 - DNA, 79 bp, Homo sapiens
atagttcaatgactgatgaggaataggccaaagcgactcacctgatagtatttttgctcctcactgaaggccaccagga

SEQ ID NO: 66909 - DNA, 79 bp, Homo sapiens
atgaggaataggccaaagcgactcacctgatagtatttttgctcctcactgaaggccaccaggatgacagagataaaca

SEQ ID NO: 66910 - DNA, 76 bp, Homo sapiens
aataggccaaagcgactcacctgatagtatttttgctcctcactgaaggccaccaggatgacagagataaacaggt

SEQ ID NO: 66911 - DNA, 80 bp, Homo sapiens
actcacctgatagtatttttgctcctcactgaaggccaccaggatgacagagataaacaggttcagcaccacaaatgtca

SEQ ID NO: 66912 - DNA, 77 bp, Homo sapiens
atagtatttttgctcctcactgaaggccaccaggatgacagagataaacaggttcagcaccacaaatgtcataaaaa

SEQ ID NO: 66913 - DNA, 79 bp, Homo sapiens
tttttgctcctcactgaaggccaccaggatgacagagataaacaggttcagcaccacaaatgtcataaaaacaatgcag

SEQ ID NO: 66914 - DNA, 80 bp, Homo sapiens
tgaaggccaccaggatgacagagataaacaggttcagcaccacaaatgtcataaaaacaatgcaggatccaatgaggaag

SEQ ID NO: 66915 - DNA, 79 bp, Homo sapiens
accaggatgacagagataaacaggttcagcaccacaaatgtcataaaaacaatgcaggatccaatgaggaaggagccaa

SEQ ID NO: 66916 - DNA, 79 bp, Homo sapiens
agataaacaggttcagcaccacaaatgtcataaaaacaatgcaggatccaatgaggaaggagccaagcactgggctata

SEQ ID NO: 66917 - DNA, 79 bp, Homo sapiens
aacaggttcagcaccacaaatgtcataaaaacaatgcaggatccaatgaggaaggagccaagcactgggctatagtcca

SEQ ID NO: 66918 - DNA, 78 bp, Homo sapiens
acaaatgtcataaaaacaatgcaggatccaatgaggaaggagccaagcactgggctatagtccaggacctgtcagaaa

SEQ ID NO: 66919 - DNA, 77 bp, Homo sapiens
ataaaaacaatgcaggatccaatgaggaaggagccaagcactgggctatagtccaggacctgtcagaaagaaagcca

SEQ ID NO: 66920 - DNA, 79 bp, Homo sapiens
acaatgcaggatccaatgaggaaggagccaagcactgggctatagtccaggacctgtcagaaagaaagccagggtcatc

SEQ ID NO: 66921 - DNA, 77 bp, Homo sapiens
atccaatgaggaaggagccaagcactgggctatagtccaggacctgtcagaaagaaagccagggtcatccagtgtcc

SEQ ID NO: 66922 - DNA, 74 bp, Homo sapiens
cttcacagaggctccgtatagatggcagcaaccgtgccctcaccccgttacctcctcgtagttgaagattccca

SEQ ID NO: 66923 - DNA, 75 bp, Homo sapiens
ctccgtatagatggcagcaaccgtgccctcaccccgttacctcctcgtagttgaagattcccagctgaaggctga

SEQ ID NO: 66924 - DNA, 75 bp, Homo sapiens
atggcagcaaccgtgccctcaccccgttacctcctcgtagttgaagattcccagctgaaggctgaccatcgtctc

SEQ ID NO: 66925 - DNA, 76 bp, Homo sapiens
tgccctcaccccgttacctcctcgtagttgaagattcccagctgaaggctgaccatcgtctccgccgcatcaaaga

SEQ ID NO: 66926 - DNA, 72 bp, Homo sapiens
ccgttacctcctcgtagttgaagattcccagctgaaggctgaccatcgtctccgccgcatcaaagagggttt

SEQ ID NO: 66927 - DNA, 74 bp, Homo sapiens
cctcctcgtagttgaagattcccagctgaaggctgaccatcgtctccgccgcatcaaagagggttttgtaggaa

SEQ ID NO: 66928 - DNA, 72 bp, Homo sapiens
aagattcccagctgaaggctgaccatcgtctccgccgcatcaaagagggttttgtaggaacggagtttccaa

SEQ ID NO: 66929 - DNA, 72 bp, Homo sapiens
ctgaaggctgaccatcgtctccgccgcatcaaagagggttttgtaggaacggagtttccaaccaaatatcaa

SEQ ID NO: 66930 - DNA, 69 bp, Homo sapiens
accatcgtctccgccgcatcaaagagggttttgtaggaacggagtttccaaccaaatatcaagtttgac

SEQ ID NO: 66931 - DNA, 71 bp, Homo sapiens
tccgccgcatcaaagagggttttgtaggaacggagtttccaaccaaatatcaagtttgactgtcatggaaa

SEQ ID NO: 66932 - DNA, 69 bp, Homo sapiens
atcaaagagggttttgtaggaacggagtttccaaccaaatatcaagtttgactgtcatggaaagaattc

SEQ ID NO: 66933 - DNA, 72 bp, Homo sapiens
ttttgtaggaacggagtttccaaccaaatatcaagtttgactgtcatggaaagaattctcatgaacagggaa

SEQ ID NO: 66934 - DNA, 74 bp, Homo sapiens
tttctgcagagaccctccccgaacttttcccaaagcagatacttaccgcgatggagtaagccaggagcatggta

SEQ ID NO: 66935 - DNA, 72 bp, Homo sapiens
agaccctccccgaacttttcccaaagcagatacttaccgcgatggagtaagccaggagcatggtaaggatga

SEQ ID NO: 66936 - DNA, 74 bp, Homo sapiens
cccgaacttttcccaaagcagatacttaccgcgatggagtaagccaggagcatggtaaggatgacaatcataaa

SEQ ID NO: 66937 - DNA, 78 bp, Homo sapiens
tttcccaaagcagatacttaccgcgatggagtaagccaggagcatggtaaggatgacaatcataaagcctgaaatgtc

SEQ ID NO: 66938 - DNA, 78 bp, Homo sapiens
agatacttaccgcgatggagtaagccaggagcatggtaaggatgacaatcataaagcctgaaatgtcgccccaggcac

SEQ ID NO: 66939 - DNA, 78 bp, Homo sapiens
atggagtaagccaggagcatggtaaggatgacaatcataaagcctgaaatgtcgccccaggcacggcgtagggctgcc

SEQ ID NO: 66940 - DNA, 81 bp, Homo sapiens
ccaggagcatggtaaggatgacaatcataaagcctgaaatgtcgccccaggcacggcgtagggctgccgtgatcatgttca

SEQ ID NO: 66941 - DNA, 78 bp, Homo sapiens
atggtaaggatgacaatcataaagcctgaaatgtcgccccaggcacggcgtagggctgccgtgatcatgttcattttg

SEQ ID NO: 66942 - DNA, 78 bp, Homo sapiens
atgacaatcataaagcctgaaatgtcgccccaggcacggcgtagggctgccgtgatcatgttcattttgggattcaac

SEQ ID NO: 66943 - DNA, 78 bp, Homo sapiens
ataaagcctgaaatgtcgccccaggcacggcgtagggctgccgtgatcatgttcattttgggattcaacctgagcaga

SEQ ID NO: 66944 - DNA, 78 bp, Homo sapiens
aaatgtcgccccaggcacggcgtagggctgccgtgatcatgttcattttgggattcaacctgagcagatgccaaagct

SEQ ID NO: 66945 - DNA, 82 bp, Homo sapiens
gcacggcgtagggctgccgtgatcatgttcattttgggattcaacctgagcagatgccaaagcttcactgtggacaggagta

SEQ ID NO: 66946 - DNA, 81 bp, Homo sapiens
tagggctgccgtgatcatgttcattttgggattcaacctgagcagatgccaaagcttcactgtggacaggagtaccaggaa

SEQ ID NO: 66947 - DNA, 83 bp, Homo sapiens
gtgatcatgttcattttgggattcaacctgagcagatgccaaagcttcactgtggacaggagtaccaggaaggcaatgatgta

SEQ ID NO: 66948 - DNA, 81 bp, Homo sapiens
tgttcattttgggattcaacctgagcagatgccaaagcttcactgtggacaggagtaccaggaaggcaatgatgtagccaa

SEQ ID NO: 66949 - DNA, 81 bp, Homo sapiens
attcaacctgagcagatgccaaagcttcactgtggacaggagtaccaggaaggcaatgatgtagccaagggcggcatcggc

SEQ ID NO: 66950 - DNA, 86 bp, Homo sapiens
cagatgccaaagcttcactgtggacaggagtaccaggaaggcaatgatgtagccaagggcggcatcggctgctgctgtctcactga

SEQ ID NO: 66951 - DNA, 84 bp, Homo sapiens
aaagcttcactgtggacaggagtaccaggaaggcaatgatgtagccaagggcggcatcggctgctgctgtctcactgaagctga

SEQ ID NO: 66952 - DNA, 86 bp, Homo sapiens
actgtggacaggagtaccaggaaggcaatgatgtagccaagggcggcatcggctgctgctgtctcactgaagctgatgcctctgtg

SEQ ID NO: 66953 - DNA, 86 bp, Homo sapiens
taccaggaaggcaatgatgtagccaagggcggcatcggctgctgctgtctcactgaagctgatgcctctgtgggaccaaaatgcaa

SEQ ID NO: 66954 - DNA, 85 bp, Homo sapiens
aaggcaatgatgtagccaagggcggcatcggctgctgctgtctcactgaagctgatgcctctgtgggaccaaaatgcaaaggctg

SEQ ID NO: 66955 - DNA, 85 bp, Homo sapiens
atgtagccaagggcggcatcggctgctgctgtctcactgaagctgatgcctctgtgggaccaaaatgcaaaggctgggtctcaga

SEQ ID NO: 66956 - DNA, 75 bp, Homo sapiens
aagaggggccagtgtggggagctggggggctgaggagacagccactgactcctccctgtggttccggcagcgctg

SEQ ID NO: 66957 - DNA, 75 bp, Homo sapiens
tgtggggagctggggggctgaggagacagccactgactcctccctgtggttccggcagcgctggaggtccctttc

SEQ ID NO: 66958 - DNA, 74 bp, Homo sapiens
ggggggctgaggagacagccactgactcctccctgtggttccggcagcgctggaggtccctttcggccaggaca

SEQ ID NO: 66959 - DNA, 75 bp, Homo sapiens
aggagacagccactgactcctccctgtggttccggcagcgctggaggtccctttcggccaggacagccctcttca

SEQ ID NO: 66960 - DNA, 72 bp, Homo sapiens
actgactcctccctgtggttccggcagcgctggaggtccctttcggccaggacagccctcttcacaaacacc

SEQ ID NO: 66961 - DNA, 72 bp, Homo sapiens
tcctccctgtggttccggcagcgctggaggtccctttcggccaggacagccctcttcacaaacaccgccagg

SEQ ID NO: 66962 - DNA, 75 bp, Homo sapiens
tggttccggcagcgctggaggtccctttcggccaggacagccctcttcacaaacaccgccagggcgctccagctg

SEQ ID NO: 66963 - DNA, 77 bp, Homo sapiens
agcgctggaggtccctttcggccaggacagccctcttcacaaacaccgccagggcgctccagctggccaggatgatg

SEQ ID NO: 66964 - DNA, 78 bp, Homo sapiens
tttcggccaggacagccctcttcacaaacaccgccagggcgctccagctggccaggatgatggccagctccagaaggt

SEQ ID NO: 66965 - DNA, 79 bp, Homo sapiens
aggacagccctcttcacaaacaccgccagggcgctccagctggccaggatgatggccagctccagaaggttccacttgc

SEQ ID NO: 66966 - DNA, 81 bp, Homo sapiens
cctcttcacaaacaccgccagggcgctccagctggccaggatgatggccagctccagaaggttccacttgctgcagaaata

SEQ ID NO: 66967 - DNA, 79 bp, Homo sapiens
aaacaccgccagggcgctccagctggccaggatgatggccagctccagaaggttccacttgctgcagaaatagccccac

SEQ ID NO: 66968 - DNA, 83 bp, Homo sapiens
gctccagctggccaggatgatggccagctccagaaggttccacttgctgcagaaatagccccacgtctctttactcatgcgct

SEQ ID NO: 66969 - DNA, 82 bp, Homo sapiens
gccaggatgatggccagctccagaaggttccacttgctgcagaaatagccccacgtctctttactcatgcgcttgccctgga

SEQ ID NO: 66970 - DNA, 79 bp, Homo sapiens
atgatggccagctccagaaggttccacttgctgcagaaatagccccacgtctctttactcatgcgcttgccctggaaaa

SEQ ID NO: 66971 - DNA, 77 bp, Homo sapiens
tccagaaggttccacttgctgcagaaatagccccacgtctctttactcatgcgcttgccctggaaaaggagcgtgaa

SEQ ID NO: 66972 - DNA, 76 bp, Homo sapiens
ggttccacttgctgcagaaatagccccacgtctctttactcatgcgcttgccctggaaaaggagcgtgaagttgcg

SEQ ID NO: 66973 - DNA, 74 bp, Homo sapiens
agaaatagccccacgtctctttactcatgcgcttgccctggaaaaggagcgtgaagttgcggccgtgactgccc

SEQ ID NO: 66974 - DNA, 79 bp, Homo sapiens
ccctgcaccccaaaccctgctcatgagctatgagcatgccccttacctgcaccaccatgtagtagaggaggaagaggaa

SEQ ID NO: 66975 - DNA, 84 bp, Homo sapiens
caaaccctgctcatgagctatgagcatgccccttacctgcaccaccatgtagtagaggaggaagaggaagtagatgagctctgc

SEQ ID NO: 66976 - DNA, 85 bp, Homo sapiens
tcatgagctatgagcatgccccttacctgcaccaccatgtagtagaggaggaagaggaagtagatgagctctgccgctaccacga

SEQ ID NO: 66977 - DNA, 81 bp, Homo sapiens
agctatgagcatgccccttacctgcaccaccatgtagtagaggaggaagaggaagtagatgagctctgccgctaccacgaa

SEQ ID NO: 66978 - DNA, 76 bp, Homo sapiens
cccttacctgcaccaccatgtagtagaggaggaagaggaagtagatgagctctgccgctaccacgaaggggtgcca

SEQ ID NO: 66979 - DNA, 76 bp, Homo sapiens
accaccatgtagtagaggaggaagaggaagtagatgagctctgccgctaccacgaaggggtgccagccgtcggtga

SEQ ID NO: 66980 - DNA, 74 bp, Homo sapiens
atgtagtagaggaggaagaggaagtagatgagctctgccgctaccacgaaggggtgccagccgtcggtgaaggg

SEQ ID NO: 66981 - DNA, 74 bp, Homo sapiens
gaagaggaagtagatgagctctgccgctaccacgaaggggtgccagccgtcggtgaaggggtacaggcggaggc

SEQ ID NO: 66982 - DNA, 75 bp, Homo sapiens
aagtagatgagctctgccgctaccacgaaggggtgccagccgtcggtgaaggggtacaggcggaggctctgcagg

SEQ ID NO: 66983 - DNA, 75 bp, Homo sapiens
tctgccgctaccacgaaggggtgccagccgtcggtgaaggggtacaggcggaggctctgcagggccgcgtgcgta

SEQ ID NO: 66984 - DNA, 71 bp, Homo sapiens
taccacgaaggggtgccagccgtcggtgaaggggtacaggcggaggctctgcagggccgcgtgcgtaaaaa

SEQ ID NO: 66985 - DNA, 71 bp, Homo sapiens
gggtgccagccgtcggtgaaggggtacaggcggaggctctgcagggccgcgtgcgtaaaaaaggtgcctgg

SEQ ID NO: 66986 - DNA, 70 bp, Homo sapiens
ccgtcggtgaaggggtacaggcggaggctctgcagggccgcgtgcgtaaaaaaggtgcctggggagcaaa

SEQ ID NO: 66987 - DNA, 76 bp, Homo sapiens
ggtacaggcggaggctctgcagggccgcgtgcgtaaaaaaggtgcctggggagcaaagtgcgttctgctcactctg

SEQ ID NO: 66988 - DNA, 82 bp, Homo sapiens
tatatgtcttctggagccctgcagagggttcccaggcgaggctgcccacccagagcgctggtctctagcgtcagcgtgacaa

SEQ ID NO: 66989 - DNA, 81 bp, Homo sapiens
gagccctgcagagggttcccaggcgaggctgcccacccagagcgctggtctctagcgtcagcgtgacaatgcagaacaggt

SEQ ID NO: 66990 - DNA, 78 bp, Homo sapiens
agagggttcccaggcgaggctgcccacccagagcgctggtctctagcgtcagcgtgacaatgcagaacaggttgacgt

SEQ ID NO: 66991 - DNA, 81 bp, Homo sapiens
aggcgaggctgcccacccagagcgctggtctctagcgtcagcgtgacaatgcagaacaggttgacgttggcgttgtagaca

SEQ ID NO: 66992 - DNA, 82 bp, Homo sapiens
tgcccacccagagcgctggtctctagcgtcagcgtgacaatgcagaacaggttgacgttggcgttgtagacagtggactcca

SEQ ID NO: 66993 - DNA, 81 bp, Homo sapiens
agagcgctggtctctagcgtcagcgtgacaatgcagaacaggttgacgttggcgttgtagacagtggactccacaaacaca

SEQ ID NO: 66994 - DNA, 81 bp, Homo sapiens
tggtctctagcgtcagcgtgacaatgcagaacaggttgacgttggcgttgtagacagtggactccacaaacacagctctgg

SEQ ID NO: 66995 - DNA, 79 bp, Homo sapiens
agcgtgacaatgcagaacaggttgacgttggcgttgtagacagtggactccacaaacacagctctggtcagggcgtcca

SEQ ID NO: 66996 - DNA, 78 bp, Homo sapiens
acaatgcagaacaggttgacgttggcgttgtagacagtggactccacaaacacagctctggtcagggcgtccagccag

SEQ ID NO: 66997 - DNA, 78 bp, Homo sapiens
ttgacgttggcgttgtagacagtggactccacaaacacagctctggtcagggcgtccagccaggtgttgtcaaagaga

SEQ ID NO: 66998 - DNA, 78 bp, Homo sapiens
cgttgtagacagtggactccacaaacacagctctggtcagggcgtccagccaggtgttgtcaaagagatagcggagaa

SEQ ID NO: 66999 - DNA, 81 bp, Homo sapiens
tagacagtggactccacaaacacagctctggtcagggcgtccagccaggtgttgtcaaagagatagcggagaattctgcag

SEQ ID NO: 67000 - DNA, 78 bp, Homo sapiens
actccacaaacacagctctggtcagggcgtccagccaggtgttgtcaaagagatagcggagaattctgcaggaaagag

SEQ ID NO: 67001 - DNA, 79 bp, Homo sapiens
agctctggtcagggcgtccagccaggtgttgtcaaagagatagcggagaattctgcaggaaagagtggcattgggtcat

SEQ ID NO: 67002 - DNA, 81 bp, Homo sapiens
agggcgtccagccaggtgttgtcaaagagatagcggagaattctgcaggaaagagtggcattgggtcattgctatcctgca

SEQ ID NO: 67003 - DNA, 75 bp, Homo sapiens
actctagcaaaagactttactcagctacaaatgaatcaagtcaaccttaccttgacgtgctttggcgatcagtcc

SEQ ID NO: 67004 - DNA, 72 bp, Homo sapiens
aaagactttactcagctacaaatgaatcaagtcaaccttaccttgacgtgctttggcgatcagtccccaagg

SEQ ID NO: 67005 - DNA, 72 bp, Homo sapiens
ctacaaatgaatcaagtcaaccttaccttgacgtgctttggcgatcagtccccaaggggaccacgtagcctc

SEQ ID NO: 67006 - DNA, 71 bp, Homo sapiens
aatgaatcaagtcaaccttaccttgacgtgctttggcgatcagtccccaaggggaccacgtagcctcctcc

SEQ ID NO: 67007 - DNA, 68 bp, Homo sapiens
aaccttaccttgacgtgctttggcgatcagtccccaaggggaccacgtagcctcctccccggtacaca

SEQ ID NO: 67008 - DNA, 71 bp, Homo sapiens
ccttgacgtgctttggcgatcagtccccaaggggaccacgtagcctcctccccggtacacagtgagtttgc

SEQ ID NO: 67009 - DNA, 72 bp, Homo sapiens
ttggcgatcagtccccaaggggaccacgtagcctcctccccggtacacagtgagtttgccccagatgggata

SEQ ID NO: 67010 - DNA, 68 bp, Homo sapiens
cccaaggggaccacgtagcctcctccccggtacacagtgagtttgccccagatgggatacccttgacg

SEQ ID NO: 67011 - DNA, 70 bp, Homo sapiens
ggaccacgtagcctcctccccggtacacagtgagtttgccccagatgggatacccttgacgttggtcctg

SEQ ID NO: 67012 - DNA, 72 bp, Homo sapiens
tagcctcctccccggtacacagtgagtttgccccagatgggatacccttgacgttggtcctggctctggtac

SEQ ID NO: 67013 - DNA, 74 bp, Homo sapiens
cccggtacacagtgagtttgccccagatgggatacccttgacgttggtcctggctctggtactgccattactga

SEQ ID NO: 67014 - DNA, 74 bp, Homo sapiens
agtttgccccagatgggatacccttgacgttggtcctggctctggtactgccattactgagggtggtggcattc

SEQ ID NO: 67015 - DNA, 74 bp, Homo sapiens
agatgggatacccttgacgttggtcctggctctggtactgccattactgagggtggtggcattccagccttccc

SEQ ID NO: 67016 - DNA, 74 bp, Homo sapiens
atacccttgacgttggtcctggctctggtactgccattactgagggtggtggcattccagccttccccatagtc

SEQ ID NO: 67017 - DNA, 78 bp, Homo sapiens
acgttggtcctggctctggtactgccattactgagggtggtggcattccagccttccccatagtctgccatgtcttca

SEQ ID NO: 67018 - DNA, 81 bp, Homo sapiens
tctggtactgccattactgagggtggtggcattccagccttccccatagtctgccatgtcttcagcatccagggaatatgg

SEQ ID NO: 67019 - DNA, 82 bp, Homo sapiens
cattactgagggtggtggcattccagccttccccatagtctgccatgtcttcagcatccagggaatatggtgcacggcatcc

SEQ ID NO: 67020 - DNA, 84 bp, Homo sapiens
ggtggtggcattccagccttccccatagtctgccatgtcttcagcatccagggaatatggtgcacggcatccgttgagatatgc

SEQ ID NO: 67021 - DNA, 85 bp, Homo sapiens
attccagccttccccatagtctgccatgtcttcagcatccagggaatatggtgcacggcatccgttgagatatgcctgcggctgc

SEQ ID NO: 67022 - DNA, 86 bp, Homo sapiens
cttccccatagtctgccatgtcttcagcatccagggaatatggtgcacggcatccgttgagatatgcctgcggctgctgggcaaga

SEQ ID NO: 67023 - DNA, 85 bp, Homo sapiens
tcttcagcatccagggaatatggtgcacggcatccgttgagatatgcctgcggctgctgggcaagagggcaagagctttcctgga

SEQ ID NO: 67024 - DNA, 80 bp, Homo sapiens
atccagggaatatggtgcacggcatccgttgagatatgcctgcggctgctgggcaagagggcaagagctttcctggaccc

SEQ ID NO: 67025 - DNA, 82 bp, Homo sapiens
tatggtgcacggcatccgttgagatatgcctgcggctgctgggcaagagggcaagagctttcctggaccctcacttgacgaa

SEQ ID NO: 67026 - DNA, 81 bp, Homo sapiens
atccgttgagatatgcctgcggctgctgggcaagagggcaagagctttcctggaccctcacttgacgaatctgggcactgc

SEQ ID NO: 67027 - DNA, 80 bp, Homo sapiens
atatgcctgcggctgctgggcaagagggcaagagctttcctggaccctcacttgacgaatctgggcactgccaaccagct

SEQ ID NO: 67028 - DNA, 77 bp, Homo sapiens
ctgctgggcaagagggcaagagctttcctggaccctcacttgacgaatctgggcactgccaaccagcttggagttcc

SEQ ID NO: 67029 - DNA, 78 bp, Homo sapiens
agagggcaagagctttcctggaccctcacttgacgaatctgggcactgccaaccagcttggagttcccatcagtgata

SEQ ID NO: 67030 - DNA, 76 bp, Homo sapiens
agctttcctggaccctcacttgacgaatctgggcactgccaaccagcttggagttcccatcagtgataaagcctaa

SEQ ID NO: 67031 - DNA, 74 bp, Homo sapiens
gaccctcacttgacgaatctgggcactgccaaccagcttggagttcccatcagtgataaagcctaaaaagaaaa

SEQ ID NO: 67032 - DNA, 72 bp, Homo sapiens
acttgacgaatctgggcactgccaaccagcttggagttcccatcagtgataaagcctaaaaagaaaaacaag

SEQ ID NO: 67033 - DNA, 71 bp, Homo sapiens
tctgggcactgccaaccagcttggagttcccatcagtgataaagcctaaaaagaaaaacaaggtgggtaaa

SEQ ID NO: 67034 - DNA, 73 bp, Homo sapiens
agaaggcacaaggaggctgacacagccccagggcttcaggacttacctggggggtgaccatacaggttactca

SEQ ID NO: 67035 - DNA, 71 bp, Homo sapiens
acaaggaggctgacacagccccagggcttcaggacttacctggggggtgaccatacaggttactcacgagg

SEQ ID NO: 67036 - DNA, 70 bp, Homo sapiens
acacagccccagggcttcaggacttacctggggggtgaccatacaggttactcacgagggtggtgttggc

SEQ ID NO: 67037 - DNA, 69 bp, Homo sapiens
agggcttcaggacttacctggggggtgaccatacaggttactcacgagggtggtgttggcccacttgaa

SEQ ID NO: 67038 - DNA, 69 bp, Homo sapiens
acttacctggggggtgaccatacaggttactcacgagggtggtgttggcccacttgaagaactctcgga

SEQ ID NO: 67039 - DNA, 72 bp, Homo sapiens
ggggtgaccatacaggttactcacgagggtggtgttggcccacttgaagaactctcggaagccgagcacacc

SEQ ID NO: 67040 - DNA, 72 bp, Homo sapiens
accatacaggttactcacgagggtggtgttggcccacttgaagaactctcggaagccgagcacacctgaaaa

SEQ ID NO: 67041 - DNA, 73 bp, Homo sapiens
ttactcacgagggtggtgttggcccacttgaagaactctcggaagccgagcacacctgaaaagcccctggtga

SEQ ID NO: 67042 - DNA, 74 bp, Homo sapiens
agggtggtgttggcccacttgaagaactctcggaagccgagcacacctgaaaagcccctggtgaagctgtgctg

SEQ ID NO: 67043 - DNA, 77 bp, Homo sapiens
cacttgaagaactctcggaagccgagcacacctgaaaagcccctggtgaagctgtgctggaggtgtctgttgaggtg

SEQ ID NO: 67044 - DNA, 75 bp, Homo sapiens
aagaactctcggaagccgagcacacctgaaaagcccctggtgaagctgtgctggaggtgtctgttgaggtggtag

SEQ ID NO: 67045 - DNA, 75 bp, Homo sapiens
aagccgagcacacctgaaaagcccctggtgaagctgtgctggaggtgtctgttgaggtggtaggcgctggggtcc

SEQ ID NO: 67046 - DNA, 74 bp, Homo sapiens
cctgaaaagcccctggtgaagctgtgctggaggtgtctgttgaggtggtaggcgctggggtccctctgcccgta

SEQ ID NO: 67047 - DNA, 76 bp, Homo sapiens
ccctggtgaagctgtgctggaggtgtctgttgaggtggtaggcgctggggtccctctgcccgtaggccacgagcag

SEQ ID NO: 67048 - DNA, 79 bp, Homo sapiens
aagctgtgctggaggtgtctgttgaggtggtaggcgctggggtccctctgcccgtaggccacgagcagtagcatccaca

SEQ ID NO: 67049 - DNA, 76 bp, Homo sapiens
aggtgtctgttgaggtggtaggcgctggggtccctctgcccgtaggccacgagcagtagcatccacaggaagccca

SEQ ID NO: 67050 - DNA, 78 bp, Homo sapiens
tgttgaggtggtaggcgctggggtccctctgcccgtaggccacgagcagtagcatccacaggaagcccaagtatgctg

SEQ ID NO: 67051 - DNA, 76 bp, Homo sapiens
tggtaggcgctggggtccctctgcccgtaggccacgagcagtagcatccacaggaagcccaagtatgctggggagg

SEQ ID NO: 67052 - DNA, 80 bp, Homo sapiens
tccctctgcccgtaggccacgagcagtagcatccacaggaagcccaagtatgctggggagggaggcacagtccctgctca

SEQ ID NO: 67053 - DNA, 81 bp, Homo sapiens
cgtaggccacgagcagtagcatccacaggaagcccaagtatgctggggagggaggcacagtccctgctcaggcaggatcca

SEQ ID NO: 67054 - DNA, 82 bp, Homo sapiens
tctgtttcaggctgtgctgagagccagcgagtgggaaggatgcctacccaggatttctctgatgagggcaaatgctttctgt

SEQ ID NO: 67055 - DNA, 81 bp, Homo sapiens
aggctgtgctgagagccagcgagtgggaaggatgcctacccaggatttctctgatgagggcaaatgctttctgttccttga

SEQ ID NO: 67056 - DNA, 76 bp, Homo sapiens
agagccagcgagtgggaaggatgcctacccaggatttctctgatgagggcaaatgctttctgttccttgaggtggg

SEQ ID NO: 67057 - DNA, 75 bp, Homo sapiens
tgggaaggatgcctacccaggatttctctgatgagggcaaatgctttctgttccttgaggtgggtggttttcatc

SEQ ID NO: 67058 - DNA, 76 bp, Homo sapiens
aggatgcctacccaggatttctctgatgagggcaaatgctttctgttccttgaggtgggtggttttcatcttctca

SEQ ID NO: 67059 - DNA, 78 bp, Homo sapiens
aggatttctctgatgagggcaaatgctttctgttccttgaggtgggtggttttcatcttctcaatggcagcggtgaga

SEQ ID NO: 67060 - DNA, 77 bp, Homo sapiens
atgagggcaaatgctttctgttccttgaggtgggtggttttcatcttctcaatggcagcggtgagaggtggctggta

SEQ ID NO: 67061 - DNA, 76 bp, Homo sapiens
aaatgctttctgttccttgaggtgggtggttttcatcttctcaatggcagcggtgagaggtggctggtagacatcc

SEQ ID NO: 67062 - DNA, 79 bp, Homo sapiens
tctgttccttgaggtgggtggttttcatcttctcaatggcagcggtgagaggtggctggtagacatccctgctgctgtt

SEQ ID NO: 67063 - DNA, 80 bp, Homo sapiens
tgggtggttttcatcttctcaatggcagcggtgagaggtggctggtagacatccctgctgctgtttcttcgtgctcggaa

SEQ ID NO: 67064 - DNA, 82 bp, Homo sapiens
tttcatcttctcaatggcagcggtgagaggtggctggtagacatccctgctgctgtttcttcgtgctcggaacaaggcatag

SEQ ID NO: 67065 - DNA, 80 bp, Homo sapiens
ttctcaatggcagcggtgagaggtggctggtagacatccctgctgctgtttcttcgtgctcggaacaaggcataggggtc

SEQ ID NO: 67066 - DNA, 77 bp, Homo sapiens
gtgagaggtggctggtagacatccctgctgctgtttcttcgtgctcggaacaaggcataggggtctgtggagggaag

SEQ ID NO: 67067 - DNA, 76 bp, Homo sapiens
aggtggctggtagacatccctgctgctgtttcttcgtgctcggaacaaggcataggggtctgtggagggaaggaca

SEQ ID NO: 67068 - DNA, 77 bp, Homo sapiens
tagacatccctgctgctgtttcttcgtgctcggaacaaggcataggggtctgtggagggaaggacaccaggacagcc

SEQ ID NO: 67069 - DNA, 74 bp, Homo sapiens
aaccctatttcttaccataattcacacttatatgtctacttgtgcatttacctggttgatgccatctccccaaa

SEQ ID NO: 67070 - DNA, 79 bp, Homo sapiens
taccataattcacacttatatgtctacttgtgcatttacctggttgatgccatctccccaaatgggctgttcattccaa

SEQ ID NO: 67071 - DNA, 80 bp, Homo sapiens
ttcacacttatatgtctacttgtgcatttacctggttgatgccatctccccaaatgggctgttcattccaaaggcagcaa

SEQ ID NO: 67072 - DNA, 81 bp, Homo sapiens
tatgtctacttgtgcatttacctggttgatgccatctccccaaatgggctgttcattccaaaggcagcaacctgtgctgtg

SEQ ID NO: 67073 - DNA, 77 bp, Homo sapiens
atttacctggttgatgccatctccccaaatgggctgttcattccaaaggcagcaacctgtgctgtgttggcagggac

SEQ ID NO: 67074 - DNA, 78 bp, Homo sapiens
ttgatgccatctccccaaatgggctgttcattccaaaggcagcaacctgtgctgtgttggcagggactggggttggaa

SEQ ID NO: 67075 - DNA, 74 bp, Homo sapiens
atctccccaaatgggctgttcattccaaaggcagcaacctgtgctgtgttggcagggactggggttggaagtgg

SEQ ID NO: 67076 - DNA, 75 bp, Homo sapiens
tgggctgttcattccaaaggcagcaacctgtgctgtgttggcagggactggggttggaagtggggattgacttta

SEQ ID NO: 67077 - DNA, 74 bp, Homo sapiens
attccaaaggcagcaacctgtgctgtgttggcagggactggggttggaagtggggattgactttacatgggcaa

SEQ ID NO: 67078 - DNA, 72 bp, Homo sapiens
agcaacctgtgctgtgttggcagggactggggttggaagtggggattgactttacatgggcaacaaagaacc

SEQ ID NO: 67079 - DNA, 71 bp, Homo sapiens
tgtgctgtgttggcagggactggggttggaagtggggattgactttacatgggcaacaaagaaccttttgg

SEQ ID NO: 67080 - DNA, 69 bp, Homo sapiens
cagggactggggttggaagtggggattgactttacatgggcaacaaagaaccttttgggctgacgaagc

SEQ ID NO: 67081 - DNA, 81 bp, Homo sapiens
tcatcagggccgcagctggccagaccctgcctccagccaccgaggcacattacctgggcccaacagatgtcctggcagcgg

SEQ ID NO: 67082 - DNA, 78 bp, Homo sapiens
ctggccagaccctgcctccagccaccgaggcacattacctgggcccaacagatgtcctggcagcggggccacagtatc

SEQ ID NO: 67083 - DNA, 78 bp, Homo sapiens
cctgcctccagccaccgaggcacattacctgggcccaacagatgtcctggcagcggggccacagtatcctcctcatcg

SEQ ID NO: 67084 - DNA, 78 bp, Homo sapiens
agccaccgaggcacattacctgggcccaacagatgtcctggcagcggggccacagtatcctcctcatcgtccactctc

SEQ ID NO: 67085 - DNA, 78 bp, Homo sapiens
aggcacattacctgggcccaacagatgtcctggcagcggggccacagtatcctcctcatcgtccactctcttcaagac

SEQ ID NO: 67086 - DNA, 79 bp, Homo sapiens
tgggcccaacagatgtcctggcagcggggccacagtatcctcctcatcgtccactctcttcaagaccagtgcaaagaaa

SEQ ID NO: 67087 - DNA, 80 bp, Homo sapiens
aacagatgtcctggcagcggggccacagtatcctcctcatcgtccactctcttcaagaccagtgcaaagaaagcagcgaa

SEQ ID NO: 67088 - DNA, 80 bp, Homo sapiens
cagcggggccacagtatcctcctcatcgtccactctcttcaagaccagtgcaaagaaagcagcgaatcccagcacctgaa

SEQ ID NO: 67089 - DNA, 77 bp, Homo sapiens
acagtatcctcctcatcgtccactctcttcaagaccagtgcaaagaaagcagcgaatcccagcacctgaaaaatacc

SEQ ID NO: 67090 - DNA, 76 bp, Homo sapiens
atcctcctcatcgtccactctcttcaagaccagtgcaaagaaagcagcgaatcccagcacctgaaaaatacccagg

SEQ ID NO: 67091 - DNA, 75 bp, Homo sapiens
tccactctcttcaagaccagtgcaaagaaagcagcgaatcccagcacctgaaaaatacccagggaggtcctcgaa

SEQ ID NO: 67092 - DNA, 73 bp, Homo sapiens
ttcaagaccagtgcaaagaaagcagcgaatcccagcacctgaaaaatacccagggaggtcctcgaacccactc

SEQ ID NO: 67093 - DNA, 74 bp, Homo sapiens
gatgggtggaggggaggagggcgggtgcctgaggcagggtcctgaccttcaggggctgggtgacgaacatgctc

SEQ ID NO: 67094 - DNA, 73 bp, Homo sapiens
aggggaggagggcgggtgcctgaggcagggtcctgaccttcaggggctgggtgacgaacatgctctccacgaa

SEQ ID NO: 67095 - DNA, 76 bp, Homo sapiens
agggcgggtgcctgaggcagggtcctgaccttcaggggctgggtgacgaacatgctctccacgaaggagacagcca

SEQ ID NO: 67096 - DNA, 82 bp, Homo sapiens
tgaggcagggtcctgaccttcaggggctgggtgacgaacatgctctccacgaaggagacagccatggagatgagccacctga

SEQ ID NO: 67097 - DNA, 78 bp, Homo sapiens
agggtcctgaccttcaggggctgggtgacgaacatgctctccacgaaggagacagccatggagatgagccacctgagg

SEQ ID NO: 67098 - DNA, 80 bp, Homo sapiens
ttcaggggctgggtgacgaacatgctctccacgaaggagacagccatggagatgagccacctgagggagctggccctccc

SEQ ID NO: 67099 - DNA, 82 bp, Homo sapiens
tgacgaacatgctctccacgaaggagacagccatggagatgagccacctgagggagctggccctcccgtagtgcaggccgta

SEQ ID NO: 67100 - DNA, 82 bp, Homo sapiens
aacatgctctccacgaaggagacagccatggagatgagccacctgagggagctggccctcccgtagtgcaggccgtagagca

SEQ ID NO: 67101 - DNA, 80 bp, Homo sapiens
acgaaggagacagccatggagatgagccacctgagggagctggccctcccgtagtgcaggccgtagagcatggtgaagaa

SEQ ID NO: 67102 - DNA, 80 bp, Homo sapiens
ccatggagatgagccacctgagggagctggccctcccgtagtgcaggccgtagagcatggtgaagaaggccgccacgcca

SEQ ID NO: 67103 - DNA, 78 bp, Homo sapiens
atgagccacctgagggagctggccctcccgtagtgcaggccgtagagcatggtgaagaaggccgccacgccactggtg

SEQ ID NO: 67104 - DNA, 76 bp, Homo sapiens
agggagctggccctcccgtagtgcaggccgtagagcatggtgaagaaggccgccacgccactggtggccgctacca

SEQ ID NO: 67105 - DNA, 77 bp, Homo sapiens
ctggccctcccgtagtgcaggccgtagagcatggtgaagaaggccgccacgccactggtggccgctaccaggagcca

SEQ ID NO: 67106 - DNA, 78 bp, Homo sapiens
cgtagtgcaggccgtagagcatggtgaagaaggccgccacgccactggtggccgctaccaggagccagcccaccagga

SEQ ID NO: 67107 - DNA, 78 bp, Homo sapiens
ccgtagagcatggtgaagaaggccgccacgccactggtggccgctaccaggagccagcccaccaggatgcaccaccag

SEQ ID NO: 67108 - DNA, 77 bp, Homo sapiens
atggtgaagaaggccgccacgccactggtggccgctaccaggagccagcccaccaggatgcaccaccagggcaggcc

SEQ ID NO: 67109 - DNA, 75 bp, Homo sapiens
aaggccgccacgccactggtggccgctaccaggagccagcccaccaggatgcaccaccagggcaggccttgaggg

SEQ ID NO: 67110 - DNA, 76 bp, Homo sapiens
actggtggccgctaccaggagccagcccaccaggatgcaccaccagggcaggccttgagggggtttgctcacctga

SEQ ID NO: 67111 - DNA, 78 bp, Homo sapiens
ctaccaggagccagcccaccaggatgcaccaccagggcaggccttgagggggtttgctcacctgaagagcgctgcaaa

SEQ ID NO: 67112 - DNA, 77 bp, Homo sapiens
agccagcccaccaggatgcaccaccagggcaggccttgagggggtttgctcacctgaagagcgctgcaaaggaggtg

SEQ ID NO: 67113 - DNA, 77 bp, Homo sapiens
aggatgcaccaccagggcaggccttgagggggtttgctcacctgaagagcgctgcaaaggaggtggacagacatagt

SEQ ID NO: 67114 - DNA, 74 bp, Homo sapiens
accagggcaggccttgagggggtttgctcacctgaagagcgctgcaaaggaggtggacagacatagttagggtg

SEQ ID NO: 67115 - DNA, 76 bp, Homo sapiens
gctggggcaggcaggcacccactcagcccccagggaagtggattacctggcatgtgcaggggcccaggtgcccggc

SEQ ID NO: 67116 - DNA, 74 bp, Homo sapiens
aggcaggcacccactcagcccccagggaagtggattacctggcatgtgcaggggcccaggtgcccggctgtacc

SEQ ID NO: 67117 - DNA, 71 bp, Homo sapiens
acccactcagcccccagggaagtggattacctggcatgtgcaggggcccaggtgcccggctgtacccccag

SEQ ID NO: 67118 - DNA, 71 bp, Homo sapiens
cagggaagtggattacctggcatgtgcaggggcccaggtgcccggctgtacccccaggccgcccttcaggg

SEQ ID NO: 67119 - DNA, 74 bp, Homo sapiens
aagtggattacctggcatgtgcaggggcccaggtgcccggctgtacccccaggccgcccttcagggtctgcagc

SEQ ID NO: 67120 - DNA, 77 bp, Homo sapiens
catgtgcaggggcccaggtgcccggctgtacccccaggccgcccttcagggtctgcagctgcctgagggcctaggca

SEQ ID NO: 67121 - DNA, 76 bp, Homo sapiens
aggtgcccggctgtacccccaggccgcccttcagggtctgcagctgcctgagggcctaggcatggctgtggggctg

SEQ ID NO: 67122 - DNA, 77 bp, Homo sapiens
tgtacccccaggccgcccttcagggtctgcagctgcctgagggcctaggcatggctgtggggctgggagaagcctcg

SEQ ID NO: 67123 - DNA, 76 bp, Homo sapiens
aggccgcccttcagggtctgcagctgcctgagggcctaggcatggctgtggggctgggagaagcctcggggcccca

SEQ ID NO: 67124 - DNA, 82 bp, Homo sapiens
gtctgcagctgcctgagggcctaggcatggctgtggggctgggagaagcctcggggccccaccagccgcagctcttgctcca

SEQ ID NO: 67125 - DNA, 78 bp, Homo sapiens
tgcctgagggcctaggcatggctgtggggctgggagaagcctcggggccccaccagccgcagctcttgctccacgtgt

SEQ ID NO: 67126 - DNA, 78 bp, Homo sapiens
ctaggcatggctgtggggctgggagaagcctcggggccccaccagccgcagctcttgctccacgtgttccagctgaag

SEQ ID NO: 67127 - DNA, 77 bp, Homo sapiens
ctgtggggctgggagaagcctcggggccccaccagccgcagctcttgctccacgtgttccagctgaaggtacagaca

SEQ ID NO: 67128 - DNA, 78 bp, Homo sapiens
ctgggagaagcctcggggccccaccagccgcagctcttgctccacgtgttccagctgaaggtacagacactgcctgta

SEQ ID NO: 67129 - DNA, 79 bp, Homo sapiens
tcggggccccaccagccgcagctcttgctccacgtgttccagctgaaggtacagacactgcctgtaggcgctgtccttc

SEQ ID NO: 67130 - DNA, 78 bp, Homo sapiens
ccccaccagccgcagctcttgctccacgtgttccagctgaaggtacagacactgcctgtaggcgctgtccttccaggg

SEQ ID NO: 67131 - DNA, 78 bp, Homo sapiens
agctcttgctccacgtgttccagctgaaggtacagacactgcctgtaggcgctgtccttccaggggccactccgtgcc

SEQ ID NO: 67132 - DNA, 76 bp, Homo sapiens
tccacgtgttccagctgaaggtacagacactgcctgtaggcgctgtccttccaggggccactccgtgccgccttgg

SEQ ID NO: 67133 - DNA, 76 bp, Homo sapiens
ttccagctgaaggtacagacactgcctgtaggcgctgtccttccaggggccactccgtgccgccttgggcttggga

SEQ ID NO: 67134 - DNA, 77 bp, Homo sapiens
tacagacactgcctgtaggcgctgtccttccaggggccactccgtgccgccttgggcttgggacactgtgatttctc

SEQ ID NO: 67135 - DNA, 75 bp, Homo sapiens
actgcctgtaggcgctgtccttccaggggccactccgtgccgccttgggcttgggacactgtgatttctctggag

SEQ ID NO: 67136 - DNA, 73 bp, Homo sapiens
ctgtccttccaggggccactccgtgccgccttgggcttgggacactgtgatttctctggaggacaaagaagaa

SEQ ID NO: 67137 - DNA, 75 bp, Homo sapiens
ttccaggggccactccgtgccgccttgggcttgggacactgtgatttctctggaggacaaagaagaaagcgatca

SEQ ID NO: 67138 - DNA, 76 bp, Homo sapiens
gccccaaaatgcggcttctcttggcacagacatgtccagggcttacctttcatttctgatgaccccaaagtgagtg

SEQ ID NO: 67139 - DNA, 76 bp, Homo sapiens
aaaatgcggcttctcttggcacagacatgtccagggcttacctttcatttctgatgaccccaaagtgagtgttaca

SEQ ID NO: 67140 - DNA, 75 bp, Homo sapiens
ttggcacagacatgtccagggcttacctttcatttctgatgaccccaaagtgagtgttacagggtcctctctctt

SEQ ID NO: 67141 - DNA, 72 bp, Homo sapiens
acagacatgtccagggcttacctttcatttctgatgaccccaaagtgagtgttacagggtcctctctctttt

SEQ ID NO: 67142 - DNA, 70 bp, Homo sapiens
agggcttacctttcatttctgatgaccccaaagtgagtgttacagggtcctctctctttttggcttcctc

SEQ ID NO: 67143 - DNA, 71 bp, Homo sapiens
ctttcatttctgatgaccccaaagtgagtgttacagggtcctctctctttttggcttcctcccagaacacc

SEQ ID NO: 67144 - DNA, 72 bp, Homo sapiens
atgaccccaaagtgagtgttacagggtcctctctctttttggcttcctcccagaacacctgccctgatgtgt

SEQ ID NO: 67145 - DNA, 74 bp, Homo sapiens
agtgagtgttacagggtcctctctctttttggcttcctcccagaacacctgccctgatgtgttctgtggataaa

SEQ ID NO: 67146 - DNA, 76 bp, Homo sapiens
ttacagggtcctctctctttttggcttcctcccagaacacctgccctgatgtgttctgtggataaatgacatcttc

SEQ ID NO: 67147 - DNA, 77 bp, Homo sapiens
tctctttttggcttcctcccagaacacctgccctgatgtgttctgtggataaatgacatcttccaccaaggcgagga

SEQ ID NO: 67148 - DNA, 79 bp, Homo sapiens
cttcctcccagaacacctgccctgatgtgttctgtggataaatgacatcttccaccaaggcgaggagactgttgatgtc

SEQ ID NO: 67149 - DNA, 81 bp, Homo sapiens
agaacacctgccctgatgtgttctgtggataaatgacatcttccaccaaggcgaggagactgttgatgtccatcaagttca

SEQ ID NO: 67150 - DNA, 81 bp, Homo sapiens
ccctgatgtgttctgtggataaatgacatcttccaccaaggcgaggagactgttgatgtccatcaagttcactgagtccca

SEQ ID NO: 67151 - DNA, 81 bp, Homo sapiens
tgtgttctgtggataaatgacatcttccaccaaggcgaggagactgttgatgtccatcaagttcactgagtcccagcccaa

SEQ ID NO: 67152 - DNA, 77 bp, Homo sapiens
ggataaatgacatcttccaccaaggcgaggagactgttgatgtccatcaagttcactgagtcccagcccaaggcggg

SEQ ID NO: 67153 - DNA, 77 bp, Homo sapiens
ttccaccaaggcgaggagactgttgatgtccatcaagttcactgagtcccagcccaaggcgggggatggcaccttga

SEQ ID NO: 67154 - DNA, 76 bp, Homo sapiens
aaggcgaggagactgttgatgtccatcaagttcactgagtcccagcccaaggcgggggatggcaccttgagagctt

SEQ ID NO: 67155 - DNA, 77 bp, Homo sapiens
agactgttgatgtccatcaagttcactgagtcccagcccaaggcgggggatggcaccttgagagctttgaagaggga

SEQ ID NO: 67156 - DNA, 77 bp, Homo sapiens
atcaagttcactgagtcccagcccaaggcgggggatggcaccttgagagctttgaagagggagctgacgattcttga

SEQ ID NO: 67157 - DNA, 78 bp, Homo sapiens
ttcactgagtcccagcccaaggcgggggatggcaccttgagagctttgaagagggagctgacgattcttgacacatcc

SEQ ID NO: 67158 - DNA, 76 bp, Homo sapiens
tcccagcccaaggcgggggatggcaccttgagagctttgaagagggagctgacgattcttgacacatcctggtggg

SEQ ID NO: 67159 - DNA, 73 bp, Homo sapiens
aggcgggggatggcaccttgagagctttgaagagggagctgacgattcttgacacatcctggtggggaaaggg

SEQ ID NO: 67160 - DNA, 73 bp, Homo sapiens
accttgagagctttgaagagggagctgacgattcttgacacatcctggtggggaaaggggccataagccaagg

SEQ ID NO: 67161 - DNA, 73 bp, Homo sapiens
agagctttgaagagggagctgacgattcttgacacatcctggtggggaaaggggccataagccaaggtgaggg

SEQ ID NO: 67162 - DNA, 80 bp, Homo sapiens
ttctgctgaggctacagcaccccccaggctagctgaggttgaggacctgccttggtcactgcctcaggtgtcagaaggcc

SEQ ID NO: 67163 - DNA, 78 bp, Homo sapiens
tacagcaccccccaggctagctgaggttgaggacctgccttggtcactgcctcaggtgtcagaaggccgtcctccatg

SEQ ID NO: 67164 - DNA, 77 bp, Homo sapiens
cccaggctagctgaggttgaggacctgccttggtcactgcctcaggtgtcagaaggccgtcctccatgggctgtggg

SEQ ID NO: 67165 - DNA, 77 bp, Homo sapiens
tagctgaggttgaggacctgccttggtcactgcctcaggtgtcagaaggccgtcctccatgggctgtggggagggag

SEQ ID NO: 67166 - DNA, 74 bp, Homo sapiens
aggacctgccttggtcactgcctcaggtgtcagaaggccgtcctccatgggctgtggggagggagtcaggttgg

SEQ ID NO: 67167 - DNA, 72 bp, Homo sapiens
cttggtcactgcctcaggtgtcagaaggccgtcctccatgggctgtggggagggagtcaggttgggggaccc

SEQ ID NO: 67168 - DNA, 69 bp, Homo sapiens
tcaggtgtcagaaggccgtcctccatgggctgtggggagggagtcaggttgggggacccccggtcccat

SEQ ID NO: 67169 - DNA, 68 bp, Homo sapiens
tcagaaggccgtcctccatgggctgtggggagggagtcaggttgggggacccccggtcccattttcca

SEQ ID NO: 67170 - DNA, 69 bp, Homo sapiens
tccatgggctgtggggagggagtcaggttgggggacccccggtcccattttccagtgttctgctccttc

SEQ ID NO: 67171 - DNA, 67 bp, Homo sapiens
tgtggggagggagtcaggttgggggacccccggtcccattttccagtgttctgctccttcgcgaccc

SEQ ID NO: 67172 - DNA, 65 bp, Homo sapiens
agggagtcaggttgggggacccccggtcccattttccagtgttctgctccttcgcgacccgggga

SEQ ID NO: 67173 - DNA, 65 bp, Homo sapiens
ggggacccccggtcccattttccagtgttctgctccttcgcgacccggggacgggtgttctgaaa

SEQ ID NO: 67174 - DNA, 72 bp, Homo sapiens
ggtcccattttccagtgttctgctccttcgcgacccggggacgggtgttctgaaagatctgaacaatcagga

SEQ ID NO: 67175 - DNA, 72 bp, Homo sapiens
attttccagtgttctgctccttcgcgacccggggacgggtgttctgaaagatctgaacaatcaggaggttga

SEQ ID NO: 67176 - DNA, 75 bp, Homo sapiens
tgttctgctccttcgcgacccggggacgggtgttctgaaagatctgaacaatcaggaggttgatggggaacatga

SEQ ID NO: 67177 - DNA, 74 bp, Homo sapiens
cttcgcgacccggggacgggtgttctgaaagatctgaacaatcaggaggttgatggggaacatgaggatggagc

SEQ ID NO: 67178 - DNA, 79 bp, Homo sapiens
acgggtgttctgaaagatctgaacaatcaggaggttgatggggaacatgaggatggagctctccaggccaatcatcacc

SEQ ID NO: 67179 - DNA, 83 bp, Homo sapiens
tgttctgaaagatctgaacaatcaggaggttgatggggaacatgaggatggagctctccaggccaatcatcacctcctgccag

SEQ ID NO: 67180 - DNA, 79 bp, Homo sapiens
atcaggaggttgatggggaacatgaggatggagctctccaggccaatcatcacctcctgccaggtgaattcaattttac

SEQ ID NO: 67181 - DNA, 75 bp, Homo sapiens
gggaacatgaggatggagctctccaggccaatcatcacctcctgccaggtgaattcaattttacctggggaaagg

SEQ ID NO: 67182 - DNA, 75 bp, Homo sapiens
atgaggatggagctctccaggccaatcatcacctcctgccaggtgaattcaattttacctggggaaagggaagga

SEQ ID NO: 67183 - DNA, 72 bp, Homo sapiens
tctccaggccaatcatcacctcctgccaggtgaattcaattttacctggggaaagggaaggaagggatcaaa

SEQ ID NO: 67184 - DNA, 69 bp, Homo sapiens
aatcatcacctcctgccaggtgaattcaattttacctggggaaagggaaggaagggatcaaagggagag

SEQ ID NO: 67185 - DNA, 74 bp, Homo sapiens
aggtccaccagccactaaccctgacctccatgacactgggaattacccaagtccatcttttgctcagctgggtc

SEQ ID NO: 67186 - DNA, 73 bp, Homo sapiens
accagccactaaccctgacctccatgacactgggaattacccaagtccatcttttgctcagctgggtccttgg

SEQ ID NO: 67187 - DNA, 71 bp, Homo sapiens
taaccctgacctccatgacactgggaattacccaagtccatcttttgctcagctgggtccttggggacccc

SEQ ID NO: 67188 - DNA, 76 bp, Homo sapiens
tgacactgggaattacccaagtccatcttttgctcagctgggtccttggggaccccccagaacatgatgctggtca

SEQ ID NO: 67189 - DNA, 76 bp, Homo sapiens
ctgggaattacccaagtccatcttttgctcagctgggtccttggggaccccccagaacatgatgctggtcagcatg

SEQ ID NO: 67190 - DNA, 82 bp, Homo sapiens
aagtccatcttttgctcagctgggtccttggggaccccccagaacatgatgctggtcagcatggtgcacagcagcagggaga

SEQ ID NO: 67191 - DNA, 85 bp, Homo sapiens
tcttttgctcagctgggtccttggggaccccccagaacatgatgctggtcagcatggtgcacagcagcagggagaagcagcagga

SEQ ID NO: 67192 - DNA, 83 bp, Homo sapiens
tgggtccttggggaccccccagaacatgatgctggtcagcatggtgcacagcagcagggagaagcagcaggacaccctctgga

SEQ ID NO: 67193 - DNA, 83 bp, Homo sapiens
gggaccccccagaacatgatgctggtcagcatggtgcacagcagcagggagaagcagcaggacaccctctggacgcgggtgaa

SEQ ID NO: 67194 - DNA, 91 bp, Homo sapiens
agaacatgatgctggtcagcatggtgcacagcagcagggagaagcagcaggacaccctctggacgcgggtgaagctgctgcgagcgcagcg

SEQ ID NO: 67195 - DNA, 91 bp, Homo sapiens
tggtcagcatggtgcacagcagcagggagaagcagcaggacaccctctggacgcgggtgaagctgctgcgagcgcagcggctgaagatcga

SEQ ID NO: 67196 - DNA, 87 bp, Homo sapiens
atggtgcacagcagcagggagaagcagcaggacaccctctggacgcgggtgaagctgctgcgagcgcagcggctgaagatcgaatac

SEQ ID NO: 67197 - DNA, 85 bp, Homo sapiens
agcagggagaagcagcaggacaccctctggacgcgggtgaagctgctgcgagcgcagcggctgaagatcgaataccagatgtgtc

SEQ ID NO: 67198 - DNA, 85 bp, Homo sapiens
agcagcaggacaccctctggacgcgggtgaagctgctgcgagcgcagcggctgaagatcgaataccagatgtgtccatcctggaa

SEQ ID NO: 67199 - DNA, 82 bp, Homo sapiens
aggacaccctctggacgcgggtgaagctgctgcgagcgcagcggctgaagatcgaataccagatgtgtccatcctggaagcc

SEQ ID NO: 67200 - DNA, 82 bp, Homo sapiens
acgcgggtgaagctgctgcgagcgcagcggctgaagatcgaataccagatgtgtccatcctggaagcccgcggaagtcttca

SEQ ID NO: 67201 - DNA, 83 bp, Homo sapiens
gtgaagctgctgcgagcgcagcggctgaagatcgaataccagatgtgtccatcctggaagcccgcggaagtcttcatgaaaaa

SEQ ID NO: 67202 - DNA, 80 bp, Homo sapiens
ctgcgagcgcagcggctgaagatcgaataccagatgtgtccatcctggaagcccgcggaagtcttcatgaaaaacaggtg

SEQ ID NO: 67203 - DNA, 80 bp, Homo sapiens
agcggctgaagatcgaataccagatgtgtccatcctggaagcccgcggaagtcttcatgaaaaacaggtggctgcaggca

SEQ ID NO: 67204 - DNA, 79 bp, Homo sapiens
atcgaataccagatgtgtccatcctggaagcccgcggaagtcttcatgaaaaacaggtggctgcaggcaggcagggaga

SEQ ID NO: 67205 - DNA, 78 bp, Homo sapiens
agatgtgtccatcctggaagcccgcggaagtcttcatgaaaaacaggtggctgcaggcaggcagggagagagggacag

SEQ ID NO: 67206 - DNA, 76 bp, Homo sapiens
atcctggaagcccgcggaagtcttcatgaaaaacaggtggctgcaggcaggcagggagagagggacaggcatttag

SEQ ID NO: 67207 - DNA, 68 bp, Homo sapiens
aagaaaacaaaaataaagtacctgaattgttttctgtcctgctccgtggccacaggaaacaccttatc

SEQ ID NO: 67208 - DNA, 70 bp, Homo sapiens
aaaaataaagtacctgaattgttttctgtcctgctccgtggccacaggaaacaccttatcgaggacgcaa

SEQ ID NO: 67209 - DNA, 73 bp, Homo sapiens
aagtacctgaattgttttctgtcctgctccgtggccacaggaaacaccttatcgaggacgcaatctccaacat

SEQ ID NO: 67210 - DNA, 77 bp, Homo sapiens
ttttctgtcctgctccgtggccacaggaaacaccttatcgaggacgcaatctccaacattgatggatagccaggagt

SEQ ID NO: 67211 - DNA, 80 bp, Homo sapiens
tgctccgtggccacaggaaacaccttatcgaggacgcaatctccaacattgatggatagccaggagttgcacaggaaata

SEQ ID NO: 67212 - DNA, 77 bp, Homo sapiens
cacaggaaacaccttatcgaggacgcaatctccaacattgatggatagccaggagttgcacaggaaataccacttcc

SEQ ID NO: 67213 - DNA, 75 bp, Homo sapiens
aaacaccttatcgaggacgcaatctccaacattgatggatagccaggagttgcacaggaaataccacttccggtc

SEQ ID NO: 67214 - DNA, 79 bp, Homo sapiens
aggacgcaatctccaacattgatggatagccaggagttgcacaggaaataccacttccggtccatcaccaggtcataga

SEQ ID NO: 67215 - DNA, 79 bp, Homo sapiens
aatctccaacattgatggatagccaggagttgcacaggaaataccacttccggtccatcaccaggtcatagaccagcac

SEQ ID NO: 67216 - DNA, 80 bp, Homo sapiens
ttgatggatagccaggagttgcacaggaaataccacttccggtccatcaccaggtcatagaccagcacccggctcacata

SEQ ID NO: 67217 - DNA, 76 bp, Homo sapiens
aggagttgcacaggaaataccacttccggtccatcaccaggtcatagaccagcacccggctcacatacctggagaa

SEQ ID NO: 67218 - DNA, 73 bp, Homo sapiens
acaggaaataccacttccggtccatcaccaggtcatagaccagcacccggctcacatacctggagaagggacc

SEQ ID NO: 67219 - DNA, 73 bp, Homo sapiens
aataccacttccggtccatcaccaggtcatagaccagcacccggctcacatacctggagaagggacccagagt

SEQ ID NO: 67220 - DNA, 76 bp, Homo sapiens
tccatcaccaggtcatagaccagcacccggctcacatacctggagaagggacccagagttttgaggataaggtgga

SEQ ID NO: 67221 - DNA, 76 bp, Homo sapiens
tgggcctgtcactctgtagattctcaaggtttgtctgcccccaactcaccacgatggccggtcccctgagttgtca

SEQ ID NO: 67222 - DNA, 76 bp, Homo sapiens
actctgtagattctcaaggtttgtctgcccccaactcaccacgatggccggtcccctgagttgtcatgccacagcc

SEQ ID NO: 67223 - DNA, 75 bp, Homo sapiens
attctcaaggtttgtctgcccccaactcaccacgatggccggtcccctgagttgtcatgccacagccggaggctc

SEQ ID NO: 67224 - DNA, 76 bp, Homo sapiens
tttgtctgcccccaactcaccacgatggccggtcccctgagttgtcatgccacagccggaggctccgcagttctcc

SEQ ID NO: 67225 - DNA, 74 bp, Homo sapiens
aactcaccacgatggccggtcccctgagttgtcatgccacagccggaggctccgcagttctcccagggggaaca

SEQ ID NO: 67226 - DNA, 73 bp, Homo sapiens
acgatggccggtcccctgagttgtcatgccacagccggaggctccgcagttctcccagggggaacagggtgga

SEQ ID NO: 67227 - DNA, 75 bp, Homo sapiens
ccctgagttgtcatgccacagccggaggctccgcagttctcccagggggaacagggtggagaggaggaaggcatc

SEQ ID NO: 67228 - DNA, 76 bp, Homo sapiens
agttgtcatgccacagccggaggctccgcagttctcccagggggaacagggtggagaggaggaaggcatccactgc

SEQ ID NO: 67229 - DNA, 74 bp, Homo sapiens
agccggaggctccgcagttctcccagggggaacagggtggagaggaggaaggcatccactgctcctcgctcaaa

SEQ ID NO: 67230 - DNA, 72 bp, Homo sapiens
tccgcagttctcccagggggaacagggtggagaggaggaaggcatccactgctcctcgctcaaaaaccggag

SEQ ID NO: 67231 - DNA, 73 bp, Homo sapiens
tcccagggggaacagggtggagaggaggaaggcatccactgctcctcgctcaaaaaccggagtgtcgggatca

SEQ ID NO: 67232 - DNA, 74 bp, Homo sapiens
aacagggtggagaggaggaaggcatccactgctcctcgctcaaaaaccggagtgtcgggatcagccaggtggtg

SEQ ID NO: 67233 - DNA, 76 bp, Homo sapiens
agaggaggaaggcatccactgctcctcgctcaaaaaccggagtgtcgggatcagccaggtggtggggctctctctc

SEQ ID NO: 67234 - DNA, 77 bp, Homo sapiens
aaggcatccactgctcctcgctcaaaaaccggagtgtcgggatcagccaggtggtggggctctctctctccatccag

SEQ ID NO: 67235 - DNA, 77 bp, Homo sapiens
actgctcctcgctcaaaaaccggagtgtcgggatcagccaggtggtggggctctctctctccatccaggccatacag

SEQ ID NO: 67236 - DNA, 77 bp, Homo sapiens
ctcaaaaaccggagtgtcgggatcagccaggtggtggggctctctctctccatccaggccatacagggtgacagtca

SEQ ID NO: 67237 - DNA, 80 bp, Homo sapiens
agtgtcgggatcagccaggtggtggggctctctctctccatccaggccatacagggtgacagtcacctgaaatccagaga

SEQ ID NO: 67238 - DNA, 80 bp, Homo sapiens
atcagccaggtggtggggctctctctctccatccaggccatacagggtgacagtcacctgaaatccagagaccagaagtg

SEQ ID NO: 67239 - DNA, 78 bp, Homo sapiens
aggtggtggggctctctctctccatccaggccatacagggtgacagtcacctgaaatccagagaccagaagtggccaa

SEQ ID NO: 67240 - DNA, 79 bp, Homo sapiens
tgggtgggatgtgctgattaatcagtggatcttgcataggcaggtacctttgaggacgtggctgcccctcgtcggtgtc

SEQ ID NO: 67241 - DNA, 80 bp, Homo sapiens
atgtgctgattaatcagtggatcttgcataggcaggtacctttgaggacgtggctgcccctcgtcggtgtcctgtgtaga

SEQ ID NO: 67242 - DNA, 78 bp, Homo sapiens
attaatcagtggatcttgcataggcaggtacctttgaggacgtggctgcccctcgtcggtgtcctgtgtagactgtca

SEQ ID NO: 67243 - DNA, 76 bp, Homo sapiens
atcttgcataggcaggtacctttgaggacgtggctgcccctcgtcggtgtcctgtgtagactgtcaccaggtagtg

SEQ ID NO: 67244 - DNA, 74 bp, Homo sapiens
aggtacctttgaggacgtggctgcccctcgtcggtgtcctgtgtagactgtcaccaggtagtggtactgagcaa

SEQ ID NO: 67245 - DNA, 76 bp, Homo sapiens
tttgaggacgtggctgcccctcgtcggtgtcctgtgtagactgtcaccaggtagtggtactgagcaaagggatcat

SEQ ID NO: 67246 - DNA, 77 bp, Homo sapiens
cgtggctgcccctcgtcggtgtcctgtgtagactgtcaccaggtagtggtactgagcaaagggatcattgtcttcca

SEQ ID NO: 67247 - DNA, 80 bp, Homo sapiens
tcgtcggtgtcctgtgtagactgtcaccaggtagtggtactgagcaaagggatcattgtcttccagcactgtgaccttca

SEQ ID NO: 67248 - DNA, 80 bp, Homo sapiens
ctgtgtagactgtcaccaggtagtggtactgagcaaagggatcattgtcttccagcactgtgaccttcacctgaagagaa

SEQ ID NO: 67249 - DNA, 81 bp, Homo sapiens
tgtcaccaggtagtggtactgagcaaagggatcattgtcttccagcactgtgaccttcacctgaagagaaggacagcatta

SEQ ID NO: 67250 - DNA, 78 bp, Homo sapiens
aggtagtggtactgagcaaagggatcattgtcttccagcactgtgaccttcacctgaagagaaggacagcattaggaa

SEQ ID NO: 67251 - DNA, 80 bp, Homo sapiens
actgagcaaagggatcattgtcttccagcactgtgaccttcacctgaagagaaggacagcattaggaaggccttgctcag

SEQ ID NO: 67252 - DNA, 76 bp, Homo sapiens
agttttctccaggacggtgtacgcagcgccaatggttctcagcctcaccttggcctgatcctgagcgtccttcctc

SEQ ID NO: 67253 - DNA, 79 bp, Homo sapiens
aggacggtgtacgcagcgccaatggttctcagcctcaccttggcctgatcctgagcgtccttcctcctcgcccagatca

SEQ ID NO: 67254 - DNA, 82 bp, Homo sapiens
tgtacgcagcgccaatggttctcagcctcaccttggcctgatcctgagcgtccttcctcctcgcccagatcaccaccagcac

SEQ ID NO: 67255 - DNA, 79 bp, Homo sapiens
aatggttctcagcctcaccttggcctgatcctgagcgtccttcctcctcgcccagatcaccaccagcacgtagaccaca

SEQ ID NO: 67256 - DNA, 80 bp, Homo sapiens
agcctcaccttggcctgatcctgagcgtccttcctcctcgcccagatcaccaccagcacgtagaccacacacaggcagcc

SEQ ID NO: 67257 - DNA, 81 bp, Homo sapiens
tggcctgatcctgagcgtccttcctcctcgcccagatcaccaccagcacgtagaccacacacaggcagcccacggtggtca

SEQ ID NO: 67258 - DNA, 78 bp, Homo sapiens
atcctgagcgtccttcctcctcgcccagatcaccaccagcacgtagaccacacacaggcagcccacggtggtcacgac

SEQ ID NO: 67259 - DNA, 77 bp, Homo sapiens
ttcctcctcgcccagatcaccaccagcacgtagaccacacacaggcagcccacggtggtcacgaccacagggttgtc

SEQ ID NO: 67260 - DNA, 76 bp, Homo sapiens
ccagatcaccaccagcacgtagaccacacacaggcagcccacggtggtcacgaccacagggttgtcctcaaaggtg

SEQ ID NO: 67261 - DNA, 74 bp, Homo sapiens
accaccagcacgtagaccacacacaggcagcccacggtggtcacgaccacagggttgtcctcaaaggtggcaaa

SEQ ID NO: 67262 - DNA, 76 bp, Homo sapiens
acgtagaccacacacaggcagcccacggtggtcacgaccacagggttgtcctcaaaggtggcaaagagctcagcag

SEQ ID NO: 67263 - DNA, 78 bp, Homo sapiens
acaggcagcccacggtggtcacgaccacagggttgtcctcaaaggtggcaaagagctcagcagtctggtggatgttga

SEQ ID NO: 67264 - DNA, 79 bp, Homo sapiens
acggtggtcacgaccacagggttgtcctcaaaggtggcaaagagctcagcagtctggtggatgttgatggcattggaca

SEQ ID NO: 67265 - DNA, 80 bp, Homo sapiens
acgaccacagggttgtcctcaaaggtggcaaagagctcagcagtctggtggatgttgatggcattggacatcaccaggaa

SEQ ID NO: 67266 - DNA, 82 bp, Homo sapiens
ttgtcctcaaaggtggcaaagagctcagcagtctggtggatgttgatggcattggacatcaccaggaacgtgcttccgaaga

SEQ ID NO: 67267 - DNA, 80 bp, Homo sapiens
aaaggtggcaaagagctcagcagtctggtggatgttgatggcattggacatcaccaggaacgtgcttccgaagaaagtga

SEQ ID NO: 67268 - DNA, 81 bp, Homo sapiens
aaagagctcagcagtctggtggatgttgatggcattggacatcaccaggaacgtgcttccgaagaaagtgaggtggttgca

SEQ ID NO: 67269 - DNA, 80 bp, Homo sapiens
agtctggtggatgttgatggcattggacatcaccaggaacgtgcttccgaagaaagtgaggtggttgcagaggcagtgtg

SEQ ID NO: 67270 - DNA, 79 bp, Homo sapiens
atgttgatggcattggacatcaccaggaacgtgcttccgaagaaagtgaggtggttgcagaggcagtgtgtctggtagg

SEQ ID NO: 67271 - DNA, 78 bp, Homo sapiens
atggcattggacatcaccaggaacgtgcttccgaagaaagtgaggtggttgcagaggcagtgtgtctggtaggggctg

SEQ ID NO: 67272 - DNA, 75 bp, Homo sapiens
acatcaccaggaacgtgcttccgaagaaagtgaggtggttgcagaggcagtgtgtctggtaggggctggtccgag

SEQ ID NO: 67273 - DNA, 73 bp, Homo sapiens
acgtgcttccgaagaaagtgaggtggttgcagaggcagtgtgtctggtaggggctggtccgaggccccaccta

SEQ ID NO: 67274 - DNA, 72 bp, Homo sapiens
agaaagtgaggtggttgcagaggcagtgtgtctggtaggggctggtccgaggccccacctacaacccataaa

SEQ ID NO: 67275 - DNA, 74 bp, Homo sapiens
tggttgcagaggcagtgtgtctggtaggggctggtccgaggccccacctacaacccataaaggggctgtcagtg

SEQ ID NO: 67276 - DNA, 72 bp, Homo sapiens
agaggcagtgtgtctggtaggggctggtccgaggccccacctacaacccataaaggggctgtcagtggagac

SEQ ID NO: 67277 - DNA, 79 bp, Homo sapiens
cacagcccaccaagctgcctcatctccttcacttcgctctccttacctggcatcctgagtcgtcccaagtctcctggac

SEQ ID NO: 67278 - DNA, 78 bp, Homo sapiens
accaagctgcctcatctccttcacttcgctctccttacctggcatcctgagtcgtcccaagtctcctggacctcatcc

SEQ ID NO: 67279 - DNA, 79 bp, Homo sapiens
tcatctccttcacttcgctctccttacctggcatcctgagtcgtcccaagtctcctggacctcatcccagaacacacag

SEQ ID NO: 67280 - DNA, 79 bp, Homo sapiens
cttcacttcgctctccttacctggcatcctgagtcgtcccaagtctcctggacctcatcccagaacacacagtgagaca

SEQ ID NO: 67281 - DNA, 78 bp, Homo sapiens
tccttacctggcatcctgagtcgtcccaagtctcctggacctcatcccagaacacacagtgagacaggaaggtggtga

SEQ ID NO: 67282 - DNA, 79 bp, Homo sapiens
catcctgagtcgtcccaagtctcctggacctcatcccagaacacacagtgagacaggaaggtggtgatgccaaccgtga

SEQ ID NO: 67283 - DNA, 78 bp, Homo sapiens
tgagtcgtcccaagtctcctggacctcatcccagaacacacagtgagacaggaaggtggtgatgccaaccgtgaggtc

SEQ ID NO: 67284 - DNA, 75 bp, Homo sapiens
aagtctcctggacctcatcccagaacacacagtgagacaggaaggtggtgatgccaaccgtgaggtccctgccgg

SEQ ID NO: 67285 - DNA, 76 bp, Homo sapiens
acctcatcccagaacacacagtgagacaggaaggtggtgatgccaaccgtgaggtccctgccgggggctggctcca

SEQ ID NO: 67286 - DNA, 77 bp, Homo sapiens
agaacacacagtgagacaggaaggtggtgatgccaaccgtgaggtccctgccgggggctggctccaggtcagactca

SEQ ID NO: 67287 - DNA, 74 bp, Homo sapiens
agacaggaaggtggtgatgccaaccgtgaggtccctgccgggggctggctccaggtcagactcagggaccacag

SEQ ID NO: 67288 - DNA, 76 bp, Homo sapiens
gtggtgatgccaaccgtgaggtccctgccgggggctggctccaggtcagactcagggaccacagtcaaatagtaga

SEQ ID NO: 67289 - DNA, 73 bp, Homo sapiens
atgccaaccgtgaggtccctgccgggggctggctccaggtcagactcagggaccacagtcaaatagtagaccc

SEQ ID NO: 67290 - DNA, 71 bp, Homo sapiens
aggtccctgccgggggctggctccaggtcagactcagggaccacagtcaaatagtagaccccttctccaaa

SEQ ID NO: 67291 - DNA, 73 bp, Homo sapiens
ggggctggctccaggtcagactcagggaccacagtcaaatagtagaccccttctccaaaacgcaggtcctgtg

SEQ ID NO: 67292 - DNA, 75 bp, Homo sapiens
tccaggtcagactcagggaccacagtcaaatagtagaccccttctccaaaacgcaggtcctgtgggctcaggatc

SEQ ID NO: 67293 - DNA, 73 bp, Homo sapiens
agactcagggaccacagtcaaatagtagaccccttctccaaaacgcaggtcctgtgggctcaggatccacgtg

SEQ ID NO: 67294 - DNA, 76 bp, Homo sapiens
acagtcaaatagtagaccccttctccaaaacgcaggtcctgtgggctcaggatccacgtgggcagctcatctgtag

SEQ ID NO: 67295 - DNA, 75 bp, Homo sapiens
ttctccaaaacgcaggtcctgtgggctcaggatccacgtgggcagctcatctgtaggaaagggggttccaggtca

SEQ ID NO: 67296 - DNA, 75 bp, Homo sapiens
aaaacgcaggtcctgtgggctcaggatccacgtgggcagctcatctgtaggaaagggggttccaggtcagcctga

SEQ ID NO: 67297 - DNA, 78 bp, Homo sapiens
cccaggcagcagctcaggaaatggtcacaggcctacctggagccaccattggtacgaggtgagtttgggcatcgtagc

SEQ ID NO: 67298 - DNA, 77 bp, Homo sapiens
agctcaggaaatggtcacaggcctacctggagccaccattggtacgaggtgagtttgggcatcgtagctgctcttgt

SEQ ID NO: 67299 - DNA, 75 bp, Homo sapiens
aggaaatggtcacaggcctacctggagccaccattggtacgaggtgagtttgggcatcgtagctgctcttgttgg

SEQ ID NO: 67300 - DNA, 75 bp, Homo sapiens
aggcctacctggagccaccattggtacgaggtgagtttgggcatcgtagctgctcttgttggggtggtagccata

SEQ ID NO: 67301 - DNA, 77 bp, Homo sapiens
tggagccaccattggtacgaggtgagtttgggcatcgtagctgctcttgttggggtggtagccatagcccaggctaa

SEQ ID NO: 67302 - DNA, 78 bp, Homo sapiens
attggtacgaggtgagtttgggcatcgtagctgctcttgttggggtggtagccatagcccaggctaagcgtgagtgca

SEQ ID NO: 67303 - DNA, 79 bp, Homo sapiens
aggtgagtttgggcatcgtagctgctcttgttggggtggtagccatagcccaggctaagcgtgagtgcaatgtctggtc

SEQ ID NO: 67304 - DNA, 83 bp, Homo sapiens
atcgtagctgctcttgttggggtggtagccatagcccaggctaagcgtgagtgcaatgtctggtctccagtgcagctggatcc

SEQ ID NO: 67305 - DNA, 82 bp, Homo sapiens
agctgctcttgttggggtggtagccatagcccaggctaagcgtgagtgcaatgtctggtctccagtgcagctggatccccaa

SEQ ID NO: 67306 - DNA, 79 bp, Homo sapiens
gggtggtagccatagcccaggctaagcgtgagtgcaatgtctggtctccagtgcagctggatccccaaggttgcctccc

SEQ ID NO: 67307 - DNA, 79 bp, Homo sapiens
atagcccaggctaagcgtgagtgcaatgtctggtctccagtgcagctggatccccaaggttgcctcccctgaagtcacg

SEQ ID NO: 67308 - DNA, 79 bp, Homo sapiens
ctaagcgtgagtgcaatgtctggtctccagtgcagctggatccccaaggttgcctcccctgaagtcacgttcacccaca

SEQ ID NO: 67309 - DNA, 78 bp, Homo sapiens
agtgcaatgtctggtctccagtgcagctggatccccaaggttgcctcccctgaagtcacgttcacccacaaagcttca

SEQ ID NO: 67310 - DNA, 76 bp, Homo sapiens
atgtctggtctccagtgcagctggatccccaaggttgcctcccctgaagtcacgttcacccacaaagcttcaggac

SEQ ID NO: 67311 - DNA, 76 bp, Homo sapiens
tgcagctggatccccaaggttgcctcccctgaagtcacgttcacccacaaagcttcaggactggtcaggttcaaca

SEQ ID NO: 67312 - DNA, 70 bp, Homo sapiens
atccccaaggttgcctcccctgaagtcacgttcacccacaaagcttcaggactggtcaggttcaacacgg

SEQ ID NO: 67313 - DNA, 71 bp, Homo sapiens
aaggttgcctcccctgaagtcacgttcacccacaaagcttcaggactggtcaggttcaacacggtcggctg

SEQ ID NO: 67314 - DNA, 75 bp, Homo sapiens
cctgaagtcacgttcacccacaaagcttcaggactggtcaggttcaacacggtcggctggctgtgtctttgtgaa

SEQ ID NO: 67315 - DNA, 73 bp, Homo sapiens
acgttcacccacaaagcttcaggactggtcaggttcaacacggtcggctggctgtgtctttgtgaatgccggg

SEQ ID NO: 67316 - DNA, 80 bp, Homo sapiens
aaagcttcaggactggtcaggttcaacacggtcggctggctgtgtctttgtgaatgccggggcagcaggatctgtgatca

SEQ ID NO: 67317 - DNA, 80 bp, Homo sapiens
ctggtcaggttcaacacggtcggctggctgtgtctttgtgaatgccggggcagcaggatctgtgatcagaaacaatccta

SEQ ID NO: 67318 - DNA, 79 bp, Homo sapiens
aggttcaacacggtcggctggctgtgtctttgtgaatgccggggcagcaggatctgtgatcagaaacaatcctattgaa

SEQ ID NO: 67319 - DNA, 81 bp, Homo sapiens
ggtcggctggctgtgtctttgtgaatgccggggcagcaggatctgtgatcagaaacaatcctattgaaggtgtgccaggaa

SEQ ID NO: 67320 - DNA, 72 bp, Homo sapiens
tccagcctgggcccacctaacttttgacgacaccccaaacttctacctcgatattctccgacagattcttca

SEQ ID NO: 67321 - DNA, 72 bp, Homo sapiens
ggcccacctaacttttgacgacaccccaaacttctacctcgatattctccgacagattcttcacaggtatga

SEQ ID NO: 67322 - DNA, 73 bp, Homo sapiens
ctaacttttgacgacaccccaaacttctacctcgatattctccgacagattcttcacaggtatgagttgacca

SEQ ID NO: 67323 - DNA, 75 bp, Homo sapiens
acaccccaaacttctacctcgatattctccgacagattcttcacaggtatgagttgaccactagggctggtcaca

SEQ ID NO: 67324 - DNA, 75 bp, Homo sapiens
aaacttctacctcgatattctccgacagattcttcacaggtatgagttgaccactagggctggtcacacggaggc

SEQ ID NO: 67325 - DNA, 77 bp, Homo sapiens
cctcgatattctccgacagattcttcacaggtatgagttgaccactagggctggtcacacggaggccaccgacagtc

SEQ ID NO: 67326 - DNA, 77 bp, Homo sapiens
acagattcttcacaggtatgagttgaccactagggctggtcacacggaggccaccgacagtcccgctgacatcaaag

SEQ ID NO: 67327 - DNA, 77 bp, Homo sapiens
ttcttcacaggtatgagttgaccactagggctggtcacacggaggccaccgacagtcccgctgacatcaaagtggct

SEQ ID NO: 67328 - DNA, 74 bp, Homo sapiens
agttgaccactagggctggtcacacggaggccaccgacagtcccgctgacatcaaagtggcttcgggctggaaa

SEQ ID NO: 67329 - DNA, 72 bp, Homo sapiens
accactagggctggtcacacggaggccaccgacagtcccgctgacatcaaagtggcttcgggctggaaaggg

SEQ ID NO: 67330 - DNA, 72 bp, Homo sapiens
gtcacacggaggccaccgacagtcccgctgacatcaaagtggcttcgggctggaaaggggctctttgggaaa

SEQ ID NO: 67331 - DNA, 74 bp, Homo sapiens
ccaccgacagtcccgctgacatcaaagtggcttcgggctggaaaggggctctttgggaaactcatgatctgaaa

SEQ ID NO: 67332 - DNA, 74 bp, Homo sapiens
acagtcccgctgacatcaaagtggcttcgggctggaaaggggctctttgggaaactcatgatctgaaaccaaga

SEQ ID NO: 67333 - DNA, 73 bp, Homo sapiens
acatcaaagtggcttcgggctggaaaggggctctttgggaaactcatgatctgaaaccaagagcaaggagtgt

SEQ ID NO: 67334 - DNA, 73 bp, Homo sapiens
agtggcttcgggctggaaaggggctctttgggaaactcatgatctgaaaccaagagcaaggagtgttggccaa

SEQ ID NO: 67335 - DNA, 70 bp, Homo sapiens
ctctgcaaactgtaaaggctgtccccaaggacgctactaccgttattacctttatatccacgggctcctg

SEQ ID NO: 67336 - DNA, 68 bp, Homo sapiens
actgtaaaggctgtccccaaggacgctactaccgttattacctttatatccacgggctcctggccgcc

SEQ ID NO: 67337 - DNA, 71 bp, Homo sapiens
cccaaggacgctactaccgttattacctttatatccacgggctcctggccgccctccagagagctgaggga

SEQ ID NO: 67338 - DNA, 73 bp, Homo sapiens
ggacgctactaccgttattacctttatatccacgggctcctggccgccctccagagagctgagggaggaggca

SEQ ID NO: 67339 - DNA, 76 bp, Homo sapiens
ttattacctttatatccacgggctcctggccgccctccagagagctgagggaggaggcagcgggcagcatgaaggt

SEQ ID NO: 67340 - DNA, 79 bp, Homo sapiens
cctttatatccacgggctcctggccgccctccagagagctgagggaggaggcagcgggcagcatgaaggttgcagagtc

SEQ ID NO: 67341 - DNA, 82 bp, Homo sapiens
acgggctcctggccgccctccagagagctgagggaggaggcagcgggcagcatgaaggttgcagagtctgcggcatcagggc

SEQ ID NO: 67342 - DNA, 83 bp, Homo sapiens
cgccctccagagagctgagggaggaggcagcgggcagcatgaaggttgcagagtctgcggcatcagggcgcagggaggagcct

SEQ ID NO: 67343 - DNA, 84 bp, Homo sapiens
agagctgagggaggaggcagcgggcagcatgaaggttgcagagtctgcggcatcagggcgcagggaggagccttgccaactcca

SEQ ID NO: 67344 - DNA, 81 bp, Homo sapiens
aggaggcagcgggcagcatgaaggttgcagagtctgcggcatcagggcgcagggaggagccttgccaactccagggttgta

SEQ ID NO: 67345 - DNA, 82 bp, Homo sapiens
gggcagcatgaaggttgcagagtctgcggcatcagggcgcagggaggagccttgccaactccagggttgtattctggccaca

SEQ ID NO: 67346 - DNA, 78 bp, Homo sapiens
atgaaggttgcagagtctgcggcatcagggcgcagggaggagccttgccaactccagggttgtattctggccacaagg

SEQ ID NO: 67347 - DNA, 78 bp, Homo sapiens
agagtctgcggcatcagggcgcagggaggagccttgccaactccagggttgtattctggccacaaggtgaggacagag

SEQ ID NO: 67348 - DNA, 75 bp, Homo sapiens
atcagggcgcagggaggagccttgccaactccagggttgtattctggccacaaggtgaggacagaggtggcaggg

SEQ ID NO: 67349 - DNA, 73 bp, Homo sapiens
aggttaggggatgagctttcttggggacctgtaacgcagctggtttgtacctgtttgtgtacacagagatgga

SEQ ID NO: 67350 - DNA, 74 bp, Homo sapiens
atgagctttcttggggacctgtaacgcagctggtttgtacctgtttgtgtacacagagatggagggggtggcca

SEQ ID NO: 67351 - DNA, 76 bp, Homo sapiens
gggacctgtaacgcagctggtttgtacctgtttgtgtacacagagatggagggggtggccagcatggctggaaggc

SEQ ID NO: 67352 - DNA, 76 bp, Homo sapiens
tgtaacgcagctggtttgtacctgtttgtgtacacagagatggagggggtggccagcatggctggaaggccccctg

SEQ ID NO: 67353 - DNA, 74 bp, Homo sapiens
tggtttgtacctgtttgtgtacacagagatggagggggtggccagcatggctggaaggccccctggcagttttc

SEQ ID NO: 67354 - DNA, 75 bp, Homo sapiens
cctgtttgtgtacacagagatggagggggtggccagcatggctggaaggccccctggcagttttcccagcaggag

SEQ ID NO: 67355 - DNA, 78 bp, Homo sapiens
tacacagagatggagggggtggccagcatggctggaaggccccctggcagttttcccagcaggagggtggtctgcaca

SEQ ID NO: 67356 - DNA, 79 bp, Homo sapiens
ggggtggccagcatggctggaaggccccctggcagttttcccagcaggagggtggtctgcacatgctccatgactcgaa

SEQ ID NO: 67357 - DNA, 83 bp, Homo sapiens
agcatggctggaaggccccctggcagttttcccagcaggagggtggtctgcacatgctccatgactcgaagcagccgcagcac

SEQ ID NO: 67358 - DNA, 82 bp, Homo sapiens
aaggccccctggcagttttcccagcaggagggtggtctgcacatgctccatgactcgaagcagccgcagcactgtggcaatc

SEQ ID NO: 67359 - DNA, 84 bp, Homo sapiens
ctggcagttttcccagcaggagggtggtctgcacatgctccatgactcgaagcagccgcagcactgtggcaatctgaaaaagga

SEQ ID NO: 67360 - DNA, 84 bp, Homo sapiens
ttttcccagcaggagggtggtctgcacatgctccatgactcgaagcagccgcagcactgtggcaatctgaaaaaggaggcagga

SEQ ID NO: 67361 - DNA, 86 bp, Homo sapiens
agggtggtctgcacatgctccatgactcgaagcagccgcagcactgtggcaatctgaaaaaggaggcaggaagatgttgctatgga

SEQ ID NO: 67362 - DNA, 85 bp, Homo sapiens
actaagcattcagtgtgtgtgaggtctgcatctggcctggacacccacctggctgctgctggcctccgcaggctcttctggtctg

SEQ ID NO: 67363 - DNA, 86 bp, Homo sapiens
attcagtgtgtgtgaggtctgcatctggcctggacacccacctggctgctgctggcctccgcaggctcttctggtctgttgctcag

SEQ ID NO: 67364 - DNA, 85 bp, Homo sapiens
tgtgaggtctgcatctggcctggacacccacctggctgctgctggcctccgcaggctcttctggtctgttgctcagggaagcttc

SEQ ID NO: 67365 - DNA, 84 bp, Homo sapiens
atctggcctggacacccacctggctgctgctggcctccgcaggctcttctggtctgttgctcagggaagcttccagcacactgc

SEQ ID NO: 67366 - DNA, 83 bp, Homo sapiens
acccacctggctgctgctggcctccgcaggctcttctggtctgttgctcagggaagcttccagcacactgcccacagcctgaa

SEQ ID NO: 67367 - DNA, 82 bp, Homo sapiens
ctgctgctggcctccgcaggctcttctggtctgttgctcagggaagcttccagcacactgcccacagcctgaaacaggtccc

SEQ ID NO: 67368 - DNA, 79 bp, Homo sapiens
ctggcctccgcaggctcttctggtctgttgctcagggaagcttccagcacactgcccacagcctgaaacaggtccctgg

SEQ ID NO: 67369 - DNA, 80 bp, Homo sapiens
aggctcttctggtctgttgctcagggaagcttccagcacactgcccacagcctgaaacaggtccctggtggctgcctggc

SEQ ID NO: 67370 - DNA, 82 bp, Homo sapiens
tctgttgctcagggaagcttccagcacactgcccacagcctgaaacaggtccctggtggctgcctggcgcctctggtcctca

SEQ ID NO: 67371 - DNA, 77 bp, Homo sapiens
agggaagcttccagcacactgcccacagcctgaaacaggtccctggtggctgcctggcgcctctggtcctcagggcg

SEQ ID NO: 67372 - DNA, 79 bp, Homo sapiens
ttccagcacactgcccacagcctgaaacaggtccctggtggctgcctggcgcctctggtcctcagggcgggccttggca

SEQ ID NO: 67373 - DNA, 77 bp, Homo sapiens
cccacagcctgaaacaggtccctggtggctgcctggcgcctctggtcctcagggcgggccttggcactcactgtcaa

SEQ ID NO: 67374 - DNA, 78 bp, Homo sapiens
tgaaacaggtccctggtggctgcctggcgcctctggtcctcagggcgggccttggcactcactgtcaacagggcctca

SEQ ID NO: 67375 - DNA, 82 bp, Homo sapiens
cctggtggctgcctggcgcctctggtcctcagggcgggccttggcactcactgtcaacagggcctcactggcatgctgtaga

SEQ ID NO: 67376 - DNA, 83 bp, Homo sapiens
ctgcctggcgcctctggtcctcagggcgggccttggcactcactgtcaacagggcctcactggcatgctgtagagccaagctg

SEQ ID NO: 67377 - DNA, 82 bp, Homo sapiens
tctggtcctcagggcgggccttggcactcactgtcaacagggcctcactggcatgctgtagagccaagctggcctcccactg

SEQ ID NO: 67378 - DNA, 80 bp, Homo sapiens
tcctcagggcgggccttggcactcactgtcaacagggcctcactggcatgctgtagagccaagctggcctcccactgggt

SEQ ID NO: 67379 - DNA, 80 bp, Homo sapiens
ttggcactcactgtcaacagggcctcactggcatgctgtagagccaagctggcctcccactgggttcacccaaataagga

SEQ ID NO: 67380 - DNA, 77 bp, Homo sapiens
actcactgtcaacagggcctcactggcatgctgtagagccaagctggcctcccactgggttcacccaaataaggaaa

SEQ ID NO: 67381 - DNA, 77 bp, Homo sapiens
aacagggcctcactggcatgctgtagagccaagctggcctcccactgggttcacccaaataaggaaaagcgatgtga

SEQ ID NO: 67382 - DNA, 75 bp, Homo sapiens
acacggtgttttaatttgagttctccaagaagcagatcccagagcaagaatttgagagcaagtcatttatttgga

SEQ ID NO: 67383 - DNA, 79 bp, Homo sapiens
ttaatttgagttctccaagaagcagatcccagagcaagaatttgagagcaagtcatttatttggacatgatcccaagaa

SEQ ID NO: 67384 - DNA, 79 bp, Homo sapiens
ttctccaagaagcagatcccagagcaagaatttgagagcaagtcatttatttggacatgatcccaagaaacacttgtgg

SEQ ID NO: 67385 - DNA, 75 bp, Homo sapiens
agatcccagagcaagaatttgagagcaagtcatttatttggacatgatcccaagaaacacttgtggggagtaggg

SEQ ID NO: 67386 - DNA, 74 bp, Homo sapiens
aagaatttgagagcaagtcatttatttggacatgatcccaagaaacacttgtggggagtagggggtgtgagaca

SEQ ID NO: 67387 - DNA, 74 bp, Homo sapiens
tttgagagcaagtcatttatttggacatgatcccaagaaacacttgtggggagtagggggtgtgagacagggaa

SEQ ID NO: 67388 - DNA, 71 bp, Homo sapiens
agtcatttatttggacatgatcccaagaaacacttgtggggagtagggggtgtgagacagggaagggtgga

SEQ ID NO: 67389 - DNA, 72 bp, Homo sapiens
ttggacatgatcccaagaaacacttgtggggagtagggggtgtgagacagggaagggtggaagccagtacag

SEQ ID NO: 67390 - DNA, 72 bp, Homo sapiens
aagaaacacttgtggggagtagggggtgtgagacagggaagggtggaagccagtacaggagtgtgatcaagc

SEQ ID NO: 67391 - DNA, 72 bp, Homo sapiens
acttgtggggagtagggggtgtgagacagggaagggtggaagccagtacaggagtgtgatcaagcccattac

SEQ ID NO: 67392 - DNA, 73 bp, Homo sapiens
agtagggggtgtgagacagggaagggtggaagccagtacaggagtgtgatcaagcccattacctgggattcac

SEQ ID NO: 67393 - DNA, 75 bp, Homo sapiens
agacagggaagggtggaagccagtacaggagtgtgatcaagcccattacctgggattcactcctgcttgggatta

SEQ ID NO: 67394 - DNA, 77 bp, Homo sapiens
aagggtggaagccagtacaggagtgtgatcaagcccattacctgggattcactcctgcttgggattatccatcaaga

SEQ ID NO: 67395 - DNA, 77 bp, Homo sapiens
aagccagtacaggagtgtgatcaagcccattacctgggattcactcctgcttgggattatccatcaagaggggtgag

SEQ ID NO: 67396 - DNA, 76 bp, Homo sapiens
aggagtgtgatcaagcccattacctgggattcactcctgcttgggattatccatcaagaggggtgaggtagctggg

SEQ ID NO: 67397 - DNA, 73 bp, Homo sapiens
aagcccattacctgggattcactcctgcttgggattatccatcaagaggggtgaggtagctggggtgtttata

SEQ ID NO: 67398 - DNA, 76 bp, Homo sapiens
tgggattcactcctgcttgggattatccatcaagaggggtgaggtagctggggtgtttataagccagcttcattag

SEQ ID NO: 67399 - DNA, 76 bp, Homo sapiens
actcctgcttgggattatccatcaagaggggtgaggtagctggggtgtttataagccagcttcattagtcactgaa

SEQ ID NO: 67400 - DNA, 80 bp, Homo sapiens
attatccatcaagaggggtgaggtagctggggtgtttataagccagcttcattagtcactgaacactgcatgaattcaca

SEQ ID NO: 67401 - DNA, 81 bp, Homo sapiens
atcaagaggggtgaggtagctggggtgtttataagccagcttcattagtcactgaacactgcatgaattcacagccatatg

SEQ ID NO: 67402 - DNA, 81 bp, Homo sapiens
aggtagctggggtgtttataagccagcttcattagtcactgaacactgcatgaattcacagccatatgggcaggtacagta

SEQ ID NO: 67403 - DNA, 82 bp, Homo sapiens
gggtgtttataagccagcttcattagtcactgaacactgcatgaattcacagccatatgggcaggtacagtaggctctgagg

SEQ ID NO: 67404 - DNA, 85 bp, Homo sapiens
ttataagccagcttcattagtcactgaacactgcatgaattcacagccatatgggcaggtacagtaggctctgagggtcagagaa

SEQ ID NO: 67405 - DNA, 81 bp, Homo sapiens
attagtcactgaacactgcatgaattcacagccatatgggcaggtacagtaggctctgagggtcagagaagacccccagaa

SEQ ID NO: 67406 - DNA, 80 bp, Homo sapiens
actgaacactgcatgaattcacagccatatgggcaggtacagtaggctctgagggtcagagaagacccccagaaggataa

SEQ ID NO: 67407 - DNA, 79 bp, Homo sapiens
tgaattcacagccatatgggcaggtacagtaggctctgagggtcagagaagacccccagaaggataaggaagcacagga

SEQ ID NO: 67408 - DNA, 82 bp, Homo sapiens
agtaggctctgagggtcagagaagacccccagaaggataaggaagcacaggagctggcagccagatgtcaggctggcatgta

SEQ ID NO: 67409 - DNA, 81 bp, Homo sapiens
agaagacccccagaaggataaggaagcacaggagctggcagccagatgtcaggctggcatgtactgaagttgagaacatgg

SEQ ID NO: 67410 - DNA, 86 bp, Homo sapiens
aaggataaggaagcacaggagctggcagccagatgtcaggctggcatgtactgaagttgagaacatgggcagtcagtagcagtgtc

SEQ ID NO: 67411 - DNA, 88 bp, Homo sapiens
aagcacaggagctggcagccagatgtcaggctggcatgtactgaagttgagaacatgggcagtcagtagcagtgtctggactcacatt

SEQ ID NO: 67412 - DNA, 84 bp, Homo sapiens
tggcatgtactgaagttgagaacatgggcagtcagtagcagtgtctggactcacatttggccacccaaatattaatgagattca

SEQ ID NO: 67413 - DNA, 79 bp, Homo sapiens
agaacatgggcagtcagtagcagtgtctggactcacatttggccacccaaatattaatgagattcagttactccctcaa

SEQ ID NO: 67414 - DNA, 79 bp, Homo sapiens
agtcagtagcagtgtctggactcacatttggccacccaaatattaatgagattcagttactccctcaacttgctcacca

SEQ ID NO: 67415 - DNA, 81 bp, Homo sapiens
agtgtctggactcacatttggccacccaaatattaatgagattcagttactccctcaacttgctcaccagcagatgcagga

SEQ ID NO: 67416 - DNA, 81 bp, Homo sapiens
actcacatttggccacccaaatattaatgagattcagttactccctcaacttgctcaccagcagatgcaggagtgagagtc

SEQ ID NO: 67417 - DNA, 81 bp, Homo sapiens
ttggccacccaaatattaatgagattcagttactccctcaacttgctcaccagcagatgcaggagtgagagtctgggcaaa

SEQ ID NO: 67418 - DNA, 82 bp, Homo sapiens
aatattaatgagattcagttactccctcaacttgctcaccagcagatgcaggagtgagagtctgggcaaacaggccctctca

SEQ ID NO: 67419 - DNA, 83 bp, Homo sapiens
ttactccctcaacttgctcaccagcagatgcaggagtgagagtctgggcaaacaggccctctcacctagcgtgagatacatgg

SEQ ID NO: 67420 - DNA, 84 bp, Homo sapiens
aacttgctcaccagcagatgcaggagtgagagtctgggcaaacaggccctctcacctagcgtgagatacatgggcagcaggagg

SEQ ID NO: 67421 - DNA, 81 bp, Homo sapiens
agatgcaggagtgagagtctgggcaaacaggccctctcacctagcgtgagatacatgggcagcaggaggggcaccttccca

SEQ ID NO: 67422 - DNA, 81 bp, Homo sapiens
agtctgggcaaacaggccctctcacctagcgtgagatacatgggcagcaggaggggcaccttcccatgaatcgcccatgca

SEQ ID NO: 67423 - DNA, 78 bp, Homo sapiens
aacaggccctctcacctagcgtgagatacatgggcagcaggaggggcaccttcccatgaatcgcccatgcaggacccc

SEQ ID NO: 67424 - DNA, 79 bp, Homo sapiens
acctagcgtgagatacatgggcagcaggaggggcaccttcccatgaatcgcccatgcaggacccctggaaagaagatga

SEQ ID NO: 67425 - DNA, 77 bp, Homo sapiens
tgtgaaggagcgtgtcccatgttagcctctgtagatgggagctactcacctgggccgagggtgtgagttccttactc

SEQ ID NO: 67426 - DNA, 76 bp, Homo sapiens
tgtcccatgttagcctctgtagatgggagctactcacctgggccgagggtgtgagttccttactccggcaggtcac

SEQ ID NO: 67427 - DNA, 75 bp, Homo sapiens
atgttagcctctgtagatgggagctactcacctgggccgagggtgtgagttccttactccggcaggtcacctctc

SEQ ID NO: 67428 - DNA, 76 bp, Homo sapiens
ctgtagatgggagctactcacctgggccgagggtgtgagttccttactccggcaggtcacctctctcagcacctcg

SEQ ID NO: 67429 - DNA, 78 bp, Homo sapiens
agctactcacctgggccgagggtgtgagttccttactccggcaggtcacctctctcagcacctcggccagctcctgca

SEQ ID NO: 67430 - DNA, 78 bp, Homo sapiens
cctgggccgagggtgtgagttccttactccggcaggtcacctctctcagcacctcggccagctcctgcaccctctgca

SEQ ID NO: 67431 - DNA, 78 bp, Homo sapiens
gggtgtgagttccttactccggcaggtcacctctctcagcacctcggccagctcctgcaccctctgcacgtcctccaa

SEQ ID NO: 67432 - DNA, 81 bp, Homo sapiens
ttactccggcaggtcacctctctcagcacctcggccagctcctgcaccctctgcacgtcctccaagccggtggtgactgca

SEQ ID NO: 67433 - DNA, 82 bp, Homo sapiens
aggtcacctctctcagcacctcggccagctcctgcaccctctgcacgtcctccaagccggtggtgactgcagacagtgatcc

SEQ ID NO: 67434 - DNA, 89 bp, Homo sapiens
tctcagcacctcggccagctcctgcaccctctgcacgtcctccaagccggtggtgactgcagacagtgatcccagcacatgctctctga

SEQ ID NO: 67435 - DNA, 85 bp, Homo sapiens
ctcggccagctcctgcaccctctgcacgtcctccaagccggtggtgactgcagacagtgatcccagcacatgctctctgaccttg

SEQ ID NO: 67436 - DNA, 83 bp, Homo sapiens
ctcctgcaccctctgcacgtcctccaagccggtggtgactgcagacagtgatcccagcacatgctctctgaccttggcacggg

SEQ ID NO: 67437 - DNA, 81 bp, Homo sapiens
ctctgcacgtcctccaagccggtggtgactgcagacagtgatcccagcacatgctctctgaccttggcacgggggagaaag

SEQ ID NO: 67438 - DNA, 81 bp, Homo sapiens
tcctccaagccggtggtgactgcagacagtgatcccagcacatgctctctgaccttggcacgggggagaaaggcagggaga

SEQ ID NO: 67439 - DNA, 80 bp, Homo sapiens
accgcacctggcctcactggtggtttctaaagccctgcagacctctgtctgccttgtatgatgtgtgattaggcagataa

SEQ ID NO: 67440 - DNA, 80 bp, Homo sapiens
acctggcctcactggtggtttctaaagccctgcagacctctgtctgccttgtatgatgtgtgattaggcagataacagcc

SEQ ID NO: 67441 - DNA, 79 bp, Homo sapiens
actggtggtttctaaagccctgcagacctctgtctgccttgtatgatgtgtgattaggcagataacagccccctcaaga

SEQ ID NO: 67442 - DNA, 85 bp, Homo sapiens
tctaaagccctgcagacctctgtctgccttgtatgatgtgtgattaggcagataacagccccctcaagatgcccacattcacatc

SEQ ID NO: 67443 - DNA, 81 bp, Homo sapiens
agacctctgtctgccttgtatgatgtgtgattaggcagataacagccccctcaagatgcccacattcacatccctgaaacc

SEQ ID NO: 67444 - DNA, 84 bp, Homo sapiens
tgtctgccttgtatgatgtgtgattaggcagataacagccccctcaagatgcccacattcacatccctgaaacctgtgaatatg

SEQ ID NO: 67445 - DNA, 83 bp, Homo sapiens
tatgatgtgtgattaggcagataacagccccctcaagatgcccacattcacatccctgaaacctgtgaatatgttactgaatg

SEQ ID NO: 67446 - DNA, 79 bp, Homo sapiens
attaggcagataacagccccctcaagatgcccacattcacatccctgaaacctgtgaatatgttactgaatgtggcaaa

SEQ ID NO: 67447 - DNA, 77 bp, Homo sapiens
ataacagccccctcaagatgcccacattcacatccctgaaacctgtgaatatgttactgaatgtggcaaaaggcact

SEQ ID NO: 67448 - DNA, 77 bp, Homo sapiens
aagatgcccacattcacatccctgaaacctgtgaatatgttactgaatgtggcaaaaggcactttgactaagtcatt

SEQ ID NO: 67449 - DNA, 77 bp, Homo sapiens
atgcccacattcacatccctgaaacctgtgaatatgttactgaatgtggcaaaaggcactttgactaagtcattttg

SEQ ID NO: 67450 - DNA, 76 bp, Homo sapiens
acattcacatccctgaaacctgtgaatatgttactgaatgtggcaaaaggcactttgactaagtcattttggagaa

SEQ ID NO: 67451 - DNA, 75 bp, Homo sapiens
acatccctgaaacctgtgaatatgttactgaatgtggcaaaaggcactttgactaagtcattttggagaagcaat

SEQ ID NO: 67452 - DNA, 73 bp, Homo sapiens
aacctgtgaatatgttactgaatgtggcaaaaggcactttgactaagtcattttggagaagcaattaagttaa

SEQ ID NO: 67453 - DNA, 72 bp, Homo sapiens
gtgaatatgttactgaatgtggcaaaaggcactttgactaagtcattttggagaagcaattaagttaaaaat

SEQ ID NO: 67454 - DNA, 75 bp, Homo sapiens
tactgaatgtggcaaaaggcactttgactaagtcattttggagaagcaattaagttaaaaattctgagatggaga

SEQ ID NO: 67455 - DNA, 72 bp, Homo sapiens
actttgactaagtcattttggagaagcaattaagttaaaaattctgagatggagagattatccgaacaggtg

SEQ ID NO: 67456 - DNA, 74 bp, Homo sapiens
ttttggagaagcaattaagttaaaaattctgagatggagagattatccgaacaggtgggaccaacgtcatcata

SEQ ID NO: 67457 - DNA, 73 bp, Homo sapiens
agaagcaattaagttaaaaattctgagatggagagattatccgaacaggtgggaccaacgtcatcatacgacc

SEQ ID NO: 67458 - DNA, 70 bp, Homo sapiens
agattatccgaacaggtgggaccaacgtcatcatacgacccttctaagagggaggtaggaacgttaatca

SEQ ID NO: 67459 - DNA, 72 bp, Homo sapiens
accaacgtcatcatacgacccttctaagagggaggtaggaacgttaatcagaacaggagatgggtgatggag

SEQ ID NO: 67460 - DNA, 72 bp, Homo sapiens
atcatacgacccttctaagagggaggtaggaacgttaatcagaacaggagatgggtgatggaggcaggggta

SEQ ID NO: 67461 - DNA, 68 bp, Homo sapiens
acccttctaagagggaggtaggaacgttaatcagaacaggagatgggtgatggaggcaggggtagggg

SEQ ID NO: 67462 - DNA, 68 bp, Homo sapiens
agagggaggtaggaacgttaatcagaacaggagatgggtgatggaggcaggggtagggggaagaaaaa

SEQ ID NO: 67463 - DNA, 68 bp, Homo sapiens
aggaacgttaatcagaacaggagatgggtgatggaggcaggggtagggggaagaaaaagagagggaaa

SEQ ID NO: 67464 - DNA, 67 bp, Homo sapiens
agatgggtgatggaggcaggggtagggggaagaaaaagagagggaaagaggatgaggtaagggtggg

SEQ ID NO: 67465 - DNA, 68 bp, Homo sapiens
atggaggcaggggtagggggaagaaaaagagagggaaagaggatgaggtaagggtggggagagacaga

SEQ ID NO: 67466 - DNA, 69 bp, Homo sapiens
aagaaaaagagagggaaagaggatgaggtaagggtggggagagacagagggagaggagaggactttgga

SEQ ID NO: 67467 - DNA, 73 bp, Homo sapiens
aaagagagggaaagaggatgaggtaagggtggggagagacagagggagaggagaggactttggagatgctgcg

SEQ ID NO: 67468 - DNA, 76 bp, Homo sapiens
aaagaggatgaggtaagggtggggagagacagagggagaggagaggactttggagatgctgcgtggctggctttga

SEQ ID NO: 67469 - DNA, 77 bp, Homo sapiens
taagggtggggagagacagagggagaggagaggactttggagatgctgcgtggctggctttgaagataggagtcaag

SEQ ID NO: 67470 - DNA, 81 bp, Homo sapiens
gagacagagggagaggagaggactttggagatgctgcgtggctggctttgaagataggagtcaaggagtgcaggcggcctc

SEQ ID NO: 67471 - DNA, 79 bp, Homo sapiens
gagaggagaggactttggagatgctgcgtggctggctttgaagataggagtcaaggagtgcaggcggcctctagaaccc

SEQ ID NO: 67472 - DNA, 76 bp, Homo sapiens
gactttggagatgctgcgtggctggctttgaagataggagtcaaggagtgcaggcggcctctagaacccggaaaag

SEQ ID NO: 67473 - DNA, 78 bp, Homo sapiens
tggagatgctgcgtggctggctttgaagataggagtcaaggagtgcaggcggcctctagaacccggaaaaggcaagga

SEQ ID NO: 67474 - DNA, 75 bp, Homo sapiens
gctggctttgaagataggagtcaaggagtgcaggcggcctctagaacccggaaaaggcaaggaatggcttctctc

SEQ ID NO: 67475 - DNA, 74 bp, Homo sapiens
tttgaagataggagtcaaggagtgcaggcggcctctagaacccggaaaaggcaaggaatggcttctctcctgga

SEQ ID NO: 67476 - DNA, 75 bp, Homo sapiens
tcaaggagtgcaggcggcctctagaacccggaaaaggcaaggaatggcttctctcctggagcctccaggtttgca

SEQ ID NO: 67477 - DNA, 76 bp, Homo sapiens
ggcaaggaatggcttctctcctggagcctccaggtttgcagctctgccatcaccttacttttggcctagtggaccc

SEQ ID NO: 67478 - DNA, 72 bp, Homo sapiens
ctctcctggagcctccaggtttgcagctctgccatcaccttacttttggcctagtggaccccattttaaact

SEQ ID NO: 67479 - DNA, 73 bp, Homo sapiens
ctggagcctccaggtttgcagctctgccatcaccttacttttggcctagtggaccccattttaaacttctggc

SEQ ID NO: 67480 - DNA, 77 bp, Homo sapiens
ggcctccagaactataaagtgaataaatgcgtgttgcgttaagccatgatctttgtggtcatttgtaacagcagccc

SEQ ID NO: 67481 - DNA, 78 bp, Homo sapiens
aaagtgaataaatgcgtgttgcgttaagccatgatctttgtggtcatttgtaacagcagccctagcaaacatatatag

SEQ ID NO: 67482 - DNA, 81 bp, Homo sapiens
aatgcgtgttgcgttaagccatgatctttgtggtcatttgtaacagcagccctagcaaacatatataggatgtctcaagct

SEQ ID NO: 67483 - DNA, 80 bp, Homo sapiens
ttaagccatgatctttgtggtcatttgtaacagcagccctagcaaacatatataggatgtctcaagctttctccaaatct

SEQ ID NO: 67484 - DNA, 79 bp, Homo sapiens
atgatctttgtggtcatttgtaacagcagccctagcaaacatatataggatgtctcaagctttctccaaatcttcaaat

SEQ ID NO: 67485 - DNA, 78 bp, Homo sapiens
atttgtaacagcagccctagcaaacatatataggatgtctcaagctttctccaaatcttcaaattgaatctgtagaat

SEQ ID NO: 67486 - DNA, 79 bp, Homo sapiens
gcagccctagcaaacatatataggatgtctcaagctttctccaaatcttcaaattgaatctgtagaatttggcactatt

SEQ ID NO: 67487 - DNA, 78 bp, Homo sapiens
cctagcaaacatatataggatgtctcaagctttctccaaatcttcaaattgaatctgtagaatttggcactatttgaa

SEQ ID NO: 67488 - DNA, 76 bp, Homo sapiens
taggatgtctcaagctttctccaaatcttcaaattgaatctgtagaatttggcactatttgaaaataaattgtgtc

SEQ ID NO: 67489 - DNA, 76 bp, Homo sapiens
ctcaagctttctccaaatcttcaaattgaatctgtagaatttggcactatttgaaaataaattgtgtctcagcgtg

SEQ ID NO: 67490 - DNA, 76 bp, Homo sapiens
tttctccaaatcttcaaattgaatctgtagaatttggcactatttgaaaataaattgtgtctcagcgtggcacctg

SEQ ID NO: 67491 - DNA, 79 bp, Homo sapiens
aaattgaatctgtagaatttggcactatttgaaaataaattgtgtctcagcgtggcacctgtgaccagaatggcatgaa

SEQ ID NO: 67492 - DNA, 80 bp, Homo sapiens
aatctgtagaatttggcactatttgaaaataaattgtgtctcagcgtggcacctgtgaccagaatggcatgaaattcaga

SEQ ID NO: 67493 - DNA, 78 bp, Homo sapiens
aatttggcactatttgaaaataaattgtgtctcagcgtggcacctgtgaccagaatggcatgaaattcagaaactgga

SEQ ID NO: 67494 - DNA, 80 bp, Homo sapiens
tttgaaaataaattgtgtctcagcgtggcacctgtgaccagaatggcatgaaattcagaaactggatgactgttggtctg

SEQ ID NO: 67495 - DNA, 84 bp, Homo sapiens
taaattgtgtctcagcgtggcacctgtgaccagaatggcatgaaattcagaaactggatgactgttggtctggcatggatggga

SEQ ID NO: 67496 - DNA, 81 bp, Homo sapiens
cgtggcacctgtgaccagaatggcatgaaattcagaaactggatgactgttggtctggcatggatgggaggtctcaccgga

SEQ ID NO: 67497 - DNA, 79 bp, Homo sapiens
acctgtgaccagaatggcatgaaattcagaaactggatgactgttggtctggcatggatgggaggtctcaccggaggct

SEQ ID NO: 67498 - DNA, 77 bp, Homo sapiens
aaactggatgactgttggtctggcatggatgggaggtctcaccggaggcttggggtccctgtgtgcctttgcagcag

SEQ ID NO: 67499 - DNA, 74 bp, Homo sapiens
tggcatggatgggaggtctcaccggaggcttggggtccctgtgtgcctttgcagcagtggggacaagaaccccc

SEQ ID NO: 67500 - DNA, 69 bp, Homo sapiens
accggaggcttggggtccctgtgtgcctttgcagcagtggggacaagaacccccctacccagccctcca

SEQ ID NO: 67501 - DNA, 72 bp, Homo sapiens
ggtccctgtgtgcctttgcagcagtggggacaagaacccccctacccagccctccactcctgtcttgggcca

SEQ ID NO: 67502 - DNA, 67 bp, Homo sapiens
agtggggacaagaacccccctacccagccctccactcctgtcttgggccaggccacgggcttcaggg

SEQ ID NO: 67503 - DNA, 68 bp, Homo sapiens
aagaacccccctacccagccctccactcctgtcttgggccaggccacgggcttcagggtcaagtgctt

SEQ ID NO: 67504 - DNA, 74 bp, Homo sapiens
tacccagccctccactcctgtcttgggccaggccacgggcttcagggtcaagtgctttctacactacaaagcac

SEQ ID NO: 67505 - DNA, 74 bp, Homo sapiens
ctccactcctgtcttgggccaggccacgggcttcagggtcaagtgctttctacactacaaagcactaatgaggg

SEQ ID NO: 67506 - DNA, 76 bp, Homo sapiens
tcctgtcttgggccaggccacgggcttcagggtcaagtgctttctacactacaaagcactaatgaggggctggtga

SEQ ID NO: 67507 - DNA, 73 bp, Homo sapiens
ggccacgggcttcagggtcaagtgctttctacactacaaagcactaatgaggggctggtgaggggctttggta

SEQ ID NO: 67508 - DNA, 75 bp, Homo sapiens
ttcagggtcaagtgctttctacactacaaagcactaatgaggggctggtgaggggctttggtaggagcagagaaa

SEQ ID NO: 67509 - DNA, 72 bp, Homo sapiens
aagtgctttctacactacaaagcactaatgaggggctggtgaggggctttggtaggagcagagaaaaactaa

SEQ ID NO: 67510 - DNA, 75 bp, Homo sapiens
tacactacaaagcactaatgaggggctggtgaggggctttggtaggagcagagaaaaactaagaacatcatttca

SEQ ID NO: 67511 - DNA, 76 bp, Homo sapiens
acaaagcactaatgaggggctggtgaggggctttggtaggagcagagaaaaactaagaacatcatttcagcactgc

SEQ ID NO: 67512 - DNA, 75 bp, Homo sapiens
aatgaggggctggtgaggggctttggtaggagcagagaaaaactaagaacatcatttcagcactgcccagtagaa

SEQ ID NO: 67513 - DNA, 74 bp, Homo sapiens
aggggctttggtaggagcagagaaaaactaagaacatcatttcagcactgcccagtagaactgtcatttgtaac

SEQ ID NO: 67514 - DNA, 74 bp, Homo sapiens
gtaggagcagagaaaaactaagaacatcatttcagcactgcccagtagaactgtcatttgtaactttatttaat

SEQ ID NO: 67515 - DNA, 73 bp, Homo sapiens
agcagagaaaaactaagaacatcatttcagcactgcccagtagaactgtcatttgtaactttatttaatttta

SEQ ID NO: 67516 - DNA, 74 bp, Homo sapiens
ctaagaacatcatttcagcactgcccagtagaactgtcatttgtaactttatttaattttaataatgacttaga

SEQ ID NO: 67517 - DNA, 76 bp, Homo sapiens
ttcagcactgcccagtagaactgtcatttgtaactttatttaattttaataatgacttagatttaagcagcagcca

SEQ ID NO: 67518 - DNA, 71 bp, Homo sapiens
agaactgtcatttgtaactttatttaattttaataatgacttagatttaagcagcagccacttttgatggg

SEQ ID NO: 67519 - DNA, 77 bp, Homo sapiens
taattttaataatgacttagatttaagcagcagccacttttgatggggcagagacaccgtggcctgttgctcacacc

SEQ ID NO: 67520 - DNA, 78 bp, Homo sapiens
ttttgatggggcagagacaccgtggcctgttgctcacacctggctcagcctgacaggctttcccgaagcttccaagta

SEQ ID NO: 67521 - DNA, 81 bp, Homo sapiens
ctcagcctgacaggctttcccgaagcttccaagtatgagtgcatctgccatccattccagggacagccaggcctccatccc

SEQ ID NO: 67522 - DNA, 79 bp, Homo sapiens
acaggctttcccgaagcttccaagtatgagtgcatctgccatccattccagggacagccaggcctccatcccggctgtg

SEQ ID NO: 67523 - DNA, 79 bp, Homo sapiens
tttcccgaagcttccaagtatgagtgcatctgccatccattccagggacagccaggcctccatcccggctgtgtcttgg

SEQ ID NO: 67524 - DNA, 79 bp, Homo sapiens
aagtatgagtgcatctgccatccattccagggacagccaggcctccatcccggctgtgtcttgggttgaggaaagaata

SEQ ID NO: 67525 - DNA, 76 bp, Homo sapiens
atccattccagggacagccaggcctccatcccggctgtgtcttgggttgaggaaagaataggtcagtgtggcagga

SEQ ID NO: 67526 - DNA, 74 bp, Homo sapiens
agggacagccaggcctccatcccggctgtgtcttgggttgaggaaagaataggtcagtgtggcaggagactctt

SEQ ID NO: 67527 - DNA, 75 bp, Homo sapiens
cggctgtgtcttgggttgaggaaagaataggtcagtgtggcaggagactctttgcagaatattccagaagggaaa

SEQ ID NO: 67528 - DNA, 76 bp, Homo sapiens
tcttgggttgaggaaagaataggtcagtgtggcaggagactctttgcagaatattccagaagggaaactcagataa

SEQ ID NO: 67529 - DNA, 78 bp, Homo sapiens
gaaagaataggtcagtgtggcaggagactctttgcagaatattccagaagggaaactcagataatgggtaatctcaca

SEQ ID NO: 67530 - DNA, 79 bp, Homo sapiens
caggagactctttgcagaatattccagaagggaaactcagataatgggtaatctcacatttgcttctgcaggccctgac

SEQ ID NO: 67531 - DNA, 76 bp, Homo sapiens
aatattccagaagggaaactcagataatgggtaatctcacatttgcttctgcaggccctgaccccatcgtttgtca

SEQ ID NO: 67532 - DNA, 75 bp, Homo sapiens
ataatgggtaatctcacatttgcttctgcaggccctgaccccatcgtttgtcacctaccctgggtaaagatgtca

SEQ ID NO: 67533 - DNA, 76 bp, Homo sapiens
taatctcacatttgcttctgcaggccctgaccccatcgtttgtcacctaccctgggtaaagatgtcaccggctctg

SEQ ID NO: 67534 - DNA, 72 bp, Homo sapiens
atttgcttctgcaggccctgaccccatcgtttgtcacctaccctgggtaaagatgtcaccggctctggaccc

SEQ ID NO: 67535 - DNA, 71 bp, Homo sapiens
cccatcgtttgtcacctaccctgggtaaagatgtcaccggctctggaccctccggcaaatggactcaccca

SEQ ID NO: 67536 - DNA, 73 bp, Homo sapiens
gtttgtcacctaccctgggtaaagatgtcaccggctctggaccctccggcaaatggactcacccagcaggagc

SEQ ID NO: 67537 - DNA, 74 bp, Homo sapiens
taccctgggtaaagatgtcaccggctctggaccctccggcaaatggactcacccagcaggagcccagcagggga

SEQ ID NO: 67538 - DNA, 77 bp, Homo sapiens
aaagatgtcaccggctctggaccctccggcaaatggactcacccagcaggagcccagcaggggacgagatggcagga

SEQ ID NO: 67539 - DNA, 78 bp, Homo sapiens
ccggctctggaccctccggcaaatggactcacccagcaggagcccagcaggggacgagatggcaggaggagagagagc

SEQ ID NO: 67540 - DNA, 76 bp, Homo sapiens
accctccggcaaatggactcacccagcaggagcccagcaggggacgagatggcaggaggagagagagctgggaggg

SEQ ID NO: 67541 - DNA, 79 bp, Homo sapiens
aaatggactcacccagcaggagcccagcaggggacgagatggcaggaggagagagagctgggaggggtcattctcctga

SEQ ID NO: 67542 - DNA, 78 bp, Homo sapiens
agcccagcaggggacgagatggcaggaggagagagagctgggaggggtcattctcctgatgccctcggccaggtcacc

SEQ ID NO: 67543 - DNA, 76 bp, Homo sapiens
gggacgagatggcaggaggagagagagctgggaggggtcattctcctgatgccctcggccaggtcaccgggggctg

SEQ ID NO: 67544 - DNA, 77 bp, Homo sapiens
gaggagagagagctgggaggggtcattctcctgatgccctcggccaggtcaccgggggctggccgcctcattcttca

SEQ ID NO: 67545 - DNA, 74 bp, Homo sapiens
agagagctgggaggggtcattctcctgatgccctcggccaggtcaccgggggctggccgcctcattcttcaaaa

SEQ ID NO: 67546 - DNA, 76 bp, Homo sapiens
ggtcattctcctgatgccctcggccaggtcaccgggggctggccgcctcattcttcaaaagccacagctcctacca

SEQ ID NO: 67547 - DNA, 76 bp, Homo sapiens
ttctcctgatgccctcggccaggtcaccgggggctggccgcctcattcttcaaaagccacagctcctaccagagag

SEQ ID NO: 67548 - DNA, 79 bp, Homo sapiens
ctggccgcctcattcttcaaaagccacagctcctaccagagagtccctctgtgggcagccgccccctggatcctgctca

SEQ ID NO: 67549 - DNA, 77 bp, Homo sapiens
attcttcaaaagccacagctcctaccagagagtccctctgtgggcagccgccccctggatcctgctcacggcaggcc

SEQ ID NO: 67550 - DNA, 75 bp, Homo sapiens
aaaagccacagctcctaccagagagtccctctgtgggcagccgccccctggatcctgctcacggcaggccgggcc

SEQ ID NO: 67551 - DNA, 75 bp, Homo sapiens
agctcctaccagagagtccctctgtgggcagccgccccctggatcctgctcacggcaggccgggcctctggggtc

SEQ ID NO: 67552 - DNA, 75 bp, Homo sapiens
agtccctctgtgggcagccgccccctggatcctgctcacggcaggccgggcctctggggtcctccacgctgtcta

SEQ ID NO: 67553 - DNA, 75 bp, Homo sapiens
tctgtgggcagccgccccctggatcctgctcacggcaggccgggcctctggggtcctccacgctgtctagtttgt

SEQ ID NO: 67554 - DNA, 71 bp, Homo sapiens
cccctggatcctgctcacggcaggccgggcctctggggtcctccacgctgtctagtttgttccctaagccc

SEQ ID NO: 67555 - DNA, 75 bp, Homo sapiens
ggcaggccgggcctctggggtcctccacgctgtctagtttgttccctaagccctgcacacacctgtctcaacaga

SEQ ID NO: 67556 - DNA, 74 bp, Homo sapiens
ctctggggtcctccacgctgtctagtttgttccctaagccctgcacacacctgtctcaacagagcccttgttaa

SEQ ID NO: 67557 - DNA, 78 bp, Homo sapiens
tgtctagtttgttccctaagccctgcacacacctgtctcaacagagcccttgttaacatcttctcagcttcccagtga

SEQ ID NO: 67558 - DNA, 79 bp, Homo sapiens
acacctgtctcaacagagcccttgttaacatcttctcagcttcccagtgagagtttgacatctgtcttgtgccaggccc

SEQ ID NO: 67559 - DNA, 76 bp, Homo sapiens
aacagagcccttgttaacatcttctcagcttcccagtgagagtttgacatctgtcttgtgccaggccccgggcatt

SEQ ID NO: 67560 - DNA, 76 bp, Homo sapiens
ttctcagcttcccagtgagagtttgacatctgtcttgtgccaggccccgggcatttcatggggagaccttgggtta

SEQ ID NO: 67561 - DNA, 75 bp, Homo sapiens
ttcccagtgagagtttgacatctgtcttgtgccaggccccgggcatttcatggggagaccttgggttaggctgtg

SEQ ID NO: 67562 - DNA, 75 bp, Homo sapiens
agagtttgacatctgtcttgtgccaggccccgggcatttcatggggagaccttgggttaggctgtgtggtctgtg

SEQ ID NO: 67563 - DNA, 75 bp, Homo sapiens
tcttgtgccaggccccgggcatttcatggggagaccttgggttaggctgtgtggtctgtgtgcttggggaccaca

SEQ ID NO: 67564 - DNA, 73 bp, Homo sapiens
aggccccgggcatttcatggggagaccttgggttaggctgtgtggtctgtgtgcttggggaccacaggatgtc

SEQ ID NO: 67565 - DNA, 73 bp, Homo sapiens
atttcatggggagaccttgggttaggctgtgtggtctgtgtgcttggggaccacaggatgtccaggggaagct

SEQ ID NO: 67566 - DNA, 74 bp, Homo sapiens
gagaccttgggttaggctgtgtggtctgtgtgcttggggaccacaggatgtccaggggaagcttcccattggta

SEQ ID NO: 67567 - DNA, 75 bp, Homo sapiens
ttgggttaggctgtgtggtctgtgtgcttggggaccacaggatgtccaggggaagcttcccattggtacttctca

SEQ ID NO: 67568 - DNA, 78 bp, Homo sapiens
tgtggtctgtgtgcttggggaccacaggatgtccaggggaagcttcccattggtacttctcagagtgaatgtgaccaa

SEQ ID NO: 67569 - DNA, 79 bp, Homo sapiens
tgtgtgcttggggaccacaggatgtccaggggaagcttcccattggtacttctcagagtgaatgtgaccaagaatgaga

SEQ ID NO: 67570 - DNA, 79 bp, Homo sapiens
gggaccacaggatgtccaggggaagcttcccattggtacttctcagagtgaatgtgaccaagaatgagagctgtgtgtg

SEQ ID NO: 67571 - DNA, 80 bp, Homo sapiens
atgtccaggggaagcttcccattggtacttctcagagtgaatgtgaccaagaatgagagctgtgtgtgtgtgaaagtgtg

SEQ ID NO: 67572 - DNA, 83 bp, Homo sapiens
aagcttcccattggtacttctcagagtgaatgtgaccaagaatgagagctgtgtgtgtgtgaaagtgtgtgagtgtgtatgta

SEQ ID NO: 67573 - DNA, 94 bp, Homo sapiens
tgtgtatgtgtgtgagtatgagtcatatgagtgagtgtgtgagcatgtatgtatatgcgtataagtgtgtgagtatgtgtgtgggagtatgtga

SEQ ID NO: 67574 - DNA, 91 bp, Homo sapiens
tgtgagtatgagtcatatgagtgagtgtgtgagcatgtatgtatatgcgtataagtgtgtgagtatgtgtgtgggagtatgtgaatgtgtt

SEQ ID NO: 67575 - DNA, 91 bp, Homo sapiens
gtatgagtcatatgagtgagtgtgtgagcatgtatgtatatgcgtataagtgtgtgagtatgtgtgtgggagtatgtgaatgtgtttgtga

SEQ ID NO: 67576 - DNA, 90 bp, Homo sapiens
tatgagtgagtgtgtgagcatgtatgtatatgcgtataagtgtgtgagtatgtgtgtgggagtatgtgaatgtgtttgtgagtgtgtgtg

SEQ ID NO: 67577 - DNA, 86 bp, Homo sapiens
gtgtgtgtgtgcataagagtgtgtgtgaaagtgtgtatgtatgatgtgtgagagctaatgtgtatgtatgtggcagggggtctggg

SEQ ID NO: 67578 - DNA, 81 bp, Homo sapiens
ataagagtgtgtgtgaaagtgtgtatgtatgatgtgtgagagctaatgtgtatgtatgtggcagggggtctggggtaagag

SEQ ID NO: 67579 - DNA, 81 bp, Homo sapiens
tgtgaaagtgtgtatgtatgatgtgtgagagctaatgtgtatgtatgtggcagggggtctggggtaagagggctggaggtg

SEQ ID NO: 67580 - DNA, 79 bp, Homo sapiens
aagtgtgtatgtatgatgtgtgagagctaatgtgtatgtatgtggcagggggtctggggtaagagggctggaggtggag

SEQ ID NO: 67581 - DNA, 76 bp, Homo sapiens
gtatgatgtgtgagagctaatgtgtatgtatgtggcagggggtctggggtaagagggctggaggtggagggggaac

SEQ ID NO: 67582 - DNA, 71 bp, Homo sapiens
agagctaatgtgtatgtatgtggcagggggtctggggtaagagggctggaggtggagggggaacctctaaa

SEQ ID NO: 67583 - DNA, 69 bp, Homo sapiens
tatgtatgtggcagggggtctggggtaagagggctggaggtggagggggaacctctaaactgggtttga

SEQ ID NO: 67584 - DNA, 66 bp, Homo sapiens
tgtggcagggggtctggggtaagagggctggaggtggagggggaacctctaaactgggtttgaacc

SEQ ID NO: 67585 - DNA, 66 bp, Homo sapiens
tggggtaagagggctggaggtggagggggaacctctaaactgggtttgaacccaggcttcaccact

SEQ ID NO: 67586 - DNA, 68 bp, Homo sapiens
aggtggagggggaacctctaaactgggtttgaacccaggcttcaccacttaccagacacagggacaca

SEQ ID NO: 67587 - DNA, 72 bp, Homo sapiens
aacctctaaactgggtttgaacccaggcttcaccacttaccagacacagggacacaggcaggcacctctgat

SEQ ID NO: 67588 - DNA, 73 bp, Homo sapiens
aaactgggtttgaacccaggcttcaccacttaccagacacagggacacaggcaggcacctctgattctcttac

SEQ ID NO: 67589 - DNA, 75 bp, Homo sapiens
aacccaggcttcaccacttaccagacacagggacacaggcaggcacctctgattctcttaccctctgtttcctca

SEQ ID NO: 67590 - DNA, 79 bp, Homo sapiens
ttcaccacttaccagacacagggacacaggcaggcacctctgattctcttaccctctgtttcctcagctgtaacataga

SEQ ID NO: 67591 - DNA, 81 bp, Homo sapiens
taccagacacagggacacaggcaggcacctctgattctcttaccctctgtttcctcagctgtaacatagatggaggcctca

SEQ ID NO: 67592 - DNA, 78 bp, Homo sapiens
acacaggcaggcacctctgattctcttaccctctgtttcctcagctgtaacatagatggaggcctcaccatttacgtc

SEQ ID NO: 67593 - DNA, 74 bp, Homo sapiens
cacctctgattctcttaccctctgtttcctcagctgtaacatagatggaggcctcaccatttacgtcccagggt

SEQ ID NO: 67594 - DNA, 73 bp, Homo sapiens
attctcttaccctctgtttcctcagctgtaacatagatggaggcctcaccatttacgtcccagggttgtagtg

SEQ ID NO: 67595 - DNA, 73 bp, Homo sapiens
taccctctgtttcctcagctgtaacatagatggaggcctcaccatttacgtcccagggttgtagtggggatta

SEQ ID NO: 67596 - DNA, 77 bp, Homo sapiens
tcagctgtaacatagatggaggcctcaccatttacgtcccagggttgtagtggggattacagatccatgaagcccta

SEQ ID NO: 67597 - DNA, 75 bp, Homo sapiens
taacatagatggaggcctcaccatttacgtcccagggttgtagtggggattacagatccatgaagccctaattca

SEQ ID NO: 67598 - DNA, 73 bp, Homo sapiens
tggaggcctcaccatttacgtcccagggttgtagtggggattacagatccatgaagccctaattcagggcctg

SEQ ID NO: 67599 - DNA, 76 bp, Homo sapiens
accatttacgtcccagggttgtagtggggattacagatccatgaagccctaattcagggcctggcagctcatagca

SEQ ID NO: 67600 - DNA, 80 bp, Homo sapiens
agggttgtagtggggattacagatccatgaagccctaattcagggcctggcagctcatagcaggtgcttgatacatgtta

SEQ ID NO: 67601 - DNA, 82 bp, Homo sapiens
ttacagatccatgaagccctaattcagggcctggcagctcatagcaggtgcttgatacatgttagtttctctcggtaagcga

SEQ ID NO: 67602 - DNA, 81 bp, Homo sapiens
atgaagccctaattcagggcctggcagctcatagcaggtgcttgatacatgttagtttctctcggtaagcgaccacaatga

SEQ ID NO: 67603 - DNA, 80 bp, Homo sapiens
attcagggcctggcagctcatagcaggtgcttgatacatgttagtttctctcggtaagcgaccacaatgacaatccggct

SEQ ID NO: 67604 - DNA, 74 bp, Homo sapiens
aggtgcttgatacatgttagtttctctcggtaagcgaccacaatgacaatccggcttcctgtattaagtaccta

SEQ ID NO: 67605 - DNA, 75 bp, Homo sapiens
taagcgaccacaatgacaatccggcttcctgtattaagtacctaccaggcctctagcaccacactcagtaccttc

SEQ ID NO: 67606 - DNA, 74 bp, Homo sapiens
acaatgacaatccggcttcctgtattaagtacctaccaggcctctagcaccacactcagtaccttcctgcaaac

SEQ ID NO: 67607 - DNA, 72 bp, Homo sapiens
aatccggcttcctgtattaagtacctaccaggcctctagcaccacactcagtaccttcctgcaaacctttca

SEQ ID NO: 67608 - DNA, 73 bp, Homo sapiens
ttcctgtattaagtacctaccaggcctctagcaccacactcagtaccttcctgcaaacctttcagggagccaa

SEQ ID NO: 67609 - DNA, 72 bp, Homo sapiens
aagtacctaccaggcctctagcaccacactcagtaccttcctgcaaacctttcagggagccaagagaagtct

SEQ ID NO: 67610 - DNA, 74 bp, Homo sapiens
aggcctctagcaccacactcagtaccttcctgcaaacctttcagggagccaagagaagtctttcttctcttctc

SEQ ID NO: 67611 - DNA, 73 bp, Homo sapiens
accacactcagtaccttcctgcaaacctttcagggagccaagagaagtctttcttctcttctccgtgcccaca

SEQ ID NO: 67612 - DNA, 70 bp, Homo sapiens
agtaccttcctgcaaacctttcagggagccaagagaagtctttcttctcttctccgtgcccacaggggtg

SEQ ID NO: 67613 - DNA, 87 bp, Homo sapiens
tgtgggtgtgtgcatgcacacacacgaacacaaactcatgtggcacatgctgggagtggacacaatcatacgttctgcaatagttta

SEQ ID NO: 67614 - DNA, 87 bp, Homo sapiens
tgcatgcacacacacgaacacaaactcatgtggcacatgctgggagtggacacaatcatacgttctgcaatagtttatcatactagg

SEQ ID NO: 67615 - DNA, 82 bp, Homo sapiens
cacacgaacacaaactcatgtggcacatgctgggagtggacacaatcatacgttctgcaatagtttatcatactaggttgta

SEQ ID NO: 67616 - DNA, 80 bp, Homo sapiens
aacacaaactcatgtggcacatgctgggagtggacacaatcatacgttctgcaatagtttatcatactaggttgtaacaa

SEQ ID NO: 67617 - DNA, 75 bp, Homo sapiens
tggacacaatcatacgttctgcaatagtttatcatactaggttgtaacaatggaacggccatttttgtagattaa

SEQ ID NO: 67618 - DNA, 73 bp, Homo sapiens
tcatacgttctgcaatagtttatcatactaggttgtaacaatggaacggccatttttgtagattaaaactgat

SEQ ID NO: 67619 - DNA, 71 bp, Homo sapiens
tagtttatcatactaggttgtaacaatggaacggccatttttgtagattaaaactgattgaatgttgacgg

SEQ ID NO: 67620 - DNA, 71 bp, Homo sapiens
tactaggttgtaacaatggaacggccatttttgtagattaaaactgattgaatgttgacggtcttatctag

SEQ ID NO: 67621 - DNA, 69 bp, Homo sapiens
ggttgtaacaatggaacggccatttttgtagattaaaactgattgaatgttgacggtcttatctagttt

SEQ ID NO: 67622 - DNA, 71 bp, Homo sapiens
ggaacggccatttttgtagattaaaactgattgaatgttgacggtcttatctagttttttagttgcagtga

SEQ ID NO: 67623 - DNA, 72 bp, Homo sapiens
ttgtagattaaaactgattgaatgttgacggtcttatctagttttttagttgcagtgatcgtaattcttatt

SEQ ID NO: 67624 - DNA, 71 bp, Homo sapiens
gattaaaactgattgaatgttgacggtcttatctagttttttagttgcagtgatcgtaattcttatttaac

SEQ ID NO: 67625 - DNA, 72 bp, Homo sapiens
gattgaatgttgacggtcttatctagttttttagttgcagtgatcgtaattcttatttaactcttactacaa

SEQ ID NO: 67626 - DNA, 72 bp, Homo sapiens
gacggtcttatctagttttttagttgcagtgatcgtaattcttatttaactcttactacaattgtatgagga

SEQ ID NO: 67627 - DNA, 72 bp, Homo sapiens
gttttttagttgcagtgatcgtaattcttatttaactcttactacaattgtatgaggagactagtattcttc

SEQ ID NO: 67628 - DNA, 75 bp, Homo sapiens
ttagttgcagtgatcgtaattcttatttaactcttactacaattgtatgaggagactagtattcttctatatggg

SEQ ID NO: 67629 - DNA, 73 bp, Homo sapiens
cttatttaactcttactacaattgtatgaggagactagtattcttctatatggggaaactgagacttagagag

SEQ ID NO: 67630 - DNA, 73 bp, Homo sapiens
tcttactacaattgtatgaggagactagtattcttctatatggggaaactgagacttagagaggtttggtccc

SEQ ID NO: 67631 - DNA, 74 bp, Homo sapiens
aattgtatgaggagactagtattcttctatatggggaaactgagacttagagaggtttggtccctggcctgtga

SEQ ID NO: 67632 - DNA, 74 bp, Homo sapiens
ctagtattcttctatatggggaaactgagacttagagaggtttggtccctggcctgtgacaatgcgaatggtaa

SEQ ID NO: 67633 - DNA, 75 bp, Homo sapiens
ttcttctatatggggaaactgagacttagagaggtttggtccctggcctgtgacaatgcgaatggtaagtgacaa

SEQ ID NO: 67634 - DNA, 74 bp, Homo sapiens
gaaactgagacttagagaggtttggtccctggcctgtgacaatgcgaatggtaagtgacaaagccgggacgcca

SEQ ID NO: 67635 - DNA, 74 bp, Homo sapiens
acttagagaggtttggtccctggcctgtgacaatgcgaatggtaagtgacaaagccgggacgccatctgtggtc

SEQ ID NO: 67636 - DNA, 76 bp, Homo sapiens
tggcctgtgacaatgcgaatggtaagtgacaaagccgggacgccatctgtggtccaactccaaaccgctacccatg

SEQ ID NO: 67637 - DNA, 74 bp, Homo sapiens
acaatgcgaatggtaagtgacaaagccgggacgccatctgtggtccaactccaaaccgctacccatgtgaccga

SEQ ID NO: 67638 - DNA, 70 bp, Homo sapiens
acaaagccgggacgccatctgtggtccaactccaaaccgctacccatgtgaccgaggacagtcccctttc

SEQ ID NO: 67639 - DNA, 74 bp, Homo sapiens
ggacgccatctgtggtccaactccaaaccgctacccatgtgaccgaggacagtcccctttctgctctggggctc

SEQ ID NO: 67640 - DNA, 76 bp, Homo sapiens
gtccaactccaaaccgctacccatgtgaccgaggacagtcccctttctgctctggggctctgccttgtcatctgaa

SEQ ID NO: 67641 - DNA, 75 bp, Homo sapiens
aaaccgctacccatgtgaccgaggacagtcccctttctgctctggggctctgccttgtcatctgaaacatgaaaa

SEQ ID NO: 67642 - DNA, 78 bp, Homo sapiens
cgaggacagtcccctttctgctctggggctctgccttgtcatctgaaacatgaaaagcaggggatgatgtgttctaaa

SEQ ID NO: 67643 - DNA, 79 bp, Homo sapiens
tctgctctggggctctgccttgtcatctgaaacatgaaaagcaggggatgatgtgttctaaactccccccatcccagag

SEQ ID NO: 67644 - DNA, 80 bp, Homo sapiens
tgccttgtcatctgaaacatgaaaagcaggggatgatgtgttctaaactccccccatcccagaggcctgtgcctccatga

SEQ ID NO: 67645 - DNA, 76 bp, Homo sapiens
ggatgatgtgttctaaactccccccatcccagaggcctgtgcctccatgagggccagccgagaaagcaggttacca

SEQ ID NO: 67646 - DNA, 73 bp, Homo sapiens
tgttctaaactccccccatcccagaggcctgtgcctccatgagggccagccgagaaagcaggttaccaaggaa

SEQ ID NO: 67647 - DNA, 73 bp, Homo sapiens
cccccatcccagaggcctgtgcctccatgagggccagccgagaaagcaggttaccaaggaagaaggcattttc

SEQ ID NO: 67648 - DNA, 76 bp, Homo sapiens
tgtgcctccatgagggccagccgagaaagcaggttaccaaggaagaaggcattttcttcactttatgtcactcacc

SEQ ID NO: 67649 - DNA, 72 bp, Homo sapiens
atgagggccagccgagaaagcaggttaccaaggaagaaggcattttcttcactttatgtcactcacccaaaa

SEQ ID NO: 67650 - DNA, 69 bp, Homo sapiens
aggttaccaaggaagaaggcattttcttcactttatgtcactcacccaaaagaccagagagggaggtgg

SEQ ID NO: 67651 - DNA, 72 bp, Homo sapiens
aaggaagaaggcattttcttcactttatgtcactcacccaaaagaccagagagggaggtggtgtcagccgct

SEQ ID NO: 67652 - DNA, 74 bp, Homo sapiens
attttcttcactttatgtcactcacccaaaagaccagagagggaggtggtgtcagccgcttgggagacaccaca

SEQ ID NO: 67653 - DNA, 73 bp, Homo sapiens
actttatgtcactcacccaaaagaccagagagggaggtggtgtcagccgcttgggagacaccacaggtttctc

SEQ ID NO: 67654 - DNA, 73 bp, Homo sapiens
acccaaaagaccagagagggaggtggtgtcagccgcttgggagacaccacaggtttctcccctgatccatgaa

SEQ ID NO: 67655 - DNA, 74 bp, Homo sapiens
aaagaccagagagggaggtggtgtcagccgcttgggagacaccacaggtttctcccctgatccatgaaccttga

SEQ ID NO: 67656 - DNA, 76 bp, Homo sapiens
ggaggtggtgtcagccgcttgggagacaccacaggtttctcccctgatccatgaaccttgatccacagcccaaatg

SEQ ID NO: 67657 - DNA, 80 bp, Homo sapiens
tgtcagccgcttgggagacaccacaggtttctcccctgatccatgaaccttgatccacagcccaaatggccgcacgcaga

SEQ ID NO: 67658 - DNA, 76 bp, Homo sapiens
ttgggagacaccacaggtttctcccctgatccatgaaccttgatccacagcccaaatggccgcacgcagaccctgg

SEQ ID NO: 67659 - DNA, 74 bp, Homo sapiens
accacaggtttctcccctgatccatgaaccttgatccacagcccaaatggccgcacgcagaccctggggcccca

SEQ ID NO: 67660 - DNA, 75 bp, Homo sapiens
cctgatccatgaaccttgatccacagcccaaatggccgcacgcagaccctggggccccagaggaagggaatgaaa

SEQ ID NO: 67661 - DNA, 75 bp, Homo sapiens
tccatgaaccttgatccacagcccaaatggccgcacgcagaccctggggccccagaggaagggaatgaaaggagc

SEQ ID NO: 67662 - DNA, 68 bp, Homo sapiens
aaatggccgcacgcagaccctggggccccagaggaagggaatgaaaggagccccccagcttcccacgg

SEQ ID NO: 67663 - DNA, 66 bp, Homo sapiens
acgcagaccctggggccccagaggaagggaatgaaaggagccccccagcttcccacgggtaccttc

SEQ ID NO: 67664 - DNA, 69 bp, Homo sapiens
tggggccccagaggaagggaatgaaaggagccccccagcttcccacgggtaccttctgtctgacgtcta

SEQ ID NO: 67665 - DNA, 73 bp, Homo sapiens
aggaagggaatgaaaggagccccccagcttcccacgggtaccttctgtctgacgtctatgctcagtgactgtc

SEQ ID NO: 67666 - DNA, 75 bp, Homo sapiens
aatgaaaggagccccccagcttcccacgggtaccttctgtctgacgtctatgctcagtgactgtcctgagccctg

SEQ ID NO: 67667 - DNA, 78 bp, Homo sapiens
cccccagcttcccacgggtaccttctgtctgacgtctatgctcagtgactgtcctgagccctggctttcatgctcttg

SEQ ID NO: 67668 - DNA, 82 bp, Homo sapiens
ttcccacgggtaccttctgtctgacgtctatgctcagtgactgtcctgagccctggctttcatgctcttggttcagcatgga

SEQ ID NO: 67669 - DNA, 88 bp, Homo sapiens
tgtctgacgtctatgctcagtgactgtcctgagccctggctttcatgctcttggttcagcatggaggacacagccttggccagctgga

SEQ ID NO: 67670 - DNA, 88 bp, Homo sapiens
tatgctcagtgactgtcctgagccctggctttcatgctcttggttcagcatggaggacacagccttggccagctggaggagctgctcg

SEQ ID NO: 67671 - DNA, 85 bp, Homo sapiens
tgactgtcctgagccctggctttcatgctcttggttcagcatggaggacacagccttggccagctggaggagctgctcggggcca

SEQ ID NO: 67672 - DNA, 83 bp, Homo sapiens
ctggctttcatgctcttggttcagcatggaggacacagccttggccagctggaggagctgctcggggccaccctcgccttgca

SEQ ID NO: 67673 - DNA, 84 bp, Homo sapiens
tttcatgctcttggttcagcatggaggacacagccttggccagctggaggagctgctcggggccaccctcgccttgcagagctg

SEQ ID NO: 67674 - DNA, 81 bp, Homo sapiens
ttcagcatggaggacacagccttggccagctggaggagctgctcggggccaccctcgccttgcagagctgtggggattttc

SEQ ID NO: 67675 - DNA, 80 bp, Homo sapiens
ttggccagctggaggagctgctcggggccaccctcgccttgcagagctgtggggattttctctgacacggcagcctggaa

SEQ ID NO: 67676 - DNA, 81 bp, Homo sapiens
tggaggagctgctcggggccaccctcgccttgcagagctgtggggattttctctgacacggcagcctggaatgctacatcc

SEQ ID NO: 67677 - DNA, 80 bp, Homo sapiens
ctcggggccaccctcgccttgcagagctgtggggattttctctgacacggcagcctggaatgctacatcctcaacacatg

SEQ ID NO: 67678 - DNA, 81 bp, Homo sapiens
accctcgccttgcagagctgtggggattttctctgacacggcagcctggaatgctacatcctcaacacatgtgtctccgag

SEQ ID NO: 67679 - DNA, 84 bp, Homo sapiens
ttgcagagctgtggggattttctctgacacggcagcctggaatgctacatcctcaacacatgtgtctccgagtgccacctgtta

SEQ ID NO: 67680 - DNA, 81 bp, Homo sapiens
tggggattttctctgacacggcagcctggaatgctacatcctcaacacatgtgtctccgagtgccacctgttaggaaatca

SEQ ID NO: 67681 - DNA, 81 bp, Homo sapiens
ttttctctgacacggcagcctggaatgctacatcctcaacacatgtgtctccgagtgccacctgttaggaaatcagaaata

SEQ ID NO: 67682 - DNA, 76 bp, Homo sapiens
gagaatttttctcagtaaagaaacagtgaccactgccaccacctaccttagccatggcctgggtctgctgcgtgtc

SEQ ID NO: 67683 - DNA, 74 bp, Homo sapiens
tttttctcagtaaagaaacagtgaccactgccaccacctaccttagccatggcctgggtctgctgcgtgtcccc

SEQ ID NO: 67684 - DNA, 77 bp, Homo sapiens
taaagaaacagtgaccactgccaccacctaccttagccatggcctgggtctgctgcgtgtcccctgcacgattggtg

SEQ ID NO: 67685 - DNA, 78 bp, Homo sapiens
cactgccaccacctaccttagccatggcctgggtctgctgcgtgtcccctgcacgattggtggcagaaataactactg

SEQ ID NO: 67686 - DNA, 78 bp, Homo sapiens
acctaccttagccatggcctgggtctgctgcgtgtcccctgcacgattggtggcagaaataactactgtcagcacaaa

SEQ ID NO: 67687 - DNA, 81 bp, Homo sapiens
ttagccatggcctgggtctgctgcgtgtcccctgcacgattggtggcagaaataactactgtcagcacaaagtcattgttc

SEQ ID NO: 67688 - DNA, 80 bp, Homo sapiens
ctgggtctgctgcgtgtcccctgcacgattggtggcagaaataactactgtcagcacaaagtcattgttctcctctccaa

SEQ ID NO: 67689 - DNA, 80 bp, Homo sapiens
cgtgtcccctgcacgattggtggcagaaataactactgtcagcacaaagtcattgttctcctctccaagtggcagataca

SEQ ID NO: 67690 - DNA, 82 bp, Homo sapiens
cctgcacgattggtggcagaaataactactgtcagcacaaagtcattgttctcctctccaagtggcagatacactgatggga

SEQ ID NO: 67691 - DNA, 80 bp, Homo sapiens
attggtggcagaaataactactgtcagcacaaagtcattgttctcctctccaagtggcagatacactgatgggagggcag

SEQ ID NO: 67692 - DNA, 78 bp, Homo sapiens
aaataactactgtcagcacaaagtcattgttctcctctccaagtggcagatacactgatgggagggcaggttcagggc

SEQ ID NO: 67693 - DNA, 80 bp, Homo sapiens
agcacaaagtcattgttctcctctccaagtggcagatacactgatgggagggcaggttcagggccacagtgtaggcagga

SEQ ID NO: 67694 - DNA, 77 bp, Homo sapiens
aaagtcattgttctcctctccaagtggcagatacactgatgggagggcaggttcagggccacagtgtaggcaggaac

SEQ ID NO: 67695 - DNA, 77 bp, Homo sapiens
ctctccaagtggcagatacactgatgggagggcaggttcagggccacagtgtaggcaggaacctggcaaaaccagaa

SEQ ID NO: 67696 - DNA, 76 bp, Homo sapiens
aagtggcagatacactgatgggagggcaggttcagggccacagtgtaggcaggaacctggcaaaaccagaaattga

SEQ ID NO: 67697 - DNA, 75 bp, Homo sapiens
atacactgatgggagggcaggttcagggccacagtgtaggcaggaacctggcaaaaccagaaattgaccgatgag

SEQ ID NO: 67698 - DNA, 79 bp, Homo sapiens
aagaagatgagcccaggagctgagggaagagcagagtcttcagccggtacctgattccagacagaagcagaactccagg

SEQ ID NO: 67699 - DNA, 76 bp, Homo sapiens
aggagctgagggaagagcagagtcttcagccggtacctgattccagacagaagcagaactccaggggtcccagggc

SEQ ID NO: 67700 - DNA, 75 bp, Homo sapiens
agggaagagcagagtcttcagccggtacctgattccagacagaagcagaactccaggggtcccagggctgtggag

SEQ ID NO: 67701 - DNA, 76 bp, Homo sapiens
agagtcttcagccggtacctgattccagacagaagcagaactccaggggtcccagggctgtggaggcgttgcagaa

SEQ ID NO: 67702 - DNA, 76 bp, Homo sapiens
agccggtacctgattccagacagaagcagaactccaggggtcccagggctgtggaggcgttgcagaagatggcaaa

SEQ ID NO: 67703 - DNA, 77 bp, Homo sapiens
attccagacagaagcagaactccaggggtcccagggctgtggaggcgttgcagaagatggcaaagctcgtcagaacg

SEQ ID NO: 67704 - DNA, 76 bp, Homo sapiens
agaagcagaactccaggggtcccagggctgtggaggcgttgcagaagatggcaaagctcgtcagaacggtgccctc

SEQ ID NO: 67705 - DNA, 74 bp, Homo sapiens
aactccaggggtcccagggctgtggaggcgttgcagaagatggcaaagctcgtcagaacggtgccctcctctgg

SEQ ID NO: 67706 - DNA, 81 bp, Homo sapiens
cagggctgtggaggcgttgcagaagatggcaaagctcgtcagaacggtgccctcctctggggcaatagtgcaggcaggcac

SEQ ID NO: 67707 - DNA, 81 bp, Homo sapiens
ctgtggaggcgttgcagaagatggcaaagctcgtcagaacggtgccctcctctggggcaatagtgcaggcaggcacctcac

SEQ ID NO: 67708 - DNA, 78 bp, Homo sapiens
agaagatggcaaagctcgtcagaacggtgccctcctctggggcaatagtgcaggcaggcacctcacggggaggcacag

SEQ ID NO: 67709 - DNA, 81 bp, Homo sapiens
aaagctcgtcagaacggtgccctcctctggggcaatagtgcaggcaggcacctcacggggaggcacagtgctgatcacata

SEQ ID NO: 67710 - DNA, 82 bp, Homo sapiens
tcgtcagaacggtgccctcctctggggcaatagtgcaggcaggcacctcacggggaggcacagtgctgatcacataggtgtc

SEQ ID NO: 67711 - DNA, 81 bp, Homo sapiens
ccctcctctggggcaatagtgcaggcaggcacctcacggggaggcacagtgctgatcacataggtgtcctccccataggca

SEQ ID NO: 67712 - DNA, 86 bp, Homo sapiens
ggcaatagtgcaggcaggcacctcacggggaggcacagtgctgatcacataggtgtcctccccataggcatgcctggtcagtgctg

SEQ ID NO: 67713 - DNA, 83 bp, Homo sapiens
caggcaggcacctcacggggaggcacagtgctgatcacataggtgtcctccccataggcatgcctggtcagtgctgggagtaa

SEQ ID NO: 67714 - DNA, 81 bp, Homo sapiens
acctcacggggaggcacagtgctgatcacataggtgtcctccccataggcatgcctggtcagtgctgggagtaaagagaga

SEQ ID NO: 67715 - DNA, 84 bp, Homo sapiens
ggaggcacagtgctgatcacataggtgtcctccccataggcatgcctggtcagtgctgggagtaaagagagatcatgttcaggg

SEQ ID NO: 67716 - DNA, 82 bp, Homo sapiens
agtgctgatcacataggtgtcctccccataggcatgcctggtcagtgctgggagtaaagagagatcatgttcagggggccac

SEQ ID NO: 67717 - DNA, 73 bp, Homo sapiens
ttctgggtttatctgggttccctgagaggagataaaagggaggtttcgcacctgtggctctgattcggatgac

SEQ ID NO: 67718 - DNA, 72 bp, Homo sapiens
atctgggttccctgagaggagataaaagggaggtttcgcacctgtggctctgattcggatgacctctccccg

SEQ ID NO: 67719 - DNA, 73 bp, Homo sapiens
agaggagataaaagggaggtttcgcacctgtggctctgattcggatgacctctccccgggactgcagaaacga

SEQ ID NO: 67720 - DNA, 74 bp, Homo sapiens
taaaagggaggtttcgcacctgtggctctgattcggatgacctctccccgggactgcagaaacgagctgttcaa

SEQ ID NO: 67721 - DNA, 76 bp, Homo sapiens
aggtttcgcacctgtggctctgattcggatgacctctccccgggactgcagaaacgagctgttcaacagcaacgtg

SEQ ID NO: 67722 - DNA, 80 bp, Homo sapiens
tgtggctctgattcggatgacctctccccgggactgcagaaacgagctgttcaacagcaacgtggaggtgttgctctgga

SEQ ID NO: 67723 - DNA, 75 bp, Homo sapiens
attcggatgacctctccccgggactgcagaaacgagctgttcaacagcaacgtggaggtgttgctctggaggagg

SEQ ID NO: 67724 - DNA, 72 bp, Homo sapiens
acctctccccgggactgcagaaacgagctgttcaacagcaacgtggaggtgttgctctggaggagggttaag

SEQ ID NO: 67725 - DNA, 73 bp, Homo sapiens
actgcagaaacgagctgttcaacagcaacgtggaggtgttgctctggaggagggttaaggaccttggccaaaa

SEQ ID NO: 67726 - DNA, 71 bp, Homo sapiens
aaacgagctgttcaacagcaacgtggaggtgttgctctggaggagggttaaggaccttggccaaaatcctc

SEQ ID NO: 67727 - DNA, 77 bp, Homo sapiens
ttcaacagcaacgtggaggtgttgctctggaggagggttaaggaccttggccaaaatcctctgagtctgcaggcatc

SEQ ID NO: 67728 - DNA, 74 bp, Homo sapiens
aacgtggaggtgttgctctggaggagggttaaggaccttggccaaaatcctctgagtctgcaggcatccaggag

SEQ ID NO: 67729 - DNA, 77 bp, Homo sapiens
ttgctctggaggagggttaaggaccttggccaaaatcctctgagtctgcaggcatccaggaggggctcagcctgaaa

SEQ ID NO: 67730 - DNA, 75 bp, Homo sapiens
aggagggttaaggaccttggccaaaatcctctgagtctgcaggcatccaggaggggctcagcctgaaagacagga

SEQ ID NO: 67731 - DNA, 77 bp, Homo sapiens
aaggaccttggccaaaatcctctgagtctgcaggcatccaggaggggctcagcctgaaagacaggatggcccagggc

SEQ ID NO: 67732 - DNA, 76 bp, Homo sapiens
aaagcgcaagggagatttccattcttgagtggttgtcactgtgctcacctgctctgttggggtgttgtccaaatac

SEQ ID NO: 67733 - DNA, 77 bp, Homo sapiens
aagggagatttccattcttgagtggttgtcactgtgctcacctgctctgttggggtgttgtccaaataccagctgaa

SEQ ID NO: 67734 - DNA, 80 bp, Homo sapiens
attcttgagtggttgtcactgtgctcacctgctctgttggggtgttgtccaaataccagctgaacatagccactggagag

SEQ ID NO: 67735 - DNA, 79 bp, Homo sapiens
agtggttgtcactgtgctcacctgctctgttggggtgttgtccaaataccagctgaacatagccactggagagtcctcc

SEQ ID NO: 67736 - DNA, 79 bp, Homo sapiens
actgtgctcacctgctctgttggggtgttgtccaaataccagctgaacatagccactggagagtcctcccccatggtga

SEQ ID NO: 67737 - DNA, 78 bp, Homo sapiens
tctgttggggtgttgtccaaataccagctgaacatagccactggagagtcctcccccatggtgaccctgagcagaatg

SEQ ID NO: 67738 - DNA, 81 bp, Homo sapiens
tgttgtccaaataccagctgaacatagccactggagagtcctcccccatggtgaccctgagcagaatgtctttgctggcat

SEQ ID NO: 67739 - DNA, 79 bp, Homo sapiens
aaataccagctgaacatagccactggagagtcctcccccatggtgaccctgagcagaatgtctttgctggcattaactg

SEQ ID NO: 67740 - DNA, 79 bp, Homo sapiens
aacatagccactggagagtcctcccccatggtgaccctgagcagaatgtctttgctggcattaactggcctgcagttcc

SEQ ID NO: 67741 - DNA, 82 bp, Homo sapiens
actggagagtcctcccccatggtgaccctgagcagaatgtctttgctggcattaactggcctgcagttcctctcacagctga

SEQ ID NO: 67742 - DNA, 81 bp, Homo sapiens
agtcctcccccatggtgaccctgagcagaatgtctttgctggcattaactggcctgcagttcctctcacagctgaaaggca

SEQ ID NO: 67743 - DNA, 84 bp, Homo sapiens
atggtgaccctgagcagaatgtctttgctggcattaactggcctgcagttcctctcacagctgaaaggcagacagaggacagag

SEQ ID NO: 67744 - DNA, 84 bp, Homo sapiens
agcagaatgtctttgctggcattaactggcctgcagttcctctcacagctgaaaggcagacagaggacagagtgaggaagctcc

SEQ ID NO: 67745 - DNA, 82 bp, Homo sapiens
atgtctttgctggcattaactggcctgcagttcctctcacagctgaaaggcagacagaggacagagtgaggaagctccccga

SEQ ID NO: 67746 - DNA, 83 bp, Homo sapiens
attaactggcctgcagttcctctcacagctgaaaggcagacagaggacagagtgaggaagctccccgaggcattgctatcatc

SEQ ID NO: 67747 - DNA, 85 bp, Homo sapiens
ctgcagttcctctcacagctgaaaggcagacagaggacagagtgaggaagctccccgaggcattgctatcatctggatgtttgtc

SEQ ID NO: 67748 - DNA, 82 bp, Homo sapiens
ttcctctcacagctgaaaggcagacagaggacagagtgaggaagctccccgaggcattgctatcatctggatgtttgtcccc

SEQ ID NO: 67749 - DNA, 79 bp, Homo sapiens
aaaggcagacagaggacagagtgaggaagctccccgaggcattgctatcatctggatgtttgtcccctgaaacctcatg

SEQ ID NO: 67750 - DNA, 79 bp, Homo sapiens
acagaggacagagtgaggaagctccccgaggcattgctatcatctggatgtttgtcccctgaaacctcatgttgaaata

SEQ ID NO: 67751 - DNA, 79 bp, Homo sapiens
acagagtgaggaagctccccgaggcattgctatcatctggatgtttgtcccctgaaacctcatgttgaaatatgatccc

SEQ ID NO: 67752 - DNA, 75 bp, Homo sapiens
ttggctgaacgaatgaatcaggaccctggaggaactgcccacgtgccccacctgactcgaggcctgagttcccag

SEQ ID NO: 67753 - DNA, 75 bp, Homo sapiens
aatgaatcaggaccctggaggaactgcccacgtgccccacctgactcgaggcctgagttcccagggcgcagacac

SEQ ID NO: 67754 - DNA, 77 bp, Homo sapiens
cctggaggaactgcccacgtgccccacctgactcgaggcctgagttcccagggcgcagacacgtagaggcactgctc

SEQ ID NO: 67755 - DNA, 77 bp, Homo sapiens
aactgcccacgtgccccacctgactcgaggcctgagttcccagggcgcagacacgtagaggcactgctctgccctgt

SEQ ID NO: 67756 - DNA, 79 bp, Homo sapiens
acgtgccccacctgactcgaggcctgagttcccagggcgcagacacgtagaggcactgctctgccctgttctccagctc

SEQ ID NO: 67757 - DNA, 81 bp, Homo sapiens
actcgaggcctgagttcccagggcgcagacacgtagaggcactgctctgccctgttctccagctcttggcctctcagaaca

SEQ ID NO: 67758 - DNA, 83 bp, Homo sapiens
cctgagttcccagggcgcagacacgtagaggcactgctctgccctgttctccagctcttggcctctcagaacagccaggcgca

SEQ ID NO: 67759 - DNA, 85 bp, Homo sapiens
agggcgcagacacgtagaggcactgctctgccctgttctccagctcttggcctctcagaacagccaggcgcagggtgacagcaga

SEQ ID NO: 67760 - DNA, 85 bp, Homo sapiens
agacacgtagaggcactgctctgccctgttctccagctcttggcctctcagaacagccaggcgcagggtgacagcagagtcaggc

SEQ ID NO: 67761 - DNA, 85 bp, Homo sapiens
actgctctgccctgttctccagctcttggcctctcagaacagccaggcgcagggtgacagcagagtcaggcggcggcaggcagga

SEQ ID NO: 67762 - DNA, 85 bp, Homo sapiens
ctgttctccagctcttggcctctcagaacagccaggcgcagggtgacagcagagtcaggcggcggcaggcaggatgctggaacca

SEQ ID NO: 67763 - DNA, 84 bp, Homo sapiens
agctcttggcctctcagaacagccaggcgcagggtgacagcagagtcaggcggcggcaggcaggatgctggaaccaccagctcc

SEQ ID NO: 67764 - DNA, 84 bp, Homo sapiens
ctctcagaacagccaggcgcagggtgacagcagagtcaggcggcggcaggcaggatgctggaaccaccagctccctctggtctg

SEQ ID NO: 67765 - DNA, 83 bp, Homo sapiens
aacagccaggcgcagggtgacagcagagtcaggcggcggcaggcaggatgctggaaccaccagctccctctggtctgtgcgaa

SEQ ID NO: 67766 - DNA, 85 bp, Homo sapiens
agggtgacagcagagtcaggcggcggcaggcaggatgctggaaccaccagctccctctggtctgtgcgaagcagctgcctctcaa

SEQ ID NO: 67767 - DNA, 87 bp, Homo sapiens
agagtcaggcggcggcaggcaggatgctggaaccaccagctccctctggtctgtgcgaagcagctgcctctcaacacagctgctcca

SEQ ID NO: 67768 - DNA, 87 bp, Homo sapiens
aggcggcggcaggcaggatgctggaaccaccagctccctctggtctgtgcgaagcagctgcctctcaacacagctgctccacagagc

SEQ ID NO: 67769 - DNA, 87 bp, Homo sapiens
aggcaggatgctggaaccaccagctccctctggtctgtgcgaagcagctgcctctcaacacagctgctccacagagcccagcaagac

SEQ ID NO: 67770 - DNA, 84 bp, Homo sapiens
aaccaccagctccctctggtctgtgcgaagcagctgcctctcaacacagctgctccacagagcccagcaagaccctgagagaaa

SEQ ID NO: 67771 - DNA, 91 bp, Homo sapiens
tggtctgtgcgaagcagctgcctctcaacacagctgctccacagagcccagcaagaccctgagagaaatggacagacactatgatccatca

SEQ ID NO: 67772 - DNA, 88 bp, Homo sapiens
cagctgcctctcaacacagctgctccacagagcccagcaagaccctgagagaaatggacagacactatgatccatcaggagccctgaa

SEQ ID NO: 67773 - DNA, 74 bp, Homo sapiens
aaaaaaagaactctattgtcacctaccacatgaccattggaagcgtaactccttgtcattgtctggccagccca

SEQ ID NO: 67774 - DNA, 76 bp, Homo sapiens
aagaactctattgtcacctaccacatgaccattggaagcgtaactccttgtcattgtctggccagcccagggtcac

SEQ ID NO: 67775 - DNA, 77 bp, Homo sapiens
ttgtcacctaccacatgaccattggaagcgtaactccttgtcattgtctggccagcccagggtcactgtcgtgaaag

SEQ ID NO: 67776 - DNA, 79 bp, Homo sapiens
acatgaccattggaagcgtaactccttgtcattgtctggccagcccagggtcactgtcgtgaaaggatccacatatgga

SEQ ID NO: 67777 - DNA, 76 bp, Homo sapiens
attggaagcgtaactccttgtcattgtctggccagcccagggtcactgtcgtgaaaggatccacatatggaccagg

SEQ ID NO: 67778 - DNA, 78 bp, Homo sapiens
taactccttgtcattgtctggccagcccagggtcactgtcgtgaaaggatccacatatggaccaggttggatgtacac

SEQ ID NO: 67779 - DNA, 78 bp, Homo sapiens
ttgtctggccagcccagggtcactgtcgtgaaaggatccacatatggaccaggttggatgtacacctccatatcgcct

SEQ ID NO: 67780 - DNA, 75 bp, Homo sapiens
cccagggtcactgtcgtgaaaggatccacatatggaccaggttggatgtacacctccatatcgcctttatctttc

SEQ ID NO: 67781 - DNA, 77 bp, Homo sapiens
gtcactgtcgtgaaaggatccacatatggaccaggttggatgtacacctccatatcgcctttatctttctgcaaaaa

SEQ ID NO: 67782 - DNA, 76 bp, Homo sapiens
gtgaaaggatccacatatggaccaggttggatgtacacctccatatcgcctttatctttctgcaaaaaaaagcagc

SEQ ID NO: 67783 - DNA, 77 bp, Homo sapiens
acatatggaccaggttggatgtacacctccatatcgcctttatctttctgcaaaaaaaagcagccagctggtgagac

SEQ ID NO: 67784 - DNA, 66 bp, Homo sapiens
aactcaaaactaaaacagagtgcttggacatcttttccttgtgaggttaaacgttttttaaagaca

SEQ ID NO: 67785 - DNA, 69 bp, Homo sapiens
aacagagtgcttggacatcttttccttgtgaggttaaacgttttttaaagacaatactcacactctttc

SEQ ID NO: 67786 - DNA, 69 bp, Homo sapiens
agtgcttggacatcttttccttgtgaggttaaacgttttttaaagacaatactcacactctttccttca

SEQ ID NO: 67787 - DNA, 70 bp, Homo sapiens
atcttttccttgtgaggttaaacgttttttaaagacaatactcacactctttccttcagcattcatccca

SEQ ID NO: 67788 - DNA, 72 bp, Homo sapiens
ttgtgaggttaaacgttttttaaagacaatactcacactctttccttcagcattcatcccagatggttcttg

SEQ ID NO: 67789 - DNA, 71 bp, Homo sapiens
aacgttttttaaagacaatactcacactctttccttcagcattcatcccagatggttcttggagaccggaa

SEQ ID NO: 67790 - DNA, 77 bp, Homo sapiens
taaagacaatactcacactctttccttcagcattcatcccagatggttcttggagaccggaaggggctgtgaacaca

SEQ ID NO: 67791 - DNA, 73 bp, Homo sapiens
acactctttccttcagcattcatcccagatggttcttggagaccggaaggggctgtgaacacagtgggaacgg

SEQ ID NO: 67792 - DNA, 75 bp, Homo sapiens
ttcagcattcatcccagatggttcttggagaccggaaggggctgtgaacacagtgggaacgggtatcaagctttg

SEQ ID NO: 67793 - DNA, 71 bp, Homo sapiens
attcatcccagatggttcttggagaccggaaggggctgtgaacacagtgggaacgggtatcaagctttggt

SEQ ID NO: 67794 - DNA, 68 bp, Homo sapiens
gttcttggagaccggaaggggctgtgaacacagtgggaacgggtatcaagctttggttggaaacctta

SEQ ID NO: 67795 - DNA, 66 bp, Homo sapiens
agaccggaaggggctgtgaacacagtgggaacgggtatcaagctttggttggaaaccttataaaag

SEQ ID NO: 67796 - DNA, 77 bp, Homo sapiens
aggtgcaatgctctggactcttggtaaaaggttttatgctcccttgcagaaacaccttgcctgtgatagtgatgttc

SEQ ID NO: 67797 - DNA, 74 bp, Homo sapiens
tggactcttggtaaaaggttttatgctcccttgcagaaacaccttgcctgtgatagtgatgttcccgatttcca

SEQ ID NO: 67798 - DNA, 73 bp, Homo sapiens
ttggtaaaaggttttatgctcccttgcagaaacaccttgcctgtgatagtgatgttcccgatttccaaactca

SEQ ID NO: 67799 - DNA, 74 bp, Homo sapiens
aggttttatgctcccttgcagaaacaccttgcctgtgatagtgatgttcccgatttccaaactcaggttggaga

SEQ ID NO: 67800 - DNA, 76 bp, Homo sapiens
ccttgcagaaacaccttgcctgtgatagtgatgttcccgatttccaaactcaggttggagaaggcattcctcacca

SEQ ID NO: 67801 - DNA, 77 bp, Homo sapiens
aaacaccttgcctgtgatagtgatgttcccgatttccaaactcaggttggagaaggcattcctcaccagcatggtga

SEQ ID NO: 67802 - DNA, 76 bp, Homo sapiens
cctgtgatagtgatgttcccgatttccaaactcaggttggagaaggcattcctcaccagcatggtgaccagaaagg

SEQ ID NO: 67803 - DNA, 77 bp, Homo sapiens
atgttcccgatttccaaactcaggttggagaaggcattcctcaccagcatggtgaccagaaaggtgcctgcaataca

SEQ ID NO: 67804 - DNA, 75 bp, Homo sapiens
atttccaaactcaggttggagaaggcattcctcaccagcatggtgaccagaaaggtgcctgcaatacaaaggacc

SEQ ID NO: 67805 - DNA, 78 bp, Homo sapiens
aggttggagaaggcattcctcaccagcatggtgaccagaaaggtgcctgcaatacaaaggacccagagtcacagccat

SEQ ID NO: 67806 - DNA, 80 bp, Homo sapiens
aaggcattcctcaccagcatggtgaccagaaaggtgcctgcaatacaaaggacccagagtcacagccattgtcatgaact

SEQ ID NO: 67807 - DNA, 69 bp, Homo sapiens
acaaagggaagaggaggggcatcagaaggggagccactaaccccatgtaccttcaaccggaacagccag

SEQ ID NO: 67808 - DNA, 70 bp, Homo sapiens
aggggcatcagaaggggagccactaaccccatgtaccttcaaccggaacagccaggcggcaaatcccaaa

SEQ ID NO: 67809 - DNA, 72 bp, Homo sapiens
atcagaaggggagccactaaccccatgtaccttcaaccggaacagccaggcggcaaatcccaaatggctctc

SEQ ID NO: 67810 - DNA, 72 bp, Homo sapiens
agccactaaccccatgtaccttcaaccggaacagccaggcggcaaatcccaaatggctctccaaagctcact

SEQ ID NO: 67811 - DNA, 74 bp, Homo sapiens
atgtaccttcaaccggaacagccaggcggcaaatcccaaatggctctccaaagctcacttgctcgtgggagaag

SEQ ID NO: 67812 - DNA, 77 bp, Homo sapiens
ttcaaccggaacagccaggcggcaaatcccaaatggctctccaaagctcacttgctcgtgggagaaggttgcattga

SEQ ID NO: 67813 - DNA, 78 bp, Homo sapiens
aacagccaggcggcaaatcccaaatggctctccaaagctcacttgctcgtgggagaaggttgcattgagtccagccac

SEQ ID NO: 67814 - DNA, 77 bp, Homo sapiens
aaatcccaaatggctctccaaagctcacttgctcgtgggagaaggttgcattgagtccagccacctcaaaggtcagc

SEQ ID NO: 67815 - DNA, 77 bp, Homo sapiens
aaatggctctccaaagctcacttgctcgtgggagaaggttgcattgagtccagccacctcaaaggtcagctcttccg

SEQ ID NO: 67816 - DNA, 76 bp, Homo sapiens
aaagctcacttgctcgtgggagaaggttgcattgagtccagccacctcaaaggtcagctcttccggggtgccctga

SEQ ID NO: 67817 - DNA, 77 bp, Homo sapiens
acttgctcgtgggagaaggttgcattgagtccagccacctcaaaggtcagctcttccggggtgccctgagccaatga

SEQ ID NO: 67818 - DNA, 79 bp, Homo sapiens
agaaggttgcattgagtccagccacctcaaaggtcagctcttccggggtgccctgagccaatgagatggtgatcaatag

SEQ ID NO: 67819 - DNA, 77 bp, Homo sapiens
ccacctcaaaggtcagctcttccggggtgccctgagccaatgagatggtgatcaataggtcctgtccaagctccaaa

SEQ ID NO: 67820 - DNA, 78 bp, Homo sapiens
aaaggtcagctcttccggggtgccctgagccaatgagatggtgatcaataggtcctgtccaagctccaaatggtcaga

SEQ ID NO: 67821 - DNA, 78 bp, Homo sapiens
ctcttccggggtgccctgagccaatgagatggtgatcaataggtcctgtccaagctccaaatggtcagaagcccagga

SEQ ID NO: 67822 - DNA, 82 bp, Homo sapiens
ccctgagccaatgagatggtgatcaataggtcctgtccaagctccaaatggtcagaagcccaggaggcctgcagccctgaca

SEQ ID NO: 67823 - DNA, 83 bp, Homo sapiens
aatgagatggtgatcaataggtcctgtccaagctccaaatggtcagaagcccaggaggcctgcagccctgacagcagctccac

SEQ ID NO: 67824 - DNA, 82 bp, Homo sapiens
tggtgatcaataggtcctgtccaagctccaaatggtcagaagcccaggaggcctgcagccctgacagcagctccaccaagtg

SEQ ID NO: 67825 - DNA, 80 bp, Homo sapiens
tcctgtccaagctccaaatggtcagaagcccaggaggcctgcagccctgacagcagctccaccaagtggactgtaatgtt

SEQ ID NO: 67826 - DNA, 80 bp, Homo sapiens
aagctccaaatggtcagaagcccaggaggcctgcagccctgacagcagctccaccaagtggactgtaatgtttctggaga

SEQ ID NO: 67827 - DNA, 80 bp, Homo sapiens
aatggtcagaagcccaggaggcctgcagccctgacagcagctccaccaagtggactgtaatgtttctggagattgtagag

SEQ ID NO: 67828 - DNA, 79 bp, Homo sapiens
aggaggcctgcagccctgacagcagctccaccaagtggactgtaatgtttctggagattgtagaggtggtggtgttgcc

SEQ ID NO: 67829 - DNA, 78 bp, Homo sapiens
cagccctgacagcagctccaccaagtggactgtaatgtttctggagattgtagaggtggtggtgttgccggtggcttg

SEQ ID NO: 67830 - DNA, 77 bp, Homo sapiens
agcagctccaccaagtggactgtaatgtttctggagattgtagaggtggtggtgttgccggtggcttggatctccag

SEQ ID NO: 67831 - DNA, 75 bp, Homo sapiens
accaagtggactgtaatgtttctggagattgtagaggtggtggtgttgccggtggcttggatctccaggcggtgc

SEQ ID NO: 67832 - DNA, 74 bp, Homo sapiens
actgtaatgtttctggagattgtagaggtggtggtgttgccggtggcttggatctccaggcggtgcctcccagg

SEQ ID NO: 67833 - DNA, 75 bp, Homo sapiens
ttctggagattgtagaggtggtggtgttgccggtggcttggatctccaggcggtgcctcccagggcccatcagtt

SEQ ID NO: 67834 - DNA, 73 bp, Homo sapiens
tagaggtggtggtgttgccggtggcttggatctccaggcggtgcctcccagggcccatcagtttctgggtttc

SEQ ID NO: 67835 - DNA, 75 bp, Homo sapiens
tggtggtgttgccggtggcttggatctccaggcggtgcctcccagggcccatcagtttctgggtttctctgtcca

SEQ ID NO: 67836 - DNA, 76 bp, Homo sapiens
gtggcttggatctccaggcggtgcctcccagggcccatcagtttctgggtttctctgtccaggatcagattgtacg

SEQ ID NO: 67837 - DNA, 76 bp, Homo sapiens
ttggatctccaggcggtgcctcccagggcccatcagtttctgggtttctctgtccaggatcagattgtacggtagc

SEQ ID NO: 67838 - DNA, 73 bp, Homo sapiens
gtgcctcccagggcccatcagtttctgggtttctctgtccaggatcagattgtacggtagcgagcccttttgg

SEQ ID NO: 67839 - DNA, 72 bp, Homo sapiens
agggcccatcagtttctgggtttctctgtccaggatcagattgtacggtagcgagcccttttgggtggtgga

SEQ ID NO: 67840 - DNA, 73 bp, Homo sapiens
atcagtttctgggtttctctgtccaggatcagattgtacggtagcgagcccttttgggtggtggactcggcca

SEQ ID NO: 67841 - DNA, 73 bp, Homo sapiens
tttctctgtccaggatcagattgtacggtagcgagcccttttgggtggtggactcggccagggttatgtcacc

SEQ ID NO: 67842 - DNA, 72 bp, Homo sapiens
aggatcagattgtacggtagcgagcccttttgggtggtggactcggccagggttatgtcacccaaaagcaca

SEQ ID NO: 67843 - DNA, 70 bp, Homo sapiens
attgtacggtagcgagcccttttgggtggtggactcggccagggttatgtcacccaaaagcacagtgtaa

SEQ ID NO: 67844 - DNA, 72 bp, Homo sapiens
tagcgagcccttttgggtggtggactcggccagggttatgtcacccaaaagcacagtgtaagtcactcctgt

SEQ ID NO: 67845 - DNA, 71 bp, Homo sapiens
ttttgggtggtggactcggccagggttatgtcacccaaaagcacagtgtaagtcactcctgttcctaagtg

SEQ ID NO: 67846 - DNA, 69 bp, Homo sapiens
actcggccagggttatgtcacccaaaagcacagtgtaagtcactcctgttcctaagtggggtaagaaaa

SEQ ID NO: 67847 - DNA, 67 bp, Homo sapiens
agggttatgtcacccaaaagcacagtgtaagtcactcctgttcctaagtggggtaagaaaaattaaa

SEQ ID NO: 67848 - DNA, 83 bp, Homo sapiens
aaatcagtgattttatagcttgccttgatgtgcccaattctgcagactcacctccatcaagctccacctgaatccacagagga

SEQ ID NO: 67849 - DNA, 81 bp, Homo sapiens
ttttatagcttgccttgatgtgcccaattctgcagactcacctccatcaagctccacctgaatccacagaggatccccaaa

SEQ ID NO: 67850 - DNA, 83 bp, Homo sapiens
ccttgatgtgcccaattctgcagactcacctccatcaagctccacctgaatccacagaggatccccaaagacagcctggcaga

SEQ ID NO: 67851 - DNA, 80 bp, Homo sapiens
aattctgcagactcacctccatcaagctccacctgaatccacagaggatccccaaagacagcctggcagagagggccggc

SEQ ID NO: 67852 - DNA, 79 bp, Homo sapiens
actcacctccatcaagctccacctgaatccacagaggatccccaaagacagcctggcagagagggccggctcctgactg

SEQ ID NO: 67853 - DNA, 79 bp, Homo sapiens
cctccatcaagctccacctgaatccacagaggatccccaaagacagcctggcagagagggccggctcctgactgggaca

SEQ ID NO: 67854 - DNA, 79 bp, Homo sapiens
acctgaatccacagaggatccccaaagacagcctggcagagagggccggctcctgactgggacaggccggagcatgcag

SEQ ID NO: 67855 - DNA, 80 bp, Homo sapiens
aatccacagaggatccccaaagacagcctggcagagagggccggctcctgactgggacaggccggagcatgcagtcacac

SEQ ID NO: 67856 - DNA, 82 bp, Homo sapiens
cccaaagacagcctggcagagagggccggctcctgactgggacaggccggagcatgcagtcacactgagcgtctccatcttg

SEQ ID NO: 67857 - DNA, 85 bp, Homo sapiens
gcctggcagagagggccggctcctgactgggacaggccggagcatgcagtcacactgagcgtctccatcttgtctcgcacggtca

SEQ ID NO: 67858 - DNA, 83 bp, Homo sapiens
agagagggccggctcctgactgggacaggccggagcatgcagtcacactgagcgtctccatcttgtctcgcacggtcacctgc

SEQ ID NO: 67859 - DNA, 90 bp, Homo sapiens
tcctgactgggacaggccggagcatgcagtcacactgagcgtctccatcttgtctcgcacggtcacctgcctctgagctgtcacatgcca

SEQ ID NO: 67860 - DNA, 89 bp, Homo sapiens
actgggacaggccggagcatgcagtcacactgagcgtctccatcttgtctcgcacggtcacctgcctctgagctgtcacatgccactca

SEQ ID NO: 67861 - DNA, 93 bp, Homo sapiens
agcatgcagtcacactgagcgtctccatcttgtctcgcacggtcacctgcctctgagctgtcacatgccactcactggttgtgcattcagcaa

SEQ ID NO: 67862 - DNA, 89 bp, Homo sapiens
agtcacactgagcgtctccatcttgtctcgcacggtcacctgcctctgagctgtcacatgccactcactggttgtgcattcagcaaaca

SEQ ID NO: 67863 - DNA, 86 bp, Homo sapiens
gtctccatcttgtctcgcacggtcacctgcctctgagctgtcacatgccactcactggttgtgcattcagcaaacacggtgaattc

SEQ ID NO: 67864 - DNA, 84 bp, Homo sapiens
atcttgtctcgcacggtcacctgcctctgagctgtcacatgccactcactggttgtgcattcagcaaacacggtgaattcccca

SEQ ID NO: 67865 - DNA, 84 bp, Homo sapiens
ctctgagctgtcacatgccactcactggttgtgcattcagcaaacacggtgaattccccaggagatgtgaactggtgggtcaca

SEQ ID NO: 67866 - DNA, 84 bp, Homo sapiens
tgtcacatgccactcactggttgtgcattcagcaaacacggtgaattccccaggagatgtgaactggtgggtcacattgctgga

SEQ ID NO: 67867 - DNA, 81 bp, Homo sapiens
actcactggttgtgcattcagcaaacacggtgaattccccaggagatgtgaactggtgggtcacattgctggacacattgc

SEQ ID NO: 67868 - DNA, 83 bp, Homo sapiens
tgtgcattcagcaaacacggtgaattccccaggagatgtgaactggtgggtcacattgctggacacattgccggccacagtca

SEQ ID NO: 67869 - DNA, 79 bp, Homo sapiens
ttcagcaaacacggtgaattccccaggagatgtgaactggtgggtcacattgctggacacattgccggccacagtcagg

SEQ ID NO: 67870 - DNA, 81 bp, Homo sapiens
tgaattccccaggagatgtgaactggtgggtcacattgctggacacattgccggccacagtcagggacatgaccagtgttg

SEQ ID NO: 67871 - DNA, 72 bp, Homo sapiens
aaaaactgatgatacaacctggctcaaggctcagagatttctcttacctcggcgggttgtagggatcaaaag

SEQ ID NO: 67872 - DNA, 76 bp, Homo sapiens
atgatacaacctggctcaaggctcagagatttctcttacctcggcgggttgtagggatcaaaagtgtggctgtctc

SEQ ID NO: 67873 - DNA, 75 bp, Homo sapiens
gctcaaggctcagagatttctcttacctcggcgggttgtagggatcaaaagtgtggctgtctcctgtactaatta

SEQ ID NO: 67874 - DNA, 75 bp, Homo sapiens
tcagagatttctcttacctcggcgggttgtagggatcaaaagtgtggctgtctcctgtactaattatacaggaca

SEQ ID NO: 67875 - DNA, 71 bp, Homo sapiens
atttctcttacctcggcgggttgtagggatcaaaagtgtggctgtctcctgtactaattatacaggacagg

SEQ ID NO: 67876 - DNA, 73 bp, Homo sapiens
gcgggttgtagggatcaaaagtgtggctgtctcctgtactaattatacaggacaggtttcctatgtagggtga

SEQ ID NO: 67877 - DNA, 75 bp, Homo sapiens
ttgtagggatcaaaagtgtggctgtctcctgtactaattatacaggacaggtttcctatgtagggtgagaggagc

SEQ ID NO: 67878 - DNA, 73 bp, Homo sapiens
aaaagtgtggctgtctcctgtactaattatacaggacaggtttcctatgtagggtgagaggagccacgtcagg

SEQ ID NO: 67879 - DNA, 78 bp, Homo sapiens
tctcctgtactaattatacaggacaggtttcctatgtagggtgagaggagccacgtcagggagatggtgacattgtca

SEQ ID NO: 67880 - DNA, 77 bp, Homo sapiens
taattatacaggacaggtttcctatgtagggtgagaggagccacgtcagggagatggtgacattgtcaaagatgaaa

SEQ ID NO: 67881 - DNA, 78 bp, Homo sapiens
tacaggacaggtttcctatgtagggtgagaggagccacgtcagggagatggtgacattgtcaaagatgaaactctcac

SEQ ID NO: 67882 - DNA, 80 bp, Homo sapiens
gtttcctatgtagggtgagaggagccacgtcagggagatggtgacattgtcaaagatgaaactctcactggacaccatca

SEQ ID NO: 67883 - DNA, 85 bp, Homo sapiens
tgagaggagccacgtcagggagatggtgacattgtcaaagatgaaactctcactggacaccatcagctgcagggctgtggattaa

SEQ ID NO: 67884 - DNA, 82 bp, Homo sapiens
cacgtcagggagatggtgacattgtcaaagatgaaactctcactggacaccatcagctgcagggctgtggattaaaacataa

SEQ ID NO: 67885 - DNA, 81 bp, Homo sapiens
agggagatggtgacattgtcaaagatgaaactctcactggacaccatcagctgcagggctgtggattaaaacataaaatgc

SEQ ID NO: 67886 - DNA, 85 bp, Homo sapiens
acattgtcaaagatgaaactctcactggacaccatcagctgcagggctgtggattaaaacataaaatgctgcatgcacttgtgaa

SEQ ID NO: 67887 - DNA, 75 bp, Homo sapiens
ataaaatcagagggacatttctatgctcaagcaagtcggggactcaccttcccggcactggtactgcacccacag

SEQ ID NO: 67888 - DNA, 75 bp, Homo sapiens
agagggacatttctatgctcaagcaagtcggggactcaccttcccggcactggtactgcacccacaggtaactgc

SEQ ID NO: 67889 - DNA, 75 bp, Homo sapiens
atttctatgctcaagcaagtcggggactcaccttcccggcactggtactgcacccacaggtaactgccctgagtc

SEQ ID NO: 67890 - DNA, 71 bp, Homo sapiens
caagtcggggactcaccttcccggcactggtactgcacccacaggtaactgccctgagtcggacacaggtt

SEQ ID NO: 67891 - DNA, 71 bp, Homo sapiens
actcaccttcccggcactggtactgcacccacaggtaactgccctgagtcggacacaggtttccaaagtag

SEQ ID NO: 67892 - DNA, 73 bp, Homo sapiens
cttcccggcactggtactgcacccacaggtaactgccctgagtcggacacaggtttccaaagtaggtctcatc

SEQ ID NO: 67893 - DNA, 76 bp, Homo sapiens
actggtactgcacccacaggtaactgccctgagtcggacacaggtttccaaagtaggtctcatctgctgccacctg

SEQ ID NO: 67894 - DNA, 78 bp, Homo sapiens
acccacaggtaactgccctgagtcggacacaggtttccaaagtaggtctcatctgctgccacctggcatgactgtagc

SEQ ID NO: 67895 - DNA, 82 bp, Homo sapiens
taactgccctgagtcggacacaggtttccaaagtaggtctcatctgctgccacctggcatgactgtagctcctggcactggc

SEQ ID NO: 67896 - DNA, 81 bp, Homo sapiens
agtcggacacaggtttccaaagtaggtctcatctgctgccacctggcatgactgtagctcctggcactggcctgggaagca

SEQ ID NO: 67897 - DNA, 82 bp, Homo sapiens
aggtttccaaagtaggtctcatctgctgccacctggcatgactgtagctcctggcactggcctgggaagcacgcacatccca

SEQ ID NO: 67898 - DNA, 85 bp, Homo sapiens
agtaggtctcatctgctgccacctggcatgactgtagctcctggcactggcctgggaagcacgcacatcccagcggaagcaggaa

SEQ ID NO: 67899 - DNA, 78 bp, Homo sapiens
agcaactgccctctgctggccgccagagctgcagagcccttgggccctacctgccacctcctccttgacgttggccca

SEQ ID NO: 67900 - DNA, 82 bp, Homo sapiens
tctgctggccgccagagctgcagagcccttgggccctacctgccacctcctccttgacgttggcccagctgcatccctgctc

SEQ ID NO: 67901 - DNA, 80 bp, Homo sapiens
agagctgcagagcccttgggccctacctgccacctcctccttgacgttggcccagctgcatccctgctccagatctgaag

SEQ ID NO: 67902 - DNA, 76 bp, Homo sapiens
agcccttgggccctacctgccacctcctccttgacgttggcccagctgcatccctgctccagatctgaaggacgcc

SEQ ID NO: 67903 - DNA, 78 bp, Homo sapiens
ttgggccctacctgccacctcctccttgacgttggcccagctgcatccctgctccagatctgaaggacgcccggcatc

SEQ ID NO: 67904 - DNA, 79 bp, Homo sapiens
cacctcctccttgacgttggcccagctgcatccctgctccagatctgaaggacgcccggcatcctgggtgcagaaatgg

SEQ ID NO: 67905 - DNA, 80 bp, Homo sapiens
tccttgacgttggcccagctgcatccctgctccagatctgaaggacgcccggcatcctgggtgcagaaatggggattctg

SEQ ID NO: 67906 - DNA, 80 bp, Homo sapiens
ttggcccagctgcatccctgctccagatctgaaggacgcccggcatcctgggtgcagaaatggggattctggcgcccgta

SEQ ID NO: 67907 - DNA, 77 bp, Homo sapiens
atccctgctccagatctgaaggacgcccggcatcctgggtgcagaaatggggattctggcgcccgtagacggcatcc

SEQ ID NO: 67908 - DNA, 76 bp, Homo sapiens
agatctgaaggacgcccggcatcctgggtgcagaaatggggattctggcgcccgtagacggcatcctggacctgga

SEQ ID NO: 67909 - DNA, 74 bp, Homo sapiens
aaggacgcccggcatcctgggtgcagaaatggggattctggcgcccgtagacggcatcctggacctggatgacc

SEQ ID NO: 67910 - DNA, 76 bp, Homo sapiens
atcctgggtgcagaaatggggattctggcgcccgtagacggcatcctggacctggatgacctgccccaagccacag

SEQ ID NO: 67911 - DNA, 78 bp, Homo sapiens
cagaaatggggattctggcgcccgtagacggcatcctggacctggatgacctgccccaagccacagtgcacggtggca

SEQ ID NO: 67912 - DNA, 79 bp, Homo sapiens
gattctggcgcccgtagacggcatcctggacctggatgacctgccccaagccacagtgcacggtggcattgagtccctc

SEQ ID NO: 67913 - DNA, 78 bp, Homo sapiens
cccgtagacggcatcctggacctggatgacctgccccaagccacagtgcacggtggcattgagtccctcgcaggccag

SEQ ID NO: 67914 - DNA, 81 bp, Homo sapiens
agacggcatcctggacctggatgacctgccccaagccacagtgcacggtggcattgagtccctcgcaggccaggctctggc

SEQ ID NO: 67915 - DNA, 80 bp, Homo sapiens
tggacctggatgacctgccccaagccacagtgcacggtggcattgagtccctcgcaggccaggctctggccaacccctga

SEQ ID NO: 67916 - DNA, 78 bp, Homo sapiens
atgacctgccccaagccacagtgcacggtggcattgagtccctcgcaggccaggctctggccaacccctgaggcaaag

SEQ ID NO: 67917 - DNA, 77 bp, Homo sapiens
aagccacagtgcacggtggcattgagtccctcgcaggccaggctctggccaacccctgaggcaaagggaaggcaaga

SEQ ID NO: 67918 - DNA, 73 bp, Homo sapiens
acggtggcattgagtccctcgcaggccaggctctggccaacccctgaggcaaagggaaggcaagacattaggg

SEQ ID NO: 67919 - DNA, 73 bp, Homo sapiens
agggagacagggtgggagatgggaactcaggggcacgggccactcacggaactcgcacatgaaggcgaaggtc

SEQ ID NO: 67920 - DNA, 76 bp, Homo sapiens
gtgggagatgggaactcaggggcacgggccactcacggaactcgcacatgaaggcgaaggtctgggcgcagtccga

SEQ ID NO: 67921 - DNA, 75 bp, Homo sapiens
atgggaactcaggggcacgggccactcacggaactcgcacatgaaggcgaaggtctgggcgcagtccgaggtcac

SEQ ID NO: 67922 - DNA, 76 bp, Homo sapiens
gggcacgggccactcacggaactcgcacatgaaggcgaaggtctgggcgcagtccgaggtcacccactcagaggaa

SEQ ID NO: 67923 - DNA, 75 bp, Homo sapiens
actcacggaactcgcacatgaaggcgaaggtctgggcgcagtccgaggtcacccactcagaggaagggcctctcc

SEQ ID NO: 67924 - DNA, 76 bp, Homo sapiens
ggaactcgcacatgaaggcgaaggtctgggcgcagtccgaggtcacccactcagaggaagggcctctcccgatgtg

SEQ ID NO: 67925 - DNA, 77 bp, Homo sapiens
tgaaggcgaaggtctgggcgcagtccgaggtcacccactcagaggaagggcctctcccgatgtggccgcaggtgtca

SEQ ID NO: 67926 - DNA, 75 bp, Homo sapiens
aaggtctgggcgcagtccgaggtcacccactcagaggaagggcctctcccgatgtggccgcaggtgtcaggggca

SEQ ID NO: 67927 - DNA, 75 bp, Homo sapiens
agtccgaggtcacccactcagaggaagggcctctcccgatgtggccgcaggtgtcaggggcagcggcggcctgcc

SEQ ID NO: 67928 - DNA, 76 bp, Homo sapiens
acccactcagaggaagggcctctcccgatgtggccgcaggtgtcaggggcagcggcggcctgccctccatgccagt

SEQ ID NO: 67929 - DNA, 78 bp, Homo sapiens
aggaagggcctctcccgatgtggccgcaggtgtcaggggcagcggcggcctgccctccatgccagttgctgtaggtca

SEQ ID NO: 67930 - DNA, 81 bp, Homo sapiens
tctcccgatgtggccgcaggtgtcaggggcagcggcggcctgccctccatgccagttgctgtaggtcacattggaggtgtc

SEQ ID NO: 67931 - DNA, 80 bp, Homo sapiens
atgtggccgcaggtgtcaggggcagcggcggcctgccctccatgccagttgctgtaggtcacattggaggtgtccaacca

SEQ ID NO: 67932 - DNA, 76 bp, Homo sapiens
aggtgtcaggggcagcggcggcctgccctccatgccagttgctgtaggtcacattggaggtgtccaaccaagtccc

SEQ ID NO: 67933 - DNA, 74 bp, Homo sapiens
agcggcggcctgccctccatgccagttgctgtaggtcacattggaggtgtccaaccaagtccccggccctggaa

SEQ ID NO: 67934 - DNA, 75 bp, Homo sapiens
tgccctccatgccagttgctgtaggtcacattggaggtgtccaaccaagtccccggccctggaagggcaacacga

SEQ ID NO: 67935 - DNA, 73 bp, Homo sapiens
atgccagttgctgtaggtcacattggaggtgtccaaccaagtccccggccctggaagggcaacacgaccacca

SEQ ID NO: 67936 - DNA, 73 bp, Homo sapiens
agaattgcaaacacaagtttctcataaaacagcgatcacggcacctaccctccgtggttccattccgtgccaa

SEQ ID NO: 67937 - DNA, 71 bp, Homo sapiens
aaacacaagtttctcataaaacagcgatcacggcacctaccctccgtggttccattccgtgccaagttcca

SEQ ID NO: 67938 - DNA, 74 bp, Homo sapiens
ttctcataaaacagcgatcacggcacctaccctccgtggttccattccgtgccaagttccacgtgagtccaatc

SEQ ID NO: 67939 - DNA, 73 bp, Homo sapiens
aacagcgatcacggcacctaccctccgtggttccattccgtgccaagttccacgtgagtccaatccaccattc

SEQ ID NO: 67940 - DNA, 70 bp, Homo sapiens
acggcacctaccctccgtggttccattccgtgccaagttccacgtgagtccaatccaccattccctgtcc

SEQ ID NO: 67941 - DNA, 77 bp, Homo sapiens
cgtggttccattccgtgccaagttccacgtgagtccaatccaccattccctgtcctgggagatgtgcttctgcagaa

SEQ ID NO: 67942 - DNA, 77 bp, Homo sapiens
ttccattccgtgccaagttccacgtgagtccaatccaccattccctgtcctgggagatgtgcttctgcagaaaccac

SEQ ID NO: 67943 - DNA, 75 bp, Homo sapiens
aagttccacgtgagtccaatccaccattccctgtcctgggagatgtgcttctgcagaaaccactgggtgccttcg

SEQ ID NO: 67944 - DNA, 79 bp, Homo sapiens
gtgagtccaatccaccattccctgtcctgggagatgtgcttctgcagaaaccactgggtgccttcgtcctgaatgaaga

SEQ ID NO: 67945 - DNA, 76 bp, Homo sapiens
aatccaccattccctgtcctgggagatgtgcttctgcagaaaccactgggtgccttcgtcctgaatgaagaccaaa

SEQ ID NO: 67946 - DNA, 76 bp, Homo sapiens
ttccctgtcctgggagatgtgcttctgcagaaaccactgggtgccttcgtcctgaatgaagaccaaatggcctcct

SEQ ID NO: 67947 - DNA, 78 bp, Homo sapiens
agatgtgcttctgcagaaaccactgggtgccttcgtcctgaatgaagaccaaatggcctccttgcccctcgcaccagc

SEQ ID NO: 67948 - DNA, 76 bp, Homo sapiens
cttctgcagaaaccactgggtgccttcgtcctgaatgaagaccaaatggcctccttgcccctcgcaccagctctgg

SEQ ID NO: 67949 - DNA, 75 bp, Homo sapiens
aaaccactgggtgccttcgtcctgaatgaagaccaaatggcctccttgcccctcgcaccagctctgggcatcacg

SEQ ID NO: 67950 - DNA, 77 bp, Homo sapiens
ttcgtcctgaatgaagaccaaatggcctccttgcccctcgcaccagctctgggcatcacggaaggtgcgtccgagtg

SEQ ID NO: 67951 - DNA, 76 bp, Homo sapiens
aatgaagaccaaatggcctccttgcccctcgcaccagctctgggcatcacggaaggtgcgtccgagtggcacaaat

SEQ ID NO: 67952 - DNA, 78 bp, Homo sapiens
accaaatggcctccttgcccctcgcaccagctctgggcatcacggaaggtgcgtccgagtggcacaaattcatagcaa

SEQ ID NO: 67953 - DNA, 81 bp, Homo sapiens
cctccttgcccctcgcaccagctctgggcatcacggaaggtgcgtccgagtggcacaaattcatagcaagcatctctgaag

SEQ ID NO: 67954 - DNA, 83 bp, Homo sapiens
caccagctctgggcatcacggaaggtgcgtccgagtggcacaaattcatagcaagcatctctgaaggccacctggctgttaga

SEQ ID NO: 67955 - DNA, 82 bp, Homo sapiens
tctgggcatcacggaaggtgcgtccgagtggcacaaattcatagcaagcatctctgaaggccacctggctgttagagcaaaa

SEQ ID NO: 67956 - DNA, 79 bp, Homo sapiens
acggaaggtgcgtccgagtggcacaaattcatagcaagcatctctgaaggccacctggctgttagagcaaaagctgcct

SEQ ID NO: 67957 - DNA, 82 bp, Homo sapiens
tccgagtggcacaaattcatagcaagcatctctgaaggccacctggctgttagagcaaaagctgccttcctctggcttaaca

SEQ ID NO: 67958 - DNA, 80 bp, Homo sapiens
acaaattcatagcaagcatctctgaaggccacctggctgttagagcaaaagctgccttcctctggcttaacagtggtggc

SEQ ID NO: 67959 - DNA, 79 bp, Homo sapiens
atagcaagcatctctgaaggccacctggctgttagagcaaaagctgccttcctctggcttaacagtggtggccctaagc

SEQ ID NO: 67960 - DNA, 79 bp, Homo sapiens
tctctgaaggccacctggctgttagagcaaaagctgccttcctctggcttaacagtggtggccctaagcctcagagcaa

SEQ ID NO: 67961 - DNA, 78 bp, Homo sapiens
cctggctgttagagcaaaagctgccttcctctggcttaacagtggtggccctaagcctcagagcaagcaccaggagta

SEQ ID NO: 67962 - DNA, 77 bp, Homo sapiens
ctgttagagcaaaagctgccttcctctggcttaacagtggtggccctaagcctcagagcaagcaccaggagtaccaa

SEQ ID NO: 67963 - DNA, 77 bp, Homo sapiens
aaaagctgccttcctctggcttaacagtggtggccctaagcctcagagcaagcaccaggagtaccaagcccactgca

SEQ ID NO: 67964 - DNA, 80 bp, Homo sapiens
ttaacagtggtggccctaagcctcagagcaagcaccaggagtaccaagcccactgcactcatgcttgaaccactgctggg

SEQ ID NO: 67965 - DNA, 83 bp, Homo sapiens
tggccctaagcctcagagcaagcaccaggagtaccaagcccactgcactcatgcttgaaccactgctggggcctctggatgga

SEQ ID NO: 67966 - DNA, 72 bp, Homo sapiens
tcctctgcaaatctgagctgtaaacaagccttggaaaggtcctccccttacctaaatcccagcttcagggtc

SEQ ID NO: 67967 - DNA, 67 bp, Homo sapiens
agctgtaaacaagccttggaaaggtcctccccttacctaaatcccagcttcagggtcccgtttctga

SEQ ID NO: 67968 - DNA, 66 bp, Homo sapiens
taaacaagccttggaaaggtcctccccttacctaaatcccagcttcagggtcccgtttctgactgg

SEQ ID NO: 67969 - DNA, 66 bp, Homo sapiens
aaggtcctccccttacctaaatcccagcttcagggtcccgtttctgactggggtgccaccaccaaa

SEQ ID NO: 67970 - DNA, 69 bp, Homo sapiens
ccttacctaaatcccagcttcagggtcccgtttctgactggggtgccaccaccaaaggcagggtataca

SEQ ID NO: 67971 - DNA, 72 bp, Homo sapiens
taaatcccagcttcagggtcccgtttctgactggggtgccaccaccaaaggcagggtatacacagccaccga

SEQ ID NO: 67972 - DNA, 73 bp, Homo sapiens
agcttcagggtcccgtttctgactggggtgccaccaccaaaggcagggtatacacagccaccgagtgatcctc

SEQ ID NO: 67973 - DNA, 77 bp, Homo sapiens
tcccgtttctgactggggtgccaccaccaaaggcagggtatacacagccaccgagtgatcctctgcctgcttctcac

SEQ ID NO: 67974 - DNA, 76 bp, Homo sapiens
gggtgccaccaccaaaggcagggtatacacagccaccgagtgatcctctgcctgcttctcactccagggaagaaaa

SEQ ID NO: 67975 - DNA, 76 bp, Homo sapiens
ccaccaccaaaggcagggtatacacagccaccgagtgatcctctgcctgcttctcactccagggaagaaaatcaaa

SEQ ID NO: 67976 - DNA, 78 bp, Homo sapiens
aggcagggtatacacagccaccgagtgatcctctgcctgcttctcactccagggaagaaaatcaaagcaggtcccatg

SEQ ID NO: 67977 - DNA, 81 bp, Homo sapiens
agccaccgagtgatcctctgcctgcttctcactccagggaagaaaatcaaagcaggtcccatggctgccgtctgataatca

SEQ ID NO: 67978 - DNA, 71 bp, Homo sapiens
accgaggaccgcagccccggctcctacagccccggccctcgccccttacctccagcaactgcacgtagctc

SEQ ID NO: 67979 - DNA, 70 bp, Homo sapiens
agccccggctcctacagccccggccctcgccccttacctccagcaactgcacgtagctcgccgggaacca

SEQ ID NO: 67980 - DNA, 72 bp, Homo sapiens
ctcctacagccccggccctcgccccttacctccagcaactgcacgtagctcgccgggaaccagccacggagc

SEQ ID NO: 67981 - DNA, 71 bp, Homo sapiens
ggccctcgccccttacctccagcaactgcacgtagctcgccgggaaccagccacggagcccgtcctccttc

SEQ ID NO: 67982 - DNA, 72 bp, Homo sapiens
ccttacctccagcaactgcacgtagctcgccgggaaccagccacggagcccgtcctccttctcgccttccca

SEQ ID NO: 67983 - DNA, 73 bp, Homo sapiens
cctccagcaactgcacgtagctcgccgggaaccagccacggagcccgtcctccttctcgccttcccaccagcc

SEQ ID NO: 67984 - DNA, 68 bp, Homo sapiens
acgtagctcgccgggaaccagccacggagcccgtcctccttctcgccttcccaccagccgccgtccgg

SEQ ID NO: 67985 - DNA, 70 bp, Homo sapiens
ctcgccgggaaccagccacggagcccgtcctccttctcgccttcccaccagccgccgtccgggacctgca

SEQ ID NO: 67986 - DNA, 76 bp, Homo sapiens
accagccacggagcccgtcctccttctcgccttcccaccagccgccgtccgggacctgcagcagcgtgatcagctc

SEQ ID NO: 67987 - DNA, 75 bp, Homo sapiens
cccgtcctccttctcgccttcccaccagccgccgtccgggacctgcagcagcgtgatcagctcgcccgcggcgaa

SEQ ID NO: 67988 - DNA, 78 bp, Homo sapiens
cttctcgccttcccaccagccgccgtccgggacctgcagcagcgtgatcagctcgcccgcggcgaagcgcagcccctg

SEQ ID NO: 67989 - DNA, 78 bp, Homo sapiens
cttcccaccagccgccgtccgggacctgcagcagcgtgatcagctcgcccgcggcgaagcgcagcccctggccgtgcc

SEQ ID NO: 67990 - DNA, 77 bp, Homo sapiens
ccgtccgggacctgcagcagcgtgatcagctcgcccgcggcgaagcgcagcccctggccgtgccgctccccggagaa

SEQ ID NO: 67991 - DNA, 77 bp, Homo sapiens
acctgcagcagcgtgatcagctcgcccgcggcgaagcgcagcccctggccgtgccgctccccggagaaggggtacag

SEQ ID NO: 67992 - DNA, 73 bp, Homo sapiens
agcgtgatcagctcgcccgcggcgaagcgcagcccctggccgtgccgctccccggagaaggggtacagggtcc

SEQ ID NO: 67993 - DNA, 72 bp, Homo sapiens
agctcgcccgcggcgaagcgcagcccctggccgtgccgctccccggagaaggggtacagggtccggcagcga

SEQ ID NO: 67994 - DNA, 73 bp, Homo sapiens
cgaagcgcagcccctggccgtgccgctccccggagaaggggtacagggtccggcagcgagcgccggacatggc

SEQ ID NO: 67995 - DNA, 71 bp, Homo sapiens
ccctggccgtgccgctccccggagaaggggtacagggtccggcagcgagcgccggacatggccttggcgcc

SEQ ID NO: 67996 - DNA, 72 bp, Homo sapiens
tgccgctccccggagaaggggtacagggtccggcagcgagcgccggacatggccttggcgcccgggttcaca

SEQ ID NO: 67997 - DNA, 76 bp, Homo sapiens
ggagaaggggtacagggtccggcagcgagcgccggacatggccttggcgcccgggttcacagcgcagcctgcattc

SEQ ID NO: 67998 - DNA, 76 bp, Homo sapiens
gggtacagggtccggcagcgagcgccggacatggccttggcgcccgggttcacagcgcagcctgcattcccgccga

SEQ ID NO: 67999 - DNA, 76 bp, Homo sapiens
ggtccggcagcgagcgccggacatggccttggcgcccgggttcacagcgcagcctgcattcccgccgagccccacg

SEQ ID NO: 68000 - DNA, 76 bp, Homo sapiens
agcgccggacatggccttggcgcccgggttcacagcgcagcctgcattcccgccgagccccacgggctgggcagcg

SEQ ID NO: 68001 - DNA, 76 bp, Homo sapiens
acatggccttggcgcccgggttcacagcgcagcctgcattcccgccgagccccacgggctgggcagcggctccgcg

SEQ ID NO: 68002 - DNA, 73 bp, Homo sapiens
cgcccgggttcacagcgcagcctgcattcccgccgagccccacgggctgggcagcggctccgcggggtcccag

SEQ ID NO: 68003 - DNA, 76 bp, Homo sapiens
ttcacagcgcagcctgcattcccgccgagccccacgggctgggcagcggctccgcggggtcccaggcgcccggcgc

SEQ ID NO: 68004 - DNA, 71 bp, Homo sapiens
agcctgcattcccgccgagccccacgggctgggcagcggctccgcggggtcccaggcgcccggcgctccgg

SEQ ID NO: 68005 - DNA, 71 bp, Homo sapiens
cgagccccacgggctgggcagcggctccgcggggtcccaggcgcccggcgctccgggctcccgcgctctgg

SEQ ID NO: 68006 - DNA, 72 bp, Homo sapiens
acgggctgggcagcggctccgcggggtcccaggcgcccggcgctccgggctcccgcgctctgggcgcgcgcc

SEQ ID NO: 68007 - DNA, 73 bp, Homo sapiens
ggcagcggctccgcggggtcccaggcgcccggcgctccgggctcccgcgctctgggcgcgcgccgtctctggg

SEQ ID NO: 68008 - DNA, 72 bp, Homo sapiens
tccgcggggtcccaggcgcccggcgctccgggctcccgcgctctgggcgcgcgccgtctctggggtgcgcgg

SEQ ID NO: 68009 - DNA, 72 bp, Homo sapiens
cccaggcgcccggcgctccgggctcccgcgctctgggcgcgcgccgtctctggggtgcgcgggggtcctcag

SEQ ID NO: 68010 - DNA, 72 bp, Homo sapiens
cggcgctccgggctcccgcgctctgggcgcgcgccgtctctggggtgcgcgggggtcctcaggcaggcgggg

SEQ ID NO: 68011 - DNA, 74 bp, Homo sapiens
ctcccgcgctctgggcgcgcgccgtctctggggtgcgcgggggtcctcaggcaggcgggggacgcgcgctccgc

SEQ ID NO: 68012 - DNA, 73 bp, Homo sapiens
tctgggcgcgcgccgtctctggggtgcgcgggggtcctcaggcaggcgggggacgcgcgctccgcgccgggaa

SEQ ID NO: 68013 - DNA, 73 bp, Homo sapiens
gtctctggggtgcgcgggggtcctcaggcaggcgggggacgcgcgctccgcgccgggaagcagagactcgttg

SEQ ID NO: 68014 - DNA, 70 bp, Homo sapiens
cttattagcctggaaggggcgggaccaggggtccgtgcccaataggaagggagcagaggagtgagtcctg

SEQ ID NO: 68015 - DNA, 70 bp, Homo sapiens
tggaaggggcgggaccaggggtccgtgcccaataggaagggagcagaggagtgagtcctggccgcgtccc

SEQ ID NO: 68016 - DNA, 70 bp, Homo sapiens
caggggtccgtgcccaataggaagggagcagaggagtgagtcctggccgcgtccccgtcgctagggaaac

SEQ ID NO: 68017 - DNA, 75 bp, Homo sapiens
tccgtgcccaataggaagggagcagaggagtgagtcctggccgcgtccccgtcgctagggaaaccgatgcagctg

SEQ ID NO: 68018 - DNA, 74 bp, Homo sapiens
aataggaagggagcagaggagtgagtcctggccgcgtccccgtcgctagggaaaccgatgcagctggaggccgc

SEQ ID NO: 68019 - DNA, 79 bp, Homo sapiens
agcagaggagtgagtcctggccgcgtccccgtcgctagggaaaccgatgcagctggaggccgcgcgcgatgcggctcgc

SEQ ID NO: 68020 - DNA, 78 bp, Homo sapiens
tgagtcctggccgcgtccccgtcgctagggaaaccgatgcagctggaggccgcgcgcgatgcggctcgcggaggagcg

SEQ ID NO: 68021 - DNA, 77 bp, Homo sapiens
cgcgtccccgtcgctagggaaaccgatgcagctggaggccgcgcgcgatgcggctcgcggaggagcgggccgcgctc

SEQ ID NO: 68022 - DNA, 79 bp, Homo sapiens
gtcgctagggaaaccgatgcagctggaggccgcgcgcgatgcggctcgcggaggagcgggccgcgctcgcggcggagaa

SEQ ID NO: 68023 - DNA, 78 bp, Homo sapiens
aaaccgatgcagctggaggccgcgcgcgatgcggctcgcggaggagcgggccgcgctcgcggcggagaacgcggatgg

SEQ ID NO: 68024 - DNA, 75 bp, Homo sapiens
agctggaggccgcgcgcgatgcggctcgcggaggagcgggccgcgctcgcggcggagaacgcggatggggaaccc

SEQ ID NO: 68025 - DNA, 73 bp, Homo sapiens
cgcgatgcggctcgcggaggagcgggccgcgctcgcggcggagaacgcggatggggaacccggcgccgaccga

SEQ ID NO: 68026 - DNA, 70 bp, Homo sapiens
gctcgcggcggagaacgcggatggggaacccggcgccgaccgacgactgcgactcctggggacctacgtg

SEQ ID NO: 68027 - DNA, 71 bp, Homo sapiens
ggcggagaacgcggatggggaacccggcgccgaccgacgactgcgactcctggggacctacgtggccatga

SEQ ID NO: 68028 - DNA, 73 bp, Homo sapiens
atggggaacccggcgccgaccgacgactgcgactcctggggacctacgtggccatgagcctgcggccggctgc

SEQ ID NO: 68029 - DNA, 73 bp, Homo sapiens
aacccggcgccgaccgacgactgcgactcctggggacctacgtggccatgagcctgcggccggctgcgggcgc

SEQ ID NO: 68030 - DNA, 76 bp, Homo sapiens
cgaccgacgactgcgactcctggggacctacgtggccatgagcctgcggccggctgcgggcgcctgggagcgttgc

SEQ ID NO: 68031 - DNA, 79 bp, Homo sapiens
tgcgactcctggggacctacgtggccatgagcctgcggccggctgcgggcgcctgggagcgttgcgcggggagtgctga

SEQ ID NO: 68032 - DNA, 79 bp, Homo sapiens
gggacctacgtggccatgagcctgcggccggctgcgggcgcctgggagcgttgcgcggggagtgctgaggcggagcagc

SEQ ID NO: 68033 - DNA, 82 bp, Homo sapiens
acgtggccatgagcctgcggccggctgcgggcgcctgggagcgttgcgcggggagtgctgaggcggagcagctgctccaggc

SEQ ID NO: 68034 - DNA, 79 bp, Homo sapiens
agcctgcggccggctgcgggcgcctgggagcgttgcgcggggagtgctgaggcggagcagctgctccaggccttcctgg

SEQ ID NO: 68035 - DNA, 82 bp, Homo sapiens
tgcgggcgcctgggagcgttgcgcggggagtgctgaggcggagcagctgctccaggccttcctgggccgcgatgctgccgag

SEQ ID NO: 68036 - DNA, 79 bp, Homo sapiens
cctgggagcgttgcgcggggagtgctgaggcggagcagctgctccaggccttcctgggccgcgatgctgccgaggggcc

SEQ ID NO: 68037 - DNA, 82 bp, Homo sapiens
ttgcgcggggagtgctgaggcggagcagctgctccaggccttcctgggccgcgatgctgccgaggggccgcggccgctgctg

SEQ ID NO: 68038 - DNA, 79 bp, Homo sapiens
gagcagctgctccaggccttcctgggccgcgatgctgccgaggggccgcggccgctgctggtggtgcggcccgggccca

SEQ ID NO: 68039 - DNA, 73 bp, Homo sapiens
ctccaggccttcctgggccgcgatgctgccgaggggccgcggccgctgctggtggtgcggcccgggcccaggg

SEQ ID NO: 68040 - DNA, 75 bp, Homo sapiens
ttcctgggccgcgatgctgccgaggggccgcggccgctgctggtggtgcggcccgggcccaggggcctggcaata

SEQ ID NO: 68041 - DNA, 72 bp, Homo sapiens
cgatgctgccgaggggccgcggccgctgctggtggtgcggcccgggcccaggggcctggcaatacgccccgg

SEQ ID NO: 68042 - DNA, 72 bp, Homo sapiens
tgccgaggggccgcggccgctgctggtggtgcggcccgggcccaggggcctggcaatacgccccgggctgga

SEQ ID NO: 68043 - DNA, 70 bp, Homo sapiens
ccgcggccgctgctggtggtgcggcccgggcccaggggcctggcaatacgccccgggctggaggtgggac

SEQ ID NO: 68044 - DNA, 71 bp, Homo sapiens
tgctggtggtgcggcccgggcccaggggcctggcaatacgccccgggctggaggtgggacctgagtcgggc

SEQ ID NO: 68045 - DNA, 70 bp, Homo sapiens
ccgggcccaggggcctggcaatacgccccgggctggaggtgggacctgagtcgggcctggctggcgctaa

SEQ ID NO: 68046 - DNA, 70 bp, Homo sapiens
gggcctggcaatacgccccgggctggaggtgggacctgagtcgggcctggctggcgctaaggcgcttttt

SEQ ID NO: 68047 - DNA, 68 bp, Homo sapiens
aatacgccccgggctggaggtgggacctgagtcgggcctggctggcgctaaggcgctttttttccttc

SEQ ID NO: 68048 - DNA, 70 bp, Homo sapiens
ggctggaggtgggacctgagtcgggcctggctggcgctaaggcgctttttttccttcgcaccgggcccga

SEQ ID NO: 68049 - DNA, 69 bp, Homo sapiens
aggtgggacctgagtcgggcctggctggcgctaaggcgctttttttccttcgcaccgggcccgagcctc

SEQ ID NO: 68050 - DNA, 69 bp, Homo sapiens
agtcgggcctggctggcgctaaggcgctttttttccttcgcaccgggcccgagcctccagggcccgaca

SEQ ID NO: 68051 - DNA, 70 bp, Homo sapiens
cctggctggcgctaaggcgctttttttccttcgcaccgggcccgagcctccagggcccgacagcttccgc

SEQ ID NO: 68052 - DNA, 70 bp, Homo sapiens
taaggcgctttttttccttcgcaccgggcccgagcctccagggcccgacagcttccgcggcgcagtggtc

SEQ ID NO: 68053 - DNA, 70 bp, Homo sapiens
tttttccttcgcaccgggcccgagcctccagggcccgacagcttccgcggcgcagtggtctgcggggacc

SEQ ID NO: 68054 - DNA, 71 bp, Homo sapiens
accgggcccgagcctccagggcccgacagcttccgcggcgcagtggtctgcggggacctgcccgcggcacc

SEQ ID NO: 68055 - DNA, 76 bp, Homo sapiens
agcctccagggcccgacagcttccgcggcgcagtggtctgcggggacctgcccgcggcacctctggagcacctagc

SEQ ID NO: 68056 - DNA, 77 bp, Homo sapiens
cccgacagcttccgcggcgcagtggtctgcggggacctgcccgcggcacctctggagcacctagccgcgctgttctc

SEQ ID NO: 68057 - DNA, 77 bp, Homo sapiens
cttccgcggcgcagtggtctgcggggacctgcccgcggcacctctggagcacctagccgcgctgttctcggaggtga

SEQ ID NO: 68058 - DNA, 76 bp, Homo sapiens
ggcgcagtggtctgcggggacctgcccgcggcacctctggagcacctagccgcgctgttctcggaggtgagggtgg

SEQ ID NO: 68059 - DNA, 75 bp, Homo sapiens
tctgcggggacctgcccgcggcacctctggagcacctagccgcgctgttctcggaggtgagggtgggttagtgtc

SEQ ID NO: 68060 - DNA, 73 bp, Homo sapiens
ccgcggcacctctggagcacctagccgcgctgttctcggaggtgagggtgggttagtgtccccgcgcggctaa

SEQ ID NO: 68061 - DNA, 75 bp, Homo sapiens
tctcagaattggaacacctgcctttctttcctgtgcacctctgttccaggttgttctacccgtcctggccaatga

SEQ ID NO: 68062 - DNA, 73 bp, Homo sapiens
ttggaacacctgcctttctttcctgtgcacctctgttccaggttgttctacccgtcctggccaatgagaagaa

SEQ ID NO: 68063 - DNA, 72 bp, Homo sapiens
ctttctttcctgtgcacctctgttccaggttgttctacccgtcctggccaatgagaagaatcgcctaaactg

SEQ ID NO: 68064 - DNA, 78 bp, Homo sapiens
tgcacctctgttccaggttgttctacccgtcctggccaatgagaagaatcgcctaaactggccccacatgatatgtga

SEQ ID NO: 68065 - DNA, 78 bp, Homo sapiens
ggttgttctacccgtcctggccaatgagaagaatcgcctaaactggccccacatgatatgtgaggatgtcaggcggca

SEQ ID NO: 68066 - DNA, 81 bp, Homo sapiens
cctggccaatgagaagaatcgcctaaactggccccacatgatatgtgaggatgtcaggcggcacgcccacagcctccaatg

SEQ ID NO: 68067 - DNA, 81 bp, Homo sapiens
aatgagaagaatcgcctaaactggccccacatgatatgtgaggatgtcaggcggcacgcccacagcctccaatgtgacctc

SEQ ID NO: 68068 - DNA, 81 bp, Homo sapiens
aatcgcctaaactggccccacatgatatgtgaggatgtcaggcggcacgcccacagcctccaatgtgacctctcagttata

SEQ ID NO: 68069 - DNA, 82 bp, Homo sapiens
aactggccccacatgatatgtgaggatgtcaggcggcacgcccacagcctccaatgtgacctctcagttatacttgagcaag

SEQ ID NO: 68070 - DNA, 81 bp, Homo sapiens
atgatatgtgaggatgtcaggcggcacgcccacagcctccaatgtgacctctcagttatacttgagcaagtgaagggaaaa

SEQ ID NO: 68071 - DNA, 75 bp, Homo sapiens
aggatgtcaggcggcacgcccacagcctccaatgtgacctctcagttatacttgagcaagtgaagggaaaaactt

SEQ ID NO: 68072 - DNA, 76 bp, Homo sapiens
cggcacgcccacagcctccaatgtgacctctcagttatacttgagcaagtgaagggaaaaactttgctgcctcttc

SEQ ID NO: 68073 - DNA, 78 bp, Homo sapiens
agcctccaatgtgacctctcagttatacttgagcaagtgaagggaaaaactttgctgcctcttccagcaggctcagaa

SEQ ID NO: 68074 - DNA, 76 bp, Homo sapiens
ccaatgtgacctctcagttatacttgagcaagtgaagggaaaaactttgctgcctcttccagcaggctcagaaaaa

SEQ ID NO: 68075 - DNA, 74 bp, Homo sapiens
ctctcagttatacttgagcaagtgaagggaaaaactttgctgcctcttccagcaggctcagaaaaaatggagtt

SEQ ID NO: 68076 - DNA, 74 bp, Homo sapiens
tgagcaagtgaagggaaaaactttgctgcctcttccagcaggctcagaaaaaatggagtttgcggattccaaaa

SEQ ID NO: 68077 - DNA, 72 bp, Homo sapiens
aagggaaaaactttgctgcctcttccagcaggctcagaaaaaatggagtttgcggattccaaaagtgagaca

SEQ ID NO: 68078 - DNA, 74 bp, Homo sapiens
aaactttgctgcctcttccagcaggctcagaaaaaatggagtttgcggattccaaaagtgagacagtgtaagta

SEQ ID NO: 68079 - DNA, 74 bp, Homo sapiens
cctcttccagcaggctcagaaaaaatggagtttgcggattccaaaagtgagacagtgtaagtaccgccagcctg

SEQ ID NO: 68080 - DNA, 74 bp, Homo sapiens
aggctcagaaaaaatggagtttgcggattccaaaagtgagacagtgtaagtaccgccagcctggccatatgggc

SEQ ID NO: 68081 - DNA, 80 bp, Homo sapiens
tgtttttgttgttatcattgttgttgttttgtctttcacagcttggattctatagataagtcagtcatctatgccattga

SEQ ID NO: 68082 - DNA, 83 bp, Homo sapiens
ttgttgttatcattgttgttgttttgtctttcacagcttggattctatagataagtcagtcatctatgccattgagtctgcag

SEQ ID NO: 68083 - DNA, 85 bp, Homo sapiens
ttgttgttttgtctttcacagcttggattctatagataagtcagtcatctatgccattgagtctgcagtgatcaaatggagctac

SEQ ID NO: 68084 - DNA, 85 bp, Homo sapiens
ttttgtctttcacagcttggattctatagataagtcagtcatctatgccattgagtctgcagtgatcaaatggagctaccaagtc

SEQ ID NO: 68085 - DNA, 85 bp, Homo sapiens
agcttggattctatagataagtcagtcatctatgccattgagtctgcagtgatcaaatggagctaccaagtccaggtggtactca

SEQ ID NO: 68086 - DNA, 85 bp, Homo sapiens
attctatagataagtcagtcatctatgccattgagtctgcagtgatcaaatggagctaccaagtccaggtggtactcaagagaga

SEQ ID NO: 68087 - DNA, 83 bp, Homo sapiens
ataagtcagtcatctatgccattgagtctgcagtgatcaaatggagctaccaagtccaggtggtactcaagagagagtcttcc

SEQ ID NO: 68088 - DNA, 83 bp, Homo sapiens
tctatgccattgagtctgcagtgatcaaatggagctaccaagtccaggtggtactcaagagagagtcttcccagccactctta

SEQ ID NO: 68089 - DNA, 77 bp, Homo sapiens
agtctgcagtgatcaaatggagctaccaagtccaggtggtactcaagagagagtcttcccagccactcttacaaggg

SEQ ID NO: 68090 - DNA, 75 bp, Homo sapiens
agtgatcaaatggagctaccaagtccaggtggtactcaagagagagtcttcccagccactcttacaaggggagaa

SEQ ID NO: 68091 - DNA, 73 bp, Homo sapiens
atggagctaccaagtccaggtggtactcaagagagagtcttcccagccactcttacaaggggagaatcccacc

SEQ ID NO: 68092 - DNA, 69 bp, Homo sapiens
aagtccaggtggtactcaagagagagtcttcccagccactcttacaaggggagaatcccacccctaagg

SEQ ID NO: 68093 - DNA, 71 bp, Homo sapiens
tactcaagagagagtcttcccagccactcttacaaggggagaatcccacccctaaggtggagttggagttc

SEQ ID NO: 68094 - DNA, 70 bp, Homo sapiens
agagagtcttcccagccactcttacaaggggagaatcccacccctaaggtggagttggagttctggaaga

SEQ ID NO: 68095 - DNA, 71 bp, Homo sapiens
agccactcttacaaggggagaatcccacccctaaggtggagttggagttctggaagagcaggtaggcaaga

SEQ ID NO: 68096 - DNA, 72 bp, Homo sapiens
tcttacaaggggagaatcccacccctaaggtggagttggagttctggaagagcaggtaggcaagaaggcaca

SEQ ID NO: 68097 - DNA, 74 bp, Homo sapiens
agaatcccacccctaaggtggagttggagttctggaagagcaggtaggcaagaaggcacatgctggaagtctgg

SEQ ID NO: 68098 - DNA, 83 bp, Homo sapiens
atttcctgatgcttccctggattcacccttcttcatgatattgcaggtatgaagatctgaaatacatctataatcaactgaga

SEQ ID NO: 68099 - DNA, 82 bp, Homo sapiens
atgcttccctggattcacccttcttcatgatattgcaggtatgaagatctgaaatacatctataatcaactgagaacaataa

SEQ ID NO: 68100 - DNA, 79 bp, Homo sapiens
attcacccttcttcatgatattgcaggtatgaagatctgaaatacatctataatcaactgagaacaataacggtgaggg

SEQ ID NO: 68101 - DNA, 82 bp, Homo sapiens
cttcttcatgatattgcaggtatgaagatctgaaatacatctataatcaactgagaacaataacggtgaggggcatggccaa

SEQ ID NO: 68102 - DNA, 81 bp, Homo sapiens
atattgcaggtatgaagatctgaaatacatctataatcaactgagaacaataacggtgaggggcatggccaagctcctgga

SEQ ID NO: 68103 - DNA, 82 bp, Homo sapiens
tatgaagatctgaaatacatctataatcaactgagaacaataacggtgaggggcatggccaagctcctggacaagcttcaga

SEQ ID NO: 68104 - DNA, 78 bp, Homo sapiens
aatacatctataatcaactgagaacaataacggtgaggggcatggccaagctcctggacaagcttcagagtagctact

SEQ ID NO: 68105 - DNA, 78 bp, Homo sapiens
atctataatcaactgagaacaataacggtgaggggcatggccaagctcctggacaagcttcagagtagctactttcca

SEQ ID NO: 68106 - DNA, 76 bp, Homo sapiens
aactgagaacaataacggtgaggggcatggccaagctcctggacaagcttcagagtagctactttccagctttcaa

SEQ ID NO: 68107 - DNA, 77 bp, Homo sapiens
aataacggtgaggggcatggccaagctcctggacaagcttcagagtagctactttccagctttcaaagccatgtaca

SEQ ID NO: 68108 - DNA, 82 bp, Homo sapiens
catggccaagctcctggacaagcttcagagtagctactttccagctttcaaagccatgtacagagatgttgttgcaggtgag

SEQ ID NO: 68109 - DNA, 80 bp, Homo sapiens
aagctcctggacaagcttcagagtagctactttccagctttcaaagccatgtacagagatgttgttgcaggtgaggacca

SEQ ID NO: 68110 - DNA, 78 bp, Homo sapiens
agagtagctactttccagctttcaaagccatgtacagagatgttgttgcaggtgaggaccagcaagtgttttcacaaa

SEQ ID NO: 68111 - DNA, 78 bp, Homo sapiens
actttccagctttcaaagccatgtacagagatgttgttgcaggtgaggaccagcaagtgttttcacaaatgtgtttga

SEQ ID NO: 68112 - DNA, 78 bp, Homo sapiens
tttcaaagccatgtacagagatgttgttgcaggtgaggaccagcaagtgttttcacaaatgtgtttgactcaagttac

SEQ ID NO: 68113 - DNA, 80 bp, Homo sapiens
tacagagatgttgttgcaggtgaggaccagcaagtgttttcacaaatgtgtttgactcaagttaccgtcgaatgatgcat

SEQ ID NO: 68114 - DNA, 78 bp, Homo sapiens
atgttgttgcaggtgaggaccagcaagtgttttcacaaatgtgtttgactcaagttaccgtcgaatgatgcattcacc

SEQ ID NO: 68115 - DNA, 78 bp, Homo sapiens
aggaccagcaagtgttttcacaaatgtgtttgactcaagttaccgtcgaatgatgcattcacctctctctgtctgaat

SEQ ID NO: 68116 - DNA, 77 bp, Homo sapiens
agtgttttcacaaatgtgtttgactcaagttaccgtcgaatgatgcattcacctctctctgtctgaattccgcaact

SEQ ID NO: 68117 - DNA, 77 bp, Homo sapiens
acaaatgtgtttgactcaagttaccgtcgaatgatgcattcacctctctctgtctgaattccgcaacttcaagtcct

SEQ ID NO: 68118 - DNA, 76 bp, Homo sapiens
tttgactcaagttaccgtcgaatgatgcattcacctctctctgtctgaattccgcaacttcaagtccttgtaaatt

SEQ ID NO: 68119 - DNA, 75 bp, Homo sapiens
aatgatgcattcacctctctctgtctgaattccgcaacttcaagtccttgtaaatttccgacccgacacaaacta

SEQ ID NO: 68120 - DNA, 74 bp, Homo sapiens
tctgtctgaattccgcaacttcaagtccttgtaaatttccgacccgacacaaactagcatggtggcaagaatac

SEQ ID NO: 68121 - DNA, 78 bp, Homo sapiens
agtccttgtaaatttccgacccgacacaaactagcatggtggcaagaataccacatctagatacatgagagcagctaa

SEQ ID NO: 68122 - DNA, 81 bp, Homo sapiens
tgtaaatttccgacccgacacaaactagcatggtggcaagaataccacatctagatacatgagagcagctaaacagagcta

SEQ ID NO: 68123 - DNA, 84 bp, Homo sapiens
acccgacacaaactagcatggtggcaagaataccacatctagatacatgagagcagctaaacagagctatgctgtttgcagttc

SEQ ID NO: 68124 - DNA, 87 bp, Homo sapiens
acaaactagcatggtggcaagaataccacatctagatacatgagagcagctaaacagagctatgctgtttgcagttccactgctgta

SEQ ID NO: 68125 - DNA, 85 bp, Homo sapiens
ggcaagaataccacatctagatacatgagagcagctaaacagagctatgctgtttgcagttccactgctgtatggcctgggaaaa

SEQ ID NO: 68126 - DNA, 84 bp, Homo sapiens
aataccacatctagatacatgagagcagctaaacagagctatgctgtttgcagttccactgctgtatggcctgggaaaattcac

SEQ ID NO: 68127 - DNA, 83 bp, Homo sapiens
tagatacatgagagcagctaaacagagctatgctgtttgcagttccactgctgtatggcctgggaaaattcacctagcccctc

SEQ ID NO: 68128 - DNA, 80 bp, Homo sapiens
agcagctaaacagagctatgctgtttgcagttccactgctgtatggcctgggaaaattcacctagcccctctgagcttta

SEQ ID NO: 68129 - DNA, 78 bp, Homo sapiens
taaacagagctatgctgtttgcagttccactgctgtatggcctgggaaaattcacctagcccctctgagctttagtac

SEQ ID NO: 68130 - DNA, 75 bp, Homo sapiens
tgtttgcagttccactgctgtatggcctgggaaaattcacctagcccctctgagctttagtacgtgtgttggtta

SEQ ID NO: 68131 - DNA, 72 bp, Homo sapiens
agttccactgctgtatggcctgggaaaattcacctagcccctctgagctttagtacgtgtgttggttatggg

SEQ ID NO: 68132 - DNA, 73 bp, Homo sapiens
ctgtatggcctgggaaaattcacctagcccctctgagctttagtacgtgtgttggttatggggcatacacttc

SEQ ID NO: 68133 - DNA, 71 bp, Homo sapiens
ggaaaattcacctagcccctctgagctttagtacgtgtgttggttatggggcatacacttctgcctacttt

SEQ ID NO: 68134 - DNA, 73 bp, Homo sapiens
ttcacctagcccctctgagctttagtacgtgtgttggttatggggcatacacttctgcctacttttctaggtc

SEQ ID NO: 68135 - DNA, 76 bp, Homo sapiens
tctgagctttagtacgtgtgttggttatggggcatacacttctgcctacttttctaggtccgtgtgagattataca

SEQ ID NO: 68136 - DNA, 73 bp, Homo sapiens
tttagtacgtgtgttggttatggggcatacacttctgcctacttttctaggtccgtgtgagattatacaggtg

SEQ ID NO: 68137 - DNA, 74 bp, Homo sapiens
ttggttatggggcatacacttctgcctacttttctaggtccgtgtgagattatacaggtggaagaacttattga

SEQ ID NO: 68138 - DNA, 74 bp, Homo sapiens
catacacttctgcctacttttctaggtccgtgtgagattatacaggtggaagaacttattgacttaacacaaca

SEQ ID NO: 68139 - DNA, 73 bp, Homo sapiens
ttctgcctacttttctaggtccgtgtgagattatacaggtggaagaacttattgacttaacacaacaatgttc

SEQ ID NO: 68140 - DNA, 72 bp, Homo sapiens
acttttctaggtccgtgtgagattatacaggtggaagaacttattgacttaacacaacaatgttcctggagc

SEQ ID NO: 68141 - DNA, 72 bp, Homo sapiens
attatacaggtggaagaacttattgacttaacacaacaatgttcctggagctgtccctttgtgtctttcaaa

SEQ ID NO: 68142 - DNA, 71 bp, Homo sapiens
aagaacttattgacttaacacaacaatgttcctggagctgtccctttgtgtctttcaaacactggggccag

SEQ ID NO: 68143 - DNA, 74 bp, Homo sapiens
tattgacttaacacaacaatgttcctggagctgtccctttgtgtctttcaaacactggggccaggacatacagt

SEQ ID NO: 68144 - DNA, 75 bp, Homo sapiens
tgttcctggagctgtccctttgtgtctttcaaacactggggccaggacatacagttctggggtggccattatgga

SEQ ID NO: 68145 - DNA, 75 bp, Homo sapiens
tccctttgtgtctttcaaacactggggccaggacatacagttctggggtggccattatggagcctgtgtgaccaa

SEQ ID NO: 68146 - DNA, 76 bp, Homo sapiens
tgtgtctttcaaacactggggccaggacatacagttctggggtggccattatggagcctgtgtgaccaactccagg

SEQ ID NO: 68147 - DNA, 75 bp, Homo sapiens
aaacactggggccaggacatacagttctggggtggccattatggagcctgtgtgaccaactccagggtggtcatg

SEQ ID NO: 68148 - DNA, 81 bp, Homo sapiens
gacatacagttctggggtggccattatggagcctgtgtgaccaactccagggtggtcatgtgagtccatctgtcctaatca

SEQ ID NO: 68149 - DNA, 79 bp, Homo sapiens
ttctggggtggccattatggagcctgtgtgaccaactccagggtggtcatgtgagtccatctgtcctaatcaaggacta

SEQ ID NO: 68150 - DNA, 79 bp, Homo sapiens
ccattatggagcctgtgtgaccaactccagggtggtcatgtgagtccatctgtcctaatcaaggactacccttctggca

SEQ ID NO: 68151 - DNA, 79 bp, Homo sapiens
atggagcctgtgtgaccaactccagggtggtcatgtgagtccatctgtcctaatcaaggactacccttctggcaagaca

SEQ ID NO: 68152 - DNA, 78 bp, Homo sapiens
tgtgaccaactccagggtggtcatgtgagtccatctgtcctaatcaaggactacccttctggcaagacagcctaacca

SEQ ID NO: 68153 - DNA, 77 bp, Homo sapiens
agggtggtcatgtgagtccatctgtcctaatcaaggactacccttctggcaagacagcctaaccatgccttccagga

SEQ ID NO: 68154 - DNA, 76 bp, Homo sapiens
tgagtccatctgtcctaatcaaggactacccttctggcaagacagcctaaccatgccttccaggacctgggattat

SEQ ID NO: 68155 - DNA, 75 bp, Homo sapiens
atctgtcctaatcaaggactacccttctggcaagacagcctaaccatgccttccaggacctgggattattggctg

SEQ ID NO: 68156 - DNA, 73 bp, Homo sapiens
taatcaaggactacccttctggcaagacagcctaaccatgccttccaggacctgggattattggctgggaccc

SEQ ID NO: 68157 - DNA, 73 bp, Homo sapiens
tacccttctggcaagacagcctaaccatgccttccaggacctgggattattggctgggacccctcattaacta

SEQ ID NO: 68158 - DNA, 72 bp, Homo sapiens
aagacagcctaaccatgccttccaggacctgggattattggctgggacccctcattaactaagtgcttgtac

SEQ ID NO: 68159 - DNA, 71 bp, Homo sapiens
ctaaccatgccttccaggacctgggattattggctgggacccctcattaactaagtgcttgtacctccctg

SEQ ID NO: 68160 - DNA, 72 bp, Homo sapiens
tgggattattggctgggacccctcattaactaagtgcttgtacctccctggcacgctgggaactcctgggtc

SEQ ID NO: 68161 - DNA, 71 bp, Homo sapiens
tgggacccctcattaactaagtgcttgtacctccctggcacgctgggaactcctgggtctggtcaaaggtc

SEQ ID NO: 68162 - DNA, 71 bp, Homo sapiens
ccctcattaactaagtgcttgtacctccctggcacgctgggaactcctgggtctggtcaaaggtctttctg

SEQ ID NO: 68163 - DNA, 72 bp, Homo sapiens
tacctccctggcacgctgggaactcctgggtctggtcaaaggtctttctgggcctgtcttcagggtctggaa

SEQ ID NO: 68164 - DNA, 70 bp, Homo sapiens
acgctgggaactcctgggtctggtcaaaggtctttctgggcctgtcttcagggtctggaaactactagaa

SEQ ID NO: 68165 - DNA, 68 bp, Homo sapiens
aactcctgggtctggtcaaaggtctttctgggcctgtcttcagggtctggaaactactagaagaaagt

SEQ ID NO: 68166 - DNA, 72 bp, Homo sapiens
tctggtcaaaggtctttctgggcctgtcttcagggtctggaaactactagaagaaagttcttccatccgatc

SEQ ID NO: 68167 - DNA, 72 bp, Homo sapiens
aaggtctttctgggcctgtcttcagggtctggaaactactagaagaaagttcttccatccgatctgcctaca

SEQ ID NO: 68168 - DNA, 79 bp, Homo sapiens
ctgtcttcagggtctggaaactactagaagaaagttcttccatccgatctgcctacagctgctgctttgcactgtacaa

SEQ ID NO: 68169 - DNA, 80 bp, Homo sapiens
actactagaagaaagttcttccatccgatctgcctacagctgctgctttgcactgtacaaatccatgttgttacctctca

SEQ ID NO: 68170 - DNA, 79 bp, Homo sapiens
aaagttcttccatccgatctgcctacagctgctgctttgcactgtacaaatccatgttgttacctctcacctctggaat

SEQ ID NO: 68171 - DNA, 82 bp, Homo sapiens
tcttccatccgatctgcctacagctgctgctttgcactgtacaaatccatgttgttacctctcacctctggaattcaggtcc

SEQ ID NO: 68172 - DNA, 79 bp, Homo sapiens
tgcctacagctgctgctttgcactgtacaaatccatgttgttacctctcacctctggaattcaggtccctccacctttg

SEQ ID NO: 68173 - DNA, 78 bp, Homo sapiens
tgctgctttgcactgtacaaatccatgttgttacctctcacctctggaattcaggtccctccacctttggctccttga

SEQ ID NO: 68174 - DNA, 73 bp, Homo sapiens
actgtacaaatccatgttgttacctctcacctctggaattcaggtccctccacctttggctccttgagaaatc

SEQ ID NO: 68175 - DNA, 73 bp, Homo sapiens
aaatccatgttgttacctctcacctctggaattcaggtccctccacctttggctccttgagaaatctctattc

SEQ ID NO: 68176 - DNA, 73 bp, Homo sapiens
gttgttacctctcacctctggaattcaggtccctccacctttggctccttgagaaatctctattccatttcta

SEQ ID NO: 68177 - DNA, 76 bp, Homo sapiens
ctctggaattcaggtccctccacctttggctccttgagaaatctctattccatttctagctccattctgcattttc

SEQ ID NO: 68178 - DNA, 75 bp, Homo sapiens
aattcaggtccctccacctttggctccttgagaaatctctattccatttctagctccattctgcattttctattc

SEQ ID NO: 68179 - DNA, 79 bp, Homo sapiens
tccacctttggctccttgagaaatctctattccatttctagctccattctgcattttctattcctactgtcagatggga

SEQ ID NO: 68180 - DNA, 80 bp, Homo sapiens
tccttgagaaatctctattccatttctagctccattctgcattttctattcctactgtcagatgggactgcaatttcctg

SEQ ID NO: 68181 - DNA, 78 bp, Homo sapiens
aaatctctattccatttctagctccattctgcattttctattcctactgtcagatgggactgcaatttcctggccatt

SEQ ID NO: 68182 - DNA, 82 bp, Homo sapiens
tattccatttctagctccattctgcattttctattcctactgtcagatgggactgcaatttcctggccatttgagcaccaga

SEQ ID NO: 68183 - DNA, 82 bp, Homo sapiens
tccattctgcattttctattcctactgtcagatgggactgcaatttcctggccatttgagcaccagacaagatctacgctta

SEQ ID NO: 68184 - DNA, 78 bp, Homo sapiens
attttctattcctactgtcagatgggactgcaatttcctggccatttgagcaccagacaagatctacgcttatcaaaa

SEQ ID NO: 68185 - DNA, 80 bp, Homo sapiens
ctattcctactgtcagatgggactgcaatttcctggccatttgagcaccagacaagatctacgcttatcaaaattgccaa

SEQ ID NO: 68186 - DNA, 79 bp, Homo sapiens
caatttcctggccatttgagcaccagacaagatctacgcttatcaaaattgccaagccagcaaagtctatgattagaag

SEQ ID NO: 68187 - DNA, 78 bp, Homo sapiens
gccatttgagcaccagacaagatctacgcttatcaaaattgccaagccagcaaagtctatgattagaagtaggtaaat

SEQ ID NO: 68188 - DNA, 74 bp, Homo sapiens
agcaccagacaagatctacgcttatcaaaattgccaagccagcaaagtctatgattagaagtaggtaaattttt

SEQ ID NO: 68189 - DNA, 73 bp, Homo sapiens
gacaagatctacgcttatcaaaattgccaagccagcaaagtctatgattagaagtaggtaaatttttttagga

SEQ ID NO: 68190 - DNA, 71 bp, Homo sapiens
tatcaaaattgccaagccagcaaagtctatgattagaagtaggtaaatttttttaggactccctctccatt

SEQ ID NO: 68191 - DNA, 69 bp, Homo sapiens
aaattgccaagccagcaaagtctatgattagaagtaggtaaatttttttaggactccctctccatttct

SEQ ID NO: 68192 - DNA, 71 bp, Homo sapiens
caaagtctatgattagaagtaggtaaatttttttaggactccctctccatttcttggagcactgtgcgtct

SEQ ID NO: 68193 - DNA, 71 bp, Homo sapiens
tatgattagaagtaggtaaatttttttaggactccctctccatttcttggagcactgtgcgtcttctccct

SEQ ID NO: 68194 - DNA, 67 bp, Homo sapiens
aagtaggtaaatttttttaggactccctctccatttcttggagcactgtgcgtcttctccctttttc

SEQ ID NO: 68195 - DNA, 70 bp, Homo sapiens
tttttaggactccctctccatttcttggagcactgtgcgtcttctccctttttcttgtaaaatctcctct

SEQ ID NO: 68196 - DNA, 74 bp, Homo sapiens
tccctctccatttcttggagcactgtgcgtcttctccctttttcttgtaaaatctcctctttgctcttcagtac

SEQ ID NO: 68197 - DNA, 74 bp, Homo sapiens
ttcttggagcactgtgcgtcttctccctttttcttgtaaaatctcctctttgctcttcagtaccataggtcaaa

SEQ ID NO: 68198 - DNA, 69 bp, Homo sapiens
ttctccctttttcttgtaaaatctcctctttgctcttcagtaccataggtcaaaatgtgcttttaaagg

SEQ ID NO: 68199 - DNA, 73 bp, Homo sapiens
ttcttgtaaaatctcctctttgctcttcagtaccataggtcaaaatgtgcttttaaaggtctttgtcatttca

SEQ ID NO: 68200 - DNA, 74 bp, Homo sapiens
aatctcctctttgctcttcagtaccataggtcaaaatgtgcttttaaaggtctttgtcatttcacatggtctaa

SEQ ID NO: 68201 - DNA, 74 bp, Homo sapiens
tgctcttcagtaccataggtcaaaatgtgcttttaaaggtctttgtcatttcacatggtctaagcttaattaaa

SEQ ID NO: 68202 - DNA, 75 bp, Homo sapiens
tcagtaccataggtcaaaatgtgcttttaaaggtctttgtcatttcacatggtctaagcttaattaaagcagtga

SEQ ID NO: 68203 - DNA, 72 bp, Homo sapiens
aggtcaaaatgtgcttttaaaggtctttgtcatttcacatggtctaagcttaattaaagcagtgattttcaa

SEQ ID NO: 68204 - DNA, 71 bp, Homo sapiens
gtgcttttaaaggtctttgtcatttcacatggtctaagcttaattaaagcagtgattttcaaacattttac

SEQ ID NO: 68205 - DNA, 72 bp, Homo sapiens
ggtctttgtcatttcacatggtctaagcttaattaaagcagtgattttcaaacattttactttgcccagaac

SEQ ID NO: 68206 - DNA, 72 bp, Homo sapiens
tcatttcacatggtctaagcttaattaaagcagtgattttcaaacattttactttgcccagaactctttctt

SEQ ID NO: 68207 - DNA, 86 bp, Homo sapiens
gtattaggctccagatgggaatgctgaccatctccaattccttccagctctagcagaggcacaggacatccatgtgcacctgatac

SEQ ID NO: 68208 - DNA, 87 bp, Homo sapiens
ctccagatgggaatgctgaccatctccaattccttccagctctagcagaggcacaggacatccatgtgcacctgataccgctccagc

SEQ ID NO: 68209 - DNA, 86 bp, Homo sapiens
atgctgaccatctccaattccttccagctctagcagaggcacaggacatccatgtgcacctgataccgctccagcgccacctggaa

SEQ ID NO: 68210 - DNA, 85 bp, Homo sapiens
atctccaattccttccagctctagcagaggcacaggacatccatgtgcacctgataccgctccagcgccacctggaagctctgga

SEQ ID NO: 68211 - DNA, 87 bp, Homo sapiens
ttccagctctagcagaggcacaggacatccatgtgcacctgataccgctccagcgccacctggaagctctggagaatgcagaatttc

SEQ ID NO: 68212 - DNA, 85 bp, Homo sapiens
tctagcagaggcacaggacatccatgtgcacctgataccgctccagcgccacctggaagctctggagaatgcagaatttccggag

SEQ ID NO: 68213 - DNA, 82 bp, Homo sapiens
aggcacaggacatccatgtgcacctgataccgctccagcgccacctggaagctctggagaatgcagaatttccggaggtgaa

SEQ ID NO: 68214 - DNA, 82 bp, Homo sapiens
atccatgtgcacctgataccgctccagcgccacctggaagctctggagaatgcagaatttccggaggtgaagccccagctgc

SEQ ID NO: 68215 - DNA, 77 bp, Homo sapiens
acctgataccgctccagcgccacctggaagctctggagaatgcagaatttccggaggtgaagccccagctgcggccc

SEQ ID NO: 68216 - DNA, 78 bp, Homo sapiens
tccagcgccacctggaagctctggagaatgcagaatttccggaggtgaagccccagctgcggcccctgctccacgtgg

SEQ ID NO: 68217 - DNA, 79 bp, Homo sapiens
tggaagctctggagaatgcagaatttccggaggtgaagccccagctgcggcccctgctccacgtggtctgtctgatttg

SEQ ID NO: 68218 - DNA, 81 bp, Homo sapiens
tggagaatgcagaatttccggaggtgaagccccagctgcggcccctgctccacgtggtctgtctgatttgggccacatgca

SEQ ID NO: 68219 - DNA, 79 bp, Homo sapiens
atgcagaatttccggaggtgaagccccagctgcggcccctgctccacgtggtctgtctgatttgggccacatgcaagtc

SEQ ID NO: 68220 - DNA, 78 bp, Homo sapiens
tccggaggtgaagccccagctgcggcccctgctccacgtggtctgtctgatttgggccacatgcaagtcctaccgctc

SEQ ID NO: 68221 - DNA, 77 bp, Homo sapiens
ccagctgcggcccctgctccacgtggtctgtctgatttgggccacatgcaagtcctaccgctccccgggaaggctga

SEQ ID NO: 68222 - DNA, 78 bp, Homo sapiens
cccctgctccacgtggtctgtctgatttgggccacatgcaagtcctaccgctccccgggaaggctgactgtgctgctc

SEQ ID NO: 68223 - DNA, 77 bp, Homo sapiens
acgtggtctgtctgatttgggccacatgcaagtcctaccgctccccgggaaggctgactgtgctgctccaggagatt

SEQ ID NO: 68224 - DNA, 80 bp, Homo sapiens
tctgatttgggccacatgcaagtcctaccgctccccgggaaggctgactgtgctgctccaggagatttgcaaccttctca

SEQ ID NO: 68225 - DNA, 79 bp, Homo sapiens
tttgggccacatgcaagtcctaccgctccccgggaaggctgactgtgctgctccaggagatttgcaaccttctcatcca

SEQ ID NO: 68226 - DNA, 79 bp, Homo sapiens
atgcaagtcctaccgctccccgggaaggctgactgtgctgctccaggagatttgcaaccttctcatccagcaggtgggc

SEQ ID NO: 68227 - DNA, 79 bp, Homo sapiens
taccgctccccgggaaggctgactgtgctgctccaggagatttgcaaccttctcatccagcaggtgggctgccctggga

SEQ ID NO: 68228 - DNA, 83 bp, Homo sapiens
aaggctgactgtgctgctccaggagatttgcaaccttctcatccagcaggtgggctgccctgggatgcccagcaactgctccc

SEQ ID NO: 68229 - DNA, 81 bp, Homo sapiens
actgtgctgctccaggagatttgcaaccttctcatccagcaggtgggctgccctgggatgcccagcaactgctccctgggg

SEQ ID NO: 68230 - DNA, 84 bp, Homo sapiens
ttacaggatgtctgcacctgctcagtgatactaatctgtttgtataccaggcctctaattatctcagcccagaagacctgctga

SEQ ID NO: 68231 - DNA, 81 bp, Homo sapiens
cacctgctcagtgatactaatctgtttgtataccaggcctctaattatctcagcccagaagacctgctgagaagtgaggta

SEQ ID NO: 68232 - DNA, 78 bp, Homo sapiens
agtgatactaatctgtttgtataccaggcctctaattatctcagcccagaagacctgctgagaagtgaggtagaagaa

SEQ ID NO: 68233 - DNA, 77 bp, Homo sapiens
actaatctgtttgtataccaggcctctaattatctcagcccagaagacctgctgagaagtgaggtagaagaaagtca

SEQ ID NO: 68234 - DNA, 79 bp, Homo sapiens
ttgtataccaggcctctaattatctcagcccagaagacctgctgagaagtgaggtagaagaaagtcagagaaaactgca

SEQ ID NO: 68235 - DNA, 80 bp, Homo sapiens
tctaattatctcagcccagaagacctgctgagaagtgaggtagaagaaagtcagagaaaactgcaagtggtctcagacac

SEQ ID NO: 68236 - DNA, 78 bp, Homo sapiens
agaagacctgctgagaagtgaggtagaagaaagtcagagaaaactgcaagtggtctcagacactttgagcttcttcaa

SEQ ID NO: 68237 - DNA, 77 bp, Homo sapiens
agaagtgaggtagaagaaagtcagagaaaactgcaagtggtctcagacactttgagcttcttcaagcaagagtttca

SEQ ID NO: 68238 - DNA, 77 bp, Homo sapiens
aggtagaagaaagtcagagaaaactgcaagtggtctcagacactttgagcttcttcaagcaagagtttcaggacaga

SEQ ID NO: 68239 - DNA, 76 bp, Homo sapiens
aaagtcagagaaaactgcaagtggtctcagacactttgagcttcttcaagcaagagtttcaggacagaagggagaa

SEQ ID NO: 68240 - DNA, 77 bp, Homo sapiens
aaactgcaagtggtctcagacactttgagcttcttcaagcaagagtttcaggacagaagggagaatctccacactta

SEQ ID NO: 68241 - DNA, 78 bp, Homo sapiens
tggtctcagacactttgagcttcttcaagcaagagtttcaggacagaagggagaatctccacacttacttcaaagaga

SEQ ID NO: 68242 - DNA, 74 bp, Homo sapiens
acactttgagcttcttcaagcaagagtttcaggacagaagggagaatctccacacttacttcaaagagaaccag

SEQ ID NO: 68243 - DNA, 74 bp, Homo sapiens
ttcttcaagcaagagtttcaggacagaagggagaatctccacacttacttcaaagagaaccaggaagtcaagga

SEQ ID NO: 68244 - DNA, 71 bp, Homo sapiens
agtttcaggacagaagggagaatctccacacttacttcaaagagaaccaggaagtcaaggaatgggatttc

SEQ ID NO: 68245 - DNA, 70 bp, Homo sapiens
agaagggagaatctccacacttacttcaaagagaaccaggaagtcaaggaatgggatttccagtcttctt

SEQ ID NO: 68246 - DNA, 70 bp, Homo sapiens
agaatctccacacttacttcaaagagaaccaggaagtcaaggaatgggatttccagtcttctttggtctt

SEQ ID NO: 68247 - DNA, 71 bp, Homo sapiens
acttacttcaaagagaaccaggaagtcaaggaatgggatttccagtcttctttggtctttgtgcgattgga

SEQ ID NO: 68248 - DNA, 72 bp, Homo sapiens
aaagagaaccaggaagtcaaggaatgggatttccagtcttctttggtctttgtgcgattggatggcttcctg

SEQ ID NO: 68249 - DNA, 74 bp, Homo sapiens
aagtcaaggaatgggatttccagtcttctttggtctttgtgcgattggatggcttcctgggacaactgcacgtg

SEQ ID NO: 68250 - DNA, 74 bp, Homo sapiens
aaggaatgggatttccagtcttctttggtctttgtgcgattggatggcttcctgggacaactgcacgtggtgga

SEQ ID NO: 68251 - DNA, 79 bp, Homo sapiens
ttccagtcttctttggtctttgtgcgattggatggcttcctgggacaactgcacgtggtggaggtgagtgcgcacctca

SEQ ID NO: 68252 - DNA, 79 bp, Homo sapiens
ttctttggtctttgtgcgattggatggcttcctgggacaactgcacgtggtggaggtgagtgcgcacctcacctcaggc

SEQ ID NO: 68253 - DNA, 82 bp, Homo sapiens
tttgtgcgattggatggcttcctgggacaactgcacgtggtggaggtgagtgcgcacctcacctcaggctgccagccccaga

SEQ ID NO: 68254 - DNA, 72 bp, Homo sapiens
ttgctgagaatgattttaacttttttgtgaattgtccccatagggtcttctgaagacggccctggatttcca

SEQ ID NO: 68255 - DNA, 67 bp, Homo sapiens
attttaacttttttgtgaattgtccccatagggtcttctgaagacggccctggatttccacaaactg

SEQ ID NO: 68256 - DNA, 69 bp, Homo sapiens
tttttgtgaattgtccccatagggtcttctgaagacggccctggatttccacaaactgggaaaggtgga

SEQ ID NO: 68257 - DNA, 69 bp, Homo sapiens
aattgtccccatagggtcttctgaagacggccctggatttccacaaactgggaaaggtggagttcagcg

SEQ ID NO: 68258 - DNA, 71 bp, Homo sapiens
tagggtcttctgaagacggccctggatttccacaaactgggaaaggtggagttcagcggcgtcagagggaa

SEQ ID NO: 68259 - DNA, 76 bp, Homo sapiens
ttctgaagacggccctggatttccacaaactgggaaaggtggagttcagcggcgtcagagggaatgctctgagtca

SEQ ID NO: 68260 - DNA, 82 bp, Homo sapiens
tggatttccacaaactgggaaaggtggagttcagcggcgtcagagggaatgctctgagtcagcaggtccagcaaatgcatga

SEQ ID NO: 68261 - DNA, 79 bp, Homo sapiens
acaaactgggaaaggtggagttcagcggcgtcagagggaatgctctgagtcagcaggtccagcaaatgcatgaagaatt

SEQ ID NO: 68262 - DNA, 83 bp, Homo sapiens
aaaggtggagttcagcggcgtcagagggaatgctctgagtcagcaggtccagcaaatgcatgaagaatttcaagagatgtaca

SEQ ID NO: 68263 - DNA, 86 bp, Homo sapiens
agttcagcggcgtcagagggaatgctctgagtcagcaggtccagcaaatgcatgaagaatttcaagagatgtacaggcttctctca

SEQ ID NO: 68264 - DNA, 86 bp, Homo sapiens
tcagagggaatgctctgagtcagcaggtccagcaaatgcatgaagaatttcaagagatgtacaggcttctctcaggatcctcctcc

SEQ ID NO: 68265 - DNA, 85 bp, Homo sapiens
aatgctctgagtcagcaggtccagcaaatgcatgaagaatttcaagagatgtacaggcttctctcaggatcctcctccgactgcc

SEQ ID NO: 68266 - DNA, 82 bp, Homo sapiens
agcaggtccagcaaatgcatgaagaatttcaagagatgtacaggcttctctcaggatcctcctccgactgcctgtacctcca

SEQ ID NO: 68267 - DNA, 80 bp, Homo sapiens
agcaaatgcatgaagaatttcaagagatgtacaggcttctctcaggatcctcctccgactgcctgtacctccaaagcacg

SEQ ID NO: 68268 - DNA, 75 bp, Homo sapiens
gaagaatttcaagagatgtacaggcttctctcaggatcctcctccgactgcctgtacctccaaagcacggtaggg

SEQ ID NO: 68269 - DNA, 74 bp, Homo sapiens
atttcaagagatgtacaggcttctctcaggatcctcctccgactgcctgtacctccaaagcacggtagggttgg

SEQ ID NO: 68270 - DNA, 74 bp, Homo sapiens
atgtacaggcttctctcaggatcctcctccgactgcctgtacctccaaagcacggtagggttgggaagggctga

SEQ ID NO: 68271 - DNA, 75 bp, Homo sapiens
ttctctcaggatcctcctccgactgcctgtacctccaaagcacggtagggttgggaagggctgaatcgccagctc

SEQ ID NO: 68272 - DNA, 73 bp, Homo sapiens
ggcttacagaaaattacgttttccttatatatatatggtgtctcttcaggactttgaaaatgacgtctctgaa

SEQ ID NO: 68273 - DNA, 72 bp, Homo sapiens
aattacgttttccttatatatatatggtgtctcttcaggactttgaaaatgacgtctctgaatttaaccaga

SEQ ID NO: 68274 - DNA, 76 bp, Homo sapiens
cttatatatatatggtgtctcttcaggactttgaaaatgacgtctctgaatttaaccagaaagtagaagatcttga

SEQ ID NO: 68275 - DNA, 75 bp, Homo sapiens
tatatatggtgtctcttcaggactttgaaaatgacgtctctgaatttaaccagaaagtagaagatcttgaccgaa

SEQ ID NO: 68276 - DNA, 73 bp, Homo sapiens
tgtctcttcaggactttgaaaatgacgtctctgaatttaaccagaaagtagaagatcttgaccgaagattggg

SEQ ID NO: 68277 - DNA, 71 bp, Homo sapiens
tttgaaaatgacgtctctgaatttaaccagaaagtagaagatcttgaccgaagattggggactatctttat

SEQ ID NO: 68278 - DNA, 70 bp, Homo sapiens
acgtctctgaatttaaccagaaagtagaagatcttgaccgaagattggggactatctttattcaagcttt

SEQ ID NO: 68279 - DNA, 73 bp, Homo sapiens
aatttaaccagaaagtagaagatcttgaccgaagattggggactatctttattcaagcttttgatgatgcacc

SEQ ID NO: 68280 - DNA, 79 bp, Homo sapiens
agaaagtagaagatcttgaccgaagattggggactatctttattcaagcttttgatgatgcacctggcttggagcatgc

SEQ ID NO: 68281 - DNA, 77 bp, Homo sapiens
aagatcttgaccgaagattggggactatctttattcaagcttttgatgatgcacctggcttggagcatgcctttaag

SEQ ID NO: 68282 - DNA, 75 bp, Homo sapiens
aagattggggactatctttattcaagcttttgatgatgcacctggcttggagcatgcctttaaggtttgtgtaaa

SEQ ID NO: 68283 - DNA, 77 bp, Homo sapiens
ggactatctttattcaagcttttgatgatgcacctggcttggagcatgcctttaaggtttgtgtaaatggggcagga

SEQ ID NO: 68284 - DNA, 77 bp, Homo sapiens
tttattcaagcttttgatgatgcacctggcttggagcatgcctttaaggtttgtgtaaatggggcaggagccactcg

SEQ ID NO: 68285 - DNA, 70 bp, Homo sapiens
aaaggtttaatctgtgatttttttcctctttttcctccaccttccctacagctgctagacatagcaggaa

SEQ ID NO: 68286 - DNA, 71 bp, Homo sapiens
tgatttttttcctctttttcctccaccttccctacagctgctagacatagcaggaaacctccttgaaagac

SEQ ID NO: 68287 - DNA, 73 bp, Homo sapiens
ctctttttcctccaccttccctacagctgctagacatagcaggaaacctccttgaaagaccgctggtagcgag

SEQ ID NO: 68288 - DNA, 78 bp, Homo sapiens
tccaccttccctacagctgctagacatagcaggaaacctccttgaaagaccgctggtagcgagggatacatctgataa

SEQ ID NO: 68289 - DNA, 77 bp, Homo sapiens
ttccctacagctgctagacatagcaggaaacctccttgaaagaccgctggtagcgagggatacatctgataaatacc

SEQ ID NO: 68290 - DNA, 77 bp, Homo sapiens
tagacatagcaggaaacctccttgaaagaccgctggtagcgagggatacatctgataaatacctggtcctcatccaa

SEQ ID NO: 68291 - DNA, 74 bp, Homo sapiens
aggaaacctccttgaaagaccgctggtagcgagggatacatctgataaatacctggtcctcatccaaatgttca

SEQ ID NO: 68292 - DNA, 74 bp, Homo sapiens
acctccttgaaagaccgctggtagcgagggatacatctgataaatacctggtcctcatccaaatgttcaacaaa

SEQ ID NO: 68293 - DNA, 80 bp, Homo sapiens
aagaccgctggtagcgagggatacatctgataaatacctggtcctcatccaaatgttcaacaaagatctggatgcagtga

SEQ ID NO: 68294 - DNA, 85 bp, Homo sapiens
tagcgagggatacatctgataaatacctggtcctcatccaaatgttcaacaaagatctggatgcagtgaggatgatctacagtca

SEQ ID NO: 68295 - DNA, 85 bp, Homo sapiens
atacatctgataaatacctggtcctcatccaaatgttcaacaaagatctggatgcagtgaggatgatctacagtcagcacgtcca

SEQ ID NO: 68296 - DNA, 82 bp, Homo sapiens
taaatacctggtcctcatccaaatgttcaacaaagatctggatgcagtgaggatgatctacagtcagcacgtccaggaggaa

SEQ ID NO: 68297 - DNA, 84 bp, Homo sapiens
tcctcatccaaatgttcaacaaagatctggatgcagtgaggatgatctacagtcagcacgtccaggaggaagcagaacttggta

SEQ ID NO: 68298 - DNA, 81 bp, Homo sapiens
ttcaacaaagatctggatgcagtgaggatgatctacagtcagcacgtccaggaggaagcagaacttggtaggcttgttaaa

SEQ ID NO: 68299 - DNA, 78 bp, Homo sapiens
aaagatctggatgcagtgaggatgatctacagtcagcacgtccaggaggaagcagaacttggtaggcttgttaaaggg

SEQ ID NO: 68300 - DNA, 75 bp, Homo sapiens
agtgaggatgatctacagtcagcacgtccaggaggaagcagaacttggtaggcttgttaaaggggattttgatgg

SEQ ID NO: 68301 - DNA, 74 bp, Homo sapiens
atgatctacagtcagcacgtccaggaggaagcagaacttggtaggcttgttaaaggggattttgatggggacat

SEQ ID NO: 68302 - DNA, 79 bp, Homo sapiens
actgaggtgctctagactcatttcggtctgtctgtgccatgtctccagggttctccccggtgcacaagaacatgcccac

SEQ ID NO: 68303 - DNA, 78 bp, Homo sapiens
ctctagactcatttcggtctgtctgtgccatgtctccagggttctccccggtgcacaagaacatgcccaccgtggctg

SEQ ID NO: 68304 - DNA, 78 bp, Homo sapiens
tcatttcggtctgtctgtgccatgtctccagggttctccccggtgcacaagaacatgcccaccgtggctggcggcctc

SEQ ID NO: 68305 - DNA, 79 bp, Homo sapiens
tgtctgtgccatgtctccagggttctccccggtgcacaagaacatgcccaccgtggctggcggcctccgctgggcacag

SEQ ID NO: 68306 - DNA, 77 bp, Homo sapiens
atgtctccagggttctccccggtgcacaagaacatgcccaccgtggctggcggcctccgctgggcacaggagctgag

SEQ ID NO: 68307 - DNA, 80 bp, Homo sapiens
gggttctccccggtgcacaagaacatgcccaccgtggctggcggcctccgctgggcacaggagctgaggcagcgcatcca

SEQ ID NO: 68308 - DNA, 83 bp, Homo sapiens
tgcacaagaacatgcccaccgtggctggcggcctccgctgggcacaggagctgaggcagcgcatccagggtcctttcagcaac

SEQ ID NO: 68309 - DNA, 79 bp, Homo sapiens
aacatgcccaccgtggctggcggcctccgctgggcacaggagctgaggcagcgcatccagggtcctttcagcaactttg

SEQ ID NO: 68310 - DNA, 81 bp, Homo sapiens
accgtggctggcggcctccgctgggcacaggagctgaggcagcgcatccagggtcctttcagcaactttggacgcatcaca

SEQ ID NO: 68311 - DNA, 81 bp, Homo sapiens
ctccgctgggcacaggagctgaggcagcgcatccagggtcctttcagcaactttggacgcatcacacacccgtgagtattg

SEQ ID NO: 68312 - DNA, 81 bp, Homo sapiens
cacaggagctgaggcagcgcatccagggtcctttcagcaactttggacgcatcacacacccgtgagtattgtgttcctgaa

SEQ ID NO: 68313 - DNA, 80 bp, Homo sapiens
agctgaggcagcgcatccagggtcctttcagcaactttggacgcatcacacacccgtgagtattgtgttcctgaaagaca

SEQ ID NO: 68314 - DNA, 75 bp, Homo sapiens
atccagggtcctttcagcaactttggacgcatcacacacccgtgagtattgtgttcctgaaagacaggcttgtct

SEQ ID NO: 68315 - DNA, 71 bp, Homo sapiens
cctcggattattactttaacttcttctaattctgtgtcactttttctcttttgtacgagtagttgcatgga

SEQ ID NO: 68316 - DNA, 74 bp, Homo sapiens
ttactttaacttcttctaattctgtgtcactttttctcttttgtacgagtagttgcatggaatctgcagaagga

SEQ ID NO: 68317 - DNA, 75 bp, Homo sapiens
taacttcttctaattctgtgtcactttttctcttttgtacgagtagttgcatggaatctgcagaaggaaagcgaa

SEQ ID NO: 68318 - DNA, 76 bp, Homo sapiens
taattctgtgtcactttttctcttttgtacgagtagttgcatggaatctgcagaaggaaagcgaatgcaacaaaaa

SEQ ID NO: 68319 - DNA, 80 bp, Homo sapiens
tttttctcttttgtacgagtagttgcatggaatctgcagaaggaaagcgaatgcaacaaaaatatgaagatatgctgtca

SEQ ID NO: 68320 - DNA, 82 bp, Homo sapiens
ttttgtacgagtagttgcatggaatctgcagaaggaaagcgaatgcaacaaaaatatgaagatatgctgtcattgctagaaa

SEQ ID NO: 68321 - DNA, 82 bp, Homo sapiens
agtagttgcatggaatctgcagaaggaaagcgaatgcaacaaaaatatgaagatatgctgtcattgctagaaaagtaagcaa

SEQ ID NO: 68322 - DNA, 82 bp, Homo sapiens
aatctgcagaaggaaagcgaatgcaacaaaaatatgaagatatgctgtcattgctagaaaagtaagcaacttctggcattgc

SEQ ID NO: 68323 - DNA, 79 bp, Homo sapiens
agaaggaaagcgaatgcaacaaaaatatgaagatatgctgtcattgctagaaaagtaagcaacttctggcattgcgtgg

SEQ ID NO: 68324 - DNA, 85 bp, Homo sapiens
atgcaacaaaaatatgaagatatgctgtcattgctagaaaagtaagcaacttctggcattgcgtgggtctgcagattgcacagcc

SEQ ID NO: 68325 - DNA, 84 bp, Homo sapiens
acaaaaatatgaagatatgctgtcattgctagaaaagtaagcaacttctggcattgcgtgggtctgcagattgcacagcctcca

SEQ ID NO: 68326 - DNA, 78 bp, Homo sapiens
agctgggagggggcttatgaggtggctgttgtctctgacccttgcaggtatgagacaagactttatgaggattggtgc

SEQ ID NO: 68327 - DNA, 81 bp, Homo sapiens
ggcttatgaggtggctgttgtctctgacccttgcaggtatgagacaagactttatgaggattggtgccggacagtatcaga

SEQ ID NO: 68328 - DNA, 80 bp, Homo sapiens
atgaggtggctgttgtctctgacccttgcaggtatgagacaagactttatgaggattggtgccggacagtatcagagaag

SEQ ID NO: 68329 - DNA, 80 bp, Homo sapiens
tctctgacccttgcaggtatgagacaagactttatgaggattggtgccggacagtatcagagaagtcacagtacaatctt

SEQ ID NO: 68330 - DNA, 78 bp, Homo sapiens
cttgcaggtatgagacaagactttatgaggattggtgccggacagtatcagagaagtcacagtacaatctttcccaac

SEQ ID NO: 68331 - DNA, 78 bp, Homo sapiens
tatgagacaagactttatgaggattggtgccggacagtatcagagaagtcacagtacaatctttcccaaccacttcta

SEQ ID NO: 68332 - DNA, 73 bp, Homo sapiens
aagactttatgaggattggtgccggacagtatcagagaagtcacagtacaatctttcccaaccacttctaaaa

SEQ ID NO: 68333 - DNA, 73 bp, Homo sapiens
aggattggtgccggacagtatcagagaagtcacagtacaatctttcccaaccacttctaaaacgtgacccaga

SEQ ID NO: 68334 - DNA, 74 bp, Homo sapiens
acagtatcagagaagtcacagtacaatctttcccaaccacttctaaaacgtgacccagagacgaaggagatcac

SEQ ID NO: 68335 - DNA, 72 bp, Homo sapiens
agaagtcacagtacaatctttcccaaccacttctaaaacgtgacccagagacgaaggagatcactatcaact

SEQ ID NO: 68336 - DNA, 70 bp, Homo sapiens
acagtacaatctttcccaaccacttctaaaacgtgacccagagacgaaggagatcactatcaactttaac

SEQ ID NO: 68337 - DNA, 69 bp, Homo sapiens
atctttcccaaccacttctaaaacgtgacccagagacgaaggagatcactatcaactttaacccacagg

SEQ ID NO: 68338 - DNA, 73 bp, Homo sapiens
acttctaaaacgtgacccagagacgaaggagatcactatcaactttaacccacaggtcagttggctgacagta

SEQ ID NO: 68339 - DNA, 74 bp, Homo sapiens
aaacgtgacccagagacgaaggagatcactatcaactttaacccacaggtcagttggctgacagtagctctctt

SEQ ID NO: 68340 - DNA, 82 bp, Homo sapiens
attattcattatcactgaacgacagacacttgtgttgcttcttttctccagctgatttcagtgctgaaagaaatgagctatc

SEQ ID NO: 68341 - DNA, 81 bp, Homo sapiens
atcactgaacgacagacacttgtgttgcttcttttctccagctgatttcagtgctgaaagaaatgagctatcttgaaccca

SEQ ID NO: 68342 - DNA, 81 bp, Homo sapiens
acagacacttgtgttgcttcttttctccagctgatttcagtgctgaaagaaatgagctatcttgaacccagagagatgaaa

SEQ ID NO: 68343 - DNA, 85 bp, Homo sapiens
tgttgcttcttttctccagctgatttcagtgctgaaagaaatgagctatcttgaacccagagagatgaaacacatgcctgagaca

SEQ ID NO: 68344 - DNA, 88 bp, Homo sapiens
ttttctccagctgatttcagtgctgaaagaaatgagctatcttgaacccagagagatgaaacacatgcctgagacagcagcagccatg

SEQ ID NO: 68345 - DNA, 86 bp, Homo sapiens
atttcagtgctgaaagaaatgagctatcttgaacccagagagatgaaacacatgcctgagacagcagcagccatgttctcctccag

SEQ ID NO: 68346 - DNA, 85 bp, Homo sapiens
tgaaagaaatgagctatcttgaacccagagagatgaaacacatgcctgagacagcagcagccatgttctcctccagggatttcta

SEQ ID NO: 68347 - DNA, 85 bp, Homo sapiens
aaatgagctatcttgaacccagagagatgaaacacatgcctgagacagcagcagccatgttctcctccagggatttctatcggca

SEQ ID NO: 68348 - DNA, 83 bp, Homo sapiens
aacccagagagatgaaacacatgcctgagacagcagcagccatgttctcctccagggatttctatcggcagcttgtggctaat

SEQ ID NO: 68349 - DNA, 84 bp, Homo sapiens
agatgaaacacatgcctgagacagcagcagccatgttctcctccagggatttctatcggcagcttgtggctaatttagagttga

SEQ ID NO: 68350 - DNA, 83 bp, Homo sapiens
atgcctgagacagcagcagccatgttctcctccagggatttctatcggcagcttgtggctaatttagagttgatggcaaattg

SEQ ID NO: 68351 - DNA, 80 bp, Homo sapiens
acagcagcagccatgttctcctccagggatttctatcggcagcttgtggctaatttagagttgatggcaaattggtacaa

SEQ ID NO: 68352 - DNA, 75 bp, Homo sapiens
catgttctcctccagggatttctatcggcagcttgtggctaatttagagttgatggcaaattggtacaacaaggt

SEQ ID NO: 68353 - DNA, 74 bp, Homo sapiens
ctccagggatttctatcggcagcttgtggctaatttagagttgatggcaaattggtacaacaaggttatgaaaa

SEQ ID NO: 68354 - DNA, 76 bp, Homo sapiens
atttctatcggcagcttgtggctaatttagagttgatggcaaattggtacaacaaggttatgaaaactctgctgga

SEQ ID NO: 68355 - DNA, 73 bp, Homo sapiens
agcttgtggctaatttagagttgatggcaaattggtacaacaaggttatgaaaactctgctggaggtggaatt

SEQ ID NO: 68356 - DNA, 73 bp, Homo sapiens
taatttagagttgatggcaaattggtacaacaaggttatgaaaactctgctggaggtggaatttccattagtg

SEQ ID NO: 68357 - DNA, 73 bp, Homo sapiens
agagttgatggcaaattggtacaacaaggttatgaaaactctgctggaggtggaatttccattagtggaggaa

SEQ ID NO: 68358 - DNA, 72 bp, Homo sapiens
aaattggtacaacaaggttatgaaaactctgctggaggtggaatttccattagtggaggaagagctgcaaaa

SEQ ID NO: 68359 - DNA, 75 bp, Homo sapiens
acaacaaggttatgaaaactctgctggaggtggaatttccattagtggaggaagagctgcaaaatattgatctcc

SEQ ID NO: 68360 - DNA, 82 bp, Homo sapiens
tatgaaaactctgctggaggtggaatttccattagtggaggaagagctgcaaaatattgatctccgcctcagagcagcagag

SEQ ID NO: 68361 - DNA, 80 bp, Homo sapiens
tggaggtggaatttccattagtggaggaagagctgcaaaatattgatctccgcctcagagcagcagaggagactttgaac

SEQ ID NO: 68362 - DNA, 78 bp, Homo sapiens
aatttccattagtggaggaagagctgcaaaatattgatctccgcctcagagcagcagaggagactttgaactggaaaa

SEQ ID NO: 68363 - DNA, 79 bp, Homo sapiens
ttagtggaggaagagctgcaaaatattgatctccgcctcagagcagcagaggagactttgaactggaaaacagaaggta

SEQ ID NO: 68364 - DNA, 79 bp, Homo sapiens
agctgcaaaatattgatctccgcctcagagcagcagaggagactttgaactggaaaacagaaggtaacagggcaccatc

SEQ ID NO: 68365 - DNA, 77 bp, Homo sapiens
aaaatattgatctccgcctcagagcagcagaggagactttgaactggaaaacagaaggtaacagggcaccatctgaa

SEQ ID NO: 68366 - DNA, 79 bp, Homo sapiens
tatgccactgcaggctatttcaattaattatgtttcttttggggaacaggcatttgcgattatgtcactgaaatcacca

SEQ ID NO: 68367 - DNA, 76 bp, Homo sapiens
gctatttcaattaattatgtttcttttggggaacaggcatttgcgattatgtcactgaaatcaccagtagtattca

SEQ ID NO: 68368 - DNA, 77 bp, Homo sapiens
attaattatgtttcttttggggaacaggcatttgcgattatgtcactgaaatcaccagtagtattcatgatcttgaa

SEQ ID NO: 68369 - DNA, 78 bp, Homo sapiens
tatgtttcttttggggaacaggcatttgcgattatgtcactgaaatcaccagtagtattcatgatcttgaacaaagaa

SEQ ID NO: 68370 - DNA, 78 bp, Homo sapiens
ggaacaggcatttgcgattatgtcactgaaatcaccagtagtattcatgatcttgaacaaagaattcagaaaactaaa

SEQ ID NO: 68371 - DNA, 80 bp, Homo sapiens
gcatttgcgattatgtcactgaaatcaccagtagtattcatgatcttgaacaaagaattcagaaaactaaagacaatgtg

SEQ ID NO: 68372 - DNA, 80 bp, Homo sapiens
tatgtcactgaaatcaccagtagtattcatgatcttgaacaaagaattcagaaaactaaagacaatgtggaagagatcca

SEQ ID NO: 68373 - DNA, 79 bp, Homo sapiens
atcaccagtagtattcatgatcttgaacaaagaattcagaaaactaaagacaatgtggaagagatccaaaacatcatga

SEQ ID NO: 68374 - DNA, 77 bp, Homo sapiens
gtattcatgatcttgaacaaagaattcagaaaactaaagacaatgtggaagagatccaaaacatcatgaaaacatgg

SEQ ID NO: 68375 - DNA, 76 bp, Homo sapiens
atgatcttgaacaaagaattcagaaaactaaagacaatgtggaagagatccaaaacatcatgaaaacatgggtgac

SEQ ID NO: 68376 - DNA, 75 bp, Homo sapiens
gaattcagaaaactaaagacaatgtggaagagatccaaaacatcatgaaaacatgggtgactccaatatttaaga

SEQ ID NO: 68377 - DNA, 74 bp, Homo sapiens
aactaaagacaatgtggaagagatccaaaacatcatgaaaacatgggtgactccaatatttaagacaaaagatg

SEQ ID NO: 68378 - DNA, 74 bp, Homo sapiens
aagacaatgtggaagagatccaaaacatcatgaaaacatgggtgactccaatatttaagacaaaagatggaaaa

SEQ ID NO: 68379 - DNA, 70 bp, Homo sapiens
agatccaaaacatcatgaaaacatgggtgactccaatatttaagacaaaagatggaaaaagggaatccct

SEQ ID NO: 68380 - DNA, 70 bp, Homo sapiens
aacatcatgaaaacatgggtgactccaatatttaagacaaaagatggaaaaagggaatcccttctttctc

SEQ ID NO: 68381 - DNA, 70 bp, Homo sapiens
aaaacatgggtgactccaatatttaagacaaaagatggaaaaagggaatcccttctttctctggatgatc

SEQ ID NO: 68382 - DNA, 74 bp, Homo sapiens
ctccaatatttaagacaaaagatggaaaaagggaatcccttctttctctggatgatcggcatgatcgaatggaa

SEQ ID NO: 68383 - DNA, 72 bp, Homo sapiens
tttaagacaaaagatggaaaaagggaatcccttctttctctggatgatcggcatgatcgaatggaaaaatat

SEQ ID NO: 68384 - DNA, 76 bp, Homo sapiens
aagatggaaaaagggaatcccttctttctctggatgatcggcatgatcgaatggaaaaatattacaatctcatcaa

SEQ ID NO: 68385 - DNA, 75 bp, Homo sapiens
aaaaagggaatcccttctttctctggatgatcggcatgatcgaatggaaaaatattacaatctcatcaaggaatc

SEQ ID NO: 68386 - DNA, 79 bp, Homo sapiens
ccttctttctctggatgatcggcatgatcgaatggaaaaatattacaatctcatcaaggaatctggccttaagatccac

SEQ ID NO: 68387 - DNA, 81 bp, Homo sapiens
tctggatgatcggcatgatcgaatggaaaaatattacaatctcatcaaggaatctggccttaagatccacgcccttgttca

SEQ ID NO: 68388 - DNA, 75 bp, Homo sapiens
atgatcgaatggaaaaatattacaatctcatcaaggaatctggccttaagatccacgcccttgttcaggtaataa

SEQ ID NO: 68389 - DNA, 72 bp, Homo sapiens
aatggaaaaatattacaatctcatcaaggaatctggccttaagatccacgcccttgttcaggtaataaccca

SEQ ID NO: 68390 - DNA, 75 bp, Homo sapiens
aatattacaatctcatcaaggaatctggccttaagatccacgcccttgttcaggtaataacccagccactcaggc

SEQ ID NO: 68391 - DNA, 75 bp, Homo sapiens
tcaaggaatctggccttaagatccacgcccttgttcaggtaataacccagccactcaggcgcacatactacgagt

SEQ ID NO: 68392 - DNA, 70 bp, Homo sapiens
tcatgctattaaacgaggtttatatcctttcttcttccttttataggaaaacctgggtctattttcagca

SEQ ID NO: 68393 - DNA, 67 bp, Homo sapiens
taaacgaggtttatatcctttcttcttccttttataggaaaacctgggtctattttcagcagaccca

SEQ ID NO: 68394 - DNA, 68 bp, Homo sapiens
tttatatcctttcttcttccttttataggaaaacctgggtctattttcagcagacccaacctccaata

SEQ ID NO: 68395 - DNA, 69 bp, Homo sapiens
cttcttccttttataggaaaacctgggtctattttcagcagacccaacctccaatatctggaagactta

SEQ ID NO: 68396 - DNA, 71 bp, Homo sapiens
ttataggaaaacctgggtctattttcagcagacccaacctccaatatctggaagacttatgttaactctat

SEQ ID NO: 68397 - DNA, 71 bp, Homo sapiens
aaacctgggtctattttcagcagacccaacctccaatatctggaagacttatgttaactctattgacaatt

SEQ ID NO: 68398 - DNA, 77 bp, Homo sapiens
tattttcagcagacccaacctccaatatctggaagacttatgttaactctattgacaatttgttgctgaatggattc

SEQ ID NO: 68399 - DNA, 75 bp, Homo sapiens
agcagacccaacctccaatatctggaagacttatgttaactctattgacaatttgttgctgaatggattctttct

SEQ ID NO: 68400 - DNA, 76 bp, Homo sapiens
aacctccaatatctggaagacttatgttaactctattgacaatttgttgctgaatggattctttcttgccattgag

SEQ ID NO: 68401 - DNA, 78 bp, Homo sapiens
gaagacttatgttaactctattgacaatttgttgctgaatggattctttcttgccattgagtgctccctcaagtatct

SEQ ID NO: 68402 - DNA, 79 bp, Homo sapiens
ttatgttaactctattgacaatttgttgctgaatggattctttcttgccattgagtgctccctcaagtatcttctggaa

SEQ ID NO: 68403 - DNA, 79 bp, Homo sapiens
tctattgacaatttgttgctgaatggattctttcttgccattgagtgctccctcaagtatcttctggaaaatactggta

SEQ ID NO: 68404 - DNA, 75 bp, Homo sapiens
aatttgttgctgaatggattctttcttgccattgagtgctccctcaagtatcttctggaaaatactggtacttac

SEQ ID NO: 68405 - DNA, 76 bp, Homo sapiens
aatggattctttcttgccattgagtgctccctcaagtatcttctggaaaatactggtacttactggcttatggatg

SEQ ID NO: 68406 - DNA, 76 bp, Homo sapiens
tcttgccattgagtgctccctcaagtatcttctggaaaatactggtacttactggcttatggatgtgggttattat

SEQ ID NO: 68407 - DNA, 74 bp, Homo sapiens
attgagtgctccctcaagtatcttctggaaaatactggtacttactggcttatggatgtgggttattattggaa

SEQ ID NO: 68408 - DNA, 73 bp, Homo sapiens
gtttgcttgttttctgtgtttttcagagtgtaaggcaggacttaccccaatatttgaagcacaactgagtcta

SEQ ID NO: 68409 - DNA, 75 bp, Homo sapiens
ttttctgtgtttttcagagtgtaaggcaggacttaccccaatatttgaagcacaactgagtctagccatcccaga

SEQ ID NO: 68410 - DNA, 74 bp, Homo sapiens
tttttcagagtgtaaggcaggacttaccccaatatttgaagcacaactgagtctagccatcccagagctagttt

SEQ ID NO: 68411 - DNA, 74 bp, Homo sapiens
agtgtaaggcaggacttaccccaatatttgaagcacaactgagtctagccatcccagagctagttttctatccg

SEQ ID NO: 68412 - DNA, 75 bp, Homo sapiens
aggacttaccccaatatttgaagcacaactgagtctagccatcccagagctagttttctatccgtctctggagtc

SEQ ID NO: 68413 - DNA, 77 bp, Homo sapiens
ccaatatttgaagcacaactgagtctagccatcccagagctagttttctatccgtctctggagtctggagtgaaggg

SEQ ID NO: 68414 - DNA, 75 bp, Homo sapiens
acaactgagtctagccatcccagagctagttttctatccgtctctggagtctggagtgaaggggggtttctgtga

SEQ ID NO: 68415 - DNA, 74 bp, Homo sapiens
agtctagccatcccagagctagttttctatccgtctctggagtctggagtgaaggggggtttctgtgacattgt

SEQ ID NO: 68416 - DNA, 76 bp, Homo sapiens
cagagctagttttctatccgtctctggagtctggagtgaaggggggtttctgtgacattgttgagggtctcatcac

SEQ ID NO: 68417 - DNA, 75 bp, Homo sapiens
ttttctatccgtctctggagtctggagtgaaggggggtttctgtgacattgttgagggtctcatcaccagcattt

SEQ ID NO: 68418 - DNA, 75 bp, Homo sapiens
agtctggagtgaaggggggtttctgtgacattgttgagggtctcatcaccagcatttttaggataccatctctgg

SEQ ID NO: 68419 - DNA, 74 bp, Homo sapiens
aaggggggtttctgtgacattgttgagggtctcatcaccagcatttttaggataccatctctggtgccacggct

SEQ ID NO: 68420 - DNA, 77 bp, Homo sapiens
ttctgtgacattgttgagggtctcatcaccagcatttttaggataccatctctggtgccacggctttccccacaaaa

SEQ ID NO: 68421 - DNA, 76 bp, Homo sapiens
attgttgagggtctcatcaccagcatttttaggataccatctctggtgccacggctttccccacaaaatggctctc

SEQ ID NO: 68422 - DNA, 79 bp, Homo sapiens
tctcatcaccagcatttttaggataccatctctggtgccacggctttccccacaaaatggctctcctcactatcaggta

SEQ ID NO: 68423 - DNA, 77 bp, Homo sapiens
atttttaggataccatctctggtgccacggctttccccacaaaatggctctcctcactatcaggtactggagctgca

SEQ ID NO: 68424 - DNA, 82 bp, Homo sapiens
taggataccatctctggtgccacggctttccccacaaaatggctctcctcactatcaggtactggagctgcagccatcctgc

SEQ ID NO: 68425 - DNA, 80 bp, Homo sapiens
tctctggtgccacggctttccccacaaaatggctctcctcactatcaggtactggagctgcagccatcctgccctccaac

SEQ ID NO: 68426 - DNA, 74 bp, Homo sapiens
ctgccacacactggtgtaacctgcctgccgttgtctcgcttccccaggtcgacctggacggtataccagatttg

SEQ ID NO: 68427 - DNA, 72 bp, Homo sapiens
acactggtgtaacctgcctgccgttgtctcgcttccccaggtcgacctggacggtataccagatttggcaaa

SEQ ID NO: 68428 - DNA, 76 bp, Homo sapiens
taacctgcctgccgttgtctcgcttccccaggtcgacctggacggtataccagatttggcaaacatgcggcgcaca

SEQ ID NO: 68429 - DNA, 79 bp, Homo sapiens
ttgtctcgcttccccaggtcgacctggacggtataccagatttggcaaacatgcggcgcacactcatggagagagtcca

SEQ ID NO: 68430 - DNA, 80 bp, Homo sapiens
ttccccaggtcgacctggacggtataccagatttggcaaacatgcggcgcacactcatggagagagtccagagaatgatg

SEQ ID NO: 68431 - DNA, 84 bp, Homo sapiens
tcgacctggacggtataccagatttggcaaacatgcggcgcacactcatggagagagtccagagaatgatgggcctctgctgtg

SEQ ID NO: 68432 - DNA, 89 bp, Homo sapiens
tataccagatttggcaaacatgcggcgcacactcatggagagagtccagagaatgatgggcctctgctgtggctatcagagcaccttca

SEQ ID NO: 68433 - DNA, 88 bp, Homo sapiens
tttggcaaacatgcggcgcacactcatggagagagtccagagaatgatgggcctctgctgtggctatcagagcaccttcagccagtat

SEQ ID NO: 68434 - DNA, 87 bp, Homo sapiens
aaacatgcggcgcacactcatggagagagtccagagaatgatgggcctctgctgtggctatcagagcaccttcagccagtattcgta

SEQ ID NO: 68435 - DNA, 82 bp, Homo sapiens
agagtccagagaatgatgggcctctgctgtggctatcagagcaccttcagccagtattcgtacctctatgtggaggaccgga

SEQ ID NO: 68436 - DNA, 80 bp, Homo sapiens
agagaatgatgggcctctgctgtggctatcagagcaccttcagccagtattcgtacctctatgtggaggaccggaaggag

SEQ ID NO: 68437 - DNA, 78 bp, Homo sapiens
cctctgctgtggctatcagagcaccttcagccagtattcgtacctctatgtggaggaccggaaggaggttctgggtca

SEQ ID NO: 68438 - DNA, 75 bp, Homo sapiens
ctgtggctatcagagcaccttcagccagtattcgtacctctatgtggaggaccggaaggaggttctgggtcagtt

SEQ ID NO: 68439 - DNA, 74 bp, Homo sapiens
agagcaccttcagccagtattcgtacctctatgtggaggaccggaaggaggttctgggtcagtttctgctgtac

SEQ ID NO: 68440 - DNA, 75 bp, Homo sapiens
ttcagccagtattcgtacctctatgtggaggaccggaaggaggttctgggtcagtttctgctgtacgggcacatc

SEQ ID NO: 68441 - DNA, 73 bp, Homo sapiens
attcgtacctctatgtggaggaccggaaggaggttctgggtcagtttctgctgtacgggcacatcctcactcc

SEQ ID NO: 68442 - DNA, 74 bp, Homo sapiens
tatgtggaggaccggaaggaggttctgggtcagtttctgctgtacgggcacatcctcactccggaagaaattga

SEQ ID NO: 68443 - DNA, 75 bp, Homo sapiens
gaaggaggttctgggtcagtttctgctgtacgggcacatcctcactccggaagaaattgaagaccatgtggaaga

SEQ ID NO: 68444 - DNA, 79 bp, Homo sapiens
ttctgggtcagtttctgctgtacgggcacatcctcactccggaagaaattgaagaccatgtggaagatggcatcccaga

SEQ ID NO: 68445 - DNA, 76 bp, Homo sapiens
agtttctgctgtacgggcacatcctcactccggaagaaattgaagaccatgtggaagatggcatcccagagaaccc

SEQ ID NO: 68446 - DNA, 74 bp, Homo sapiens
tacgggcacatcctcactccggaagaaattgaagaccatgtggaagatggcatcccagagaaccctcccctcct

SEQ ID NO: 68447 - DNA, 73 bp, Homo sapiens
ctcactccggaagaaattgaagaccatgtggaagatggcatcccagagaaccctcccctcctttctcagttta

SEQ ID NO: 68448 - DNA, 72 bp, Homo sapiens
aagaaattgaagaccatgtggaagatggcatcccagagaaccctcccctcctttctcagtttaaagtgcaaa

SEQ ID NO: 68449 - DNA, 74 bp, Homo sapiens
attgaagaccatgtggaagatggcatcccagagaaccctcccctcctttctcagtttaaagtgcaaatcgactc

SEQ ID NO: 68450 - DNA, 73 bp, Homo sapiens
atgtggaagatggcatcccagagaaccctcccctcctttctcagtttaaagtgcaaatcgactcctatgaaac

SEQ ID NO: 68451 - DNA, 72 bp, Homo sapiens
atcccagagaaccctcccctcctttctcagtttaaagtgcaaatcgactcctatgaaacgctctatgaagag

SEQ ID NO: 68452 - DNA, 73 bp, Homo sapiens
agaaccctcccctcctttctcagtttaaagtgcaaatcgactcctatgaaacgctctatgaagaggtgtgcag

SEQ ID NO: 68453 - DNA, 77 bp, Homo sapiens
tcctttctcagtttaaagtgcaaatcgactcctatgaaacgctctatgaagaggtgtgcaggctggaacccatcaag

SEQ ID NO: 68454 - DNA, 76 bp, Homo sapiens
agtttaaagtgcaaatcgactcctatgaaacgctctatgaagaggtgtgcaggctggaacccatcaaggtgtttga

SEQ ID NO: 68455 - DNA, 77 bp, Homo sapiens
aatcgactcctatgaaacgctctatgaagaggtgtgcaggctggaacccatcaaggtgtttgacggctggatgaaaa

SEQ ID NO: 68456 - DNA, 78 bp, Homo sapiens
actcctatgaaacgctctatgaagaggtgtgcaggctggaacccatcaaggtgtttgacggctggatgaaaattgata

SEQ ID NO: 68457 - DNA, 76 bp, Homo sapiens
tctatgaagaggtgtgcaggctggaacccatcaaggtgtttgacggctggatgaaaattgatattcgaccctttaa

SEQ ID NO: 68458 - DNA, 74 bp, Homo sapiens
aagaggtgtgcaggctggaacccatcaaggtgtttgacggctggatgaaaattgatattcgaccctttaaggca

SEQ ID NO: 68459 - DNA, 75 bp, Homo sapiens
acccatcaaggtgtttgacggctggatgaaaattgatattcgaccctttaaggcatctctgctgaatattattaa

SEQ ID NO: 68460 - DNA, 76 bp, Homo sapiens
gtgtttgacggctggatgaaaattgatattcgaccctttaaggcatctctgctgaatattattaagaggtggagcc

SEQ ID NO: 68461 - DNA, 77 bp, Homo sapiens
atgaaaattgatattcgaccctttaaggcatctctgctgaatattattaagaggtggagcctcctgttcaaacagca

SEQ ID NO: 68462 - DNA, 80 bp, Homo sapiens
ctttaaggcatctctgctgaatattattaagaggtggagcctcctgttcaaacagcatcttgtggaccacgtcactcaca

SEQ ID NO: 68463 - DNA, 80 bp, Homo sapiens
atctctgctgaatattattaagaggtggagcctcctgttcaaacagcatcttgtggaccacgtcactcacaggtacaaca

SEQ ID NO: 68464 - DNA, 75 bp, Homo sapiens
atattattaagaggtggagcctcctgttcaaacagcatcttgtggaccacgtcactcacaggtacaacagttgtt

SEQ ID NO: 68465 - DNA, 74 bp, Homo sapiens
aagaggtggagcctcctgttcaaacagcatcttgtggaccacgtcactcacaggtacaacagttgttttcactt

SEQ ID NO: 68466 - DNA, 78 bp, Homo sapiens
cctcctgttcaaacagcatcttgtggaccacgtcactcacaggtacaacagttgttttcactttcttccagcatgcta

SEQ ID NO: 68467 - DNA, 74 bp, Homo sapiens
agaagtagaacgagaatggttcctcatgttctgtttgtgttgattagcttggccaacctggatgcgtttataaa

SEQ ID NO: 68468 - DNA, 74 bp, Homo sapiens
agaacgagaatggttcctcatgttctgtttgtgttgattagcttggccaacctggatgcgtttataaagaagag

SEQ ID NO: 68469 - DNA, 78 bp, Homo sapiens
tcctcatgttctgtttgtgttgattagcttggccaacctggatgcgtttataaagaagagtgagagcggcttactcaa

SEQ ID NO: 68470 - DNA, 76 bp, Homo sapiens
tgtttgtgttgattagcttggccaacctggatgcgtttataaagaagagtgagagcggcttactcaagaaagttga

SEQ ID NO: 68471 - DNA, 74 bp, Homo sapiens
tgttgattagcttggccaacctggatgcgtttataaagaagagtgagagcggcttactcaagaaagttgaaaaa

SEQ ID NO: 68472 - DNA, 72 bp, Homo sapiens
ttggccaacctggatgcgtttataaagaagagtgagagcggcttactcaagaaagttgaaaaaggagatttc

SEQ ID NO: 68473 - DNA, 70 bp, Homo sapiens
atgcgtttataaagaagagtgagagcggcttactcaagaaagttgaaaaaggagatttccaaggcttggt

SEQ ID NO: 68474 - DNA, 73 bp, Homo sapiens
tttataaagaagagtgagagcggcttactcaagaaagttgaaaaaggagatttccaaggcttggttgagatca

SEQ ID NO: 68475 - DNA, 73 bp, Homo sapiens
agtgagagcggcttactcaagaaagttgaaaaaggagatttccaaggcttggttgagatcatgggacacctta

SEQ ID NO: 68476 - DNA, 72 bp, Homo sapiens
ttactcaagaaagttgaaaaaggagatttccaaggcttggttgagatcatgggacaccttatggctgttaaa

SEQ ID NO: 68477 - DNA, 70 bp, Homo sapiens
aagaaagttgaaaaaggagatttccaaggcttggttgagatcatgggacaccttatggctgttaaagaac

SEQ ID NO: 68478 - DNA, 72 bp, Homo sapiens
aaaaaggagatttccaaggcttggttgagatcatgggacaccttatggctgttaaagaacggcagagtaaca

SEQ ID NO: 68479 - DNA, 78 bp, Homo sapiens
tttccaaggcttggttgagatcatgggacaccttatggctgttaaagaacggcagagtaacactgatgagatgtttga

SEQ ID NO: 68480 - DNA, 77 bp, Homo sapiens
ttggttgagatcatgggacaccttatggctgttaaagaacggcagagtaacactgatgagatgtttgagcccttaaa

SEQ ID NO: 68481 - DNA, 76 bp, Homo sapiens
ggacaccttatggctgttaaagaacggcagagtaacactgatgagatgtttgagcccttaaagcagactattgaat

SEQ ID NO: 68482 - DNA, 78 bp, Homo sapiens
ccttatggctgttaaagaacggcagagtaacactgatgagatgtttgagcccttaaagcagactattgaattgctgaa

SEQ ID NO: 68483 - DNA, 79 bp, Homo sapiens
ttaaagaacggcagagtaacactgatgagatgtttgagcccttaaagcagactattgaattgctgaagacctatgaaca

SEQ ID NO: 68484 - DNA, 79 bp, Homo sapiens
agtaacactgatgagatgtttgagcccttaaagcagactattgaattgctgaagacctatgaacaagaattgccagaaa

SEQ ID NO: 68485 - DNA, 78 bp, Homo sapiens
atgagatgtttgagcccttaaagcagactattgaattgctgaagacctatgaacaagaattgccagaaacagtgttta

SEQ ID NO: 68486 - DNA, 77 bp, Homo sapiens
atgtttgagcccttaaagcagactattgaattgctgaagacctatgaacaagaattgccagaaacagtgtttaagca

SEQ ID NO: 68487 - DNA, 78 bp, Homo sapiens
ccttaaagcagactattgaattgctgaagacctatgaacaagaattgccagaaacagtgtttaagcagctggaggtca

SEQ ID NO: 68488 - DNA, 80 bp, Homo sapiens
actattgaattgctgaagacctatgaacaagaattgccagaaacagtgtttaagcagctggaggtcagtgcatttatgtc

SEQ ID NO: 68489 - DNA, 78 bp, Homo sapiens
tgaagacctatgaacaagaattgccagaaacagtgtttaagcagctggaggtcagtgcatttatgtcttccttataaa

SEQ ID NO: 68490 - DNA, 77 bp, Homo sapiens
tatgaacaagaattgccagaaacagtgtttaagcagctggaggtcagtgcatttatgtcttccttataaaagaaata

SEQ ID NO: 68491 - DNA, 76 bp, Homo sapiens
gaaagagcaccttgggaatctgaccacactgaggtttcctttgcaggagctgcctgagaaatggaacaacataaaa

SEQ ID NO: 68492 - DNA, 72 bp, Homo sapiens
accttgggaatctgaccacactgaggtttcctttgcaggagctgcctgagaaatggaacaacataaaaaagg

SEQ ID NO: 68493 - DNA, 74 bp, Homo sapiens
aatctgaccacactgaggtttcctttgcaggagctgcctgagaaatggaacaacataaaaaaggtggccattac

SEQ ID NO: 68494 - DNA, 77 bp, Homo sapiens
acactgaggtttcctttgcaggagctgcctgagaaatggaacaacataaaaaaggtggccattactgtgaagcagca

SEQ ID NO: 68495 - DNA, 77 bp, Homo sapiens
ttcctttgcaggagctgcctgagaaatggaacaacataaaaaaggtggccattactgtgaagcagcaggtggcccca

SEQ ID NO: 68496 - DNA, 78 bp, Homo sapiens
tgcctgagaaatggaacaacataaaaaaggtggccattactgtgaagcagcaggtggccccactgcaggcaaatgaag

SEQ ID NO: 68497 - DNA, 76 bp, Homo sapiens
aaatggaacaacataaaaaaggtggccattactgtgaagcagcaggtggccccactgcaggcaaatgaagtgacac

SEQ ID NO: 68498 - DNA, 77 bp, Homo sapiens
aacataaaaaaggtggccattactgtgaagcagcaggtggccccactgcaggcaaatgaagtgacactcctccgcca

SEQ ID NO: 68499 - DNA, 81 bp, Homo sapiens
aaaggtggccattactgtgaagcagcaggtggccccactgcaggcaaatgaagtgacactcctccgccagaggtgcacagc

SEQ ID NO: 68500 - DNA, 84 bp, Homo sapiens
attactgtgaagcagcaggtggccccactgcaggcaaatgaagtgacactcctccgccagaggtgcacagccttcgatgcagaa

SEQ ID NO: 68501 - DNA, 85 bp, Homo sapiens
agcaggtggccccactgcaggcaaatgaagtgacactcctccgccagaggtgcacagccttcgatgcagaacagcagcaattctg

SEQ ID NO: 68502 - DNA, 87 bp, Homo sapiens
cactgcaggcaaatgaagtgacactcctccgccagaggtgcacagccttcgatgcagaacagcagcaattctgggagcaattccaca

SEQ ID NO: 68503 - DNA, 82 bp, Homo sapiens
aaatgaagtgacactcctccgccagaggtgcacagccttcgatgcagaacagcagcaattctgggagcaattccacaaagaa

SEQ ID NO: 68504 - DNA, 81 bp, Homo sapiens
aagtgacactcctccgccagaggtgcacagccttcgatgcagaacagcagcaattctgggagcaattccacaaagaagccc

SEQ ID NO: 68505 - DNA, 81 bp, Homo sapiens
tccgccagaggtgcacagccttcgatgcagaacagcagcaattctgggagcaattccacaaagaagccccgttcaggtatg

SEQ ID NO: 68506 - DNA, 78 bp, Homo sapiens
cacagccttcgatgcagaacagcagcaattctgggagcaattccacaaagaagccccgttcaggtatgggccgaacac

SEQ ID NO: 68507 - DNA, 80 bp, Homo sapiens
ttcgatgcagaacagcagcaattctgggagcaattccacaaagaagccccgttcaggtatgggccgaacactgctgcctc

SEQ ID NO: 68508 - DNA, 76 bp, Homo sapiens
agaacagcagcaattctgggagcaattccacaaagaagccccgttcaggtatgggccgaacactgctgcctctctt

SEQ ID NO: 68509 - DNA, 75 bp, Homo sapiens
atgggcccctgcgtgccatacttacaaaggaacacactgtgttttgtaggtttgatagcatccaccctcatcaaa

SEQ ID NO: 68510 - DNA, 80 bp, Homo sapiens
ctgcgtgccatacttacaaaggaacacactgtgttttgtaggtttgatagcatccaccctcatcaaatgctggatgccag

SEQ ID NO: 68511 - DNA, 81 bp, Homo sapiens
tacttacaaaggaacacactgtgttttgtaggtttgatagcatccaccctcatcaaatgctggatgccaggcacatcgaga

SEQ ID NO: 68512 - DNA, 85 bp, Homo sapiens
aacacactgtgttttgtaggtttgatagcatccaccctcatcaaatgctggatgccaggcacatcgagatccagcagatggaatc

SEQ ID NO: 68513 - DNA, 86 bp, Homo sapiens
ttttgtaggtttgatagcatccaccctcatcaaatgctggatgccaggcacatcgagatccagcagatggaatccactatggcctc

SEQ ID NO: 68514 - DNA, 89 bp, Homo sapiens
tttgatagcatccaccctcatcaaatgctggatgccaggcacatcgagatccagcagatggaatccactatggcctccatttctgagtc

SEQ ID NO: 68515 - DNA, 87 bp, Homo sapiens
accctcatcaaatgctggatgccaggcacatcgagatccagcagatggaatccactatggcctccatttctgagtctgccagcttat

SEQ ID NO: 68516 - DNA, 87 bp, Homo sapiens
atcaaatgctggatgccaggcacatcgagatccagcagatggaatccactatggcctccatttctgagtctgccagcttatttgaag

SEQ ID NO: 68517 - DNA, 85 bp, Homo sapiens
atgccaggcacatcgagatccagcagatggaatccactatggcctccatttctgagtctgccagcttatttgaagtcaatgtccc

SEQ ID NO: 68518 - DNA, 83 bp, Homo sapiens
atcgagatccagcagatggaatccactatggcctccatttctgagtctgccagcttatttgaagtcaatgtccctgactataa

SEQ ID NO: 68519 - DNA, 85 bp, Homo sapiens
atccagcagatggaatccactatggcctccatttctgagtctgccagcttatttgaagtcaatgtccctgactataagcagctga

SEQ ID NO: 68520 - DNA, 85 bp, Homo sapiens
tggaatccactatggcctccatttctgagtctgccagcttatttgaagtcaatgtccctgactataagcagctgaggcagtgcag

SEQ ID NO: 68521 - DNA, 83 bp, Homo sapiens
tatggcctccatttctgagtctgccagcttatttgaagtcaatgtccctgactataagcagctgaggcagtgcaggaaggagg

SEQ ID NO: 68522 - DNA, 85 bp, Homo sapiens
tttctgagtctgccagcttatttgaagtcaatgtccctgactataagcagctgaggcagtgcaggaaggaggtctgccagctgaa

SEQ ID NO: 68523 - DNA, 83 bp, Homo sapiens
agcttatttgaagtcaatgtccctgactataagcagctgaggcagtgcaggaaggaggtctgccagctgaaggagctctggga

SEQ ID NO: 68524 - DNA, 83 bp, Homo sapiens
tttgaagtcaatgtccctgactataagcagctgaggcagtgcaggaaggaggtctgccagctgaaggagctctgggacaccat

SEQ ID NO: 68525 - DNA, 82 bp, Homo sapiens
aatgtccctgactataagcagctgaggcagtgcaggaaggaggtctgccagctgaaggagctctgggacaccattggaatgg

SEQ ID NO: 68526 - DNA, 83 bp, Homo sapiens
aggcagtgcaggaaggaggtctgccagctgaaggagctctgggacaccattggaatggtgacctccagcatccatgcctggga

SEQ ID NO: 68527 - DNA, 81 bp, Homo sapiens
aggaaggaggtctgccagctgaaggagctctgggacaccattggaatggtgacctccagcatccatgcctgggagaccaca

SEQ ID NO: 68528 - DNA, 82 bp, Homo sapiens
tgccagctgaaggagctctgggacaccattggaatggtgacctccagcatccatgcctgggagaccacaccctggaggaata

SEQ ID NO: 68529 - DNA, 78 bp, Homo sapiens
aaggagctctgggacaccattggaatggtgacctccagcatccatgcctgggagaccacaccctggaggaatatcaac

SEQ ID NO: 68530 - DNA, 78 bp, Homo sapiens
ctctgggacaccattggaatggtgacctccagcatccatgcctgggagaccacaccctggaggaatatcaacgtggaa

SEQ ID NO: 68531 - DNA, 78 bp, Homo sapiens
attggaatggtgacctccagcatccatgcctgggagaccacaccctggaggaatatcaacgtggaagccatggagttg

SEQ ID NO: 68532 - DNA, 78 bp, Homo sapiens
cctccagcatccatgcctgggagaccacaccctggaggaatatcaacgtggaagccatggagttggagtgcaaacagt

SEQ ID NO: 68533 - DNA, 73 bp, Homo sapiens
accctggaggaatatcaacgtggaagccatggagttggagtgcaaacagtttgcccggcatatccgaaacctg

SEQ ID NO: 68534 - DNA, 75 bp, Homo sapiens
agttggagtgcaaacagtttgcccggcatatccgaaacctggacaaggaggtcagggcctgggatgcattcacag

SEQ ID NO: 68535 - DNA, 78 bp, Homo sapiens
atatccgaaacctggacaaggaggtcagggcctgggatgcattcacaggcctggaaagcactgtgtggaacacgctga

SEQ ID NO: 68536 - DNA, 79 bp, Homo sapiens
aacctggacaaggaggtcagggcctgggatgcattcacaggcctggaaagcactgtgtggaacacgctgagctccctga

SEQ ID NO: 68537 - DNA, 86 bp, Homo sapiens
gtcagggcctgggatgcattcacaggcctggaaagcactgtgtggaacacgctgagctccctgagggcagtagctgagctgcagaa

SEQ ID NO: 68538 - DNA, 88 bp, Homo sapiens
ctgggatgcattcacaggcctggaaagcactgtgtggaacacgctgagctccctgagggcagtagctgagctgcagaatccagccatc

SEQ ID NO: 68539 - DNA, 84 bp, Homo sapiens
attcacaggcctggaaagcactgtgtggaacacgctgagctccctgagggcagtagctgagctgcagaatccagccatccggga

SEQ ID NO: 68540 - DNA, 85 bp, Homo sapiens
tggaaagcactgtgtggaacacgctgagctccctgagggcagtagctgagctgcagaatccagccatccgggagcggcactggag

SEQ ID NO: 68541 - DNA, 89 bp, Homo sapiens
actgtgtggaacacgctgagctccctgagggcagtagctgagctgcagaatccagccatccgggagcggcactggaggcagctgatgca

SEQ ID NO: 68542 - DNA, 87 bp, Homo sapiens
aacacgctgagctccctgagggcagtagctgagctgcagaatccagccatccgggagcggcactggaggcagctgatgcaggccacc

SEQ ID NO: 68543 - DNA, 88 bp, Homo sapiens
ctgagggcagtagctgagctgcagaatccagccatccgggagcggcactggaggcagctgatgcaggccaccggtgtgagcttcacta

SEQ ID NO: 68544 - DNA, 87 bp, Homo sapiens
agtagctgagctgcagaatccagccatccgggagcggcactggaggcagctgatgcaggccaccggtgtgagcttcactatggacca

SEQ ID NO: 68545 - DNA, 82 bp, Homo sapiens
tccagccatccgggagcggcactggaggcagctgatgcaggccaccggtgtgagcttcactatggaccaggacaccacccta

SEQ ID NO: 68546 - DNA, 85 bp, Homo sapiens
gggagcggcactggaggcagctgatgcaggccaccggtgtgagcttcactatggaccaggacaccaccctagcgcacctgctgca

SEQ ID NO: 68547 - DNA, 86 bp, Homo sapiens
atgcaggccaccggtgtgagcttcactatggaccaggacaccaccctagcgcacctgctgcagctccagctgcaccactatgagga

SEQ ID NO: 68548 - DNA, 84 bp, Homo sapiens
accggtgtgagcttcactatggaccaggacaccaccctagcgcacctgctgcagctccagctgcaccactatgaggatgaggtc

SEQ ID NO: 68549 - DNA, 85 bp, Homo sapiens
tgagcttcactatggaccaggacaccaccctagcgcacctgctgcagctccagctgcaccactatgaggatgaggtccggggcat

SEQ ID NO: 68550 - DNA, 84 bp, Homo sapiens
tatggaccaggacaccaccctagcgcacctgctgcagctccagctgcaccactatgaggatgaggtccggggcattgtggacaa

SEQ ID NO: 68551 - DNA, 86 bp, Homo sapiens
tagcgcacctgctgcagctccagctgcaccactatgaggatgaggtccggggcattgtggacaaagctgcaaaagagatgggtatg

SEQ ID NO: 68552 - DNA, 80 bp, Homo sapiens
cagctccagctgcaccactatgaggatgaggtccggggcattgtggacaaagctgcaaaagagatgggtatggagaaaac

SEQ ID NO: 68553 - DNA, 76 bp, Homo sapiens
tgcaccactatgaggatgaggtccggggcattgtggacaaagctgcaaaagagatgggtatggagaaaaccttaaa

SEQ ID NO: 68554 - DNA, 73 bp, Homo sapiens
actatgaggatgaggtccggggcattgtggacaaagctgcaaaagagatgggtatggagaaaaccttaaagga

SEQ ID NO: 68555 - DNA, 75 bp, Homo sapiens
atgaggtccggggcattgtggacaaagctgcaaaagagatgggtatggagaaaaccttaaaggagctgcagacta

SEQ ID NO: 68556 - DNA, 77 bp, Homo sapiens
ttgtggacaaagctgcaaaagagatgggtatggagaaaaccttaaaggagctgcagactacctgggctggcatggaa

SEQ ID NO: 68557 - DNA, 75 bp, Homo sapiens
aaaagagatgggtatggagaaaaccttaaaggagctgcagactacctgggctggcatggaattccagtatgagcc

SEQ ID NO: 68558 - DNA, 75 bp, Homo sapiens
tatggagaaaaccttaaaggagctgcagactacctgggctggcatggaattccagtatgagccccacccacggac

SEQ ID NO: 68559 - DNA, 73 bp, Homo sapiens
aaaaccttaaaggagctgcagactacctgggctggcatggaattccagtatgagccccacccacggaccaatg

SEQ ID NO: 68560 - DNA, 77 bp, Homo sapiens
aggagctgcagactacctgggctggcatggaattccagtatgagccccacccacggaccaatgtccccctcctgtgc

SEQ ID NO: 68561 - DNA, 77 bp, Homo sapiens
actacctgggctggcatggaattccagtatgagccccacccacggaccaatgtccccctcctgtgctctgatgagga

SEQ ID NO: 68562 - DNA, 77 bp, Homo sapiens
catggaattccagtatgagccccacccacggaccaatgtccccctcctgtgctctgatgaggacctcatagaggttc

SEQ ID NO: 68563 - DNA, 76 bp, Homo sapiens
aattccagtatgagccccacccacggaccaatgtccccctcctgtgctctgatgaggacctcatagaggttctgga

SEQ ID NO: 68564 - DNA, 77 bp, Homo sapiens
acggaccaatgtccccctcctgtgctctgatgaggacctcatagaggttctggaggataatcaagttcaacttcaga

SEQ ID NO: 68565 - DNA, 79 bp, Homo sapiens
cccctcctgtgctctgatgaggacctcatagaggttctggaggataatcaagttcaacttcagaacctggtgatgtcca

SEQ ID NO: 68566 - DNA, 81 bp, Homo sapiens
tgctctgatgaggacctcatagaggttctggaggataatcaagttcaacttcagaacctggtgatgtccaagtatgttgct

SEQ ID NO: 68567 - DNA, 75 bp, Homo sapiens
aggacctcatagaggttctggaggataatcaagttcaacttcagaacctggtgatgtccaagtatgttgctttct

SEQ ID NO: 68568 - DNA, 75 bp, Homo sapiens
atagaggttctggaggataatcaagttcaacttcagaacctggtgatgtccaagtatgttgctttcttcttggag

SEQ ID NO: 68569 - DNA, 76 bp, Homo sapiens
tctggaggataatcaagttcaacttcagaacctggtgatgtccaagtatgttgctttcttcttggaggaggtgtcg

SEQ ID NO: 68570 - DNA, 76 bp, Homo sapiens
atcaagttcaacttcagaacctggtgatgtccaagtatgttgctttcttcttggaggaggtgtcgggctggcagaa

SEQ ID NO: 68571 - DNA, 76 bp, Homo sapiens
aacttcagaacctggtgatgtccaagtatgttgctttcttcttggaggaggtgtcgggctggcagaagaagctgtc

SEQ ID NO: 68572 - DNA, 82 bp, Homo sapiens
tgatgtccaagtatgttgctttcttcttggaggaggtgtcgggctggcagaagaagctgtccacagtggacgctgtcatctc

SEQ ID NO: 68573 - DNA, 80 bp, Homo sapiens
aagtatgttgctttcttcttggaggaggtgtcgggctggcagaagaagctgtccacagtggacgctgtcatctctatctg

SEQ ID NO: 68574 - DNA, 81 bp, Homo sapiens
tttcttcttggaggaggtgtcgggctggcagaagaagctgtccacagtggacgctgtcatctctatctggtttgaagtgca

SEQ ID NO: 68575 - DNA, 83 bp, Homo sapiens
ttggaggaggtgtcgggctggcagaagaagctgtccacagtggacgctgtcatctctatctggtttgaagtgcagcgaacatg

SEQ ID NO: 68576 - DNA, 83 bp, Homo sapiens
gggctggcagaagaagctgtccacagtggacgctgtcatctctatctggtttgaagtgcagcgaacatggactcacctggaaa

SEQ ID NO: 68577 - DNA, 84 bp, Homo sapiens
agaagaagctgtccacagtggacgctgtcatctctatctggtttgaagtgcagcgaacatggactcacctggaaagcatattca

SEQ ID NO: 68578 - DNA, 86 bp, Homo sapiens
tgtccacagtggacgctgtcatctctatctggtttgaagtgcagcgaacatggactcacctggaaagcatattcactggatctgaa

SEQ ID NO: 68579 - DNA, 83 bp, Homo sapiens
acgctgtcatctctatctggtttgaagtgcagcgaacatggactcacctggaaagcatattcactggatctgaagatattcgg

SEQ ID NO: 68580 - DNA, 84 bp, Homo sapiens
atctctatctggtttgaagtgcagcgaacatggactcacctggaaagcatattcactggatctgaagatattcgggcacagcta

SEQ ID NO: 68581 - DNA, 81 bp, Homo sapiens
tttgaagtgcagcgaacatggactcacctggaaagcatattcactggatctgaagatattcgggcacagctaccccaggta

SEQ ID NO: 68582 - DNA, 79 bp, Homo sapiens
agcgaacatggactcacctggaaagcatattcactggatctgaagatattcgggcacagctaccccaggtacctgctaa

SEQ ID NO: 68583 - DNA, 77 bp, Homo sapiens
actcacctggaaagcatattcactggatctgaagatattcgggcacagctaccccaggtacctgctaaggaaatcta

SEQ ID NO: 68584 - DNA, 78 bp, Homo sapiens
aaagcatattcactggatctgaagatattcgggcacagctaccccaggtacctgctaaggaaatctagaatctctcta

SEQ ID NO: 68585 - DNA, 70 bp, Homo sapiens
ctaggaactgagtggagtggtggttaattgcttccacatttttatttgcaggattctaaaaggtttgaag

SEQ ID NO: 68586 - DNA, 71 bp, Homo sapiens
agtggtggttaattgcttccacatttttatttgcaggattctaaaaggtttgaaggcatcgacattgactt

SEQ ID NO: 68587 - DNA, 74 bp, Homo sapiens
taattgcttccacatttttatttgcaggattctaaaaggtttgaaggcatcgacattgactttaaagagctagc

SEQ ID NO: 68588 - DNA, 75 bp, Homo sapiens
acatttttatttgcaggattctaaaaggtttgaaggcatcgacattgactttaaagagctagcttatgatgccca

SEQ ID NO: 68589 - DNA, 75 bp, Homo sapiens
ttatttgcaggattctaaaaggtttgaaggcatcgacattgactttaaagagctagcttatgatgcccagaaaat

SEQ ID NO: 68590 - DNA, 74 bp, Homo sapiens
attctaaaaggtttgaaggcatcgacattgactttaaagagctagcttatgatgcccagaaaattccaaatgta

SEQ ID NO: 68591 - DNA, 77 bp, Homo sapiens
tttgaaggcatcgacattgactttaaagagctagcttatgatgcccagaaaattccaaatgtagtgcaaaccaccaa

SEQ ID NO: 68592 - DNA, 76 bp, Homo sapiens
atcgacattgactttaaagagctagcttatgatgcccagaaaattccaaatgtagtgcaaaccaccaacaagccag

SEQ ID NO: 68593 - DNA, 76 bp, Homo sapiens
tttaaagagctagcttatgatgcccagaaaattccaaatgtagtgcaaaccaccaacaagccaggcctgtatgaaa

SEQ ID NO: 68594 - DNA, 78 bp, Homo sapiens
tagcttatgatgcccagaaaattccaaatgtagtgcaaaccaccaacaagccaggcctgtatgaaaagctggaggata

SEQ ID NO: 68595 - DNA, 77 bp, Homo sapiens
atgatgcccagaaaattccaaatgtagtgcaaaccaccaacaagccaggcctgtatgaaaagctggaggatattcag

SEQ ID NO: 68596 - DNA, 75 bp, Homo sapiens
aaaattccaaatgtagtgcaaaccaccaacaagccaggcctgtatgaaaagctggaggatattcagggcaggtga

SEQ ID NO: 68597 - DNA, 76 bp, Homo sapiens
tagtgcaaaccaccaacaagccaggcctgtatgaaaagctggaggatattcagggcaggtgagggtccgcccatta

SEQ ID NO: 68598 - DNA, 72 bp, Homo sapiens
aaaccaccaacaagccaggcctgtatgaaaagctggaggatattcagggcaggtgagggtccgcccattacc

SEQ ID NO: 68599 - DNA, 73 bp, Homo sapiens
caggcctgtatgaaaagctggaggatattcagggcaggtgagggtccgcccattaccccttctctaataagaa

SEQ ID NO: 68600 - DNA, 79 bp, Homo sapiens
atgggtctagacattcttaactgggaaattctatgttctgtgccctcagattgtgcctgtgtgagaaggccctggcaga

SEQ ID NO: 68601 - DNA, 78 bp, Homo sapiens
attcttaactgggaaattctatgttctgtgccctcagattgtgcctgtgtgagaaggccctggcagagtacctcgaca

SEQ ID NO: 68602 - DNA, 78 bp, Homo sapiens
aactgggaaattctatgttctgtgccctcagattgtgcctgtgtgagaaggccctggcagagtacctcgacaccaaga

SEQ ID NO: 68603 - DNA, 80 bp, Homo sapiens
ttctatgttctgtgccctcagattgtgcctgtgtgagaaggccctggcagagtacctcgacaccaagaggcttgccttcc

SEQ ID NO: 68604 - DNA, 75 bp, Homo sapiens
cctcagattgtgcctgtgtgagaaggccctggcagagtacctcgacaccaagaggcttgccttcccgcggtttta

SEQ ID NO: 68605 - DNA, 72 bp, Homo sapiens
attgtgcctgtgtgagaaggccctggcagagtacctcgacaccaagaggcttgccttcccgcggttttactt

SEQ ID NO: 68606 - DNA, 72 bp, Homo sapiens
gtgtgagaaggccctggcagagtacctcgacaccaagaggcttgccttcccgcggttttactttctctcctc

SEQ ID NO: 68607 - DNA, 73 bp, Homo sapiens
tggcagagtacctcgacaccaagaggcttgccttcccgcggttttactttctctcctcctccgatctgttaga

SEQ ID NO: 68608 - DNA, 71 bp, Homo sapiens
agtacctcgacaccaagaggcttgccttcccgcggttttactttctctcctcctccgatctgttagacatc

SEQ ID NO: 68609 - DNA, 69 bp, Homo sapiens
accaagaggcttgccttcccgcggttttactttctctcctcctccgatctgttagacatcctttccaac

SEQ ID NO: 68610 - DNA, 72 bp, Homo sapiens
cttcccgcggttttactttctctcctcctccgatctgttagacatcctttccaacggcacagctccacaaca

SEQ ID NO: 68611 - DNA, 74 bp, Homo sapiens
ttttactttctctcctcctccgatctgttagacatcctttccaacggcacagctccacaacaggtaagctggag

SEQ ID NO: 68612 - DNA, 81 bp, Homo sapiens
ttctctcctcctccgatctgttagacatcctttccaacggcacagctccacaacaggtaagctggaggagcatctgcagaa

SEQ ID NO: 68613 - DNA, 80 bp, Homo sapiens
tcctccgatctgttagacatcctttccaacggcacagctccacaacaggtaagctggaggagcatctgcagaaaggtcta

SEQ ID NO: 68614 - DNA, 70 bp, Homo sapiens
agcttcccgaacatgttttatgatccattggcctggtttcccttcataggttcaacgtcacctttccaaa

SEQ ID NO: 68615 - DNA, 71 bp, Homo sapiens
atgttttatgatccattggcctggtttcccttcataggttcaacgtcacctttccaaactctttgacaaca

SEQ ID NO: 68616 - DNA, 74 bp, Homo sapiens
tatgatccattggcctggtttcccttcataggttcaacgtcacctttccaaactctttgacaacatggccaaga

SEQ ID NO: 68617 - DNA, 75 bp, Homo sapiens
tggtttcccttcataggttcaacgtcacctttccaaactctttgacaacatggccaagatgcgattccagctaga

SEQ ID NO: 68618 - DNA, 78 bp, Homo sapiens
tcccttcataggttcaacgtcacctttccaaactctttgacaacatggccaagatgcgattccagctagatgccagtg

SEQ ID NO: 68619 - DNA, 76 bp, Homo sapiens
gttcaacgtcacctttccaaactctttgacaacatggccaagatgcgattccagctagatgccagtggggaaccaa

SEQ ID NO: 68620 - DNA, 75 bp, Homo sapiens
acctttccaaactctttgacaacatggccaagatgcgattccagctagatgccagtggggaaccaaccaagacaa

SEQ ID NO: 68621 - DNA, 81 bp, Homo sapiens
tttgacaacatggccaagatgcgattccagctagatgccagtggggaaccaaccaagacaagcctcggcatgtacagcaaa

SEQ ID NO: 68622 - DNA, 80 bp, Homo sapiens
aacatggccaagatgcgattccagctagatgccagtggggaaccaaccaagacaagcctcggcatgtacagcaaagaaga

SEQ ID NO: 68623 - DNA, 79 bp, Homo sapiens
aagatgcgattccagctagatgccagtggggaaccaaccaagacaagcctcggcatgtacagcaaagaagaggagtatg

SEQ ID NO: 68624 - DNA, 79 bp, Homo sapiens
agctagatgccagtggggaaccaaccaagacaagcctcggcatgtacagcaaagaagaggagtatgtggctttcagtga

SEQ ID NO: 68625 - DNA, 77 bp, Homo sapiens
agtggggaaccaaccaagacaagcctcggcatgtacagcaaagaagaggagtatgtggctttcagtgagccctgtga

SEQ ID NO: 68626 - DNA, 79 bp, Homo sapiens
aaccaaccaagacaagcctcggcatgtacagcaaagaagaggagtatgtggctttcagtgagccctgtgactgcagcgg

SEQ ID NO: 68627 - DNA, 81 bp, Homo sapiens
aagcctcggcatgtacagcaaagaagaggagtatgtggctttcagtgagccctgtgactgcagcgggcaggtaacacagta

SEQ ID NO: 68628 - DNA, 79 bp, Homo sapiens
atgtacagcaaagaagaggagtatgtggctttcagtgagccctgtgactgcagcgggcaggtaacacagtagccctttc

SEQ ID NO: 68629 - DNA, 75 bp, Homo sapiens
aaagaagaggagtatgtggctttcagtgagccctgtgactgcagcgggcaggtaacacagtagccctttcccctc

SEQ ID NO: 68630 - DNA, 75 bp, Homo sapiens
agtatgtggctttcagtgagccctgtgactgcagcgggcaggtaacacagtagccctttcccctccttctgcttt

SEQ ID NO: 68631 - DNA, 74 bp, Homo sapiens
taaccaaaacttctcaggcacccagtgtctaacctgagttgttctttcaggtagaaatatggctgaaccatgtc

SEQ ID NO: 68632 - DNA, 78 bp, Homo sapiens
ttctcaggcacccagtgtctaacctgagttgttctttcaggtagaaatatggctgaaccatgtccttggtcacatgaa

SEQ ID NO: 68633 - DNA, 77 bp, Homo sapiens
agtgtctaacctgagttgttctttcaggtagaaatatggctgaaccatgtccttggtcacatgaaggccactgtgag

SEQ ID NO: 68634 - DNA, 82 bp, Homo sapiens
taacctgagttgttctttcaggtagaaatatggctgaaccatgtccttggtcacatgaaggccactgtgaggcatgagatga

SEQ ID NO: 68635 - DNA, 82 bp, Homo sapiens
ttctttcaggtagaaatatggctgaaccatgtccttggtcacatgaaggccactgtgaggcatgagatgacagaaggtgtaa

SEQ ID NO: 68636 - DNA, 83 bp, Homo sapiens
aaatatggctgaaccatgtccttggtcacatgaaggccactgtgaggcatgagatgacagaaggtgtaactgcctatgaagaa

SEQ ID NO: 68637 - DNA, 82 bp, Homo sapiens
tgaaccatgtccttggtcacatgaaggccactgtgaggcatgagatgacagaaggtgtaactgcctatgaagaaaagccgag

SEQ ID NO: 68638 - DNA, 82 bp, Homo sapiens
atgtccttggtcacatgaaggccactgtgaggcatgagatgacagaaggtgtaactgcctatgaagaaaagccgagggagca

SEQ ID NO: 68639 - DNA, 80 bp, Homo sapiens
atgaaggccactgtgaggcatgagatgacagaaggtgtaactgcctatgaagaaaagccgagggagcagtggctttttga

SEQ ID NO: 68640 - DNA, 78 bp, Homo sapiens
actgtgaggcatgagatgacagaaggtgtaactgcctatgaagaaaagccgagggagcagtggctttttgaccaccca

SEQ ID NO: 68641 - DNA, 77 bp, Homo sapiens
tgagatgacagaaggtgtaactgcctatgaagaaaagccgagggagcagtggctttttgaccacccagctcaggtat

SEQ ID NO: 68642 - DNA, 73 bp, Homo sapiens
aaggtgtaactgcctatgaagaaaagccgagggagcagtggctttttgaccacccagctcaggtattctccta

SEQ ID NO: 68643 - DNA, 75 bp, Homo sapiens
taactgcctatgaagaaaagccgagggagcagtggctttttgaccacccagctcaggtattctcctaatgggatc

SEQ ID NO: 68644 - DNA, 73 bp, Homo sapiens
atgaagaaaagccgagggagcagtggctttttgaccacccagctcaggtattctcctaatgggatccccatcc

SEQ ID NO: 68645 - DNA, 80 bp, Homo sapiens
aaacagccatgataacagctttactaggcaactcttgctgccacaggtggccctgacctgtactcagatctggtggacaa

SEQ ID NO: 68646 - DNA, 80 bp, Homo sapiens
atgataacagctttactaggcaactcttgctgccacaggtggccctgacctgtactcagatctggtggacaacagaagtg

SEQ ID NO: 68647 - DNA, 80 bp, Homo sapiens
tttactaggcaactcttgctgccacaggtggccctgacctgtactcagatctggtggacaacagaagtgggcatggcatt

SEQ ID NO: 68648 - DNA, 82 bp, Homo sapiens
aggcaactcttgctgccacaggtggccctgacctgtactcagatctggtggacaacagaagtgggcatggcatttgccaggc

SEQ ID NO: 68649 - DNA, 80 bp, Homo sapiens
ccacaggtggccctgacctgtactcagatctggtggacaacagaagtgggcatggcatttgccaggctggaggaaggcta

SEQ ID NO: 68650 - DNA, 84 bp, Homo sapiens
ccctgacctgtactcagatctggtggacaacagaagtgggcatggcatttgccaggctggaggaaggctatgagagtgccatga

SEQ ID NO: 68651 - DNA, 84 bp, Homo sapiens
tactcagatctggtggacaacagaagtgggcatggcatttgccaggctggaggaaggctatgagagtgccatgaaggactatta

SEQ ID NO: 68652 - DNA, 82 bp, Homo sapiens
agatctggtggacaacagaagtgggcatggcatttgccaggctggaggaaggctatgagagtgccatgaaggactattataa

SEQ ID NO: 68653 - DNA, 81 bp, Homo sapiens
acaacagaagtgggcatggcatttgccaggctggaggaaggctatgagagtgccatgaaggactattataagaagcaagtg

SEQ ID NO: 68654 - DNA, 81 bp, Homo sapiens
catggcatttgccaggctggaggaaggctatgagagtgccatgaaggactattataagaagcaagtggcccagctcaaaac

SEQ ID NO: 68655 - DNA, 80 bp, Homo sapiens
tgccaggctggaggaaggctatgagagtgccatgaaggactattataagaagcaagtggcccagctcaaaacccttatca

SEQ ID NO: 68656 - DNA, 79 bp, Homo sapiens
aggaaggctatgagagtgccatgaaggactattataagaagcaagtggcccagctcaaaacccttatcaccatgctgat

SEQ ID NO: 68657 - DNA, 83 bp, Homo sapiens
tatgagagtgccatgaaggactattataagaagcaagtggcccagctcaaaacccttatcaccatgctgattggccagctctc

SEQ ID NO: 68658 - DNA, 78 bp, Homo sapiens
atgaaggactattataagaagcaagtggcccagctcaaaacccttatcaccatgctgattggccagctctccaaggga

SEQ ID NO: 68659 - DNA, 76 bp, Homo sapiens
actattataagaagcaagtggcccagctcaaaacccttatcaccatgctgattggccagctctccaagggagaccg

SEQ ID NO: 68660 - DNA, 79 bp, Homo sapiens
aagcaagtggcccagctcaaaacccttatcaccatgctgattggccagctctccaagggagaccggcagaagattatga

SEQ ID NO: 68661 - DNA, 83 bp, Homo sapiens
cagctcaaaacccttatcaccatgctgattggccagctctccaagggagaccggcagaagattatgactatatgcaccatcga

SEQ ID NO: 68662 - DNA, 83 bp, Homo sapiens
aaaacccttatcaccatgctgattggccagctctccaagggagaccggcagaagattatgactatatgcaccatcgatgtgca

SEQ ID NO: 68663 - DNA, 83 bp, Homo sapiens
attggccagctctccaagggagaccggcagaagattatgactatatgcaccatcgatgtgcatgcccgggatgtggtagccaa

SEQ ID NO: 68664 - DNA, 86 bp, Homo sapiens
tccaagggagaccggcagaagattatgactatatgcaccatcgatgtgcatgcccgggatgtggtagccaagatgattgctcagaa

SEQ ID NO: 68665 - DNA, 84 bp, Homo sapiens
agaccggcagaagattatgactatatgcaccatcgatgtgcatgcccgggatgtggtagccaagatgattgctcagaaggtggg

SEQ ID NO: 68666 - DNA, 83 bp, Homo sapiens
aagattatgactatatgcaccatcgatgtgcatgcccgggatgtggtagccaagatgattgctcagaaggtgggtcccaaaca

SEQ ID NO: 68667 - DNA, 82 bp, Homo sapiens
actatatgcaccatcgatgtgcatgcccgggatgtggtagccaagatgattgctcagaaggtgggtcccaaacatccaggga

SEQ ID NO: 68668 - DNA, 79 bp, Homo sapiens
atcgatgtgcatgcccgggatgtggtagccaagatgattgctcagaaggtgggtcccaaacatccagggatgcccactt

SEQ ID NO: 68669 - DNA, 76 bp, Homo sapiens
atgcccgggatgtggtagccaagatgattgctcagaaggtgggtcccaaacatccagggatgcccacttttgtgta

SEQ ID NO: 68670 - DNA, 76 bp, Homo sapiens
actacctgctgcctatgattcacccacctactctaccactctctctttaggtagacaatgcccaggctttcctctg

SEQ ID NO: 68671 - DNA, 81 bp, Homo sapiens
tatgattcacccacctactctaccactctctctttaggtagacaatgcccaggctttcctctggctgtctcagctgcgcca

SEQ ID NO: 68672 - DNA, 79 bp, Homo sapiens
cacctactctaccactctctctttaggtagacaatgcccaggctttcctctggctgtctcagctgcgccatcgttggga

SEQ ID NO: 68673 - DNA, 80 bp, Homo sapiens
actctaccactctctctttaggtagacaatgcccaggctttcctctggctgtctcagctgcgccatcgttgggatgacga

SEQ ID NO: 68674 - DNA, 80 bp, Homo sapiens
tctttaggtagacaatgcccaggctttcctctggctgtctcagctgcgccatcgttgggatgacgaggtcaaacactgct

SEQ ID NO: 68675 - DNA, 83 bp, Homo sapiens
tagacaatgcccaggctttcctctggctgtctcagctgcgccatcgttgggatgacgaggtcaaacactgctttgccaacatc

SEQ ID NO: 68676 - DNA, 83 bp, Homo sapiens
ggctttcctctggctgtctcagctgcgccatcgttgggatgacgaggtcaaacactgctttgccaacatctgtgatgcccagt

SEQ ID NO: 68677 - DNA, 83 bp, Homo sapiens
tctggctgtctcagctgcgccatcgttgggatgacgaggtcaaacactgctttgccaacatctgtgatgcccagtttttgtat

SEQ ID NO: 68678 - DNA, 81 bp, Homo sapiens
gtctcagctgcgccatcgttgggatgacgaggtcaaacactgctttgccaacatctgtgatgcccagtttttgtattccta

SEQ ID NO: 68679 - DNA, 77 bp, Homo sapiens
atcgttgggatgacgaggtcaaacactgctttgccaacatctgtgatgcccagtttttgtattcctatgagtacctg

SEQ ID NO: 68680 - DNA, 77 bp, Homo sapiens
atgacgaggtcaaacactgctttgccaacatctgtgatgcccagtttttgtattcctatgagtacctgggaaacaca

SEQ ID NO: 68681 - DNA, 75 bp, Homo sapiens
aaacactgctttgccaacatctgtgatgcccagtttttgtattcctatgagtacctgggaaacacacctcgcttg

SEQ ID NO: 68682 - DNA, 77 bp, Homo sapiens
tgccaacatctgtgatgcccagtttttgtattcctatgagtacctgggaaacacacctcgcttggtgatcacacctt

SEQ ID NO: 68683 - DNA, 77 bp, Homo sapiens
atctgtgatgcccagtttttgtattcctatgagtacctgggaaacacacctcgcttggtgatcacacctttgactga

SEQ ID NO: 68684 - DNA, 75 bp, Homo sapiens
agtttttgtattcctatgagtacctgggaaacacacctcgcttggtgatcacacctttgactgacaggtgagcac

SEQ ID NO: 68685 - DNA, 79 bp, Homo sapiens
ttgtattcctatgagtacctgggaaacacacctcgcttggtgatcacacctttgactgacaggtgagcactggtgtcaa

SEQ ID NO: 68686 - DNA, 79 bp, Homo sapiens
tacctgggaaacacacctcgcttggtgatcacacctttgactgacaggtgagcactggtgtcaaccactgacagcctta

SEQ ID NO: 68687 - DNA, 76 bp, Homo sapiens
atctcactgggcccccaagaatgatgacctatgccctcccgtgtttggcaggtgctacatcaccctcacccagtcc

SEQ ID NO: 68688 - DNA, 80 bp, Homo sapiens
caagaatgatgacctatgccctcccgtgtttggcaggtgctacatcaccctcacccagtccctgcacctgaccatgagtg

SEQ ID NO: 68689 - DNA, 79 bp, Homo sapiens
atgatgacctatgccctcccgtgtttggcaggtgctacatcaccctcacccagtccctgcacctgaccatgagtggggc

SEQ ID NO: 68690 - DNA, 77 bp, Homo sapiens
atgccctcccgtgtttggcaggtgctacatcaccctcacccagtccctgcacctgaccatgagtggggctcccgcag

SEQ ID NO: 68691 - DNA, 81 bp, Homo sapiens
gtgtttggcaggtgctacatcaccctcacccagtccctgcacctgaccatgagtggggctcccgcaggacctgcaggcaca

SEQ ID NO: 68692 - DNA, 80 bp, Homo sapiens
ctacatcaccctcacccagtccctgcacctgaccatgagtggggctcccgcaggacctgcaggcacaggcaagaccgaga

SEQ ID NO: 68693 - DNA, 79 bp, Homo sapiens
tcacccagtccctgcacctgaccatgagtggggctcccgcaggacctgcaggcacaggcaagaccgagaccaccaagga

SEQ ID NO: 68694 - DNA, 77 bp, Homo sapiens
agtccctgcacctgaccatgagtggggctcccgcaggacctgcaggcacaggcaagaccgagaccaccaaggacctg

SEQ ID NO: 68695 - DNA, 77 bp, Homo sapiens
acctgaccatgagtggggctcccgcaggacctgcaggcacaggcaagaccgagaccaccaaggacctgggccgcgca

SEQ ID NO: 68696 - DNA, 77 bp, Homo sapiens
gggctcccgcaggacctgcaggcacaggcaagaccgagaccaccaaggacctgggccgcgcactgggcatcctggtc

SEQ ID NO: 68697 - DNA, 78 bp, Homo sapiens
aggacctgcaggcacaggcaagaccgagaccaccaaggacctgggccgcgcactgggcatcctggtctatgtgttcaa

SEQ ID NO: 68698 - DNA, 78 bp, Homo sapiens
aggcacaggcaagaccgagaccaccaaggacctgggccgcgcactgggcatcctggtctatgtgttcaactgctcgga

SEQ ID NO: 68699 - DNA, 79 bp, Homo sapiens
agaccgagaccaccaaggacctgggccgcgcactgggcatcctggtctatgtgttcaactgctcggagcagatggatta

SEQ ID NO: 68700 - DNA, 78 bp, Homo sapiens
accaccaaggacctgggccgcgcactgggcatcctggtctatgtgttcaactgctcggagcagatggattacaaggta

SEQ ID NO: 68701 - DNA, 79 bp, Homo sapiens
aggacctgggccgcgcactgggcatcctggtctatgtgttcaactgctcggagcagatggattacaaggtacagttcca

SEQ ID NO: 68702 - DNA, 77 bp, Homo sapiens
cactgggcatcctggtctatgtgttcaactgctcggagcagatggattacaaggtacagttccacccggcttcctgg

SEQ ID NO: 68703 - DNA, 74 bp, Homo sapiens
atcctggtctatgtgttcaactgctcggagcagatggattacaaggtacagttccacccggcttcctgggggtg

SEQ ID NO: 68704 - DNA, 73 bp, Homo sapiens
tctatgtgttcaactgctcggagcagatggattacaaggtacagttccacccggcttcctgggggtgggggtg

SEQ ID NO: 68705 - DNA, 75 bp, Homo sapiens
attgataagcctggcccgttggtaatttaatctttgtgcattttcttgcagtcttgtggcaacatctacaaaggc

SEQ ID NO: 68706 - DNA, 75 bp, Homo sapiens
cccgttggtaatttaatctttgtgcattttcttgcagtcttgtggcaacatctacaaaggccttgctcagactgg

SEQ ID NO: 68707 - DNA, 77 bp, Homo sapiens
ggtaatttaatctttgtgcattttcttgcagtcttgtggcaacatctacaaaggccttgctcagactggtgcctggg

SEQ ID NO: 68708 - DNA, 82 bp, Homo sapiens
tgtgcattttcttgcagtcttgtggcaacatctacaaaggccttgctcagactggtgcctggggctgctttgatgagtttaa

SEQ ID NO: 68709 - DNA, 80 bp, Homo sapiens
tttcttgcagtcttgtggcaacatctacaaaggccttgctcagactggtgcctggggctgctttgatgagtttaatcgaa

SEQ ID NO: 68710 - DNA, 80 bp, Homo sapiens
tcttgtggcaacatctacaaaggccttgctcagactggtgcctggggctgctttgatgagtttaatcgaatctccgtgga

SEQ ID NO: 68711 - DNA, 78 bp, Homo sapiens
atctacaaaggccttgctcagactggtgcctggggctgctttgatgagtttaatcgaatctccgtggaggtcttgtca

SEQ ID NO: 68712 - DNA, 77 bp, Homo sapiens
aaggccttgctcagactggtgcctggggctgctttgatgagtttaatcgaatctccgtggaggtcttgtcagtggtg

SEQ ID NO: 68713 - DNA, 78 bp, Homo sapiens
agactggtgcctggggctgctttgatgagtttaatcgaatctccgtggaggtcttgtcagtggtggcagtgcaggtaa

SEQ ID NO: 68714 - DNA, 76 bp, Homo sapiens
gggctgctttgatgagtttaatcgaatctccgtggaggtcttgtcagtggtggcagtgcaggtaagggccagaagt

SEQ ID NO: 68715 - DNA, 75 bp, Homo sapiens
tttgatgagtttaatcgaatctccgtggaggtcttgtcagtggtggcagtgcaggtaagggccagaagttggtgg

SEQ ID NO: 68716 - DNA, 74 bp, Homo sapiens
tttaatcgaatctccgtggaggtcttgtcagtggtggcagtgcaggtaagggccagaagttggtgggagccttg

SEQ ID NO: 68717 - DNA, 77 bp, Homo sapiens
ctaaaaggcaattgaggaatttctcgctgattgattggttcaccaggtaaaaagcattcaagatgcgattagagata

SEQ ID NO: 68718 - DNA, 78 bp, Homo sapiens
aattgaggaatttctcgctgattgattggttcaccaggtaaaaagcattcaagatgcgattagagataagaagcagtg

SEQ ID NO: 68719 - DNA, 78 bp, Homo sapiens
aatttctcgctgattgattggttcaccaggtaaaaagcattcaagatgcgattagagataagaagcagtggttcagct

SEQ ID NO: 68720 - DNA, 77 bp, Homo sapiens
ctgattgattggttcaccaggtaaaaagcattcaagatgcgattagagataagaagcagtggttcagcttccttggg

SEQ ID NO: 68721 - DNA, 78 bp, Homo sapiens
tggttcaccaggtaaaaagcattcaagatgcgattagagataagaagcagtggttcagcttccttggggaggagatca

SEQ ID NO: 68722 - DNA, 79 bp, Homo sapiens
taaaaagcattcaagatgcgattagagataagaagcagtggttcagcttccttggggaggagatcagcctgaatccttc

SEQ ID NO: 68723 - DNA, 78 bp, Homo sapiens
aagatgcgattagagataagaagcagtggttcagcttccttggggaggagatcagcctgaatccttctgtcggtatct

SEQ ID NO: 68724 - DNA, 79 bp, Homo sapiens
attagagataagaagcagtggttcagcttccttggggaggagatcagcctgaatccttctgtcggtatcttcatcacca

SEQ ID NO: 68725 - DNA, 79 bp, Homo sapiens
taagaagcagtggttcagcttccttggggaggagatcagcctgaatccttctgtcggtatcttcatcaccatgaaccca

SEQ ID NO: 68726 - DNA, 81 bp, Homo sapiens
tggttcagcttccttggggaggagatcagcctgaatccttctgtcggtatcttcatcaccatgaacccaggctatgctggc

SEQ ID NO: 68727 - DNA, 84 bp, Homo sapiens
cttggggaggagatcagcctgaatccttctgtcggtatcttcatcaccatgaacccaggctatgctggccgcacagagctgcca

SEQ ID NO: 68728 - DNA, 86 bp, Homo sapiens
agatcagcctgaatccttctgtcggtatcttcatcaccatgaacccaggctatgctggccgcacagagctgccagagaatctcaag

SEQ ID NO: 68729 - DNA, 85 bp, Homo sapiens
aatccttctgtcggtatcttcatcaccatgaacccaggctatgctggccgcacagagctgccagagaatctcaagtctctcttca

SEQ ID NO: 68730 - DNA, 88 bp, Homo sapiens
tgtcggtatcttcatcaccatgaacccaggctatgctggccgcacagagctgccagagaatctcaagtctctcttcaggtgagtgtca

SEQ ID NO: 68731 - DNA, 87 bp, Homo sapiens
ttcatcaccatgaacccaggctatgctggccgcacagagctgccagagaatctcaagtctctcttcaggtgagtgtcagttctgccc

SEQ ID NO: 68732 - DNA, 84 bp, Homo sapiens
aacccaggctatgctggccgcacagagctgccagagaatctcaagtctctcttcaggtgagtgtcagttctgccccatgcaaaa

SEQ ID NO: 68733 - DNA, 84 bp, Homo sapiens
tatgctggccgcacagagctgccagagaatctcaagtctctcttcaggtgagtgtcagttctgccccatgcaaaagccccaaaa

SEQ ID NO: 68734 - DNA, 73 bp, Homo sapiens
actgtacttgggaaactgactgggccttctgtctttctatactcaggccttgtgcaatggtggttccagactt

SEQ ID NO: 68735 - DNA, 73 bp, Homo sapiens
acttgggaaactgactgggccttctgtctttctatactcaggccttgtgcaatggtggttccagactttgaat

SEQ ID NO: 68736 - DNA, 80 bp, Homo sapiens
actgggccttctgtctttctatactcaggccttgtgcaatggtggttccagactttgaattgatctgtgaaatcatgctg

SEQ ID NO: 68737 - DNA, 82 bp, Homo sapiens
cttctgtctttctatactcaggccttgtgcaatggtggttccagactttgaattgatctgtgaaatcatgctggtggcagaa

SEQ ID NO: 68738 - DNA, 84 bp, Homo sapiens
tctatactcaggccttgtgcaatggtggttccagactttgaattgatctgtgaaatcatgctggtggcagaaggattcattgaa

SEQ ID NO: 68739 - DNA, 83 bp, Homo sapiens
cttgtgcaatggtggttccagactttgaattgatctgtgaaatcatgctggtggcagaaggattcattgaagcccagtcatta

SEQ ID NO: 68740 - DNA, 81 bp, Homo sapiens
tggttccagactttgaattgatctgtgaaatcatgctggtggcagaaggattcattgaagcccagtcattagccagaaagt

SEQ ID NO: 68741 - DNA, 82 bp, Homo sapiens
actttgaattgatctgtgaaatcatgctggtggcagaaggattcattgaagcccagtcattagccagaaagttcatcactct

SEQ ID NO: 68742 - DNA, 82 bp, Homo sapiens
aattgatctgtgaaatcatgctggtggcagaaggattcattgaagcccagtcattagccagaaagttcatcactctttacca

SEQ ID NO: 68743 - DNA, 80 bp, Homo sapiens
aaatcatgctggtggcagaaggattcattgaagcccagtcattagccagaaagttcatcactctttaccagttgtgcaaa

SEQ ID NO: 68744 - DNA, 80 bp, Homo sapiens
tggtggcagaaggattcattgaagcccagtcattagccagaaagttcatcactctttaccagttgtgcaaagagcttctc

SEQ ID NO: 68745 - DNA, 77 bp, Homo sapiens
aaggattcattgaagcccagtcattagccagaaagttcatcactctttaccagttgtgcaaagagcttctctccaaa

SEQ ID NO: 68746 - DNA, 77 bp, Homo sapiens
cccagtcattagccagaaagttcatcactctttaccagttgtgcaaagagcttctctccaaacaggtaggatctcta

SEQ ID NO: 68747 - DNA, 75 bp, Homo sapiens
attagccagaaagttcatcactctttaccagttgtgcaaagagcttctctccaaacaggtaggatctctagggag

SEQ ID NO: 68748 - DNA, 75 bp, Homo sapiens
aaagttcatcactctttaccagttgtgcaaagagcttctctccaaacaggtaggatctctagggaggctgtacaa

SEQ ID NO: 68749 - DNA, 74 bp, Homo sapiens
actctttaccagttgtgcaaagagcttctctccaaacaggtaggatctctagggaggctgtacaaccaagcacc

SEQ ID NO: 68750 - DNA, 79 bp, Homo sapiens
acatggtgttctgtctctctgtcactttgatctaacactgcccacaggatcactacgactggggcctacgggccatcaa

SEQ ID NO: 68751 - DNA, 78 bp, Homo sapiens
tctgtcactttgatctaacactgcccacaggatcactacgactggggcctacgggccatcaagtccgtgctggtggtg

SEQ ID NO: 68752 - DNA, 78 bp, Homo sapiens
ttgatctaacactgcccacaggatcactacgactggggcctacgggccatcaagtccgtgctggtggtggcaggatcc

SEQ ID NO: 68753 - DNA, 77 bp, Homo sapiens
actgcccacaggatcactacgactggggcctacgggccatcaagtccgtgctggtggtggcaggatccctgaagaga

SEQ ID NO: 68754 - DNA, 75 bp, Homo sapiens
ggatcactacgactggggcctacgggccatcaagtccgtgctggtggtggcaggatccctgaagagaggagaccc

SEQ ID NO: 68755 - DNA, 75 bp, Homo sapiens
gggcctacgggccatcaagtccgtgctggtggtggcaggatccctgaagagaggagaccctgaccggcctgagga

SEQ ID NO: 68756 - DNA, 75 bp, Homo sapiens
tacgggccatcaagtccgtgctggtggtggcaggatccctgaagagaggagaccctgaccggcctgaggaccagg

SEQ ID NO: 68757 - DNA, 77 bp, Homo sapiens
aagtccgtgctggtggtggcaggatccctgaagagaggagaccctgaccggcctgaggaccaggtcctgatgcgctc

SEQ ID NO: 68758 - DNA, 78 bp, Homo sapiens
tggtggcaggatccctgaagagaggagaccctgaccggcctgaggaccaggtcctgatgcgctccttgcgggatttca

SEQ ID NO: 68759 - DNA, 76 bp, Homo sapiens
aggatccctgaagagaggagaccctgaccggcctgaggaccaggtcctgatgcgctccttgcgggatttcaacatc

SEQ ID NO: 68760 - DNA, 76 bp, Homo sapiens
agaggagaccctgaccggcctgaggaccaggtcctgatgcgctccttgcgggatttcaacatccccaagattgtga

SEQ ID NO: 68761 - DNA, 78 bp, Homo sapiens
accctgaccggcctgaggaccaggtcctgatgcgctccttgcgggatttcaacatccccaagattgtgactgatgaca

SEQ ID NO: 68762 - DNA, 82 bp, Homo sapiens
cctgaggaccaggtcctgatgcgctccttgcgggatttcaacatccccaagattgtgactgatgacatgcccatcttcatgg

SEQ ID NO: 68763 - DNA, 82 bp, Homo sapiens
aggtcctgatgcgctccttgcgggatttcaacatccccaagattgtgactgatgacatgcccatcttcatgggcctgatcgg

SEQ ID NO: 68764 - DNA, 78 bp, Homo sapiens
ctccttgcgggatttcaacatccccaagattgtgactgatgacatgcccatcttcatgggcctgatcggggacctctt

SEQ ID NO: 68765 - DNA, 78 bp, Homo sapiens
gatttcaacatccccaagattgtgactgatgacatgcccatcttcatgggcctgatcggggacctctttcccgccctg

SEQ ID NO: 68766 - DNA, 78 bp, Homo sapiens
aacatccccaagattgtgactgatgacatgcccatcttcatgggcctgatcggggacctctttcccgccctggatgtc

SEQ ID NO: 68767 - DNA, 76 bp, Homo sapiens
aagattgtgactgatgacatgcccatcttcatgggcctgatcggggacctctttcccgccctggatgtcccccgga

SEQ ID NO: 68768 - DNA, 73 bp, Homo sapiens
atgacatgcccatcttcatgggcctgatcggggacctctttcccgccctggatgtcccccggaggagagaccc

SEQ ID NO: 68769 - DNA, 69 bp, Homo sapiens
atcttcatgggcctgatcggggacctctttcccgccctggatgtcccccggaggagagaccccaacttc

SEQ ID NO: 68770 - DNA, 67 bp, Homo sapiens
cctgatcggggacctctttcccgccctggatgtcccccggaggagagaccccaacttcgaagctttg

SEQ ID NO: 68771 - DNA, 66 bp, Homo sapiens
ggacctctttcccgccctggatgtcccccggaggagagaccccaacttcgaagctttggttaggaa

SEQ ID NO: 68772 - DNA, 67 bp, Homo sapiens
tttcccgccctggatgtcccccggaggagagaccccaacttcgaagctttggttaggaaggcgatag

SEQ ID NO: 68773 - DNA, 72 bp, Homo sapiens
ctggatgtcccccggaggagagaccccaacttcgaagctttggttaggaaggcgatagtggatctgaagctc

SEQ ID NO: 68774 - DNA, 73 bp, Homo sapiens
aggagagaccccaacttcgaagctttggttaggaaggcgatagtggatctgaagctccaggctgaggacaact

SEQ ID NO: 68775 - DNA, 75 bp, Homo sapiens
cccaacttcgaagctttggttaggaaggcgatagtggatctgaagctccaggctgaggacaactttgtgctcaag

SEQ ID NO: 68776 - DNA, 76 bp, Homo sapiens
agctttggttaggaaggcgatagtggatctgaagctccaggctgaggacaactttgtgctcaaggtacatgtggtt

SEQ ID NO: 68777 - DNA, 76 bp, Homo sapiens
tggttaggaaggcgatagtggatctgaagctccaggctgaggacaactttgtgctcaaggtacatgtggtttttcc

SEQ ID NO: 68778 - DNA, 80 bp, Homo sapiens
aggtgagtcacaggctggtccctctggctgaatttcctgcctcctcaggtggtccagctggaggagctcctggctgtgcg

SEQ ID NO: 68779 - DNA, 80 bp, Homo sapiens
ggctggtccctctggctgaatttcctgcctcctcaggtggtccagctggaggagctcctggctgtgcggcactctgtatt

SEQ ID NO: 68780 - DNA, 81 bp, Homo sapiens
tctggctgaatttcctgcctcctcaggtggtccagctggaggagctcctggctgtgcggcactctgtatttgtggtgggtg

SEQ ID NO: 68781 - DNA, 80 bp, Homo sapiens
tttcctgcctcctcaggtggtccagctggaggagctcctggctgtgcggcactctgtatttgtggtgggtggcgctggta

SEQ ID NO: 68782 - DNA, 79 bp, Homo sapiens
tcctcaggtggtccagctggaggagctcctggctgtgcggcactctgtatttgtggtgggtggcgctggtaccggcaag

SEQ ID NO: 68783 - DNA, 82 bp, Homo sapiens
tccagctggaggagctcctggctgtgcggcactctgtatttgtggtgggtggcgctggtaccggcaagtcacaggtgctgag

SEQ ID NO: 68784 - DNA, 78 bp, Homo sapiens
aggagctcctggctgtgcggcactctgtatttgtggtgggtggcgctggtaccggcaagtcacaggtgctgaggtcct

SEQ ID NO: 68785 - DNA, 80 bp, Homo sapiens
gctgtgcggcactctgtatttgtggtgggtggcgctggtaccggcaagtcacaggtgctgaggtccttgcacaagaccta

SEQ ID NO: 68786 - DNA, 81 bp, Homo sapiens
actctgtatttgtggtgggtggcgctggtaccggcaagtcacaggtgctgaggtccttgcacaagacctatcagatcatga

SEQ ID NO: 68787 - DNA, 79 bp, Homo sapiens
tatttgtggtgggtggcgctggtaccggcaagtcacaggtgctgaggtccttgcacaagacctatcagatcatgaaacg

SEQ ID NO: 68788 - DNA, 80 bp, Homo sapiens
tggcgctggtaccggcaagtcacaggtgctgaggtccttgcacaagacctatcagatcatgaaacggcgccccgtctgga

SEQ ID NO: 68789 - DNA, 80 bp, Homo sapiens
taccggcaagtcacaggtgctgaggtccttgcacaagacctatcagatcatgaaacggcgccccgtctggactgacctca

SEQ ID NO: 68790 - DNA, 79 bp, Homo sapiens
acaggtgctgaggtccttgcacaagacctatcagatcatgaaacggcgccccgtctggactgacctcaatcccaaagca

SEQ ID NO: 68791 - DNA, 77 bp, Homo sapiens
aggtccttgcacaagacctatcagatcatgaaacggcgccccgtctggactgacctcaatcccaaagcagtcacaaa

SEQ ID NO: 68792 - DNA, 79 bp, Homo sapiens
acaagacctatcagatcatgaaacggcgccccgtctggactgacctcaatcccaaagcagtcacaaatgatgagctctt

SEQ ID NO: 68793 - DNA, 85 bp, Homo sapiens
tatcagatcatgaaacggcgccccgtctggactgacctcaatcccaaagcagtcacaaatgatgagctctttggcatcatcaatc

SEQ ID NO: 68794 - DNA, 82 bp, Homo sapiens
atgaaacggcgccccgtctggactgacctcaatcccaaagcagtcacaaatgatgagctctttggcatcatcaatccagcca

SEQ ID NO: 68795 - DNA, 83 bp, Homo sapiens
cccgtctggactgacctcaatcccaaagcagtcacaaatgatgagctctttggcatcatcaatccagccacaggagaatggaa

SEQ ID NO: 68796 - DNA, 83 bp, Homo sapiens
actgacctcaatcccaaagcagtcacaaatgatgagctctttggcatcatcaatccagccacaggagaatggaaggatggtaa

SEQ ID NO: 68797 - DNA, 82 bp, Homo sapiens
atcccaaagcagtcacaaatgatgagctctttggcatcatcaatccagccacaggagaatggaaggatggtaagagtgggat

SEQ ID NO: 68798 - DNA, 83 bp, Homo sapiens
tcacaaatgatgagctctttggcatcatcaatccagccacaggagaatggaaggatggtaagagtgggattctcccaggagaa

SEQ ID NO: 68799 - DNA, 80 bp, Homo sapiens
aatgatgagctctttggcatcatcaatccagccacaggagaatggaaggatggtaagagtgggattctcccaggagaaag

SEQ ID NO: 68800 - DNA, 81 bp, Homo sapiens
tctttggcatcatcaatccagccacaggagaatggaaggatggtaagagtgggattctcccaggagaaagtctctgctagc

SEQ ID NO: 68801 - DNA, 72 bp, Homo sapiens
aaagaggattaatgaagaaatggaaaataaggtgtcagtggttccttttaggattgttctcttccatcatgc

SEQ ID NO: 68802 - DNA, 75 bp, Homo sapiens
agaaatggaaaataaggtgtcagtggttccttttaggattgttctcttccatcatgcgggagcttgccaacatca

SEQ ID NO: 68803 - DNA, 76 bp, Homo sapiens
aaaataaggtgtcagtggttccttttaggattgttctcttccatcatgcgggagcttgccaacatcacccatgatg

SEQ ID NO: 68804 - DNA, 78 bp, Homo sapiens
tcagtggttccttttaggattgttctcttccatcatgcgggagcttgccaacatcacccatgatgggcccaagtggat

SEQ ID NO: 68805 - DNA, 76 bp, Homo sapiens
ttccttttaggattgttctcttccatcatgcgggagcttgccaacatcacccatgatgggcccaagtggattttac

SEQ ID NO: 68806 - DNA, 81 bp, Homo sapiens
attgttctcttccatcatgcgggagcttgccaacatcacccatgatgggcccaagtggattttactggatggcgacataga

SEQ ID NO: 68807 - DNA, 83 bp, Homo sapiens
atcatgcgggagcttgccaacatcacccatgatgggcccaagtggattttactggatggcgacatagatccaatgtggattga

SEQ ID NO: 68808 - DNA, 81 bp, Homo sapiens
agcttgccaacatcacccatgatgggcccaagtggattttactggatggcgacatagatccaatgtggattgaatccctga

SEQ ID NO: 68809 - DNA, 79 bp, Homo sapiens
aacatcacccatgatgggcccaagtggattttactggatggcgacatagatccaatgtggattgaatccctgaatactg

SEQ ID NO: 68810 - DNA, 82 bp, Homo sapiens
atgatgggcccaagtggattttactggatggcgacatagatccaatgtggattgaatccctgaatactgtcatggatgataa

SEQ ID NO: 68811 - DNA, 81 bp, Homo sapiens
agtggattttactggatggcgacatagatccaatgtggattgaatccctgaatactgtcatggatgataacaaggtatgaa

SEQ ID NO: 68812 - DNA, 80 bp, Homo sapiens
attttactggatggcgacatagatccaatgtggattgaatccctgaatactgtcatggatgataacaaggtatgaaattg

SEQ ID NO: 68813 - DNA, 80 bp, Homo sapiens
gacatagatccaatgtggattgaatccctgaatactgtcatggatgataacaaggtatgaaattgggggatatccctaga

SEQ ID NO: 68814 - DNA, 79 bp, Homo sapiens
caatgtggattgaatccctgaatactgtcatggatgataacaaggtatgaaattgggggatatccctagatcatttcta

SEQ ID NO: 68815 - DNA, 79 bp, Homo sapiens
aaggcacctccctccttcctcactggcatgcccttccctgttgtctccaggtgctgacattggccagcaatgagaggat

SEQ ID NO: 68816 - DNA, 80 bp, Homo sapiens
ctccttcctcactggcatgcccttccctgttgtctccaggtgctgacattggccagcaatgagaggattcctctgaaccc

SEQ ID NO: 68817 - DNA, 81 bp, Homo sapiens
actggcatgcccttccctgttgtctccaggtgctgacattggccagcaatgagaggattcctctgaaccccaccatgaagc

SEQ ID NO: 68818 - DNA, 81 bp, Homo sapiens
ttccctgttgtctccaggtgctgacattggccagcaatgagaggattcctctgaaccccaccatgaagctcctctttgaga

SEQ ID NO: 68819 - DNA, 83 bp, Homo sapiens
ttgtctccaggtgctgacattggccagcaatgagaggattcctctgaaccccaccatgaagctcctctttgagatcagccacc

SEQ ID NO: 68820 - DNA, 86 bp, Homo sapiens
tgacattggccagcaatgagaggattcctctgaaccccaccatgaagctcctctttgagatcagccacctgcgcacagccactcca

SEQ ID NO: 68821 - DNA, 85 bp, Homo sapiens
cagcaatgagaggattcctctgaaccccaccatgaagctcctctttgagatcagccacctgcgcacagccactccagcaactgtc

SEQ ID NO: 68822 - DNA, 84 bp, Homo sapiens
atgagaggattcctctgaaccccaccatgaagctcctctttgagatcagccacctgcgcacagccactccagcaactgtctcta

SEQ ID NO: 68823 - DNA, 84 bp, Homo sapiens
tcctctgaaccccaccatgaagctcctctttgagatcagccacctgcgcacagccactccagcaactgtctctagagcaggtac

SEQ ID NO: 68824 - DNA, 82 bp, Homo sapiens
accatgaagctcctctttgagatcagccacctgcgcacagccactccagcaactgtctctagagcaggtacggcccaagaag

SEQ ID NO: 68825 - DNA, 80 bp, Homo sapiens
ctcctctttgagatcagccacctgcgcacagccactccagcaactgtctctagagcaggtacggcccaagaagggaagaa

SEQ ID NO: 68826 - DNA, 79 bp, Homo sapiens
atcagccacctgcgcacagccactccagcaactgtctctagagcaggtacggcccaagaagggaagaaccacaaagcta

SEQ ID NO: 68827 - DNA, 80 bp, Homo sapiens
ataatgatgtatatggaatattcactaaactgtattctctgtgctcacagggatcttgtacatcaacccggcagacttgg

SEQ ID NO: 68828 - DNA, 79 bp, Homo sapiens
tatatggaatattcactaaactgtattctctgtgctcacagggatcttgtacatcaacccggcagacttgggatggaac

SEQ ID NO: 68829 - DNA, 76 bp, Homo sapiens
attcactaaactgtattctctgtgctcacagggatcttgtacatcaacccggcagacttgggatggaaccctccag

SEQ ID NO: 68830 - DNA, 82 bp, Homo sapiens
tattctctgtgctcacagggatcttgtacatcaacccggcagacttgggatggaaccctccagtgagcagctggattgagaa

SEQ ID NO: 68831 - DNA, 78 bp, Homo sapiens
tcacagggatcttgtacatcaacccggcagacttgggatggaaccctccagtgagcagctggattgagaagagggaaa

SEQ ID NO: 68832 - DNA, 78 bp, Homo sapiens
atcttgtacatcaacccggcagacttgggatggaaccctccagtgagcagctggattgagaagagggaaatccagaca

SEQ ID NO: 68833 - DNA, 79 bp, Homo sapiens
acatcaacccggcagacttgggatggaaccctccagtgagcagctggattgagaagagggaaatccagacagagagagc

SEQ ID NO: 68834 - DNA, 76 bp, Homo sapiens
acttgggatggaaccctccagtgagcagctggattgagaagagggaaatccagacagagagagccaacttaaccat

SEQ ID NO: 68835 - DNA, 76 bp, Homo sapiens
atggaaccctccagtgagcagctggattgagaagagggaaatccagacagagagagccaacttaaccattttgttc

SEQ ID NO: 68836 - DNA, 77 bp, Homo sapiens
agtgagcagctggattgagaagagggaaatccagacagagagagccaacttaaccattttgttcgacaagtatcttc

SEQ ID NO: 68837 - DNA, 74 bp, Homo sapiens
agctggattgagaagagggaaatccagacagagagagccaacttaaccattttgttcgacaagtatcttccaac

SEQ ID NO: 68838 - DNA, 73 bp, Homo sapiens
aagagggaaatccagacagagagagccaacttaaccattttgttcgacaagtatcttccaacctgcctagaca

SEQ ID NO: 68839 - DNA, 75 bp, Homo sapiens
aaatccagacagagagagccaacttaaccattttgttcgacaagtatcttccaacctgcctagacacactcagaa

SEQ ID NO: 68840 - DNA, 73 bp, Homo sapiens
agagagagccaacttaaccattttgttcgacaagtatcttccaacctgcctagacacactcagaaccaggtag

SEQ ID NO: 68841 - DNA, 72 bp, Homo sapiens
ttaaccattttgttcgacaagtatcttccaacctgcctagacacactcagaaccaggtaggccaagaaacaa

SEQ ID NO: 68842 - DNA, 73 bp, Homo sapiens
ttttgttcgacaagtatcttccaacctgcctagacacactcagaaccaggtaggccaagaaacaaggaagata

SEQ ID NO: 68843 - DNA, 72 bp, Homo sapiens
aagtatcttccaacctgcctagacacactcagaaccaggtaggccaagaaacaaggaagatagagagttaaa

SEQ ID NO: 68844 - DNA, 75 bp, Homo sapiens
agaatggaatatcctctgtgtttcagatcccctcgggtctctctttgcaggtttaagaagatcattcccatccca

SEQ ID NO: 68845 - DNA, 80 bp, Homo sapiens
tctgtgtttcagatcccctcgggtctctctttgcaggtttaagaagatcattcccatcccagagcagagcatggttcaga

SEQ ID NO: 68846 - DNA, 79 bp, Homo sapiens
tttcagatcccctcgggtctctctttgcaggtttaagaagatcattcccatcccagagcagagcatggttcagatggtg

SEQ ID NO: 68847 - DNA, 80 bp, Homo sapiens
gggtctctctttgcaggtttaagaagatcattcccatcccagagcagagcatggttcagatggtgtgtcaccttctggaa

SEQ ID NO: 68848 - DNA, 83 bp, Homo sapiens
tctttgcaggtttaagaagatcattcccatcccagagcagagcatggttcagatggtgtgtcaccttctggaatgtctcctga

SEQ ID NO: 68849 - DNA, 81 bp, Homo sapiens
tttaagaagatcattcccatcccagagcagagcatggttcagatggtgtgtcaccttctggaatgtctcctgaccacggag

SEQ ID NO: 68850 - DNA, 84 bp, Homo sapiens
atcattcccatcccagagcagagcatggttcagatggtgtgtcaccttctggaatgtctcctgaccacggaggacatccctgca

SEQ ID NO: 68851 - DNA, 82 bp, Homo sapiens
agagcagagcatggttcagatggtgtgtcaccttctggaatgtctcctgaccacggaggacatccctgcagactgccctaag

SEQ ID NO: 68852 - DNA, 77 bp, Homo sapiens
atggttcagatggtgtgtcaccttctggaatgtctcctgaccacggaggacatccctgcagactgccctaaggaaat

SEQ ID NO: 68853 - DNA, 79 bp, Homo sapiens
tggtgtgtcaccttctggaatgtctcctgaccacggaggacatccctgcagactgccctaaggaaatttatgagcatta

SEQ ID NO: 68854 - DNA, 77 bp, Homo sapiens
tgtcaccttctggaatgtctcctgaccacggaggacatccctgcagactgccctaaggaaatttatgagcattattt

SEQ ID NO: 68855 - DNA, 78 bp, Homo sapiens
aatgtctcctgaccacggaggacatccctgcagactgccctaaggaaatttatgagcattattttgtgtttgctgcca

SEQ ID NO: 68856 - DNA, 76 bp, Homo sapiens
accacggaggacatccctgcagactgccctaaggaaatttatgagcattattttgtgtttgctgccatctgggctt

SEQ ID NO: 68857 - DNA, 78 bp, Homo sapiens
acatccctgcagactgccctaaggaaatttatgagcattattttgtgtttgctgccatctgggctttcggcggagcaa

SEQ ID NO: 68858 - DNA, 76 bp, Homo sapiens
agactgccctaaggaaatttatgagcattattttgtgtttgctgccatctgggctttcggcggagcaatggtccaa

SEQ ID NO: 68859 - DNA, 77 bp, Homo sapiens
taaggaaatttatgagcattattttgtgtttgctgccatctgggctttcggcggagcaatggtccaagatcaggtaa

SEQ ID NO: 68860 - DNA, 81 bp, Homo sapiens
ttatgagcattattttgtgtttgctgccatctgggctttcggcggagcaatggtccaagatcaggtaaggagatatgttga

SEQ ID NO: 68861 - DNA, 79 bp, Homo sapiens
attttgtgtttgctgccatctgggctttcggcggagcaatggtccaagatcaggtaaggagatatgttgagctcaacaa

SEQ ID NO: 68862 - DNA, 81 bp, Homo sapiens
tttgctgccatctgggctttcggcggagcaatggtccaagatcaggtaaggagatatgttgagctcaacaaccacactgaa

SEQ ID NO: 68863 - DNA, 74 bp, Homo sapiens
ttcttgagttctggaggaccttgtcccctgactgtctttgtttttgcagcttgtggactaccgggcagagttca

SEQ ID NO: 68864 - DNA, 74 bp, Homo sapiens
ttctggaggaccttgtcccctgactgtctttgtttttgcagcttgtggactaccgggcagagttcagcaaatgg

SEQ ID NO: 68865 - DNA, 77 bp, Homo sapiens
tcccctgactgtctttgtttttgcagcttgtggactaccgggcagagttcagcaaatggtggctgactgagttcaaa

SEQ ID NO: 68866 - DNA, 76 bp, Homo sapiens
gtctttgtttttgcagcttgtggactaccgggcagagttcagcaaatggtggctgactgagttcaaaacagtcaag

SEQ ID NO: 68867 - DNA, 75 bp, Homo sapiens
tttttgcagcttgtggactaccgggcagagttcagcaaatggtggctgactgagttcaaaacagtcaagtttcct

SEQ ID NO: 68868 - DNA, 73 bp, Homo sapiens
cttgtggactaccgggcagagttcagcaaatggtggctgactgagttcaaaacagtcaagtttccttcccaag

SEQ ID NO: 68869 - DNA, 75 bp, Homo sapiens
ggcagagttcagcaaatggtggctgactgagttcaaaacagtcaagtttccttcccaaggaaccatctttgacta

SEQ ID NO: 68870 - DNA, 73 bp, Homo sapiens
agttcagcaaatggtggctgactgagttcaaaacagtcaagtttccttcccaaggaaccatctttgactatta

SEQ ID NO: 68871 - DNA, 73 bp, Homo sapiens
atggtggctgactgagttcaaaacagtcaagtttccttcccaaggaaccatctttgactattacatcgaccca

SEQ ID NO: 68872 - DNA, 70 bp, Homo sapiens
agttcaaaacagtcaagtttccttcccaaggaaccatctttgactattacatcgacccagagaccaagaa

SEQ ID NO: 68873 - DNA, 70 bp, Homo sapiens
aaacagtcaagtttccttcccaaggaaccatctttgactattacatcgacccagagaccaagaaattcga

SEQ ID NO: 68874 - DNA, 71 bp, Homo sapiens
tttccttcccaaggaaccatctttgactattacatcgacccagagaccaagaaattcgagccttggtccaa

SEQ ID NO: 68875 - DNA, 71 bp, Homo sapiens
aaggaaccatctttgactattacatcgacccagagaccaagaaattcgagccttggtccaagctcgtcccc

SEQ ID NO: 68876 - DNA, 71 bp, Homo sapiens
tttgactattacatcgacccagagaccaagaaattcgagccttggtccaagctcgtcccccagttcgaatt

SEQ ID NO: 68877 - DNA, 71 bp, Homo sapiens
agaccaagaaattcgagccttggtccaagctcgtcccccagttcgaatttgaccccgagatgcccttgcag

SEQ ID NO: 68878 - DNA, 74 bp, Homo sapiens
agaaattcgagccttggtccaagctcgtcccccagttcgaatttgaccccgagatgcccttgcaggtgagtgca

SEQ ID NO: 68879 - DNA, 78 bp, Homo sapiens
cttggtccaagctcgtcccccagttcgaatttgaccccgagatgcccttgcaggtgagtgcagctgagcagccgagga

SEQ ID NO: 68880 - DNA, 80 bp, Homo sapiens
aagctcgtcccccagttcgaatttgaccccgagatgcccttgcaggtgagtgcagctgagcagccgaggacgtgcgtgca

SEQ ID NO: 68881 - DNA, 77 bp, Homo sapiens
tttctccctagagcccacccttggcaggcttattgtgctcccattccaggcgtgtttggtgcacacgagtgagacca

SEQ ID NO: 68882 - DNA, 79 bp, Homo sapiens
agcccacccttggcaggcttattgtgctcccattccaggcgtgtttggtgcacacgagtgagaccatccgtgtgtgcta

SEQ ID NO: 68883 - DNA, 81 bp, Homo sapiens
ccttggcaggcttattgtgctcccattccaggcgtgtttggtgcacacgagtgagaccatccgtgtgtgctacttcatgga

SEQ ID NO: 68884 - DNA, 81 bp, Homo sapiens
cttattgtgctcccattccaggcgtgtttggtgcacacgagtgagaccatccgtgtgtgctacttcatggagcggttgatg

SEQ ID NO: 68885 - DNA, 82 bp, Homo sapiens
tcccattccaggcgtgtttggtgcacacgagtgagaccatccgtgtgtgctacttcatggagcggttgatggcgcggcagcg

SEQ ID NO: 68886 - DNA, 85 bp, Homo sapiens
tgtttggtgcacacgagtgagaccatccgtgtgtgctacttcatggagcggttgatggcgcggcagcggcctgtcatgctggtgg

SEQ ID NO: 68887 - DNA, 84 bp, Homo sapiens
acacgagtgagaccatccgtgtgtgctacttcatggagcggttgatggcgcggcagcggcctgtcatgctggtgggcacggctg

SEQ ID NO: 68888 - DNA, 87 bp, Homo sapiens
tgagaccatccgtgtgtgctacttcatggagcggttgatggcgcggcagcggcctgtcatgctggtgggcacggctggcactggcaa

SEQ ID NO: 68889 - DNA, 86 bp, Homo sapiens
tgtgctacttcatggagcggttgatggcgcggcagcggcctgtcatgctggtgggcacggctggcactggcaagtcggtgctggtg

SEQ ID NO: 68890 - DNA, 84 bp, Homo sapiens
tacttcatggagcggttgatggcgcggcagcggcctgtcatgctggtgggcacggctggcactggcaagtcggtgctggtggga

SEQ ID NO: 68891 - DNA, 83 bp, Homo sapiens
agcggttgatggcgcggcagcggcctgtcatgctggtgggcacggctggcactggcaagtcggtgctggtgggagctaagctg

SEQ ID NO: 68892 - DNA, 82 bp, Homo sapiens
cggcagcggcctgtcatgctggtgggcacggctggcactggcaagtcggtgctggtgggagctaagctggccagccttgacc

SEQ ID NO: 68893 - DNA, 82 bp, Homo sapiens
tgtcatgctggtgggcacggctggcactggcaagtcggtgctggtgggagctaagctggccagccttgaccccgaggcatac

SEQ ID NO: 68894 - DNA, 79 bp, Homo sapiens
gtgggcacggctggcactggcaagtcggtgctggtgggagctaagctggccagccttgaccccgaggcatacctggtga

SEQ ID NO: 68895 - DNA, 75 bp, Homo sapiens
ctggcactggcaagtcggtgctggtgggagctaagctggccagccttgaccccgaggcatacctggtgaaaaacg

SEQ ID NO: 68896 - DNA, 75 bp, Homo sapiens
caagtcggtgctggtgggagctaagctggccagccttgaccccgaggcatacctggtgaaaaacgtgccattcaa

SEQ ID NO: 68897 - DNA, 74 bp, Homo sapiens
ctggtgggagctaagctggccagccttgaccccgaggcatacctggtgaaaaacgtgccattcaactactacac

SEQ ID NO: 68898 - DNA, 75 bp, Homo sapiens
ctaagctggccagccttgaccccgaggcatacctggtgaaaaacgtgccattcaactactacaccacgtcagcaa

SEQ ID NO: 68899 - DNA, 77 bp, Homo sapiens
cagccttgaccccgaggcatacctggtgaaaaacgtgccattcaactactacaccacgtcagcaatgctgcagggta

SEQ ID NO: 68900 - DNA, 77 bp, Homo sapiens
cccgaggcatacctggtgaaaaacgtgccattcaactactacaccacgtcagcaatgctgcagggtaagcagcccag

SEQ ID NO: 68901 - DNA, 77 bp, Homo sapiens
atacctggtgaaaaacgtgccattcaactactacaccacgtcagcaatgctgcagggtaagcagcccagggcacctg

SEQ ID NO: 68902 - DNA, 76 bp, Homo sapiens
gtgaaaaacgtgccattcaactactacaccacgtcagcaatgctgcagggtaagcagcccagggcacctggggtgg

SEQ ID NO: 68903 - DNA, 76 bp, Homo sapiens
atctgagatttgagccgccttccctcaccgactggctctctccccagctgtcctggagaagcctctggaaaagaag

SEQ ID NO: 68904 - DNA, 76 bp, Homo sapiens
atttgagccgccttccctcaccgactggctctctccccagctgtcctggagaagcctctggaaaagaaggctggca

SEQ ID NO: 68905 - DNA, 75 bp, Homo sapiens
ccttccctcaccgactggctctctccccagctgtcctggagaagcctctggaaaagaaggctggcagaaactatg

SEQ ID NO: 68906 - DNA, 75 bp, Homo sapiens
actggctctctccccagctgtcctggagaagcctctggaaaagaaggctggcagaaactatggccctccagggaa

SEQ ID NO: 68907 - DNA, 74 bp, Homo sapiens
tctccccagctgtcctggagaagcctctggaaaagaaggctggcagaaactatggccctccagggaacaagaaa

SEQ ID NO: 68908 - DNA, 75 bp, Homo sapiens
tcctggagaagcctctggaaaagaaggctggcagaaactatggccctccagggaacaagaaactcatctatttca

SEQ ID NO: 68909 - DNA, 77 bp, Homo sapiens
cctctggaaaagaaggctggcagaaactatggccctccagggaacaagaaactcatctatttcattgatgacatgaa

SEQ ID NO: 68910 - DNA, 79 bp, Homo sapiens
aaaagaaggctggcagaaactatggccctccagggaacaagaaactcatctatttcattgatgacatgaacatgcctga

SEQ ID NO: 68911 - DNA, 80 bp, Homo sapiens
cagaaactatggccctccagggaacaagaaactcatctatttcattgatgacatgaacatgcctgaggtggatgcctacg

SEQ ID NO: 68912 - DNA, 79 bp, Homo sapiens
actatggccctccagggaacaagaaactcatctatttcattgatgacatgaacatgcctgaggtggatgcctacgggac

SEQ ID NO: 68913 - DNA, 80 bp, Homo sapiens
agggaacaagaaactcatctatttcattgatgacatgaacatgcctgaggtggatgcctacgggacggtgcagccccaca

SEQ ID NO: 68914 - DNA, 82 bp, Homo sapiens
aagaaactcatctatttcattgatgacatgaacatgcctgaggtggatgcctacgggacggtgcagccccacaccatcatcc

SEQ ID NO: 68915 - DNA, 86 bp, Homo sapiens
tatttcattgatgacatgaacatgcctgaggtggatgcctacgggacggtgcagccccacaccatcatccggcagcatctggacta

SEQ ID NO: 68916 - DNA, 85 bp, Homo sapiens
atgacatgaacatgcctgaggtggatgcctacgggacggtgcagccccacaccatcatccggcagcatctggactatggccactg

SEQ ID NO: 68917 - DNA, 81 bp, Homo sapiens
aacatgcctgaggtggatgcctacgggacggtgcagccccacaccatcatccggcagcatctggactatggccactggtaa

SEQ ID NO: 68918 - DNA, 83 bp, Homo sapiens
tggatgcctacgggacggtgcagccccacaccatcatccggcagcatctggactatggccactggtaagagcgcccatgtaga

SEQ ID NO: 68919 - DNA, 80 bp, Homo sapiens
ctacgggacggtgcagccccacaccatcatccggcagcatctggactatggccactggtaagagcgcccatgtagaggga

SEQ ID NO: 68920 - DNA, 79 bp, Homo sapiens
agccccacaccatcatccggcagcatctggactatggccactggtaagagcgcccatgtagagggactggcccaaggga

SEQ ID NO: 68921 - DNA, 78 bp, Homo sapiens
cctcagtcctcagacacctttcacctagagcttctgactgttccaggtatgatcggagcaagctgtccctaaaggaga

SEQ ID NO: 68922 - DNA, 80 bp, Homo sapiens
tcagacacctttcacctagagcttctgactgttccaggtatgatcggagcaagctgtccctaaaggagatcacaaatgta

SEQ ID NO: 68923 - DNA, 79 bp, Homo sapiens
tttcacctagagcttctgactgttccaggtatgatcggagcaagctgtccctaaaggagatcacaaatgtacagtatgt

SEQ ID NO: 68924 - DNA, 79 bp, Homo sapiens
cttctgactgttccaggtatgatcggagcaagctgtccctaaaggagatcacaaatgtacagtatgtttcctgtatgaa

SEQ ID NO: 68925 - DNA, 76 bp, Homo sapiens
actgttccaggtatgatcggagcaagctgtccctaaaggagatcacaaatgtacagtatgtttcctgtatgaaccc

SEQ ID NO: 68926 - DNA, 79 bp, Homo sapiens
tatgatcggagcaagctgtccctaaaggagatcacaaatgtacagtatgtttcctgtatgaaccccacggcaggcagct

SEQ ID NO: 68927 - DNA, 77 bp, Homo sapiens
aagctgtccctaaaggagatcacaaatgtacagtatgtttcctgtatgaaccccacggcaggcagcttcaccatcaa

SEQ ID NO: 68928 - DNA, 75 bp, Homo sapiens
tccctaaaggagatcacaaatgtacagtatgtttcctgtatgaaccccacggcaggcagcttcaccatcaacccc

SEQ ID NO: 68929 - DNA, 74 bp, Homo sapiens
acaaatgtacagtatgtttcctgtatgaaccccacggcaggcagcttcaccatcaacccccggcttcaggtaca

SEQ ID NO: 68930 - DNA, 75 bp, Homo sapiens
tgtacagtatgtttcctgtatgaaccccacggcaggcagcttcaccatcaacccccggcttcaggtacaggagga

SEQ ID NO: 68931 - DNA, 74 bp, Homo sapiens
gtttcctgtatgaaccccacggcaggcagcttcaccatcaacccccggcttcaggtacaggaggagccatggga

SEQ ID NO: 68932 - DNA, 73 bp, Homo sapiens
cccacggcaggcagcttcaccatcaacccccggcttcaggtacaggaggagccatgggacctgggtcctaatc

SEQ ID NO: 68933 - DNA, 77 bp, Homo sapiens
ttctactccgtggtaacggatgttgagctcatgcctttgtttcctgtacagcgtcacttcagcgtgtttgtcctctc

SEQ ID NO: 68934 - DNA, 75 bp, Homo sapiens
tggtaacggatgttgagctcatgcctttgtttcctgtacagcgtcacttcagcgtgtttgtcctctccttcccgg

SEQ ID NO: 68935 - DNA, 77 bp, Homo sapiens
tgttgagctcatgcctttgtttcctgtacagcgtcacttcagcgtgtttgtcctctccttcccgggggcagatgccc

SEQ ID NO: 68936 - DNA, 75 bp, Homo sapiens
tttgtttcctgtacagcgtcacttcagcgtgtttgtcctctccttcccgggggcagatgccctgtcctctatcta

SEQ ID NO: 68937 - DNA, 80 bp, Homo sapiens
ttcctgtacagcgtcacttcagcgtgtttgtcctctccttcccgggggcagatgccctgtcctctatctacagcatcatc

SEQ ID NO: 68938 - DNA, 82 bp, Homo sapiens
acttcagcgtgtttgtcctctccttcccgggggcagatgccctgtcctctatctacagcatcatcctcactcagcatctgaa

SEQ ID NO: 68939 - DNA, 82 bp, Homo sapiens
tgtttgtcctctccttcccgggggcagatgccctgtcctctatctacagcatcatcctcactcagcatctgaagctcggaaa

SEQ ID NO: 68940 - DNA, 81 bp, Homo sapiens
tcctctccttcccgggggcagatgccctgtcctctatctacagcatcatcctcactcagcatctgaagctcggaaacttcc

SEQ ID NO: 68941 - DNA, 83 bp, Homo sapiens
gggcagatgccctgtcctctatctacagcatcatcctcactcagcatctgaagctcggaaacttcccggcgtccctgcagaaa

SEQ ID NO: 68942 - DNA, 83 bp, Homo sapiens
atgccctgtcctctatctacagcatcatcctcactcagcatctgaagctcggaaacttcccggcgtccctgcagaaatccatc

SEQ ID NO: 68943 - DNA, 82 bp, Homo sapiens
tatctacagcatcatcctcactcagcatctgaagctcggaaacttcccggcgtccctgcagaaatccatccccccactgatc

SEQ ID NO: 68944 - DNA, 80 bp, Homo sapiens
atcatcctcactcagcatctgaagctcggaaacttcccggcgtccctgcagaaatccatccccccactgatcgatctggc

SEQ ID NO: 68945 - DNA, 77 bp, Homo sapiens
tcagcatctgaagctcggaaacttcccggcgtccctgcagaaatccatccccccactgatcgatctggccctcgcct

SEQ ID NO: 68946 - DNA, 74 bp, Homo sapiens
atctgaagctcggaaacttcccggcgtccctgcagaaatccatccccccactgatcgatctggccctcgccttc

SEQ ID NO: 68947 - DNA, 71 bp, Homo sapiens
aaacttcccggcgtccctgcagaaatccatccccccactgatcgatctggccctcgccttccaccagaaaa

SEQ ID NO: 68948 - DNA, 74 bp, Homo sapiens
cgtccctgcagaaatccatccccccactgatcgatctggccctcgccttccaccagaaaattgctaccaccttc

SEQ ID NO: 68949 - DNA, 72 bp, Homo sapiens
agaaatccatccccccactgatcgatctggccctcgccttccaccagaaaattgctaccaccttcctaccca

SEQ ID NO: 68950 - DNA, 72 bp, Homo sapiens
ccccactgatcgatctggccctcgccttccaccagaaaattgctaccaccttcctacccacaggaatcaaat

SEQ ID NO: 68951 - DNA, 73 bp, Homo sapiens
atcgatctggccctcgccttccaccagaaaattgctaccaccttcctacccacaggaatcaaattccactaca

SEQ ID NO: 68952 - DNA, 73 bp, Homo sapiens
ctcgccttccaccagaaaattgctaccaccttcctacccacaggaatcaaattccactacatcttcaacctca

SEQ ID NO: 68953 - DNA, 73 bp, Homo sapiens
ttccaccagaaaattgctaccaccttcctacccacaggaatcaaattccactacatcttcaacctcagagatt

SEQ ID NO: 68954 - DNA, 73 bp, Homo sapiens
aaattgctaccaccttcctacccacaggaatcaaattccactacatcttcaacctcagagattttgccaacat

SEQ ID NO: 68955 - DNA, 73 bp, Homo sapiens
accttcctacccacaggaatcaaattccactacatcttcaacctcagagattttgccaacattttccaggtga

SEQ ID NO: 68956 - DNA, 76 bp, Homo sapiens
acaggaatcaaattccactacatcttcaacctcagagattttgccaacattttccaggtgagttcatcggctccga

SEQ ID NO: 68957 - DNA, 76 bp, Homo sapiens
atcaaattccactacatcttcaacctcagagattttgccaacattttccaggtgagttcatcggctccgagacacc

SEQ ID NO: 68958 - DNA, 75 bp, Homo sapiens
tacatcttcaacctcagagattttgccaacattttccaggtgagttcatcggctccgagacaccctaggggctta

SEQ ID NO: 68959 - DNA, 71 bp, Homo sapiens
tctggatggttattaacgttatttttttgtgtctgttccccttgaagggcattctcttctcctcagtggaa

SEQ ID NO: 68960 - DNA, 71 bp, Homo sapiens
ttattaacgttatttttttgtgtctgttccccttgaagggcattctcttctcctcagtggaatgtgtgaaa

SEQ ID NO: 68961 - DNA, 75 bp, Homo sapiens
tttttttgtgtctgttccccttgaagggcattctcttctcctcagtggaatgtgtgaaatccacatgggatctta

SEQ ID NO: 68962 - DNA, 79 bp, Homo sapiens
tgtctgttccccttgaagggcattctcttctcctcagtggaatgtgtgaaatccacatgggatcttataaggctctatc

SEQ ID NO: 68963 - DNA, 84 bp, Homo sapiens
ttgaagggcattctcttctcctcagtggaatgtgtgaaatccacatgggatcttataaggctctatctgcatgaatcaaatcga

SEQ ID NO: 68964 - DNA, 82 bp, Homo sapiens
attctcttctcctcagtggaatgtgtgaaatccacatgggatcttataaggctctatctgcatgaatcaaatcgagtttatc

SEQ ID NO: 68965 - DNA, 82 bp, Homo sapiens
ctcagtggaatgtgtgaaatccacatgggatcttataaggctctatctgcatgaatcaaatcgagtttatcgggataagatg

SEQ ID NO: 68966 - DNA, 80 bp, Homo sapiens
aatgtgtgaaatccacatgggatcttataaggctctatctgcatgaatcaaatcgagtttatcgggataagatggtagaa

SEQ ID NO: 68967 - DNA, 77 bp, Homo sapiens
aaatccacatgggatcttataaggctctatctgcatgaatcaaatcgagtttatcgggataagatggtagaagaaaa

SEQ ID NO: 68968 - DNA, 76 bp, Homo sapiens
atcttataaggctctatctgcatgaatcaaatcgagtttatcgggataagatggtagaagaaaaggactttgatct

SEQ ID NO: 68969 - DNA, 76 bp, Homo sapiens
gctctatctgcatgaatcaaatcgagtttatcgggataagatggtagaagaaaaggactttgatctttttgataaa

SEQ ID NO: 68970 - DNA, 75 bp, Homo sapiens
tctgcatgaatcaaatcgagtttatcgggataagatggtagaagaaaaggactttgatctttttgataaaatcca

SEQ ID NO: 68971 - DNA, 72 bp, Homo sapiens
atcgagtttatcgggataagatggtagaagaaaaggactttgatctttttgataaaatccagacagaagtgc

SEQ ID NO: 68972 - DNA, 73 bp, Homo sapiens
tttatcgggataagatggtagaagaaaaggactttgatctttttgataaaatccagacagaagtgctcaagaa

SEQ ID NO: 68973 - DNA, 73 bp, Homo sapiens
tggtagaagaaaaggactttgatctttttgataaaatccagacagaagtgctcaagaaaacttttgatgtgag

SEQ ID NO: 68974 - DNA, 72 bp, Homo sapiens
aaaaggactttgatctttttgataaaatccagacagaagtgctcaagaaaacttttgatgtgagtattgccc

SEQ ID NO: 68975 - DNA, 74 bp, Homo sapiens
gatctttttgataaaatccagacagaagtgctcaagaaaacttttgatgtgagtattgccctatggattttctt

SEQ ID NO: 68976 - DNA, 74 bp, Homo sapiens
tttgataaaatccagacagaagtgctcaagaaaacttttgatgtgagtattgccctatggattttctttgtatt

SEQ ID NO: 68977 - DNA, 77 bp, Homo sapiens
ccagaagtcaataatgagggcccttattcctgtgtctcatcaccaggatattgaagaccctgtggagcagacccaaa

SEQ ID NO: 68978 - DNA, 75 bp, Homo sapiens
aataatgagggcccttattcctgtgtctcatcaccaggatattgaagaccctgtggagcagacccaaagcccgaa

SEQ ID NO: 68979 - DNA, 76 bp, Homo sapiens
cccttattcctgtgtctcatcaccaggatattgaagaccctgtggagcagacccaaagcccgaacctgtattgtca

SEQ ID NO: 68980 - DNA, 78 bp, Homo sapiens
tcctgtgtctcatcaccaggatattgaagaccctgtggagcagacccaaagcccgaacctgtattgtcactttgcaaa

SEQ ID NO: 68981 - DNA, 75 bp, Homo sapiens
atcaccaggatattgaagaccctgtggagcagacccaaagcccgaacctgtattgtcactttgcaaatggtattg

SEQ ID NO: 68982 - DNA, 73 bp, Homo sapiens
atattgaagaccctgtggagcagacccaaagcccgaacctgtattgtcactttgcaaatggtattggggagcc

SEQ ID NO: 68983 - DNA, 76 bp, Homo sapiens
tgtggagcagacccaaagcccgaacctgtattgtcactttgcaaatggtattggggagcccaaatacatgcctgta

SEQ ID NO: 68984 - DNA, 72 bp, Homo sapiens
acccaaagcccgaacctgtattgtcactttgcaaatggtattggggagcccaaatacatgcctgtacagtct

SEQ ID NO: 68985 - DNA, 72 bp, Homo sapiens
cgaacctgtattgtcactttgcaaatggtattggggagcccaaatacatgcctgtacagtcttgggaacttt

SEQ ID NO: 68986 - DNA, 75 bp, Homo sapiens
tgtattgtcactttgcaaatggtattggggagcccaaatacatgcctgtacagtcttgggaacttttgacccaga

SEQ ID NO: 68987 - DNA, 72 bp, Homo sapiens
actttgcaaatggtattggggagcccaaatacatgcctgtacagtcttgggaacttttgacccagactctgg

SEQ ID NO: 68988 - DNA, 73 bp, Homo sapiens
tggtattggggagcccaaatacatgcctgtacagtcttgggaacttttgacccagactctggtggaggccttg

SEQ ID NO: 68989 - DNA, 74 bp, Homo sapiens
ccaaatacatgcctgtacagtcttgggaacttttgacccagactctggtggaggccttggagaaccacaatgaa

SEQ ID NO: 68990 - DNA, 75 bp, Homo sapiens
acatgcctgtacagtcttgggaacttttgacccagactctggtggaggccttggagaaccacaatgaagtcaaca

SEQ ID NO: 68991 - DNA, 75 bp, Homo sapiens
tcttgggaacttttgacccagactctggtggaggccttggagaaccacaatgaagtcaacacagtgatggaccta

SEQ ID NO: 68992 - DNA, 76 bp, Homo sapiens
ttttgacccagactctggtggaggccttggagaaccacaatgaagtcaacacagtgatggacctagttctctttga

SEQ ID NO: 68993 - DNA, 78 bp, Homo sapiens
cccagactctggtggaggccttggagaaccacaatgaagtcaacacagtgatggacctagttctctttgaggatgcca

SEQ ID NO: 68994 - DNA, 80 bp, Homo sapiens
aggccttggagaaccacaatgaagtcaacacagtgatggacctagttctctttgaggatgccatgcgccatgtgtaagtg

SEQ ID NO: 68995 - DNA, 82 bp, Homo sapiens
gaaccacaatgaagtcaacacagtgatggacctagttctctttgaggatgccatgcgccatgtgtaagtgtgcttctcctct

SEQ ID NO: 68996 - DNA, 81 bp, Homo sapiens
acaatgaagtcaacacagtgatggacctagttctctttgaggatgccatgcgccatgtgtaagtgtgcttctcctcttcct

SEQ ID NO: 68997 - DNA, 79 bp, Homo sapiens
aacacagtgatggacctagttctctttgaggatgccatgcgccatgtgtaagtgtgcttctcctcttccttttcctcag

SEQ ID NO: 68998 - DNA, 83 bp, Homo sapiens
actgcagaaagtctgatcaaagcaacatgtgcctgcttccttctctttagctgccatatcaatcgcatcttggagtccccgcg

SEQ ID NO: 68999 - DNA, 80 bp, Homo sapiens
agtctgatcaaagcaacatgtgcctgcttccttctctttagctgccatatcaatcgcatcttggagtccccgcggggaaa

SEQ ID NO: 69000 - DNA, 80 bp, Homo sapiens
aacatgtgcctgcttccttctctttagctgccatatcaatcgcatcttggagtccccgcggggaaatgctctgctggttg

SEQ ID NO: 69001 - DNA, 78 bp, Homo sapiens
gcttccttctctttagctgccatatcaatcgcatcttggagtccccgcggggaaatgctctgctggttggtgtaggtg

SEQ ID NO: 69002 - DNA, 79 bp, Homo sapiens
tctttagctgccatatcaatcgcatcttggagtccccgcggggaaatgctctgctggttggtgtaggtgggagcggcaa

SEQ ID NO: 69003 - DNA, 80 bp, Homo sapiens
ctgccatatcaatcgcatcttggagtccccgcggggaaatgctctgctggttggtgtaggtgggagcggcaagcagagcc

SEQ ID NO: 69004 - DNA, 77 bp, Homo sapiens
aatcgcatcttggagtccccgcggggaaatgctctgctggttggtgtaggtgggagcggcaagcagagcctgacaag

SEQ ID NO: 69005 - DNA, 78 bp, Homo sapiens
agtccccgcggggaaatgctctgctggttggtgtaggtgggagcggcaagcagagcctgacaaggctggcagctttca

SEQ ID NO: 69006 - DNA, 85 bp, Homo sapiens
ggaaatgctctgctggttggtgtaggtgggagcggcaagcagagcctgacaaggctggcagctttcatcagctccatggatgtct

SEQ ID NO: 69007 - DNA, 88 bp, Homo sapiens
tctgctggttggtgtaggtgggagcggcaagcagagcctgacaaggctggcagctttcatcagctccatggatgtcttccagatcaca

SEQ ID NO: 69008 - DNA, 88 bp, Homo sapiens
tggtgtaggtgggagcggcaagcagagcctgacaaggctggcagctttcatcagctccatggatgtcttccagatcacactgcgcaaa

SEQ ID NO: 69009 - DNA, 89 bp, Homo sapiens
agcggcaagcagagcctgacaaggctggcagctttcatcagctccatggatgtcttccagatcacactgcgcaaaggctaccagatcca

SEQ ID NO: 69010 - DNA, 87 bp, Homo sapiens
agagcctgacaaggctggcagctttcatcagctccatggatgtcttccagatcacactgcgcaaaggctaccagatccaggacttca

SEQ ID NO: 69011 - DNA, 83 bp, Homo sapiens
aaggctggcagctttcatcagctccatggatgtcttccagatcacactgcgcaaaggctaccagatccaggacttcaaggtaa

SEQ ID NO: 69012 - DNA, 81 bp, Homo sapiens
agctttcatcagctccatggatgtcttccagatcacactgcgcaaaggctaccagatccaggacttcaaggtaaaaggtca

SEQ ID NO: 69013 - DNA, 84 bp, Homo sapiens
atcagctccatggatgtcttccagatcacactgcgcaaaggctaccagatccaggacttcaaggtaaaaggtcaggcagctgca

SEQ ID NO: 69014 - DNA, 80 bp, Homo sapiens
atggatgtcttccagatcacactgcgcaaaggctaccagatccaggacttcaaggtaaaaggtcaggcagctgcagggag

SEQ ID NO: 69015 - DNA, 80 bp, Homo sapiens
agatcacactgcgcaaaggctaccagatccaggacttcaaggtaaaaggtcaggcagctgcagggaggaggctcagcttc

SEQ ID NO: 69016 - DNA, 78 bp, Homo sapiens
tttcaaggaggccttcttttcagagatttctgatattgaccattcctacagatggacctggccagcctgtgtctgaaa

SEQ ID NO: 69017 - DNA, 81 bp, Homo sapiens
ttcttttcagagatttctgatattgaccattcctacagatggacctggccagcctgtgtctgaaagctggagtgaagaatc

SEQ ID NO: 69018 - DNA, 81 bp, Homo sapiens
atttctgatattgaccattcctacagatggacctggccagcctgtgtctgaaagctggagtgaagaatctcaacacagtgt

SEQ ID NO: 69019 - DNA, 83 bp, Homo sapiens
atattgaccattcctacagatggacctggccagcctgtgtctgaaagctggagtgaagaatctcaacacagtgtttctcatga

SEQ ID NO: 69020 - DNA, 84 bp, Homo sapiens
attcctacagatggacctggccagcctgtgtctgaaagctggagtgaagaatctcaacacagtgtttctcatgactgatgccca

SEQ ID NO: 69021 - DNA, 86 bp, Homo sapiens
atggacctggccagcctgtgtctgaaagctggagtgaagaatctcaacacagtgtttctcatgactgatgcccaagtggctgatga

SEQ ID NO: 69022 - DNA, 83 bp, Homo sapiens
cctgtgtctgaaagctggagtgaagaatctcaacacagtgtttctcatgactgatgcccaagtggctgatgagaggttccttg

SEQ ID NO: 69023 - DNA, 86 bp, Homo sapiens
aaagctggagtgaagaatctcaacacagtgtttctcatgactgatgcccaagtggctgatgagaggttccttgtgctcatcaatga

SEQ ID NO: 69024 - DNA, 85 bp, Homo sapiens
agtgaagaatctcaacacagtgtttctcatgactgatgcccaagtggctgatgagaggttccttgtgctcatcaatgatcttttg

SEQ ID NO: 69025 - DNA, 87 bp, Homo sapiens
atctcaacacagtgtttctcatgactgatgcccaagtggctgatgagaggttccttgtgctcatcaatgatcttttggcatctggta

SEQ ID NO: 69026 - DNA, 85 bp, Homo sapiens
tgtttctcatgactgatgcccaagtggctgatgagaggttccttgtgctcatcaatgatcttttggcatctggtaagagattcct

SEQ ID NO: 69027 - DNA, 85 bp, Homo sapiens
atgactgatgcccaagtggctgatgagaggttccttgtgctcatcaatgatcttttggcatctggtaagagattccttgcacttg

SEQ ID NO: 69028 - DNA, 84 bp, Homo sapiens
agtggctgatgagaggttccttgtgctcatcaatgatcttttggcatctggtaagagattccttgcacttggtgtcactgataa

SEQ ID NO: 69029 - DNA, 81 bp, Homo sapiens
atgagaggttccttgtgctcatcaatgatcttttggcatctggtaagagattccttgcacttggtgtcactgataaattcc

SEQ ID NO: 69030 - DNA, 80 bp, Homo sapiens
atttaacgagatgccaaggctgcctatctgtgctccattttttcccaggggagatcccagatctctactctgatgatgaa

SEQ ID NO: 69031 - DNA, 80 bp, Homo sapiens
agatgccaaggctgcctatctgtgctccattttttcccaggggagatcccagatctctactctgatgatgaagttgaaaa

SEQ ID NO: 69032 - DNA, 80 bp, Homo sapiens
cctatctgtgctccattttttcccaggggagatcccagatctctactctgatgatgaagttgaaaacatcataagcaatg

SEQ ID NO: 69033 - DNA, 80 bp, Homo sapiens
ctccattttttcccaggggagatcccagatctctactctgatgatgaagttgaaaacatcataagcaatgtgaggaatga

SEQ ID NO: 69034 - DNA, 80 bp, Homo sapiens
tttttcccaggggagatcccagatctctactctgatgatgaagttgaaaacatcataagcaatgtgaggaatgaagtcaa

SEQ ID NO: 69035 - DNA, 82 bp, Homo sapiens
agatcccagatctctactctgatgatgaagttgaaaacatcataagcaatgtgaggaatgaagtcaagagccagggtctggt

SEQ ID NO: 69036 - DNA, 83 bp, Homo sapiens
atctctactctgatgatgaagttgaaaacatcataagcaatgtgaggaatgaagtcaagagccagggtctggttgacaacaga

SEQ ID NO: 69037 - DNA, 80 bp, Homo sapiens
atgatgaagttgaaaacatcataagcaatgtgaggaatgaagtcaagagccagggtctggttgacaacagagagaactgt

SEQ ID NO: 69038 - DNA, 78 bp, Homo sapiens
ttgaaaacatcataagcaatgtgaggaatgaagtcaagagccagggtctggttgacaacagagagaactgttggaagt

SEQ ID NO: 69039 - DNA, 78 bp, Homo sapiens
atcataagcaatgtgaggaatgaagtcaagagccagggtctggttgacaacagagagaactgttggaagttctttata

SEQ ID NO: 69040 - DNA, 76 bp, Homo sapiens
aatgtgaggaatgaagtcaagagccagggtctggttgacaacagagagaactgttggaagttctttatagatcgga

SEQ ID NO: 69041 - DNA, 75 bp, Homo sapiens
aatgaagtcaagagccagggtctggttgacaacagagagaactgttggaagttctttatagatcggatccggcga

SEQ ID NO: 69042 - DNA, 74 bp, Homo sapiens
cagggtctggttgacaacagagagaactgttggaagttctttatagatcggatccggcgacagctgaaggtaaa

SEQ ID NO: 69043 - DNA, 77 bp, Homo sapiens
ttgacaacagagagaactgttggaagttctttatagatcggatccggcgacagctgaaggtaaagagcatttactga

SEQ ID NO: 69044 - DNA, 75 bp, Homo sapiens
aacagagagaactgttggaagttctttatagatcggatccggcgacagctgaaggtaaagagcatttactgacag

SEQ ID NO: 69045 - DNA, 76 bp, Homo sapiens
actgttggaagttctttatagatcggatccggcgacagctgaaggtaaagagcatttactgacaggggcaggcaga

SEQ ID NO: 69046 - DNA, 74 bp, Homo sapiens
agtatttctctgatgccttcctggttctccccacccttctgacttctcaggtgactctctgtttctcccctgtg

SEQ ID NO: 69047 - DNA, 73 bp, Homo sapiens
tgccttcctggttctccccacccttctgacttctcaggtgactctctgtttctcccctgtgggaaacaagcta

SEQ ID NO: 69048 - DNA, 72 bp, Homo sapiens
tggttctccccacccttctgacttctcaggtgactctctgtttctcccctgtgggaaacaagctaagagtcc

SEQ ID NO: 69049 - DNA, 73 bp, Homo sapiens
acccttctgacttctcaggtgactctctgtttctcccctgtgggaaacaagctaagagtccgcagcaggaagt

SEQ ID NO: 69050 - DNA, 77 bp, Homo sapiens
tctcaggtgactctctgtttctcccctgtgggaaacaagctaagagtccgcagcaggaagttcccagccattgtgaa

SEQ ID NO: 69051 - DNA, 77 bp, Homo sapiens
ggtgactctctgtttctcccctgtgggaaacaagctaagagtccgcagcaggaagttcccagccattgtgaactgca

SEQ ID NO: 69052 - DNA, 78 bp, Homo sapiens
tttctcccctgtgggaaacaagctaagagtccgcagcaggaagttcccagccattgtgaactgcacagccatccactg

SEQ ID NO: 69053 - DNA, 79 bp, Homo sapiens
tgggaaacaagctaagagtccgcagcaggaagttcccagccattgtgaactgcacagccatccactggttccacgagtg

SEQ ID NO: 69054 - DNA, 81 bp, Homo sapiens
aagctaagagtccgcagcaggaagttcccagccattgtgaactgcacagccatccactggttccacgagtggcctcagcaa

SEQ ID NO: 69055 - DNA, 85 bp, Homo sapiens
cagcaggaagttcccagccattgtgaactgcacagccatccactggttccacgagtggcctcagcaagcattggagtctgtcagc

SEQ ID NO: 69056 - DNA, 82 bp, Homo sapiens
aagttcccagccattgtgaactgcacagccatccactggttccacgagtggcctcagcaagcattggagtctgtcagcctcc

SEQ ID NO: 69057 - DNA, 86 bp, Homo sapiens
ttgtgaactgcacagccatccactggttccacgagtggcctcagcaagcattggagtctgtcagcctccgcttcttgcagaacaca

SEQ ID NO: 69058 - DNA, 84 bp, Homo sapiens
aactgcacagccatccactggttccacgagtggcctcagcaagcattggagtctgtcagcctccgcttcttgcagaacacagag

SEQ ID NO: 69059 - DNA, 82 bp, Homo sapiens
atccactggttccacgagtggcctcagcaagcattggagtctgtcagcctccgcttcttgcagaacacagagggcattgagg

SEQ ID NO: 69060 - DNA, 84 bp, Homo sapiens
ttccacgagtggcctcagcaagcattggagtctgtcagcctccgcttcttgcagaacacagagggcattgaggtgagagagaaa

SEQ ID NO: 69061 - DNA, 84 bp, Homo sapiens
tcagcaagcattggagtctgtcagcctccgcttcttgcagaacacagagggcattgaggtgagagagaaaaggagacactccta

SEQ ID NO: 69062 - DNA, 78 bp, Homo sapiens
attggagtctgtcagcctccgcttcttgcagaacacagagggcattgaggtgagagagaaaaggagacactcctaaaa

SEQ ID NO: 69063 - DNA, 78 bp, Homo sapiens
tctgtcagcctccgcttcttgcagaacacagagggcattgaggtgagagagaaaaggagacactcctaaaagtccttc

SEQ ID NO: 69064 - DNA, 74 bp, Homo sapiens
tcttcaacacaagataatcttttcatttcttgctctttggttttagcccacagtaaagcagtcgattagcaaat

SEQ ID NO: 69065 - DNA, 74 bp, Homo sapiens
aacacaagataatcttttcatttcttgctctttggttttagcccacagtaaagcagtcgattagcaaattcatg

SEQ ID NO: 69066 - DNA, 75 bp, Homo sapiens
tttcatttcttgctctttggttttagcccacagtaaagcagtcgattagcaaattcatggcctttgtccacacaa

SEQ ID NO: 69067 - DNA, 76 bp, Homo sapiens
tgctctttggttttagcccacagtaaagcagtcgattagcaaattcatggcctttgtccacacaagtgtcaaccaa

SEQ ID NO: 69068 - DNA, 74 bp, Homo sapiens
tttggttttagcccacagtaaagcagtcgattagcaaattcatggcctttgtccacacaagtgtcaaccaaaca

SEQ ID NO: 69069 - DNA, 79 bp, Homo sapiens
acagtaaagcagtcgattagcaaattcatggcctttgtccacacaagtgtcaaccaaacatcccagtcttatctgagca

SEQ ID NO: 69070 - DNA, 80 bp, Homo sapiens
aagcagtcgattagcaaattcatggcctttgtccacacaagtgtcaaccaaacatcccagtcttatctgagcaatgaaca

SEQ ID NO: 69071 - DNA, 79 bp, Homo sapiens
aaattcatggcctttgtccacacaagtgtcaaccaaacatcccagtcttatctgagcaatgaacagcgctacaactata

SEQ ID NO: 69072 - DNA, 79 bp, Homo sapiens
atggcctttgtccacacaagtgtcaaccaaacatcccagtcttatctgagcaatgaacagcgctacaactatacaactc

SEQ ID NO: 69073 - DNA, 76 bp, Homo sapiens
acacaagtgtcaaccaaacatcccagtcttatctgagcaatgaacagcgctacaactatacaactcccaagtcctt

SEQ ID NO: 69074 - DNA, 76 bp, Homo sapiens
aaccaaacatcccagtcttatctgagcaatgaacagcgctacaactatacaactcccaagtcctttctggagttca

SEQ ID NO: 69075 - DNA, 80 bp, Homo sapiens
acatcccagtcttatctgagcaatgaacagcgctacaactatacaactcccaagtcctttctggagttcatcagactcta

SEQ ID NO: 69076 - DNA, 80 bp, Homo sapiens
ttatctgagcaatgaacagcgctacaactatacaactcccaagtcctttctggagttcatcagactctaccagagcttgt

SEQ ID NO: 69077 - DNA, 80 bp, Homo sapiens
aatgaacagcgctacaactatacaactcccaagtcctttctggagttcatcagactctaccagagcttgttgcacaggca

SEQ ID NO: 69078 - DNA, 78 bp, Homo sapiens
ctacaactatacaactcccaagtcctttctggagttcatcagactctaccagagcttgttgcacaggcacagaaaaga

SEQ ID NO: 69079 - DNA, 82 bp, Homo sapiens
tatacaactcccaagtcctttctggagttcatcagactctaccagagcttgttgcacaggcacagaaaagagctcaagtgca

SEQ ID NO: 69080 - DNA, 83 bp, Homo sapiens
tcctttctggagttcatcagactctaccagagcttgttgcacaggcacagaaaagagctcaagtgcaagacagagcggttgga

SEQ ID NO: 69081 - DNA, 83 bp, Homo sapiens
tctggagttcatcagactctaccagagcttgttgcacaggcacagaaaagagctcaagtgcaagacagagcggttggagaacg

SEQ ID NO: 69082 - DNA, 83 bp, Homo sapiens
atcagactctaccagagcttgttgcacaggcacagaaaagagctcaagtgcaagacagagcggttggagaacgggctgctgaa

SEQ ID NO: 69083 - DNA, 85 bp, Homo sapiens
accagagcttgttgcacaggcacagaaaagagctcaagtgcaagacagagcggttggagaacgggctgctgaagctgcatagcac

SEQ ID NO: 69084 - DNA, 84 bp, Homo sapiens
acaggcacagaaaagagctcaagtgcaagacagagcggttggagaacgggctgctgaagctgcatagcacctctgcccaggtga

SEQ ID NO: 69085 - DNA, 84 bp, Homo sapiens
agaaaagagctcaagtgcaagacagagcggttggagaacgggctgctgaagctgcatagcacctctgcccaggtgagcaatgtc

SEQ ID NO: 69086 - DNA, 82 bp, Homo sapiens
aagtgcaagacagagcggttggagaacgggctgctgaagctgcatagcacctctgcccaggtgagcaatgtcccgctccttc

SEQ ID NO: 69087 - DNA, 80 bp, Homo sapiens
aagacagagcggttggagaacgggctgctgaagctgcatagcacctctgcccaggtgagcaatgtcccgctccttccacc

SEQ ID NO: 69088 - DNA, 81 bp, Homo sapiens
ttggagaacgggctgctgaagctgcatagcacctctgcccaggtgagcaatgtcccgctccttccacctgcaggggacttg

SEQ ID NO: 69089 - DNA, 81 bp, Homo sapiens
agtccctccagtcacaactcctgataagtcccgtgcttctccaatgcaggtggatgatctgaaagcaaagctggctgccca

SEQ ID NO: 69090 - DNA, 81 bp, Homo sapiens
agtcacaactcctgataagtcccgtgcttctccaatgcaggtggatgatctgaaagcaaagctggctgcccaggaagtaga

SEQ ID NO: 69091 - DNA, 81 bp, Homo sapiens
ataagtcccgtgcttctccaatgcaggtggatgatctgaaagcaaagctggctgcccaggaagtagagctgaagcagaaaa

SEQ ID NO: 69092 - DNA, 87 bp, Homo sapiens
tgcttctccaatgcaggtggatgatctgaaagcaaagctggctgcccaggaagtagagctgaagcagaaaaatgaagatgcagacaa

SEQ ID NO: 69093 - DNA, 84 bp, Homo sapiens
aatgcaggtggatgatctgaaagcaaagctggctgcccaggaagtagagctgaagcagaaaaatgaagatgcagacaaactgat

SEQ ID NO: 69094 - DNA, 83 bp, Homo sapiens
atgatctgaaagcaaagctggctgcccaggaagtagagctgaagcagaaaaatgaagatgcagacaaactgattcaggtcgtg

SEQ ID NO: 69095 - DNA, 79 bp, Homo sapiens
aaagcaaagctggctgcccaggaagtagagctgaagcagaaaaatgaagatgcagacaaactgattcaggtcgtgggtg

SEQ ID NO: 69096 - DNA, 81 bp, Homo sapiens
gctgcccaggaagtagagctgaagcagaaaaatgaagatgcagacaaactgattcaggtcgtgggtgtggagactgacaaa

SEQ ID NO: 69097 - DNA, 82 bp, Homo sapiens
aagtagagctgaagcagaaaaatgaagatgcagacaaactgattcaggtcgtgggtgtggagactgacaaagtgagcagaga

SEQ ID NO: 69098 - DNA, 83 bp, Homo sapiens
tgaagcagaaaaatgaagatgcagacaaactgattcaggtcgtgggtgtggagactgacaaagtgagcagagagaaagccatg

SEQ ID NO: 69099 - DNA, 83 bp, Homo sapiens
aaaatgaagatgcagacaaactgattcaggtcgtgggtgtggagactgacaaagtgagcagagagaaagccatggcagatgaa

SEQ ID NO: 69100 - DNA, 85 bp, Homo sapiens
atgcagacaaactgattcaggtcgtgggtgtggagactgacaaagtgagcagagagaaagccatggcagatgaagaggagcagaa

SEQ ID NO: 69101 - DNA, 81 bp, Homo sapiens
aaactgattcaggtcgtgggtgtggagactgacaaagtgagcagagagaaagccatggcagatgaagaggagcagaaggtg

SEQ ID NO: 69102 - DNA, 86 bp, Homo sapiens
gtcgtgggtgtggagactgacaaagtgagcagagagaaagccatggcagatgaagaggagcagaaggtggccgtcatcatgctaga

SEQ ID NO: 69103 - DNA, 85 bp, Homo sapiens
agactgacaaagtgagcagagagaaagccatggcagatgaagaggagcagaaggtggccgtcatcatgctagaggtgaaacagaa

SEQ ID NO: 69104 - DNA, 85 bp, Homo sapiens
acaaagtgagcagagagaaagccatggcagatgaagaggagcagaaggtggccgtcatcatgctagaggtgaaacagaagcagaa

SEQ ID NO: 69105 - DNA, 84 bp, Homo sapiens
agagaaagccatggcagatgaagaggagcagaaggtggccgtcatcatgctagaggtgaaacagaagcagaaggactgtgagga

SEQ ID NO: 69106 - DNA, 84 bp, Homo sapiens
atggcagatgaagaggagcagaaggtggccgtcatcatgctagaggtgaaacagaagcagaaggactgtgaggaggacctggca

SEQ ID NO: 69107 - DNA, 80 bp, Homo sapiens
atgaagaggagcagaaggtggccgtcatcatgctagaggtgaaacagaagcagaaggactgtgaggaggacctggcaaag

SEQ ID NO: 69108 - DNA, 82 bp, Homo sapiens
aaggtggccgtcatcatgctagaggtgaaacagaagcagaaggactgtgaggaggacctggcaaaggctgagccagcactca

SEQ ID NO: 69109 - DNA, 86 bp, Homo sapiens
ccgtcatcatgctagaggtgaaacagaagcagaaggactgtgaggaggacctggcaaaggctgagccagcactcacagcagcgcag

SEQ ID NO: 69110 - DNA, 87 bp, Homo sapiens
tagaggtgaaacagaagcagaaggactgtgaggaggacctggcaaaggctgagccagcactcacagcagcgcaggcagctctcaaca

SEQ ID NO: 69111 - DNA, 86 bp, Homo sapiens
cagaagcagaaggactgtgaggaggacctggcaaaggctgagccagcactcacagcagcgcaggcagctctcaacaccctgaacaa

SEQ ID NO: 69112 - DNA, 83 bp, Homo sapiens
agaaggactgtgaggaggacctggcaaaggctgagccagcactcacagcagcgcaggcagctctcaacaccctgaacaaggta

SEQ ID NO: 69113 - DNA, 82 bp, Homo sapiens
aggaggacctggcaaaggctgagccagcactcacagcagcgcaggcagctctcaacaccctgaacaaggtaggaggactgtc

SEQ ID NO: 69114 - DNA, 88 bp, Homo sapiens
gcaaaggctgagccagcactcacagcagcgcaggcagctctcaacaccctgaacaaggtaggaggactgtctgccatacctgctcatc

SEQ ID NO: 69115 - DNA, 87 bp, Homo sapiens
ctgagccagcactcacagcagcgcaggcagctctcaacaccctgaacaaggtaggaggactgtctgccatacctgctcatccctcag

SEQ ID NO: 69116 - DNA, 71 bp, Homo sapiens
acaaagaaagcccattcatgttcccctaaccacctccttctcttttcccagaccaacctgacagagctgaa

SEQ ID NO: 69117 - DNA, 73 bp, Homo sapiens
attcatgttcccctaaccacctccttctcttttcccagaccaacctgacagagctgaagtcatttggctctcc

SEQ ID NO: 69118 - DNA, 75 bp, Homo sapiens
ctaaccacctccttctcttttcccagaccaacctgacagagctgaagtcatttggctctccgcctctggccgtca

SEQ ID NO: 69119 - DNA, 78 bp, Homo sapiens
acctccttctcttttcccagaccaacctgacagagctgaagtcatttggctctccgcctctggccgtcagcaatgtca

SEQ ID NO: 69120 - DNA, 83 bp, Homo sapiens
tttcccagaccaacctgacagagctgaagtcatttggctctccgcctctggccgtcagcaatgtcagcgctgcggtgatggta

SEQ ID NO: 69121 - DNA, 85 bp, Homo sapiens
aacctgacagagctgaagtcatttggctctccgcctctggccgtcagcaatgtcagcgctgcggtgatggtactgatggctccca

SEQ ID NO: 69122 - DNA, 83 bp, Homo sapiens
agagctgaagtcatttggctctccgcctctggccgtcagcaatgtcagcgctgcggtgatggtactgatggctcccaggggta

SEQ ID NO: 69123 - DNA, 81 bp, Homo sapiens
agtcatttggctctccgcctctggccgtcagcaatgtcagcgctgcggtgatggtactgatggctcccaggggtagggtgc

SEQ ID NO: 69124 - DNA, 79 bp, Homo sapiens
ctctccgcctctggccgtcagcaatgtcagcgctgcggtgatggtactgatggctcccaggggtagggtgcccaaggac

SEQ ID NO: 69125 - DNA, 77 bp, Homo sapiens
ccgtcagcaatgtcagcgctgcggtgatggtactgatggctcccaggggtagggtgcccaaggaccggagctggaag

SEQ ID NO: 69126 - DNA, 77 bp, Homo sapiens
aatgtcagcgctgcggtgatggtactgatggctcccaggggtagggtgcccaaggaccggagctggaaggctgctaa

SEQ ID NO: 69127 - DNA, 74 bp, Homo sapiens
cggtgatggtactgatggctcccaggggtagggtgcccaaggaccggagctggaaggctgctaaggtcaccatg

SEQ ID NO: 69128 - DNA, 74 bp, Homo sapiens
tggtactgatggctcccaggggtagggtgcccaaggaccggagctggaaggctgctaaggtcaccatggccaaa

SEQ ID NO: 69129 - DNA, 73 bp, Homo sapiens
tcccaggggtagggtgcccaaggaccggagctggaaggctgctaaggtcaccatggccaaagtggatggcttc

SEQ ID NO: 69130 - DNA, 76 bp, Homo sapiens
tagggtgcccaaggaccggagctggaaggctgctaaggtcaccatggccaaagtggatggcttcctggactcgcta

SEQ ID NO: 69131 - DNA, 73 bp, Homo sapiens
aaggaccggagctggaaggctgctaaggtcaccatggccaaagtggatggcttcctggactcgctaataaact

SEQ ID NO: 69132 - DNA, 76 bp, Homo sapiens
tggaaggctgctaaggtcaccatggccaaagtggatggcttcctggactcgctaataaacttcaacaaagagaaca

SEQ ID NO: 69133 - DNA, 75 bp, Homo sapiens
ctaaggtcaccatggccaaagtggatggcttcctggactcgctaataaacttcaacaaagagaacattcacgaga

SEQ ID NO: 69134 - DNA, 76 bp, Homo sapiens
catggccaaagtggatggcttcctggactcgctaataaacttcaacaaagagaacattcacgagaactgcctcaaa

SEQ ID NO: 69135 - DNA, 76 bp, Homo sapiens
aaagtggatggcttcctggactcgctaataaacttcaacaaagagaacattcacgagaactgcctcaaagccatca

SEQ ID NO: 69136 - DNA, 78 bp, Homo sapiens
ttcctggactcgctaataaacttcaacaaagagaacattcacgagaactgcctcaaagccatcaggccgtatctgcaa

SEQ ID NO: 69137 - DNA, 76 bp, Homo sapiens
actcgctaataaacttcaacaaagagaacattcacgagaactgcctcaaagccatcaggccgtatctgcaagaccc

SEQ ID NO: 69138 - DNA, 76 bp, Homo sapiens
taaacttcaacaaagagaacattcacgagaactgcctcaaagccatcaggccgtatctgcaagaccccgagttcaa

SEQ ID NO: 69139 - DNA, 76 bp, Homo sapiens
aaagagaacattcacgagaactgcctcaaagccatcaggccgtatctgcaagaccccgagttcaatcctgagtttg

SEQ ID NO: 69140 - DNA, 77 bp, Homo sapiens
attcacgagaactgcctcaaagccatcaggccgtatctgcaagaccccgagttcaatcctgagtttgtggccaccaa

SEQ ID NO: 69141 - DNA, 79 bp, Homo sapiens
ctcaaagccatcaggccgtatctgcaagaccccgagttcaatcctgagtttgtggccaccaaatcctatgcggctgcag

SEQ ID NO: 69142 - DNA, 79 bp, Homo sapiens
agccatcaggccgtatctgcaagaccccgagttcaatcctgagtttgtggccaccaaatcctatgcggctgcaggcctc

SEQ ID NO: 69143 - DNA, 78 bp, Homo sapiens
ccgtatctgcaagaccccgagttcaatcctgagtttgtggccaccaaatcctatgcggctgcaggcctctgctcctgg

SEQ ID NO: 69144 - DNA, 81 bp, Homo sapiens
cccgagttcaatcctgagtttgtggccaccaaatcctatgcggctgcaggcctctgctcctgggtcatcaatattgtgaga

SEQ ID NO: 69145 - DNA, 83 bp, Homo sapiens
ttcaatcctgagtttgtggccaccaaatcctatgcggctgcaggcctctgctcctgggtcatcaatattgtgagattttatga

SEQ ID NO: 69146 - DNA, 83 bp, Homo sapiens
tttgtggccaccaaatcctatgcggctgcaggcctctgctcctgggtcatcaatattgtgagattttatgaggtgttctgtga

SEQ ID NO: 69147 - DNA, 82 bp, Homo sapiens
accaaatcctatgcggctgcaggcctctgctcctgggtcatcaatattgtgagattttatgaggtgttctgtgatgtggaac

SEQ ID NO: 69148 - DNA, 84 bp, Homo sapiens
tatgcggctgcaggcctctgctcctgggtcatcaatattgtgagattttatgaggtgttctgtgatgtggaacccaagcgccag

SEQ ID NO: 69149 - DNA, 81 bp, Homo sapiens
cctctgctcctgggtcatcaatattgtgagattttatgaggtgttctgtgatgtggaacccaagcgccaggcactgaacaa

SEQ ID NO: 69150 - DNA, 80 bp, Homo sapiens
tcctgggtcatcaatattgtgagattttatgaggtgttctgtgatgtggaacccaagcgccaggcactgaacaaagccac

SEQ ID NO: 69151 - DNA, 78 bp, Homo sapiens
atcaatattgtgagattttatgaggtgttctgtgatgtggaacccaagcgccaggcactgaacaaagccaccgcggac

SEQ ID NO: 69152 - DNA, 78 bp, Homo sapiens
agattttatgaggtgttctgtgatgtggaacccaagcgccaggcactgaacaaagccaccgcggacctcacagctgcc

SEQ ID NO: 69153 - DNA, 80 bp, Homo sapiens
atgtggaacccaagcgccaggcactgaacaaagccaccgcggacctcacagctgcccaggagaagctggctgccatcaaa

SEQ ID NO: 69154 - DNA, 79 bp, Homo sapiens
aacccaagcgccaggcactgaacaaagccaccgcggacctcacagctgcccaggagaagctggctgccatcaaagccaa

SEQ ID NO: 69155 - DNA, 83 bp, Homo sapiens
aggcactgaacaaagccaccgcggacctcacagctgcccaggagaagctggctgccatcaaagccaagatcgctgtgagtgac

SEQ ID NO: 69156 - DNA, 81 bp, Homo sapiens
aacaaagccaccgcggacctcacagctgcccaggagaagctggctgccatcaaagccaagatcgctgtgagtgaccccaga

SEQ ID NO: 69157 - DNA, 81 bp, Homo sapiens
accgcggacctcacagctgcccaggagaagctggctgccatcaaagccaagatcgctgtgagtgaccccagagcccctcac

SEQ ID NO: 69158 - DNA, 82 bp, Homo sapiens
acagctgcccaggagaagctggctgccatcaaagccaagatcgctgtgagtgaccccagagcccctcaccctgctagtccgc

SEQ ID NO: 69159 - DNA, 73 bp, Homo sapiens
tagttacatgggccgaaatgactgatggtccttgtattccttcctaaacagcaccttaatgaaaacctggcaa

SEQ ID NO: 69160 - DNA, 73 bp, Homo sapiens
aaatgactgatggtccttgtattccttcctaaacagcaccttaatgaaaacctggcaaagctcacagccaggt

SEQ ID NO: 69161 - DNA, 72 bp, Homo sapiens
atggtccttgtattccttcctaaacagcaccttaatgaaaacctggcaaagctcacagccaggtttgagaaa

SEQ ID NO: 69162 - DNA, 76 bp, Homo sapiens
tattccttcctaaacagcaccttaatgaaaacctggcaaagctcacagccaggtttgagaaagcaacagcagacaa

SEQ ID NO: 69163 - DNA, 76 bp, Homo sapiens
ttcctaaacagcaccttaatgaaaacctggcaaagctcacagccaggtttgagaaagcaacagcagacaaactcaa

SEQ ID NO: 69164 - DNA, 77 bp, Homo sapiens
accttaatgaaaacctggcaaagctcacagccaggtttgagaaagcaacagcagacaaactcaaatgtcagcaagaa

SEQ ID NO: 69165 - DNA, 78 bp, Homo sapiens
aaaacctggcaaagctcacagccaggtttgagaaagcaacagcagacaaactcaaatgtcagcaagaagccgaagtga

SEQ ID NO: 69166 - DNA, 80 bp, Homo sapiens
aaagctcacagccaggtttgagaaagcaacagcagacaaactcaaatgtcagcaagaagccgaagtgaccgcagtcacca

SEQ ID NO: 69167 - DNA, 79 bp, Homo sapiens
ggtttgagaaagcaacagcagacaaactcaaatgtcagcaagaagccgaagtgaccgcagtcaccatctcccttgccaa

SEQ ID NO: 69168 - DNA, 78 bp, Homo sapiens
aaagcaacagcagacaaactcaaatgtcagcaagaagccgaagtgaccgcagtcaccatctcccttgccaaccgcctg

SEQ ID NO: 69169 - DNA, 77 bp, Homo sapiens
agacaaactcaaatgtcagcaagaagccgaagtgaccgcagtcaccatctcccttgccaaccgcctggtgagtgtaa

SEQ ID NO: 69170 - DNA, 80 bp, Homo sapiens
actcaaatgtcagcaagaagccgaagtgaccgcagtcaccatctcccttgccaaccgcctggtgagtgtaagccacagca

SEQ ID NO: 69171 - DNA, 78 bp, Homo sapiens
aagaagccgaagtgaccgcagtcaccatctcccttgccaaccgcctggtgagtgtaagccacagcagcccgagctgta

SEQ ID NO: 69172 - DNA, 72 bp, Homo sapiens
acctactgtgtaacacgcctcctctcctctctggcttttgaaatggtaggttggaggactcgcttctgaaaa

SEQ ID NO: 69173 - DNA, 73 bp, Homo sapiens
tgtaacacgcctcctctcctctctggcttttgaaatggtaggttggaggactcgcttctgaaaacgtgaggtg

SEQ ID NO: 69174 - DNA, 77 bp, Homo sapiens
tctcctctctggcttttgaaatggtaggttggaggactcgcttctgaaaacgtgaggtgggcagatgccgtgcagaa

SEQ ID NO: 69175 - DNA, 75 bp, Homo sapiens
gcttttgaaatggtaggttggaggactcgcttctgaaaacgtgaggtgggcagatgccgtgcagaacttcaaaca

SEQ ID NO: 69176 - DNA, 75 bp, Homo sapiens
aaatggtaggttggaggactcgcttctgaaaacgtgaggtgggcagatgccgtgcagaacttcaaacagcaggaa

SEQ ID NO: 69177 - DNA, 76 bp, Homo sapiens
ttggaggactcgcttctgaaaacgtgaggtgggcagatgccgtgcagaacttcaaacagcaggaaaggacgttatg

SEQ ID NO: 69178 - DNA, 76 bp, Homo sapiens
ttctgaaaacgtgaggtgggcagatgccgtgcagaacttcaaacagcaggaaaggacgttatgtggagacatttta

SEQ ID NO: 69179 - DNA, 74 bp, Homo sapiens
aaacgtgaggtgggcagatgccgtgcagaacttcaaacagcaggaaaggacgttatgtggagacattttactta

SEQ ID NO: 69180 - DNA, 74 bp, Homo sapiens
cagatgccgtgcagaacttcaaacagcaggaaaggacgttatgtggagacattttacttataacggctttcatt

SEQ ID NO: 69181 - DNA, 72 bp, Homo sapiens
cgtgcagaacttcaaacagcaggaaaggacgttatgtggagacattttacttataacggctttcatttccta

SEQ ID NO: 69182 - DNA, 69 bp, Homo sapiens
aaaggacgttatgtggagacattttacttataacggctttcatttcctaccttggcttcttcacaaaga

SEQ ID NO: 69183 - DNA, 69 bp, Homo sapiens
acgttatgtggagacattttacttataacggctttcatttcctaccttggcttcttcacaaagaaatac

SEQ ID NO: 69184 - DNA, 69 bp, Homo sapiens
attttacttataacggctttcatttcctaccttggcttcttcacaaagaaataccggcagagcctcctg

SEQ ID NO: 69185 - DNA, 71 bp, Homo sapiens
acttataacggctttcatttcctaccttggcttcttcacaaagaaataccggcagagcctcctggacagaa

SEQ ID NO: 69186 - DNA, 72 bp, Homo sapiens
tttcatttcctaccttggcttcttcacaaagaaataccggcagagcctcctggacagaacttggaggcccta

SEQ ID NO: 69187 - DNA, 75 bp, Homo sapiens
cttggcttcttcacaaagaaataccggcagagcctcctggacagaacttggaggccctacctgagccagctgaaa

SEQ ID NO: 69188 - DNA, 75 bp, Homo sapiens
ttcacaaagaaataccggcagagcctcctggacagaacttggaggccctacctgagccagctgaaagtacgtatg

SEQ ID NO: 69189 - DNA, 74 bp, Homo sapiens
aaataccggcagagcctcctggacagaacttggaggccctacctgagccagctgaaagtacgtatggcctgaat

SEQ ID NO: 69190 - DNA, 74 bp, Homo sapiens
agcctcctggacagaacttggaggccctacctgagccagctgaaagtacgtatggcctgaatttctcccgacca

SEQ ID NO: 69191 - DNA, 75 bp, Homo sapiens
agaatgtctgcttctgttctgagcgtggggtggtgtttcttcttcaccagactcccattccagtcaccccagccc

SEQ ID NO: 69192 - DNA, 73 bp, Homo sapiens
cttctgttctgagcgtggggtggtgtttcttcttcaccagactcccattccagtcaccccagccctggatccc

SEQ ID NO: 69193 - DNA, 76 bp, Homo sapiens
gtggggtggtgtttcttcttcaccagactcccattccagtcaccccagccctggatcccctgaggatgctgatgga

SEQ ID NO: 69194 - DNA, 81 bp, Homo sapiens
gtgtttcttcttcaccagactcccattccagtcaccccagccctggatcccctgaggatgctgatggatgatgctgacgtg

SEQ ID NO: 69195 - DNA, 85 bp, Homo sapiens
ttcttcaccagactcccattccagtcaccccagccctggatcccctgaggatgctgatggatgatgctgacgtggctgcctggca

SEQ ID NO: 69196 - DNA, 82 bp, Homo sapiens
actcccattccagtcaccccagccctggatcccctgaggatgctgatggatgatgctgacgtggctgcctggcagaacgagg

SEQ ID NO: 69197 - DNA, 83 bp, Homo sapiens
tcaccccagccctggatcccctgaggatgctgatggatgatgctgacgtggctgcctggcagaacgagggcctcccagccgac

SEQ ID NO: 69198 - DNA, 84 bp, Homo sapiens
ctggatcccctgaggatgctgatggatgatgctgacgtggctgcctggcagaacgagggcctcccagccgaccgcatgtccgtg

SEQ ID NO: 69199 - DNA, 87 bp, Homo sapiens
tgaggatgctgatggatgatgctgacgtggctgcctggcagaacgagggcctcccagccgaccgcatgtccgtggagaatgccacca

SEQ ID NO: 69200 - DNA, 85 bp, Homo sapiens
atgctgatggatgatgctgacgtggctgcctggcagaacgagggcctcccagccgaccgcatgtccgtggagaatgccaccattc

SEQ ID NO: 69201 - DNA, 83 bp, Homo sapiens
atgatgctgacgtggctgcctggcagaacgagggcctcccagccgaccgcatgtccgtggagaatgccaccattctcatcaac

SEQ ID NO: 69202 - DNA, 83 bp, Homo sapiens
ctgcctggcagaacgagggcctcccagccgaccgcatgtccgtggagaatgccaccattctcatcaactgtgagcgctggcca

SEQ ID NO: 69203 - DNA, 81 bp, Homo sapiens
agaacgagggcctcccagccgaccgcatgtccgtggagaatgccaccattctcatcaactgtgagcgctggccactcatgg

SEQ ID NO: 69204 - DNA, 84 bp, Homo sapiens
ctcccagccgaccgcatgtccgtggagaatgccaccattctcatcaactgtgagcgctggccactcatggttgaccctcagcta

SEQ ID NO: 69205 - DNA, 85 bp, Homo sapiens
accgcatgtccgtggagaatgccaccattctcatcaactgtgagcgctggccactcatggttgaccctcagctacaaggcatcaa

SEQ ID NO: 69206 - DNA, 86 bp, Homo sapiens
tccgtggagaatgccaccattctcatcaactgtgagcgctggccactcatggttgaccctcagctacaaggcatcaaatggatcaa

SEQ ID NO: 69207 - DNA, 85 bp, Homo sapiens
atgccaccattctcatcaactgtgagcgctggccactcatggttgaccctcagctacaaggcatcaaatggatcaagaataaata

SEQ ID NO: 69208 - DNA, 84 bp, Homo sapiens
attctcatcaactgtgagcgctggccactcatggttgaccctcagctacaaggcatcaaatggatcaagaataaatatggtgaa

SEQ ID NO: 69209 - DNA, 82 bp, Homo sapiens
aactgtgagcgctggccactcatggttgaccctcagctacaaggcatcaaatggatcaagaataaatatggtgaagatctcc

SEQ ID NO: 69210 - DNA, 80 bp, Homo sapiens
ccactcatggttgaccctcagctacaaggcatcaaatggatcaagaataaatatggtgaagatctccgggtcacgcagat

SEQ ID NO: 69211 - DNA, 80 bp, Homo sapiens
ttgaccctcagctacaaggcatcaaatggatcaagaataaatatggtgaagatctccgggtcacgcagattggtcagaaa

SEQ ID NO: 69212 - DNA, 77 bp, Homo sapiens
agctacaaggcatcaaatggatcaagaataaatatggtgaagatctccgggtcacgcagattggtcagaaagggtaa

SEQ ID NO: 69213 - DNA, 77 bp, Homo sapiens
atcaaatggatcaagaataaatatggtgaagatctccgggtcacgcagattggtcagaaagggtaagtggttgagca

SEQ ID NO: 69214 - DNA, 75 bp, Homo sapiens
atcaagaataaatatggtgaagatctccgggtcacgcagattggtcagaaagggtaagtggttgagcacagaagt

SEQ ID NO: 69215 - DNA, 74 bp, Homo sapiens
aataaatatggtgaagatctccgggtcacgcagattggtcagaaagggtaagtggttgagcacagaagttccca

SEQ ID NO: 69216 - DNA, 78 bp, Homo sapiens
tagcttgccacagtctcatactcccggactcatacttgtttccctagctaccttcaaatcatagagcaggccctggaa

SEQ ID NO: 69217 - DNA, 77 bp, Homo sapiens
ccacagtctcatactcccggactcatacttgtttccctagctaccttcaaatcatagagcaggccctggaagctgga

SEQ ID NO: 69218 - DNA, 77 bp, Homo sapiens
atactcccggactcatacttgtttccctagctaccttcaaatcatagagcaggccctggaagctggagctgtggtgc

SEQ ID NO: 69219 - DNA, 79 bp, Homo sapiens
atacttgtttccctagctaccttcaaatcatagagcaggccctggaagctggagctgtggtgctgattgaaaatctaga

SEQ ID NO: 69220 - DNA, 80 bp, Homo sapiens
tttccctagctaccttcaaatcatagagcaggccctggaagctggagctgtggtgctgattgaaaatctagaggagtcca

SEQ ID NO: 69221 - DNA, 82 bp, Homo sapiens
taccttcaaatcatagagcaggccctggaagctggagctgtggtgctgattgaaaatctagaggagtccattgatcctgttc

SEQ ID NO: 69222 - DNA, 81 bp, Homo sapiens
aatcatagagcaggccctggaagctggagctgtggtgctgattgaaaatctagaggagtccattgatcctgttctgggacc

SEQ ID NO: 69223 - DNA, 79 bp, Homo sapiens
cctggaagctggagctgtggtgctgattgaaaatctagaggagtccattgatcctgttctgggacccctgcttgggaga

SEQ ID NO: 69224 - DNA, 80 bp, Homo sapiens
tggagctgtggtgctgattgaaaatctagaggagtccattgatcctgttctgggacccctgcttgggagagaagtcatta

SEQ ID NO: 69225 - DNA, 76 bp, Homo sapiens
tggtgctgattgaaaatctagaggagtccattgatcctgttctgggacccctgcttgggagagaagtcattaaaaa

SEQ ID NO: 69226 - DNA, 72 bp, Homo sapiens
attgaaaatctagaggagtccattgatcctgttctgggacccctgcttgggagagaagtcattaaaaaagga

SEQ ID NO: 69227 - DNA, 71 bp, Homo sapiens
aggagtccattgatcctgttctgggacccctgcttgggagagaagtcattaaaaaaggacggtaagactca

SEQ ID NO: 69228 - DNA, 73 bp, Homo sapiens
attgatcctgttctgggacccctgcttgggagagaagtcattaaaaaaggacggtaagactcagctgtgttgc

SEQ ID NO: 69229 - DNA, 72 bp, Homo sapiens
ttctgggacccctgcttgggagagaagtcattaaaaaaggacggtaagactcagctgtgttgctgacccttc

SEQ ID NO: 69230 - DNA, 73 bp, Homo sapiens
aattttgcaggaaggcaccttaccttcacatgagcctttatgttccagattcattaaaattggagacaaagaa

SEQ ID NO: 69231 - DNA, 75 bp, Homo sapiens
aaggcaccttaccttcacatgagcctttatgttccagattcattaaaattggagacaaagaatgtgaatacaatc

SEQ ID NO: 69232 - DNA, 75 bp, Homo sapiens
ttaccttcacatgagcctttatgttccagattcattaaaattggagacaaagaatgtgaatacaatcccaagttc

SEQ ID NO: 69233 - DNA, 76 bp, Homo sapiens
acatgagcctttatgttccagattcattaaaattggagacaaagaatgtgaatacaatcccaagttccggctcatc

SEQ ID NO: 69234 - DNA, 76 bp, Homo sapiens
tatgttccagattcattaaaattggagacaaagaatgtgaatacaatcccaagttccggctcatcctccacaccaa

SEQ ID NO: 69235 - DNA, 75 bp, Homo sapiens
attcattaaaattggagacaaagaatgtgaatacaatcccaagttccggctcatcctccacaccaagctggctaa

SEQ ID NO: 69236 - DNA, 76 bp, Homo sapiens
aattggagacaaagaatgtgaatacaatcccaagttccggctcatcctccacaccaagctggctaatcctcactac

SEQ ID NO: 69237 - DNA, 80 bp, Homo sapiens
aaagaatgtgaatacaatcccaagttccggctcatcctccacaccaagctggctaatcctcactaccagcctgagctgca

SEQ ID NO: 69238 - DNA, 81 bp, Homo sapiens
aatacaatcccaagttccggctcatcctccacaccaagctggctaatcctcactaccagcctgagctgcaggctcaggcca

SEQ ID NO: 69239 - DNA, 81 bp, Homo sapiens
aagttccggctcatcctccacaccaagctggctaatcctcactaccagcctgagctgcaggctcaggccaccctgatcaac

SEQ ID NO: 69240 - DNA, 82 bp, Homo sapiens
atcctccacaccaagctggctaatcctcactaccagcctgagctgcaggctcaggccaccctgatcaacttcaccgtgacca

SEQ ID NO: 69241 - DNA, 81 bp, Homo sapiens
acaccaagctggctaatcctcactaccagcctgagctgcaggctcaggccaccctgatcaacttcaccgtgaccagggatg

SEQ ID NO: 69242 - DNA, 81 bp, Homo sapiens
taatcctcactaccagcctgagctgcaggctcaggccaccctgatcaacttcaccgtgaccagggatggcctggaggacca

SEQ ID NO: 69243 - DNA, 80 bp, Homo sapiens
actaccagcctgagctgcaggctcaggccaccctgatcaacttcaccgtgaccagggatggcctggaggaccagttgctg

SEQ ID NO: 69244 - DNA, 81 bp, Homo sapiens
agctgcaggctcaggccaccctgatcaacttcaccgtgaccagggatggcctggaggaccagttgctggccgctgtggtca

SEQ ID NO: 69245 - DNA, 79 bp, Homo sapiens
aggccaccctgatcaacttcaccgtgaccagggatggcctggaggaccagttgctggccgctgtggtcagcatggagag

SEQ ID NO: 69246 - DNA, 82 bp, Homo sapiens
tgatcaacttcaccgtgaccagggatggcctggaggaccagttgctggccgctgtggtcagcatggagaggccagacttgga

SEQ ID NO: 69247 - DNA, 83 bp, Homo sapiens
ttcaccgtgaccagggatggcctggaggaccagttgctggccgctgtggtcagcatggagaggccagacttggagcagctgaa

SEQ ID NO: 69248 - DNA, 83 bp, Homo sapiens
agggatggcctggaggaccagttgctggccgctgtggtcagcatggagaggccagacttggagcagctgaaggtgaggacaga

SEQ ID NO: 69249 - DNA, 82 bp, Homo sapiens
tggaggaccagttgctggccgctgtggtcagcatggagaggccagacttggagcagctgaaggtgaggacagaagggagaaa

SEQ ID NO: 69250 - DNA, 80 bp, Homo sapiens
accagttgctggccgctgtggtcagcatggagaggccagacttggagcagctgaaggtgaggacagaagggagaaaatgt

SEQ ID NO: 69251 - DNA, 74 bp, Homo sapiens
agcacagagaacagcaaatcctggtcttaaggcaggatcaagatatgtggttttaagaaacaagaaaggtcagg

SEQ ID NO: 69252 - DNA, 72 bp, Homo sapiens
agaacagcaaatcctggtcttaaggcaggatcaagatatgtggttttaagaaacaagaaaggtcagggtggc

SEQ ID NO: 69253 - DNA, 71 bp, Homo sapiens
aatcctggtcttaaggcaggatcaagatatgtggttttaagaaacaagaaaggtcagggtggctgtggttg

SEQ ID NO: 69254 - DNA, 71 bp, Homo sapiens
ttaaggcaggatcaagatatgtggttttaagaaacaagaaaggtcagggtggctgtggttggaacctccaa

SEQ ID NO: 69255 - DNA, 67 bp, Homo sapiens
aagatatgtggttttaagaaacaagaaaggtcagggtggctgtggttggaacctccaacaggaaggt

SEQ ID NO: 69256 - DNA, 67 bp, Homo sapiens
ttttaagaaacaagaaaggtcagggtggctgtggttggaacctccaacaggaaggttgttcttccca

SEQ ID NO: 69257 - DNA, 68 bp, Homo sapiens
acaagaaaggtcagggtggctgtggttggaacctccaacaggaaggttgttcttcccacgaatccaaa

SEQ ID NO: 69258 - DNA, 68 bp, Homo sapiens
agggtggctgtggttggaacctccaacaggaaggttgttcttcccacgaatccaaaggctgtacaagg

SEQ ID NO: 69259 - DNA, 70 bp, Homo sapiens
tggttggaacctccaacaggaaggttgttcttcccacgaatccaaaggctgtacaagggcaaagacacta

SEQ ID NO: 69260 - DNA, 71 bp, Homo sapiens
aacctccaacaggaaggttgttcttcccacgaatccaaaggctgtacaagggcaaagacactacagctgcc

SEQ ID NO: 69261 - DNA, 72 bp, Homo sapiens
aaggttgttcttcccacgaatccaaaggctgtacaagggcaaagacactacagctgcctgaagttagtgctt

SEQ ID NO: 69262 - DNA, 76 bp, Homo sapiens
tgttcttcccacgaatccaaaggctgtacaagggcaaagacactacagctgcctgaagttagtgctttaggatatg

SEQ ID NO: 69263 - DNA, 77 bp, Homo sapiens
acgaatccaaaggctgtacaagggcaaagacactacagctgcctgaagttagtgctttaggatatggagcataaaga

SEQ ID NO: 69264 - DNA, 80 bp, Homo sapiens
aggctgtacaagggcaaagacactacagctgcctgaagttagtgctttaggatatggagcataaagagaggaagagatga

SEQ ID NO: 69265 - DNA, 80 bp, Homo sapiens
aaagacactacagctgcctgaagttagtgctttaggatatggagcataaagagaggaagagatgagatccacttggatac

SEQ ID NO: 69266 - DNA, 81 bp, Homo sapiens
actacagctgcctgaagttagtgctttaggatatggagcataaagagaggaagagatgagatccacttggataccagcacc

SEQ ID NO: 69267 - DNA, 79 bp, Homo sapiens
cctgaagttagtgctttaggatatggagcataaagagaggaagagatgagatccacttggataccagcaccccactcca

SEQ ID NO: 69268 - DNA, 79 bp, Homo sapiens
tttaggatatggagcataaagagaggaagagatgagatccacttggataccagcaccccactccagcctcgaggaagct

SEQ ID NO: 69269 - DNA, 79 bp, Homo sapiens
atatggagcataaagagaggaagagatgagatccacttggataccagcaccccactccagcctcgaggaagcttttaca

SEQ ID NO: 69270 - DNA, 79 bp, Homo sapiens
aagagaggaagagatgagatccacttggataccagcaccccactccagcctcgaggaagcttttacacagtctgccatg

SEQ ID NO: 69271 - DNA, 77 bp, Homo sapiens
aagagatgagatccacttggataccagcaccccactccagcctcgaggaagcttttacacagtctgccatggtttta

SEQ ID NO: 69272 - DNA, 73 bp, Homo sapiens
acttggataccagcaccccactccagcctcgaggaagcttttacacagtctgccatggttttacacagtttaa

SEQ ID NO: 69273 - DNA, 72 bp, Homo sapiens
ataccagcaccccactccagcctcgaggaagcttttacacagtctgccatggttttacacagtttaaaactg

SEQ ID NO: 69274 - DNA, 74 bp, Homo sapiens
actccagcctcgaggaagcttttacacagtctgccatggttttacacagtttaaaactggaagacagattctgc

SEQ ID NO: 69275 - DNA, 73 bp, Homo sapiens
tcgaggaagcttttacacagtctgccatggttttacacagtttaaaactggaagacagattctgctgattttt

SEQ ID NO: 69276 - DNA, 71 bp, Homo sapiens
agcttttacacagtctgccatggttttacacagtttaaaactggaagacagattctgctgattttttttta

SEQ ID NO: 69277 - DNA, 71 bp, Homo sapiens
ctgccatggttttacacagtttaaaactggaagacagattctgctgatttttttttaagtaagccatagga

SEQ ID NO: 69278 - DNA, 71 bp, Homo sapiens
ttacacagtttaaaactggaagacagattctgctgatttttttttaagtaagccataggagagttgttcat

SEQ ID NO: 69279 - DNA, 69 bp, Homo sapiens
gtttaaaactggaagacagattctgctgatttttttttaagtaagccataggagagttgttcattaaag

SEQ ID NO: 69280 - DNA, 85 bp, Homo sapiens
atgccctgggcatctgcacctgactgtctcttgcttgatatttgcagtccgatctcacaaagcagcagaatggattcaaaattac

SEQ ID NO: 69281 - DNA, 82 bp, Homo sapiens
atctgcacctgactgtctcttgcttgatatttgcagtccgatctcacaaagcagcagaatggattcaaaattaccctgaaaa

SEQ ID NO: 69282 - DNA, 80 bp, Homo sapiens
tgactgtctcttgcttgatatttgcagtccgatctcacaaagcagcagaatggattcaaaattaccctgaaaacgttgga

SEQ ID NO: 69283 - DNA, 78 bp, Homo sapiens
tgcttgatatttgcagtccgatctcacaaagcagcagaatggattcaaaattaccctgaaaacgttggaagacagtct

SEQ ID NO: 69284 - DNA, 76 bp, Homo sapiens
atatttgcagtccgatctcacaaagcagcagaatggattcaaaattaccctgaaaacgttggaagacagtcttctc

SEQ ID NO: 69285 - DNA, 76 bp, Homo sapiens
atctcacaaagcagcagaatggattcaaaattaccctgaaaacgttggaagacagtcttctctctcgcctctcctc

SEQ ID NO: 69286 - DNA, 74 bp, Homo sapiens
acaaagcagcagaatggattcaaaattaccctgaaaacgttggaagacagtcttctctctcgcctctcctccgc

SEQ ID NO: 69287 - DNA, 71 bp, Homo sapiens
aatggattcaaaattaccctgaaaacgttggaagacagtcttctctctcgcctctcctccgcctctgggaa

SEQ ID NO: 69288 - DNA, 69 bp, Homo sapiens
aaaattaccctgaaaacgttggaagacagtcttctctctcgcctctcctccgcctctgggaacttcctg

SEQ ID NO: 69289 - DNA, 72 bp, Homo sapiens
aaaacgttggaagacagtcttctctctcgcctctcctccgcctctgggaacttcctgggagaaacagtgctg

SEQ ID NO: 69290 - DNA, 73 bp, Homo sapiens
agacagtcttctctctcgcctctcctccgcctctgggaacttcctgggagaaacagtgctggtggaaaaccta

SEQ ID NO: 69291 - DNA, 75 bp, Homo sapiens
tctctctcgcctctcctccgcctctgggaacttcctgggagaaacagtgctggtggaaaacctagagatcaccaa

SEQ ID NO: 69292 - DNA, 77 bp, Homo sapiens
ctctcctccgcctctgggaacttcctgggagaaacagtgctggtggaaaacctagagatcaccaagcagactgctgc

SEQ ID NO: 69293 - DNA, 77 bp, Homo sapiens
tctgggaacttcctgggagaaacagtgctggtggaaaacctagagatcaccaagcagactgctgccgaagttgagaa

SEQ ID NO: 69294 - DNA, 74 bp, Homo sapiens
aacttcctgggagaaacagtgctggtggaaaacctagagatcaccaagcagactgctgccgaagttgagaaaaa

SEQ ID NO: 69295 - DNA, 73 bp, Homo sapiens
agaaacagtgctggtggaaaacctagagatcaccaagcagactgctgccgaagttgagaaaaaggtaaaactc

SEQ ID NO: 69296 - DNA, 74 bp, Homo sapiens
tggtggaaaacctagagatcaccaagcagactgctgccgaagttgagaaaaaggtaaaactcctctggctagtc

SEQ ID NO: 69297 - DNA, 73 bp, Homo sapiens
aaacctagagatcaccaagcagactgctgccgaagttgagaaaaaggtaaaactcctctggctagtctgggaa

SEQ ID NO: 69298 - DNA, 68 bp, Homo sapiens
ttattttataatgtttggaaggccctcggtcccccctgtgaggactagaagacggggtgtgatgggaa

SEQ ID NO: 69299 - DNA, 67 bp, Homo sapiens
ttataatgtttggaaggccctcggtcccccctgtgaggactagaagacggggtgtgatgggaaaggg

SEQ ID NO: 69300 - DNA, 66 bp, Homo sapiens
tggaaggccctcggtcccccctgtgaggactagaagacggggtgtgatgggaaaggggcccaaccc

SEQ ID NO: 69301 - DNA, 71 bp, Homo sapiens
gtcccccctgtgaggactagaagacggggtgtgatgggaaaggggcccaacccctgctctgttccagcata

SEQ ID NO: 69302 - DNA, 72 bp, Homo sapiens
tgtgaggactagaagacggggtgtgatgggaaaggggcccaacccctgctctgttccagcataccaccaaac

SEQ ID NO: 69303 - DNA, 71 bp, Homo sapiens
tagaagacggggtgtgatgggaaaggggcccaacccctgctctgttccagcataccaccaaacctccaaca

SEQ ID NO: 69304 - DNA, 72 bp, Homo sapiens
tgatgggaaaggggcccaacccctgctctgttccagcataccaccaaacctccaacaaggccttttgcagtc

SEQ ID NO: 69305 - DNA, 74 bp, Homo sapiens
gggcccaacccctgctctgttccagcataccaccaaacctccaacaaggccttttgcagtctcagtctcgcgct

SEQ ID NO: 69306 - DNA, 80 bp, Homo sapiens
cctgctctgttccagcataccaccaaacctccaacaaggccttttgcagtctcagtctcgcgcttgcatcagaagggcat

SEQ ID NO: 69307 - DNA, 80 bp, Homo sapiens
ttccagcataccaccaaacctccaacaaggccttttgcagtctcagtctcgcgcttgcatcagaagggcattggagatat

SEQ ID NO: 69308 - DNA, 78 bp, Homo sapiens
ataccaccaaacctccaacaaggccttttgcagtctcagtctcgcgcttgcatcagaagggcattggagatattggcc

SEQ ID NO: 69309 - DNA, 81 bp, Homo sapiens
aacctccaacaaggccttttgcagtctcagtctcgcgcttgcatcagaagggcattggagatattggccctgagcaggaca

SEQ ID NO: 69310 - DNA, 87 bp, Homo sapiens
cttttgcagtctcagtctcgcgcttgcatcagaagggcattggagatattggccctgagcaggacagagcatatctgtaacagtgtc

SEQ ID NO: 69311 - DNA, 87 bp, Homo sapiens
tctcagtctcgcgcttgcatcagaagggcattggagatattggccctgagcaggacagagcatatctgtaacagtgtccaggaacaa

SEQ ID NO: 69312 - DNA, 83 bp, Homo sapiens
cgcttgcatcagaagggcattggagatattggccctgagcaggacagagcatatctgtaacagtgtccaggaacaatatacct

SEQ ID NO: 69313 - DNA, 81 bp, Homo sapiens
atcagaagggcattggagatattggccctgagcaggacagagcatatctgtaacagtgtccaggaacaatatacctttgac

SEQ ID NO: 69314 - DNA, 81 bp, Homo sapiens
tggagatattggccctgagcaggacagagcatatctgtaacagtgtccaggaacaatatacctttgacggaagatgcttat

SEQ ID NO: 69315 - DNA, 81 bp, Homo sapiens
atattggccctgagcaggacagagcatatctgtaacagtgtccaggaacaatatacctttgacggaagatgcttattgcca

SEQ ID NO: 69316 - DNA, 76 bp, Homo sapiens
atatctgtaacagtgtccaggaacaatatacctttgacggaagatgcttattgccagattattgggatttctccaa

SEQ ID NO: 69317 - DNA, 76 bp, Homo sapiens
taacagtgtccaggaacaatatacctttgacggaagatgcttattgccagattattgggatttctccaaatatgaa

SEQ ID NO: 69318 - DNA, 74 bp, Homo sapiens
gaacaatatacctttgacggaagatgcttattgccagattattgggatttctccaaatatgaaagacttcgttc

SEQ ID NO: 69319 - DNA, 74 bp, Homo sapiens
tatacctttgacggaagatgcttattgccagattattgggatttctccaaatatgaaagacttcgttctaggta

SEQ ID NO: 69320 - DNA, 74 bp, Homo sapiens
aagatgcttattgccagattattgggatttctccaaatatgaaagacttcgttctaggtagagacaaggtagga

SEQ ID NO: 69321 - DNA, 74 bp, Homo sapiens
ttattgccagattattgggatttctccaaatatgaaagacttcgttctaggtagagacaaggtaggaaatatga

SEQ ID NO: 69322 - DNA, 72 bp, Homo sapiens
agattattgggatttctccaaatatgaaagacttcgttctaggtagagacaaggtaggaaatatgaaaagca

SEQ ID NO: 69323 - DNA, 73 bp, Homo sapiens
tttctccaaatatgaaagacttcgttctaggtagagacaaggtaggaaatatgaaaagcaatgatgggtaaga

SEQ ID NO: 69324 - DNA, 71 bp, Homo sapiens
agcccaggttggttggaacagtgggctgctgtttatttttccaacaggtccaggaggccaaggtgactgaa

SEQ ID NO: 69325 - DNA, 73 bp, Homo sapiens
ttggttggaacagtgggctgctgtttatttttccaacaggtccaggaggccaaggtgactgaagtgaaaatca

SEQ ID NO: 69326 - DNA, 72 bp, Homo sapiens
aacagtgggctgctgtttatttttccaacaggtccaggaggccaaggtgactgaagtgaaaatcaacgaggc

SEQ ID NO: 69327 - DNA, 71 bp, Homo sapiens
tttatttttccaacaggtccaggaggccaaggtgactgaagtgaaaatcaacgaggcccgagagcactacc

SEQ ID NO: 69328 - DNA, 74 bp, Homo sapiens
ttttccaacaggtccaggaggccaaggtgactgaagtgaaaatcaacgaggcccgagagcactaccggccagca

SEQ ID NO: 69329 - DNA, 78 bp, Homo sapiens
aggaggccaaggtgactgaagtgaaaatcaacgaggcccgagagcactaccggccagcagctgccagggcctcactgc

SEQ ID NO: 69330 - DNA, 79 bp, Homo sapiens
aaggtgactgaagtgaaaatcaacgaggcccgagagcactaccggccagcagctgccagggcctcactgctctacttca

SEQ ID NO: 69331 - DNA, 80 bp, Homo sapiens
aagtgaaaatcaacgaggcccgagagcactaccggccagcagctgccagggcctcactgctctacttcatcatgaacgac

SEQ ID NO: 69332 - DNA, 83 bp, Homo sapiens
aatcaacgaggcccgagagcactaccggccagcagctgccagggcctcactgctctacttcatcatgaacgacctcagcaaga

SEQ ID NO: 69333 - DNA, 85 bp, Homo sapiens
agagcactaccggccagcagctgccagggcctcactgctctacttcatcatgaacgacctcagcaagatccatccaatgtaccag

SEQ ID NO: 69334 - DNA, 83 bp, Homo sapiens
taccggccagcagctgccagggcctcactgctctacttcatcatgaacgacctcagcaagatccatccaatgtaccagttttc

SEQ ID NO: 69335 - DNA, 82 bp, Homo sapiens
ctgccagggcctcactgctctacttcatcatgaacgacctcagcaagatccatccaatgtaccagttttctctcaaggtgac

SEQ ID NO: 69336 - DNA, 80 bp, Homo sapiens
cctcactgctctacttcatcatgaacgacctcagcaagatccatccaatgtaccagttttctctcaaggtgacttacacc

SEQ ID NO: 69337 - DNA, 78 bp, Homo sapiens
tctacttcatcatgaacgacctcagcaagatccatccaatgtaccagttttctctcaaggtgacttacacctggagtt

SEQ ID NO: 69338 - DNA, 77 bp, Homo sapiens
atcatgaacgacctcagcaagatccatccaatgtaccagttttctctcaaggtgacttacacctggagtttcttgcc

SEQ ID NO: 69339 - DNA, 73 bp, Homo sapiens
tatagtaagagggctgtgtaccttaccagtttcctgtcttctgtccccaggccttcagtatcgtcttccagaa

SEQ ID NO: 69340 - DNA, 73 bp, Homo sapiens
agggctgtgtaccttaccagtttcctgtcttctgtccccaggccttcagtatcgtcttccagaaggctgtgga

SEQ ID NO: 69341 - DNA, 74 bp, Homo sapiens
accttaccagtttcctgtcttctgtccccaggccttcagtatcgtcttccagaaggctgtggagagggctgctc

SEQ ID NO: 69342 - DNA, 78 bp, Homo sapiens
ttcctgtcttctgtccccaggccttcagtatcgtcttccagaaggctgtggagagggctgctcctgacgaaagcctca

SEQ ID NO: 69343 - DNA, 76 bp, Homo sapiens
tccccaggccttcagtatcgtcttccagaaggctgtggagagggctgctcctgacgaaagcctcagggagcgggtg

SEQ ID NO: 69344 - DNA, 77 bp, Homo sapiens
tcagtatcgtcttccagaaggctgtggagagggctgctcctgacgaaagcctcagggagcgggtggccaacctaata

SEQ ID NO: 69345 - DNA, 78 bp, Homo sapiens
tcttccagaaggctgtggagagggctgctcctgacgaaagcctcagggagcgggtggccaacctaatagacagcataa

SEQ ID NO: 69346 - DNA, 75 bp, Homo sapiens
aaggctgtggagagggctgctcctgacgaaagcctcagggagcgggtggccaacctaatagacagcataaccttc

SEQ ID NO: 69347 - DNA, 76 bp, Homo sapiens
gggctgctcctgacgaaagcctcagggagcgggtggccaacctaatagacagcataaccttctctgtgtaccagta

SEQ ID NO: 69348 - DNA, 76 bp, Homo sapiens
tcctgacgaaagcctcagggagcgggtggccaacctaatagacagcataaccttctctgtgtaccagtacaccatc

SEQ ID NO: 69349 - DNA, 74 bp, Homo sapiens
ctcagggagcgggtggccaacctaatagacagcataaccttctctgtgtaccagtacaccatccgcgggctctt

SEQ ID NO: 69350 - DNA, 76 bp, Homo sapiens
gggtggccaacctaatagacagcataaccttctctgtgtaccagtacaccatccgcgggctctttgagtgtgataa

SEQ ID NO: 69351 - DNA, 77 bp, Homo sapiens
aacctaatagacagcataaccttctctgtgtaccagtacaccatccgcgggctctttgagtgtgataagctgaccta

SEQ ID NO: 69352 - DNA, 79 bp, Homo sapiens
tagacagcataaccttctctgtgtaccagtacaccatccgcgggctctttgagtgtgataagctgacctaccttgccca

SEQ ID NO: 69353 - DNA, 76 bp, Homo sapiens
accttctctgtgtaccagtacaccatccgcgggctctttgagtgtgataagctgacctaccttgcccagctcacct

SEQ ID NO: 69354 - DNA, 75 bp, Homo sapiens
taccagtacaccatccgcgggctctttgagtgtgataagctgacctaccttgcccagctcacctttcaggtaaaa

SEQ ID NO: 69355 - DNA, 75 bp, Homo sapiens
atccgcgggctctttgagtgtgataagctgacctaccttgcccagctcacctttcaggtaaaagtggattgaaga

SEQ ID NO: 69356 - DNA, 74 bp, Homo sapiens
ctctttgagtgtgataagctgacctaccttgcccagctcacctttcaggtaaaagtggattgaagaagtttcca

SEQ ID NO: 69357 - DNA, 72 bp, Homo sapiens
agtgtgataagctgacctaccttgcccagctcacctttcaggtaaaagtggattgaagaagtttccagaaaa

SEQ ID NO: 69358 - DNA, 84 bp, Homo sapiens
tctggctacaagctaaagaaatgcagtatcatttctccacattgcagattctcctcatgaaccgagaagtcaatgcagtggagt

SEQ ID NO: 69359 - DNA, 81 bp, Homo sapiens
aagctaaagaaatgcagtatcatttctccacattgcagattctcctcatgaaccgagaagtcaatgcagtggagttggatt

SEQ ID NO: 69360 - DNA, 83 bp, Homo sapiens
aaatgcagtatcatttctccacattgcagattctcctcatgaaccgagaagtcaatgcagtggagttggatttcctgcttcga

SEQ ID NO: 69361 - DNA, 84 bp, Homo sapiens
atttctccacattgcagattctcctcatgaaccgagaagtcaatgcagtggagttggatttcctgcttcgatctccagtgcaga

SEQ ID NO: 69362 - DNA, 83 bp, Homo sapiens
acattgcagattctcctcatgaaccgagaagtcaatgcagtggagttggatttcctgcttcgatctccagtgcagacgggcac

SEQ ID NO: 69363 - DNA, 81 bp, Homo sapiens
attctcctcatgaaccgagaagtcaatgcagtggagttggatttcctgcttcgatctccagtgcagacgggcaccgccagc

SEQ ID NO: 69364 - DNA, 78 bp, Homo sapiens
atgaaccgagaagtcaatgcagtggagttggatttcctgcttcgatctccagtgcagacgggcaccgccagccccgtg

SEQ ID NO: 69365 - DNA, 77 bp, Homo sapiens
aagtcaatgcagtggagttggatttcctgcttcgatctccagtgcagacgggcaccgccagccccgtggagttcctc

SEQ ID NO: 69366 - DNA, 76 bp, Homo sapiens
agtggagttggatttcctgcttcgatctccagtgcagacgggcaccgccagccccgtggagttcctctcccatcag

SEQ ID NO: 69367 - DNA, 76 bp, Homo sapiens
atttcctgcttcgatctccagtgcagacgggcaccgccagccccgtggagttcctctcccatcaggcgtggggagc

SEQ ID NO: 69368 - DNA, 77 bp, Homo sapiens
tctccagtgcagacgggcaccgccagccccgtggagttcctctcccatcaggcgtggggagctgtcaaggtcagtat

SEQ ID NO: 69369 - DNA, 76 bp, Homo sapiens
agtgcagacgggcaccgccagccccgtggagttcctctcccatcaggcgtggggagctgtcaaggtcagtattgac

SEQ ID NO: 69370 - DNA, 72 bp, Homo sapiens
cgccagccccgtggagttcctctcccatcaggcgtggggagctgtcaaggtcagtattgacccctagaaaaa

SEQ ID NO: 69371 - DNA, 71 bp, Homo sapiens
cccgtggagttcctctcccatcaggcgtggggagctgtcaaggtcagtattgacccctagaaaaaagccaa

SEQ ID NO: 69372 - DNA, 76 bp, Homo sapiens
acagctttctggagaaactgcatttcagattctctgaaatttcccaggtactttcatcaatggaagaattctctaa

SEQ ID NO: 69373 - DNA, 78 bp, Homo sapiens
ttctggagaaactgcatttcagattctctgaaatttcccaggtactttcatcaatggaagaattctctaatctggatc

SEQ ID NO: 69374 - DNA, 75 bp, Homo sapiens
atttcagattctctgaaatttcccaggtactttcatcaatggaagaattctctaatctggatcgggacatagagg

SEQ ID NO: 69375 - DNA, 77 bp, Homo sapiens
ttctctgaaatttcccaggtactttcatcaatggaagaattctctaatctggatcgggacatagagggatctgctaa

SEQ ID NO: 69376 - DNA, 76 bp, Homo sapiens
aaatttcccaggtactttcatcaatggaagaattctctaatctggatcgggacatagagggatctgctaagagctg

SEQ ID NO: 69377 - DNA, 75 bp, Homo sapiens
ggtactttcatcaatggaagaattctctaatctggatcgggacatagagggatctgctaagagctggaaaaagtt

SEQ ID NO: 69378 - DNA, 75 bp, Homo sapiens
atggaagaattctctaatctggatcgggacatagagggatctgctaagagctggaaaaagtttgtggagtccgaa

SEQ ID NO: 69379 - DNA, 76 bp, Homo sapiens
aattctctaatctggatcgggacatagagggatctgctaagagctggaaaaagtttgtggagtccgaatgtcctga

SEQ ID NO: 69380 - DNA, 77 bp, Homo sapiens
tctggatcgggacatagagggatctgctaagagctggaaaaagtttgtggagtccgaatgtcctgagaaagagaagc

SEQ ID NO: 69381 - DNA, 76 bp, Homo sapiens
acatagagggatctgctaagagctggaaaaagtttgtggagtccgaatgtcctgagaaagagaagctcccacagga

SEQ ID NO: 69382 - DNA, 75 bp, Homo sapiens
atctgctaagagctggaaaaagtttgtggagtccgaatgtcctgagaaagagaagctcccacaggagtggaagaa

SEQ ID NO: 69383 - DNA, 74 bp, Homo sapiens
agctggaaaaagtttgtggagtccgaatgtcctgagaaagagaagctcccacaggagtggaagaacaagacagc

SEQ ID NO: 69384 - DNA, 76 bp, Homo sapiens
aagtttgtggagtccgaatgtcctgagaaagagaagctcccacaggagtggaagaacaagacagccctgcagcgcc

SEQ ID NO: 69385 - DNA, 84 bp, Homo sapiens
agtccgaatgtcctgagaaagagaagctcccacaggagtggaagaacaagacagccctgcagcgcctctgcatgctgagagcca

SEQ ID NO: 69386 - DNA, 82 bp, Homo sapiens
agaaagagaagctcccacaggagtggaagaacaagacagccctgcagcgcctctgcatgctgagagccatgcggcccgaccg

SEQ ID NO: 69387 - DNA, 83 bp, Homo sapiens
aagctcccacaggagtggaagaacaagacagccctgcagcgcctctgcatgctgagagccatgcggcccgaccggatgaccta

SEQ ID NO: 69388 - DNA, 84 bp, Homo sapiens
gagtggaagaacaagacagccctgcagcgcctctgcatgctgagagccatgcggcccgaccggatgacctatgctttgcggtag

SEQ ID NO: 69389 - DNA, 82 bp, Homo sapiens
aagaacaagacagccctgcagcgcctctgcatgctgagagccatgcggcccgaccggatgacctatgctttgcggtaggaaa

SEQ ID NO: 69390 - DNA, 81 bp, Homo sapiens
cctgcagcgcctctgcatgctgagagccatgcggcccgaccggatgacctatgctttgcggtaggaaacagggtggtggaa

SEQ ID NO: 69391 - DNA, 78 bp, Homo sapiens
cctctgcatgctgagagccatgcggcccgaccggatgacctatgctttgcggtaggaaacagggtggtggaaggccca

SEQ ID NO: 69392 - DNA, 77 bp, Homo sapiens
atgctgagagccatgcggcccgaccggatgacctatgctttgcggtaggaaacagggtggtggaaggcccagcatag

SEQ ID NO: 69393 - DNA, 78 bp, Homo sapiens
gtggctgctatatatgtataaatctatatgtgctttttttctggcagagattttgttgaagagaagttaggaagcaaa

SEQ ID NO: 69394 - DNA, 74 bp, Homo sapiens
atatgtataaatctatatgtgctttttttctggcagagattttgttgaagagaagttaggaagcaaatacgtgg

SEQ ID NO: 69395 - DNA, 74 bp, Homo sapiens
tataaatctatatgtgctttttttctggcagagattttgttgaagagaagttaggaagcaaatacgtggtggga

SEQ ID NO: 69396 - DNA, 72 bp, Homo sapiens
tgctttttttctggcagagattttgttgaagagaagttaggaagcaaatacgtggtgggaagagccctagat

SEQ ID NO: 69397 - DNA, 73 bp, Homo sapiens
ttttctggcagagattttgttgaagagaagttaggaagcaaatacgtggtgggaagagccctagattttgcaa

SEQ ID NO: 69398 - DNA, 71 bp, Homo sapiens
attttgttgaagagaagttaggaagcaaatacgtggtgggaagagccctagattttgcaacctcatttgaa

SEQ ID NO: 69399 - DNA, 71 bp, Homo sapiens
aagagaagttaggaagcaaatacgtggtgggaagagccctagattttgcaacctcatttgaagaatcggga

SEQ ID NO: 69400 - DNA, 73 bp, Homo sapiens
ttaggaagcaaatacgtggtgggaagagccctagattttgcaacctcatttgaagaatcgggaccagccactc

SEQ ID NO: 69401 - DNA, 71 bp, Homo sapiens
aatacgtggtgggaagagccctagattttgcaacctcatttgaagaatcgggaccagccactcctatgttt

SEQ ID NO: 69402 - DNA, 74 bp, Homo sapiens
aagagccctagattttgcaacctcatttgaagaatcgggaccagccactcctatgtttttcatcctgtctccag

SEQ ID NO: 69403 - DNA, 74 bp, Homo sapiens
tagattttgcaacctcatttgaagaatcgggaccagccactcctatgtttttcatcctgtctccaggggtggac

SEQ ID NO: 69404 - DNA, 75 bp, Homo sapiens
tcatttgaagaatcgggaccagccactcctatgtttttcatcctgtctccaggggtggacccactgaaggatgta

SEQ ID NO: 69405 - DNA, 72 bp, Homo sapiens
aagaatcgggaccagccactcctatgtttttcatcctgtctccaggggtggacccactgaaggatgtagaaa

SEQ ID NO: 69406 - DNA, 73 bp, Homo sapiens
agccactcctatgtttttcatcctgtctccaggggtggacccactgaaggatgtagaaagtcaaggtgagaaa

SEQ ID NO: 69407 - DNA, 73 bp, Homo sapiens
tatgtttttcatcctgtctccaggggtggacccactgaaggatgtagaaagtcaaggtgagaaaggcgtcctc

SEQ ID NO: 69408 - DNA, 74 bp, Homo sapiens
tttcatcctgtctccaggggtggacccactgaaggatgtagaaagtcaaggtgagaaaggcgtcctcttggagc

SEQ ID NO: 69409 - DNA, 74 bp, Homo sapiens
tccaggggtggacccactgaaggatgtagaaagtcaaggtgagaaaggcgtcctcttggagccagggctgcatt

SEQ ID NO: 69410 - DNA, 72 bp, Homo sapiens
atcattagacacaagaaataataatgacgcctccatcctccttttaggaagaaaacttggatacaccttcaa

SEQ ID NO: 69411 - DNA, 71 bp, Homo sapiens
acaagaaataataatgacgcctccatcctccttttaggaagaaaacttggatacaccttcaacaatcagaa

SEQ ID NO: 69412 - DNA, 71 bp, Homo sapiens
aataataatgacgcctccatcctccttttaggaagaaaacttggatacaccttcaacaatcagaactttca

SEQ ID NO: 69413 - DNA, 70 bp, Homo sapiens
tccatcctccttttaggaagaaaacttggatacaccttcaacaatcagaactttcacaacgtgtctttgg

SEQ ID NO: 69414 - DNA, 70 bp, Homo sapiens
ttttaggaagaaaacttggatacaccttcaacaatcagaactttcacaacgtgtctttggggcaaggaca

SEQ ID NO: 69415 - DNA, 70 bp, Homo sapiens
aagaaaacttggatacaccttcaacaatcagaactttcacaacgtgtctttggggcaaggacaggaagtg

SEQ ID NO: 69416 - DNA, 76 bp, Homo sapiens
ttggatacaccttcaacaatcagaactttcacaacgtgtctttggggcaaggacaggaagtggtggctgaggctgc

SEQ ID NO: 69417 - DNA, 76 bp, Homo sapiens
cttcaacaatcagaactttcacaacgtgtctttggggcaaggacaggaagtggtggctgaggctgcgctggacctc

SEQ ID NO: 69418 - DNA, 75 bp, Homo sapiens
aactttcacaacgtgtctttggggcaaggacaggaagtggtggctgaggctgcgctggacctcgctgccaagaaa

SEQ ID NO: 69419 - DNA, 76 bp, Homo sapiens
acaacgtgtctttggggcaaggacaggaagtggtggctgaggctgcgctggacctcgctgccaagaaaggtcactg

SEQ ID NO: 69420 - DNA, 77 bp, Homo sapiens
ggcaaggacaggaagtggtggctgaggctgcgctggacctcgctgccaagaaaggtcactgggttattttgcaggta

SEQ ID NO: 69421 - DNA, 77 bp, Homo sapiens
ggaagtggtggctgaggctgcgctggacctcgctgccaagaaaggtcactgggttattttgcaggtatgttcctcta

SEQ ID NO: 69422 - DNA, 77 bp, Homo sapiens
tggctgaggctgcgctggacctcgctgccaagaaaggtcactgggttattttgcaggtatgttcctctacccttgtc

SEQ ID NO: 69423 - DNA, 72 bp, Homo sapiens
cgctggacctcgctgccaagaaaggtcactgggttattttgcaggtatgttcctctacccttgtctgggtta

SEQ ID NO: 69424 - DNA, 72 bp, Homo sapiens
acctcgctgccaagaaaggtcactgggttattttgcaggtatgttcctctacccttgtctgggttatcttga

SEQ ID NO: 69425 - DNA, 69 bp, Homo sapiens
ctacgttgacatggtttattttatgactgtattctccaccaaattttttaggtaaagagatgttccttc

SEQ ID NO: 69426 - DNA, 65 bp, Homo sapiens
ggtttattttatgactgtattctccaccaaattttttaggtaaagagatgttccttctttacctt

SEQ ID NO: 69427 - DNA, 69 bp, Homo sapiens
tatgactgtattctccaccaaattttttaggtaaagagatgttccttctttaccttttatcacccagcc

SEQ ID NO: 69428 - DNA, 67 bp, Homo sapiens
attctccaccaaattttttaggtaaagagatgttccttctttaccttttatcacccagcccactgcc

SEQ ID NO: 69429 - DNA, 73 bp, Homo sapiens
tttttaggtaaagagatgttccttctttaccttttatcacccagcccactgccttgaacatagcagacactga

SEQ ID NO: 69430 - DNA, 73 bp, Homo sapiens
gtaaagagatgttccttctttaccttttatcacccagcccactgccttgaacatagcagacactgaaacaaaa

SEQ ID NO: 69431 - DNA, 72 bp, Homo sapiens
tgttccttctttaccttttatcacccagcccactgccttgaacatagcagacactgaaacaaaaggccggtg

SEQ ID NO: 69432 - DNA, 72 bp, Homo sapiens
ttaccttttatcacccagcccactgccttgaacatagcagacactgaaacaaaaggccggtgggtcaaggaa

SEQ ID NO: 69433 - DNA, 74 bp, Homo sapiens
cagcccactgccttgaacatagcagacactgaaacaaaaggccggtgggtcaaggaatccatgaagaaattaaa

SEQ ID NO: 69434 - DNA, 72 bp, Homo sapiens
actgccttgaacatagcagacactgaaacaaaaggccggtgggtcaaggaatccatgaagaaattaaagaaa

SEQ ID NO: 69435 - DNA, 70 bp, Homo sapiens
aacatagcagacactgaaacaaaaggccggtgggtcaaggaatccatgaagaaattaaagaaagaataaa

SEQ ID NO: 69436 - DNA, 69 bp, Homo sapiens
actgaaacaaaaggccggtgggtcaaggaatccatgaagaaattaaagaaagaataaatgcaaaagcca

SEQ ID NO: 69437 - DNA, 69 bp, Homo sapiens
aaaaggccggtgggtcaaggaatccatgaagaaattaaagaaagaataaatgcaaaagccagtcactcc

SEQ ID NO: 69438 - DNA, 73 bp, Homo sapiens
tcaaggaatccatgaagaaattaaagaaagaataaatgcaaaagccagtcactcccattcttcccggctttca

SEQ ID NO: 69439 - DNA, 72 bp, Homo sapiens
atgaagaaattaaagaaagaataaatgcaaaagccagtcactcccattcttcccggctttcactaccatgaa

SEQ ID NO: 69440 - DNA, 70 bp, Homo sapiens
aaattaaagaaagaataaatgcaaaagccagtcactcccattcttcccggctttcactaccatgaacctc

SEQ ID NO: 69441 - DNA, 73 bp, Homo sapiens
aataaatgcaaaagccagtcactcccattcttcccggctttcactaccatgaacctcccccatctcctgatta

SEQ ID NO: 69442 - DNA, 73 bp, Homo sapiens
aaaagccagtcactcccattcttcccggctttcactaccatgaacctcccccatctcctgattactggtgaca

SEQ ID NO: 69443 - DNA, 77 bp, Homo sapiens
agtcactcccattcttcccggctttcactaccatgaacctcccccatctcctgattactggtgacatcacatcttgc

SEQ ID NO: 69444 - DNA, 77 bp, Homo sapiens
attcttcccggctttcactaccatgaacctcccccatctcctgattactggtgacatcacatcttgctgctgggtct

SEQ ID NO: 69445 - DNA, 78 bp, Homo sapiens
tttcactaccatgaacctcccccatctcctgattactggtgacatcacatcttgctgctgggtctttgtccttaatta

SEQ ID NO: 69446 - DNA, 75 bp, Homo sapiens
aacctcccccatctcctgattactggtgacatcacatcttgctgctgggtctttgtccttaattattcagttatt

SEQ ID NO: 69447 - DNA, 78 bp, Homo sapiens
atctcctgattactggtgacatcacatcttgctgctgggtctttgtccttaattattcagttatttatttggagccta

SEQ ID NO: 69448 - DNA, 78 bp, Homo sapiens
attactggtgacatcacatcttgctgctgggtctttgtccttaattattcagttatttatttggagcctagcaactga

SEQ ID NO: 69449 - DNA, 79 bp, Homo sapiens
acatcacatcttgctgctgggtctttgtccttaattattcagttatttatttggagcctagcaactgagagatctgccc

SEQ ID NO: 69450 - DNA, 76 bp, Homo sapiens
atcttgctgctgggtctttgtccttaattattcagttatttatttggagcctagcaactgagagatctgcccctcc

SEQ ID NO: 69451 - DNA, 73 bp, Homo sapiens
tctttgtccttaattattcagttatttatttggagcctagcaactgagagatctgcccctcccagggcctcct

SEQ ID NO: 69452 - DNA, 73 bp, Homo sapiens
agttatttatttggagcctagcaactgagagatctgcccctcccagggcctccttttccagaaacatcaggaa

SEQ ID NO: 69453 - DNA, 76 bp, Homo sapiens
tatttggagcctagcaactgagagatctgcccctcccagggcctccttttccagaaacatcaggaagttcaggaga

SEQ ID NO: 69454 - DNA, 72 bp, Homo sapiens
aactgagagatctgcccctcccagggcctccttttccagaaacatcaggaagttcaggagaaaagataataa

SEQ ID NO: 69455 - DNA, 72 bp, Homo sapiens
tctgcccctcccagggcctccttttccagaaacatcaggaagttcaggagaaaagataataacagctgagtt

SEQ ID NO: 69456 - DNA, 76 bp, Homo sapiens
agctaagcagatgcctgtattgagggggggctccttccttcccactagaacattcacctggtggccaagtggctca

SEQ ID NO: 69457 - DNA, 74 bp, Homo sapiens
agatgcctgtattgagggggggctccttccttcccactagaacattcacctggtggccaagtggctcagcaccc

SEQ ID NO: 69458 - DNA, 74 bp, Homo sapiens
tattgagggggggctccttccttcccactagaacattcacctggtggccaagtggctcagcaccctggagaaga

SEQ ID NO: 69459 - DNA, 78 bp, Homo sapiens
ccttccttcccactagaacattcacctggtggccaagtggctcagcaccctggagaagaagctggaggagcacagtga

SEQ ID NO: 69460 - DNA, 81 bp, Homo sapiens
ttcccactagaacattcacctggtggccaagtggctcagcaccctggagaagaagctggaggagcacagtgagaacagcca

SEQ ID NO: 69461 - DNA, 79 bp, Homo sapiens
aacattcacctggtggccaagtggctcagcaccctggagaagaagctggaggagcacagtgagaacagccacccagagt

SEQ ID NO: 69462 - DNA, 82 bp, Homo sapiens
gtggccaagtggctcagcaccctggagaagaagctggaggagcacagtgagaacagccacccagagttcagggtcttcatga

SEQ ID NO: 69463 - DNA, 84 bp, Homo sapiens
agtggctcagcaccctggagaagaagctggaggagcacagtgagaacagccacccagagttcagggtcttcatgagtgcagagc

SEQ ID NO: 69464 - DNA, 81 bp, Homo sapiens
accctggagaagaagctggaggagcacagtgagaacagccacccagagttcagggtcttcatgagtgcagagccagcaccc

SEQ ID NO: 69465 - DNA, 81 bp, Homo sapiens
aagaagctggaggagcacagtgagaacagccacccagagttcagggtcttcatgagtgcagagccagcaccctcccctgag

SEQ ID NO: 69466 - DNA, 83 bp, Homo sapiens
aggagcacagtgagaacagccacccagagttcagggtcttcatgagtgcagagccagcaccctcccctgagggccacatcatc

SEQ ID NO: 69467 - DNA, 78 bp, Homo sapiens
agaacagccacccagagttcagggtcttcatgagtgcagagccagcaccctcccctgagggccacatcatcccccagg

SEQ ID NO: 69468 - DNA, 79 bp, Homo sapiens
agagttcagggtcttcatgagtgcagagccagcaccctcccctgagggccacatcatcccccagggcatcctggagaac

SEQ ID NO: 69469 - DNA, 82 bp, Homo sapiens
gtcttcatgagtgcagagccagcaccctcccctgagggccacatcatcccccagggcatcctggagaactccattaagatca

SEQ ID NO: 69470 - DNA, 80 bp, Homo sapiens
atgagtgcagagccagcaccctcccctgagggccacatcatcccccagggcatcctggagaactccattaagatcaccaa

SEQ ID NO: 69471 - DNA, 77 bp, Homo sapiens
agccagcaccctcccctgagggccacatcatcccccagggcatcctggagaactccattaagatcaccaatgagccc

SEQ ID NO: 69472 - DNA, 80 bp, Homo sapiens
cctgagggccacatcatcccccagggcatcctggagaactccattaagatcaccaatgagccccccacgggcatgcatgc

SEQ ID NO: 69473 - DNA, 81 bp, Homo sapiens
acatcatcccccagggcatcctggagaactccattaagatcaccaatgagccccccacgggcatgcatgccaacctgcaca

SEQ ID NO: 69474 - DNA, 79 bp, Homo sapiens
ccagggcatcctggagaactccattaagatcaccaatgagccccccacgggcatgcatgccaacctgcacaaggccctg

SEQ ID NO: 69475 - DNA, 78 bp, Homo sapiens
atcctggagaactccattaagatcaccaatgagccccccacgggcatgcatgccaacctgcacaaggccctggacaac

SEQ ID NO: 69476 - DNA, 77 bp, Homo sapiens
aagatcaccaatgagccccccacgggcatgcatgccaacctgcacaaggccctggacaacttcactcaggtacggcc

SEQ ID NO: 69477 - DNA, 74 bp, Homo sapiens
atgagccccccacgggcatgcatgccaacctgcacaaggccctggacaacttcactcaggtacggccccgggag

SEQ ID NO: 69478 - DNA, 73 bp, Homo sapiens
acgggcatgcatgccaacctgcacaaggccctggacaacttcactcaggtacggccccgggagggaggcaaaa

SEQ ID NO: 69479 - DNA, 74 bp, Homo sapiens
atgccaacctgcacaaggccctggacaacttcactcaggtacggccccgggagggaggcaaaaacagcagcaca

SEQ ID NO: 69480 - DNA, 77 bp, Homo sapiens
tataagagaagttgtgtgcgaaccttaaaagcgacactctcatttcaggacactctggagatgtgttctcgggagac

SEQ ID NO: 69481 - DNA, 75 bp, Homo sapiens
ttgtgtgcgaaccttaaaagcgacactctcatttcaggacactctggagatgtgttctcgggagacggagtttaa

SEQ ID NO: 69482 - DNA, 74 bp, Homo sapiens
aaccttaaaagcgacactctcatttcaggacactctggagatgtgttctcgggagacggagtttaagagcatcc

SEQ ID NO: 69483 - DNA, 77 bp, Homo sapiens
aaagcgacactctcatttcaggacactctggagatgtgttctcgggagacggagtttaagagcatcctctttgctct

SEQ ID NO: 69484 - DNA, 75 bp, Homo sapiens
atttcaggacactctggagatgtgttctcgggagacggagtttaagagcatcctctttgctctttgttacttcca

SEQ ID NO: 69485 - DNA, 75 bp, Homo sapiens
actctggagatgtgttctcgggagacggagtttaagagcatcctctttgctctttgttacttccatgcggtggtg

SEQ ID NO: 69486 - DNA, 75 bp, Homo sapiens
agatgtgttctcgggagacggagtttaagagcatcctctttgctctttgttacttccatgcggtggtggcagaaa

SEQ ID NO: 69487 - DNA, 73 bp, Homo sapiens
gagacggagtttaagagcatcctctttgctctttgttacttccatgcggtggtggcagaaagacgaaaatttg

SEQ ID NO: 69488 - DNA, 71 bp, Homo sapiens
agtttaagagcatcctctttgctctttgttacttccatgcggtggtggcagaaagacgaaaatttgggccc

SEQ ID NO: 69489 - DNA, 71 bp, Homo sapiens
atcctctttgctctttgttacttccatgcggtggtggcagaaagacgaaaatttgggccccagggatggaa

SEQ ID NO: 69490 - DNA, 72 bp, Homo sapiens
tctttgttacttccatgcggtggtggcagaaagacgaaaatttgggccccagggatggaatcgctcataccc

SEQ ID NO: 69491 - DNA, 71 bp, Homo sapiens
ttacttccatgcggtggtggcagaaagacgaaaatttgggccccagggatggaatcgctcataccccttta

SEQ ID NO: 69492 - DNA, 72 bp, Homo sapiens
tggtggcagaaagacgaaaatttgggccccagggatggaatcgctcatacccctttaacactggagacctca

SEQ ID NO: 69493 - DNA, 70 bp, Homo sapiens
aaagacgaaaatttgggccccagggatggaatcgctcatacccctttaacactggagacctcactatctc

SEQ ID NO: 69494 - DNA, 73 bp, Homo sapiens
aaaatttgggccccagggatggaatcgctcatacccctttaacactggagacctcactatctctgtgaatgtc

SEQ ID NO: 69495 - DNA, 76 bp, Homo sapiens
agggatggaatcgctcatacccctttaacactggagacctcactatctctgtgaatgtcctctacaacttcctgga

SEQ ID NO: 69496 - DNA, 75 bp, Homo sapiens
aatcgctcatacccctttaacactggagacctcactatctctgtgaatgtcctctacaacttcctggaggccaac

SEQ ID NO: 69497 - DNA, 73 bp, Homo sapiens
cctttaacactggagacctcactatctctgtgaatgtcctctacaacttcctggaggccaacgcaaaggtaaa

SEQ ID NO: 69498 - DNA, 75 bp, Homo sapiens
aacactggagacctcactatctctgtgaatgtcctctacaacttcctggaggccaacgcaaaggtaaaggccatg

SEQ ID NO: 69499 - DNA, 75 bp, Homo sapiens
acctcactatctctgtgaatgtcctctacaacttcctggaggccaacgcaaaggtaaaggccatggacattcagg

SEQ ID NO: 69500 - DNA, 74 bp, Homo sapiens
tgtgaatgtcctctacaacttcctggaggccaacgcaaaggtaaaggccatggacattcagggaccagccaggt

SEQ ID NO: 69501 - DNA, 76 bp, Homo sapiens
ttcttccttcctctctttctttcccccatcactcaggtcccctatgatgatttgcgctacctgtttggagagatca

SEQ ID NO: 69502 - DNA, 79 bp, Homo sapiens
ctctctttctttcccccatcactcaggtcccctatgatgatttgcgctacctgtttggagagatcatgtatggaggcca

SEQ ID NO: 69503 - DNA, 81 bp, Homo sapiens
tttctttcccccatcactcaggtcccctatgatgatttgcgctacctgtttggagagatcatgtatggaggccatatcaca

SEQ ID NO: 69504 - DNA, 85 bp, Homo sapiens
atcactcaggtcccctatgatgatttgcgctacctgtttggagagatcatgtatggaggccatatcacagatgactgggacagaa

SEQ ID NO: 69505 - DNA, 86 bp, Homo sapiens
ccctatgatgatttgcgctacctgtttggagagatcatgtatggaggccatatcacagatgactgggacagaagactctgcagaac

SEQ ID NO: 69506 - DNA, 84 bp, Homo sapiens
atgatttgcgctacctgtttggagagatcatgtatggaggccatatcacagatgactgggacagaagactctgcagaacctacc

SEQ ID NO: 69507 - DNA, 82 bp, Homo sapiens
ctgtttggagagatcatgtatggaggccatatcacagatgactgggacagaagactctgcagaacctacctgggggaattca

SEQ ID NO: 69508 - DNA, 82 bp, Homo sapiens
agatcatgtatggaggccatatcacagatgactgggacagaagactctgcagaacctacctgggggaattcattcgaccaga

SEQ ID NO: 69509 - DNA, 79 bp, Homo sapiens
tggaggccatatcacagatgactgggacagaagactctgcagaacctacctgggggaattcattcgaccagaaatgtta

SEQ ID NO: 69510 - DNA, 77 bp, Homo sapiens
atatcacagatgactgggacagaagactctgcagaacctacctgggggaattcattcgaccagaaatgttagaagga

SEQ ID NO: 69511 - DNA, 74 bp, Homo sapiens
agatgactgggacagaagactctgcagaacctacctgggggaattcattcgaccagaaatgttagaaggagaac

SEQ ID NO: 69512 - DNA, 73 bp, Homo sapiens
acagaagactctgcagaacctacctgggggaattcattcgaccagaaatgttagaaggagaactgtctttggc

SEQ ID NO: 69513 - DNA, 67 bp, Homo sapiens
agaacctacctgggggaattcattcgaccagaaatgttagaaggagaactgtctttggccccagggt

SEQ ID NO: 69514 - DNA, 69 bp, Homo sapiens
tacctgggggaattcattcgaccagaaatgttagaaggagaactgtctttggccccagggttcccactc

SEQ ID NO: 69515 - DNA, 71 bp, Homo sapiens
aattcattcgaccagaaatgttagaaggagaactgtctttggccccagggttcccactcccaggcaacatg

SEQ ID NO: 69516 - DNA, 71 bp, Homo sapiens
gaaatgttagaaggagaactgtctttggccccagggttcccactcccaggcaacatggactacaatggtta

SEQ ID NO: 69517 - DNA, 73 bp, Homo sapiens
ttagaaggagaactgtctttggccccagggttcccactcccaggcaacatggactacaatggttatcatcagg

SEQ ID NO: 69518 - DNA, 76 bp, Homo sapiens
aactgtctttggccccagggttcccactcccaggcaacatggactacaatggttatcatcaggtgagactctgctc

SEQ ID NO: 69519 - DNA, 82 bp, Homo sapiens
ccagggttcccactcccaggcaacatggactacaatggttatcatcaggtgagactctgctctgtgcttctgatgtcgtgag

SEQ ID NO: 69520 - DNA, 74 bp, Homo sapiens
aggtacgtcctggtttctttttaagtgagcttgcccttgattttcagtacatcgatgctgagctgcccccagaa

SEQ ID NO: 69521 - DNA, 74 bp, Homo sapiens
tggtttctttttaagtgagcttgcccttgattttcagtacatcgatgctgagctgcccccagaatccccctacc

SEQ ID NO: 69522 - DNA, 76 bp, Homo sapiens
tttttaagtgagcttgcccttgattttcagtacatcgatgctgagctgcccccagaatccccctacctctatggcc

SEQ ID NO: 69523 - DNA, 77 bp, Homo sapiens
ttgcccttgattttcagtacatcgatgctgagctgcccccagaatccccctacctctatggcctccacccgaacgca

SEQ ID NO: 69524 - DNA, 78 bp, Homo sapiens
ttgattttcagtacatcgatgctgagctgcccccagaatccccctacctctatggcctccacccgaacgcagagattg

SEQ ID NO: 69525 - DNA, 78 bp, Homo sapiens
gtacatcgatgctgagctgcccccagaatccccctacctctatggcctccacccgaacgcagagattggcttcctgac

SEQ ID NO: 69526 - DNA, 71 bp, Homo sapiens
agctgcccccagaatccccctacctctatggcctccacccgaacgcagagattggcttcctgacccaaacc

SEQ ID NO: 69527 - DNA, 71 bp, Homo sapiens
ccagaatccccctacctctatggcctccacccgaacgcagagattggcttcctgacccaaacctcagaaaa

SEQ ID NO: 69528 - DNA, 74 bp, Homo sapiens
ctacctctatggcctccacccgaacgcagagattggcttcctgacccaaacctcagaaaagctcttccgcactg

SEQ ID NO: 69529 - DNA, 80 bp, Homo sapiens
tatggcctccacccgaacgcagagattggcttcctgacccaaacctcagaaaagctcttccgcactgtgctggagctgca

SEQ ID NO: 69530 - DNA, 77 bp, Homo sapiens
acccgaacgcagagattggcttcctgacccaaacctcagaaaagctcttccgcactgtgctggagctgcagcctcgg

SEQ ID NO: 69531 - DNA, 80 bp, Homo sapiens
agagattggcttcctgacccaaacctcagaaaagctcttccgcactgtgctggagctgcagcctcgggacagccaggcca

SEQ ID NO: 69532 - DNA, 80 bp, Homo sapiens
ttcctgacccaaacctcagaaaagctcttccgcactgtgctggagctgcagcctcgggacagccaggccagagacggagc

SEQ ID NO: 69533 - DNA, 83 bp, Homo sapiens
tcagaaaagctcttccgcactgtgctggagctgcagcctcgggacagccaggccagagacggagcgggcgccacaagagaaga

SEQ ID NO: 69534 - DNA, 80 bp, Homo sapiens
aaagctcttccgcactgtgctggagctgcagcctcgggacagccaggccagagacggagcgggcgccacaagagaagaaa

SEQ ID NO: 69535 - DNA, 79 bp, Homo sapiens
actgtgctggagctgcagcctcgggacagccaggccagagacggagcgggcgccacaagagaagaaaaggtgtgtgtgg

SEQ ID NO: 69536 - DNA, 76 bp, Homo sapiens
agctgcagcctcgggacagccaggccagagacggagcgggcgccacaagagaagaaaaggtgtgtgtggtggggac

SEQ ID NO: 69537 - DNA, 75 bp, Homo sapiens
cctcgggacagccaggccagagacggagcgggcgccacaagagaagaaaaggtgtgtgtggtggggactgcctga

SEQ ID NO: 69538 - DNA, 73 bp, Homo sapiens
aggccagagacggagcgggcgccacaagagaagaaaaggtgtgtgtggtggggactgcctgaggtcgttctgg

SEQ ID NO: 69539 - DNA, 73 bp, Homo sapiens
tggagaatagagccctttcttaacgctgtgtttccttctgtggggcaggtcaaggcacttctggaagaaatat

SEQ ID NO: 69540 - DNA, 73 bp, Homo sapiens
tagagccctttcttaacgctgtgtttccttctgtggggcaggtcaaggcacttctggaagaaatattggagcg

SEQ ID NO: 69541 - DNA, 75 bp, Homo sapiens
tcttaacgctgtgtttccttctgtggggcaggtcaaggcacttctggaagaaatattggagcgggtgacagacga

SEQ ID NO: 69542 - DNA, 74 bp, Homo sapiens
tgtttccttctgtggggcaggtcaaggcacttctggaagaaatattggagcgggtgacagacgagtttaacatc

SEQ ID NO: 69543 - DNA, 76 bp, Homo sapiens
gggcaggtcaaggcacttctggaagaaatattggagcgggtgacagacgagtttaacatcccagaactgatggcca

SEQ ID NO: 69544 - DNA, 74 bp, Homo sapiens
aaggcacttctggaagaaatattggagcgggtgacagacgagtttaacatcccagaactgatggccaaagtgga

SEQ ID NO: 69545 - DNA, 75 bp, Homo sapiens
tggaagaaatattggagcgggtgacagacgagtttaacatcccagaactgatggccaaagtggaggagcgcaccc

SEQ ID NO: 69546 - DNA, 73 bp, Homo sapiens
aaatattggagcgggtgacagacgagtttaacatcccagaactgatggccaaagtggaggagcgcacccctta

SEQ ID NO: 69547 - DNA, 76 bp, Homo sapiens
tgacagacgagtttaacatcccagaactgatggccaaagtggaggagcgcaccccttacattgtagttgccttcca

SEQ ID NO: 69548 - DNA, 73 bp, Homo sapiens
acgagtttaacatcccagaactgatggccaaagtggaggagcgcaccccttacattgtagttgccttccagga

SEQ ID NO: 69549 - DNA, 76 bp, Homo sapiens
ccagaactgatggccaaagtggaggagcgcaccccttacattgtagttgccttccaggagtgtggccggatgaata

SEQ ID NO: 69550 - DNA, 77 bp, Homo sapiens
actgatggccaaagtggaggagcgcaccccttacattgtagttgccttccaggagtgtggccggatgaatatcctca

SEQ ID NO: 69551 - DNA, 76 bp, Homo sapiens
aaagtggaggagcgcaccccttacattgtagttgccttccaggagtgtggccggatgaatatcctcaccagagaga

SEQ ID NO: 69552 - DNA, 78 bp, Homo sapiens
accccttacattgtagttgccttccaggagtgtggccggatgaatatcctcaccagagagattcagcgctcactgagg

SEQ ID NO: 69553 - DNA, 83 bp, Homo sapiens
ttacattgtagttgccttccaggagtgtggccggatgaatatcctcaccagagagattcagcgctcactgagggagctggagc

SEQ ID NO: 69554 - DNA, 82 bp, Homo sapiens
ttgccttccaggagtgtggccggatgaatatcctcaccagagagattcagcgctcactgagggagctggagctcggcttaaa

SEQ ID NO: 69555 - DNA, 82 bp, Homo sapiens
tgtggccggatgaatatcctcaccagagagattcagcgctcactgagggagctggagctcggcttaaaggtgagcgcggtct

SEQ ID NO: 69556 - DNA, 82 bp, Homo sapiens
atgaatatcctcaccagagagattcagcgctcactgagggagctggagctcggcttaaaggtgagcgcggtcttgtaaggca

SEQ ID NO: 69557 - DNA, 81 bp, Homo sapiens
atcctcaccagagagattcagcgctcactgagggagctggagctcggcttaaaggtgagcgcggtcttgtaaggcatggag

SEQ ID NO: 69558 - DNA, 80 bp, Homo sapiens
agattcagcgctcactgagggagctggagctcggcttaaaggtgagcgcggtcttgtaaggcatggaggggacattgcta

SEQ ID NO: 69559 - DNA, 73 bp, Homo sapiens
acttcccaccttctcacgctttccccctcccattctttatcttcagggggagctgactatgaccagccacatg

SEQ ID NO: 69560 - DNA, 76 bp, Homo sapiens
ttccccctcccattctttatcttcagggggagctgactatgaccagccacatggagaacttacagaatgccctgta

SEQ ID NO: 69561 - DNA, 80 bp, Homo sapiens
cattctttatcttcagggggagctgactatgaccagccacatggagaacttacagaatgccctgtacttcgatatggtgc

SEQ ID NO: 69562 - DNA, 80 bp, Homo sapiens
tttatcttcagggggagctgactatgaccagccacatggagaacttacagaatgccctgtacttcgatatggtgccagag

SEQ ID NO: 69563 - DNA, 82 bp, Homo sapiens
agctgactatgaccagccacatggagaacttacagaatgccctgtacttcgatatggtgccagagtcctgggctagacgagc

SEQ ID NO: 69564 - DNA, 80 bp, Homo sapiens
actatgaccagccacatggagaacttacagaatgccctgtacttcgatatggtgccagagtcctgggctagacgagccta

SEQ ID NO: 69565 - DNA, 76 bp, Homo sapiens
aacttacagaatgccctgtacttcgatatggtgccagagtcctgggctagacgagcctacccttccacagcaggcc

SEQ ID NO: 69566 - DNA, 78 bp, Homo sapiens
aatgccctgtacttcgatatggtgccagagtcctgggctagacgagcctacccttccacagcaggcctggcagcctgg

SEQ ID NO: 69567 - DNA, 77 bp, Homo sapiens
acttcgatatggtgccagagtcctgggctagacgagcctacccttccacagcaggcctggcagcctggtttccagac

SEQ ID NO: 69568 - DNA, 78 bp, Homo sapiens
cagagtcctgggctagacgagcctacccttccacagcaggcctggcagcctggtttccagacctcctcaacagaatca

SEQ ID NO: 69569 - DNA, 78 bp, Homo sapiens
tgggctagacgagcctacccttccacagcaggcctggcagcctggtttccagacctcctcaacagaatcaaggagcta

SEQ ID NO: 69570 - DNA, 77 bp, Homo sapiens
agcctacccttccacagcaggcctggcagcctggtttccagacctcctcaacagaatcaaggagctagaggcttgga

SEQ ID NO: 69571 - DNA, 77 bp, Homo sapiens
tccacagcaggcctggcagcctggtttccagacctcctcaacagaatcaaggagctagaggcttggacgggtgactt

SEQ ID NO: 69572 - DNA, 75 bp, Homo sapiens
cctggcagcctggtttccagacctcctcaacagaatcaaggagctagaggcttggacgggtgactttacaatgcc

SEQ ID NO: 69573 - DNA, 75 bp, Homo sapiens
tggtttccagacctcctcaacagaatcaaggagctagaggcttggacgggtgactttacaatgccctccactgtg

SEQ ID NO: 69574 - DNA, 77 bp, Homo sapiens
agacctcctcaacagaatcaaggagctagaggcttggacgggtgactttacaatgccctccactgtgtggctgacag

SEQ ID NO: 69575 - DNA, 77 bp, Homo sapiens
aacagaatcaaggagctagaggcttggacgggtgactttacaatgccctccactgtgtggctgacaggcttcttcaa

SEQ ID NO: 69576 - DNA, 74 bp, Homo sapiens
aaggagctagaggcttggacgggtgactttacaatgccctccactgtgtggctgacaggcttcttcaaccccca

SEQ ID NO: 69577 - DNA, 73 bp, Homo sapiens
agaggcttggacgggtgactttacaatgccctccactgtgtggctgacaggcttcttcaacccccagtcgttc

SEQ ID NO: 69578 - DNA, 76 bp, Homo sapiens
acgggtgactttacaatgccctccactgtgtggctgacaggcttcttcaacccccagtcgttcctgactgccatca

SEQ ID NO: 69579 - DNA, 82 bp, Homo sapiens
actgtgtggctgacaggcttcttcaacccccagtcgttcctgactgccatcatgcagtccacggctcgcaagaatgagtggc

SEQ ID NO: 69580 - DNA, 82 bp, Homo sapiens
tgacaggcttcttcaacccccagtcgttcctgactgccatcatgcagtccacggctcgcaagaatgagtggccactggacca

SEQ ID NO: 69581 - DNA, 80 bp, Homo sapiens
cttcaacccccagtcgttcctgactgccatcatgcagtccacggctcgcaagaatgagtggccactggaccagatggccc

SEQ ID NO: 69582 - DNA, 87 bp, Homo sapiens
agtcgttcctgactgccatcatgcagtccacggctcgcaagaatgagtggccactggaccagatggccctgcaatgtgacatgacga

SEQ ID NO: 69583 - DNA, 89 bp, Homo sapiens
tgactgccatcatgcagtccacggctcgcaagaatgagtggccactggaccagatggccctgcaatgtgacatgacgaagaagaacaga

SEQ ID NO: 69584 - DNA, 86 bp, Homo sapiens
ccatcatgcagtccacggctcgcaagaatgagtggccactggaccagatggccctgcaatgtgacatgacgaagaagaacagagaa

SEQ ID NO: 69585 - DNA, 80 bp, Homo sapiens
acggctcgcaagaatgagtggccactggaccagatggccctgcaatgtgacatgacgaagaagaacagagaagagtttag

SEQ ID NO: 69586 - DNA, 79 bp, Homo sapiens
aagaatgagtggccactggaccagatggccctgcaatgtgacatgacgaagaagaacagagaagagtttaggagtcctc

SEQ ID NO: 69587 - DNA, 76 bp, Homo sapiens
ccactggaccagatggccctgcaatgtgacatgacgaagaagaacagagaagagtttaggagtcctcctcgggaag

SEQ ID NO: 69588 - DNA, 75 bp, Homo sapiens
agatggccctgcaatgtgacatgacgaagaagaacagagaagagtttaggagtcctcctcgggaaggggcctaca

SEQ ID NO: 69589 - DNA, 75 bp, Homo sapiens
ccctgcaatgtgacatgacgaagaagaacagagaagagtttaggagtcctcctcgggaaggggcctacatccatg

SEQ ID NO: 69590 - DNA, 74 bp, Homo sapiens
acatgacgaagaagaacagagaagagtttaggagtcctcctcgggaaggggcctacatccatggcctcttcatg

SEQ ID NO: 69591 - DNA, 72 bp, Homo sapiens
aagaacagagaagagtttaggagtcctcctcgggaaggggcctacatccatggcctcttcatggaaggtgcc

SEQ ID NO: 69592 - DNA, 75 bp, Homo sapiens
ttaggagtcctcctcgggaaggggcctacatccatggcctcttcatggaaggtgcctgctgggacacacaggtaa

SEQ ID NO: 69593 - DNA, 77 bp, Homo sapiens
ctacatccatggcctcttcatggaaggtgcctgctgggacacacaggtaaagcttggaatgaaccaaagggcagctt

SEQ ID NO: 69594 - DNA, 75 bp, Homo sapiens
atggcctcttcatggaaggtgcctgctgggacacacaggtaaagcttggaatgaaccaaagggcagctttctggg

SEQ ID NO: 69595 - DNA, 83 bp, Homo sapiens
gctctgggtctgatctaaggtgcctcttctcatgttttatcctcaggctgggatcattacagaggcaaagctgaaggatctga

SEQ ID NO: 69596 - DNA, 81 bp, Homo sapiens
gggtctgatctaaggtgcctcttctcatgttttatcctcaggctgggatcattacagaggcaaagctgaaggatctgacac

SEQ ID NO: 69597 - DNA, 80 bp, Homo sapiens
taaggtgcctcttctcatgttttatcctcaggctgggatcattacagaggcaaagctgaaggatctgacaccccctatgc

SEQ ID NO: 69598 - DNA, 84 bp, Homo sapiens
tctcatgttttatcctcaggctgggatcattacagaggcaaagctgaaggatctgacaccccctatgcctgtgatgttcatcaa

SEQ ID NO: 69599 - DNA, 82 bp, Homo sapiens
tttatcctcaggctgggatcattacagaggcaaagctgaaggatctgacaccccctatgcctgtgatgttcatcaaggccat

SEQ ID NO: 69600 - DNA, 85 bp, Homo sapiens
ctgggatcattacagaggcaaagctgaaggatctgacaccccctatgcctgtgatgttcatcaaggccattcctgcagataagca

SEQ ID NO: 69601 - DNA, 84 bp, Homo sapiens
attacagaggcaaagctgaaggatctgacaccccctatgcctgtgatgttcatcaaggccattcctgcagataagcaggactgc

SEQ ID NO: 69602 - DNA, 84 bp, Homo sapiens
aagctgaaggatctgacaccccctatgcctgtgatgttcatcaaggccattcctgcagataagcaggactgccgcagtgtctat

SEQ ID NO: 69603 - DNA, 87 bp, Homo sapiens
tatgcctgtgatgttcatcaaggccattcctgcagataagcaggactgccgcagtgtctattcctgtcctgtgtacaagactagtca

SEQ ID NO: 69604 - DNA, 82 bp, Homo sapiens
atgttcatcaaggccattcctgcagataagcaggactgccgcagtgtctattcctgtcctgtgtacaagactagtcagcggg

SEQ ID NO: 69605 - DNA, 80 bp, Homo sapiens
atcaaggccattcctgcagataagcaggactgccgcagtgtctattcctgtcctgtgtacaagactagtcagcggggacc

SEQ ID NO: 69606 - DNA, 78 bp, Homo sapiens
attcctgcagataagcaggactgccgcagtgtctattcctgtcctgtgtacaagactagtcagcggggacccacctac

SEQ ID NO: 69607 - DNA, 76 bp, Homo sapiens
taagcaggactgccgcagtgtctattcctgtcctgtgtacaagactagtcagcggggacccacctacgtgtggact

SEQ ID NO: 69608 - DNA, 74 bp, Homo sapiens
cgcagtgtctattcctgtcctgtgtacaagactagtcagcggggacccacctacgtgtggactttcaacctgaa

SEQ ID NO: 69609 - DNA, 73 bp, Homo sapiens
tctattcctgtcctgtgtacaagactagtcagcggggacccacctacgtgtggactttcaacctgaagactaa

SEQ ID NO: 69610 - DNA, 70 bp, Homo sapiens
gtcctgtgtacaagactagtcagcggggacccacctacgtgtggactttcaacctgaagactaaggaaaa

SEQ ID NO: 69611 - DNA, 68 bp, Homo sapiens
aagactagtcagcggggacccacctacgtgtggactttcaacctgaagactaaggaaaacccatccaa

SEQ ID NO: 69612 - DNA, 68 bp, Homo sapiens
gggacccacctacgtgtggactttcaacctgaagactaaggaaaacccatccaagtgggttctggctg

SEQ ID NO: 69613 - DNA, 71 bp, Homo sapiens
tacgtgtggactttcaacctgaagactaaggaaaacccatccaagtgggttctggctggagtagccttgct

SEQ ID NO: 69614 - DNA, 71 bp, Homo sapiens
ctttcaacctgaagactaaggaaaacccatccaagtgggttctggctggagtagccttgcttctccagatt

SEQ ID NO: 69615 - DNA, 73 bp, Homo sapiens
aacctgaagactaaggaaaacccatccaagtgggttctggctggagtagccttgcttctccagatttagcatc

SEQ ID NO: 69616 - DNA, 77 bp, Homo sapiens
gaaaacccatccaagtgggttctggctggagtagccttgcttctccagatttagcatcctgcagagccaccgagaaa

SEQ ID NO: 69617 - DNA, 76 bp, Homo sapiens
atccaagtgggttctggctggagtagccttgcttctccagatttagcatcctgcagagccaccgagaaaataaaaa

SEQ ID NO: 69618 - DNA, 78 bp, Homo sapiens
ttctggctggagtagccttgcttctccagatttagcatcctgcagagccaccgagaaaataaaaaagctgggcttgga

SEQ ID NO: 69619 - DNA, 77 bp, Homo sapiens
agtagccttgcttctccagatttagcatcctgcagagccaccgagaaaataaaaaagctgggcttggaggctgccta

SEQ ID NO: 69620 - DNA, 78 bp, Homo sapiens
ttgcttctccagatttagcatcctgcagagccaccgagaaaataaaaaagctgggcttggaggctgcctagagggaca

SEQ ID NO: 69621 - DNA, 75 bp, Homo sapiens
atttagcatcctgcagagccaccgagaaaataaaaaagctgggcttggaggctgcctagagggacaggtgggtga

SEQ ID NO: 69622 - DNA, 72 bp, Homo sapiens
atcctgcagagccaccgagaaaataaaaaagctgggcttggaggctgcctagagggacaggtgggtgaaggg

SEQ ID NO: 69623 - DNA, 71 bp, Homo sapiens
cgagaaaataaaaaagctgggcttggaggctgcctagagggacaggtgggtgaagggtcaccacagacact

SEQ ID NO: 69624 - DNA, 71 bp, Homo sapiens
aaaaagctgggcttggaggctgcctagagggacaggtgggtgaagggtcaccacagacacttagaacggta

SEQ ID NO: 69625 - DNA, 73 bp, Homo sapiens
ggcttggaggctgcctagagggacaggtgggtgaagggtcaccacagacacttagaacggtaagaaaccatga

SEQ ID NO: 69626 - DNA, 75 bp, Homo sapiens
tgcctagagggacaggtgggtgaagggtcaccacagacacttagaacggtaagaaaccatgagcactcacaattc

SEQ ID NO: 69627 - DNA, 75 bp, Homo sapiens
gacaggtgggtgaagggtcaccacagacacttagaacggtaagaaaccatgagcactcacaattctgtagaattc

SEQ ID NO: 69628 - DNA, 74 bp, Homo sapiens
accacagacacttagaacggtaagaaaccatgagcactcacaattctgtagaattcctctagggaacttggaga

SEQ ID NO: 69629 - DNA, 74 bp, Homo sapiens
ttagaacggtaagaaaccatgagcactcacaattctgtagaattcctctagggaacttggagaggtgtgcctaa

SEQ ID NO: 69630 - DNA, 74 bp, Homo sapiens
acggtaagaaaccatgagcactcacaattctgtagaattcctctagggaacttggagaggtgtgcctaaggtga

SEQ ID NO: 69631 - DNA, 79 bp, Homo sapiens
atgagcactcacaattctgtagaattcctctagggaacttggagaggtgtgcctaaggtgaggctgagctgaaggaatg

SEQ ID NO: 69632 - DNA, 75 bp, Homo sapiens
acaattctgtagaattcctctagggaacttggagaggtgtgcctaaggtgaggctgagctgaaggaatgtgggcc

SEQ ID NO: 69633 - DNA, 72 bp, Homo sapiens
aattcctctagggaacttggagaggtgtgcctaaggtgaggctgagctgaaggaatgtgggcccaggtttct

SEQ ID NO: 69634 - DNA, 72 bp, Homo sapiens
tagggaacttggagaggtgtgcctaaggtgaggctgagctgaaggaatgtgggcccaggtttcttaataaaa

SEQ ID NO: 69635 - DNA, 74 bp, Homo sapiens
agaggtgtgcctaaggtgaggctgagctgaaggaatgtgggcccaggtttcttaataaaatgatttactcttca

SEQ ID NO: 69636 - DNA, 74 bp, Homo sapiens
ctaaggtgaggctgagctgaaggaatgtgggcccaggtttcttaataaaatgatttactcttcaactgtgtctg

SEQ ID NO: 69637 - DNA, 74 bp, Homo sapiens
gctgagctgaaggaatgtgggcccaggtttcttaataaaatgatttactcttcaactgtgtctggcccaggatt

SEQ ID NO: 69638 - DNA, 73 bp, Homo sapiens
ctgaaggaatgtgggcccaggtttcttaataaaatgatttactcttcaactgtgtctggcccaggatttgaga

SEQ ID NO: 69639 - DNA, 73 bp, Homo sapiens
caaaccagcccctgaactcctatttatacaaaatttattattatattttattcaggatgacaagccatcagga

SEQ ID NO: 69640 - DNA, 75 bp, Homo sapiens
ctgaactcctatttatacaaaatttattattatattttattcaggatgacaagccatcaggaggtcaacaacaca

SEQ ID NO: 69641 - DNA, 77 bp, Homo sapiens
atttatacaaaatttattattatattttattcaggatgacaagccatcaggaggtcaacaacacaagcacagacaga

SEQ ID NO: 69642 - DNA, 75 bp, Homo sapiens
aaaatttattattatattttattcaggatgacaagccatcaggaggtcaacaacacaagcacagacagagggaaa

SEQ ID NO: 69643 - DNA, 80 bp, Homo sapiens
tatattttattcaggatgacaagccatcaggaggtcaacaacacaagcacagacagagggaaagaggccaaactgctgaa

SEQ ID NO: 69644 - DNA, 82 bp, Homo sapiens
tttattcaggatgacaagccatcaggaggtcaacaacacaagcacagacagagggaaagaggccaaactgctgaatgtcagc

SEQ ID NO: 69645 - DNA, 82 bp, Homo sapiens
atgacaagccatcaggaggtcaacaacacaagcacagacagagggaaagaggccaaactgctgaatgtcagcggcctgtctg

SEQ ID NO: 69646 - DNA, 79 bp, Homo sapiens
atcaggaggtcaacaacacaagcacagacagagggaaagaggccaaactgctgaatgtcagcggcctgtctggaggggc

SEQ ID NO: 69647 - DNA, 78 bp, Homo sapiens
aacaacacaagcacagacagagggaaagaggccaaactgctgaatgtcagcggcctgtctggaggggctgaggcttcg

SEQ ID NO: 69648 - DNA, 76 bp, Homo sapiens
acagacagagggaaagaggccaaactgctgaatgtcagcggcctgtctggaggggctgaggcttcggcctcgggag

SEQ ID NO: 69649 - DNA, 74 bp, Homo sapiens
ctgaagcaggaggcagggaaacggtcaggcatacaggtcctcccgatccgcagagtaaacctccccctcctgca

SEQ ID NO: 69650 - DNA, 73 bp, Homo sapiens
aggcagggaaacggtcaggcatacaggtcctcccgatccgcagagtaaacctccccctcctgcaggagagcaa

SEQ ID NO: 69651 - DNA, 72 bp, Homo sapiens
aaacggtcaggcatacaggtcctcccgatccgcagagtaaacctccccctcctgcaggagagcaaagttgag

SEQ ID NO: 69652 - DNA, 74 bp, Homo sapiens
aggcatacaggtcctcccgatccgcagagtaaacctccccctcctgcaggagagcaaagttgaggaagtgagag

SEQ ID NO: 69653 - DNA, 75 bp, Homo sapiens
ggtcctcccgatccgcagagtaaacctccccctcctgcaggagagcaaagttgaggaagtgagagggcctgtgca

SEQ ID NO: 69654 - DNA, 74 bp, Homo sapiens
cagagtaaacctccccctcctgcaggagagcaaagttgaggaagtgagagggcctgtgcacctcgtggtagaac

SEQ ID NO: 69655 - DNA, 73 bp, Homo sapiens
acctccccctcctgcaggagagcaaagttgaggaagtgagagggcctgtgcacctcgtggtagaactctttgg

SEQ ID NO: 69656 - DNA, 77 bp, Homo sapiens
ctgcaggagagcaaagttgaggaagtgagagggcctgtgcacctcgtggtagaactctttggggttcgccagctgta

SEQ ID NO: 69657 - DNA, 75 bp, Homo sapiens
caaagttgaggaagtgagagggcctgtgcacctcgtggtagaactctttggggttcgccagctgtagctcatatt

SEQ ID NO: 69658 - DNA, 76 bp, Homo sapiens
aggaagtgagagggcctgtgcacctcgtggtagaactctttggggttcgccagctgtagctcatatttcatgttgg

SEQ ID NO: 69659 - DNA, 78 bp, Homo sapiens
ggcctgtgcacctcgtggtagaactctttggggttcgccagctgtagctcatatttcatgttggggtcatgccgaaca

SEQ ID NO: 69660 - DNA, 74 bp, Homo sapiens
acctcgtggtagaactctttggggttcgccagctgtagctcatatttcatgttggggtcatgccgaacaccttc

SEQ ID NO: 69661 - DNA, 74 bp, Homo sapiens
tagaactctttggggttcgccagctgtagctcatatttcatgttggggtcatgccgaacaccttcggggagaag

SEQ ID NO: 69662 - DNA, 75 bp, Homo sapiens
gggttcgccagctgtagctcatatttcatgttggggtcatgccgaacaccttcggggagaaggaaacagccaatg

SEQ ID NO: 69663 - DNA, 74 bp, Homo sapiens
agctgtagctcatatttcatgttggggtcatgccgaacaccttcggggagaaggaaacagccaatgttaacagg

SEQ ID NO: 69664 - DNA, 71 bp, Homo sapiens
accttatccctactgctatccccacatccccaggctcctcccacttacccatgaagttgtagttccacgag

SEQ ID NO: 69665 - DNA, 74 bp, Homo sapiens
tactgctatccccacatccccaggctcctcccacttacccatgaagttgtagttccacgaggactgggcaggga

SEQ ID NO: 69666 - DNA, 73 bp, Homo sapiens
ccacatccccaggctcctcccacttacccatgaagttgtagttccacgaggactgggcagggaccatgaagaa

SEQ ID NO: 69667 - DNA, 72 bp, Homo sapiens
aggctcctcccacttacccatgaagttgtagttccacgaggactgggcagggaccatgaagaagccaaggaa

SEQ ID NO: 69668 - DNA, 70 bp, Homo sapiens
acttacccatgaagttgtagttccacgaggactgggcagggaccatgaagaagccaaggaaacggtccga

SEQ ID NO: 69669 - DNA, 77 bp, Homo sapiens
atgaagttgtagttccacgaggactgggcagggaccatgaagaagccaaggaaacggtccgacagcagcatctgcac

SEQ ID NO: 69670 - DNA, 79 bp, Homo sapiens
tgtagttccacgaggactgggcagggaccatgaagaagccaaggaaacggtccgacagcagcatctgcaccctctcata

SEQ ID NO: 69671 - DNA, 79 bp, Homo sapiens
actgggcagggaccatgaagaagccaaggaaacggtccgacagcagcatctgcaccctctcatagtgtgaaggcaggta

SEQ ID NO: 69672 - DNA, 77 bp, Homo sapiens
agggaccatgaagaagccaaggaaacggtccgacagcagcatctgcaccctctcatagtgtgaaggcaggtagccct

SEQ ID NO: 69673 - DNA, 76 bp, Homo sapiens
aagccaaggaaacggtccgacagcagcatctgcaccctctcatagtgtgaaggcaggtagcccttggggttgttgc

SEQ ID NO: 69674 - DNA, 80 bp, Homo sapiens
tccgacagcagcatctgcaccctctcatagtgtgaaggcaggtagcccttggggttgttgcccttgtctgtgttctggcg

SEQ ID NO: 69675 - DNA, 75 bp, Homo sapiens
atctgcaccctctcatagtgtgaaggcaggtagcccttggggttgttgcccttgtctgtgttctggcggccccat

SEQ ID NO: 69676 - DNA, 75 bp, Homo sapiens
tcatagtgtgaaggcaggtagcccttggggttgttgcccttgtctgtgttctggcggccccattcgtagccactg

SEQ ID NO: 69677 - DNA, 72 bp, Homo sapiens
tgtgaaggcaggtagcccttggggttgttgcccttgtctgtgttctggcggccccattcgtagccactgggg

SEQ ID NO: 69678 - DNA, 72 bp, Homo sapiens
tagcccttggggttgttgcccttgtctgtgttctggcggccccattcgtagccactgggggtcagcttgtag

SEQ ID NO: 69679 - DNA, 75 bp, Homo sapiens
ttgttgcccttgtctgtgttctggcggccccattcgtagccactgggggtcagcttgtaggccgtcagtgtacag

SEQ ID NO: 69680 - DNA, 78 bp, Homo sapiens
tgtctgtgttctggcggccccattcgtagccactgggggtcagcttgtaggccgtcagtgtacaggagcctggcgtga

SEQ ID NO: 69681 - DNA, 77 bp, Homo sapiens
tgttctggcggccccattcgtagccactgggggtcagcttgtaggccgtcagtgtacaggagcctggcgtgaagctg

SEQ ID NO: 69682 - DNA, 74 bp, Homo sapiens
attcgtagccactgggggtcagcttgtaggccgtcagtgtacaggagcctggcgtgaagctgggggaggaacga

SEQ ID NO: 69683 - DNA, 74 bp, Homo sapiens
actgggggtcagcttgtaggccgtcagtgtacaggagcctggcgtgaagctgggggaggaacgaggacagagta

SEQ ID NO: 69684 - DNA, 77 bp, Homo sapiens
gggtcagcttgtaggccgtcagtgtacaggagcctggcgtgaagctgggggaggaacgaggacagagtaacagctca

SEQ ID NO: 69685 - DNA, 80 bp, Homo sapiens
tgcaatccctgccccaccatacttcctcccaaggagcccaggcccacctgcatgtgatgataatggtcttctcgccatcc

SEQ ID NO: 69686 - DNA, 77 bp, Homo sapiens
ccccaccatacttcctcccaaggagcccaggcccacctgcatgtgatgataatggtcttctcgccatcccaagatgg

SEQ ID NO: 69687 - DNA, 79 bp, Homo sapiens
atacttcctcccaaggagcccaggcccacctgcatgtgatgataatggtcttctcgccatcccaagatgggttgtcagc

SEQ ID NO: 69688 - DNA, 83 bp, Homo sapiens
aaggagcccaggcccacctgcatgtgatgataatggtcttctcgccatcccaagatgggttgtcagccatgatcttggcatgg

SEQ ID NO: 69689 - DNA, 85 bp, Homo sapiens
aggcccacctgcatgtgatgataatggtcttctcgccatcccaagatgggttgtcagccatgatcttggcatgggtggtgacatc

SEQ ID NO: 69690 - DNA, 84 bp, Homo sapiens
atgtgatgataatggtcttctcgccatcccaagatgggttgtcagccatgatcttggcatgggtggtgacatcctggggtgata

SEQ ID NO: 69691 - DNA, 81 bp, Homo sapiens
atgataatggtcttctcgccatcccaagatgggttgtcagccatgatcttggcatgggtggtgacatcctggggtgataac

SEQ ID NO: 69692 - DNA, 81 bp, Homo sapiens
ttctcgccatcccaagatgggttgtcagccatgatcttggcatgggtggtgacatcctggggtgataactgcggggactca

SEQ ID NO: 69693 - DNA, 80 bp, Homo sapiens
aagatgggttgtcagccatgatcttggcatgggtggtgacatcctggggtgataactgcggggactcattgggctgagtg

SEQ ID NO: 69694 - DNA, 82 bp, Homo sapiens
ttgtcagccatgatcttggcatgggtggtgacatcctggggtgataactgcggggactcattgggctgagtgtggatccaac

SEQ ID NO: 69695 - DNA, 78 bp, Homo sapiens
atgatcttggcatgggtggtgacatcctggggtgataactgcggggactcattgggctgagtgtggatccaacctaag

SEQ ID NO: 69696 - DNA, 74 bp, Homo sapiens
atgggtggtgacatcctggggtgataactgcggggactcattgggctgagtgtggatccaacctaagggttcca

SEQ ID NO: 69697 - DNA, 74 bp, Homo sapiens
acatcctggggtgataactgcggggactcattgggctgagtgtggatccaacctaagggttccatctcctatag

SEQ ID NO: 69698 - DNA, 74 bp, Homo sapiens
gtgataactgcggggactcattgggctgagtgtggatccaacctaagggttccatctcctataggtaaagagga

SEQ ID NO: 69699 - DNA, 75 bp, Homo sapiens
gggactcattgggctgagtgtggatccaacctaagggttccatctcctataggtaaagaggagtacagagctgaa

SEQ ID NO: 69700 - DNA, 75 bp, Homo sapiens
attgggctgagtgtggatccaacctaagggttccatctcctataggtaaagaggagtacagagctgaatcccatc

SEQ ID NO: 69701 - DNA, 78 bp, Homo sapiens
aggaatcgcaccagcttttccacactcccaggctccatcactccccattaccttgaggtactcatgctggggcagctg

SEQ ID NO: 69702 - DNA, 80 bp, Homo sapiens
agcttttccacactcccaggctccatcactccccattaccttgaggtactcatgctggggcagctggccaggcaggtgca

SEQ ID NO: 69703 - DNA, 80 bp, Homo sapiens
actcccaggctccatcactccccattaccttgaggtactcatgctggggcagctggccaggcaggtgcacggtctggtga

SEQ ID NO: 69704 - DNA, 82 bp, Homo sapiens
tccatcactccccattaccttgaggtactcatgctggggcagctggccaggcaggtgcacggtctggtgagtgccccactgc

SEQ ID NO: 69705 - DNA, 83 bp, Homo sapiens
cattaccttgaggtactcatgctggggcagctggccaggcaggtgcacggtctggtgagtgccccactgcggcaccatcacaa

SEQ ID NO: 69706 - DNA, 87 bp, Homo sapiens
ttgaggtactcatgctggggcagctggccaggcaggtgcacggtctggtgagtgccccactgcggcaccatcacaatgcagcggatc

SEQ ID NO: 69707 - DNA, 87 bp, Homo sapiens
tcatgctggggcagctggccaggcaggtgcacggtctggtgagtgccccactgcggcaccatcacaatgcagcggatctccttcacc

SEQ ID NO: 69708 - DNA, 83 bp, Homo sapiens
ggcagctggccaggcaggtgcacggtctggtgagtgccccactgcggcaccatcacaatgcagcggatctccttcacctgggg

SEQ ID NO: 69709 - DNA, 79 bp, Homo sapiens
aggtgcacggtctggtgagtgccccactgcggcaccatcacaatgcagcggatctccttcacctgggggttatctggtg

SEQ ID NO: 69710 - DNA, 79 bp, Homo sapiens
acggtctggtgagtgccccactgcggcaccatcacaatgcagcggatctccttcacctgggggttatctggtgggctca

SEQ ID NO: 69711 - DNA, 79 bp, Homo sapiens
tgccccactgcggcaccatcacaatgcagcggatctccttcacctgggggttatctggtgggctcaccccatataggta

SEQ ID NO: 69712 - DNA, 80 bp, Homo sapiens
ggcaccatcacaatgcagcggatctccttcacctgggggttatctggtgggctcaccccatataggtatcctgcaatctg

SEQ ID NO: 69713 - DNA, 80 bp, Homo sapiens
atcacaatgcagcggatctccttcacctgggggttatctggtgggctcaccccatataggtatcctgcaatctggagaca

SEQ ID NO: 69714 - DNA, 74 bp, Homo sapiens
agcggatctccttcacctgggggttatctggtgggctcaccccatataggtatcctgcaatctggagacaaagg

SEQ ID NO: 69715 - DNA, 73 bp, Homo sapiens
cttcacctgggggttatctggtgggctcaccccatataggtatcctgcaatctggagacaaaggggtcaggaa

SEQ ID NO: 69716 - DNA, 73 bp, Homo sapiens
ttatctggtgggctcaccccatataggtatcctgcaatctggagacaaaggggtcaggaaccaaaactcttct

SEQ ID NO: 69717 - DNA, 79 bp, Homo sapiens
aaatgagttgggcacacactgtggcctagctgagtccacttactcacttgggcccgaaggtcagatatgcagatgaact

SEQ ID NO: 69718 - DNA, 82 bp, Homo sapiens
gcacacactgtggcctagctgagtccacttactcacttgggcccgaaggtcagatatgcagatgaacttcttaagcacattc

SEQ ID NO: 69719 - DNA, 79 bp, Homo sapiens
tggcctagctgagtccacttactcacttgggcccgaaggtcagatatgcagatgaacttcttaagcacattcttgggaa

SEQ ID NO: 69720 - DNA, 78 bp, Homo sapiens
ctgagtccacttactcacttgggcccgaaggtcagatatgcagatgaacttcttaagcacattcttgggaaggatgta

SEQ ID NO: 69721 - DNA, 76 bp, Homo sapiens
acttactcacttgggcccgaaggtcagatatgcagatgaacttcttaagcacattcttgggaaggatgtaggtgta

SEQ ID NO: 69722 - DNA, 77 bp, Homo sapiens
ttgggcccgaaggtcagatatgcagatgaacttcttaagcacattcttgggaaggatgtaggtgtagccagtctcct

SEQ ID NO: 69723 - DNA, 84 bp, Homo sapiens
tcagatatgcagatgaacttcttaagcacattcttgggaaggatgtaggtgtagccagtctccttgatgtcgtcagatgaaaca

SEQ ID NO: 69724 - DNA, 80 bp, Homo sapiens
agatgaacttcttaagcacattcttgggaaggatgtaggtgtagccagtctccttgatgtcgtcagatgaaacatagatg

SEQ ID NO: 69725 - DNA, 80 bp, Homo sapiens
acttcttaagcacattcttgggaaggatgtaggtgtagccagtctccttgatgtcgtcagatgaaacatagatgtgattg

SEQ ID NO: 69726 - DNA, 80 bp, Homo sapiens
attcttgggaaggatgtaggtgtagccagtctccttgatgtcgtcagatgaaacatagatgtgattggtccttaggtgca

SEQ ID NO: 69727 - DNA, 82 bp, Homo sapiens
aaggatgtaggtgtagccagtctccttgatgtcgtcagatgaaacatagatgtgattggtccttaggtgcaggttggcagca

SEQ ID NO: 69728 - DNA, 83 bp, Homo sapiens
tagccagtctccttgatgtcgtcagatgaaacatagatgtgattggtccttaggtgcaggttggcagcagagatggccctaaa

SEQ ID NO: 69729 - DNA, 80 bp, Homo sapiens
agtctccttgatgtcgtcagatgaaacatagatgtgattggtccttaggtgcaggttggcagcagagatggccctaaaaa

SEQ ID NO: 69730 - DNA, 80 bp, Homo sapiens
atgtcgtcagatgaaacatagatgtgattggtccttaggtgcaggttggcagcagagatggccctaaaaacaggcaggga

SEQ ID NO: 69731 - DNA, 81 bp, Homo sapiens
atgaaacatagatgtgattggtccttaggtgcaggttggcagcagagatggccctaaaaacaggcagggagtgtcagcatc

SEQ ID NO: 69732 - DNA, 83 bp, Homo sapiens
atgtgattggtccttaggtgcaggttggcagcagagatggccctaaaaacaggcagggagtgtcagcatcgctcagcccagca

SEQ ID NO: 69733 - DNA, 73 bp, Homo sapiens
ttaggtagtgcagccggcctttccatccccaccctcttgcccgacagtacctgaccctccactcagtcttgga

SEQ ID NO: 69734 - DNA, 72 bp, Homo sapiens
agccggcctttccatccccaccctcttgcccgacagtacctgaccctccactcagtcttggatgagaaagtc

SEQ ID NO: 69735 - DNA, 75 bp, Homo sapiens
accctcttgcccgacagtacctgaccctccactcagtcttggatgagaaagtctgggtctcatagttgctggtgg

SEQ ID NO: 69736 - DNA, 81 bp, Homo sapiens
acagtacctgaccctccactcagtcttggatgagaaagtctgggtctcatagttgctggtggtggaggtgatgatctcatc

SEQ ID NO: 69737 - DNA, 84 bp, Homo sapiens
ccctccactcagtcttggatgagaaagtctgggtctcatagttgctggtggtggaggtgatgatctcatcgccatgcttgttga

SEQ ID NO: 69738 - DNA, 86 bp, Homo sapiens
actcagtcttggatgagaaagtctgggtctcatagttgctggtggtggaggtgatgatctcatcgccatgcttgttgacagtgcga

SEQ ID NO: 69739 - DNA, 86 bp, Homo sapiens
atgagaaagtctgggtctcatagttgctggtggtggaggtgatgatctcatcgccatgcttgttgacagtgcgagtctgtgttgcc

SEQ ID NO: 69740 - DNA, 89 bp, Homo sapiens
tgggtctcatagttgctggtggtggaggtgatgatctcatcgccatgcttgttgacagtgcgagtctgtgttgccgtcagctgcgattg

SEQ ID NO: 69741 - DNA, 86 bp, Homo sapiens
atagttgctggtggtggaggtgatgatctcatcgccatgcttgttgacagtgcgagtctgtgttgccgtcagctgcgattgttcct

SEQ ID NO: 69742 - DNA, 88 bp, Homo sapiens
gtggaggtgatgatctcatcgccatgcttgttgacagtgcgagtctgtgttgccgtcagctgcgattgttccttggtctgcttctcga

SEQ ID NO: 69743 - DNA, 90 bp, Homo sapiens
atgatctcatcgccatgcttgttgacagtgcgagtctgtgttgccgtcagctgcgattgttccttggtctgcttctcgatctcagcgatc

SEQ ID NO: 69744 - DNA, 89 bp, Homo sapiens
atcgccatgcttgttgacagtgcgagtctgtgttgccgtcagctgcgattgttccttggtctgcttctcgatctcagcgatctgctgcc

SEQ ID NO: 69745 - DNA, 90 bp, Homo sapiens
cttgttgacagtgcgagtctgtgttgccgtcagctgcgattgttccttggtctgcttctcgatctcagcgatctgctgccgctgctgtga

SEQ ID NO: 69746 - DNA, 89 bp, Homo sapiens
gagtctgtgttgccgtcagctgcgattgttccttggtctgcttctcgatctcagcgatctgctgccgctgctgtgacggtgccgagatc

SEQ ID NO: 69747 - DNA, 90 bp, Homo sapiens
tgtgttgccgtcagctgcgattgttccttggtctgcttctcgatctcagcgatctgctgccgctgctgtgacggtgccgagatctccata

SEQ ID NO: 69748 - DNA, 89 bp, Homo sapiens
tgcgattgttccttggtctgcttctcgatctcagcgatctgctgccgctgctgtgacggtgccgagatctccatacccaggatgatgtc

SEQ ID NO: 69749 - DNA, 87 bp, Homo sapiens
tccttggtctgcttctcgatctcagcgatctgctgccgctgctgtgacggtgccgagatctccatacccaggatgatgtctcgaatt

SEQ ID NO: 69750 - DNA, 90 bp, Homo sapiens
tctgcttctcgatctcagcgatctgctgccgctgctgtgacggtgccgagatctccatacccaggatgatgtctcgaatttctgattgtg

SEQ ID NO: 69751 - DNA, 91 bp, Homo sapiens
atctcagcgatctgctgccgctgctgtgacggtgccgagatctccatacccaggatgatgtctcgaatttctgattgtgtcagtgatgcca

SEQ ID NO: 69752 - DNA, 88 bp, Homo sapiens
tgctgccgctgctgtgacggtgccgagatctccatacccaggatgatgtctcgaatttctgattgtgtcagtgatgccacgttcacac

SEQ ID NO: 69753 - DNA, 83 bp, Homo sapiens
ctgtgacggtgccgagatctccatacccaggatgatgtctcgaatttctgattgtgtcagtgatgccacgttcacactgtggg

SEQ ID NO: 69754 - DNA, 82 bp, Homo sapiens
acggtgccgagatctccatacccaggatgatgtctcgaatttctgattgtgtcagtgatgccacgttcacactgtggggatg

SEQ ID NO: 69755 - DNA, 81 bp, Homo sapiens
tccatacccaggatgatgtctcgaatttctgattgtgtcagtgatgccacgttcacactgtggggatggtgtgggttatat

SEQ ID NO: 69756 - DNA, 80 bp, Homo sapiens
aggatgatgtctcgaatttctgattgtgtcagtgatgccacgttcacactgtggggatggtgtgggttatattacaagga

SEQ ID NO: 69757 - DNA, 78 bp, Homo sapiens
tctcgaatttctgattgtgtcagtgatgccacgttcacactgtggggatggtgtgggttatattacaaggatcccttc

SEQ ID NO: 69758 - DNA, 74 bp, Homo sapiens
aaaaccgtatatagacctcctgtctgtgtccccaccagcactgctcacttgtttttcttgccgtagtcagccaa

SEQ ID NO: 69759 - DNA, 81 bp, Homo sapiens
tatatagacctcctgtctgtgtccccaccagcactgctcacttgtttttcttgccgtagtcagccaagatcagatccttga

SEQ ID NO: 69760 - DNA, 81 bp, Homo sapiens
tctgtgtccccaccagcactgctcacttgtttttcttgccgtagtcagccaagatcagatccttgagctgcacctcgacct

SEQ ID NO: 69761 - DNA, 82 bp, Homo sapiens
caccagcactgctcacttgtttttcttgccgtagtcagccaagatcagatccttgagctgcacctcgaccttgatccattct

SEQ ID NO: 69762 - DNA, 81 bp, Homo sapiens
actgctcacttgtttttcttgccgtagtcagccaagatcagatccttgagctgcacctcgaccttgatccattcttcgtca

SEQ ID NO: 69763 - DNA, 81 bp, Homo sapiens
ttgtttttcttgccgtagtcagccaagatcagatccttgagctgcacctcgaccttgatccattcttcgtcagtcagagtg

SEQ ID NO: 69764 - DNA, 84 bp, Homo sapiens
ttgccgtagtcagccaagatcagatccttgagctgcacctcgaccttgatccattcttcgtcagtcagagtgggccagatgtgg

SEQ ID NO: 69765 - DNA, 82 bp, Homo sapiens
aagatcagatccttgagctgcacctcgaccttgatccattcttcgtcagtcagagtgggccagatgtggtgtggttctgtaa

SEQ ID NO: 69766 - DNA, 81 bp, Homo sapiens
agatccttgagctgcacctcgaccttgatccattcttcgtcagtcagagtgggccagatgtggtgtggttctgtaatagta

SEQ ID NO: 69767 - DNA, 80 bp, Homo sapiens
ctgcacctcgaccttgatccattcttcgtcagtcagagtgggccagatgtggtgtggttctgtaatagtagtcttgtctg

SEQ ID NO: 69768 - DNA, 81 bp, Homo sapiens
ttgatccattcttcgtcagtcagagtgggccagatgtggtgtggttctgtaatagtagtcttgtctggcttcaggatcact

SEQ ID NO: 69769 - DNA, 79 bp, Homo sapiens
attcttcgtcagtcagagtgggccagatgtggtgtggttctgtaatagtagtcttgtctggcttcaggatcacttttgc

SEQ ID NO: 69770 - DNA, 78 bp, Homo sapiens
tcagagtgggccagatgtggtgtggttctgtaatagtagtcttgtctggcttcaggatcacttttgcccgatcgttgt

SEQ ID NO: 69771 - DNA, 78 bp, Homo sapiens
cagatgtggtgtggttctgtaatagtagtcttgtctggcttcaggatcacttttgcccgatcgttgttcacatgtagg

SEQ ID NO: 69772 - DNA, 79 bp, Homo sapiens
tgtggttctgtaatagtagtcttgtctggcttcaggatcacttttgcccgatcgttgttcacatgtagggcacgcagaa

SEQ ID NO: 69773 - DNA, 82 bp, Homo sapiens
tctgtaatagtagtcttgtctggcttcaggatcacttttgcccgatcgttgttcacatgtagggcacgcagaatcaggatga

SEQ ID NO: 69774 - DNA, 81 bp, Homo sapiens
tagtcttgtctggcttcaggatcacttttgcccgatcgttgttcacatgtagggcacgcagaatcaggatgagacgggaga

SEQ ID NO: 69775 - DNA, 78 bp, Homo sapiens
ttcaggatcacttttgcccgatcgttgttcacatgtagggcacgcagaatcaggatgagacgggagaaggcctgggaa

SEQ ID NO: 69776 - DNA, 76 bp, Homo sapiens
atcacttttgcccgatcgttgttcacatgtagggcacgcagaatcaggatgagacgggagaaggcctgggaaaaga

SEQ ID NO: 69777 - DNA, 75 bp, Homo sapiens
atcgttgttcacatgtagggcacgcagaatcaggatgagacgggagaaggcctgggaaaagatttggaagagtgg

SEQ ID NO: 69778 - DNA, 74 bp, Homo sapiens
gttcacatgtagggcacgcagaatcaggatgagacgggagaaggcctgggaaaagatttggaagagtggggtag

SEQ ID NO: 69779 - DNA, 70 bp, Homo sapiens
aaccctaaacccgctcctcctccagcgatcttctcttcccgaggttcataccgtgtaagatgaaatagtc

SEQ ID NO: 69780 - DNA, 77 bp, Homo sapiens
tcctcctccagcgatcttctcttcccgaggttcataccgtgtaagatgaaatagtcttgagccagtcgtcatagagg

SEQ ID NO: 69781 - DNA, 76 bp, Homo sapiens
cgatcttctcttcccgaggttcataccgtgtaagatgaaatagtcttgagccagtcgtcatagaggttgaagagaa

SEQ ID NO: 69782 - DNA, 76 bp, Homo sapiens
ttctcttcccgaggttcataccgtgtaagatgaaatagtcttgagccagtcgtcatagaggttgaagagaaccatc

SEQ ID NO: 69783 - DNA, 77 bp, Homo sapiens
aggttcataccgtgtaagatgaaatagtcttgagccagtcgtcatagaggttgaagagaaccatctggggctcagtg

SEQ ID NO: 69784 - DNA, 80 bp, Homo sapiens
taagatgaaatagtcttgagccagtcgtcatagaggttgaagagaaccatctggggctcagtggctttaaggatgagatc

SEQ ID NO: 69785 - DNA, 76 bp, Homo sapiens
aaatagtcttgagccagtcgtcatagaggttgaagagaaccatctggggctcagtggctttaaggatgagatcccc

SEQ ID NO: 69786 - DNA, 75 bp, Homo sapiens
ttgagccagtcgtcatagaggttgaagagaaccatctggggctcagtggctttaaggatgagatccccgaatttt

SEQ ID NO: 69787 - DNA, 73 bp, Homo sapiens
atagaggttgaagagaaccatctggggctcagtggctttaaggatgagatccccgaatttttccaccttgaga

SEQ ID NO: 69788 - DNA, 74 bp, Homo sapiens
ttgaagagaaccatctggggctcagtggctttaaggatgagatccccgaatttttccaccttgagacacgcctg

SEQ ID NO: 69789 - DNA, 71 bp, Homo sapiens
atctggggctcagtggctttaaggatgagatccccgaatttttccaccttgagacacgcctggaaagggag

SEQ ID NO: 69790 - DNA, 70 bp, Homo sapiens
agtggctttaaggatgagatccccgaatttttccaccttgagacacgcctggaaagggagttggagctcc

SEQ ID NO: 69791 - DNA, 70 bp, Homo sapiens
ttaaggatgagatccccgaatttttccaccttgagacacgcctggaaagggagttggagctccgatcctt

SEQ ID NO: 69792 - DNA, 71 bp, Homo sapiens
cccgaatttttccaccttgagacacgcctggaaagggagttggagctccgatcctttgatgacaatattgg

SEQ ID NO: 69793 - DNA, 71 bp, Homo sapiens
atttttccaccttgagacacgcctggaaagggagttggagctccgatcctttgatgacaatattggggaag

SEQ ID NO: 69794 - DNA, 74 bp, Homo sapiens
agacacgcctggaaagggagttggagctccgatcctttgatgacaatattggggaagtccagtaagtgcaccta

SEQ ID NO: 69795 - DNA, 75 bp, Homo sapiens
gaaagggagttggagctccgatcctttgatgacaatattggggaagtccagtaagtgcacctaagacaagatcaa

SEQ ID NO: 69796 - DNA, 76 bp, Homo sapiens
agttggagctccgatcctttgatgacaatattggggaagtccagtaagtgcacctaagacaagatcaagtccaaga

SEQ ID NO: 69797 - DNA, 77 bp, Homo sapiens
ctccgatcctttgatgacaatattggggaagtccagtaagtgcacctaagacaagatcaagtccaagatgagaaaca

SEQ ID NO: 69798 - DNA, 72 bp, Homo sapiens
acctaagacaagatcaagtccaagatgagaaacagcctgaaggtctcaaggtctcttttctcctaccccacc

SEQ ID NO: 69799 - DNA, 70 bp, Homo sapiens
tgaaggtctcaaggtctcttttctcctaccccaccccaccctcttacctccagtgggtccagcatgccct

SEQ ID NO: 69800 - DNA, 69 bp, Homo sapiens
aaggtctcttttctcctaccccaccccaccctcttacctccagtgggtccagcatgcccttcctggtga

SEQ ID NO: 69801 - DNA, 73 bp, Homo sapiens
ttttctcctaccccaccccaccctcttacctccagtgggtccagcatgcccttcctggtgacaatgatctgct

SEQ ID NO: 69802 - DNA, 84 bp, Homo sapiens
tcttacctccagtgggtccagcatgcccttcctggtgacaatgatctgcttgggctgctcctccacaggcagagatcggatcag

SEQ ID NO: 69803 - DNA, 83 bp, Homo sapiens
agtgggtccagcatgcccttcctggtgacaatgatctgcttgggctgctcctccacaggcagagatcggatcagggcggccac

SEQ ID NO: 69804 - DNA, 85 bp, Homo sapiens
gtccagcatgcccttcctggtgacaatgatctgcttgggctgctcctccacaggcagagatcggatcagggcggccacctcctca

SEQ ID NO: 69805 - DNA, 84 bp, Homo sapiens
cttcctggtgacaatgatctgcttgggctgctcctccacaggcagagatcggatcagggcggccacctcctcagctgtcttcca

SEQ ID NO: 69806 - DNA, 83 bp, Homo sapiens
acaatgatctgcttgggctgctcctccacaggcagagatcggatcagggcggccacctcctcagctgtcttccacttagccaa

SEQ ID NO: 69807 - DNA, 78 bp, Homo sapiens
ttgggctgctcctccacaggcagagatcggatcagggcggccacctcctcagctgtcttccacttagccaacttaaaa

SEQ ID NO: 69808 - DNA, 79 bp, Homo sapiens
tcctccacaggcagagatcggatcagggcggccacctcctcagctgtcttccacttagccaacttaaaagcaagagaga

SEQ ID NO: 69809 - DNA, 76 bp, Homo sapiens
aggcagagatcggatcagggcggccacctcctcagctgtcttccacttagccaacttaaaagcaagagagaagaaa

SEQ ID NO: 69810 - DNA, 72 bp, Homo sapiens
atcagggcggccacctcctcagctgtcttccacttagccaacttaaaagcaagagagaagaaaatggaaatt

SEQ ID NO: 69811 - DNA, 74 bp, Homo sapiens
aataagaggcaacatggttctacagcctcttcatctttaaacctgctcacctgccccaaacgcttctgtcccgc

SEQ ID NO: 69812 - DNA, 73 bp, Homo sapiens
aacatggttctacagcctcttcatctttaaacctgctcacctgccccaaacgcttctgtcccgcccacacgga

SEQ ID NO: 69813 - DNA, 73 bp, Homo sapiens
gcctcttcatctttaaacctgctcacctgccccaaacgcttctgtcccgcccacacggacgtgtggattatct

SEQ ID NO: 69814 - DNA, 72 bp, Homo sapiens
atctttaaacctgctcacctgccccaaacgcttctgtcccgcccacacggacgtgtggattatcttgaggaa

SEQ ID NO: 69815 - DNA, 74 bp, Homo sapiens
aacctgctcacctgccccaaacgcttctgtcccgcccacacggacgtgtggattatcttgaggaacagctgccc

SEQ ID NO: 69816 - DNA, 74 bp, Homo sapiens
cccaaacgcttctgtcccgcccacacggacgtgtggattatcttgaggaacagctgccctgtgcgtgggttgaa

SEQ ID NO: 69817 - DNA, 77 bp, Homo sapiens
acgcttctgtcccgcccacacggacgtgtggattatcttgaggaacagctgccctgtgcgtgggttgaagatgaaga

SEQ ID NO: 69818 - DNA, 78 bp, Homo sapiens
cccacacggacgtgtggattatcttgaggaacagctgccctgtgcgtgggttgaagatgaagatggctccgttgatgg

SEQ ID NO: 69819 - DNA, 80 bp, Homo sapiens
gtgtggattatcttgaggaacagctgccctgtgcgtgggttgaagatgaagatggctccgttgatgggcttggttgtcaa

SEQ ID NO: 69820 - DNA, 78 bp, Homo sapiens
attatcttgaggaacagctgccctgtgcgtgggttgaagatgaagatggctccgttgatgggcttggttgtcaagttc

SEQ ID NO: 69821 - DNA, 75 bp, Homo sapiens
aacagctgccctgtgcgtgggttgaagatgaagatggctccgttgatgggcttggttgtcaagttcccttcaaag

SEQ ID NO: 69822 - DNA, 74 bp, Homo sapiens
ccctgtgcgtgggttgaagatgaagatggctccgttgatgggcttggttgtcaagttcccttcaaaggtctaga

SEQ ID NO: 69823 - DNA, 75 bp, Homo sapiens
ttgaagatgaagatggctccgttgatgggcttggttgtcaagttcccttcaaaggtctagaggaggacggcattc

SEQ ID NO: 69824 - DNA, 73 bp, Homo sapiens
atgaagatggctccgttgatgggcttggttgtcaagttcccttcaaaggtctagaggaggacggcattcgtta

SEQ ID NO: 69825 - DNA, 82 bp, Homo sapiens
agccatgtacagagtcccgcacctatacactgctgctaacactcaccttgtgaatagtcactctgtagacgttggtgtcatc

SEQ ID NO: 69826 - DNA, 81 bp, Homo sapiens
tacagagtcccgcacctatacactgctgctaacactcaccttgtgaatagtcactctgtagacgttggtgtcatccacaaa

SEQ ID NO: 69827 - DNA, 80 bp, Homo sapiens
acctatacactgctgctaacactcaccttgtgaatagtcactctgtagacgttggtgtcatccacaaaccagataatctg

SEQ ID NO: 69828 - DNA, 81 bp, Homo sapiens
tacactgctgctaacactcaccttgtgaatagtcactctgtagacgttggtgtcatccacaaaccagataatctggttgga

SEQ ID NO: 69829 - DNA, 80 bp, Homo sapiens
taacactcaccttgtgaatagtcactctgtagacgttggtgtcatccacaaaccagataatctggttggagaagagctca

SEQ ID NO: 69830 - DNA, 81 bp, Homo sapiens
ttgtgaatagtcactctgtagacgttggtgtcatccacaaaccagataatctggttggagaagagctcaccatagttctga

SEQ ID NO: 69831 - DNA, 78 bp, Homo sapiens
actctgtagacgttggtgtcatccacaaaccagataatctggttggagaagagctcaccatagttctgagaagacaaa

SEQ ID NO: 69832 - DNA, 78 bp, Homo sapiens
tagacgttggtgtcatccacaaaccagataatctggttggagaagagctcaccatagttctgagaagacaaataaggc

SEQ ID NO: 69833 - DNA, 78 bp, Homo sapiens
atccacaaaccagataatctggttggagaagagctcaccatagttctgagaagacaaataaggctcagtgggttcaga

SEQ ID NO: 69834 - DNA, 78 bp, Homo sapiens
aaaccagataatctggttggagaagagctcaccatagttctgagaagacaaataaggctcagtgggttcagatgaata

SEQ ID NO: 69835 - DNA, 80 bp, Homo sapiens
atctggttggagaagagctcaccatagttctgagaagacaaataaggctcagtgggttcagatgaatagagctgtagccc

SEQ ID NO: 69836 - DNA, 80 bp, Homo sapiens
agaagagctcaccatagttctgagaagacaaataaggctcagtgggttcagatgaatagagctgtagccccttgcggatc

SEQ ID NO: 69837 - DNA, 77 bp, Homo sapiens
tagttctgagaagacaaataaggctcagtgggttcagatgaatagagctgtagccccttgcggatccgttcacgtaa

SEQ ID NO: 69838 - DNA, 76 bp, Homo sapiens
aagacaaataaggctcagtgggttcagatgaatagagctgtagccccttgcggatccgttcacgtaacacatacag

SEQ ID NO: 69839 - DNA, 76 bp, Homo sapiens
aataaggctcagtgggttcagatgaatagagctgtagccccttgcggatccgttcacgtaacacatacagggcagg

SEQ ID NO: 69840 - DNA, 78 bp, Homo sapiens
gttcagatgaatagagctgtagccccttgcggatccgttcacgtaacacatacagggcagggtttgccttcatgatct

SEQ ID NO: 69841 - DNA, 78 bp, Homo sapiens
atgaatagagctgtagccccttgcggatccgttcacgtaacacatacagggcagggtttgccttcatgatcttggcca

SEQ ID NO: 69842 - DNA, 79 bp, Homo sapiens
ttgcggatccgttcacgtaacacatacagggcagggtttgccttcatgatcttggccatggcctgttgtatgagaggct

SEQ ID NO: 69843 - DNA, 81 bp, Homo sapiens
ttcacgtaacacatacagggcagggtttgccttcatgatcttggccatggcctgttgtatgagaggcttgctgcctgggaa

SEQ ID NO: 69844 - DNA, 80 bp, Homo sapiens
tacagggcagggtttgccttcatgatcttggccatggcctgttgtatgagaggcttgctgcctgggaaccagtttccata

SEQ ID NO: 69845 - DNA, 79 bp, Homo sapiens
agggtttgccttcatgatcttggccatggcctgttgtatgagaggcttgctgcctgggaaccagtttccataggcactg

SEQ ID NO: 69846 - DNA, 81 bp, Homo sapiens
cttcatgatcttggccatggcctgttgtatgagaggcttgctgcctgggaaccagtttccataggcactgtgaggataaaa

SEQ ID NO: 69847 - DNA, 78 bp, Homo sapiens
ttggccatggcctgttgtatgagaggcttgctgcctgggaaccagtttccataggcactgtgaggataaaagggtcaa

SEQ ID NO: 69848 - DNA, 75 bp, Homo sapiens
tgttgtatgagaggcttgctgcctgggaaccagtttccataggcactgtgaggataaaagggtcaagaaaagtta

SEQ ID NO: 69849 - DNA, 73 bp, Homo sapiens
atgagaggcttgctgcctgggaaccagtttccataggcactgtgaggataaaagggtcaagaaaagttaagac

SEQ ID NO: 69850 - DNA, 81 bp, Homo sapiens
gcgcctggcctgaaaatacatggtcctgagcctcaactcacctgtgcaagttataggccaggtcaatggcgatgagtacac

SEQ ID NO: 69851 - DNA, 81 bp, Homo sapiens
tgaaaatacatggtcctgagcctcaactcacctgtgcaagttataggccaggtcaatggcgatgagtacacctgtgggcga

SEQ ID NO: 69852 - DNA, 79 bp, Homo sapiens
atacatggtcctgagcctcaactcacctgtgcaagttataggccaggtcaatggcgatgagtacacctgtgggcgaagg

SEQ ID NO: 69853 - DNA, 78 bp, Homo sapiens
cctcaactcacctgtgcaagttataggccaggtcaatggcgatgagtacacctgtgggcgaagggtagatactcatgt

SEQ ID NO: 69854 - DNA, 77 bp, Homo sapiens
acctgtgcaagttataggccaggtcaatggcgatgagtacacctgtgggcgaagggtagatactcatgttgtcggtg

SEQ ID NO: 69855 - DNA, 76 bp, Homo sapiens
agttataggccaggtcaatggcgatgagtacacctgtgggcgaagggtagatactcatgttgtcggtggtgtagtc

SEQ ID NO: 69856 - DNA, 75 bp, Homo sapiens
aggtcaatggcgatgagtacacctgtgggcgaagggtagatactcatgttgtcggtggtgtagtccaggaacttg

SEQ ID NO: 69857 - DNA, 74 bp, Homo sapiens
atggcgatgagtacacctgtgggcgaagggtagatactcatgttgtcggtggtgtagtccaggaacttggcccg

SEQ ID NO: 69858 - DNA, 72 bp, Homo sapiens
gtacacctgtgggcgaagggtagatactcatgttgtcggtggtgtagtccaggaacttggcccgggcgtagc

SEQ ID NO: 69859 - DNA, 73 bp, Homo sapiens
aagggtagatactcatgttgtcggtggtgtagtccaggaacttggcccgggcgtagcgctcaatgtcgtggga

SEQ ID NO: 69860 - DNA, 77 bp, Homo sapiens
tagatactcatgttgtcggtggtgtagtccaggaacttggcccgggcgtagcgctcaatgtcgtgggaatcatagtc

SEQ ID NO: 69861 - DNA, 73 bp, Homo sapiens
tgttgtcggtggtgtagtccaggaacttggcccgggcgtagcgctcaatgtcgtgggaatcatagtcccccca

SEQ ID NO: 69862 - DNA, 76 bp, Homo sapiens
tagtccaggaacttggcccgggcgtagcgctcaatgtcgtgggaatcatagtccccccagcgcaactggatgtcaa

SEQ ID NO: 69863 - DNA, 75 bp, Homo sapiens
aacttggcccgggcgtagcgctcaatgtcgtgggaatcatagtccccccagcgcaactggatgtcaatccagtat

SEQ ID NO: 69864 - DNA, 75 bp, Homo sapiens
cccgggcgtagcgctcaatgtcgtgggaatcatagtccccccagcgcaactggatgtcaatccagtatttctggg

SEQ ID NO: 69865 - DNA, 81 bp, Homo sapiens
tcaatgtcgtgggaatcatagtccccccagcgcaactggatgtcaatccagtatttctgggtggtggtgctgtccatcaca

SEQ ID NO: 69866 - DNA, 79 bp, Homo sapiens
tcgtgggaatcatagtccccccagcgcaactggatgtcaatccagtatttctgggtggtggtgctgtccatcacatccc

SEQ ID NO: 69867 - DNA, 80 bp, Homo sapiens
atagtccccccagcgcaactggatgtcaatccagtatttctgggtggtggtgctgtccatcacatccctgaggatgaaga

SEQ ID NO: 69868 - DNA, 81 bp, Homo sapiens
gcaactggatgtcaatccagtatttctgggtggtggtgctgtccatcacatccctgaggatgaagagggttcaagcttcta

SEQ ID NO: 69869 - DNA, 78 bp, Homo sapiens
atgtcaatccagtatttctgggtggtggtgctgtccatcacatccctgaggatgaagagggttcaagcttctaagaaa

SEQ ID NO: 69870 - DNA, 75 bp, Homo sapiens
aggaaaacgaaagtgtcctggctgcctagggctgggtcctgaggcacttacttggagtcagccagcaatgagggc

SEQ ID NO: 69871 - DNA, 78 bp, Homo sapiens
tcctggctgcctagggctgggtcctgaggcacttacttggagtcagccagcaatgagggccgggagacattccactta

SEQ ID NO: 69872 - DNA, 75 bp, Homo sapiens
cctagggctgggtcctgaggcacttacttggagtcagccagcaatgagggccgggagacattccacttataggag

SEQ ID NO: 69873 - DNA, 79 bp, Homo sapiens
gtcctgaggcacttacttggagtcagccagcaatgagggccgggagacattccacttataggaggcaaagagcaggata

SEQ ID NO: 69874 - DNA, 80 bp, Homo sapiens
acttacttggagtcagccagcaatgagggccgggagacattccacttataggaggcaaagagcaggatatctgcacagga

SEQ ID NO: 69875 - DNA, 81 bp, Homo sapiens
agtcagccagcaatgagggccgggagacattccacttataggaggcaaagagcaggatatctgcacaggaagagttcatct

SEQ ID NO: 69876 - DNA, 80 bp, Homo sapiens
caatgagggccgggagacattccacttataggaggcaaagagcaggatatctgcacaggaagagttcatcttatatgact

SEQ ID NO: 69877 - DNA, 78 bp, Homo sapiens
agggccgggagacattccacttataggaggcaaagagcaggatatctgcacaggaagagttcatcttatatgactttc

SEQ ID NO: 69878 - DNA, 79 bp, Homo sapiens
attccacttataggaggcaaagagcaggatatctgcacaggaagagttcatcttatatgactttcggggatggattgtc

SEQ ID NO: 69879 - DNA, 78 bp, Homo sapiens
ttataggaggcaaagagcaggatatctgcacaggaagagttcatcttatatgactttcggggatggattgtctccttt

SEQ ID NO: 69880 - DNA, 78 bp, Homo sapiens
agcaggatatctgcacaggaagagttcatcttatatgactttcggggatggattgtctccttttgtactgtctcaatt

SEQ ID NO: 69881 - DNA, 77 bp, Homo sapiens
atatctgcacaggaagagttcatcttatatgactttcggggatggattgtctccttttgtactgtctcaatttccag

SEQ ID NO: 69882 - DNA, 76 bp, Homo sapiens
aagagttcatcttatatgactttcggggatggattgtctccttttgtactgtctcaatttccagtgcatcaagttc

SEQ ID NO: 69883 - DNA, 76 bp, Homo sapiens
ttatatgactttcggggatggattgtctccttttgtactgtctcaatttccagtgcatcaagttcctggtcaaaca

SEQ ID NO: 69884 - DNA, 74 bp, Homo sapiens
actttcggggatggattgtctccttttgtactgtctcaatttccagtgcatcaagttcctggtcaaacacctga

SEQ ID NO: 69885 - DNA, 75 bp, Homo sapiens
atggattgtctccttttgtactgtctcaatttccagtgcatcaagttcctggtcaaacacctgaaggaaaacatg

SEQ ID NO: 69886 - DNA, 75 bp, Homo sapiens
tccttttgtactgtctcaatttccagtgcatcaagttcctggtcaaacacctgaaggaaaacatggagagattaa

SEQ ID NO: 69887 - DNA, 81 bp, Homo sapiens
ctgagctgactctctacagtaccctctcccctcgattccagcccacctgacataagtccataacaatgctctcatggatct

SEQ ID NO: 69888 - DNA, 81 bp, Homo sapiens
tctctacagtaccctctcccctcgattccagcccacctgacataagtccataacaatgctctcatggatcttctgccacaa

SEQ ID NO: 69889 - DNA, 80 bp, Homo sapiens
acagtaccctctcccctcgattccagcccacctgacataagtccataacaatgctctcatggatcttctgccacaagtga

SEQ ID NO: 69890 - DNA, 86 bp, Homo sapiens
ctcgattccagcccacctgacataagtccataacaatgctctcatggatcttctgccacaagtgagctcggaagatctggatgaga

SEQ ID NO: 69891 - DNA, 87 bp, Homo sapiens
agcccacctgacataagtccataacaatgctctcatggatcttctgccacaagtgagctcggaagatctggatgagagagatcttca

SEQ ID NO: 69892 - DNA, 87 bp, Homo sapiens
ctgacataagtccataacaatgctctcatggatcttctgccacaagtgagctcggaagatctggatgagagagatcttcagcgtggg

SEQ ID NO: 69893 - DNA, 90 bp, Homo sapiens
taacaatgctctcatggatcttctgccacaagtgagctcggaagatctggatgagagagatcttcagcgtggggatcttgccgtgcatga

SEQ ID NO: 69894 - DNA, 90 bp, Homo sapiens
atgctctcatggatcttctgccacaagtgagctcggaagatctggatgagagagatcttcagcgtggggatcttgccgtgcatgaagata

SEQ ID NO: 69895 - DNA, 85 bp, Homo sapiens
atcttctgccacaagtgagctcggaagatctggatgagagagatcttcagcgtggggatcttgccgtgcatgaagatacccgtca

SEQ ID NO: 69896 - DNA, 83 bp, Homo sapiens
ccacaagtgagctcggaagatctggatgagagagatcttcagcgtggggatcttgccgtgcatgaagatacccgtcaggtcta

SEQ ID NO: 69897 - DNA, 84 bp, Homo sapiens
tcggaagatctggatgagagagatcttcagcgtggggatcttgccgtgcatgaagatacccgtcaggtctagctgcacctgaaa

SEQ ID NO: 69898 - DNA, 83 bp, Homo sapiens
atgagagagatcttcagcgtggggatcttgccgtgcatgaagatacccgtcaggtctagctgcacctgaaagcctacatatac

SEQ ID NO: 69899 - DNA, 82 bp, Homo sapiens
agagatcttcagcgtggggatcttgccgtgcatgaagatacccgtcaggtctagctgcacctgaaagcctacatatacctgc

SEQ ID NO: 69900 - DNA, 79 bp, Homo sapiens
tggggatcttgccgtgcatgaagatacccgtcaggtctagctgcacctgaaagcctacatatacctgccaggaaaacga

SEQ ID NO: 69901 - DNA, 79 bp, Homo sapiens
ccgtgcatgaagatacccgtcaggtctagctgcacctgaaagcctacatatacctgccaggaaaacgacaatgtgacat

SEQ ID NO: 69902 - DNA, 79 bp, Homo sapiens
atgaagatacccgtcaggtctagctgcacctgaaagcctacatatacctgccaggaaaacgacaatgtgacattagaga

SEQ ID NO: 69903 - DNA, 78 bp, Homo sapiens
agaagcagcaactgtctttagcttcccctctccagtgtcaatcacactcacattggctcgattaatggtcggggacca

SEQ ID NO: 69904 - DNA, 76 bp, Homo sapiens
tctttagcttcccctctccagtgtcaatcacactcacattggctcgattaatggtcggggaccaccagagggtgaa

SEQ ID NO: 69905 - DNA, 76 bp, Homo sapiens
ccctctccagtgtcaatcacactcacattggctcgattaatggtcggggaccaccagagggtgaatctacgattgg

SEQ ID NO: 69906 - DNA, 78 bp, Homo sapiens
tgtcaatcacactcacattggctcgattaatggtcggggaccaccagagggtgaatctacgattgggaatctggttca

SEQ ID NO: 69907 - DNA, 76 bp, Homo sapiens
atcacactcacattggctcgattaatggtcggggaccaccagagggtgaatctacgattgggaatctggttcagtc

SEQ ID NO: 69908 - DNA, 76 bp, Homo sapiens
attggctcgattaatggtcggggaccaccagagggtgaatctacgattgggaatctggttcagtcctgatcgctga

SEQ ID NO: 69909 - DNA, 76 bp, Homo sapiens
ttaatggtcggggaccaccagagggtgaatctacgattgggaatctggttcagtcctgatcgctgagcattagtta

SEQ ID NO: 69910 - DNA, 78 bp, Homo sapiens
accaccagagggtgaatctacgattgggaatctggttcagtcctgatcgctgagcattagttagcttcttccacttca

SEQ ID NO: 69911 - DNA, 80 bp, Homo sapiens
gtgaatctacgattgggaatctggttcagtcctgatcgctgagcattagttagcttcttccacttcatagattcctcaaa

SEQ ID NO: 69912 - DNA, 80 bp, Homo sapiens
tctacgattgggaatctggttcagtcctgatcgctgagcattagttagcttcttccacttcatagattcctcaaagccac

SEQ ID NO: 69913 - DNA, 79 bp, Homo sapiens
aatctggttcagtcctgatcgctgagcattagttagcttcttccacttcatagattcctcaaagccactggccttctcc

SEQ ID NO: 69914 - DNA, 79 bp, Homo sapiens
agtcctgatcgctgagcattagttagcttcttccacttcatagattcctcaaagccactggccttctccctggggagca

SEQ ID NO: 69915 - DNA, 78 bp, Homo sapiens
ctgagcattagttagcttcttccacttcatagattcctcaaagccactggccttctccctggggagcaagagaagcag

SEQ ID NO: 69916 - DNA, 76 bp, Homo sapiens
ttagttagcttcttccacttcatagattcctcaaagccactggccttctccctggggagcaagagaagcaggtgag

SEQ ID NO: 69917 - DNA, 72 bp, Homo sapiens
atgagctcaaagggttgtgacaggtccctctaagagaggagaatcctcaccagaaaagcccctcccaggtag

SEQ ID NO: 69918 - DNA, 69 bp, Homo sapiens
agggttgtgacaggtccctctaagagaggagaatcctcaccagaaaagcccctcccaggtagggaagta

SEQ ID NO: 69919 - DNA, 70 bp, Homo sapiens
taagagaggagaatcctcaccagaaaagcccctcccaggtagggaagtaagtgcccttaaagagtgtgtg

SEQ ID NO: 69920 - DNA, 69 bp, Homo sapiens
agaatcctcaccagaaaagcccctcccaggtagggaagtaagtgcccttaaagagtgtgtgttccagaa

SEQ ID NO: 69921 - DNA, 69 bp, Homo sapiens
agaaaagcccctcccaggtagggaagtaagtgcccttaaagagtgtgtgttccagaatgccttccacac

SEQ ID NO: 69922 - DNA, 71 bp, Homo sapiens
tcccaggtagggaagtaagtgcccttaaagagtgtgtgttccagaatgccttccacaccgcccagggcctg

SEQ ID NO: 69923 - DNA, 74 bp, Homo sapiens
aagtaagtgcccttaaagagtgtgtgttccagaatgccttccacaccgcccagggcctggatcatgtctgtacg

SEQ ID NO: 69924 - DNA, 75 bp, Homo sapiens
ccttaaagagtgtgtgttccagaatgccttccacaccgcccagggcctggatcatgtctgtacggtagttgttca

SEQ ID NO: 69925 - DNA, 75 bp, Homo sapiens
aagagtgtgtgttccagaatgccttccacaccgcccagggcctggatcatgtctgtacggtagttgttcaggttc

SEQ ID NO: 69926 - DNA, 76 bp, Homo sapiens
ttccagaatgccttccacaccgcccagggcctggatcatgtctgtacggtagttgttcaggttccagagcttccca

SEQ ID NO: 69927 - DNA, 78 bp, Homo sapiens
ttccacaccgcccagggcctggatcatgtctgtacggtagttgttcaggttccagagcttcccatcatgccgctggtg

SEQ ID NO: 69928 - DNA, 79 bp, Homo sapiens
cagggcctggatcatgtctgtacggtagttgttcaggttccagagcttcccatcatgccgctggtgtgtccaccagaac

SEQ ID NO: 69929 - DNA, 79 bp, Homo sapiens
atcatgtctgtacggtagttgttcaggttccagagcttcccatcatgccgctggtgtgtccaccagaacggattctgct

SEQ ID NO: 69930 - DNA, 77 bp, Homo sapiens
tgtacggtagttgttcaggttccagagcttcccatcatgccgctggtgtgtccaccagaacggattctgcttcaaaa

SEQ ID NO: 69931 - DNA, 78 bp, Homo sapiens
tagttgttcaggttccagagcttcccatcatgccgctggtgtgtccaccagaacggattctgcttcaaaacctagatg

SEQ ID NO: 69932 - DNA, 81 bp, Homo sapiens
cagagcttcccatcatgccgctggtgtgtccaccagaacggattctgcttcaaaacctagatggcaaggcaggcacggtca

SEQ ID NO: 69933 - DNA, 79 bp, Homo sapiens
ttcccatcatgccgctggtgtgtccaccagaacggattctgcttcaaaacctagatggcaaggcaggcacggtcaagct

SEQ ID NO: 69934 - DNA, 78 bp, Homo sapiens
atagccatggattttcctgactcagggaaaatctgctccctctacatacctgatactgcttaaagtcagttctgacac

SEQ ID NO: 69935 - DNA, 79 bp, Homo sapiens
ttcctgactcagggaaaatctgctccctctacatacctgatactgcttaaagtcagttctgacacgccagcccttatca

SEQ ID NO: 69936 - DNA, 78 bp, Homo sapiens
actcagggaaaatctgctccctctacatacctgatactgcttaaagtcagttctgacacgccagcccttatcataagc

SEQ ID NO: 69937 - DNA, 80 bp, Homo sapiens
aaatctgctccctctacatacctgatactgcttaaagtcagttctgacacgccagcccttatcataagccagtgtgtgcc

SEQ ID NO: 69938 - DNA, 79 bp, Homo sapiens
tacatacctgatactgcttaaagtcagttctgacacgccagcccttatcataagccagtgtgtgccggtccttctggaa

SEQ ID NO: 69939 - DNA, 76 bp, Homo sapiens
atactgcttaaagtcagttctgacacgccagcccttatcataagccagtgtgtgccggtccttctggaagagggta

SEQ ID NO: 69940 - DNA, 76 bp, Homo sapiens
ttaaagtcagttctgacacgccagcccttatcataagccagtgtgtgccggtccttctggaagagggtattgattc

SEQ ID NO: 69941 - DNA, 78 bp, Homo sapiens
gttctgacacgccagcccttatcataagccagtgtgtgccggtccttctggaagagggtattgattcgaggaatgcca

SEQ ID NO: 69942 - DNA, 77 bp, Homo sapiens
cccttatcataagccagtgtgtgccggtccttctggaagagggtattgattcgaggaatgccacgatcccatgaatc

SEQ ID NO: 69943 - DNA, 78 bp, Homo sapiens
atcataagccagtgtgtgccggtccttctggaagagggtattgattcgaggaatgccacgatcccatgaatcttctag

SEQ ID NO: 69944 - DNA, 76 bp, Homo sapiens
tgtgtgccggtccttctggaagagggtattgattcgaggaatgccacgatcccatgaatcttctaggtcttctaaa

SEQ ID NO: 69945 - DNA, 76 bp, Homo sapiens
ttctggaagagggtattgattcgaggaatgccacgatcccatgaatcttctaggtcttctaaagtcaggcgtcttc

SEQ ID NO: 69946 - DNA, 73 bp, Homo sapiens
agggtattgattcgaggaatgccacgatcccatgaatcttctaggtcttctaaagtcaggcgtcttccaaaaa

SEQ ID NO: 69947 - DNA, 73 bp, Homo sapiens
ttgattcgaggaatgccacgatcccatgaatcttctaggtcttctaaagtcaggcgtcttccaaaaaaagaaa

SEQ ID NO: 69948 - DNA, 71 bp, Homo sapiens
ccacgatcccatgaatcttctaggtcttctaaagtcaggcgtcttccaaaaaaagaaagattcaagtcaaa

SEQ ID NO: 69949 - DNA, 77 bp, Homo sapiens
accactgcccctgccccagggttggcatgccctcctaggtgcccacctgttctgagcaatggcctcttgcctcttga

SEQ ID NO: 69950 - DNA, 79 bp, Homo sapiens
cctgccccagggttggcatgccctcctaggtgcccacctgttctgagcaatggcctcttgcctcttgagtgcgtactca

SEQ ID NO: 69951 - DNA, 79 bp, Homo sapiens
agggttggcatgccctcctaggtgcccacctgttctgagcaatggcctcttgcctcttgagtgcgtactcagcccagac

SEQ ID NO: 69952 - DNA, 80 bp, Homo sapiens
cctcctaggtgcccacctgttctgagcaatggcctcttgcctcttgagtgcgtactcagcccagacccgctgagaatcaa

SEQ ID NO: 69953 - DNA, 82 bp, Homo sapiens
taggtgcccacctgttctgagcaatggcctcttgcctcttgagtgcgtactcagcccagacccgctgagaatcaatgaactc

SEQ ID NO: 69954 - DNA, 85 bp, Homo sapiens
ttctgagcaatggcctcttgcctcttgagtgcgtactcagcccagacccgctgagaatcaatgaactcgctctcccatggctgta

SEQ ID NO: 69955 - DNA, 83 bp, Homo sapiens
aatggcctcttgcctcttgagtgcgtactcagcccagacccgctgagaatcaatgaactcgctctcccatggctgtatgtagc

SEQ ID NO: 69956 - DNA, 81 bp, Homo sapiens
ctcttgagtgcgtactcagcccagacccgctgagaatcaatgaactcgctctcccatggctgtatgtagcggtacaagttg

SEQ ID NO: 69957 - DNA, 79 bp, Homo sapiens
agtgcgtactcagcccagacccgctgagaatcaatgaactcgctctcccatggctgtatgtagcggtacaagttgggaa

SEQ ID NO: 69958 - DNA, 79 bp, Homo sapiens
ccagacccgctgagaatcaatgaactcgctctcccatggctgtatgtagcggtacaagttgggaatgagctggtcttct

SEQ ID NO: 69959 - DNA, 83 bp, Homo sapiens
tgagaatcaatgaactcgctctcccatggctgtatgtagcggtacaagttgggaatgagctggtcttcttcatggctcattcc

SEQ ID NO: 69960 - DNA, 82 bp, Homo sapiens
atcaatgaactcgctctcccatggctgtatgtagcggtacaagttgggaatgagctggtcttcttcatggctcattcctgaa

SEQ ID NO: 69961 - DNA, 81 bp, Homo sapiens
tctcccatggctgtatgtagcggtacaagttgggaatgagctggtcttcttcatggctcattcctgaacgaaagtgtgtga

SEQ ID NO: 69962 - DNA, 80 bp, Homo sapiens
tgtatgtagcggtacaagttgggaatgagctggtcttcttcatggctcattcctgaacgaaagtgtgtgatacctacatc

SEQ ID NO: 69963 - DNA, 78 bp, Homo sapiens
ggtacaagttgggaatgagctggtcttcttcatggctcattcctgaacgaaagtgtgtgatacctacatctgtctgtt

SEQ ID NO: 69964 - DNA, 78 bp, Homo sapiens
aagttgggaatgagctggtcttcttcatggctcattcctgaacgaaagtgtgtgatacctacatctgtctgtttggac

SEQ ID NO: 69965 - DNA, 77 bp, Homo sapiens
tggtcttcttcatggctcattcctgaacgaaagtgtgtgatacctacatctgtctgtttggaccacctgtttgggtg

SEQ ID NO: 69966 - DNA, 77 bp, Homo sapiens
ttcttcatggctcattcctgaacgaaagtgtgtgatacctacatctgtctgtttggaccacctgtttgggtgtacaa

SEQ ID NO: 69967 - DNA, 72 bp, Homo sapiens
aacgaaagtgtgtgatacctacatctgtctgtttggaccacctgtttgggtgtacaaccaagattacagaaa

SEQ ID NO: 69968 - DNA, 68 bp, Homo sapiens
cccttagggcctgagcaatagggtttagaaatacgttgaaccaggctgtacctgaggtcggattgggg

SEQ ID NO: 69969 - DNA, 74 bp, Homo sapiens
caatagggtttagaaatacgttgaaccaggctgtacctgaggtcggattgggggatgagcacatggcccattga

SEQ ID NO: 69970 - DNA, 78 bp, Homo sapiens
gtttagaaatacgttgaaccaggctgtacctgaggtcggattgggggatgagcacatggcccattgagagcatgccga

SEQ ID NO: 69971 - DNA, 79 bp, Homo sapiens
tacgttgaaccaggctgtacctgaggtcggattgggggatgagcacatggcccattgagagcatgccgagtccacccaa

SEQ ID NO: 69972 - DNA, 77 bp, Homo sapiens
aggctgtacctgaggtcggattgggggatgagcacatggcccattgagagcatgccgagtccacccaactccttagg

SEQ ID NO: 69973 - DNA, 75 bp, Homo sapiens
attgggggatgagcacatggcccattgagagcatgccgagtccacccaactccttaggggtgtagaacacaaccg

SEQ ID NO: 69974 - DNA, 70 bp, Homo sapiens
acatggcccattgagagcatgccgagtccacccaactccttaggggtgtagaacacaaccggggggaacc

SEQ ID NO: 69975 - DNA, 70 bp, Homo sapiens
attgagagcatgccgagtccacccaactccttaggggtgtagaacacaaccggggggaaccgacttggca

SEQ ID NO: 69976 - DNA, 68 bp, Homo sapiens
atgccgagtccacccaactccttaggggtgtagaacacaaccggggggaaccgacttggcatcttgga

SEQ ID NO: 69977 - DNA, 67 bp, Homo sapiens
acccaactccttaggggtgtagaacacaaccggggggaaccgacttggcatcttggagttgagtcca

SEQ ID NO: 69978 - DNA, 70 bp, Homo sapiens
ctccttaggggtgtagaacacaaccggggggaaccgacttggcatcttggagttgagtccaatcttgata

SEQ ID NO: 69979 - DNA, 72 bp, Homo sapiens
tgtagaacacaaccggggggaaccgacttggcatcttggagttgagtccaatcttgatacgtgtctggattt

SEQ ID NO: 69980 - DNA, 72 bp, Homo sapiens
aaccggggggaaccgacttggcatcttggagttgagtccaatcttgatacgtgtctggattttgttctcaca

SEQ ID NO: 69981 - DNA, 75 bp, Homo sapiens
aaccgacttggcatcttggagttgagtccaatcttgatacgtgtctggattttgttctcacacttcaccagtaag

SEQ ID NO: 69982 - DNA, 77 bp, Homo sapiens
atcttggagttgagtccaatcttgatacgtgtctggattttgttctcacacttcaccagtaagtccaagagctcttg

SEQ ID NO: 69983 - DNA, 75 bp, Homo sapiens
agttgagtccaatcttgatacgtgtctggattttgttctcacacttcaccagtaagtccaagagctcttgggtgt

SEQ ID NO: 69984 - DNA, 76 bp, Homo sapiens
aatcttgatacgtgtctggattttgttctcacacttcaccagtaagtccaagagctcttgggtgttcaccacagcc

SEQ ID NO: 69985 - DNA, 75 bp, Homo sapiens
tctggattttgttctcacacttcaccagtaagtccaagagctcttgggtgttcaccacagcctcccgaaagtatg

SEQ ID NO: 69986 - DNA, 75 bp, Homo sapiens
ttttgttctcacacttcaccagtaagtccaagagctcttgggtgttcaccacagcctcccgaaagtatgtcataa

SEQ ID NO: 69987 - DNA, 76 bp, Homo sapiens
acacttcaccagtaagtccaagagctcttgggtgttcaccacagcctcccgaaagtatgtcataaggccaatgaga

SEQ ID NO: 69988 - DNA, 78 bp, Homo sapiens
tcttgggtgttcaccacagcctcccgaaagtatgtcataaggccaatgagagctgtattccacttattcacaatctaa

SEQ ID NO: 69989 - DNA, 78 bp, Homo sapiens
tcaccacagcctcccgaaagtatgtcataaggccaatgagagctgtattccacttattcacaatctaaaggtagtaga

SEQ ID NO: 69990 - DNA, 73 bp, Homo sapiens
cctcccgaaagtatgtcataaggccaatgagagctgtattccacttattcacaatctaaaggtagtagaaaaa

SEQ ID NO: 69991 - DNA, 73 bp, Homo sapiens
gaaagtatgtcataaggccaatgagagctgtattccacttattcacaatctaaaggtagtagaaaaaaaagta

SEQ ID NO: 69992 - DNA, 75 bp, Homo sapiens
aggacagcagaggacaagagggaagctgggcatgacggccctgtaccttggtgaaggtggtggacccagaggcca

SEQ ID NO: 69993 - DNA, 76 bp, Homo sapiens
aggacaagagggaagctgggcatgacggccctgtaccttggtgaaggtggtggacccagaggccatgagaatctga

SEQ ID NO: 69994 - DNA, 76 bp, Homo sapiens
aagagggaagctgggcatgacggccctgtaccttggtgaaggtggtggacccagaggccatgagaatctgacgcac

SEQ ID NO: 69995 - DNA, 77 bp, Homo sapiens
tgggcatgacggccctgtaccttggtgaaggtggtggacccagaggccatgagaatctgacgcacgcggttgtggaa

SEQ ID NO: 69996 - DNA, 81 bp, Homo sapiens
ctgtaccttggtgaaggtggtggacccagaggccatgagaatctgacgcacgcggttgtggaagcgctgcattgactcatc

SEQ ID NO: 69997 - DNA, 83 bp, Homo sapiens
gtgaaggtggtggacccagaggccatgagaatctgacgcacgcggttgtggaagcgctgcattgactcatcgtccacacgcag

SEQ ID NO: 69998 - DNA, 84 bp, Homo sapiens
gtggacccagaggccatgagaatctgacgcacgcggttgtggaagcgctgcattgactcatcgtccacacgcaggaaacactga

SEQ ID NO: 69999 - DNA, 86 bp, Homo sapiens
ggccatgagaatctgacgcacgcggttgtggaagcgctgcattgactcatcgtccacacgcaggaaacactgagctgtgcgctcct

SEQ ID NO: 70000 - DNA, 83 bp, Homo sapiens
aatctgacgcacgcggttgtggaagcgctgcattgactcatcgtccacacgcaggaaacactgagctgtgcgctccttagtaa

SEQ ID NO: 70001 - DNA, 79 bp, Homo sapiens
acgcggttgtggaagcgctgcattgactcatcgtccacacgcaggaaacactgagctgtgcgctccttagtaacctaaa

SEQ ID NO: 70002 - DNA, 80 bp, Homo sapiens
ttgtggaagcgctgcattgactcatcgtccacacgcaggaaacactgagctgtgcgctccttagtaacctaaaccacaaa

SEQ ID NO: 70003 - DNA, 75 bp, Homo sapiens
attgactcatcgtccacacgcaggaaacactgagctgtgcgctccttagtaacctaaaccacaaagtcaaggtta

SEQ ID NO: 70004 - DNA, 74 bp, Homo sapiens
atcgtccacacgcaggaaacactgagctgtgcgctccttagtaacctaaaccacaaagtcaaggttaacatgtc

SEQ ID NO: 70005 - DNA, 75 bp, Homo sapiens
aagtgcaggcgcgttcatgtcactcccagccccgcccaggctgtacctcattctgcaggttccagaccccgtcct

SEQ ID NO: 70006 - DNA, 75 bp, Homo sapiens
gcgttcatgtcactcccagccccgcccaggctgtacctcattctgcaggttccagaccccgtccttgtgggtgaa

SEQ ID NO: 70007 - DNA, 75 bp, Homo sapiens
tcactcccagccccgcccaggctgtacctcattctgcaggttccagaccccgtccttgtgggtgaactcctcata

SEQ ID NO: 70008 - DNA, 76 bp, Homo sapiens
cccgcccaggctgtacctcattctgcaggttccagaccccgtccttgtgggtgaactcctcatagctggtgcggca

SEQ ID NO: 70009 - DNA, 77 bp, Homo sapiens
ctgtacctcattctgcaggttccagaccccgtccttgtgggtgaactcctcatagctggtgcggcacttaggcagga

SEQ ID NO: 70010 - DNA, 78 bp, Homo sapiens
attctgcaggttccagaccccgtccttgtgggtgaactcctcatagctggtgcggcacttaggcaggatgcggcactc

SEQ ID NO: 70011 - DNA, 79 bp, Homo sapiens
ttccagaccccgtccttgtgggtgaactcctcatagctggtgcggcacttaggcaggatgcggcactcgaagccacaca

SEQ ID NO: 70012 - DNA, 80 bp, Homo sapiens
cccgtccttgtgggtgaactcctcatagctggtgcggcacttaggcaggatgcggcactcgaagccacacatgttgaaca

SEQ ID NO: 70013 - DNA, 82 bp, Homo sapiens
tgtgggtgaactcctcatagctggtgcggcacttaggcaggatgcggcactcgaagccacacatgttgaacagcaggttggg

SEQ ID NO: 70014 - DNA, 81 bp, Homo sapiens
tcctcatagctggtgcggcacttaggcaggatgcggcactcgaagccacacatgttgaacagcaggttggggttgtcctta

SEQ ID NO: 70015 - DNA, 79 bp, Homo sapiens
ctggtgcggcacttaggcaggatgcggcactcgaagccacacatgttgaacagcaggttggggttgtccttactgtaca

SEQ ID NO: 70016 - DNA, 78 bp, Homo sapiens
cttaggcaggatgcggcactcgaagccacacatgttgaacagcaggttggggttgtccttactgtacacagacacgaa

SEQ ID NO: 70017 - DNA, 78 bp, Homo sapiens
atgcggcactcgaagccacacatgttgaacagcaggttggggttgtccttactgtacacagacacgaagctgttctcc

SEQ ID NO: 70018 - DNA, 76 bp, Homo sapiens
aagccacacatgttgaacagcaggttggggttgtccttactgtacacagacacgaagctgttctcccactgaactg

SEQ ID NO: 70019 - DNA, 77 bp, Homo sapiens
atgttgaacagcaggttggggttgtccttactgtacacagacacgaagctgttctcccactgaactgtagtcactga

SEQ ID NO: 70020 - DNA, 74 bp, Homo sapiens
aggttggggttgtccttactgtacacagacacgaagctgttctcccactgaactgtagtcactgaccgtggcaa

SEQ ID NO: 70021 - DNA, 78 bp, Homo sapiens
ttgtccttactgtacacagacacgaagctgttctcccactgaactgtagtcactgaccgtggcaagcggttcttgatg

SEQ ID NO: 70022 - DNA, 79 bp, Homo sapiens
tactgtacacagacacgaagctgttctcccactgaactgtagtcactgaccgtggcaagcggttcttgatgtcccagaa

SEQ ID NO: 70023 - DNA, 76 bp, Homo sapiens
agacacgaagctgttctcccactgaactgtagtcactgaccgtggcaagcggttcttgatgtcccagaataccgcc

SEQ ID NO: 70024 - DNA, 76 bp, Homo sapiens
tgttctcccactgaactgtagtcactgaccgtggcaagcggttcttgatgtcccagaataccgcccggcctctgcc

SEQ ID NO: 70025 - DNA, 76 bp, Homo sapiens
actgaactgtagtcactgaccgtggcaagcggttcttgatgtcccagaataccgcccggcctctgcccacagagaa

SEQ ID NO: 70026 - DNA, 78 bp, Homo sapiens
agtcactgaccgtggcaagcggttcttgatgtcccagaataccgcccggcctctgcccacagagaacacatggtcaca

SEQ ID NO: 70027 - DNA, 80 bp, Homo sapiens
ccttagcttatgtccttccagctcacacagccccaacctagactcacaagttaacatcatgtttcatgaggcgcatgcgg

SEQ ID NO: 70028 - DNA, 82 bp, Homo sapiens
ttatgtccttccagctcacacagccccaacctagactcacaagttaacatcatgtttcatgaggcgcatgcgggcatctcgg

SEQ ID NO: 70029 - DNA, 81 bp, Homo sapiens
ctcacacagccccaacctagactcacaagttaacatcatgtttcatgaggcgcatgcgggcatctcggggccagcacttct

SEQ ID NO: 70030 - DNA, 79 bp, Homo sapiens
cccaacctagactcacaagttaacatcatgtttcatgaggcgcatgcgggcatctcggggccagcacttcttgttatta

SEQ ID NO: 70031 - DNA, 82 bp, Homo sapiens
tagactcacaagttaacatcatgtttcatgaggcgcatgcgggcatctcggggccagcacttcttgttattatagccaacga

SEQ ID NO: 70032 - DNA, 81 bp, Homo sapiens
taacatcatgtttcatgaggcgcatgcgggcatctcggggccagcacttcttgttattatagccaacgatgttttcattat

SEQ ID NO: 70033 - DNA, 78 bp, Homo sapiens
atgtttcatgaggcgcatgcgggcatctcggggccagcacttcttgttattatagccaacgatgttttcattattggg

SEQ ID NO: 70034 - DNA, 75 bp, Homo sapiens
aggcgcatgcgggcatctcggggccagcacttcttgttattatagccaacgatgttttcattattggggtcaggg

SEQ ID NO: 70035 - DNA, 76 bp, Homo sapiens
catctcggggccagcacttcttgttattatagccaacgatgttttcattattggggtcagggtgctctgtcaggta

SEQ ID NO: 70036 - DNA, 74 bp, Homo sapiens
ccagcacttcttgttattatagccaacgatgttttcattattggggtcagggtgctctgtcaggtaacgttgaa

SEQ ID NO: 70037 - DNA, 73 bp, Homo sapiens
acttcttgttattatagccaacgatgttttcattattggggtcagggtgctctgtcaggtaacgttgaatcag

SEQ ID NO: 70038 - DNA, 73 bp, Homo sapiens
attatagccaacgatgttttcattattggggtcagggtgctctgtcaggtaacgttgaatcaggtcccgagcc

SEQ ID NO: 70039 - DNA, 77 bp, Homo sapiens
tgttttcattattggggtcagggtgctctgtcaggtaacgttgaatcaggtcccgagcctcatctgctgtgaaccta

SEQ ID NO: 70040 - DNA, 77 bp, Homo sapiens
attattggggtcagggtgctctgtcaggtaacgttgaatcaggtcccgagcctcatctgctgtgaacctacaccaga

SEQ ID NO: 70041 - DNA, 78 bp, Homo sapiens
agggtgctctgtcaggtaacgttgaatcaggtcccgagcctcatctgctgtgaacctacaccagaccaggtacactgc

SEQ ID NO: 70042 - DNA, 79 bp, Homo sapiens
tctgtcaggtaacgttgaatcaggtcccgagcctcatctgctgtgaacctacaccagaccaggtacactgctgaggccc

SEQ ID NO: 70043 - DNA, 78 bp, Homo sapiens
acatgcctcagtaccctgcaaggctaggaatccaggaaagccctcacctgaaaaaaatatggatgcgatcaatgtatc

SEQ ID NO: 70044 - DNA, 78 bp, Homo sapiens
agtaccctgcaaggctaggaatccaggaaagccctcacctgaaaaaaatatggatgcgatcaatgtatctgcagaaga

SEQ ID NO: 70045 - DNA, 77 bp, Homo sapiens
aaggctaggaatccaggaaagccctcacctgaaaaaaatatggatgcgatcaatgtatctgcagaagagacggatgg

SEQ ID NO: 70046 - DNA, 78 bp, Homo sapiens
ggaatccaggaaagccctcacctgaaaaaaatatggatgcgatcaatgtatctgcagaagagacggatggggtgggca

SEQ ID NO: 70047 - DNA, 80 bp, Homo sapiens
aagccctcacctgaaaaaaatatggatgcgatcaatgtatctgcagaagagacggatggggtgggcagcctcagtggcta

SEQ ID NO: 70048 - DNA, 81 bp, Homo sapiens
aaaaaatatggatgcgatcaatgtatctgcagaagagacggatggggtgggcagcctcagtggctatgtcctggaaactga

SEQ ID NO: 70049 - DNA, 84 bp, Homo sapiens
atatggatgcgatcaatgtatctgcagaagagacggatggggtgggcagcctcagtggctatgtcctggaaactgagaaagtca

SEQ ID NO: 70050 - DNA, 82 bp, Homo sapiens
aatgtatctgcagaagagacggatggggtgggcagcctcagtggctatgtcctggaaactgagaaagtcatttggcatctga

SEQ ID NO: 70051 - DNA, 80 bp, Homo sapiens
tctgcagaagagacggatggggtgggcagcctcagtggctatgtcctggaaactgagaaagtcatttggcatctgagggg

SEQ ID NO: 70052 - DNA, 77 bp, Homo sapiens
agacggatggggtgggcagcctcagtggctatgtcctggaaactgagaaagtcatttggcatctgagggggcccagc

SEQ ID NO: 70053 - DNA, 82 bp, Homo sapiens
gcagcctcagtggctatgtcctggaaactgagaaagtcatttggcatctgagggggcccagccatctcactggcccggtgca

SEQ ID NO: 70054 - DNA, 79 bp, Homo sapiens
tggctatgtcctggaaactgagaaagtcatttggcatctgagggggcccagccatctcactggcccggtgcaatcccaa

SEQ ID NO: 70055 - DNA, 78 bp, Homo sapiens
ctggaaactgagaaagtcatttggcatctgagggggcccagccatctcactggcccggtgcaatcccaatacaagcaa

SEQ ID NO: 70056 - DNA, 80 bp, Homo sapiens
actgagaaagtcatttggcatctgagggggcccagccatctcactggcccggtgcaatcccaatacaagcaaatccatca

SEQ ID NO: 70057 - DNA, 80 bp, Homo sapiens
tttggcatctgagggggcccagccatctcactggcccggtgcaatcccaatacaagcaaatccatcaccaggccataata

SEQ ID NO: 70058 - DNA, 80 bp, Homo sapiens
agggggcccagccatctcactggcccggtgcaatcccaatacaagcaaatccatcaccaggccataatactgcacgatga

SEQ ID NO: 70059 - DNA, 82 bp, Homo sapiens
agccatctcactggcccggtgcaatcccaatacaagcaaatccatcaccaggccataatactgcacgatgaatgaggcaaac

SEQ ID NO: 70060 - DNA, 81 bp, Homo sapiens
actggcccggtgcaatcccaatacaagcaaatccatcaccaggccataatactgcacgatgaatgaggcaaactgcaggcc

SEQ ID NO: 70061 - DNA, 87 bp, Homo sapiens
caatcccaatacaagcaaatccatcaccaggccataatactgcacgatgaatgaggcaaactgcaggcctctgatgatcccatatga

SEQ ID NO: 70062 - DNA, 86 bp, Homo sapiens
atacaagcaaatccatcaccaggccataatactgcacgatgaatgaggcaaactgcaggcctctgatgatcccatatgaattcgta

SEQ ID NO: 70063 - DNA, 85 bp, Homo sapiens
aaatccatcaccaggccataatactgcacgatgaatgaggcaaactgcaggcctctgatgatcccatatgaattcgtatggttca

SEQ ID NO: 70064 - DNA, 84 bp, Homo sapiens
aggccataatactgcacgatgaatgaggcaaactgcaggcctctgatgatcccatatgaattcgtatggttcatgtcctagaaa

SEQ ID NO: 70065 - DNA, 83 bp, Homo sapiens
aatactgcacgatgaatgaggcaaactgcaggcctctgatgatcccatatgaattcgtatggttcatgtcctagaaagaaaga

SEQ ID NO: 70066 - DNA, 80 bp, Homo sapiens
atgaatgaggcaaactgcaggcctctgatgatcccatatgaattcgtatggttcatgtcctagaaagaaagaactacaat

SEQ ID NO: 70067 - DNA, 77 bp, Homo sapiens
aaactgcaggcctctgatgatcccatatgaattcgtatggttcatgtcctagaaagaaagaactacaattcttaaga

SEQ ID NO: 70068 - DNA, 83 bp, Homo sapiens
agacaagcactccacacacaattccatgctactgcgcctgagacgcaccttatagttgatgacgacgttgttcttggctgtca

SEQ ID NO: 70069 - DNA, 83 bp, Homo sapiens
cacacacaattccatgctactgcgcctgagacgcaccttatagttgatgacgacgttgttcttggctgtcatgtagtcggcta

SEQ ID NO: 70070 - DNA, 81 bp, Homo sapiens
aattccatgctactgcgcctgagacgcaccttatagttgatgacgacgttgttcttggctgtcatgtagtcggctatgttg

SEQ ID NO: 70071 - DNA, 81 bp, Homo sapiens
tactgcgcctgagacgcaccttatagttgatgacgacgttgttcttggctgtcatgtagtcggctatgttgtggtccacga

SEQ ID NO: 70072 - DNA, 82 bp, Homo sapiens
ctgagacgcaccttatagttgatgacgacgttgttcttggctgtcatgtagtcggctatgttgtggtccacgatgaggcgca

SEQ ID NO: 70073 - DNA, 83 bp, Homo sapiens
cttatagttgatgacgacgttgttcttggctgtcatgtagtcggctatgttgtggtccacgatgaggcgcagcagcctgttga

SEQ ID NO: 70074 - DNA, 84 bp, Homo sapiens
atgacgacgttgttcttggctgtcatgtagtcggctatgttgtggtccacgatgaggcgcagcagcctgttgagcagagtcaag

SEQ ID NO: 70075 - DNA, 88 bp, Homo sapiens
ttcttggctgtcatgtagtcggctatgttgtggtccacgatgaggcgcagcagcctgttgagcagagtcaagtcgatcttctcataca

SEQ ID NO: 70076 - DNA, 86 bp, Homo sapiens
atgtagtcggctatgttgtggtccacgatgaggcgcagcagcctgttgagcagagtcaagtcgatcttctcatacatcttctcaaa

SEQ ID NO: 70077 - DNA, 85 bp, Homo sapiens
ctatgttgtggtccacgatgaggcgcagcagcctgttgagcagagtcaagtcgatcttctcatacatcttctcaaagcgggattc

SEQ ID NO: 70078 - DNA, 88 bp, Homo sapiens
ttgtggtccacgatgaggcgcagcagcctgttgagcagagtcaagtcgatcttctcatacatcttctcaaagcgggattccagcatga

SEQ ID NO: 70079 - DNA, 87 bp, Homo sapiens
aggcgcagcagcctgttgagcagagtcaagtcgatcttctcatacatcttctcaaagcgggattccagcatgacattgcactcgcct

SEQ ID NO: 70080 - DNA, 85 bp, Homo sapiens
agcctgttgagcagagtcaagtcgatcttctcatacatcttctcaaagcgggattccagcatgacattgcactcgccttcactcg

SEQ ID NO: 70081 - DNA, 86 bp, Homo sapiens
ttgagcagagtcaagtcgatcttctcatacatcttctcaaagcgggattccagcatgacattgcactcgccttcactcgtctccca

SEQ ID NO: 70082 - DNA, 81 bp, Homo sapiens
aagtcgatcttctcatacatcttctcaaagcgggattccagcatgacattgcactcgccttcactcgtctcccacacgtcc

SEQ ID NO: 70083 - DNA, 83 bp, Homo sapiens
ctcatacatcttctcaaagcgggattccagcatgacattgcactcgccttcactcgtctcccacacgtcctgcaggttattga

SEQ ID NO: 70084 - DNA, 83 bp, Homo sapiens
atcttctcaaagcgggattccagcatgacattgcactcgccttcactcgtctcccacacgtcctgcaggttattgatgcctga

SEQ ID NO: 70085 - DNA, 83 bp, Homo sapiens
agcgggattccagcatgacattgcactcgccttcactcgtctcccacacgtcctgcaggttattgatgcctgaggagtagcaa

SEQ ID NO: 70086 - DNA, 84 bp, Homo sapiens
atgacattgcactcgccttcactcgtctcccacacgtcctgcaggttattgatgcctgaggagtagcaaggcaggtctccagca

SEQ ID NO: 70087 - DNA, 79 bp, Homo sapiens
actcgccttcactcgtctcccacacgtcctgcaggttattgatgcctgaggagtagcaaggcaggtctccagcaggtta

SEQ ID NO: 70088 - DNA, 71 bp, Homo sapiens
aactaaattcctgccccgttcctcacagggcgatctcatgaaagttctaccttgacaccacttgtaaacaa

SEQ ID NO: 70089 - DNA, 73 bp, Homo sapiens
cccgttcctcacagggcgatctcatgaaagttctaccttgacaccacttgtaaacaagcagcggaggtggttc

SEQ ID NO: 70090 - DNA, 79 bp, Homo sapiens
tcctcacagggcgatctcatgaaagttctaccttgacaccacttgtaaacaagcagcggaggtggttctgtgtctgcag

SEQ ID NO: 70091 - DNA, 77 bp, Homo sapiens
atctcatgaaagttctaccttgacaccacttgtaaacaagcagcggaggtggttctgtgtctgcaggcttaatccag

SEQ ID NO: 70092 - DNA, 73 bp, Homo sapiens
aaagttctaccttgacaccacttgtaaacaagcagcggaggtggttctgtgtctgcaggcttaatccagggtg

SEQ ID NO: 70093 - DNA, 74 bp, Homo sapiens
ccttgacaccacttgtaaacaagcagcggaggtggttctgtgtctgcaggcttaatccagggtgggaacaggcg

SEQ ID NO: 70094 - DNA, 77 bp, Homo sapiens
taaacaagcagcggaggtggttctgtgtctgcaggcttaatccagggtgggaacaggcggcgcttgtcggcttcata

SEQ ID NO: 70095 - DNA, 77 bp, Homo sapiens
aagcagcggaggtggttctgtgtctgcaggcttaatccagggtgggaacaggcggcgcttgtcggcttcataccaca

SEQ ID NO: 70096 - DNA, 76 bp, Homo sapiens
ttctgtgtctgcaggcttaatccagggtgggaacaggcggcgcttgtcggcttcataccacaggtactggtccagg

SEQ ID NO: 70097 - DNA, 78 bp, Homo sapiens
tctgcaggcttaatccagggtgggaacaggcggcgcttgtcggcttcataccacaggtactggtccaggtaagcatca

SEQ ID NO: 70098 - DNA, 75 bp, Homo sapiens
ttaatccagggtgggaacaggcggcgcttgtcggcttcataccacaggtactggtccaggtaagcatcagttatc

SEQ ID NO: 70099 - DNA, 75 bp, Homo sapiens
ggtgggaacaggcggcgcttgtcggcttcataccacaggtactggtccaggtaagcatcagttatcttctccagg

SEQ ID NO: 70100 - DNA, 79 bp, Homo sapiens
cgcttgtcggcttcataccacaggtactggtccaggtaagcatcagttatcttctccaggggctcaacatcatatactg

SEQ ID NO: 70101 - DNA, 77 bp, Homo sapiens
cttcataccacaggtactggtccaggtaagcatcagttatcttctccaggggctcaacatcatatactggaacgagg

SEQ ID NO: 70102 - DNA, 78 bp, Homo sapiens
acaggtactggtccaggtaagcatcagttatcttctccaggggctcaacatcatatactggaacgaggtggctataca

SEQ ID NO: 70103 - DNA, 82 bp, Homo sapiens
tccaggtaagcatcagttatcttctccaggggctcaacatcatatactggaacgaggtggctatacagatccatgaactcaa

SEQ ID NO: 70104 - DNA, 83 bp, Homo sapiens
taagcatcagttatcttctccaggggctcaacatcatatactggaacgaggtggctatacagatccatgaactcaatgcccac

SEQ ID NO: 70105 - DNA, 80 bp, Homo sapiens
aacatcatatactggaacgaggtggctatacagatccatgaactcaatgcccacctgtgggacaaggaggctggttcaca

SEQ ID NO: 70106 - DNA, 77 bp, Homo sapiens
aacgaggtggctatacagatccatgaactcaatgcccacctgtgggacaaggaggctggttcacaccaatccaccaa

SEQ ID NO: 70107 - DNA, 69 bp, Homo sapiens
aactgctacctttggtagaaccaaaaagaaaacttgggaggcctcactcacctctttgaaggctctctg

SEQ ID NO: 70108 - DNA, 72 bp, Homo sapiens
tttggtagaaccaaaaagaaaacttgggaggcctcactcacctctttgaaggctctctgtgtgaggaggtga

SEQ ID NO: 70109 - DNA, 74 bp, Homo sapiens
aaaaagaaaacttgggaggcctcactcacctctttgaaggctctctgtgtgaggaggtgacgcttgatgcggga

SEQ ID NO: 70110 - DNA, 78 bp, Homo sapiens
aacttgggaggcctcactcacctctttgaaggctctctgtgtgaggaggtgacgcttgatgcgggacagcgcctcgtg

SEQ ID NO: 70111 - DNA, 76 bp, Homo sapiens
actcacctctttgaaggctctctgtgtgaggaggtgacgcttgatgcgggacagcgcctcgtgggggttatcgtag

SEQ ID NO: 70112 - DNA, 80 bp, Homo sapiens
tttgaaggctctctgtgtgaggaggtgacgcttgatgcgggacagcgcctcgtgggggttatcgtaggcctgctcgatca

SEQ ID NO: 70113 - DNA, 80 bp, Homo sapiens
tctgtgtgaggaggtgacgcttgatgcgggacagcgcctcgtgggggttatcgtaggcctgctcgatcagacctagctcc

SEQ ID NO: 70114 - DNA, 76 bp, Homo sapiens
aggaggtgacgcttgatgcgggacagcgcctcgtgggggttatcgtaggcctgctcgatcagacctagctcctccc

SEQ ID NO: 70115 - DNA, 79 bp, Homo sapiens
ttgatgcgggacagcgcctcgtgggggttatcgtaggcctgctcgatcagacctagctcctccctctgagactggttca

SEQ ID NO: 70116 - DNA, 76 bp, Homo sapiens
acagcgcctcgtgggggttatcgtaggcctgctcgatcagacctagctcctccctctgagactggttcaaccgaga

SEQ ID NO: 70117 - DNA, 77 bp, Homo sapiens
gtgggggttatcgtaggcctgctcgatcagacctagctcctccctctgagactggttcaaccgagacttcacactga

SEQ ID NO: 70118 - DNA, 77 bp, Homo sapiens
ggttatcgtaggcctgctcgatcagacctagctcctccctctgagactggttcaaccgagacttcacactgacaaaa

SEQ ID NO: 70119 - DNA, 79 bp, Homo sapiens
tgctcgatcagacctagctcctccctctgagactggttcaaccgagacttcacactgacaaaagcaatgggaagggtga

SEQ ID NO: 70120 - DNA, 76 bp, Homo sapiens
atcagacctagctcctccctctgagactggttcaaccgagacttcacactgacaaaagcaatgggaagggtgaatg

SEQ ID NO: 70121 - DNA, 75 bp, Homo sapiens
ttccctgctgtcaccttcccagcaggaacctatctaccctactactcacctataagcttccttgagccgctccaa

SEQ ID NO: 70122 - DNA, 77 bp, Homo sapiens
ccttcccagcaggaacctatctaccctactactcacctataagcttccttgagccgctccaatgccaagatgagcaa

SEQ ID NO: 70123 - DNA, 77 bp, Homo sapiens
aggaacctatctaccctactactcacctataagcttccttgagccgctccaatgccaagatgagcaacttggtgtca

SEQ ID NO: 70124 - DNA, 80 bp, Homo sapiens
ctactactcacctataagcttccttgagccgctccaatgccaagatgagcaacttggtgtcatgcttataggagagtggg

SEQ ID NO: 70125 - DNA, 80 bp, Homo sapiens
tataagcttccttgagccgctccaatgccaagatgagcaacttggtgtcatgcttataggagagtggggggaatgggatg

SEQ ID NO: 70126 - DNA, 78 bp, Homo sapiens
cttgagccgctccaatgccaagatgagcaacttggtgtcatgcttataggagagtggggggaatgggatgggtgaaaa

SEQ ID NO: 70127 - DNA, 75 bp, Homo sapiens
aatgccaagatgagcaacttggtgtcatgcttataggagagtggggggaatgggatgggtgaaaacctgcggctt

SEQ ID NO: 70128 - DNA, 74 bp, Homo sapiens
aagatgagcaacttggtgtcatgcttataggagagtggggggaatgggatgggtgaaaacctgcggctttccaa

SEQ ID NO: 70129 - DNA, 73 bp, Homo sapiens
aacttggtgtcatgcttataggagagtggggggaatgggatgggtgaaaacctgcggctttccaaccaatgca

SEQ ID NO: 70130 - DNA, 73 bp, Homo sapiens
ttataggagagtggggggaatgggatgggtgaaaacctgcggctttccaaccaatgcactgtggtggtatata

SEQ ID NO: 70131 - DNA, 73 bp, Homo sapiens
agagtggggggaatgggatgggtgaaaacctgcggctttccaaccaatgcactgtggtggtatatactgccac

SEQ ID NO: 70132 - DNA, 76 bp, Homo sapiens
aatgggatgggtgaaaacctgcggctttccaaccaatgcactgtggtggtatatactgccactgcttcctccgctg

SEQ ID NO: 70133 - DNA, 78 bp, Homo sapiens
tgggtgaaaacctgcggctttccaaccaatgcactgtggtggtatatactgccactgcttcctccgctgtgatgtaag

SEQ ID NO: 70134 - DNA, 77 bp, Homo sapiens
ggctttccaaccaatgcactgtggtggtatatactgccactgcttcctccgctgtgatgtaaggcccgtcctgtaag

SEQ ID NO: 70135 - DNA, 79 bp, Homo sapiens
aaccaatgcactgtggtggtatatactgccactgcttcctccgctgtgatgtaaggcccgtcctgtaaggtggacatga

SEQ ID NO: 70136 - DNA, 77 bp, Homo sapiens
actgtggtggtatatactgccactgcttcctccgctgtgatgtaaggcccgtcctgtaaggtggacatgaaattagc

SEQ ID NO: 70137 - DNA, 78 bp, Homo sapiens
tatatactgccactgcttcctccgctgtgatgtaaggcccgtcctgtaaggtggacatgaaattagcctcccgctaca

SEQ ID NO: 70138 - DNA, 74 bp, Homo sapiens
cccactcccccaccactcacacccagcccagcctactctgcccaaccttcaggtagttgtgctgccgctcctgt

SEQ ID NO: 70139 - DNA, 80 bp, Homo sapiens
caccactcacacccagcccagcctactctgcccaaccttcaggtagttgtgctgccgctcctgttctgccttcagataga

SEQ ID NO: 70140 - DNA, 76 bp, Homo sapiens
acccagcccagcctactctgcccaaccttcaggtagttgtgctgccgctcctgttctgccttcagatagagccggg

SEQ ID NO: 70141 - DNA, 77 bp, Homo sapiens
agcctactctgcccaaccttcaggtagttgtgctgccgctcctgttctgccttcagatagagccgggtgaggcggcc

SEQ ID NO: 70142 - DNA, 76 bp, Homo sapiens
ttcaggtagttgtgctgccgctcctgttctgccttcagatagagccgggtgaggcggcccagattctttttacaaa

SEQ ID NO: 70143 - DNA, 77 bp, Homo sapiens
ttgtgctgccgctcctgttctgccttcagatagagccgggtgaggcggcccagattctttttacaaacagtcttgtc

SEQ ID NO: 70144 - DNA, 74 bp, Homo sapiens
ctgttctgccttcagatagagccgggtgaggcggcccagattctttttacaaacagtcttgtccacagtggccc

SEQ ID NO: 70145 - DNA, 73 bp, Homo sapiens
ttcagatagagccgggtgaggcggcccagattctttttacaaacagtcttgtccacagtggcccctcggcgga

SEQ ID NO: 70146 - DNA, 71 bp, Homo sapiens
atagagccgggtgaggcggcccagattctttttacaaacagtcttgtccacagtggcccctcggcggatcc

SEQ ID NO: 70147 - DNA, 70 bp, Homo sapiens
gcggcccagattctttttacaaacagtcttgtccacagtggcccctcggcggatccgttctcggttgtag

SEQ ID NO: 70148 - DNA, 70 bp, Homo sapiens
ttctttttacaaacagtcttgtccacagtggcccctcggcggatccgttctcggttgtagtgggcagtgt

SEQ ID NO: 70149 - DNA, 72 bp, Homo sapiens
tttacaaacagtcttgtccacagtggcccctcggcggatccgttctcggttgtagtgggcagtgttggtcca

SEQ ID NO: 70150 - DNA, 74 bp, Homo sapiens
tcttgtccacagtggcccctcggcggatccgttctcggttgtagtgggcagtgttggtccaccagtcagccttg

SEQ ID NO: 70151 - DNA, 73 bp, Homo sapiens
tggcccctcggcggatccgttctcggttgtagtgggcagtgttggtccaccagtcagccttggccttcacgta

SEQ ID NO: 70152 - DNA, 75 bp, Homo sapiens
ggatccgttctcggttgtagtgggcagtgttggtccaccagtcagccttggccttcacgtatcgaaggatcatat

SEQ ID NO: 70153 - DNA, 76 bp, Homo sapiens
cgttctcggttgtagtgggcagtgttggtccaccagtcagccttggccttcacgtatcgaaggatcatattctcta

SEQ ID NO: 70154 - DNA, 77 bp, Homo sapiens
agtgttggtccaccagtcagccttggccttcacgtatcgaaggatcatattctctatgggcgtcggcagcccaggga

SEQ ID NO: 70155 - DNA, 75 bp, Homo sapiens
gtcagccttggccttcacgtatcgaaggatcatattctctatgggcgtcggcagcccagggacctaaaagtccaa

SEQ ID NO: 70156 - DNA, 72 bp, Homo sapiens
ccttggccttcacgtatcgaaggatcatattctctatgggcgtcggcagcccagggacctaaaagtccaaaa

SEQ ID NO: 70157 - DNA, 74 bp, Homo sapiens
acgtatcgaaggatcatattctctatgggcgtcggcagcccagggacctaaaagtccaaaaagcacaatcaagc

SEQ ID NO: 70158 - DNA, 76 bp, Homo sapiens
aggatcatattctctatgggcgtcggcagcccagggacctaaaagtccaaaaagcacaatcaagccaggatccagc

SEQ ID NO: 70159 - DNA, 67 bp, Homo sapiens
ctaccctaaagacggatgtttacgcctccaaggaaataaagagacacccaccttccagggaatgttg

SEQ ID NO: 70160 - DNA, 71 bp, Homo sapiens
acggatgtttacgcctccaaggaaataaagagacacccaccttccagggaatgttggctttccagcagcgc

SEQ ID NO: 70161 - DNA, 75 bp, Homo sapiens
tacgcctccaaggaaataaagagacacccaccttccagggaatgttggctttccagcagcgccaggcttcactga

SEQ ID NO: 70162 - DNA, 77 bp, Homo sapiens
aaataaagagacacccaccttccagggaatgttggctttccagcagcgccaggcttcactgaggtgctgcaggattg

SEQ ID NO: 70163 - DNA, 76 bp, Homo sapiens
acccaccttccagggaatgttggctttccagcagcgccaggcttcactgaggtgctgcaggattgtccgggccttg

SEQ ID NO: 70164 - DNA, 80 bp, Homo sapiens
cttccagggaatgttggctttccagcagcgccaggcttcactgaggtgctgcaggattgtccgggccttgttctgcttga

SEQ ID NO: 70165 - DNA, 80 bp, Homo sapiens
aatgttggctttccagcagcgccaggcttcactgaggtgctgcaggattgtccgggccttgttctgcttgatcccctcag

SEQ ID NO: 70166 - DNA, 86 bp, Homo sapiens
agcagcgccaggcttcactgaggtgctgcaggattgtccgggccttgttctgcttgatcccctcaggcatcatgtccagaatatca

SEQ ID NO: 70167 - DNA, 88 bp, Homo sapiens
aggcttcactgaggtgctgcaggattgtccgggccttgttctgcttgatcccctcaggcatcatgtccagaatatcatgcatcacagc

SEQ ID NO: 70168 - DNA, 89 bp, Homo sapiens
actgaggtgctgcaggattgtccgggccttgttctgcttgatcccctcaggcatcatgtccagaatatcatgcatcacagctgcccgca

SEQ ID NO: 70169 - DNA, 87 bp, Homo sapiens
gattgtccgggccttgttctgcttgatcccctcaggcatcatgtccagaatatcatgcatcacagctgcccgcagctcaaggtcaaa

SEQ ID NO: 70170 - DNA, 89 bp, Homo sapiens
ggccttgttctgcttgatcccctcaggcatcatgtccagaatatcatgcatcacagctgcccgcagctcaaggtcaaaatgtgactcca

SEQ ID NO: 70171 - DNA, 91 bp, Homo sapiens
ttctgcttgatcccctcaggcatcatgtccagaatatcatgcatcacagctgcccgcagctcaaggtcaaaatgtgactccactcgctgct

SEQ ID NO: 70172 - DNA, 89 bp, Homo sapiens
ctcaggcatcatgtccagaatatcatgcatcacagctgcccgcagctcaaggtcaaaatgtgactccactcgctgctttgttactgtct

SEQ ID NO: 70173 - DNA, 88 bp, Homo sapiens
atcatgtccagaatatcatgcatcacagctgcccgcagctcaaggtcaaaatgtgactccactcgctgctttgttactgtctttgcca

SEQ ID NO: 70174 - DNA, 83 bp, Homo sapiens
agaatatcatgcatcacagctgcccgcagctcaaggtcaaaatgtgactccactcgctgctttgttactgtctttgccacccc

SEQ ID NO: 70175 - DNA, 78 bp, Homo sapiens
atcacagctgcccgcagctcaaggtcaaaatgtgactccactcgctgctttgttactgtctttgccaccccctttgag

SEQ ID NO: 70176 - DNA, 76 bp, Homo sapiens
cgcagctcaaggtcaaaatgtgactccactcgctgctttgttactgtctttgccaccccctttgagtgtcgacctg

SEQ ID NO: 70177 - DNA, 73 bp, Homo sapiens
aggtcaaaatgtgactccactcgctgctttgttactgtctttgccaccccctttgagtgtcgacctggaagta

SEQ ID NO: 70178 - DNA, 74 bp, Homo sapiens
aaatgtgactccactcgctgctttgttactgtctttgccaccccctttgagtgtcgacctggaagtagagtgtc

SEQ ID NO: 70179 - DNA, 71 bp, Homo sapiens
ccactcgctgctttgttactgtctttgccaccccctttgagtgtcgacctggaagtagagtgtcccaaggg

SEQ ID NO: 70180 - DNA, 70 bp, Homo sapiens
tgttactgtctttgccaccccctttgagtgtcgacctggaagtagagtgtcccaaggggattacaaggaa

SEQ ID NO: 70181 - DNA, 72 bp, Homo sapiens
gtacttttgaagcaataacaggagaagttggacacagagaaaaccactcaccttcaaactgccgggccagga

SEQ ID NO: 70182 - DNA, 72 bp, Homo sapiens
aataacaggagaagttggacacagagaaaaccactcaccttcaaactgccgggccaggaggttgccaagcca

SEQ ID NO: 70183 - DNA, 73 bp, Homo sapiens
agttggacacagagaaaaccactcaccttcaaactgccgggccaggaggttgccaagccatcgctctaataaa

SEQ ID NO: 70184 - DNA, 70 bp, Homo sapiens
agagaaaaccactcaccttcaaactgccgggccaggaggttgccaagccatcgctctaataaaggggtaa

SEQ ID NO: 70185 - DNA, 74 bp, Homo sapiens
actcaccttcaaactgccgggccaggaggttgccaagccatcgctctaataaaggggtaatgccacgcatgaaa

SEQ ID NO: 70186 - DNA, 73 bp, Homo sapiens
ccttcaaactgccgggccaggaggttgccaagccatcgctctaataaaggggtaatgccacgcatgaaaaaga

SEQ ID NO: 70187 - DNA, 75 bp, Homo sapiens
gccaggaggttgccaagccatcgctctaataaaggggtaatgccacgcatgaaaaagagccagactcgccaaccg

SEQ ID NO: 70188 - DNA, 77 bp, Homo sapiens
ttgccaagccatcgctctaataaaggggtaatgccacgcatgaaaaagagccagactcgccaaccggcagcccagaa

SEQ ID NO: 70189 - DNA, 77 bp, Homo sapiens
agccatcgctctaataaaggggtaatgccacgcatgaaaaagagccagactcgccaaccggcagcccagaagccaca

SEQ ID NO: 70190 - DNA, 75 bp, Homo sapiens
ctaataaaggggtaatgccacgcatgaaaaagagccagactcgccaaccggcagcccagaagccacagccaggac

SEQ ID NO: 70191 - DNA, 76 bp, Homo sapiens
ggtaatgccacgcatgaaaaagagccagactcgccaaccggcagcccagaagccacagccaggacccttccctaca

SEQ ID NO: 70192 - DNA, 72 bp, Homo sapiens
atgaaaaagagccagactcgccaaccggcagcccagaagccacagccaggacccttccctacagggccctac

SEQ ID NO: 70193 - DNA, 74 bp, Homo sapiens
cagactcgccaaccggcagcccagaagccacagccaggacccttccctacagggccctacgatcccaagcagaa

SEQ ID NO: 70194 - DNA, 71 bp, Homo sapiens
aaccggcagcccagaagccacagccaggacccttccctacagggccctacgatcccaagcagaagttaaga

SEQ ID NO: 70195 - DNA, 71 bp, Homo sapiens
ccagaagccacagccaggacccttccctacagggccctacgatcccaagcagaagttaagaatacaagtta

SEQ ID NO: 70196 - DNA, 73 bp, Homo sapiens
tcaaaaaaaagaaagtcagtaaagtcaaggtctcaccgtgttgaaacgataatagatgagatgcttcaggtcc

SEQ ID NO: 70197 - DNA, 75 bp, Homo sapiens
aaaaagaaagtcagtaaagtcaaggtctcaccgtgttgaaacgataatagatgagatgcttcaggtccttgcaca

SEQ ID NO: 70198 - DNA, 84 bp, Homo sapiens
taaagtcaaggtctcaccgtgttgaaacgataatagatgagatgcttcaggtccttgcacatgcgaatctgtcgcatcagcttg

SEQ ID NO: 70199 - DNA, 87 bp, Homo sapiens
tctcaccgtgttgaaacgataatagatgagatgcttcaggtccttgcacatgcgaatctgtcgcatcagcttgtatttgtatcgata

SEQ ID NO: 70200 - DNA, 88 bp, Homo sapiens
ttgaaacgataatagatgagatgcttcaggtccttgcacatgcgaatctgtcgcatcagcttgtatttgtatcgatacatgcccgtca

SEQ ID NO: 70201 - DNA, 88 bp, Homo sapiens
taatagatgagatgcttcaggtccttgcacatgcgaatctgtcgcatcagcttgtatttgtatcgatacatgcccgtcaactgcccaa

SEQ ID NO: 70202 - DNA, 87 bp, Homo sapiens
atgagatgcttcaggtccttgcacatgcgaatctgtcgcatcagcttgtatttgtatcgatacatgcccgtcaactgcccaacatgg

SEQ ID NO: 70203 - DNA, 84 bp, Homo sapiens
aggtccttgcacatgcgaatctgtcgcatcagcttgtatttgtatcgatacatgcccgtcaactgcccaacatgggcaaatata

SEQ ID NO: 70204 - DNA, 86 bp, Homo sapiens
acatgcgaatctgtcgcatcagcttgtatttgtatcgatacatgcccgtcaactgcccaacatgggcaaatatatactgcaatcca

SEQ ID NO: 70205 - DNA, 87 bp, Homo sapiens
atctgtcgcatcagcttgtatttgtatcgatacatgcccgtcaactgcccaacatgggcaaatatatactgcaatccatctgccagc

SEQ ID NO: 70206 - DNA, 84 bp, Homo sapiens
cttgtatttgtatcgatacatgcccgtcaactgcccaacatgggcaaatatatactgcaatccatctgccagctgcaatacaat

SEQ ID NO: 70207 - DNA, 85 bp, Homo sapiens
tttgtatcgatacatgcccgtcaactgcccaacatgggcaaatatatactgcaatccatctgccagctgcaatacaattgcccca

SEQ ID NO: 70208 - DNA, 86 bp, Homo sapiens
tacatgcccgtcaactgcccaacatgggcaaatatatactgcaatccatctgccagctgcaatacaattgccccatcagacctgga

SEQ ID NO: 70209 - DNA, 82 bp, Homo sapiens
aactgcccaacatgggcaaatatatactgcaatccatctgccagctgcaatacaattgccccatcagacctggagcttaaac

SEQ ID NO: 70210 - DNA, 72 bp, Homo sapiens
ttcctccagcgtcctcacccaggcaggggttgggaatacctaaccttacctggaaggcatccacattgccca

SEQ ID NO: 70211 - DNA, 73 bp, Homo sapiens
ctcacccaggcaggggttgggaatacctaaccttacctggaaggcatccacattgcccagccgatactgcacg

SEQ ID NO: 70212 - DNA, 74 bp, Homo sapiens
caggggttgggaatacctaaccttacctggaaggcatccacattgcccagccgatactgcacgtgactatccac

SEQ ID NO: 70213 - DNA, 78 bp, Homo sapiens
gaatacctaaccttacctggaaggcatccacattgcccagccgatactgcacgtgactatccaccaccagcttagtca

SEQ ID NO: 70214 - DNA, 79 bp, Homo sapiens
taaccttacctggaaggcatccacattgcccagccgatactgcacgtgactatccaccaccagcttagtcaaacgcaga

SEQ ID NO: 70215 - DNA, 79 bp, Homo sapiens
aaggcatccacattgcccagccgatactgcacgtgactatccaccaccagcttagtcaaacgcagaacttcccgacaca

SEQ ID NO: 70216 - DNA, 77 bp, Homo sapiens
acattgcccagccgatactgcacgtgactatccaccaccagcttagtcaaacgcagaacttcccgacacaggtggaa

SEQ ID NO: 70217 - DNA, 76 bp, Homo sapiens
agccgatactgcacgtgactatccaccaccagcttagtcaaacgcagaacttcccgacacaggtggaaagcattcc

SEQ ID NO: 70218 - DNA, 72 bp, Homo sapiens
acgtgactatccaccaccagcttagtcaaacgcagaacttcccgacacaggtggaaagcattcccaaaacga

SEQ ID NO: 70219 - DNA, 72 bp, Homo sapiens
tatccaccaccagcttagtcaaacgcagaacttcccgacacaggtggaaagcattcccaaaacgagatttct

SEQ ID NO: 70220 - DNA, 69 bp, Homo sapiens
aaacgcagaacttcccgacacaggtggaaagcattcccaaaacgagatttctttctttcctggagaaga

SEQ ID NO: 70221 - DNA, 69 bp, Homo sapiens
aacttcccgacacaggtggaaagcattcccaaaacgagatttctttctttcctggagaagatgcaaaaa

SEQ ID NO: 70222 - DNA, 72 bp, Homo sapiens
aactgtccgtccttgaagcccaggaggcccctagggtccaatgcaggcaccttggtggtgagcgttttcaca

SEQ ID NO: 70223 - DNA, 74 bp, Homo sapiens
ttgaagcccaggaggcccctagggtccaatgcaggcaccttggtggtgagcgttttcacaggcttgaggttgaa

SEQ ID NO: 70224 - DNA, 73 bp, Homo sapiens
aggcccctagggtccaatgcaggcaccttggtggtgagcgttttcacaggcttgaggttgaagttgtagtcca

SEQ ID NO: 70225 - DNA, 76 bp, Homo sapiens
tagggtccaatgcaggcaccttggtggtgagcgttttcacaggcttgaggttgaagttgtagtccaggtgcaggta

SEQ ID NO: 70226 - DNA, 72 bp, Homo sapiens
aggcaccttggtggtgagcgttttcacaggcttgaggttgaagttgtagtccaggtgcaggtagttgaggtt

SEQ ID NO: 70227 - DNA, 73 bp, Homo sapiens
gtggtgagcgttttcacaggcttgaggttgaagttgtagtccaggtgcaggtagttgaggtttttgcggtgaa

SEQ ID NO: 70228 - DNA, 72 bp, Homo sapiens
ttttcacaggcttgaggttgaagttgtagtccaggtgcaggtagttgaggtttttgcggtgaatgagaaggt

SEQ ID NO: 70229 - DNA, 75 bp, Homo sapiens
cttgaggttgaagttgtagtccaggtgcaggtagttgaggtttttgcggtgaatgagaaggttgagcatgttgta

SEQ ID NO: 70230 - DNA, 75 bp, Homo sapiens
tagtccaggtgcaggtagttgaggtttttgcggtgaatgagaaggttgagcatgttgtagccctggcggcaaacc

SEQ ID NO: 70231 - DNA, 73 bp, Homo sapiens
aggtagttgaggtttttgcggtgaatgagaaggttgagcatgttgtagccctggcggcaaacctggagcccaa

SEQ ID NO: 70232 - DNA, 72 bp, Homo sapiens
aggtttttgcggtgaatgagaaggttgagcatgttgtagccctggcggcaaacctggagcccaacctccacc

SEQ ID NO: 70233 - DNA, 77 bp, Homo sapiens
tgaatgagaaggttgagcatgttgtagccctggcggcaaacctggagcccaacctccacccagtccagctttgtgga

SEQ ID NO: 70234 - DNA, 74 bp, Homo sapiens
aaggttgagcatgttgtagccctggcggcaaacctggagcccaacctccacccagtccagctttgtggactgaa

SEQ ID NO: 70235 - DNA, 72 bp, Homo sapiens
atgttgtagccctggcggcaaacctggagcccaacctccacccagtccagctttgtggactgaaagaatttg

SEQ ID NO: 70236 - DNA, 72 bp, Homo sapiens
ctggcggcaaacctggagcccaacctccacccagtccagctttgtggactgaaagaatttggtggctttgaa

SEQ ID NO: 70237 - DNA, 72 bp, Homo sapiens
ctggagcccaacctccacccagtccagctttgtggactgaaagaatttggtggctttgaaggagcggaacaa

SEQ ID NO: 70238 - DNA, 71 bp, Homo sapiens
aacctccacccagtccagctttgtggactgaaagaatttggtggctttgaaggagcggaacaaatacctga

SEQ ID NO: 70239 - DNA, 72 bp, Homo sapiens
agtccagctttgtggactgaaagaatttggtggctttgaaggagcggaacaaatacctgaggtgggaacatg

SEQ ID NO: 70240 - DNA, 72 bp, Homo sapiens
tttgtggactgaaagaatttggtggctttgaaggagcggaacaaatacctgaggtgggaacatggagagtaa

SEQ ID NO: 70241 - DNA, 73 bp, Homo sapiens
tactgatatctctggaacagaagtctgcgcagggcccctggggcaccttacctcttcttttgagccttagggg

SEQ ID NO: 70242 - DNA, 71 bp, Homo sapiens
aacagaagtctgcgcagggcccctggggcaccttacctcttcttttgagccttagggggccgatgcttcag

SEQ ID NO: 70243 - DNA, 71 bp, Homo sapiens
aagtctgcgcagggcccctggggcaccttacctcttcttttgagccttagggggccgatgcttcagggcat

SEQ ID NO: 70244 - DNA, 73 bp, Homo sapiens
ccctggggcaccttacctcttcttttgagccttagggggccgatgcttcagggcattcagcacatagtactta

SEQ ID NO: 70245 - DNA, 75 bp, Homo sapiens
accttacctcttcttttgagccttagggggccgatgcttcagggcattcagcacatagtacttaagcagcttctg

SEQ ID NO: 70246 - DNA, 76 bp, Homo sapiens
ttcttttgagccttagggggccgatgcttcagggcattcagcacatagtacttaagcagcttctggtaggagaccc

SEQ ID NO: 70247 - DNA, 77 bp, Homo sapiens
agccttagggggccgatgcttcagggcattcagcacatagtacttaagcagcttctggtaggagaccctcactttca

SEQ ID NO: 70248 - DNA, 81 bp, Homo sapiens
cgatgcttcagggcattcagcacatagtacttaagcagcttctggtaggagaccctcactttcacaggctgcccggcagga

SEQ ID NO: 70249 - DNA, 79 bp, Homo sapiens
cttcagggcattcagcacatagtacttaagcagcttctggtaggagaccctcactttcacaggctgcccggcaggacaa

SEQ ID NO: 70250 - DNA, 80 bp, Homo sapiens
ttcagcacatagtacttaagcagcttctggtaggagaccctcactttcacaggctgcccggcaggacaatgctcccgata

SEQ ID NO: 70251 - DNA, 75 bp, Homo sapiens
ttaagcagcttctggtaggagaccctcactttcacaggctgcccggcaggacaatgctcccgatacctggaaaaa

SEQ ID NO: 70252 - DNA, 74 bp, Homo sapiens
agcttctggtaggagaccctcactttcacaggctgcccggcaggacaatgctcccgatacctggaaaaataagc

SEQ ID NO: 70253 - DNA, 72 bp, Homo sapiens
agaccctcactttcacaggctgcccggcaggacaatgctcccgatacctggaaaaataagcccaccagagtt

SEQ ID NO: 70254 - DNA, 70 bp, Homo sapiens
tttctcctacacatccactatcattccccctgccacagggaaaaaccttaccagttcttgacaaggggta

SEQ ID NO: 70255 - DNA, 70 bp, Homo sapiens
acatccactatcattccccctgccacagggaaaaaccttaccagttcttgacaaggggtatgtccagggc

SEQ ID NO: 70256 - DNA, 65 bp, Homo sapiens
attccccctgccacagggaaaaaccttaccagttcttgacaaggggtatgtccagggcccgacgg

SEQ ID NO: 70257 - DNA, 68 bp, Homo sapiens
cagggaaaaaccttaccagttcttgacaaggggtatgtccagggcccgacgggtgcgaccagagcgta

SEQ ID NO: 70258 - DNA, 68 bp, Homo sapiens
aaaccttaccagttcttgacaaggggtatgtccagggcccgacgggtgcgaccagagcgtaggttgaa

SEQ ID NO: 70259 - DNA, 68 bp, Homo sapiens
agttcttgacaaggggtatgtccagggcccgacgggtgcgaccagagcgtaggttgaagggccgcggg

SEQ ID NO: 70260 - DNA, 71 bp, Homo sapiens
gggtatgtccagggcccgacgggtgcgaccagagcgtaggttgaagggccgcggggcccagagcagggcaa

SEQ ID NO: 70261 - DNA, 74 bp, Homo sapiens
tgtccagggcccgacgggtgcgaccagagcgtaggttgaagggccgcggggcccagagcagggcaatgccattg

SEQ ID NO: 70262 - DNA, 78 bp, Homo sapiens
gggtgcgaccagagcgtaggttgaagggccgcggggcccagagcagggcaatgccattggctgtattgtctgtataga

SEQ ID NO: 70263 - DNA, 76 bp, Homo sapiens
cgaccagagcgtaggttgaagggccgcggggcccagagcagggcaatgccattggctgtattgtctgtatagaggg

SEQ ID NO: 70264 - DNA, 77 bp, Homo sapiens
taggttgaagggccgcggggcccagagcagggcaatgccattggctgtattgtctgtatagaggggtgtgtccttca

SEQ ID NO: 70265 - DNA, 78 bp, Homo sapiens
gcggggcccagagcagggcaatgccattggctgtattgtctgtatagaggggtgtgtccttcaggaagggctccacaa

SEQ ID NO: 70266 - DNA, 76 bp, Homo sapiens
agagcagggcaatgccattggctgtattgtctgtatagaggggtgtgtccttcaggaagggctccacaaactccgg

SEQ ID NO: 70267 - DNA, 75 bp, Homo sapiens
atgccattggctgtattgtctgtatagaggggtgtgtccttcaggaagggctccacaaactccgggagctcaaat

SEQ ID NO: 70268 - DNA, 73 bp, Homo sapiens
attggctgtattgtctgtatagaggggtgtgtccttcaggaagggctccacaaactccgggagctcaaattcc

SEQ ID NO: 70269 - DNA, 76 bp, Homo sapiens
ttgtctgtatagaggggtgtgtccttcaggaagggctccacaaactccgggagctcaaattcctcatcatcatccg

SEQ ID NO: 70270 - DNA, 75 bp, Homo sapiens
gggtgtgtccttcaggaagggctccacaaactccgggagctcaaattcctcatcatcatccggcaatggttcctg

SEQ ID NO: 70271 - DNA, 76 bp, Homo sapiens
ttcaggaagggctccacaaactccgggagctcaaattcctcatcatcatccggcaatggttcctggctctgaaaaa

SEQ ID NO: 70272 - DNA, 74 bp, Homo sapiens
aagggctccacaaactccgggagctcaaattcctcatcatcatccggcaatggttcctggctctgaaaaaggaa

SEQ ID NO: 70273 - DNA, 73 bp, Homo sapiens
aaactccgggagctcaaattcctcatcatcatccggcaatggttcctggctctgaaaaaggaatccctctaag

SEQ ID NO: 70274 - DNA, 74 bp, Homo sapiens
atttctcctagaagagctgagggaaagcatcccttcccttcctcaccttgactgagtgcctatgggagattggg

SEQ ID NO: 70275 - DNA, 76 bp, Homo sapiens
tagaagagctgagggaaagcatcccttcccttcctcaccttgactgagtgcctatgggagattgggttgatcaaag

SEQ ID NO: 70276 - DNA, 72 bp, Homo sapiens
agggaaagcatcccttcccttcctcaccttgactgagtgcctatgggagattgggttgatcaaagggtcaaa

SEQ ID NO: 70277 - DNA, 72 bp, Homo sapiens
cccttcccttcctcaccttgactgagtgcctatgggagattgggttgatcaaagggtcaaagtagaaagctg

SEQ ID NO: 70278 - DNA, 77 bp, Homo sapiens
ttcctcaccttgactgagtgcctatgggagattgggttgatcaaagggtcaaagtagaaagctggcaagtcaggatc

SEQ ID NO: 70279 - DNA, 76 bp, Homo sapiens
actgagtgcctatgggagattgggttgatcaaagggtcaaagtagaaagctggcaagtcaggatcctcagttttga

SEQ ID NO: 70280 - DNA, 77 bp, Homo sapiens
tatgggagattgggttgatcaaagggtcaaagtagaaagctggcaagtcaggatcctcagttttgatgaatacaaca

SEQ ID NO: 70281 - DNA, 75 bp, Homo sapiens
agattgggttgatcaaagggtcaaagtagaaagctggcaagtcaggatcctcagttttgatgaatacaacattgg

SEQ ID NO: 70282 - DNA, 75 bp, Homo sapiens
atcaaagggtcaaagtagaaagctggcaagtcaggatcctcagttttgatgaatacaacattgggagtatggtac

SEQ ID NO: 70283 - DNA, 74 bp, Homo sapiens
aaagtagaaagctggcaagtcaggatcctcagttttgatgaatacaacattgggagtatggtacctaaaatgaa

SEQ ID NO: 70284 - DNA, 74 bp, Homo sapiens
aaagctggcaagtcaggatcctcagttttgatgaatacaacattgggagtatggtacctaaaatgaaaggaaga

SEQ ID NO: 70285 - DNA, 72 bp, Homo sapiens
ggatcctcagttttgatgaatacaacattgggagtatggtacctaaaatgaaaggaagagtcagccaaagtt

SEQ ID NO: 70286 - DNA, 75 bp, Homo sapiens
taaacagcagccttctcctttccaaatgttgtgttccaggtctcttaccaggtgaggtggacatggtgtggaaga

SEQ ID NO: 70287 - DNA, 74 bp, Homo sapiens
ttctcctttccaaatgttgtgttccaggtctcttaccaggtgaggtggacatggtgtggaagattgttgtacaa

SEQ ID NO: 70288 - DNA, 73 bp, Homo sapiens
caaatgttgtgttccaggtctcttaccaggtgaggtggacatggtgtggaagattgttgtacaagtaaggaaa

SEQ ID NO: 70289 - DNA, 74 bp, Homo sapiens
ttgtgttccaggtctcttaccaggtgaggtggacatggtgtggaagattgttgtacaagtaaggaaaagcaatc

SEQ ID NO: 70290 - DNA, 74 bp, Homo sapiens
aggtctcttaccaggtgaggtggacatggtgtggaagattgttgtacaagtaaggaaaagcaatcttgtactca

SEQ ID NO: 70291 - DNA, 77 bp, Homo sapiens
aggtgaggtggacatggtgtggaagattgttgtacaagtaaggaaaagcaatcttgtactcagtgcggataggctgc

SEQ ID NO: 70292 - DNA, 77 bp, Homo sapiens
atggtgtggaagattgttgtacaagtaaggaaaagcaatcttgtactcagtgcggataggctgccggatgataatct

SEQ ID NO: 70293 - DNA, 76 bp, Homo sapiens
aagattgttgtacaagtaaggaaaagcaatcttgtactcagtgcggataggctgccggatgataatcttgttaata

SEQ ID NO: 70294 - DNA, 78 bp, Homo sapiens
ttgtacaagtaaggaaaagcaatcttgtactcagtgcggataggctgccggatgataatcttgttaatatcattgaat

SEQ ID NO: 70295 - DNA, 81 bp, Homo sapiens
aaaagcaatcttgtactcagtgcggataggctgccggatgataatcttgttaatatcattgaattcattccagtcttcatc

SEQ ID NO: 70296 - DNA, 81 bp, Homo sapiens
tgcggataggctgccggatgataatcttgttaatatcattgaattcattccagtcttcatccctagggtacaacatcaaga

SEQ ID NO: 70297 - DNA, 79 bp, Homo sapiens
ataggctgccggatgataatcttgttaatatcattgaattcattccagtcttcatccctagggtacaacatcaagaata

SEQ ID NO: 70298 - DNA, 78 bp, Homo sapiens
gatgataatcttgttaatatcattgaattcattccagtcttcatccctagggtacaacatcaagaataagcagacttt

SEQ ID NO: 70299 - DNA, 73 bp, Homo sapiens
cttgttaatatcattgaattcattccagtcttcatccctagggtacaacatcaagaataagcagacttttttt

SEQ ID NO: 70300 - DNA, 75 bp, Homo sapiens
tacgtttcattcaactcaaaatgtctaaaatccctaatctctccaactcactgtaggttgatgtctcgaacaaga

SEQ ID NO: 70301 - DNA, 72 bp, Homo sapiens
actcaaaatgtctaaaatccctaatctctccaactcactgtaggttgatgtctcgaacaagaggttcaaatt

SEQ ID NO: 70302 - DNA, 72 bp, Homo sapiens
atgtctaaaatccctaatctctccaactcactgtaggttgatgtctcgaacaagaggttcaaatttggggcc

SEQ ID NO: 70303 - DNA, 75 bp, Homo sapiens
taatctctccaactcactgtaggttgatgtctcgaacaagaggttcaaatttggggcctccaggaatggccatat

SEQ ID NO: 70304 - DNA, 74 bp, Homo sapiens
aactcactgtaggttgatgtctcgaacaagaggttcaaatttggggcctccaggaatggccatattgagtgcct

SEQ ID NO: 70305 - DNA, 74 bp, Homo sapiens
taggttgatgtctcgaacaagaggttcaaatttggggcctccaggaatggccatattgagtgccttggacgtaa

SEQ ID NO: 70306 - DNA, 72 bp, Homo sapiens
atgtctcgaacaagaggttcaaatttggggcctccaggaatggccatattgagtgccttggacgtaaagaag

SEQ ID NO: 70307 - DNA, 71 bp, Homo sapiens
ggttcaaatttggggcctccaggaatggccatattgagtgccttggacgtaaagaaggccttcaaatcaaa

SEQ ID NO: 70308 - DNA, 71 bp, Homo sapiens
aatttggggcctccaggaatggccatattgagtgccttggacgtaaagaaggccttcaaatcaaacaggta

SEQ ID NO: 70309 - DNA, 74 bp, Homo sapiens
aggaatggccatattgagtgccttggacgtaaagaaggccttcaaatcaaacaggtagaagtagttgtcatcca

SEQ ID NO: 70310 - DNA, 73 bp, Homo sapiens
atattgagtgccttggacgtaaagaaggccttcaaatcaaacaggtagaagtagttgtcatccaccaagtctg

SEQ ID NO: 70311 - DNA, 73 bp, Homo sapiens
agtgccttggacgtaaagaaggccttcaaatcaaacaggtagaagtagttgtcatccaccaagtctgtcagga

SEQ ID NO: 70312 - DNA, 75 bp, Homo sapiens
acgtaaagaaggccttcaaatcaaacaggtagaagtagttgtcatccaccaagtctgtcaggagctgattagcca

SEQ ID NO: 70313 - DNA, 79 bp, Homo sapiens
ttcaaatcaaacaggtagaagtagttgtcatccaccaagtctgtcaggagctgattagccaggcggtagagagtcgaca

SEQ ID NO: 70314 - DNA, 79 bp, Homo sapiens
aacaggtagaagtagttgtcatccaccaagtctgtcaggagctgattagccaggcggtagagagtcgacatcataggta

SEQ ID NO: 70315 - DNA, 81 bp, Homo sapiens
tagaagtagttgtcatccaccaagtctgtcaggagctgattagccaggcggtagagagtcgacatcataggtagtgtgaac

SEQ ID NO: 70316 - DNA, 82 bp, Homo sapiens
atccaccaagtctgtcaggagctgattagccaggcggtagagagtcgacatcataggtagtgtgaactgccagcgctggtaa

SEQ ID NO: 70317 - DNA, 83 bp, Homo sapiens
tctgtcaggagctgattagccaggcggtagagagtcgacatcataggtagtgtgaactgccagcgctggtaagtggagccatt

SEQ ID NO: 70318 - DNA, 81 bp, Homo sapiens
agctgattagccaggcggtagagagtcgacatcataggtagtgtgaactgccagcgctggtaagtggagccatttacatac

SEQ ID NO: 70319 - DNA, 77 bp, Homo sapiens
aggcggtagagagtcgacatcataggtagtgtgaactgccagcgctggtaagtggagccatttacatacctaggtaa

SEQ ID NO: 70320 - DNA, 76 bp, Homo sapiens
gtagagagtcgacatcataggtagtgtgaactgccagcgctggtaagtggagccatttacatacctaggtaaaaaa

SEQ ID NO: 70321 - DNA, 74 bp, Homo sapiens
acatcataggtagtgtgaactgccagcgctggtaagtggagccatttacatacctaggtaaaaaatgaaaggcc

SEQ ID NO: 70322 - DNA, 73 bp, Homo sapiens
tgtgaactgccagcgctggtaagtggagccatttacatacctaggtaaaaaatgaaaggcccacctcaagtaa

SEQ ID NO: 70323 - DNA, 78 bp, Homo sapiens
atttccagaactcctcccaggtgtagtatctccatctatcactcacttcctgctgtccctcaacggctggtggtcata

SEQ ID NO: 70324 - DNA, 78 bp, Homo sapiens
agaactcctcccaggtgtagtatctccatctatcactcacttcctgctgtccctcaacggctggtggtcatagaacca

SEQ ID NO: 70325 - DNA, 78 bp, Homo sapiens
aggtgtagtatctccatctatcactcacttcctgctgtccctcaacggctggtggtcatagaaccagtccaacacagg

SEQ ID NO: 70326 - DNA, 79 bp, Homo sapiens
tatctccatctatcactcacttcctgctgtccctcaacggctggtggtcatagaaccagtccaacacaggggcgtcctc

SEQ ID NO: 70327 - DNA, 74 bp, Homo sapiens
actcacttcctgctgtccctcaacggctggtggtcatagaaccagtccaacacaggggcgtcctcctcagggtc

SEQ ID NO: 70328 - DNA, 78 bp, Homo sapiens
tgctgtccctcaacggctggtggtcatagaaccagtccaacacaggggcgtcctcctcagggtccagctctagctgaa

SEQ ID NO: 70329 - DNA, 77 bp, Homo sapiens
tccctcaacggctggtggtcatagaaccagtccaacacaggggcgtcctcctcagggtccagctctagctgaatggc

SEQ ID NO: 70330 - DNA, 80 bp, Homo sapiens
tggtcatagaaccagtccaacacaggggcgtcctcctcagggtccagctctagctgaatggcctccagtggctcaacatc

SEQ ID NO: 70331 - DNA, 78 bp, Homo sapiens
atagaaccagtccaacacaggggcgtcctcctcagggtccagctctagctgaatggcctccagtggctcaacatctag

SEQ ID NO: 70332 - DNA, 83 bp, Homo sapiens
tcctcctcagggtccagctctagctgaatggcctccagtggctcaacatctaggatgttgtcagcatagtccaagggcggctc

SEQ ID NO: 70333 - DNA, 85 bp, Homo sapiens
ggtccagctctagctgaatggcctccagtggctcaacatctaggatgttgtcagcatagtccaagggcggctcctcatcatcaaa

SEQ ID NO: 70334 - DNA, 83 bp, Homo sapiens
agctctagctgaatggcctccagtggctcaacatctaggatgttgtcagcatagtccaagggcggctcctcatcatcaaaagg

SEQ ID NO: 70335 - DNA, 78 bp, Homo sapiens
aatggcctccagtggctcaacatctaggatgttgtcagcatagtccaagggcggctcctcatcatcaaaagggggaaa

SEQ ID NO: 70336 - DNA, 79 bp, Homo sapiens
gctcaacatctaggatgttgtcagcatagtccaagggcggctcctcatcatcaaaagggggaaaacgcatcctcttgaa

SEQ ID NO: 70337 - DNA, 78 bp, Homo sapiens
acatctaggatgttgtcagcatagtccaagggcggctcctcatcatcaaaagggggaaaacgcatcctcttgaaatgc

SEQ ID NO: 70338 - DNA, 76 bp, Homo sapiens
tcagcatagtccaagggcggctcctcatcatcaaaagggggaaaacgcatcctcttgaaatgcctcctatctcttt

SEQ ID NO: 70339 - DNA, 72 bp, Homo sapiens
atagtccaagggcggctcctcatcatcaaaagggggaaaacgcatcctcttgaaatgcctcctatctctttt

SEQ ID NO: 70340 - DNA, 76 bp, Homo sapiens
ctcctcatcatcaaaagggggaaaacgcatcctcttgaaatgcctcctatctcttttttctcggcgcatcataatc

SEQ ID NO: 70341 - DNA, 75 bp, Homo sapiens
atcaaaagggggaaaacgcatcctcttgaaatgcctcctatctcttttttctcggcgcatcataatccacattga

SEQ ID NO: 70342 - DNA, 78 bp, Homo sapiens
gaaaacgcatcctcttgaaatgcctcctatctcttttttctcggcgcatcataatccacattgacctggaaggcaaga

SEQ ID NO: 70343 - DNA, 80 bp, Homo sapiens
atcctcttgaaatgcctcctatctcttttttctcggcgcatcataatccacattgacctggaaggcaagacatcacacaa

SEQ ID NO: 70344 - DNA, 73 bp, Homo sapiens
caccaccaccacccaccatatttcagcctttctcacccccactgggagatgtagacaggttcaatgacccagg

SEQ ID NO: 70345 - DNA, 75 bp, Homo sapiens
acccaccatatttcagcctttctcacccccactgggagatgtagacaggttcaatgacccagggaatctcattga

SEQ ID NO: 70346 - DNA, 74 bp, Homo sapiens
tttcagcctttctcacccccactgggagatgtagacaggttcaatgacccagggaatctcattgacgaaggaaa

SEQ ID NO: 70347 - DNA, 75 bp, Homo sapiens
tttctcacccccactgggagatgtagacaggttcaatgacccagggaatctcattgacgaaggaaatggctccag

SEQ ID NO: 70348 - DNA, 80 bp, Homo sapiens
actgggagatgtagacaggttcaatgacccagggaatctcattgacgaaggaaatggctccagtgatgtggtacagcaca

SEQ ID NO: 70349 - DNA, 82 bp, Homo sapiens
agatgtagacaggttcaatgacccagggaatctcattgacgaaggaaatggctccagtgatgtggtacagcacaggcacatc

SEQ ID NO: 70350 - DNA, 79 bp, Homo sapiens
aggttcaatgacccagggaatctcattgacgaaggaaatggctccagtgatgtggtacagcacaggcacatcccgaatc

SEQ ID NO: 70351 - DNA, 81 bp, Homo sapiens
agggaatctcattgacgaaggaaatggctccagtgatgtggtacagcacaggcacatcccgaatctgctcccaaggcatag

SEQ ID NO: 70352 - DNA, 84 bp, Homo sapiens
atctcattgacgaaggaaatggctccagtgatgtggtacagcacaggcacatcccgaatctgctcccaaggcataggcatgttc

SEQ ID NO: 70353 - DNA, 81 bp, Homo sapiens
aaggaaatggctccagtgatgtggtacagcacaggcacatcccgaatctgctcccaaggcataggcatgttctccaggagt

SEQ ID NO: 70354 - DNA, 84 bp, Homo sapiens
tccagtgatgtggtacagcacaggcacatcccgaatctgctcccaaggcataggcatgttctccaggagtttgaggactgcgtg

SEQ ID NO: 70355 - DNA, 83 bp, Homo sapiens
tggtacagcacaggcacatcccgaatctgctcccaaggcataggcatgttctccaggagtttgaggactgcgtggggcatgta

SEQ ID NO: 70356 - DNA, 79 bp, Homo sapiens
acaggcacatcccgaatctgctcccaaggcataggcatgttctccaggagtttgaggactgcgtggggcatgtacttta

SEQ ID NO: 70357 - DNA, 80 bp, Homo sapiens
gaatctgctcccaaggcataggcatgttctccaggagtttgaggactgcgtggggcatgtactttagggcactggcacat

SEQ ID NO: 70358 - DNA, 77 bp, Homo sapiens
ccaaggcataggcatgttctccaggagtttgaggactgcgtggggcatgtactttagggcactggcacattagaaaa

SEQ ID NO: 70359 - DNA, 76 bp, Homo sapiens
ataggcatgttctccaggagtttgaggactgcgtggggcatgtactttagggcactggcacattagaaaaagagaa

SEQ ID NO: 70360 - DNA, 75 bp, Homo sapiens
ccaggagtttgaggactgcgtggggcatgtactttagggcactggcacattagaaaaagagaaggctatcagaaa

SEQ ID NO: 70361 - DNA, 63 bp, Homo sapiens
ggaaaagggccaaattccaaatgaaattatttcaggatgttccttaccccaagtaaacccttt

SEQ ID NO: 70362 - DNA, 66 bp, Homo sapiens
aaattccaaatgaaattatttcaggatgttccttaccccaagtaaacccttttgtcatggcggaac

SEQ ID NO: 70363 - DNA, 69 bp, Homo sapiens
tgaaattatttcaggatgttccttaccccaagtaaacccttttgtcatggcggaacttcctgttggtca

SEQ ID NO: 70364 - DNA, 70 bp, Homo sapiens
ttatttcaggatgttccttaccccaagtaaacccttttgtcatggcggaacttcctgttggtcatgtctc

SEQ ID NO: 70365 - DNA, 72 bp, Homo sapiens
ttccttaccccaagtaaacccttttgtcatggcggaacttcctgttggtcatgtctccatggtctcgaatga

SEQ ID NO: 70366 - DNA, 75 bp, Homo sapiens
aagtaaacccttttgtcatggcggaacttcctgttggtcatgtctccatggtctcgaatgatcttcctgacatgt

SEQ ID NO: 70367 - DNA, 76 bp, Homo sapiens
acccttttgtcatggcggaacttcctgttggtcatgtctccatggtctcgaatgatcttcctgacatgttctgggg

SEQ ID NO: 70368 - DNA, 79 bp, Homo sapiens
atggcggaacttcctgttggtcatgtctccatggtctcgaatgatcttcctgacatgttctgggggcatgtcttccttc

SEQ ID NO: 70369 - DNA, 82 bp, Homo sapiens
tcctgttggtcatgtctccatggtctcgaatgatcttcctgacatgttctgggggcatgtcttccttctgggcatccacaaa

SEQ ID NO: 70370 - DNA, 78 bp, Homo sapiens
atgtctccatggtctcgaatgatcttcctgacatgttctgggggcatgtcttccttctgggcatccacaaacccaaac

SEQ ID NO: 70371 - DNA, 75 bp, Homo sapiens
tctcgaatgatcttcctgacatgttctgggggcatgtcttccttctgggcatccacaaacccaaacttccgcttt

SEQ ID NO: 70372 - DNA, 77 bp, Homo sapiens
atgatcttcctgacatgttctgggggcatgtcttccttctgggcatccacaaacccaaacttccgcttttctgcata

SEQ ID NO: 70373 - DNA, 77 bp, Homo sapiens
atgttctgggggcatgtcttccttctgggcatccacaaacccaaacttccgcttttctgcatagcgcttggcctgca

SEQ ID NO: 70374 - DNA, 79 bp, Homo sapiens
ggcatgtcttccttctgggcatccacaaacccaaacttccgcttttctgcatagcgcttggcctgcaattgctgccatt

SEQ ID NO: 70375 - DNA, 78 bp, Homo sapiens
tcttccttctgggcatccacaaacccaaacttccgcttttctgcatagcgcttggcctgcaattgctgccattttcga

SEQ ID NO: 70376 - DNA, 77 bp, Homo sapiens
atccacaaacccaaacttccgcttttctgcatagcgcttggcctgcaattgctgccattttcgagctggaaaggcac

SEQ ID NO: 70377 - DNA, 77 bp, Homo sapiens
ccaaacttccgcttttctgcatagcgcttggcctgcaattgctgccattttcgagctggaaaggcacctcagtttaa

SEQ ID NO: 70378 - DNA, 80 bp, Homo sapiens
ttccgcttttctgcatagcgcttggcctgcaattgctgccattttcgagctggaaaggcacctcagtttaaaggcctgca

SEQ ID NO: 70379 - DNA, 80 bp, Homo sapiens
tctgcatagcgcttggcctgcaattgctgccattttcgagctggaaaggcacctcagtttaaaggcctgcacaccctccc

SEQ ID NO: 70380 - DNA, 74 bp, Homo sapiens
acccgccccgcctccggcccgcgcgccgctccacactctcgcctcacctttctcctgcagcttctcctccgaca

SEQ ID NO: 70381 - DNA, 76 bp, Homo sapiens
cctccggcccgcgcgccgctccacactctcgcctcacctttctcctgcagcttctcctccgacatgtagtccggta

SEQ ID NO: 70382 - DNA, 77 bp, Homo sapiens
cgcgccgctccacactctcgcctcacctttctcctgcagcttctcctccgacatgtagtccggtagcggggctagag

SEQ ID NO: 70383 - DNA, 78 bp, Homo sapiens
tccacactctcgcctcacctttctcctgcagcttctcctccgacatgtagtccggtagcggggctagagggccaggca

SEQ ID NO: 70384 - DNA, 72 bp, Homo sapiens
cctcacctttctcctgcagcttctcctccgacatgtagtccggtagcggggctagagggccaggcaccgggt

SEQ ID NO: 70385 - DNA, 71 bp, Homo sapiens
tttctcctgcagcttctcctccgacatgtagtccggtagcggggctagagggccaggcaccgggttacccg

SEQ ID NO: 70386 - DNA, 69 bp, Homo sapiens
ttctcctccgacatgtagtccggtagcggggctagagggccaggcaccgggttacccggccctcgataa

SEQ ID NO: 70387 - DNA, 67 bp, Homo sapiens
acatgtagtccggtagcggggctagagggccaggcaccgggttacccggccctcgataaggaaacac

SEQ ID NO: 70388 - DNA, 66 bp, Homo sapiens
tagtccggtagcggggctagagggccaggcaccgggttacccggccctcgataaggaaacactccg

SEQ ID NO: 70389 - DNA, 70 bp, Homo sapiens
gctagagggccaggcaccgggttacccggccctcgataaggaaacactccggccatatccggagaatctg

SEQ ID NO: 70390 - DNA, 67 bp, Homo sapiens
agggccaggcaccgggttacccggccctcgataaggaaacactccggccatatccggagaatctggg

SEQ ID NO: 70391 - DNA, 69 bp, Homo sapiens
gttacccggccctcgataaggaaacactccggccatatccggagaatctggggagcggcgggatagaaa

SEQ ID NO: 70392 - DNA, 70 bp, Homo sapiens
ccggccctcgataaggaaacactccggccatatccggagaatctggggagcggcgggatagaaaaattca

SEQ ID NO: 70393 - DNA, 71 bp, Homo sapiens
ccgacccgaccacgcctcccgcagcccggccttaaacgcctgccacgcaccccacaggccctcacacaaga

SEQ ID NO: 70394 - DNA, 71 bp, Homo sapiens
acgcctcccgcagcccggccttaaacgcctgccacgcaccccacaggccctcacacaagaggccgctttcc

SEQ ID NO: 70395 - DNA, 73 bp, Homo sapiens
agcccggccttaaacgcctgccacgcaccccacaggccctcacacaagaggccgctttccccgcagcgcaatg

SEQ ID NO: 70396 - DNA, 75 bp, Homo sapiens
ccttaaacgcctgccacgcaccccacaggccctcacacaagaggccgctttccccgcagcgcaatggcggccaga

SEQ ID NO: 70397 - DNA, 76 bp, Homo sapiens
acgcaccccacaggccctcacacaagaggccgctttccccgcagcgcaatggcggccagactgcgtccgctccgcg

SEQ ID NO: 70398 - DNA, 77 bp, Homo sapiens
acaggccctcacacaagaggccgctttccccgcagcgcaatggcggccagactgcgtccgctccgcgttcccagcgc

SEQ ID NO: 70399 - DNA, 76 bp, Homo sapiens
ctcacacaagaggccgctttccccgcagcgcaatggcggccagactgcgtccgctccgcgttcccagcgccgggaa

SEQ ID NO: 70400 - DNA, 75 bp, Homo sapiens
cgctttccccgcagcgcaatggcggccagactgcgtccgctccgcgttcccagcgccgggaagtgcgcaacccga

SEQ ID NO: 70401 - DNA, 79 bp, Homo sapiens
cgcagcgcaatggcggccagactgcgtccgctccgcgttcccagcgccgggaagtgcgcaacccgagttcagcagttga

SEQ ID NO: 70402 - DNA, 76 bp, Homo sapiens
aatggcggccagactgcgtccgctccgcgttcccagcgccgggaagtgcgcaacccgagttcagcagttgatccag

SEQ ID NO: 70403 - DNA, 76 bp, Homo sapiens
agactgcgtccgctccgcgttcccagcgccgggaagtgcgcaacccgagttcagcagttgatccagtcggcgccga

SEQ ID NO: 70404 - DNA, 78 bp, Homo sapiens
tccgcgttcccagcgccgggaagtgcgcaacccgagttcagcagttgatccagtcggcgccgaggtgctcagatggat

SEQ ID NO: 70405 - DNA, 74 bp, Homo sapiens
ccgccttccctctcgcttccccctcccctttcccagccgcgctctcaatctctagctcgctcgcgctccctctc

SEQ ID NO: 70406 - DNA, 73 bp, Homo sapiens
ttccctctcgcttccccctcccctttcccagccgcgctctcaatctctagctcgctcgcgctccctctccccg

SEQ ID NO: 70407 - DNA, 72 bp, Homo sapiens
ccctcccctttcccagccgcgctctcaatctctagctcgctcgcgctccctctccccgggccgtggaaagga

SEQ ID NO: 70408 - DNA, 72 bp, Homo sapiens
ccgcgctctcaatctctagctcgctcgcgctccctctccccgggccgtggaaaggatcccacttccggtggg

SEQ ID NO: 70409 - DNA, 72 bp, Homo sapiens
aatctctagctcgctcgcgctccctctccccgggccgtggaaaggatcccacttccggtggggtgtcatggc

SEQ ID NO: 70410 - DNA, 70 bp, Homo sapiens
tcgcgctccctctccccgggccgtggaaaggatcccacttccggtggggtgtcatggcggcgtctcggac

SEQ ID NO: 70411 - DNA, 72 bp, Homo sapiens
ctctccccgggccgtggaaaggatcccacttccggtggggtgtcatggcggcgtctcggactgtgatggctg

SEQ ID NO: 70412 - DNA, 72 bp, Homo sapiens
ccgggccgtggaaaggatcccacttccggtggggtgtcatggcggcgtctcggactgtgatggctgtgggga

SEQ ID NO: 70413 - DNA, 74 bp, Homo sapiens
aaaggatcccacttccggtggggtgtcatggcggcgtctcggactgtgatggctgtggggagacggcgctagtg

SEQ ID NO: 70414 - DNA, 76 bp, Homo sapiens
ttccggtggggtgtcatggcggcgtctcggactgtgatggctgtggggagacggcgctagtggggagagcgaccaa

SEQ ID NO: 70415 - DNA, 76 bp, Homo sapiens
gggtgtcatggcggcgtctcggactgtgatggctgtggggagacggcgctagtggggagagcgaccaagaggcccc

SEQ ID NO: 70416 - DNA, 73 bp, Homo sapiens
cggcgtctcggactgtgatggctgtggggagacggcgctagtggggagagcgaccaagaggccccctcccctc

SEQ ID NO: 70417 - DNA, 70 bp, Homo sapiens
actgtgatggctgtggggagacggcgctagtggggagagcgaccaagaggccccctcccctccccgggtc

SEQ ID NO: 70418 - DNA, 66 bp, Homo sapiens
ctgtggggagacggcgctagtggggagagcgaccaagaggccccctcccctccccgggtccccttc

SEQ ID NO: 70419 - DNA, 65 bp, Homo sapiens
agacggcgctagtggggagagcgaccaagaggccccctcccctccccgggtccccttcccctatc

SEQ ID NO: 70420 - DNA, 63 bp, Homo sapiens
tagtggggagagcgaccaagaggccccctcccctccccgggtccccttcccctatccccctcc

SEQ ID NO: 70421 - DNA, 60 bp, Homo sapiens
accaagaggccccctcccctccccgggtccccttcccctatccccctccccccagcctcc

SEQ ID NO: 70422 - DNA, 61 bp, Homo sapiens
ccctcccctccccgggtccccttcccctatccccctccccccagcctccttgccaacgccc

SEQ ID NO: 70423 - DNA, 61 bp, Homo sapiens
cccgggtccccttcccctatccccctccccccagcctccttgccaacgccccctttccctc

SEQ ID NO: 70424 - DNA, 62 bp, Homo sapiens
cccttcccctatccccctccccccagcctccttgccaacgccccctttccctctccccctcc

SEQ ID NO: 70425 - DNA, 67 bp, Homo sapiens
tatccccctccccccagcctccttgccaacgccccctttccctctccccctcccgctcggcgctgac

SEQ ID NO: 70426 - DNA, 67 bp, Homo sapiens
cccagcctccttgccaacgccccctttccctctccccctcccgctcggcgctgaccccccatcccca

SEQ ID NO: 70427 - DNA, 65 bp, Homo sapiens
ctccttgccaacgccccctttccctctccccctcccgctcggcgctgaccccccatccccacccc

SEQ ID NO: 70428 - DNA, 64 bp, Homo sapiens
ccctttccctctccccctcccgctcggcgctgaccccccatccccacccccgtgggaacactgg

SEQ ID NO: 70429 - DNA, 71 bp, Homo sapiens
tctccccctcccgctcggcgctgaccccccatccccacccccgtgggaacactgggagcctgcactccaca

SEQ ID NO: 70430 - DNA, 71 bp, Homo sapiens
cgctcggcgctgaccccccatccccacccccgtgggaacactgggagcctgcactccacagaccctctcct

SEQ ID NO: 70431 - DNA, 71 bp, Homo sapiens
ctgaccccccatccccacccccgtgggaacactgggagcctgcactccacagaccctctccttgcctcttc

SEQ ID NO: 70432 - DNA, 73 bp, Homo sapiens
ccatccccacccccgtgggaacactgggagcctgcactccacagaccctctccttgcctcttccctcacctca

SEQ ID NO: 70433 - DNA, 66 bp, Homo sapiens
acctcagcctccgctccccgccctcttcccggcccagggcgccggcccacccttccctccgccgcc

SEQ ID NO: 70434 - DNA, 63 bp, Homo sapiens
ctccgctccccgccctcttcccggcccagggcgccggcccacccttccctccgccgccccccg

SEQ ID NO: 70435 - DNA, 62 bp, Homo sapiens
ccgccctcttcccggcccagggcgccggcccacccttccctccgccgccccccggccgcggg

SEQ ID NO: 70436 - DNA, 68 bp, Homo sapiens
gcccagggcgccggcccacccttccctccgccgccccccggccgcggggaggacatggccgcgcacag

SEQ ID NO: 70437 - DNA, 67 bp, Homo sapiens
ccggcccacccttccctccgccgccccccggccgcggggaggacatggccgcgcacaggccggtgga

SEQ ID NO: 70438 - DNA, 67 bp, Homo sapiens
acccttccctccgccgccccccggccgcggggaggacatggccgcgcacaggccggtggaatgggtc

SEQ ID NO: 70439 - DNA, 70 bp, Homo sapiens
ccgccccccggccgcggggaggacatggccgcgcacaggccggtggaatgggtccaggccgtggtcagcc

SEQ ID NO: 70440 - DNA, 74 bp, Homo sapiens
ggaggacatggccgcgcacaggccggtggaatgggtccaggccgtggtcagccgcttcgacgagcaggtaaccg

SEQ ID NO: 70441 - DNA, 73 bp, Homo sapiens
tggccgcgcacaggccggtggaatgggtccaggccgtggtcagccgcttcgacgagcaggtaaccggcccgtg

SEQ ID NO: 70442 - DNA, 69 bp, Homo sapiens
aggccggtggaatgggtccaggccgtggtcagccgcttcgacgagcaggtaaccggcccgtggcgggcg

SEQ ID NO: 70443 - DNA, 69 bp, Homo sapiens
aatgggtccaggccgtggtcagccgcttcgacgagcaggtaaccggcccgtggcgggcgggaggtggga

SEQ ID NO: 70444 - DNA, 74 bp, Homo sapiens
tttctttttttttcagcttccaataaaaacaggacagcagaacacacataccaaagtcagtactgagcacaaca

SEQ ID NO: 70445 - DNA, 77 bp, Homo sapiens
ttttcagcttccaataaaaacaggacagcagaacacacataccaaagtcagtactgagcacaacaaggaatgtctaa

SEQ ID NO: 70446 - DNA, 77 bp, Homo sapiens
ttccaataaaaacaggacagcagaacacacataccaaagtcagtactgagcacaacaaggaatgtctaatcaatatt

SEQ ID NO: 70447 - DNA, 77 bp, Homo sapiens
aaaacaggacagcagaacacacataccaaagtcagtactgagcacaacaaggaatgtctaatcaatatttccaaata

SEQ ID NO: 70448 - DNA, 75 bp, Homo sapiens
cagaacacacataccaaagtcagtactgagcacaacaaggaatgtctaatcaatatttccaaatacaagttttct

SEQ ID NO: 70449 - DNA, 72 bp, Homo sapiens
acataccaaagtcagtactgagcacaacaaggaatgtctaatcaatatttccaaatacaagttttctttggt

SEQ ID NO: 70450 - DNA, 74 bp, Homo sapiens
tactgagcacaacaaggaatgtctaatcaatatttccaaatacaagttttctttggttataagcggcctcacta

SEQ ID NO: 70451 - DNA, 72 bp, Homo sapiens
gcacaacaaggaatgtctaatcaatatttccaaatacaagttttctttggttataagcggcctcactactat

SEQ ID NO: 70452 - DNA, 69 bp, Homo sapiens
ggaatgtctaatcaatatttccaaatacaagttttctttggttataagcggcctcactactattttaaa

SEQ ID NO: 70453 - DNA, 68 bp, Homo sapiens
caatatttccaaatacaagttttctttggttataagcggcctcactactattttaaagaatgttaaca

SEQ ID NO: 70454 - DNA, 69 bp, Homo sapiens
caaatacaagttttctttggttataagcggcctcactactattttaaagaatgttaacaatatggtgag

SEQ ID NO: 70455 - DNA, 69 bp, Homo sapiens
ctttggttataagcggcctcactactattttaaagaatgttaacaatatggtgagtatttgggttactg

SEQ ID NO: 70456 - DNA, 69 bp, Homo sapiens
taagcggcctcactactattttaaagaatgttaacaatatggtgagtatttgggttactgtgttttggg

SEQ ID NO: 70457 - DNA, 68 bp, Homo sapiens
gcctcactactattttaaagaatgttaacaatatggtgagtatttgggttactgtgttttggggaatt

SEQ ID NO: 70458 - DNA, 75 bp, Homo sapiens
gattggtagcagaaagtgaaactaacttttatgttctgaatatcttttctgttagagaatatttggagaagctgc

SEQ ID NO: 70459 - DNA, 75 bp, Homo sapiens
tagcagaaagtgaaactaacttttatgttctgaatatcttttctgttagagaatatttggagaagctgctgaaaa

SEQ ID NO: 70460 - DNA, 72 bp, Homo sapiens
tgaaactaacttttatgttctgaatatcttttctgttagagaatatttggagaagctgctgaaaaaaattta

SEQ ID NO: 70461 - DNA, 78 bp, Homo sapiens
tgttctgaatatcttttctgttagagaatatttggagaagctgctgaaaaaaatttatatctctctcagttgattata

SEQ ID NO: 70462 - DNA, 78 bp, Homo sapiens
tatcttttctgttagagaatatttggagaagctgctgaaaaaaatttatatctctctcagttgattatattggataca

SEQ ID NO: 70463 - DNA, 77 bp, Homo sapiens
ctgttagagaatatttggagaagctgctgaaaaaaatttatatctctctcagttgattatattggatacactggaaa

SEQ ID NO: 70464 - DNA, 77 bp, Homo sapiens
tttggagaagctgctgaaaaaaatttatatctctctcagttgattatattggatacactggaaaaatgtcttgctgg

SEQ ID NO: 70465 - DNA, 76 bp, Homo sapiens
gctgctgaaaaaaatttatatctctctcagttgattatattggatacactggaaaaatgtcttgctggggtaagta

SEQ ID NO: 70466 - DNA, 74 bp, Homo sapiens
aaatttatatctctctcagttgattatattggatacactggaaaaatgtcttgctggggtaagtaaattgatct

SEQ ID NO: 70467 - DNA, 77 bp, Homo sapiens
tatctctctcagttgattatattggatacactggaaaaatgtcttgctggggtaagtaaattgatcttaagtaggca

SEQ ID NO: 70468 - DNA, 75 bp, Homo sapiens
tgattatattggatacactggaaaaatgtcttgctggggtaagtaaattgatcttaagtaggcaggctttgtgaa

SEQ ID NO: 70469 - DNA, 72 bp, Homo sapiens
atattggatacactggaaaaatgtcttgctggggtaagtaaattgatcttaagtaggcaggctttgtgaatt

SEQ ID NO: 70470 - DNA, 70 bp, Homo sapiens
acaggtaaaattaaagtttagaataatgtgattatttctattttagcaaccaaaggacacaatgagatta

SEQ ID NO: 70471 - DNA, 75 bp, Homo sapiens
ttaaagtttagaataatgtgattatttctattttagcaaccaaaggacacaatgagattagatgaaacgatgctg

SEQ ID NO: 70472 - DNA, 78 bp, Homo sapiens
gaataatgtgattatttctattttagcaaccaaaggacacaatgagattagatgaaacgatgctggtcaaacagttgc

SEQ ID NO: 70473 - DNA, 77 bp, Homo sapiens
attatttctattttagcaaccaaaggacacaatgagattagatgaaacgatgctggtcaaacagttgctgccagaaa

SEQ ID NO: 70474 - DNA, 79 bp, Homo sapiens
tattttagcaaccaaaggacacaatgagattagatgaaacgatgctggtcaaacagttgctgccagaaatctgccattt

SEQ ID NO: 70475 - DNA, 79 bp, Homo sapiens
aaccaaaggacacaatgagattagatgaaacgatgctggtcaaacagttgctgccagaaatctgccattttcttcacac

SEQ ID NO: 70476 - DNA, 80 bp, Homo sapiens
aatgagattagatgaaacgatgctggtcaaacagttgctgccagaaatctgccattttcttcacacctgtcgtgaaggaa

SEQ ID NO: 70477 - DNA, 78 bp, Homo sapiens
attagatgaaacgatgctggtcaaacagttgctgccagaaatctgccattttcttcacacctgtcgtgaaggaaacca

SEQ ID NO: 70478 - DNA, 82 bp, Homo sapiens
aacgatgctggtcaaacagttgctgccagaaatctgccattttcttcacacctgtcgtgaaggaaaccagcatgcagctgaa

SEQ ID NO: 70479 - DNA, 78 bp, Homo sapiens
aaacagttgctgccagaaatctgccattttcttcacacctgtcgtgaaggaaaccagcatgcagctgaacttcggaat

SEQ ID NO: 70480 - DNA, 78 bp, Homo sapiens
ccagaaatctgccattttcttcacacctgtcgtgaaggaaaccagcatgcagctgaacttcggaattctgcctctggg

SEQ ID NO: 70481 - DNA, 76 bp, Homo sapiens
tgccattttcttcacacctgtcgtgaaggaaaccagcatgcagctgaacttcggaattctgcctctggggttttat

SEQ ID NO: 70482 - DNA, 74 bp, Homo sapiens
tttcttcacacctgtcgtgaaggaaaccagcatgcagctgaacttcggaattctgcctctggggttttattttc

SEQ ID NO: 70483 - DNA, 77 bp, Homo sapiens
tcgtgaaggaaaccagcatgcagctgaacttcggaattctgcctctggggttttattttctctcagctgcaacaact

SEQ ID NO: 70484 - DNA, 79 bp, Homo sapiens
aaccagcatgcagctgaacttcggaattctgcctctggggttttattttctctcagctgcaacaacttcaatgcagtct

SEQ ID NO: 70485 - DNA, 78 bp, Homo sapiens
atgcagctgaacttcggaattctgcctctggggttttattttctctcagctgcaacaacttcaatgcagtctttagtc

SEQ ID NO: 70486 - DNA, 74 bp, Homo sapiens
aacttcggaattctgcctctggggttttattttctctcagctgcaacaacttcaatgcagtctttagtcgcatt

SEQ ID NO: 70487 - DNA, 74 bp, Homo sapiens
cctctggggttttattttctctcagctgcaacaacttcaatgcagtctttagtcgcatttctaccaggttagtg

SEQ ID NO: 70488 - DNA, 78 bp, Homo sapiens
tttattttctctcagctgcaacaacttcaatgcagtctttagtcgcatttctaccaggttagtgtgtaaatccacatg

SEQ ID NO: 70489 - DNA, 79 bp, Homo sapiens
tttctctcagctgcaacaacttcaatgcagtctttagtcgcatttctaccaggttagtgtgtaaatccacatgggacta

SEQ ID NO: 70490 - DNA, 61 bp, Homo sapiens
ccctaatacttaatttgataagttaattttggtttttactttttaggttacaggaattaac

SEQ ID NO: 70491 - DNA, 64 bp, Homo sapiens
taatttgataagttaattttggtttttactttttaggttacaggaattaactgtttgttcagaa

SEQ ID NO: 70492 - DNA, 65 bp, Homo sapiens
agttaattttggtttttactttttaggttacaggaattaactgtttgttcagaagacaatgttga

SEQ ID NO: 70493 - DNA, 71 bp, Homo sapiens
ggtttttactttttaggttacaggaattaactgtttgttcagaagacaatgttgatgttcatgatatagaa

SEQ ID NO: 70494 - DNA, 74 bp, Homo sapiens
tactttttaggttacaggaattaactgtttgttcagaagacaatgttgatgttcatgatatagaattgttacag

SEQ ID NO: 70495 - DNA, 82 bp, Homo sapiens
caggaattaactgtttgttcagaagacaatgttgatgttcatgatatagaattgttacagtatatcaatgtggattgtgcaa

SEQ ID NO: 70496 - DNA, 80 bp, Homo sapiens
attaactgtttgttcagaagacaatgttgatgttcatgatatagaattgttacagtatatcaatgtggattgtgcaaaat

SEQ ID NO: 70497 - DNA, 81 bp, Homo sapiens
cagaagacaatgttgatgttcatgatatagaattgttacagtatatcaatgtggattgtgcaaaattaaaacgactcctga

SEQ ID NO: 70498 - DNA, 78 bp, Homo sapiens
caatgttgatgttcatgatatagaattgttacagtatatcaatgtggattgtgcaaaattaaaacgactcctgaaggg

SEQ ID NO: 70499 - DNA, 74 bp, Homo sapiens
gttcatgatatagaattgttacagtatatcaatgtggattgtgcaaaattaaaacgactcctgaagggtaagtt

SEQ ID NO: 70500 - DNA, 71 bp, Homo sapiens
atagaattgttacagtatatcaatgtggattgtgcaaaattaaaacgactcctgaagggtaagtttaaatg

SEQ ID NO: 70501 - DNA, 74 bp, Homo sapiens
acagtatatcaatgtggattgtgcaaaattaaaacgactcctgaagggtaagtttaaatgtataatatatctga

SEQ ID NO: 70502 - DNA, 70 bp, Homo sapiens
caatgtggattgtgcaaaattaaaacgactcctgaagggtaagtttaaatgtataatatatctgaaaaaa

SEQ ID NO: 70503 - DNA, 66 bp, Homo sapiens
ttaaaaattgtgttttttccagaaacagcatttaaatttaaagccctaaagaaggttgcgcagtta

SEQ ID NO: 70504 - DNA, 68 bp, Homo sapiens
gtgttttttccagaaacagcatttaaatttaaagccctaaagaaggttgcgcagttagcagttataaa

SEQ ID NO: 70505 - DNA, 70 bp, Homo sapiens
cagaaacagcatttaaatttaaagccctaaagaaggttgcgcagttagcagttataaatagcctggaaaa

SEQ ID NO: 70506 - DNA, 68 bp, Homo sapiens
gcatttaaatttaaagccctaaagaaggttgcgcagttagcagttataaatagcctggaaaaggtaag

SEQ ID NO: 70507 - DNA, 67 bp, Homo sapiens
atttaaagccctaaagaaggttgcgcagttagcagttataaatagcctggaaaaggtaagttacaac

SEQ ID NO: 70508 - DNA, 70 bp, Homo sapiens
taaagaaggttgcgcagttagcagttataaatagcctggaaaaggtaagttacaacctctctggtattaa

SEQ ID NO: 70509 - DNA, 69 bp, Homo sapiens
ttgcgcagttagcagttataaatagcctggaaaaggtaagttacaacctctctggtattaaaattttgt

SEQ ID NO: 70510 - DNA, 67 bp, Homo sapiens
agcagttataaatagcctggaaaaggtaagttacaacctctctggtattaaaattttgtttttgatg

SEQ ID NO: 70511 - DNA, 71 bp, Homo sapiens
gacattttatttactgtattacaaaaaatcactgtaaagacatgtggttctttatttataggcattttgga

SEQ ID NO: 70512 - DNA, 69 bp, Homo sapiens
atttactgtattacaaaaaatcactgtaaagacatgtggttctttatttataggcattttggaactggg

SEQ ID NO: 70513 - DNA, 70 bp, Homo sapiens
aaaaatcactgtaaagacatgtggttctttatttataggcattttggaactgggtagaaaattatccaga

SEQ ID NO: 70514 - DNA, 72 bp, Homo sapiens
cactgtaaagacatgtggttctttatttataggcattttggaactgggtagaaaattatccagatgaattta

SEQ ID NO: 70515 - DNA, 71 bp, Homo sapiens
gacatgtggttctttatttataggcattttggaactgggtagaaaattatccagatgaatttacaaaactg

SEQ ID NO: 70516 - DNA, 72 bp, Homo sapiens
atttataggcattttggaactgggtagaaaattatccagatgaatttacaaaactgtaccagatcccacaga

SEQ ID NO: 70517 - DNA, 75 bp, Homo sapiens
taggcattttggaactgggtagaaaattatccagatgaatttacaaaactgtaccagatcccacagactgatatg

SEQ ID NO: 70518 - DNA, 75 bp, Homo sapiens
actgggtagaaaattatccagatgaatttacaaaactgtaccagatcccacagactgatatggctggtaaggata

SEQ ID NO: 70519 - DNA, 75 bp, Homo sapiens
attatccagatgaatttacaaaactgtaccagatcccacagactgatatggctggtaaggatacgattgattttt

SEQ ID NO: 70520 - DNA, 73 bp, Homo sapiens
ccagatgaatttacaaaactgtaccagatcccacagactgatatggctggtaaggatacgattgatttttttt

SEQ ID NO: 70521 - DNA, 77 bp, Homo sapiens
ggattttgttcctatctaataatgtcatttaatatatttttcatgcagaatgtgcagaaaagctatttgacttggtg

SEQ ID NO: 70522 - DNA, 79 bp, Homo sapiens
tcctatctaataatgtcatttaatatatttttcatgcagaatgtgcagaaaagctatttgacttggtggatggttttgc

SEQ ID NO: 70523 - DNA, 80 bp, Homo sapiens
taatgtcatttaatatatttttcatgcagaatgtgcagaaaagctatttgacttggtggatggttttgctgaaagcacca

SEQ ID NO: 70524 - DNA, 76 bp, Homo sapiens
atatatttttcatgcagaatgtgcagaaaagctatttgacttggtggatggttttgctgaaagcaccaaacgtaaa

SEQ ID NO: 70525 - DNA, 78 bp, Homo sapiens
tttcatgcagaatgtgcagaaaagctatttgacttggtggatggttttgctgaaagcaccaaacgtaaagcagcagtt

SEQ ID NO: 70526 - DNA, 76 bp, Homo sapiens
tgcagaaaagctatttgacttggtggatggttttgctgaaagcaccaaacgtaaagcagcagtttggccactacaa

SEQ ID NO: 70527 - DNA, 72 bp, Homo sapiens
aaaagctatttgacttggtggatggttttgctgaaagcaccaaacgtaaagcagcagtttggccactacaaa

SEQ ID NO: 70528 - DNA, 74 bp, Homo sapiens
acttggtggatggttttgctgaaagcaccaaacgtaaagcagcagtttggccactacaaatcattctccttatc

SEQ ID NO: 70529 - DNA, 76 bp, Homo sapiens
ttttgctgaaagcaccaaacgtaaagcagcagtttggccactacaaatcattctccttatcttgtgtccagaaata

SEQ ID NO: 70530 - DNA, 74 bp, Homo sapiens
aaagcaccaaacgtaaagcagcagtttggccactacaaatcattctccttatcttgtgtccagaaataatccag

SEQ ID NO: 70531 - DNA, 76 bp, Homo sapiens
aaacgtaaagcagcagtttggccactacaaatcattctccttatcttgtgtccagaaataatccaggatatatcca

SEQ ID NO: 70532 - DNA, 75 bp, Homo sapiens
agtttggccactacaaatcattctccttatcttgtgtccagaaataatccaggatatatccaaagacgtggttga

SEQ ID NO: 70533 - DNA, 75 bp, Homo sapiens
actacaaatcattctccttatcttgtgtccagaaataatccaggatatatccaaagacgtggttgatgaaaacaa

SEQ ID NO: 70534 - DNA, 77 bp, Homo sapiens
aatcattctccttatcttgtgtccagaaataatccaggatatatccaaagacgtggttgatgaaaacaacatgaata

SEQ ID NO: 70535 - DNA, 75 bp, Homo sapiens
ttatcttgtgtccagaaataatccaggatatatccaaagacgtggttgatgaaaacaacatgaataaggtaagga

SEQ ID NO: 70536 - DNA, 71 bp, Homo sapiens
agaaataatccaggatatatccaaagacgtggttgatgaaaacaacatgaataaggtaaggagggcaaaat

SEQ ID NO: 70537 - DNA, 71 bp, Homo sapiens
aatccaggatatatccaaagacgtggttgatgaaaacaacatgaataaggtaaggagggcaaaattatttc

SEQ ID NO: 70538 - DNA, 75 bp, Homo sapiens
gaagaaacttcatatattatcttatcgctatatttgaattctgtagaagttatttctggacagtctacgaaaagc

SEQ ID NO: 70539 - DNA, 79 bp, Homo sapiens
ttcatatattatcttatcgctatatttgaattctgtagaagttatttctggacagtctacgaaaagctcttgctggcca

SEQ ID NO: 70540 - DNA, 77 bp, Homo sapiens
attatcttatcgctatatttgaattctgtagaagttatttctggacagtctacgaaaagctcttgctggccatggag

SEQ ID NO: 70541 - DNA, 77 bp, Homo sapiens
cgctatatttgaattctgtagaagttatttctggacagtctacgaaaagctcttgctggccatggaggaagtaggca

SEQ ID NO: 70542 - DNA, 77 bp, Homo sapiens
aattctgtagaagttatttctggacagtctacgaaaagctcttgctggccatggaggaagtaggcagctgacagaaa

SEQ ID NO: 70543 - DNA, 80 bp, Homo sapiens
aagttatttctggacagtctacgaaaagctcttgctggccatggaggaagtaggcagctgacagaaagtgctgcaattgc

SEQ ID NO: 70544 - DNA, 83 bp, Homo sapiens
cagtctacgaaaagctcttgctggccatggaggaagtaggcagctgacagaaagtgctgcaattgcctgtgtcaaactgtgta

SEQ ID NO: 70545 - DNA, 82 bp, Homo sapiens
aaagctcttgctggccatggaggaagtaggcagctgacagaaagtgctgcaattgcctgtgtcaaactgtgtaaagcaagta

SEQ ID NO: 70546 - DNA, 82 bp, Homo sapiens
ctggccatggaggaagtaggcagctgacagaaagtgctgcaattgcctgtgtcaaactgtgtaaagcaagtacttacatcaa

SEQ ID NO: 70547 - DNA, 79 bp, Homo sapiens
aggaagtaggcagctgacagaaagtgctgcaattgcctgtgtcaaactgtgtaaagcaagtacttacatcaattgggaa

SEQ ID NO: 70548 - DNA, 82 bp, Homo sapiens
cagctgacagaaagtgctgcaattgcctgtgtcaaactgtgtaaagcaagtacttacatcaattgggaagataactctgtca

SEQ ID NO: 70549 - DNA, 77 bp, Homo sapiens
agaaagtgctgcaattgcctgtgtcaaactgtgtaaagcaagtacttacatcaattgggaagataactctgtcattt

SEQ ID NO: 70550 - DNA, 74 bp, Homo sapiens
aattgcctgtgtcaaactgtgtaaagcaagtacttacatcaattgggaagataactctgtcattttcctacttg

SEQ ID NO: 70551 - DNA, 76 bp, Homo sapiens
tgtgtcaaactgtgtaaagcaagtacttacatcaattgggaagataactctgtcattttcctacttgttcagtcca

SEQ ID NO: 70552 - DNA, 76 bp, Homo sapiens
tgtaaagcaagtacttacatcaattgggaagataactctgtcattttcctacttgttcagtccatggtggttgatc

SEQ ID NO: 70553 - DNA, 74 bp, Homo sapiens
tacttacatcaattgggaagataactctgtcattttcctacttgttcagtccatggtggttgatcttaaggtaa

SEQ ID NO: 70554 - DNA, 73 bp, Homo sapiens
aattgggaagataactctgtcattttcctacttgttcagtccatggtggttgatcttaaggtaacatgcttat

SEQ ID NO: 70555 - DNA, 74 bp, Homo sapiens
aagataactctgtcattttcctacttgttcagtccatggtggttgatcttaaggtaacatgcttattctttctc

SEQ ID NO: 70556 - DNA, 73 bp, Homo sapiens
tcattttcctacttgttcagtccatggtggttgatcttaaggtaacatgcttattctttctctactacaaact

SEQ ID NO: 70557 - DNA, 66 bp, Homo sapiens
actgcatgggtatttaaaggcttttgttttctgttggggtttttatagaacctgctttttaatcca

SEQ ID NO: 70558 - DNA, 64 bp, Homo sapiens
tttaaaggcttttgttttctgttggggtttttatagaacctgctttttaatccaagtaagccat

SEQ ID NO: 70559 - DNA, 70 bp, Homo sapiens
tttgttttctgttggggtttttatagaacctgctttttaatccaagtaagccattctcaagaggcagtca

SEQ ID NO: 70560 - DNA, 74 bp, Homo sapiens
tttctgttggggtttttatagaacctgctttttaatccaagtaagccattctcaagaggcagtcagcctgcaga

SEQ ID NO: 70561 - DNA, 80 bp, Homo sapiens
tttttatagaacctgctttttaatccaagtaagccattctcaagaggcagtcagcctgcagatgtggatctaatgattga

SEQ ID NO: 70562 - DNA, 81 bp, Homo sapiens
ctgctttttaatccaagtaagccattctcaagaggcagtcagcctgcagatgtggatctaatgattgactgccttgtttct

SEQ ID NO: 70563 - DNA, 82 bp, Homo sapiens
tttaatccaagtaagccattctcaagaggcagtcagcctgcagatgtggatctaatgattgactgccttgtttcttgctttc

SEQ ID NO: 70564 - DNA, 84 bp, Homo sapiens
taagccattctcaagaggcagtcagcctgcagatgtggatctaatgattgactgccttgtttcttgctttcgtataagccctca

SEQ ID NO: 70565 - DNA, 81 bp, Homo sapiens
aagaggcagtcagcctgcagatgtggatctaatgattgactgccttgtttcttgctttcgtataagccctcacaacaacca

SEQ ID NO: 70566 - DNA, 78 bp, Homo sapiens
gcctgcagatgtggatctaatgattgactgccttgtttcttgctttcgtataagccctcacaacaaccaacactttaa

SEQ ID NO: 70567 - DNA, 75 bp, Homo sapiens
atgtggatctaatgattgactgccttgtttcttgctttcgtataagccctcacaacaaccaacactttaaggtga

SEQ ID NO: 70568 - DNA, 76 bp, Homo sapiens
tctaatgattgactgccttgtttcttgctttcgtataagccctcacaacaaccaacactttaaggtgagagcattg

SEQ ID NO: 70569 - DNA, 70 bp, Homo sapiens
ccttgtttcttgctttcgtataagccctcacaacaaccaacactttaaggtgagagcattggtttttatc

SEQ ID NO: 70570 - DNA, 71 bp, Homo sapiens
tttcttgctttcgtataagccctcacaacaaccaacactttaaggtgagagcattggtttttatctaacta

SEQ ID NO: 70571 - DNA, 81 bp, Homo sapiens
ttctttttctatagatctgcctggctcagaattcaccttctacatttcactatgtgctggtaaattcactccatcgaatca

SEQ ID NO: 70572 - DNA, 84 bp, Homo sapiens
tatagatctgcctggctcagaattcaccttctacatttcactatgtgctggtaaattcactccatcgaatcatcaccaatgtaa

SEQ ID NO: 70573 - DNA, 80 bp, Homo sapiens
ctggctcagaattcaccttctacatttcactatgtgctggtaaattcactccatcgaatcatcaccaatgtaagtccaaa

SEQ ID NO: 70574 - DNA, 76 bp, Homo sapiens
attcaccttctacatttcactatgtgctggtaaattcactccatcgaatcatcaccaatgtaagtccaaaaggtat

SEQ ID NO: 70575 - DNA, 78 bp, Homo sapiens
tctacatttcactatgtgctggtaaattcactccatcgaatcatcaccaatgtaagtccaaaaggtattgctaaatta

SEQ ID NO: 70576 - DNA, 76 bp, Homo sapiens
ttcactatgtgctggtaaattcactccatcgaatcatcaccaatgtaagtccaaaaggtattgctaaattactaaa

SEQ ID NO: 70577 - DNA, 71 bp, Homo sapiens
gctggtaaattcactccatcgaatcatcaccaatgtaagtccaaaaggtattgctaaattactaaaaaaat

SEQ ID NO: 70578 - DNA, 68 bp, Homo sapiens
actcacgtaattttgtactttttcttcctattggtctttgtttttctctagtccgcattggattggtg

SEQ ID NO: 70579 - DNA, 70 bp, Homo sapiens
ttttgtactttttcttcctattggtctttgtttttctctagtccgcattggattggtggcctaagattga

SEQ ID NO: 70580 - DNA, 76 bp, Homo sapiens
tttcttcctattggtctttgtttttctctagtccgcattggattggtggcctaagattgatgctgtgtattgtcac

SEQ ID NO: 70581 - DNA, 76 bp, Homo sapiens
ctttgtttttctctagtccgcattggattggtggcctaagattgatgctgtgtattgtcactcggttgaacttcga

SEQ ID NO: 70582 - DNA, 77 bp, Homo sapiens
tttttctctagtccgcattggattggtggcctaagattgatgctgtgtattgtcactcggttgaacttcgaaatatg

SEQ ID NO: 70583 - DNA, 76 bp, Homo sapiens
cattggattggtggcctaagattgatgctgtgtattgtcactcggttgaacttcgaaatatgtttggtgaaacact

SEQ ID NO: 70584 - DNA, 76 bp, Homo sapiens
attggtggcctaagattgatgctgtgtattgtcactcggttgaacttcgaaatatgtttggtgaaacacttcataa

SEQ ID NO: 70585 - DNA, 78 bp, Homo sapiens
taagattgatgctgtgtattgtcactcggttgaacttcgaaatatgtttggtgaaacacttcataaagcagtgcaagg

SEQ ID NO: 70586 - DNA, 78 bp, Homo sapiens
tgtgtattgtcactcggttgaacttcgaaatatgtttggtgaaacacttcataaagcagtgcaaggttgtggagcaca

SEQ ID NO: 70587 - DNA, 76 bp, Homo sapiens
ctcggttgaacttcgaaatatgtttggtgaaacacttcataaagcagtgcaaggttgtggagcacacccagcaata

SEQ ID NO: 70588 - DNA, 77 bp, Homo sapiens
ttgaacttcgaaatatgtttggtgaaacacttcataaagcagtgcaaggttgtggagcacacccagcaatacgaatg

SEQ ID NO: 70589 - DNA, 77 bp, Homo sapiens
tgtttggtgaaacacttcataaagcagtgcaaggttgtggagcacacccagcaatacgaatggcaccggtaagataa

SEQ ID NO: 70590 - DNA, 76 bp, Homo sapiens
aacacttcataaagcagtgcaaggttgtggagcacacccagcaatacgaatggcaccggtaagataaatcacgaat

SEQ ID NO: 70591 - DNA, 76 bp, Homo sapiens
ataaagcagtgcaaggttgtggagcacacccagcaatacgaatggcaccggtaagataaatcacgaattttgaatc

SEQ ID NO: 70592 - DNA, 73 bp, Homo sapiens
aaggttgtggagcacacccagcaatacgaatggcaccggtaagataaatcacgaattttgaatctcacctcct

SEQ ID NO: 70593 - DNA, 61 bp, Homo sapiens
tttgtttttagagtcttacatttaaagaaaaagtaacaagccttaaatttaaagaaaaacc

SEQ ID NO: 70594 - DNA, 65 bp, Homo sapiens
gagtcttacatttaaagaaaaagtaacaagccttaaatttaaagaaaaacctacagacctggaga

SEQ ID NO: 70595 - DNA, 65 bp, Homo sapiens
catttaaagaaaaagtaacaagccttaaatttaaagaaaaacctacagacctggagacaagaagc

SEQ ID NO: 70596 - DNA, 68 bp, Homo sapiens
aagtaacaagccttaaatttaaagaaaaacctacagacctggagacaagaagctataagtatcttctc

SEQ ID NO: 70597 - DNA, 71 bp, Homo sapiens
ccttaaatttaaagaaaaacctacagacctggagacaagaagctataagtatcttctcttgtccatggtga

SEQ ID NO: 70598 - DNA, 73 bp, Homo sapiens
ttaaagaaaaacctacagacctggagacaagaagctataagtatcttctcttgtccatggtgaaactaattca

SEQ ID NO: 70599 - DNA, 77 bp, Homo sapiens
aaacctacagacctggagacaagaagctataagtatcttctcttgtccatggtgaaactaattcatgcagatccaaa

SEQ ID NO: 70600 - DNA, 81 bp, Homo sapiens
tggagacaagaagctataagtatcttctcttgtccatggtgaaactaattcatgcagatccaaagctcttgctttgtgtaa

SEQ ID NO: 70601 - DNA, 77 bp, Homo sapiens
aagctataagtatcttctcttgtccatggtgaaactaattcatgcagatccaaagctcttgctttgtgtaagtattt

SEQ ID NO: 70602 - DNA, 75 bp, Homo sapiens
aagtatcttctcttgtccatggtgaaactaattcatgcagatccaaagctcttgctttgtgtaagtattttttta

SEQ ID NO: 70603 - DNA, 78 bp, Homo sapiens
tcttgtccatggtgaaactaattcatgcagatccaaagctcttgctttgtgtaagtatttttttatgaaatgtctcaa

SEQ ID NO: 70604 - DNA, 77 bp, Homo sapiens
tggtgaaactaattcatgcagatccaaagctcttgctttgtgtaagtatttttttatgaaatgtctcaaaattatca

SEQ ID NO: 70605 - DNA, 62 bp, Homo sapiens
atttttttaattgaagtttcctttttttccttgcagaatccaagaaaacaggggcccgaaac

SEQ ID NO: 70606 - DNA, 65 bp, Homo sapiens
tttaattgaagtttcctttttttccttgcagaatccaagaaaacaggggcccgaaacccaaggca

SEQ ID NO: 70607 - DNA, 68 bp, Homo sapiens
ctttttttccttgcagaatccaagaaaacaggggcccgaaacccaaggcagtacagcagaattaatta

SEQ ID NO: 70608 - DNA, 72 bp, Homo sapiens
ttgcagaatccaagaaaacaggggcccgaaacccaaggcagtacagcagaattaattacagggctcgtccaa

SEQ ID NO: 70609 - DNA, 69 bp, Homo sapiens
aatccaagaaaacaggggcccgaaacccaaggcagtacagcagaattaattacagggctcgtccaactg

SEQ ID NO: 70610 - DNA, 79 bp, Homo sapiens
aaacccaaggcagtacagcagaattaattacagggctcgtccaactggtccctcagtcacacatgccagagattgctca

SEQ ID NO: 70611 - DNA, 81 bp, Homo sapiens
agtacagcagaattaattacagggctcgtccaactggtccctcagtcacacatgccagagattgctcaggaagcaatggag

SEQ ID NO: 70612 - DNA, 78 bp, Homo sapiens
agaattaattacagggctcgtccaactggtccctcagtcacacatgccagagattgctcaggaagcaatggaggtaag

SEQ ID NO: 70613 - DNA, 77 bp, Homo sapiens
ttacagggctcgtccaactggtccctcagtcacacatgccagagattgctcaggaagcaatggaggtaaggggaaaa

SEQ ID NO: 70614 - DNA, 77 bp, Homo sapiens
aactggtccctcagtcacacatgccagagattgctcaggaagcaatggaggtaaggggaaaatgaattccatgttct

SEQ ID NO: 70615 - DNA, 79 bp, Homo sapiens
tcagtcacacatgccagagattgctcaggaagcaatggaggtaaggggaaaatgaattccatgttcttgaaggaaagat

SEQ ID NO: 70616 - DNA, 76 bp, Homo sapiens
acatgccagagattgctcaggaagcaatggaggtaaggggaaaatgaattccatgttcttgaaggaaagattgtaa

SEQ ID NO: 70617 - DNA, 74 bp, Homo sapiens
attgctcaggaagcaatggaggtaaggggaaaatgaattccatgttcttgaaggaaagattgtaactatgtaca

SEQ ID NO: 70618 - DNA, 74 bp, Homo sapiens
aagcaatggaggtaaggggaaaatgaattccatgttcttgaaggaaagattgtaactatgtacattcatgatgt

SEQ ID NO: 70619 - DNA, 72 bp, Homo sapiens
aggtaaggggaaaatgaattccatgttcttgaaggaaagattgtaactatgtacattcatgatgttcctttg

SEQ ID NO: 70620 - DNA, 75 bp, Homo sapiens
aaatgaattccatgttcttgaaggaaagattgtaactatgtacattcatgatgttcctttggtgtgtggtttctg

SEQ ID NO: 70621 - DNA, 76 bp, Homo sapiens
attccatgttcttgaaggaaagattgtaactatgtacattcatgatgttcctttggtgtgtggtttctgtgagtaa

SEQ ID NO: 70622 - DNA, 76 bp, Homo sapiens
aggaaagattgtaactatgtacattcatgatgttcctttggtgtgtggtttctgtgagtaacaggtagatgtcatt

SEQ ID NO: 70623 - DNA, 77 bp, Homo sapiens
attgtaactatgtacattcatgatgttcctttggtgtgtggtttctgtgagtaacaggtagatgtcatttctggaaa

SEQ ID NO: 70624 - DNA, 78 bp, Homo sapiens
tatgtacattcatgatgttcctttggtgtgtggtttctgtgagtaacaggtagatgtcatttctggaaatggtatgtt

SEQ ID NO: 70625 - DNA, 77 bp, Homo sapiens
atgatgttcctttggtgtgtggtttctgtgagtaacaggtagatgtcatttctggaaatggtatgtttatgtctata

SEQ ID NO: 70626 - DNA, 76 bp, Homo sapiens
ttggtgtgtggtttctgtgagtaacaggtagatgtcatttctggaaatggtatgtttatgtctatacattgtttta

SEQ ID NO: 70627 - DNA, 77 bp, Homo sapiens
tctgtgagtaacaggtagatgtcatttctggaaatggtatgtttatgtctatacattgttttataaaactccatgga

SEQ ID NO: 70628 - DNA, 75 bp, Homo sapiens
gagtaacaggtagatgtcatttctggaaatggtatgtttatgtctatacattgttttataaaactccatggagaa

SEQ ID NO: 70629 - DNA, 72 bp, Homo sapiens
agatgtcatttctggaaatggtatgtttatgtctatacattgttttataaaactccatggagaaagaagggg

SEQ ID NO: 70630 - DNA, 73 bp, Homo sapiens
gtttatgtctatacattgttttataaaactccatggagaaagaaggggtttacttgctttgtatcacatagca

SEQ ID NO: 70631 - DNA, 73 bp, Homo sapiens
gtctatacattgttttataaaactccatggagaaagaaggggtttacttgctttgtatcacatagcaataaca

SEQ ID NO: 70632 - DNA, 74 bp, Homo sapiens
ttataaaactccatggagaaagaaggggtttacttgctttgtatcacatagcaataacattgtacaaattctga

SEQ ID NO: 70633 - DNA, 79 bp, Homo sapiens
tacttgctttgtatcacatagcaataacattgtacaaattctgatgcttaataaaatagttcgagattttctaattgca

SEQ ID NO: 70634 - DNA, 75 bp, Homo sapiens
catagcaataacattgtacaaattctgatgcttaataaaatagttcgagattttctaattgcagttgactttaaa

SEQ ID NO: 70635 - DNA, 70 bp, Homo sapiens
aacattgtacaaattctgatgcttaataaaatagttcgagattttctaattgcagttgactttaaaattt

SEQ ID NO: 70636 - DNA, 79 bp, Homo sapiens
tttttaaaaaattcaggctctgctggttcttcatcagttagatagcattgatttgtggaatcctgatgctcctgtagaa

SEQ ID NO: 70637 - DNA, 79 bp, Homo sapiens
aaaaattcaggctctgctggttcttcatcagttagatagcattgatttgtggaatcctgatgctcctgtagaaacattt

SEQ ID NO: 70638 - DNA, 81 bp, Homo sapiens
tgctggttcttcatcagttagatagcattgatttgtggaatcctgatgctcctgtagaaacattttgggagattaggtata

SEQ ID NO: 70639 - DNA, 79 bp, Homo sapiens
ttcatcagttagatagcattgatttgtggaatcctgatgctcctgtagaaacattttgggagattaggtatatgtactt

SEQ ID NO: 70640 - DNA, 76 bp, Homo sapiens
agttagatagcattgatttgtggaatcctgatgctcctgtagaaacattttgggagattaggtatatgtactttta

SEQ ID NO: 70641 - DNA, 73 bp, Homo sapiens
cattgatttgtggaatcctgatgctcctgtagaaacattttgggagattaggtatatgtacttttatttttta

SEQ ID NO: 70642 - DNA, 69 bp, Homo sapiens
ttattttgtatttttgtcttgaaatattaactctgtagtacttagtacattgtaaaacttacacttcca

SEQ ID NO: 70643 - DNA, 67 bp, Homo sapiens
gtatttttgtcttgaaatattaactctgtagtacttagtacattgtaaaacttacacttccaaaggt

SEQ ID NO: 70644 - DNA, 67 bp, Homo sapiens
gtcttgaaatattaactctgtagtacttagtacattgtaaaacttacacttccaaaggttttatggt

SEQ ID NO: 70645 - DNA, 65 bp, Homo sapiens
attaactctgtagtacttagtacattgtaaaacttacacttccaaaggttttatggttttgtatt

SEQ ID NO: 70646 - DNA, 65 bp, Homo sapiens
ctctgtagtacttagtacattgtaaaacttacacttccaaaggttttatggttttgtattttatt

SEQ ID NO: 70647 - DNA, 66 bp, Homo sapiens
gtacttagtacattgtaaaacttacacttccaaaggttttatggttttgtattttatttgacttca

SEQ ID NO: 70648 - DNA, 65 bp, Homo sapiens
cttagtacattgtaaaacttacacttccaaaggttttatggttttgtattttatttgacttcaaa

SEQ ID NO: 70649 - DNA, 66 bp, Homo sapiens
cattgtaaaacttacacttccaaaggttttatggttttgtattttatttgacttcaaattattaga

SEQ ID NO: 70650 - DNA, 64 bp, Homo sapiens
acacttccaaaggttttatggttttgtattttatttgacttcaaattattagaatttcttgttt

SEQ ID NO: 70651 - DNA, 65 bp, Homo sapiens
tccaaaggttttatggttttgtattttatttgacttcaaattattagaatttcttgttttaactg

SEQ ID NO: 70652 - DNA, 65 bp, Homo sapiens
ggttttatggttttgtattttatttgacttcaaattattagaatttcttgttttaactgtaagaa

SEQ ID NO: 70653 - DNA, 69 bp, Homo sapiens
gtattttatttgacttcaaattattagaatttcttgttttaactgtaagaaaagtatcacagcaattta

SEQ ID NO: 70654 - DNA, 69 bp, Homo sapiens
atttgacttcaaattattagaatttcttgttttaactgtaagaaaagtatcacagcaatttagaaaata

SEQ ID NO: 70655 - DNA, 68 bp, Homo sapiens
tcaaattattagaatttcttgttttaactgtaagaaaagtatcacagcaatttagaaaataaatttta

SEQ ID NO: 70656 - DNA, 68 bp, Homo sapiens
agaatttcttgttttaactgtaagaaaagtatcacagcaatttagaaaataaattttaagaatagtgc

SEQ ID NO: 70657 - DNA, 69 bp, Homo sapiens
taactgtaagaaaagtatcacagcaatttagaaaataaattttaagaatagtgctaaattttgtcaccc

SEQ ID NO: 70658 - DNA, 69 bp, Homo sapiens
gaaaagtatcacagcaatttagaaaataaattttaagaatagtgctaaattttgtcaccctaacataag

SEQ ID NO: 70659 - DNA, 70 bp, Homo sapiens
tcacagcaatttagaaaataaattttaagaatagtgctaaattttgtcaccctaacataagtactgttgt

SEQ ID NO: 70660 - DNA, 66 bp, Homo sapiens
attttaagaatagtgctaaattttgtcaccctaacataagtactgttgtttggtatattacttttt

SEQ ID NO: 70661 - DNA, 70 bp, Homo sapiens
gtgctaaattttgtcaccctaacataagtactgttgtttggtatattacttttttcagatttcaatgtgg

SEQ ID NO: 70662 - DNA, 68 bp, Homo sapiens
tttttaatagattttcatagttataagcctagaatgataaaattttgtaacaatactgttttttcagt

SEQ ID NO: 70663 - DNA, 67 bp, Homo sapiens
aatagattttcatagttataagcctagaatgataaaattttgtaacaatactgttttttcagttttt

SEQ ID NO: 70664 - DNA, 70 bp, Homo sapiens
catagttataagcctagaatgataaaattttgtaacaatactgttttttcagttttttgaactatgatct

SEQ ID NO: 70665 - DNA, 69 bp, Homo sapiens
gcctagaatgataaaattttgtaacaatactgttttttcagttttttgaactatgatctttcataaact

SEQ ID NO: 70666 - DNA, 68 bp, Homo sapiens
aattttgtaacaatactgttttttcagttttttgaactatgatctttcataaactttctgtaatacca

SEQ ID NO: 70667 - DNA, 72 bp, Homo sapiens
caatactgttttttcagttttttgaactatgatctttcataaactttctgtaataccaatgctttcgatgaa

SEQ ID NO: 70668 - DNA, 73 bp, Homo sapiens
tttttcagttttttgaactatgatctttcataaactttctgtaataccaatgctttcgatgaatgaattaata

SEQ ID NO: 70669 - DNA, 77 bp, Homo sapiens
tttgaactatgatctttcataaactttctgtaataccaatgctttcgatgaatgaattaataatggacacctgctta

SEQ ID NO: 70670 - DNA, 77 bp, Homo sapiens
actatgatctttcataaactttctgtaataccaatgctttcgatgaatgaattaataatggacacctgcttagaaga

SEQ ID NO: 70671 - DNA, 73 bp, Homo sapiens
ttcataaactttctgtaataccaatgctttcgatgaatgaattaataatggacacctgcttagaagaaaaaaa

SEQ ID NO: 70672 - DNA, 75 bp, Homo sapiens
ctgtaataccaatgctttcgatgaatgaattaataatggacacctgcttagaagaaaaaaatgtatgcagaattt

SEQ ID NO: 70673 - DNA, 77 bp, Homo sapiens
caatgctttcgatgaatgaattaataatggacacctgcttagaagaaaaaaatgtatgcagaattttgtggtctgct

SEQ ID NO: 70674 - DNA, 76 bp, Homo sapiens
cgatgaatgaattaataatggacacctgcttagaagaaaaaaatgtatgcagaattttgtggtctgcttcctagat

SEQ ID NO: 70675 - DNA, 77 bp, Homo sapiens
taatggacacctgcttagaagaaaaaaatgtatgcagaattttgtggtctgcttcctagattatacaaatcattaca

SEQ ID NO: 70676 - DNA, 75 bp, Homo sapiens
gacacctgcttagaagaaaaaaatgtatgcagaattttgtggtctgcttcctagattatacaaatcattacattt

SEQ ID NO: 70677 - DNA, 78 bp, Homo sapiens
gaaaaaaatgtatgcagaattttgtggtctgcttcctagattatacaaatcattacattttaatgagcatgaagtcac

SEQ ID NO: 70678 - DNA, 79 bp, Homo sapiens
aaatgtatgcagaattttgtggtctgcttcctagattatacaaatcattacattttaatgagcatgaagtcaccacacg

SEQ ID NO: 70679 - DNA, 77 bp, Homo sapiens
tttgtggtctgcttcctagattatacaaatcattacattttaatgagcatgaagtcaccacacggaggaaaatgtaa

SEQ ID NO: 70680 - DNA, 77 bp, Homo sapiens
ctgcttcctagattatacaaatcattacattttaatgagcatgaagtcaccacacggaggaaaatgtaaatgtgtaa

SEQ ID NO: 70681 - DNA, 75 bp, Homo sapiens
gattatacaaatcattacattttaatgagcatgaagtcaccacacggaggaaaatgtaaatgtgtaaacctcaag

SEQ ID NO: 70682 - DNA, 75 bp, Homo sapiens
atcattacattttaatgagcatgaagtcaccacacggaggaaaatgtaaatgtgtaaacctcaagtttgccatta

SEQ ID NO: 70683 - DNA, 75 bp, Homo sapiens
ttaatgagcatgaagtcaccacacggaggaaaatgtaaatgtgtaaacctcaagtttgccattatcttataagaa

SEQ ID NO: 70684 - DNA, 72 bp, Homo sapiens
atgaagtcaccacacggaggaaaatgtaaatgtgtaaacctcaagtttgccattatcttataagaatgggtg

SEQ ID NO: 70685 - DNA, 71 bp, Homo sapiens
acacggaggaaaatgtaaatgtgtaaacctcaagtttgccattatcttataagaatgggtgtgctaagtta

SEQ ID NO: 70686 - DNA, 74 bp, Homo sapiens
aatgtaaatgtgtaaacctcaagtttgccattatcttataagaatgggtgtgctaagttacttggcagctgaat

SEQ ID NO: 70687 - DNA, 73 bp, Homo sapiens
aagtttgccattatcttataagaatgggtgtgctaagttacttggcagctgaattaaaccttactctagagta

SEQ ID NO: 70688 - DNA, 76 bp, Homo sapiens
ttatcttataagaatgggtgtgctaagttacttggcagctgaattaaaccttactctagagtagtgctgtccacta

SEQ ID NO: 70689 - DNA, 76 bp, Homo sapiens
taagaatgggtgtgctaagttacttggcagctgaattaaaccttactctagagtagtgctgtccactagtaatata

SEQ ID NO: 70690 - DNA, 76 bp, Homo sapiens
gggtgtgctaagttacttggcagctgaattaaaccttactctagagtagtgctgtccactagtaatataatgagaa

SEQ ID NO: 70691 - DNA, 76 bp, Homo sapiens
ttacttggcagctgaattaaaccttactctagagtagtgctgtccactagtaatataatgagaaccccatatgtta

SEQ ID NO: 70692 - DNA, 72 bp, Homo sapiens
agctgaattaaaccttactctagagtagtgctgtccactagtaatataatgagaaccccatatgttaaaaac

SEQ ID NO: 70693 - DNA, 68 bp, Homo sapiens
aaaccttactctagagtagtgctgtccactagtaatataatgagaaccccatatgttaaaaacttttt

SEQ ID NO: 70694 - DNA, 70 bp, Homo sapiens
ctagagtagtgctgtccactagtaatataatgagaaccccatatgttaaaaacttttttacttactacat

SEQ ID NO: 70695 - DNA, 69 bp, Homo sapiens
gctgtccactagtaatataatgagaaccccatatgttaaaaacttttttacttactacattaaagagta

SEQ ID NO: 70696 - DNA, 65 bp, Homo sapiens
agtaatataatgagaaccccatatgttaaaaacttttttacttactacattaaagagtaaaaaga

SEQ ID NO: 70697 - DNA, 64 bp, Homo sapiens
gagaaccccatatgttaaaaacttttttacttactacattaaagagtaaaaagaagcaggtaaa

SEQ ID NO: 70698 - DNA, 64 bp, Homo sapiens
tatgttaaaaacttttttacttactacattaaagagtaaaaagaagcaggtaaaattaattgta

SEQ ID NO: 70699 - DNA, 64 bp, Homo sapiens
tttttacttactacattaaagagtaaaaagaagcaggtaaaattaattgtaattatgttttgtt

SEQ ID NO: 70700 - DNA, 66 bp, Homo sapiens
agagtaaaaagaagcaggtaaaattaattgtaattatgttttgtttaacccggtgtatattatcta

SEQ ID NO: 70701 - DNA, 69 bp, Homo sapiens
gaagcaggtaaaattaattgtaattatgttttgtttaacccggtgtatattatctataatttcaacatg

SEQ ID NO: 70702 - DNA, 69 bp, Homo sapiens
gtaaaattaattgtaattatgttttgtttaacccggtgtatattatctataatttcaacatgtaatcaa

SEQ ID NO: 70703 - DNA, 82 bp, Homo sapiens
tgcattaggttattgatgatgctagtaacaatgaactttatgttactgcagctcacaaatgcttttttacatctgcaagaaa

SEQ ID NO: 70704 - DNA, 83 bp, Homo sapiens
tgatgatgctagtaacaatgaactttatgttactgcagctcacaaatgcttttttacatctgcaagaaattaactagtcatca

SEQ ID NO: 70705 - DNA, 79 bp, Homo sapiens
tagtaacaatgaactttatgttactgcagctcacaaatgcttttttacatctgcaagaaattaactagtcatcaaatgc

SEQ ID NO: 70706 - DNA, 81 bp, Homo sapiens
tgaactttatgttactgcagctcacaaatgcttttttacatctgcaagaaattaactagtcatcaaatgcttagtagcaca

SEQ ID NO: 70707 - DNA, 81 bp, Homo sapiens
ttactgcagctcacaaatgcttttttacatctgcaagaaattaactagtcatcaaatgcttagtagcacagaaattctcaa

SEQ ID NO: 70708 - DNA, 77 bp, Homo sapiens
acaaatgcttttttacatctgcaagaaattaactagtcatcaaatgcttagtagcacagaaattctcaagtggttgc

SEQ ID NO: 70709 - DNA, 76 bp, Homo sapiens
ttttacatctgcaagaaattaactagtcatcaaatgcttagtagcacagaaattctcaagtggttgcgggaaatat

SEQ ID NO: 70710 - DNA, 78 bp, Homo sapiens
caagaaattaactagtcatcaaatgcttagtagcacagaaattctcaagtggttgcgggaaatattgatctgcaggaa

SEQ ID NO: 70711 - DNA, 78 bp, Homo sapiens
taactagtcatcaaatgcttagtagcacagaaattctcaagtggttgcgggaaatattgatctgcaggaataaatttc

SEQ ID NO: 70712 - DNA, 75 bp, Homo sapiens
caaatgcttagtagcacagaaattctcaagtggttgcgggaaatattgatctgcaggaataaatttcttcttaaa

SEQ ID NO: 70713 - DNA, 72 bp, Homo sapiens
gtagcacagaaattctcaagtggttgcgggaaatattgatctgcaggaataaatttcttcttaaaaataagg

SEQ ID NO: 70714 - DNA, 72 bp, Homo sapiens
cagaaattctcaagtggttgcgggaaatattgatctgcaggaataaatttcttcttaaaaataaggtaagca

SEQ ID NO: 70715 - DNA, 72 bp, Homo sapiens
caagtggttgcgggaaatattgatctgcaggaataaatttcttcttaaaaataaggtaagcaaaatgacata

SEQ ID NO: 70716 - DNA, 69 bp, Homo sapiens
cgggaaatattgatctgcaggaataaatttcttcttaaaaataaggtaagcaaaatgacatatttaaaa

SEQ ID NO: 70717 - DNA, 68 bp, Homo sapiens
ttatttatttttttctagcaggcagatagaagttcctgtcactttctccttttttacggggtaggatg

SEQ ID NO: 70718 - DNA, 72 bp, Homo sapiens
ttttctagcaggcagatagaagttcctgtcactttctccttttttacggggtaggatgtgatattccttcta

SEQ ID NO: 70719 - DNA, 71 bp, Homo sapiens
ggcagatagaagttcctgtcactttctccttttttacggggtaggatgtgatattccttctagtggaaata

SEQ ID NO: 70720 - DNA, 69 bp, Homo sapiens
atagaagttcctgtcactttctccttttttacggggtaggatgtgatattccttctagtggaaatacca

SEQ ID NO: 70721 - DNA, 70 bp, Homo sapiens
actttctccttttttacggggtaggatgtgatattccttctagtggaaataccagtcaaatgtccatgga

SEQ ID NO: 70722 - DNA, 74 bp, Homo sapiens
tttttacggggtaggatgtgatattccttctagtggaaataccagtcaaatgtccatggatcatgaagaattac

SEQ ID NO: 70723 - DNA, 78 bp, Homo sapiens
gtaggatgtgatattccttctagtggaaataccagtcaaatgtccatggatcatgaagaattactacgtactcctgga

SEQ ID NO: 70724 - DNA, 78 bp, Homo sapiens
atgtgatattccttctagtggaaataccagtcaaatgtccatggatcatgaagaattactacgtactcctggagcctc

SEQ ID NO: 70725 - DNA, 76 bp, Homo sapiens
ttctagtggaaataccagtcaaatgtccatggatcatgaagaattactacgtactcctggagcctctctccggaag

SEQ ID NO: 70726 - DNA, 73 bp, Homo sapiens
aaataccagtcaaatgtccatggatcatgaagaattactacgtactcctggagcctctctccggaagggaaaa

SEQ ID NO: 70727 - DNA, 71 bp, Homo sapiens
aaatgtccatggatcatgaagaattactacgtactcctggagcctctctccggaagggaaaagggaactcc

SEQ ID NO: 70728 - DNA, 73 bp, Homo sapiens
atggatcatgaagaattactacgtactcctggagcctctctccggaagggaaaagggaactcctctatggtca

SEQ ID NO: 70729 - DNA, 69 bp, Homo sapiens
aagaattactacgtactcctggagcctctctccggaagggaaaagggaactcctctatggtcagcttct

SEQ ID NO: 70730 - DNA, 69 bp, Homo sapiens
acgtactcctggagcctctctccggaagggaaaagggaactcctctatggtcagcttcttctgtacttt

SEQ ID NO: 70731 - DNA, 70 bp, Homo sapiens
cctctctccggaagggaaaagggaactcctctatggtcagcttcttctgtactttttctgtatcatttta

SEQ ID NO: 70732 - DNA, 77 bp, Homo sapiens
ataaaattacccaagttgcaaatatatgtcttccacccttgactctcaggatagtgcagcaggatgcagcggaaccc

SEQ ID NO: 70733 - DNA, 77 bp, Homo sapiens
aagttgcaaatatatgtcttccacccttgactctcaggatagtgcagcaggatgcagcggaacccccccgatttgcc

SEQ ID NO: 70734 - DNA, 77 bp, Homo sapiens
aaatatatgtcttccacccttgactctcaggatagtgcagcaggatgcagcggaacccccccgatttgccgacaagc

SEQ ID NO: 70735 - DNA, 76 bp, Homo sapiens
cacccttgactctcaggatagtgcagcaggatgcagcggaacccccccgatttgccgacaagcccagaccaaacta

SEQ ID NO: 70736 - DNA, 76 bp, Homo sapiens
tctcaggatagtgcagcaggatgcagcggaacccccccgatttgccgacaagcccagaccaaactagaagtggccc

SEQ ID NO: 70737 - DNA, 75 bp, Homo sapiens
atagtgcagcaggatgcagcggaacccccccgatttgccgacaagcccagaccaaactagaagtggccctgtaca

SEQ ID NO: 70738 - DNA, 71 bp, Homo sapiens
aggatgcagcggaacccccccgatttgccgacaagcccagaccaaactagaagtggccctgtacatgtttc

SEQ ID NO: 70739 - DNA, 68 bp, Homo sapiens
aacccccccgatttgccgacaagcccagaccaaactagaagtggccctgtacatgtttctgtggaacc

SEQ ID NO: 70740 - DNA, 78 bp, Homo sapiens
acctctgtgaggaagcagatatccggtgtggggtggatgaagtgtcagtgcataacctcttgcccaactataacacat

SEQ ID NO: 70741 - DNA, 78 bp, Homo sapiens
aggaagcagatatccggtgtggggtggatgaagtgtcagtgcataacctcttgcccaactataacacattcatggagt

SEQ ID NO: 70742 - DNA, 80 bp, Homo sapiens
ctcttgcccaactataacacattcatggagtttgcctctgtcagcaatatgatgtcaacaggtaaatgtgaatagtggtt

SEQ ID NO: 70743 - DNA, 77 bp, Homo sapiens
cccaactataacacattcatggagtttgcctctgtcagcaatatgatgtcaacaggtaaatgtgaatagtggttttt

SEQ ID NO: 70744 - DNA, 81 bp, Homo sapiens
ttctccattggcaggcagggctctaagtgcagtaacttgatttgctgttgtatttgcttaggaagagcagcacttcagaaa

SEQ ID NO: 70745 - DNA, 81 bp, Homo sapiens
ttggcaggcagggctctaagtgcagtaacttgatttgctgttgtatttgcttaggaagagcagcacttcagaaaagagtga

SEQ ID NO: 70746 - DNA, 83 bp, Homo sapiens
gggctctaagtgcagtaacttgatttgctgttgtatttgcttaggaagagcagcacttcagaaaagagtgatggcactgctga

SEQ ID NO: 70747 - DNA, 88 bp, Homo sapiens
ttgcttaggaagagcagcacttcagaaaagagtgatggcactgctgaggcgcattgagcatcccactgcaggaaacactgaggtatgc

SEQ ID NO: 70748 - DNA, 87 bp, Homo sapiens
cagcacttcagaaaagagtgatggcactgctgaggcgcattgagcatcccactgcaggaaacactgaggtatgcccttagcaacaga

SEQ ID NO: 70749 - DNA, 85 bp, Homo sapiens
ttcagaaaagagtgatggcactgctgaggcgcattgagcatcccactgcaggaaacactgaggtatgcccttagcaacagaaaca

SEQ ID NO: 70750 - DNA, 82 bp, Homo sapiens
agtgatggcactgctgaggcgcattgagcatcccactgcaggaaacactgaggtatgcccttagcaacagaaacacccctcc

SEQ ID NO: 70751 - DNA, 79 bp, Homo sapiens
ctgaggcgcattgagcatcccactgcaggaaacactgaggtatgcccttagcaacagaaacacccctcccaggcgccca

SEQ ID NO: 70752 - DNA, 76 bp, Homo sapiens
attgagcatcccactgcaggaaacactgaggtatgcccttagcaacagaaacacccctcccaggcgcccaccctca

SEQ ID NO: 70753 - DNA, 76 bp, Homo sapiens
atgtttagctctagactaagttgctttcaagtgataattgccttcattttaggcttgggaagatacacatgcaaaa

SEQ ID NO: 70754 - DNA, 76 bp, Homo sapiens
tctagactaagttgctttcaagtgataattgccttcattttaggcttgggaagatacacatgcaaaatgggaacaa

SEQ ID NO: 70755 - DNA, 74 bp, Homo sapiens
ggaagatacacatgcaaaatgggaacaagcaacaaagctaatccttaactatccaaaagccaaaatggaagatg

SEQ ID NO: 70756 - DNA, 72 bp, Homo sapiens
atgcaaaatgggaacaagcaacaaagctaatccttaactatccaaaagccaaaatggaagatggccaggtaa

SEQ ID NO: 70757 - DNA, 70 bp, Homo sapiens
aaatgggaacaagcaacaaagctaatccttaactatccaaaagccaaaatggaagatggccaggtaagtc

SEQ ID NO: 70758 - DNA, 75 bp, Homo sapiens
aattcatgctttgcacaaaaattttgtgtttaggctgctgaaagccttcacaagaccattgttaagaggcgaatg

SEQ ID NO: 70759 - DNA, 74 bp, Homo sapiens
ctttgcacaaaaattttgtgtttaggctgctgaaagccttcacaagaccattgttaagaggcgaatgtcccatg

SEQ ID NO: 70760 - DNA, 76 bp, Homo sapiens
gcagagaagcaattctggcctggcaacctatagcccacccatgggtccagtcagtgaacgtaagggttctatgatt

SEQ ID NO: 70761 - DNA, 75 bp, Homo sapiens
agaagcaattctggcctggcaacctatagcccacccatgggtccagtcagtgaacgtaagggttctatgatttca

SEQ ID NO: 70762 - DNA, 74 bp, Homo sapiens
aagcaattctggcctggcaacctatagcccacccatgggtccagtcagtgaacgtaagggttctatgatttcag

SEQ ID NO: 70763 - DNA, 76 bp, Homo sapiens
ttctggcctggcaacctatagcccacccatgggtccagtcagtgaacgtaagggttctatgatttcagtgatgtct

SEQ ID NO: 70764 - DNA, 77 bp, Homo sapiens
tggcaacctatagcccacccatgggtccagtcagtgaacgtaagggttctatgatttcagtgatgtcttcagaggga

SEQ ID NO: 70765 - DNA, 74 bp, Homo sapiens
aacctatagcccacccatgggtccagtcagtgaacgtaagggttctatgatttcagtgatgtcttcagagggaa

SEQ ID NO: 70766 - DNA, 74 bp, Homo sapiens
acctatagcccacccatgggtccagtcagtgaacgtaagggttctatgatttcagtgatgtcttcagagggaaa

SEQ ID NO: 70767 - DNA, 77 bp, Homo sapiens
tagcccacccatgggtccagtcagtgaacgtaagggttctatgatttcagtgatgtcttcagagggaaacgcagata

SEQ ID NO: 70768 - DNA, 75 bp, Homo sapiens
acccatgggtccagtcagtgaacgtaagggttctatgatttcagtgatgtcttcagagggaaacgcagatacacc

SEQ ID NO: 70769 - DNA, 78 bp, Homo sapiens
agtgatgtcttcagagggaaacgcagatacacctgtcagcaaatttatggatcggctgttgtccttaatggtgtgtaa

SEQ ID NO: 70770 - DNA, 76 bp, Homo sapiens
agagggaaacgcagatacacctgtcagcaaatttatggatcggctgttgtccttaatggtgtgtaaccatgagaaa

SEQ ID NO: 70771 - DNA, 76 bp, Homo sapiens
aaacgcagatacacctgtcagcaaatttatggatcggctgttgtccttaatggtgtgtaaccatgagaaagtggga

SEQ ID NO: 70772 - DNA, 76 bp, Homo sapiens
tacacctgtcagcaaatttatggatcggctgttgtccttaatggtgtgtaaccatgagaaagtgggacttcaaata

SEQ ID NO: 70773 - DNA, 73 bp, Homo sapiens
atggtgtgtaaccatgagaaagtgggacttcaaatacggaccaatgttaaggatctggtgggtctagaattga

SEQ ID NO: 70774 - DNA, 72 bp, Homo sapiens
gtgtaaccatgagaaagtgggacttcaaatacggaccaatgttaaggatctggtgggtctagaattgagtcc

SEQ ID NO: 70775 - DNA, 73 bp, Homo sapiens
aaagtgggacttcaaatacggaccaatgttaaggatctggtgggtctagaattgagtcctgctctgtatccaa

SEQ ID NO: 70776 - DNA, 75 bp, Homo sapiens
acttcaaatacggaccaatgttaaggatctggtgggtctagaattgagtcctgctctgtatccaatgctatttaa

SEQ ID NO: 70777 - DNA, 76 bp, Homo sapiens
accaatgttaaggatctggtgggtctagaattgagtcctgctctgtatccaatgctatttaacaaattgaagaata

SEQ ID NO: 70778 - DNA, 79 bp, Homo sapiens
ttaaggatctggtgggtctagaattgagtcctgctctgtatccaatgctatttaacaaattgaagaataccatcagcaa

SEQ ID NO: 70779 - DNA, 76 bp, Homo sapiens
tggtgggtctagaattgagtcctgctctgtatccaatgctatttaacaaattgaagaataccatcagcaagttttt

SEQ ID NO: 70780 - DNA, 70 bp, Homo sapiens
tttcacctttctctatgaatagagtgacttgtttgaaataagcctttttctttcagattatttaaattag

SEQ ID NO: 70781 - DNA, 71 bp, Homo sapiens
ctctatgaatagagtgacttgtttgaaataagcctttttctttcagattatttaaattaggtactcacagt

SEQ ID NO: 70782 - DNA, 69 bp, Homo sapiens
tgaatagagtgacttgtttgaaataagcctttttctttcagattatttaaattaggtactcacagtttt

SEQ ID NO: 70783 - DNA, 65 bp, Homo sapiens
gacttgtttgaaataagcctttttctttcagattatttaaattaggtactcacagtttttaaaaa

SEQ ID NO: 70784 - DNA, 63 bp, Homo sapiens
aaataagcctttttctttcagattatttaaattaggtactcacagtttttaaaaatttccaaa

SEQ ID NO: 70785 - DNA, 69 bp, Homo sapiens
gattatttaaattaggtactcacagtttttaaaaatttccaaaaaattgcagaaagaagagtcatctca

SEQ ID NO: 70786 - DNA, 68 bp, Homo sapiens
aattaggtactcacagtttttaaaaatttccaaaaaattgcagaaagaagagtcatctcaatgtaggg

SEQ ID NO: 70787 - DNA, 72 bp, Homo sapiens
tcacagtttttaaaaatttccaaaaaattgcagaaagaagagtcatctcaatgtaggggtcagcttgcctct

SEQ ID NO: 70788 - DNA, 71 bp, Homo sapiens
tttaaaaatttccaaaaaattgcagaaagaagagtcatctcaatgtaggggtcagcttgcctcttaggaac

SEQ ID NO: 70789 - DNA, 76 bp, Homo sapiens
tttccaaaaaattgcagaaagaagagtcatctcaatgtaggggtcagcttgcctcttaggaactctggtgtgtatg

SEQ ID NO: 70790 - DNA, 77 bp, Homo sapiens
agaaagaagagtcatctcaatgtaggggtcagcttgcctcttaggaactctggtgtgtatgtgtgcctaagggtata

SEQ ID NO: 70791 - DNA, 77 bp, Homo sapiens
aagagtcatctcaatgtaggggtcagcttgcctcttaggaactctggtgtgtatgtgtgcctaagggtatacgtgcc

SEQ ID NO: 70792 - DNA, 75 bp, Homo sapiens
aatgtaggggtcagcttgcctcttaggaactctggtgtgtatgtgtgcctaagggtatacgtgccctgtgtatgg

SEQ ID NO: 70793 - DNA, 77 bp, Homo sapiens
agcttgcctcttaggaactctggtgtgtatgtgtgcctaagggtatacgtgccctgtgtatgggtacgagtgtctgc

SEQ ID NO: 70794 - DNA, 80 bp, Homo sapiens
tctggtgtgtatgtgtgcctaagggtatacgtgccctgtgtatgggtacgagtgtctgcgtatatctgtatgcttatttg

SEQ ID NO: 70795 - DNA, 82 bp, Homo sapiens
tgtatgtgtgcctaagggtatacgtgccctgtgtatgggtacgagtgtctgcgtatatctgtatgcttatttggctctatgc

SEQ ID NO: 70796 - DNA, 78 bp, Homo sapiens
cctaagggtatacgtgccctgtgtatgggtacgagtgtctgcgtatatctgtatgcttatttggctctatgcctgtgg

SEQ ID NO: 70797 - DNA, 82 bp, Homo sapiens
tacgtgccctgtgtatgggtacgagtgtctgcgtatatctgtatgcttatttggctctatgcctgtgggtgcacttactctg

SEQ ID NO: 70798 - DNA, 84 bp, Homo sapiens
tgtatgggtacgagtgtctgcgtatatctgtatgcttatttggctctatgcctgtgggtgcacttactctgtgtgtttagatca

SEQ ID NO: 70799 - DNA, 84 bp, Homo sapiens
agtgtctgcgtatatctgtatgcttatttggctctatgcctgtgggtgcacttactctgtgtgtttagatcagtcagtttcatc

SEQ ID NO: 70800 - DNA, 83 bp, Homo sapiens
cgtatatctgtatgcttatttggctctatgcctgtgggtgcacttactctgtgtgtttagatcagtcagtttcatctctctag

SEQ ID NO: 70801 - DNA, 73 bp, Homo sapiens
tctctctagggggtctgtcttctgggcattgatggcaaatcattaatgtatttgttctttctttaggttttat

SEQ ID NO: 70802 - DNA, 75 bp, Homo sapiens
gggtctgtcttctgggcattgatggcaaatcattaatgtatttgttctttctttaggttttattgactgatacca

SEQ ID NO: 70803 - DNA, 76 bp, Homo sapiens
gtcttctgggcattgatggcaaatcattaatgtatttgttctttctttaggttttattgactgataccaatactca

SEQ ID NO: 70804 - DNA, 76 bp, Homo sapiens
gcattgatggcaaatcattaatgtatttgttctttctttaggttttattgactgataccaatactcaatttgtaga

SEQ ID NO: 70805 - DNA, 72 bp, Homo sapiens
tcattaatgtatttgttctttctttaggttttattgactgataccaatactcaatttgtagaacaaaccata

SEQ ID NO: 70806 - DNA, 72 bp, Homo sapiens
tttgttctttctttaggttttattgactgataccaatactcaatttgtagaacaaaccatagctataatgaa

SEQ ID NO: 70807 - DNA, 77 bp, Homo sapiens
ggttttattgactgataccaatactcaatttgtagaacaaaccatagctataatgaagaacttgctagataatcata

SEQ ID NO: 70808 - DNA, 82 bp, Homo sapiens
aggcagctctgaacatctagggcaagctagcattgaaacaatgatgttaaatctggtcaggtaagcattctactgaaatgta

SEQ ID NO: 70809 - DNA, 76 bp, Homo sapiens
tttgtctatatctgataatttttttattgtttctatgtctatataggtatgttcgtgtgcttgggaatatggtcca

SEQ ID NO: 70810 - DNA, 77 bp, Homo sapiens
tctgataatttttttattgtttctatgtctatataggtatgttcgtgtgcttgggaatatggtccatgcaattcaaa

SEQ ID NO: 70811 - DNA, 74 bp, Homo sapiens
atttttttattgtttctatgtctatataggtatgttcgtgtgcttgggaatatggtccatgcaattcaaataaa

SEQ ID NO: 70812 - DNA, 78 bp, Homo sapiens
tggtccatgcaattcaaataaaaacgaaactgtgtcaattagttgaagtaatgatggcaaggagagatgacctctcat

SEQ ID NO: 70813 - DNA, 75 bp, Homo sapiens
attcaaataaaaacgaaactgtgtcaattagttgaagtaatgatggcaaggagagatgacctctcattttgccaa

SEQ ID NO: 70814 - DNA, 77 bp, Homo sapiens
aataaaaacgaaactgtgtcaattagttgaagtaatgatggcaaggagagatgacctctcattttgccaagagatga

SEQ ID NO: 70815 - DNA, 75 bp, Homo sapiens
tggcttcaaaaacattgtttgctgtttctcttttctccaccattctataggaataagatggtagaatacctgaca

SEQ ID NO: 70816 - DNA, 73 bp, Homo sapiens
aaaaacattgtttgctgtttctcttttctccaccattctataggaataagatggtagaatacctgacagactg

SEQ ID NO: 70817 - DNA, 72 bp, Homo sapiens
cagatgatgatgtaaaatgtcttacaaggtaaaaaaagaatgaccttcaagtattagtgggttttactgtga

SEQ ID NO: 70818 - DNA, 78 bp, Homo sapiens
ttttttttcagagatttggaccaggcaagcatggaagcagtagtttcacttctagctggtctccctctgcagcctgaa

SEQ ID NO: 70819 - DNA, 81 bp, Homo sapiens
tttcagagatttggaccaggcaagcatggaagcagtagtttcacttctagctggtctccctctgcagcctgaagaaggaga

SEQ ID NO: 70820 - DNA, 81 bp, Homo sapiens
accaggcaagcatggaagcagtagtttcacttctagctggtctccctctgcagcctgaagaaggagatggtgtggaattga

SEQ ID NO: 70821 - DNA, 80 bp, Homo sapiens
atggaagcagtagtttcacttctagctggtctccctctgcagcctgaagaaggagatggtgtggaattgatggaagccaa

SEQ ID NO: 70822 - DNA, 80 bp, Homo sapiens
tagtttcacttctagctggtctccctctgcagcctgaagaaggagatggtgtggaattgatggaagccaaatcacagtta

SEQ ID NO: 70823 - DNA, 79 bp, Homo sapiens
ttctagctggtctccctctgcagcctgaagaaggagatggtgtggaattgatggaagccaaatcacagttatttcttaa

SEQ ID NO: 70824 - DNA, 76 bp, Homo sapiens
tctccctctgcagcctgaagaaggagatggtgtggaattgatggaagccaaatcacagttatttcttaagtaaatt

SEQ ID NO: 70825 - DNA, 75 bp, Homo sapiens
agcctgaagaaggagatggtgtggaattgatggaagccaaatcacagttatttcttaagtaaatttcagtcacca

SEQ ID NO: 70826 - DNA, 72 bp, Homo sapiens
agaaggagatggtgtggaattgatggaagccaaatcacagttatttcttaagtaaatttcagtcaccaaaaa

SEQ ID NO: 70827 - DNA, 73 bp, Homo sapiens
tggtgtggaattgatggaagccaaatcacagttatttcttaagtaaatttcagtcaccaaaaaacataaagca

SEQ ID NO: 70828 - DNA, 73 bp, Homo sapiens
ctagttgatacggccttcactatgtaaaggtcagtctttttatttctcagatacttcacattatttatgaacc

SEQ ID NO: 70829 - DNA, 76 bp, Homo sapiens
gccttcactatgtaaaggtcagtctttttatttctcagatacttcacattatttatgaaccttttgaatgactgca

SEQ ID NO: 70830 - DNA, 75 bp, Homo sapiens
ctatgtaaaggtcagtctttttatttctcagatacttcacattatttatgaaccttttgaatgactgcagtgaag

SEQ ID NO: 70831 - DNA, 79 bp, Homo sapiens
tctttttatttctcagatacttcacattatttatgaaccttttgaatgactgcagtgaagttgaagatgaaagtgcgca

SEQ ID NO: 70832 - DNA, 79 bp, Homo sapiens
ttatttctcagatacttcacattatttatgaaccttttgaatgactgcagtgaagttgaagatgaaagtgcgcaaacag

SEQ ID NO: 70833 - DNA, 78 bp, Homo sapiens
atacttcacattatttatgaaccttttgaatgactgcagtgaagttgaagatgaaagtgcgcaaacaggtggcaggaa

SEQ ID NO: 70834 - DNA, 77 bp, Homo sapiens
attatttatgaaccttttgaatgactgcagtgaagttgaagatgaaagtgcgcaaacaggtggcaggaaacgtggca

SEQ ID NO: 70835 - DNA, 77 bp, Homo sapiens
aaccttttgaatgactgcagtgaagttgaagatgaaagtgcgcaaacaggtggcaggaaacgtggcatgtctcggag

SEQ ID NO: 70836 - DNA, 85 bp, Homo sapiens
atgactgcagtgaagttgaagatgaaagtgcgcaaacaggtggcaggaaacgtggcatgtctcggaggctggcatcactgaggca

SEQ ID NO: 70837 - DNA, 80 bp, Homo sapiens
aagttgaagatgaaagtgcgcaaacaggtggcaggaaacgtggcatgtctcggaggctggcatcactgaggcactgtacg

SEQ ID NO: 70838 - DNA, 81 bp, Homo sapiens
atgaaagtgcgcaaacaggtggcaggaaacgtggcatgtctcggaggctggcatcactgaggcactgtacggtccttgcaa

SEQ ID NO: 70839 - DNA, 79 bp, Homo sapiens
aacaggtggcaggaaacgtggcatgtctcggaggctggcatcactgaggcactgtacggtccttgcaatgtcaaactta

SEQ ID NO: 70840 - DNA, 80 bp, Homo sapiens
aggaaacgtggcatgtctcggaggctggcatcactgaggcactgtacggtccttgcaatgtcaaacttactcaatgccaa

SEQ ID NO: 70841 - DNA, 81 bp, Homo sapiens
catgtctcggaggctggcatcactgaggcactgtacggtccttgcaatgtcaaacttactcaatgccaacgtagacagtgg

SEQ ID NO: 70842 - DNA, 83 bp, Homo sapiens
aggctggcatcactgaggcactgtacggtccttgcaatgtcaaacttactcaatgccaacgtagacagtggtctcatgcactc

SEQ ID NO: 70843 - DNA, 81 bp, Homo sapiens
atcactgaggcactgtacggtccttgcaatgtcaaacttactcaatgccaacgtagacagtggtctcatgcactccatagg

SEQ ID NO: 70844 - DNA, 80 bp, Homo sapiens
actgtacggtccttgcaatgtcaaacttactcaatgccaacgtagacagtggtctcatgcactccataggtgagatcaaa

SEQ ID NO: 70845 - DNA, 80 bp, Homo sapiens
gtccttgcaatgtcaaacttactcaatgccaacgtagacagtggtctcatgcactccataggtgagatcaaatgaaagtt

SEQ ID NO: 70846 - DNA, 81 bp, Homo sapiens
tcaaacttactcaatgccaacgtagacagtggtctcatgcactccataggtgagatcaaatgaaagtttcatatagaaata

SEQ ID NO: 70847 - DNA, 80 bp, Homo sapiens
ttactcaatgccaacgtagacagtggtctcatgcactccataggtgagatcaaatgaaagtttcatatagaaatacaaaa

SEQ ID NO: 70848 - DNA, 76 bp, Homo sapiens
ttacttcagcaaggccatgttagtaaatttgcatctgtttgtccacattaggcttaggttaccacaaggatctcca

SEQ ID NO: 70849 - DNA, 76 bp, Homo sapiens
catgttagtaaatttgcatctgtttgtccacattaggcttaggttaccacaaggatctccagacaagagctacatt

SEQ ID NO: 70850 - DNA, 75 bp, Homo sapiens
aatttgcatctgtttgtccacattaggcttaggttaccacaaggatctccagacaagagctacatttatggaagt

SEQ ID NO: 70851 - DNA, 75 bp, Homo sapiens
tgtttgtccacattaggcttaggttaccacaaggatctccagacaagagctacatttatggaagttctgacaaaa

SEQ ID NO: 70852 - DNA, 74 bp, Homo sapiens
acattaggcttaggttaccacaaggatctccagacaagagctacatttatggaagttctgacaaaaatccttca

SEQ ID NO: 70853 - DNA, 75 bp, Homo sapiens
ttaggttaccacaaggatctccagacaagagctacatttatggaagttctgacaaaaatccttcaacaaggcaca

SEQ ID NO: 70854 - DNA, 77 bp, Homo sapiens
acaaggatctccagacaagagctacatttatggaagttctgacaaaaatccttcaacaaggcacagaatttgacaca

SEQ ID NO: 70855 - DNA, 77 bp, Homo sapiens
agacaagagctacatttatggaagttctgacaaaaatccttcaacaaggcacagaatttgacacacttgcagaaaca

SEQ ID NO: 70856 - DNA, 76 bp, Homo sapiens
agagctacatttatggaagttctgacaaaaatccttcaacaaggcacagaatttgacacacttgcagaaacagtat

SEQ ID NO: 70857 - DNA, 77 bp, Homo sapiens
gaagttctgacaaaaatccttcaacaaggcacagaatttgacacacttgcagaaacagtattggctgatcggtttga

SEQ ID NO: 70858 - DNA, 76 bp, Homo sapiens
acaaaaatccttcaacaaggcacagaatttgacacacttgcagaaacagtattggctgatcggtttgagagattgg

SEQ ID NO: 70859 - DNA, 78 bp, Homo sapiens
atccttcaacaaggcacagaatttgacacacttgcagaaacagtattggctgatcggtttgagagattggtggaactg

SEQ ID NO: 70860 - DNA, 80 bp, Homo sapiens
acagaatttgacacacttgcagaaacagtattggctgatcggtttgagagattggtggaactggtcacaatgatgggtga

SEQ ID NO: 70861 - DNA, 80 bp, Homo sapiens
atttgacacacttgcagaaacagtattggctgatcggtttgagagattggtggaactggtcacaatgatgggtgatcaag

SEQ ID NO: 70862 - DNA, 77 bp, Homo sapiens
agaaacagtattggctgatcggtttgagagattggtggaactggtcacaatgatgggtgatcaaggagaactcccta

SEQ ID NO: 70863 - DNA, 79 bp, Homo sapiens
agtattggctgatcggtttgagagattggtggaactggtcacaatgatgggtgatcaaggagaactccctatagcgatg

SEQ ID NO: 70864 - DNA, 79 bp, Homo sapiens
atcggtttgagagattggtggaactggtcacaatgatgggtgatcaaggagaactccctatagcgatggctctggccaa

SEQ ID NO: 70865 - DNA, 79 bp, Homo sapiens
aactggtcacaatgatgggtgatcaaggagaactccctatagcgatggctctggccaatgtggttccttgttctcagtg

SEQ ID NO: 70866 - DNA, 79 bp, Homo sapiens
tgatgggtgatcaaggagaactccctatagcgatggctctggccaatgtggttccttgttctcagtgggtaagtgatta

SEQ ID NO: 70867 - DNA, 76 bp, Homo sapiens
atcaaggagaactccctatagcgatggctctggccaatgtggttccttgttctcagtgggtaagtgattagagtaa

SEQ ID NO: 70868 - DNA, 74 bp, Homo sapiens
agaactccctatagcgatggctctggccaatgtggttccttgttctcagtgggtaagtgattagagtaagcggg

SEQ ID NO: 70869 - DNA, 74 bp, Homo sapiens
tatagcgatggctctggccaatgtggttccttgttctcagtgggtaagtgattagagtaagcggggaagaaaag

SEQ ID NO: 70870 - DNA, 72 bp, Homo sapiens
ataaaaatgggattgtttgcactaacctgattttgttttgttctcaggatgaactagctcgagttctggtta

SEQ ID NO: 70871 - DNA, 74 bp, Homo sapiens
attgtttgcactaacctgattttgttttgttctcaggatgaactagctcgagttctggttactctgtttgattc

SEQ ID NO: 70872 - DNA, 74 bp, Homo sapiens
ctaacctgattttgttttgttctcaggatgaactagctcgagttctggttactctgtttgattctcggcattta

SEQ ID NO: 70873 - DNA, 74 bp, Homo sapiens
tttgttttgttctcaggatgaactagctcgagttctggttactctgtttgattctcggcatttactctaccaac

SEQ ID NO: 70874 - DNA, 78 bp, Homo sapiens
tttgttctcaggatgaactagctcgagttctggttactctgtttgattctcggcatttactctaccaactgctctgga

SEQ ID NO: 70875 - DNA, 75 bp, Homo sapiens
aactagctcgagttctggttactctgtttgattctcggcatttactctaccaactgctctggaacatgttttcta

SEQ ID NO: 70876 - DNA, 73 bp, Homo sapiens
agttctggttactctgtttgattctcggcatttactctaccaactgctctggaacatgttttctaaagaagta

SEQ ID NO: 70877 - DNA, 74 bp, Homo sapiens
tggttactctgtttgattctcggcatttactctaccaactgctctggaacatgttttctaaagaagtagaattg

SEQ ID NO: 70878 - DNA, 79 bp, Homo sapiens
tttgattctcggcatttactctaccaactgctctggaacatgttttctaaagaagtagaattggcagactccatgcaga

SEQ ID NO: 70879 - DNA, 77 bp, Homo sapiens
atttactctaccaactgctctggaacatgttttctaaagaagtagaattggcagactccatgcagactctcttccga

SEQ ID NO: 70880 - DNA, 79 bp, Homo sapiens
taccaactgctctggaacatgttttctaaagaagtagaattggcagactccatgcagactctcttccgaggcaacagct

SEQ ID NO: 70881 - DNA, 78 bp, Homo sapiens
tggaacatgttttctaaagaagtagaattggcagactccatgcagactctcttccgaggcaacagcttggccagtaaa

SEQ ID NO: 70882 - DNA, 76 bp, Homo sapiens
atgttttctaaagaagtagaattggcagactccatgcagactctcttccgaggcaacagcttggccagtaaaataa

SEQ ID NO: 70883 - DNA, 79 bp, Homo sapiens
aagtagaattggcagactccatgcagactctcttccgaggcaacagcttggccagtaaaataatgacattctgtttcaa

SEQ ID NO: 70884 - DNA, 78 bp, Homo sapiens
attggcagactccatgcagactctcttccgaggcaacagcttggccagtaaaataatgacattctgtttcaaggtttg

SEQ ID NO: 70885 - DNA, 77 bp, Homo sapiens
atgcagactctcttccgaggcaacagcttggccagtaaaataatgacattctgtttcaaggtttgtatcattcattt

SEQ ID NO: 70886 - DNA, 77 bp, Homo sapiens
tctcttccgaggcaacagcttggccagtaaaataatgacattctgtttcaaggtttgtatcattcattttgtgtgta

SEQ ID NO: 70887 - DNA, 75 bp, Homo sapiens
aatatatggagcaggtataataaactcctattcgtgcatttctgtaggtatatggtgctacctatctacaaaaac

SEQ ID NO: 70888 - DNA, 76 bp, Homo sapiens
tggagcaggtataataaactcctattcgtgcatttctgtaggtatatggtgctacctatctacaaaaactcctgga

SEQ ID NO: 70889 - DNA, 73 bp, Homo sapiens
ataaactcctattcgtgcatttctgtaggtatatggtgctacctatctacaaaaactcctggatcctttatta

SEQ ID NO: 70890 - DNA, 77 bp, Homo sapiens
tattcgtgcatttctgtaggtatatggtgctacctatctacaaaaactcctggatcctttattacgaattgtgatca

SEQ ID NO: 70891 - DNA, 75 bp, Homo sapiens
atttctgtaggtatatggtgctacctatctacaaaaactcctggatcctttattacgaattgtgatcacatcctc

SEQ ID NO: 70892 - DNA, 79 bp, Homo sapiens
tatggtgctacctatctacaaaaactcctggatcctttattacgaattgtgatcacatcctctgattggcaacatgtta

SEQ ID NO: 70893 - DNA, 78 bp, Homo sapiens
tacctatctacaaaaactcctggatcctttattacgaattgtgatcacatcctctgattggcaacatgttagctttga

SEQ ID NO: 70894 - DNA, 77 bp, Homo sapiens
aaaactcctggatcctttattacgaattgtgatcacatcctctgattggcaacatgttagctttgaagtggatccta

SEQ ID NO: 70895 - DNA, 78 bp, Homo sapiens
atcctttattacgaattgtgatcacatcctctgattggcaacatgttagctttgaagtggatcctaccaggtttgtca

SEQ ID NO: 70896 - DNA, 78 bp, Homo sapiens
ttattacgaattgtgatcacatcctctgattggcaacatgttagctttgaagtggatcctaccaggtttgtcatcttt

SEQ ID NO: 70897 - DNA, 80 bp, Homo sapiens
ttgtgatcacatcctctgattggcaacatgttagctttgaagtggatcctaccaggtttgtcatcttttcacatagaacc

SEQ ID NO: 70898 - DNA, 75 bp, Homo sapiens
tctgattggcaacatgttagctttgaagtggatcctaccaggtttgtcatcttttcacatagaaccgctgttttt

SEQ ID NO: 70899 - DNA, 70 bp, Homo sapiens
ttttatttttttgtaggttagaaccatcagagagccttgaggaaaaccagcggaacctccttcagatgac

SEQ ID NO: 70900 - DNA, 71 bp, Homo sapiens
tttttgtaggttagaaccatcagagagccttgaggaaaaccagcggaacctccttcagatgactgaaaagt

SEQ ID NO: 70901 - DNA, 79 bp, Homo sapiens
ttagaaccatcagagagccttgaggaaaaccagcggaacctccttcagatgactgaaaagttcttccatgccatcatca

SEQ ID NO: 70902 - DNA, 78 bp, Homo sapiens
atcagagagccttgaggaaaaccagcggaacctccttcagatgactgaaaagttcttccatgccatcatcagttcctc

SEQ ID NO: 70903 - DNA, 77 bp, Homo sapiens
ttgaggaaaaccagcggaacctccttcagatgactgaaaagttcttccatgccatcatcagttcctcctcagaattc

SEQ ID NO: 70904 - DNA, 74 bp, Homo sapiens
cggaacctccttcagatgactgaaaagttcttccatgccatcatcagttcctcctcagaattcccccctcaact

SEQ ID NO: 70905 - DNA, 79 bp, Homo sapiens
ttcagatgactgaaaagttcttccatgccatcatcagttcctcctcagaattcccccctcaacttcgaagtgtgtgcca

SEQ ID NO: 70906 - DNA, 76 bp, Homo sapiens
tgaaaagttcttccatgccatcatcagttcctcctcagaattcccccctcaacttcgaagtgtgtgccactgttta

SEQ ID NO: 70907 - DNA, 76 bp, Homo sapiens
agttcttccatgccatcatcagttcctcctcagaattcccccctcaacttcgaagtgtgtgccactgtttatacca

SEQ ID NO: 70908 - DNA, 75 bp, Homo sapiens
tcatcagttcctcctcagaattcccccctcaacttcgaagtgtgtgccactgtttataccaggtatgcttacagt

SEQ ID NO: 70909 - DNA, 74 bp, Homo sapiens
ctcctcagaattcccccctcaacttcgaagtgtgtgccactgtttataccaggtatgcttacagttagagatta

SEQ ID NO: 70910 - DNA, 72 bp, Homo sapiens
aattcccccctcaacttcgaagtgtgtgccactgtttataccaggtatgcttacagttagagattaccatta

SEQ ID NO: 70911 - DNA, 79 bp, Homo sapiens
aaatacacagttatcaaaacccatgtctttgtgtctctctctttgcagagtcatcgcagccatttgcttttttagcaca

SEQ ID NO: 70912 - DNA, 79 bp, Homo sapiens
ttatcaaaacccatgtctttgtgtctctctctttgcagagtcatcgcagccatttgcttttttagcacacggcttcagt

SEQ ID NO: 70913 - DNA, 80 bp, Homo sapiens
atgtctttgtgtctctctctttgcagagtcatcgcagccatttgcttttttagcacacggcttcagttgcttagagacgt

SEQ ID NO: 70914 - DNA, 83 bp, Homo sapiens
tgtctctctctttgcagagtcatcgcagccatttgcttttttagcacacggcttcagttgcttagagacgttaacagcatcat

SEQ ID NO: 70915 - DNA, 78 bp, Homo sapiens
atcgcagccatttgcttttttagcacacggcttcagttgcttagagacgttaacagcatcattgaaatcaccatttta

SEQ ID NO: 70916 - DNA, 74 bp, Homo sapiens
ccatttgcttttttagcacacggcttcagttgcttagagacgttaacagcatcattgaaatcaccattttaaaa

SEQ ID NO: 70917 - DNA, 75 bp, Homo sapiens
tttttagcacacggcttcagttgcttagagacgttaacagcatcattgaaatcaccattttaaaagctgtttgag

SEQ ID NO: 70918 - DNA, 78 bp, Homo sapiens
cttcagttgcttagagacgttaacagcatcattgaaatcaccattttaaaagctgtttgaggctgctctatgtgaatt

SEQ ID NO: 70919 - DNA, 76 bp, Homo sapiens
gttgcttagagacgttaacagcatcattgaaatcaccattttaaaagctgtttgaggctgctctatgtgaattttt

SEQ ID NO: 70920 - DNA, 77 bp, Homo sapiens
gttaacagcatcattgaaatcaccattttaaaagctgtttgaggctgctctatgtgaattttttcaccattgctatt

SEQ ID NO: 70921 - DNA, 76 bp, Homo sapiens
gcatcattgaaatcaccattttaaaagctgtttgaggctgctctatgtgaattttttcaccattgctatttttaaa

SEQ ID NO: 70922 - DNA, 74 bp, Homo sapiens
ccattttaaaagctgtttgaggctgctctatgtgaattttttcaccattgctatttttaaagatgtatctgttc

SEQ ID NO: 70923 - DNA, 77 bp, Homo sapiens
taaaagctgtttgaggctgctctatgtgaattttttcaccattgctatttttaaagatgtatctgttctatctgtaa

SEQ ID NO: 70924 - DNA, 75 bp, Homo sapiens
tttgaggctgctctatgtgaattttttcaccattgctatttttaaagatgtatctgttctatctgtaaaaaagct

SEQ ID NO: 70925 - DNA, 71 bp, Homo sapiens
ctatgtgaattttttcaccattgctatttttaaagatgtatctgttctatctgtaaaaaagcttttcacgg

SEQ ID NO: 70926 - DNA, 75 bp, Homo sapiens
ttttcaccattgctatttttaaagatgtatctgttctatctgtaaaaaagcttttcacggtatacatagatgata

SEQ ID NO: 70927 - DNA, 73 bp, Homo sapiens
gctatttttaaagatgtatctgttctatctgtaaaaaagcttttcacggtatacatagatgataaaacatact

SEQ ID NO: 70928 - DNA, 74 bp, Homo sapiens
agatgtatctgttctatctgtaaaaaagcttttcacggtatacatagatgataaaacatacttaaccttgtctc

SEQ ID NO: 70929 - DNA, 72 bp, Homo sapiens
ctgttctatctgtaaaaaagcttttcacggtatacatagatgataaaacatacttaaccttgtctctcttaa

SEQ ID NO: 70930 - DNA, 72 bp, Homo sapiens
gtaaaaaagcttttcacggtatacatagatgataaaacatacttaaccttgtctctcttaatttatcatgac

SEQ ID NO: 70931 - DNA, 74 bp, Homo sapiens
agcttttcacggtatacatagatgataaaacatacttaaccttgtctctcttaatttatcatgacttttctgcc

SEQ ID NO: 70932 - DNA, 73 bp, Homo sapiens
cggtatacatagatgataaaacatacttaaccttgtctctcttaatttatcatgacttttctgcctttacaaa

SEQ ID NO: 70933 - DNA, 71 bp, Homo sapiens
gataaaacatacttaaccttgtctctcttaatttatcatgacttttctgcctttacaaaaaggctcaagga

SEQ ID NO: 70934 - DNA, 69 bp, Homo sapiens
cttaaccttgtctctcttaatttatcatgacttttctgcctttacaaaaaggctcaaggaaacttagga

SEQ ID NO: 70935 - DNA, 70 bp, Homo sapiens
gtctctcttaatttatcatgacttttctgcctttacaaaaaggctcaaggaaacttaggaaaatcctgta

SEQ ID NO: 70936 - DNA, 68 bp, Homo sapiens
cttaatttatcatgacttttctgcctttacaaaaaggctcaaggaaacttaggaaaatcctgtatagt

SEQ ID NO: 70937 - DNA, 65 bp, Homo sapiens
gcctttacaaaaaggctcaaggaaacttaggaaaatcctgtatagttttttcaactagttaagtc

SEQ ID NO: 70938 - DNA, 66 bp, Homo sapiens
aggctcaaggaaacttaggaaaatcctgtatagttttttcaactagttaagtctgagtctaaaggg

SEQ ID NO: 70939 - DNA, 65 bp, Homo sapiens
gaaacttaggaaaatcctgtatagttttttcaactagttaagtctgagtctaaagggtagtttag

SEQ ID NO: 70940 - DNA, 68 bp, Homo sapiens
ggaaaatcctgtatagttttttcaactagttaagtctgagtctaaagggtagtttagttataatatga

SEQ ID NO: 70941 - DNA, 66 bp, Homo sapiens
agttttttcaactagttaagtctgagtctaaagggtagtttagttataatatgaaacttaatacag

SEQ ID NO: 70942 - DNA, 73 bp, Homo sapiens
tcaactagttaagtctgagtctaaagggtagtttagttataatatgaaacttaatacagtgaatatcttctca

SEQ ID NO: 70943 - DNA, 71 bp, Homo sapiens
ctaaagggtagtttagttataatatgaaacttaatacagtgaatatcttctcaagtttgggctgtattcag

SEQ ID NO: 70944 - DNA, 71 bp, Homo sapiens
agtttagttataatatgaaacttaatacagtgaatatcttctcaagtttgggctgtattcaggtttctctt

SEQ ID NO: 70945 - DNA, 71 bp, Homo sapiens
ataatatgaaacttaatacagtgaatatcttctcaagtttgggctgtattcaggtttctctttaaatttta

SEQ ID NO: 70946 - DNA, 70 bp, Homo sapiens
atacagtgaatatcttctcaagtttgggctgtattcaggtttctctttaaattttatttagtaattgttc

SEQ ID NO: 70947 - DNA, 72 bp, Homo sapiens
gaatatcttctcaagtttgggctgtattcaggtttctctttaaattttatttagtaattgttctattgatga

SEQ ID NO: 70948 - DNA, 71 bp, Homo sapiens
tcaagtttgggctgtattcaggtttctctttaaattttatttagtaattgttctattgatgaaactaggca

SEQ ID NO: 70949 - DNA, 71 bp, Homo sapiens
gggctgtattcaggtttctctttaaattttatttagtaattgttctattgatgaaactaggcagacaggaa

SEQ ID NO: 70950 - DNA, 72 bp, Homo sapiens
caggtttctctttaaattttatttagtaattgttctattgatgaaactaggcagacaggaaatagcacatat

SEQ ID NO: 70951 - DNA, 72 bp, Homo sapiens
attttatttagtaattgttctattgatgaaactaggcagacaggaaatagcacatattaaaaatagtctggg

SEQ ID NO: 70952 - DNA, 77 bp, Homo sapiens
tctattgatgaaactaggcagacaggaaatagcacatattaaaaatagtctgggtcagcttcttggttggcctagta

SEQ ID NO: 70953 - DNA, 74 bp, Homo sapiens
atgaaactaggcagacaggaaatagcacatattaaaaatagtctgggtcagcttcttggttggcctagtagtaa

SEQ ID NO: 70954 - DNA, 74 bp, Homo sapiens
aatagcacatattaaaaatagtctgggtcagcttcttggttggcctagtagtaactggtttcagagagcaagtg

SEQ ID NO: 70955 - DNA, 70 bp, Homo sapiens
aaaatagtctgggtcagcttcttggttggcctagtagtaactggtttcagagagcaagtgggtttctaaa

SEQ ID NO: 70956 - DNA, 72 bp, Homo sapiens
ggtcagcttcttggttggcctagtagtaactggtttcagagagcaagtgggtttctaaaatgacagaggctt

SEQ ID NO: 70957 - DNA, 72 bp, Homo sapiens
tcttggttggcctagtagtaactggtttcagagagcaagtgggtttctaaaatgacagaggctttgacttta

SEQ ID NO: 70958 - DNA, 71 bp, Homo sapiens
tagtagtaactggtttcagagagcaagtgggtttctaaaatgacagaggctttgactttagctggttaaaa

SEQ ID NO: 70959 - DNA, 72 bp, Homo sapiens
taactggtttcagagagcaagtgggtttctaaaatgacagaggctttgactttagctggttaaaagtgaatg

SEQ ID NO: 70960 - DNA, 72 bp, Homo sapiens
agagcaagtgggtttctaaaatgacagaggctttgactttagctggttaaaagtgaatggggactgactaca

SEQ ID NO: 70961 - DNA, 72 bp, Homo sapiens
agtgggtttctaaaatgacagaggctttgactttagctggttaaaagtgaatggggactgactacatgatta

SEQ ID NO: 70962 - DNA, 75 bp, Homo sapiens
aaatgacagaggctttgactttagctggttaaaagtgaatggggactgactacatgattacatggtctaggagat

SEQ ID NO: 70963 - DNA, 74 bp, Homo sapiens
tttgactttagctggttaaaagtgaatggggactgactacatgattacatggtctaggagattgtagtagaatt

SEQ ID NO: 70964 - DNA, 78 bp, Homo sapiens
ttaaaagtgaatggggactgactacatgattacatggtctaggagattgtagtagaatttcttcatgtggttgtcatc

SEQ ID NO: 70965 - DNA, 76 bp, Homo sapiens
ggactgactacatgattacatggtctaggagattgtagtagaatttcttcatgtggttgtcatcctaaaagaaaaa

SEQ ID NO: 70966 - DNA, 74 bp, Homo sapiens
actacatgattacatggtctaggagattgtagtagaatttcttcatgtggttgtcatcctaaaagaaaaatctt

SEQ ID NO: 70967 - DNA, 77 bp, Homo sapiens
catggtctaggagattgtagtagaatttcttcatgtggttgtcatcctaaaagaaaaatctttttgtatcatgagca

SEQ ID NO: 70968 - DNA, 74 bp, Homo sapiens
ggagattgtagtagaatttcttcatgtggttgtcatcctaaaagaaaaatctttttgtatcatgagcaaagttg

SEQ ID NO: 70969 - DNA, 72 bp, Homo sapiens
gtagaatttcttcatgtggttgtcatcctaaaagaaaaatctttttgtatcatgagcaaagttggagaccgt

SEQ ID NO: 70970 - DNA, 73 bp, Homo sapiens
atgtggttgtcatcctaaaagaaaaatctttttgtatcatgagcaaagttggagaccgttttgagaccatgat

SEQ ID NO: 70971 - DNA, 73 bp, Homo sapiens
catcctaaaagaaaaatctttttgtatcatgagcaaagttggagaccgttttgagaccatgattctaataatg

SEQ ID NO: 70972 - DNA, 73 bp, Homo sapiens
tttttgtatcatgagcaaagttggagaccgttttgagaccatgattctaataatgtaaaaggaacaggtctta

SEQ ID NO: 70973 - DNA, 71 bp, Homo sapiens
agcaaagttggagaccgttttgagaccatgattctaataatgtaaaaggaacaggtcttagcacttattta

SEQ ID NO: 70974 - DNA, 70 bp, Homo sapiens
agttggagaccgttttgagaccatgattctaataatgtaaaaggaacaggtcttagcacttatttagtac

SEQ ID NO: 70975 - DNA, 70 bp, Homo sapiens
cgttttgagaccatgattctaataatgtaaaaggaacaggtcttagcacttatttagtacttaggaaata

SEQ ID NO: 70976 - DNA, 71 bp, Homo sapiens
ccatgattctaataatgtaaaaggaacaggtcttagcacttatttagtacttaggaaatatttaatgaaga

SEQ ID NO: 70977 - DNA, 67 bp, Homo sapiens
gcacttatttagtacttaggaaatatttaatgaagaaataaatttcccatccctcccacctaagtaa

SEQ ID NO: 70978 - DNA, 66 bp, Homo sapiens
agtacttaggaaatatttaatgaagaaataaatttcccatccctcccacctaagtaaacaagattc

SEQ ID NO: 70979 - DNA, 71 bp, Homo sapiens
atgaagaaataaatttcccatccctcccacctaagtaaacaagattcttgccagctttcacagctaagaaa

SEQ ID NO: 70980 - DNA, 69 bp, Homo sapiens
aaataaatttcccatccctcccacctaagtaaacaagattcttgccagctttcacagctaagaaaggag

SEQ ID NO: 70981 - DNA, 70 bp, Homo sapiens
atccctcccacctaagtaaacaagattcttgccagctttcacagctaagaaaggaggaaaatagtgaaaa

SEQ ID NO: 70982 - DNA, 70 bp, Homo sapiens
ccacctaagtaaacaagattcttgccagctttcacagctaagaaaggaggaaaatagtgaaaatagattt

SEQ ID NO: 70983 - DNA, 73 bp, Homo sapiens
caagattcttgccagctttcacagctaagaaaggaggaaaatagtgaaaatagatttttaaacactatatgtg

SEQ ID NO: 70984 - DNA, 73 bp, Homo sapiens
cttgccagctttcacagctaagaaaggaggaaaatagtgaaaatagatttttaaacactatatgtggtgatta

SEQ ID NO: 70985 - DNA, 72 bp, Homo sapiens
tcacagctaagaaaggaggaaaatagtgaaaatagatttttaaacactatatgtggtgattattaaacagta

SEQ ID NO: 70986 - DNA, 74 bp, Homo sapiens
agtgaaaatagatttttaaacactatatgtggtgattattaaacagtatgttatgctttttagagcacttcaca

SEQ ID NO: 70987 - DNA, 74 bp, Homo sapiens
gatttttaaacactatatgtggtgattattaaacagtatgttatgctttttagagcacttcacagtaaaatatc

SEQ ID NO: 70988 - DNA, 74 bp, Homo sapiens
atgtggtgattattaaacagtatgttatgctttttagagcacttcacagtaaaatatcctatattattttaata

SEQ ID NO: 70989 - DNA, 68 bp, Homo sapiens
ctttttagagcacttcacagtaaaatatcctatattattttaataacaaacctggtttattatgttaa

SEQ ID NO: 70990 - DNA, 65 bp, Homo sapiens
tattttaataacaaacctggtttattatgttaaaatttcacataaaattattatctttaaaaaca

SEQ ID NO: 70991 - DNA, 65 bp, Homo sapiens
acaaacctggtttattatgttaaaatttcacataaaattattatctttaaaaacatgaattaaag

SEQ ID NO: 70992 - DNA, 70 bp, Homo sapiens
gtttattatgttaaaatttcacataaaattattatctttaaaaacatgaattaaaggtggtatcagtgca

SEQ ID NO: 70993 - DNA, 70 bp, Homo sapiens
taaaatttcacataaaattattatctttaaaaacatgaattaaaggtggtatcagtgcattgtttaagta

SEQ ID NO: 70994 - DNA, 70 bp, Homo sapiens
cacataaaattattatctttaaaaacatgaattaaaggtggtatcagtgcattgtttaagtattgggtaa

SEQ ID NO: 70995 - DNA, 71 bp, Homo sapiens
ttatctttaaaaacatgaattaaaggtggtatcagtgcattgtttaagtattgggtaaaagcattgttgaa

SEQ ID NO: 70996 - DNA, 74 bp, Homo sapiens
aaaaacatgaattaaaggtggtatcagtgcattgtttaagtattgggtaaaagcattgttgaagagcagagaca

SEQ ID NO: 70997 - DNA, 79 bp, Homo sapiens
ttaaaggtggtatcagtgcattgtttaagtattgggtaaaagcattgttgaagagcagagacagcatgctgtgttgtta

SEQ ID NO: 70998 - DNA, 80 bp, Homo sapiens
tggtatcagtgcattgtttaagtattgggtaaaagcattgttgaagagcagagacagcatgctgtgttgttattaaataa

SEQ ID NO: 70999 - DNA, 76 bp, Homo sapiens
cattgtttaagtattgggtaaaagcattgttgaagagcagagacagcatgctgtgttgttattaaataaggcttta

SEQ ID NO: 71000 - DNA, 73 bp, Homo sapiens
aagtattgggtaaaagcattgttgaagagcagagacagcatgctgtgttgttattaaataaggctttattttt

SEQ ID NO: 71001 - DNA, 74 bp, Homo sapiens
aagcattgttgaagagcagagacagcatgctgtgttgttattaaataaggctttattttttaattagtaactgg

SEQ ID NO: 71002 - DNA, 73 bp, Homo sapiens
gaagagcagagacagcatgctgtgttgttattaaataaggctttattttttaattagtaactggtaacaggga

SEQ ID NO: 71003 - DNA, 71 bp, Homo sapiens
gacagcatgctgtgttgttattaaataaggctttattttttaattagtaactggtaacagggaatgttaca

SEQ ID NO: 71004 - DNA, 67 bp, Homo sapiens
attagtaactggtaacagggaatgttacatttactgattagaaagaaagataggaaaaaagctttgg

SEQ ID NO: 71005 - DNA, 70 bp, Homo sapiens
cagggaatgttacatttactgattagaaagaaagataggaaaaaagctttggtctcaagatagtatttta

SEQ ID NO: 71006 - DNA, 69 bp, Homo sapiens
gaaagaaagataggaaaaaagctttggtctcaagatagtattttattgagtctgcttcccaaacctagt

SEQ ID NO: 71007 - DNA, 69 bp, Homo sapiens
gataggaaaaaagctttggtctcaagatagtattttattgagtctgcttcccaaacctagtttatttct

SEQ ID NO: 71008 - DNA, 70 bp, Homo sapiens
agctttggtctcaagatagtattttattgagtctgcttcccaaacctagtttatttcttttggtttgctc

SEQ ID NO: 71009 - DNA, 69 bp, Homo sapiens
ggtctcaagatagtattttattgagtctgcttcccaaacctagtttatttcttttggtttgctcttttg

SEQ ID NO: 71010 - DNA, 65 bp, Homo sapiens
agtattttattgagtctgcttcccaaacctagtttatttcttttggtttgctcttttgtttttat

SEQ ID NO: 71011 - DNA, 67 bp, Homo sapiens
gagtctgcttcccaaacctagtttatttcttttggtttgctcttttgtttttattcatcttccctct

SEQ ID NO: 71012 - DNA, 65 bp, Homo sapiens
cccaaacctagtttatttcttttggtttgctcttttgtttttattcatcttccctcttctggctt

SEQ ID NO: 71013 - DNA, 66 bp, Homo sapiens
agtttatttcttttggtttgctcttttgtttttattcatcttccctcttctggctttttcttgccc

SEQ ID NO: 71014 - DNA, 67 bp, Homo sapiens
ttttggtttgctcttttgtttttattcatcttccctcttctggctttttcttgcccctttgcctttg

SEQ ID NO: 71015 - DNA, 68 bp, Homo sapiens
ttttgtttttattcatcttccctcttctggctttttcttgcccctttgcctttggcagtaacagaaag

SEQ ID NO: 71016 - DNA, 71 bp, Homo sapiens
ctcttctggctttttcttgcccctttgcctttggcagtaacagaaaggtaccttcctgctcttctgtgttc

SEQ ID NO: 71017 - DNA, 71 bp, Homo sapiens
tttttcttgcccctttgcctttggcagtaacagaaaggtaccttcctgctcttctgtgttctgcctggagg

SEQ ID NO: 71018 - DNA, 72 bp, Homo sapiens
ccctttgcctttggcagtaacagaaaggtaccttcctgctcttctgtgttctgcctggagggatagtagtcc

SEQ ID NO: 71019 - DNA, 72 bp, Homo sapiens
tttggcagtaacagaaaggtaccttcctgctcttctgtgttctgcctggagggatagtagtccctttgggac

SEQ ID NO: 71020 - DNA, 72 bp, Homo sapiens
taccttcctgctcttctgtgttctgcctggagggatagtagtccctttgggacctactggggaaatgttgaa

SEQ ID NO: 71021 - DNA, 70 bp, Homo sapiens
cttctgtgttctgcctggagggatagtagtccctttgggacctactggggaaatgttgaaagggaagtga

SEQ ID NO: 71022 - DNA, 70 bp, Homo sapiens
tgttctgcctggagggatagtagtccctttgggacctactggggaaatgttgaaagggaagtgagtatat

SEQ ID NO: 71023 - DNA, 70 bp, Homo sapiens
acctactggggaaatgttgaaagggaagtgagtatattgctagctaataaacttccctggactttagctc

SEQ ID NO: 71024 - DNA, 70 bp, Homo sapiens
aaagggaagtgagtatattgctagctaataaacttccctggactttagctccttttttgagttcatatct

SEQ ID NO: 71025 - DNA, 72 bp, Homo sapiens
agtgagtatattgctagctaataaacttccctggactttagctccttttttgagttcatatcttggccttta

SEQ ID NO: 71026 - DNA, 69 bp, Homo sapiens
tagctaataaacttccctggactttagctccttttttgagttcatatcttggcctttaagccttttcaa

SEQ ID NO: 71027 - DNA, 69 bp, Homo sapiens
ataaacttccctggactttagctccttttttgagttcatatcttggcctttaagccttttcaaatcatg

SEQ ID NO: 71028 - DNA, 71 bp, Homo sapiens
actttagctccttttttgagttcatatcttggcctttaagccttttcaaatcatgtgttaaccagctctat

SEQ ID NO: 71029 - DNA, 72 bp, Homo sapiens
gctccttttttgagttcatatcttggcctttaagccttttcaaatcatgtgttaaccagctctattacttta

SEQ ID NO: 71030 - DNA, 72 bp, Homo sapiens
gagttcatatcttggcctttaagccttttcaaatcatgtgttaaccagctctattactttatataccttcct

SEQ ID NO: 71031 - DNA, 70 bp, Homo sapiens
tcttggcctttaagccttttcaaatcatgtgttaaccagctctattactttatataccttccttccttag

SEQ ID NO: 71032 - DNA, 71 bp, Homo sapiens
gccttttcaaatcatgtgttaaccagctctattactttatataccttccttccttagttgactggattaag

SEQ ID NO: 71033 - DNA, 70 bp, Homo sapiens
caaatcatgtgttaaccagctctattactttatataccttccttccttagttgactggattaaggttatt

SEQ ID NO: 71034 - DNA, 69 bp, Homo sapiens
ccagctctattactttatataccttccttccttagttgactggattaaggttatttaagaatagccaac

SEQ ID NO: 71035 - DNA, 72 bp, Homo sapiens
ccttccttagttgactggattaaggttatttaagaatagccaactgtgaacatgtgtcagatttataattaa

SEQ ID NO: 71036 - DNA, 77 bp, Homo sapiens
tgactggattaaggttatttaagaatagccaactgtgaacatgtgtcagatttataattaaatcattttctcatgtg

SEQ ID NO: 71037 - DNA, 78 bp, Homo sapiens
gaatagccaactgtgaacatgtgtcagatttataattaaatcattttctcatgtgttgttttcacttctcctgatggt

SEQ ID NO: 71038 - DNA, 77 bp, Homo sapiens
ctgtgaacatgtgtcagatttataattaaatcattttctcatgtgttgttttcacttctcctgatggttttaggata

SEQ ID NO: 71039 - DNA, 76 bp, Homo sapiens
catgtgtcagatttataattaaatcattttctcatgtgttgttttcacttctcctgatggttttaggataaagata

SEQ ID NO: 71040 - DNA, 73 bp, Homo sapiens
taattaaatcattttctcatgtgttgttttcacttctcctgatggttttaggataaagataaaatgattccca

SEQ ID NO: 71041 - DNA, 73 bp, Homo sapiens
cattttctcatgtgttgttttcacttctcctgatggttttaggataaagataaaatgattcccaaagtggata

SEQ ID NO: 71042 - DNA, 74 bp, Homo sapiens
ttcacttctcctgatggttttaggataaagataaaatgattcccaaagtggatattctcgtatggtgagagaat

SEQ ID NO: 71043 - DNA, 74 bp, Homo sapiens
ctcctgatggttttaggataaagataaaatgattcccaaagtggatattctcgtatggtgagagaattctaaga

SEQ ID NO: 71044 - DNA, 73 bp, Homo sapiens
aagataaaatgattcccaaagtggatattctcgtatggtgagagaattctaagaactaatttatgattctaaa

SEQ ID NO: 71045 - DNA, 73 bp, Homo sapiens
gtggatattctcgtatggtgagagaattctaagaactaatttatgattctaaataaatctcaccctttttcag

SEQ ID NO: 71046 - DNA, 71 bp, Homo sapiens
gagaattctaagaactaatttatgattctaaataaatctcaccctttttcagtaaatctgcttctccaaac

SEQ ID NO: 71047 - DNA, 70 bp, Homo sapiens
aagaactaatttatgattctaaataaatctcaccctttttcagtaaatctgcttctccaaactgaagtag

SEQ ID NO: 71048 - DNA, 70 bp, Homo sapiens
gattctaaataaatctcaccctttttcagtaaatctgcttctccaaactgaagtagtttacacacagttt

SEQ ID NO: 71049 - DNA, 70 bp, Homo sapiens
aatctcaccctttttcagtaaatctgcttctccaaactgaagtagtttacacacagttttaaggctataa

SEQ ID NO: 71050 - DNA, 70 bp, Homo sapiens
ccctttttcagtaaatctgcttctccaaactgaagtagtttacacacagttttaaggctataaatgatag

SEQ ID NO: 71051 - DNA, 73 bp, Homo sapiens
gtaaatctgcttctccaaactgaagtagtttacacacagttttaaggctataaatgatagttatataccactg

SEQ ID NO: 71052 - DNA, 72 bp, Homo sapiens
gcttctccaaactgaagtagtttacacacagttttaaggctataaatgatagttatataccactgttactaa

SEQ ID NO: 71053 - DNA, 72 bp, Homo sapiens
actgaagtagtttacacacagttttaaggctataaatgatagttatataccactgttactaatacatttgta

SEQ ID NO: 71054 - DNA, 72 bp, Homo sapiens
cacacagttttaaggctataaatgatagttatataccactgttactaatacatttgtatatagtctaaagtt

SEQ ID NO: 71055 - DNA, 72 bp, Homo sapiens
agttatataccactgttactaatacatttgtatatagtctaaagtttgaaacaaagctctgtgagctaaggg

SEQ ID NO: 71056 - DNA, 74 bp, Homo sapiens
tgttactaatacatttgtatatagtctaaagtttgaaacaaagctctgtgagctaaggggctgtgtcttgttgt

SEQ ID NO: 71057 - DNA, 73 bp, Homo sapiens
atttgtatatagtctaaagtttgaaacaaagctctgtgagctaaggggctgtgtcttgttgttttactgctat

SEQ ID NO: 71058 - DNA, 74 bp, Homo sapiens
tatatagtctaaagtttgaaacaaagctctgtgagctaaggggctgtgtcttgttgttttactgctatttccca

SEQ ID NO: 71059 - DNA, 73 bp, Homo sapiens
aagtttgaaacaaagctctgtgagctaaggggctgtgtcttgttgttttactgctatttcccaatgcctagaa

SEQ ID NO: 71060 - DNA, 75 bp, Homo sapiens
acaaagctctgtgagctaaggggctgtgtcttgttgttttactgctatttcccaatgcctagaatggtatttgac

SEQ ID NO: 71061 - DNA, 73 bp, Homo sapiens
ctaaggggctgtgtcttgttgttttactgctatttcccaatgcctagaatggtatttgacctgtaggtacaca

SEQ ID NO: 71062 - DNA, 73 bp, Homo sapiens
tgtgtcttgttgttttactgctatttcccaatgcctagaatggtatttgacctgtaggtacacagtaactctt

SEQ ID NO: 71063 - DNA, 73 bp, Homo sapiens
ttgttgttttactgctatttcccaatgcctagaatggtatttgacctgtaggtacacagtaactctttggatg

SEQ ID NO: 71064 - DNA, 75 bp, Homo sapiens
actgctatttcccaatgcctagaatggtatttgacctgtaggtacacagtaactctttggatggatgaatgggtg

SEQ ID NO: 71065 - DNA, 73 bp, Homo sapiens
atgaatgggtgggtggatgaatggatgtctaactaacttaaagcccaagttatgggttatggtgttggatgtc

SEQ ID NO: 71066 - DNA, 73 bp, Homo sapiens
ggtggatgaatggatgtctaactaacttaaagcccaagttatgggttatggtgttggatgtccagaattccca

SEQ ID NO: 71067 - DNA, 73 bp, Homo sapiens
taactaacttaaagcccaagttatgggttatggtgttggatgtccagaattcccagaataagatgccatctat

SEQ ID NO: 71068 - DNA, 75 bp, Homo sapiens
ttaaagcccaagttatgggttatggtgttggatgtccagaattcccagaataagatgccatctatttgtggatta

SEQ ID NO: 71069 - DNA, 75 bp, Homo sapiens
agttatgggttatggtgttggatgtccagaattcccagaataagatgccatctatttgtggattaaataattcta

SEQ ID NO: 71070 - DNA, 75 bp, Homo sapiens
ttatggtgttggatgtccagaattcccagaataagatgccatctatttgtggattaaataattctaacatggttt

SEQ ID NO: 71071 - DNA, 73 bp, Homo sapiens
ggatgtccagaattcccagaataagatgccatctatttgtggattaaataattctaacatggttttaaaaata

SEQ ID NO: 71072 - DNA, 69 bp, Homo sapiens
tttaaaataattattctgcctaggctagtccaatcaagagtcttttaattttgaaagaaatctttggtc

SEQ ID NO: 71073 - DNA, 74 bp, Homo sapiens
ttattctgcctaggctagtccaatcaagagtcttttaattttgaaagaaatctttggtctagaaagagctctga

SEQ ID NO: 71074 - DNA, 74 bp, Homo sapiens
ctaggctagtccaatcaagagtcttttaattttgaaagaaatctttggtctagaaagagctctgagagatgaaa

SEQ ID NO: 71075 - DNA, 76 bp, Homo sapiens
tccaatcaagagtcttttaattttgaaagaaatctttggtctagaaagagctctgagagatgaaaccaatatgtgc

SEQ ID NO: 71076 - DNA, 74 bp, Homo sapiens
aagagtcttttaattttgaaagaaatctttggtctagaaagagctctgagagatgaaaccaatatgtgcctgga

SEQ ID NO: 71077 - DNA, 72 bp, Homo sapiens
aattttgaaagaaatctttggtctagaaagagctctgagagatgaaaccaatatgtgcctggagttttgggg

SEQ ID NO: 71078 - DNA, 71 bp, Homo sapiens
agaaatctttggtctagaaagagctctgagagatgaaaccaatatgtgcctggagttttgggggtttttta

SEQ ID NO: 71079 - DNA, 70 bp, Homo sapiens
tctagaaagagctctgagagatgaaaccaatatgtgcctggagttttgggggttttttaggtggcttttt

SEQ ID NO: 71080 - DNA, 66 bp, Homo sapiens
agctctgagagatgaaaccaatatgtgcctggagttttgggggttttttaggtggctttttttttt

SEQ ID NO: 71081 - DNA, 69 bp, Homo sapiens
ttttttaagatattttgataaatggtcaactgtaatatgtgaaaagttttaagcaggcctacagttttg

SEQ ID NO: 71082 - DNA, 71 bp, Homo sapiens
gatattttgataaatggtcaactgtaatatgtgaaaagttttaagcaggcctacagttttgttctgtaatt

SEQ ID NO: 71083 - DNA, 73 bp, Homo sapiens
gataaatggtcaactgtaatatgtgaaaagttttaagcaggcctacagttttgttctgtaattttctctgcag

SEQ ID NO: 71084 - DNA, 72 bp, Homo sapiens
caactgtaatatgtgaaaagttttaagcaggcctacagttttgttctgtaattttctctgcagtttcttcac

SEQ ID NO: 71085 - DNA, 70 bp, Homo sapiens
gtgaaaagttttaagcaggcctacagttttgttctgtaattttctctgcagtttcttcactttaataata

SEQ ID NO: 71086 - DNA, 74 bp, Homo sapiens
acagttttgttctgtaattttctctgcagtttcttcactttaataatattaatgcttcttactagttgagctga

SEQ ID NO: 71087 - DNA, 75 bp, Homo sapiens
tctgtaattttctctgcagtttcttcactttaataatattaatgcttcttactagttgagctgataaccttcttc

SEQ ID NO: 71088 - DNA, 75 bp, Homo sapiens
tctctgcagtttcttcactttaataatattaatgcttcttactagttgagctgataaccttcttctcccaaatgt

SEQ ID NO: 71089 - DNA, 75 bp, Homo sapiens
gtttcttcactttaataatattaatgcttcttactagttgagctgataaccttcttctcccaaatgttgcagagc

SEQ ID NO: 71090 - DNA, 74 bp, Homo sapiens
taataatattaatgcttcttactagttgagctgataaccttcttctcccaaatgttgcagagcttttaacctcc

SEQ ID NO: 71091 - DNA, 75 bp, Homo sapiens
ttgagctgataaccttcttctcccaaatgttgcagagcttttaacctcctctgattagaaccatttcaggaagta

SEQ ID NO: 71092 - DNA, 76 bp, Homo sapiens
tcttctcccaaatgttgcagagcttttaacctcctctgattagaaccatttcaggaagtagcctgcaaacattgaa

SEQ ID NO: 71093 - DNA, 74 bp, Homo sapiens
tcccaaatgttgcagagcttttaacctcctctgattagaaccatttcaggaagtagcctgcaaacattgaaaaa

SEQ ID NO: 71094 - DNA, 73 bp, Homo sapiens
agagcttttaacctcctctgattagaaccatttcaggaagtagcctgcaaacattgaaaaatatgtgaaatgt

SEQ ID NO: 71095 - DNA, 74 bp, Homo sapiens
acctcctctgattagaaccatttcaggaagtagcctgcaaacattgaaaaatatgtgaaatgttaagagtaatc

SEQ ID NO: 71096 - DNA, 74 bp, Homo sapiens
ctcctctgattagaaccatttcaggaagtagcctgcaaacattgaaaaatatgtgaaatgttaagagtaatctt

SEQ ID NO: 71097 - DNA, 72 bp, Homo sapiens
ctgattagaaccatttcaggaagtagcctgcaaacattgaaaaatatgtgaaatgttaagagtaatcttttt

SEQ ID NO: 71098 - DNA, 73 bp, Homo sapiens
ccatttcaggaagtagcctgcaaacattgaaaaatatgtgaaatgttaagagtaatcttttttagagagagag

SEQ ID NO: 71099 - DNA, 73 bp, Homo sapiens
tcaggaagtagcctgcaaacattgaaaaatatgtgaaatgttaagagtaatcttttttagagagagaggtctt

SEQ ID NO: 71100 - DNA, 73 bp, Homo sapiens
gcctgcaaacattgaaaaatatgtgaaatgttaagagtaatcttttttagagagagaggtctttaattcagaa

SEQ ID NO: 71101 - DNA, 70 bp, Homo sapiens
aacattgaaaaatatgtgaaatgttaagagtaatcttttttagagagagaggtctttaattcagaatttc

SEQ ID NO: 71102 - DNA, 70 bp, Homo sapiens
aaaatatgtgaaatgttaagagtaatcttttttagagagagaggtctttaattcagaatttctaaagtga

SEQ ID NO: 71103 - DNA, 68 bp, Homo sapiens
gtgaaatgttaagagtaatcttttttagagagagaggtctttaattcagaatttctaaagtgaatttt

SEQ ID NO: 71104 - DNA, 69 bp, Homo sapiens
agagtaatcttttttagagagagaggtctttaattcagaatttctaaagtgaatttttatatttatcca

SEQ ID NO: 71105 - DNA, 68 bp, Homo sapiens
agagagaggtctttaattcagaatttctaaagtgaatttttatatttatccatataatttttatttct

SEQ ID NO: 71106 - DNA, 68 bp, Homo sapiens
aatttttatttctttattcagtaggatcataattaaatgccaggtgttggaaaaagaacttaaagtca

SEQ ID NO: 71107 - DNA, 73 bp, Homo sapiens
tctttattcagtaggatcataattaaatgccaggtgttggaaaaagaacttaaagtcaattgaaggatacaca

SEQ ID NO: 71108 - DNA, 74 bp, Homo sapiens
ttcagtaggatcataattaaatgccaggtgttggaaaaagaacttaaagtcaattgaaggatacacagagaaga

SEQ ID NO: 71109 - DNA, 71 bp, Homo sapiens
cataattaaatgccaggtgttggaaaaagaacttaaagtcaattgaaggatacacagagaagaattttaca

SEQ ID NO: 71110 - DNA, 70 bp, Homo sapiens
gccaggtgttggaaaaagaacttaaagtcaattgaaggatacacagagaagaattttacataccaagaaa

SEQ ID NO: 71111 - DNA, 67 bp, Homo sapiens
gttggaaaaagaacttaaagtcaattgaaggatacacagagaagaattttacataccaagaaaaaat

SEQ ID NO: 71112 - DNA, 71 bp, Homo sapiens
cttaaagtcaattgaaggatacacagagaagaattttacataccaagaaaaaattatgtagacacaaatgt

SEQ ID NO: 71113 - DNA, 74 bp, Homo sapiens
tgaaggatacacagagaagaattttacataccaagaaaaaattatgtagacacaaatgtttttagtgtgtgatc

SEQ ID NO: 71114 - DNA, 73 bp, Homo sapiens
cacagagaagaattttacataccaagaaaaaattatgtagacacaaatgtttttagtgtgtgatctacttgta

SEQ ID NO: 71115 - DNA, 72 bp, Homo sapiens
gaagaattttacataccaagaaaaaattatgtagacacaaatgtttttagtgtgtgatctacttgtaatgaa

SEQ ID NO: 71116 - DNA, 72 bp, Homo sapiens
acataccaagaaaaaattatgtagacacaaatgtttttagtgtgtgatctacttgtaatgaatattttatat

SEQ ID NO: 71117 - DNA, 74 bp, Homo sapiens
aattatgtagacacaaatgtttttagtgtgtgatctacttgtaatgaatattttatattacatttctcaaaagc

SEQ ID NO: 71118 - DNA, 74 bp, Homo sapiens
gtagacacaaatgtttttagtgtgtgatctacttgtaatgaatattttatattacatttctcaaaagctaggaa

SEQ ID NO: 71119 - DNA, 72 bp, Homo sapiens
atgtttttagtgtgtgatctacttgtaatgaatattttatattacatttctcaaaagctaggaattaaccaa

SEQ ID NO: 71120 - DNA, 73 bp, Homo sapiens
tgtgtgatctacttgtaatgaatattttatattacatttctcaaaagctaggaattaaccaaaatgtaaatat

SEQ ID NO: 71121 - DNA, 70 bp, Homo sapiens
tttatattacatttctcaaaagctaggaattaaccaaaatgtaaatatttaatatcctcaaattcacttg

SEQ ID NO: 71122 - DNA, 70 bp, Homo sapiens
catttctcaaaagctaggaattaaccaaaatgtaaatatttaatatcctcaaattcacttggagagagtt

SEQ ID NO: 71123 - DNA, 72 bp, Homo sapiens
agctaggaattaaccaaaatgtaaatatttaatatcctcaaattcacttggagagagtttttctgtgattca

SEQ ID NO: 71124 - DNA, 74 bp, Homo sapiens
gaattaaccaaaatgtaaatatttaatatcctcaaattcacttggagagagtttttctgtgattcatagccaga

SEQ ID NO: 71125 - DNA, 78 bp, Homo sapiens
tttaatatcctcaaattcacttggagagagtttttctgtgattcatagccagaaatagtagacatgattgggtctcaa

SEQ ID NO: 71126 - DNA, 77 bp, Homo sapiens
cctcaaattcacttggagagagtttttctgtgattcatagccagaaatagtagacatgattgggtctcaacatttct

SEQ ID NO: 71127 - DNA, 77 bp, Homo sapiens
acttggagagagtttttctgtgattcatagccagaaatagtagacatgattgggtctcaacatttcttgctgtttta

SEQ ID NO: 71128 - DNA, 78 bp, Homo sapiens
ttctgtgattcatagccagaaatagtagacatgattgggtctcaacatttcttgctgttttagtgcttggcttaaaaa

SEQ ID NO: 71129 - DNA, 76 bp, Homo sapiens
attcatagccagaaatagtagacatgattgggtctcaacatttcttgctgttttagtgcttggcttaaaaatgtaa

SEQ ID NO: 71130 - DNA, 73 bp, Homo sapiens
ccagaaatagtagacatgattgggtctcaacatttcttgctgttttagtgcttggcttaaaaatgtaataaaa

SEQ ID NO: 71131 - DNA, 67 bp, Homo sapiens
gggtctcaacatttcttgctgttttagtgcttggcttaaaaatgtaataaaaattaaaacccagaat

SEQ ID NO: 71132 - DNA, 67 bp, Homo sapiens
tcttgctgttttagtgcttggcttaaaaatgtaataaaaattaaaacccagaattaaaattcattcc

SEQ ID NO: 71133 - DNA, 67 bp, Homo sapiens
tagtgcttggcttaaaaatgtaataaaaattaaaacccagaattaaaattcattcctcaaaattcag

SEQ ID NO: 71134 - DNA, 66 bp, Homo sapiens
cttggcttaaaaatgtaataaaaattaaaacccagaattaaaattcattcctcaaaattcagttga

SEQ ID NO: 71135 - DNA, 65 bp, Homo sapiens
aatgtaataaaaattaaaacccagaattaaaattcattcctcaaaattcagttgatttctaattt

SEQ ID NO: 71136 - DNA, 68 bp, Homo sapiens
taaaacccagaattaaaattcattcctcaaaattcagttgatttctaattttttgttgattccatttg

SEQ ID NO: 71137 - DNA, 80 bp, Homo sapiens
aacattgtttttgttgctgtatgtagtcggtgctgtgacttgtttgtgctcatctctgttctgtaggcaacttgccactc

SEQ ID NO: 71138 - DNA, 82 bp, Homo sapiens
ttgttgctgtatgtagtcggtgctgtgacttgtttgtgctcatctctgttctgtaggcaacttgccactccctactgaataa

SEQ ID NO: 71139 - DNA, 82 bp, Homo sapiens
tgtatgtagtcggtgctgtgacttgtttgtgctcatctctgttctgtaggcaacttgccactccctactgaataaagctaca

SEQ ID NO: 71140 - DNA, 79 bp, Homo sapiens
tgctgtgacttgtttgtgctcatctctgttctgtaggcaacttgccactccctactgaataaagctacagtaaaagaaa

SEQ ID NO: 71141 - DNA, 74 bp, Homo sapiens
acttgtttgtgctcatctctgttctgtaggcaacttgccactccctactgaataaagctacagtaaaagaaaaa

SEQ ID NO: 71142 - DNA, 65 bp, Homo sapiens
aaggaaaacaaaaaatcagtaagtttggagaactttttattagctgtttctttcaaagcaaaaca

SEQ ID NO: 71143 - DNA, 70 bp, Homo sapiens
tatattaattcaaaccttatactcaattctcaactccttgtttttaggtggttagccagcgtttccctca

SEQ ID NO: 71144 - DNA, 69 bp, Homo sapiens
aattcaaaccttatactcaattctcaactccttgtttttaggtggttagccagcgtttccctcagaaca

SEQ ID NO: 71145 - DNA, 74 bp, Homo sapiens
ttatactcaattctcaactccttgtttttaggtggttagccagcgtttccctcagaacagcatcggtgcagtag

SEQ ID NO: 71146 - DNA, 73 bp, Homo sapiens
aactccttgtttttaggtggttagccagcgtttccctcagaacagcatcggtgcagtaggaagtgccatgttc

SEQ ID NO: 71147 - DNA, 75 bp, Homo sapiens
ttgtttttaggtggttagccagcgtttccctcagaacagcatcggtgcagtaggaagtgccatgttcctcagatt

SEQ ID NO: 71148 - DNA, 83 bp, Homo sapiens
ttagccagcgtttccctcagaacagcatcggtgcagtaggaagtgccatgttcctcagatttatcaatcctgccattgtctca

SEQ ID NO: 71149 - DNA, 82 bp, Homo sapiens
tttccctcagaacagcatcggtgcagtaggaagtgccatgttcctcagatttatcaatcctgccattgtctcaccgtatgaa

SEQ ID NO: 71150 - DNA, 81 bp, Homo sapiens
aacagcatcggtgcagtaggaagtgccatgttcctcagatttatcaatcctgccattgtctcaccgtatgaagcagggatt

SEQ ID NO: 71151 - DNA, 80 bp, Homo sapiens
gtgcagtaggaagtgccatgttcctcagatttatcaatcctgccattgtctcaccgtatgaagcagggattttagataaa

SEQ ID NO: 71152 - DNA, 77 bp, Homo sapiens
gtaggaagtgccatgttcctcagatttatcaatcctgccattgtctcaccgtatgaagcagggattttagataaaaa

SEQ ID NO: 71153 - DNA, 76 bp, Homo sapiens
ccatgttcctcagatttatcaatcctgccattgtctcaccgtatgaagcagggattttagataaaaagccaccacc

SEQ ID NO: 71154 - DNA, 74 bp, Homo sapiens
atttatcaatcctgccattgtctcaccgtatgaagcagggattttagataaaaagccaccacctagaatcgaaa

SEQ ID NO: 71155 - DNA, 73 bp, Homo sapiens
ctgccattgtctcaccgtatgaagcagggattttagataaaaagccaccacctagaatcgaaaggggcttgaa

SEQ ID NO: 71156 - DNA, 72 bp, Homo sapiens
tcaccgtatgaagcagggattttagataaaaagccaccacctagaatcgaaaggggcttgaagttaatgtca

SEQ ID NO: 71157 - DNA, 69 bp, Homo sapiens
aagcagggattttagataaaaagccaccacctagaatcgaaaggggcttgaagttaatgtcaaaggtga

SEQ ID NO: 71158 - DNA, 68 bp, Homo sapiens
ggattttagataaaaagccaccacctagaatcgaaaggggcttgaagttaatgtcaaaggtgaattat

SEQ ID NO: 71159 - DNA, 69 bp, Homo sapiens
ataaaaagccaccacctagaatcgaaaggggcttgaagttaatgtcaaaggtgaattattttgataatc

SEQ ID NO: 71160 - DNA, 71 bp, Homo sapiens
accacctagaatcgaaaggggcttgaagttaatgtcaaaggtgaattattttgataatctagctatcttaa

SEQ ID NO: 71161 - DNA, 77 bp, Homo sapiens
catacaataaataatctgattatttataaccctgttttattgtgtagatacttcagagtattgccaatcatgttctc

SEQ ID NO: 71162 - DNA, 76 bp, Homo sapiens
ataatctgattatttataaccctgttttattgtgtagatacttcagagtattgccaatcatgttctcttcacaaaa

SEQ ID NO: 71163 - DNA, 76 bp, Homo sapiens
ctgattatttataaccctgttttattgtgtagatacttcagagtattgccaatcatgttctcttcacaaaagaaga

SEQ ID NO: 71164 - DNA, 77 bp, Homo sapiens
ataaccctgttttattgtgtagatacttcagagtattgccaatcatgttctcttcacaaaagaagaacatatgcggc

SEQ ID NO: 71165 - DNA, 79 bp, Homo sapiens
ttattgtgtagatacttcagagtattgccaatcatgttctcttcacaaaagaagaacatatgcggcctttcaatgattt

SEQ ID NO: 71166 - DNA, 78 bp, Homo sapiens
agatacttcagagtattgccaatcatgttctcttcacaaaagaagaacatatgcggcctttcaatgattttgtgaaaa

SEQ ID NO: 71167 - DNA, 77 bp, Homo sapiens
agtattgccaatcatgttctcttcacaaaagaagaacatatgcggcctttcaatgattttgtgaaaagcaactttga

SEQ ID NO: 71168 - DNA, 79 bp, Homo sapiens
tgttctcttcacaaaagaagaacatatgcggcctttcaatgattttgtgaaaagcaactttgatgcagcacgcaggtaa

SEQ ID NO: 71169 - DNA, 75 bp, Homo sapiens
acaaaagaagaacatatgcggcctttcaatgattttgtgaaaagcaactttgatgcagcacgcaggtaattttct

SEQ ID NO: 71170 - DNA, 77 bp, Homo sapiens
aagaacatatgcggcctttcaatgattttgtgaaaagcaactttgatgcagcacgcaggtaattttcttgccactta

SEQ ID NO: 71171 - DNA, 78 bp, Homo sapiens
gcctttcaatgattttgtgaaaagcaactttgatgcagcacgcaggtaattttcttgccacttactcagttgctctgt

SEQ ID NO: 71172 - DNA, 76 bp, Homo sapiens
tgggtgtatctggtgttgaaaattctaatgactttgcatttttgaaggtttttccttgatatagcatctgattgtc

SEQ ID NO: 71173 - DNA, 75 bp, Homo sapiens
ggtgttgaaaattctaatgactttgcatttttgaaggtttttccttgatatagcatctgattgtcctacaagtga

SEQ ID NO: 71174 - DNA, 79 bp, Homo sapiens
attctaatgactttgcatttttgaaggtttttccttgatatagcatctgattgtcctacaagtgatgcagtaaatcata

SEQ ID NO: 71175 - DNA, 77 bp, Homo sapiens
actttgcatttttgaaggtttttccttgatatagcatctgattgtcctacaagtgatgcagtaaatcatagtctttc

SEQ ID NO: 71176 - DNA, 77 bp, Homo sapiens
ttttgaaggtttttccttgatatagcatctgattgtcctacaagtgatgcagtaaatcatagtctttccttcataag

SEQ ID NO: 71177 - DNA, 82 bp, Homo sapiens
ttttccttgatatagcatctgattgtcctacaagtgatgcagtaaatcatagtctttccttcataagtgacggcaatgtgct

SEQ ID NO: 71178 - DNA, 84 bp, Homo sapiens
atatagcatctgattgtcctacaagtgatgcagtaaatcatagtctttccttcataagtgacggcaatgtgcttgctttacatc

SEQ ID NO: 71179 - DNA, 80 bp, Homo sapiens
attgtcctacaagtgatgcagtaaatcatagtctttccttcataagtgacggcaatgtgcttgctttacatcgtctactc

SEQ ID NO: 71180 - DNA, 81 bp, Homo sapiens
aagtgatgcagtaaatcatagtctttccttcataagtgacggcaatgtgcttgctttacatcgtctactctggaacaatca

SEQ ID NO: 71181 - DNA, 78 bp, Homo sapiens
taaatcatagtctttccttcataagtgacggcaatgtgcttgctttacatcgtctactctggaacaatcaggagaaaa

SEQ ID NO: 71182 - DNA, 76 bp, Homo sapiens
atagtctttccttcataagtgacggcaatgtgcttgctttacatcgtctactctggaacaatcaggagaaaattgg

SEQ ID NO: 71183 - DNA, 79 bp, Homo sapiens
ttcataagtgacggcaatgtgcttgctttacatcgtctactctggaacaatcaggagaaaattgggcagtatctttcca

SEQ ID NO: 71184 - DNA, 79 bp, Homo sapiens
gcaatgtgcttgctttacatcgtctactctggaacaatcaggagaaaattgggcagtatctttccagcaacaggtaaga

SEQ ID NO: 71185 - DNA, 75 bp, Homo sapiens
cttgctttacatcgtctactctggaacaatcaggagaaaattgggcagtatctttccagcaacaggtaagatttc

SEQ ID NO: 71186 - DNA, 77 bp, Homo sapiens
tacatcgtctactctggaacaatcaggagaaaattgggcagtatctttccagcaacaggtaagatttcccagtcatg

SEQ ID NO: 71187 - DNA, 76 bp, Homo sapiens
tctggaacaatcaggagaaaattgggcagtatctttccagcaacaggtaagatttcccagtcatggggatagtgaa

SEQ ID NO: 71188 - DNA, 75 bp, Homo sapiens
aatcaggagaaaattgggcagtatctttccagcaacaggtaagatttcccagtcatggggatagtgaacactctc

SEQ ID NO: 71189 - DNA, 75 bp, Homo sapiens
tgctaaatgtgaactgctaattttttttctaagtagtttgctgtatctagggatcataaagctgttggaagacga

SEQ ID NO: 71190 - DNA, 72 bp, Homo sapiens
tgctaattttttttctaagtagtttgctgtatctagggatcataaagctgttggaagacgaccttttgataa

SEQ ID NO: 71191 - DNA, 74 bp, Homo sapiens
ttttctaagtagtttgctgtatctagggatcataaagctgttggaagacgaccttttgataagatggcaacact

SEQ ID NO: 71192 - DNA, 78 bp, Homo sapiens
taagtagtttgctgtatctagggatcataaagctgttggaagacgaccttttgataagatggcaacacttcttgcata

SEQ ID NO: 71193 - DNA, 77 bp, Homo sapiens
tgtatctagggatcataaagctgttggaagacgaccttttgataagatggcaacacttcttgcatacctgggtcctc

SEQ ID NO: 71194 - DNA, 77 bp, Homo sapiens
atcataaagctgttggaagacgaccttttgataagatggcaacacttcttgcatacctgggtcctccagagcacaaa

SEQ ID NO: 71195 - DNA, 78 bp, Homo sapiens
ttggaagacgaccttttgataagatggcaacacttcttgcatacctgggtcctccagagcacaaacctgtggcagata

SEQ ID NO: 71196 - DNA, 78 bp, Homo sapiens
agacgaccttttgataagatggcaacacttcttgcatacctgggtcctccagagcacaaacctgtggcagatacacac

SEQ ID NO: 71197 - DNA, 79 bp, Homo sapiens
ataagatggcaacacttcttgcatacctgggtcctccagagcacaaacctgtggcagatacacactggtccagccttaa

SEQ ID NO: 71198 - DNA, 75 bp, Homo sapiens
aacacttcttgcatacctgggtcctccagagcacaaacctgtggcagatacacactggtccagccttaaccttac

SEQ ID NO: 71199 - DNA, 76 bp, Homo sapiens
ttgcatacctgggtcctccagagcacaaacctgtggcagatacacactggtccagccttaaccttaccagttcaaa

SEQ ID NO: 71200 - DNA, 74 bp, Homo sapiens
tcctccagagcacaaacctgtggcagatacacactggtccagccttaaccttaccagttcaaagtttgaggaat

SEQ ID NO: 71201 - DNA, 72 bp, Homo sapiens
acaaacctgtggcagatacacactggtccagccttaaccttaccagttcaaagtttgaggaatttatgacta

SEQ ID NO: 71202 - DNA, 72 bp, Homo sapiens
tggcagatacacactggtccagccttaaccttaccagttcaaagtttgaggaatttatgactaggtaaagta

SEQ ID NO: 71203 - DNA, 69 bp, Homo sapiens
atacacactggtccagccttaaccttaccagttcaaagtttgaggaatttatgactaggtaaagtacaa

SEQ ID NO: 71204 - DNA, 67 bp, Homo sapiens
gtccagccttaaccttaccagttcaaagtttgaggaatttatgactaggtaaagtacaaccttgaaa

SEQ ID NO: 71205 - DNA, 68 bp, Homo sapiens
aaccttaccagttcaaagtttgaggaatttatgactaggtaaagtacaaccttgaaatagttgattgc

SEQ ID NO: 71206 - DNA, 74 bp, Homo sapiens
ctcagtagacaacataaagcctcataattactctgttatttttcttttaggcatcaggtacatgaaaaagaaga

SEQ ID NO: 71207 - DNA, 72 bp, Homo sapiens
acataaagcctcataattactctgttatttttcttttaggcatcaggtacatgaaaaagaagaattcaaggc

SEQ ID NO: 71208 - DNA, 70 bp, Homo sapiens
ggcatcaggtacatgaaaaagaagaattcaaggctttgaaaacgttaagtattttctaccaagctgggac

SEQ ID NO: 71209 - DNA, 68 bp, Homo sapiens
ggtacatgaaaaagaagaattcaaggctttgaaaacgttaagtattttctaccaagctgggacttcca

SEQ ID NO: 71210 - DNA, 66 bp, Homo sapiens
aaaagaagaattcaaggctttgaaaacgttaagtattttctaccaagctgggacttccaaagctgg

SEQ ID NO: 71211 - DNA, 65 bp, Homo sapiens
aaggctttgaaaacgttaagtattttctaccaagctgggacttccaaagctgggaatcctatttt

SEQ ID NO: 71212 - DNA, 67 bp, Homo sapiens
ttgaaaacgttaagtattttctaccaagctgggacttccaaagctgggaatcctattttttattatg

SEQ ID NO: 71213 - DNA, 70 bp, Homo sapiens
tattttctaccaagctgggacttccaaagctgggaatcctattttttattatgttgcacggaggtaagaa

SEQ ID NO: 71214 - DNA, 69 bp, Homo sapiens
aagctgggacttccaaagctgggaatcctattttttattatgttgcacggaggtaagaaatactatgtt

SEQ ID NO: 71215 - DNA, 69 bp, Homo sapiens
ttccaaagctgggaatcctattttttattatgttgcacggaggtaagaaatactatgttttgggtctct

SEQ ID NO: 71216 - DNA, 70 bp, Homo sapiens
gctgggaatcctattttttattatgttgcacggaggtaagaaatactatgttttgggtctcttaacagaa

SEQ ID NO: 71217 - DNA, 69 bp, Homo sapiens
tttaaacactgctaataatctttgtcttttttgtcattttccttaggttcaaaactggtcaaatcaatg

SEQ ID NO: 71218 - DNA, 73 bp, Homo sapiens
ctgctaataatctttgtcttttttgtcattttccttaggttcaaaactggtcaaatcaatggtgatttgctga

SEQ ID NO: 71219 - DNA, 73 bp, Homo sapiens
ctttgtcttttttgtcattttccttaggttcaaaactggtcaaatcaatggtgatttgctgatataccatgtc

SEQ ID NO: 71220 - DNA, 75 bp, Homo sapiens
ttgtcattttccttaggttcaaaactggtcaaatcaatggtgatttgctgatataccatgtcttactgactttaa

SEQ ID NO: 71221 - DNA, 75 bp, Homo sapiens
tttccttaggttcaaaactggtcaaatcaatggtgatttgctgatataccatgtcttactgactttaaagccata

SEQ ID NO: 71222 - DNA, 80 bp, Homo sapiens
aaaactggtcaaatcaatggtgatttgctgatataccatgtcttactgactttaaagccatattatgcaaagccatatga

SEQ ID NO: 71223 - DNA, 82 bp, Homo sapiens
tggtcaaatcaatggtgatttgctgatataccatgtcttactgactttaaagccatattatgcaaagccatatgaaattgta

SEQ ID NO: 71224 - DNA, 80 bp, Homo sapiens
tggtgatttgctgatataccatgtcttactgactttaaagccatattatgcaaagccatatgaaattgtagtggacctta

SEQ ID NO: 71225 - DNA, 75 bp, Homo sapiens
atataccatgtcttactgactttaaagccatattatgcaaagccatatgaaattgtagtggaccttacccatacc

SEQ ID NO: 71226 - DNA, 74 bp, Homo sapiens
tgtcttactgactttaaagccatattatgcaaagccatatgaaattgtagtggaccttacccataccgggccta

SEQ ID NO: 71227 - DNA, 74 bp, Homo sapiens
tttaaagccatattatgcaaagccatatgaaattgtagtggaccttacccataccgggcctagcaatcgcttta

SEQ ID NO: 71228 - DNA, 73 bp, Homo sapiens
atattatgcaaagccatatgaaattgtagtggaccttacccataccgggcctagcaatcgctttaaaacagac

SEQ ID NO: 71229 - DNA, 70 bp, Homo sapiens
aaagccatatgaaattgtagtggaccttacccataccgggcctagcaatcgctttaaaacagactttctc

SEQ ID NO: 71230 - DNA, 71 bp, Homo sapiens
tatgaaattgtagtggaccttacccataccgggcctagcaatcgctttaaaacagactttctctctaagtg

SEQ ID NO: 71231 - DNA, 67 bp, Homo sapiens
gaccttacccataccgggcctagcaatcgctttaaaacagactttctctctaagtggtttgttgttt

SEQ ID NO: 71232 - DNA, 67 bp, Homo sapiens
ataccgggcctagcaatcgctttaaaacagactttctctctaagtggtttgttgtttttcctggctt

SEQ ID NO: 71233 - DNA, 68 bp, Homo sapiens
atcgctttaaaacagactttctctctaagtggtttgttgtttttcctggctttgcttacgacaacgtc

SEQ ID NO: 71234 - DNA, 72 bp, Homo sapiens
actttctctctaagtggtttgttgtttttcctggctttgcttacgacaacgtctccgcagtctatatctata

SEQ ID NO: 71235 - DNA, 73 bp, Homo sapiens
tctctaagtggtttgttgtttttcctggctttgcttacgacaacgtctccgcagtctatatctataactgtaa

SEQ ID NO: 71236 - DNA, 73 bp, Homo sapiens
tttgttgtttttcctggctttgcttacgacaacgtctccgcagtctatatctataactgtaactcctgggtca

SEQ ID NO: 71237 - DNA, 74 bp, Homo sapiens
ttttcctggctttgcttacgacaacgtctccgcagtctatatctataactgtaactcctgggtcagggagtaca

SEQ ID NO: 71238 - DNA, 77 bp, Homo sapiens
tttgcttacgacaacgtctccgcagtctatatctataactgtaactcctgggtcagggagtacaccaagtatcatga

SEQ ID NO: 71239 - DNA, 79 bp, Homo sapiens
acaacgtctccgcagtctatatctataactgtaactcctgggtcagggagtacaccaagtatcatgagcggctgctgac

SEQ ID NO: 71240 - DNA, 79 bp, Homo sapiens
gtctatatctataactgtaactcctgggtcagggagtacaccaagtatcatgagcggctgctgactggcctcaaaggta

SEQ ID NO: 71241 - DNA, 78 bp, Homo sapiens
tcctgggtcagggagtacaccaagtatcatgagcggctgctgactggcctcaaaggtagcaaaaggcttgttttcata

SEQ ID NO: 71242 - DNA, 77 bp, Homo sapiens
agggagtacaccaagtatcatgagcggctgctgactggcctcaaaggtagcaaaaggcttgttttcatagactgtcc

SEQ ID NO: 71243 - DNA, 78 bp, Homo sapiens
tacaccaagtatcatgagcggctgctgactggcctcaaaggtagcaaaaggcttgttttcatagactgtcctgggaaa

SEQ ID NO: 71244 - DNA, 80 bp, Homo sapiens
atgagcggctgctgactggcctcaaaggtagcaaaaggcttgttttcatagactgtcctgggaaactggctgagcacata

SEQ ID NO: 71245 - DNA, 80 bp, Homo sapiens
tgactggcctcaaaggtagcaaaaggcttgttttcatagactgtcctgggaaactggctgagcacatagagcatgaacaa

SEQ ID NO: 71246 - DNA, 79 bp, Homo sapiens
aaaaggcttgttttcatagactgtcctgggaaactggctgagcacatagagcatgaacaacagaaactacctgctgcca

SEQ ID NO: 71247 - DNA, 80 bp, Homo sapiens
ttttcatagactgtcctgggaaactggctgagcacatagagcatgaacaacagaaactacctgctgccaccttggcttta

SEQ ID NO: 71248 - DNA, 80 bp, Homo sapiens
atagactgtcctgggaaactggctgagcacatagagcatgaacaacagaaactacctgctgccaccttggctttagaaga

SEQ ID NO: 71249 - DNA, 78 bp, Homo sapiens
aaactggctgagcacatagagcatgaacaacagaaactacctgctgccaccttggctttagaagaggacctgaaggta

SEQ ID NO: 71250 - DNA, 79 bp, Homo sapiens
ctgagcacatagagcatgaacaacagaaactacctgctgccaccttggctttagaagaggacctgaaggtattccacaa

SEQ ID NO: 71251 - DNA, 79 bp, Homo sapiens
tagagcatgaacaacagaaactacctgctgccaccttggctttagaagaggacctgaaggtattccacaatgctctcaa

SEQ ID NO: 71252 - DNA, 78 bp, Homo sapiens
ctgctgccaccttggctttagaagaggacctgaaggtattccacaatgctctcaagctagctcacaaagacaccaaag

SEQ ID NO: 71253 - DNA, 75 bp, Homo sapiens
cttggctttagaagaggacctgaaggtattccacaatgctctcaagctagctcacaaagacaccaaagtttctat

SEQ ID NO: 71254 - DNA, 74 bp, Homo sapiens
ctttagaagaggacctgaaggtattccacaatgctctcaagctagctcacaaagacaccaaagtttctattaaa

SEQ ID NO: 71255 - DNA, 73 bp, Homo sapiens
acctgaaggtattccacaatgctctcaagctagctcacaaagacaccaaagtttctattaaagtaagttccag

SEQ ID NO: 71256 - DNA, 74 bp, Homo sapiens
gtattccacaatgctctcaagctagctcacaaagacaccaaagtttctattaaagtaagttccagtctgtgttt

SEQ ID NO: 71257 - DNA, 73 bp, Homo sapiens
tctcaagctagctcacaaagacaccaaagtttctattaaagtaagttccagtctgtgttttgtaaacgattca

SEQ ID NO: 71258 - DNA, 71 bp, Homo sapiens
ttaattcttctccacttcaccccgtcaccaccactttccaggttggttctactgctgtccaagtaacttca

SEQ ID NO: 71259 - DNA, 72 bp, Homo sapiens
acttcaccccgtcaccaccactttccaggttggttctactgctgtccaagtaacttcagcagagcgaacaaa

SEQ ID NO: 71260 - DNA, 74 bp, Homo sapiens
tcaccaccactttccaggttggttctactgctgtccaagtaacttcagcagagcgaacaaaagtcctagggcaa

SEQ ID NO: 71261 - DNA, 75 bp, Homo sapiens
ttccaggttggttctactgctgtccaagtaacttcagcagagcgaacaaaagtcctagggcaatcagtctttcta

SEQ ID NO: 71262 - DNA, 76 bp, Homo sapiens
ttggttctactgctgtccaagtaacttcagcagagcgaacaaaagtcctagggcaatcagtctttctaaatgacat

SEQ ID NO: 71263 - DNA, 76 bp, Homo sapiens
tgtccaagtaacttcagcagagcgaacaaaagtcctagggcaatcagtctttctaaatgacatttattatgcttcg

SEQ ID NO: 71264 - DNA, 76 bp, Homo sapiens
taacttcagcagagcgaacaaaagtcctagggcaatcagtctttctaaatgacatttattatgcttcggaaattga

SEQ ID NO: 71265 - DNA, 73 bp, Homo sapiens
agagcgaacaaaagtcctagggcaatcagtctttctaaatgacatttattatgcttcggaaattgaagaaatc

SEQ ID NO: 71266 - DNA, 75 bp, Homo sapiens
ttctaaatgacatttattatgcttcggaaattgaagaaatctgcctagtagatgagaaccagttcaccttaacca

SEQ ID NO: 71267 - DNA, 74 bp, Homo sapiens
acatttattatgcttcggaaattgaagaaatctgcctagtagatgagaaccagttcaccttaaccattgcaaac

SEQ ID NO: 71268 - DNA, 75 bp, Homo sapiens
attatgcttcggaaattgaagaaatctgcctagtagatgagaaccagttcaccttaaccattgcaaaccagggca

SEQ ID NO: 71269 - DNA, 76 bp, Homo sapiens
attgaagaaatctgcctagtagatgagaaccagttcaccttaaccattgcaaaccagggcacgccgctcaccttca

SEQ ID NO: 71270 - DNA, 77 bp, Homo sapiens
aaatctgcctagtagatgagaaccagttcaccttaaccattgcaaaccagggcacgccgctcaccttcatgcaccag

SEQ ID NO: 71271 - DNA, 79 bp, Homo sapiens
tagtagatgagaaccagttcaccttaaccattgcaaaccagggcacgccgctcaccttcatgcaccaggagtgtgaagc

SEQ ID NO: 71272 - DNA, 78 bp, Homo sapiens
agttcaccttaaccattgcaaaccagggcacgccgctcaccttcatgcaccaggagtgtgaagccattgtccagtcta

SEQ ID NO: 71273 - DNA, 80 bp, Homo sapiens
accttaaccattgcaaaccagggcacgccgctcaccttcatgcaccaggagtgtgaagccattgtccagtctatcattca

SEQ ID NO: 71274 - DNA, 81 bp, Homo sapiens
ttgcaaaccagggcacgccgctcaccttcatgcaccaggagtgtgaagccattgtccagtctatcattcatatccggaccc

SEQ ID NO: 71275 - DNA, 81 bp, Homo sapiens
acgccgctcaccttcatgcaccaggagtgtgaagccattgtccagtctatcattcatatccggacccgctgggaactgtca

SEQ ID NO: 71276 - DNA, 80 bp, Homo sapiens
accttcatgcaccaggagtgtgaagccattgtccagtctatcattcatatccggacccgctgggaactgtcacagcccga

SEQ ID NO: 71277 - DNA, 78 bp, Homo sapiens
accaggagtgtgaagccattgtccagtctatcattcatatccggacccgctgggaactgtcacagcccgactctatcc

SEQ ID NO: 71278 - DNA, 79 bp, Homo sapiens
tgtgaagccattgtccagtctatcattcatatccggacccgctgggaactgtcacagcccgactctatcccccaacaca

SEQ ID NO: 71279 - DNA, 75 bp, Homo sapiens
ccagtctatcattcatatccggacccgctgggaactgtcacagcccgactctatcccccaacacaccaagattcg

SEQ ID NO: 71280 - DNA, 75 bp, Homo sapiens
tatcattcatatccggacccgctgggaactgtcacagcccgactctatcccccaacacaccaagattcggccaaa

SEQ ID NO: 71281 - DNA, 73 bp, Homo sapiens
tatccggacccgctgggaactgtcacagcccgactctatcccccaacacaccaagattcggccaaaagatgtc

SEQ ID NO: 71282 - DNA, 75 bp, Homo sapiens
ggaactgtcacagcccgactctatcccccaacacaccaagattcggccaaaagatgtccctgggacactgctcaa

SEQ ID NO: 71283 - DNA, 76 bp, Homo sapiens
acagcccgactctatcccccaacacaccaagattcggccaaaagatgtccctgggacactgctcaatatcgcatta

SEQ ID NO: 71284 - DNA, 76 bp, Homo sapiens
aacacaccaagattcggccaaaagatgtccctgggacactgctcaatatcgcattacttaatttaggcagttctga

SEQ ID NO: 71285 - DNA, 73 bp, Homo sapiens
attcggccaaaagatgtccctgggacactgctcaatatcgcattacttaatttaggcagttctgacccgagtt

SEQ ID NO: 71286 - DNA, 72 bp, Homo sapiens
aaaagatgtccctgggacactgctcaatatcgcattacttaatttaggcagttctgacccgagtttacggta

SEQ ID NO: 71287 - DNA, 68 bp, Homo sapiens
cactgctcaatatcgcattacttaatttaggcagttctgacccgagtttacggtaggttttttaaaat

SEQ ID NO: 71288 - DNA, 66 bp, Homo sapiens
atcgcattacttaatttaggcagttctgacccgagtttacggtaggttttttaaaattctcttcag

SEQ ID NO: 71289 - DNA, 69 bp, Homo sapiens
taaggaaaaatacgttttaaaacaacttcatttgtgttttctcctaggtcagctgcctataatcttctg

SEQ ID NO: 71290 - DNA, 71 bp, Homo sapiens
aatacgttttaaaacaacttcatttgtgttttctcctaggtcagctgcctataatcttctgtgtgccttaa

SEQ ID NO: 71291 - DNA, 72 bp, Homo sapiens
acaacttcatttgtgttttctcctaggtcagctgcctataatcttctgtgtgccttaacttgtacctttaat

SEQ ID NO: 71292 - DNA, 71 bp, Homo sapiens
catttgtgttttctcctaggtcagctgcctataatcttctgtgtgccttaacttgtacctttaatttaaaa

SEQ ID NO: 71293 - DNA, 70 bp, Homo sapiens
ttttctcctaggtcagctgcctataatcttctgtgtgccttaacttgtacctttaatttaaaaatcgagg

SEQ ID NO: 71294 - DNA, 71 bp, Homo sapiens
agctgcctataatcttctgtgtgccttaacttgtacctttaatttaaaaatcgagggccagttactagaga

SEQ ID NO: 71295 - DNA, 71 bp, Homo sapiens
tataatcttctgtgtgccttaacttgtacctttaatttaaaaatcgagggccagttactagagacatcagg

SEQ ID NO: 71296 - DNA, 71 bp, Homo sapiens
tgtgtgccttaacttgtacctttaatttaaaaatcgagggccagttactagagacatcaggtttatgtatc

SEQ ID NO: 71297 - DNA, 70 bp, Homo sapiens
taacttgtacctttaatttaaaaatcgagggccagttactagagacatcaggtttatgtatccctgccaa

SEQ ID NO: 71298 - DNA, 71 bp, Homo sapiens
taatttaaaaatcgagggccagttactagagacatcaggtttatgtatccctgccaacaacaccctcttta

SEQ ID NO: 71299 - DNA, 73 bp, Homo sapiens
aaaatcgagggccagttactagagacatcaggtttatgtatccctgccaacaacaccctctttattgtctcta

SEQ ID NO: 71300 - DNA, 74 bp, Homo sapiens
agttactagagacatcaggtttatgtatccctgccaacaacaccctctttattgtctctattagtaagacactg

SEQ ID NO: 71301 - DNA, 78 bp, Homo sapiens
agagacatcaggtttatgtatccctgccaacaacaccctctttattgtctctattagtaagacactggcagccaatga

SEQ ID NO: 71302 - DNA, 78 bp, Homo sapiens
gtttatgtatccctgccaacaacaccctctttattgtctctattagtaagacactggcagccaatgagccacacctca

SEQ ID NO: 71303 - DNA, 76 bp, Homo sapiens
tgccaacaacaccctctttattgtctctattagtaagacactggcagccaatgagccacacctcacgttagaattt

SEQ ID NO: 71304 - DNA, 74 bp, Homo sapiens
aacaccctctttattgtctctattagtaagacactggcagccaatgagccacacctcacgttagaatttttgga

SEQ ID NO: 71305 - DNA, 75 bp, Homo sapiens
tttattgtctctattagtaagacactggcagccaatgagccacacctcacgttagaatttttggaagagtgtatt

SEQ ID NO: 71306 - DNA, 75 bp, Homo sapiens
ctattagtaagacactggcagccaatgagccacacctcacgttagaatttttggaagagtgtatttctggattta

SEQ ID NO: 71307 - DNA, 76 bp, Homo sapiens
tggcagccaatgagccacacctcacgttagaatttttggaagagtgtatttctggatttagcaaatctagtaagta

SEQ ID NO: 71308 - DNA, 75 bp, Homo sapiens
caatgagccacacctcacgttagaatttttggaagagtgtatttctggatttagcaaatctagtaagtaatgata

SEQ ID NO: 71309 - DNA, 71 bp, Homo sapiens
cacacctcacgttagaatttttggaagagtgtatttctggatttagcaaatctagtaagtaatgataattt

SEQ ID NO: 71310 - DNA, 70 bp, Homo sapiens
gttagaatttttggaagagtgtatttctggatttagcaaatctagtaagtaatgataattttctttaata

SEQ ID NO: 71311 - DNA, 72 bp, Homo sapiens
tggaagagtgtatttctggatttagcaaatctagtaagtaatgataattttctttaatactaacaattattc

SEQ ID NO: 71312 - DNA, 71 bp, Homo sapiens
gtatttctggatttagcaaatctagtaagtaatgataattttctttaatactaacaattattctaagagaa

SEQ ID NO: 71313 - DNA, 69 bp, Homo sapiens
gcaaatctagtaagtaatgataattttctttaatactaacaattattctaagagaattcaaagaaaacc

SEQ ID NO: 71314 - DNA, 67 bp, Homo sapiens
tctagtaagtaatgataattttctttaatactaacaattattctaagagaattcaaagaaaaccctt

SEQ ID NO: 71315 - DNA, 67 bp, Homo sapiens
gataattttctttaatactaacaattattctaagagaattcaaagaaaaccctttcatttcagaatt

SEQ ID NO: 71316 - DNA, 68 bp, Homo sapiens
ttctaagagaattcaaagaaaaccctttcatttcagaattttccagtgaagactttcacttacatttt

SEQ ID NO: 71317 - DNA, 65 bp, Homo sapiens
aaccctttcatttcagaattttccagtgaagactttcacttacatttttactttttttcctcttc

SEQ ID NO: 71318 - DNA, 71 bp, Homo sapiens
gtgaagactttcacttacatttttactttttttcctcttctgattttatatctgtggtatcctgtaactga

SEQ ID NO: 71319 - DNA, 72 bp, Homo sapiens
tcacttacatttttactttttttcctcttctgattttatatctgtggtatcctgtaactgaaggaactctga

SEQ ID NO: 71320 - DNA, 70 bp, Homo sapiens
tttttcctcttctgattttatatctgtggtatcctgtaactgaaggaactctgaaggaactttttggtag

SEQ ID NO: 71321 - DNA, 74 bp, Homo sapiens
tatatctgtggtatcctgtaactgaaggaactctgaaggaactttttggtaggccacattgagaaatccaccaa

SEQ ID NO: 71322 - DNA, 73 bp, Homo sapiens
tatcctgtaactgaaggaactctgaaggaactttttggtaggccacattgagaaatccaccaaaattctgata

SEQ ID NO: 71323 - DNA, 70 bp, Homo sapiens
aactgaaggaactctgaaggaactttttggtaggccacattgagaaatccaccaaaattctgataataaa

SEQ ID NO: 71324 - DNA, 73 bp, Homo sapiens
tctgaaggaactttttggtaggccacattgagaaatccaccaaaattctgataataaaagcaaagcggcaaga

SEQ ID NO: 71325 - DNA, 70 bp, Homo sapiens
aactttttggtaggccacattgagaaatccaccaaaattctgataataaaagcaaagcggcaagagtttg

SEQ ID NO: 71326 - DNA, 73 bp, Homo sapiens
taggccacattgagaaatccaccaaaattctgataataaaagcaaagcggcaagagtttggtactttacacac

SEQ ID NO: 71327 - DNA, 70 bp, Homo sapiens
aatccaccaaaattctgataataaaagcaaagcggcaagagtttggtactttacacacctctggaccact

SEQ ID NO: 71328 - DNA, 70 bp, Homo sapiens
aattctgataataaaagcaaagcggcaagagtttggtactttacacacctctggaccacttacaaagtat

SEQ ID NO: 71329 - DNA, 71 bp, Homo sapiens
agcggcaagagtttggtactttacacacctctggaccacttacaaagtattttcttcactgttgcagttta

SEQ ID NO: 71330 - DNA, 70 bp, Homo sapiens
caagagtttggtactttacacacctctggaccacttacaaagtattttcttcactgttgcagtttaatta

SEQ ID NO: 71331 - DNA, 76 bp, Homo sapiens
ctctggaccacttacaaagtattttcttcactgttgcagtttaattagcttcagcatttctcttcatagcagaaaa

SEQ ID NO: 71332 - DNA, 77 bp, Homo sapiens
cacttacaaagtattttcttcactgttgcagtttaattagcttcagcatttctcttcatagcagaaaagtccacata

SEQ ID NO: 71333 - DNA, 78 bp, Homo sapiens
gtattttcttcactgttgcagtttaattagcttcagcatttctcttcatagcagaaaagtccacataagtatccatgt

SEQ ID NO: 71334 - DNA, 76 bp, Homo sapiens
gtttaattagcttcagcatttctcttcatagcagaaaagtccacataagtatccatgttgcctccttaattttaga

SEQ ID NO: 71335 - DNA, 75 bp, Homo sapiens
agcatttctcttcatagcagaaaagtccacataagtatccatgttgcctccttaattttagagaactagtcattt

SEQ ID NO: 71336 - DNA, 71 bp, Homo sapiens
agcagaaaagtccacataagtatccatgttgcctccttaattttagagaactagtcattttctcttttctt

SEQ ID NO: 71337 - DNA, 70 bp, Homo sapiens
ccacataagtatccatgttgcctccttaattttagagaactagtcattttctcttttctttaggttgact

SEQ ID NO: 71338 - DNA, 72 bp, Homo sapiens
tatccatgttgcctccttaattttagagaactagtcattttctcttttctttaggttgactttgaacaatga

SEQ ID NO: 71339 - DNA, 68 bp, Homo sapiens
gcctccttaattttagagaactagtcattttctcttttctttaggttgactttgaacaatgaatttat

SEQ ID NO: 71340 - DNA, 72 bp, Homo sapiens
cattttctcttttctttaggttgactttgaacaatgaatttattgtaaatgtacagttcacggagagcacag

SEQ ID NO: 71341 - DNA, 76 bp, Homo sapiens
tttctttaggttgactttgaacaatgaatttattgtaaatgtacagttcacggagagcacagtggcacataataca

SEQ ID NO: 71342 - DNA, 76 bp, Homo sapiens
ttaggttgactttgaacaatgaatttattgtaaatgtacagttcacggagagcacagtggcacataatacagggcc

SEQ ID NO: 71343 - DNA, 78 bp, Homo sapiens
tttgaacaatgaatttattgtaaatgtacagttcacggagagcacagtggcacataatacagggcccagagtcagttc

SEQ ID NO: 71344 - DNA, 77 bp, Homo sapiens
ttattgtaaatgtacagttcacggagagcacagtggcacataatacagggcccagagtcagttctgactttgtttta

SEQ ID NO: 71345 - DNA, 75 bp, Homo sapiens
aaatgtacagttcacggagagcacagtggcacataatacagggcccagagtcagttctgactttgttttaactaa

SEQ ID NO: 71346 - DNA, 73 bp, Homo sapiens
acggagagcacagtggcacataatacagggcccagagtcagttctgactttgttttaactaagtcttataaat

SEQ ID NO: 71347 - DNA, 71 bp, Homo sapiens
cacataatacagggcccagagtcagttctgactttgttttaactaagtcttataaatttaatatccactct

SEQ ID NO: 71348 - DNA, 69 bp, Homo sapiens
gggcccagagtcagttctgactttgttttaactaagtcttataaatttaatatccactctttatatttg

SEQ ID NO: 71349 - DNA, 70 bp, Homo sapiens
gtcagttctgactttgttttaactaagtcttataaatttaatatccactctttatatttgtccatcttta

SEQ ID NO: 71350 - DNA, 72 bp, Homo sapiens
agtcttataaatttaatatccactctttatatttgtccatctttatatcctatagttttataaatgttgatc

SEQ ID NO: 71351 - DNA, 75 bp, Homo sapiens
cactctttatatttgtccatctttatatcctatagttttataaatgttgatcttctcccagcatatttcctgacc

SEQ ID NO: 71352 - DNA, 73 bp, Homo sapiens
atttgtccatctttatatcctatagttttataaatgttgatcttctcccagcatatttcctgaccttttcttc

SEQ ID NO: 71353 - DNA, 71 bp, Homo sapiens
ccatctttatatcctatagttttataaatgttgatcttctcccagcatatttcctgaccttttcttccctt

SEQ ID NO: 71354 - DNA, 70 bp, Homo sapiens
tatcctatagttttataaatgttgatcttctcccagcatatttcctgaccttttcttccctttcctttcc

SEQ ID NO: 71355 - DNA, 70 bp, Homo sapiens
ataaatgttgatcttctcccagcatatttcctgaccttttcttccctttcctttccctgtaatatataaa

SEQ ID NO: 71356 - DNA, 68 bp, Homo sapiens
gttgatcttctcccagcatatttcctgaccttttcttccctttcctttccctgtaatatataaaactt

SEQ ID NO: 71357 - DNA, 64 bp, Homo sapiens
cccagcatatttcctgaccttttcttccctttcctttccctgtaatatataaaacttttttttc

SEQ ID NO: 71358 - DNA, 66 bp, Homo sapiens
cttccctttcctttccctgtaatatataaaacttttttttctgcattcaaacacatttcttgactt

SEQ ID NO: 71359 - DNA, 70 bp, Homo sapiens
tcctttccctgtaatatataaaacttttttttctgcattcaaacacatttcttgacttttatatattaga

SEQ ID NO: 71360 - DNA, 69 bp, Homo sapiens
atatataaaacttttttttctgcattcaaacacatttcttgacttttatatattagataattaaaagct

SEQ ID NO: 71361 - DNA, 73 bp, Homo sapiens
cttttttttctgcattcaaacacatttcttgacttttatatattagataattaaaagcttcagcaattcacta

SEQ ID NO: 71362 - DNA, 78 bp, Homo sapiens
tctgcattcaaacacatttcttgacttttatatattagataattaaaagcttcagcaattcactaagactctttgtca

SEQ ID NO: 71363 - DNA, 75 bp, Homo sapiens
cacatttcttgacttttatatattagataattaaaagcttcagcaattcactaagactctttgtcaggtaagaga

SEQ ID NO: 71364 - DNA, 74 bp, Homo sapiens
tattagataattaaaagcttcagcaattcactaagactctttgtcaggtaagagatgtaggactataaccctaa

SEQ ID NO: 71365 - DNA, 73 bp, Homo sapiens
gataattaaaagcttcagcaattcactaagactctttgtcaggtaagagatgtaggactataaccctaacaaa

SEQ ID NO: 71366 - DNA, 70 bp, Homo sapiens
actaagactctttgtcaggtaagagatgtaggactataaccctaacaaaaaaatgtgtaggactgacaaa

SEQ ID NO: 71367 - DNA, 70 bp, Homo sapiens
actctttgtcaggtaagagatgtaggactataaccctaacaaaaaaatgtgtaggactgacaaaacaaga

SEQ ID NO: 71368 - DNA, 68 bp, Homo sapiens
aggtaagagatgtaggactataaccctaacaaaaaaatgtgtaggactgacaaaacaagaaaagtata

SEQ ID NO: 71369 - DNA, 65 bp, Homo sapiens
gtaggactataaccctaacaaaaaaatgtgtaggactgacaaaacaagaaaagtataaactttat

SEQ ID NO: 71370 - DNA, 65 bp, Homo sapiens
aaccctaacaaaaaaatgtgtaggactgacaaaacaagaaaagtataaactttattcataaatat

SEQ ID NO: 71371 - DNA, 72 bp, Homo sapiens
aatgtgtaggactgacaaaacaagaaaagtataaactttattcataaatattaatatgagagaagatttgag

SEQ ID NO: 71372 - DNA, 73 bp, Homo sapiens
gtaggactgacaaaacaagaaaagtataaactttattcataaatattaatatgagagaagatttgagtgaatg

SEQ ID NO: 71373 - DNA, 80 bp, Homo sapiens
ttcataaatattaatatgagagaagatttgagtgaatgtaaaggcatattgtgttcctgcatgaacagttcttcccagat

SEQ ID NO: 71374 - DNA, 79 bp, Homo sapiens
attaatatgagagaagatttgagtgaatgtaaaggcatattgtgttcctgcatgaacagttcttcccagattattacaa

SEQ ID NO: 71375 - DNA, 78 bp, Homo sapiens
atgagagaagatttgagtgaatgtaaaggcatattgtgttcctgcatgaacagttcttcccagattattacaaattta

SEQ ID NO: 71376 - DNA, 75 bp, Homo sapiens
atttgagtgaatgtaaaggcatattgtgttcctgcatgaacagttcttcccagattattacaaatttaatgtaat

SEQ ID NO: 71377 - DNA, 75 bp, Homo sapiens
atgtaaaggcatattgtgttcctgcatgaacagttcttcccagattattacaaatttaatgtaatttcatcaaaa

SEQ ID NO: 71378 - DNA, 73 bp, Homo sapiens
gtgttcctgcatgaacagttcttcccagattattacaaatttaatgtaatttcatcaaaataaccatgggatt

SEQ ID NO: 71379 - DNA, 74 bp, Homo sapiens
ttaatgtaatttcatcaaaataaccatgggatttgaggattgagaatggagatagaacttaaatgattctaaat

SEQ ID NO: 71380 - DNA, 75 bp, Homo sapiens
caaaataaccatgggatttgaggattgagaatggagatagaacttaaatgattctaaattctacataaaagtgca

SEQ ID NO: 71381 - DNA, 77 bp, Homo sapiens
tgggatttgaggattgagaatggagatagaacttaaatgattctaaattctacataaaagtgcaataatagctaaga

SEQ ID NO: 71382 - DNA, 76 bp, Homo sapiens
ggattgagaatggagatagaacttaaatgattctaaattctacataaaagtgcaataatagctaagaaaatattga

SEQ ID NO: 71383 - DNA, 73 bp, Homo sapiens
atggagatagaacttaaatgattctaaattctacataaaagtgcaataatagctaagaaaatattgaaaggaa

SEQ ID NO: 71384 - DNA, 72 bp, Homo sapiens
aaatgattctaaattctacataaaagtgcaataatagctaagaaaatattgaaaggaaagagacttgagact

SEQ ID NO: 71385 - DNA, 72 bp, Homo sapiens
aaattctacataaaagtgcaataatagctaagaaaatattgaaaggaaagagacttgagacttaatagtaca

SEQ ID NO: 71386 - DNA, 75 bp, Homo sapiens
taaaagtgcaataatagctaagaaaatattgaaaggaaagagacttgagacttaatagtacagatgtctgaacac

SEQ ID NO: 71387 - DNA, 77 bp, Homo sapiens
gcaataatagctaagaaaatattgaaaggaaagagacttgagacttaatagtacagatgtctgaacactttatagca

SEQ ID NO: 71388 - DNA, 75 bp, Homo sapiens
agctaagaaaatattgaaaggaaagagacttgagacttaatagtacagatgtctgaacactttatagcagtacaa

SEQ ID NO: 71389 - DNA, 75 bp, Homo sapiens
gaaaggaaagagacttgagacttaatagtacagatgtctgaacactttatagcagtacaataattaaaacataca

SEQ ID NO: 71390 - DNA, 84 bp, Homo sapiens
taattaaaacatacatgtgcaagaatcagccatcagatcagtttaagagaaacagattgataaagaagcatcacaaactgatga

SEQ ID NO: 71391 - DNA, 85 bp, Homo sapiens
atacatgtgcaagaatcagccatcagatcagtttaagagaaacagattgataaagaagcatcacaaactgatgagggagagatta

SEQ ID NO: 71392 - DNA, 81 bp, Homo sapiens
aagaatcagccatcagatcagtttaagagaaacagattgataaagaagcatcacaaactgatgagggagagattaaatcat

SEQ ID NO: 71393 - DNA, 82 bp, Homo sapiens
tcagccatcagatcagtttaagagaaacagattgataaagaagcatcacaaactgatgagggagagattaaatcatttaata

SEQ ID NO: 71394 - DNA, 77 bp, Homo sapiens
cagtttaagagaaacagattgataaagaagcatcacaaactgatgagggagagattaaatcatttaataaatgaggc

SEQ ID NO: 71395 - DNA, 77 bp, Homo sapiens
agagaaacagattgataaagaagcatcacaaactgatgagggagagattaaatcatttaataaatgaggctgggaaa

SEQ ID NO: 71396 - DNA, 76 bp, Homo sapiens
attgataaagaagcatcacaaactgatgagggagagattaaatcatttaataaatgaggctgggaaatgacttaaa

SEQ ID NO: 71397 - DNA, 75 bp, Homo sapiens
agcatcacaaactgatgagggagagattaaatcatttaataaatgaggctgggaaatgacttaaattaggtcttc

SEQ ID NO: 71398 - DNA, 73 bp, Homo sapiens
actgatgagggagagattaaatcatttaataaatgaggctgggaaatgacttaaattaggtcttcgtcttcac

SEQ ID NO: 71399 - DNA, 72 bp, Homo sapiens
gagattaaatcatttaataaatgaggctgggaaatgacttaaattaggtcttcgtcttcaccgtacaccata

SEQ ID NO: 71400 - DNA, 70 bp, Homo sapiens
atttaataaatgaggctgggaaatgacttaaattaggtcttcgtcttcaccgtacaccataagataccaa

SEQ ID NO: 71401 - DNA, 72 bp, Homo sapiens
taaatgaggctgggaaatgacttaaattaggtcttcgtcttcaccgtacaccataagataccaagtatgttc

SEQ ID NO: 71402 - DNA, 71 bp, Homo sapiens
aaatgacttaaattaggtcttcgtcttcaccgtacaccataagataccaagtatgttctgcctgtatttaa

SEQ ID NO: 71403 - DNA, 73 bp, Homo sapiens
taaattaggtcttcgtcttcaccgtacaccataagataccaagtatgttctgcctgtatttaagagttgagta

SEQ ID NO: 71404 - DNA, 75 bp, Homo sapiens
gtcttcgtcttcaccgtacaccataagataccaagtatgttctgcctgtatttaagagttgagtagggctgtgtg

SEQ ID NO: 71405 - DNA, 76 bp, Homo sapiens
accgtacaccataagataccaagtatgttctgcctgtatttaagagttgagtagggctgtgtgtggtggctctcgc

SEQ ID NO: 71406 - DNA, 74 bp, Homo sapiens
gtgattttcattgaccatcacatgctaatagtgtatttttttccaggtattgaattgaaacacctttgtttgga

SEQ ID NO: 71407 - DNA, 75 bp, Homo sapiens
cattgaccatcacatgctaatagtgtatttttttccaggtattgaattgaaacacctttgtttggaatacatgac

SEQ ID NO: 71408 - DNA, 75 bp, Homo sapiens
atcacatgctaatagtgtatttttttccaggtattgaattgaaacacctttgtttggaatacatgactccatggc

SEQ ID NO: 71409 - DNA, 73 bp, Homo sapiens
gtgtatttttttccaggtattgaattgaaacacctttgtttggaatacatgactccatggctgtcaaatctag

SEQ ID NO: 71410 - DNA, 72 bp, Homo sapiens
tttccaggtattgaattgaaacacctttgtttggaatacatgactccatggctgtcaaatctagttcgtttt

SEQ ID NO: 71411 - DNA, 78 bp, Homo sapiens
tattgaattgaaacacctttgtttggaatacatgactccatggctgtcaaatctagttcgtttttgcaagcataatga

SEQ ID NO: 71412 - DNA, 78 bp, Homo sapiens
aaacacctttgtttggaatacatgactccatggctgtcaaatctagttcgtttttgcaagcataatgatgatgccaaa

SEQ ID NO: 71413 - DNA, 80 bp, Homo sapiens
tttggaatacatgactccatggctgtcaaatctagttcgtttttgcaagcataatgatgatgccaaacgacaaagagtta

SEQ ID NO: 71414 - DNA, 80 bp, Homo sapiens
atgactccatggctgtcaaatctagttcgtttttgcaagcataatgatgatgccaaacgacaaagagttactgctattct

SEQ ID NO: 71415 - DNA, 81 bp, Homo sapiens
ctgtcaaatctagttcgtttttgcaagcataatgatgatgccaaacgacaaagagttactgctattcttgacaagctgata

SEQ ID NO: 71416 - DNA, 79 bp, Homo sapiens
aaatctagttcgtttttgcaagcataatgatgatgccaaacgacaaagagttactgctattcttgacaagctgataaca

SEQ ID NO: 71417 - DNA, 83 bp, Homo sapiens
ttttgcaagcataatgatgatgccaaacgacaaagagttactgctattcttgacaagctgataacaatgaccatcaatgaaaa

SEQ ID NO: 71418 - DNA, 82 bp, Homo sapiens
ataatgatgatgccaaacgacaaagagttactgctattcttgacaagctgataacaatgaccatcaatgaaaaacagatgta

SEQ ID NO: 71419 - DNA, 78 bp, Homo sapiens
ccaaacgacaaagagttactgctattcttgacaagctgataacaatgaccatcaatgaaaaacagatgtacccatcta

SEQ ID NO: 71420 - DNA, 79 bp, Homo sapiens
aaagagttactgctattcttgacaagctgataacaatgaccatcaatgaaaaacagatgtacccatctattcaagcaaa

SEQ ID NO: 71421 - DNA, 80 bp, Homo sapiens
ttactgctattcttgacaagctgataacaatgaccatcaatgaaaaacagatgtacccatctattcaagcaaaaatatgg

SEQ ID NO: 71422 - DNA, 78 bp, Homo sapiens
ttgacaagctgataacaatgaccatcaatgaaaaacagatgtacccatctattcaagcaaaaatatggggaagccttg

SEQ ID NO: 71423 - DNA, 75 bp, Homo sapiens
ataacaatgaccatcaatgaaaaacagatgtacccatctattcaagcaaaaatatggggaagccttgggcaggta

SEQ ID NO: 71424 - DNA, 76 bp, Homo sapiens
atcaatgaaaaacagatgtacccatctattcaagcaaaaatatggggaagccttgggcaggtattgagtttgctca

SEQ ID NO: 71425 - DNA, 73 bp, Homo sapiens
aaaaacagatgtacccatctattcaagcaaaaatatggggaagccttgggcaggtattgagtttgctcaaata

SEQ ID NO: 71426 - DNA, 74 bp, Homo sapiens
atgtacccatctattcaagcaaaaatatggggaagccttgggcaggtattgagtttgctcaaatatttatctag

SEQ ID NO: 71427 - DNA, 75 bp, Homo sapiens
aattggtagagtgattaaaaacatgttattttccttcttcaactagattacagatctgcttgatgttgtactaga

SEQ ID NO: 71428 - DNA, 78 bp, Homo sapiens
gagtgattaaaaacatgttattttccttcttcaactagattacagatctgcttgatgttgtactagacagtttcatca

SEQ ID NO: 71429 - DNA, 78 bp, Homo sapiens
acatgttattttccttcttcaactagattacagatctgcttgatgttgtactagacagtttcatcaaaaccagtgcaa

SEQ ID NO: 71430 - DNA, 77 bp, Homo sapiens
attttccttcttcaactagattacagatctgcttgatgttgtactagacagtttcatcaaaaccagtgcaacaggtg

SEQ ID NO: 71431 - DNA, 79 bp, Homo sapiens
aactagattacagatctgcttgatgttgtactagacagtttcatcaaaaccagtgcaacaggtggcttgggatcaataa

SEQ ID NO: 71432 - DNA, 80 bp, Homo sapiens
attacagatctgcttgatgttgtactagacagtttcatcaaaaccagtgcaacaggtggcttgggatcaataaaagctga

SEQ ID NO: 71433 - DNA, 81 bp, Homo sapiens
ttgatgttgtactagacagtttcatcaaaaccagtgcaacaggtggcttgggatcaataaaagctgaggtgatggcagata

SEQ ID NO: 71434 - DNA, 82 bp, Homo sapiens
tgtactagacagtttcatcaaaaccagtgcaacaggtggcttgggatcaataaaagctgaggtgatggcagatactgctgta

SEQ ID NO: 71435 - DNA, 81 bp, Homo sapiens
tttcatcaaaaccagtgcaacaggtggcttgggatcaataaaagctgaggtgatggcagatactgctgtagctttggcttc

SEQ ID NO: 71436 - DNA, 79 bp, Homo sapiens
aaaaccagtgcaacaggtggcttgggatcaataaaagctgaggtgatggcagatactgctgtagctttggcttctggaa

SEQ ID NO: 71437 - DNA, 79 bp, Homo sapiens
aacaggtggcttgggatcaataaaagctgaggtgatggcagatactgctgtagctttggcttctggaaatgtgaaattg

SEQ ID NO: 71438 - DNA, 80 bp, Homo sapiens
gatcaataaaagctgaggtgatggcagatactgctgtagctttggcttctggaaatgtgaaattggtttcaagcaaggta

SEQ ID NO: 71439 - DNA, 79 bp, Homo sapiens
ataaaagctgaggtgatggcagatactgctgtagctttggcttctggaaatgtgaaattggtttcaagcaaggtaatca

SEQ ID NO: 71440 - DNA, 76 bp, Homo sapiens
gtgatggcagatactgctgtagctttggcttctggaaatgtgaaattggtttcaagcaaggtaatcacttttcttt

SEQ ID NO: 71441 - DNA, 73 bp, Homo sapiens
agatactgctgtagctttggcttctggaaatgtgaaattggtttcaagcaaggtaatcacttttcttttgcct

SEQ ID NO: 71442 - DNA, 74 bp, Homo sapiens
tttggcttctggaaatgtgaaattggtttcaagcaaggtaatcacttttcttttgccttctgtactatagcata

SEQ ID NO: 71443 - DNA, 72 bp, Homo sapiens
aaaaaaaaaatcctgcttctttacaggttattggaaggatgtgcaaaataattgacaagacatgcttatctc

SEQ ID NO: 71444 - DNA, 74 bp, Homo sapiens
aaaaatcctgcttctttacaggttattggaaggatgtgcaaaataattgacaagacatgcttatctccaactcc

SEQ ID NO: 71445 - DNA, 75 bp, Homo sapiens
tctttacaggttattggaaggatgtgcaaaataattgacaagacatgcttatctccaactcctactttagaacaa

SEQ ID NO: 71446 - DNA, 77 bp, Homo sapiens
ttattggaaggatgtgcaaaataattgacaagacatgcttatctccaactcctactttagaacaacatcttatgtgg

SEQ ID NO: 71447 - DNA, 80 bp, Homo sapiens
tgtgcaaaataattgacaagacatgcttatctccaactcctactttagaacaacatcttatgtgggatgatattgctatt

SEQ ID NO: 71448 - DNA, 79 bp, Homo sapiens
aataattgacaagacatgcttatctccaactcctactttagaacaacatcttatgtgggatgatattgctattttagca

SEQ ID NO: 71449 - DNA, 82 bp, Homo sapiens
aagacatgcttatctccaactcctactttagaacaacatcttatgtgggatgatattgctattttagcacgctacatgctga

SEQ ID NO: 71450 - DNA, 82 bp, Homo sapiens
ttatctccaactcctactttagaacaacatcttatgtgggatgatattgctattttagcacgctacatgctgatgctgtcct

SEQ ID NO: 71451 - DNA, 81 bp, Homo sapiens
tactttagaacaacatcttatgtgggatgatattgctattttagcacgctacatgctgatgctgtccttcaacaattccct

SEQ ID NO: 71452 - DNA, 85 bp, Homo sapiens
agaacaacatcttatgtgggatgatattgctattttagcacgctacatgctgatgctgtccttcaacaattcccttgatgtggca

SEQ ID NO: 71453 - DNA, 86 bp, Homo sapiens
cttatgtgggatgatattgctattttagcacgctacatgctgatgctgtccttcaacaattcccttgatgtggcagctcatcttcc

SEQ ID NO: 71454 - DNA, 83 bp, Homo sapiens
atattgctattttagcacgctacatgctgatgctgtccttcaacaattcccttgatgtggcagctcatcttccctacctcttc

SEQ ID NO: 71455 - DNA, 81 bp, Homo sapiens
tattttagcacgctacatgctgatgctgtccttcaacaattcccttgatgtggcagctcatcttccctacctcttccacgt

SEQ ID NO: 71456 - DNA, 79 bp, Homo sapiens
tacatgctgatgctgtccttcaacaattcccttgatgtggcagctcatcttccctacctcttccacgttgttactttct

SEQ ID NO: 71457 - DNA, 75 bp, Homo sapiens
atgctgtccttcaacaattcccttgatgtggcagctcatcttccctacctcttccacgttgttactttcttagta

SEQ ID NO: 71458 - DNA, 74 bp, Homo sapiens
cttcaacaattcccttgatgtggcagctcatcttccctacctcttccacgttgttactttcttagtagccacag

SEQ ID NO: 71459 - DNA, 75 bp, Homo sapiens
ttgatgtggcagctcatcttccctacctcttccacgttgttactttcttagtagccacaggtccgctctccctta

SEQ ID NO: 71460 - DNA, 72 bp, Homo sapiens
agctcatcttccctacctcttccacgttgttactttcttagtagccacaggtccgctctcccttagagcttc

SEQ ID NO: 71461 - DNA, 72 bp, Homo sapiens
ttccctacctcttccacgttgttactttcttagtagccacaggtccgctctcccttagagcttccacacatg

SEQ ID NO: 71462 - DNA, 75 bp, Homo sapiens
tccacgttgttactttcttagtagccacaggtccgctctcccttagagcttccacacatggactggtcattaata

SEQ ID NO: 71463 - DNA, 77 bp, Homo sapiens
ttgttactttcttagtagccacaggtccgctctcccttagagcttccacacatggactggtcattaatatcattcac

SEQ ID NO: 71464 - DNA, 80 bp, Homo sapiens
ttagtagccacaggtccgctctcccttagagcttccacacatggactggtcattaatatcattcactctctgtgtacttg

SEQ ID NO: 71465 - DNA, 81 bp, Homo sapiens
tccgctctcccttagagcttccacacatggactggtcattaatatcattcactctctgtgtacttgttcacagcttcattt

SEQ ID NO: 71466 - DNA, 80 bp, Homo sapiens
cttagagcttccacacatggactggtcattaatatcattcactctctgtgtacttgttcacagcttcattttagtggtaa

SEQ ID NO: 71467 - DNA, 79 bp, Homo sapiens
cttccacacatggactggtcattaatatcattcactctctgtgtacttgttcacagcttcattttagtggtaagttcta

SEQ ID NO: 71468 - DNA, 75 bp, Homo sapiens
actggtcattaatatcattcactctctgtgtacttgttcacagcttcattttagtggtaagttctaggaaaggaa

SEQ ID NO: 71469 - DNA, 76 bp, Homo sapiens
tcattaatatcattcactctctgtgtacttgttcacagcttcattttagtggtaagttctaggaaaggaatttgtg

SEQ ID NO: 71470 - DNA, 72 bp, Homo sapiens
attcactctctgtgtacttgttcacagcttcattttagtggtaagttctaggaaaggaatttgtgtttacca

SEQ ID NO: 71471 - DNA, 69 bp, Homo sapiens
aaaagtaatattttctgtctttacttgttcctttattctcttacagaagagaccaagcaagttttgaga

SEQ ID NO: 71472 - DNA, 74 bp, Homo sapiens
attttctgtctttacttgttcctttattctcttacagaagagaccaagcaagttttgagactcagtctgacaga

SEQ ID NO: 71473 - DNA, 76 bp, Homo sapiens
tctttacttgttcctttattctcttacagaagagaccaagcaagttttgagactcagtctgacagagttctcatta

SEQ ID NO: 71474 - DNA, 74 bp, Homo sapiens
ctttattctcttacagaagagaccaagcaagttttgagactcagtctgacagagttctcattacccaaatttta

SEQ ID NO: 71475 - DNA, 75 bp, Homo sapiens
tcttacagaagagaccaagcaagttttgagactcagtctgacagagttctcattacccaaattttacttgctgtt

SEQ ID NO: 71476 - DNA, 75 bp, Homo sapiens
aagagaccaagcaagttttgagactcagtctgacagagttctcattacccaaattttacttgctgtttggcatta

SEQ ID NO: 71477 - DNA, 74 bp, Homo sapiens
aagttttgagactcagtctgacagagttctcattacccaaattttacttgctgtttggcattagcaaagtcaag

SEQ ID NO: 71478 - DNA, 80 bp, Homo sapiens
agactcagtctgacagagttctcattacccaaattttacttgctgtttggcattagcaaagtcaagtcagctgctgtcat

SEQ ID NO: 71479 - DNA, 76 bp, Homo sapiens
agagttctcattacccaaattttacttgctgtttggcattagcaaagtcaagtcagctgctgtcattgccttccgt

SEQ ID NO: 71480 - DNA, 75 bp, Homo sapiens
attacccaaattttacttgctgtttggcattagcaaagtcaagtcagctgctgtcattgccttccgttccagtta

SEQ ID NO: 71481 - DNA, 74 bp, Homo sapiens
aaattttacttgctgtttggcattagcaaagtcaagtcagctgctgtcattgccttccgttccagttaccggga

SEQ ID NO: 71482 - DNA, 79 bp, Homo sapiens
ttgctgtttggcattagcaaagtcaagtcagctgctgtcattgccttccgttccagttaccgggacaggtcattctctc

SEQ ID NO: 71483 - DNA, 77 bp, Homo sapiens
attagcaaagtcaagtcagctgctgtcattgccttccgttccagttaccgggacaggtcattctctcctggctccta

SEQ ID NO: 71484 - DNA, 77 bp, Homo sapiens
tgtcattgccttccgttccagttaccgggacaggtcattctctcctggctcctatgagagagagacttttgctttga

SEQ ID NO: 71485 - DNA, 75 bp, Homo sapiens
ttccgttccagttaccgggacaggtcattctctcctggctcctatgagagagagacttttgctttgacatccttg

SEQ ID NO: 71486 - DNA, 76 bp, Homo sapiens
ttccagttaccgggacaggtcattctctcctggctcctatgagagagagacttttgctttgacatccttggaaaca

SEQ ID NO: 71487 - DNA, 78 bp, Homo sapiens
acaggtcattctctcctggctcctatgagagagagacttttgctttgacatccttggaaacagtcacagaagctttgt

SEQ ID NO: 71488 - DNA, 80 bp, Homo sapiens
attctctcctggctcctatgagagagagacttttgctttgacatccttggaaacagtcacagaagctttgttggagatca

SEQ ID NO: 71489 - DNA, 80 bp, Homo sapiens
tcctatgagagagagacttttgctttgacatccttggaaacagtcacagaagctttgttggagatcatggaggtatagaa

SEQ ID NO: 71490 - DNA, 76 bp, Homo sapiens
agagacttttgctttgacatccttggaaacagtcacagaagctttgttggagatcatggaggtatagaagccaaaa

SEQ ID NO: 71491 - DNA, 78 bp, Homo sapiens
tttgctttgacatccttggaaacagtcacagaagctttgttggagatcatggaggtatagaagccaaaatgataagaa

SEQ ID NO: 71492 - DNA, 75 bp, Homo sapiens
tccttggaaacagtcacagaagctttgttggagatcatggaggtatagaagccaaaatgataagaaactaagtta

SEQ ID NO: 71493 - DNA, 67 bp, Homo sapiens
aataaacattatttaaacagttctaaaaacatttatgtacaatatgtattcagagtatccccttttt

SEQ ID NO: 71494 - DNA, 76 bp, Homo sapiens
aacagttctaaaaacatttatgtacaatatgtattcagagtatccccttttttaggcatgcatgagagatattcca

SEQ ID NO: 71495 - DNA, 76 bp, Homo sapiens
aaaaacatttatgtacaatatgtattcagagtatccccttttttaggcatgcatgagagatattccaacgtgcaag

SEQ ID NO: 71496 - DNA, 79 bp, Homo sapiens
atttatgtacaatatgtattcagagtatccccttttttaggcatgcatgagagatattccaacgtgcaagtggctggac

SEQ ID NO: 71497 - DNA, 80 bp, Homo sapiens
atatgtattcagagtatccccttttttaggcatgcatgagagatattccaacgtgcaagtggctggaccagtggacagaa

SEQ ID NO: 71498 - DNA, 78 bp, Homo sapiens
agtatccccttttttaggcatgcatgagagatattccaacgtgcaagtggctggaccagtggacagaactagctcaaa

SEQ ID NO: 71499 - DNA, 80 bp, Homo sapiens
tttaggcatgcatgagagatattccaacgtgcaagtggctggaccagtggacagaactagctcaaaggtatgtcctaaat

SEQ ID NO: 71500 - DNA, 78 bp, Homo sapiens
catgagagatattccaacgtgcaagtggctggaccagtggacagaactagctcaaaggtatgtcctaaattaaatata

SEQ ID NO: 71501 - DNA, 74 bp, Homo sapiens
agatattccaacgtgcaagtggctggaccagtggacagaactagctcaaaggtatgtcctaaattaaatataag

SEQ ID NO: 71502 - DNA, 73 bp, Homo sapiens
gtgcaagtggctggaccagtggacagaactagctcaaaggtatgtcctaaattaaatataagttgtaaaaata

SEQ ID NO: 71503 - DNA, 75 bp, Homo sapiens
tggctggaccagtggacagaactagctcaaaggtatgtcctaaattaaatataagttgtaaaaatatgcatattg

SEQ ID NO: 71504 - DNA, 74 bp, Homo sapiens
gacagaactagctcaaaggtatgtcctaaattaaatataagttgtaaaaatatgcatattgttgaaaatacagc

SEQ ID NO: 71505 - DNA, 69 bp, Homo sapiens
gttataatttattatttagtatatataaacacaaaggtttttataagttctgtggatcttttaattgca

SEQ ID NO: 71506 - DNA, 72 bp, Homo sapiens
ttatttagtatatataaacacaaaggtttttataagttctgtggatcttttaattgcagatttgcattccaa

SEQ ID NO: 71507 - DNA, 74 bp, Homo sapiens
tatataaacacaaaggtttttataagttctgtggatcttttaattgcagatttgcattccaatataatccatcc

SEQ ID NO: 71508 - DNA, 75 bp, Homo sapiens
cacaaaggtttttataagttctgtggatcttttaattgcagatttgcattccaatataatccatccctgcaacca

SEQ ID NO: 71509 - DNA, 77 bp, Homo sapiens
ttttataagttctgtggatcttttaattgcagatttgcattccaatataatccatccctgcaaccaagagctcttgt

SEQ ID NO: 71510 - DNA, 79 bp, Homo sapiens
tgtggatcttttaattgcagatttgcattccaatataatccatccctgcaaccaagagctcttgttgtctttgggtgta

SEQ ID NO: 71511 - DNA, 78 bp, Homo sapiens
tttaattgcagatttgcattccaatataatccatccctgcaaccaagagctcttgttgtctttgggtgtattagcaaa

SEQ ID NO: 71512 - DNA, 78 bp, Homo sapiens
atttgcattccaatataatccatccctgcaaccaagagctcttgttgtctttgggtgtattagcaaacgagtgtctca

SEQ ID NO: 71513 - DNA, 78 bp, Homo sapiens
aatataatccatccctgcaaccaagagctcttgttgtctttgggtgtattagcaaacgagtgtctcatgggcagataa

SEQ ID NO: 71514 - DNA, 79 bp, Homo sapiens
atccctgcaaccaagagctcttgttgtctttgggtgtattagcaaacgagtgtctcatgggcagataaagcagataatc

SEQ ID NO: 71515 - DNA, 76 bp, Homo sapiens
aaccaagagctcttgttgtctttgggtgtattagcaaacgagtgtctcatgggcagataaagcagataatccgtat

SEQ ID NO: 71516 - DNA, 77 bp, Homo sapiens
ttgttgtctttgggtgtattagcaaacgagtgtctcatgggcagataaagcagataatccgtattcttagcaaggta

SEQ ID NO: 71517 - DNA, 76 bp, Homo sapiens
tttgggtgtattagcaaacgagtgtctcatgggcagataaagcagataatccgtattcttagcaaggtacctgttc

SEQ ID NO: 71518 - DNA, 77 bp, Homo sapiens
gtattagcaaacgagtgtctcatgggcagataaagcagataatccgtattcttagcaaggtacctgttccgccctca

SEQ ID NO: 71519 - DNA, 76 bp, Homo sapiens
tgtctcatgggcagataaagcagataatccgtattcttagcaaggtacctgttccgccctcacttctcccaaatat

SEQ ID NO: 71520 - DNA, 73 bp, Homo sapiens
atgggcagataaagcagataatccgtattcttagcaaggtacctgttccgccctcacttctcccaaatattta

SEQ ID NO: 71521 - DNA, 66 bp, Homo sapiens
agtaaaataaaaaattctgttttcctaaaaggcacttgagagttgcttaaaaggacctgacactta

SEQ ID NO: 71522 - DNA, 68 bp, Homo sapiens
aaaattctgttttcctaaaaggcacttgagagttgcttaaaaggacctgacacttacaacagtcaagt

SEQ ID NO: 71523 - DNA, 73 bp, Homo sapiens
ttttcctaaaaggcacttgagagttgcttaaaaggacctgacacttacaacagtcaagttctgatagaagcta

SEQ ID NO: 71524 - DNA, 75 bp, Homo sapiens
taaaaggcacttgagagttgcttaaaaggacctgacacttacaacagtcaagttctgatagaagctacagtaata

SEQ ID NO: 71525 - DNA, 73 bp, Homo sapiens
agttgcttaaaaggacctgacacttacaacagtcaagttctgatagaagctacagtaatagcactaaccaaat

SEQ ID NO: 71526 - DNA, 75 bp, Homo sapiens
ttaaaaggacctgacacttacaacagtcaagttctgatagaagctacagtaatagcactaaccaaattacagcca

SEQ ID NO: 71527 - DNA, 74 bp, Homo sapiens
acacttacaacagtcaagttctgatagaagctacagtaatagcactaaccaaattacagccacttcttaataag

SEQ ID NO: 71528 - DNA, 73 bp, Homo sapiens
acaacagtcaagttctgatagaagctacagtaatagcactaaccaaattacagccacttcttaataaggtaat

SEQ ID NO: 71529 - DNA, 74 bp, Homo sapiens
agttctgatagaagctacagtaatagcactaaccaaattacagccacttcttaataaggtaattactgtataga

SEQ ID NO: 71530 - DNA, 75 bp, Homo sapiens
gaagctacagtaatagcactaaccaaattacagccacttcttaataaggtaattactgtatagaaaatgagtgca

SEQ ID NO: 71531 - DNA, 80 bp, Homo sapiens
agactatgtcatgattcatcttactagcctcaaacatatcttctttgccaggactcgcctctgcacaaagccctcttttg

SEQ ID NO: 71532 - DNA, 78 bp, Homo sapiens
atgattcatcttactagcctcaaacatatcttctttgccaggactcgcctctgcacaaagccctcttttgggtagctg

SEQ ID NO: 71533 - DNA, 81 bp, Homo sapiens
ttactagcctcaaacatatcttctttgccaggactcgcctctgcacaaagccctcttttgggtagctgtggctgtgctgca

SEQ ID NO: 71534 - DNA, 83 bp, Homo sapiens
acatatcttctttgccaggactcgcctctgcacaaagccctcttttgggtagctgtggctgtgctgcagcttgatgaggtcaa

SEQ ID NO: 71535 - DNA, 83 bp, Homo sapiens
tttgccaggactcgcctctgcacaaagccctcttttgggtagctgtggctgtgctgcagcttgatgaggtcaacttgtattca

SEQ ID NO: 71536 - DNA, 82 bp, Homo sapiens
actcgcctctgcacaaagccctcttttgggtagctgtggctgtgctgcagcttgatgaggtcaacttgtattcagcaggtac

SEQ ID NO: 71537 - DNA, 81 bp, Homo sapiens
caaagccctcttttgggtagctgtggctgtgctgcagcttgatgaggtcaacttgtattcagcaggtaccgcacttcttga

SEQ ID NO: 71538 - DNA, 80 bp, Homo sapiens
ctcttttgggtagctgtggctgtgctgcagcttgatgaggtcaacttgtattcagcaggtaccgcacttcttgaacaaaa

SEQ ID NO: 71539 - DNA, 82 bp, Homo sapiens
ctgtggctgtgctgcagcttgatgaggtcaacttgtattcagcaggtaccgcacttcttgaacaaaacctgcatactttaga

SEQ ID NO: 71540 - DNA, 82 bp, Homo sapiens
tgtgctgcagcttgatgaggtcaacttgtattcagcaggtaccgcacttcttgaacaaaacctgcatactttagatagtctc

SEQ ID NO: 71541 - DNA, 77 bp, Homo sapiens
tgatgaggtcaacttgtattcagcaggtaccgcacttcttgaacaaaacctgcatactttagatagtctccgtatat

SEQ ID NO: 71542 - DNA, 76 bp, Homo sapiens
aacttgtattcagcaggtaccgcacttcttgaacaaaacctgcatactttagatagtctccgtatattcaatgaca

SEQ ID NO: 71543 - DNA, 76 bp, Homo sapiens
tattcagcaggtaccgcacttcttgaacaaaacctgcatactttagatagtctccgtatattcaatgacaaggtaa

SEQ ID NO: 71544 - DNA, 73 bp, Homo sapiens
taccgcacttcttgaacaaaacctgcatactttagatagtctccgtatattcaatgacaaggtaagcaaactt

SEQ ID NO: 71545 - DNA, 73 bp, Homo sapiens
ttgaacaaaacctgcatactttagatagtctccgtatattcaatgacaaggtaagcaaactttgccttgaggt

SEQ ID NO: 71546 - DNA, 76 bp, Homo sapiens
tgcatactttagatagtctccgtatattcaatgacaaggtaagcaaactttgccttgaggttcctagattactcaa

SEQ ID NO: 71547 - DNA, 79 bp, Homo sapiens
agaaagctactgtgtgaacctcatcaaccatctcatgattatctttaatagagtccagaggaagtatttatggcaatcc

SEQ ID NO: 71548 - DNA, 80 bp, Homo sapiens
tgtgaacctcatcaaccatctcatgattatctttaatagagtccagaggaagtatttatggcaatccggaatcctctgga

SEQ ID NO: 71549 - DNA, 79 bp, Homo sapiens
aaccatctcatgattatctttaatagagtccagaggaagtatttatggcaatccggaatcctctggagtggcactgcaa

SEQ ID NO: 71550 - DNA, 79 bp, Homo sapiens
atgattatctttaatagagtccagaggaagtatttatggcaatccggaatcctctggagtggcactgcaagcaaatgga

SEQ ID NO: 71551 - DNA, 78 bp, Homo sapiens
atctttaatagagtccagaggaagtatttatggcaatccggaatcctctggagtggcactgcaagcaaatggatcatt

SEQ ID NO: 71552 - DNA, 78 bp, Homo sapiens
cagaggaagtatttatggcaatccggaatcctctggagtggcactgcaagcaaatggatcattttgttggactcaatt

SEQ ID NO: 71553 - DNA, 79 bp, Homo sapiens
tatttatggcaatccggaatcctctggagtggcactgcaagcaaatggatcattttgttggactcaatttcaactctaa

SEQ ID NO: 71554 - DNA, 75 bp, Homo sapiens
aatccggaatcctctggagtggcactgcaagcaaatggatcattttgttggactcaatttcaactctaactttaa

SEQ ID NO: 71555 - DNA, 76 bp, Homo sapiens
aatcctctggagtggcactgcaagcaaatggatcattttgttggactcaatttcaactctaactttaactttgcat

SEQ ID NO: 71556 - DNA, 76 bp, Homo sapiens
agtggcactgcaagcaaatggatcattttgttggactcaatttcaactctaactttaactttgcattggttggaca

SEQ ID NO: 71557 - DNA, 71 bp, Homo sapiens
caagcaaatggatcattttgttggactcaatttcaactctaactttaactttgcattggttggacaccttt

SEQ ID NO: 71558 - DNA, 68 bp, Homo sapiens
ggatcattttgttggactcaatttcaactctaactttaactttgcattggttggacaccttttaaaag

SEQ ID NO: 71559 - DNA, 65 bp, Homo sapiens
gttggactcaatttcaactctaactttaactttgcattggttggacaccttttaaaaggtaaaaa

SEQ ID NO: 71560 - DNA, 65 bp, Homo sapiens
tcaactctaactttaactttgcattggttggacaccttttaaaaggtaaaaaagccttatttaga

SEQ ID NO: 71561 - DNA, 62 bp, Homo sapiens
aactttaactttgcattggttggacaccttttaaaaggtaaaaaagccttatttagaatatt

SEQ ID NO: 71562 - DNA, 75 bp, Homo sapiens
tgtttgttttttgtagggtacaggcatccttcacctgctattgttgcaagaacagtcagaattttacatacacta

SEQ ID NO: 71563 - DNA, 75 bp, Homo sapiens
tttttgtagggtacaggcatccttcacctgctattgttgcaagaacagtcagaattttacatacactactaactc

SEQ ID NO: 71564 - DNA, 77 bp, Homo sapiens
tacaggcatccttcacctgctattgttgcaagaacagtcagaattttacatacactactaactctggttaacaaaca

SEQ ID NO: 71565 - DNA, 75 bp, Homo sapiens
atccttcacctgctattgttgcaagaacagtcagaattttacatacactactaactctggttaacaaacacagaa

SEQ ID NO: 71566 - DNA, 75 bp, Homo sapiens
gctattgttgcaagaacagtcagaattttacatacactactaactctggttaacaaacacagaaattgtgacaaa

SEQ ID NO: 71567 - DNA, 73 bp, Homo sapiens
gcaagaacagtcagaattttacatacactactaactctggttaacaaacacagaaattgtgacaaatttgaag

SEQ ID NO: 71568 - DNA, 73 bp, Homo sapiens
attttacatacactactaactctggttaacaaacacagaaattgtgacaaatttgaagtgaatacacagagcg

SEQ ID NO: 71569 - DNA, 75 bp, Homo sapiens
acatacactactaactctggttaacaaacacagaaattgtgacaaatttgaagtgaatacacagagcgtggccta

SEQ ID NO: 71570 - DNA, 74 bp, Homo sapiens
tctggttaacaaacacagaaattgtgacaaatttgaagtgaatacacagagcgtggcctacttagcaggtaaaa

SEQ ID NO: 71571 - DNA, 72 bp, Homo sapiens
aaacacagaaattgtgacaaatttgaagtgaatacacagagcgtggcctacttagcaggtaaaaacacaaaa

SEQ ID NO: 71572 - DNA, 72 bp, Homo sapiens
agaaattgtgacaaatttgaagtgaatacacagagcgtggcctacttagcaggtaaaaacacaaaataaaca

SEQ ID NO: 71573 - DNA, 71 bp, Homo sapiens
atttgaagtgaatacacagagcgtggcctacttagcaggtaaaaacacaaaataaacaaaattaatcttgc

SEQ ID NO: 71574 - DNA, 66 bp, Homo sapiens
cacacttgtgatttgttaaattttttaacctgccaccgttttccttttagctttacttacagtgtc

SEQ ID NO: 71575 - DNA, 65 bp, Homo sapiens
gttaaattttttaacctgccaccgttttccttttagctttacttacagtgtctgaagaagttcga

SEQ ID NO: 71576 - DNA, 70 bp, Homo sapiens
tttttaacctgccaccgttttccttttagctttacttacagtgtctgaagaagttcgaagtcgctgcagc

SEQ ID NO: 71577 - DNA, 70 bp, Homo sapiens
accgttttccttttagctttacttacagtgtctgaagaagttcgaagtcgctgcagcctaaaacatagaa

SEQ ID NO: 71578 - DNA, 73 bp, Homo sapiens
ttttagctttacttacagtgtctgaagaagttcgaagtcgctgcagcctaaaacatagaaagtcacttcttct

SEQ ID NO: 71579 - DNA, 75 bp, Homo sapiens
tttacttacagtgtctgaagaagttcgaagtcgctgcagcctaaaacatagaaagtcacttcttcttactgatat

SEQ ID NO: 71580 - DNA, 76 bp, Homo sapiens
tgtctgaagaagttcgaagtcgctgcagcctaaaacatagaaagtcacttcttcttactgatatttcaatggaaaa

SEQ ID NO: 71581 - DNA, 74 bp, Homo sapiens
agaagttcgaagtcgctgcagcctaaaacatagaaagtcacttcttcttactgatatttcaatggaaaatgttc

SEQ ID NO: 71582 - DNA, 77 bp, Homo sapiens
agtcgctgcagcctaaaacatagaaagtcacttcttcttactgatatttcaatggaaaatgttcctatggatacata

SEQ ID NO: 71583 - DNA, 77 bp, Homo sapiens
aaacatagaaagtcacttcttcttactgatatttcaatggaaaatgttcctatggatacatatcccattcatcatgg

SEQ ID NO: 71584 - DNA, 76 bp, Homo sapiens
aaagtcacttcttcttactgatatttcaatggaaaatgttcctatggatacatatcccattcatcatggtgaccct

SEQ ID NO: 71585 - DNA, 77 bp, Homo sapiens
ttcttactgatatttcaatggaaaatgttcctatggatacatatcccattcatcatggtgacccttcctataggtaa

SEQ ID NO: 71586 - DNA, 75 bp, Homo sapiens
atttcaatggaaaatgttcctatggatacatatcccattcatcatggtgacccttcctataggtaagtggattta

SEQ ID NO: 71587 - DNA, 75 bp, Homo sapiens
aaaatgttcctatggatacatatcccattcatcatggtgacccttcctataggtaagtggatttactctcctata

SEQ ID NO: 71588 - DNA, 77 bp, Homo sapiens
ttcctatggatacatatcccattcatcatggtgacccttcctataggtaagtggatttactctcctataattacata

SEQ ID NO: 71589 - DNA, 76 bp, Homo sapiens
tatttgtcaccatattaattgatttttctctattgttttcatctttcaggacactaaaggagactcagccatggtc

SEQ ID NO: 71590 - DNA, 73 bp, Homo sapiens
attaattgatttttctctattgttttcatctttcaggacactaaaggagactcagccatggtcctctcccaaa

SEQ ID NO: 71591 - DNA, 73 bp, Homo sapiens
tttttctctattgttttcatctttcaggacactaaaggagactcagccatggtcctctcccaaaggttctgaa

SEQ ID NO: 71592 - DNA, 72 bp, Homo sapiens
attgttttcatctttcaggacactaaaggagactcagccatggtcctctcccaaaggttctgaaggatacct

SEQ ID NO: 71593 - DNA, 75 bp, Homo sapiens
atctttcaggacactaaaggagactcagccatggtcctctcccaaaggttctgaaggataccttgcagccaccta

SEQ ID NO: 71594 - DNA, 75 bp, Homo sapiens
acactaaaggagactcagccatggtcctctcccaaaggttctgaaggataccttgcagccacctatccaactgtc

SEQ ID NO: 71595 - DNA, 76 bp, Homo sapiens
actcagccatggtcctctcccaaaggttctgaaggataccttgcagccacctatccaactgtcggccagaccagtc

SEQ ID NO: 71596 - DNA, 73 bp, Homo sapiens
atggtcctctcccaaaggttctgaaggataccttgcagccacctatccaactgtcggccagaccagtccccga

SEQ ID NO: 71597 - DNA, 73 bp, Homo sapiens
aaaggttctgaaggataccttgcagccacctatccaactgtcggccagaccagtccccgagccaggaaatcca

SEQ ID NO: 71598 - DNA, 78 bp, Homo sapiens
ttctgaaggataccttgcagccacctatccaactgtcggccagaccagtccccgagccaggaaatccatgagcctgga

SEQ ID NO: 71599 - DNA, 78 bp, Homo sapiens
taccttgcagccacctatccaactgtcggccagaccagtccccgagccaggaaatccatgagcctggacatggggcaa

SEQ ID NO: 71600 - DNA, 75 bp, Homo sapiens
acctatccaactgtcggccagaccagtccccgagccaggaaatccatgagcctggacatggggcaaccttctcag

SEQ ID NO: 71601 - DNA, 76 bp, Homo sapiens
tcggccagaccagtccccgagccaggaaatccatgagcctggacatggggcaaccttctcaggccaacactaagaa

SEQ ID NO: 71602 - DNA, 74 bp, Homo sapiens
accagtccccgagccaggaaatccatgagcctggacatggggcaaccttctcaggccaacactaagaagttgct

SEQ ID NO: 71603 - DNA, 74 bp, Homo sapiens
agccaggaaatccatgagcctggacatggggcaaccttctcaggccaacactaagaagttgcttggttagttta

SEQ ID NO: 71604 - DNA, 73 bp, Homo sapiens
aaatccatgagcctggacatggggcaaccttctcaggccaacactaagaagttgcttggttagtttatctaaa

SEQ ID NO: 71605 - DNA, 72 bp, Homo sapiens
tggacatggggcaaccttctcaggccaacactaagaagttgcttggttagtttatctaaattatgtagattt

SEQ ID NO: 71606 - DNA, 68 bp, Homo sapiens
gggcaaccttctcaggccaacactaagaagttgcttggttagtttatctaaattatgtagattttttt

SEQ ID NO: 71607 - DNA, 71 bp, Homo sapiens
tagacactgtagttaatgaacttgcatattcttaacttttgtttataggaacaaggaaaagttttgatcac

SEQ ID NO: 71608 - DNA, 73 bp, Homo sapiens
gttaatgaacttgcatattcttaacttttgtttataggaacaaggaaaagttttgatcacttgatatcagaca

SEQ ID NO: 71609 - DNA, 73 bp, Homo sapiens
ttgcatattcttaacttttgtttataggaacaaggaaaagttttgatcacttgatatcagacacaaaggctcc

SEQ ID NO: 71610 - DNA, 71 bp, Homo sapiens
taacttttgtttataggaacaaggaaaagttttgatcacttgatatcagacacaaaggctcctaaaaggca

SEQ ID NO: 71611 - DNA, 72 bp, Homo sapiens
ttgtttataggaacaaggaaaagttttgatcacttgatatcagacacaaaggctcctaaaaggcaagaaatg

SEQ ID NO: 71612 - DNA, 74 bp, Homo sapiens
aaggaaaagttttgatcacttgatatcagacacaaaggctcctaaaaggcaagaaatggaatcagggatcacaa

SEQ ID NO: 71613 - DNA, 74 bp, Homo sapiens
aaagttttgatcacttgatatcagacacaaaggctcctaaaaggcaagaaatggaatcagggatcacaacaccc

SEQ ID NO: 71614 - DNA, 73 bp, Homo sapiens
acttgatatcagacacaaaggctcctaaaaggcaagaaatggaatcagggatcacaacaccccccaaaatgag

SEQ ID NO: 71615 - DNA, 73 bp, Homo sapiens
agacacaaaggctcctaaaaggcaagaaatggaatcagggatcacaacaccccccaaaatgaggagagtagca

SEQ ID NO: 71616 - DNA, 75 bp, Homo sapiens
tcctaaaaggcaagaaatggaatcagggatcacaacaccccccaaaatgaggagagtagcagaaactgattatga

SEQ ID NO: 71617 - DNA, 75 bp, Homo sapiens
aagaaatggaatcagggatcacaacaccccccaaaatgaggagagtagcagaaactgattatgaaatgggtgaga

SEQ ID NO: 71618 - DNA, 74 bp, Homo sapiens
atcagggatcacaacaccccccaaaatgaggagagtagcagaaactgattatgaaatgggtgagaaacaaagta

SEQ ID NO: 71619 - DNA, 75 bp, Homo sapiens
atcacaacaccccccaaaatgaggagagtagcagaaactgattatgaaatgggtgagaaacaaagtattgatcta

SEQ ID NO: 71620 - DNA, 77 bp, Homo sapiens
cccaaaatgaggagagtagcagaaactgattatgaaatgggtgagaaacaaagtattgatctagatcattgaaaata

SEQ ID NO: 71621 - DNA, 80 bp, Homo sapiens
aagtgattatccaggtgtttgatcacgttaattccctatcttgctgcagaaactcagaggatttcctcatcacaacagca

SEQ ID NO: 71622 - DNA, 78 bp, Homo sapiens
aggtgtttgatcacgttaattccctatcttgctgcagaaactcagaggatttcctcatcacaacagcacccacattta

SEQ ID NO: 71623 - DNA, 78 bp, Homo sapiens
ttgatcacgttaattccctatcttgctgcagaaactcagaggatttcctcatcacaacagcacccacatttacgtaaa

SEQ ID NO: 71624 - DNA, 77 bp, Homo sapiens
taattccctatcttgctgcagaaactcagaggatttcctcatcacaacagcacccacatttacgtaaagtttcagtg

SEQ ID NO: 71625 - DNA, 78 bp, Homo sapiens
ctgcagaaactcagaggatttcctcatcacaacagcacccacatttacgtaaagtttcagtgtctgaatcaaatgttc

SEQ ID NO: 71626 - DNA, 75 bp, Homo sapiens
aaactcagaggatttcctcatcacaacagcacccacatttacgtaaagtttcagtgtctgaatcaaatgttctct

SEQ ID NO: 71627 - DNA, 77 bp, Homo sapiens
tttcctcatcacaacagcacccacatttacgtaaagtttcagtgtctgaatcaaatgttctcttggatgaagaagta

SEQ ID NO: 71628 - DNA, 75 bp, Homo sapiens
atcacaacagcacccacatttacgtaaagtttcagtgtctgaatcaaatgttctcttggatgaagaagtacttac

SEQ ID NO: 71629 - DNA, 75 bp, Homo sapiens
acatttacgtaaagtttcagtgtctgaatcaaatgttctcttggatgaagaagtacttactgatccgaagatcca

SEQ ID NO: 71630 - DNA, 78 bp, Homo sapiens
taaagtttcagtgtctgaatcaaatgttctcttggatgaagaagtacttactgatccgaagatccaggcgctgcttct

SEQ ID NO: 71631 - DNA, 80 bp, Homo sapiens
tgtctgaatcaaatgttctcttggatgaagaagtacttactgatccgaagatccaggcgctgcttcttactgttctagta

SEQ ID NO: 71632 - DNA, 75 bp, Homo sapiens
aaatgttctcttggatgaagaagtacttactgatccgaagatccaggcgctgcttcttactgttctagtaaggat

SEQ ID NO: 71633 - DNA, 75 bp, Homo sapiens
ttctcttggatgaagaagtacttactgatccgaagatccaggcgctgcttcttactgttctagtaaggatttccc

SEQ ID NO: 71634 - DNA, 71 bp, Homo sapiens
aagaagtacttactgatccgaagatccaggcgctgcttcttactgttctagtaaggatttcccctttttga

SEQ ID NO: 71635 - DNA, 71 bp, Homo sapiens
cttactgatccgaagatccaggcgctgcttcttactgttctagtaaggatttcccctttttgagtccccca

SEQ ID NO: 71636 - DNA, 73 bp, Homo sapiens
ttcagccacaaagtaaaaatgttgtgtgtttacttttttgcatcttggcaggctacactggtaaaatatacca

SEQ ID NO: 71637 - DNA, 75 bp, Homo sapiens
aaaatgttgtgtgtttacttttttgcatcttggcaggctacactggtaaaatataccacagatgagtttgatcaa

SEQ ID NO: 71638 - DNA, 74 bp, Homo sapiens
gtgtttacttttttgcatcttggcaggctacactggtaaaatataccacagatgagtttgatcaacgaattctt

SEQ ID NO: 71639 - DNA, 77 bp, Homo sapiens
tttttgcatcttggcaggctacactggtaaaatataccacagatgagtttgatcaacgaattctttatgaatactta

SEQ ID NO: 71640 - DNA, 78 bp, Homo sapiens
atcttggcaggctacactggtaaaatataccacagatgagtttgatcaacgaattctttatgaatacttagcagaggc

SEQ ID NO: 71641 - DNA, 77 bp, Homo sapiens
tacactggtaaaatataccacagatgagtttgatcaacgaattctttatgaatacttagcagaggccagtgttgtgt

SEQ ID NO: 71642 - DNA, 75 bp, Homo sapiens
aaatataccacagatgagtttgatcaacgaattctttatgaatacttagcagaggccagtgttgtgtttcccaaa

SEQ ID NO: 71643 - DNA, 74 bp, Homo sapiens
acagatgagtttgatcaacgaattctttatgaatacttagcagaggccagtgttgtgtttcccaaagtctttcc

SEQ ID NO: 71644 - DNA, 74 bp, Homo sapiens
tttgatcaacgaattctttatgaatacttagcagaggccagtgttgtgtttcccaaagtctttcctgttgtgta

SEQ ID NO: 71645 - DNA, 72 bp, Homo sapiens
tctttatgaatacttagcagaggccagtgttgtgtttcccaaagtctttcctgttgtgtaagtatctccttt

SEQ ID NO: 71646 - DNA, 70 bp, Homo sapiens
aatacttagcagaggccagtgttgtgtttcccaaagtctttcctgttgtgtaagtatctccttttgattt

SEQ ID NO: 71647 - DNA, 68 bp, Homo sapiens
aggccagtgttgtgtttcccaaagtctttcctgttgtgtaagtatctccttttgattttaattcacct

SEQ ID NO: 71648 - DNA, 73 bp, Homo sapiens
ttttcttttaggcataatttgttggactctaagatcaacaccctgttatcattgtgccaagatccaaatttgt

SEQ ID NO: 71649 - DNA, 75 bp, Homo sapiens
tttaggcataatttgttggactctaagatcaacaccctgttatcattgtgccaagatccaaatttgttaaatcca

SEQ ID NO: 71650 - DNA, 75 bp, Homo sapiens
aatttgttggactctaagatcaacaccctgttatcattgtgccaagatccaaatttgttaaatccaatccatgga

SEQ ID NO: 71651 - DNA, 78 bp, Homo sapiens
actctaagatcaacaccctgttatcattgtgccaagatccaaatttgttaaatccaatccatggaattgtgcagagtg

SEQ ID NO: 71652 - DNA, 78 bp, Homo sapiens
accctgttatcattgtgccaagatccaaatttgttaaatccaatccatggaattgtgcagagtgtggtgtaccatgaa

SEQ ID NO: 71653 - DNA, 79 bp, Homo sapiens
ttatcattgtgccaagatccaaatttgttaaatccaatccatggaattgtgcagagtgtggtgtaccatgaagaatccc

SEQ ID NO: 71654 - DNA, 76 bp, Homo sapiens
aagatccaaatttgttaaatccaatccatggaattgtgcagagtgtggtgtaccatgaagaatccccaccacaata

SEQ ID NO: 71655 - DNA, 74 bp, Homo sapiens
aaatttgttaaatccaatccatggaattgtgcagagtgtggtgtaccatgaagaatccccaccacaataccaaa

SEQ ID NO: 71656 - DNA, 77 bp, Homo sapiens
aatccatggaattgtgcagagtgtggtgtaccatgaagaatccccaccacaataccaaacatcttacctgcaaagta

SEQ ID NO: 71657 - DNA, 74 bp, Homo sapiens
aattgtgcagagtgtggtgtaccatgaagaatccccaccacaataccaaacatcttacctgcaaagtaaataaa

SEQ ID NO: 71658 - DNA, 74 bp, Homo sapiens
agagtgtggtgtaccatgaagaatccccaccacaataccaaacatcttacctgcaaagtaaataaatgtatctg

SEQ ID NO: 71659 - DNA, 75 bp, Homo sapiens
tgtaccatgaagaatccccaccacaataccaaacatcttacctgcaaagtaaataaatgtatctggagaaggatg

SEQ ID NO: 71660 - DNA, 74 bp, Homo sapiens
agaatccccaccacaataccaaacatcttacctgcaaagtaaataaatgtatctggagaaggatggttgatgaa

SEQ ID NO: 71661 - DNA, 70 bp, Homo sapiens
gctatatgacttatttaatttctgttacaattaaaagataccttgcttgttataagagtaaaatttgatt

SEQ ID NO: 71662 - DNA, 69 bp, Homo sapiens
taatttctgttacaattaaaagataccttgcttgttataagagtaaaatttgatttgttgcaggttttg

SEQ ID NO: 71663 - DNA, 67 bp, Homo sapiens
ctgttacaattaaaagataccttgcttgttataagagtaaaatttgatttgttgcaggttttggttt

SEQ ID NO: 71664 - DNA, 69 bp, Homo sapiens
agataccttgcttgttataagagtaaaatttgatttgttgcaggttttggttttaatggcttgtggcgg

SEQ ID NO: 71665 - DNA, 71 bp, Homo sapiens
ttgcttgttataagagtaaaatttgatttgttgcaggttttggttttaatggcttgtggcggtttgcagga

SEQ ID NO: 71666 - DNA, 67 bp, Homo sapiens
taagagtaaaatttgatttgttgcaggttttggttttaatggcttgtggcggtttgcaggaccgttt

SEQ ID NO: 71667 - DNA, 67 bp, Homo sapiens
atttgatttgttgcaggttttggttttaatggcttgtggcggtttgcaggaccgttttcaaaggtaa

SEQ ID NO: 71668 - DNA, 65 bp, Homo sapiens
caggttttggttttaatggcttgtggcggtttgcaggaccgttttcaaaggtaagaaaatatatt

SEQ ID NO: 71669 - DNA, 66 bp, Homo sapiens
tttggttttaatggcttgtggcggtttgcaggaccgttttcaaaggtaagaaaatatatttttctc

SEQ ID NO: 71670 - DNA, 67 bp, Homo sapiens
gcttgtggcggtttgcaggaccgttttcaaaggtaagaaaatatatttttctctaacttttggcaaa

SEQ ID NO: 71671 - DNA, 66 bp, Homo sapiens
gcggtttgcaggaccgttttcaaaggtaagaaaatatatttttctctaacttttggcaaaatgaag

SEQ ID NO: 71672 - DNA, 66 bp, Homo sapiens
gaccgttttcaaaggtaagaaaatatatttttctctaacttttggcaaaatgaaggtttctgttca

SEQ ID NO: 71673 - DNA, 66 bp, Homo sapiens
tacttaaaaaaaaggaactaaaataatttcctattttccattacagcaaacacaaattccagacta

SEQ ID NO: 71674 - DNA, 71 bp, Homo sapiens
aaaggaactaaaataatttcctattttccattacagcaaacacaaattccagactatgctgagcttattgt

SEQ ID NO: 71675 - DNA, 73 bp, Homo sapiens
aaataatttcctattttccattacagcaaacacaaattccagactatgctgagcttattgttaagtttcttga

SEQ ID NO: 71676 - DNA, 76 bp, Homo sapiens
tttcctattttccattacagcaaacacaaattccagactatgctgagcttattgttaagtttcttgatgccttgat

SEQ ID NO: 71677 - DNA, 78 bp, Homo sapiens
ttccattacagcaaacacaaattccagactatgctgagcttattgttaagtttcttgatgccttgattgacacgtacc

SEQ ID NO: 71678 - DNA, 76 bp, Homo sapiens
aaacacaaattccagactatgctgagcttattgttaagtttcttgatgccttgattgacacgtacctgcctggaat

SEQ ID NO: 71679 - DNA, 79 bp, Homo sapiens
attccagactatgctgagcttattgttaagtttcttgatgccttgattgacacgtacctgcctggaattgatgaagaaa

SEQ ID NO: 71680 - DNA, 78 bp, Homo sapiens
tgagcttattgttaagtttcttgatgccttgattgacacgtacctgcctggaattgatgaagaaaccagtgaagaatc

SEQ ID NO: 71681 - DNA, 76 bp, Homo sapiens
tattgttaagtttcttgatgccttgattgacacgtacctgcctggaattgatgaagaaaccagtgaagaatccctc

SEQ ID NO: 71682 - DNA, 78 bp, Homo sapiens
tttcttgatgccttgattgacacgtacctgcctggaattgatgaagaaaccagtgaagaatccctcctgactcccaca

SEQ ID NO: 71683 - DNA, 76 bp, Homo sapiens
ccttgattgacacgtacctgcctggaattgatgaagaaaccagtgaagaatccctcctgactcccacatctcctta

SEQ ID NO: 71684 - DNA, 75 bp, Homo sapiens
acgtacctgcctggaattgatgaagaaaccagtgaagaatccctcctgactcccacatctccttaccctcctgca

SEQ ID NO: 71685 - DNA, 78 bp, Homo sapiens
aattgatgaagaaaccagtgaagaatccctcctgactcccacatctccttaccctcctgcactgcagagccagcttag

SEQ ID NO: 71686 - DNA, 79 bp, Homo sapiens
atgaagaaaccagtgaagaatccctcctgactcccacatctccttaccctcctgcactgcagagccagcttagtatcac

SEQ ID NO: 71687 - DNA, 77 bp, Homo sapiens
aagaatccctcctgactcccacatctccttaccctcctgcactgcagagccagcttagtatcactgccaaccttaac

SEQ ID NO: 71688 - DNA, 77 bp, Homo sapiens
tcctgactcccacatctccttaccctcctgcactgcagagccagcttagtatcactgccaaccttaacctttctaat

SEQ ID NO: 71689 - DNA, 78 bp, Homo sapiens
acatctccttaccctcctgcactgcagagccagcttagtatcactgccaaccttaacctttctaattccatgacctca

SEQ ID NO: 71690 - DNA, 78 bp, Homo sapiens
taccctcctgcactgcagagccagcttagtatcactgccaaccttaacctttctaattccatgacctcacttgcaact

SEQ ID NO: 71691 - DNA, 78 bp, Homo sapiens
actgcagagccagcttagtatcactgccaaccttaacctttctaattccatgacctcacttgcaacttcccagcattc

SEQ ID NO: 71692 - DNA, 75 bp, Homo sapiens
agagccagcttagtatcactgccaaccttaacctttctaattccatgacctcacttgcaacttcccagcattccc

SEQ ID NO: 71693 - DNA, 74 bp, Homo sapiens
tatcactgccaaccttaacctttctaattccatgacctcacttgcaacttcccagcattccccaggtcagtaaa

SEQ ID NO: 71694 - DNA, 73 bp, Homo sapiens
ccttaacctttctaattccatgacctcacttgcaacttcccagcattccccaggtcagtaaatgtgatcttta

SEQ ID NO: 71695 - DNA, 77 bp, Homo sapiens
ctttctaattccatgacctcacttgcaacttcccagcattccccaggtcagtaaatgtgatctttatatgactttga

SEQ ID NO: 71696 - DNA, 67 bp, Homo sapiens
attgtatttcacccttttttaaatcttatgaacatcacttacttgcttttttttcttccattctttg

SEQ ID NO: 71697 - DNA, 69 bp, Homo sapiens
cttttttaaatcttatgaacatcacttacttgcttttttttcttccattctttgtaaagcttctctgcc

SEQ ID NO: 71698 - DNA, 76 bp, Homo sapiens
atcttatgaacatcacttacttgcttttttttcttccattctttgtaaagcttctctgccttgctctaaatcagca

SEQ ID NO: 71699 - DNA, 74 bp, Homo sapiens
tgaacatcacttacttgcttttttttcttccattctttgtaaagcttctctgccttgctctaaatcagcagttt

SEQ ID NO: 71700 - DNA, 76 bp, Homo sapiens
ttacttgcttttttttcttccattctttgtaaagcttctctgccttgctctaaatcagcagttttcatgcagctgt

SEQ ID NO: 71701 - DNA, 80 bp, Homo sapiens
tcttccattctttgtaaagcttctctgccttgctctaaatcagcagttttcatgcagctgttccctcatcaaggtactct

SEQ ID NO: 71702 - DNA, 78 bp, Homo sapiens
tctttgtaaagcttctctgccttgctctaaatcagcagttttcatgcagctgttccctcatcaaggtactctttattt

SEQ ID NO: 71703 - DNA, 80 bp, Homo sapiens
aaagcttctctgccttgctctaaatcagcagttttcatgcagctgttccctcatcaaggtactctttattttcatcatct

SEQ ID NO: 71704 - DNA, 80 bp, Homo sapiens
ttgctctaaatcagcagttttcatgcagctgttccctcatcaaggtactctttattttcatcatctttgcacgaaaatac

SEQ ID NO: 71705 - DNA, 80 bp, Homo sapiens
taaatcagcagttttcatgcagctgttccctcatcaaggtactctttattttcatcatctttgcacgaaaatactgctta

SEQ ID NO: 71706 - DNA, 77 bp, Homo sapiens
ttttcatgcagctgttccctcatcaaggtactctttattttcatcatctttgcacgaaaatactgcttaccccacac

SEQ ID NO: 71707 - DNA, 76 bp, Homo sapiens
agctgttccctcatcaaggtactctttattttcatcatctttgcacgaaaatactgcttaccccacactcatcctg

SEQ ID NO: 71708 - DNA, 69 bp, Homo sapiens
ggaaaagaagaagtaactggctgttctctttttctccaggaatcgacaaggagaacgttgaactctccc

SEQ ID NO: 71709 - DNA, 70 bp, Homo sapiens
agaagtaactggctgttctctttttctccaggaatcgacaaggagaacgttgaactctcccctaccactg

SEQ ID NO: 71710 - DNA, 72 bp, Homo sapiens
ttctctttttctccaggaatcgacaaggagaacgttgaactctcccctaccactggccactgtaacagtgga

SEQ ID NO: 71711 - DNA, 71 bp, Homo sapiens
tttttctccaggaatcgacaaggagaacgttgaactctcccctaccactggccactgtaacagtggacgaa

SEQ ID NO: 71712 - DNA, 72 bp, Homo sapiens
aatcgacaaggagaacgttgaactctcccctaccactggccactgtaacagtggacgaactcgccacggatc

SEQ ID NO: 71713 - DNA, 72 bp, Homo sapiens
agaacgttgaactctcccctaccactggccactgtaacagtggacgaactcgccacggatccgcaagccaag

SEQ ID NO: 71714 - DNA, 75 bp, Homo sapiens
aactctcccctaccactggccactgtaacagtggacgaactcgccacggatccgcaagccaagtgcagaagcaaa

SEQ ID NO: 71715 - DNA, 80 bp, Homo sapiens
cactggccactgtaacagtggacgaactcgccacggatccgcaagccaagtgcagaagcaaagaagcgctggcagtttca

SEQ ID NO: 71716 - DNA, 77 bp, Homo sapiens
tgtaacagtggacgaactcgccacggatccgcaagccaagtgcagaagcaaagaagcgctggcagtttcaaacgtaa

SEQ ID NO: 71717 - DNA, 78 bp, Homo sapiens
tggacgaactcgccacggatccgcaagccaagtgcagaagcaaagaagcgctggcagtttcaaacgtaatagcattaa

SEQ ID NO: 71718 - DNA, 79 bp, Homo sapiens
ccacggatccgcaagccaagtgcagaagcaaagaagcgctggcagtttcaaacgtaatagcattaagaagatcgtgtga

SEQ ID NO: 71719 - DNA, 80 bp, Homo sapiens
atccgcaagccaagtgcagaagcaaagaagcgctggcagtttcaaacgtaatagcattaagaagatcgtgtgaagcttgc

SEQ ID NO: 71720 - DNA, 79 bp, Homo sapiens
ccaagtgcagaagcaaagaagcgctggcagtttcaaacgtaatagcattaagaagatcgtgtgaagcttgcttgctttc

SEQ ID NO: 71721 - DNA, 74 bp, Homo sapiens
aagcaaagaagcgctggcagtttcaaacgtaatagcattaagaagatcgtgtgaagcttgcttgctttcttttt

SEQ ID NO: 71722 - DNA, 72 bp, Homo sapiens
ctggcagtttcaaacgtaatagcattaagaagatcgtgtgaagcttgcttgctttcttttttaaaatcaact

SEQ ID NO: 71723 - DNA, 73 bp, Homo sapiens
tcaaacgtaatagcattaagaagatcgtgtgaagcttgcttgctttcttttttaaaatcaacttaacatgggc

SEQ ID NO: 71724 - DNA, 68 bp, Homo sapiens
cttgctttcttttttaaaatcaacttaacatgggctcttcactagtgaccccttccctgtccttgccc

SEQ ID NO: 71725 - DNA, 67 bp, Homo sapiens
tttcttttttaaaatcaacttaacatgggctcttcactagtgaccccttccctgtccttgccctttc

SEQ ID NO: 71726 - DNA, 67 bp, Homo sapiens
ttcttttttaaaatcaacttaacatgggctcttcactagtgaccccttccctgtccttgccctttcc

SEQ ID NO: 71727 - DNA, 66 bp, Homo sapiens
tttttaaaatcaacttaacatgggctcttcactagtgaccccttccctgtccttgccctttccccc

SEQ ID NO: 71728 - DNA, 72 bp, Homo sapiens
aacttaacatgggctcttcactagtgaccccttccctgtccttgccctttccccccatgttgtaatgctgca

SEQ ID NO: 71729 - DNA, 73 bp, Homo sapiens
taacatgggctcttcactagtgaccccttccctgtccttgccctttccccccatgttgtaatgctgcacttcc

SEQ ID NO: 71730 - DNA, 71 bp, Homo sapiens
ttcactagtgaccccttccctgtccttgccctttccccccatgttgtaatgctgcacttcctgttttataa

SEQ ID NO: 71731 - DNA, 71 bp, Homo sapiens
actagtgaccccttccctgtccttgccctttccccccatgttgtaatgctgcacttcctgttttataatga

SEQ ID NO: 71732 - DNA, 70 bp, Homo sapiens
cccttccctgtccttgccctttccccccatgttgtaatgctgcacttcctgttttataatgaacccatcc

SEQ ID NO: 71733 - DNA, 70 bp, Homo sapiens
tccctgtccttgccctttccccccatgttgtaatgctgcacttcctgttttataatgaacccatccggtt

SEQ ID NO: 71734 - DNA, 79 bp, Homo sapiens
ccatgttgtaatgctgcacttcctgttttataatgaacccatccggtttgccatgttgccagatgatcaactcttcgaa

SEQ ID NO: 71735 - DNA, 75 bp, Homo sapiens
tcctgttttataatgaacccatccggtttgccatgttgccagatgatcaactcttcgaagccttgcctaaattta

SEQ ID NO: 71736 - DNA, 77 bp, Homo sapiens
ttttataatgaacccatccggtttgccatgttgccagatgatcaactcttcgaagccttgcctaaatttaatgctgc

SEQ ID NO: 71737 - DNA, 74 bp, Homo sapiens
atccggtttgccatgttgccagatgatcaactcttcgaagccttgcctaaatttaatgctgccttttctttaac

SEQ ID NO: 71738 - DNA, 73 bp, Homo sapiens
tttgccatgttgccagatgatcaactcttcgaagccttgcctaaatttaatgctgccttttctttaacttttt

SEQ ID NO: 71739 - DNA, 72 bp, Homo sapiens
ttgccagatgatcaactcttcgaagccttgcctaaatttaatgctgccttttctttaactttttttcttcta

SEQ ID NO: 71740 - DNA, 67 bp, Homo sapiens
agccttgcctaaatttaatgctgccttttctttaactttttttcttctacttttggcgtgtatctgg

SEQ ID NO: 71741 - DNA, 70 bp, Homo sapiens
gctgccttttctttaactttttttcttctacttttggcgtgtatctggtatatgtaagtgttcagaacaa

SEQ ID NO: 71742 - DNA, 71 bp, Homo sapiens
taactttttttcttctacttttggcgtgtatctggtatatgtaagtgttcagaacaactgcaaagaaagtg

SEQ ID NO: 71743 - DNA, 74 bp, Homo sapiens
ttcttctacttttggcgtgtatctggtatatgtaagtgttcagaacaactgcaaagaaagtgggaggtcaggaa

SEQ ID NO: 71744 - DNA, 72 bp, Homo sapiens
ttttggcgtgtatctggtatatgtaagtgttcagaacaactgcaaagaaagtgggaggtcaggaaactttta

SEQ ID NO: 71745 - DNA, 73 bp, Homo sapiens
tgtatctggtatatgtaagtgttcagaacaactgcaaagaaagtgggaggtcaggaaacttttaactgagaaa

SEQ ID NO: 71746 - DNA, 73 bp, Homo sapiens
tatgtaagtgttcagaacaactgcaaagaaagtgggaggtcaggaaacttttaactgagaaatctcaattgta

SEQ ID NO: 71747 - DNA, 72 bp, Homo sapiens
agaacaactgcaaagaaagtgggaggtcaggaaacttttaactgagaaatctcaattgtaagagaggatgaa

SEQ ID NO: 71748 - DNA, 72 bp, Homo sapiens
caaagaaagtgggaggtcaggaaacttttaactgagaaatctcaattgtaagagaggatgaattcttgaata

SEQ ID NO: 71749 - DNA, 73 bp, Homo sapiens
aaagtgggaggtcaggaaacttttaactgagaaatctcaattgtaagagaggatgaattcttgaatactgcta

SEQ ID NO: 71750 - DNA, 78 bp, Homo sapiens
ttttaactgagaaatctcaattgtaagagaggatgaattcttgaatactgctactactggccagtgatgaaagccatt

SEQ ID NO: 71751 - DNA, 83 bp, Homo sapiens
aaatctcaattgtaagagaggatgaattcttgaatactgctactactggccagtgatgaaagccatttgcacagagctctgcc

SEQ ID NO: 71752 - DNA, 82 bp, Homo sapiens
taagagaggatgaattcttgaatactgctactactggccagtgatgaaagccatttgcacagagctctgccttctgtggttt

SEQ ID NO: 71753 - DNA, 78 bp, Homo sapiens
aattcttgaatactgctactactggccagtgatgaaagccatttgcacagagctctgccttctgtggttttcccttct

SEQ ID NO: 71754 - DNA, 79 bp, Homo sapiens
tactactggccagtgatgaaagccatttgcacagagctctgccttctgtggttttcccttcttcatcctacagagtaaa

SEQ ID NO: 71755 - DNA, 71 bp, Homo sapiens
gccttctgtggttttcccttcttcatcctacagagtaaagtgttagtcctatttatacatttttcaagata

SEQ ID NO: 71756 - DNA, 73 bp, Homo sapiens
ttcccttcttcatcctacagagtaaagtgttagtcctatttatacatttttcaagatacaagtttatgagaga

SEQ ID NO: 71757 - DNA, 73 bp, Homo sapiens
cttcatcctacagagtaaagtgttagtcctatttatacatttttcaagatacaagtttatgagagaaatagta

SEQ ID NO: 71758 - DNA, 70 bp, Homo sapiens
gagtaaagtgttagtcctatttatacatttttcaagatacaagtttatgagagaaatagtattataaccc

SEQ ID NO: 71759 - DNA, 71 bp, Homo sapiens
gtgttagtcctatttatacatttttcaagatacaagtttatgagagaaatagtattataaccccagtatgt

SEQ ID NO: 71760 - DNA, 71 bp, Homo sapiens
atacatttttcaagatacaagtttatgagagaaatagtattataaccccagtatgtttaatcttttagctg

SEQ ID NO: 71761 - DNA, 71 bp, Homo sapiens
tttcaagatacaagtttatgagagaaatagtattataaccccagtatgtttaatcttttagctgtggactt

SEQ ID NO: 71762 - DNA, 67 bp, Homo sapiens
acaagtttatgagagaaatagtattataaccccagtatgtttaatcttttagctgtggacttttttt

SEQ ID NO: 71763 - DNA, 66 bp, Homo sapiens
gagaaatagtattataaccccagtatgtttaatcttttagctgtggactttttttttaaccgtaca

SEQ ID NO: 71764 - DNA, 65 bp, Homo sapiens
gtattataaccccagtatgtttaatcttttagctgtggactttttttttaaccgtacaaaactga

SEQ ID NO: 71765 - DNA, 66 bp, Homo sapiens
ccagtatgtttaatcttttagctgtggactttttttttaaccgtacaaaactgaaagaaccataga

SEQ ID NO: 71766 - DNA, 69 bp, Homo sapiens
gtggactttttttttaaccgtacaaaactgaaagaaccatagaggtcaagcctcagtgacttgacacca

SEQ ID NO: 71767 - DNA, 73 bp, Homo sapiens
tttttaaccgtacaaaactgaaagaaccatagaggtcaagcctcagtgacttgacaccataaagccacagaca

SEQ ID NO: 71768 - DNA, 72 bp, Homo sapiens
aactgaaagaaccatagaggtcaagcctcagtgacttgacaccataaagccacagacaaggtacttgggggg

SEQ ID NO: 71769 - DNA, 72 bp, Homo sapiens
atagaggtcaagcctcagtgacttgacaccataaagccacagacaaggtacttgggggggagggcagggaaa

SEQ ID NO: 71770 - DNA, 70 bp, Homo sapiens
cctcagtgacttgacaccataaagccacagacaaggtacttgggggggagggcagggaaatttcatattt

SEQ ID NO: 71771 - DNA, 66 bp, Homo sapiens
acaaggtacttgggggggagggcagggaaatttcatattttatagtggattcttaagaaatactaa

SEQ ID NO: 71772 - DNA, 69 bp, Homo sapiens
tgggggggagggcagggaaatttcatattttatagtggattcttaagaaatactaacacttgagtatta

SEQ ID NO: 71773 - DNA, 71 bp, Homo sapiens
gggagggcagggaaatttcatattttatagtggattcttaagaaatactaacacttgagtattagcaataa

SEQ ID NO: 71774 - DNA, 74 bp, Homo sapiens
ttatagtggattcttaagaaatactaacacttgagtattagcaataattacaggaaaataagtgcgaccacata

SEQ ID NO: 71775 - DNA, 74 bp, Homo sapiens
ggattcttaagaaatactaacacttgagtattagcaataattacaggaaaataagtgcgaccacatatatctta

SEQ ID NO: 71776 - DNA, 75 bp, Homo sapiens
agaaatactaacacttgagtattagcaataattacaggaaaataagtgcgaccacatatatcttaacattactga

SEQ ID NO: 71777 - DNA, 75 bp, Homo sapiens
ttgagtattagcaataattacaggaaaataagtgcgaccacatatatcttaacattactgaattaaaactatggc

SEQ ID NO: 71778 - DNA, 74 bp, Homo sapiens
gcaataattacaggaaaataagtgcgaccacatatatcttaacattactgaattaaaactatggcttctaagtc

SEQ ID NO: 71779 - DNA, 73 bp, Homo sapiens
caggaaaataagtgcgaccacatatatcttaacattactgaattaaaactatggcttctaagtccttatccaa

SEQ ID NO: 71780 - DNA, 76 bp, Homo sapiens
taagtgcgaccacatatatcttaacattactgaattaaaactatggcttctaagtccttatccaaactcagtcatc

SEQ ID NO: 71781 - DNA, 73 bp, Homo sapiens
accacatatatcttaacattactgaattaaaactatggcttctaagtccttatccaaactcagtcatccaaac

SEQ ID NO: 71782 - DNA, 71 bp, Homo sapiens
tcttaacattactgaattaaaactatggcttctaagtccttatccaaactcagtcatccaaactagtttat

SEQ ID NO: 71783 - DNA, 68 bp, Homo sapiens
actgaattaaaactatggcttctaagtccttatccaaactcagtcatccaaactagtttatttttttc

SEQ ID NO: 71784 - DNA, 71 bp, Homo sapiens
actatggcttctaagtccttatccaaactcagtcatccaaactagtttatttttttctccagttgattatc

SEQ ID NO: 71785 - DNA, 69 bp, Homo sapiens
tctaagtccttatccaaactcagtcatccaaactagtttatttttttctccagttgattatcttttaat

SEQ ID NO: 71786 - DNA, 68 bp, Homo sapiens
atatatattttttcccctccccctcttctttcctaactaattctgagcagggtaatcagtgaacaaag

SEQ ID NO: 71787 - DNA, 68 bp, Homo sapiens
tttcccctccccctcttctttcctaactaattctgagcagggtaatcagtgaacaaagtgttgaaaat

SEQ ID NO: 71788 - DNA, 70 bp, Homo sapiens
ccctcttctttcctaactaattctgagcagggtaatcagtgaacaaagtgttgaaaattgttcccagaag

SEQ ID NO: 71789 - DNA, 70 bp, Homo sapiens
tctttcctaactaattctgagcagggtaatcagtgaacaaagtgttgaaaattgttcccagaaggtaatt

SEQ ID NO: 71790 - DNA, 72 bp, Homo sapiens
actaattctgagcagggtaatcagtgaacaaagtgttgaaaattgttcccagaaggtaattttcatagatgt

SEQ ID NO: 71791 - DNA, 76 bp, Homo sapiens
tcagtgaacaaagtgttgaaaattgttcccagaaggtaattttcatagatgtttgcattagctccatagcaaaatg

SEQ ID NO: 71792 - DNA, 74 bp, Homo sapiens
agtgttgaaaattgttcccagaaggtaattttcatagatgtttgcattagctccatagcaaaatggaatggtac

SEQ ID NO: 71793 - DNA, 76 bp, Homo sapiens
gtaattttcatagatgtttgcattagctccatagcaaaatggaatggtacgtgacatttagggtagctgatatttt

SEQ ID NO: 71794 - DNA, 76 bp, Homo sapiens
tttcatagatgtttgcattagctccatagcaaaatggaatggtacgtgacatttagggtagctgatatttttattt

SEQ ID NO: 71795 - DNA, 73 bp, Homo sapiens
gtttgcattagctccatagcaaaatggaatggtacgtgacatttagggtagctgatatttttattttgttaaa

SEQ ID NO: 71796 - DNA, 72 bp, Homo sapiens
gctccatagcaaaatggaatggtacgtgacatttagggtagctgatatttttattttgttaaataatttcca

SEQ ID NO: 71797 - DNA, 71 bp, Homo sapiens
tggaatggtacgtgacatttagggtagctgatatttttattttgttaaataatttccaagaatagagtatg

SEQ ID NO: 71798 - DNA, 70 bp, Homo sapiens
ggtacgtgacatttagggtagctgatatttttattttgttaaataatttccaagaatagagtatggtgta

SEQ ID NO: 71799 - DNA, 72 bp, Homo sapiens
gtgacatttagggtagctgatatttttattttgttaaataatttccaagaatagagtatggtgtatattata

SEQ ID NO: 71800 - DNA, 70 bp, Homo sapiens
tagggtagctgatatttttattttgttaaataatttccaagaatagagtatggtgtatattataaatttc

SEQ ID NO: 71801 - DNA, 69 bp, Homo sapiens
gggtagctgatatttttattttgttaaataatttccaagaatagagtatggtgtatattataaatttct

SEQ ID NO: 71802 - DNA, 70 bp, Homo sapiens
tatttttattttgttaaataatttccaagaatagagtatggtgtatattataaatttctttgataagatg

SEQ ID NO: 71803 - DNA, 70 bp, Homo sapiens
ttattttgttaaataatttccaagaatagagtatggtgtatattataaatttctttgataagatgtattt

SEQ ID NO: 71804 - DNA, 73 bp, Homo sapiens
ttgttaaataatttccaagaatagagtatggtgtatattataaatttctttgataagatgtattttgaatgtc

SEQ ID NO: 71805 - DNA, 72 bp, Homo sapiens
gttaaataatttccaagaatagagtatggtgtatattataaatttctttgataagatgtattttgaatgtct

SEQ ID NO: 71806 - DNA, 73 bp, Homo sapiens
taatttccaagaatagagtatggtgtatattataaatttctttgataagatgtattttgaatgtcttttaatc

SEQ ID NO: 71807 - DNA, 74 bp, Homo sapiens
tccaagaatagagtatggtgtatattataaatttctttgataagatgtattttgaatgtcttttaatcttcctc

SEQ ID NO: 71808 - DNA, 73 bp, Homo sapiens
gaatagagtatggtgtatattataaatttctttgataagatgtattttgaatgtcttttaatcttcctcctcc

SEQ ID NO: 71809 - DNA, 73 bp, Homo sapiens
atagagtatggtgtatattataaatttctttgataagatgtattttgaatgtcttttaatcttcctcctcctc

SEQ ID NO: 71810 - DNA, 71 bp, Homo sapiens
gtgtatattataaatttctttgataagatgtattttgaatgtcttttaatcttcctcctcctctccaaaaa

SEQ ID NO: 71811 - DNA, 70 bp, Homo sapiens
tttctttgataagatgtattttgaatgtcttttaatcttcctcctcctctccaaaaaaatcagaaacctc

SEQ ID NO: 71812 - DNA, 71 bp, Homo sapiens
tgataagatgtattttgaatgtcttttaatcttcctcctcctctccaaaaaaatcagaaacctctttaaga

SEQ ID NO: 71813 - DNA, 71 bp, Homo sapiens
ttaatcttcctcctcctctccaaaaaaatcagaaacctctttaagaaaacatgtaggttatatatgctaga

SEQ ID NO: 71814 - DNA, 74 bp, Homo sapiens
ctccaaaaaaatcagaaacctctttaagaaaacatgtaggttatatatgctagaattgcatttaatcactgtga

SEQ ID NO: 71815 - DNA, 80 bp, Homo sapiens
aaaacatgtaggttatatatgctagaattgcatttaatcactgtgaaaagactggtcagcctgcattagtatgacagtag

SEQ ID NO: 71816 - DNA, 81 bp, Homo sapiens
tatatatgctagaattgcatttaatcactgtgaaaagactggtcagcctgcattagtatgacagtaggggggctgttagaa

SEQ ID NO: 71817 - DNA, 80 bp, Homo sapiens
aattgcatttaatcactgtgaaaagactggtcagcctgcattagtatgacagtaggggggctgttagaattgctgctata

SEQ ID NO: 71818 - DNA, 79 bp, Homo sapiens
aaaagactggtcagcctgcattagtatgacagtaggggggctgttagaattgctgctatactggtggtatggattatca

SEQ ID NO: 71819 - DNA, 82 bp, Homo sapiens
tcagcctgcattagtatgacagtaggggggctgttagaattgctgctatactggtggtatggattatcatggcattggaatt

SEQ ID NO: 71820 - DNA, 79 bp, Homo sapiens
attagtatgacagtaggggggctgttagaattgctgctatactggtggtatggattatcatggcattggaattttcata

SEQ ID NO: 71821 - DNA, 81 bp, Homo sapiens
atgacagtaggggggctgttagaattgctgctatactggtggtatggattatcatggcattggaattttcatagtaatgca

SEQ ID NO: 71822 - DNA, 81 bp, Homo sapiens
ctgttagaattgctgctatactggtggtatggattatcatggcattggaattttcatagtaatgcagatccaatttctttg

SEQ ID NO: 71823 - DNA, 81 bp, Homo sapiens
agaattgctgctatactggtggtatggattatcatggcattggaattttcatagtaatgcagatccaatttctttgtggta

SEQ ID NO: 71824 - DNA, 78 bp, Homo sapiens
gtatggattatcatggcattggaattttcatagtaatgcagatccaatttctttgtggtacctgcagtttacaaaata

SEQ ID NO: 71825 - DNA, 76 bp, Homo sapiens
atcatggcattggaattttcatagtaatgcagatccaatttctttgtggtacctgcagtttacaaaataatttgac

SEQ ID NO: 71826 - DNA, 76 bp, Homo sapiens
ggaattttcatagtaatgcagatccaatttctttgtggtacctgcagtttacaaaataatttgacttcagtgagca

SEQ ID NO: 71827 - DNA, 77 bp, Homo sapiens
atagtaatgcagatccaatttctttgtggtacctgcagtttacaaaataatttgacttcagtgagcatattggtatc

SEQ ID NO: 71828 - DNA, 76 bp, Homo sapiens
tctttgtggtacctgcagtttacaaaataatttgacttcagtgagcatattggtatctggatgttccaatttagaa

SEQ ID NO: 71829 - DNA, 74 bp, Homo sapiens
tttgacttcagtgagcatattggtatctggatgttccaatttagaactaaaccatatttattacaaaaagatat

SEQ ID NO: 71830 - DNA, 71 bp, Homo sapiens
tggtatctggatgttccaatttagaactaaaccatatttattacaaaaagatattaatccctctactccca

SEQ ID NO: 71831 - DNA, 66 bp, Homo sapiens
gttccaatttagaactaaaccatatttattacaaaaagatattaatccctctactcccaggttccc

SEQ ID NO: 71832 - DNA, 67 bp, Homo sapiens
gaactaaaccatatttattacaaaaagatattaatccctctactcccaggttccctttatatgttaa

SEQ ID NO: 71833 - DNA, 70 bp, Homo sapiens
ccatatttattacaaaaagatattaatccctctactcccaggttccctttatatgttaagatataatggc

SEQ ID NO: 71834 - DNA, 69 bp, Homo sapiens
ttacaaaaagatattaatccctctactcccaggttccctttatatgttaagatataatggctttgaggg

SEQ ID NO: 71835 - DNA, 67 bp, Homo sapiens
atattaatccctctactcccaggttccctttatatgttaagatataatggctttgaggggggaaaaa
